United States Patent Application Publication US 2005/0228172 A9 - sequence listing, part 51

SEQ ID NO: 207571 - DNA, 659 bp, Homo sapiens
gtttcatgtcttagatttaagtccttaatccatcttgagttgctttttgtataaggtgagagatgagaatccagattcattctcctacctgtggcttgccaattatcccagcatcatttgttgaaaagggtgtcctttccctactttatatttttgtttgctttgtcaaaattcagttggcagtaagtatttggatttatttctgggttctctattctgttccattggtctatgtgcctatttttataccagtaccatgctgttttggtgactacggccttatagtagaatttgaaatcargtagtgtgatgcctccagatttgtgctttttgcttagtcttgctttggctatttgggctcttttttggtttcatatgaattttagaattgtttattctaattctgtgaagaatgatggtggtattttgatgggcattccatttaatttgtagattgcttttggcagtatggtcattttcaaaatactgcttctacaaatctatgagcacgggatgtgtttctatttgtttatgtcgtctatgatttctttcagcagtgttttgcagttttccatgtagaggtctttaggctcctcggttaggtatacttttaagtattttatttttgttttcgcaggtattataaacagcgttgagtt

SEQ ID NO: 207572 - DNA, 659 bp, Homo sapiens
gtttcatgtcttagatttaagtccttaatccatcttgagttgctttttgtataaggtgagagatgagaatccagattcattctcctacctgtggcttgccaattatcccagcatcatttgttgaaaagggtgtcctttccctactttatatttttgtttgctttgtcaaaattcagttggcagtaagtatttggatttatttctgggttctctattctgttccattggtctatgtgcctatttttataccagtaccatgctgttttggtgactacggccttatagtagaatttgaaatcaggtagtgtgatgcctccagatttgtgctttttgcttagtcttgctttggckatttgggctcttttttggtttcatatgaattttagaattgtttattctaattctgtgaagaatgatggtggtattttgatgggcattccatttaatttgtagattgcttttggcagtatggtcattttcaaaatactgcttctacaaatctatgagcacgggatgtgtttctatttgtttatgtcgtctatgatttctttcagcagtgttttgcagttttccatgtagaggtctttaggctcctcggttaggtatacttttaagtattttatttttgttttcgcaggtattataaacagcgttgagtt

SEQ ID NO: 207573 - DNA, 555 bp, Homo sapiens
aaaacagcctataaggccatgcccccctcccacctttctttttttctttctttttcttaatcaaagtcttactctgtcacccaggctggagtgcagtggcatgatctcggctcactgcaacctccgcctcccaggttcaagcagttctcctgcctcagcctcctgagtagctgggactacaggcttgcaccaccacgcccagctaatttttgtattttttttagtagagacagtgtttcaccatattggccaggctggtctcaaactcctgacttcgtgatccacctgcctcagcctcccaaagtgctgggattacaggsgtgggctactgcacctggccaaggccatgcctcttaaagcaatttcaattcattcttcttttttgtgtgtgttttgttttgtttttctttttaagttgtcctgttggaaactgggcctatgctatccatggagcattagaacaaactgttccaatctggcacttgtctaaaaatattaaatccactgactgcttgaaagaatgaattgtgctactccccctttgaaagttcttga

SEQ ID NO: 207574 - DNA, 588 bp, Homo sapiens
atgccttttatttcctttttttccccaggaaaattagacctggccaaaatctctagtaaaatgtttaattagaagtsgtgggagtgaacatcactttctcgttcctgattttaggggaaaagtatccaatcgagtttttttgctatgataaaatgctggattttgtcaaatgcattttcttttttttattttaatttttattttaagttctggggtgcatgtgcaggatgtgcaggtttgttacataggtaaacatgttccatggtggtttgctgcacccatcaacccatcacctaggtattaaccccagcatgcattaactatttttcctaatgctctccctctctgcacccccaacaggcccacacaacagtgtgtgttattcccttccctgtgtccatgtcttctcactgttcagctcccacttataagtgagaacatgcagtgtttggttttctattcccattagcttgctgaggagaatggcttccagctccatccatgtccctgcaaaggatgtgatcttgttcctttttatggctgcatagtattccatggtatatatgtaccacattttctttatccagc

SEQ ID NO: 207575 - DNA, 588 bp, Homo sapiens
atgccttttatttcctttttttccccaggaaaattagacctggccaaaatctctagtaaaatgtttaattagaagtcgtgggagtgaacatcactttctcgttcctgattttaggggaaaagtatccaatcgagtttttttgctatgataaaatgctggattttgtcaaatgcattttcttttttttattttaatttttattttaagttctggggtgcatgtgcaggatgtgcaggtttgttacataggtaaacatgttccatggtggtttgctgcacccatcaacccatcacctaggtattaaccccagcatgcattarctatttttcctaatgctctccctctctgcacccccaacaggcccacacaacagtgtgtgttattcccttccctgtgtccatgtcttctcactgttcagctcccacttataagtgagaacatgcagtgtttggttttctattcccattagcttgctgaggagaatggcttccagctccatccatgtccctgcaaaggatgtgatcttgttcctttttatggctgcatagtattccatggtatatatgtaccacattttctttatccagc

SEQ ID NO: 207576 - DNA, 588 bp, Homo sapiens
atgccttttatttcctttttttccccaggaaaattagacctggccaaaatctctagtaaaatgtttaattagaagtcgtgggagtgaacatcactttctcgttcctgattttaggggaaaagtatccaatcgagtttttttgctatgataaaatgctggattttgtcaaatgcattttcttttttttattttaatttttattttaagttctggggtgcatgtgcaggatgtgcaggtttgttacataggtaaacatgttccatggtggtttgctgcacccatcaacccatcacctaggtattaaccccagcatgcattaactatttttcctaatgctctccctctctgcacccccaacaggcccacacaayagtgtgtgttattcccttccctgtgtccatgtcttctcactgttcagctcccacttataagtgagaacatgcagtgtttggttttctattcccattagcttgctgaggagaatggcttccagctccatccatgtccctgcaaaggatgtgatcttgttcctttttatggctgcatagtattccatggtatatatgtaccacattttctttatccagc

SEQ ID NO: 207577 - DNA, 414 bp, Homo sapiens
gtttgtaaatcaaaatgtacacatgacatcaaaatagctgtaaaatatgagggtcagcattttttaaatattatgtgctgtcatcacttcttgagcaatctaattcagactcttaccttcctttaatgttcatcttaaataatgcaaaatgatatatgttgagatatatgttttcttaagtcagaaaaattttaagaaccaaygtcatagaacagttttgccacattttaggtatggaagaggtttcaggtactatatagttcaatccagctacttttagctattgtatacatttatatgtaagtatgtatgtacttatatctgtatatatatgcatacatacacaatatcatatatattattagcattgtttatttctttagaatcacatacacacatagatacaatgaatat

SEQ ID NO: 207578 - DNA, 414 bp, Homo sapiens
gtttgtaaatcaaaatgtacacatgacatcaaaatagctgtaaaatatgagggtcagcattttttaaatattatgtgctgtcatcacttcttgagcaatctaattcagactcttaccttcctttaatgttcatcttaaataatgcaaaatgatatatgttgagatatatgttttcttaagtcagaaaaattttaagaaccaacgtcatagaacagttttgccamattttaggtatggaagaggtttcaggtactatatagttcaatccagctacttttagctattgtatacatttatatgtaagtatgtatgtacttatatctgtatatatatgcatacatacacaatatcatatatattattagcattgtttatttctttagaatcacatacacacatagatacaatgaatat

SEQ ID NO: 207579 - DNA, 574 bp, Homo sapiens
cctttcactggcaagctttgacctaaaacaatataagaagggaattctgggaaatgtgacctttggagatagaaataatgataaattaaaaaaaaaaaattaagcataagaggcctgagtatcatttatccccaaatttgtctcattagggtttataaggatcccagcaacagsctagtaattaaaatggatcatattattatgaaagatagattatattattacgacttctgatgtccagcactccagtgctctttttgtctgtctaagtagagattacagtgtagtgtgagaatgtacaatgacaggcaggcccagattctgccactcacttaaactactcaaaatgacctattcacctctgagaatgtgccaagcaatgtgctagccatgtgaccccaggcaagtcttctttagatctcagatccagttctttcactaaaaatgaggtaaacacttaatttcagaatagatgtaatgatacaatttaaaaagtgaatgtaaagaaaagcacccaggccatgtctaatatgaagtcaaacttcatttcgctcctaactcattttcatcaaaa

SEQ ID NO: 207580 - DNA, 585 bp, Homo sapiens
tctttcactaaaaatgaggtaaacacttaatttcagaatagatgtaatgatacaatttaaaaagtgaatgtaaagaaaagcacccaggccatgtctaatatgaagtcaaacttcatttcgctcctaactcattttcatcaaaaatcatctgcagtcaggatatcatgatacttagtccaataccaggaagatataccattctgagctagcaccaaattagtttttatagtaagtcatacattttgttaaagaaatattatttatattattttaatataaagattttaaatagtggagccaattcctttctgtgagtctaactctttagcactaggaagaggctggaraaccatctatcagagatgtggttataataattcttgcactggaccagctgaattctaccagaggtacaaacaggagctggtaccattccttctgaaactattagaaaaagagggactcctccataactcattttatgaggccagcatcatcctgataccaaagcctggcagggacacaacgaaaaaaaaatttcaggccaatatccctgatgaacattgatgcaaaaatcctcaataa

SEQ ID NO: 207581 - DNA, 571 bp, Homo sapiens
gagcctatttcttttgcctcacttatcacttttaaaaataattatattctatccatgaattgtttattttaaatgactagtaaaaatgaaaaagcccctaggaaaacatggataaacactatctttaaggagacatcagtcttccgaattttagattaaccttgaatataaaactagattcaacaatcttagtgtagttgattggtcaatacactctaacagtcagcttgctgctcttcctccaggcaaaatgagttatcaaaaatgcatagaaaataaaaaaacaagaaacagccactggaagtaagatgtggtaaatatwtacacataagagaagtaacatggctttcaaatcagaaaggcaggaataaaaatccttagtttgccactatctatgctcttggacaagatacctaagctacctgtctctcagtttccacatctgtgaaataaagataatagtagctaaatttcaggattgttttgcattttaaatcatggagtctttgtaagatgttacatagaaacgtcatagatactcagtgaatgttaatgatgatgattattactc

SEQ ID NO: 207582 - DNA, 487 bp, Homo sapiens
ctaatagcatacagctgcacttgttcccaatgagattcaaagtagttgccttacttacaaatagtcttcaaaataagaacattatgacataccctggcaaactaaaatgtgtatagaaataaagttttataaaaataaatgaatgctgctagcaagtagtatattactcggccccacccttctggaagttctgggagctgattacrtgatttagttcaaactttcaataacctcataaaagaatccaatccacaaactgtttacagctttattgaaggaacttaacctttcttattttataaaataggtaagaattctgagaggaaaagaactgaagagagcagcaattgggaaaagtcaacacatataaagtatcgtaataaatgttgttttccaatggaagagagtctaaggtaatttcataagttattcatgaaagtggagtatcgaggtctgtggcctattaagaactcatgatcacttcaac

SEQ ID NO: 207583 - DNA, 554 bp, Homo sapiens
ctctattccgagttcacttaaatccccatgaatttatgatcaggaacatctttcatttattcacacattcattcattcagcagccatttttggaaagcccgtgatgggtaaggcattgtactcagggtggagaatacagagaaaaaagggacaagccatcttcacattcaagaaactcaccattctcagtgacccatgacttgaatattgttgagtaacactacacatttgaagtatatctattttgataagaaatgggatggggaagggagayagctacatttgctatggtgaattttttagaatgccagcaataggggaagctgctgcctccagcaggcttcattgacctcatttaataactattcctttgtttccacagttccccgcttctcctttgttggcttttggaaagtgggatgaacattgttctctcagatgtgtatttcagcttcccctagtcccacctttttgtctctttaaaaatatgctctattttactttgaaagcagagatgctgaaggagttagagaagtgacatgaaaagcttttaa

SEQ ID NO: 207584 - DNA, 631 bp, Homo sapiens
gcattgcagatgactctaaatgccttatgatataaataccttgagtaaaatgaaaacacaagtagctttgcgtatatttatatgttttgccctttaagttttgagtttaaaggctgaaagcagagacagtggtaaaagcaaggcagcttcttctgaagatctatgcactaaattagtttgattaaactcagtgcacacttaccaggcacctactatgtgccaggcatgtgaggggcaggatgaagaatactgaaacaaacagtacaaagggcatggtgcccaagatctgttcaaaataagttatcttccaagggaaaccttttmtattcctttgggtgttctcaatacataggtcaaaccaggggtgatgccacaattctgtggtcttaagcatttctttggaaattgccacgtccatgattttcaaaaatatctgatacaattcattttttcaggcaaacactaagtgaaagtgcaacagttctaatcattataattcacttctggaaagtaaatatccatttacccaaaaaacataaggtgctttttaaaagtaaaatattttttaaattaagtaaaatggttttaaacatctaaaattatttcaaagttaaatggtctaaatcaaaaa

SEQ ID NO: 207585 - DNA, 564 bp, Homo sapiens
gtacaaagggcatggtgcccaagatctgttcaaaataagttatcttccaagggaaaccttttctattcctttgggtgttctcaatacataggtcaaaccaggggtgatgccrcaattctgtggtcttaagcatttctttggaaattgccacgtccatgattttcaaaaatatctgatacaattcattttttcaggcaaacactaagtgaaagtgcaacagttctaatcattataattcacttctggaaagtaaatatccatttacccaaaaaacataaggtgctttttaaaagtaaaatattttttaaattaagtaaaatggttttaaacatctaaaattatttcaaagttaaatggtctaaatcaaaaaataatttattctctgacattttcactctggactaaaatgtaatttctggttcattttagttctgtactagaataaaattcctagtcaaacatgttcaaaaatctttcttttatgagtgaaataggattttgtgaatttgctactcagaactttgcaatggaattggtgttcaggactagaaaaaagtagagtag

SEQ ID NO: 207586 - DNA, 377 bp, Homo sapiens
gaccctactcctccccaaattcccctttctttgtcaccttgtcaagatgggtcattctaaaatgtttttatagcattctttgctcattttacctttgaacccttaagttgttcatttgtcttgccagctttctagatcttattcctgatcctacctctacagtcaaagaaccctcattatgagggcaaaaagatcgtgcctcataccccatttttaggggtaaaattatttcctgttacttggatttaataaaaagtaagacttctagttataaattcaattaaaatatttgtttttgtatggatgctaaagcaatcctagcaccatcttaaagttacatactcaygatcaaatttctccaaaatctattctgggcc

SEQ ID NO: 207587 - DNA, 389 bp, Homo sapiens
gacactattcaacccagtatgtatccaactccctttcttacctcttcaagttcaggggcttgttattccttcttcattttcatgaacttgttcatgcaattgtaacttgtttacaccatgtgaaatccctttgttaaagtctcttcaaattatccagtgtgctagtgtcatttgcatcctgcggagactcaractgatacacctgccctcccacctgcctttttttattttaacttgctttcacttaccacttatagcagcaatgttaagaatagaaagcattgaaccagggatgatttgccctggggccccatagcctttgtggggaaagaccatttggcttgactatgattctgcctttaatcttcactgaactgaaagattttaaa

SEQ ID NO: 207588 - DNA, 519 bp, Homo sapiens
ttccatgagtgtctgtctcctgaagatttcaaataatttgctggtgaaaccatcttggcttgacaaatttttgatgattatggataagcttagaaatttattctataatgactacttttttattactttggcaattttaatttattaaaattatttactcattgagatttaaaaattaatagagcttcatgtagaaagcagttagtttttaagtctttgtatttctaatcagatcttcctacttctctataataataataacaaaatattacaattataagagtaataatactattttccaggcaccgtgtcatgcygtgtacacattatattcttcaatctttaccacggcactaagagctagatgctatcaatttcctgtctttgaatgagaaaaccaaggcatttattacaatggttacatttttctcctttgatggagtaacatataaagataatagcagatccttcaatgttgagatagccttgctgaaactcacataaatcactatgactgta

SEQ ID NO: 207589 - DNA, 545 bp, Homo sapiens
tgaaaaccacctatgtgtctgctgagggatgaacagataatgaagttgttatatacatgtgatatatattccaatgtatgcataaatatgcatgcatatttgtatgcaaatgtatggataaatatgcttacattggaatattattcagccttagaaaagaatgagatcttgacatttgctacaacatggatgaacctggaggacattatgctaagtgaaataagccagacacacaaagaaaatattgcatgatctcacttatatgtgggatattttttaaaatgtcaaataaacagagatgaagaataaaacagtgttcaccagaggtaggggtcgggggagaaaatgggaagatgtaggtccaaagacagaaagtagcagtatgtaggatgaacaagtctagagatgtaatgtacaccatgaagactataggtaacaaaattgtactgtatttgggattcctgctaaattagtagatatgagctgctcttgccacaaaaacaaaagcaaaamaatgggtaactatgtgagataatggatatgtt

SEQ ID NO: 207590 - DNA, 545 bp, Homo sapiens
gagggtctgggagaaggagtgatttctaacactgagaaagcagcagaagtacttctgatgacaattcactcactacatgacattttttttttttcttgagtgtcgctctgtcacccatgctggagtgcagtggtgtgatctcggctcactgcaacctccgcctcccgagttcaagtgattctcctgcctaagcctcccaagtagctgggactacaggcacacaccactayacccagctaattttagtatttttagtagagacaaggtttcaccaggttggctaggctagtcttgaactcctgacctcaggtgatcttcccgcctcagcctcccacagtgctgggattacaggcatgagccaccatgcccagcctacatgacattttcttgagttgatgataggtgtgataggtagtatgttaaattaaaactcattcattctgttagttattcttgagctgggccaaaatataagtactaaaggatgtagtaatagcttaaggggacaggttgagtcactgtataaaatgcatactaaaccacaa

SEQ ID NO: 207591 - DNA, 471 bp, Homo sapiens
ctcttataccctaataacgtccaatatatcactataagcttgcttatctgcccttcagtagccctccttatttaatcacttttgttacttttttcttttaaaaatattaagatgttgcatctcwttacttctttaagtactcacccattgccctccatcttttcagcataatttctttaaaggtggtaattccttacctctactttcttactatccaccttctaaagaatgaatgcttttctgacctaaggttcccttacagtcattttagattttccttccttacagagctaatatttgagaaaagtagtgtacattcattgtctctttccctgtcacatattcactatttacttcacctcaatatggtatctcctcccattactacactaaaagcactattttcatggtttttgataactttcttgttgctagatccaatgggtggttatcggttcttatgtcaatgga

SEQ ID NO: 207592 - DNA, 567 bp, Homo sapiens
gtgtaaataaaggctcttgagtttttaaccaaaatatccttttttgacttttattatgagcagatatataaaattttaaaattgtartttaaaacttacacacaatacataaaattatgtaaatatatgtaaatgttacctatatgtatgtttatatatgtccataaatattatatatatatttcttaattttaatcaaagatagccctagaagaaaactcagtttttttcagtggctttaacctaatgcttcttaaattcatacttctaaaatctaatctaaaaaactgtaatctattaagataaactgtaaatgaaaaaatagaagaggcatcactgaaattttatagaaatcatataaattagtggcttctgctagaacccattcattaaaaaatcattttttctacttgtccacactgtaattgcatgtgagtctctattttacaaaatattaatataaaactttagacatttagtttttaaatagaaatccaatttctttgtggaatcaaaatatgccctgctcaacagtcccacttcttctttttgtaataattacattaa

SEQ ID NO: 207593 - DNA, 567 bp, Homo sapiens
gtgtaaataaaggctcttgagtttttaaccaaaatatccttttttgacttttattatgagcagatatataaaattttaaaattgtaatttaaaacttacacacaatacataaaattatgtaaatatatgtaaatgttacctatatgtatgtttatatatgtccataaatattatatatatatttcttaattttaatcaaagatagccctagaagaaaactcagttttttycagtggctttaacctaatgcttcttaaattcatacttctaaaatctaatctaaaaaactgtaatctattaagataaactgtaaatgaaaaaatagaagaggcatcactgaaattttatagaaatcatataaattagtggcttctgctagaacccattcattaaaaaatcattttttctacttgtccacactgtaattgcatgtgagtctctattttacaaaatattaatataaaactttagacatttagtttttaaatagaaatccaatttctttgtggaatcaaaatatgccctgctcaacagtcccacttcttctttttgtaataattacattaa

SEQ ID NO: 207594 - DNA, 583 bp, Homo sapiens
tatgaaatacaatgagaacttttgtgattcatcttatgctaccttatctcctatgctttagtatgttacaagaatttctctttttcagccttgaattacactacaaaaggaaaagttcccttctgtaacttaaactgagccttgatttagggtggaggtagtggcctagtggggtaggagagaratacgggaagaaagtttatgaaggtttgggagttggggactgcttcacactaactggttcaaagtcacacacccagcaaatgctgcttagacaatgacaaggaattattagggtgagaatattcacttttcttaaactggtcagcaggttgactataggcttccagcctcacgctcatttgaaaacaggattatttctttaagaaagaaagaattaaggaggggtgaatatgccaacccaaagccttggggagccactgttttttatttcctctcctctggtcattcttctctagataagtctacagcagtttttaaacacccagttcaaatcagcacatctttataatttatatttattattctaataattagctaaaaacaagccaatcaagccctg

SEQ ID NO: 207595 - DNA, 583 bp, Homo sapiens
tatgaaatacaatgagaacttttgtgattcatcttatgctaccttatctcctatgctttagtatgttacaagaatttctctttttcagccttgaattacactacaaaaggaaaagttcccttctgtaacttaaactgagccttgatttagggtggaggtagtggcctagtggggtaggagagagatacgggaagaaagtttatgaaggtttgggagttggggactgcttcacactaactggttcaaagtcacacacccagcaaatgctgcttagacaatgacaaggaattattagggtgagaatattcacttttcttaaactggtcagcaggttgactataggcttccagcctcacgctcatttgaaaacaggattatttctttaagaaagaaagaattaaggaggggtgaatatgccaacccaaagccttggggagccactgttttttatttcctctcctctggtcattcttctctagataagtctacagcrgtttttaaacacccagttcaaatcagcacatctttataatttatatttattattctaataattagctaaaaacaagccaatcaagccctg

SEQ ID NO: 207596 - DNA, 541 bp, Homo sapiens
agtgcctcaattgttttaccctaacctcagcccattattattttatcttaaaactcagcaaacaccctaacctgctctcttactgaggaggctcgcccaagaataaatgagttccgtcattgcctttcttctctgacttttgggaccatttgcttggtctaggacctgagttgcaggtccaggaaagcgtgtactctcgaatccacccaggagtgcctgactacagtcctcctgcagagggcgctgtggagtcccagacacgagtgttaggtggaatcgggctgattgcccatcacgtcttgcctttccctggcagtaggcttgttatgaaatcattgactttctatttgcctctggggcttaagcgaatctgttaccctcaaataacctatctgatctcagacaaatgccaaacagagctcagtttctctgccctgtgggtggccataaaatccagacaatttcccyctaggtgttttcgatggcgcagccacagcttctgtgagattcgatttctccccagttcccctgtgggtctgag

SEQ ID NO: 207597 - DNA, 566 bp, Homo sapiens
cacacactagacagagcacacacactcatagccacacactacatgttacactcactacacacactcacactgtagccacacaccacacacacaccacacacgtatcacacaacatacattgcacccttacacacatctcagacacacaccacacatacttcacacgctcaaacatcagagtcatacaacacacatcatacactcacacattcattcatacatatattcatactcacacactcttgcccccacacacatcacgttcattcactcatattccccttctctgtctctccaagacagccccaggcctcaagcccagtgcatggtggagcccagctgtgtgacagctctggggcattgggaagagcccgctaagtagggaagggtggggctaatcccagctgggagctctggcactaaggagaggcccgaggctgccctctgccatcttggmccatttcagggctggaggacatcacaaccacagctgctccgggccaggggagattcagatagggatggggcagggcaggctgcccacccccccacacacttcctctgca

SEQ ID NO: 207598 - DNA, 563 bp, Homo sapiens
atatctcctgccctcgaatctgggtactgtgaccacttaactgatagaatgcagcagaaccaagtttttttggtccagacattaagactccatcagtttctcattttctctctcaggctgtttgttcttggaacccagccataaatgatcccaaacatcctggagatagactcacatgggaaggaggttcacagcccactgctctggcagagctcccagagagccagcctcagccatatgaatgaratatcttgaaagtggatctggcagtcctcattgagctgtttcagctaaaattatatggaacagaaatgacctatctgtactgagccctgcccagattgtatatttgtgagcaaaataaatgattgttgttgttttaggtctctaaggtttcagatgattagtgacacagaactgtctcaagtaagtaacttctgctgtgatccagggttgtttcctcttttctaacttctaatcttctatttgacccaaggggttccatttgctttttcttctgcattgacacagtcctgtcctagtaggactcacattgctattca

SEQ ID NO: 207599 - DNA, 594 bp, Homo sapiens
ctcatgggcagggaaacagagcaaatgacacaatatctctatcccaaaggagcttgcagcttagttgagaagacaaaagctacttctagctattaaggatatacaagtgttgaaggatgataagactttgaattgttatggaaaaagtggaggcactgattcattcaacaggatttaygtcagttgctggagatacaaagccaaatagatgtcacagaaactctaaggtcaactagtcttggaagacaaggggcgcttcatctccttgtgattattgtttttcagcattgcacaggagaagtcggcctgagtggtgcggcgctcgggacccaccagcaatgctgctcttcgtgctcacctgcctgctggcggtcttcccaggtgtgtctgccaggccccaactctccaagctccaccccttcagcctgcccgactccagggttcacctccctggggacactaaaatcagactcatccccagggatgtccctctcaaagttggcacttccttgaggaagagtcatacagagaagacgctgaaaggccacatctgtgagcattggaagtcagggacaggaatggcacttcctaatc

SEQ ID NO: 207600 - DNA, 524 bp, Homo sapiens
tgaattccattccattccaatccattcctttcctttcgcttgcattccattctattctcttctactgcatacaatttcactccattcgttcccattccattcaattccattccattcaattccattccatttgtttccattctcttcgattccatttctttatattccatgccattcgattccattctattgggttgcawtacattcgtgttcattccattccagaccattccatttgactccattcctttcgagccctttcaatttgagtccattcctttccagtccatttcactccagtccattactatccattccataccattccatcccattccattccattccattccattccattccattccattccattgcattccattccattccattccattgcactgcactccattccattacattctactctatctgagtcgattttattgcattagattctattccattggattactttccattcgattacattccattcatgtacattccattccagtcaa

SEQ ID NO: 207601 - DNA, 524 bp, Homo sapiens
tgaattccattccattccaatccattcctttcctttcgcttgcattccattctattctcttctactgcatacaatttcactccattcgttcccattccattcaattccattccattcaattccattccatttgtttccattctcttcgattccatttctttatattccatgccattcgattccattctattgggttgcattacattcgtgttcattccattccagaccattccatttgactscattcctttcgagccctttcaatttgagtccattcctttccagtccatttcactccagtccattactatccattccataccattccatcccattccattccattccattccattccattccattccattccattgcattccattccattccattccattgcactgcactccattccattacattctactctatctgagtcgattttattgcattagattctattccattggattactttccattcgattacattccattcatgtacattccattccagtcaa

SEQ ID NO: 207602 - DNA, 524 bp, Homo sapiens
tgaattccattccattccaatccattcctttcctttcgcttgcattccattctattctcttctactgcatacaatttcactccattcgttcccattccattcaattccattccattcaattccattccatttgtttccattctcttcgattccatttctttatattccatgccattcgattccattctattgggttgcattacattcgtgttcattccattccagaccattccatttgactccattcctttcgagccctttcaatttgagtccattcctttccagtccrtttcactccagtccattactatccattccataccattccatcccattccattccattccattccattccattccattccattccattgcattccattccattccattccattgcactgcactccattccattacattctactctatctgagtcgattttattgcattagattctattccattggattactttccattcgattacattccattcatgtacattccattccagtcaa

SEQ ID NO: 207603 - DNA, 524 bp, Homo sapiens
tgaattccattccattccaatccattcctttcctttcgcttgcattccattctattctcttctactgcatacaatttcactccattcgttcccattccattcaattccattccattcaattccattccatttgtttccattctcttcgattccatttctttatattccatgccattcgattccattctattgggttgcattacattcgtgttcattccattccagaccattccatttgactccattcctttcgagccctttcaatttgagtccattcctttccagtccatttcactccagtccattactatccattccataccattccatcccattccattccattccattccattccattccattccattccattgcattccattccattccattccattgcactgcactccattccwttacattctactctatctgagtcgattttattgcattagattctattccattggattactttccattcgattacattccattcatgtacattccattccagtcaa

SEQ ID NO: 207604 - DNA, 613 bp, Homo sapiens
tgaaattcgagtcctttccagtacatttcaytccaatcccatccaatcccatctactccattcaattcctttccattccatttgatttgattcattgatttgattccattcagtttgattccattccgtgaaatttcgttccattctattccattgcattactttccattcaattccattccatttcatttcagtccattcgcttcctttcctttcgattcaattccatttgataacactccattctatgcgatttcattccaatcgattcaattccattcgataacattcctttcgtttccattcaattcgagtccatttaatttgagcattcgtgtccattctatccgagtccattccattaccgtctattctattcccttccattcctgttgattcaatttcattcccttccattcgattcctttccattggattccattcctttccattccattccattcgttcccattccatgtgatttcattccattccagtccattatattcgagtccactccactcaattctattacattcaattccttttgagtccgttccataacactccattcatttcgattccatttcttgccagttttcttccattttat

SEQ ID NO: 207605 - DNA, 613 bp, Homo sapiens
tgaaattcgagtcctttccagtacatttcattccaatcccatccaatccmatctactccattcaattcctttccattccatttgatttgattcattgatttgattccattcagtttgattccattccgtgaaatttcgttccattctattccattgcattactttccattcaattccattccatttcatttcagtccattcgcttcctttcctttcgattcaattccatttgataacactccattctatgcgatttcattccaatcgattcaattccattcgataacattcctttcgtttccattcaattcgagtccatttaatttgagcattcgtgtccattctatccgagtccattccattaccgtctattctattcccttccattcctgttgattcaatttcattcccttccattcgattcctttccattggattccattcctttccattccattccattcgttcccattccatgtgatttcattccattccagtccattatattcgagtccactccactcaattctattacattcaattccttttgagtccgttccataacactccattcatttcgattccatttcttgccagttttcttccattttat

SEQ ID NO: 207606 - DNA, 511 bp, Homo sapiens
gaatacaatggaatatactgsaatgtaacgtaatgaactcgaatgtaattgactggaatggaatgtacatgaatggaatgtaatcgaatggaaagtaatccaatggaatagattctaatgcaataaaatcgactcagatagagtagaatgtaatggaatggagtgcagtgcaatggaatggaatggaatggaatgcaatggaatggaatggaatggaatggaatggaatggaatggaatgggatggaatggtatggaatggatagtaatggactggagtgaaatggactggaaaggaatggactcaaattgaaagggctcgaaaggaatggagtcaaatggaatggtctggaatggaatgaacacgaatgtaatgcaacccaatagaatggaatcgaatggcatggaatataaagaaatggaatcgaagagaatggaaacaaagggaatggaattgaatggaatggaattgaatggaatgggaacgaatggagtgaaattgtatgcagtag

SEQ ID NO: 207607 - DNA, 511 bp, Homo sapiens
gaatacaatggaatatactggaatgtaacgtaatgaactcgaatgtaattgactggaatggaatgtacatgaatggaatgtaatcgaatggaaagtaatccaatggaatagawtctaatgcaataaaatcgactcagatagagtagaatgtaatggaatggagtgcagtgcaatggaatggaatggaatggaatgcaatggaatggaatggaatggaatggaatggaatggaatggaatgggatggaatggtatggaatggatagtaatggactggagtgaaatggactggaaaggaatggactcaaattgaaagggctcgaaaggaatggagtcaaatggaatggtctggaatggaatgaacacgaatgtaatgcaacccaatagaatggaatcgaatggcatggaatataaagaaatggaatcgaagagaatggaaacaaagggaatggaattgaatggaatggaattgaatggaatgggaacgaatggagtgaaattgtatgcagtag

SEQ ID NO: 207608 - DNA, 511 bp, Homo sapiens
gaatacaatggaatatactggaatgtaacgtaatgaactcgaatgtaattgactggaatggaatgtacatgaatggaatgtaatcgaatggaaagtaatccaatggaatagattctaatgcaataaaatcgactcasatagagtagaatgtaatggaatggagtgcagtgcaatggaatggaatggaatggaatgcaatggaatggaatggaatggaatggaatggaatggaatggaatgggatggaatggtatggaatggatagtaatggactggagtgaaatggactggaaaggaatggactcaaattgaaagggctcgaaaggaatggagtcaaatggaatggtctggaatggaatgaacacgaatgtaatgcaacccaatagaatggaatcgaatggcatggaatataaagaaatggaatcgaagagaatggaaacaaagggaatggaattgaatggaatggaattgaatggaatgggaacgaatggagtgaaattgtatgcagtag

SEQ ID NO: 207609 - DNA, 475 bp, Homo sapiens
gaatataatggactggaatggaatgaaatcacatggaatgggaacgaatggaatggaatggaaaggaatggaatcgaatggaaaggaatcgaatggaagggaatgaaattgaatcaacaggaatggaagggaatagaatagacggtaatggaatggactcgaatagaatggacacgaatgctcaaattaaatggacwtgaatggaatggaaacgaaaggaatgtcatcgaatggaattgaatcgattggaatgaaatcgcatagaatggagtggaatcaaatggaattgaatcgaaaggaaaggaagcgaatggactgaaatgaaatggaatggaattgaatggaaagtaatgcaatggaatagaatggaacgaaatttcacggaatggaatcaaactgaatggaatcaaatcaatggaatcaaatcaaatggaatggaaaggaattgaatggagtagatgggattggatgggat

SEQ ID NO: 207610 - DNA, 460 bp, Homo sapiens
ggaagggaatgtagtgtaatggacaggcctggaataaagtggaatgctacggtctcgaatggaataaaaatgtatggaatggaatgcaatgaaacggaatcgaatgtcatagaatgtaatggaatgcaaaaaaatggaatccaaaatcattgactggaaaggctgggtgtcgaaaggaattgactccaatggaatggaatcgaatggaatggaagtgaatagaatcgaactaaatcgaatggaatggaattgataggaacggaatggaaargaatgcaatgatttggcatggaatggaatcgaatggcatcgaatggaatggaatggaatgcaatggaatggaatgtattagaatggaatgaactttaatggaatgtactcgaatggattcgactggaatggaatgttctggaagtgaatggactccaatggaatggattcaaaaggaatggaatcgtac

SEQ ID NO: 207611 - DNA, 471 bp, Homo sapiens
ctggaatgtaacgtaatgaactcgaatgtaattgactggaatggaatgtacatgaatggaatgtaatcgaatggaaagtaatccaatggaatagaatctaatgcaataaaatcgactcagatagagtagaatgtaatggaatggagtgcagtgcaatggaatggaatggaatggaatgcaatggaatggaatggaatggaatgggatggaatggtatggaatggatagtaatggactggagtgaaatggactggaaaggaatggactcaaattgaaagggcacgaaaggaatggagwcaaatggaatggtctggaatggaatgaacacgaatgtaatgcaacccaatagaatggaatcgaatggcatggaatataaagaaatggaatcgaagagaatggaaacaaatggaatggaattgaatggaatgggaacgaatggagtgaaattgtatgcagtagaagtgaatagaa

SEQ ID NO: 207612 - DNA, 471 bp, Homo sapiens
ctggaatgtaacgtaatgaactcgaatgtaattgactggaatggaatgtacatgaatggaatgtaatcgaatggaaagtaatccaatggaatagaatctaatgcaataaaatcgactcagatagagtagaatgtaatggaatggagtgcagtgcaatggaatggaatggaatggaatgcaatggaatggaatggaatggaatgggatggaatggtatggaatggatagtaatggactggagtgaaatggactggaaaggaatggactcaaattgaaagggcacgaaaggaatggagtcaaatggaatggtctggaatggaatgaacacgaatgtaatgcaacccaatagaatggartcgaatggcatggaatataaagaaatggaatcgaagagaatggaaacaaatggaatggaattgaatggaatgggaacgaatggagtgaaattgtatgcagtagaagtgaatagaa

SEQ ID NO: 207613 - DNA, 536 bp, Homo sapiens
atggcaggaaactaatgtgactataactgtgccattttattcaatgtccaatgcttgttccattcttttatgctgttgtctgctactggttgtatatgtggattagtagctgttttgctttgagggttaaatgtgaatcttcataaacctaagaaataggtattattgcccctcatgtgctttttttaaaggctaaagtgcttcaaagatacctctttaaactcacttattccaaaacaattgyttttctggtatgggactcacaatttgtttttcttgtctctttctcattaggagaaattatgtgcttgggagaaaaaatgcccatggataataaatctgataaaattgaagtaccaaaggactgacctcatactgaaactctgttgggcatagtcttatagcctttggaaatgtcacaacaaggttcttgaaaagtaactcttcatatggctgtgaactctgagcttgctatatgtttgaagccacatgaaggttctttgtgggatgtggtacccttccaagagaaagggtaa

SEQ ID NO: 207614 - DNA, 570 bp, Homo sapiens
tgatagggtgaaactatggacaaagtgtcctttgtagcattttattttactttttgttggttatgttcgcttctgtttttcatgcgaattgttacattttttgactatattttatattttgctctagtcaatcatcttattgttttgctcatgtgcagtgtgtctccaattttaattttctctaaaacagagctccaaatctttgagaattttacatgaacttttttatttctgtaacttagtagaaattcattcttattctttatgttagagtagggtggtttggacacacatatagatgggaaataaaatgaacattgtcttaatcaaccatagctcttttgcattttatatttaatgtaatagatcagtagcagtcaccagagctctggtgctgagcyggtgctgaacttgctggcttcaaagtcctggaaaacattgaaacatacagatttctgggtcctagtttcagagattttattcagttgttctgaagtgggacccggaaatctgtgtcttcaaaaaagtactcaagggactaagatatgtagcgcattggggaaacatttt

SEQ ID NO: 207615 - DNA, 581 bp, Homo sapiens
agccattggaatttgcagtataattgtccatagctcatcaaatgaaagccacatttatgtttagttcaataatattcctgagatgaggttagttayacaaacagtggacctaaaaaagcataaaagaattcttttgaatatttttttcagagtaagttataaatacatgtttcaaaaggacactatttgcacgactgaaaaacatgcatttggcagaatatttaaagcttgatttcagttacaatggcatcatgtttatgacactacatctaatagtaaaaacatgcattttgaacagaaagttgatatattgttcctcaatccctgtgactttatttttaattcaattgaaaatgaacaagcctctttgtgttttggtatgagggaacaaaatatagtttggagtggtttttaaaagcttttcttctctctccattctgggaagaaaagattggttttcaaaaccctaaatttttccaacaattagcatctcataatgacattttatttgttttctttctttttttaaaagaaaaaaacatactttgtgctgcaggaagattgctcttaaaatcactacc

SEQ ID NO: 207616 - DNA, 536 bp, Homo sapiens
caagcttgaaaagttgtatttttccaagaatatatccattttctctggattttcagtttgtgagcatgtagtttataaaaacttcggatgagcttttgtatttctgtggcatcagttttcatgtcgcttttctcatgttttagtatgtttatttggatcttctcttttctttatgtggttagtctagttagcggtttatcaagtctgtttattttttatgaagaatcagcttttcatttcatttagtctttgatttagttttttaatctctattttatttagttctgctcttaccattgttaattcttccatctgctatttttaggtttggtttatttttgctttcctaattccttaggtgcatcattatattgctaatttgtaatttttctacattttttatataggcatttaatgctataaaaatccckcttagcacttcttttgctgtgtcccactggatttggtattttttttttcattttcattcattttaaaaaacattgatatatttgtcttaatttttgtggcccaat

SEQ ID NO: 207617 - DNA, 521 bp, Homo sapiens
aacgattagacatgacacacratttaatcaatcctatggtactcatggttttaaatattcattgtttaaaatttacatctatagaaacctcctaagttttaagttttatacaactttcttcaaaaataaaagtagcaacaaatatacctaacaaaggcaatataaagaaaataaaattatctctccatttcgaattgcactaccccttttctttttacttttaaataagctttttctaacactcttatcatttttttctacattctgttggagctactccaagcttcccgcattacactacagttgtgagaccctcaactgtcataacagtacaataagtgcctgatagcttctaagtatagagaattgtctcacagtttctatagaaaattctcttatttatacaccctggaatttcaacctcattttaaacaacagcactgttatgcacttgctaacctgtaccaactgcctttctaaacatttcttcactgttatttttataataatgtttttaccta

SEQ ID NO: 207618 - DNA, 549 bp, Homo sapiens
tttaccccaaagacaggcaataattaatgctggtgaggatgtagaaaaagagggacattcacacattgttggtgggagagtaaattagtatggccgtgatggagaacagtatacaggtctctcaaaaaactaaaaagagaactactacatgatgcagcaatgccattgctgrgtatttatcaaaaagaaagaaaatgagtatgttgatgagatgtctacactcccatgtttattgcagcacaattcacaatagccaagatttggaagcaacctaagtgtccatcagtggatgaatggattaaaaaaatgtggtatatatacataatggaatattattgagccctgaaaagaatgaaatccgtcatttgtgacaacacggatggaactgggggaaattatgttaaatgaaataagcctggcacagtaagacgaatatggcatgttctcactaacatgtgggagtcagaagaaaaaaatgaactcatgaagattgtaaaatgatggttaccaggggctgggaagggcggtggggagagagaaaaaacgagg

SEQ ID NO: 207619 - DNA, 569 bp, Homo sapiens
tatctctgtttaaatcccattcctgcatcttaataactgtggtacattgatcaagttgcttgtcctttctatgcttcagattacaaatgggccaatatatttaaaaagagatatttttctcatataaattttattcaagacagtctctttgactgaagattatatatataaaaccttcatatatacatacacacacacacatatatatatgaatgttttatcacatcttggcattctgttagtatcaatttaatacttctatagttcagaagacccatgccctatttttaatagcctatatacttgagaagtcaacaragacgtgcaataaactttacaactattaactggttacaaatcgatttgccattaaagtgctgatggtgtgtagaggaggactggtggcttcactatcatgattgtgtaatcatcatcattaacctcctttagaaaaatcaaacacagggaagattattactattttataaaagttttcttaaatacatgttgtcagactcatagaaacatcttcgacttagtgattctattctctgtaataaagattgaaa

SEQ ID NO: 207620 - DNA, 623 bp, Homo sapiens
tgaggtgggagaattgcttgcacccaggaggcagagattgcagtgagccaatattgcgccactgcactccagcctgggcaacagagtgagaatccatcttaaaaaaaaaaaaaaaaattcaagatagagtcgccaattatacattgtcaagaaacatgaatttcaggtatattaaaaagtaawatataaaagataaaatagtgaagaactgaaaaagtaaaagaaactataagcatatttttaacagatctagtattaacagacatagtattaccaaagaacttttgagtgtagaagaaataaagtagttaataaaataaaacttagaatgactttggaagtattttatcttcctcagttttttggaatagtttgaacaagattgatattaattattcttcaaatgtttgttagagtttagcagttcggccatcaagttcacaaggtttttcttggaaaggacatttttgtgaccttttcctatctcattatttgctataggaccattcaggttttggatttcttcatggctcaatcgtggtagattttatatgtctaggaattaatccatctcttctatgtttaccaaatttattggcacatagttcctcataagaatttct

SEQ ID NO: 207621 - DNA, 490 bp, Homo sapiens
gtgagaagcagccctccttaatctgttcacttaaccccttccatttacgactcccaaagttcaaccgctttcctaacttttaaatgtcaaatatttttgtaaatactctttatcagcctaaagcagtactacagttttactagcattgtagagtttctgtttttattattgtgtaaaatacaacatagattagtccccttctggatgggatatgtttaagaccctcagtggatacctgaaaccacagacagtagtgaaccctataaatatcatgcttttttyctatacatccaaacctgtgaaaaagtttaatttgtaaattaagtatagaaagagagcaacaataatgataaaatagaataattataatacaattatgacaatatgctttcataaaagtaatgtgacctctgtcactttctctctaagtatcttaatatttttggaccatggttgaccacaggtaacaaattatagacagaaaactgca

SEQ ID NO: 207622 - DNA, 545 bp, Homo sapiens
cagcactggtgggccggcactgctgggggacccacacaccctccgcagctgctggcccaggtgctaagcccctcactgcccggggctggggggccagctggccgctccgagtgcagggcccgccaagccccatgcccacccggaactctagctggcctgtaagtgcagtgggcagccctggttccctcccttgcctctcctccacacctccacgcaggctgagggagccagctccagcctcgagcatcccaggaaggggcaaccacagtgcagcgcaggctgaagggctcctcaagtgcggccagagagggcgcagaggcygaggaggcaccaagagcaagtgagggctgcgagggctgccagcacgctgtcacctctcacaacctcaatggttaccttgtctgtagtatcagaatcccttctaagaatccttaacaggtgtgtcttcaatgcctgtttgaacagcttgactaagagggagtccctaaccccagagtcatttgatcctaaagtgtacagctcagtttgataggcaaccactcttt

SEQ ID NO: 207623 - DNA, 370 bp, Homo sapiens
caccatgttcatccatgacatgtagggattataaaagctataattcatgatgagatttgggtrgggacacagccaaaccatatcatgtatcccaattaaagtcctcctcctcctcctcctccttcttctttttcaaacgaggcccttagaaaactacatatcacttctggagtgctgggagaaaaatgggaagaccaatggcctggggcaggacctacatggtgaaggagacaggctatgtgcaaattgccagattggggaggaccaagagtctcagtgacagaaattcagagggtttcagagtgctgtagagagctctgaaacacaacgttcaggatcaaggttaaattcaaccatgttccaactttgt

SEQ ID NO: 207624 - DNA, 378 bp, Homo sapiens
tcacctcccaccatgttcatccatgacatgtagggattataaaagctataattcatgatgagatttgggtagggacacagccaaaccatatcatgtatcccaattaaagtcctcctcctcctcctcctccttcttctttttcaaacgaggcccttagaaaactacatatcamttctggagtgctgggagaaaaatgggaagaccaatggcctggggcaggacctacatggtgaaggagacaggctatgtgcaaattgccagattggggaggaccaagagtctcagtgacagaaattcagagggtttcagagtgctgtagagagctctgaaacacaacgttcaggatcaaggttaaattcaaccatgttccaactttgt

SEQ ID NO: 207625 - DNA, 366 bp, Homo sapiens
catgtagggattataaaagctataattcatgatgagatttgggtagggacacagccaaaccatatcatgtatcccaattaaagtcctcctcctcctcctcctccttcttctttttcaaacgaggcccttagaaaactacatatcacttctggagtgctgggagaaaaatgggaagaccratggcctggggcaggacctacatggtgaaggagacaggctatgtgcaaattgccagattggggaggaccaagagtctcagtgacagaaattcagagggtttcagagtgctgtagagagctctgaaacacaacgttcaggatcaaggttaaattcaaccatgttccaactttgtcaggaactaaacat

SEQ ID NO: 207626 - DNA, 610 bp, Homo sapiens
ttaaataaattccataattttttgagatctcctttctctgaattgtttttatgaaatgcctcactttagatgctcttaataagtaccaacaggaccattatattgtatatttagtccaaagataaattttcactttgatgaaaaaaaaatcagataatctctatggaaatctcctcaaaatattaggtatattgtttggaaactggtcattaagcacactgtttgaaatagggtagggcaataaacaatatgggacacagtaaattcataaaactcatgmtttctgcactttgtgaactggatctgaagataaaagatctgaacccaaaagaaagggttctgaaatatttgtgcaccttatgaacagctataataactataatactgttctatggagactgctttaaagaataatgttcactagagtgaatgagttttaatctgcttataaaaatatcagtccaatcataccagatatgattatgaggctataagattgagaggcagataaatatattgaaaaaaatttgtctttccttttcaatttaaaaatcattttcttccatcttaaaaggctaaagctgtatttatggacttcttatatctaagg

SEQ ID NO: 207627 - DNA, 568 bp, Homo sapiens
taaaatataactaagtatgytcatatccataagccatctaattctcatatttaccagtttatgtcacagaatttccaagatctttgttctatttcttgttacaattggtgaaagcagggccaataatttatattaaaattcagtatgtttcagttatgctttataaaatacactgtctagaggaggagcgagagctaaacacagagcttaacatttattgagagcttcctgtgtattgagtgctgtgtcaaatatattatttaatttaaataataacactgtgatattgctgtgaatatttcatgagtagctctaggacacaagggtgagttttttttggaggaagtgtaataaatacacccatgtctcaaacacggcatttccacacctaaattgcaaagctgttctgatgtaagtatagacagtactactggccaatccagaaatctgaaagaacatatagagatggttctgaattcaacaattatttttaaaaatgcttctgagtgtccagcaccatcaaagtgggagtgggtattaaataatgatctaagaacatatgaaggtg

SEQ ID NO: 207628 - DNA, 568 bp, Homo sapiens
taaaatataactaagtatgttcatatccataagccatctaattctcatatttaccagtttatgtcacagaatttccaagatctttgttctatttcttgttacaattggtgaaagcagggccaataatttatattaaaattcagtatgtttcagttatgctttataaaatacactgtctagaggaggagcgagagctaaacacagagcttaacatttattgagagcttcctgtgtattgagtgctgtgtcaaatatattatttaatttaaataataacactgtgatattgctgtgaatatttcatgagtagctctaggacacaarggtgagttttttttggaggaagtgtaataaatacacccatgtctcaaacacggcatttccacacctaaattgcaaagctgttctgatgtaagtatagacagtactactggccaatccagaaatctgaaagaacatatagagatggttctgaattcaacaattatttttaaaaatgcttctgagtgtccagcaccatcaaagtgggagtgggtattaaataatgatctaagaacatatgaaggtg

SEQ ID NO: 207629 - DNA, 569 bp, Homo sapiens
ttcagtttagggaagattccagagtagatattaaggaggagattaaatgattatttattgtactaatttactgtacgttaggatattcatgaaaaaacttcttgatgtcatcaggaaatgactacccttgaatttaatcttctgattagatataacaagaaaaatccatactgttattagaacgactgcccagtgaatagtgtttggttacactagcaatcacttcagagaattttaacatgccttgaaatataaatgtcatttactaattttctttcttcttaagaagtgtatatataagagtttttgaactcttatytttaaaatctaaagctcattatacacttaaattagtatttaagttcttaactttatgtatctactcttcagccagtctacctcactattcttctcctcagaatatggtcatgtaattatgcaaaagcttttttattataaatgcaatgcttatttctatagtcaatttcaccattaaaatgataggtagaatttcaatgtaaggaattttaaaagtaagcatccttggtaaaaaagaggaaagaaagttt

SEQ ID NO: 207630 - DNA, 574 bp, Homo sapiens
attttaggaattaagtaatgtgatgtttctcttaatatgtatatatttcataaytttctatatgtatatatgaatttttttgtgtatatatacacacacacagaggattgtttgttttgtaccattaaactttatatcaattcttacctaagtaccatcttgggtttttttggttttggggttttgttatttctcagacaaggtctcactctgtcacccaggctggagtgcagggcagtggactgattatggctcactgcagcctcaacctctgggttcaactgatccttccacctcagccttccaagtagctgggactatagatgtacaccaccatgtccagctatttttttttacttctagtagagatgaggcctcactgtgttgcccaggctggtctcaaactcctgggctcaagcaatcctcctgcctcagccactaaaagttctgggattgcaggagtgagccactacacccagcctgcacattgttattctaactatcatggaaatataaaatatttgaatctttggttaaaaaatgccaccttttattaatttttatttttttaaat

SEQ ID NO: 207631 - DNA, 574 bp, Homo sapiens
attttaggaattaagtaatgtgatgtttctcttaatatgtatatatttcataactttctatatgtatatatgaatttttttgtgtatatatacacacacacagaggattgtttgttttgtaccattaaactttatatcaattcttacctaagtaccatcttgggtttttttggttttggggttttgttatttctcagacaaggtctcactctgtcacccaggctggagtgcaggrcagtggactgattatggctcactgcagcctcaacctctgggttcaactgatccttccacctcagccttccaagtagctgggactatagatgtacaccaccatgtccagctatttttttttacttctagtagagatgaggcctcactgtgttgcccaggctggtctcaaactcctgggctcaagcaatcctcctgcctcagccactaaaagttctgggattgcaggagtgagccactacacccagcctgcacattgttattctaactatcatggaaatataaaatatttgaatctttggttaaaaaatgccaccttttattaatttttatttttttaaat

SEQ ID NO: 207632 - DNA, 574 bp, Homo sapiens
attttaggaattaagtaatgtgatgtttctcttaatatgtatatatttcataactttctatatgtatatatgaatttttttgtgtatatatacacacacacagaggattgtttgttttgtaccattaaactttatatcaattcttacctaagtaccatcttgggtttttttggttttggggttttgttatttctcagacaaggtctcactctgtcacccaggctggagtgcagggcagtggactgattatggctcactgcagcctcaacctctgggttcaactgatccttccacctcagccttccaagtagctgggactatagatgtacaccaccatgtccagctatttttttttacttytagtagagatgaggcctcactgtgttgcccaggctggtctcaaactcctgggctcaagcaatcctcctgcctcagccactaaaagttctgggattgcaggagtgagccactacacccagcctgcacattgttattctaactatcatggaaatataaaatatttgaatctttggttaaaaaatgccaccttttattaatttttatttttttaaat

SEQ ID NO: 207633 - DNA, 608 bp, Homo sapiens
taaatgcctacatcacagggtactagaatggattaagaggatttagaatggtgcctggcacagagaaagtgtaatagatgttagcattcagacatttktactgtttcctctgtcttctgtttccttgctattatgttacatttgcttaaaagtggctgaatttctagcatgccacgtgcagttgagaggacaagatgctgcatctttgctgctgcaacttatgttttgctgtgcgctgcattgcatgcttcatatcttttataaaataaattggataatatgttgagggggtaagcagctgaactgtacatcatgtatcagttatagttatccacaaagcttagaaggtaggatttcatactggcagttctctatcctattgagcgacacagactcagacatatggaagatactttacaaatcatctagcacaatcacaagttacacgtgaagcactgaggctgcctggtgactggccagtgttagaaaattatggtgtatagtgatgtgcggcatcagaaatttttagttagaacaaataggcagggctgtacttgaattttgcctcttactccatatggtaaatactcctgggaatattgttttat

SEQ ID NO: 207634 - DNA, 533 bp, Homo sapiens
tgctttggttgcctgtgcttgtgggttattactcaggaaatttttgcccagaccaaagtcctggagagtttctcaatgttttctggtagtagtttcacagttttgaggtcttagatttaagcctttagtccatttttatttgatttttatatgtggcaagagatatcaatctagtttcattcttctgcatacgggtgtccagatttccagcatcatttattgaaaagatagtctttcccccagtgtatattcttgacaccttgagttcactataagtatttagatttttttcaggttctctattctgttccattggtctatgtatctgttttttgtgatcttttgaatttttttcaaatacatttattattgatatcatacttattatttcttttttctactaattttggatttgctttgctcctgcttttctagttacatccaatgctattattgataaggaggracttattcctgccattgtattatctgttttctggttttgtcttcctttcttctttccttcctgtctt

SEQ ID NO: 207635 - DNA, 531 bp, Homo sapiens
tgatgtatcacaatacctgcatctgacttccagatacatccatgcgtcagtaaataaacaaatagaaataggatacatttagccaaactttgattgttattagctcttggtagtgggcatatgggcattcattgtattatttttttaacttttttatatttgaaagttttcttactrtattggaaagtgagaaagttataaatatctgtgggattttgaaatttcttaatactgtataaatgtggtttcctcataccacattactttataacagataacttcactgttacatgtttttctcattcactgtaccctgtagtttctcctgtcagcttatctcctcttatgtctctaaacacacttataaatcaatgaaattaatcactattgttaatacacattatatgcacatctttgctgttatctgtctgcttttcatagacattttctcttccagattattaaaattctgtctatttcaagcaaagcgtttcataaagtcttttcaaattccttagccagatgttcatt

SEQ ID NO: 207636 - DNA, 558 bp, Homo sapiens
ttgcctatttactaccacagtctggcctctatatcacaggcagttttttttttttttttttttttttttttttgagatggagtcttactcttgtcgcccatgctggagtgcaatggttcagtctcagttcactgcaacctccgactcctgggttcacctgattctcatgcctcagcctcccaagtagctgggattacaggtgaccaccaccacactggctaatttttttrtatttttagtagggacagggtttcactatgttgcccaggcttgtctcaaactcctgacttcaggtggtctgcccacctcagcctcccaaagtgctgggattaaaggtgtgagccatggcacctggtccccagccaatttttaccccattcactatttcatcaaggctgtgtacatgtgagacttaatttcacttttttatatagtactgtatcaaacgttttattaaattccaactcaactctcctactcttctgtatctgacatttattgtcactttttctggaaaatctgtctacttatttggaataaataactgatccaaaaacc

SEQ ID NO: 207637 - DNA, 560 bp, Homo sapiens
ataagtggaatcatgcagtatttgtcgtttagcgactaccttatttcaaatagcataatgtcctccaggttcacccatgttgctgaaaatagtaggattttcttctttagaaaaatactcaatattattagtagcattagtaatcacgataataattataatcctatatgtggaaatgttatgcatttatattyattatcccatcaggtcttgttaaaaaaaaaaaaaaactgtgtaaaacagaacaagttactttcttgaaaattcttagaaattttacgttacatgctcatatgattaacatatgttatagccccaagaagcaatacacttcatttagacagaaaataaagaactaaaacatgtactttagcaaagagagaatggaaggagggaaattctatgatttaatagcaaccattcatcaagatgtactgtcactgcaccattccaaatttataactaagcctgaaaaagtatatgatatgaaatttaattttcagttttaatttttctctctatatgcttagaattagagatgcaaatttcaagggaaaaat

SEQ ID NO: 207638 - DNA, 541 bp, Homo sapiens
gtggggagagcatccaagacagaaggggagtacctgcaagagagcagtatgtttgatgtttctgataagctgcaaagcctatagtggctaaaacaaagtaaaggagaaagcaaagagcagaagtggtcagtgaggctcctagaggagaccatggaggttttgctggtcatgttcaggtgggaagtatttggaagatttttagcacaagaatggcataatatggcttgtgatttaaaagagtaatttattaggactgatgtgtagagaagagttttttggagagtgcttcaaggatggaatttgggagactattaagagactacagaaatagtccaataaagagttgatgataacttgaagtggaatagtagtagtggagacagtgagttgttttcagttaagagggtggagctgaagaaccgatggagcgggtttattgtgagttctgctttgastgtgttgaatttgagataccaattaagtatctcactggaaatccagaatggatcaatagaagataatgctgattgaaaaaaaaact

SEQ ID NO: 207639 - DNA, 689 bp, Homo sapiens
gtcatgtttaattagttgtcttcaagtgttatactgaaggcagcccttccaggagctaaccctggctggagaggatgtgatttccagmaaatatattatttatctcagtccaaaaagttaacttacatgtcagttaaggtttcagcccacacatgaggtcttattgtgttactgagcattgctcatcaagatacttaagaaagggtttgttgggctaaataaagatggcagactgggaaggaacctaaaataaaaatgaaagtcagcggagaaagagttgccagagatcagcctctgaactttatgtatcagctaaggagctcctaccatttacttgaaaaatctcccctgtctgagagacaggggaggcactgggctgctgtttccttaagcacttggatcttgttaattatgtgcgcattaagcagcattctgcattaaatttggccttgcaggaagataatatgaatcctcaactcaggcacaaaaggctttggcagtcgccttaacctgcttccccatctttcagcatccccctctacattgcagatttgcattcctccagcttaggctccatacatcagggattgcaagctcagggggagccaattcagtgttttactgttataattaatgatttatattgaaatagaatatttctctttttatcttctacttattctagttct

SEQ ID NO: 207640 - DNA, 350 bp, Homo sapiens
acacaacaaggatgccaactgtcattattgttattcaacatagtactggaaatcctagctagagcgatcagacaagagaatgatagkaaagggcatccatattggaaaggaagaagtcaaattatccttgtttgcagatgataaggtcttatatttggaaaaacctaaagactccacaaaaaaactattaggactgataagaaaactcagtaaagttgcaggatacaaaatcaacatacaaaaatcagtagtatttctatatgcccacagtgaacaaggggaaaaagaaatttttaaaaatctcatttacaatagtcacatatataattaaatagctagaaatttgctta

SEQ ID NO: 207641 - DNA, 530 bp, Homo sapiens
gccatgtagtaagtcacaaaacaagtctcaataaatttcaaagaatcagtactgaacagaaaaaaacctctaatctcaatataactaagatagagatcaataacaaaaaagataactttcaaaatctacaaaatataaacacatacaaataattgataggtcaatgcaacataatagtgaaaattaggaaagtcttagaactctccattccacaaaaacaaaaaaamctgcaaatcgaaatatattgagttacagctaatgaaggtgctgaaaagaaaatgtatagctgtaaatgtttataatggaatcaaagttgtcttaccctgggattcccagaaagcacagccaactaaggcatagcattgtattggagagtgaccccagggagcaagtaagaacaagggaacaaagcagggaaggagtgagagcaacatgagggtgcattctgtgtgctgccagaggtgctgtgattcctgggtcctcactgagaagcagtacaaaatgcatctctaggttgtacatggtgaaga

SEQ ID NO: 207642 - DNA, 618 bp, Homo sapiens
catgcttggagccactcgggggtgtggatatggtttgcccaggccttggcgtgctaggcagcattttgaatggccaaagctcaaagcaggggctgcayggcctccttcatgaatacatgaggacctcgctccccctggagttcagcaaaagacagcagcaggttctgacctgtggcagccacagcaggctggaggaaggtgtaccaaagtcagggaagagaaaggcactgttcttccagacggccagtctgtgccacagagtgaccctaactgggcccctcctggcagaggacagtgatgaggaagtagtagtctgggcaatgtacaatgtagctgcctctctcttctctcttcccttctcccttgcagtggcataatcagcaggggctaccatctcctacagctcgcccagcttctcctgcagctcctccttgacatgctgctcagactaaagtgcattgttgatctccatattctcactgttctggacagagagaagcaatcacgccacccactgcagctggagaccgcagaacttggtgtctgcctcccatggcgccgggaaggatggaggcagattagaaaaatgatcccctctcccccatagccatcaaacca

SEQ ID NO: 207643 - DNA, 618 bp, Homo sapiens
catgcttggagccactcgggggtgtggatatggtttgcccaggccttggcgtgctaggcagcattttgaatggccaaagctcaaagcaggggctgcacggcctccttcatgaatacatgaggacctcgctccccctggagttcagcaaaagacagcagcaggttctgacctgtggcagccacagcaggctggaggaaggtgtaccaaagtcagggaagagaaaggcactgttcttccagacggccagtctgtgccacagagtgaccctaactgggcccctcctggcagaggacagtgatgaggaagtagtagtctgggcaatgtacaatgtagctgcctctctcttctcycttcccttctcccttgcagtggcataatcagcaggggctaccatctcctacagctcgcccagcttctcctgcagctcctccttgacatgctgctcagactaaagtgcattgttgatctccatattctcactgttctggacagagagaagcaatcacgccacccactgcagctggagaccgcagaacttggtgtctgcctcccatggcgccgggaaggatggaggcagattagaaaaatgatcccctctcccccatagccatcaaacca

SEQ ID NO: 207644 - DNA, 618 bp, Homo sapiens
catgcttggagccactcgggggtgtggatatggtttgcccaggccttggcgtgctaggcagcattttgaatggccaaagctcaaagcaggggctgcacggcctccttcatgaatacatgaggacctcgctccccctggagttcagcaaaagacagcagcaggttctgacctgtggcagccacagcaggctggaggaaggtgtaccaaagtcagggaagagaaaggcactgttcttccagacggccagtctgtgccacagagtgaccctaactgggcccctcctggcagaggacagtgatgaggaagtagtagtctgggcaatgtacaatgtagctgcctctctcttctctcttcccttctcccttgcagtggcataatcagcaggggctaccatctcctacagctcgcccagcttctcctgcagctcctccttgacatgctgctcagactaaagtgcrttgttgatctccatattctcactgttctggacagagagaagcaatcacgccacccactgcagctggagaccgcagaacttggtgtctgcctcccatggcgccgggaaggatggaggcagattagaaaaatgatcccctctcccccatagccatcaaacca

SEQ ID NO: 207645 - DNA, 618 bp, Homo sapiens
catgcttggagccactcgggggtgtggatatggtttgcccaggccttggcgtgctaggcagcattttgaatggccaaagctcaaagcaggggctgcacggcctccttcatgaatacatgaggacctcgctccccctggagttcagcaaaagacagcagcaggttctgacctgtggcagccacagcaggctggaggaaggtgtaccaaagtcagggaagagaaaggcactgttcttccagacggccagtctgtgccacagagtgaccctaactgggcccctcctggcagaggacagtgatgaggaagtagtagtctgggcaatgtacaatgtagctgcctctctcttctctcttcccttctcccttgcagtggcataatcagcaggggctaccatctcctacagctcgcccagcttctcctgcagctcctccttgacatgctgctcagactaaagtgcattgttgatctccatattctcactgttctggacagagagaagcaatcacrccacccactgcagctggagaccgcagaacttggtgtctgcctcccatggcgccgggaaggatggaggcagattagaaaaatgatcccctctcccccatagccatcaaacca

SEQ ID NO: 207646 - DNA, 580 bp, Homo sapiens
tgaagcagtaggcaggggccaggagtggattttaaaggcaaagttmtcagacccactaggaccatgaactggtaaactctcctcaagctcccaaggacagaggatttgggactttgttggttttggcccacagccacagaactgaaagtctgaatctggattctctcaaaaggacagtaacataaagctctatgaggcaggaaaataaggtctggaggcagggaatctaagactgtttcgcgctgatttcctagaatcaaattgaatggtaaagagtgagaagttcagatctggggatcctgggccattccacacagtgccctttaaaaggtctagagctgggctcaatgtacaacttggtcaataaagatctctactgtgaagttgctttgctttagaaataaaatattaaataatttttaaaaagatctcaggccaaggatggtggctcatgcctataataacaacactttgggaggctgaggtgggtggattgcttgaggtcaggagttcaagaccaacctgggcaacatggcaaagccccatctgtacaaatacaaaaattacccaggagtggtgg

SEQ ID NO: 207647 - DNA, 348 bp, Homo sapiens
gaacaaatttaataatacacaccacagaggtagcatttaaaaactagcataagcttgcacaacaaatcagaaaatagcctattcttgggatgtattactgaggaaatcatgttgtcattggttccagtctaaggctttcagataaaatcttatgcctgaaaggaaagcatgcaagctgtkgcaatttattttaataccttactccacataatagaagataacgatgataacaggtagaagactattttctccaaataggactgttggccaaagtaggcattggcctgctaaagtcacacctgctgactgtcttcagtgaatgacattggtgtcctaaaataaacaact

SEQ ID NO: 207648 - DNA, 584 bp, Homo sapiens
gtgctaatatttgaatttagtcatatgcaatgatttttgatgactttatagccaatgctaaggtacagagaaaggaagaaaatgctttgctttagtttagaagttggtacacagacccactataatgttatatttaataagagaaaaagtcagattttcccccagaaaaggggaatcagtctctaagttgaggtatgtttgggtgttttcttcacattatcaacagcaagctgtctttcatgtctaggattcaccagacaaatgataaatgtctgatactcagtgaatttgacatttggcatgagaaaaatagaggtctttaggccttattttagttcccagaattgaaagagcatgcacaaccatatccrtctcctggattaaccatagcttgttattaactaacagtgaaagatgaaatattagatatgttctgaggagtcaaataaagtacacgacatgaaaacaaaaaacaataaggcatgttagaacacatctcttttcaagcctcatcccatattctatcactataagaaagaatttcctgctttccaaactaacagtgcttagtgaagagaacattg

SEQ ID NO: 207649 - DNA, 576 bp, Homo sapiens
aggaaatctgtcattgtgcatagtttatcacgataatttgctttttagatgaaagggcacagaagtctgatccaagagcaatggagaacattgatacagaattatgctcagggagtagaatagcacaatgaactaagaaccctcccttggagatgcagaggccaatgagctgggaartcaatcagtgcataaggaataagatctaggtcttccatgtaagaagaaaaaatattctttaataatgaataatgtagaataatagaattagaaagatatattgtaagattgtagcatttatattgcttcttagaaataaattaaatttagtaaatatatcaaaaattaaaaaaaaattccgagcccaagtagtacaggtatattgactttaaattgatcacattaaaattaaaattattattacaaatccaatattgagtatatttttgcataaatcaaagttgtactatatatacgtaagctaacaatgaaaggaaaatctactatgtgttaatcttgtagtgaattgtaaataaattcgaacctagaatattttaatataagaatttaagaggttaa

SEQ ID NO: 207650 - DNA, 576 bp, Homo sapiens
aggaaatctgtcattgtgcatagtttatcacgataatttgctttttagatgaaagggcacagaagtctgatccaagagcaatggagaacattgatacagaattatgctcagggagtagaatagcacaatgaactaagaaccctcccttggagatgcagaggccaatgagctgggaagtcaatcagtgcataaggaataagatctaggtcttccatgtaagaagaaaaaatattctttaataatgaataatgtagaataatagaattagaaagatatattgtaagattgtagcatttatattgcttcttagaaataaattaaatttagtaaatatatcaaaaattaaaaaaaaattccgagcccaagtagtacaggtatattgactttaaattgatcacattaaaattaaaattattattacaaatccaatattgagtatatttttgcataaakcaaagttgtactatatatacgtaagctaacaatgaaaggaaaatctactatgtgttaatcttgtagtgaattgtaaataaattcgaacctagaatattttaatataagaatttaagaggttaa

SEQ ID NO: 207651 - DNA, 565 bp, Homo sapiens
gaaaacaggggtcttgccaacattggacttaattataaagttcacagtgtttccagaaaatctgatttggggacatgacagtcatgtccaaagttctgaagacaactctgagattaagatggttcaaattcatgttgggaagattctgcaatattaggaagtaatatcacagtgaaaaacctagatggtagtcacatgtatgtgctttaatcactagattgaataaggtccacatgtacaggaaaggggagcaagaatagaaactccagaagagctgagaaaaccttggagtttgtgttgggtttagagagatttattttccatattttttatcactttttwaaaaaatttattcctagaatcatatgtactcacattcaacagaaagagaattctagtagagtcatctctgagtagacatgcttgtttagtcttatactaaagactaaattagttcagtggtttcagagggaagaaatacttagagtccaagaaaatatgtatttcttagtggtaatatatgagtttatttcatttcaatgtggtctgtgctttactatattag

SEQ ID NO: 207652 - DNA, 565 bp, Homo sapiens
gaaaacaggggtcttgccaacattggacttaattataaagttcacagtgtttccagaaaatctgatttggggacatgacagtcatgtccaaagttctgaagacaactctgagattaagatggttcaaattcatgttgggaagattctgcaatattaggaagtaatatcacagtgaaaaacctagatggtagtcacatgtatgtgctttaatcactagattgaataaggtccacatgtacaggaaaggggagcaagaatagaaactccagaagagctgagaaaaccttggagtttgtgttgggtttagagagatttattttccatattttttatcacttttttaaaaaatttattcctagaatcatatgtactcacattcaacagaaagagaattctagtagagtcatctctgagtagacatgcttgtttagtcttatactaaagactaaattagttcagtggtttcagagggaagaaatacttagagtccaagaaaatatgtayttcttagtggtaatatatgagtttatttcatttcaatgtggtctgtgctttactatattag

SEQ ID NO: 207653 - DNA, 516 bp, Homo sapiens
gaaaataatttctattcacaaatccccaaatgcttgggaaggccatcctttcactggtcagactttggagttatcagaattatacttaaattgatggagggtagacacttgcctctaattactgccgtgttacataactctaatataagcatagcatgggagtgtaaatctgacagtgatttcaraaatttccctaggaagtgagggaaatgataggacttaaaagcttcaaagacagaaaagggagtaaggaattcagagagagaagaacttaaataaagcaatggatgtgggagcgtgcagggtgtttgcaggaacaatgagaacacgggtgtgttcgtttctaggtacagggcatgtagcagtggtaaaagaggtgaaggctgaaaaagaaagtgaatttgtacaacacttgatttctgtcttgggcaaatcaacattcaatggccacacgtgagtgacattttaaatcaaatgttttctataaaaagatattggttagtagattactattaa

SEQ ID NO: 207654 - DNA, 553 bp, Homo sapiens
agggctgatcctaacgatcttattttaacttgattagctctgtaaagaccttattttcaaataaactcatattcttagctactggggaattaggacttcaacaggaatttggtggggggactcaattcaacataaaaatgagttataacttagtatattcatgttcaattgtatttaaattctaaagaggtgattataatatatatatttatgaatgcatatttatgtaaacatatagacacacatgtaaatttatatacatgtaattttaaaattgtttacttaaatataattattaatttttttcctagctttatgtatgcttcagaaacgtgattttaatttccacataatttattatcagcaagaatcatwgtttttattgaactattttactcttcttaaacatataggttgtttctaatttgtagctattaaaaactcactgtcatggagaactgtttatctctctggctatctagttatctacttgcctatctatccattttccatatgaacacatatgtttacacactttggcacactactggca

SEQ ID NO: 207655 - DNA, 504 bp, Homo sapiens
tgtttaacacacataaatgataaatactcaaggtgatggataccctaaatgccctgacttgaaccattacacattctatgcctataacaaaaaaatcacatgyatcacatacatatgtataaatattatatatcaataaaaaaatagtgtggctggacttcaagtggcctgacttggttttatggccaccatagagattagtaattgcaactttggaaagaatttctagtattatttcccgggaagaccaaatctgaaacaaacattttagggggcttgcaaacccagaaaaataatagtgaaggaaaaggcagcatgggaagaaagaaagaaaggcaaatgaccaaactggcaaaagcatcatcataaaatacagctgatttctcatcaagcagcatttctcaaacaagactttatgaaaacataggacctcagaataattactagaagtggaagagaatttattcaccagctcctttccatctcctatctctcatgagtcaa

SEQ ID NO: 207656 - DNA, 504 bp, Homo sapiens
tgtttaacacacataaatgataaatactcaaggtgatggataccctaaatgccctgacttgaaccattacacattctatgcctataacaaaaaaatcacatgtatcacatacatatgtataaatattatatatcaataaaaaaatagtgtggctggacttcaagtggcctgacttggttttatggccaccatagrgattagtaattgcaactttggaaagaatttctagtattatttcccgggaagaccaaatctgaaacaaacattttagggggcttgcaaacccagaaaaataatagtgaaggaaaaggcagcatgggaagaaagaaagaaaggcaaatgaccaaactggcaaaagcatcatcataaaatacagctgatttctcatcaagcagcatttctcaaacaagactttatgaaaacataggacctcagaataattactagaagtggaagagaatttattcaccagctcctttccatctcctatctctcatgagtcaa

SEQ ID NO: 207657 - DNA, 504 bp, Homo sapiens
tgtttaacacacataaatgataaatactcaaggtgatggataccctaaatgccctgacttgaaccattacacattctatgcctataacaaaaaaatcacatgtatcacatacatatgtataaatattatatatcaataaaaaaatagtgtggctggacttcaagtggcctgacttggttttatggccaccatagagattagtaattgcaactttggaaagaatttctagtatyatttcccgggaagaccaaatctgaaacaaacattttagggggcttgcaaacccagaaaaataatagtgaaggaaaaggcagcatgggaagaaagaaagaaaggcaaatgaccaaactggcaaaagcatcatcataaaatacagctgatttctcatcaagcagcatttctcaaacaagactttatgaaaacataggacctcagaataattactagaagtggaagagaatttattcaccagctcctttccatctcctatctctcatgagtcaa

SEQ ID NO: 207658 - DNA, 504 bp, Homo sapiens
tgtttaacacacataaatgataaatactcaaggtgatggataccctaaatgccctgacttgaaccattacacattctatgcctataacaaaaaaatcacatgtatcacatacatatgtataaatattatatatcaataaaaaaatagtgtggctggacttcaagtggcctgacttggttttatggccaccatagagattagtaattgcaactttggaaagaatttctagtattatttcccrggaagaccaaatctgaaacaaacattttagggggcttgcaaacccagaaaaataatagtgaaggaaaaggcagcatgggaagaaagaaagaaaggcaaatgaccaaactggcaaaagcatcatcataaaatacagctgatttctcatcaagcagcatttctcaaacaagactttatgaaaacataggacctcagaataattactagaagtggaagagaatttattcaccagctcctttccatctcctatctctcatgagtcaa

SEQ ID NO: 207659 - DNA, 394 bp, Homo sapiens
agaagttatgattcttggctagagacttaactcaacctataaatttgtttacttaataaatctggaataaattgattagttagtactcttattttaaaataacacattgatttatgcagaaaatagacctcactattcttatttttccctgaccagtacraaattacaagttcctattggaaaaagacagttggctatttgaaaggcaatttgaatggtccacaacatcaccattatgcaaaattctcaatcttttgatatgcttatccatcactgccaagctctggaataatgtgattacagtaatagaaagaaatggttgtgctcttgaagcagtaggtggctttgcctagtgcagatgaattactgccaaggaatacattggttatgcaca

SEQ ID NO: 207660 - DNA, 414 bp, Homo sapiens
tgagagaaatacatcacaatacaaaatgaaactacaaagtgattgaaattagaaaagagagttctaaaaatggagaatacattaagaagatcaaacctgtatacaatttcaattcaattacaggagaaataataggtgggagagagtaaagaaaagggagggccaataatataaaaaaagaagttttattaktctaagaagagtttaatgataaaagaagtgcattaagtaattcgggtaaaaattattcactttgaaataaaaaaagatgaagatgaaaccttaaagtttcaatgcagatatacaaattatttacaaagagcaaaaaagcattgtcttttatttacaacatacaacactgagacagttaaacaccttctatctaccatagaaaaacaagactaattcaaaacc

SEQ ID NO: 207661 - DNA, 543 bp, Homo sapiens
taccttcttctcatctgcagatgaaatatcctccaggatagaccataccttaggctacaaaacaaatctcaacaaatttttaaaaaatcaaaatcatatcaagtattttcttgaacagcaatggaataaaactagaaatcaatactgagaagaactttgcaaactgtaaaaatacatggaaattaaacaatatgttcctgagtgawcattgaatcaataaagaaattaaaacagaaatgaaatttttttaaacaaatgaaaatcaaaacacagcacactgaaacttacaggatacagtgaaagcagtgttaagaggaaagtttataggaataaacaaccccatcaaaaaagcaaagagatttcaaataaaaaatctgacaatgtatctcaagaacaagaaatgcaaaaacaaaacaaaccaaaaccaaaactagtagaaggaaagaaataataaaatcagagcagaactaaatgatataaagtgcattagtctgttctcacattgataataaagacataccctaaactgggtaatttataaag

SEQ ID NO: 207662 - DNA, 543 bp, Homo sapiens
taccttcttctcatctgcagatgaaatatcctccaggatagaccataccttaggctacaaaacaaatctcaacaaatttttaaaaaatcaaaatcatatcaagtattttcttgaacagcaatggaataaaactagaaatcaatactgagaagaactttgcaaactgtaaaaatacatggaaattaaacaatatgttcctgagtgaacaytgaatcaataaagaaattaaaacagaaatgaaatttttttaaacaaatgaaaatcaaaacacagcacactgaaacttacaggatacagtgaaagcagtgttaagaggaaagtttataggaataaacaaccccatcaaaaaagcaaagagatttcaaataaaaaatctgacaatgtatctcaagaacaagaaatgcaaaaacaaaacaaaccaaaaccaaaactagtagaaggaaagaaataataaaatcagagcagaactaaatgatataaagtgcattagtctgttctcacattgataataaagacataccctaaactgggtaatttataaag

SEQ ID NO: 207663 - DNA, 540 bp, Homo sapiens
tgccgtttcctctgaaaatgcctgtttttcacttagccccttgccttcctccctcgactgcagtccccatcttttctcccgctgaaaaggaaaaattaataaaaataggagccaaagaaaattcagaagggaaatgggtgtcaccagaccaaagagaaatgttatccaaacccctcatgagggaaattctctcccatctgcatcaagggactcattagggacctcaagctaagtgtgatgcagtcctcggggtctacagatgtataggaatttatattttggcaagacaagttacagatagttgcctagtatgtaagaagactaataagcagatcctcagaaaaccacctgttggagggagaaatccaggattaaggctgttccaaagtgtccaaattgattatgcygaaatgcccccaattggtcacttaaaatatttattagtgatagatcaccttactcattgggtagaagctattcccttttcaagtgcaactgctagtaatgtactcaaggcattagttgaaaatattataccca

SEQ ID NO: 207664 - DNA, 633 bp, Homo sapiens
ctaggcaacttacaactatcaccacattcctcaaaacaaccccatggagaagacaggcattatatcccttttacaagcattaaagccatggcacaaaacaggtgaagcaatttgaccaagctaagcactcatctcattcaaaacccgagcccttcccccaccatgccctttatacaattatattgtaaaattccattttgttttttaaaatagcatgcaagtaataagtaaaagatgatcactttcacatctcggcagcgttccttgtcctcaatcctactctcttctctgaatgaacagtttgagatattccttttgtaccatttcctatgcatttgtgaacactgttaccaacactggtactattcaactttaagttctgccaatatgataggttaaaaaatacactacttaataaatgagaatcttgagtgtcaggcactagctaggcaaccaggatrtaagtgaagaaaaaaaaaaaagttacagctcttgtctttttgggtttactattgtagtggtagagaaaaacctgataatggtgtaagtgataaagtataattgtgagcaaggtgctaggaaggaaacagacatcaggatacaaaagtatgtaaggtggtttctggcctaata

SEQ ID NO: 207665 - DNA, 497 bp, Homo sapiens
  misc_feature (1)...(497): n = A,T,C or G
nnnnnnnnnnnnnnngccgcaggtgtttatctgggtgtggaccaggtagagggccttcctcccagcctccatgccgtgaacacatgtaacgtgggctgtacctgtgtggtcccagcttgygtgtgtgcacgtgcctcagatgtgctcccatatatgttgtgttcccaagagtttctggggagcttgctgtacacccatcctcctgggagtggtgtgtgcctctagagctggtgtccactcatgtccatggcatggctgagcatgcagattcctggacgccacccagccctacagaatctctgaagtggagcccgagaatctgcattgcagtcagttccctgggagggcatcacgggtcctgaacttttgggattgctggccgtggagacaggcgctgcctctcagacccctgtgtaccccgctctcttctcagagcccagaccaggaccaggagggtctgtcaagggcttctgctcacccaggaaccccacagagca

SEQ ID NO: 207666 - DNA, 497 bp, Homo sapiens
  misc_feature (1)...(497): n = A,T,C or G
nnnnnnnnnnnnnnngccgcaggtgtttatctgggtgtggaccaggtagagggccttcctcccagcctccatgccgtgaacacatgtaacgtgggctgtacctgtgtggtcccagcttgtgtgtgtgcacgtgcctcagatgtgctcccatatatgttgtgttcccaagagtttctggggagcttgctgtacacccatcctcctgggagtggtgtgtgcctctagagctggtgyccactcatgtccatggcatggctgagcatgcagattcctggacgccacccagccctacagaatctctgaagtggagcccgagaatctgcattgcagtcagttccctgggagggcatcacgggtcctgaacttttgggattgctggccgtggagacaggcgctgcctctcagacccctgtgtaccccgctctcttctcagagcccagaccaggaccaggagggtctgtcaagggcttctgctcacccaggaaccccacagagca

SEQ ID NO: 207667 - DNA, 497 bp, Homo sapiens
  misc_feature (1)...(497): n = A,T,C or G
nnnnnnnnnnnnnnngccgcaggtgtttatctgggtgtggaccaggtagagggccttcctcccagcctccatgccgtgaacacatgtaacgtgggctgtacctgtgtggtcccagcttgtgtgtgtgcacgtgcctcagatgtgctcccatatatgttgtgttcccaagagtttctggggagcttgctgtacacccatcctcctgggagtggtgtgtgcctctagagctggtgtccactcatgtccatggcatggctgagcatgcagattcctggacgccacccagccctacagaatctctgaagtggagcccgagaatctgcattgcagtcagttccctgggagggcatcacgggtcctgaacttttgggattgctggccgtggagacaggcgctgcctctcagacccctgtgtascccgctctcttctcagagcccagaccaggaccaggagggtctgtcaagggcttctgctcacccaggaaccccacagagca

SEQ ID NO: 207668 - DNA, 497 bp, Homo sapiens
  misc_feature (1)...(497): n = A,T,C or G
nnnnnnnnnnnnnnngccgcaggtgtttatctgggtgtggaccaggtagagggccttcctcccagcctccatgccgtgaacacatgtaacgtgggctgtacctgtgtggtcccagcttgtgtgtgtgcacgtgcctcagatgtgctcccatatatgttgtgttcccaagagtttctggggagcttgctgtacacccatcctcctgggagtggtgtgtgcctctagagctggtgtccactcatgtccatggcatggctgagcatgcagattcctggacgccacccagccctacagaatctctgaagtggagcccgagaatctgcattgcagtcagttccctgggagggcatcacgggtcctgaacttttgggattgctggccgtggagacaggcgctgcctctcagacccctgtgtacccygctctcttctcagagcccagaccaggaccaggagggtctgtcaagggcttctgctcacccaggaaccccacagagca

SEQ ID NO: 207669 - DNA, 470 bp, Homo sapiens
acaataccttgtcacgtgggcctctccatagggcacctcatcacatggcaactggcttccatcagagggagcaatggaaagagcaggagaagggtgaccaaggcaggcatcgtagtctccttgtagcctcayctcagaagcgatgttacttttgctgtattctctttgttagaagtgagtcactaggtccaggggtggaattttacaagggtgtgaatggcaggaggtgagggtgatcagggccatttagaggctgcctaccagtgttgaagaaaattgttgacttctatgagctgtagcagcagacagtgctatgcaaggagaatggctgtctcagaagtccagctcctcacatgggtttaaacgtgttgccttttccccctgatacattttgtttaaatccatggtcatcttgccatttagtggtgtggtttaattgcatatttgggttagtctgtatgtaaacattt

SEQ ID NO: 207670 - DNA, 544 bp, Homo sapiens
gctttttacaataccttgtcacgtgggcctctccatagggcacctcatcacatggcaactggcttccatcagagggagcaatggaaagagcaggagaagggtgaccaaggcaggcatcgtagtctccttgtagcctcacctcagaagcgatgttacttttgctgtattctctttgttagaagtgagtcactaggtccaggggtggaattttacaagggtgtgaatggcaggaggtgagggtgatcagggccatttagaggctgcctaccagtgttgaagaaarttgttgacttctatgagctgtagcagcagacagtgctatgcaaggagaatggctgtctcagaagtccagctcctcacatgggtttaaacgtgttgccttttccccctgatacattttgtttaaatccatggtcatcttgccatttagtggtgtggtttaattgcatatttgggttagtctgtatgtaaacatttaacataggtgtctctgggttaaacaggaatcctattcatcttcttcaccgatatggtctgtggactc

SEQ ID NO: 207671 - DNA, 470 bp, Homo sapiens
acaataccttgtcacgtgggcctctccatagggcacctcatcacatggcaactggcttccatcagagggagcaatggaaagagcaggagaagggtgaccaaggcaggcatcgtagtctccttgtagcctcacctcagaagcgatgttacttttgctgtattctctttgttagaagtgagtcactaggtccaggggtggaattttacaagggtgtgaatggcaggaggtgagggtgatcagggccatttagaggctgcctaccagtgttgaagaaaattgttgacttctatgagctgtagcagcagacagtgctatgcaaggagaatggctgtytcagaagtccagctcctcacatgggtttaaacgtgttgccttttccccctgatacattttgtttaaatccatggtcatcttgccatttagtggtgtggtttaattgcatatttgggttagtctgtatgtaaacattt

SEQ ID NO: 207672 - DNA, 470 bp, Homo sapiens
acaataccttgtcacgtgggcctctccatagggcacctcatcacatggcaactggcttccatcagagggagcaatggaaagagcaggagaagggtgaccaaggcaggcatcgtagtctccttgtagcctcacctcagaagcgatgttacttttgctgtattctctttgttagaagtgagtcactaggtccaggggtggaattttacaagggtgtgaatggcaggaggtgagggtgatcagggccatttagaggctgcctaccagtgttgaagaaaattgttgacttctatgagctgtagcagcagacagtgctatgcaaggagaatggctgtctcagaagtccagctcctcacatgrgtttaaacgtgttgccttttccccctgatacattttgtttaaatccatggtcatcttgccatttagtggtgtggtttaattgcatatttgggttagtctgtatgtaaacattt

SEQ ID NO: 207673 - DNA, 470 bp, Homo sapiens
acaataccttgtcacgtgggcctctccatagggcacctcatcacatggcaactggcttccatcagagggagcaatggaaagagcaggagaagggtgaccaaggcaggcatcgtagtctccttgtagcctcacctcagaagcgatgttacttttgctgtattctctttgttagaagtgagtcactaggtccaggggtggaattttacaagggtgtgaatggcaggaggtgagggtgatcagggccatttagaggctgcctaccagtgttgaagaaaattgttgacttctatgagctgtagcagcagacagtgctatgcaaggagaatggctgtctcagaagtccagctcctcacatggrtttaaacgtgttgccttttccccctgatacattttgtttaaatccatggtcatcttgccatttagtggtgtggtttaattgcatatttgggttagtctgtatgtaaacattt

SEQ ID NO: 207674 - DNA, 599 bp, Homo sapiens
tttcatgcctgctgacacaagatcacgttttgccgcctctggctccaggggtgatttttaatttccaatcttcatgtattaagaatcactttcctaaaggtcaagtctgccattgatagttattcctttgatggatctgggaaaaccttctggaaaggattcattattctagatactgttaagaacatttgtgatgcatgggaggaggtaaaaatattaacatgaataggaatttggaagaagttgattccaaacttcatagatgactttgaggggttctcactagcttcagtggaggaagtaactacacaacgtggtggaaatagcaagagaagtaggattaaaagtaggagcctgcagatgtgactgaatttgctgcmatctcatgataaaacttgggatgaattgcttcttacagatgaatggtttattgatagaatctactcctggtgcagatgctgtgaacatttttgttgaagacacaaaggatttagaatttccacataaagttagttgataaagcagaggcagagtttgagaggattgactccaattttgaaagttctcctatggtaggtaaaatgttatcaaacagcatc

SEQ ID NO: 207675 - DNA, 533 bp, Homo sapiens
gggagtttccttgcacaagctctctctttgcctgctgccaaccacgtaagatgtgacttactcctccttgccttccaccatgattgtgaagcttccccagctatgtagaactgtgagtccattaaccctttttcttttgtgaattgcccagtctygggtatgtctttatcagcagcatgaaaacggactaatacacctactgttgtattataacaagtagctgagtctcaaacaatcacagcagtagaactttagtcaaccacaggcagccaaccgttcaaaacaggttcaaataagggaaatgcccagcagtaaccaagccagcagtttgtatacttcactgccattttttgtaagtcactttcctattctatctataaatgttatccaaccatgtggcagtcctggagtcattctgaatctattcaggttgtagggcctgcctaattcacaaattattctttgctcaattaaactctgttaaatttaattcatctaaaatttatattttaatagaactaatatatgatata

SEQ ID NO: 207676 - DNA, 533 bp, Homo sapiens
gggagtttccttgcacaagctctctctttgcctgctgccaaccacgtaagatgtgacttactcctccttgccttccaccatgattgtgaagcttccccagctatgtagaactgtgagtccattaaccctttttcttttgtgaattgcccagtctcgggtatgtctttatcagcagcatgaaaacggactaatacacctactgttgtattataacaagtagctgagtctcaaacaatcacagcagtagaactttagtcaaccacaggcagccaacmgttcaaaacaggttcaaataagggaaatgcccagcagtaaccaagccagcagtttgtatacttcactgccattttttgtaagtcactttcctattctatctataaatgttatccaaccatgtggcagtcctggagtcattctgaatctattcaggttgtagggcctgcctaattcacaaattattctttgctcaattaaactctgttaaatttaattcatctaaaatttatattttaatagaactaatatatgatata

SEQ ID NO: 207677 - DNA, 533 bp, Homo sapiens
gggagtttccttgcacaagctctctctttgcctgctgccaaccacgtaagatgtgacttactcctccttgccttccaccatgattgtgaagcttccccagctatgtagaactgtgagtccattaaccctttttcttttgtgaattgcccagtctcgggtatgtctttatcagcagcatgaaaacggactaatacacctactgttgtattataacaagtagctgagtctcaaacaatcacagcagtagaactttagtcaaccacaggcagccaaccrttcaaaacaggttcaaataagggaaatgcccagcagtaaccaagccagcagtttgtatacttcactgccattttttgtaagtcactttcctattctatctataaatgttatccaaccatgtggcagtcctggagtcattctgaatctattcaggttgtagggcctgcctaattcacaaattattctttgctcaattaaactctgttaaatttaattcatctaaaatttatattttaatagaactaatatatgatata

SEQ ID NO: 207678 - DNA, 480 bp, Homo sapiens
ttgatttccacttacttaaaattgacttctcaatttccagctcccagaagagtctagtgttctggttgagagaactacctaaagctcaactcaaaatctaaatcttttctagtatcaaaatatgtttataagaagatgtttagatgtcaatagggaggggaggagggacaaggttttattagacctgtcattcagaaaattattttgatgaaaattttcatcacttacaccaactgcaatttattcatggtcttgggaaaatagcatacctatgataacacasgcttcctcaaatataacttttatatatagccaaagagtcaaaatcaggctaaatgtgataatatcttaattgatattaataggtaaagtttataacataaatatttcaaaaatataaggttatgtattctctcttaatgtgttgttctttctatcctttatcaaatttgtacttcttatcttctcagtacagaattc

SEQ ID NO: 207679 - DNA, 546 bp, Homo sapiens
aattttatagataaggatattggaaattgttagagattaaatgcctttttccaagtacatgatacagtctgacgtctgccgctgaacacttatatttacatgcactgaaacccaatctttcttcttcaaattgataatgtttcccttcttaaagctttgtcttttacatcgcaaaacaggataacagggagaaatgacaaattacagaagtggttacctgataataaatcttactacctttaggtgaatcacttacaggactttttaggatggtgacagtgtatttggcttaggtttatgttttccacatttaatgtcatctttacatttttcaaaagccagcaagagtttgctattcagaaagagagcatcttaccttcacagcaagagacatccttttagataatccttagaacaagctaatgctgaaaaacctgatggtatgaaggaagagacccatgttggaaagggaatatgggttgtttactaagggaagaaaygccagtatcaggctcaacactcatctaacagtgggaatacttgtta

SEQ ID NO: 207680 - DNA, 501 bp, Homo sapiens
aattagggtgattttacaaaatgcctgtccaatatatttcaaaactgtcaacatcattataaacaagagaagtctgacaaactgttccagcaaaaaggagctgaagcagacatgayaactaaatgcaatatggtattctagatgggatcctgcaacataaaatgatattaaaagtgtgcttaggatgtcaccaaaatgatggagtaggaacaatctggcatcagtctccctaacagaaaaccaaaacagtaacaagattataaccagaaatatcacagaattataatttgacactgggaaaatctgaggggccacaaagaagtgagaaaccactagcaaaaggaaagagaaatggacctctctaatcagaacaaccctccccaactctgccaggtccagtggaggaaagttcccccagattcatgatttctacactggaaaaagtaagatcaaggtggaaagtcaggtttcctatcatcttgggttgcttcacttgagaac

SEQ ID NO: 207681 - DNA, 433 bp, Homo sapiens
aattgtcataaggttaaaataacttgctataatattaagattttttttctaagcctcatggtaaccaaaaagctaaaacagatacactaaaaataaaaagaggatttaaaacatactaccagagaaaattacataactacaaaggaagacatgtaatgaaataaaaaagaaagagagtagtyacaaaacaaccatttaaaaagtaacaagatgctagttcatccttacctattaataattgagtgtaagatgactaagttctccaaaagaagaaattatgtcttaatggattaaaaacaagaccccaagtatataggtcttttcttgtttttcatccattcagagtttcctacaagaaacacctctcctataaagatatacatagactaaaaataggctggaaaaagatatccatgcacgtagaaaccaaaaa

SEQ ID NO: 207682 - DNA, 553 bp, Homo sapiens
tgcaacttcatctatctatctgtctatctatctatcatctatgtatctttccatatctacctatatgtctttgtatctatctctatacctcttgtagtaatatagcagagtcagttcagcttatcttcaagtttgctagaggatttcaggcatattttctttttctagtaaatcatgatattaatcttaaattatgtaayattcaatggtttgcattccctgcaaattatactaaattgttgtttatcaacatagaatattttctaattgtaaatctgttcgtaggcagacagatcagagagaatacaactaaataaaacaagaagtagtgctatcacatcttaataaatagaataacattttatacaatgggtgataaacagaatttcttcttcatgtcatggcaatttagacttgttttagctaaacagaatttcttcctcatgtcatggcaatttagacttgttttagcattttaaaacattataaagtagaatctaagaattaataaataaaatatcaggtagcaatatataacgtaaagctttaataa

SEQ ID NO: 207683 - DNA, 494 bp, Homo sapiens
tgcacatacttgggacacctctaagcttgcatgctgcatctatcaccgaatgcctgtctgaacttggtcaaattacaaaaccttctgtattccagtcatcttatcggtaaaatgaagattgtaatattctcataggattgctcagaatattaaataaaagaaataaattactcaccatagcatatgctatagcagcaaataataactgttattatccacatctacaattattatatacttacacattaaattaaattactaatcctttgttaaattctcatgaaacaraaaggacttttaactagtttctatacttagttttcctataaatctcaatttttaactctttgaaaaatatcttaattatgattagtaaattgaagtgtgaaatttaatgaaatcatcatgccacactaagaagtagaacttaatcacactgagtaacacttttgtttaccacttgttctttctgatgatctaactggtctgatgat

SEQ ID NO: 207684 - DNA, 621 bp, Homo sapiens
tgaatggataagtaagaaagttaatattacaaaagctataaatacatacttatttaaattttttaaaaaatgtcagcttctttaaaagacaaacttctatgaagtaattrttataataatacgtttttggcttaataacatttaaagatgtaatgtgtataaaaataatggaacaaatggaaggatagtaaaatataactttatatgaataatatatctatatcagacaagaattaagttagatgagtatgagtctaggacttctatggtaagctctataacaaccagaaaagaagtcataagaaatatacctttaaacacattaaaggaattaaaacgccacattaaaatatattctcctagtgcaaatgaaagcagtaaagtagaaatagaagaacaaaaaatataacatatgagacataaaaatttaaaagtaaagtccaagacataaatctaactcccaaaataagaaaattaaaagtgaatagattaaataatccaatcagaaaagcagagattgcaagttttgatttaaaaatatgattcaactgtattatgctatgtaagactttaacttaaataagttcattatgttaataatagaaaaatatgtattatgca

SEQ ID NO: 207685 - DNA, 597 bp, Homo sapiens
ctttttacagcttccagtcaaaccatgaactccagcatcaccaactccagcctgataattacatgtactgaaagagatatccattgaaagactccctcgaccccccctttaaagggactttcatcaggtgctattaattaatccttgtactgttaagttaaagggttttgattcctgggtgcmcatatctcatctgaaaaaggcaccaactcctactaattcttaaaatattgatactattatctgacaccatactcaggttaacaaaagccttgtcttcagacccagaagaaaggtagcatgaaaatgatctgcttttgtgagacataagactagaaattaaaactattcaatctctctaggctcagtgactactgcaggagagatgggcatgtgagattgtaagggcctgttttgagggatacaattagttcagatgctccaaatcaaggatggcacagagttacctaaacagccaacaagttgaggaattttgccactctgaattccttaactcaaaagggtttaaccaaatgcttatgtttcgtattgctaaatggctacaagtcagtatctaagaccagaattcatttctat

SEQ ID NO: 207686 - DNA, 597 bp, Homo sapiens
ctttttacagcttccagtcaaaccatgaactccagcatcaccaactccagcctgataattacatgtactgaaagagatatccattgaaagactccctcgaccccccctttaaagggactttcatcaggtgctattaattaatccttgtactgttaagttaaagggttttgattcctgggtgcacatatctcatctgaaaaaggcaccaactcctactaattcttaaaatattgatactattatctgacaccatactcaggttaacaaaagccttgtcttcagacccagaagaaaggtagcatgaaaatgatctgcttttgtgagacataagactagaaattaaaactattcaatctctctargctcagtgactactgcaggagagatgggcatgtgagattgtaagggcctgttttgagggatacaattagttcagatgctccaaatcaaggatggcacagagttacctaaacagccaacaagttgaggaattttgccactctgaattccttaactcaaaagggtttaaccaaatgcttatgtttcgtattgctaaatggctacaagtcagtatctaagaccagaattcatttctat

SEQ ID NO: 207687 - DNA, 379 bp, Homo sapiens
taaatagcaaaaaaaaaaaaaaaccaaataacccaattttaaaaaataggtgagggactttaagagatacttctccaaagaaaacatacaaatggccaacaggtgtatgaacatatgctggacatcactaatcatcaggggaatgaaaatcgaagccacaaaaagatatcactttatgcttgttagaatgatcactataaaaacaaaaataacaaaggaraaaataacaaatattggcaaagttgtggaaaaattgaaactcttgagcggtggtggtagaaatgtaaaatggtgttgttgatatgaaaaagagtttgggggggttcctcaaaaaattaaaaatagaaccaccatataacgcagcaatgccacatctcgg

SEQ ID NO: 207688 - DNA, 479 bp, Homo sapiens
tccatatataagatgtcattagacaaacacatgaagatggcaagaaggctgtttggtatatcactgtgggatttcaaagagcattttgcacaattatggtgtttaaagtcacaggagtagatagatgatataacctgtggacattgtgtaggtagatggaaaggagaattgggcccaggattgtgggcagaggattacctaggtgccgaggcaagagactgaaggcacaaactgtttcagtataataaagaaaatagttagaataagaatagtcataatacaaattagatatagagatgatcatgaagaattatcaatcattattatagacattattaatcattagcttttaatattactctttgttgcattactaatataacctaggaataaccggcrggtatagggtcaggtgctgaaaggacattgtgagaagtgacctagaagacaagaggtgagccttctgtcacacccgcaaa

SEQ ID NO: 207689 - DNA, 614 bp, Homo sapiens
atctgatggtatgaagtcacccggaacttgaataaaggaactaggagccagcgtgctacagttgaacagttaaaaagtatagtaggtggaggaaggtgttgatgggaatacgatagaacacatggctatttctactcccatagcaaggaaacaggagaatggagacatagacttgaggtgcaagaagatggcagattctttctttacctgaggagaggcatgtgcaaaaggtagatggaaatgtagtccaaaactaaaaaaaattttgattttgaaatgttaaactaattggtgtgaaaaaaattgtcctaaaaaatagtttattcacatattcactttagcaaaggagagaaattttatgtaacttatttggatacaagactaygatattacagatactcacattttaaatgactccctgcaacttaaaaataagatttaaccttttattcttttaaggacggaagactcttcatattgtggccttgcctacctgctcaatattgcttttctttactctcccgtcacaaatcccactcggtcatttccgaaggacatgatgatacctacatgggtcacattctgtaataagacctgtctttcgaatatgctac

SEQ ID NO: 207690 - DNA, 602 bp, Homo sapiens
attctgtcctatttttccttggaatttgggggctaaatactgagcacctgttggacagttaaaagtgactagcgcagccaccagactacagacacgaatgtcaggctttctgggaaagggctctctaacaacccccaattcttcggagttggcagcattggttcaygtggaaccagcttccacttttcatgtacttctgggctgagctgagggttgacagagaggaaatccattcagctccggggtcccggcaacaagttggttgaccctgtggccatgagtggaactctcaaagtcatgtcgcccaagccagactcgcccatctatcctatctatcctgacccgtgcctcatgggtcctaacacctgtcggacaaacttcctcccaactctcttctctgaggttagtcccacttctaaaaaccactccctgtctctggtgcttttctagtttctcctgtaagaatgacttctagtataaacttcaggactccattaccttctttaggcacccgggttcaccaataggaaagacataatttttgcccaaagccccattgggtggggggactatctggaattttaggattcctcctcagacta

SEQ ID NO: 207691 - DNA, 602 bp, Homo sapiens
attctgtcctatttttccttggaatttgggggctaaatactgagcacctgttggacagttaaaagtgactagcgcagccaccagactacagacacgaatgtcaggctttctgggaaagggctctctaacaacccccaattcttcggagttggcagcattggttcatgtggaaccagcttccacttttcatgtacttctgggctgagctgagggttgacagagaggaaatccattcagctccggggtcccrgcaacaagttggttgaccctgtggccatgagtggaactctcaaagtcatgtcgcccaagccagactcgcccatctatcctatctatcctgacccgtgcctcatgggtcctaacacctgtcggacaaacttcctcccaactctcttctctgaggttagtcccacttctaaaaaccactccctgtctctggtgcttttctagtttctcctgtaagaatgacttctagtataaacttcaggactccattaccttctttaggcacccgggttcaccaataggaaagacataatttttgcccaaagccccattgggtggggggactatctggaattttaggattcctcctcagacta

SEQ ID NO: 207692 - DNA, 602 bp, Homo sapiens
attctgtcctatttttccttggaatttgggggctaaatactgagcacctgttggacagttaaaagtgactagcgcagccaccagactacagacacgaatgtcaggctttctgggaaagggctctctaacaacccccaattcttcggagttggcagcattggttcatgtggaaccagcttccacttttcatgtacttctgggctgagctgagggttgacagagaggaaatccattcagctccggggtcccggcaacaagttggttgaccctgtggccatgagtggaactctcaaagtcatgtcgcccaagccagactcgcccatctatcctatctatcctgacccgtgcctcatgggtcctaacacctgtcggacaaacttcctcccaactctcttctctgaggttagtcccacttctaaaaaccactccctgtctctggtgcttttctagtttctcctgtaagaatgacttctagtataaacttcaggactccattaccttctttaggcacccgggttcaccaayaggaaagacataatttttgcccaaagccccattgggtggggggactatctggaattttaggattcctcctcagacta

SEQ ID NO: 207693 - DNA, 470 bp, Homo sapiens
tatttaaagttaatgtcaacaacacagaattgggcttgcttatttatccattctggccatctctgcatttaactagagtaataatttattcacagttgatgtaattacttatatgtctgaactgaagtataaaatgtcattattggttttattctgtttgttgagtcagtgatcactttgctctcttttctcactttgtttgaattatttaattttgtagaagtctgtcttaatttaccaattagatttttagctacccatgacttttattgtttgcttcagttaaaggattccattataaatcctttaatttccacagtctatttatacctaatattgcaatgcttcatgtaaaacatagaaaatattccaatttgtagtgtttttactcccatcattttttagagtatagttatcaaargcattttatataggtatatatatatatatatccatatgtgtgtttgtat

SEQ ID NO: 207694 - DNA, 623 bp, Homo sapiens
cagtgcccaaacatcaaagctagaaaggaaacatatggtcagtaggggccttgcatgggcttctcccttgctgtagcaagccaaaataatagaaacagttttacattcctagtgccaggacccatcttgggttgacaaaatctgagacaagtcaaggtaaaagaggcagctgtttgaatagatttattggaaagtctaaggcagctctcaggaccaagctataaaagagataagatagaaataatcatattctgttaccacagtagacagggctttaaggtactagggccttttaataggacttagcaagcatttttttttgcctcagaccttccagttcaaacaaaattagttaccagtagacttaggcgaatgctatactgcacataggtacacaaccccaacctatacaagcactaagaaaattgtaacactttgagttggtctggtgggattgtctccagacttctccctgtatccagttacagcaataaatttccttctttcctagttttcttctcattactgggccttgagaaaatgcagccagttctggcttgaccccggaaatagtaagagtactcacatatcactatyttgttagggccagtcactggtttatt

SEQ ID NO: 207695 - DNA, 506 bp, Homo sapiens
aagagagtatggtggggagttcttaaagaatattgttatgattatctgtccttgggaaagaaggaaaataaagcccatgagaaagctggagaatttggtttgtaaagcactctcttcagagggaaaaagcagataaagttttatacatatcatgatttatttccttctgttatttcagaattccacacaaggcttcacaaaacagttgaaccgacagcgacaacaaaaagcctccctgcatataatgaaatggccttagaaattataaagccgattagaaatgctgatacaagaaatgtagggagaagttcttatgttcatcaagtgccattactggcaatgaccttaagtgaggtcgtacttgtatgcagccagccttgggaacaggctgagaccactgctgtgtgcaatctgttgatctaagtgatattaagtgcacacccaatgyactggtttctctcatcgaaagaggtactaaagtaactgaacggtgggtaagccaaggg

SEQ ID NO: 207696 - DNA, 499 bp, Homo sapiens
ttttaattgacatattttgaaaatatagtttacaaaaaagttatgtaaatttatataaaaccgtttcaacaaaatatgattatactagtatgcatacatttgagattaaattcatttatatttagatttttagtatatatgaagaytactcttttaaaataattaaatactgaaatcagttatggaacatatctcaattgttccatgaaaataatttagttctacattgagaaaagcataaataaaatcatctaaaataaaaagtttaaatcttaactatttacaacattaccattttcagaacctgataagcaagacctacataattaatatttagttttaaaatattgctaccatatttaaaaagtaattacaccatttgccaataaatcatataaaaatattctatattttttgttgtccatacttgtctatggtttgttgtccatactcctactgtctatggaagtttacataaacattacaattaaatatgtag

SEQ ID NO: 207697 - DNA, 499 bp, Homo sapiens
ttttaattgacatattttgaaaatatagtttacaaaaaagttatgtaaatttatataaaaccgtttcaacaaaatatgattatactagtatgcatacatttgagattaaattcatttatatttagatttttagtatatatgaagattactcttttaaaataattaaatactgaaatcagttatggaacatatctcaattgttccatgaaaataatttagttctacattgagaaaagcataaataaaatcayctaaaataaaaagtttaaatcttaactatttacaacattaccattttcagaacctgataagcaagacctacataattaatatttagttttaaaatattgctaccatatttaaaaagtaattacaccatttgccaataaatcatataaaaatattctatattttttgttgtccatacttgtctatggtttgttgtccatactcctactgtctatggaagtttacataaacattacaattaaatatgtag

SEQ ID NO: 207698 - DNA, 499 bp, Homo sapiens
ttttaattgacatattttgaaaatatagtttacaaaaaagttatgtaaatttatataaaaccgtttcaacaaaatatgattatactagtatgcatacatttgagattaaattcatttatatttagatttttagtatatatgaagattactcttttaaaataattaaatactgaaatcagttatggaacatatctcaattgttccatgaaaataatttagttctacattgagaaaagcataaataaaatcatctaaaakaaaaagtttaaatcttaactatttacaacattaccattttcagaacctgataagcaagacctacataattaatatttagttttaaaatattgctaccatatttaaaaagtaattacaccatttgccaataaatcatataaaaatattctatattttttgttgtccatacttgtctatggtttgttgtccatactcctactgtctatggaagtttacataaacattacaattaaatatgtag

SEQ ID NO: 207699 - DNA, 439 bp, Homo sapiens
attagctagtactaagagttttattctataggaaaagaattaaggttaagagagattatatgacctgtaaaattcacatagatggcaaaatcatggttgattcctggtaagaacatcaactataggaacaaaagtaatttataagcaaactgatcagcattttattatgatagttaatcacacacagagcatgcttcagtagatgagtatttttcacataacataaatttttataatttatcatacatgatgaagmatccttaaaaataacataaaatcacatcatccctatataaagtccttttcaacatgtgttttagttaaaactactttagttgaggagaggccttatgaatataacaactaaaaatcataaaagactatatttcaaatacaactagcaaaaatcaacatgtattgcttcaaaacaaaatagatt

SEQ ID NO: 207700 - DNA, 594 bp, Homo sapiens
ttttatccaaacccaaactgatggcagtaatcattgattgcattgctatatttaaaatgtgcatcttcaaaatwgcaagtttatttaatagaccattttaactatgaaacatcaaaagcattaaatttctcaagatattttcaaatgtatcaaagaaaattaacttacatgaactcggtccaacatttaagactatcttattgagataaaaaactagagaaatactgaaattttgatcagtgttttgttttgtcataggggttactatgagccagcatttaaatactaattagctgcagtaaaatatttactgaaagaccattcagcatttgagagaacacataccaaaatggaggctacaaataagggggtaaaattcacttctatgtaaaaataatcatggtaaacatgaattgccagtgaaaatcacatgctcttcaagtcagagctactagtttccgaagggcaccatctccactcatgtatttgagtatgcttataacaacgcatgtttctgttaaaagtgcatatattacaaaaatatttttatgaaagagcattcttagcatatatgaggatattttgatcaactaa

SEQ ID NO: 207701 - DNA, 594 bp, Homo sapiens
ttttatccaaacccaaactgatggcagtaatcattgattgcattgctatatttaaaatgtgcatcttcaaaattgcaagtttatttaatagaycattttaactatgaaacatcaaaagcattaaatttctcaagatattttcaaatgtatcaaagaaaattaacttacatgaactcggtccaacatttaagactatcttattgagataaaaaactagagaaatactgaaattttgatcagtgttttgttttgtcataggggttactatgagccagcatttaaatactaattagctgcagtaaaatatttactgaaagaccattcagcatttgagagaacacataccaaaatggaggctacaaataagggggtaaaattcacttctatgtaaaaataatcatggtaaacatgaattgccagtgaaaatcacatgctcttcaagtcagagctactagtttccgaagggcaccatctccactcatgtatttgagtatgcttataacaacgcatgtttctgttaaaagtgcatatattacaaaaatatttttatgaaagagcattcttagcatatatgaggatattttgatcaactaa

SEQ ID NO: 207702 - DNA, 548 bp, Homo sapiens
atgaacaaaatttatattttctagataaattgtgatgacatctttattaagtctagaaaagttcatgaagattgaaataccaatgaaaataattactgatatttcatatgtacataacttaaaatgtaaatgacaatatagtatttatttgattgctaaaattatgtttgaattaaaaaattatgcttaattaaagtgatacatttttatcaacaggtccttatttaggggcaaatatatttccagtgcttcatgggagcctaatgtatgctgtcataacttgattgtgaataaaattatgtggcatttgattcaggaaaggcaaagtgaattagccaaaataatttgaaaaactagtgaggggaawatgtaacacttgaaccaaggaaggcttattaatgcacttttggtgtgaaagttgaagactctatgagctgagtctatatatttgaacccagcaactaactgttataaagattctatcctatttttgctgctacaatattaaccacaacgtggagaatgtttatagcatgtcctgtgcacac

SEQ ID NO: 207703 - DNA, 451 bp, Homo sapiens
ctacatattttcatgctgtattcctgagaaagattaacaggaaaatgggcactatttgtacctgtttggattctctacactaaatctacgtttgcctgagattttggcctacttatctttaaacctggtgatcaagctttaaatgataattagtatcaaaattctctattgccataaatacagatataatattaggaarttaataaaaggaattgaattaaatatttaaagagttttttctgaattcttactgaacaattaaacatatacttcagtaatgaaaataactagatagtaaccagatgaaaacatctaaaatcattctgaatagtcaaattaatgaatgatggttaacataatgataaagatggaatgaattttttcttatgtatatttttaatcagcacaatgatttataatgagcaacactcagagttggctgccccagtgg

SEQ ID NO: 207704 - DNA, 451 bp, Homo sapiens
ctacatattttcatgctgtattcctgagaaagattaacaggaaaatgggcactatttgtacctgtttggattctctacactaaatctacgtttgcctgagattttggcctacttatctttaaacctggtgatcaagctttaaatgataattagtatcaaaattctctattgccataaatacagatataatattaggaagttaataaaaggaattgaattaaatatttaaagagttttttctgaattcttactgaacaattaaacatatacttcagtaatgaaaataactagatagtaaccagatgaaaacatctaaaatcattctgaatagtcaaattaatgaatgatggttaacataatgataaagatggaatgaattttttcttatgtatatttttaatcarcacaatgatttataatgagcaacactcagagttggctgccccagtgg

SEQ ID NO: 207705 - DNA, 516 bp, Homo sapiens
gagcgtattccagtcacttcytccttatttcagtatgttgtactctagcatattttacagtcattcttgaaaactacaagcaagaaagtgggaagaactaggttggtccaaggccacccagtgaactgatctgcaatttgatatttagactacatatggtatatggtatactcattatgtctgtgtttgaatagatattcttagttgtcagcatgacctttgcaataacctgaactttccagtgatcttggtaatattttcacactgtgtttggaaagaattcaagagacttgggatcgactcctggtttaggcattttctgtacggaaatagacaaatcacctgttttctttgggtatcaggtgtttttattttcattattagacaaaacagaaaaaaatgatatgaaataaaagagctcagacaaaaactaatggcagaattagtgtgcctatgcttacacataatggtgtctgaaagtactcgtggataaaacaagcaaactggtagtgacag

SEQ ID NO: 207706 - DNA, 569 bp, Homo sapiens
aagcaagcctcttctgcctatgagcctataaaatcaaaagcaagttagttacttcctagagacaatggaggtacaggcattggataaacacagccattccaaatgggagacattggccaaaacaaaggggttacaggccccatgcaagtccaaaatccaggagggcagtcaaatcttaaagctccaaaatgatctcctttgactccatgtctcacatccaggtcacgctgatgcaagaggagggtacccatggttttaggcagctccaccattgtggttctgcaggatagagcctccctcccagctgctttcatgggttggtgttgagtgtctatggcttctccagsgacacggtgcaagctgtaggtgcaagctgtaggtggatctaccattctgggatctggaggacagtggcccacttctcacagctccactaggcagtgcccagtagggactccgtgtggggtccaaccccacatttcccttccacactgccctgtcagaggttctccatgagaactctgtccctgcagcaaacttgttgccttggacatccagcggtttccaca

SEQ ID NO: 207707 - DNA, 455 bp, Homo sapiens
atagccatatttactcaacaagatacwtatttactcaacaaggtattccaagtgtaatttctagcttgtgaactaagactaacctgattgaactatacatcctaatcagcaagaggattttttgtatgccataaatgagtaatatcttctttttatacatgaatacctgtaagtggcccatccctatcagatgcatgtgagagagaagagtgaacaaataaccatcttttcaaaaaagagacgagagtaggtttctaaaaattaaacataggggcgctttagaaataaaaacagaaagtcacataccaaatcaaacaagaaattccaacaacaggaaatgttcaaacctatgctatccatctaaggaaacaaggtaaggtatattaataaaagttcaagttgaaattatatggtagacaggctcagaaaagaaaaaactccaagaaagcgaatcc

SEQ ID NO: 207708 - DNA, 299 bp, Homo sapiens
atttttctttactctttgctcaggaagggataaatgttttattaaaggattctttgaggcttgtattcttcatctctaaattaatgaaaagaaggaaaagtttttagaattctatatttttaaagtaaatgtacagatataaatgrctagaatttatttagtgcacccaagactcaagcatgttactataacgttgtcctgtattaaataatgcaatccggccgggcgcagtggctcatgcctgtaatcccagcactttgggaggccgaggctggtggaacacctgaggtcgggagttc

SEQ ID NO: 207709 - DNA, 532 bp, Homo sapiens
ctccgggattaggtgctaaaccccaggtttccaggttcttcagcttgagacagatgrcatatcatgggagttctcaccctccgtaatcacacaagccaattccactaataaatttcctccttatctatatatctatctacctatctcctgtgtgtgtgtgtgtgtgagtgtttgtttttttcagaatattgggtaatacaggaactttttcttaaataaaagtaaaatgatgtgaaatttcaaaatatttgtaaaaatgctttctaggcaaaaataatgtgccatttacattaataaaaagggctattgatctgcaatgtctatcattttgctgaagttttaaattattttctaatctactcaagttactattaaactttggagttctctggtttctctagtttaaaaaagttagaattttcttaaaaccagtaacaagatttgcttcttgcgaattatatatatgcaagacagaatccaacctattagattcaaattaccctttgcagtcagataatacatttaacttgcc

SEQ ID NO: 207710 - DNA, 559 bp, Homo sapiens
aagaaacactggcaaaaggattaatagttggcatttaaaaaaatagtcccaaatttttttaaaaagtggatacatggatagwagaaaatatacaaatattatgttttgacatagaagaatcaatataataaaaaaggaagataagagaaacaaaaaagcagattaatctcattttctgatatatagaaaataaatggcaaatagtgcaattaaatattgataatcaggtattaaaagactaattgagaaaatagggacttaagggcaattttaaaagccgtaagaacagaggttacaactggaatgaaaatagaaactttcttaaatgttgatgtaactttaaaattacagaagaaagcacatgacatagagaaataaagattaaatcatgtataataagcatagtaagtataatgtaaactaatgtaaaatttaagacacaatatatcagcttatctacatatgttaatgaatctaactcatttattgaaagaaaaagaaatctaatcataagatagatcaattgatcatttaatagatcaattcaaaaggaaatgaa

SEQ ID NO: 207711 - DNA, 559 bp, Homo sapiens
aagaaacactggcaaaaggattaatagttggcatttaaaaaaatagtcccaaatttttttaaaaagtggatacatggatagaagaaaatatacaaatattatgttttgacatagaagaatcaatataataaaaaaggaagataagagaaacaaaaaagcagattaatctcattttctgatatatagaaaataaatggcaaatagtgcaattaaatattgataatcaggtattaaaagactaattgagaaaataggracttaagggcaattttaaaagccgtaagaacagaggttacaactggaatgaaaatagaaactttcttaaatgttgatgtaactttaaaattacagaagaaagcacatgacatagagaaataaagattaaatcatgtataataagcatagtaagtataatgtaaactaatgtaaaatttaagacacaatatatcagcttatctacatatgttaatgaatctaactcatttattgaaagaaaaagaaatctaatcataagatagatcaattgatcatttaatagatcaattcaaaaggaaatgaa

SEQ ID NO: 207712 - DNA, 559 bp, Homo sapiens
aagaaacactggcaaaaggattaatagttggcatttaaaaaaatagtcccaaatttttttaaaaagtggatacatggatagaagaaaatatacaaatattatgttttgacatagaagaatcaatataataaaaaaggaagataagagaaacaaaaaagcagattaatctcattttctgatatatagaaaataaatggcaaatagtgcaattaaatattgataatcaggtattaaaagactaattgagaaaatagggacttaagggcaattttaaaagccgtaagaacagaggttacaactggaatgaaaatagaaactttcttaaatgttgatgtaactttaaaattacagaagaaagcacatgacatagagaaakaaagattaaatcatgtataataagcatagtaagtataatgtaaactaatgtaaaatttaagacacaatatatcagcttatctacatatgttaatgaatctaactcatttattgaaagaaaaagaaatctaatcataagatagatcaattgatcatttaatagatcaattcaaaaggaaatgaa

SEQ ID NO: 207713 - DNA, 611 bp, Homo sapiens
atgtgttttctatgtaaaaagtaggcatttagattaagatggcattctagactcacatgtgattcacttatccttgttgagaaactaacactgtgtagaagtgaaaaaaaatagatcaaagaaaaataaaatacagaattcaggagagggtgagacaaaaaaaaagaggtgacgtaaaattctggaaaggaggtgaagaagaggagtgagaggacacaaatgaaaatggaagcagaaacttatgacagcaacaagggggagccttcatacatctggtttaataaatacatcagcaaagaggacatatggacacaatccaggacagcaaaaataaatcaacatcacaacttattttatgaggccagcatcatcctgataccaaagcctggcagaaacacaacaataaaagagaattttagaccaatatccctgaatatcgatgaaaaaatcctcaataaaatactggcaaactgaatccagcagcacatcaaaaagcttatccaccatgatcaagtgcgcttcatccctgggatgcaaggctagttcaacataygcaaatcactaaatgtaatccagtgtataaacagaaccaaagacaaaaaccacatgat

SEQ ID NO: 207714 - DNA, 497 bp, Homo sapiens
tatacgattggctaagccaaaagctctgctgggagagtttaactgttttgcttgggctataattggccatctgttattgatctttaccgcactgagtcatccacgtgggctatggctaatgatagaattacttcactaaatacgcagttttcattctartttttagatacatactgtataaggaataaaaaacaggctttattattggttagtgttgatactgtatgtctataaaattattcaatcatattaaaagtctgtgttttgaattcatgtgcatgtatgtatgtgtatataagtattatatatgtgtgtgtgtatgtgtgtgtgtatgaagatgtggatgtggaggttaaatttctttttaaataataattatttatttgtacagtttttaatagttggaaaacaccatcaaaaaagcaaatagcaagtttttatgaaaatagacttttgtcacaatctgctctgaactttgctgaagtttcaaataataa

SEQ ID NO: 207715 - DNA, 497 bp, Homo sapiens
tatacgattggctaagccaaaagctctgctgggagagtttaactgttttgcttgggctataattggccatctgttattgatctttaccgcactgagtcatccacgtgggctatggctaatgatagaattacttcactaaatacgcagttttcattctagtttttagatacatactgtataaggaataaaaaacaggctttattattggttagtgttgatactgtatgtctataaaattattcaatcatattaaaagtctgtgttttgaattcatgtgcatgtatgtatgtgtatataagtattatatatgtgtgtgtktatgtgtgtgtgtatgaagatgtggatgtggaggttaaatttctttttaaataataattatttatttgtacagtttttaatagttggaaaacaccatcaaaaaagcaaatagcaagtttttatgaaaatagacttttgtcacaatctgctctgaactttgctgaagtttcaaataataa

SEQ ID NO: 207716 - DNA, 497 bp, Homo sapiens
tatacgattggctaagccaaaagctctgctgggagagtttaactgttttgcttgggctataattggccatctgttattgatctttaccgcactgagtcatccacgtgggctatggctaatgatagaattacttcactaaatacgcagttttcattctagtttttagatacatactgtataaggaataaaaaacaggctttattattggttagtgttgatactgtatgtctataaaattattcaatcatattaaaagtctgtgttttgaattcatgtgcatgtatgtatgtgtatataagtattatatatgtgtgtgtgtatgtgtgtgtgtatgaagatgtggatgtggaggttaaatttctttttaaataataattatttatttgtacagtttttartagttggaaaacaccatcaaaaaagcaaatagcaagtttttatgaaaatagacttttgtcacaatctgctctgaactttgctgaagtttcaaataataa

SEQ ID NO: 207717 - DNA, 609 bp, Homo sapiens
aacttgcatatcaattttccatgatagcatttagcaaattatttttgacttgttttcctctacattattttaaaatttacattctattttaaaataaataaggtgagaaggcttgatttaagagaatatagaaagtgtggatggtattcttgaccaaaagaacgtcatgaatgagatgggctgttctagactgcatgggaccctaccagtgatgaagataggactataggctgtcatstggttatttgttccatgccaagcagctttgctttgatctctatcatatattggctgctgcacgcaattccacttggggaaaacaaaaaacaccactgaattctcccattggcttaggagttaatctgcattccatgaaggactcctagacttcatgcagaatttggaagggtcaaattttttattctgttgacctaatgcttcgtatttttgaaaatcttattctttggctctttacttcctgtggttttgattactttcatgtttagtaaatatgactttttttttcttctaatgataaattcttttctttaaatagaaaaaaattataatactaacaagcaaggtattgtagcagttaaaagacaaaaa

SEQ ID NO: 207718 - DNA, 609 bp, Homo sapiens
aacttgcatatcaattttccatgatagcatttagcaaattatttttgacttgttttcctctacattattttaaaatttacattctattttaaaataaataaggtgagaaggcttgatttaagagaatatagaaagtgtggatggtattcttgaccaaaagaacgtcatgaatgagatgggctgttctagactgcatgggaccctaccagtgatgaagataggactataggctgtcatctggttatttgttccatgccaagcagctttgctttgatctctatcatatattggctgctgcacgcaattccacttggggaaaacaaaaaacaccactgaattctcccattggcttaggagttaatctgcattccatgaaggactcctagacttcatgcagaatttggaagggtcaaattttttattctgttgayctaatgcttcgtatttttgaaaatcttattctttggctctttacttcctgtggttttgattactttcatgtttagtaaatatgactttttttttcttctaatgataaattcttttctttaaatagaaaaaaattataatactaacaagcaaggtattgtagcagttaaaagacaaaaa

SEQ ID NO: 207719 - DNA, 595 bp, Homo sapiens
catatattatgcattgactccatctttcacaatgatcttactgtccctgggctattgcccaaacatgggtgggctaagaagaaaggctcactgaaagttacagtatttgtcattgttgcaggcattgacatgaaaaataaagatccacatattgacatgctttgtgcccactcccacgggtctttcctttgagctatgaattgttacttttcaatttycttctcttgtctttccaggtccagactaacggaccaaacactttacttctgccgtagagtccaggtatacccatatatctatgtctacttctctctcataggaagtgacagctaagtaactgcacacagctttgcccattggaatgatgccccttataactgtactttaataccactcatttctggagttgcaatgaggcagcaatcctctttcacctgtcacaaacatattgcaataatccatctgtgagtcaggctgaggtttatcctactccgtcagttgggaaccccatgaaaccataaccatgagatgaagataggtcatttgtactaagagataggggacatagacatcagggtcacttgttcatgcagct

SEQ ID NO: 207720 - DNA, 595 bp, Homo sapiens
catatattatgcattgactccatctttcacaatgatcttactgtccctgggctattgcccaaacatgggtgggctaagaagaaaggctcactgaaagttacagtatttgtcattgttgcaggcattgacatgaaaaataaagatccacatattgacatgctttgtgcccactcccacgggtctttcctttgagctatgaattgttacttttcaattttcttctcttgtctttccaggtccagactaacggaccaaacactttacttctgccgtagagtccaggtatacccatayatctatgtctacttctctctcataggaagtgacagctaagtaactgcacacagctttgcccattggaatgatgccccttataactgtactttaataccactcatttctggagttgcaatgaggcagcaatcctctttcacctgtcacaaacatattgcaataatccatctgtgagtcaggctgaggtttatcctactccgtcagttgggaaccccatgaaaccataaccatgagatgaagataggtcatttgtactaagagataggggacatagacatcagggtcacttgttcatgcagct

SEQ ID NO: 207721 - DNA, 507 bp, Homo sapiens
atttctggagttgcaatgaggcagcaatcctctttcacctgtcacaaacatattgcaataatccatctgtgartcaggctgaggtttatcctactccgtcagttgggaaccccatgaaaccataaccatgagatgaagataggtcatttgtactaagagataggggacatagacatcagggtcacttgttcatgcagcttaagcatgttgtctgatattcttgaaagaaatctttctactgtgtcatgcaaatttcacaatagatccatccattctattatgccaaaataaacataataaaacagacctaaaaaacggacaatcccagtcatgcagccatttggtttttcctggcaggaaacatagtcctcattaggatcatagcaccccctatcaatgcattccttactgctttatattaaacagaaaattatttaggctattctgaggaagaagactcatggtgggttcttagctcttaaggattaattctatttttttattcta

SEQ ID NO: 207722 - DNA, 507 bp, Homo sapiens
atttctggagttgcaatgaggcagcaatcctctttcacctgtcacaaacatattgcaataatccatctgtgagtcaggctgaggtttatcctactccgtcagttgggaaccccatgaaaccataaccatgagatgaagataggtcatttgtactaagagataggggacatagacatcagggtcacttgttcatgcagcttaagcatgttgtctgatattcttgaaagaaatctttctactgtgtcatgcaaatttcacaatagatccatccattctattatgccaaaataaacataataaaacagacctaaaaaacggacaatcccagtcatgcagccatttggtttttcctggcaggaaacatagtcctcattaggatcwtagcaccccctatcaatgcattccttactgctttatattaaacagaaaattatttaggctattctgaggaagaagactcatggtgggttcttagctcttaaggattaattctatttttttattcta

SEQ ID NO: 207723 - DNA, 500 bp, Homo sapiens
tttctcctttcagtgattgtcagacatggatccattgtcagacttcatgtccattaaatcaacaaatgagatgtactttaatcaattgcctacatcattgaattaagcagagcatctcctgtgaggacctgccagcctgttagattcakctctaactaaaattttacttactttgtcctgctaaatcaatcactcagaaaatatatgtgcattttattttatgttcctttttcttctagccaattttctggatggagatttctggttttttatgttttgctgtagtttatgctttttgggtcataataacaccagtggacatatgtctggggtcatgtaacatcaagacagaatgaaaatgaaaagcactttagaggagatgggtagaaactgtcagaaacgtctaacttatttgattcctccaaatatttattctttgatatccagactcctcttatttgtaaacagagaagccgaaagcagtagaaaattcataaagt

SEQ ID NO: 207724 - DNA, 565 bp, Homo sapiens
caagtagtgaagatagagatgaagagaatgaagaactgaataaattgcaggcattacaggaaaaaagaataaatgaagaagaggaaaagaaaaaagaaaaaatcaaattgaaaaaaaagaaaaaggtcttatccagttccactgaagaggacacttcaaaacaaaagaaacgaagatatcagaagaaagaaaagaaaaaaagagtaaatcaataaagggaaacatcacaaaaaggaaagaacaaggagaraaaaaaaaaagcattcttctacccctaaaagttctgaattctccagaaagtaactgagactttgcttaagccattaaatttaaaaatttgtttttaaaacatgtttgccttgccttggaatttgctatatattatgttttgcaataaatcacagccttttccatacagacattttttgtatgtgggaccattatccctctggtaatatatttttaatatgctatgactgtaaagtattaaatcagtcttgttacttgatagtgatgccccaagtatagctatttgtatgtactaaacacatcatttttggtatat

SEQ ID NO: 207725 - DNA, 551 bp, Homo sapiens
acgccattagggtgtgccctccttagaatgtcagcggtccttataaaaggggaaaaatgtggctacaggcatacacacatggagtgagagcatcatataaagataggagttatgccgtcacaagtcaaggaattaccaggagctatgagggagtcttggaacaggatgttcagaggaagcacagacctggcaacataatgatttaagactttcgacctccaggagtgtaagaaaataaactcccgatgctctcagatacccagtttgtggcaccttcttacagcagaccaacacaatgatataccttccttgtccccacgaaatattgtttttgtgtctgagatttcttattttctttttttccccaattctattaagatgaatatttttaaaagattacataatgcaaaactgtgcatgttctgacatctgtcttccactgcagctttatctcataatcttaygtgtctacctccttgctttcttctccagccataatctctttcctatcaccatcatcattataagagttaaagaaagaagagagaaac

SEQ ID NO: 207726 - DNA, 597 bp, Homo sapiens
cttttggtgttcaggtcatcatatatataaatagaggaatatagaaaccattttttcygctgaattacaaaatagtcaattccatagtagtaaaagagtcaactcttgatttcctgatgtagcttcacaatgctgtagcagaaatggaacaggaaaagtttgatcttcaaaagcaacacactgaaaacattcaagaattgcttgaggatacaaatgtgcgtctgaataaaatggagagtgaatacatggcgcaaacacagtccacagtgagtctttaaacctgttcttgacatcttagaacctgtcttctcaatttccatgtcctcatgtttccctgatgtgcacagtgtagaaagaagtgtgttacagaatcaaaagaaaaactttaccttcctactccatacagatttatgtgtggccatggacagacccttgaagtctgtgagggatttgactctagtgtgtttaatgctgctttttatttattattattattatttttacttttattttttgagacggagtctcaccctgtcacccaggctggagtgcaacgcatggccttggctcactgcaacctccgcctcctgggttcaa

SEQ ID NO: 207727 - DNA, 597 bp, Homo sapiens
cttttggtgttcaggtcatcatatatataaatagaggaatatagaaaccattttttccgctgaattacaaaatagtcaattccatagtagtaaaagagtcaactcttgatttcctgatgtagcttcacaatgctgtagcagaaatggaacaggaaaagtttgatcttcaaaagcaacacactgaaaacattcaagaattgcttgaggatacaaatgtgcgtctgaataaaatggagagtgaatacatggcgcaaacacagtccacagtgagtctttaaacctgttcttgacatcttagaacctgtcttctcaatttccatgtcctcatgtttccctgatgtgcacagtgtagaaagaagtgtgttacagaatcaaaagaaaaacttyaccttcctactccatacagatttatgtgtggccatggacagacccttgaagtctgtgagggatttgactctagtgtgtttaatgctgctttttatttattattattattatttttacttttattttttgagacggagtctcaccctgtcacccaggctggagtgcaacgcatggccttggctcactgcaacctccgcctcctgggttcaa

SEQ ID NO: 207728 - DNA, 407 bp, Homo sapiens
aagaccatccagggtaacatggtgagaccatgtctcttaaaaaaaaaaaaaattagctaggcccggkggggtgtgcttgtagtcccagttagttgggaggctgaggcaggaggattacttgagcccattaggtcaaggttgcagtgaggtgtgattgtgctactggatgccagcttgggcaatggatccaaaaaaaagaaaaaattaacacatttgtttgatgaagagtggaaaattgtttgggcctccattcccttccatggaaataataggaatagggtaaagaaaaaggtgtaagccctgatggacaaagagaataagagagcaatacaatttttggagttggaaaggcaatggatttgttgaaattgatctagcaggctcaagaaagcataaccctaaatcag

SEQ ID NO: 207729 - DNA, 458 bp, Homo sapiens
ccctttgtctatttttaaattgagttattcttttccttgatttataggaacattttatatatttaggatacaaataaatcatcacattctttttcgtcattctttttttattgaatagacgtaacatgaaatttaccattttaataattataagtatatagttcagtggcattaagtacatttacaytgtagtgcaactatcactaccatccagctccaaattttgtcatctttcctaatactttgtacccagtaaacaataattctccatttgccgtctttattcagttcctcacttttagtctcttacgaatttgaccattctaggaaactcatgtaagtggaattatgcagtatttgtccttcagtgactggcgtatttcacttcgcataatgtcattatggtccattcatgttgtggcttgtgtcaaaattcctttttaaaggctaaataataa

SEQ ID NO: 207730 - DNA, 596 bp, Homo sapiens
ttttaagaacaagctgattgtcatttttttcatttatatatatcattttcatttatatatttttcattcatatatacacacacatgcaaataaaaatattaagatatgcatagagagttttattatttatgttatatgtatataacatgaaagggataccagcttgagcctgagctgtgttcaccttagaactcaagcctacatgtcatgtttagacgactggtaggcaagtttcacttggaaactccttacctgagaaccaaggaacctcctagaaattaagtcatcctggctgagcatggtggctcatgcctgtaatcccagcacttcgggaggctgaggcaggtggatcatgaggtcaggagttcaagaccagcctggccaatatggtgaaaccccgtctctactaaaaatacaaaaattagcaggtgyggtggcagacgcctgtgatcccagctactcaggaggctgaggcaggagaaccgcttgaacccaggaggtggaggttgcagtgagccaagatcacgccactgcactctagcctgggtaacagagtgagactctatctcgaaaaaaaaaagaaaaagtaagtcatc

SEQ ID NO: 207731 - DNA, 491 bp, Homo sapiens
tttctcatctcatcacctctgagcctgccagggtgagagcagcctttcccagcatcgtcctttaagatgcracagaaacaggtcccacctgagccagcaggaatgcggcacccagtggctggctctgcagtcttgatgctcgccggcaccttcagggtgaaggacgccctgtcgtaaacgcatgaagagccctgcgtttcatatattgatgttgttgctttttctttagaggaacgtttgtgcactgtgggaacctctgtctctaccagtgtcacccttgctgtggggagtgtgtaccgtgtgcgggggctggtggcctttctctgctgtctgccacagtttgtgaggggctcgctgagcctcatacctgagcctccccctccccaccccctcctgccccagggaggcccagaaccagggaggagaggtgctgggagtgagtgccgaggagctggggtcctggccctgcagccactgtcacagcacagccc

SEQ ID NO: 207732 - DNA, 491 bp, Homo sapiens
tttctcatctcatcacctctgagcctgccagggtgagagcagcctttcccagcatcgtcctttaagatgcgacagaaacaggtcccacctgagccagcaggaatgcggcacccagtggctggctctgcagtcttgatgctcgccggcaccttcagggtgaaggacgccctgtcgtaaacgcatgaagagccctgcgtttcatatattgatgttgttgctttttctttagaggaacgtttgtgcactgtgggaacctctgtctctaccagtgtcacccttgctgtggggagtgtgtaccgtgtgcgggggctggtggcctttctctgctgtctgccacagyttgtgaggggctcgctgagcctcatacctgagcctccccctccccaccccctcctgccccagggaggcccagaaccagggaggagaggtgctgggagtgagtgccgaggagctggggtcctggccctgcagccactgtcacagcacagccc

SEQ ID NO: 207733 - DNA, 491 bp, Homo sapiens
tttctcatctcatcacctctgagcctgccagggtgagagcagcctttcccagcatcgtcctttaagatgcgacagaaacaggtcccacctgagccagcaggaatgcggcacccagtggctggctctgcagtcttgatgctcgccggcaccttcagggtgaaggacgccctgtcgtaaacgcatgaagagccctgcgtttcatatattgatgttgttgctttttctttagaggaacgtttgtgcactgtgggaacctctgtctctaccagtgtcacccttgctgtggggagtgtgtaccgtgtgcgggggctggtggcctttctctgctgtctgccacagtktgtgaggggctcgctgagcctcatacctgagcctccccctccccaccccctcctgccccagggaggcccagaaccagggaggagaggtgctgggagtgagtgccgaggagctggggtcctggccctgcagccactgtcacagcacagccc

SEQ ID NO: 207734 - DNA, 515 bp, Homo sapiens
aggggatgattcttggaatgatgagtattagtttccacatgcctgagtttaggttctggatttaaaaccttattgtaagatcatctctttgaaccttctctctaattgtggggtyttatggtttgggggaaattttacttatttttgttgttggttttttggtttttggttttttgagacagggtctccctctattgaccaggctggagtgcagaggctggagtgctgtggggcgatcagggctcactgaggcctgcacctccctggctgaagagatcctcccacttcagcctccccactaggtgggaatacaagcgagtgccaccatatccagctagttttaaaaattttttgtagtgatggggtcttactatgttgccaggcttgtctcaagctcctgggctcaagtgatcctcccgtctcagcctcccaaagtgttaggattataggtatgagccaccatgcccggccgatttgtttttttaacagatagaaaatcatttgagggggaaact

SEQ ID NO: 207735 - DNA, 559 bp, Homo sapiens
cttaagtttatttgagtcctcatgtgtcaggtgaatctcttgaagacagcagatacttggctggtgaacttttagccaatctgccattccatatcttttaatggagcatttagcccatttgcattcaatgttactgttgagatgtgaggtattattgtgttgttgttttataggccctgtgagatttatgctttaagaaggttctattttggtgtattttgaggtttcatttgaaaattagaaactctttttagcaactcttgtagtgctggctaggtaatggcaaattctctcagcatttrtttgtctgaaaaaaagaaaaaaaactttatctcctcttcattcatgaagcttagtttgctgggtacaaaattcttggctgacaattattttctttcaggaggctaaagataaaatcctaatcccttctcacttataaagcttctgctgagaaatctgctgttagtctgatagattttctttcatagattacctgatgatatttgtctcacaggttttaagattctttccttcaccttgactttagataacctgatga

SEQ ID NO: 207736 - DNA, 559 bp, Homo sapiens
cttaagtttatttgagtcctcatgtgtcaggtgaatctcttgaagacagcagatacttggctggtgaacttttagccaatctgccattccatatcttttaatggagcatttagcccatttgcattcaatgttactgttgagatgtgaggtattattgtgttgttgttttataggccctgtgagatttatgctttaagaaggttctattttggtgtattttgaggtttcatttgaaaattagaaactctttttagcaactcttgtagtgctggctaggtaatggcaaattctctcagcatttgtttgtctgaaaaaaagaaraaaaactttatctcctcttcattcatgaagcttagtttgctgggtacaaaattcttggctgacaattattttctttcaggaggctaaagataaaatcctaatcccttctcacttataaagcttctgctgagaaatctgctgttagtctgatagattttctttcatagattacctgatgatatttgtctcacaggttttaagattctttccttcaccttgactttagataacctgatga

SEQ ID NO: 207737 - DNA, 564 bp, Homo sapiens
tcttttttctttgcatctatttacattctagatgggtgagaaatatttttatgtatatatgtggataggtacatatatatgtatgtatgtgtttatgtgtaggtaggcatgcatatatgcatttatgtatttatgtatgcatgtagaactctatgtgtgcatttaaaaatatagattargcattcactttagggaaaagaagacatagaagttgtttatctggaaacattctcttcaaatgatctgtgcctgcatatttccttggaaatgattcaggtacagcagaggtaacattatttaacctaatttgaaatttaatgcccctagttatatgtaggagtccccatttattcacagaggatactttccaagatccccagtggatgcctgaaaccacggatagaactgaatcctatatacgtaaaaatttcttttttcttcttcacaattttatggatagaagattcattctaaccatagatcttagcagcctcagcatacatttatttatttatgtttttactaagtcaaaaatttcaccttgtcctctctaggaagcacttt

SEQ ID NO: 207738 - DNA, 621 bp, Homo sapiens
caatgataggaaagcataattgttactcaaattaagaaggatgtaccaaaataaaaatcaacacattatttccttcactgagaatttcttggtaagaaaaaatatcagttgaactatataatgtggcaaatggcaaagtaaaaacagttattcatacaaaacccaatgtgttacatttgagatgatctccttattccatgttaatatgaaagcctattataaagctcagtccagaaaagttatttaaaatgttttaattatatgaagaactcttattgagtatgtatattagtccatattcacactgctgataaagacatgcctgagactgggtaacttattaaaaaagaggttttattgactcataattccacatggctggggaggcctcacaatcatggcggaagggcaaggagcatcttacagggcggcaagcaagagagagcttgtacaggggaatttccctttctaaaaccatcagatctcatgaggcttattcactatcacaggaayagcaggagaaagaccaatccccatgattcaattatccaccactgggtccctcccatgacacatgggaattttgggagctacaattcaaggtgagatttggctgaggac

SEQ ID NO: 207739 - DNA, 342 bp, Homo sapiens
gatctcccatctccttggctgcaacacccaattaaagccttctttcttggcaatactcattgtctcagtaactggctttctccgcggtgagcagcaggacctagacggaacctctggtgtttccataacaattagattactattgaccaatttaatcaagctgacattcgttgaacattccayctaacaacaacagaatatatattgttatcaattgcaggtggaacaatcatcaaggtagaaaatattctgggttataaaacaaatctcaataaatttgaatgattcagttcttacaaatattttatctgactccaactaaattcattagaaaccaataac

SEQ ID NO: 207740 - DNA, 586 bp, Homo sapiens
taaagggaatttaaaacaaattttagcaatctaaatattaaagggaaatttttaagtgacatatatcttcagcaaaaagctacagtgcaaarcacatttattattttttactttttacttttgaagacaatgtttcttctggtaccaaggaccaaggaacatagcacatttaaaggtccaatctaaaaaatccttataaatgcaacaagacatgtgagatagctgtagtagaggagaaagataaactatccatatatgcagatgatatgattgtttatataaatcaccaaaaaaagagacaatatagtttttttttaataagagtattgtaaggtttctcgatgcaagataaaaaaattgttaacaaatttattcttgaaaaaagacaactctacatatcacaggtgcccctttcctcccccatttagtagtttaccaagaaactatttcatcaggtttagttaccttcttcctaagcagctaagctccttcttcctaaaaggccatgtccttgatggagtttccatttcttcccttttgtttgtagaactattaggtggacagctcttccagggagggggggtat

SEQ ID NO: 207741 - DNA, 586 bp, Homo sapiens
taaagggaatttaaaacaaattttagcaatctaaatattaaagggaaatttttaagtgacatatatcttcagcaaaaagctacagtgcaaagcacatttattattttttactttttacttttgaagacaatgtttcttctggtaccaaggaccaaggaacatagcacatttaaaggtccaatctaaaaaatccttataaatgcaacaagacatgtgagatagctgtagtagaggagaaagataaactatccatatatgcagatgatatgattgtttatataaatcaccaaaaaaagagacaatatagtttttttttaataagagtattgtaaggtttctcgatgcaagataaaaaaattgttaacaaatttattcttgaaaaaagacaactctacatatcacaggtgyccctttcctcccccatttagtagtttaccaagaaactatttcatcaggtttagttaccttcttcctaagcagctaagctccttcttcctaaaaggccatgtccttgatggagtttccatttcttcccttttgtttgtagaactattaggtggacagctcttccagggagggggggtat

SEQ ID NO: 207742 - DNA, 586 bp, Homo sapiens
taaagggaatttaaaacaaattttagcaatctaaatattaaagggaaatttttaagtgacatatatcttcagcaaaaagctacagtgcaaagcacatttattattttttactttttacttttgaagacaatgtttcttctggtaccaaggaccaaggaacatagcacatttaaaggtccaatctaaaaaatccttataaatgcaacaagacatgtgagatagctgtagtagaggagaaagataaactatccatatatgcagatgatatgattgtttatataaatcaccaaaaaaagagacaatatagtttttttttaataagagtattgtaaggtttctcgatgcaagataaaaaaattgttaacaaatttattcttgaaaaaagacaactctacatatcacaggtgcccctttcctcccccatttagtagtttaccaagaaactatttcatcaggtttagttaccttcttcctaagsagctaagctccttcttcctaaaaggccatgtccttgatggagtttccatttcttcccttttgtttgtagaactattaggtggacagctcttccagggagggggggtat

SEQ ID NO: 207743 - DNA, 586 bp, Homo sapiens
taaagggaatttaaaacaaattttagcaatctaaatattaaagggaaatttttaagtgacatatatcttcagcaaaaagctacagtgcaaagcacatttattattttttactttttacttttgaagacaatgtttcttctggtaccaaggaccaaggaacatagcacatttaaaggtccaatctaaaaaatccttataaatgcaacaagacatgtgagatagctgtagtagaggagaaagataaactatccatatatgcagatgatatgattgtttatataaatcaccaaaaaaagagacaatatagtttttttttaataagagtattgtaaggtttctcgatgcaagataaaaaaattgttaacaaatttattcttgaaaaaagacaactctacatatcacaggtgcccctttcctcccccatttagtagtttaccaagaaactatttcatcaggtttagttaccttcttcctaagcagctaagctccttcttcctaaaaggccatgtccttgatggagtttccrtttcttcccttttgtttgtagaactattaggtggacagctcttccagggagggggggtat

SEQ ID NO: 207744 - DNA, 345 bp, Homo sapiens
tgaaattcttggtgttcaaactaatgaacaaacagacaaacaaaaaacccgcaagtgaatcgttcaattttatgttgaagcaaacacactgtgggtcttccaattagaaatctttacccttttaagatttctgactatttatctttttaaaaaattactttctattattattattaatttcaacttttattttagatacagrgggtgcagatttgttacatggaaatactgtgtgatgctgggatttggagtacagatcacgtaaccctggtagtgagcagagtaccaaatagataggtttctttttttaacccacacccccttcctccacccttcagtagtcaa

SEQ ID NO: 207745 - DNA, 589 bp, Homo sapiens
gctgacagtgatatagacaatgaagtcctcatcagatggggatctggtactattgtggactgaagcaaaggtgagtcttgctatgctttagctaagagactggtggcattttctccctgtcctagagatctggggaactttaaacttgagagagatgatttagggtatctggtggaagaaatatctaagcagcaaagcattcaagaggtgcccttgcttttacaaagcgatgatatgaaattggacctcatgtttaaaagggaagtagagtgtaaaagtttggaaactttgcagmctgaccatggtagaaaagaaaaacccattttctcagaggaaattcaagcaggctgcagaaatttgcataaataatgaggagccaatgttaatcatcactgacaatggggaaaatgtctccagggcatttcagagatcttcaaggcagcccctttcatcacaggcccagaggcctaggaggaaaaaatagtttttgtgggtcaggctcagagccccactgctctgtgcagccttgggatttggtgctctgtgtcccagctgaaagctccagccatggctataagaggccaacaca

SEQ ID NO: 207746 - DNA, 589 bp, Homo sapiens
gctgacagtgatatagacaatgaagtcctcatcagatggggatctggtactattgtggactgaagcaaaggtgagtcttgctatgctttagctaagagactggtggcattttctccctgtcctagagatctggggaactttaaacttgagagagatgatttagggtatctggtggaagaaatatctaagcagcaaagcattcaagaggtgcccttgcttttacaaagcgatgatatgaaattggacctcatgtttaaaagggaagtagagtgtaaaagtttggaaactttgcagactgaccatggtagaaaagaaaarcccattttctcagaggaaattcaagcaggctgcagaaatttgcataaataatgaggagccaatgttaatcatcactgacaatggggaaaatgtctccagggcatttcagagatcttcaaggcagcccctttcatcacaggcccagaggcctaggaggaaaaaatagtttttgtgggtcaggctcagagccccactgctctgtgcagccttgggatttggtgctctgtgtcccagctgaaagctccagccatggctataagaggccaacaca

SEQ ID NO: 207747 - DNA, 589 bp, Homo sapiens
gctgacagtgatatagacaatgaagtcctcatcagatggggatctggtactattgtggactgaagcaaaggtgagtcttgctatgctttagctaagagactggtggcattttctccctgtcctagagatctggggaactttaaacttgagagagatgatttagggtatctggtggaagaaatatctaagcagcaaagcattcaagaggtgcccttgcttttacaaagcgatgatatgaaattggacctcatgtttaaaagggaagtagagtgtaaaagtttggaaactttgcagactgaccatggtagaaaagaaaaacccattttctcagaggaaattcaagcaggctrcagaaatttgcataaataatgaggagccaatgttaatcatcactgacaatggggaaaatgtctccagggcatttcagagatcttcaaggcagcccctttcatcacaggcccagaggcctaggaggaaaaaatagtttttgtgggtcaggctcagagccccactgctctgtgcagccttgggatttggtgctctgtgtcccagctgaaagctccagccatggctataagaggccaacaca

SEQ ID NO: 207748 - DNA, 585 bp, Homo sapiens
aatcactcatactcacaaaatggcaagaataattcagggtacacattttaatcagttcacttttttttttttttwaaaaagaatcattattaactttgcagtggtgtatttcactggttccttttataattaaaaactttttcccctcaaattccctttccagcaagcagcctgttgcctgaagttttactccttcattaccagttaaaacaaaatcaccaattaggcacatgaacacgtctgtattaatctcattaaggtgatagcaccaaataaattggaactatttttgtgcttttactgtgttcctatggctttatcaggccctgtggtcatatacaaagacctcgcagcttagtcatttagagtcattcggttgtggactgaatgtggcattaccatctatggctgaaaattgctttcagcttttcaactgcactgactagtctgtagttaatcttagatcattcactcgcaaaattaaatgagccagaacgatggtcttttttttatataaaataatacatcacaaaacacttatttgccctgcccaaaagagagatcaaattcatttaaaatcccata

SEQ ID NO: 207749 - DNA, 275 bp, Homo sapiens
ttgcatgcttaagaattgtgtatttcactacagtcatgtgtcccttaatgacagggatgcattctgagaaatacatcattaggtgattttgtcattgcgcaaacatcctagagtgtacttacasaaacctagatggtatagcctactgcactcctagactatatggtatagcctgttgcttctagactacaaatctgtacatcatgttactgtagtgagtactctatgcaattgtaacacagtgataagtatttgtttatgtaaacatatctaac

SEQ ID NO: 207750 - DNA, 483 bp, Homo sapiens
tccacaatgtatacatacatcaaaacatcatayggtataccatatgtatatataatttttaactgttgataaaaaaataaaaatttgaacaaatatatattttatctttcaaagaagattcagaatttaaaatattaaatttaaaatatagaaatgttagtctaagtttggattttctaatacaaaatattgctgcttaacactaaagagtaggtaaaaatactagtttaatttttttatcatttccaaaagattttagtattctttaaaatagtctcacttatcttaattgttcattaaagatctataatccattatgtatatgtatattgaaaggaaaagacctagttttgggcctttattttggaaaatctatgactctttgactctgttttctcatctataaaatggacttttgagaacattcaactaacttgcaattatggtgagaattaatatgtgaaagaaagtgctcagcttctg

SEQ ID NO: 207751 - DNA, 623 bp, Homo sapiens
ttttggaagtagatttggctgagattaaagtcttgagtgacatgaagacaatgttaaagataaatccaaactcttctttattgcttgacacttttccaatcagcatcaacttcattcctggtaagttggtgtagcatggtgagttctgccttatttcatactttatttggttagaatctgggggagggggtaaaggtgcaggttggttatttcaaatgtgcagacgrcctccaccaattttgcagtatagtgctattacttcagggaatacacccataaaactttgatttcctagtaattctgcttttgtgcattcttaatttgagactcagtgagggtgaaagagttgtagatttggcaaacgctgcactattttctcacattttttcgatttgctaagaccaataacaaatgtattactcctttttttcctttaatttttaaatccatggccttttcactgcctttactttccatgtgttgccactgtatcctccactgtatcccccacattggtcccagcacttgacacttagtaggcactcaaccaatacttgttgagtgaacaagtttaatgcattccagtttttttagtttttagatgatgttgtgcctaatgcaca

SEQ ID NO: 207752 - DNA, 623 bp, Homo sapiens
ttttggaagtagatttggctgagattaaagtcttgagtgacatgaagacaatgttaaagataaatccaaactcttctttattgcttgacacttttccaatcagcatcaacttcattcctggtaagttggtgtagcatggtgagttctgccttatttcatactttatttggttagaatctgggggagggggtaaaggtgcaggttggttatttcaaatgtgcagacgacctccaccaattttgcagtatagtgctattacttcagggaatacacccataaaactttgatttcctagtaattctgcttttgtgcattcttaatttgagactcagtgagggtgaaagagttgtagatttggcaaacgctgcactattttctcacattttttcgatttgctaagaccaataacaaatgtattacycctttttttcctttaatttttaaatccatggccttttcactgcctttactttccatgtgttgccactgtatcctccactgtatcccccacattggtcccagcacttgacacttagtaggcactcaaccaatacttgttgagtgaacaagtttaatgcattccagtttttttagtttttagatgatgttgtgcctaatgcaca

SEQ ID NO: 207753 - DNA, 623 bp, Homo sapiens
ttttggaagtagatttggctgagattaaagtcttgagtgacatgaagacaatgttaaagataaatccaaactcttctttattgcttgacacttttccaatcagcatcaacttcattcctggtaagttggtgtagcatggtgagttctgccttatttcatactttatttggttagaatctgggggagggggtaaaggtgcaggttggttatttcaaatgtgcagacgacctccaccaattttgcagtatagtgctattacttcagggaatacacccataaaactttgatttcctagtaattctgcttttgtgcattcttaatttgagactcagtgagggtgaaagagttgtagatttggcaaacgctgcactattttctcacattttttcgatttgctaagaccaataacaaatgtattactcctttttttcctttaatttttaaatccatggccttttcactgcctttactttccatgtgttgccactgtatcctccactgtatcccccacattggkcccagcacttgacacttagtaggcactcaaccaatacttgttgagtgaacaagtttaatgcattccagtttttttagtttttagatgatgttgtgcctaatgcaca

SEQ ID NO: 207754 - DNA, 623 bp, Homo sapiens
ttttggaagtagatttggctgagattaaagtcttgagtgacatgaagacaatgttaaagataaatccaaactcttctttattgcttgacacttttccaatcagcatcaacttcattcctggtaagttggtgtagcatggtgagttctgccttatttcatactttatttggttagaatctgggggagggggtaaaggtgcaggttggttatttcaaatgtgcagacgacctccaccaattttgcagtatagtgctattacttcagggaatacacccataaaactttgatttcctagtaattctgcttttgtgcattcttaatttgagactcagtgagggtgaaagagttgtagatttggcaaacgctgcactattttctcacattttttcgatttgctaagaccaataacaaatgtattactcctttttttcctttaatttttaaatccatggccttttcactgcctttactttccatgtgttgccactgtatcctccactgtatcccccacattggtcccagcacttgacacttagtaggcactcaaccaatacttgttgagtgaacaagtttaatgcattcyagtttttttagtttttagatgatgttgtgcctaatgcaca

SEQ ID NO: 207755 - DNA, 601 bp, Homo sapiens
catgtcttttacttatgccaagctgtcacactgtgtgcatgaactgagggatttagtttttcttccacagccccagagccagcaaatgactgaccttaaayctaaaactgtaggagtttggtcagggtggtgggaaaagttgtaagaaaaggttatagggaaagacacaaatcttcttggaagaatgggaggttttgcaaaagcttcaaaggagaatttagctgaaggcagttaaattctcttaagagcaagggttagataacaagggaatgtaaagaaacttatctagataaattgttctacttatatctctggaaaccaacctttgatcattcatgtgcaggactgctctctacttgcaggggttgacaatgttaattacccacaaattgtgtttgctccaagcccttgtcattaaatctgtactaaataaattcaagtggggccagcttagggggctgcactccttttggctgctgcactctctcattggcagtgctgagtggtgcagtcccctagctcactgtcaggaaaaatacctgtgtcagggaactcctttcattcatcgcttggccagagtctgcgggacagatcagcataa

SEQ ID NO: 207756 - DNA, 495 bp, Homo sapiens
ccacaagttcaacaccagcataagcaagatagtgaggccctatctgtataaaaagtatgaaaactagccagctgtggctgtgtgtgcctatattcccagcagctcaggaggctgagacaagagaatcccttgaacccaagaatttgaggttacagtgagctgattgtgaactgcactccaatctgggaaccagagtgagaacctgtctcaaaaaaagaaaaaaaaaaaaaaagaaagaaagaaaaagaaaagaagaaaatatgtataaaygaatgttttaaattggaacaattactatagcatcaaaacgcacatttgatgagatgtgaaaatttattcttaagtatttatccatttctggtttggtagcaaaggcattataatacttctataactgggctaatagaatcagatagaatcaagcaaagttggcagagcctaggcatctacctaaaagaaatgctctctcccatttccgtgacacattaactcctc

SEQ ID NO: 207757 - DNA, 532 bp, Homo sapiens
gttaacagtaacttactgtatatttcaaaataactagaagagtagatttagagtattcctaacacaaataaataacaaatattttaggtggtagatataccagttacccagatttgatcattatatatcacatgctggtatcaaaatgtcacaggtaccacataaataagtaaaaatattaggtatctataaaaattaaaagtaaaataaaaagaatattttgagagaaaataatggctaagaagtaggagaagttaaaaataagttgaaactaaartattggactgaaatacaaatttattaataaataaaataacaattgaaagagaaaattaagttttacaaaaaagaaattctcagttttgattctcaaaaaatccagctataagctgcttagaagagacatgtctgaggtaagatgacctacaaagattaaaagtgaaaggtgaaaataagatatgaagcaaatcttataaattaatattagtattagataaaataaataaaagtagttcccaacttaaagataaaa

SEQ ID NO: 207758 - DNA, 483 bp, Homo sapiens
tgaccatccccttcctgtgtcattgttattcatggtatgtatgaatacctgtcatgatttatatgctaatcattcatttggttgtacattggattattgtaaacattactacccattgtctcctttacactttttctagattctcatgctttctatatatcttgtatattgactgtattgctcagtaagattaaatgtcttcatgacctaatttcgacttttacaaaatctgttcccagaattcactgaaataatagaaaattagaaaaatagaagattttaaaatcttaaaattgtgacacataacatacctcataactttttatgtacagttgatttaaactaaggaataattaattttgaaagtctttcctattgaccctcagagatttatttttaataatttacawtgttcaatgtctagttatactttatcaaaattattaaaggtatatggacatctttttgttctctcattttaaa

SEQ ID NO: 207759 - DNA, 571 bp, Homo sapiens
  misc_feature (1)...(571): n = A,T,C or G
ttggggagtctgtcctcagggtacatgaaaatgtgactggtggaaggnctgctgccaatagctcatgccttggccctggcagtagcaaccagcagcagcagagtctgcaggctggggatgtcaatggggctccaaggttttagagatgcaggggttgtgggaccccagggcaggatgcaatcttttcggggtgggtctctctctgtgttatagcatcttggaactcgggcaatatgggacccagcttgaatgccttctctggagcaataccattgtgtgrtttcctggcagcttcctgttagtcttagggcccaagggtcaaggggctctctcacggccaggattgcaggagtctgcagaggaaatgttgaccactgggggtctctcaccctccctttccctgtattgaggagcctctccggacaggctcccagctgatcccagccaagcagcctgccttactttcctctctttccttgccttaggtgtttccttccagacacttccctattgaatccctgcattctctcttagatgatctatttgaagtgtgattatttacttgctattt

SEQ ID NO: 207760 - DNA, 577 bp, Homo sapiens
gggaattgctggatcaaatggtagagttctacttttaattctttaaggaatctctatacagtctcaatagtggttgtactaatttacattcccaccagcartgtaaaagtgttctctttctactacattcatgccaacatctattgttttttaatttttacattatggccattcttgcaggagtaaggtggtatctcattgtggttttgatttgcatttccccaatgattagtgatgtcgagcaatatttcttatgtttgttggctgtttgtatatcttcttttgagaactatctattcctgtcttttgcccactctttgatgggattatttgtgttttttttttcttgctgattcctttgagttttttgcagattctggatattagtcctttttcagatgtatagattatgaagatttccccccattctgtgggctatttactctgctgattatttcttttgctgtacagaagctttttattttaattaggtcctatctggaaaaattttatcaagatatcagtagtggatttgagttaatttatgtgtgttgtaatttctttaatgctgaagaca

SEQ ID NO: 207761 - DNA, 498 bp, Homo sapiens
gaacctctctttctatagataacagggcaaagtgttaaaatgcaggtcactggtgcgagagatatcctgttgtaaaaacggtgacctccagaagttttgggaaggatggcagcggagccctctacatgtagaaagaacacagatgttgctctcrcaacaaatgcatgagaatggtaggtaggcagctgcccagcatatataatgcagtttcttcccttgtgagatatgatctttatacctagagatgcaataaagttattaaggggcctgaatggaatgagaaagaccttgtcatatgataatgactttattttgtctaagcatcagttactctctcctctctctctcacaagactttttatcagctacagctttacaagaaaaaaaaaacagcagcaacaagcaaactaaattttacgcaaattcacagtttgaaatctccacaccctaaatcttacatttaatcataaagtgttaaattttaatgtattcttttaa

SEQ ID NO: 207762 - DNA, 346 bp, Homo sapiens
aggagacaaaatcacacaggaaaggaaaatgtggcgagaaacagcccagaaacaggtttctggcccctgacccccgcgtgggcaaagcggggcaggcttggctgggtcgggtrgccgctccctcctggcctgctcttcggagaccctgggagtcttcatgtgatgatgtcatgctcagagctggacagaagagaggagctgctcagacagcggagccccgggcgggcacccctgggccccagcccctttctccccgggcaggaggcagaggcagggccacccctcccaggctccagctgggctcctgttgctctcggccccaccctggctgtgaaatgtcagaagg

SEQ ID NO: 207763 - DNA, 346 bp, Homo sapiens
aggagacaaaatcacacaggaaaggaaaatgtggcgagaaacagcccagaaacaggtttctggcccctgacccccgcgtgggcaaagcggggcaggcttggctgggtcgggtagccgctccctcctggcctgctcttcrgagaccctgggagtcttcatgtgatgatgtcatgctcagagctggacagaagagaggagctgctcagacagcggagccccgggcgggcacccctgggccccagcccctttctccccgggcaggaggcagaggcagggccacccctcccaggctccagctgggctcctgttgctctcggccccaccctggctgtgaaatgtcagaagg

SEQ ID NO: 207764 - DNA, 628 bp, Homo sapiens
ttgtaattaaccttcgcttctcacatgtcagtatgtgaagtgtctggtttaagcaatttatccaaaaaagccatagactctttaaataacaacaaaacctgggcctggaattttataaaggcagaatgagtaagacacggtttcggtgtgcttttttaaagaaaacagggtcttgctctgttgcccaggatgaaatgccatgctgcatttacagctcactgcagccttgacctcccacctcagcttccagaggagctgggattacaggtgtgcaccaccacgcccagctaatttaaaaaatttttgtagaaacagggtgtcactgtgttgcccaggctggtctccagcaatcctctggccttgaccccctamagtgtggggattacacgcacgagcaacttgccacttactatctgactgtgacctggaaccagaaaggagattccgagagtgtgctcaatcaatcacaaactgacctttttcatgggtttcttgaactcctgtagctcttcagcactcatgccttcccatacctgataaataggatcaatgaatttctttgacctgtcaacaaagatcacatttcaaagtcaagttaaatacttcagcagaagtcaaaattggtttg

SEQ ID NO: 207765 - DNA, 628 bp, Homo sapiens
ttgtaattaaccttcgcttctcacatgtcagtatgtgaagtgtctggtttaagcaatttatccaaaaaagccatagactctttaaataacaacaaaacctgggcctggaattttataaaggcagaatgagtaagacacggtttcggtgtgcttttttaaagaaaacagggtcttgctctgttgcccaggatgaaatgccatgctgcatttacagctcactgcagccttgacctcccacctcagcttccagaggagctgggattacaggtgtgcaccaccacgcccagctaatttaaaaaatttttgtagaaacagggtgtcactgtgttgcccaggctggtctccagcaatcctctggccttgaccccctaaagtgtggggattacacscacgagcaacttgccacttactatctgactgtgacctggaaccagaaaggagattccgagagtgtgctcaatcaatcacaaactgacctttttcatgggtttcttgaactcctgtagctcttcagcactcatgccttcccatacctgataaataggatcaatgaatttctttgacctgtcaacaaagatcacatttcaaagtcaagttaaatacttcagcagaagtcaaaattggtttg

SEQ ID NO: 207766 - DNA, 658 bp, Homo sapiens
tggcaaagatctaaatttgttcagctaatttgtaattaaccttcgcttctcacatgtcagtatgtgaagtgtctggtttaagcaatttatccaaaaaagccatagactctttaaataacaacaaaacctgggcctggaattttataaaggcagaatgagtaagacacggtttcggtgtgcttttttaaagaaaacagggtcttgctctgttgcccaggatgaaatgccatgctgcatttacagctcactgcagccttgacctcccacctcagcttccagaggagctgggattacaggtgtgcaccaccacgcccagctaatttaaaaaatttttgtagaaacagggtgtcactgtgttgcccaggctggtctccagcaatcctctggccttgaccccctaaagtgtggggattacacgcaygagcaacttgccacttactatctgactgtgacctggaaccagaaaggagattccgagagtgtgctcaatcaatcacaaactgacctttttcatgggtttcttgaactcctgtagctcttcagcactcatgccttcccatacctgataaataggatcaatgaatttctttgacctgtcaacaaagatcacatttcaaagtcaagttaaatacttcagcagaagtcaaaattggtttgg

SEQ ID NO: 207767 - DNA, 628 bp, Homo sapiens
ttgtaattaaccttcgcttctcacatgtcagtatgtgaagtgtctggtttaagcaatttatccaaaaaagccatagactctttaaataacaacaaaacctgggcctggaattttataaaggcagaatgagtaagacacggtttcggtgtgcttttttaaagaaaacagggtcttgctctgttgcccaggatgaaatgccatgctgcatttacagctcactgcagccttgacctcccacctcagcttccagaggagctgggattacaggtgtgcaccaccacgcccagctaatttaaaaaatttttgtagaaacagggtgtcactgtgttgcccaggctggtctccagcaatcctctggccttgaccccctaaagtgtggggattacacgcacgagcracttgccacttactatctgactgtgacctggaaccagaaaggagattccgagagtgtgctcaatcaatcacaaactgacctttttcatgggtttcttgaactcctgtagctcttcagcactcatgccttcccatacctgataaataggatcaatgaatttctttgacctgtcaacaaagatcacatttcaaagtcaagttaaatacttcagcagaagtcaaaattggtttg

SEQ ID NO: 207768 - DNA, 628 bp, Homo sapiens
ttgtaattaaccttcgcttctcacatgtcagtatgtgaagtgtctggtttaagcaatttatccaaaaaagccatagactctttaaataacaacaaaacctgggcctggaattttataaaggcagaatgagtaagacacggtttcggtgtgcttttttaaagaaaacagggtcttgctctgttgcccaggatgaaatgccatgctgcatttacagctcactgcagccttgacctcccacctcagcttccagaggagctgggattacaggtgtgcaccaccacgcccagctaatttaaaaaatttttgtagaaacagggtgtcactgtgttgcccaggctggtctccagcaatcctctggccttgaccccctaaagtgtggggattacacgcacgagcaacttgccacttactatctgactgtgacctggaaccagaaaggagattccgagagtgtgctcaatcaatcacaaactgacctttttcatgggtttcttgaactcctgtagctcttcagcactcatgycttcccatacctgataaataggatcaatgaatttctttgacctgtcaacaaagatcacatttcaaagtcaagttaaatacttcagcagaagtcaaaattggtttg

SEQ ID NO: 207769 - DNA, 550 bp, Homo sapiens
attgagggagggatctgtgattggatcaagggggcagtttcccccatgctattctcatgagatctgattgctttatacacgtttggaaattcctccttcttttgttcttttctttcctgccgttttgtaaaggtgcctgtttccccttctgccatgattgtaagtttcctgaggccttcccagctatgcagaactgtgagtcataaattaaacctccttcgtttataaattaccccgtctccagtctcgggtagtatctttgtggcagtgtgaatactaatacaatgcagctggctcaaactgaatgmgccctgactctgcctcacaggaatggcctttagctaaccacaagatgatctctctgatcccatcaaacacctgctctagctgctctgaggagacctccttagccacccaagtcctcccagctttccttacataaatctctagttcatttgtgaccactatcacaaattagctgttaatttgtcctctatttttccctgtgggttagtcttatttccctaatactagcctaagactatcttcc

SEQ ID NO: 207770 - DNA, 499 bp, Homo sapiens
tgggtaagattcaactaaggctattgttagagtaactgaatcaaattctcgaagtggggcctgagagtctaaattttgatcatacatactggatgaatttgatggaaatggtcgaaaggccagacccgagaaagccctggctcacagagttgacttctccatgaaaagtttatggaataactacactaacttaaagataagttcctscttaggcttatcatctcatgcaatatattgaggtattgggaggctatgaggcactgtctcttaaaatgtgagtatgttaacctgaaaaataaatttatttggtatatcagggactatcaatatctgagcatagaaaacattttgctaggcatcaaccaggaatggaactctaaggaattagaataagcaaacattaatggaagggggtcagaaacatttggatggaatgagttactgcagtaggagttcaggcaagcaagggaagagtaagcaatcaatgaggaagtatgag

SEQ ID NO: 207771 - DNA, 578 bp, Homo sapiens
ttgattcaatgtctttgctattataaatagtgctacagtgaacatatatatgcatgtgtctttatgatagaatttatattcctttgtgtatatacacagtaatgggattgctgggtcaaatggtagttatatttttagttctttgagaaatttccaaactgctttccacaaaggttgaactaatttgcattcccaccaaaaagcatataagcattcccttttctctgtatcctcaccaacatctgttattctttaacttcttaatattagccattttgactggtgagacagagtatctcattgtgcttttgatctgcatttctgtaatgattagtgatgttaaacgtttttttatctgtttgttggctgctttcttcttttgagatgtgtctgttcttgttctttgcccactttttaatgggccaacagttgttttaaatgcaagatttcaagtgaatccttgaatattactagactcaaytgaagcccttggacatgtcctgaagagttcaaattagaatttattccgagcagacactgagttctcctcatcactctagggtttagatctgtgtttt

SEQ ID NO: 207772 - DNA, 511 bp, Homo sapiens
acctacaaattaataatgccatagatcaaataagaaatcatcagataaattggaaatacagtcatgtaccacatataactacatttctgtcaacaataaaccatatatatgatggtagttccatagaattttaataccatagttttactatactttttctatgtttagatacacaaatatttgccattgtgttgtaattgcctacagtattaagtacaataacatgatgtactggtttgttgcttgggagcaataggctataccacatagcctaagtgtgttgtaggctatactatgtagatttgtgtaagtacattctgtgatatttgcccaaggwtaaaatctcttaatgatgcatttctcaaaatgtatcccaattgtgaagtgatgcatgattatacactgaattaagtggtagcaaaatgacaacatacgaaaatttgtgaaaggcagagaaagcagtacttacaggaaaatgtatacctttaaatatatatattagaaacaaaaa

SEQ ID NO: 207773 - DNA, 286 bp, Homo sapiens
agttatgtgtggcagacccctttcagtaaaactgagatcttcaaaatggcctttgcagagagggagtagatagaatggagggcaggtcctctttcatcttacacttgtgggaatagtaatccaaaaaattatatgggcatatatacaataccactgaaatcttgggaaactattttaaaattagaaatttgtgggaaattttaatttttattctaagtgttcattgtttaagagaaatgcgctcackgttcgaatttgcttgagcatgatctgtgggtacagcctc

SEQ ID NO: 207774 - DNA, 286 bp, Homo sapiens
agttatgtgtggcagacccctttcagtaaaactgagatcttcaaaatggcctttgcagagagggagtagatagaatggagggcaggtcctctttcatcttacacttgtgggaatagtaatccaaaaaattatatgggcatatatacaataccactgaaatcttgggaaactattttaaaattagaaatttgtgggaaattttaatttttattctaagtgttcattgtttaagagaaatgcgctcacggttcgartttgcttgagcatgatctgtgggtacagcctc

SEQ ID NO: 207775 - DNA, 532 bp, Homo sapiens
caatgtgtatggtcttcattcagccatggtctctaccagttcctgttactgtcccagcatggaagccatgctaattattagycatcaccgcattgtttctcttatccataaggaaaaaaaatccatttctgttttcaaaatccataactctgagctgtgggaaatcaattaaatgttctaatttttttctaagcctgattagtggcagtaaccgagttcaaatttgtcatattttcatccataacaaacttgcatttttggaccataaagtgaaaataataaagaaggaataaaactgtaaaaacccacctgatcaaaataattataattattattaacaaggggtaaaaatgtagaaagacgtatttattggatagatgaccatcactaaaaaaaaaaaaaaaaattaactctccatgtactaaagcaagaacaaagcatattccattttttccaattcagaatgcccttgaagtagattctacatataagtaatcatggacaaattataaattagaaaagtgatgtaggc

SEQ ID NO: 207776 - DNA, 532 bp, Homo sapiens
caatgtgtatggtcttcattcagccatggtctctaccagttcctgttactgtcccagcatggaagccatgctaattattagtcatcaccgcattgtttctcttatccataaggaaaaaaaatccatttctgttttcaaaatccataaytctgagctgtgggaaatcaattaaatgttctaatttttttctaagcctgattagtggcagtaaccgagttcaaatttgtcatattttcatccataacaaacttgcatttttggaccataaagtgaaaataataaagaaggaataaaactgtaaaaacccacctgatcaaaataattataattattattaacaaggggtaaaaatgtagaaagacgtatttattggatagatgaccatcactaaaaaaaaaaaaaaaaattaactctccatgtactaaagcaagaacaaagcatattccattttttccaattcagaatgcccttgaagtagattctacatataagtaatcatggacaaattataaattagaaaagtgatgtaggc

SEQ ID NO: 207777 - DNA, 532 bp, Homo sapiens
caatgtgtatggtcttcattcagccatggtctctaccagttcctgttactgtcccagcatggaagccatgctaattattagtcatcaccgcattgtttctcttatccataaggaaaaaaaatccatttctgttttcaaaatccataactctgagctgtgggaaatcaattaaatgttctaatttttttctaagcctgattagtggcagtaaccgagttcaaatttgtcatattttcatccataacaaacttgcatttttggaccataaagtgaaaataataaagaaggaataaaactgtaaaaacccacctgatcaaaataattataattattattaacaaggggtaaaaatgtagaaagacrtatttattggatagatgaccatcactaaaaaaaaaaaaaaaaattaactctccatgtactaaagcaagaacaaagcatattccattttttccaattcagaatgcccttgaagtagattctacatataagtaatcatggacaaattataaattagaaaagtgatgtaggc

SEQ ID NO: 207778 - DNA, 553 bp, Homo sapiens
tagtgctgcctttgatcattagaaattattataactcagcacatggaattggcactsatcttttatgtttgcagtctgcaagatgtgcctttattatttttcaataagtcttaaggtggtcattgggcagggaggatggtcctgctatggagtagggagaaacaaatcaacatagttttcatttctatagaatgcttcacctctatagctattagaccatgagactttatgaactaagtttagccactgctctttttaccaacttagtagagagaacagaggcctggtagtgaaggtcaacaactctgatttataacctgtctctacctagtatttaattttaagactatgactaggaaatttaatctttctgaacctcggcttccttatcagtgtagtgaagataatgctactcagcttgtggactgttcacttcttcattgaagaagtgcatattaaacccctactatgtgccagacgttgttcttggtgctagtggagagccagaaaacaaatgctctaccttataggaggcaaggtagttgcaaggatt

SEQ ID NO: 207779 - DNA, 610 bp, Homo sapiens
  misc_feature (1)...(610): n = A,T,C or G
acggtggaatttaaatttttgggattgatgtattgatttatttattaatttatattttcatactgattgttaaatagtattaatagcaccactgcatatatgcatagaaaaaggtgagaaactatacataaaaatgttaagattggttatatctgggtgttgagatagatatatattttatacatacatcagtggacatgtatttagtgttaacangaaaaaatatatacaaggcatattataaaaatatggcttctctctagcctatccttttatttctttagtaactgaaaacatagattaatgctttgaagttaatttaaacttattcttaaatagttcatagcctgaatggtaatttctcttgagttttctgcaggttcctcagcccactattttgaccaccttcttcaaccccatattgaccccagaggtcttagtctcacctggaattctaacacaaacatggaacaattgagtcgactttttctaaacactttcattgtcctgtttcctckttttccctagcaatccttattttccccaagctacccctacacacgcaccaatcaagtaaacaaagaaataaagaaaggagtgctgttttaag

SEQ ID NO: 207780 - DNA, 553 bp, Homo sapiens
tagtgctgcctttgatcattagaaattattataactcagcacatggaattggcactcatcttttatgtttgcagtctgcaagatgtgcctttattatttttcaataagtcttaaggtggtcattgggcagggrggatggtcctgctatggagtagggagaaacaaatcaacatagttttcatttctatagaatgcttcacctctatagctattagaccatgagactttatgaactaagtttagccactgctctttttaccaacttagtagagagaacagaggcctggtagtgaaggtcaacaactctgatttataacctgtctctacctagtatttaattttaagactatgactaggaaatttaatctttctgaacctcggcttccttatcagtgtagtgaagataatgctactcagcttgtggactgttcacttcttcattgaagaagtgcatattaaacccctactatgtgccagacgttgttcttggtgctagtggagagccagaaaacaaatgctctaccttataggaggcaaggtagttgcaaggatt

SEQ ID NO: 207781 - DNA, 505 bp, Homo sapiens
gcgtggcatgactgggattaaaacctgagtagtctggtcccagtctttaaccactatgctatactgaagtaggcctggagagggagatccagtagctccaacttgaactccctggatggtactttcattgctgagttgtttccagaatcctctagctaagggaattgccataaatcacagtattaagtctcagttaattgctattttctgtgaaccaaagtcacactctcttaccaatgttgagaaacaaatttatcaatattgagaaattccttaagaattcagcaaccaatctttcccccaccttttcagcatctctaaaatgggactattaagaaaaacttcttaagaatgtttgaaattcactaagatcttgaatacattaaaaacaaatagcagaatggctcccatatagtaggcgtccataaatggttatgtgtcatacaaaaacacaacagaatatagatgatggcacaaagttaarcatttagaaactaaagaatat

SEQ ID NO: 207782 - DNA, 586 bp, Homo sapiens
tacacctctcatattagtccagagccattttcagagagatttcttatgctgaatcaacaagctgaatatttttaaattataccttattcacacttatatagaaccgcccataaaagtgtccacatacattactactagcaattgtattttactttgacaattctaaatggtttacatttgtatattcattcactttacatgtatcagtgttaatatatatagatggacatattttctacttcttaattaattttattgactactattctcaaatttctaatttgtttttcttcccttcaaataccttgcacatacatgacactagagtactgagcaaaatatatccaaacatgattaaagataaataattatcagcacaagcatactcaagtttaggaggaacgyatctgtaccatgtgggtctttaacaccttaggaatctcctagagtattaggtgctcatctctttactaccaataaaaatctacttgcttcctctaagggtttcttggattttgcagaatagggagttcctactcattcccctttgtgaaagatgctggactgatagatttccatgatgaat

SEQ ID NO: 207783 - DNA, 553 bp, Homo sapiens
tagtgctgcctttgatcattagaaattattataactcagcacatggaattggcactcatcttttatgtttgcagtctgcaagatgtgcctttattatttttcaataagtcttaaggtggtcattgggcagggaggatggtcctgctatggagtagggagaaacaaatcaacatagttttcatttctatagaatgcttcacctctatagctattagaccatgagactttatgaactaagtttagccactgctctttttaccaacttagtagagagaacagaggcctggtagtgaaggtcaacaactctgatttatracctgtctctacctagtatttaattttaagactatgactaggaaatttaatctttctgaacctcggcttccttatcagtgtagtgaagataatgctactcagcttgtggactgttcacttcttcattgaagaagtgcatattaaacccctactatgtgccagacgttgttcttggtgctagtggagagccagaaaacaaatgctctaccttataggaggcaaggtagttgcaaggatt

SEQ ID NO: 207784 - DNA, 582 bp, Homo sapiens
atcttttttgctccactctttgaggctttctttttatcagaggtctaatccactattatgagctaactcatgtttatgtctggcactaatttagtcttctaagataaggaacacactaaagtttacataacacccaatcacatttccaacaaaaaatgtcaacagaatttcaccctgagttcagaggaaagaagagtgagaaaggagataaaaggcctcttayattttcttaaatttcattaaatcactttaatttcaacaaacatatttggggtctgcatgatgagaatgcaaaggtggctcccagcactccaggagttgtttcctagtagaagttgatggccctgctctggtctatccaggaagtgattagactctagctgtcacccatccaactcagggtggatgacaccatataggtgtctacagcctaggaagtcacacttactcctaagcattctactgtacccattactttcaatatggagtggggcagggatggcaaggccaaggagaggtgctgagcaagatgcttataatataaaatcatgagatatttcttttatgactatgaagtttgat

SEQ ID NO: 207785 - DNA, 582 bp, Homo sapiens
atcttttttgctccactctttgaggctttctttttatcagaggtctaatccactattatgagctaactcatgtttatgtctggcactaatttagtcttctaagataaggaacacactaaagtttacataacacccaatcacatttccaacaaaaaatgtcaacagaatttcaccctgagttcagaggaaagaagagtgagaaaggagataaaaggcctcttacattttcttaaatttcattaaatcactttaawttcaacaaacatatttggggtctgcatgatgagaatgcaaaggtggctcccagcactccaggagttgtttcctagtagaagttgatggccctgctctggtctatccaggaagtgattagactctagctgtcacccatccaactcagggtggatgacaccatataggtgtctacagcctaggaagtcacacttactcctaagcattctactgtacccattactttcaatatggagtggggcagggatggcaaggccaaggagaggtgctgagcaagatgcttataatataaaatcatgagatatttcttttatgactatgaagtttgat

SEQ ID NO: 207786 - DNA, 582 bp, Homo sapiens
atcttttttgctccactctttgaggctttctttttatcagaggtctaatccactattatgagctaactcatgtttatgtctggcactaatttagtcttctaagataaggaacacactaaagtttacataacacccaatcacatttccaacaaaaaatgtcaacagaatttcaccctgagttcagaggaaagaagagtgagaaaggagataaaaggcctcttacattttcttaaatttcattaaatcactttaatttcaacaaacatatttggggtctgcatgatgagaatgcaaaggtggctcccagcaytccaggagttgtttcctagtagaagttgatggccctgctctggtctatccaggaagtgattagactctagctgtcacccatccaactcagggtggatgacaccatataggtgtctacagcctaggaagtcacacttactcctaagcattctactgtacccattactttcaatatggagtggggcagggatggcaaggccaaggagaggtgctgagcaagatgcttataatataaaatcatgagatatttcttttatgactatgaagtttgat

SEQ ID NO: 207787 - DNA, 581 bp, Homo sapiens
gagccatttccaggtaagtgggcaaacaacccaagagttatcaatgggattttcttcttttcagcaggagcccattcttcttttctggttcatgtactctaatcaaagacaccactcaatagtgcacagtgtgtggagaaggagatggaagatgcaaggagtatgaatgtgggcactttttaaaaaatttcacccaagagaaatatacagtcatttgtcagaccagtgattttacactgtcacatgctataactgccaagaaacacatacacacacaggaagtacttcatagtgaggtatgtaaaaatatcagaaggggtataattgagtgactatggctaatcacacacattttccagcatgcagcatggcatttgaatttttctagtatatcagcgttatgttaaatatatcaagagtaaaggaagtagtagaatattagaggagaaacaaagggagygaaaaaaatggaaaaaaaaaagagatagatttgaaaatgtatgccgggcatgtatatgtgtgtctatggtttttaaaagtttctactataaacagcacttgtgagcagggcagtgtctggt

SEQ ID NO: 207788 - DNA, 581 bp, Homo sapiens
gagccatttccaggtaagtgggcaaacaacccaagagttatcaatgggattttcttcttttcagcaggagcccattcttcttttctggttcatgtactctaatcaaagacaccactcaatagtgcacagtgtgtggagaaggagatggaagatgcaaggagtatgaatgtgggcactttttaaaaaatttcacccaagagaaatatacagtcatttgtcagaccagtgattttacactgtcacatgctataactgccaagaaacacatacacacacaggaagtacttcatagtgaggtatgtaaaaatatcagaaggggtataattgagtgactatggctaatcacacacattttccagcatgcagcatggcatttgaatttttctagtatatcagcgttatgttaaatatatcaagagtaaaggaagtagtagaatattagaggagaaacaaagggagtgaaaaaaatggaaaaaaaaaagagatagatttgaaaatgtatgcygggcatgtatatgtgtgtctatggtttttaaaagtttctactataaacagcacttgtgagcagggcagtgtctggt

SEQ ID NO: 207789 - DNA, 581 bp, Homo sapiens
gagccatttccaggtaagtgggcaaacaacccaagagttatcaatgggattttcttcttttcagcaggagcccattcttcttttctggttcatgtactctaatcaaagacaccactcaatagtgcacagtgtgtggagaaggagatggaagatgcaaggagtatgaatgtgggcactttttaaaaaatttcacccaagagaaatatacagtcatttgtcagaccagtgattttacactgtcacatgctataactgccaagaaacacatacacacacaggaagtacttcatagtgaggtatgtaaaaatatcagaaggggtataattgagtgactatggctaatcacacacattttccagcatgcagcatggcatttgaatttttctagtatatcagcgttatgttaaatatatcaagagtaaaggaagtagtagaatattagaggagaaacaaagggagtgaaaaaaatggaaaaaaaaaagagatagatttgaaaatgtatgccgggcatgtatatrtgtgtctatggtttttaaaagtttctactataaacagcacttgtgagcagggcagtgtctggt

SEQ ID NO: 207790 - DNA, 571 bp, Homo sapiens
gaggccaaatttcttactacataaatgcaagcccagattgctactttgctttaaggaattcaagcaagttagaggaaagaactggatctcagggaaatacctcctggctccttgtccagaattttttttccctactgcccaaaattataactaggatgtgagatttactccatgtcagctgttacaggaaactatcctgaaaaatacacaatttataaggcaatgataggatgattcttgattttagacctgtcagacttaatttccatacaatgacctcatccgagtttgagtgggagctaataatcaggacaaatctattggtaaagagataagggtgatgagtggagaagtagaagataggtgggcttgggaactaaagaacaacacaggatttggggraagattaaaaaaggggtagtacaggaaattagagaagatttagctttaaggaacctaagaggattttgagcaagtgtagttgaagatgacattagagttaagtaacgggatggaagacttcagaatttaagaatagttcaacaagaagtttcttcatcttgtgtcttta

SEQ ID NO: 207791 - DNA, 615 bp, Homo sapiens
tttactttcccatcttcaaaacctgcattttaggataaaggtatcaaggggaagatatgaatttataattaaactttgtactctgactaggccaatatctaagaattaccatcagtgtaagtattggtagtatgtagaccaacacaacctcagtaatgttcttggagttctaagaagtaagggcatgcakatttattttctctgcagctttaatgctagaaaacatacatgcattgtagtaactatttctctcttcatcctccttacagcacaaagtagagtaacagatgggttgtcttaactaaagatgtcagcactttattgaccaggcttctgctagattctataatagcaatatatgaattgtgatttctcctttcagggactaagagggcatgattattattcaggaaacctgttttgtttattttttctttctcccacttcaagtgttatttcatttttaagatacttgcagctttctcattctatgatgtagtcccatataagaaatatttcctttctgaatcataattcaatcctcagactattagaccataccacctgctagagggtgacatgcatctcattaaagatagctgccattactaatga

SEQ ID NO: 207792 - DNA, 586 bp, Homo sapiens
attcttgcctatagcaatttgttctgtgatggttgcaaaatgatgtttttccaattccactattcttttcacatttatcagttgctagtctactgttaggaagagccttcccctattccccatttatttatttgtttattgtttatcagtatgcaatcatgaactcctgttactcactgtgttttaacccattatactccttaaattttgatgaaggtattacctacatgcatgcaagctggcttctgtgtccttttaacacacctctttgggatttttatttgtttggggttttttgtttytgtttttgtcttgagtacttcctgaacaataagctgttccagactcatacttctgatagaaacagggggcagagaaattctaggtggaaagacagtgagaggtgaagccagctggactctctgggtcaagtggggacttggagaacttttctgtcttactagaggtttgtaaaaggcaccaatcagtactctgtaagaacgcaacaatcggtgttctatagctagctagaggtttgtaaaatgcaccaatcagtgctctgtaagaacgcaccagtcagcactct

SEQ ID NO: 207793 - DNA, 606 bp, Homo sapiens
cacactgtttgtaaattgtagcctttgtagaatgcctacattgtttaagtccctgtagcattgaatgtgaagcagagcccactctgctctatccatctcttgacaatgcatccgaggaaaatagaaaatgatggcctcccaaatctgcacattagtgaacacaaactcagccatacagtgacatctttctccttaaaaataatgatgcaggctgtctccattacttaagaaagcccgagctcacactgaaaggtgtcaaaaaacactattatcccactttgcctggaggtgccttgacagcacctttcctgccataagaatggattacaggcagggtggtaatcagccaagaagttagtaagaataagttcttttaagagcagagtrtgaatctgtgaacataataaaaggagtttaccaccacaccgaataagggaacacttagctccttgctgccttaaactaaccaggaagagcacgaccccttgctacaggttagtgaagggcagcagggacttaattgtcctatgataaaaaacccgatgagtgctctgcgaagcccactgagtaacaactatgtcgagctccaaggatctctggtgaaag

SEQ ID NO: 207794 - DNA, 606 bp, Homo sapiens
cacactgtttgtaaattgtagcctttgtagaatgcctacattgtttaagtccctgtagcattgaatgtgaagcagagcccactctgctctatccatctcttgacaatgcatccgaggaaaatagaaaatgatggcctcccaaatctgcacattagtgaacacaaactcagccatacagtgacatctttctccttaaaaataatgatgcaggctgtctccattacttaagaaagcccgagctcacactgaaaggtgtcaaaaaacactattatcccactttgcctggaggtgccttgacagcacctttcctgccataagaatggattacaggcagggtggtaatcagccaagaagttagtaagaataagttcttttaagagcagagtgtgaatctgtgaacataataaaaggagtttaccaccayaccgaataagggaacacttagctccttgctgccttaaactaaccaggaagagcacgaccccttgctacaggttagtgaagggcagcagggacttaattgtcctatgataaaaaacccgatgagtgctctgcgaagcccactgagtaacaactatgtcgagctccaaggatctctggtgaaag

SEQ ID NO: 207795 - DNA, 548 bp, Homo sapiens
catgagaggaactggatgatgttttacacaggcaacagaaggagaaaacaagagtcaaagacagaataggagagacaccaatctaaattcaaagagtttagttcaacagatttaacacagtctaattcagcaggattctctgagatgtccacccartgtgcacaattctttccaggatagcactaaagaaatcccctaaaggcccacaacagcaagtgttctattattcctctaagttttccacctgctcacctaatttactcaacagattctaactggctaaaactgataccttaacaagaagcaaaactcaagggagacttcagataaaggagagccaacattgtcacacaagtcaagtgcatagaaggtgttgtgaaaggaagaaaacccagatgtgaaaagagccatgatttgaaatctttcttcttttcctttttgaattagacttgtctgtctgtaggagaccagttcatttccttgtctctccatctggaagtatggctgctgctaccatggtggtcttcagggcattatattcttcggta

SEQ ID NO: 207796 - DNA, 624 bp, Homo sapiens
ttttcatttaatccatatactcatcctccaaagtaaacatttttatcctcattttcactcatataaaaatctaagtgtggtccaggyacggtggctcatgcttgtaatcccagcactttgggaggccgaggggggcggatcacgagatcaggagttcaagaccagcctggcaaacatggtgaaaccccatctctaggaaaaatacaaaaattagccaggcgtggtggtacatgcctgtaaatgcagctacttaggaggctgaggcaggagaatcgcttgaacccaggaggcagaggttgcagtgagctgagattgtgccattgcactccagcctgggtgacagagcgagactccgtctaaaaaatacaaaaagtaaaaacccaaaaacctaaatgtgatgttgggacgtatctaacactaatggatccaagatcactgaccagaaagcgagggatgcaggcctgggattgtttcattctaaattacatgtaattgtcaccaacaagaaaaggggtagatatgctcagggtggacactgaagtgtgtccaacatctctgttcatgagtagaatagaagactaaaaacattttcaggtctatttttaatgactctgaatcatcaac

SEQ ID NO: 207797 - DNA, 579 bp, Homo sapiens
aagtcagcatcaactatgttcagtggagccaatctgggcgatagaagtgaggttgggtggattattggaaaggtggtcattcaggratcaagactctgaccagtgtacagagaaaacaggatgcagatctcaggaactcaggacccagggccagatcaaagtgtttgtttaagcagagaaaggacaacaagaaatagagcttctagcagcaactaataagcagggggaaagaggcaggggcatggtagtcataatcatgggaaactggaaatcacatagagaaaaattcagtgtctgagatgatcgtatatagagcctgtaatactcactgggtaagaaaaagtcttttgactggatacagagaccatatcatgaaaatatttagcaaattgtacccaatgatgagtcctgccctgggctggggctgaaaaacaaagctggaggattatagttcaaaaagggagttaagaattatctaggctcaccgtgccccatgcaaagtaggtttttatgaagctactgcttaataaggataaatgaatcttctttgtatacagatgaagcaactatgtctcaaat

SEQ ID NO: 207798 - DNA, 579 bp, Homo sapiens
aagtcagcatcaactatgttcagtggagccaatctgggcgatagaagtgaggttgggtggattattggaaaggtggtcattcaggaatcaagactctgaccagtgtacagagaaaacaggatgcagatctcaggaactcaggacccagggccagatcaaagtgtttgtttaagcagagaaaggacarcaagaaatagagcttctagcagcaactaataagcagggggaaagaggcaggggcatggtagtcataatcatgggaaactggaaatcacatagagaaaaattcagtgtctgagatgatcgtatatagagcctgtaatactcactgggtaagaaaaagtcttttgactggatacagagaccatatcatgaaaatatttagcaaattgtacccaatgatgagtcctgccctgggctggggctgaaaaacaaagctggaggattatagttcaaaaagggagttaagaattatctaggctcaccgtgccccatgcaaagtaggtttttatgaagctactgcttaataaggataaatgaatcttctttgtatacagatgaagcaactatgtctcaaat

SEQ ID NO: 207799 - DNA, 579 bp, Homo sapiens
aagtcagcatcaactatgttcagtggagccaatctgggcgatagaagtgaggttgggtggattattggaaaggtggtcattcaggaatcaagactctgaccagtgtacagagaaaacaggatgcagatctcaggaactcaggacccagggccagatcaaagtgtttgtttaagcagagaaaggacaacaagaaatagagcttctagcagcaactaataagcagggggaaagaggcaggggcatggtagtcataatcatgggaaactggaaatcacatagagaaaaattcagtgtctgagatgatcgtatatagagcctgtaatactcactgggtaagaaaaagtcttttgactggatacagagaccatrtcatgaaaatatttagcaaattgtacccaatgatgagtcctgccctgggctggggctgaaaaacaaagctggaggattatagttcaaaaagggagttaagaattatctaggctcaccgtgccccatgcaaagtaggtttttatgaagctactgcttaataaggataaatgaatcttctttgtatacagatgaagcaactatgtctcaaat

SEQ ID NO: 207800 - DNA, 578 bp, Homo sapiens
aaaaattcttaggcaatacctacaaaagagatataaatgaaaggtaagttcttgttatatttttaatatatattttgctagggcttggcaaataaagakacttagatatgacagcaagagagagggaaacatctggattgactccacagtttttgtttgacttgaaacattatcctgccaggaaaagaattgtggaaagaatgttgaggggacaatatactgggggctagttgttaagtttagatttaaaaaggtgatcttgaggcacttgagtgcattccaactggaaatatctagtagacatttgaatgtatgaatctaggtttccataaaaatcttcagttgaagattggaggaaacgtaagtaaaatcactaatgaacaaatcacaaatggctttaaaaaaaaggatgtaatgattatttctctacctggagaccaaatatgtgggtatgtatgtggggatacatatataatctccaaattttgcccttcaaatctattaatgcacagtcttcctcatcttagtaaataacaacttcacctctttagctttctacaagatattctagcctgaaa

SEQ ID NO: 207801 - DNA, 393 bp, Homo sapiens
tgaattccctttgatgacaattccattcagtaccaattgatgatggtgattttggattccatttgatgatgattacattcsattccatttgatcatgattccattcgattccactcgatgattccattcgattgcgttcaatgattattccattcgagtccattcgatgattccattcgattctattcgatgatgattgcattcgggtccatggattattccattccattccattagatgattccattcgtggccattcgatgattctcttcgattccattcgataattccgtttgattccgtttgatgttgattccattcgagtccattcgatgataattccattcgattctatgcgatgattccattcctttccatttgaagatgattcca

SEQ ID NO: 207802 - DNA, 393 bp, Homo sapiens
tgaattccctttgatgacaattccattcagtaccaattgatgatggtgattttggattccatttgatgatgattacattccattccatttgatcatgattccattcgattccactcgatgattccattcgattgcgttcaatgattattccattcgagtccattcgatgattccattcgattctattcgatgatgattgcattcgggtccatggattattccattccattccattagatgattccattcgtggccattcgakgattctcttcgattccattcgataattccgtttgattccgtttgatgttgattccattcgagtccattcgatgataattccattcgattctatgcgatgattccattcctttccatttgaagatgattcca

SEQ ID NO: 207803 - DNA, 393 bp, Homo sapiens
tgaattccctttgatgacaattccattcagtaccaattgatgatggtgattttggattccatttgatgatgattacattccattccatttgatcatgattccattcgattccactcgatgattccattcgattgcgttcaatgattattccattcgagtccattcgatgattccattcgattctattcgatgatgattgcattcgggtccatggattattccattccattccattagatgattccattcgtggccattcgatgattctcttcgattccattcgataattccgtttgattccgtttgatgttgattccattcgrgtccattcgatgataattccattcgattctatgcgatgattccattcctttccatttgaagatgattcca

SEQ ID NO: 207804 - DNA, 460 bp, Homo sapiens
gaattcaatagaatggaatcaaatggaatggaatggaatggaatggaatggaatggaatggactggaatcgaatggagtggaccrgaatggaacagcctcgaatggaatggaatggcatggaatggaattgaatggaatggaatgcaatggaaacgaatgtaatcgaatgaaatggactggaatggaacatactggaatggaatggattcgaatggaatagactcgaatggaatggattcaaaaggaatggactcgaatgatctctaatgcaatgggctcgaatagaatttactccaatggaatggactcaaattcaatgcaatcgaaaggaatggagtcgaatggaatggaatcgaatggaatggaatcgaaaaaactggaatggaatggactcgaaaagaatggacaagaagggaacagtcgcgaatggaaaggaattgaatggaatggagtggaacg

SEQ ID NO: 207805 - DNA, 460 bp, Homo sapiens
gaattcaatagaatggaatcaaatggaatggaatggaatggaatggaatggaatggaatggactggaatcgaatggagtggaccagaatggaacagcctcgaatggaatggaatggcatggaatggaattgaatggaatggaatgcaatggaaasgaatgtaatcgaatgaaatggactggaatggaacatactggaatggaatggattcgaatggaatagactcgaatggaatggattcaaaaggaatggactcgaatgatctctaatgcaatgggctcgaatagaatttactccaatggaatggactcaaattcaatgcaatcgaaaggaatggagtcgaatggaatggaatcgaatggaatggaatcgaaaaaactggaatggaatggactcgaaaagaatggacaagaagggaacagtcgcgaatggaaaggaattgaatggaatggagtggaacg

SEQ ID NO: 207806 - DNA, 438 bp, Homo sapiens
ctgatggaatcatcgaatggacttgaatggaatcattgaatggactcgaatggaatctttattgaatggaattgaatggaatcatcgaatggtctcgaatggaatcattatcaaatggaatcgaatggaatcaccgaatagaatcgaatggaacaatcatcgaatggactcaaatggaattatcctcaaatggaatcgaatggatttatcgaatgcaatcgaatggaattatcgaaagcaatcgaatagaatcatcgaatggactcgaatggaatcatcgaatggaatggaatggaagagtcaatgaactcgaatggaatcatcattgaatggaatcgaatggaatcatcgaktggaatcgaatggaatcatgatcaaatggaatggaatgtaatcatcatcaaatggaatccaaaatcaccatcatcaaatggtact

SEQ ID NO: 207807 - DNA, 438 bp, Homo sapiens
ctgatggaatcatcgaatggacttgaatggaatcattgaatggactcgaatggaatctttattgaatggaattgaatggaatcatcgaatggtctcgaatggaatcattatcaaatggaatcgaatggaatcaccgaatagaatcgaatggaacaatcatcgaatggactcaaatggaattatcctcaaatggaatcgaatggatttatcgaatgcaatcgaatggaattatcgaaagcaatcgaatagaatcatcgaatggactcgaatggaatcatcgaatggaatggaatggaagagtcaatgaactcgaatggaatcatcattgaatggaatcgaatggaatcatcgagtggaatcgaatggaaycatgatcaaatggaatggaatgtaatcatcatcaaatggaatccaaaatcaccatcatcaaatggtact

SEQ ID NO: 207808 - DNA, 559 bp, Homo sapiens
tgaattcaatgaatcatcatcaaatggaaccgaatggaatcctcattgaatggaaatgaaaggagtcatcatctaatggaatcgcatggaatcatcatcaaatggaatcgaatggaatcatcatcaaatggaatctaatggaatcaatgaacggaattgaatcgaatcgtcatcgaatgaattgaatrcaatcatcgaatggtctcgaatggaatcatcttcaaatggaaaggaatggaatcatcgcatagaatcgaatggaattatcatcgaatggacccgaatggaatcaacatcaaacggaatcaaacggaattatcgaatggaatcgaagagaatcatcgaatggccacgaatggaatcatctaatggaatggaatggaataatccatggacccgaatgcaatcatcatcgaatagaatcgaatggaatcatcgaatggactcgaatggaataatcattgaacgcaatcgaatggaatcatcgagtggaatcgaatggaatcatgatcaaatggaatcgaatgtaatcatcatcaaatggaatccaaaatcacca

SEQ ID NO: 207809 - DNA, 615 bp, Homo sapiens
cattgaacggaattgcatggaatcgtcatcgaatgaattgaatgcaatcatcgaatggtstcgaatggaatcatcttcaaatggaatggaatggaatcatcgcatagaatcgaatggaattatcatcgaatggactcaaatggaatcaacatcaaacggaatcaaacggaattatcgaatggaatcgaagagaatcatcgaatggaatcgaagagaatcatcgaatggactcgaatggaatcatctaatttcattagaatggaataatccatggactcgaatgcaatcatcatcaaatggaatcgaatggaatcatcgaatggactcgagtggaataaacattcaacggaatcgaatggaatcgtcaccggatggaaacgaatggaatcatcatcgaatggaatcgaatggaatcatcaaatggaatcagatggaatcatcatcaaatggaatcgaatagaattatggaatgaaatccaatgtgatcatcatcgaatggactcgaacggaatcatcatccaatggaaactaatggaatcaacatcgaatggaatcgaatggaaacgccatccatttgaaatgaatggaattatcatgaaattgaaatggatggac

SEQ ID NO: 207810 - DNA, 615 bp, Homo sapiens
cattgaacggaattgcatggaatcgtcatcgaatgaattgaatgcaatcatcgaatggtgtcgaatgkaatcatcttcaaatggaatggaatggaatcatcgcatagaatcgaatggaattatcatcgaatggactcaaatggaatcaacatcaaacggaatcaaacggaattatcgaatggaatcgaagagaatcatcgaatggaatcgaagagaatcatcgaatggactcgaatggaatcatctaatttcattagaatggaataatccatggactcgaatgcaatcatcatcaaatggaatcgaatggaatcatcgaatggactcgagtggaataaacattcaacggaatcgaatggaatcgtcaccggatggaaacgaatggaatcatcatcgaatggaatcgaatggaatcatcaaatggaatcagatggaatcatcatcaaatggaatcgaatagaattatggaatgaaatccaatgtgatcatcatcgaatggactcgaacggaatcatcatccaatggaaactaatggaatcaacatcgaatggaatcgaatggaaacgccatccatttgaaatgaatggaattatcatgaaattgaaatggatggac

SEQ ID NO: 207811 - DNA, 615 bp, Homo sapiens
cattgaacggaattgcatggaatcgtcatcgaatgaattgaatgcaatcatcgaatggtgtcgaatggaaycatcttcaaatggaatggaatggaatcatcgcatagaatcgaatggaattatcatcgaatggactcaaatggaatcaacatcaaacggaatcaaacggaattatcgaatggaatcgaagagaatcatcgaatggaatcgaagagaatcatcgaatggactcgaatggaatcatctaatttcattagaatggaataatccatggactcgaatgcaatcatcatcaaatggaatcgaatggaatcatcgaatggactcgagtggaataaacattcaacggaatcgaatggaatcgtcaccggatggaaacgaatggaatcatcatcgaatggaatcgaatggaatcatcaaatggaatcagatggaatcatcatcaaatggaatcgaatagaattatggaatgaaatccaatgtgatcatcatcgaatggactcgaacggaatcatcatccaatggaaactaatggaatcaacatcgaatggaatcgaatggaaacgccatccatttgaaatgaatggaattatcatgaaattgaaatggatggac

SEQ ID NO: 207812 - DNA, 432 bp, Homo sapiens
ctcaaaaggaatgtaattgaatgcagaggaattgaatggacttgaatagactggactggaatggaatggactcgaaaggaatggactgtaattgaacggtctcraatggaatggaatcgaatggaatggacttgaatggaatggaattgaatggcatggaattaaatggaatggaatggactggaatgcaggggaatgggcttgaatgtaatggactggaacagaatgaacttgaatgaaatggacccaaatgaaatggaatcaaatggaatggaatcaaatggattgaaatttaatggaatggaagtgaatggaatggaatcgaatggaatggaatggtatggaattgaatgaaatggaatggaaaggaatggaaaggaatggtctcaaatggaatggaatggaatggaatagaatggacacgaaggtaat

SEQ ID NO: 207813 - DNA, 486 bp, Homo sapiens
tggaatggactcgaatggaatggactcaaaaggaatgtaattgaatgcagaggaattgaatggacttgaatagactggactggaatggaatggactcgaaaggaatggactgtaattgaacggtctcaaatggaatggaatcgaatggaatggacttgaatggaatggaattgaatggcatggaattaaatggaatggaatggactggaatgcaggggaatgggcttgaatgtaatggactggaacagaatgaacttgaatgaaatggacccaaatgaaatggaatcaaatggaatggaatcaaatggattgaaatttaatggaatggaagtgaatggaatggaatcgaatgraatggaatggtatggaattgaatgaaatggaatggaaaggaatggaaaggaatggtctcaaatggaatggaatggaatggaatagaatggacacgaaggtaatgtacttcaatggaatgcaatcgaatgaatt

SEQ ID NO: 207814 - DNA, 486 bp, Homo sapiens
tggaatggactcgaatggaatggactcaaaaggaatgtaattgaatgcagaggaattgaatggacttgaatagactggactggaatggaatggactcgaaaggaatggactgtaattgaacggtctcaaatggaatggaatcgaatggaatggacttgaatggaatggaattgaatggcatggaattaaatggaatggaatggactggaatgcaggggaatgggcttgaatgtaatggactggaacagaatgaacttgaatgaaatggacccaaatgaaatggaatcaaatggaatggaatcaaatggattgaaatttaatggaatggaagtgaatggaatggaatcgaatggaatggaatggtatggaattgaatgaaatggaatggaaaggaatggaaaggaatggtctcaaatrgaatggaatggaatggaatagaatggacacgaaggtaatgtacttcaatggaatgcaatcgaatgaatt

SEQ ID NO: 207815 - DNA, 411 bp, Homo sapiens
aatggaatggagtgttatggaatggtctccaatggaatggaattraacagaatgcaatcgaaagggatggaatcgaatggagtggattcgaatggaatggaatggaatggactcggaaggaacagactagaatggaacggtctcgaatggaatgaaatcgaattgaatggaattgaatggaatggattcaaaggaatgaaatcgaagggaatcgtatgatctggagtggaatagaataaacttgaatgtaatagactggaatggaatggaattgaatggaatagaatataaaggaatggaatcgaatcaaatggacacgaagggaatgaaatggaatggaaaggtctcgaatggattggaatcgaacggattggaatggaatgggacggaaacgaatggaatggaatggaa

SEQ ID NO: 207816 - DNA, 415 bp, Homo sapiens
gaatggagtgttatggaatggtctccaatggaatggaattgaacagaatgcaatcgaaagggatggaatcgaatggagtggattcgaatggaatggaatggaatggactcggaaggaacagactagaatggaacggtctcgaatggaatgaaatcgaattgaatggaattgaatggaatggattcaaaggaatgaaatcgaagggaatcgtatgatctggagtggaatagaataaacttgaatgtaatagactggaatggaatggaatygaatggaatagaatataaaggaatggaatcgaatcaaatggacacgaagggaatgaaatggaatggaaaggtctcgaatggattggaatcgaacggattggaatggaatgggacggaaacgaatggaatggaatggaatggaatgc

SEQ ID NO: 207817 - DNA, 415 bp, Homo sapiens
gaatggagtgttatggaatggtctccaatggaatggaattgaacagaatgcaatcgaaagggatggaatcgaatggagtggattcgaatggaatggaatggaatggactcggaaggaacagactagaatggaacggtctcgaatggaatgaaatcgaattgaatggaattgaatggaatggattcaaaggaatgaaatcgaagggaatcgtatgatctggagtggaatagaataaacttgaatgtaatagactggaatggaatggaattgaatggaatagaatataawggaatggaatcgaatcaaatggacacgaagggaatgaaatggaatggaaaggtctcgaatggattggaatcgaacggattggaatggaatgggacggaaacgaatggaatggaatggaatggaatgc

SEQ ID NO: 207818 - DNA, 411 bp, Homo sapiens
aatggaatggagtgttatggaatggtctccaatggaatggaattgaacagaatgcaatcgaaagggatggaatcgaatggagtggattcgaatggaatggaatggaatggactcggaaggaacagactagaatggaacggtctcgaatggaatgaaatcgaattgaatggaattgaatggaatggattcaaaggaatgaaatcgaagggaatcgtatgatctggagtggaatagaataaacttgaatgtaatagactggaatggaatggaattgaatggaatagaatataaaggaatgraatcgaatcaaatggacacgaagggaatgaaatggaatggaaaggtctcgaatggattggaatcgaacggattggaatggaatgggacggaaacgaatggaatggaatggaa

SEQ ID NO: 207819 - DNA, 160 bp, Homo sapiens
aaatttaattctgctagaatacctggtctattgattaactgcagctaatatggggtctacttcacatacaagttaaattcagtgcccttaatcagtcatatgatsaggtcaacagtaataaattatgcaatattttttcacccctatagttttaatttct

SEQ ID NO: 207820 - DNA, 634 bp, Homo sapiens
gctcaccctttcttgccctctgcctcacttaatctggctaaccttactctctaagtctcagctcatgcatgatctttaggaaagccatccctgacagcttttattttccttccttataccccagygcctaacacttagcaggaactcaataagtaattatttagcaaaattaagactgtttatacaaagatgattcaaaagattgtcctctacagtctagcagcaaaggggatcgacatgttaagacatgatgtgcagttcaggtggtaaagtgacactggaaaaattgacaaagtactaagggactccaatgaagcagatacccgtgtgtgtggagaaagatagctagaatcaaggaagacttcacacagcattctgagccttttttttttctttttctgttgttggagacaagttcttactctatcacccagggtggagtgcgatggtgtgatcgagactcactgcaacctcaaactcctgggctcgagggatcttctcacctaagcttcttgagtagctgggactacaggcacatatcaccatacctgtccaattttttgtagagtcaaggttatctatggttcccaggctggtcttaaactcctggccttgagcaattctcccattttgg

SEQ ID NO: 207821 - DNA, 539 bp, Homo sapiens
aggcattggcttcagtctagagatccagaaagtctttttgatttgttgtttacccaccccaaagaaatgaagcatatgattcagatagaaagccacagtatttctgctgctacagatacttaatgaaaacagaaaaccaatacagcgtttattccagmagccactatatggcagtcccagtgctaacaactacagaagcatgaatcttgaattataaaatgtgagttattctttgccacatagtgagagaacatcaaaaatatagctagaagacttatgggaatatattccaaggtcaccaacatggcacatgaatacatatgtaacaaacctgcatgttgtgcacatgtaccagaacttaaactataataataataataaaaaaagaatgaggtaggcatgttacaagttgagttcctggctttggagaaaagcaagtccaacttcaaaaagatagaggttcacttgctgctgctttttcctctttatcaattatttgatttagtcaaattttctattcaagaaaatctcatgtgtac

SEQ ID NO: 207822 - DNA, 539 bp, Homo sapiens
aggcattggcttcagtctagagatccagaaagtctttttgatttgttgtttacccaccccaaagaaatgaagcatatgattcagatagaaagccacagtatttctgctgctacagatacttaatgaaaacagaaaaccaatacagcgtttattccagaagccactatatggcartcccagtgctaacaactacagaagcatgaatcttgaattataaaatgtgagttattctttgccacatagtgagagaacatcaaaaatatagctagaagacttatgggaatatattccaaggtcaccaacatggcacatgaatacatatgtaacaaacctgcatgttgtgcacatgtaccagaacttaaactataataataataataaaaaaagaatgaggtaggcatgttacaagttgagttcctggctttggagaaaagcaagtccaacttcaaaaagatagaggttcacttgctgctgctttttcctctttatcaattatttgatttagtcaaattttctattcaagaaaatctcatgtgtac

SEQ ID NO: 207823 - DNA, 539 bp, Homo sapiens
aggcattggcttcagtctagagatccagaaagtctttttgatttgttgtttacccaccccaaagaaatgaagcatatgattcagatagaaagccacagtatttctgctgctacagatacttaatgaaaacagaaaaccaatacagcgtttattccagaagccactatatggcagtcccagtgctaacaactacagaagcatgaatcttgaattataaaatgtgagttattctttgccacatagtgagagaacatcaaaaatatagctagaagacttatgggaakatattccaaggtcaccaacatggcacatgaatacatatgtaacaaacctgcatgttgtgcacatgtaccagaacttaaactataataataataataaaaaaagaatgaggtaggcatgttacaagttgagttcctggctttggagaaaagcaagtccaacttcaaaaagatagaggttcacttgctgctgctttttcctctttatcaattatttgatttagtcaaattttctattcaagaaaatctcatgtgtac

SEQ ID NO: 207824 - DNA, 539 bp, Homo sapiens
aggcattggcttcagtctagagatccagaaagtctttttgatttgttgtttacccaccccaaagaaatgaagcatatgattcagatagaaagccacagtatttctgctgctacagatacttaatgaaaacagaaaaccaatacagcgtttattccagaagccactatatggcagtcccagtgctaacaactacagaagcatgaatcttgaattataaaatgtgagttattctttgccacatagtgagagaacatcaaaaatatagctagaagacttatgggaatatattccaaggtcaccaacatggcacatgaatasatatgtaacaaacctgcatgttgtgcacatgtaccagaacttaaactataataataataataaaaaaagaatgaggtaggcatgttacaagttgagttcctggctttggagaaaagcaagtccaacttcaaaaagatagaggttcacttgctgctgctttttcctctttatcaattatttgatttagtcaaattttctattcaagaaaatctcatgtgtac

SEQ ID NO: 207825 - DNA, 413 bp, Homo sapiens
caccaacatggcacatgaatacatatgtaacaaacctgcatgttgtgcacatgtaccagaacttaaactataataataataataaaaaaagaatgaggtaggcatgttacaagttgagttcctggctttggagaaaagcaagtccaacttcaaaaagatagaggttcacttgctgctkctttttcctctttatcaattatttgatttagtcaaattttctattcaagaaaatctcatgtgtacagttacagtggggttatctaaatgtgtaattatgtgtcaaagtagattagttctgctatctaaataatggttctggagaatgttctcataatgtttgttcattaatcaacctatgtctcactatcagtcttccaagtggcgtatgagctgggaaactaattcagccacat

SEQ ID NO: 207826 - DNA, 436 bp, Homo sapiens
ttttctgtattcatttagagatgatttacatttatttaatgatagaatgggaatacaatgggagggaagcaatgactgagacaagccacaaaaacacrtctagccttgagatttgcaacgaatattcccagccaaatgagtctgtttaatgtgttttcatgcatgcaagtttatctgcttagctcaaactgtttgaacttacagtcccatcatagttatttccaatatttttgaaaacaaacatatacttacacatattttaaaaaatcaccattctgcaatatttctgttgaatcagaccttacattatgttgtttaataaagtatggtaagttttggcatgtatgatttttatcatataagaagcataatttcttagccaaaaatttagcctttgactctttagtagaaagttgagttctgtacattgtgttct

SEQ ID NO: 207827 - DNA, 436 bp, Homo sapiens
ttttctgtattcatttagagatgatttacatttatttaatgatagaatgggaatacaatgggagggaagcaatgactgagacaagccacaaaaacacatctagccttgagatttgcaacgaatattcccagccaaatgagtctgtttaatgtgttttcatgcatgcaagtttatctgcttagctcaaactgtttgaacttacagtcccatcatrgttatttccaatatttttgaaaacaaacatatacttacacatattttaaaaaatcaccattctgcaatatttctgttgaatcagaccttacattatgttgtttaataaagtatggtaagttttggcatgtatgatttttatcatataagaagcataatttcttagccaaaaatttagcctttgactctttagtagaaagttgagttctgtacattgtgttct

SEQ ID NO: 207828 - DNA, 371 bp, Homo sapiens
atacaatgggagggaagcaatgactgagacaagccacaaaaacacatctagccttgagatttgcaacgaatattcccagccaaatgagtctgtttaatgtgttttcatgcatgcaagtttatctgcttagctcaaactgtttgaacttacagtcccatcatagttatttccaatatttttgaaaacaaacatatacttacacatattttaaaaaatcaccattctgcaatatttctgttgaatcagaccttacrttatgttgtttaataaagtatggtaagttttggcatgtatgatttttatcatataagaagcataatttcttagccaaaaatttagcctttgactctttagtagaaagttgagttctg

SEQ ID NO: 207829 - DNA, 502 bp, Homo sapiens
tccagaaaagataaatgtatagggacaaaaagtagattmatgtttgcaaggggctggggctggaagctggtagtgactgctaatgggcatgaggaatcttacagtgatggaaatgctctaaagttggattgtagagatggctgcacaactcagtaaatgtactaaaaatcttttaactttaagtcaaaacagatacattctatagtatgtaaattatatttcaacaaagctgttttaataaaaaaggaaaaatgtttactatatcggcttagaaacatgcctcatttctaggaaataaaagaggtgagagatgatttactttgagaaaagacattgtgtcacctatgaaattttattaggcacagagtcatattttaaggtagatagttctgtactgctgaaatagtaattttaatgtctttatattgccacatgttaagaccataatgtagttataaatggaaatgtttacacctgaagtattttcaaattaaaatttaat

SEQ ID NO: 207830 - DNA, 502 bp, Homo sapiens
tccagaaaagataaatgtatagggacaaaaagtagattaatgtttgcaaggggctggggctggaagctggtagtgactgctaatgggcatgaggaatcttacagtgatggaartgctctaaagttggattgtagagatggctgcacaactcagtaaatgtactaaaaatcttttaactttaagtcaaaacagatacattctatagtatgtaaattatatttcaacaaagctgttttaataaaaaaggaaaaatgtttactatatcggcttagaaacatgcctcatttctaggaaataaaagaggtgagagatgatttactttgagaaaagacattgtgtcacctatgaaattttattaggcacagagtcatattttaaggtagatagttctgtactgctgaaatagtaattttaatgtctttatattgccacatgttaagaccataatgtagttataaatggaaatgtttacacctgaagtattttcaaattaaaatttaat

SEQ ID NO: 207831 - DNA, 450 bp, Homo sapiens
gagagcagtttggaaattaagaactaacaatgaccgttggatgcagcaatcccattactatactaggggtatatctagaagacaataaatcattgtaataaaaagatgcatgcacatgtgtgttcattgcagcactattcaaaacagcaaagacatggagtcaatccaggtgcatccaaggcagattgaaaatccaaggtagattggaaagttccatatataccatggaatactatgcagccaagaaaagaacaaaatcatgtcctttgcagcaacatggatacagctggaatccactatcttaagcaaactaacacagaaacagaaaccaaatatctcatgttttcacttatgtgggagctacacattgggtgcacattgtcataaacmtgggaactatagacactgggaaataagaacagggagggacagagtgggccagggttggaa

SEQ ID NO: 207832 - DNA, 450 bp, Homo sapiens
gagagcagtttggaaattaagaactaacaatgaccgttggatgcagcaatcccattactatactaggggtatatctagaagacaataaatcattgtaataaaaagatgcatgcacatgtgtgttcattgcagcactattcaaaacagcaaagacatggagtcaatccaggtgcatccaaggcagattgaaaatccaaggtagattggaaagttccatatataccatggaatactatgcagccaagaaaagaacaaaatcatgtcctttgcagcaacatggatacagctggaatccactatcttaagcaaactaacacagaaacagaaaccaaatatctcatgttttcacttatgtgggagctacacattgggtgcacattgtcataaacatgggaacwatagacactgggaaataagaacagggagggacagagtgggccagggttggaa

SEQ ID NO: 207833 - DNA, 544 bp, Homo sapiens
gatacagaaatttatatattgcacttatctattctggggtttttaatcaagagtgtatcccaaccttgaaggttttttgttwttttgtgtgtggttttttttttttttttttttttggctattattgttgttagagacaagagtctcactatgttgctcaagctggattcaaactcttaggctcaagctgggactacaggaatacaccactttgcccagcttcaaaaaaacatttttaaacatgttcaggccttattaggtctattacatcaaaatcttcaggggaaagcctacaattgtaaatttttaacaaaatgtcctcaggtcactgtaatgcacaattctgaaaattagtgcagcaatcacttcagtctcacctttcacccacatggctaattcctttatcagttggagatgtggccaaaaagagaaaagagtaagagagagtgtcatttattaaaactccagttaagtttcctggctatgggtaaaacagggacaagtaaactcaaaatcccacttgattttgctatttacaagctcc

SEQ ID NO: 207834 - DNA, 544 bp, Homo sapiens
gatacagaaatttatatattgcacttatctattctggggtttttaatcaagagtgtatcccaaccttgaaggttttttgttattttgtgtgtggttttttttttttttttttttttggctattattgttgttagagacaagagtctcactatgttgctcaagctggattcaaactcttaggctcaagctgggactacaggaatacaccactktgcccagcttcaaaaaaacatttttaaacatgttcaggccttattaggtctattacatcaaaatcttcaggggaaagcctacaattgtaaatttttaacaaaatgtcctcaggtcactgtaatgcacaattctgaaaattagtgcagcaatcacttcagtctcacctttcacccacatggctaattcctttatcagttggagatgtggccaaaaagagaaaagagtaagagagagtgtcatttattaaaactccagttaagtttcctggctatgggtaaaacagggacaagtaaactcaaaatcccacttgattttgctatttacaagctcc

SEQ ID NO: 207835 - DNA, 400 bp, Homo sapiens
aagagtctcactatgttgctcaagctggattcaaactcttaggctcaagctgggactacaggaatacaccactttgcccagcttcaaraaaacatttttaaacatgttcaggccttattaggtctattacatcaaaatcttcaggggaaagcctacaattgtaaatttttaacaaaatgtcctcaggtcactgtaatgcacaattctgaaaattagtgcagcaatcacttcagtctcacctttcacccacatggctaattcctttatcagttggagatgtggccaaaaagagaaaagagtaagagagagtgtcatttattaaaactccagttaagtttcctggctatgggtaaaacagggacaagtaaactcaaaatcccacttgattttgctatttaca

SEQ ID NO: 207836 - DNA, 400 bp, Homo sapiens
aagagtctcactatgttgctcaagctggattcaaactcttaggctcaagctgggactacaggaatacaccactttgcccagcttcaaaaaaacatttttaaacatgttcaggccttattaggtctattacatcaaaatcttcaggggaaagcctacaattgtaaatttttaacaaaatgtcctcaggtcactgtaatgcacaattctgaraattagtgcagcaatcacttcagtctcacctttcacccacatggctaattcctttatcagttggagatgtggccaaaaagagaaaagagtaagagagagtgtcatttattaaaactccagttaagtttcctggctatgggtaaaacagggacaagtaaactcaaaatcccacttgattttgctatttaca

SEQ ID NO: 207837 - DNA, 400 bp, Homo sapiens
aagagtctcactatgttgctcaagctggattcaaactcttaggctcaagctgggactacaggaatacaccactttgcccagcttcaaaaaaacatttttaaacatgttcaggccttattaggtctattacatcaaaatcttcaggggaaagcctacaattgtaaatttttaacaaaatgtcctcaggtcactgtaatgcacaattctgaaaattagtgcagcaatcacttcagtctcacctytcacccacatggctaattcctttatcagttggagatgtggccaaaaagagaaaagagtaagagagagtgtcatttattaaaactccagttaagtttcctggctatgggtaaaacagggacaagtaaactcaaaatcccacttgattttgctatttaca

SEQ ID NO: 207838 - DNA, 229 bp, Homo sapiens
cacttgtaaaattctggattgctaagagattttcaaatagaatttaaaagaaaacacacgaccaagacaataatgaaaatctatasataaatttactattacctttagcttctgaacatacagccaaaaatccatcttctgtcactgctttaaacgaaggtctgactcctcatgtatctctgcccaggaacactttcttattggcagaatccagtaaaacaaatgcaaa

SEQ ID NO: 207839 - DNA, 229 bp, Homo sapiens
cacttgtaaaattctggattgctaagagattttcaaatagaatttaaaagaaaacacacgaccaagacaataatgaaaatctatagataaatttactattacctttagcttctgaacrtacagccaaaaatccatcttctgtcactgctttaaacgaaggtctgactcctcatgtatctctgcccaggaacactttcttattggcagaatccagtaaaacaaatgcaaa

SEQ ID NO: 207840 - DNA, 229 bp, Homo sapiens
cacttgtaaaattctggattgctaagagattttcaaatagaatttaaaagaaaacacacgaccaagacaataatgaaaatctatagataaatttactattacctttagcttctgaacayacagccaaaaatccatcttctgtcactgctttaaacgaaggtctgactcctcatgtatctctgcccaggaacactttcttattggcagaatccagtaaaacaaatgcaaa

SEQ ID NO: 207841 - DNA, 229 bp, Homo sapiens
cacttgtaaaattctggattgctaagagattttcaaatagaatttaaaagaaaacacacgaccaagacaataatgaaaatctatagataaatttactattacctttagcttctgaacatacagccaaaaatccatcttctgtcactgctttaaacgaaggtctgactcctyatgtatctctgcccaggaacactttcttattggcagaatccagtaaaacaaatgcaaa

SEQ ID NO: 207842 - DNA, 388 bp, Homo sapiens
attctctgtaaaatgaagatgtacttttcatctcatgtgtatatataactgatatatataacatatctgttatatatgtatacatatcagtaatatatatatatatatatcttaygatatataataaacaacataggccaggcgcggtggctcacacctgtaatcccagcgctttgggaggcggaggcaggcagatgacttgaggtcaggagttcgagaccagcctggccaacgtggtgaaactaaatatacaaaaattagccaggcatgctggcacctgcctgcaatcccagctacttgggaggctgaggttggaaaattgcttgaacccggcaggcagaggttgcagtgagccaagattgtgccattggacaccagcctgggcaaa

SEQ ID NO: 207843 - DNA, 388 bp, Homo sapiens
attctctgtaaaatgaagatgtacttttcatctcatgtgtatatataactgatatatataacatatctgttatatatgtatacatatcagtaatatatatatatatatatcttacgatatataataaacaacataggccaggcgcggtggctcamacctgtaatcccagcgctttgggaggcggaggcaggcagatgacttgaggtcaggagttcgagaccagcctggccaacgtggtgaaactaaatatacaaaaattagccaggcatgctggcacctgcctgcaatcccagctacttgggaggctgaggttggaaaattgcttgaacccggcaggcagaggttgcagtgagccaagattgtgccattggacaccagcctgggcaaa

SEQ ID NO: 207844 - DNA, 388 bp, Homo sapiens
attctctgtaaaatgaagatgtacttttcatctcatgtgtatatataactgatatatataacatatctgttatatatgtatacatatcagtaatatatatatatatatatcttacgatatataataaacaacataggccaggcgcggtggctcacacctgtaatcccagcgctttgggaggcggaggcrggcagatgacttgaggtcaggagttcgagaccagcctggccaacgtggtgaaactaaatatacaaaaattagccaggcatgctggcacctgcctgcaatcccagctacttgggaggctgaggttggaaaattgcttgaacccggcaggcagaggttgcagtgagccaagattgtgccattggacaccagcctgggcaaa

SEQ ID NO: 207845 - DNA, 388 bp, Homo sapiens
attctctgtaaaatgaagatgtacttttcatctcatgtgtatatataactgatatatataacatatctgttatatatgtatacatatcagtaatatatatatatatatatcttacgatatataataaacaacataggccaggcgcggtggctcacacctgtaatcccagcgctttgggaggcggaggcaggcagatgacttgaggtcaggagttcgagaccagcctggccaacgtggtgaaactaaatatacaaaaattagccaggcatgctggcacctgcctgcaatcccagctacttgggaggctgaggtwggaaaattgcttgaacccggcaggcagaggttgcagtgagccaagattgtgccattggacaccagcctgggcaaa

SEQ ID NO: 207846 - DNA, 428 bp, Homo sapiens
ggatctaattaaactaaaggggttctgcacagcaaaagaaactaccatcagagtgaacaggcaacctacagaatgggagaaaagttttgcaatctacccatttgacaaagggctaatatccagaatctacaaagaactcaaatttacaagaaaaaaacaaccccatcaaaaaktggccaaaggatatgaagagacacttctcaaaagaagacatttatgcagccaaaagacacatgaaaaaatgctcatcatcactggccatcagagaaatgcaaatcaaaactacaatgagataccatctcacacaagttagaatggtgatcattaaaaagtcaggaaacaacaggtgctggagaggatgtggagaaacaggaaggcttttacactgttggtggggctgtaaactagttcaaccattgtggaagact

SEQ ID NO: 207847 - DNA, 580 bp, Homo sapiens
tgatccactggacattcacaaactatattgttcaaaacattagttctgaattttgatctgagtatccccggagttgcagtttcattcaaagatgtccaagaggtcaaataagacaatatcatttgctattttcagttttcttttttgagaacagcacaacaaacttcttcagagaaatgaatygtcctaacttcataggctaaaggctcatgagtcacagttctaagggcatttataaaatatggtggtgcatgcttgtattctgaacttttcaactttaaactctcatatagtaaatattaataaatacaaactgattaaagaaaagcccacttaatctgacattatttttatttttctttctttcttcatttatcagcaacaggagagtctaactaaatgtggtaaagtggtataagggaatacaatgaaaagtgtaaaatgaattaaaccagagataatcatatcaatgtggatacatctggaaaatataatacaaaatacaccaaagaaagtggcagaaaggtatgtaaagtgtataaccactcacataccattttgggacacaaataaaaaattc

SEQ ID NO: 207848 - DNA, 580 bp, Homo sapiens
tgatccactggacattcacaaactatattgttcaaaacattagttctgaattttgatctgagtatccccggagttgcagtttcattcaaagatgtccaagaggtcaaataagacaatatcatttgctattttcagttttcttttttgagaacagcacaacaaacttcttcagagaaatgaatcgtcctaacttcataggctaaaggctcatgagtcacagttctaagggcatttataaaatatggtggtgcatgcttgtattctgaacttttcaactttaaactctcatatagtaaatattaataratacaaactgattaaagaaaagcccacttaatctgacattatttttatttttctttctttcttcatttatcagcaacaggagagtctaactaaatgtggtaaagtggtataagggaatacaatgaaaagtgtaaaatgaattaaaccagagataatcatatcaatgtggatacatctggaaaatataatacaaaatacaccaaagaaagtggcagaaaggtatgtaaagtgtataaccactcacataccattttgggacacaaataaaaaattc

SEQ ID NO: 207849 - DNA, 533 bp, Homo sapiens
tactgatgacctatttctattttatttcctttttaattatggcataatttctcaacataacatatcaaaacttatacacccttaaatattaaaaaatacaatgtaagcaatattttaaatacaatatttaattattagatacattaggtttattatattacttataacattccattatataaaaattcatttgtctatttattcagattaaacaactrttaaggctgaatgtcttatgcctgtaacccagcactttgagaggctgaggcaggcagaacacttgagcccaacagttaaagaccagcctgggcaacaaggcaaaaccctgtctctacaaaactcagctgagcatggtgacacaggtctatggtgacatagctctattgtttcaactactgggatggctgaggtgtgaggatcacctgagcccaggaaatggagatcggagtgagccaagatctcaccagtgccctccagcctgggggacagaatgaaaccccatctcaaaaaacaacaagtaaaatgcttcttac

SEQ ID NO: 207850 - DNA, 533 bp, Homo sapiens
tactgatgacctatttctattttatttcctttttaattatggcataatttctcaacataacatatcaaaacttatacacccttaaatattaaaaaatacaatgtaagcaatattttaaatacaatatttaattattagatacattaggtttattatattacttataacattccattatataaaaattcatttgtctatttattcagattaaacaactattaaggctgaatgtcttatgcctgtaacccagcactttgagaggctgaggcaggcagaacacttgagcccaacagttaaagaccagcctgggcaacaaggcaaaaccctgtctctacaaaactcagctgagcatggtgacacaggtctatggtgacatagctctattgtttcaactactgggatggctgaggtgtgaggatcacctgagcccaggaaatggagatcrgagtgagccaagatctcaccagtgccctccagcctgggggacagaatgaaaccccatctcaaaaaacaacaagtaaaatgcttcttac

SEQ ID NO: 207851 - DNA, 533 bp, Homo sapiens
tactgatgacctatttctattttatttcctttttaattatggcataatttctcaacataacatatcaaaacttatacacccttaaatattaaaaaatacaatgtaagcaatattttaaatacaatatttaattattagatacattaggtttattatattacttataacattccattatataaaaattcatttgtctatttattcagattaaacaactattaaggctgaatgtcttatgcctgtaacccagcactttgagaggctgaggcaggcagaacacttgagcccaacagttaaagaccagcctgggcaacaaggcaaaaccctgtctctacaaaactcagctgagcatggtgacacaggtctatggtgacatagctctattgtttcaactactgggatggctgaggtgtgaggatcacctgagcccaggaaatggagatcggagtgagccaagrtctcaccagtgccctccagcctgggggacagaatgaaaccccatctcaaaaaacaacaagtaaaatgcttcttac

SEQ ID NO: 207852 - DNA, 533 bp, Homo sapiens
tactgatgacctatttctattttatttcctttttaattatggcataatttctcaacataacatatcaaaacttatacacccttaaatattaaaaaatacaatgtaagcaatattttaaatacaatatttaattattagatacattaggtttattatattacttataacattccattatataaaaattcatttgtctatttattcagattaaacaactattaaggctgaatgtcttatgcctgtaacccagcactttgagaggctgaggcaggcagaacacttgagcccaacagttaaagaccagcctgggcaacaaggcaaaaccctgtctctacaaaactcagctgagcatggtgacacaggtctatggtgacatagctctattgtttcaactactgggatggctgaggtgtgaggatcacctgagcccaggaaatggagatcggagtgagccaagatctcaccagtgccctccagcctgggggacagartgaaaccccatctcaaaaaacaacaagtaaaatgcttcttac

SEQ ID NO: 207853 - DNA, 630 bp, Homo sapiens
aatttctaatgaagcatttaacaatatttttcaagatcttgagaaactacatcttagtgcatatacatcttagtgcatatattataccatagataggagatcttggtatcatataacacatctgaaataaaatggatacacctttctaccttttcactctattgcattagtgatatgaagtttgattttctttatatcagacctaaataagcaagttgtcaacttttataggaaaaaatatataaatatataacgtataaattttttttaaaaaagcgtaagtagaggcacaaagcaattacctatgattcatttttgagcctatggtttttaaattttaatgtctagagatactgttaacagttggaatctgatcttggaggtgaaatgaaatttttttttcttattttccccaaaactgaraagaaatatgactgtttacccgagtttcattcttaaaccatgttggggtggcctttgggctgattgtcaccattgtttatatgctcagtgatttcagtctgggggtgctttcagggtttctggagcagttttgaagccacagaaataataattaatttttaaaatatcctgtcaaaacaactttttctgactcaagcatttgtttga

SEQ ID NO: 207854 - DNA, 470 bp, Homo sapiens
tatcatactacctgatttcaaactactacaaagctattgtaattaaaacagcatgatgctggcataaaaaaagatacattgaccaatggaacagaatggagagtccagaaatgaacccacacatgtatggttttcaacaaaggtaccaagaatatgcaatggagaaaggacagtcacttcaataaaygatgttgggaaaactggatagccacaggcaacagaataaaatttgatccttatctcataccaaatacaaatatctactcaaaatggattaatgaactaaatgtaagagcagaaactacaaaactactagacaaaaacaaattggagaaatcacagaacatttgccaaggtaataattttttttatttgacccccaaagtgccaatgacataaacaaaaatagagaaatgggattacattaaactaaaaagcttctgcaccataaaggaaacaactaacaatgg

SEQ ID NO: 207855 - DNA, 581 bp, Homo sapiens
agcctgcagaaggaaccaactttgccaacactttgatttaagatttctggcctccaggactgtaagagaagaaattgctgctgttttaagtgatctagtttgtgatgatttgttatagtagccctaagaaactactataagaatggagccaacaagagctgcagtggctaggcaaggggacctacgggcagcctcacagagtctcatcctgcacactgcacagaaagcagcgaggcttcccagcccaagggttacagagagcgagagtggcctggaagaggctttaggccrggacaagagaggatcagagcatgaacacaatgggcctgggacaatggcttggtgtcagtgttctcagtgacagatgccagcatgatgcaagagcagttcagccactcctcagggaaactgggaagggccccagtatagcaggctgccaggagggatgaggaacatcatggaggaaatcatgaggcccttcgtgtatagcatatagcccacggacctctctgcccactgacaagttatggcatgagctgcctctaatgttttgttactcaggaagaaaagaaaagattggg

SEQ ID NO: 207856 - DNA, 264 bp, Homo sapiens
ctctatgcatggtaccatcacacaggaggagggagctaatccagtaacatacattcaaagattaaattgcagatatgcacagtgtatttggcactgttcattaatattataacaccttcctctcaaagacaggcattcttaagcgttagtcacgatataccagaatttgctattcacattaaaaccaccttttaaactttataacagtaaycgattattatagttttaagaaacaaaacacaatgagaactgggaatggaattc

SEQ ID NO: 207857 - DNA, 264 bp, Homo sapiens
ctctatgcatggtaccatcacacaggaggagggagctaatccagtaacatacattcaaagattaaattgcagatatgcacagtgtatttggcactgttcattaatattataacaccttcctctcaaagacaggcattcttaagcgttagtcacgatataccagaatttgctattcacattaaaaccaccttttaaactttataacagtaaccrattattatagttttaagaaacaaaacacaatgagaactgggaatggaattc

SEQ ID NO: 207858 - DNA, 564 bp, Homo sapiens
tgacagctgtgccttatgcccagagagcacagtgcatgctggggcaggaagcaaagggctccaaggaggaggaatgaaaaaggagctggtaaattatctgactgtttgaccacayagaacactgtaatgagagatattttacagaactgtttggggatattagaagacttagacattcaaagaaaattaaacaaaggaaaaaatgaggcaattactaactctaggtaaaactgacaacaaaagtaaatacaaaaggcagccacacattccagtgcagatcactcaacactggaaagcacttatgtagtcacaacaaagtaacaaaaaaaaaaaaaaaaaaagatgtaaccaaaaatttagacataatcaattatatatggaaaaagtgaggaaaggtataggaagtataaggtttaaatgagtaaaaatcctaacatatcctataaaaagtaaattgatttaacaagaggaatattattttcacatgaggaggtaaataccagaacaaacagttaaaaacgaagtgattcttctagcaaatggcacaaatcaatgaaatgggac

SEQ ID NO: 207859 - DNA, 541 bp, Homo sapiens
tatcatccccagctcacactacttttaaaagagctgaagaaagaaatctcttgatagacagcttcctgtccatttacaacctagaaggtacctaacaaaaaacaaacaaaaaaacttgctggcaaaccaaactgtttttactgagataagaaagaaaccataaacacaatcattttaaaacactcatattttaagtatagctgctaatattgaatgacagttgccataaactctaattggatgagatgcattagagttaagtgtgttgagccaaaatgctcttacatttgccgtacagatttccgggagcaattcacagtatgtatttctgcagctataaccatttttaacccagattactctttcaggaagtttattttaagctcagtaayttaaatactgtacccaaaaaatatatagaaaggaagaaagtaagactttacaaaattattatagaggccattatatatatatagacaattattatatagacaattatccagtctaccattatgagcatttaatatagaataagaaagag

SEQ ID NO: 207860 - DNA, 491 bp, Homo sapiens
cttggctttcccagatttaacattttcagtttctattatttgggaatgaactttaagctcttcaatgtggtgatttgtaattgggtcaaatcataaatatgacagtgagaatgcaagactaatttgttggagccactcctagccaaggagaaagcctgtacccacatcttctcaagtgtgtatcttatggaggaaatcatatgttgtagtggtatttacaaaagcctgaggacatccatcataaatgttaatggtctgctagttgtacktaaactacaacttttctccatgcactcactaacactccctccctccctccctccctcagacctcctctacaccagagcctcctgccaaaccttcccacacctttgtcattaaccctttttatttcaatctctcttttagctggagacctgatttttctactcagttttaaatgctcttaagtatcatattttgtcactctatttgtagcacatctgtccttt

SEQ ID NO: 207861 - DNA, 608 bp, Homo sapiens
atcttggcaccaccaatgtcagtgagcccctcctcaatgtattcaccctcttctgtgatgcttcatatctctttcctttgggatttcaagaagaatttggttgatatgttcttctatcattttgagggttaccttctgtcttttcctaatgctaaaaatacaaagaagaaaggtagaaaagcaaaagtagcattgtaatgaacaaaattagtgttttcaaggcaaacagccaagtattacataagmcaactcacagggcatttttacaaaaattctggagaaatggctatgctggtttccagatttagaaacctctctggctcacttgaaaggactacttgggaggagggatcctatcactagacaccttccttcatgggtcaaacttttgattcaagtgtgcatgggtgagatactaagatgaaataatttgagtgtcaaaatctatgtttattatggaaaattttaaggttatattgtttctcaggaataacccaaacagacactgatgactagcattagtgacgttatggccagattatgtgaaaattgacaagcaaatatggtgtagttttcccctcttttaggaaaagcacaaagaaggatcc

SEQ ID NO: 207862 - DNA, 570 bp, Homo sapiens
catgttgtttcctcataaataacctggaacatgattcatattgttggaattaagagttggataaagaagcatttatttaaaacgttgtcagggacatggagctcttcccaaggagccaaaataccatttagagttctagagatcctgcattcttgttttgactgcatgctctggayagtttgcagctcaggtaagaacaattccaacttccagatgagattagagcctagaaggggtttaatcttcaaatcatctgctaacttaaaaacaaaatttggaaacagtaatgattaacctgattaaagctgctctcaaggatcaaccagtaaaagaagtgatagcggtgtcaacaataccacataaagtagcaggatttgtatgtcagcagtcccatttttcaagatgccaagtctaaatctatttcctacccatatttaaatgaggagccagttttggaggaattttacttgtcaagtgtgaaagagaggaagagtcagaagacactctttccaagaattctgtggataaaaggagggtttttttttttaaaccaaacctcaaaattttact

SEQ ID NO: 207863 - DNA, 570 bp, Homo sapiens
catgttgtttcctcataaataacctggaacatgattcatattgttggaattaagagttggataaagaagcatttatttaaaacgttgtcagggacatggagctcttcccaaggagccaaaataccatttagagttctagagatcctgcattcttgttttgactgcatgctctggacagtttgcagytcaggtaagaacaattccaacttccagatgagattagagcctagaaggggtttaatcttcaaatcatctgctaacttaaaaacaaaatttggaaacagtaatgattaacctgattaaagctgctctcaaggatcaaccagtaaaagaagtgatagcggtgtcaacaataccacataaagtagcaggatttgtatgtcagcagtcccatttttcaagatgccaagtctaaatctatttcctacccatatttaaatgaggagccagttttggaggaattttacttgtcaagtgtgaaagagaggaagagtcagaagacactctttccaagaattctgtggataaaaggagggtttttttttttaaaccaaacctcaaaattttact

SEQ ID NO: 207864 - DNA, 570 bp, Homo sapiens
catgttgtttcctcataaataacctggaacatgattcatattgttggaattaagagttggataaagaagcatttatttaaaacgttgtcagggacatggagctcttcccaaggagccaaaataccatttagagttctagagatcctgcattcttgttttgactgcatgctctggacagtttgcagctcaggtaagaacaattcyaacttccagatgagattagagcctagaaggggtttaatcttcaaatcatctgctaacttaaaaacaaaatttggaaacagtaatgattaacctgattaaagctgctctcaaggatcaaccagtaaaagaagtgatagcggtgtcaacaataccacataaagtagcaggatttgtatgtcagcagtcccatttttcaagatgccaagtctaaatctatttcctacccatatttaaatgaggagccagttttggaggaattttacttgtcaagtgtgaaagagaggaagagtcagaagacactctttccaagaattctgtggataaaaggagggtttttttttttaaaccaaacctcaaaattttact

SEQ ID NO: 207865 - DNA, 580 bp, Homo sapiens
aagagcttccaatggccaacactggaactgtttgagcaacaacataaagtagtactggaacctgccccaccgccaccccaaataaaatagatcygtgagtccatactgatataaagagtacagtgtggaaaggtgggttaaagtaactttacagtggagaaacccaacaaaaactagccaggtgagcaaggttaacctcaacagtgagaaatcatttgatagtatatattctctatacatacatatttatcacttgatatgataaaaatggcaccttacctctgttgtcttcctcctccaaacccataaccccagtctgatcatgagaaaaacatcagataaatcccagttcagggacatgttatataatacttgaccagtactcaaaactaataaggtaatcaaaaacaggaaaagaatgagaaactatcacagccgagaggagcctaaggcggagacatgtcaactaactgcagtgtggtttcctggatgagagcctggaacagaaagagggcgttaggcaaaaactaaggaaattagaagaaaatatggattttagttaatatatcagtaatagttc

SEQ ID NO: 207866 - DNA, 485 bp, Homo sapiens
tgccaacatttgtggcaccagggactggttttgtggaagacaatttttccatggaccagsgggtggagatggttttgggatgatttaagcacattacatttattgtgccctttatttttattattattacattgtaatatataatgaaataattatacaactcaccataatgaagaatcagtggaaactctgagctgttttcctgcaactacacagtcccatctgggggtgataggagacagtgacagatcatcagtcattagattcttataaggaacacgtaacctagatccctcacacgcacagttcacaatagggtttcgcgctcctatgagaatctaatgccgccactgatctgacaggaggcagagctcaggtggtaatgtgagtgatggggagtgactgtaaatacagatgaagcttagctcgcttgcccaccactcacctcctgctgtggggcctgattcctaacaagccacagaccg

SEQ ID NO: 207867 - DNA, 419 bp, Homo sapiens
ttcaggcattttggtttcggaatctgtgctcttgtgcactaatctgtattgcctcttaattactacaggattctcaaactttggcatgcataaggatcatcttggggagctgccaagatatatcatcactcactctaccaggattactgttctagtacagtataccgaaatatactctagaaagggaattagaaaatttttgtgtgtgtgccccaaactagctatgtgacttcrgccaaatcacttgtattcgtcagggttctccagagaaacagaactaatatgatatgtgtatatacagatatagagagaaagagatttattattaagaattggctcatgattatggatgttggtgagttcaaaatctgtagtgttgactggcaggcagagacccaggagaactgatggtgcagttg

SEQ ID NO: 207868 - DNA, 406 bp, Homo sapiens
aattcggtaatgttagaatctctgtcagtttcttggcaaatagtattcgattataaatttatgctccacaggacacacaattttagaaatgttctggaatgtttccaaattttattttggaacttggcatttggtttctctttaataatctcaatcaataatggtttatactagtcataaatgtrttagctttaaatagctgccatattccatttcagtagaaatgcttttccctttcccatagtgtgtatttgaatattcatttttgtgtgcaaagttttttccttgatacttggattcctgtggataaattatttgaaggtcatttgggaaggtggagagagagagagagagagagagagagagcgagcatgcataggttttaatgtctaacattagatttttt

SEQ ID NO: 207869 - DNA, 505 bp, Homo sapiens
cttaagcaaacgcctttcaccccaggggccaatgagtgagccagtctccccataaatactgttatccatctggaatctatgcatgagtgcccagagacaagctcagccacgggtgggcacagtgagggaaggggctgtgcttttatcccaggggttggcccagtgaggggcccgggagaagctcgcctggatctcaccttgccgctgcccttccagccatgtgagccagtggacttcctcagtgcgcgagggttttctctcactatcagccaaaagcttctaagaggacacacctttcttgatccaaactgtggtaactctgctttgcaagtcatataaagaaggagtcagcatactattttcygtaaaggcccaggcagtagatagttcagccttcgtgggccaaatggtctccattgcaactcctcaaccctcctgtgacgcagccagagacaaatgtaaacaaatgactctttctgtgttctaataaaactttacttttaaa

SEQ ID NO: 207870 - DNA, 611 bp, Homo sapiens
ttatacatattaaagcaaattaatagttttattccacattcttccattatatccagcttccccataacaatgactgctgtcatctaagttatttcgcaaagacaacagactattcttgactggcaggtttatgttttgctaggtttttttttttttttttttgtcaaatcctgatttattttaaaactttaaatattttaaaactttaaatttgtcatcataaaatcataaaaatctccagagtttttgttcatttatcatttagtttttatatttatttatttatttatttatttattatttattttttttgagatggagtcttgctctgttgcccaggctggagtgcagtgkcataatctcggctcactgcaaccaccactttccaggttcaagtgattctcctgcctcagcctcccaagtagctgggattataggtgcttgccaccatgcctagctaatgtctgtatttttagtagagacggggtttcgccatgttggccaggctgatctcaaacttctgacctcaggtgacccacccgccttggcctcccaaagtgctgggattacaggcgtgagccaccgcgcctggccagatcatttagttttta

SEQ ID NO: 207871 - DNA, 611 bp, Homo sapiens
ttatacatattaaagcaaattaatagttttattccacattcttccattatatccagcttccccataacaatgactgctgtcatctaagttatttcgcaaagacaacagactattcttgactggcaggtttatgttttgctaggtttttttttttttttttttgtcaaatcctgatttattttaaaactttaaatattttaaaactttaaatttgtcatcataaaatcataaaaatctccagagtttttgttcatttatcatttagtttttatatttatttatttatttatttatttattatttattttttttgagatggagtcttgctctgttgcccaggctggagtgcagtgtcayaatctcggctcactgcaaccaccactttccaggttcaagtgattctcctgcctcagcctcccaagtagctgggattataggtgcttgccaccatgcctagctaatgtctgtatttttagtagagacggggtttcgccatgttggccaggctgatctcaaacttctgacctcaggtgacccacccgccttggcctcccaaagtgctgggattacaggcgtgagccaccgcgcctggccagatcatttagttttta

SEQ ID NO: 207872 - DNA, 611 bp, Homo sapiens
ttatacatattaaagcaaattaatagttttattccacattcttccattatatccagcttccccataacaatgactgctgtcatctaagttatttcgcaaagacaacagactattcttgactggcaggtttatgttttgctaggtttttttttttttttttttgtcaaatcctgatttattttaaaactttaaatattttaaaactttaaatttgtcatcataaaatcataaaaatctccagagtttttgttcatttatcatttagtttttatatttatttatttatttatttatttattatttattttttttgagatggagtcttgctctgttgcccaggctggagtgcagtgtcataatctcggctcactgcaaccaccactttccaggttcaagygattctcctgcctcagcctcccaagtagctgggattataggtgcttgccaccatgcctagctaatgtctgtatttttagtagagacggggtttcgccatgttggccaggctgatctcaaacttctgacctcaggtgacccacccgccttggcctcccaaagtgctgggattacaggcgtgagccaccgcgcctggccagatcatttagttttta

SEQ ID NO: 207873 - DNA, 611 bp, Homo sapiens
ttatacatattaaagcaaattaatagttttattccacattcttccattatatccagcttccccataacaatgactgctgtcatctaagttatttcgcaaagacaacagactattcttgactggcaggtttatgttttgctaggtttttttttttttttttttgtcaaatcctgatttattttaaaactttaaatattttaaaactttaaatttgtcatcataaaatcataaaaatctccagagtttttgttcatttatcatttagtttttatatttatttatttatttatttatttattatttattttttttgagatggagtcttgctctgttgcccaggctggagtgcagtgtcataatctcggctcactgcaaccaccactttccaggttcaagtgattctcctgcctcagcctcccaagtagctgggattataggtgcttgccaccatgcctagctaatgtctgtatttttagtagagacggggtttcgccatgttggccaggctgatctcaaactyctgacctcaggtgacccacccgccttggcctcccaaagtgctgggattacaggcgtgagccaccgcgcctggccagatcatttagttttta

SEQ ID NO: 207874 - DNA, 564 bp, Homo sapiens
tcattgtaaatatttacctgtttgttttttttaataagcaataacttagcaaatacaatttacagctctactaataatttctgtagttttttttattttatactatactattttcccaatttttttaatcaggtacatatattagttttgaaattttaaaagaaatttatcaggaacatctaataatggtgaggtaaaggtcacatcattcgtctcacagaaaacaatgtaaaatctggacaaaagtatttaaaacaatattggaagaacaacaaaatgcgagcagaatttactcatgaaagactgctactgtataatgtaagaacttagtttttgcctttcttgccaaggggtgcgcaccaaactccccagcrgttctgacagcagaaaactatatccttaccacatcaaagtggttacatgtcaaagttcaaaaattagagcaactatagtttaagaaggaaattctggaggggaaagatccacagaaagactgagacacaaattctgaatataaattctactcaaaagcttgactgactgcttaattttgcatacatgttg

SEQ ID NO: 207875 - DNA, 491 bp, Homo sapiens
aatatttacctgtttgttttttttaataagcaataacttagcaaatacaatttacagctctactaataatttctgtagttttttttattttatactatactattttcccaatttttttaatcaggtacatatattagttttgaaattttaaaagaaatttatcaggaacatctaataatggtgaggtaaaggtcacatcattcgtctcacagaaaacaatgtaaaatctggacaaaagtatttaaaacaatattggaagaacaacaaaatgcgagcagaatttactcatgaaagactgctactgtataatgtaagaacttagtttttgcctttcttgccaaggggtgcgcaccaaactccccagcggttctgacagcagaaaactatatccttaccacatcaaagtggttamatgtcaaagttcaaaaattagagcaactatagtttaagaaggaaattctggaggggaaagatccacagaaagactgaga

SEQ ID NO: 207876 - DNA, 594 bp, Homo sapiens
gtacgctggggatccaagataagtaagttatgaaaaccctgcattccatacaaaattccacatgtcaccaattaagaaccactgctctagtatacacttaacttgatcatgaagaaaaatatgtactctatataaaaaccagcaagttggcaaacaagcattgccaatctcacctttacttgcagatgagtgctcttgcacctgtgttcccatccaccatttgtccaagcaaaaagttgtcagacctgaatccttcttctgccacaatgtatcatactatatagtaactaattattcatttacaattctcactagaatayagattctatttcactaatatacctctgccacttacacctgataaacactcaaaaaatattgaataaatgcaagatgtaagagctaatgagtaagtcattgtttggactatgtcaagtaagtgcttatttactgattatattggggtatgtggtttagcaaagtatgaacaaatatttccttaactacattaaagcaatttcaaatgctgaaaaaataattcattagcttttcatattaatgaaatcaatttggagctgggcgcagtggctcaaa

SEQ ID NO: 207877 - DNA, 594 bp, Homo sapiens
gtacgctggggatccaagataagtaagttatgaaaaccctgcattccatacaaaattccacatgtcaccaattaagaaccactgctctagtatacacttaacttgatcatgaagaaaaatatgtactctatataaaaaccagcaagttggcaaacaagcattgccaatctcacctttacttgcagatgagtgctcttgcacctgtgttcccatccaccatttgtccaagcaaaaagttgtcagacctgaatccttcttctgccacaatgtatcatactatatagtaactaattattcatttacaattctcactagaatatagattctatttcactaatatacctctgccacttacacctgataaacactcaawaaatattgaataaatgcaagatgtaagagctaatgagtaagtcattgtttggactatgtcaagtaagtgcttatttactgattatattggggtatgtggtttagcaaagtatgaacaaatatttccttaactacattaaagcaatttcaaatgctgaaaaaataattcattagcttttcatattaatgaaatcaatttggagctgggcgcagtggctcaaa

SEQ ID NO: 207878 - DNA, 594 bp, Homo sapiens
gtacgctggggatccaagataagtaagttatgaaaaccctgcattccatacaaaattccacatgtcaccaattaagaaccactgctctagtatacacttaacttgatcatgaagaaaaatatgtactctatataaaaaccagcaagttggcaaacaagcattgccaatctcacctttacttgcagatgagtgctcttgcacctgtgttcccatccaccatttgtccaagcaaaaagttgtcagacctgaatccttcttctgccacaatgtatcatactatatagtaactaattattcatttacaattctcactagaatatagattctatttcactaatatacctctgccacttacacctgataaacactcaaaaaatattgaataaatgcaagatgtaagagctaatgagtaagtcattgtttggactatgtcaagtaagtgcttatttactgattatattggggtatgtggtttagcaaagtatgaacaaatatttccttaactacattaaagcaatttcaaatgctgaaaaaataattcattagcttttcatrttaatgaaatcaatttggagctgggcgcagtggctcaaa

SEQ ID NO: 207879 - DNA, 600 bp, Homo sapiens
attttatagagtttcactctttttgtcaacactcacaaaggtagaaagtggaaagattctacaggtctgttagaggacaaagctgttgctctgcccaccacatcacccagggggaccttccccaagaggccccacctctattcagtgaagctcaatgatcatttattgagcaactggacactgtaggccccgacaaaataaagattaatcattacatcaactttcaatgagttcatcccatctaagtggggtaaaaaataaaagtacaaaccagttaagagctacttggtaaaggttctgaatgactaaccaatgctccaacagagsaggaccataactcagcctgaaggcttcctagaagaggtgatggctgaaggtattcatttacattttaaccatgattcattcacattgaacaatgcctcatcctccctgcacgccagcaccttgacttctaaggcattctctagctcaggtgtctctccattatcctctcagggaccagaaccagccacctataagaggaaaccagagccaacagaaccagtcacctgtgagaggaaaccagagccaagctttcccccacccaccaacgacagc

SEQ ID NO: 207880 - DNA, 538 bp, Homo sapiens
aatccatcaatagctaggctcttgatgcctgattcccagggtactttagctcttagtcttaaatatgaatattattcataagcttttttactaaagagatcaatcattatgtgcatattaaatttgcattattkctgctgttaacagtgccctttggctggccacagattacactcttatgcataggctgccatagacaataaacatttcattagtgacacttgaaatgtactcacaggataccatatccccaagagtgtatatgtgaattataagaaacctgtttaatgttagggcaagtacatattccctatagtttgcattgtatttctattctgggtgccacaaaccctaccattaaatatattttgcccacttaaaaactgctttgtggggatggcatgtcttaattgttcccaagacaatgcataatgcactgctgtgatgggccttcagttaaactaataggcaggcaagttgctgcctggcttcagcagattttaaagcactaatgaaacacactgtacgaaacaacagt

SEQ ID NO: 207881 - DNA, 529 bp, Homo sapiens
ctactcacccttggctagtttacgtactgtgaatttcaaccactcaatggatwagggcaacttagcctgttggttaattttgctcaccccatcagggaaaaaccgtgactcttttggttggaatataggtctccattggaaaatcggggtatgcagggagtttcctatctcctacctgtcagaggcacaggcatgcttgtgattgtttcttcttctgatctttctgcacagttaatcctttcagagtctgacaactctttgtatccctcccaccccacagcactccttatctattaacaaactgggctaattgtttgttgtctgctcccaactccatggcagctagaataatatctctgcaaggacagggaattttctatatatgtttacataaggacagggaatttcctctatatgtttacttaaaacagggcctggccctgtgtaagatttcaaataaatgctttttaatatattaacaaccttactttttagtacaactgtgactctacaagtgttctgttttcaa

SEQ ID NO: 207882 - DNA, 571 bp, Homo sapiens
taggtgatggcctccaggttgctactgagagtaattctcacagcattcctaggttccccccttgcttttccagagaggacagtggctcttaaacccaattttgtatgcatgtggttccttccagtttatgctgcagcagatctgacttctctactctaaggagctgtccttagccattgcgacctcagttcctgcaggtgacagtatggctttctgctgatttattaaaaatctcccattttatggctcctgtgtactctctggrgtgtgatcatgtgaccagtataatgacaatctgtctccctgctaacatttctctactttggttatttgtttgataaagtgaggagcttcccttttgttgcccttcatcagagcttaatgtctttactttgggatcaatatactttatgaataattttatttccttctatttttatggtcttttctcctcattatcatactgagtttattagctggtgctgtcagtatctttaccctgtcatatgttcctgaggtacagtaaatatcacttgtgttgtaattaatatgcacaccctctgcagtaatt

SEQ ID NO: 207883 - DNA, 563 bp, Homo sapiens
attaccagaaaaatgaaattaaactacagtggaataacattacatacccaccagaatgtctaaaattttaaatggcagaaaatattgagattttaatgaagatgtggttcatactgctgggaggartataagttgatataatcactttgaaaaaatggtaatctttaccaaagctgaacataaacatgattcttaggtacattagcttaacagaaatgcacacacatattcaccaaaagatatacaaagaatgtttgtagttacaatattcacagtagccaaaaaccaaaagaactcaaatgtctataaacactagagaaattatggcatattcatacaacgtaacaccgtgctatccagtaatgagaacaaagaatagtggttatgtttgcagaacaattaatgactagaacagggcaggggtgcttctaggtgctggtaaagttttatttcttgctgtgagtagtgggtaagcaggtccactcaaaaactctgtgaaagattatttggagatggggcgtttggaaggtgattaggtcatgaggatggaaccctcatgaata

SEQ ID NO: 207884 - DNA, 567 bp, Homo sapiens
agcttgcattgttgtattacatagacatcactgagtctccagcccctaatcccctcccagaggtcagggggtggggccaatatcacatgagaggttcctcactgtcagcttccatgcagaagctatctagggacctatcaagagttgccttgttagcataaactcaggtgtgatagaaagaggcttattwtgaataataaaggactcttctgtcacacctatcactcaggaaattccaagagttttagaaactctatgccaggaactggggacaaagaccaaatatatattttccttattatataacaatatcacaatctctttgcacatctgctttgcccctcctgcagccttggcatggtttttcttccaatggccagcacctgtgaacattctttgctggcccaaccaagcaaatgaaattaacatattcattagataagaacccaggctccttatctaatgaataatgtgttttggagcatgagagcccagttcctttgcttccagttgggacaaatttcctacaggatacttggagttccctttaggaccaggctgaggcta

SEQ ID NO: 207885 - DNA, 612 bp, Homo sapiens
tggtgcacccattaactcgtcatttacattaggtattcttttagaattattaaactcatcattaatggtatttttaaaaaagtaacatacacaaaaaaattacatatagttaagaatttgttttgtaaatgaattgcttgaatattttgatttttattgagtatggtaggagatgaatgggtctcctacccattcatgaatgattcattcattaatgataaacattcattcctttatacctgacaaaggcccccattttgtacatttttcccatgtagtgatgaagaagtaccagagaaactacaggcctctctcaggctaagagcatccagggattcatgtagccatctgtgtaaaggctggcaagaatatttaagtttatctkattgaatgtcctcattttgatataggagaagtttcaacttcactgatactcacccaggacggttagttgctagtctagagtgaagccacaattttctcaccatattgtttttgctactctccacttcacctacatttcttgatccatcatattctgtgttaaactgggaatcaatttatattactcaggattagcaaacagaactaatagaatatgtgtgtatatat

SEQ ID NO: 207886 - DNA, 612 bp, Homo sapiens
tggtgcacccattaactcgtcatttacattaggtattcttttagaattattaaactcatcattaatggtatttttaaaaaagtaacatacacaaaaaaattacatatagttaagaatttgttttgtaaatgaattgcttgaatattttgatttttattgagtatggtaggagatgaatgggtctcctacccattcatgaatgattcattcattaatgataaacattcattcctttatacctgacaaaggcccccattttgtacatttttcccatgtagtgatgaagaagtaccagagaaactacaggcctctctcaggctaagagcatccagggattcatgtagccatctgtgtaaaggctggcaagaatatttaagtttatctgattgaatgtcctcattttgatataggagaagtttcaactycactgatactcacccaggacggttagttgctagtctagagtgaagccacaattttctcaccatattgtttttgctactctccacttcacctacatttcttgatccatcatattctgtgttaaactgggaatcaatttatattactcaggattagcaaacagaactaatagaatatgtgtgtatatat

SEQ ID NO: 207887 - DNA, 374 bp, Homo sapiens
ttaccacttacatatttaactgtttaaatagcctaagtacatttatgataagacatttagcagaagacatttcctcagcttcttcagaaaaaatcctactagtatattatcttaaagtactcaccaaaaaaaaaaaaaaatacaacagagatatatttgtttcctgtctagtgaaaacagcaaaaatctcaacatatggctctcttacctcctcatgaggccatgagcttattgaggaggaagccatttgtcaattatgcttatactctcagaacatagcatagggtccaatatatgggtaaatmattttgttgagtcatttaacaaccaaatctggacgatggagattgagccttggcacacattccatcatg

SEQ ID NO: 207888 - DNA, 549 bp, Homo sapiens
atatagtctgcaataacttctttcagaaatggtgtatacattttaaaaggagagaatcaatagctgtaagattaaaaaacattattcatctctttctcacagcagggtgactaagcctgctrtcaccaaacatgttacctcactgttccctgatggagttcctttaataggatgagatgaatgcaagtgtttaactattttaacatatcaacaacagaaaataaaagcagctattgaaacaaattatctggcttcccactcattaaatatgtttatgtcattagacagaatgatactgatgcctaaaagttctatacaggttgagcatccctaatctagaaatcaaaactccaaaatgctctaaattctgaaactgttaaagcactgacatacttaaaggtcatactcaaaggaaaagcttactggagcatttcagatttcatacattcggattagagatactcaacaaataagtatatgcaaacacagcaaacctcatactattgcactttgctttattgtgctttgcaaatattgcattttttaaaa

SEQ ID NO: 207889 - DNA, 605 bp, Homo sapiens
gaatgaaagctggagggaaatataattgtgacatgtgaagtatgaaatatacttcaacttagtatagaagtataggcttaattctttgcaccaaggggcatctagaaaccatctccagaagctttyggtgataccttattaatccttctctaggtgtaccacttaggaaatgtaaatggtactaaaagaaataatttgttaggtccttaatcccacaaaagttgattaagtcattgtctgtgaataaagactaggtgagaaaattgggagctttgggaaaagggagcccaaggaaaaagtggaacaggctggaaaaaaaggaaagtgaattaaagaatagggaatcagatttcttttccattttgacttaaggatatgtcagggccaaaactatagaaatttgaaattggttcatttagaggatcaatgctcttttttcaagtgatttttttcctaagtgattcttttcctaagcaagtcacactgattttttggtttccaaactcattgacttatgggcagtttggagaattaaaaaaaggtatagactactaaggcgtcttgtgtaccagacaaaggtttcttggattctgaggatttatttc

SEQ ID NO: 207890 - DNA, 605 bp, Homo sapiens
gaatgaaagctggagggaaatataattgtgacatgtgaagtatgaaatatacttcaacttagtatagaagtataggcttaattctttgcaccaaggggcatctagaaaccatctccagaagctttcggtgataccttattaatccttctctaggtgtaccacttaggaaatgtaaatggtactaaargaaataatttgttaggtccttaatcccacaaaagttgattaagtcattgtctgtgaataaagactaggtgagaaaattgggagctttgggaaaagggagcccaaggaaaaagtggaacaggctggaaaaaaaggaaagtgaattaaagaatagggaatcagatttcttttccattttgacttaaggatatgtcagggccaaaactatagaaatttgaaattggttcatttagaggatcaatgctcttttttcaagtgatttttttcctaagtgattcttttcctaagcaagtcacactgattttttggtttccaaactcattgacttatgggcagtttggagaattaaaaaaaggtatagactactaaggcgtcttgtgtaccagacaaaggtttcttggattctgaggatttatttc

SEQ ID NO: 207891 - DNA, 605 bp, Homo sapiens
gaatgaaagctggagggaaatataattgtgacatgtgaagtatgaaatatacttcaacttagtatagaagtataggcttaattctttgcaccaaggggcatctagaaaccatctccagaagctttcggtgataccttattaatccttctctaggtgtaccacttaggaaatgtaaatggtactaaaagaaataatttgttaggtccttaatcccacaaaagttgattaagtcattgtctgtgaataaagactaggtgagaaaattgggagctttgggaaaagggagcccaaggaaaaagtggaacaggctggaaaaaaaggaaagtgaattaaagaatagggaatcagatttcttttccattttgacttaaggatatgtcagggccaaaactatagaaatttgaaattggttcatttagaggatcaatgctcttttttcaagtgatttttttcctaagtgattcttttcctaagcaagtcacactgattttttggtttccaaactcattgacktatgggcagtttggagaattaaaaaaaggtatagactactaaggcgtcttgtgtaccagacaaaggtttcttggattctgaggatttatttc

SEQ ID NO: 207892 - DNA, 605 bp, Homo sapiens
gaatgaaagctggagggaaatataattgtgacatgtgaagtatgaaatatacttcaacttagtatagaagtataggcttaattctttgcaccaaggggcatctagaaaccatctccagaagctttcggtgataccttattaatccttctctaggtgtaccacttaggaaatgtaaatggtactaaaagaaataatttgttaggtccttaatcccacaaaagttgattaagtcattgtctgtgaataaagactaggtgagaaaattgggagctttgggaaaagggagcccaaggaaaaagtggaacaggctggaaaaaaaggaaagtgaattaaagaatagggaatcagatttcttttccattttgacttaaggatatgtcagggccaaaactatagaaatttgaaattggttcatttagaggatcaatgctcttttttcaagtgatttttttcctaagtgattcttttcctaagcaagtcacactgattttttggtttccaaactcattgacttatgggcagtttggagaatwaaaaaaaggtatagactactaaggcgtcttgtgtaccagacaaaggtttcttggattctgaggatttatttc

SEQ ID NO: 207893 - DNA, 583 bp, Homo sapiens
ttgtgtaccagacaaaggtttcttggattctgaggatttatttcattactatagatatctctaaggcagcatgacctataaataatttaggcaatctcctacatatggagaaataataattaggaaggggcaaacttttgaaattacagtttagatttagtttagatttaaaattgcacacacagtctccctaacaaacgttaagcacttctgtctgttggagattagcaaagagtttgaggaacttattttacattggatctagtttgtcctttaattggtaaacctcaattccaatggcactacaggttgagtactccttatttgaaatgcttggaagaggagaattgttttggattttgtattttgaatacaggcataccttggagatattgcaggttcagttccagaccactgcaataaatcaaayactgcaataaagcgagtcacactgattttttggtttctaagcacatgtaaaagttatgtttacactataatgtagtctattaagtgtacaatagcatttctttaaatgtacacatcttaatttaaaaatattgttaagaaatgctaacagtca

SEQ ID NO: 207894 - DNA, 547 bp, Homo sapiens
gatctctgcttatttgtgccagtctggagtgaactagggtaatgccctgtttctctcattggcaacactgccctcatttggggtcttttatggcaattcccttttggatttcaagatttacattttaacatgggtttttcagccagggctggtctgtaggtgacaatctccacctttaggatatatctaggaacctccttcaatagatgggtgtaatgctataatgggaagtcctctaagggtggaatcctcacctggagggagtgctgtaatgaataatgcctgctgtggcacagggggaaagaacaggtattcatcatctctgttctaggcctactaaaaagcatgaytacaattgcagttgcaggcactgttaaaagcaaattgaggaattctgagaactagagaataagctattgtggtagtcctcaaatgataccacacaaccaccattacagtattatatctaagttgtgtataacaccagcagcagcactaagcttttttgtagttagttcagaaagccttgatttcatataactggacc

SEQ ID NO: 207895 - DNA, 578 bp, Homo sapiens
gtgtggtgcttgttttggcctgagctttcaaactttacactttatataatactggtggaaaagattggggggttctcttttgagtaattatcagctcaacaatgtgttagtcaaataaattataaagtattatcatgcattaaagcttctctcaacccaattaagatgagaactctagatgcttattttctgtgatgatgcacttgaccagatttatatgaactttccaaggtctctgttataatttagatgtattattgttaattcatatatacttttctattttcctaatatttyctgttgagctgattaagaacatgaccaggaaactggaattttaattcagccaatctctttaaattataccttttttgttgtttatatgtgctttatgccatttcaaaataaggaattttaagtgagtctcaagatgtcacagtagccccatgatgcatttttttagtgcaaattttttggagtacaacatcaagtctttagtaggttatcacaaaacctttgcctttctcttacaatatgatttcatttatagttctcttcttttaaataaatcagtggca

SEQ ID NO: 207896 - DNA, 316 bp, Homo sapiens
tatgcatatttacatagttgtataattacgtagtacaagtaaaaaataataaatgtgaataatacatgatcacttcaggacagtgggaagaagggggaaagggaagaggtggacgttagttgttattgtagaaatttaaatgttttaacagagatatcttataccaaattttaaaaaccattaaaaatagaayatatttgttatataacttatataacatgatacttgttatataacttacataacatgatacttgttatataacaagtgtatatgtgtgaaatatttctttttgattgtttgttttttctgagat

SEQ ID NO: 207897 - DNA, 316 bp, Homo sapiens
tatgcatatttacatagttgtataattacgtagtacaagtaaaaaataataaatgtgaataatacatgatcacttcaggacagtgggaagaagggggaaagggaagaggtggacgttagttgttattgtagaaatttaaatgttttaacagagatatcttataccaaattttaaaaaccattaaaaatagaatatatttgttatataacttayataacatgatacttgttatataacttacataacatgatacttgttatataacaagtgtatatgtgtgaaatatttctttttgattgtttgttttttctgagat

SEQ ID NO: 207898 - DNA, 551 bp, Homo sapiens
gtcaggtgcaatgttttctgctttatattatgtccactttgtctgtgttatatttaactttaggtttaaaatttggcctaaattttgcagaatttctaatgttacattctgcacacctcagtcaatcaggaaatatgttagattgaatggccactgaaaatatgaggttttgtactgaacaatttggatgtctattttatttgccagttataataaactctaaaaatactgttccatgtgtaaacattagtcttatttactccttgcatgtgttgcttgtactttcttttttttttttttttcctggagatggagtcttgctctatcccacaggctggagtgcagtggcatgatcttggctcactgcaacctctgcttcctgagttcaagtgattctcctgcctcagcctcccgagtagctgggattacaggcrttcgccaccatacccggctaatttttgtatttttagtagagacagggtttcgccatgtaggccaggctggtcgtgaactcctgacctcaggtgatccgccagtctcagcctcccaac

SEQ ID NO: 207899 - DNA, 425 bp, Homo sapiens
ataatacatgtgattcagaatataggatataaattgtctaaagatgcatcttcttcaagagtgccaaaggttttattttaatctgtgaatttaaggatgttttcatgctttcatgttttctgtaccactttttatctcctcctgaaaacattctaaataaacatacaccacaaagtttttccactaatatctaacaattaaaatgttatatgtagkcctttcatatataactttttttttttttcagagacagtattctgctctgtcacccaggctggaatgcagtggtgcaatcatagctcactgcaacctcgacctcctggactcaagtgatcctcccacctcagcttcccaagtagcctggactacgcacacaccaccaagcctggctaatttgttttcttttattttttgtagagatggag

SEQ ID NO: 207900 - DNA, 499 bp, Homo sapiens
cacatacacaaaaattcataaggatatggaagacttaaacaatattatcaactaatttgttatcattgaaatgtatagaacagtccacccaagaacatcataagacttttcaaatgcacatggaaaccttatcaaaataggccaaattctagagaataaaaagtactttgatacattttaaaggattcaggttttgcaaagtatatactgtgatcaccaatgaaatcaaattaagacaaacaaaaagctggaatatcccaaatcatttggaaattaaacaatatattctaaataactcctggttcaaaggataaacaaaaagtgaagttaggccaggcatggtggctcattcccataatcccagcactttgagaggccaaagcaagtggatcacttgaggtcaggagttcaagaccatcatggccaacatggtgaaaccctgtctttaataaaattacaaaarttagtcctgcatggtggcacatgactgtaatcccaa

SEQ ID NO: 207901 - DNA, 585 bp, Homo sapiens
tgttaaaagaatgcataaacacactgcttatacagaattgtgatgctatgattttgtgcaaactatataatattggccggaagatttatactggtcactaatgtcctttaacactaattattatactgaatacattttttttcttgccgactctaattatgtaattttcccctttcctgacaagaaatgcaagatttcacaaaataattctttgtcttaaaataccatgttatttaaaaaagtttattatttgtccccttctctctccattgtagtatgcaaaaatgggtgtttgggtccatatcaatgctaattattgagcaaaaagtgctcaagaaatagacaaagcataattttagggtctaatgtragttaagtacacatatatctttacttctttttaacctctcatcagctttctaaggccaaaactattacacccatttgcgaatgaagaaacagtgaaggactgagtaagtctaccgcaattattgagaggttcaaaatcaagaatgcaactctgcttctagtaactcttgagcttatggatcttctcctgaaactgtccagtgccctgccacatca

SEQ ID NO: 207902 - DNA, 585 bp, Homo sapiens
tgttaaaagaatgcataaacacactgcttatacagaattgtgatgctatgattttgtgcaaactatataatattggccggaagatttatactggtcactaatgtcctttaacactaattattatactgaatacattttttttcttgccgactctaattatgtaattttcccctttcctgacaagaaatgcaagatttcacaaaataattctttgtcttaaaataccatgttatttaaaaaagtttattatttgtccccttctctctccattgtagtatgcaaaaatgggtgtttgggtccatatcaatgctaattattgagcaaaaagtgctcaagaaatagacaaagcataattttagggtctaatgtaagttaagtacwcatatatctttacttctttttaacctctcatcagctttctaaggccaaaactattacacccatttgcgaatgaagaaacagtgaaggactgagtaagtctaccgcaattattgagaggttcaaaatcaagaatgcaactctgcttctagtaactcttgagcttatggatcttctcctgaaactgtccagtgccctgccacatca

SEQ ID NO: 207903 - DNA, 500 bp, Homo sapiens
gtgtaagtgctggcaataataacatgtctttaagtgattttcctaatactatcttattataattgggtctttagaatatgccaccagtgtagcttaccacagtatcataaaactaccatttrccactttgtagaatttgttttcataatcaattcacaaagcctcaaactgcattcatcaccaatttgtccatagcaattaccagggagttttgtgggctagtttatattactggctaatttgctctattgtcttttgcattttcacttatgaaaccaaagtggaataatgacttgttaactctgaacaatttctggactggagtgttatttctgtattttcctctccttccttttcctcacgttagcatgatttgactttgttttggtagattatatgcttcaaatagattattatcaatcaccctagtaacaacaatacctaacatttagttgatggtaaccatatggcccgagaaatatgttaaaagctttagagtg

SEQ ID NO: 207904 - DNA, 474 bp, Homo sapiens
gtctctagtggtcaactctgcactcatgccccagctttctagcccccacctttgctctgccatatcactcctctctgtcgtcttgctttctgcttattttcctgcatcctttcatctaatctagaattctgagttatcaaaaagattcttgcctctaagttgactcagcctcatttgctgcttttgtacaatctcagtttataacctgctgtttggctaatgatctttaattaatktgttagctataatcacactaactagggcttgtgaagagaacgtgaactttttacagtatctttgtattttccgcaacctggctttcccaacatgacactgagaacattcaactcaaaagacagaacctatcaacatgttcttttattttcctttaaatatgtgatcaggaaatttgaaacagactactcaagctacagttataagcttacatttataagttataagctacagttataa

SEQ ID NO: 207905 - DNA, 474 bp, Homo sapiens
gtctctagtggtcaactctgcactcatgccccagctttctagcccccacctttgctctgccatatcactcctctctgtcgtcttgctttctgcttattttcctgcatcctttcatctaatctagaattctgagttatcaaaaagattcttgcctctaagttgactcagcctcatttgctgcttttgtacaatctcagtttataacctgctgtttggctaatgatctttaattaatgtgttagctataatcacactaactagggcttgtgaagagaacgtgaactttttacagtatctttgtattttccgcaacctggctttcccaacatgacactgagaacattcaactcaaaagacagaacctatcaacatgttcttttattttcctttaaatatgtgatcaggaaatttgaaacagactactcaagctacagttataagcttacayttataagttataagctacagttataa

SEQ ID NO: 207906 - DNA, 563 bp, Homo sapiens
tataagatcttgattaatctttctctttctaaaaatatatgatttctacatctgccagtgaaaagtcctagaaccaattataaaccaatggtaatgactgtcctgaaattcaccaagtggtctctaaataccattttccaattaaaggaaacactcctttgagagatgcctaattttaagtgtgagaaaataaattgacaagatgagctgctaacatctgagattattaagagagtgtacaaagtgcacaacaacaaacttacttaaaggaacttccactgacaaaagggacaatttgtgcattagaaagaaaaacgactgtaagggattaaaacacacacacacacacacacacacacacacacacatacacacagtataaaaatcaatgagttcacaacaatactttaaaaagcaaaagctcattaatcactttggaggttgcaaaggtatcaacattcttagggtgcaattagtcaaattcagaatgtgagctattctatagtataactgacytgttttcttcaagtagtaaatggcatttaaaaaaactgaagaacgag

SEQ ID NO: 207907 - DNA, 364 bp, Homo sapiens
gaattctgctaaagtccttagatatgttacttartttttattactgctatgatgtttacattgtggcatttttcagatgtgatctagattggttaagtattaagaccagaatctgagaactttgattattccaaattaagtgctctaatacattacttattatcactgaaaatcaacactatctgcccatatcaaagaaatagctgactatgactatattactgaaggtgacacacagttaaataggtccatttactggaggtacaatgtaaccaaatcatataaatttaatgctcctttaatgggaactaaggataaatctttacaatatccatgcagttatttatccatataatagaaaata

SEQ ID NO: 207908 - DNA, 566 bp, Homo sapiens
gttctagtgaacagaattcacaaaatttattgtagattagaagccarattcactcaatgtttggtaactaagttttcattcttatacatgcaaatatatttatgtattttacttgaatatttatatgtgtatatttttacatattttatctttaactttattaatgtgttatagaatctttcatatccaatggcaaagctgttgattagacttatttgaataggatataaaactttacttttaatgatagtaataacttgtgttatatcatccagacttcctgtgttctgcttctgttctcacctctgtatttaaatctcccatgattattagcattcgcaaagaagaaaaatagcactcacagagaagaggaatgcataacagtaggagtgcattttctactaaggagtccatcataactaactaaatgacataattataagtttggaacctctgagccatgagttttagcactataagccaaatttcataacaatactagccaatacattattttaaaaaatactttagagctacactgataaactgataaaagcaactattta

SEQ ID NO: 207909 - DNA, 521 bp, Homo sapiens
aggactaagggctgagcctggggtatttcattattaagaggggtgaagaacaggagcaagcaaaagagactgagtaagtgaggggaaaaaaagaaatgttaaaacaccaataaaataactacattggtgattcaccttagaatcattttgttttacagscttattattacataatatgacatgataactatctactgaaagcttggctggagatgctgacattgtggtgaagggtttctcaatttcactgctgccaacattttgctcaggatactttgtagtgtgttatcctatccattgtagtgtgttaagcagcatttctggccctacccacttgataccagaagtactctcccgattgtaacaatcaaaaatatctccagacatttctaaatgagtaggaaatcatacctacttgtgctctctgatgtctgcctcctccatattccctaaatttcttaaggtccttaatgaatctctgccatgaaatttgttgaacacttctttgtcctcattcactt

SEQ ID NO: 207910 - DNA, 521 bp, Homo sapiens
aggactaagggctgagcctggggtatttcattattaagaggggtgaagaacaggagcaagcaaaagagactgagtaagtgaggggaaaaaaagaaatgttaaaacaccaataaaataactacattggtgattcaccttagaatcattttgttttacaggcttattattacataatatgacatgataactatctactgaaagcttggctggagatgctgacattgtggtgaagggtttctcaatttcactgctgccaacattttgctcaggatactttgtagtgtgttatcctatccattgtagtgtgttaagcagcatttctggccctrcccacttgataccagaagtactctcccgattgtaacaatcaaaaatatctccagacatttctaaatgagtaggaaatcatacctacttgtgctctctgatgtctgcctcctccatattccctaaatttcttaaggtccttaatgaatctctgccatgaaatttgttgaacacttctttgtcctcattcactt

SEQ ID NO: 207911 - DNA, 516 bp, Homo sapiens
gaagactggtatattgctgtagctattatcctatttctgtaaaccacctttccctgaaataattactacttttcacatatagtagggtaagaaatgattgacaaagtatgtaataaccctttcatcagtttcaaatgcatacacaaatattgaaacatgtccaactaaaatattacaaaacaggaaggataaaaattcccctttcctatcctctaccattccctaactctaaaaacttaatawaaaacttaatccatccagtctcctacaaccatatcactagatttacccatgtcagggaaatccagatataatgaggtgaatttcaagttgtctattttttatgactaccttacttttttccttatgcattacatatgaaacccactttaaccatttaccttttttcccttagctctatatgaagactagtttaggcattccctctgaatccacactatggcttttatttgaacttagacacaagaaacaaagaagtatttgataagatttgct

SEQ ID NO: 207912 - DNA, 516 bp, Homo sapiens
gaagactggtatattgctgtagctattatcctatttctgtaaaccacctttccctgaaataattactacttttcacatatagtagggtaagaaatgattgacaaagtatgtaataaccctttcatcagtttcaaatgcatacacaaatattgaaacatgtccaactaaaatattacaaaacaggaaggataaaaattcccctttcctatcctctaccattccctaactctaaaaacttaataaaaaacttaatccatccagtcwcctacaaccatatcactagatttacccatgtcagggaaatccagatataatgaggtgaatttcaagttgtctattttttatgactaccttacttttttccttatgcattacatatgaaacccactttaaccatttaccttttttcccttagctctatatgaagactagtttaggcattccctctgaatccacactatggcttttatttgaacttagacacaagaaacaaagaagtatttgataagatttgct

SEQ ID NO: 207913 - DNA, 562 bp, Homo sapiens
aatagcttgctaccttatccttttccctcatctgtacagtaggtagtatggcctggggagaaagaaggctagcgtgttttccacgcaattacttagccctacatgttsctccctattgataatcagaccttgtgagtactttcatcattttataaatataagagagtagactggactccggaaaagaagaggaagtggagataagtaaaactgtgaactaagtataattgttttttttttctttctttatacttggaaatacctgggcaaatagctatagaacattgttctctaatgagatggaaattggagctggaaccatttgaccttccattggttgaactttggtctccagagttaccatcctggaaggggcagtgtgtcaatgtattctttctgccaagactgtggagggggcccagcagtgaatggaggccagtagagccaaaggtgctgctgcaggtttctgtctacactagtgctggacaggagaactttccacaatggtagaagggcttgatatctgccacatgtgggaaatcgaacacttcaaatatggcta

SEQ ID NO: 207914 - DNA, 562 bp, Homo sapiens
aatagcttgctaccttatccttttccctcatctgtacagtaggtagtatggcctggggagaaagaaggctagcgtgttttccacgcaattacttagccctacatgttcctccctattgataatcagaccttgtgagtactttcatcattttataaatataagagagtagactggactccggaaaagaagagraagtggagataagtaaaactgtgaactaagtataattgttttttttttctttctttatacttggaaatacctgggcaaatagctatagaacattgttctctaatgagatggaaattggagctggaaccatttgaccttccattggttgaactttggtctccagagttaccatcctggaaggggcagtgtgtcaatgtattctttctgccaagactgtggagggggcccagcagtgaatggaggccagtagagccaaaggtgctgctgcaggtttctgtctacactagtgctggacaggagaactttccacaatggtagaagggcttgatatctgccacatgtgggaaatcgaacacttcaaatatggcta

SEQ ID NO: 207915 - DNA, 562 bp, Homo sapiens
aatagcttgctaccttatccttttccctcatctgtacagtaggtagtatggcctggggagaaagaaggctagcgtgttttccacgcaattacttagccctacatgttcctccctattgataatcagaccttgtgagtactttcatcattttataaatataagagagtagactggactccggaaaagaagaggaagtggagataagtaaaactgtgaactaagtataattgttttttttttctttctttatacttggaaatacctgggcaaatagctatagaacattgttctctaatgagatggaaattggagctggaaccatttgaccttccattggttgaactttggtctccagagttaccatcctggaaggggcagtgtgtcaatgtattctttctgccaagactgtggagggggcccarcagtgaatggaggccagtagagccaaaggtgctgctgcaggtttctgtctacactagtgctggacaggagaactttccacaatggtagaagggcttgatatctgccacatgtgggaaatcgaacacttcaaatatggcta

SEQ ID NO: 207916 - DNA, 536 bp, Homo sapiens
atctgttgattgaaaagatgtggatggtgaaggagatgtatatgtcagggatgatgcccatgtttctgacgtaagtattaaatgcagtgccatattcggagataggaaatcctggagggtgtaaagatggaagttttagtttttgttttcaatggttgtggttgtggtgggtgggggaacattttaagttcatttctgaacaaagtgagtttgagttacttaagggatattcagtggaaatggagtgttgctagttggctacatttcattctgatacaactcagagaagcagcctgggttggaaattatttgagtattttaggtgtatasatggcagtatgtatcaataaagttcacttaggtgagtgtaaacggagaggatgaaaagaggggaaaaaagctttgagaagagttaacttttaatgattgattagggaaggctaaggtcaactttcagtgattgattagagagggctacatgagcaagcaaggctgagaaggactaacctgagagattggaagaaaacaaagaggtt

SEQ ID NO: 207917 - DNA, 428 bp, Homo sapiens
atgataaaggtaagatgattttttactttaaattttttataataacagataaggatggaataaaagcaagttaattggttttaggaagtcactaggaaaaatcgacatttaaaaaataaataccacaaattccatcaaaggtgaatggtaagagaaaatcttaaaagaatgcacagaagcctggactggagtataatcactaaaatgattacatggtccttgttccatatactagagatgatamccacaaaacttaagtcactagttcagcaatttatagctaactatgctgcaagtgcccaaactagaaactgggtactcttctcaccagcaaatgttgtttctgttatatagtaccatggagcatgttagagcaatgagaatgagtccagagtaattagccatgaagattaaaatttgttcaattc

SEQ ID NO: 207918 - DNA, 597 bp, Homo sapiens
attatgacttggttgtcctagacagtaaagtaagaaacagaacttaaaaaaaaaaaaaaaagattgtctacagataaaaatcaaagaatgtaatgtataagcaaattattagaattaaaaagaacatttatacaaggttgctagataaaaaamaagtttttagataaaacttacaaaagcatcaaaaatattaaactcctagaaataaatttagcaaaagatgtacaatacttgtatacagaaaattacaaagcaaaatcagaattaaagaaatcctaaataaatgagggtgatacagtatgtttatgaaaaagaaaattcaacatttttaagaattctacttctaatttctcaaattcaataaaattctaattaaaaccacaagaatacttttccaaggaatttgataagctgattctcattttatatgaatgcgtcaggcagctcctaatgaaaatacagatacttgtcctactagatatcaagactcattagaattatagtaattaaaactatatcatgtactatttgtgcagagatagacaacttgatgaatagaacggaagagcccaacacagaactaggcaaaaaaagaat

SEQ ID NO: 207919 - DNA, 597 bp, Homo sapiens
attatgacttggttgtcctagacagtaaagtaagaaacagaacttaaaaaaaaaaaaaaaagattgtctacagataaaaatcaaagaatgtaatgtataagcaaattattagaattaaaaagaacatttatacaaggttgctagataaaaaaaaagtttttagataaaacttacaaaagcatcaaaaatattaaactcctagaaataaatttagcaaaagatgtacaatacttgwatacagaaaattacaaagcaaaatcagaattaaagaaatcctaaataaatgagggtgatacagtatgtttatgaaaaagaaaattcaacatttttaagaattctacttctaatttctcaaattcaataaaattctaattaaaaccacaagaatacttttccaaggaatttgataagctgattctcattttatatgaatgcgtcaggcagctcctaatgaaaatacagatacttgtcctactagatatcaagactcattagaattatagtaattaaaactatatcatgtactatttgtgcagagatagacaacttgatgaatagaacggaagagcccaacacagaactaggcaaaaaaagaat

SEQ ID NO: 207920 - DNA, 590 bp, Homo sapiens
tttaaattaatggcattagtgaaactttaactaatctccagataatccccattatatrcagctttcacccctctctcactttctgtttcctcagcctttggaaagcatgtatcaaggatttaaaaaaaaaaaaaaatagttgaaagatctaagaactagctgacagaaaatacaatacacagaggtgtctctgctctaccttcagacaaacaagatagagaaaccagcaggaatcaaaatggtctatgagaaactgcagttatttgttaagggaatggaaatgaaagagttacctagggtttattcattatcttctgaaattgaaaaaaaaatcagattacaaaaaaatgccatgacaatctacagaatatgtaatctatatttgctatactaaacaactggtttttctgtttctatgagaatatctaaagtattagcttcaatcattattttcaaaatttaacttaatcctccaaagggtttcagtgtgttttttcatcttttcctgctgtttaaaactatttaagtattcattatcccaacagatttgattctacgcaaaagcctccccaaatctactgtcattgtat

SEQ ID NO: 207921 - DNA, 590 bp, Homo sapiens
tttaaattaatggcattagtgaaactttaactaatctccagataatccccattatatgcagctttcacccctctctcactttctgtttcctcagcctttggaaagcatgtatcaaggatttaaaaaaaaaaaaaaatagttgaaagatctaagaactagctgacagaaaatacaatacacagaggtgtctctgctctaccttcagacaaacaagatagagaaaccagcaggaatcaaaatggtctatgagaractgcagttatttgttaagggaatggaaatgaaagagttacctagggtttattcattatcttctgaaattgaaaaaaaaatcagattacaaaaaaatgccatgacaatctacagaatatgtaatctatatttgctatactaaacaactggtttttctgtttctatgagaatatctaaagtattagcttcaatcattattttcaaaatttaacttaatcctccaaagggtttcagtgtgttttttcatcttttcctgctgtttaaaactatttaagtattcattatcccaacagatttgattctacgcaaaagcctccccaaatctactgtcattgtat

SEQ ID NO: 207922 - DNA, 627 bp, Homo sapiens
ttactaaatattatactaatattttcattgctaaatcatcaggaacatctgttcagtttgtcattcaataaaaatggatatacattagcaaagggaaaagtctatctggacagggaaatgataaactgtttaaggatgtgaaaatgtattcatctctgtatgtatcacagtgccagaaagaaccttgtaattagcaaacacataawatttgtagagcagataaactcaaagtgaagatcagctaaggagttatatagcataaccacctttcatctccccctacctccttccaaagagaaaaaagaaaaaggaaaaagaattcctggctttagggcacacattgttgaggaaggcacctggcttgttgttggcacttggaaatatgcatatacttgattcccttttattatttctggtgtttgtgaagacggcatctcagagaaacagaccaacaggtatgtgagagcagtgtaacagaaaggtttccatcaaaggagctggacttgagataaactttagggattagagattggaggatttggggaaaaaagttgcttttagtgacctgtgtttggaggacttgcgtaattgtctttagcttcaccagatttcaacaaggtaacccta

SEQ ID NO: 207923 - DNA, 606 bp, Homo sapiens
gtatccttagtacatcacaaaatacattttgatatcccaaagaagcaagacttgcaagtaggcgttttaaacataactaatctacagctacaaagttctactcttgatagcatttacctttttggggagtctcccaggctccaaaggataaaagcagagtagaatcagtataacatatacacagaagtccgtattgtaaaggctataaagatttgcagcacagtgagaagatgccttctgctccttcacactgcatacaaattatgtgaattatgttgcgtatctcttggtccactgtctggctatcctgtcgtgttctgctctgttggtcaaatactgagtggctatgcttccaaccagaggatccgctggaaaagcagaaagaacattaaaagctattttgtggtatcttcttcaaggtatagttctaatattctattaaaatgaaatgcttatttttcagcagtatcttcatatataatagctaaattttcaaaagaaaaagtttaaagtaacatgatcataygtatattttaatattcaagttaggaaagtccccttcataaaaaaaaaatgaattttgagctatatataaaaagttagatt

SEQ ID NO: 207924 - DNA, 606 bp, Homo sapiens
gtatccttagtacatcacaaaatacattttgatatcccaaagaagcaagacttgcaagtaggcgttttaaacataactaatctacagctacaaagttctactcttgatagcatttacctttttggggagtctcccaggctccaaaggataaaagcagagtagaatcagtataacatatacacagaagtccgtattgtaaaggctataaagatttgcagcacagtgagaagatgccttctgctccttcacactgcatacaaattatgtgaattatgttgcgtatctcttggtccactgtctggctatcctgtcgtgttctgctctgttggtcaaatactgagtggctatgcttccaaccagaggatccgctggaaaagcagaaagaacattaaaagctattttgtggtatcttcttcaaggtatagttctaatattctattaaaatgaaatgcttatttttcagcagtatcttcatatataatagctaaattttcaaaagaaaaagtttaaagtaacatgatcatacgtatattttaatattcmagttaggaaagtccccttcataaaaaaaaaatgaattttgagctatatataaaaagttagatt

SEQ ID NO: 207925 - DNA, 552 bp, Homo sapiens
tgggaatgccagggcccgaggatgttgcccctgtcctgaaggctgtcgcccgatcgctctatccaaggctgccctggggcagcgtcacctgggggtcctgcgggggcttctcagcacagcatccagcactgccacctagtgtgttcccgtcacgtctcctccccccgcctgcaccaggcaccagagacccrgatgccaaggcctgtcagcttcctcaatgggaaacttttcttcagtgaacaaagctctgttttatagactttttaaattttcagctcaaaaaccaaagtctgccagtgttggtggccttggagggctggtctgctgccctgggctgcaggggctgcccggctggggtcgtggtcggggcaggtgccgcccacaggttgtttggctgcaggtgatgggcaggtcccccatcacgtgtccagaggtgggtgctgctggtgggtaatccagctcattacctgtctccccccagccgccttgggctggggaccctgccccgccgaccctgccatgcccacccccctccagcctgattgcgtgtct

SEQ ID NO: 207926 - DNA, 562 bp, Homo sapiens
agctgactgccgggtgccacatgtgtcctgcctcaagccaagctccaggcggcacccgtgagcaggcagggatgccagtggtttctcacctgggagtttctttgcaggctcagagctctttgttcctttttaaaaatctgatttgaaggccgggcacagtggctcacacctgtaatctcagcactttgggaggccgaagtgggcatatcgcctgaggtcaggcgttggagaccagcctgggcaacacaggttggggcaactcccttccctaataaaagttcaaaaccaacccttaaagtttaaaaagtgagatgggatatttgaaggaggcaggtctgagggaaatgcttgaaattatcctctctgtccctgtgctgccaggtcatttagttccattgttattcaacataccatttgacacatgctaggagcgcaggactcggcaatataaagcgtggtaatcgatggacactgcccccrgcagccagccaggggcaggacttaagccccacccaactgcaggctgtcccccgccgctgctagcctgaaattggattggtta

SEQ ID NO: 207927 - DNA, 562 bp, Homo sapiens
agctgactgccgggtgccacatgtgtcctgcctcaagccaagctccaggcggcacccgtgagcaggcagggatgccagtggtttctcacctgggagtttctttgcaggctcagagctctttgttcctttttaaaaatctgatttgaaggccgggcacagtggctcacacctgtaatctcagcactttgggaggccgaagtgggcatatcgcctgaggtcaggcgttggagaccagcctgggcaacacaggttggggcaactcccttccctaataaaagttcaaaaccaacccttaaagtttaaaaagtgagatgggatatttgaaggaggcaggtctgagggaaatgcttgaaattatcctctctgtccctgtgctgccaggtcatttagttccattgttattcaacataccatttgacacatgctaggagcgcaggactcggcaatataaagcgtggtaatcgatggacactgcccccagcagccagccaggggcaggacttaagccccacccaactgcaggctgtcccccgcygctgctagcctgaaattggattggtta

SEQ ID NO: 207928 - DNA, 156 bp, Homo sapiens
ttaagatgagaattgggtggggacacagtsaaatcatatcattctgcccctggctcctcctaaatctcatgtacacacatttcaaaatggatcatgccttcccaacagtcccaaattcttaacttatttcagcattaactgaaatgtccacattcc

SEQ ID NO: 207929 - DNA, 553 bp, Homo sapiens
ttttaccttcttgttgcatgtatcagacaattatttattataaatgttgtgtagtattccattgaacwaatttaccataatttgattttctgttaagcagcttaacaatgttcaaattattttattactctggtagtactaaaaatctactactcaacttgaaaatgtacataaatgaggaatatattttctttttttcttacaactacatcaacaataacagataaacagtcaagatgaaattttgcaaatttctgaatgcttaggataactgaagttaaaaaaaatcttaaatttaacaagaagcaagttcttgtagagagtaacaaagccagcatatgagattacctaaggcagagtctggcgtatgaaatataggctgttaaagataaaaatacaaatatatatgggattgcttgaaattgaatatggttagcttgttgtagtttgaaattctaagggaccacatactgaagagcttttctatcctcttgaatccctttccccaaaaaaggggcagtcacaaaatcttcctttcccaaagtgtctgtct

SEQ ID NO: 207930 - DNA, 577 bp, Homo sapiens
gggtgaagctgactttctggatgcatcagtgtggaaaattgagaaaagaaacttcttgggcacatgagctgtcaaattattcaatcctggagccaytcacttccagaggcttcctgtttcatcaggttgtgattttcctcattgtgtagtcagcctaggttgtctttcttcactctctgctaaaatagtcacacataatatctagaagcattaagattaataagtaactaatttgaaaattagaacaagtcccaagtgaagtcaaagttactgtgtggttgacaggaaacatggctggatactaagagtgtgttcacatctgttttatgtagattagcaacatattttatatatcccttaagtaatactttcattgagactcctgatttaacactatttcttgatgaataacacctaaatcataaaggtggaggttattacctaataattcatattactggtacaaactttcacctagggtatattcctatacctgatgtaaaatcagcccagaatggagaagttaattctcttattagagcttgtcaattaactaaaaaccaggattaaatacaga

SEQ ID NO: 207931 - DNA, 577 bp, Homo sapiens
gggtgaagctgactttctggatgcatcagtgtggaaaattgagaaaagaaacttcttgggcacatgagctgtcaaattattcaatcctggagccactcacttccagaggcttcctgtttcatcaggttgtgattttcctcattgtgtagtcagcctaggttgtctttcttcactctctgctaaaatagtcacacataatatctagaagcattaagattaataagtaactaatttgaaaattagaacaagtcccaagtgaagtcaaagttactgtgtggttgasaggaaacatggctggatactaagagtgtgttcacatctgttttatgtagattagcaacatattttatatatcccttaagtaatactttcattgagactcctgatttaacactatttcttgatgaataacacctaaatcataaaggtggaggttattacctaataattcatattactggtacaaactttcacctagggtatattcctatacctgatgtaaaatcagcccagaatggagaagttaattctcttattagagcttgtcaattaactaaaaaccaggattaaatacaga

SEQ ID NO: 207932 - DNA, 577 bp, Homo sapiens
gggtgaagctgactttctggatgcatcagtgtggaaaattgagaaaagaaacttcttgggcacatgagctgtcaaattattcaatcctggagccactcacttccagaggcttcctgtttcatcaggttgtgattttcctcattgtgtagtcagcctaggttgtctttcttcactctctgctaaaatagtcacacataatatctagaagcattaagattaataagtaactaatttgaaaattagaacaagtcccaagtgaagtcaaagttactgtgtggttgacaggaaacatggctggatactaagagtgtgttcacatctgttttatgtagattagcaacatattttrtatatcccttaagtaatactttcattgagactcctgatttaacactatttcttgatgaataacacctaaatcataaaggtggaggttattacctaataattcatattactggtacaaactttcacctagggtatattcctatacctgatgtaaaatcagcccagaatggagaagttaattctcttattagagcttgtcaattaactaaaaaccaggattaaatacaga

SEQ ID NO: 207933 - DNA, 408 bp, Homo sapiens
tatttcttgatgaataacacctaaatcataaaggtggaggttattacctaataattcatattactggtacaaactttcacctagggtatattcctatacctgatgtaaaatcagcccagaatggagaagttaattctcttattagagcttgtcaattaactaaaaaccaggattaaatacagatgttctacattagtgtgtaattttgaaatgtgttgcaagcagaggaggttyttatgtctcctagaagccccatcaaaatggacaaaaaaagacacttttaaataaattcctacattatagagacctgacatatgaatttgaaaccaaatgccaacaaaggagaaaacaaacaaataaaacaactagtatggaagctagaataatgtgatgcaccattacaccaaa

SEQ ID NO: 207934 - DNA, 363 bp, Homo sapiens
ctgggcttttctactcagagattcattcccgagagctaactggctaactgagctagtgtccttcccttctctgcctccttggcatttgaacgtaaccagccctggatgattgtcaagggaatgagccacccactctgcaagccctgaaagcctgcccacccaagcgtgccagctctgtctagcccagagactccatagccagggcagtgctgctgtcacttggggcacccagaccagtcttcaggtyggaaagagggtggcaactgaggggtaaagaggaacagcgacttgcccagggccacgcagcaagataatggcatagcagagaggagagcaaacctggatgtctgatcttgcagcggg

SEQ ID NO: 207935 - DNA, 423 bp, Homo sapiens
ctgtccataccagcaactacatacctatggggacattaatttacatctgcagacatatgtgtaaatacacaagcctatacatacatgtgtagtcatttatatttaacattataacaaaataattctaaaatattttctaaagaattaaacttaatgatgagctaaatataaattagagtaatctataattgatttcaacagttctctatagtttacataaatggatgtctatttctaagctttaacatagtgtattygtcattttaaaatagtcaagaaaaaattacaaatgttcttgtcacaaaaaagataaggatttgacgatttgaggtaatatatatgtgaattaactcgattcaattattccatattgcattcacaaaccataacatagctttgtgccccataaatgtatacaaccaa

SEQ ID NO: 207936 - DNA, 583 bp, Homo sapiens
caccatgttggccagtgtggtctcgatttcctgacttcgtgatctgcacacctcggcctcccaaagtgctgggattacaggcatgagccaccacgcccggcctagttttattaatgtctgtccataccagcaactacatacctatggggacattaatttacatctgcagacatatgtgtaaatacacaagcctatacatacatgtgtagtcatttatatttaacattataacaaaataattctaaaatattttctaaagaattaaacttaatgatgagctaaatataaattagagtaatctataattgatttcaacagttctctatagtttacataaatggatgtctatttctaagctttaacatagtgtatttgtcattttaaaatagtcaagaaaaaattacaaatgttcttgtcacaaaaaagataaggatttgacgawttgaggtaatatatatgtgaattaactcgattcaattattccatattgcattcacaaaccataacatagctttgtgccccataaatgtatacaaccaaaatttctccattttcaatgaaattttaattatatatttttaaa

SEQ ID NO: 207937 - DNA, 463 bp, Homo sapiens
gtaaccactatcaccactaatgtatgaaayccactccagtcccttccgtggagcctggcggacccagctcatgtagtggttactgaaggtgaatccagaggctggacaggacagtctcagggaccccccaggctgtaccaagcctcccccagactccaccagctgcacctcacactgggcacctgcaaacacagagacaacctggtcagaaactgccacatatattcactgcttatctcactcacgtcctctcagtgtctctagttcgccataaatcaccttttataatagcaacaaggaaaacccagttcagcccaaactccatggtgagtcctctgtgttcagtgctgatcaccagatggaaattcctgggaattctggggctggggctcttctcccagagctgcagggtcagggctgggctggtttttatcagcagacagagggccctatttgcatgtct

SEQ ID NO: 207938 - DNA, 613 bp, Homo sapiens
ctggggctcttctcccagagctgcagggtcagggctgggctggtttttatcagcagacagagggccctatttgcatgtctcctactatatagcaagctctgtggtgggacagctgaggagagggcagtgcccagagaagatgagagcatcccagaaaacaytggaggtaatcctatctctcaggaaaatataacttcagattatgtgattgtgccttgatgatcaattagcagtcatcatcttatttaatgtttacacatttgcagaatatattcagtgcaagtgtcaatgttacatttgtagagaagatgaattacatacataacagagcagttgtgcaatgtgtccaatatcacacatctggccagagttagccctattacctgtgtctgtgcctctaaacactggaggagactgctcccctgagacagctccagggcgatgtgggacatgcctagtgaggttttcaggatgtcccacctgtcataacaactttatgtgactttgctttttctagtgtttacctgaaatatgcaatcagtgttcacatgtgtgtattttcaggagtccgtgattattcaagtgtcaatattcatctcttcctcttcctcag

SEQ ID NO: 207939 - DNA, 568 bp, Homo sapiens
aactgtaaaaggaataaaaaattacatattttatagcatatgtaagtgcaaactgggaataaacaagaaagagtggtgagaaggaggaattcaaagcacacagttacactgtctctgttcttcatatcaaggccatcacagtatctgcattagaatctaattatatacaattcttatagaatctaattrtatacacttcttatgcaatctaattatatacaattcttattgtaaaccttatggtaaacaatataatatttataaaagtgaattagattatatgttaatagagaaataaacgtcattgtgaagtgctaatttaaacaagataacagaaaaataatattagtttaaaaatagaacttactatagttgatttaaaaaaacaagccccaactagaagctatgtattagaaaattacagtacatattcacaaatgtaaaaactaaagatgagaaaacatggattatgaaaatgttaaccaaaataaatctatagtagctgtgtaaagttaagaaaaaatagacatcaaaaaagacttttaggacttaacagggatattacata

SEQ ID NO: 207940 - DNA, 568 bp, Homo sapiens
aactgtaaaaggaataaaaaattacatattttatagcatatgtaagtgcaaactgggaataaacaagaaagagtggtgagaaggaggaattcaaagcacacagttacactgtctctgttcttcatatcaaggccatcacagtatctgcattagaatctaattatatacaattcttatagaatctaattatatacacttcttatrcaatctaattatatacaattcttattgtaaaccttatggtaaacaatataatatttataaaagtgaattagattatatgttaatagagaaataaacgtcattgtgaagtgctaatttaaacaagataacagaaaaataatattagtttaaaaatagaacttactatagttgatttaaaaaaacaagccccaactagaagctatgtattagaaaattacagtacatattcacaaatgtaaaaactaaagatgagaaaacatggattatgaaaatgttaaccaaaataaatctatagtagctgtgtaaagttaagaaaaaatagacatcaaaaaagacttttaggacttaacagggatattacata

SEQ ID NO: 207941 - DNA, 507 bp, Homo sapiens
tgagttacaatgaaaataatgcagatctacaccttgttagggagggggtttataattatgattatcttgagatcacttttcgcaacatatktcaacatcagatacatggacttgtgtcaggaaacagtcaatgtggacatatgtgtacttatctgagtgaagagttcacatggggacgtgtttgcttgtctgagacaagagtaaatgtgaggaaatgtctgttttctgaggaaagagtaaatgtaaggacatatgtggtagtctgaggaaagagtccatgtggggacatgtgtgtttgtctgatggaagaatccacatgagtaaaggtgtgtttgtctgacagaagagcccacatgttgacaggtgtgtgtacccatttgagggtaaatgagcattcagggacagggtatgcctgaactcagctgacgtttgggaaaaatctttctcaatctaggaaagaaaaggaatcctctgggttacttgcttatcaggaagagaaaacctggg

SEQ ID NO: 207942 - DNA, 578 bp, Homo sapiens
aaaaaggcaaccacagactgggagaaaatacttccaagtcatatatttgttaaatcaattctttcaatttgttaaatgacttttataatcaatatgcaagtaaacttacaactaatgaaaagaaaaccatggagataaaaatgaaccaaatatcaggaaaggcatctcagcaaaaattatataaaaattgtttaatataaatttttttatttgggacatgtgcatttaaataaatattagatgccattactcacctatcagcatggctaaaactcacaatactcatgatgataaatggtaacatgaatgtggaaaaacaagaaatgtcatgcattgatggtgggaattcaaaacgttacatgcacaaaatgagattttttggcattttttaaatagagataaaagtagagttaaaatgtgaacttgtgcttgtgttccraagtatttacaacgttgattcagaaattgatgtttacaaagattgattcagaggaagttctgtatcagatttgttaatgtgattcattctacaatccctgaaatttgcttgcagaataaatgttgtatgaaaaatatct

SEQ ID NO: 207943 - DNA, 591 bp, Homo sapiens
gcgactttttgaacagttattttagattgttttttcctgacaaaggaaaacccaggccctgagaggaaacttccaccccagctgtgcacctgctccagggctggaacctgtgcttggtggctcccaagtgccccctttcacccaggctcttgccttgcaatgaggtttctgtcggrgctcacagatattttccttcagagtctctagcccagcatgaagtggctgtgtcctggtttagaattctctgccagtgacaccatatgctgccgacaccatgtcttttaacaattgattaacctcactaaacctactgagggatacccacagaaaagattctatgactcagaagggagtcccttttctgaagcttcacatttcctgaatcagtggacacataatgaatacaaaaacttgtaggatttggggaatgcctagtttcttcgttgggctcctgcagttgaatgttgcatctgagaatatctgcaggtacagatacattcagaataaagacacctttgtatatgctattccaataacacatattctcctttcttactattttctagcctataaaagcacctcctacacaga

SEQ ID NO: 207944 - DNA, 591 bp, Homo sapiens
gcgactttttgaacagttattttagattgttttttcctgacaaaggaaaacccaggccctgagaggaaacttccaccccagctgtgcacctgctccagggctggaacctgtgcttggtggctcccaagtgccccctttcacccaggctcttgccttgcaatgaggtttctgtcggggctcacagatattttccttcagagtctctagcccagcatgaagtggctgtgtcctggtttagaattctctgccagtgacaccatatgctgccracaccatgtcttttaacaattgattaacctcactaaacctactgagggatacccacagaaaagattctatgactcagaagggagtcccttttctgaagcttcacatttcctgaatcagtggacacataatgaatacaaaaacttgtaggatttggggaatgcctagtttcttcgttgggctcctgcagttgaatgttgcatctgagaatatctgcaggtacagatacattcagaataaagacacctttgtatatgctattccaataacacatattctcctttcttactattttctagcctataaaagcacctcctacacaga

SEQ ID NO: 207945 - DNA, 432 bp, Homo sapiens
ttacaattgattcttaataattcaatcatcctttttttctctggactgtgacctatatgcagagtctccagaaatgaaactgatgctttcccttttctggctataatattataggattatttcagtatcggctaattttatccactttcatgataaaggaagrctgctgggagggtctgtaatggagatggactaccttacccaatacagataagtttctagatatgtctttcccctggatggtctatctggagaaatgtacgtgtgtatttctcagagattaggtctttggatgatttatccaggaaaggatctatgtcgattttcactcgaagaacctggaggttcctggagcaaataagcacaagagtgtgaggtgtggggcctctaagatctctcaccctcacactagttcagacatgccctttatgt

SEQ ID NO: 207946 - DNA, 376 bp, Homo sapiens
tttcacaactcaagaagcaataaagaaatctacataattggaaggctgctccaacagagagaattttgaactatttaattaatagaccagtattcattcaaagacactctcctatggaatctgcaacttaaacagatctctgcaacctggaaaaattttctcacttatttttctctagacatccataaatgcaaaaacacattttgtgtgtatatgcatgagtgatctatagaaatactttrcatattaatgaaagtttggaaaaatgataacttcatcacttattgtgaactcacacttcactggtttccaaaattctccacctgtgtcatggggcaatgggtgcctctgagaatatgctgattttcagactgaa

SEQ ID NO: 207947 - DNA, 626 bp, Homo sapiens
aggggctaattacaattaacaacaaatgcagcagtgactccaggatgtcaatccataggtttattagtgaaaatgaggtgggttacataaattgttttgagagtattttccttgcttgtagagtcaataccaaggttggcatcaatatagggttaaacagtgatttgctgggaagatgtccttgtagatgtgatttttataaggtcatggtggcttctatcaaaggttgtggttaagcagaatccattcatggtcgttcttgttatcaggagtatgtgcatgggaaacctccttcatggtcattcctagttccatttgtcagggttttaacacaagtggatctattttgattctgacaactttcacagcctctttctaacactactggtgaggaaggtgactcactctgtggtactttgcacagcacaggataaatttcacatccacatcccattttgaccacacaagctcatcctcttcactactgttggccacttgcattcccaggtgagtctccacatgacacactggagggtgctgagcaatgggagagaggaaagtcctatcagcctctcccayatggctgcaggagccacagcctgagccccacctcagctgcagggaat

SEQ ID NO: 207948 - DNA, 576 bp, Homo sapiens
ctattttgatataagaatactcacagtttccaaattttggagaaattatgtatataagaagatattatgtttttatttttttcttaataaagtataccatactcaattgttaacaactgtgaatagcttaaaagacaaacttttcctgattctgaaaaaacagaacataagtaattagcaaatgctttaaagaataagccataaaaataatttcagtcttctgtcaattcagttcatgcaattaagtcctgtcctgcttaatattagattaacaatcatcagaaatcaatcaggtatcaatgagagtcttggaagttttaatctctataccaatggcacaatttataaaattgtcacaatcrtatatttaagagtactcctcaaaattctatagattattataagccacttgataaagaatcaaagtaaaacaccaactgtggatgactgaagttttcgaatagccatggttaaaggcagaattgaggggaaaatttggttacttccgcaataaacagaaattttacataataatcataaacactaccgataaaatatactaagacatatcaaatc

SEQ ID NO: 207949 - DNA, 383 bp, Homo sapiens
ctgcatttagaattttattttgtgaagtttgtcaaatatcaaaagtttacaatgtttgatattacaaaataggattacagattgttgtaatgtaagttatttatttagtccagtgagaactcagtgattttgaaagaaagcaaaaacttttatttttcaaagagaagaattaattttctaaacaataaccccttataagaacagcatgagagaagttaaaactgtctctcaattccraaaaataaatctattacattataattacttttaccataaaatttaatttcaaatgatctcttataaacttttataagtttttcaaattaaaaagtggattaattcttcaagaaacccttgtcaattaatgtttactgtataaagaa

SEQ ID NO: 207950 - DNA, 437 bp, Homo sapiens
acaaatctataaggactattataaatacttcccttttaattatagtcaacttcataatatgaagttattttaataaattaacttttacaaaccttagtttgacttacaaaaaacgcttatggcatacttgaacatatagttttattctaaacatcactctttcttaaataaagtcatttttattttaggataaaaagttgcmatacaagattctttctcatataaaattatttttatttttttattttaacctttcataccaaaagtactcctctatgtctaaaaatttctttttttttttttttttttgaaacaaaatcttgctctttcacccaggctggagtgcagtggcatctctcttatttactggttatgtttaggatgttttataagtaacctctgaattaaataaaatctttttgtaaaaacaaatattt

SEQ ID NO: 207951 - DNA, 437 bp, Homo sapiens
acaaatctataaggactattataaatacttcccttttaattatagtcaacttcataatatgaagttattttaataaattaacttttacaaaccttagtttgacttacaaaaaacgcttatggcatacttgaacatatagttttattctaaacatcactctttcttaaataaagtcatttttattttaggataaaaagttgccatacaagattctttctcatataaaattatttttatttttttattttaacctttcayaccaaaagtactcctctatgtctaaaaatttctttttttttttttttttttgaaacaaaatcttgctctttcacccaggctggagtgcagtggcatctctcttatttactggttatgtttaggatgttttataagtaacctctgaattaaataaaatctttttgtaaaaacaaatattt

SEQ ID NO: 207952 - DNA, 437 bp, Homo sapiens
acaaatctataaggactattataaatacttcccttttaattatagtcaacttcataatatgaagttattttaataaattaacttttacaaaccttagtttgacttacaaaaaacgcttatggcatacttgaacatatagttttattctaaacatcactctttcttaaataaagtcatttttattttaggataaaaagttgccatacaagattctttctcatataaaattatttttatttttttattttaacctttcataccaaaagtactcctctatgtctaaaaatttctttttttttttttttttttgaracaaaatcttgctctttcacccaggctggagtgcagtggcatctctcttatttactggttatgtttaggatgttttataagtaacctctgaattaaataaaatctttttgtaaaaacaaatattt

SEQ ID NO: 207953 - DNA, 437 bp, Homo sapiens
acaaatctataaggactattataaatacttcccttttaattatagtcaacttcataatatgaagttattttaataaattaacttttacaaaccttagtttgacttacaaaaaacgcttatggcatacttgaacatatagttttattctaaacatcactctttcttaaataaagtcatttttattttaggataaaaagttgccatacaagattctttctcatataaaattatttttatttttttattttaacctttcataccaaaagtactcctctatgtctaaaaatttctttttttttttttttttttgaaacaraatcttgctctttcacccaggctggagtgcagtggcatctctcttatttactggttatgtttaggatgttttataagtaacctctgaattaaataaaatctttttgtaaaaacaaatattt

SEQ ID NO: 207954 - DNA, 610 bp, Homo sapiens
acactaatacaaagatactagagcttttactttaaaactctagctatggaatatcaatacaaactcaacagatgttcaacaaaaaagggttagatgtaaacagtggttgtcatcttaaaaccagtagaaaggccctgtaaacyggaaaacaaaatatttttaagccaaaaacatatcctcatctttctttataaacttcaccataaattgattatactctcttactattctaatttttagtaaccctaattcacagtgagaagcctaggattacttaatttaacatgacatgagtttaagattttaaattactgaagacaattatgagtctaaatttaccaaattaatatttgtaaagcaatgtaaaatgtaaaggtgactctaaaaaatagatgtacattttctttacaaagcatttcactaaacagacttaacttgattggaggtctttgaaacacagcttgattacattactgcccttagagtgggaccatttaagaaaaagggccaagaaaacatgcagtttttaattcataaagtacaattgcttatgcaaatgtgcaaagaaatgagtagccttctatagtgatgaccatttcctgtaaactgc

SEQ ID NO: 207955 - DNA, 610 bp, Homo sapiens
acactaatacaaagatactagagcttttactttaaaactctagctatggaatatcaatacaaactcaacagatgttcaacaaaaaagggttagatgtaaacagtggttgtcatcttaaaaccagtagaaaggccctgtaaactggaaaacaaaatatttttaagccaaaaacatatcctcatctttctttataaacttcaccataaattgattatactctcttactattctaatttttagtaaccctaattcacagtgagaagcctaggattacttaatttaacatgacatgagtttaagattttaaattactgaagacaattatgagtctaaatttaccaaattaatatttgtaaagcaatgtaaaatgtaaaggtgactctraaaaatagatgtacattttctttacaaagcatttcactaaacagacttaacttgattggaggtctttgaaacacagcttgattacattactgcccttagagtgggaccatttaagaaaaagggccaagaaaacatgcagtttttaattcataaagtacaattgcttatgcaaatgtgcaaagaaatgagtagccttctatagtgatgaccatttcctgtaaactgc

SEQ ID NO: 207956 - DNA, 446 bp, Homo sapiens
ttttacagaatgtcaaataaaatgtatacaacatatttcaaataacctcactgaagaaggtgacacataaagtttctcacctatataacttagaartcagggtgttctgtaaatctaaagtataaagaaactgcacttaaacacttttttctagtcaataaacatacttccaacaggggtacaagttaacaattctaataccacgatgcatatattctaaattgtacaacaaattgaatgaatggcaaatgatgggaggggttcctcactttgcagtaggtggttatggacaggcaaggaaggaaagcttgaaacattcatgtatcatcatagtagattgtagataccagtgttctaaagtttgaggcaataaacatacagaagattggatacataaatagattagatgggtccattaacatgggttaatatatacatacacattt

SEQ ID NO: 207957 - DNA, 473 bp, Homo sapiens
tcatatatttatgacatctacagttttgtcttttacagaatgtcaaataaaatgtatacaacatatttcaaataacctcactgaagaaggtgacacataaagtttctcacctatataacttagaagtcagggtgttytgtaaatctaaagtataaagaaactgcacttaaacacttttttctagtcaataaacatacttccaacaggggtacaagttaacaattctaataccacgatgcatatattctaaattgtacaacaaattgaatgaatggcaaatgatgggaggggttcctcactttgcagtaggtggttatggacaggcaaggaaggaaagcttgaaacattcatgtatcatcatagtagattgtagataccagtgttctaaagtttgaggcaataaacatacagaagattggatacataaatagattagatgggtccattaacatgggttaatatatacatacaca

SEQ ID NO: 207958 - DNA, 446 bp, Homo sapiens
ttttacagaatgtcaaataaaatgtatacaacatatttcaaataacctcactgaagaaggtgacacataaagtttctcacctatataacttagaagtcagggtgttctgtaaatctaaagtataaagaaactgcacttaaacacttttttctagtcaataaacatacttccaacaggggtacaagttaacaattctaataccacgatgcatatattctaaattgtacaacaaattgaatgaatggcmaatgatgggaggggttcctcactttgcagtaggtggttatggacaggcaaggaaggaaagcttgaaacattcatgtatcatcatagtagattgtagataccagtgttctaaagtttgaggcaataaacatacagaagattggatacataaatagattagatgggtccattaacatgggttaatatatacatacacattt

SEQ ID NO: 207959 - DNA, 468 bp, Homo sapiens
tatttatgacatctacagttttgtcttttacagaatgtcaaataaaatgtatacaacatatttcaaataacctcactgaagaaggtgacacataaagtttctcacctatataacttagaagtcagggtgttctgtaaatctaaagtataaagaaactgcacttaaacacttttttctagtcaataaacatacttccaacaggggtacaagttaacaattctaataccacgatgcatatattctaaattgtacaacaaattgaatgaatggcaaatgatgggaggggttcctcactttgcagtaggtggttatggacaggcaaggaaggaaagcttgaaacattcatgtatcatcatagtasattgtagataccagtgttctaaagtttgaggcaataaacatacagaagattggatacataaatagattagatgggtccattaacatgggttaatatatacatacaca

SEQ ID NO: 207960 - DNA, 428 bp, Homo sapiens
atggaaaacattaaaacattttgatattttatataatggagataagtgtagagttaaaatgtgatcttagcagctgtgctccaaaacatttacaacacccgttccaaaacttatgctcgcactaatattttcagaggaattctattattggttttattaatttgatttgttytccactccctgaattttgcttacagaataaaagttgtatggaaaatttcccacataattagagtccatacgcatttctattttccttttttcagcaatgacttaaactcgctttctaaaaaaagtctttaaagcaaataaaatccctgtcatctctcaagcccagcactgctgccacctccctcaggattgctgactgtctcaggatgtgggttttcacattgtgtgtctcgcacagtagtacacatctatgtcct

SEQ ID NO: 207961 - DNA, 428 bp, Homo sapiens
atggaaaacattaaaacattttgatattttatataatggagataagtgtagagttaaaatgtgatcttagcagctgtgctccaaaacatttacaacacccgttccaaaacttatgctcgcactaatattttcagaggaattctattattggttttattaatttgatttgttctccactccctgaattttgcttacagaataaaagttgtatggaaaatttcccacataattagagtccatacgcatttctattttccttttttcagcaatgacttaaactcgctttctaaaaaaagtctttaaakcaaataaaatccctgtcatctctcaagcccagcactgctgccacctccctcaggattgctgactgtctcaggatgtgggttttcacattgtgtgtctcgcacagtagtacacatctatgtcct

SEQ ID NO: 207962 - DNA, 570 bp, Homo sapiens
tattaaatggaatgctactgttacaataaattactcattttatagaaaaaaacctacaaatcaaattatggttctttcagtttaacactagaaaaactatgtatgtaaattcaaaaaagcaaacaaagaggtatattaaagtcataagatggtattaatcaaaagacaaatgaatcagattacaaaaaagtaagtatataactaaatcttgttaaccatgctcaattgtattttatgtaaaatttgtattttatataaataacattattaaatgaggtattataygaagaagtgaataaaaatcataagataattcaagaaaataacagtgaaaaatatataagtagcaaaactagaaggaaaaacaaaataaatactgggtactcataacctcaatagcattactgcaaaaggagaaagggacaaagaaaaaggactgatagtgaattggaagaataaaaatgtaggattgtacagccaaaggagacatttaaatatttctaagaaggttatcaaatgtcaaaattataatttataactgaaatattaaaaacataataaaatgaaaat

SEQ ID NO: 207963 - DNA, 322 bp, Homo sapiens
ggatctagagttcaaatgatactctcatggactctctctctttctcttattccctctttctctttttccttgtatctttctcatttttcctctgtattggttttatttctctttcagagtaggattggttcacctccccctacacctcccacaagttgtggcaaagactgttgctgtcatctccaggctgtcattctacctttcactccagaagasagatgcctcttttttgacagttccagtacatttcctggtagagattttattggctacttgatttagtcataagcttgaatcattcactgtggtcaggggatgcagt

SEQ ID NO: 207964 - DNA, 608 bp, Homo sapiens
atgcatttgagaaatgatttttgttctcaaaatttaatatttatgagctgattcaggaatgtctatattatgcacattgaagtatggtcttgtgaggtgggcagcttttgtctgtgttatgttctcctgtgttctcttattgtacagggtttgacagttctgtttttcaccccacagatttaccaataaagagatatagagagtatgagctggtgactccagtcagcacaaatctagaaggacgctatctctcccatactctttctgcgagtcacaaaaagaggtcagcgagggacgtgtcttccaaccctgagcagttgttctttaacatcacggcatttggaaaagattttcatctgcgactaaagcccaacactcaactagtagctcctggggctgttgtggagtggcatgagacatctctggtgcctgggaatataaccgatcccattaacaaccatcaaccaggaagtgctacgtatagaatccggaraacagagcctttgcagactaactgtgcttatgttggtgacatcgtggacattccaggaacctctgttgccatcagcaactgtgatggtctggtaagactccttctgttttgtgcg

SEQ ID NO: 207965 - DNA, 562 bp, Homo sapiens
gggtctaataataacagttttaaaaatgtgttggtgttttctgtcttttttcattttattattctagtaattagtttttattttatcaaattgtatttattttatatgtactaaaatactagtctggtactgactggggagaaaaactgtctcttcaccatagatagtttgagaaacaggcagtgacacttagctgatttcgcccattctggacatcagaaatgtgactgaaatcatcatattacctatccaggtaactgtatgagatgatmgcatgaaaggcaatttaacataggctttatcaaagaggacagaagaatgccttgagtgacgtatgtagctatggcctggaatatgatctagacatagatattactcagtgagtttctgaaatcaacagggtttcctgtacaaaggaattgacaatgattcctacccagtgtgaacaatcaagaacaatgtctttttctgtctagcattgaccctttcctgttctcagtcaatattatcatgtatgagtgactgttaatcctttaccaattacagctttatccttgctcta

SEQ ID NO: 207966 - DNA, 571 bp, Homo sapiens
ggtctttggcaagggggtgttgatgtgcttttcctccctacttctacacctttgaaatgaaagtctggtggtcaggagtcatgacaatggcaggcattttacacacttcttgggaagacacttctggatgagaatcccagatgaaatagatttctcccacagagtcctggcatttactctctaataccataaaatctcccctgtgagtagtggcagctcacaatcatattttgtggtctacaatttgccaaaataaaggtttttttggttagtaggctttatgtgatgtgtttcataatctaaagaaattggatttttttcaacttgctagaacagcatctccttgctaattcctctggactgtcgtcagagggaactggttgtgagtggaagaactgactagctaatggctctactgggttacctagctcagtgatttccytgtgggctgattttaagatcaagggggtttatctaggacagaggttttcaacttttttttttttaacatttgtaattcttcgttcagatgaaatcactagaggttatctaataaaatagagtgtaaatt

SEQ ID NO: 207967 - DNA, 440 bp, Homo sapiens
gaattctctgcctctaaaacaagacattttaaacactttgttttcaaaacagttgattaatttttgagcaatactagactactactaaatgtatcaagagattattattagttttatggtgctttgtcatcctaaataggtgtcagtaaacagattcagatcttccataatttctgaaaattctcatgtattgattgaagaaacagtaatatataattgaactgagatctaactccagatttagtaatactgaaaaataagacatatatatatattagcctgacragttttgagatgcactatctagattgtaatagcctactttttcttccaatatttttttgtgataaaatacacataacataaaatgtaccgtcttaagcatgttttaagtatacagttcagtggtgttaagtacattcatatggttgtgcaaccat

SEQ ID NO: 207968 - DNA, 407 bp, Homo sapiens
tgttaatcatcaacatcgtctgctcctgacagccaaccatatcatagcccaataatccaggatcacctgaagcagatgttcttccttctgaggtatagtcagaaacggaataataacctaacactacatctcaatggctacrgcattcacctcacttcatttcatcacataggcattttatcatctcacatcctcacatgcatattttattattagttatttgtattaatttcttattgtgcctattttataaacttaatcataggcatgtatgtgcaggaaaaaatatagtatatatagggttcattactttctaaggtttcagacatccactgagggtctcggaacatatttctcacagataaggaagttgctgtatatatacccaaaagtagatcgctggaata

SEQ ID NO: 207969 - DNA, 589 bp, Homo sapiens
ataactgaaagagtacaactggattatttgtaactcaaaggataaatgcttgaagggatggagaacccattttctataatgtgcttrtttcaccttgcatgcctgtatcaaaacatctcatgccccccgtaaatatatacacctactatgtacccacaaaaattaaaagtataaataaaaaaataagcttgaccctaaatttacattcattttttctaagagcatgctattcttgaagttttgtttccttggctcagccacttctttttgtctcttctggcttctcctcctgctctccaaaaagtgggtattcttttcacgtgtggaggcagagggtacataggaaatttctgcatccccaatcagcctaaaaatgctcttaaaaatacatcttcaagacatcatacttcagctctcctctccaaacactccttaattctatctattgtctcagcttcagttacctcctttaaaagttccatgtcttccaaattcctgtccctagccatgtactgtctctggagagtacccacgactcccatctcctgtcttctaaacatctctgcctgcacatcctgttgacagttca

SEQ ID NO: 207970 - DNA, 514 bp, Homo sapiens
tgggaaaatgtgaagagaccatatgcttctatgtgacttttcttccactcatggaccaaagtaagtctagcattttcccagatgtcagtggacaaactgacccagttgttaggcactgttttcagaaacatcacagccagagtagacataaaattgaaagcataggattatatcctaggatggcattttagtacccaaaaggaaaaaacctctacattaatacagattgttaatgaagcacataygactactgatgaaatgaccagtggaatataaaagtaagacataactttaatcaattctgataacccatggttttctcacatgagattcgttgaggaatttttatttgcttggatgaacaggattgaaataaagaaatggttgattggacacatgatcctctataggtgaagtactggcaacttgtacaaaaggcctggcaaaatctcagtaggctatcagccctttccccttcttccctgtccaaagccagtgtgacaatacggatcct

SEQ ID NO: 207971 - DNA, 514 bp, Homo sapiens
tgggaaaatgtgaagagaccatatgcttctatgtgacttttcttccactcatggaccaaagtaagtctagcattttcccagatgtcagtggacaaactgacccagttgttaggcactgttttcagaaacatcacagccagagtagacataaaattgaaagcataggattatatcctaggatggcattttagtacccaaaaggaaaaaacctctacattaatacagattgttaatgaagcacatatgactactgatgaaatgaccagtggaatataaaagtaagacataactttaatcaattctgataacccatggttttctcacatgagattcgttgaggaatttttatttgcttggatgaacaggattgaaataaagaaatggttgattggacacatgatcctctataggtgaagtactggcaacttgtrcaaaaggcctggcaaaatctcagtaggctatcagccctttccccttcttccctgtccaaagccagtgtgacaatacggatcct

SEQ ID NO: 207972 - DNA, 252 bp, Homo sapiens
taacacaagtatcacacaataaaataggaaatgaatttaatttaaagtggaattaactaataatgatacagacaatatcaggttcttatatacctggaggtagaagttagactaggaaacaattacatgtctgaaagaacactgtgttaccaccctatygaaaaagactgggaagaagtgagtttggctcagatacaatctttacattcgtgatttttctgaaagccctgttaaccgcgataaatagaagct

SEQ ID NO: 207973 - DNA, 252 bp, Homo sapiens
taacacaagtatcacacaataaaataggaaatgaatttaatttaaagtggaattaactaataatgatacagacaatatcaggttcttatatacctggaggtagaagttagactaggaaacaattacatgtctgaaagaacactgtgttaccaccctattgaaaaagactgggargaagtgagtttggctcagatacaatctttacattcgtgatttttctgaaagccctgttaaccgcgataaatagaagct

SEQ ID NO: 207974 - DNA, 481 bp, Homo sapiens
aactgaatcatgggggcagatttttcccatgctgtttttgtgatagtgaatgtctcatgagatctgatggttttataaagggcagttcccctgcacatgctctcttgcctgccaccatgtaagacgtgccttgttcctcctttgccttccaccatgattgtgaggcctccctagccatgtggaacgttgagtccattaaacctctttttctttataaattaacccagtctcagttatttcttcatagcagcatgaaaatggactaatatacactctaaatgttatttactctatgtattcatatttagaataactactcaaatttaatcatagttaaaattattaacttttawtcggaaagtattctagtaaaataggcaaattttatggttacactttccttaaacatggataattattgcacctaatttactaggttgttgtggaaatgaataaactaatacatgtaaaatacatgcct

SEQ ID NO: 207975 - DNA, 541 bp, Homo sapiens
tgaatttcctgtttagacttggatctcatccccaagatagctcactatgtacatgcaaatattctaaaatctgaaaaatctgaaatctgaaacattttttgtcccaagcatttcaaataagggatactcaacatatactagaacactcaargggccaaaggtaatggaataggacatatttaagaagagaactaaagcagcttctgcccatgcaagagttttaataaactagtgggtttttttcttctgattttacttacagtgctcccacaagacctagatgcatgttcatgcaggaagaacgaatgactaatataagtattcttgtcaagattccttggagaaatggaacctttgtctgctgtctgcaagttggagaacgaggaaagccagtggtgtattttggtccaagttcaaaggcctgagaaccagggaaaccaatggtgtaggtcctagagtttgcaggtccaagaaccaaccagaagctctgaggtccaagggaatgaaaagactgatgttccagctcaagtagagagagcca

SEQ ID NO: 207976 - DNA, 560 bp, Homo sapiens
gggattctgtgtgggggctccaacccacattttccttccacactgccctagcagaggttctccatggrggccctgaccctacatcacacctctacttggacatccatacatttccatacatcctctaaaatctaggtggaggttcccaaacctcaattcttgacttctgcacacccacaggcccaacaccacatggaagctgtcaaggctttgggcttccaccctctgaagcaacagcctgagctgtatattggccacttttagccacagctgggatgcacggcaccaagtctcaagactgtacaaagcagcaagaccctgggctcagcccacaaaaccattttttcctcctaggcctatgggcctgtgacatgccctggaaatatttttcccattgtcttggtgattaacgttttgatcctcattacttatgcaagtttctgcagtttgcttgaatttctcctcagaaatgggtttttcttttgtatcacatagttaggctgcaaatttttctaacttttatgctcagcttcccttttaaacataagttccaattccaa

SEQ ID NO: 207977 - DNA, 528 bp, Homo sapiens
aatcatatatttaatcctgttttacttgctacaagtttcctaatgactatttttgttttatcaatcacttcaagagcaaggtataccttttcatgctgctcacaatttgttctaaattccatgmagattcatcatgctgaatttgtggcaatcattttcataaacaagagactgacattttaccacaaaatttctcctagggatttacagttagtcagcaaagtcatgtaaacttctttggaaaatcaggaggtataaattatatgtgggaacagaggttgctatgctaggaaacttcccgtgcttcactgtccattttcaggaatatacaactctcagattgcactgtatgaggtagatgagtcttctcgcagtactaataaaattacaaaaacatttgtataatatgattattcatatttattgggtacttgagagttagaaaaattacgaattcgctgcatctttcagattgcataaccaaatatttaaaaattatattcaaatatcaaaaagaagaaagaaata

SEQ ID NO: 207978 - DNA, 528 bp, Homo sapiens
aatcatatatttaatcctgttttacttgctacaagtttcctaatgactatttttgttttatcaatcacttcaagagcaaggtataccttttcatgctgctcacaatttgttctaaattccatgcagattcatcatgctgaatttgtggcaatcattttcataaacaagagactgacattttaccacaaaatttctcctagggatttacagttagtcagcaaagtcatgtaaacttctttggaaaatcaggaggtataaattatatgtgggaacagaggttgctatgctaggaaacttcccrtgcttcactgtccattttcaggaatatacaactctcagattgcactgtatgaggtagatgagtcttctcgcagtactaataaaattacaaaaacatttgtataatatgattattcatatttattgggtacttgagagttagaaaaattacgaattcgctgcatctttcagattgcataaccaaatatttaaaaattatattcaaatatcaaaaagaagaaagaaata

SEQ ID NO: 207979 - DNA, 528 bp, Homo sapiens
aatcatatatttaatcctgttttacttgctacaagtttcctaatgactatttttgttttatcaatcacttcaagagcaaggtataccttttcatgctgctcacaatttgttctaaattccatgcagattcatcatgctgaatttgtggcaatcattttcataaacaagagactgacattttaccacaaaatttctcctagggatttacagttagtcagcaaagtcatgtaaacttctttggaaaatcaggaggtataaattatatgtgggaacagaggttgctatgctaggaaacttcccgtgcttcactgtccattttcaggaatatacaactctcagattgcactgtatgaggtagatgagtcttctcgyagtactaataaaattacaaaaacatttgtataatatgattattcatatttattgggtacttgagagttagaaaaattacgaattcgctgcatctttcagattgcataaccaaatatttaaaaattatattcaaatatcaaaaagaagaaagaaata

SEQ ID NO: 207980 - DNA, 592 bp, Homo sapiens
aattcaatttaccaaatacttattgagtacaaacagaaaagcatacaaaaaatkataggcctaggtccctgtgctttgtggggtggaagaggagtcccaagaggccttgataacattgaataattaattgtatagccattgtcaccatcttcattttcttagggaccaattcagcctggagaaaggcacaaaacaagagcattcaaggaaattcagaacatagataaaccttaatataataatatcctgcttgctagatctattcattgaataaccaatatttgaggacccacaagctaccaagcactgttttatgtactagagatacaattggcatcaaaacaaagtctttgctctcatgagggttaatctagtgacaatgtttactggtcaataactaggtaagtgactcacactaaaccttacaaactgaaacctgaaaatggtgaaaaattatctcttagtaaactagatatctgagagagtaagattagcaactttatttttttaagattgggatgtaatggaatttgcaactgaggaacagaaataggacagatgccccaattccaagaggaatcaggagatggaa

SEQ ID NO: 207981 - DNA, 592 bp, Homo sapiens
aattcaatttaccaaatacttattgagtacaaacagaaaagcatacaaaaaatgataggcctaggtccctgtgctttgtggggtggaagaggagtcccaagaggccttgataacattgaataattaattgtatagccattgtcaccatcttcattttcttagggaccaattcagcctggagaaaggcacaaaacaagagcattcaaggaaattcagaacatagataaaccttaatataataatatcctgcttgctagatctattcattgaataaccaatatttgaggacccacaagctaccaagcactgttttatgtactagagatacaaytggcatcaaaacaaagtctttgctctcatgagggttaatctagtgacaatgtttactggtcaataactaggtaagtgactcacactaaaccttacaaactgaaacctgaaaatggtgaaaaattatctcttagtaaactagatatctgagagagtaagattagcaactttatttttttaagattgggatgtaatggaatttgcaactgaggaacagaaataggacagatgccccaattccaagaggaatcaggagatggaa

SEQ ID NO: 207982 - DNA, 658 bp, Homo sapiens
gttatcaactacgaatgacaagtatctgatcataaacactgtacttttagggcagttctcagtgcctttcctccccactgttctcctcttgccrtcgaggtctaagcttgggaaatacatccaacaatgctaagcactgagtaggaaggagcattttgatatatgctcatatattacaggctacatatacacacctctgggcttagctcttgggtttcttagttaacaagtgtgaatctccactgtgtactataacaggtagctatgcaacctctcaagcttcattttcctcatctctaacataggcacaatagtatccccacctcacagtgtggctgtgggaatcagttgacataacacatgaaacaatcaacactgtgcctggcatttaataaacggccaatgacttgtaactatgtttgcagcagcagttataaaaacttttcttctaaaagacagctttacaatatcacctgacaaatacagaattgacagagactaatactctgccaaaaagaaaaattatcttttaaagtaatccaagtaaaatgtgtatgaaaagactttgaatgtagcctggcttcttgccagatgactttcagcctccgcattcacaacaaatacattattctaaacagcttcaagaaagaccatggac

SEQ ID NO: 207983 - DNA, 658 bp, Homo sapiens
gttatcaactacgaatgacaagtatctgatcataaacactgtacttttagggcagttctcagtgcctttcctccccactgttctcctcttgccgtcgaggtctaagcttgggaaatacatccaacaatgctaagcactgagtaggaaggagcattttgatatatgctcatatattacaggctacatatacacacctctgggcttagctcttgggtttcttagttaacaagtgtgaatctccactgtgtactataacaggtagctatgcaacctctcaagcttcattttcctcatctctaacataggcacaatagtatccccacctcasagtgtggctgtgggaatcagttgacataacacatgaaacaatcaacactgtgcctggcatttaataaacggccaatgacttgtaactatgtttgcagcagcagttataaaaacttttcttctaaaagacagctttacaatatcacctgacaaatacagaattgacagagactaatactctgccaaaaagaaaaattatcttttaaagtaatccaagtaaaatgtgtatgaaaagactttgaatgtagcctggcttcttgccagatgactttcagcctccgcattcacaacaaatacattattctaaacagcttcaagaaagaccatggac

SEQ ID NO: 207984 - DNA, 658 bp, Homo sapiens
gttatcaactacgaatgacaagtatctgatcataaacactgtacttttagggcagttctcagtgcctttcctccccactgttctcctcttgccgtcgaggtctaagcttgggaaatacatccaacaatgctaagcactgagtaggaaggagcattttgatatatgctcatatattacaggctacatatacacacctctgggcttagctcttgggtttcttagttaacaagtgtgaatctccactgtgtactataacaggtagctatgcaacctctcaagcttcattttcctcatctctaacataggcacaatagtatccccacctcacagtgtggctgtgggaatcagttgacataayacatgaaacaatcaacactgtgcctggcatttaataaacggccaatgacttgtaactatgtttgcagcagcagttataaaaacttttcttctaaaagacagctttacaatatcacctgacaaatacagaattgacagagactaatactctgccaaaaagaaaaattatcttttaaagtaatccaagtaaaatgtgtatgaaaagactttgaatgtagcctggcttcttgccagatgactttcagcctccgcattcacaacaaatacattattctaaacagcttcaagaaagaccatggac

SEQ ID NO: 207985 - DNA, 659 bp, Homo sapiens
gtagcattcttgccttctgttgtactcaaatgtgctcctcctaaatgctacagaagttgatgattttatttcattcatctccatatcatcttacagcccctccatcatcttccaagtacatatcagtggcttgtacaaagacagtaataaactgatgcttgaaatgtccaactgcaggagaatttttayctcactataatttagccccaggaaagtgggaccttcctccagaaagaggaagagaagaacagaaatgtttccggactacagattattttttttaaccaccagtgggaaacatttcagaaacaatattttgcttagctcacttcattcccttactttcaacttaagataagagtgacatctgagaacaaagcttacctatttgcaccatttcttcattaccagcctggaaaggagggggaaagcaagaaaaagaaagttactgggtttcatcttatcaccttgtgagttttatttctaccattaatggtttccaagagctaactaatcaggagatgctagagactgggattggtgcctaaagcctgcaccttggtttgtagaaggttccatgagccaattccataacaatttggggaagggagttgtttgccccttttcattttaatttaacacttatgaagccagcaaaa

SEQ ID NO: 207986 - DNA, 627 bp, Homo sapiens
atcaaagttaaaaatatctttggactctttctagtataaaaagaaatttagtgctttacgtccctcatcctctttccactttcccatatttgtaaattgattatcagtatatcaatctacatcaataatagttgttgcatttttagttaacatttgaatccaaatttgcaagttatttttatactatataattgactttaagatttatctctaagtctctcagtctatgagttttctattcagaagtgctttgttttgagtcatctctcagtttagttttcaagttagatttctcaaactttataactgatacatattttctgagcaggggcatttcttttcccattttgtaacagcttaattgaatatagaattcttgatctacagactgctttcctctaaaytgtgtaaatacaactcctttactttttacttcataactggaaggaaaagtctgaagtaaacctattgtcccccctggattcctattggattttttcttcttgaaattcaatgtatctatgggactcttctcttcagaagtcaatgagctcttctcttatgaagatgctgatttaaagatccactttactttggttgttgcctctattcctgttattcaggttt

SEQ ID NO: 207987 - DNA, 564 bp, Homo sapiens
acaaagagatattcagcaaggataagggacatattggttcaaagcacttaaggaaatctgtggccaatcattggttgaccactaagatatgctaacagaaattttagtggccttataccatacagaatatatacttcacataattagtccagaaaagtcatttaacaaacagcagcaacaacaaaaacaaaatcagtaagaaaaacaaacactgatggggtgaaatctgatttccagaattggcacattatattatgttaaatttctagtttatgagaaaagaaaataataagacatgcaaagtaacaaaaaacccatagatagttaaaaaaaaaaaaagcagtcaatagaaactatccctgatgggggaacagcwgtcgacaatgactctaaatcagctaatatacgtatgttcaaaagaataaatgaaatcatctagggaagtaaagtttgacaatactgtcataccagataagaaatatcaataaagaaatttagatgatcagaaacaaagaatcaaatagaaattccatggttgaaaagcacaagtaaaattcaaaattc

SEQ ID NO: 207988 - DNA, 531 bp, Homo sapiens
cctacctgtaccccttcacagctgcttgagtaatttatttatttatgtatttatgyatttattttgagacagattctccctcacccaggctagagtgcagtggcgcaatctcgactcactgcaaactctgcctgctgggttcaagcaattctcttacctcagcctcccaagtagttgtaatcacatgcacgcgccacatgcccagctattttttgtatttttagtagagacgaggttttgccttgttggccaggctggtctcaaactcctgacctaaggtgattcccctgcctcggcctcccaaagtgccgggattacaggcatgagccgtggcgcccagcctgcatgagtaatttaacttctctgaacctcaatctttgagatacttcccaatgacattgtgaatttcagatcttgtattttaaatagatgacaaattataggcacttctgaaagtagttattgtaattaaattatttcatccctgaaaagaaccatatggggcaaatatgattattctccccaacctac

SEQ ID NO: 207989 - DNA, 566 bp, Homo sapiens
catcatttttccagcactggctgcccttgagctcaggtgcagtcaggtggactttcttgtgatttcttcccttggattctcccatgtggtatctgcttttcccaccccaaagtcacagaattatagaacctatagataggttatgtcatctggtctctaaatctcctcatcaacaaagattgtccaggcactgctcagaggtcttcagggatggggcatttgctacccaggcagcacagtctatctggtcttaacttttgagtgtggtgtgtaataacatcttcatattttacctcatgtggcttacagtcccagaagcttctgttaccttgccacccttacctctggtagacagcagccaaggctttttttaagttccttcgcttcagggaaggaacagcagaatcaaagagtcaaatttatggctgaagtttcaaaagccaaggtctaaacaatgaggcaaagattgaaaagactctgagattagtctaagccaggtttccccccatcaaaaaaaaaaaaacacgwaaataaatgattctatattcttaaactgagaggaagga

SEQ ID NO: 207990 - DNA, 642 bp, Homo sapiens
agtacaatccaaaagacaaaccacaatcaaagcaatggctaccaaaaggtggaagtggtctggccaaagcaaaagcagaccaagagcaaaggtcatggcaacagtttttttggatgctcgtaaggggtcaaagaacagtaactgctttttatgagtattttgacaatgttaccacagctgtagcagaaaaacatccagaaaggcttcaccagaaagtccttctccaccatgactgctgctcattcttctcatcaaacaagggcaattttgtgagtttcaatgggaaatcatcaggcatccaccttacagtcctgatttggctccttctgacttctttcttgttttctactcttaaaaaaaaaaatctgtaaaaggcacccagttttcttcagttaataatgtgaaaaagactgcattgacatggttacattcccaggaccctcagttctttagggatggactaaatggctggtatcatcacctacaaaagtatcatrgacctgatggagcttatgttgaaaaataaactttatatctttttatctcttaatcccatttttctgaaaacttgttgaagtcccctctcatatttatgtcaaataactaactgatatattatctcaaataacatacccattaaca

SEQ ID NO: 207991 - DNA, 611 bp, Homo sapiens
agcaatttggaccaaaaagttgtacatgcattttgggaggctgaggtgggaggattgcttgagctcaggggtttgatgccagactgggcaacatcataagaccccgtctctacaaaaagttaaaaaaaattttaaaaatcatctgggcatggtggtgtgcacctgtagtcccagcagctcagaaggctgggctgaggattgcctgagctcagagtttaaggctgcagtgagctgtgattacatcactatactccggctgagtgacagagcaagaccctgtctcaggaaaaaaaaaaaattgtacatggtttaaattttaaacagaaaaaaaccacaagactcacaatctggatttttttttctttttgtctattacaaatgtatgaaggatcctccctcaaatgctgtaaggcaggcagcaaaaacatggagaaatttgcatttagtttactttagaaaaataacatgtgatgcrctgtaaaaggctaaaaattggagcaggaaagcatctttgtcatattttaatgccagattacacaaatctaataattatagtgtagccttagggtggaggagggtatgtacacctgtgagacaagtgcagtagctgt

SEQ ID NO: 207992 - DNA, 579 bp, Homo sapiens
catcatgctttgctaatttctctttggccaaagaaagcttcatggccaagttgcagtgggaggggaccacaaaagggcatggatgcttggaggcatgattcattgggaaacattaatgtaacattcttctacactaaggcaagaaatgaaatagaaaaccattttttaaaaaaaaaaacatgtatttgaccacatgcatttaaaaatttgtctttggaaaaacatcattatttaaattgaatgaaggaaatatatacatctttcatatgcaaaaagtcttacaaattaataagaaagcattcagtcagaaaatgggcaaaaggcaagaacaatttccaaaagaagaaaaatgaattgccaataagcatacaaaaatgtttcaacctaactagtaatcaaagaagtgtacatttaaaataattatattattccattcccacatttcattggcaaagataatgtggtagattatattttttaccagttattcactgccycttccttttcaaggattataactctctgcttcactgaaatcagcctttgcagtatgacttgctctgaccagtgaaatgtaag

SEQ ID NO: 207993 - DNA, 383 bp, Homo sapiens
atcctagcagtcgaaacctgagttccagcaagccttgatgctgtgagttaaaatgctctggggttctaaataaacctgaaaaacagcctaggccacaagaactgcaattcctgggcaagtcaaggtgctatgataggctcagagccagtggatttgcggagcatgtaacgtagtgagacaccagccagggtatccaagggagtgcttgagctgcccctctctgaaccccrggcagagcagctcacagcttcagaagagactccttccttctgcttaagaagagaaggaagactaaataggactttgtcttgcaacttgcataccaactcaaccacagcagtatagagtactaggcagagtcctgaggctcccattccaggccc

SEQ ID NO: 207994 - DNA, 505 bp, Homo sapiens
tagcattatttaccaaaatcacaactactcctaccctctgatccagaaaattctacatctaaaaatttatcttacagattacatgtacacacacttccaaaatgtataaggktattcgttgcagctcagaaatgaaaaatattagcaataaacatgatctctctcaataagagataaatcaacaatggcacaccccacaaagaagtaagacctctgctccttctccacacagcctgtaaatatcagctgtcctccacactcagtcctagaccttcttccattcctactcttggtggtctcatccattgccagggctttaaatatcttcacagaaattatctcattccagaaaccttataataatcttttttgtcttcctatccctcgttctcttcactaaatgctattaaactacctcaaaattacattttaatagtaaaacagctttattcatgtataactgaaataaactgtacataattgtagtacattatttgataagctt

SEQ ID NO: 207995 - DNA, 465 bp, Homo sapiens
gaattcctttcatgttttctctatwataagtcaaactggtatggatgcaaacatatatttaatacatccagtttcctacatttaaaaaagttctatgtttcttcctcctgtttttaacacctttgctaaccaaccaccatctgtgagtaggtgttaagggtttcttgactgatcttctactttctattcttcattctaccctacaaccatagctatcatttttttaaaaaacattaatgtttgtccttttttgtttaaagttctttagtaaccaccacttcctctaccttgccccagcccagtactctaaggatgtaatccaaacttcatagtctaaaatgccttttatattatctggcctccctcactttacctagcactgctgtctttcaagcttgtgcttcctgacccacataatccttttctcattgcctcaaaagctccactattttttttctactccag

SEQ ID NO: 207996 - DNA, 552 bp, Homo sapiens
ctagcttttctccagtttagttcaagtaaagacaaatttaatgctttttgttttttaaaaaaagcatttacagtaggtcccatttttgtagaattatgtctatgtgtgaatatgggtacatacatagagagatcactaggaactaggatgatgttgccaaatgttatgacaattatttctgggtagttgatagtgggggttttgcttgttggttttgttttttaactttcttctatatactcttccgtagccctttttgtgataagcatgtatcagttttataaaaccaatacgttttgaataggtccctgacatctgagctattgcagggtatggctgaggagagggaattttaccagaaggcccattaaccatgggtctcatactcataaagaccataarcttagattttttatgtcctctccaaatgagttcatacatgctgtaattgaaatatactaataggattaaacacttaaattatagggagttttcttctttttaaaattatagctggaacttcaagatgtccattcttcttgagaagccctg

SEQ ID NO: 207997 - DNA, 623 bp, Homo sapiens
aaggatgctggtgctcttttcctttcactaatgtatttcctaatgtcttaggatgaaagacctccagacctccctgatgtactggtatcaggtggcttagcagcttgcatgcagtctatctcagcatttctctcttcctaaggctttggtctgctacctatacagtattccaaggacattccagtatatcaacctcagtgattgcatgtcaccattgagcccagacttgaagaggtgaggtagggttgcagatattgccagaaccctgcccaataggagctgtggcctttgggaaagaaacaaagccagcaccagtctgaggcttaggcgagaaagagccagggaactccctgccttaccaatggaaggcagaggaaaatggagcccagttgattcattcgttagtgggtagccttctagcaaacaaaataaggcagagatggcaaacagtgaatttggagggraaaacaacaatatccaacatacatgtcaatgtataaaaaatttcccttttctcccagctgcatagaattgtattgtatggacatactatgattgacatgtaaccagtcctctgctgatggatattgaggttgtttccaatctcgtcattatgaatagca

SEQ ID NO: 207998 - DNA, 622 bp, Homo sapiens
tattgtgtatgtggcagaatgcgacagtatagtgaaaaagtttgctaaacgtttcatcctgagattatcaggcatgcattagattttttttcaaaatacttataaccttttagaaagtttaatttggcagcaaaacttgaataatatctatatatcatatatatacatgtaagtgctgcacatacggaaatattcttactgtctctgtttcttcctcgctttcttttttattttcttccctttctatgcaaaagtatrtattgcatgtatatgtcaggcactggcctagctttttttgggatacagcagcaaccaaaaaagaaaaagaaaatctatgtttttatgaagcttatattcaaatggagcaagacaaacacttgccaaataaaatagatgatatctcacatattgataaacgctatagaggaaaacaaagtaggaaagggaatggaggtttcagggataataagggtaatataattaaaaacatctggctcagggaaagtttattcagatattgacttttgagcaaacacctgaaagcagtgaaggagggaattgtgtagaaattaaagggaagagctcttgatgtagacagatcacccagagaaaggactctaag

SEQ ID NO: 207999 - DNA, 563 bp, Homo sapiens
cgatgactatattttcttgagatggttgttttgtatatcaatagtatctggcaagggttctctgcatttcctaaatttgaatgttgacctctctagcaagataggggaaatttttatgggtgatatcctgaaatatgtttttcaagttgattgttttctctttcagagatgccactctgacgtagatttggtctctttagataatcccatatttcttagaggtttcgttcagtcttctttaatctttttttctttatttttgtctgaatgagttattttagagaatcagccttcaaggtctgagattctttcctcagcttggttgattctcttaattttattggttgatgatgagagtgggtcattccttgccgtttcactcacccctgccccaggagtcactagcaggcaggaacaaatcccagtgcttggtagccctgtgcagggtttgcagcttcctccccattcagcccagcatctgtgtcctgcctctatccactttcaattttataattcgttgattctcataattttattckgaaatttttgaagtaagattttca

SEQ ID NO: 208000 - DNA, 457 bp, Homo sapiens
tgcctttatctctcctggttttttaattcaaaatagaagcttgactaatgtttatacaaatatgaataaaaattcagatcaattaagtcaaaagattttgttgtgataagaataactttaccagtctatctttaattcatcatacaagacccagtgttctgaagctgtgttaccagatgcattataattaagttaataatggatataatagtgatttatttgaatgcatccacttcaactattctctcaagtcctgtatacctgtaagtaatttatctgttcttagatttgtttggtattcagaatagaattatcactttggatgaaacaagacacagttttataaatgttgtataaagagttctgggaaacamcatggaaaccatttattttactaaatacactggaactggctctttaaaagtatagtatcctgaaattaagagactcaccaaaa

SEQ ID NO: 208001 - DNA, 570 bp, Homo sapiens
cataagaataataaggactagattataaataatccttcccatatgccaaccacttgtcaagtgctttatatgcattgtcttaattagtggctaaatgccttaaaaggcattggccgggcacagtggctcacgccagtaatcccaggactttgggaggctaaggcgggtggatcacgaggtcaggagatcgagaccatcctggttaacayggtgaaaccccatctctactaaaaaaatacaaaaaaaaaaaaaattatctggaagtgctggcaagtgcctgtagtcctagctactcaggaggctgaggtaggagaatggcatgaacccgggaggtggagcttgcagtgagctgagatcacgccactgcactccagcctgggcgacaaagcaagactcttgtctcaaaaaaaaaaaaaaaaaagcaaatattatcccataattctgattaacccaagtttagagaagtaactcctccagactcattcagataagggacaaagctaaaatccgtacctatatctgcttacacatgtatcaatgatgcactctaatatatttcaatcactgaaa

SEQ ID NO: 208002 - DNA, 556 bp, Homo sapiens
tatgtttaggcagtgggagcaaagttgaataagacctgtcctagcagttgagagttttatagtttggtaggacatgataggcacataaatacttaaaygtaataccatgtcagaactatgacagatgcatgtatatccccaaaggagggagttttgagcatctgggggaaggtggggtgagaagaggcttaagctaggtctcaaaagttaaatagaggtttacccgtcttgggataggaggatgctcagagtgggtgcaaaagaagaacattctaggcagaaggaaccatgtaagcaaaggtgcaacggaatgaaacaggagagtttgggatatcgtaagtagtttagtatggttggaatataaggaagaggttgaagttccagggtagagtgggtgggaatggggcaatcagggtggttgtatgtgacacatggtaagaacaacatggtagggaggtcagataggaagatggattgaaggaaggttactgaggaaactcttgctaacaatccaaatgaaacaattgtggctcaaactaaagcagcaacagttggg

SEQ ID NO: 208003 - DNA, 556 bp, Homo sapiens
tatgtttaggcagtgggagcaaagttgaataagacctgtcctagcagttgagagttttatagtttggtaggacatgataggcacataaatacttaaatgtaataccatgtcagaactatgacagatgcatgtatatccccaaaggagggagttttgagcatctgggggaaggtggggtgagaagaggcttaagctaggtctcaaaagttaaatagaggtttmcccgtcttgggataggaggatgctcagagtgggtgcaaaagaagaacattctaggcagaaggaaccatgtaagcaaaggtgcaacggaatgaaacaggagagtttgggatatcgtaagtagtttagtatggttggaatataaggaagaggttgaagttccagggtagagtgggtgggaatggggcaatcagggtggttgtatgtgacacatggtaagaacaacatggtagggaggtcagataggaagatggattgaaggaaggttactgaggaaactcttgctaacaatccaaatgaaacaattgtggctcaaactaaagcagcaacagttggg

SEQ ID NO: 208004 - DNA, 556 bp, Homo sapiens
tatgtttaggcagtgggagcaaagttgaataagacctgtcctagcagttgagagttttatagtttggtaggacatgataggcacataaatacttaaatgtaataccatgtcagaactatgacagatgcatgtatatccccaaaggagggagttttgagcatctgggggaaggtggggtgagaagaggcttaagctaggtctcaaaagttaaatagaggtttacccgtcttgggataggaggatgctcagagtgggtgcaaaagaagaacattctaggcagaaggaaccatgtaagcaaaggtgcaacggaatgaaacaggagagtttgggatatcgtaagtagtttagtatggttggaatataaggaagaggtkgaagttccagggtagagtgggtgggaatggggcaatcagggtggttgtatgtgacacatggtaagaacaacatggtagggaggtcagataggaagatggattgaaggaaggttactgaggaaactcttgctaacaatccaaatgaaacaattgtggctcaaactaaagcagcaacagttggg

SEQ ID NO: 208005 - DNA, 568 bp, Homo sapiens
ttagcagctcagaagcagcctcagtgtgctgcccattcctgccctgatcttgttccttggtttccatcactgggtatctgccttattctagaaaccatgccctcctttatgccagaggttcagcaagtgtgaccctgaattgattgtttcctctatctgaatccccacctaataaaccgtttcaccaagaccagagtcctaccttgctattactccaaaagactatctygatgcagaatccacctggagggcctcctgagaccagagctctaggaattcatctccacatctcccactgtgcagttcagtatctggcatgtaatgggcacacaacaaatatttatagaatgaaaaggttacccactggtctagatcactgcagactgtctgctcctatgcccctccccaactcacaggacctctttgacggataaaccaaccatcgcctgtcaccatgttctttggctgctttgttgttccaactccaggcccctgacagggtctctgggtcaaacatacctactctattcccggtatgccctctttgccacttagcacatcctaaaag

SEQ ID NO: 208006 - DNA, 568 bp, Homo sapiens
ttagcagctcagaagcagcctcagtgtgctgcccattcctgccctgatcttgttccttggtttccatcactgggtatctgccttattctagaaaccatgccctcctttatgccagaggttcagcaagtgtgaccctgaattgattgtttcctctatctgaatccccacctaataaaccgtttcaccaagaccagagtcctaccttgctattactccaaaagactatcttgatgcagaatccacctggagggcctcctgagaccagagctctaggaattcatctccacatctcccactgtgcagttcagtatctggcatgtaatgggcacacaacaaatatttatagaatgaaaaggttacccactggtctagatcactgcagactgtctgctcctatgcccctccccaactcacaggacctctttgacggataaaccaaccatcgcctgtcaccrtgttctttggctgctttgttgttccaactccaggcccctgacagggtctctgggtcaaacatacctactctattcccggtatgccctctttgccacttagcacatcctaaaag

SEQ ID NO: 208007 - DNA, 569 bp, Homo sapiens
tgtgctaggcaggcaggcagcagaacatcagcctactactgcttactatgttcctgccactctagccttccttcaggtcttttgcaaggttgtttcatgcttcaacacagttctctgtgtaaatgtttcctcttccaagaggtcttgcctgatttattcccccatcccaccctggactagattaggcttgtctgctctatattcctacagcatttcctttttaacattctacacatccatcattactttatagtctcagatagatggtaagctccatgtgagcrgggactgcctctccagttacgagcacagaggctagaatatagtaggattcgatacatattcactgaacaaatgaacaaactgggatttatagccaagctacaggctctgagagatatagcggaataagtgcaggatttggagctcaacagacccaaatctgaaccccagctgtaccactcattagctaggtcaccttaagcaagtcccataatctctctgagccttagttcctcatgtgtgaaacacagacaaaacttcatagagatgtagtgaagattaaataa

SEQ ID NO: 208008 - DNA, 552 bp, Homo sapiens
aaagtaactggcacaaaatagatgctcaacaaatgttatcctcctacccacttcccaacttgcctatrgttacgaaagagttgacaacaccaaggcagggccccaattctatcagaacttatcaaaacaggattcaggcacaggaataagggaaggtcaaagatagcatcccagatgacatcttactgactcccaagctttgaacttgagctccttcagtgtgtctgaccaaggtacaatactaggcccacgactaagcctacagatggaggatccaatggctgcagccatggggagaagatggcagagactgagcccattccttttggcttttgaagcatttagacaaaagcatacaaaactcccttccccatctatgctgtccataggtaacttaatggaatccaaaggtctacaagtaagcttagttagaccagtgaggttaaaggcaacacagcacaacaggaggactacacctagaatcagatgacagggttcaagtccaaactctgccacctactggatgtgtgatttgggacaagagtttccctt

SEQ ID NO: 208009 - DNA, 607 bp, Homo sapiens
ttgcctagcaaaaagggggaaaagccccttatatctcgtgagaactcactcactatcacgagaacagcatgagggtaattgcctccatgattaaattacctcccactgggtctctcccacaacacgtgggggttacrgtaactaaaattcaagaaaagatttgggtggagacacagccaaaccatatcatatggtctgtattttaaatctcaagtaaaaaaaaaaaaaaaaaaagaaatacaagtcctccaagtttggaatgaagatgtcatatttttctgctcaatattcctcaagtaaacacagggattctttattactctcaggaccctccaggtgtattttataatacaggtgtattatataatcctgccacctctggaaagtttttgatgtcaatgaggtgtgtaatgacacatggtaaatatttggaacaaggtaatttctatagcaactgttacaatgatcccttgctctcctatttcaatcacattttatggctgaattcttttgagaatctaacaattcaaccatctctgctttatagtcagaccttgatttgtatttctcagtagtgtggagttgtgacagcattagattataaaaa

SEQ ID NO: 208010 - DNA, 522 bp, Homo sapiens
ttttttaatattctcttcaagaataaatctatgtgtggataattttgtgacacactattgacaactctagaaaacactgggcaagaccagggactacagtctcatggttctggtaaaattaaaatctctgcccaagagctaggaattaccaccaggcatctgcatacacatcactgtttcagaataataaacaacagagtgtagacagaacaaaaccaaccattaccacttaacatagtatgttatagtacgatttcaatttttttttwaaaagcatatatgcctaaggactaagagatggaacaccaaaacaaaaatagatttttagggatagtgggattgtgaaaatttttcttctgggaaaaacaacaaataaccaccccacccccaaaacacacctgccactactataatggttctaaaaataaacaaaaatgggaacttatggtagaacaatcattcaaacttacttattattggttataaaagaggcttatggtattccctggttgccttaagcta

SEQ ID NO: 208011 - DNA, 314 bp, Homo sapiens
tttctcattctcaattttaaaagcaaataatctggtgtttgatgttttgagttcttaaaaatactaaaataagttgctttctactcaagtgctgctgttggtagtttttattttttctttgggtcagagcccctgatagaaataaagttatccattcctgttctacatctttccttgcctcaacctctgtcaccctgtacttggacaggtatccctctctactccattctatattccattagygcatttcagatgatttctatccgcctctcacttgatttctttcaaatcttagatacctgttacaaagtatg

SEQ ID NO: 208012 - DNA, 636 bp, Homo sapiens
tcatcttaatctatgttagtacaggcttttagaactgattcctttctcccacagaagtgattggtgtcagatgtctgttatcagaaaaaaaaatcattcattaaaattcaaaggaagacttccctttactttttgttcctttattctattaaaatgtcatctctttgtgatcgcttctgctttgagttgtatttctttgtaacaaatgagctttaattcaaatgggtgatctccaagcactaggtttctctttcccacctacaatatttcccccaagttagataggagaaacaaacccagtgtaccctcagtactctgcctggagtactgagaagcttctagaattagcaaatgtgagtctcagtcaaacctctatgtgtgcgccaaagagccagaataacagacttcaaataaagtaatgaatacctgcaatttcagctgaaaacagttactgyttctgggctcaatttctatgaaagtggtgtaacggggaaaaggaagagatgaggggagggggacacagaggcccgtcaaagagagactctacattttttaaagttcatgtagaagatagttttgggggattgcctgcagtttctagaataaagatgttgatcacctgaggttccatctccc

SEQ ID NO: 208013 - DNA, 551 bp, Homo sapiens
atgcagtaagacattgatctaaccactgcgctccagcctgggtgacagagtgagacccygtctcaaaaacaggcaaacaaaaacaaataaagtttaaggcttcacctaactagatttactttgggggaaggggaggggaacaaataggtgggaaatcagaggactgctataatcatgggccatcttgattgcaaagtatttgataaaatttcccgagattatttcatggatcagataggaacacgtgagcagaaggataacactgttgggtagaatcgtaactaatgagacaccacccaggatcctggttgcatgattgatgacagcaccaacctgcagatgatctccagtggcatgccacaggtctctagttttagttctattctacccaataacatgaatgaagatttggaaggcaggcctatcatcagataagcaaacaacataagtttgagagggatggctaatgttacagatttcaggattgcaattcagaaaattttagttaggtagaccaaatcaatcagacgaaaactttataaggtaaaagg

SEQ ID NO: 208014 - DNA, 551 bp, Homo sapiens
atgcagtaagacattgatctaaccactgcgctccagcctgggtgacagagtgagaccccgtctcaaaaacaggcaaacaaaaacaaataaagtttaaggcttcacctaactagatttactttgggggaaggggaggggaacaaatargtgggaaatcagaggactgctataatcatgggccatcttgattgcaaagtatttgataaaatttcccgagattatttcatggatcagataggaacacgtgagcagaaggataacactgttgggtagaatcgtaactaatgagacaccacccaggatcctggttgcatgattgatgacagcaccaacctgcagatgatctccagtggcatgccacaggtctctagttttagttctattctacccaataacatgaatgaagatttggaaggcaggcctatcatcagataagcaaacaacataagtttgagagggatggctaatgttacagatttcaggattgcaattcagaaaattttagttaggtagaccaaatcaatcagacgaaaactttataaggtaaaagg

SEQ ID NO: 208015 - DNA, 551 bp, Homo sapiens
atgcagtaagacattgatctaaccactgcgctccagcctgggtgacagagtgagaccccgtctcaaaaacaggcaaacaaaaacaaataaagtttaaggcttcacctaactagatttactttgggggaaggggaggggaacaaataggtgggaaatcagaggactgctataatcatgggccatcttgattgcaaagtatttgataaaatttcccgagattatttcatggatcagataggaacaygtgagcagaaggataacactgttgggtagaatcgtaactaatgagacaccacccaggatcctggttgcatgattgatgacagcaccaacctgcagatgatctccagtggcatgccacaggtctctagttttagttctattctacccaataacatgaatgaagatttggaaggcaggcctatcatcagataagcaaacaacataagtttgagagggatggctaatgttacagatttcaggattgcaattcagaaaattttagttaggtagaccaaatcaatcagacgaaaactttataaggtaaaagg

SEQ ID NO: 208016 - DNA, 588 bp, Homo sapiens
attatcacggtgttaactgggtaatttttccagcacaaggggcaaatgcatttttaaaaaacataatcagttaaatggtacacatagaaaatgcccttcttacaacagccaatctgaggttattctattaaataaaataagcaaaaacacaaaaataaaagcccacattacatataactacaaaagttatctgtttagaagatagactttattttttcagctttgtaaaacagacttaagaacagaatacagaaatctcagaaatcaagtctcatacagacctaagcaaacctcattaatattcaagataatatttgtaaaaataaactttgaattaatcatgtttgcattatctggtattttcattaaagaacaagagagcatggagttgactataaaatgaaatttgtttctagttgcttatgatttaaacaaaccagcgtcagattaaagagcttttactctcagtaccatagaagctttgtcttggggtgtcstgggcacagtttatgatctagagtcagtgtggatcatatttcccataaattacaatccatttgaggaaactgcttctttaacactgtgtca

SEQ ID NO: 208017 - DNA, 557 bp, Homo sapiens
ctgtattattttttgacagtgcacctaaagtaaaaatgtggctccatattatgtaagattttggtacaatatttaaaattctaaaatcattaagcwattccaacctatacagaagtatgacaccttgggattatctagactatatggctaactcttttaattgtatacagatgttaagtcttacctctgcatgtgtgcattgagaaaccagatgaaaaaaaaaacttaactgtacttttcaaaaaacttggttagatatttttatttaaacatttggttttgtacagtatacatttaaattacattgcttaatgaatccatctgaaaacagtcactggttgcttctgtgatttgtgaataggagaacatataaatatagcagaatgactttgtctagcaacatgttcttgccaagataattgggaattaaatatttaaatacatggaaataatatctttgcggttacatatgtgacttccaaatcagaccaaactaattccttaggaaggccaagagatagtgaagccatagcatcagagtgacacccagaaattac

SEQ ID NO: 208018 - DNA, 557 bp, Homo sapiens
ctgtattattttttgacagtgcacctaaagtaaaaatgtggctccatattatgtaagattttggtacaatatttaaaattctaaaatcattaagcaattccaacctatacagaagtatgacaccttgggattatctagactatatggctaactcttttaattgtatacagatgttaagtcttacctctgcatgtgtgcattgagaaaccagatgaaaaaaaaaacttaactrtacttttcaaaaaacttggttagatatttttatttaaacatttggttttgtacagtatacatttaaattacattgcttaatgaatccatctgaaaacagtcactggttgcttctgtgatttgtgaataggagaacatataaatatagcagaatgactttgtctagcaacatgttcttgccaagataattgggaattaaatatttaaatacatggaaataatatctttgcggttacatatgtgacttccaaatcagaccaaactaattccttaggaaggccaagagatagtgaagccatagcatcagagtgacacccagaaattac

SEQ ID NO: 208019 - DNA, 616 bp, Homo sapiens
ttagcaatttcatatggcttaaacttaactcttctcaaagtgcatttttatgaattccctcatttgatcatcaaccttgttataagattaatactcaggttacacaaaagaaaataaggtttcaaagagttattactaagtctgaatcagctagatrtgttaaagtactggtgcattgattgtagattaaagatgtgaacatgcatatacaaaggcattgtcctgaaattggttttaattaaaagctcaaaatccacatttccatcttcccgccacaatctcttaccccactaaaaagttatcatgatgattaacatggggccttacttcactgaactactaattattcttttcagtgcttcttttattattatgactttaacaatacatcttctgatcttactaatatattttttattaagaagcttagttgtttctaccaagattaaagaggagatcatagccaagtttcttttaaaaatgaagactgcttattcttagcaagaggagaaaaaattgagggcaaaattttgtggaaatttaatttgcctcatttgtccacagtaggtaagtatggcaactgtatgcaaaatgcagcagccacgcatttcatcag

SEQ ID NO: 208020 - DNA, 616 bp, Homo sapiens
ttagcaatttcatatggcttaaacttaactcttctcaaagtgcatttttatgaattccctcatttgatcatcaaccttgttataagattaatactcaggttacacaaaagaaaataaggtttcaaagagttattactaagtctgaatcagctagatatgttaaagtactggtgcwttgattgtagattaaagatgtgaacatgcatatacaaaggcattgtcctgaaattggttttaattaaaagctcaaaatccacatttccatcttcccgccacaatctcttaccccactaaaaagttatcatgatgattaacatggggccttacttcactgaactactaattattcttttcagtgcttcttttattattatgactttaacaatacatcttctgatcttactaatatattttttattaagaagcttagttgtttctaccaagattaaagaggagatcatagccaagtttcttttaaaaatgaagactgcttattcttagcaagaggagaaaaaattgagggcaaaattttgtggaaatttaatttgcctcatttgtccacagtaggtaagtatggcaactgtatgcaaaatgcagcagccacgcatttcatcag

SEQ ID NO: 208021 - DNA, 597 bp, Homo sapiens
taacttgttctcttaacataatatggttgttttgctagatcccagtatactactttttccacaggccacgtttttcctcagtatgcacaaatgaaaaagagattaaagaatttgtgtgacctacartaaggtcagcttctaattattatgctaattccatgtactagatttaatagatctactacttttctaccagttaataaaatagactctaaatcactatctactatctaagaagggtgccctctcataccttaaaatactctgtttgaatagctgtgaaggatagtaaaatgtcttactattctgttattgatcctgaattttaaacagataaatgccaaccagaattaacttatttcatgcagcaacatctcaactctttatgttttatttttgaaagagccatttttctgaaattcccctactagataaataatctgccgaatcaaataactgatctattggcaatcccctcaactgaccaaataggctacaatgagttaatcacgcaaaatgctcaccacttgaagtcagaaatccaaattttgtgctctcttcaaccgactctgcaaagtatttgagcttgtgacttat

SEQ ID NO: 208022 - DNA, 555 bp, Homo sapiens
ttctgtgaaataaatagcattctgcaagtaatgatatgttactgggcaagtaaagctatgttgttaatttataatgaccaggatagaatgtaatataaatgggatgagcaaaggaaattcgttggttcactgctgcatcaaatctgaactctgagttttctccttatatccatcctttaatgctcagctcaaaatagatctctaagaaacgttctctattgtttccctattacaaagtatattttccttctttaacatactgtatcccttcttatctttaccacctatatgtttctgtttttacccctggctttatattcctaagtattattgcatctttgyatctattctaactgcattaaaagttcccagagttttggagccatagtctgaagttggttaagtcccagtgacaaagtttactagcatctttctcattacttacatttgtataatgctttatgtatttcagaaaattttcacatttgatattgtctatggcataacaaaatgccttaaaccaagtaagaattctatacatcactcatcaatgat

SEQ ID NO: 208023 - DNA, 529 bp, Homo sapiens
gtttcagataaaatatgtgaatgtaaccatttaaaaaatctgatgtatattaatgtagatgtttaaaattacaaaaacaaaataggttttctataaaacagacttatacgtttcagtttgagaaaatgtgtaaaagaaaatctgaggatggattgggagattttgaaaaacatgatattcktagaccagtgctttacaaagcatccattcctagcatcactgtgagcatgcatgtttatcttgcatatctgtgagatagagctatcatgaatcttttttggacttttaacattagacatacttactgtattcaactcctccaaaaccgaaaccagacactcactgacagtagttgttatctgaagcagtatattgctcagagaattgaaaagttgtatatctgatttgtgggtctcttgactcaagcagttaattattttgattgccctacaggaatttatagttgtcagtggcagttgggactccagttttaagcatttgcctaattaggcacattagtgagatagcc

SEQ ID NO: 208024 - DNA, 544 bp, Homo sapiens
ggtctgcattttcgagatcataacaactatattaaccaatgcttttactgctattggagtttcctaagtgattatatataactagaatttcccccatattctccttattcctttctttcaagtgaacagtttattggatgattattcctaataattaagcattctctttccttctcctggtaaatattctacagaatcataggaaatatctacttttagcatacaatttctaccagcccgcctcaaataacaaatatcaaatatatatttaaatagttgagttatgtgagcagagaagcctgatcacctaaatatttgtgtacaagacaactgttcttttagyttacactgggaacttctggacattttcactgaagttagtttgtcttagaatgacagtttctctaggagaagcttctggtcaaaatatatttgaactaatgggaagctaacatttatggagtgcctgtgatatgccagggctaccatttattgagtgcttgctctgtatctgacattgaaataggtaccttgcataaattac

SEQ ID NO: 208025 - DNA, 530 bp, Homo sapiens
tttgaaacatacacccacccagcatcctagtttatctaaggatgcagttatatgaggatgcaatgaatgaaactactgcacccattttgtgatcacagtgcgacataactaagggcaaaagccaatatgctgaagatggcagagtgaagatgtccaggttctaaagaacctggagttgtcaaactacctgagctttggattttttgttgtgtgacctaataaactggtgtattttctccttaaagagaaagatcacatttctgtatgtgtgtttgactgtgtgaatatgtgtgcctgtgtacrtatataaaatggtcaataaaatgttaatgctgattttttaaatgagtttttttccagtatttctttactggcagaattaaagttggttataatctcccccactttttatgcatgttcctatatttagtgtaggagagttaaaaggacaaggaggaaggatgaggcaaaaagatggaataaaattttattttggaatcagaaattgattactaagaacagtgacttga

SEQ ID NO: 208026 - DNA, 651 bp, Homo sapiens
aggcaagttccctagcctctctgggcctcagaatgttcctcagcagatgcataaaataggtgtaataacgatgtctctgtcactagactattgaggaaccaaatgagataatacctgcgagcacractgttactatttttgctgttatttctaactatctagccagagaaccttgaacaaataatttcaactctttggggctatgtttcctagaaaatgaaggaattagatttcccagattccttcacagctcttaacattcttggccatcatccatgagagtaattgccttcccatagttttattaagtgccaaccttcagggctgcatggtcctcctttccaaatgtggccccagtctctacccatcccctctttcctcttgaaaagatctacagttttcctgtagtgaagtgagcacgctgtattcattgcagcagtagtcagaacatctaggaagcaacaggaggctgctggctttgcaagtgccctccaggcacaaccctgagaatggggggaaaagcccctttcacagactgaaaggttccacagccctggattctcagtgcttccagtttctaatcacaagccctaactgggcataattggaggtggaaatgagcagacctacatttgagtgtcagttctgtca

SEQ ID NO: 208027 - DNA, 597 bp, Homo sapiens
atataaggaaagctagaacaagatctcaaaagccacaagggacactctgaagacaaaaacaggcacagccatttatttagcatcagctttatgcttaacatggtttaaggattgacggaataaaaccagaattcacagttactgccctttaataataattgtagcaggcattttcacaaaggtttagaccgtattaaatcttgcacacaaatcgtttatttccttctcacaacaattttgtgaartgggtatcattatctccatcttatgggtgtggaaatgaggcccaggcagattaagtagttagattatggccacacagctggtgcaagacagaactgagactcagacacccatctgactctgaagcctgtgatctctccatttctccactatttgacccatgcactcacgtaagataagacacagggaaagatggcatgcatgaagttcatgccagcagaggccccgctccacatccacagttctgcaaaatagcatgtggagtgcttgggagggctctccagctagctaagggttggtccaagtttgtttggcacaatgtctatcaggtggaataacacacctgagtaggaa

SEQ ID NO: 208028 - DNA, 642 bp, Homo sapiens
atataaggaaagctagaacaagatctcaaaagccacaagggacactctgaagacaaaaacaggcacagccatttatttagcatcagctttatgcttaacatggtttaaggattgacggaataaaaccagaattcacagttactgccctttaataataattgtagcaggcattttcacaaaggtttagaccgtattaaatcttgcacacaaatcgtttatttccttctcacaacaattttgtgaagwgggtatcattatctccatcttatgggtgtggaaatgaggcccaggcagattaagtagttagattatggccacacagctggtgcaagacagaactgagactcagacacccatctgactctgaagcctgtgatctctccatttctccactatttgacccatgcactcacgtaagataagacacagggaaagatggcatgcatgaagttcatgccagcagaggccccgctccacatccacagttctgcaaaatagcatgtggagtgcttgggagggctctccagctagctaagggttggtccaagtttgtttggcacaatgtctatcaggtggaataacacacctgagtaggaaacagccatctttagcaccaatcacacgtcaataatacatgcccaa

SEQ ID NO: 208029 - DNA, 577 bp, Homo sapiens
ccactggcaagtttggcctggccttagctgttacaggaggcacggtaggctctgccttatattatgtggatgctgagcacagagctaaatctttggcacattccatggagtacaggacattgcactatggaaaggaactcattttctcatcctatgggtacagaaaccaattatcgttgactgctactcttgatcacataacacaccactcatcactggtagtgaagatttacagaatgtcaagatcacagagtgcattgtcttccagcctgtcactagccagcttcctcacatcttcamcagcattggaaaggactatgatgagcgtgtgctgctgtacatcactaagagatcctcatgttaccgattgcttactttgatactggagaactgatcacccagagagagctggtctccaagccggttaacaacgaccttacggagcaagcagccacctttgagctcatcctggatgatgtgaaaagatcctcatgttactgatggcttactttgatgatggagaactgatcacccagagagagctggtctccaggcaggttagcaacgaccttgcaga

SEQ ID NO: 208030 - DNA, 550 bp, Homo sapiens
tgctctaccccttaatctggctcagctgaaaaccstgggggattctccagcctccgaggccaaggcctgcttcatttaaaagaggctttgttgctggtgggtttgacctggcttatgattttattacgtggtctggggcaggctggatacctcagctggctagacagcgggagtgataatcactttttagcttgacttttaaaccttgctgcgctctctttaaattattttctttttaattttgctatgctgtaagcttcagtttacaaattagaaaatgtcaaggtggctgtaaaccccatttgttagcaggtcccaacagtctttgggaggcatacccagcaaactgaagcctataaggttgttatagtaggtagctagtcaggcatgagcagggcaggagaggggtccgcctgaccaggaatgtcaggtaaccaccaggtgatggtcaggcggttgttaactgtctctctaaagtaataattggtcacagtcagtgccagggaaaggcagtctccctatagatagaaaaaacctgaaactggtgatc

SEQ ID NO: 208031 - DNA, 567 bp, Homo sapiens
tctaccccttaatctggctcagctgaaaaccgtgggggattctccagcctccgaggccaaggcctgcttcatttaaaagaggctttgttgctggtgggtttgacctggcttatgattttattacgtggtctggggcaggctggatacctcagctggctagacagcgggagtgataatcactttttagcttgacttttaaaccttgctgcgctctctttaaattattttctttttaattttgctatgctgtaagcttcagtttacaaattagaaaatgtcaaggtggctgtaaaccccatttgttagcaggtcccaacagtctttgggaggcatacccagcaaactgaagcctataaggttgttatrgtaggtagctagtcaggcatgagcagggcaggagaggggtccgcctgaccaggaatgtcaggtaaccaccaggtgatggtcaggcggttgttaactgtctctctaaagtaataattggtcacagtcagtgccagggaaaggcagtctccctatagatagaaaaaacctgaaactggtgatcagcagcttcctgataagatc

SEQ ID NO: 208032 - DNA, 539 bp, Homo sapiens
ttgctgctggtaacaaggtcatatgttgaatttctgagagcagctgggtctcagatctaaacaactcaagtgtgttttctcccagtagtaagatatgatgtcatccaggtgtagagaggacccgaagactctggagcactgtgtggcctggccatttgtgtagggtaagaagagcaactatgtgcttggagtgcccccaccctcatatccacagcggacatctagtgtggatcatggtgttcttctctcattgaactcaaccttgacttcttttctaagcaattaccaccaattagatttggtgcacaagataaaatctattggctgtcctggacctagagggtattcaaatatggtaacctatgcttttcagcaaatagagtttgcaacaccatcccagctttagcttgccaatatggggacaaactcacacttgtttgtttgtttttaagtgccaaagccattaaacaccaactctkccaggcgagttgctggggcttaggaataaaaaggatgtttaaaggggtattgtcttcaat

SEQ ID NO: 208033 - DNA, 621 bp, Homo sapiens
tgtaagtgggcttatgtagtatttgtccttctgtgagtggcttattttatttcatataatgtcattttacatataattcattttacagttttcttayagtggccatgcatagatttttatattcccaggccaatattctcatataatgaaagttatttcctgtgatgaaagttatttgctggcaaatttctataatttggtgtttgtgaaaataaaatccatggaaaataatattaaaatgttattaaagttcccttgagaagagatttctttttgccaaattaagtgacatcaaagattcctgttaagaataccttattggtatcagaatagacatatacatagagacagaaaatataatagctgttactagaggatacagataggggagagtgaggaattatttttaaagaacacagggtttctatttgggatgataaaaaaaatgttctggaaaaggatagtggtgattgttgtacaacattgtgaatatatttaatgccactgaattctgaattgtacacttaaagatggttaaaatggtcaatttttattttatgaatattttatcacaatgaaaaaatttaatacaaaactattcaattacatttgaaattcaaa

SEQ ID NO: 208034 - DNA, 310 bp, Homo sapiens
ggactcctcacattagaattgtcttttttcactggaggatacaatacagaggtttcaatcattggctacatgttacaacataaaggcaaaaatgttctatgtgtaagtcaatcaatataacttcatgatttggaacaaatcagtgtcctcttattatcagtagtcctgtacatattaatcagtwcatcaacagtttgaggaactcatgataagatttgagtgactcacaataagacttttatacttagggacacgatgtaagcaatgaaacattagaacttccccaggccattaatttgtgatctatagg

SEQ ID NO: 208035 - DNA, 594 bp, Homo sapiens
taagacagtttccttgtttatttatttgcttatgtgtatagtatgtttcctcctacaagaagataagtgcaatggagcaaggaccttgcctatcttatcttcctttcccagaacaatgcatggcacattgttgacatkcaacaaatatttctggttggataaatgcaatacagggtaagtactcttatccccaaggttaagaagtttagttagcagaaaatgccatattacacacatcttaaacattgtgtggcctgcaaacaaacactgaaaattccagtgcaacctcatttagaaaactcattttccttatccacatttcaatactcagagttgtgtaatgggttatggtttagacctctcacctttcttccctgctgctgtgggagcctactatgtactaacatatactgttcacaaaatagctgtgtgctgcagacaccagccactactcagatgttccatatatatatatatatatatatatatatatatggagaaagagacacacagagagatatttattatgaggaattggctcatatgattatggagactgatagatctcagcacctgcaggctgagtcaacaggc

SEQ ID NO: 208036 - DNA, 594 bp, Homo sapiens
taagacagtttccttgtttatttatttgcttatgtgtatagtatgtttcctcctacaagaagataagtgcaatggagcaaggaccttgcctatcttatcttcctttcccagaacaatgcatggcacattgttgacatgcaacaaatatttctggttggataaatgcaatacagggtaagtactcttatccccaaggttaagaagtttagttagcagaaaatgccatattacacacatcttaaacattgtgtggcctgcaaacaaacactgaaaattccagtgcaacctcatttagaaaactcattttccttatccacatttcaatactcagagttgtgtaatgggttatggtttagacctctcacctttcttccctgctgctgtgggagcctactatgtactaacatatactgttcacaaaatagctgtgtgctgcagacaccagccactactcagatgttccatatatatatatatatatatatatatatatatggagaaagagacacacagagmgatatttattatgaggaattggctcatatgattatggagactgatagatctcagcacctgcaggctgagtcaacaggc

SEQ ID NO: 208037 - DNA, 593 bp, Homo sapiens
ttctactatggatgattgcagtctcacctaataataacagcactgagtgcttaatatttgtcagttgttgcgttgagtgctttagctaagtcatctcatttaatcttcacaaaaaacatgatgtggggactcctattaccctcacgttgcaagtgagggaattagggcttagagaggataaatcacttgctccaggcttcacagtgggtgaacagaagaatagcattagaacctaggtttttctgttcacatagcccatgatcttttaaaatatattttgatcctttatgttcttccaatttttaatattttattctgaaaaatttcaagtcttcattgttttcttctgtagctcaagcttttataccactgccttctaaagcatcatgtaattaaggaaataactatatataaggaatagtaggmgcaaggagtactcacctcattgatgaggagttaggaaagcatcacagaagtgggcagctaagcagaaccatgaggttgcttagtggtttgcaagagaaaagagtggcagactatcaaagctgagggaatacatgcatgaaggacagagggatgcagaacacagcaag

SEQ ID NO: 208038 - DNA, 480 bp, Homo sapiens
gtacaccatggaatatcatgcagccataaaaacgaatgagatcatgtcctttgcagggacatggatggcacttgaagccattatcttcggcaaactaaagcaggaacaggaaaccaaacaatgcatgttctcacttataagtgggagctgaacaatgagaacacatggacacagggaggggaacaacacacactgcggcttgtggtggtaggggtggagggaggaagagcatcaagataaatagctaatgcatgctgtgcttaatacctaggtgacaggttgataggtgtagcaaaccaccatggcacatgtttacctatgtaacaaatctgcrcagactgcacctgtatcccaaaattttaaattaaattgaaaagaaaacatagtcatctctctggtcagttctaaaggaaagcatactgcagcgatctgtgatgctgtgtgatcagataggctcaaatagactgattaggaatacat

SEQ ID NO: 208039 - DNA, 539 bp, Homo sapiens
cctcactagggtccctagtcccttgatagtaacttgttattccccacctggagccctgtggcttctctactgctctgactggtgctagaatgaccttaccgattgcagacaggaccaggtctctccactgcttgagagttttcaatagttttctatggcctttagggtaaggactaatggtcttgacttgacttttagagctggtcctgatttgtcttctgggaactggggtcactcctcaacatttagtcatcatcatggttgtgcccttcctctgagctcccaccagtgctgtgcatgcctctgccatagcctgtcacacagtacagtgaccacctcttcatctgctctcccctacacactcaayacaggcttctcatagatgggggctgggtcttgttcacccctgcgtccccaaggtctgacacatcataggcactggagaaatggcgaactaaggcatgtgcaaatgaatgaatgaatgaacaaatgaataagagatgcttgcaaatgtacattggctctatgttatgtagcag

SEQ ID NO: 208040 - DNA, 616 bp, Homo sapiens
caataaaaggtaaaagagaggcatcagtaaaaaaggaatcgaatgtttaataaataatgttgaaaaaactagatagctatttgaaggaataaaataccagtttgcggcaggagtccccaacccctgggctggggactggtactggtccgtggcctgttaggaactaggccgcagagcaggaggtgagtggtgggtaagcaagcattccacctcctgtcagattagctgtggcattagaatctcataggggcgtgaaccctattgtgaaactgcgtatgccagggatctaggttktgcgctccttatgaaaatctcactaatgcctgacgatttgaagtggaacagtttcatcctgaacctccccccggctgccatcccctgactgctggtttagagtatcgtctcacaccataccccagaattaattccagatgaatttaagataatttgaatttatatttaaaattcaaactataaaagttagaataaactatatttcagacaatggtatggaaaacatacttttaagcatagatacaatataataaattatcacaaaagatctatagaattggttacacaaaaactgatcagcttgattaattttttcaccctg

SEQ ID NO: 208041 - DNA, 612 bp, Homo sapiens
tgttttaatattttttctggtatcttgtctcagtatcttcccatgtagaacaactctatatatcacagaactgctaaaagcaattaaatatggcatattgagtttttaaattacattctcttcattaaaataaccagagtgaaattttattagtaaaaataatgaagtaagagcctctgaaaatctccccctccataaaagcaacagaaatctgaaaagaattgtcagattcagtgtcaactttttcaaaacataggcaattaaccaaagscttaaagaatgttagaagcatgtattaaaaaaaggctagatctccacaagaactcaatatttgtgttttaacttgccataggtgcacccacccttccacagtgaagtcatagtcttgaaaaataacagcatttctatcacagaaaggagcagaatggagttagatcctaattcccaaagaattgcaattatttgaactgtctggtggttccctagaaaactgggctggaaaggattttctttatgtaaccttacttagatcttatgcgctgttaaaaacatctacaaaaagagtggttgagagggaatttgaaaaaaaaaattataggcaagtgttgtaaa

SEQ ID NO: 208042 - DNA, 433 bp, Homo sapiens
agaaaagctcaagaataaagcaattaacattatcactcttttgttcagttgcagtgtggggagtgatgttcctttcaataggcacaaatatttatagaagtgttaactatgggctgggcgcagtggctcacgcctgtaatcccagcactttgggaggccaacgcaggcggatcacctgaggtcaggagttcaagaccagcctggcaaatatggtgaaaccccatctctactaaaaatacaaaaattagccaggcatgatggtggctgtctgtaatcccagttactcgggaggctgagtcaggagaatcatttgaacctgggakgcggaggttgcagtgagccgagatttcaccattgcactccagcctggacaacaagagctagactccatctcacaaaaaaaaaaaaaagtattaactatgaaatcctaccc

SEQ ID NO: 208043 - DNA, 281 bp, Homo sapiens
ttagaaactcatgtatttaattttatctttcaaagaacatttttaaaaggcttactctgyttatatgtatattttgcacaaagctttccattcataaacaaaaggtgaataggaatctgaattgaaaactacgtaatttcttttctcctttttgtcaaatcatcacagtatagattagtcattctgtatgaagtgcattgccaagacatagtcacatttgtgtacaaatgtgaaggctatatctcaatagaaatcaaaaacaaaaaaatacagaagaccat

SEQ ID NO: 208044 - DNA, 281 bp, Homo sapiens
ttagaaactcatgtatttaattttatctttcaaagaacatttttaaaaggcttactctgtttatatgtatattttgcacaaagctttccattcataaacaaaaggtgaataggaatctgaattgaaaactacrtaatttcttttctcctttttgtcaaatcatcacagtatagattagtcattctgtatgaagtgcattgccaagacatagtcacatttgtgtacaaatgtgaaggctatatctcaatagaaatcaaaaacaaaaaaatacagaagaccat

SEQ ID NO: 208045 - DNA, 281 bp, Homo sapiens
ttagaaactcatgtatttaattttatctttcaaagaacatttttaaaaggcttactctgtttatatgtatattttgcacaaagctttccattcataaacaaaaggtgaataggaatctgaattgaaaactacgtaatttcttttctcctttttgtcaaatcatcacagtatagattagtcattstgtatgaagtgcattgccaagacatagtcacatttgtgtacaaatgtgaaggctatatctcaatagaaatcaaaaacaaaaaaatacagaagaccat

SEQ ID NO: 208046 - DNA, 596 bp, Homo sapiens
atttgtgggaagaacattattaaaggccatattcccaaatatgaattatacaaagatagattatgttacttgaaaaaaacttaaagatttctcaattttactttgaggaattataaaatgttattttgtggcaagtaagatgaagtacagtattatcatcaatcactgttgctatcttatatacaagatttttggaaacatccttttagcaataccttttccacttgagcagcattagaaattttgttcttgttaataggtataagcatgttctaatcctgtacttttgttaaattatctattttattgactttcataatagatttttttgakaatattctttttttctgattagagtttaagtagattataatttttcactagaaagcatttaaaatgctgctcattttccaaagttagtgtggcttgattatctgacaaatcctgccagcagcctgtaggtctgatataccttatgtaacatcatctgcattattattattatagcagccattttataagcagataggaatgtttaaataatcattatcaggtaatcaaatgtaacatactcttaagggtaaattaatttaaaa

SEQ ID NO: 208047 - DNA, 449 bp, Homo sapiens
ttcttatgttgtatgacaagaaatatgaaataattctgaaaaatttagtcattcttcttttaaatttagaaacccgttttttatatttataatatttaaagccattaaaagttaagatgtcataattaaaataatcttttwacattaattagcatttagcagatgaccataataaattatttttaattatgctacattaattgccaatacaaatttatttctggtttttacaaatctgtttgcaaaattttattttgtcatttattaaatttttgtataattagctgctacattgcaggtataggaacttccagtattaagcatgattacaaatacttcagttttcatgtcttaccttttattaatagtctaaaagttataaaatgctttgtgcattagtattggtaacattctttagtatgaactatcatttgaaaaatgttaggaac

SEQ ID NO: 208048 - DNA, 449 bp, Homo sapiens
ttcttatgttgtatgacaagaaatatgaaataattctgaaaaatttagtcattcttcttttaaatttagaaacccgttttttatatttataatatttaaagccattaaaagttaagatgtcataattaaaataatcttttaacattaattagcatttagcagatgaccataataaattatttttaattatgytacattaattgccaatacaaatttatttctggtttttacaaatctgtttgcaaaattttattttgtcatttattaaatttttgtataattagctgctacattgcaggtataggaacttccagtattaagcatgattacaaatacttcagttttcatgtcttaccttttattaatagtctaaaagttataaaatgctttgtgcattagtattggtaacattctttagtatgaactatcatttgaaaaatgttaggaac

SEQ ID NO: 208049 - DNA, 449 bp, Homo sapiens
ttcttatgttgtatgacaagaaatatgaaataattctgaaaaatttagtcattcttcttttaaatttagaaacccgttttttatatttataatatttaaagccattaaaagttaagatgtcataattaaaataatcttttaacattaattagcatttagcagatgaccataataaattatttttaattatgctacattaattgccaatacaaatwtatttctggtttttacaaatctgtttgcaaaattttattttgtcatttattaaatttttgtataattagctgctacattgcaggtataggaacttccagtattaagcatgattacaaatacttcagttttcatgtcttaccttttattaatagtctaaaagttataaaatgctttgtgcattagtattggtaacattctttagtatgaactatcatttgaaaaatgttaggaac

SEQ ID NO: 208050 - DNA, 449 bp, Homo sapiens
ttcttatgttgtatgacaagaaatatgaaataattctgaaaaatttagtcattcttcttttaaatttagaaacccgttttttatatttataatatttaaagccattaaaagttaagatgtcataattaaaataatcttttaacattaattagcatttagcagatgaccataataaattatttttaattatgctacattaattgccaatacaaatttmtttctggtttttacaaatctgtttgcaaaattttattttgtcatttattaaatttttgtataattagctgctacattgcaggtataggaacttccagtattaagcatgattacaaatacttcagttttcatgtcttaccttttattaatagtctaaaagttataaaatgctttgtgcattagtattggtaacattctttagtatgaactatcatttgaaaaatgttaggaac

SEQ ID NO: 208051 - DNA, 397 bp, Homo sapiens
agaatcctgtacttagactccytaaatatattaaaaatgaaatttaaaaattttatttaaaaaaggatttccaaattttcaaatgtgtattttaatgtcaattagatatacacttgacatcatctgatttttttttattgaccagtggttgcctgccatagaacatggctccatggcaggggcgcatcttcccccacactagatttagagaagttactgggtccaggtgctcctcagtgctctcaggtactgcttgacctgctggaaaccacaaagtagatgctagtattgtgtgctttgcagtctaacaaccctgaaatacaaatcctacccagccaccacttctagaaatacaactttgaataatatacataactttgcaaaattaagagaattc

SEQ ID NO: 208052 - DNA, 395 bp, Homo sapiens
agacttcaccactctgcaatatatgcatggaagaatcctgtacttagactccctaaatatattaaaaatgaaatttaaaaattttatttaaaaaaggatttccaaattttcaaatgtgtattttaatgtcaattagatatacacttgacatcatctgatttttttttattgaccagtggttgcctgccatagaacatggctccrtggcaggggcgcatcttcccccacactagatttagagaagttactgggtccaggtgctcctcagtgctctcaggtactgcttgacctgctggaaaccacaaagtagatgctagtattgtgtgctttgcagtctaacaaccctgaaatacaaatcctacccagccaccacttctagaaatacaactttgaat

SEQ ID NO: 208053 - DNA, 394 bp, Homo sapiens
gacttcaccactctgcaatatatgcatggaagaatcctgtacttagactccctaaatatattaaaaatgaaatttaaaaattttatttaaaaaaggatttccaaattttcaaatgtgtattttaatgtcaattagatatacacttgacatcatctgatttttttttattgaccagtggttgcctgccatagaacatggctccatggcaggggygcatcttcccccacactagatttagagaagttactgggtccaggtgctcctcagtgctctcaggtactgcttgacctgctggaaaccacaaagtagatgctagtattgtgtgctttgcagtctaacaaccctgaaatacaaatcctacccagccaccacttctagaaatacaactttgaat

SEQ ID NO: 208054 - DNA, 580 bp, Homo sapiens
ttgacctccataattccttatcttaactgagacatttcctttctattgatcgcaggtctttatatgaacttaaccaatagccagtcagaaaatttttgaatctacctataacctggacccccaccgccacccaaccccccaccctcctcacacttcaccttccttgaccaaaccaatgtacttcttaaatgtgtgtgattgaagtctcatgtctccctaaaatgtataaaaccaagccacaccccaaccaccytgagcacacgttctcaagatctcctgagggctgtgtcatgggccatggtcactcctatatggttcagaatgaatctcttcaaatattttagaatttggttcttttcatcaatgggactaaacagaattgacagctgaggtttggcaatggagctggagaagtgtgtgtgcaaaaaaaagagaaagtggtacaaattgtataatatgaaagacttttctttatatgcacaaaagataaaaccatacatttagttcaatgtgtaatcatttgtgcagtccagagatttaatattgaggctgaaaatgagcatatcaatcccaggccttg

SEQ ID NO: 208055 - DNA, 580 bp, Homo sapiens
ttgacctccataattccttatcttaactgagacatttcctttctattgatcgcaggtctttatatgaacttaaccaatagccagtcagaaaatttttgaatctacctataacctggacccccaccgccacccaaccccccaccctcctcacacttcaccttccttgaccaaaccaatgtacttcttaaatgtgtgtgattgaagtctcatgtctccctaaaatgtataaaaccaagccacaccccaaccaccttgagcacaygttctcaagatctcctgagggctgtgtcatgggccatggtcactcctatatggttcagaatgaatctcttcaaatattttagaatttggttcttttcatcaatgggactaaacagaattgacagctgaggtttggcaatggagctggagaagtgtgtgtgcaaaaaaaagagaaagtggtacaaattgtataatatgaaagacttttctttatatgcacaaaagataaaaccatacatttagttcaatgtgtaatcatttgtgcagtccagagatttaatattgaggctgaaaatgagcatatcaatcccaggccttg

SEQ ID NO: 208056 - DNA, 494 bp, Homo sapiens
gggaaactcactatctaggcttctaggaatcccagaatcaggtgtgaccatccacrtggttagcaataagtttcctatgggaacttcccacccaattcagtgcttgcagaataagaaagcgctagcaaaaacatttaatatcttgtatttaaggtgagtcatagtccagacaggacaggcccatgagatgtggaaaaaatgtgtttccaaggctatgttaacatcactagggagtttcgtctcgggaaagcactctctataaagtcagttcttccaggtcctcaaaccaattcaaaacctagcctgctgattcaacttgtgtggacctcagccagtctggtattaggatgatagtgtaggtattccagcttcctaggggagctctgctgaatacgttagctcatccctgggcaatgttgttggcacagccccatgttacctcatctatcacatggttaccagagcgagctcaccatcttgcacacctgaacatg

SEQ ID NO: 208057 - DNA, 494 bp, Homo sapiens
gggaaactcactatctaggcttctaggaatcccagaatcaggtgtgaccatccacgtggttagcaataagtttcctatggraacttcccacccaattcagtgcttgcagaataagaaagcgctagcaaaaacatttaatatcttgtatttaaggtgagtcatagtccagacaggacaggcccatgagatgtggaaaaaatgtgtttccaaggctatgttaacatcactagggagtttcgtctcgggaaagcactctctataaagtcagttcttccaggtcctcaaaccaattcaaaacctagcctgctgattcaacttgtgtggacctcagccagtctggtattaggatgatagtgtaggtattccagcttcctaggggagctctgctgaatacgttagctcatccctgggcaatgttgttggcacagccccatgttacctcatctatcacatggttaccagagcgagctcaccatcttgcacacctgaacatg

SEQ ID NO: 208058 - DNA, 494 bp, Homo sapiens
gggaaactcactatctaggcttctaggaatcccagaatcaggtgtgaccatccacgtggttagcaataagtttcctatgggaacttcccacccaattcagtgcttgcagaataagaaagcgctagcaaaaacatttaatatcttgtatttaaggtgagtcatagtccagacaggacaggcccatgagatgtggaaaaaatgtgtttccaaggctatgttaacatcactagggagtttcgtctcgggaargcactctctataaagtcagttcttccaggtcctcaaaccaattcaaaacctagcctgctgattcaacttgtgtggacctcagccagtctggtattaggatgatagtgtaggtattccagcttcctaggggagctctgctgaatacgttagctcatccctgggcaatgttgttggcacagccccatgttacctcatctatcacatggttaccagagcgagctcaccatcttgcacacctgaacatg

SEQ ID NO: 208059 - DNA, 373 bp, Homo sapiens
gaaattgcctaaggagaatttagaatgagaaaaaggccagaggcagacaattttagacaccaggaagagaaattaagagagaagatttgagaagtagctgataaggaggggaattccaggtttgtaggagattctcagggagactggatggtgggtaaaacggtgaagagaaatctgaagggtatgagtgttgactattaaaggagacagtagagttctttggcactgttatcttttgtattaacagacttttggctttgaatgtgggtaacatttgttatytgttagtaaagtttatctttagtgtattgtaatggggctctaccattttgatagcaaattctcataggttaaaattacttattttcaaaat

SEQ ID NO: 208060 - DNA, 600 bp, Homo sapiens
ttcattcatactctttatgagaattgaggggatgctactgggaaatgggaagaaagaaaatgatctagctaatcttgccaatcagatatttaaataaatggtctaatgatatattctcagggatagagacgtgatctctggaatgcctttagcaacatatccttggctaaaagattaattagattcagaaactatagagaatgggtccctggagaatgtcatgtargcaatgtaactctctgggttataaaatggaaagttttagtaatttaaataacctctttcatgtgaagtaatcacatgatctcatttagaaaccctatttattattatgggccagaggtgcctatccaaagcaagaagaatattttatccagcattttaaattgttttctgagggagaaatattatgttatttagtctttcatatgattataaatgaaagtcttgatattcatatttctgcttagaaatacaaatatgaattgatacatgagtagcacaactggaagtaaatgatattatttttaaatggtgaatgaaagacaattatgaaagtaaaacatgggtttgggcagggctactgaattggtctaaaaa

SEQ ID NO: 208061 - DNA, 468 bp, Homo sapiens
tttcaaaacacaatcatgcccttcctacagtcccccaaattcttaactcattctagtattaacccaaaagtccaagtccaaagtctcatctgagacaaggcaagtctcttccacttatgagcctgtaaaatcgaaagtaagttaattacatcctagatacaatggggataccagtattgggtaaacacgcccattccaaacgggaaaaattggccaaaacaaaggagctacatgactcargcaagtcccgaatccaatagggcagtcattaaaccttaaggttacaaaatgatctcctttgactccatgtctcacatcaaggaaacgctgatgcaagagttggggcttccatgttgtgtgcatctctgcttctgtggctttgaagggtactgccttcctcctggctgctttcactggctatcattgagtgtctgtggcttttccaggtgcacagtgcaagctgttggt

SEQ ID NO: 208062 - DNA, 604 bp, Homo sapiens
tgctaataggaagaaaaacaagaaatggtccttccttccttcattcttacatttgtaccatttttttccctgtttctttctgtatgcattatctaatttgatgtgcataacaacttatgagatacaaaagaaggttgttattgaccccacatagaaaagaaaggcaagtaatttcaaaaagatcaagcatttattagaaatttctagacttagtgaggaaggaagaactaagactatgtaagatgttattatcgttacatattgattagtgtgcactgctcgtgaataccatatttttaggcctgttttcctgaaccacataatattgtcccactgtgaaacaggcattacaattttgtatttacttctaatggttctcaaagggaaccttgtttaatgatataacatttgcaaatctctttgaataaagaaatcatttaaatgcaaagtatctctgaacattatcccctttactctcccactgggtacataaaaatcaaatagggctgactgtgatattttaggagcataaaggtatcataaattgactctttgcacyttgctacaccacaccccagaacaactctgcacctcatgcagatct

SEQ ID NO: 208063 - DNA, 564 bp, Homo sapiens
taatactaggcacactagtcctgctttggaattctaagtcagaatgtatttttatttttattttattttattttattttatttatattttatttttgagatggaatctcactctgtcatgcaggctagtctgcagtggggtgatgtccgctcactacaatctctgcctcccaggtttaaacgattctccttcttcagcctcccgagtagttggactacaggcatgcaccaaaatgcctggctaatttttgtattttaatagagacaggattttgtcctgttggccaggctggtctcgaattcctgacctcaggtaatccrtcccccgttggcctcccaaagtgttgagattacaggcgtgagccaccgcactcagcccagaatgtacttttaaaatcaagactcatcttaaaacttctctaaacatgattattataaacatatcacccaaggtatacaaatgtggtcttcaacatttttttaattgacatgtagtacatatttaaggggcacaatttgatgtttcagcacatatatatagcacaatgatcaaatcagggtattt

SEQ ID NO: 208064 - DNA, 600 bp, Homo sapiens
tttgtgaactctcacattaagcagctttgttatgctaattaacttgtaaatgaagaatggagtgattctcccattattgaatatcattcttaagggcctgatttagaaaaataaagatatcctttatgcttgcaaatgatgctaagctgtggatcaggagtctattttagtggaaaagtcaccctattttttaaaaagttgctacatatccattaagctttatatttagttttartccgccaatgaattttacaaaagaaatatctgttcgggaaggaaataacacaagacaactttgagaatttatttccacacaatctccccttgaaaggccaatgtatcataactaagaaaaatctcagtgcatctataccagaggtcaaaactgctgatctgaaggttatagacttgtcaaaagagatgtatcatttaacgagtagtgttttgctttaatttttaaaatttgaaatttggtattttttaaaaaatgagagagtgcataccaaaatcctgatttctagattttggtggaaaattagaagatatgacaaatacaagagcaatgtttatactggacaacaatcacctggagctgaatag

SEQ ID NO: 208065 - DNA, 600 bp, Homo sapiens
tttgtgaactctcacattaagcagctttgttatgctaattaacttgtaaatgaagaatggagtgattctcccattattgaatatcattcttaagggcctgatttagaaaaataaagatatcctttatgcttgcaaatgatgctaagctgtggatcaggagtctattttagtggaaaagtcaccctattttttaaaaagttgctacatatccattaagctttatatttagttttaatcmgccaatgaattttacaaaagaaatatctgttcgggaaggaaataacacaagacaactttgagaatttatttccacacaatctccccttgaaaggccaatgtatcataactaagaaaaatctcagtgcatctataccagaggtcaaaactgctgatctgaaggttatagacttgtcaaaagagatgtatcatttaacgagtagtgttttgctttaatttttaaaatttgaaatttggtattttttaaaaaatgagagagtgcataccaaaatcctgatttctagattttggtggaaaattagaagatatgacaaatacaagagcaatgtttatactggacaacaatcacctggagctgaatag

SEQ ID NO: 208066 - DNA, 600 bp, Homo sapiens
tttgtgaactctcacattaagcagctttgttatgctaattaacttgtaaatgaagaatggagtgattctcccattattgaatatcattcttaagggcctgatttagaaaaataaagatatcctttatgcttgcaaatgatgctaagctgtggatcaggagtctattttagtggaaaagtcaccctattttttaaaaagttgctacatatccattaagctttatatttagttttaatccgccaatgaattttacaaaagaaatatctgttcgggaaggaaataacacaagacaactttgagaatttatttccacacaatctccccttgaaaggccaatgtatcataactaagaaaaatctcagtgcatctataccagaggtcaaaactgctgatctgaaggttatagacttgtcaaaagagatgtatcatttaacgagtagtgttttgctttaatttttaaaatttgaaatttggtattttttaaaawatgagagagtgcataccaaaatcctgatttctagattttggtggaaaattagaagatatgacaaatacaagagcaatgtttatactggacaacaatcacctggagctgaatag

SEQ ID NO: 208067 - DNA, 538 bp, Homo sapiens
gttacaaattttgctgcatatccttgaaataaaaaatgcaaagagattttcctctcatcttgttttgtatccttgaaaacttgactttgtgaccgtatgggagtactttgtcttgatctcagctaactggagggtggcaattttcaggtacatgtaatrgctagcctaaaaatttttcttaagcagttaaaatcctttgcaagctcgaaaatgagtactctagactcctgggaagaacaatggtaactgctccatgtggtagctcagtagctaaagcttggccctttcacagtggaacttgggttcagttctcagctcaggaaattattcttttctggtttggtattagtgtgacaacttctgatttcctgtattaaattttcctttctttgagctacctttcaggtgattctcaatcttgtaaaaattgattgccgtctctggagacacctcatgtatccttggttaattcataattgtagttaaggtttttataatttcacataggaggttacctttggtaaagttcaaaagccga

SEQ ID NO: 208068 - DNA, 403 bp, Homo sapiens
tatcaagcattttaaacctttgatattgacaaacattgcaaaatcaaattctaaattaagtctttttttgacctcattaacttttaagtatttattcctatgaagcccaaaagaggcrtatttggcttatttgctatattaaaattctatacaaagcattgtcagatagaaaatggtatttaacttcctttgagttacattcatatgaatgtgttttcaatatatattccaaaattgtataagattcctataatatcatatgtctgatatcatgtttcagtatatatgtctcagtacatgttaccagtaataattataattgtttgttaaataattgtgtgccaaagagattttcttgttaattgcagctttaactgtggctgtcctaagattcttatcatcc

SEQ ID NO: 208069 - DNA, 512 bp, Homo sapiens
tcataaaaagtttacagatatttctttaattttttccacatttatatgtaacatatcatttatacataaattcagtgttctataaaggtataaatgcctctgataaggtttaatgtctttaaattatcctccaggaattcataattgccaacaaaccatagcctctccgtctcttggtttgattgcactaacacttaccaaagtgtactttacgataagttagttgttctatattttaaaactttgggaaaccctgaattaaagttaaatattatttcccctacagaatttcttagagcctgtactatgcaaataagcattgtaaatcttcagtactttacaaaattattagtccattgaatcctttttcattgatcatattaatgaaatcacagaaatttgttttgggaaacactactcggatcacatgcaagactcttgtgtttagatccttaaactataraatattctacttctgaaaataatctaacattaaacttccgttatttgta

SEQ ID NO: 208070 - DNA, 567 bp, Homo sapiens
aatatgatattgtcttgtacttctttatataagaataaaaaggccaggcgcggtggctcatgcctgtaatccaagcactttgagaggccgaggcaggtggatcatgaggtcaagagatcaagaccatcctggccaacatggtgaaaccccgactctactaaaaatacaaaaaattagccgggcgtggtggtgggtgcccatagtcccacctacttgggaggctgaggcaggagaatcacttgaacccaggagatagggttaccatgagccgagactgtgccactgcactccagcctggtgacagagcaagactctgtgtcccaaaaaaaaaaaaaaaaaagaaaaagaaaaaagaataaaagtgaacatccagtgtgtccaatttatattctcagtctggttcactgaagttttcaacagtctgtttctttgaaccaaacttcatatattattcaaagtaccctgcacactacattcaaaaaattaaaagcyctgctattacataagcaattactattgacaatagtaattgtgtagcctatatgatgttggaaaattttgattaaa

SEQ ID NO: 208071 - DNA, 613 bp, Homo sapiens
gctgcctttttttcagagatgccctgcccggagaggagaaatgtggcagtctggccacagcagccttgctcagctctgcccagttcaaacttcctggctgctttgtttactctgtgagcttaaaactggctactcaagctgcaccagtggtggatgcccctccccacaccaagctcaattgtcccaggttgatctctgactgctgttgtgttggcagtgagaatttcaagccagtgggggtgggacccaccgagccagaccacttggctccctgacttcagcacccctttccaggggagtgaacggttctgtcttgctggcattccaggagccactggggtatggaaagaaaaacmcctgcagctagttcagtgttttccctaatggccacccagttttgtgctcgaaacccagggccctggtggggtaggcaccatagggaacctcctggtctgcggggttgcaaagaccatgggacaaatgcagtatctgggctggagtgtgcacccttcctcaggctcagtccctcatggcttcccttggttaggggagaaaatttcccgacttcttgcacttcctgggtgaggcgatgccccaccctgcttcagatcac

SEQ ID NO: 208072 - DNA, 492 bp, Homo sapiens
ataatcaccttgtaatacattagatatcttacaatttattcctgctacataactgtaattatgttattctttgaccaacatgtcctcatccattcctcctcattaaccacctcagctgccggtaagtaactttcctctctctacttcaatgtaatcaattttttaaaattccacatatgagtgagatgatatggaatttgtctttctgtttctggcttatttcccttaacgtaggtcctccaggttcatccatgttgtcgcgaatgagaagatttcatcattttatatggctgaatagtattccattgtgaatatataccatattttctttatctatttatccaatgatggataattacattgattccatatcttggccattgtgaataatgttgtgaygaacatgggaatgcagatatctcttggatatattgactgcaattcatttagttatataccaagtagtggtattgctggatcacatatggtatt

SEQ ID NO: 208073 - DNA, 585 bp, Homo sapiens
ctgtaatgggtgacccatagatcacaagcattcttagaattatttcatgctgtttgtctgccatttttttgtaccatagttacatgctccatcagtaaatgatcaaattattgcaacattcttccaggatgtaaatgttttagtctttagctggtttacttagagattactttacatttagatgcttacttagagatgctttatttagagattgccattacagaaaccttgggtagatattagctatacataccactcaggattaactatttatttctacgataggggataagttctstccacacacccccagctaacccccaatactcatgccttttatatgtaaaagtataatatgagctagtcataaattttctacttacttccttatgttcttctcaaatatcagtttctattagttcttttggctagactggacatttgatacttttattttttttaccatatccatatttatttcatcagtttggattgttttctattattctgcttttctgttgaaataaagttctgtttacaggttgttcaacacatcagccttgatgtcttttataacatataaaa

SEQ ID NO: 208074 - DNA, 548 bp, Homo sapiens
cttactttctgtctttcctactctcagctcttctattatcttcaaagttgagaaaatggctagtttttcttaaacatcctttcagagctatttattttcccattttgagtgctgggatcattctccgagttctgcaaagtgctctgggcagcagaagaaggagagagggagctttgtgccactgatttcaaccttgcaatgcaatstctcccagtttccataaatcagcaggtttacaggagacggtgagaagagtgccctctgatttttacacctgattctctctaaaatctgcccaggggcttctggaggtgcttattttcccaaaaggcagaggctgcagaaacccactactatgtcagggtagaagaatttacctattttggaagtaactggtgattctgagaaacagcattataacttttagtatccatttataatatgactcagtgaatgtctttgcacgtgtcctgagaccctcgcagagaaactctgatggcttttgagctgccagcgaaagcttcgttttagaggtgaacacttagcat

SEQ ID NO: 208075 - DNA, 460 bp, Homo sapiens
cctgttgtacactacagttgagagccatccagcatggtcwgtgaagggttggaaggctaggtgaacacgtctggaagaatgacctccccaattagcacttggggggttactaaaccctttggctgtttgctgaaagctaccaacctactccccagaaatgcacactggaacatcattttgcttatagatttagaaagtatagagcaggctgttagtcaaatccagctagcagcatgcttttggtgaataacgttttattggaacacagccacagccattgatttgcacattacctatggctgctttctcacccaagggcagaactgagtagctgtgacagagactgcatgatggcctgcaaaactgcaaatttttattctctggccctttacagaaaatgcttgctggcctctggctagagagcactgagggcctgggagtgcctagactcaggttaaat

SEQ ID NO: 208076 - DNA, 460 bp, Homo sapiens
cctgttgtacactacagttgagagccatccagcatggtctgtgaagggttggaaggctaggtgaacacgtctggaagaatgacctccccaattagcacttggggggttactaaaccctttggctgtttgctgaaagctaccaacctactccccagaaatgcacactggaacatcattttgcttatagatttagaaagtatagagcaggctgttagtcaaatccagctagcagcatgcttttggtgaataacgttttattggaacacagccacagccattgatttgcacattacctatggctgctttctcmcccaagggcagaactgagtagctgtgacagagactgcatgatggcctgcaaaactgcaaatttttattctctggccctttacagaaaatgcttgctggcctctggctagagagcactgagggcctgggagtgcctagactcaggttaaat

SEQ ID NO: 208077 - DNA, 298 bp, Homo sapiens
actggctgcggggaaactttgtggcagttgtccagggagggatgccagagtttgaaggagggcagggggatgaagagagcacacaatttcaagtgcctgcctttccagatctgctctgcttcttaatctgctcaactctgctctgataggaatgcaaagcaaagaagccaccagcggctacagtcttcacttgaccacatgctgctgggttycacacagatacagtcaaaatcagcccttcgaaagctcaccattggcaatgtgcagagctctaatcgggaattcaatcatatacttc

SEQ ID NO: 208078 - DNA, 453 bp, Homo sapiens
gctgcatgagataaatgatattcggggattttgaaagtacttttaagcatgccattaagaaatctaaacatgaagactatgaacatcagaggcaaaggtgtcagcaagcagcctgttgtagaaggagatttgtcagtctacagatgagcagattaaaaaaaaaaaacaacaasaacagtgtagaaagcaccattctatatctcacttttacacttgactcaagactccatatggactggtctagtggcttaaatgtccaccaaagatatccttattctccccaagccagcaagcatcatttcctcctgtatccactttgcttcactctctcctctttgcttagaagtggagaaggtcaggactctacttaataagttaaagtgccttggttgaataaacttagggccttctaactatttctataagccaacccacacacttacacacacttct

SEQ ID NO: 208079 - DNA, 636 bp, Homo sapiens
atattgcaaactagtagcctccttgcaatctctttagtgccacggtttttgcatttttatactgtttgctgctgatttcactgcttaaaatggcccccaaggatagtaatgaagtgctggccctgaccacaagaaggctgagctgtgccttatggagaaaatgcacaagccttgcacagacatgagttacagcagygtcggctatgagttcaatgttgatgaattaagcagtctttaaacagaaacacacataaaacaaagttatgtattggatccgttgacaaaaatgttgtggccagaagctcaaaagaccctaaacccttttatttcccaggagcaatggttcagtatttgctaagtgaatgttcacagtgacactacagaatagacttagctaccacgcatatcgagaatcagctgtattcatcgagctccttcttctgccaagtgccatgcctacagctgggtgtttggtgaactcctgctttcagggagcttaaagtttagtgagggaggcatgcattaattaatgacactaatgaatgtgcagtttcaggcaagtcaaggaagatgccctaaggatgtgaagtgccaaccgagacctaaagaatgaatgggagttctacagctcaaaca

SEQ ID NO: 208080 - DNA, 527 bp, Homo sapiens
aatgtgcagtttcaggcaagtcaaggaagatgccctaaggatgtgaagtgccaaccgagacctaaagaatgaatgggagttctacagctcaaacacctgggaaagaagctctgagctgtagatctgagcacaggggtgcagtggacggcatcctcaggaacatctcctyggtgagggaaactgcatcaagcaaagggaaaagtggcaacagaggcctcagccaagcccacaagaactctggagctgagcaaacttggcagaaatgtccccgacaaggcaagaagcctgggactttgtacccttacatcaaccagtcataaactgatatgcagtagctcccttcagtttaggacaatccatggggaaaagactcagctgtcagccaatgacagtcatggcagttttacaaatgaatgctttacaaagtgagcacttccctcctcccctccagcatccctaaaaaggcagctaaaaaggaagggcagctctgccaaacaggggggaaaagcacgtgcaaaggccttgtg

SEQ ID NO: 208081 - DNA, 512 bp, Homo sapiens
gaagccacctgcttcaatgaagagaacagaattgagcagagtggggaaaagagaggctgtgcagatatgagaagtctggcttgtgtgtatttaacaagcagctaagcaggtgagaagaagtgaatgaaggtgagaggtgtttagacagtaagtcaacaggacttgatatgacacagatgtgggcagcaaggagaagaggcatcacagacactgcttggttcctgatcttcccaaacaaacaaacagaggtccctgtgctgggatggagacttccaaaagaggactaggtttgggaagatggctagaggaggaaactcacattagaatcagccaaattatactcawaacagtcaaatggatatacctggctgacactccaattcacatgtttggcactcagagatgtgggatgaagatttaaatgtatgaatcacggcactgagatgtcaatggaagtctcagatggggatgagactgttcagggagcagagcagaagacaagagggcctaag

SEQ ID NO: 208082 - DNA, 635 bp, Homo sapiens
gataaacttgttccttctttttctgcatttggctcatggaaggaaaagctgcaggaaatcttagcattcagagaaatgattgtatatgctttaaagccaaagaaacactgcctttgattagcttggaaacagccaggtatcttttgctagaaagaggatcaaaaacttggagagaaaccaaatatatggaatactgagcaagaatgagatactctctgaaacctaagttttacagattttaacaccaaatcytcatgagttttcagtgagccctacattcattattcattcattcattctaaactgacacaaccacattggaaattattataacaagattcaggaaaatagtcctattccttatgggagtgattcttcttctatgaattttatccaaggatctaatttaacaaacacatagaaaaaataaaattatatgcaggcatttattcaatgatgattttctccaaaagctcatctttgaaaaaaacataaatgttcattatttggggaaaattttaataaatatttgtaaagtaacaggatgcaaatactgggtaattattaaaatgacttcatagtaccacaagggaaaatgttgaagtgaaaataaagtacaaaagagtaggtttggt

SEQ ID NO: 208083 - DNA, 635 bp, Homo sapiens
gataaacttgttccttctttttctgcatttggctcatggaaggaaaagctgcaggaaatcttagcattcagagaaatgattgtatatgctttaaagccaaagaaacactgcctttgattagcttggaaacagccaggtatcttttgctagaaagaggatcaaaaacttggagagaaaccaaatatatggaatactgagcaagaatgagatactctctgaaacctaagttttacagattttaacaccaaatcctcatgagttttcagtgagccctacattcattattcattcattcattctaaactgacacaaccacattggaaattattataacaagattcaggaaaatagtcctattccttatgggagtgattcttcttctatgaattttatccaaggatctaatttaacaaamacatagaaaaaataaaattatatgcaggcatttattcaatgatgattttctccaaaagctcatctttgaaaaaaacataaatgttcattatttggggaaaattttaataaatatttgtaaagtaacaggatgcaaatactgggtaattattaaaatgacttcatagtaccacaagggaaaatgttgaagtgaaaataaagtacaaaagagtaggtttggt

SEQ ID NO: 208084 - DNA, 635 bp, Homo sapiens
gataaacttgttccttctttttctgcatttggctcatggaaggaaaagctgcaggaaatcttagcattcagagaaatgattgtatatgctttaaagccaaagaaacactgcctttgattagcttggaaacagccaggtatcttttgctagaaagaggatcaaaaacttggagagaaaccaaatatatggaatactgagcaagaatgagatactctctgaaacctaagttttacagattttaacaccaaatcctcatgagttttcagtgagccctacattcattattcattcattcattctaaactgacacaaccacattggaaattattataacaagattcaggaaaatagtcctattccttatgggagtgattcttcttctatgaattttatccaaggatctaatttaacaaacacatagaaaaaataaaattatatgcaggcatttattcaatgatgattttctccaaaagctcatctttgawaaaaacataaatgttcattatttggggaaaattttaataaatatttgtaaagtaacaggatgcaaatactgggtaattattaaaatgacttcatagtaccacaagggaaaatgttgaagtgaaaataaagtacaaaagagtaggtttggt

SEQ ID NO: 208085 - DNA, 304 bp, Homo sapiens
tttgattttgcttggatattcagaaagttgcattatttgtcaagtaatcacaaaagaatcaattgttagattcctgcctccgtagagaccttatccytcatcagacctccaggaaatgaccagaattatcaaaggaaaagcaaacattgctcagcagcaaccaagtccctgaccacatgcaagaagcagggccaccccaagacagggaaccaagagcctggatcagccacgataaagacaggcaggcatctggcctccatcagagatggtattcccacccaagcctggcattgcgcccagggat

SEQ ID NO: 208086 - DNA, 563 bp, Homo sapiens
ttgaggtgtcgctgaagtgaacagtactgatgctgtgcatacagcaggcctaccataaatgcttatccagaagtgtttgtgtggggccaggcttttttgaagactttgtttgctgtgtctgctacagggccttgcctataaggaatcatttggagtttttttctcgatgagggatctggaattgtattttgtgtaaagcgttctctttccttctgtctttcctgagtcaggcaggttttgtggttttgcaagagtaagagtttctcacagcatcggagaccactgagtgaagcctgatccttgttaaaatcattattgtcatstagttctcctagccttttgtccaccccggggccaggtcaagaggccccttcctaagctctcacctgcaataatgcttcctgcccttgaccttggggtccaccagattgcactgtgctttgcctctccagcaaatccagggttgcctctggggctctcaggtttcattttattttcactaaatccttctggggcttctatttttatccttgtgtttgagttgtcgaggctgtttaagatga

SEQ ID NO: 208087 - DNA, 503 bp, Homo sapiens
gagtttgcaggatgagctggtcatagtggagaaaggtgctagcagcatctgaatttcaggctcagagagaaagaagagaacatattgtggtttcagagtatgggctcttatgccaggcaaatgtagttgtagtccaggctttgcttcttctaagtctatcatctggaactgaatatctaagctgtctctgactcartttccccactgaactatgagttcagaatccatagacaataatagttcggacatcgttgagttgcagtaaggcataaatggagccagtgagtaaagtatttagcacagtgcttgggcacctgagtactcaacaggtacattgtgatgatgatgatggagactgagagctgtgggtggggctctggcagcctttcaggcagttgtagaggtgctaccgaggggatcacccattcattcccaaattactccataaacctcaaccatcaacaaagatacccagtgagaaaaatggactggctgggcgtggg

SEQ ID NO: 208088 - DNA, 503 bp, Homo sapiens
gagtttgcaggatgagctggtcatagtggagaaaggtgctagcagcatctgaatttcaggctcagagagaaagaagagaacatattgtggtttcagagtatgggctcttatgccaggcaaatgtagttgtagtccaggctttgcttcttctaagtctatcatctggaactgaatatctaagctgtctctgactcaatttccccactgaactatgagttcagaatccatagacaataatagttcggacatcgttgagttgcagtaaggcataaatggagccagtgagtaaagtatttagcacagtgcttgggcacctgagtactcaacaggtacattgtgatgatgatgatggagactgagagctstgggtggggctctggcagcctttcaggcagttgtagaggtgctaccgaggggatcacccattcattcccaaattactccataaacctcaaccatcaacaaagatacccagtgagaaaaatggactggctgggcgtggg

SEQ ID NO: 208089 - DNA, 629 bp, Homo sapiens
tgtttttacttagatactttatttcttgaatatggaatgcaatttcttttatttcaaattaaactaagcggtttagcttaatcatatataacaaaccttgcagtataagggccctgatcccaaatcttgctacacattagtttctagcccatgcagtaaatggatacctggagcaaatccaaaaagrgaaaccactttaattaggtttgaaagtgtctccagtcagttccagaatagccatcactggatttacggtgcaccttccaaactgtaactctttgcatatccagctgaagcaagaaggctccagagaaatcgagtatgatttcttcaaacctaaatgtttgtctctccaaataagcgtccctagaaaatatggccaagatagatggaaggaaagtcggtctcaccttagctaagcctgtcagcctttgttattgcttccatttaattgcgaggtttctagaagaatcagttcggtaaaaccctccttggaatgtttccataaatatagactctccccaaaatctgtcacatagcagttacattcactctcacctttatgcccaaatgacagtgacttgggactttaccccagcaggaactggcactgaggttaggagaggtca

SEQ ID NO: 208090 - DNA, 423 bp, Homo sapiens
cagaattcaaacccaggtcagcccaactctagcatttcgagcccaaggaacttacatacatacatatacgtatatatacatatgtatatgtatatgtatatgaaagtacctgagtgtggtgctcatttatcactcatgacttgctgcccacactcacactatgtatatacatatataygtatacacacacatatacatatacatacatatatatacacacacatatacatatacacacatgtatgtatatgtgtgtgtatatatgtataataagcagtgtaggattgttttgaatcagcggctgttttaaagttgagtcacctgttaatttcttttggattccttgtccttattttcccagccataaaacataagtgtgacacattgcaaacaaatgtgcaggcagcatgacacagtggaaag

SEQ ID NO: 208091 - DNA, 462 bp, Homo sapiens
ctttggtacttgggcctccrcgtgtaaaaactcatctatggaatgaatatggggaaaaatttgtgtcactgaagctgtccaatggggcatgaaattcaacagtcatcccaaaaacaccctctctaaccaaggtcacatacactcatctatctggggggctttcacgggcatatggaggatgtcttgctattaatcctagacgttaagcgcaggtcttcagaaaacaagaaaatgagattatcttttgggtgtttagatttttttttttaaccaatagactttattttttagagcaattttatgtttatagaagaattggccaagcacagtggctgaagcctagaatcccagcactttgggaggccaaggcaggtggatcacaaggtcaggaaattgagaccatcctggctaacatggtgaaaccccatctctactaaaaatacaaaaagttagccaggcgtg

SEQ ID NO: 208092 - DNA, 462 bp, Homo sapiens
ctttggtacttgggcctccacgtgtaaaaactcatctatggaatgaatatgggkaaaaatttgtgtcactgaagctgtccaatggggcatgaaattcaacagtcatcccaaaaacaccctctctaaccaaggtcacatacactcatctatctggggggctttcacgggcatatggaggatgtcttgctattaatcctagacgttaagcgcaggtcttcagaaaacaagaaaatgagattatcttttgggtgtttagatttttttttttaaccaatagactttattttttagagcaattttatgtttatagaagaattggccaagcacagtggctgaagcctagaatcccagcactttgggaggccaaggcaggtggatcacaaggtcaggaaattgagaccatcctggctaacatggtgaaaccccatctctactaaaaatacaaaaagttagccaggcgtg

SEQ ID NO: 208093 - DNA, 296 bp, Homo sapiens
cccacttccaaataaggtcacattcacaggtgccaggcattaggacttgcacatayctctcagaggggacacagtttaatgcatgacaccttcaattcccaaggttgcttcacagctggtttcccccagcgtgaaactcagtggaagtgaagctgacactggcagaagacacagacattgtttccagacccttcagctaccttgccgaatacctgaatcatgattgggtctaagagcttaggcaatgccaaatgccacatgtgtaggtgatttaaagaaggaaaaggcagaaagcg

SEQ ID NO: 208094 - DNA, 296 bp, Homo sapiens
cccacttccaaataaggtcacattcacaggtgccaggcattaggacttgcacatacctctcagaggggacacagtttaatgcatgacaccttcaattcccaaggttgcttcacagctggtttcccccagcgtgaaactcagtggaagtgaagctgacactggcagaagacacagacattgtttccagacccttcarctaccttgccgaatacctgaatcatgattgggtctaagagcttaggcaatgccaaatgccacatgtgtaggtgatttaaagaaggaaaaggcagaaagcg

SEQ ID NO: 208095 - DNA, 554 bp, Homo sapiens
caggcattaggacttgcacatacctctcagaggggacacagtttaatgcatgacaccttcaattcccaaggttgcttcacagctggtttcccccagcgtgaaactcagtggaagtgaagctgacactggcagaagacacagacattgtttccagacccttcagctaccttgccgaatacctgaatcatgattgggtctaagagcttaggcaatgccaaatgccacatgtgtaggtgatttaaagaaggaaaaggcagaaagcggggcagttctgcaaaactggaaaatccaggtgctacaatttcccrgagtcctggagaagaccactttttgatcccaagagggacccagatgtcagatgggtcctcttgacttcagcaattaaatactgtccatgatatatttatttcaaaacatatttgctaagtgtctacactgctctaggcactgaagatggggtggtggggagtaagacaaatgtctaaccatggtgctcatattctagtaaaaggagaccagcaatcgataagcaaataagtgaaacgtagaaaaag

SEQ ID NO: 208096 - DNA, 548 bp, Homo sapiens
aaacacagtctcactggagtgtggggaccaaataatttgtgagaattactgggggttgttctgggcattgtcaggtaattatcatcattcctggcctccaggatgccaaatagcaccttccccaattgtgataattaaaaatgtcttcaggcattgttaaatgtcacctggggagcactgcccctcttagttcagaactgcctaagactgcgatgcttccagatwtgttctttttgcttagtcttgctttgactgtgtgggctcttttttggttccatataaattttaggatctttttttccattttgtgaagaatgatggtggtattttgatgggaattgcattgaatttgtagattgcttttggctgcatggtcattttcacaatgttgattctaccatccatgagcatgggatgtgtttctatgtgttcttgtcgtctataatttttttcagcaatgttttgtagttttacttgtagaggtctttcacctccttggttaggcatattcctaagtttattttattttactttatttgcagctattg

SEQ ID NO: 208097 - DNA, 548 bp, Homo sapiens
aaacacagtctcactggagtgtggggaccaaataatttgtgagaattactgggggttgttctgggcattgtcaggtaattatcatcattcctggcctccaggatgccaaatagcaccttccccaattgtgataattaaaaatgtcttcaggcattgttaaatgtcacctggggagcactgcccctcttagttcagaactgcctaagactgcgatgcttccagatttgttctttttgcttagtcttgctttgactgtgtgggctcttttttggttccatataaattttaggatctttttttccattttgtgaagaatgatggtggtattttgatgggaattgcattgaatttgtagattgcttttggctgcatggtcattttcacaatgttgattctaccatccatgagcatgggatgtgtttctatgtgttcttgtcgtctataatttttttcagcaatgttttgtagttttmcttgtagaggtctttcacctccttggttaggcatattcctaagtttattttattttactttatttgcagctattg

SEQ ID NO: 208098 - DNA, 430 bp, Homo sapiens
gaattcatttaccagttctagaagctttatggatgagtcttcagggttttctgggtatatgatcatgtcatcagcaaacagcaacagcttgacttcctttttgtcagatcacagggaaaatctctcttgcaacctcctcttgagcccactctacccagaccatccctcctcagggaaggggcccagagataaagttctaatcttgactctatctagttctcaagccaatgtatggtctttaagctccacgaaggctgcctccagagatggccttattggcttcaaacaaaaataaacaagcctggatggggccctaaaaaaataagtgattacttgctattttttataaaagtatcattcctgtctgcagkatacacaataaacttcttttgtgttttcctgagtcatcaaaaactagttaattgaagac

SEQ ID NO: 208099 - DNA, 563 bp, Homo sapiens
ggtctgagaggcgaagtgactgccgaggtgacccaggacagcacaatgagctgagttttgttctgctggcttggtcttgaatgacaggtggagctaggggagtacactgtccatcccggaaccaagccaactccacccccaaccggagagatcctccttcatttttcccccacacatgagtgcaatagtcctaaatcagaggacaacaccggacatctgtctcaccaagctcatgcaactatatcaagaacatcctgtgtgatgyccctggggtttaaaagctagcactgttcatgtagtttcaaagtggtctacaatgccaggtcccatggaattgaaatctatcccatagcccgttgagaaaaacagtaactggaatcactgtgcttcagtctctggggattcatcgtggcctcctagtctttgttgccattaattgttttatgacattgtttaaattaagtcacttaactttcagcttcttcagctattgcaagctttccgggataacagagcacgtgttcttcttctcagagcatctcccatgcttagcacaggtgact

SEQ ID NO: 208100 - DNA, 563 bp, Homo sapiens
ggtctgagaggcgaagtgactgccgaggtgacccaggacagcacaatgagctgagttttgttctgctggcttggtcttgaatgacaggtggagctaggggagtacactgtccatcccggaaccaagccaactccacccccaaccggagagatcctccttcatttttcccccacacatgagtgcaatagtcctaaatcagaggacaacaccggacatctgtctcaccaagctcatgcaactatatcaagaacatcctgtgtgatgcccctggggtttaaaagctagcactgttcatgtagtttcaaagtggtctacaatgccaggtcccatggaattgaaatctatcccatagcccgttgagaaaaacagtaactggaatcactgtgcttcagtctctggggattcatcgtggcctcctagtctttgtkgccattaattgttttatgacattgtttaaattaagtcacttaactttcagcttcttcagctattgcaagctttccgggataacagagcacgtgttcttcttctcagagcatctcccatgcttagcacaggtgact

SEQ ID NO: 208101 - DNA, 578 bp, Homo sapiens
tcagtgacaccagcagctaagagaccttgcgtaaaaatagccaggggtgagcaggtggcacttgcccctgacgcatgctcaccacctcctctcagctgtcagcacctctgtcctctgatgtcccaccttctccctattatccaccccttcttctcccacttggtcccctccttatagcagagccactgaatgattcctggccaaggaccaataaaacctggccgtcagatttccctgtgcctagcatttgggagactatggcacatcaagttagatgttttttatttagaaaaatgatataggtggaccaggcgtggtggctcatgcctgtaatcccagcattttgggaggccaaggtgggtggatcgcttgaagtcaggagtttgagatcagcctggtcaatatggtgaaaccttgtctctactaaaaatacaaaaattagctggacgtggtggtgtgtrcctgtagtccaagccactagggaggctgagggaagagaattgcttgagcccgggaggtggaggctgcagtgagccgagattgcaccactgtactccattcagggcaacagagggaga

SEQ ID NO: 208102 - DNA, 536 bp, Homo sapiens
atgttagagattttgcttaaatcttttatctttggctatacactcataagccttatggctgcagaaacctcaggtaagtcccctttatttctcacagcagcagctattactcattttatataagtttataaagttgcctttggaaagaaaatcaagctccatctttgatttatttttaattyattttaattgagtattaaatgttcaatgctacatttgaaaagtaagaatcaaaactttgattttctaaagcctgaagtacaaatatgtaggactagattctaaaatgttctttaaaataaacattcctggttgaacattgtacaacaccatctctattgccagagattatcttgcaaaaaagcatgacatttgttgttgtggaaaatagagtaggaaatggaagagaagaggatgaggctgagagaggaggagccttagaaatgagctccagaaatgaggagggggaagtggcttccccagatccgaggactatccccatgtgggactggtggtaattggtgccacgaagcact

SEQ ID NO: 208103 - DNA, 536 bp, Homo sapiens
atgttagagattttgcttaaatcttttatctttggctatacactcataagccttatggctgcagaaacctcaggtaagtcccctttatttctcacagcagcagctattactcattttatataagtttataaagttgcctttggaaagaaaatcaagctccatctttgatttatttttaattcrttttaattgagtattaaatgttcaatgctacatttgaaaagtaagaatcaaaactttgattttctaaagcctgaagtacaaatatgtaggactagattctaaaatgttctttaaaataaacattcctggttgaacattgtacaacaccatctctattgccagagattatcttgcaaaaaagcatgacatttgttgttgtggaaaatagagtaggaaatggaagagaagaggatgaggctgagagaggaggagccttagaaatgagctccagaaatgaggagggggaagtggcttccccagatccgaggactatccccatgtgggactggtggtaattggtgccacgaagcact

SEQ ID NO: 208104 - DNA, 536 bp, Homo sapiens
atgttagagattttgcttaaatcttttatctttggctatacactcataagccttatggctgcagaaacctcaggtaagtcccctttatttctcacagcagcagctattactcattttatataagtttataaagttgcctttggaaagaaaatcaagctccatctttgatttatttttaattcattttaattgagtattaaatgttcaatgctacatttgaaaagtaagaatcaaaactttgattttctaaagcctgaagtacaaatatgtaggactagattctaaaatgttctttaaaataaacattcctggttgaacattgtacaacaccatctctattgccagagattatcttgcaaaaaagcatgacatttgttgttgtggaaaatagagtaggaaatggaagagaagaggatgaggctgagagaggaggagccttagaaatgagctccagaaatgaggagrgggaagtggcttccccagatccgaggactatccccatgtgggactggtggtaattggtgccacgaagcact

SEQ ID NO: 208105 - DNA, 567 bp, Homo sapiens
atgtttggaatatctggaaggatgcacaaggagttggcaatagtagttgcttctggggagaactaaggaagagaatggagggagggggaaaattacttttaattattctctttttgttgcttctgaattttgcaccgtgtgcattgattayctgttaataactaaaataatataaagtaaataaataatcagcatatcttaccacagcaaaggtggtttaaataatgtctttaaacaattaaattcaataacacttttaaacagagattgaaggtggcttcacaatgggcagggaaataatatgtgacacagtttgcaagaacgaaaaccgtgtctgaaaatcacattaaaatgtgttgggaaacagcctgaagaaaaactgttcctaaaatagaaccaacaataaataaataaacaaatgaagtaagcaatgcaaatttcttaaaagcaccgggattcctgtgtttttaagttatttctttgtggccctaaccccaagttaagtaccagggactccttggaaccgaatggtaccccatggtgggaaaatggcccatatggtacaat

SEQ ID NO: 208106 - DNA, 567 bp, Homo sapiens
atgtttggaatatctggaaggatgcacaaggagttggcaatagtagttgcttctggggagaactaaggaagagaatggagggagggggaaaattacttttaattattctctttttgttgcttctgaattttgcaccgtgtgcattgattacctgttaataactaaaataatataaagtaaataaataatcagcatatcttaccacagcaaaggtggtttaaataatgtctttaaacaattaaattcaataacacttttaaacagagattgaaggtggcttcacaatgggcagggaaataatatgtgacacagtttgcaagaacgaaaaccgtgtctgaaaatcacattaaaatgtgttgggaaacagcytgaagaaaaactgttcctaaaatagaaccaacaataaataaataaacaaatgaagtaagcaatgcaaatttcttaaaagcaccgggattcctgtgtttttaagttatttctttgtggccctaaccccaagttaagtaccagggactccttggaaccgaatggtaccccatggtgggaaaatggcccatatggtacaat

SEQ ID NO: 208107 - DNA, 567 bp, Homo sapiens
atgtttggaatatctggaaggatgcacaaggagttggcaatagtagttgcttctggggagaactaaggaagagaatggagggagggggaaaattacttttaattattctctttttgttgcttctgaattttgcaccgtgtgcattgattacctgttaataactaaaataatataaagtaaataaataatcagcatatcttaccacagcaaaggtggtttaaataatgtctttaaacaattaaattcaataacacttttaaacagagattgaaggtggcttcacaatgggcagggaaataatatgtgacacagtttgcaagaacgaaaaccgtgtctgaaaatcacattaaaatgtgttgggaaacagcctgaagaaaaactgttcytaaaatagaaccaacaataaataaataaacaaatgaagtaagcaatgcaaatttcttaaaagcaccgggattcctgtgtttttaagttatttctttgtggccctaaccccaagttaagtaccagggactccttggaaccgaatggtaccccatggtgggaaaatggcccatatggtacaat

SEQ ID NO: 208108 - DNA, 577 bp, Homo sapiens
gtgtttccagtggcagtgataagtgcaactattattatgagttttatatataaatatacatcttctgtgagtctgccagaagtagcaataaacacaacaaactgtagttttagacccctggagtaagaaacaaatatgtattcatttctatctataaattttaattatggatatattacattaataataaaatcctaaaaaagtccttacatatatctaaagatagctttacagtgaaagcataaaagcatagcctgatataaatggacaactaccatatgtaggaaaccagggcatggcttttctctctcagagaaaatgaagatgggatttactattgaatatcttttccatgtgagaattaaaaactgtctcaaacacattttgttactattaaaatatgattgtgtgtgtgtgtgtgtgtgtgtgtgtaattagctcaatcttctaaaaatgtttcattgtaacctgaacttggcccaactctctttttggaaatcccatgctgtttatgcaacagactttcagacatctccttccttgaggttgcgmtaaattaacatgtctaatatggaat

SEQ ID NO: 208109 - DNA, 575 bp, Homo sapiens
caagctagttcttctggtttaaaatgaatatccccacagtcaattttccacatttctactttgccttcaggacaaaatacaagtttttatatttaatatgctagacttattatgaggtgccttcactgtataagttttgagtaagggctagtcatataccaaggtgctggcaatacaatactcacattttttctgcctttttttttttttgcccctacttcttttascctgtaatgtccttctatatttcaactaatttctatagcatctcttctgagagcgtgtccttcagccacaccctgatttaggtacctcttctgacactgctggcatccattcacttccatgtttactttatattatctgatcatcagaaggaccctgtcttgagtctcaccaccaaggacacatgtcctccttgaatagtcttttagttatgcaaatgtcttcactggctatctcacaatccctctttatgttgtatttgctttcagtagcagttgtgggccatagtttaatacctaaagctttatcattctactctactaaataacctacctttataccttttccca

SEQ ID NO: 208110 - DNA, 526 bp, Homo sapiens
acgagctgtgcagcgttagagatgttcttgatttctataaagtcgctgttcacaacagatgtaaatttgatgaacttgatgccaataatctgcctctcaatttgaaaaccacctgaagttactgagcaattcagaagagaaatactttaaaataacttttatccctgagcaagggagatgcttattagactttttgatactttaccatgtaaaatgctatcagaactgcccataaacctactttttctgtagaattgtgcatcatccttttttctcatatcgtgaatcaatagagaataacagaattttctgtggtcatgtttgccaaaaccatttttttaaaaaatggaaccaagtcattaataacttaggaaaatcttcttcttgagaggatactgtaattaacttggatttaagaaacgaggacactgcargttcagacccttcatacgcataaagtagtggttgcaagaaaatggtttaatcctgttaagactctgaaatctaagataaaattattatttat

SEQ ID NO: 208111 - DNA, 635 bp, Homo sapiens
gaggccttttcatcagcaatatttgtgtgttactgtcatatatcgatgagctatcacctaytgcagctctgataacatgctgacctgccattctctgaaatgaaccattgtttttcactattagttgttaaaccttgcagttgtttctgttacattttcttgtaagtagggacatctgtctgaattaaatttgatctatccaattgcactgattataaagtacttatatttattttcaaatttaaatatctctgagatgcagatgcattttacagttgatgatgtcttacaattgctatcagctaggaataacttgtggtcaaaacgtgaaaatcaaacacaagaaagcaccaaactattttagattagataacatatagtatttgagtttttaaaaatttttatcacatttatatatgtataattatatatgattatatgtatacatacatatagatatatacgcagaaaaacatagtttaaaaatcaaatggaacaggccatataatgaaaaacattttttgctttacatctatattttaaaacacatgcttactttgctgcttcttgatttatgaacttacttaaaaagtaatctatatactccctcctataaatgagaattttgttgtttg

SEQ ID NO: 208112 - DNA, 635 bp, Homo sapiens
gaggccttttcatcagcaatatttgtgtgttactgtcatatatcgatgagctatcacctactgcagctctgataacatgctgacctgccattctctgaaatgaaccattgtttttcactattagttgttaaaccttgcagttgyttctgttacattttcttgtaagtagggacatctgtctgaattaaatttgatctatccaattgcactgattataaagtacttatatttattttcaaatttaaatatctctgagatgcagatgcattttacagttgatgatgtcttacaattgctatcagctaggaataacttgtggtcaaaacgtgaaaatcaaacacaagaaagcaccaaactattttagattagataacatatagtatttgagtttttaaaaatttttatcacatttatatatgtataattatatatgattatatgtatacatacatatagatatatacgcagaaaaacatagtttaaaaatcaaatggaacaggccatataatgaaaaacattttttgctttacatctatattttaaaacacatgcttactttgctgcttcttgatttatgaacttacttaaaaagtaatctatatactccctcctataaatgagaattttgttgtttg

SEQ ID NO: 208113 - DNA, 635 bp, Homo sapiens
gaggccttttcatcagcaatatttgtgtgttactgtcatatatcgatgagctatcacctactgcagctctgataacatgctgacctgccattctctgaaatgaaccattgtttttcactattagttgttaaaccttgcagttgtttctgttacattttcttgtaagtagggacatctgtctgaattaaatttgatctatccaattgcactgattataaagtacttatatttattttcaaatttaaatatctctgagatgcagatgcattttacagttgatgatgtcttacaattgctatcagctaggaataacttgtggtcaaaacgtgaaaatcaaacacaagaaagcaccaaactattttagattagataacatatagtatttgagtttttaaaaatttttatcacatttatatatgtataattatatatgattatatgtatacatacatatagatatatacgcagaaaaacatagtttaaaaatcaaatggaacaggccatataatgaaaaacattttttgctttacatctatattttaaaacacatgcttactttgctgcttcttgatttatgaactyacttaaaaagtaatctatatactccctcctataaatgagaattttgttgtttg

SEQ ID NO: 208114 - DNA, 488 bp, Homo sapiens
gaagtatgattggtaccatttaccattactcccagtaagccacttggataatttatcatttttgtccctgcaaatttaggctgtcttggtttagaggccctgaagtccaaagaaagaaggctttcataaaaggatgtagtaagaatcccattaaaattcaagctatcattacgagccactcactttgaactttttataacaaaagacaaatagtcaaggargaatcagcattctgtcagggataattgaacttggtcagtagaaagaagagagttgtttttaaacagtggtgcaggaaatagcacgtgtggctcccaggcaatccactggggctttagttgataatgtcctcctcaattttaatgatatatgtatatgattgagcaggacattaccaactaatagtgataaggagcacacactcctcagtgataaaggtctgtgtcacattaccaggtaaggcactgaaaatagcagagatgctaacc

SEQ ID NO: 208115 - DNA, 486 bp, Homo sapiens
tgattggtaccatttaccattactcccagtaagccacttggataatttatcatttttgtccctgcaaatttaggctgtcttggtttagaggccctgaagtccaaagaaagaaggctttcataaaaggatgtagtaagaatcccattaaaattcaagctatcattacgagccactcactttgaactttttataacaaaagacaaatagtcaaggaagaatcagcattctgtcagggataattgaacttggtcagtagaaagaagakagttgtttttaaacagtggtgcaggaaatagcacgtgtggctcccaggcaatccactggggctttagttgataatgtcctcctcaattttaatgatatatgtatatgattgagcaggacattaccaactaatagtgataaggagcacacactcctcagtgataaaggtctgtgtcacattaccaggtaaggcactgaaaatagcagagatgctaaccaaat

SEQ ID NO: 208116 - DNA, 488 bp, Homo sapiens
gaagtatgattggtaccatttaccattactcccagtaagccacttggataatttatcatttttgtccctgcaaatttaggctgtcttggtttagaggccctgaagtccaaagaaagaaggctttcataaaaggatgtagtaagaatcccattaaaattcaagctatcattacgagccactcactttgaactttttataacaaaagacaaatagtcaaggaagaatcagcattctgtcagggataattgaacttggtcagtagaaagaagagagttgtttttaaacagtggtgcaggaaatagcacgtrtggctcccaggcaatccactggggctttagttgataatgtcctcctcaattttaatgatatatgtatatgattgagcaggacattaccaactaatagtgataaggagcacacactcctcagtgataaaggtctgtgtcacattaccaggtaaggcactgaaaatagcagagatgctaacc

SEQ ID NO: 208117 - DNA, 488 bp, Homo sapiens
gaagtatgattggtaccatttaccattactcccagtaagccacttggataatttatcatttttgtccctgcaaatttaggctgtcttggtttagaggccctgaagtccaaagaaagaaggctttcataaaaggatgtagtaagaatcccattaaaattcaagctatcattacgagccactcactttgaactttttataacaaaagacaaatagtcaaggaagaatcagcattctgtcagggataattgaacttggtcagtagaaagaagagagttgtttttaaacagtggtgcaggaaatagcacgtgtggctcccaggcaatccactggggctttagttgataatgtcctcctcaattttaatgatatatgtataygattgagcaggacattaccaactaatagtgataaggagcacacactcctcagtgataaaggtctgtgtcacattaccaggtaaggcactgaaaatagcagagatgctaacc

SEQ ID NO: 208118 - DNA, 589 bp, Homo sapiens
tagggcaacatttctgagatgataaaagaattttaaacaggaaaaagaatcttaactatatttagtctaaaaatctgtcaagtagatcgtgaatggctacatggatgtaacctgattagctccagacaagtgtgagaaacataaaaatataattcagcttggctgtgtatcatatccatttacaatggatcatatgtatcataacgtatttagtttaaytgagttaataaggagggtgcatgtattcaattccatcacatattgtattctacacttgaaaaagtacttcaatgtatattatcagatttaattctcacagcatccctgagacagatggtatgatgcccactttacagatgatgaaattgaaattcaaagaagtgttttaaaggaaacactttatatattacattatatatatataataagcagaagatgaaaaagggggaaacagaaaagataagtagataattctgtcagcagccacagacatcacaagaactcaaagagcacagcactggcagggtgtgggaggcattttgcaaacaagcttgccatgctgcaaaaattattctccataaggggttta

SEQ ID NO: 208119 - DNA, 398 bp, Homo sapiens
gtgttgtaagaattaaatgagataatgtttctaaagtgtaggggttggkgaatacttatgagaaaaaagagagtttatttggaagcatagcaggtcagggaggtaggacaatgccatacattatcctggaagacagtggagaagatattttccataatggaagaaaggtcctaagtcccagaattacaaaaatattatgagcaagaaagaaaatgaataggcctctagtttagataattaacagttctttggtgagaaatctcaatgaagtaatgaaaatagaaagcacattgttaggactgcatggaggcatatgtaggaaatattgagcgctcttgaaaagattggtaatgaaaaggagattatatatttttaacatgatgaattattgatccctt

SEQ ID NO: 208120 - DNA, 398 bp, Homo sapiens
gtgttgtaagaattaaatgagataatgtttctaaagtgtaggggttggggaatacttatgagaaaaaagagagtttattkggaagcatagcaggtcagggaggtaggacaatgccatacattatcctggaagacagtggagaagatattttccataatggaagaaaggtcctaagtcccagaattacaaaaatattatgagcaagaaagaaaatgaataggcctctagtttagataattaacagttctttggtgagaaatctcaatgaagtaatgaaaatagaaagcacattgttaggactgcatggaggcatatgtaggaaatattgagcgctcttgaaaagattggtaatgaaaaggagattatatatttttaacatgatgaattattgatccctt

SEQ ID NO: 208121 - DNA, 600 bp, Homo sapiens
agttgagatcaagttagaccacaaaatcaaactgaaataatttgagatgccacctcaccagaagctgtagcttgaactattataacagctctgtgttttacctttgattctcattcttacagctaagcagaragataaagtggattatctaaggtctccctgacagtaaatgccctagtctgtatgatggcaaagttatgcctgtcttagtttcaaccttggatcccacaatactgaagttcataatactttagccagaaatggctagcgacgtagatatttaaaacttgcacctgcatcttatattgtaataaatcttcttataaaagctatgagagatttttccactgttcaacttattcaaggcatatttattatattatctccagctactatatggctctgcacagctactatgtggctctgctccattaaattatcaacatctatttaatgtcactacctgacaaacaccatgtgacctattggaaataatacaacctcagtcctaaagaagttcaagcttacagtcaaattcctagttttcttgagcatcttagaataagaaaaaatatatacgtaaaacataataatattaac

SEQ ID NO: 208122 - DNA, 600 bp, Homo sapiens
agttgagatcaagttagaccacaaaatcaaactgaaataatttgagatgccacctcaccagaagctgtagcttgaactattataacagctctgtgttttacctttgattctcattcttacagctaagcagaaagataaagtggattatctaaggtctccctgacagtaaatgccctagtctgtatgatggcaaagttatgcctgtcttagtttcaaccttggatcccacaatactgaagttcataatactttagccagaaatggctagcgacgtagatatttaaaacttgcacctgcatcttatattgtaataaatcttcttataaaagctatgagagatttttccactgttcaacttattcaaggcatatttattayattatctccagctactatatggctctgcacagctactatgtggctctgctccattaaattatcaacatctatttaatgtcactacctgacaaacaccatgtgacctattggaaataatacaacctcagtcctaaagaagttcaagcttacagtcaaattcctagttttcttgagcatcttagaataagaaaaaatatatacgtaaaacataataatattaac

SEQ ID NO: 208123 - DNA, 426 bp, Homo sapiens
gtaacatacttgatatcagattataacattttgcatacacttaaacarcatatactagtacttatttcctcactaaagttttgggttattgcccacattgtcaatataatagtcacctcaatttaatttacatttctcttattctaactaaggttgggaatctttacatatttcaagagccatttgtgggttttttgctgtaaactctatagcttttctcttcttttctactaagttttggggtttcttgaatttctgtattctttttgtttggttgtttttttttttctttttgttttgttttgtttttgatacaggttctagctctatcacccaggttggagtgcagtggtgcaaccataactcattgcagcctccaactcctggcctcaagcaatccccccacctcagcatctagaatagctg

SEQ ID NO: 208124 - DNA, 426 bp, Homo sapiens
gtaacatacttgatatcagattataacattttgcatacacttaaacaacatatactagtacttatttcctcactaaagttttsggttattgcccacattgtcaatataatagtcacctcaatttaatttacatttctcttattctaactaaggttgggaatctttacatatttcaagagccatttgtgggttttttgctgtaaactctatagcttttctcttcttttctactaagttttggggtttcttgaatttctgtattctttttgtttggttgtttttttttttctttttgttttgttttgtttttgatacaggttctagctctatcacccaggttggagtgcagtggtgcaaccataactcattgcagcctccaactcctggcctcaagcaatccccccacctcagcatctagaatagctg

SEQ ID NO: 208125 - DNA, 609 bp, Homo sapiens
gagctcctgataaactgaaaatagtgtaaagttcaaagtagctaatcaacaatgtaaggcaaagtgtaatagtcagagagggtcatctttacagtgtataaagagactcatattcagcagcaacagagaaaatccatcttaaccatctaggcctacagaaatgacccattctaccctgttaaaggcaagttcttgcctcattgttaatccagggaactttaccttataaaccaacctgctcacccccatcagaatctatcctttccccctcttctggcaccagacccatacaaataaaatcttagcattacctacgtagggaagtgctggactggctaagagaagaaaaggactatgttccaaaagagctgtaggacctagttactatgcatcaacaagatctgtgggattatatgtgkgctgaatccttatggtgatggagcaaagagggtgtaaaatcagttggataagggagagtttgccagttgaacaaaaatgtttatatcatggcgagaattccaagaaacagtatactactaggatggaaagactgaaagattggatagaagtgatgagccacaataaattgaatagaaatgctaaatagaa

SEQ ID NO: 208126 - DNA, 609 bp, Homo sapiens
gagctcctgataaactgaaaatagtgtaaagttcaaagtagctaatcaacaatgtaaggcaaagtgtaatagtcagagagggtcatctttacagtgtataaagagactcatattcagcagcaacagagaaaatccatcttaaccatctaggcctacagaaatgacccattctaccctgttaaaggcaagttcttgcctcattgttaatccagggaactttaccttataaaccaacctgctcacccccatcagaatctatcctttccccctcttctggcaccagacccatacaaataaaatcttagcattacctacgtagggaagtgctggactggctaagagaagaaaaggactatgttccaaaagagctgtaggacctagttactatgcatcaacaagatctgtgggattatatgtgtgctgaatccttatggtgatggagcaaagagggtgtaaaatcagttggataagggagastttgccagttgaacaaaaatgtttatatcatggcgagaattccaagaaacagtatactactaggatggaaagactgaaagattggatagaagtgatgagccacaataaattgaatagaaatgctaaatagaa

SEQ ID NO: 208127 - DNA, 586 bp, Homo sapiens
cataatcttggcacattgtaacctctgcctcccagattcaagctattctcctgcctaagcctgggattacaggtgcctgccatcacacctggttaatttttgtatttttattagagatggggtttcgccatgttggcaagcgtggtctccaactcctgacctcaagtgatccacctgcctcagcctcccaaagtgctaggattacaggcatgagccaccacacctggcccttgtatgttttcatctggtttgtatgttaatgtaatgttggccttctaaaatgagtttagaagtgctccttgtcttctattttatgaaaaaatttgcttagttttcttaataattcttctttaaataattgatagatttcacccatttgatagaattcatttgcatcttgaattttctttagaaaggtttttaattayaaatttattttattgaagatgcatctattcagcatttctatcattctttgcttagtttcggtaacttttgtctctcaggaagtttttcatttcatctgtcattaaatatattggcataatgttgtccttaatatttggttattaatcacattaagtct

SEQ ID NO: 208128 - DNA, 591 bp, Homo sapiens
gataaaagctaccgtgctggtaaaagcctatgctacagcaaataaaatagattaacactctgggggataatgaataygttagtaaacccaaagagattaatccatttagaaaacaactaaaaacctggacataaggcaatacaagacatgagttgtgcatgtttacttgaagaacaagggaataggagcctctacaagtaaattccttactacctgattttagcctcaggagaaaggtcatcctgactgtgcacacaacagcaatagagtccaaatggaaaatgccaatttttctatcccagagaaccagaaaacagaaactaggaaaccagaaatgctggagtagataaattctgtgaaggaaaattccaaagaggaaattcctaaactctgtcattttacatctctggttgatccttaaaccactcatgttgaacggactgaaagcaaccaagttaaaataaaattaaaaagtcagaaccaagactggatcacttgaccaaaggaagggcttacagttcaagcccagacaacaaaattacttgttaaagcaaagggacaaacacttattagacaaaactaacagaattc

SEQ ID NO: 208129 - DNA, 591 bp, Homo sapiens
gataaaagctaccgtgctggtaaaagcctatgctacagcaaataaaatagattaacactctgggggataatgaatacgttagtaaacccaaakagattaatccatttagaaaacaactaaaaacctggacataaggcaatacaagacatgagttgtgcatgtttacttgaagaacaagggaataggagcctctacaagtaaattccttactacctgattttagcctcaggagaaaggtcatcctgactgtgcacacaacagcaatagagtccaaatggaaaatgccaatttttctatcccagagaaccagaaaacagaaactaggaaaccagaaatgctggagtagataaattctgtgaaggaaaattccaaagaggaaattcctaaactctgtcattttacatctctggttgatccttaaaccactcatgttgaacggactgaaagcaaccaagttaaaataaaattaaaaagtcagaaccaagactggatcacttgaccaaaggaagggcttacagttcaagcccagacaacaaaattacttgttaaagcaaagggacaaacacttattagacaaaactaacagaattc

SEQ ID NO: 208130 - DNA, 591 bp, Homo sapiens
gataaaagctaccgtgctggtaaaagcctatgctacagcaaataaaatagattaacactctgggggataatgaatacgttagtaaacccaaagagattaatccattyagaaaacaactaaaaacctggacataaggcaatacaagacatgagttgtgcatgtttacttgaagaacaagggaataggagcctctacaagtaaattccttactacctgattttagcctcaggagaaaggtcatcctgactgtgcacacaacagcaatagagtccaaatggaaaatgccaatttttctatcccagagaaccagaaaacagaaactaggaaaccagaaatgctggagtagataaattctgtgaaggaaaattccaaagaggaaattcctaaactctgtcattttacatctctggttgatccttaaaccactcatgttgaacggactgaaagcaaccaagttaaaataaaattaaaaagtcagaaccaagactggatcacttgaccaaaggaagggcttacagttcaagcccagacaacaaaattacttgttaaagcaaagggacaaacacttattagacaaaactaacagaattc

SEQ ID NO: 208131 - DNA, 591 bp, Homo sapiens
gataaaagctaccgtgctggtaaaagcctatgctacagcaaataaaatagattaacactctgggggataatgaatacgttagtaaacccaaagagattaatccatttagaaaacaactaaaaacctggacataaggcaatacaagacatgagttgtgcatgtttacttgaagaacaagggaataggagcctctacaagtaaattccttactacctgattttagcctcaggagaaaggtcatcctgactgtgcacacaacagcaatagagtccaaatggaaaatgccaatttttctatcccagagaaccagaaaacagaaactaggaaaccagaaatgctggagtagataaattctgtgaaggaaaattccaaagaggaaattcctaaactctgtcattttacatctctggttgatccttaaaccactcatgttgaacggackgaaagcaaccaagttaaaataaaattaaaaagtcagaaccaagactggatcacttgaccaaaggaagggcttacagttcaagcccagacaacaaaattacttgttaaagcaaagggacaaacacttattagacaaaactaacagaattc

SEQ ID NO: 208132 - DNA, 392 bp, Homo sapiens
gcctgaggttctcgaagtgacaggatgtttacataactctggtgagtctgggcaatgctggtttccttggagtaataaataaagatgcttcacttcactgtatggtggcttcgttttaataactggctagagaatacccttcagacagagcaaacagggcagaaataaactgagatgggaaaaactgttaatgggtcacagctaagtcatgaaccacgtggactcccccaaattaccgtcactttcttagtgccagctgtaagggattttgacaactctacacctctgaaaataagattacattatttcacaggktgttagtgatgtctgatagatttgtgtttgttttgatctgtgctgtgtctacattttgggtctaacagtttgttagt

SEQ ID NO: 208133 - DNA, 503 bp, Homo sapiens
acccggtactgatttgcatgtacaaattttaggagaaagtatctggaacttgccttctgcatttccctcctcttttagtttccccttcagttgggtccttgtagtggtaaatttcctgctcmctgacatactgtattctactgtaggtagttagagtgcattctgggagttgggtaatatttgtagttgctgcattttggggatgtgttacaactggtgggaaagtgtgtgcttggctacatctgcagatgttaccaattagggccagtgccattttccacagctgtgggctctaaaactctcccacctgcaggctcaaaattatctaatccttaaaccagcgatagcctgggctgatggaatatttgcagctcttttcttattctgggtgggtgtccttaccagtctcctggctagacttccacttgggactctgacgtataattaccattccagtcatgttctgggccggggcatggagctgagcctgaccctgaccctta

SEQ ID NO: 208134 - DNA, 503 bp, Homo sapiens
acccggtactgatttgcatgtacaaattttaggagaaagtatctggaacttgccttctgcatttccctcctcttttagtttccccttcagttgggtccttgtagtggtaaatttcctgctccctgacatactgtattctactgtaggtagttagagtgcattctgggagttgggtaatatttgtagttgctgcatkttggggatgtgttacaactggtgggaaagtgtgtgcttggctacatctgcagatgttaccaattagggccagtgccattttccacagctgtgggctctaaaactctcccacctgcaggctcaaaattatctaatccttaaaccagcgatagcctgggctgatggaatatttgcagctcttttcttattctgggtgggtgtccttaccagtctcctggctagacttccacttgggactctgacgtataattaccattccagtcatgttctgggccggggcatggagctgagcctgaccctgaccctta

SEQ ID NO: 208135 - DNA, 447 bp, Homo sapiens
gactaaatcatttagtcgtgtttattttcaaataatttttcatgacccaactccattgagctatgcaagwttcataaattgcattggcatttagagaggagacattgtgcccagaaatagtgtgatcatattaggtaagcccagaatataaaatatactcatattacattaggtaagcaaaggttactggggagagaagaatgtattttcaaatctcttaccaggtgatgaagagagttgctttggaccacatagctgactaaaggccacatttataactgacattaattttggaacctgaataagttttacttttcctgtggaacctgaggatataaaatgagagaaaggaagtatcaaaaatgtttattcatttaatatttatctattgaacgacaactgtttgctaggctgtttttacaggagctggtggtacatcagagagca

SEQ ID NO: 208136 - DNA, 671 bp, Homo sapiens
tctggatttttgggttacttctcaccactcacccaactcctgagatcttatcaggaagctactgattactagtttcaggtgttttctattaggagactgcctttccctggcatcatctgtgaccaactattactttagagagatagttaatacctgcctgamcatcacctgatggtcacccaacactcctggagtgtgtgttggggggagccctctcctgctctgctcatacctgactaaatacctactgtaatctatctatctacctacctatctgttggttggttggttgattgaatctaggtactgctgtgctttttcctgaagatatagcacaaggggctcttctttatttgggggtcttttaacacactccactccaagggtgggtcctaggttttatcttcctctttccatgcagctgtcaaaaatgccactcaaggtcaccagagattatcaggtgcctttgaagtagcaggcagctttagagtttatttaactctctagactactgctttcattttgtttttgactatcaagggcatctcttgaatttttgtaaaatttgtaaaaacttataaaaaaattagtgttcatagttgttttcagcaggaaggttaatttttacatgagggtactcatgtgccagaaatttaaaaaatgacatatat

SEQ ID NO: 208137 - DNA, 671 bp, Homo sapiens
tctggatttttgggttacttctcaccactcacccaactcctgagatcttatcaggaagctactgattactagtttcaggtgttttctattaggagactgcctttccctggcatcatctgtgaccaactattactttagagagatagttaatacctgcctgaccatcacctgatggtcacccaacactcctggagtgtgtgttggggggagccctctcctgctctgctcatacctgactaaatacctactgtaatctatctatctacctacctatctgttggttggttggttgattgaatctaggtactgctgtgctttttcctgaagatatagcacaaggggctcttctttatttgggggtcttttaacacactccactccaagggtgggtcctaggttytatcttcctctttccatgcagctgtcaaaaatgccactcaaggtcaccagagattatcaggtgcctttgaagtagcaggcagctttagagtttatttaactctctagactactgctttcattttgtttttgactatcaagggcatctcttgaatttttgtaaaatttgtaaaaacttataaaaaaattagtgttcatagttgttttcagcaggaaggttaatttttacatgagggtactcatgtgccagaaatttaaaaaatgacatatat

SEQ ID NO: 208138 - DNA, 593 bp, Homo sapiens
acagttgaaatatagtcaatgaaggaaacaaaagtgattgggagaaaaataagccaaatagagctgtasacttcaaggaaattcattcattatactatctgtgtatggagtagtctggctaatatgaagtgaaatgtatttgcaataataattagagatcatttgattattagatttgatcagccatagtaacttcaaattacaataaaactagcttaaaattttttgaaatgattctggaaaaattttactgaagatcagatagatattttcctccaggcttatggagagaaactggtttgctgaaaactggaagtatagctctgaggaatgtaagagaattggtactctgtttcaaagtaattgtccataattcctcaaactagaattcatttaaaataaacttaagaacttctgacttttcacattacaaagctctatcaaaatagcagtaaactcaagaataatttaaatggaaactattaaagtttcttttacaaaacagaattaactagctcttagcacactggacttaagttttatagcatataatactgcgtgtaaatggcatttaaaagcaagacacctaaggt

SEQ ID NO: 208139 - DNA, 475 bp, Homo sapiens
catatatccaaacattccaaacattcaaagaaatataaaatccaaaacagttctgttcctaagctttttcagataagagatactcaacctgtattatagttgtgtcccatgattctctctttaactgtgtcttctatttggctatcagcatgttctttctataattatttctgcaattctctcttgcttcaatattctcaaygttaccgagtgggtaaaggatattttaaatcctttgtttatcatccatagaacttgccattctcaaaatatttaacctatttctacgcttctctgccttcttcctgtgcccaagatatttttcattatttgggaaactttttctattcttaaaggtcaaacttaagtgtccctttttttcctaaagatttctctgggcaaattttatcatttttctcctgtaatatagaacttggtataggcctttatcattcatcttttttctctggacaga

SEQ ID NO: 208140 - DNA, 563 bp, Homo sapiens
gcaacattgcttccattgtttcaatcacactatcccacttctgccactggattgctttagccgtattctgctgtttttgcgtgttttgttgagtctcggaaattcttgttctagtctcagtattactgaagcaaatttcctgttggagatactttgacaacatccgtattctattggaggtctgagaattgttcgttgtttctcagcaggcttctcaygttgaaatcattataagaatatgcaggtgttactcatgatttgtggaatgcgtttaagaaattttcttttaaattattctattttttctctagttctgttttctgtgtgttttaactatatagggtaatagtggatttattctgctggctttaactacatgatattttaaataagaacagaggcttagtgagattaaatagtttgactaaatgcacacagcagctgagaattaaaaacttgtctgtctggatccataatattttttattagaaagaaaataacccagtctttcgccaagggaaaaaatcttatataccagcatgtgacaagactagggttcttac

SEQ ID NO: 208141 - DNA, 606 bp, Homo sapiens
gaatctatgcagcttgctctttctctcagctagaccttaggtaaagtcaccattttctatttcctttaatcctacaacaaactcctagttggttttcccacatctggttttgtgttctttattttcttcttcatcctcagattgctaatcttttaaaaagacaagcygaatcttctcattcttttgctctgtggtatatcttaacattgttcaaaatattttctgtctttctctactagatatggagtagagacccaatggtgccataatagacatttaatatgagcaaaaaaaaaagatgtttgttttttaaaaaccaaaaaacattgtttttacaaccactttgggattcatttcttattacagcagacacttgcttgtgctttctgatctgactgacatatgtgccacattctctgacaactttttttgtatctgcgattgagtccaaaatacctagccttccaaacactacataaactagcctctgcaaactccaccaatcttacttctcatcacatttcttaccctaaatattctcaaaatgcatggaacagatgtttacactgttttctccttcatacactcgccattatgctgcattgt

SEQ ID NO: 208142 - DNA, 630 bp, Homo sapiens
agaaatcctttgagctgggtagacaaaattttaccagattgaatggtaaatatatggaggggaaaccagctgtggtataactggggatggttcataggtgggcaagcagcctgggaagggagattggctcctgcacattaggaagggcccagagagacttgccaaagagtttggattttattctgtagatggtgaaatttatttcaaggaaggrgttatcactgtcaggtatacacattagacgtgattggggcagtagtgatagagccagaagggaatcatcgtggagctgaggtgacagacctgctaagacagagacctgcaattgaaaatggagacaatgatgagaaccaaggaaaggtccttttgataggctaggaattgagcaaattgtggagtcttcatacaaggcattgaacacagaatgaggaggaacgggttttggggaaattattttgattttctattagataatttgaggtgcttggaggactttggtaagaaatgtcagttggcagtacagagtgcaagggattagcaggagtgaacagatttggacagtggaggaaagctcctgagacgtgggtatgagtgtttcaagcccagatgtctgagaagcagcatccaaac

SEQ ID NO: 208143 - DNA, 630 bp, Homo sapiens
agaaatcctttgagctgggtagacaaaattttaccagattgaatggtaaatatatggaggggaaaccagctgtggtataactggggatggttcataggtgggcaagcagcctgggaagggagattggctcctgcacattaggaagggcccagagagacttgccaaagagtttggattttattctgtagatggtgaaatttatttcaaggaaggagttatcactgtcaggtatacacattagacgtgattggggcagtagtgatagagccagaagggaatcatcgtggagctgaggtgacagacctgctaagacagagacctgcaattgaaaatggagacaatgatgagaaccaaggaaaggtccttttgataggctaggaattgagcaaattgtggagtcttcatacaaggcmttgaacacagaatgaggaggaacgggttttggggaaattattttgattttctattagataatttgaggtgcttggaggactttggtaagaaatgtcagttggcagtacagagtgcaagggattagcaggagtgaacagatttggacagtggaggaaagctcctgagacgtgggtatgagtgtttcaagcccagatgtctgagaagcagcatccaaac

SEQ ID NO: 208144 - DNA, 487 bp, Homo sapiens
gttatatttgagggttttataacagagttcatggttatcagggaaatgcacactgtggtcaccaatcaccagcacatgtggacatagccaggcaagtcagaattccaaaggtaatgttactagtcagacctgcagctttctaagcaggcaggtgatttgttctgtttacctggccattcagaattaaccaggtcacaatttttctacatagaaaattggctttttttctttcctttytctaataagggaatccttccactctttccagaacagcatgtactttgatgggccagattttggtagcagcatcctttgtatctgaagaggctgttgtgatcttagtcacagacaatctatgcagttatgaaaatattaaacagtaaaggtggagtctaaaagtataatgcagactctaacaatacagagatgtctgtggattttagtaacagctcatctttttagaatgtaaaagatgataatgagggtt

SEQ ID NO: 208145 - DNA, 510 bp, Homo sapiens
aaacagttattcaggaagaaaaaaaaatacccagttttctctggataataactcagctttttctctgacatctctttgcagtccacatttccactctgatttcagacccatttatctgggtggatttgactctcagtttgatccaaacactgctgcctcaaatccatttatcttcagctcacaaaggattatgttttctgtgtttagccaacaccacaacgactctgttggtagttgtggctttgctttgtaacatctttttgtattagttaactctgtgagcaacatcrtggaattaagatctttcagtgcttctaattggcagcaaacctttgtttttaattttatgctctaatcatcatagtttgaccagtagaagcactttcaacctagttcttgtagccattttcacacatctttaaacattatccttgctttccaataacagcaagctattccagaacaatcttgagttctgttacactcagtgcgaactcaatgactccacaa

SEQ ID NO: 208146 - DNA, 493 bp, Homo sapiens
tctattgagtaattattttggcattgatctaaatttctaaataaaagcttacattgcagcatttttatttttcagcctgaattattaatagctgacctcctttttaatgtaagaatttggatatttttagttctccaattgctatttccaccatgcatgaatggtacttctatcccccaacattgtgatattgttatatggaatttttataagactgctgttcagtatttgcattattatgttgtaaacactgcttacaactgatccggtcaataaactataattacttttccctcctagaaacstttttattttactgggaactaataattttcatatctttacgtactcatcagtaaccaactttttaaaaatttcctgaatctcctctaaagacatttagttatttcacatattctgtccatttcatcttcctgaagcagtactccttctagtcagatttgactgccctctgttcttggagcacagctgt

SEQ ID NO: 208147 - DNA, 561 bp, Homo sapiens
tcagctgatagtcttaatgacaatttcactgagacaactaaaacattcagcagagatccccagattcatacaactacatctatccatctactagcatctgatccaacaaytgggccttccttcctggtcccacagatgtactgataaaccatccatgctctgctctaaaacctattccttcacttgagcaccagaaattactttcgcatttctacagctcactaattttctgttgtcaatcagaccttctgccttccatggatatgggtctgtgtaccaattccctctgccccatttatccatggaaaacaattccatttataataggtacacaaaataaaatacttaggaataaatttaaccaaggagatgaaaaatacaggtcttagaaattacagaactttgagaaaagaaattacagaatatacaaggaaatgaaaaaatactctgtgttcatgggttggaataattcatattgttaaaatgtctgtacttcccaacttgatctacagattcaatacaatctgcatcaaaattccaatgccattttttttttacaga

SEQ ID NO: 208148 - DNA, 492 bp, Homo sapiens
actgggtttattgggacataaccctattgtaagtcggggatcatctgtatattacaaacctacaataattaaaatagcataatactggcataaaaatagatatatcaatgaatggaacacgatagagagcccctaaatgaacccatacatttatagtcaattgcttttgacaaagctgtcaaaaacatacaatggggaaaggcttgggaaaactggatattcagtgcagaagaacaaaattggacccttatctcacaccatgaacaaaaatsaactcaaaataaagacttgaatgtagggcctgaaactataaaagtaatagaaaaaacataaggcaaaacttatataacatcggtctccgcaatgattatgtttttatatttgactccaaaatctcaggcaacaaaattgagaatgtcttgaattgttttccctctttcttctacatcaaattttccctttcaaaagaatcaagccaatcagcatagaacc

SEQ ID NO: 208149 - DNA, 532 bp, Homo sapiens
aaaaatgccatacgctattttttctcaaagtttctccttcacattgctgccgcgtcaagataaatatcaatgccaaaaattaagagttctttggtctaacactrtatttaagccagcactgacttcagaatctggtttattcagtccaattttagctataggattaagaactaatgagcaatacttgaattacattttggagctgttgtactacaaaatttctcattcttctaatatattgtaagctatttttgtgcctttctagcctttaaatacctactttactggaaggtaatccataatagttactagtgtgttgctctgtcagggtacaggaactaataaaccttgaaggatttagaaagcagcagattgtaataaagctcctttatcaagtttgtttggcaggtttaattacttattcttataaatatcagagactagttcatcccaatagtgaaaggtcaccttaaacatctctgtaaataattatgagtctaaaagcttgctgttgaaatacctgttttaatca

SEQ ID NO: 208150 - DNA, 532 bp, Homo sapiens
aaaaatgccatacgctattttttctcaaagtttctccttcacattgctgccgcgtcaagataaatatcaatgccaaaaattaagagttctttggtctaacactgtatttaagccagcactgacttcagaatctggtttattcagtccaattttagctataggattaagaaytaatgagcaatacttgaattacattttggagctgttgtactacaaaatttctcattcttctaatatattgtaagctatttttgtgcctttctagcctttaaatacctactttactggaaggtaatccataatagttactagtgtgttgctctgtcagggtacaggaactaataaaccttgaaggatttagaaagcagcagattgtaataaagctcctttatcaagtttgtttggcaggtttaattacttattcttataaatatcagagactagttcatcccaatagtgaaaggtcaccttaaacatctctgtaaataattatgagtctaaaagcttgctgttgaaatacctgttttaatca

SEQ ID NO: 208151 - DNA, 532 bp, Homo sapiens
aaaaatgccatacgctattttttctcaaagtttctccttcacattgctgccgcgtcaagataaatatcaatgccaaaaattaagagttctttggtctaacactgtatttaagccagcactgacttcagaatctggtttattcagtccaattttagctataggattaagaactaatgagcaatacttgaattacattttggagctgttgtactacaaaatttctcattcttctaatatattgtaagctatttttgtgcctttctagcctttaaatacctactttactggaaggtaatccataatagttactagtgtgttgctctgtcaggktacaggaactaataaaccttgaaggatttagaaagcagcagattgtaataaagctcctttatcaagtttgtttggcaggtttaattacttattcttataaatatcagagactagttcatcccaatagtgaaaggtcaccttaaacatctctgtaaataattatgagtctaaaagcttgctgttgaaatacctgttttaatca

SEQ ID NO: 208152 - DNA, 586 bp, Homo sapiens
tagtttttgtctctgttttaaaaacaagtggaagttctttaagttatagcttgtatcttacaatcaaagaaaaatgcaaatataaaacttgtcctcattttttgaaatagatgcattcctaacatgtataatttactttttgtgaatcaaatgtttcctcattaattaaaggagcttaatattcacattttaaaagttgaatacttttgtaatgtgaataattatatttaaatatatcttgtttacaaagtttaatgttttttcttaaattgctatagtctggtagctttattaattctcttatatagacaaacaaacaagactacttgagaagaatattttttcactatcatattattcagtgttacatatattgttaatatgacaggatataaggaaaataattttgacattcatcttcacgttgcataaatactgaggaaattgaaactggggaagttctgattcaaatgggatgatcaacagtaaccaatttctgargaatgaagtttcattttcatatgttgaaacagaggaaagaagtgcccaggcaacttaacaacactcttagatctcatcttggctt

SEQ ID NO: 208153 - DNA, 627 bp, Homo sapiens
ttatgcttctgatatatttgctctattcctccaatcaactctaaatgataatatttratatttccattctatatatgaagaaactgagattcagagaagttgcaccactctttcaaagtcataataagtggtcagaattcaaacctcatctgttttcttatgccaatactatagtagcctttctattacaacatcctgttctcctttcctttgaaggaaatctctataacatgatgcctcataaccagggactgtgctaacaaatatggcatcaattttgtgcaagtttgaaagagcatctcacatactgcgggcagcctgataccaaacccatatgacttgacaaatagaattcaggctgaatttcagtccccattctctctctctaccggggccctacacctgtgaggaacttacctgtcactgtgtgagcaccttgaacatgatggaaagtatattatattaacaagtagtctaaattaaaatatctacttattattttaaaaccaattacttgaactacagtaaaacaaaagtccttagtttttccagtaaatttgattattctgaatattaaatcttatcccaaggtatagattggagtacagcattttgctatattctgac

SEQ ID NO: 208154 - DNA, 627 bp, Homo sapiens
ttatgcttctgatatatttgctctattcctccaatcaactctaaatgataatatttgatatttccattctatatatgaagaaactgagattcagagaagttgcaccactctttcaaagtcataataagtggtcagaattcaaacctcatctgttttcttatgccaatactatagtagcctttctattacaacatcctgttytcctttcctttgaaggaaatctctataacatgatgcctcataaccagggactgtgctaacaaatatggcatcaattttgtgcaagtttgaaagagcatctcacatactgcgggcagcctgataccaaacccatatgacttgacaaatagaattcaggctgaatttcagtccccattctctctctctaccggggccctacacctgtgaggaacttacctgtcactgtgtgagcaccttgaacatgatggaaagtatattatattaacaagtagtctaaattaaaatatctacttattattttaaaaccaattacttgaactacagtaaaacaaaagtccttagtttttccagtaaatttgattattctgaatattaaatcttatcccaaggtatagattggagtacagcattttgctatattctgac

SEQ ID NO: 208155 - DNA, 367 bp, Homo sapiens
cactattcctttaagggttcacgtcattactttaattcataatcaatatatgtgttagacaaatacattgggaatcaaatggaaaacaaatataggacaaatatttacgattgacaaacactttatatcgatatgggaagcaaatgttaaaagtaatctgtttctataatacacacaggatacgtttctgctaaccagcctcagaatctataattgtttaacctcccrcaagggtaaactgataacatttccttttattctgcactgtatttggctttcaaattaatagtcacattctgtctagaatgttactggcagataaacagatgtctgaaagtggctgaggacatttcagttcctataaaat

SEQ ID NO: 208156 - DNA, 575 bp, Homo sapiens
gaggtatcatttatcattatcaagtgtttaaccatcatttgtcatttctttgtgttaggaacatttcagttccactcttcgttattttaacatatacaaaaaaaawttttgactgtagtcacctcgttctgttctgctatcaaatagtagatcttatgctatctaagaatgtttttgcactcattaactgtctccatattttctcctcttccctgctacccttccttgctggcctctgttaacaatcattctactctagctattcatgagttcaattgttttcattgttagttcgcatctataagtgagaacctgtgaaattcgtctttctgttcctggcttatttcacttaatataatgtcctccagttccatccacgttgttgcaaatgacaggatttcatgctttcttaaagctgaatactatttcactctgtatatgtgccatatctttattcattcatctgttgagaaacacttaggttgatttcaaatcttggctactgtgaatagttctgcaataaacatgggggtgcagatatttcttcaatatactgatttcctttcttttaaatt

SEQ ID NO: 208157 - DNA, 342 bp, Homo sapiens
aactgggtaatggtcaaaggttggaagaatttagggggctcagaaggaaacatgaagatgaggcaaagtgtggagtttcttatagactgattaaatggttgtgatcagatgcttgtctatcaagatgaatagtgaagttcaggctgatgaggcctcagttagaaatgtagaacttatttgagactggagcaaaggtcactcttcttatgccttagcaaagaacttggstatgatatgtttatgccttaggaatctggaaatttgaacttgtgtaggttatctggtggaagaaatttctaagcaccaaagcattcacgacatggcctggctgcttctaacaac

SEQ ID NO: 208158 - DNA, 581 bp, Homo sapiens
tatagtgaatagagaggcatatgtacctgaattaatagtaaaagataagatcaaggaactgttctagaaggaaacatggaagtaaaaatagtgacaatgtaaaagatgataatattcccagaaagtgagaaattgtatttaaaaattcacaggaagaaatattttaataaatgcaaggtaaattttctggagttaaaaaatatgaaagcacttaatcttaaagagctcataaaatgtcaagagagcaaaagataattataaaagagaagcacataaaaattgcagaactgtagagtatcttaaataamatggccagtatggacaaaacaatgagtcaataaactagataaatagaaattatgtaatatgcataagaagtgtgaaaaggttgaaaaagtaaatagaacctctgaaatgtgtcagccattatcaatttgtaaaacataactataattggaaactatgaagaaagaaaagagataatgagctcaaaggatttatttaaagaaacagtgtctaggctaggcgctgtggcttccgcctgtaatcccagcactttgggaggccaaggcgggcagatt

SEQ ID NO: 208159 - DNA, 456 bp, Homo sapiens
ttctgtgtttttctgcatacttactattaccagtgagsattgtaccttaaatgatttcttattgctcattaatgtcatttgcattctgattgaattacttcctttggcttttctgatagcgcaggtctagtatttttgaaacccctcagcttttggttgtctgggaaagtctttatttctcattcatgtttgaagggcattttcactggatatactgttctagcataaaatgtttgccttcagcactttaaatatattatgccagtctctcctggggtttccacttaaaagtctgctgccagatatatgggagctccacggtatgttatttgtttctttccttttactgcttttaggatccattatttatacttgactcttaagattattaaataccttgagctagtcttatttggattaaatttgctaggtgttctataacccttttgtatttga

SEQ ID NO: 208160 - DNA, 456 bp, Homo sapiens
ttctgtgtttttctgcatacttactattaccagtgaggattgtaccttaaatgatttcttattgctcattaatgtcatttgcattctgattgaattacttcctttggcttttctgatagcgcaggtctagtatttttgaaacccctcagcttttggttgtctgggaaagtctttatttctcattcatgtttgaagggcattttcactggatatactgttmtagcataaaatgtttgccttcagcactttaaatatattatgccagtctctcctggggtttccacttaaaagtctgctgccagatatatgggagctccacggtatgttatttgtttctttccttttactgcttttaggatccattatttatacttgactcttaagattattaaataccttgagctagtcttatttggattaaatttgctaggtgttctataacccttttgtatttga

SEQ ID NO: 208161 - DNA, 598 bp, Homo sapiens
tcagcttttaaaaatagtcactgactttgatgtttaaattgtggctaagctggccttctttcactagaaagagataaaatttagtttttctttcatctattcatatccacacaccccttcttaatcattattcaaagaaattgctcatgtaactcttggctcttggctgacccaccagccttactagtaaacagtaaagtgctgtgaagcygagctgcctgcccaccatcaggagagggttataaagatggcctcttagccctcagcacacaggtaatagggagacttgcacagctgatggttttagcattcatgagtagaggaaaaagagaaaatgcatgtcactgtggaattgctgataaactgaggaatgtgtgcagcctccttgtttaatccactctgccaagtgagctttgaatgctagcctgcactgaataataaagatccttacatagagagttgtgccaggcccctcattagaagtaggaaaacccaatgaccggatcaacatttcagtactatatttagctggtgggagagagaaaataatcactttgtcgctctacttcctcctttgggttttgtcctcatttaactt

SEQ ID NO: 208162 - DNA, 462 bp, Homo sapiens
agcagttaggaggatgaacagtggaggagtgtcctcactaaagagaccaatccaaactaattgtaaaggctaacagaaatgatatgaagtgcctacagcagaggcaaaggataggtctgctgtggagaaataagtccaagatcactgagtattaaatgcaaaacggataacaatgtggtgggagtggagaaagyaaaattcgtaacaaagtggagagagccattcttccatcttctttgaaggctttttaagcaaaaacagagacagaatcctacctcaatgtcacacttccaatgaccacgcccacagtgctaatgggagtgtaaattagtacaatatttgtggaaaattactgttaacaaccttagaaatgttcaaaaacttttgtgaggcacagtggctcacgcctgtaatcccagctcttagggaggcagaggcaggagaatagcttgagcccaggag

SEQ ID NO: 208163 - DNA, 462 bp, Homo sapiens
agcagttaggaggatgaacagtggaggagtgtcctcactaaagagaccaatccaaactaattgtaaaggctaacagaaatgatatgaagtgcctacagcagaggcaaaggataggtctgctgtggagaaataagtccaagatcactgagtattaaatgcaaaacggataacaatgtggtgggagtggagaaagtaaaattcgtaacaaagtggagagagccattcttccatcttctttgaaggctttttaagcaaaaacagagacagaatcctacctcaatgtcacacttccaatgaccacgcccacagtgctaatgggagtgtaaattagtacaatatttgtggaaaattactgttamcaaccttagaaatgttcaaaaacttttgtgaggcacagtggctcacgcctgtaatcccagctcttagggaggcagaggcaggagaatagcttgagcccaggag

SEQ ID NO: 208164 - DNA, 636 bp, Homo sapiens
ctcagtgtcccttgtggttaggacataagcgtggcacgctgggcttccaataaggcatgcttatgtgatgctttgatttgaaagggcatgaggaaacaggtttatgctgacttctctggtttgcctatgtaagggccaagggaaaacttccctttgctctctaaagattcactgaaaataacacaaaaaaaggcagattaataggggaaaaggcatacaaatttattaacatgcgcagggaaaataacagtgattaccccaccacacaatggggtagaaaaggggtatacccttttttcttaaaggaaagggagatggagaagtatggatgattttaggggtatagtaggtgatttttggagggaattcaatgggcttgaaacacatayagtggcctaggacaaagtctcttgggcccgcagaacagttggctatttgtgacaaacatgtgtccaggtgtgtggacaggcttcaggctttcttcctgtgatatgaattcagttagtgaacactctgggatgggaccagagataattgtttcttctttggtgggtccggactttaggcagataagggcacttcagagaacaactttatcctgtactgtgggggagacaggactgagagacaggagtg

SEQ ID NO: 208165 - DNA, 636 bp, Homo sapiens
ctcagtgtcccttgtggttaggacataagcgtggcacgctgggcttccaataaggcatgcttatgtgatgctttgatttgaaagggcatgaggaaacaggtttatgctgacttctctggtttgcctatgtaagggccaagggaaaacttccctttgctctctaaagattcactgaaaataacacaaaaaaaggcagattaataggggaaaaggcatacaaatttattaacatgcgcagggaaaataacagtgattaccccaccacacaatggggtagaaaaggggtatacccttttttcttaaaggaaagggagatggagaagtatggatgattttaggggtatagtaggtgatttttggagggaattcaatgggcttgaaacacatatagtggcctaggacaaagtctcttgggcccgcagaacagttggytatttgtgacaaacatgtgtccaggtgtgtggacaggcttcaggctttcttcctgtgatatgaattcagttagtgaacactctgggatgggaccagagataattgtttcttctttggtgggtccggactttaggcagataagggcacttcagagaacaactttatcctgtactgtgggggagacaggactgagagacaggagtg

SEQ ID NO: 208166 - DNA, 616 bp, Homo sapiens
atacaaatttattaacatgcgcagggaaaataacagtgattaccccaccacacaatggggtagaaaaggggtatacccttttttcttaaaggaaagggagatggagaagtatggatgattttaggggtatagtaggtgatttttggagggaattcaatgggcttgaaacacatatagtggcctaggacaaagtctcttgggcccgcagaacagttggctatttgtgacaaacatgtgtccaggtgtgtggacaggcttcaggctttcttcctgtgatatgaattcagttagtgaacactctrggatgggaccagagataattgtttcttctttggtgggtccggactttaggcagataagggcacttcagagaacaactttatcctgtactgtgggggagacaggactgagagacaggagtgaggcagggggaggtcagagagagcctgaggcttcttcctcagctcagcatgtcagagcaccatattttgggggtattggtttctgagccccaacacattgctatggaggcagctgacttgcaggtgcagtagaggtagtaagaagagaagcatttgtactggaggtagtggcaggtacagtgaagtcaagtcct

SEQ ID NO: 208167 - DNA, 610 bp, Homo sapiens
tggcttatgatgaaaacataatttggaagagagccaggaggtatcaaaaagattctcaaaagctgggaatttttgaatgtctgggaatatgtaagtgtcaaagggctagtttacatacattttgaagaaatccagaaattatacaaaataagaataaaaaagtgttacatcccttgcaaagtcctctgtgacttacattaaatacctcttagcttcattcatgttaaatcatttacttgcaytgatgggcttgttaatttgtttatgttgacataatagatattataaaactcaaggtattatgaatcattttctttgaaacataaacttcataacacaccagactttataaagacatttagtttggatatacaaataggagtagctgtcactttattcagaaggatgaattggcttcaaatattttcataattttacactccattttttattttattttaagttctaggatacatgtgcaggacattacactccatttttgagaaatctttagattcatgcacactagccagtttacagtatgcatgacttcacagatttgttggctaagcagtttaagcaccctggaggtggagacctctctgaaagc

SEQ ID NO: 208168 - DNA, 535 bp, Homo sapiens
gagaaagaaataaaaggcatccaaataggaagtcaggaagtcaaattatctctgtttgcagactatctgactttatacctagaaaaccccacacatagtctctgctcaaaagctcctagatttgacaaacaacttcagcaaagtctcaagatacaaaatcaatgtacaaaaatcaagatcatttctgtacactaatactctccaagctgagtgccaaatcaagaatgcaatctcattcacaatagccacaaaaaattaaaataaaatacctaggaacacagctaaccagggaggtgaaagaactctacaacaactctacaaagcactgctcaaagatatcagaaataacacaaatgaatggaaaaactttccatgttaatggatagtaagaatcaacattattaaattggccacastgcccaaagcaatttatagattcagtgctattcctatcaaactaccaatgacatttttcacagaattggaaaaaaaaattttaattcatatggaatcaaaaaaagagcctgaatagcca

SEQ ID NO: 208169 - DNA, 253 bp, Homo sapiens
atgtgcacaaaatggcaaaaaatttgagccacctgtatgttcccaggtgtggccttcctatttcagctctcttattgtaaacaagtgtctttttcgaggtctatttaatgatacattttccacgtttttacttattttttatttttagagacagggtgttgctctgttgcccaggctgggatgyagtggcgtgatcatggtttatttggttcaaacgctaagcttggggctcattctaagcagcaaaatcacc

SEQ ID NO: 208170 - DNA, 562 bp, Homo sapiens
tgtggctcaggtgaaagcaatgcaaacaatgatgtgtttaaacagaagtcgaatctgatttacattttaaaaagatccttctgggtatggtagcaagaatggactgaggagctagagaggatggagactggatgaggatggtagggatgcagctggaaagagggactgatactgggtccctctggaaggcccattgttggggtatactaagaaggatgaggaaaagagaaatcaagaactgggtcatgagcttgagctcatgggtagacagtgctgccaattcttgagagggaattaagaaggggagaagaagggttctccttgttaaattcagatgcttgtttgacattcaagtaggcacttagatatataaaatctggagataaaatataaattggggaattacatacagatgtacctcattctgttttttttttttttttcttgagacagagtcttgctctggagttctacttgttaaatttcagatgcttgtttgacattcaagtgggcacttagatatatraatctggagataaaatataaattggggaattacata

SEQ ID NO: 208171 - DNA, 456 bp, Homo sapiens
ggctaggaaaagcaggcagaagaaggtggaagaagctgacttgctgagtcttctggccttcatctttctcccgtgctgcatactccctgccctcgaacatcagactccaagttcttcagctttcaaactcttggacttacacctgtggtttgccaggggctctcaggcctccagccacagactgaaggctacgctgttggcttccctacttttgaggttttgggacttgkactgagccactactggcttctttgctcctcagcttgcagatggcctatcatgggaccttaccttgtgatcgtgtaagtcattatatatgaagaggagtttatgtatatatatttaaatacatatatcctattagttctgtccctctagagaaccctgactaatacaacaggtattttttttttaatttgattgaacacacataagattagtgtactactaagttat

SEQ ID NO: 208172 - DNA, 351 bp, Homo sapiens
agatctggttgtttaaaagtgtgtagcacctccctgctctctctctctctcgctactcctcccaccatgtgagatgcacctgctcctgctttgccctccaccatgagtaaaagcttcctgaggcctccccagaagcagatgccaccatacttcctgtacagcctgcagaastgtgagacaattaaacctcatttcttataaattgcccagtcttaggtatttctttatagcaatgtgagaatgggttaatacagactataatatgtattttataaactggctgtgaagattgaataaggcgatatatatttagggcatatttattgggcccagcacaagaagggcaaattg

SEQ ID NO: 208173 - DNA, 543 bp, Homo sapiens
tcctttttgctttcatttttcactgcatttaatattctgggtgaacaggattttttctttcagcgagttaaagatattattctattgcttttcgctttgcatgatttctgacaagaagtctgytttaattattatctttgttcttttaccattttttccccttggctgtcttcaagatttttctctttgtctctgatttgctgctgtttcaactatcatgtgtgatgtatctatgtgttttgtggtgtttttgttttgttttaaatttgggtatttacttatcttggggttttgtaaattctttagatttgttgttgaatgtgtttcatgatttcttctgaagatttttagtctttgtcccttcaaatatttcttctgtcctcttctctttcttttctccttctgtaattctagttacacattagactagttgatcaaaccagaagtttgaagatctctgttctgtattttttcgctcttcctccctttttgcttcagtgaggataatttatattgatctattttcaggtttaatgatacttt

SEQ ID NO: 208174 - DNA, 547 bp, Homo sapiens
atttacattagaaatgattcttcctytgttaggaaaatggtatagcaatttgaatcaatatagaagaagctgtgctagacctgggttttatttttagtgcattacagacttcagattcttctagttgtgggctatcattccttgcagttagggtgagggctgtgatgacagagaatattctgagggtttgtactccatttttagctgtcagtcattcctacccacttgcatgggttttttcctccatgttgttgcccctcacccagtgttgactgctgttgccactcagtgcaaggcttattgtggggatgacaatcagtttctgttgtcccatttcagcttcaggcttagtttggctttgtatatctgagctttgggtttggactttctcagcattattgcttctcctttccatggcagtcaatcttggccttgtttctgtggttaagcttgagaaaagttttcctgccctttcaagtgttatcagaccacatctgtttggtactggaataggatccttggtgcatgattgttttctgcctctctc

SEQ ID NO: 208175 - DNA, 569 bp, Homo sapiens
ctattttttattatctacagagtagatataagattgttttctgagacttcagctgcatggatttttgtactttggaagtaaataagagagagttgtagaaaacctcagagtttctgatgtttttcataatgagatccataaatattaagaattatatgactaattaattactttgacttagtccttgggtctgaatttatttttatagccataaaaagtaattatattatttgatatggcttggttttaaagtttacttctttgtacttcttttgaagctcmtgtccaaattcttttaggactctgtgtattggcttggttttaacataaaattagttgaatgtacttaaatataaaataaatgaaatcccacatgctaatggcccttataaaaacataaaatccaagtaaacttagtcagttctaaagaactatgcgcataatataatttacacaaaaatataagataaatgatgttgctttgctaacatgaaacttttggttgaaaggtgaatagagtgctgattttatcatagtcccacagcttataataatatatgcctgtgttg

SEQ ID NO: 208176 - DNA, 614 bp, Homo sapiens
aggcaaaactaattgaaagagaagagatccatgattgccagaggctgacggtggggtgggaagagaagtgattaaaaaggggcatgaggaatgtttgggaggggatgratatgtcatgtcttgattgtagtagtagatatatgactatatgtttcatcataattcattgaacagtacacctttaaaaaggtgaattttattatatacgaagatgtacatgtatatgaattatacctcaaaaaaccttaattttaaaaattaatcaaagatcttataacaaagtgtggataaagggcaaaacaaaaaatgttcttagttgatgactgaaattgataatacattaattctctaaaaagtatcatgtaaatttgtgcagttccaatatgaattccaaaaggatgtttctagacttgagtaaaataatcttaaactttatattgaagaatatataagaacagccaagaaaataggaatgaaaaataaattagagagacttatcatacccaatatcaaaatacactactgtaatcaaattaatatggtattggcatgggaacaaacagattagactaaaaaagagtatatagatatggctttcaatgtgtaagttcatt

SEQ ID NO: 208177 - DNA, 328 bp, Homo sapiens
tctttatctcttgaagccaagagcagcaaagctaaaaattaggctcagtgaataacttctgtagctgacwtgccaaagccaaggctctgataaaaaaagattgagattctggaaactgagataaggacatttatgtggataaacctaagaattactgctatctaaggatcaaaatattatcatgaggacttcggagaccaattcatttaataatgggtccagtgactctatgaactcctccatgtaatatctcacctccaagcatgagatagaaaaacttacacaactgtccttgatctaagtaataatagcaattatgtaagaaagg

SEQ ID NO: 208178 - DNA, 576 bp, Homo sapiens
ctaatgccaattctattcaaactgttccaaaaaataaaggaaaatagaatattttcatagtcattctaaaaggacagtattaccatgatactaaaaccaaagacacatcaataaaataaaactgcaggctaatatcccttaagaacatgaaggacatgaagatatttctccagtrttatcataaagagaagagtggggaaaatccctaggacattagtctgggcaaaactttcttgtgtaacaccctacaagcacaggcaaccaaagcaaaaatgaataaataggatcacacaaagttaaaaagcttctgtacagcaaagaaaacaattaacaaaattaagaaacaacctacaaaatgatagaaaatgggagctcaaacaactctaaaggaaaaccatctaatgatctgattttaaaataggcaaaagatttgaactgacatttctcaaaagaagacatacacatgacacaaataggaaaaggtattaacatcacttattatcagagaactgcaaatcaaaactacaatgagatatcacctcacaccaattaaaatggcctttgtccaaaagacag

SEQ ID NO: 208179 - DNA, 482 bp, Homo sapiens
gtcattgaaagcttctatgtttgtttgcttgtcctaaagagtagatagctttgttgtttggaaaggcacaataacgggccctgtttcacattgataagcttctaagtgtgatctatttataaaagcaggagagtaaacaagggaaaagagtcttctagctacatgaactttcatctccattgaggagatggtagactgcacagattaagttagatttagagaaaaatttttgttccttaatatgaatataagctgtgcagtttatgaaaattactgttttctctaaaaggtgtgcatgtgtgtgtaaawgttccaacagttcctaccaggagatttaagagaaaaaggaaacatatcttcatttcacaggagtagaaagactactaaggttagctaccttaaaatgaaaaactctctaaatggtcttatagaatgacaccatagtgttattttaggcagaattcagattttaagaaatgttt

SEQ ID NO: 208180 - DNA, 538 bp, Homo sapiens
cttttgttagtaagattgtgggtaattaagttaaaggtcaataaagggaattgtggcctccctcacatcatctcctactgaggctagcagcaaggactgaaaaagacagtggtcctggagtcccacaaggggaagcaaagcaagtagtatcccaggcattgctgagagtaaaaaagaagagcccttggtgtggtgaagtcagtgccacctgggcaaattcaaaatggccaggagttaaagctccttttcccaaatatacccaaagaaggagattctcaaaggaccaaagatgacatttccaatataatcrcgtgcacaaaactacaattgaggcaggtattcctgccacagaaaaggcatataatactagaaaagcaaagaatggggaaactaacaattctcaagggtctgaaggctgagtaggacttattatgatgaaggggagcatgccgagaagagaaccccagctaggggaagagtagggtgaaagctgaggggtgtttgaagaactgaaagaagggcctgagtggccagacca

SEQ ID NO: 208181 - DNA, 550 bp, Homo sapiens
attcacattcaaataactacccacaactggcaataactatcctccagagaaacccaacctgaagaagttcatgcatgaagtctgaccttgcttaattggtttggtgggacaggaccaaaactcttctagagacaggtaaaactgatccatacaaatgaatattggaatcttctttcttggggtctaggctgatgtggcatctggcaacggaggccaactgaaacttgggcctccaagtatatccaagtactggctgtggctgaagcttgagctggctacaaggtttctcctatacaggagagagtagctacctttattgcatatatttacatattggtattcaatgcttttgtattggaaaaactgaagtttgttcttttagagccagtttctgaggtgagaggtagagagaattagagatatgactagtagggtctcctaatcacgaaacaaattgcaacctatgccttgtccggtcatctttatatgactgttttytgaaagagatatgaataacatgtactgtgcagattaaggggttgaagaattc

SEQ ID NO: 208182 - DNA, 549 bp, Homo sapiens
gactctgtctcaaaaaaaaaaaaaaaaaaaagaagaagaagaagaagaagtccaaatgttgttagcagggttgtgcttcctctgaagactctaggaaaaaaataatctttctttattcttcctagcttctagtagctcccaggaatccttgacattatttgtcttgtagctacaatattacartctctgtctctgtctaatatggccttgaattttgtgtatctttgtgtctctgtgtgtcctttcctcttcttacagaggtaccagttattgaatttagggctcaccctaattcagtatgacctcatcttaactaattacatgtgcaaagattctatttccaaataaggtcatattttgtgtttataggtaggcataaagtttgggggatgctatggactgaatatttcatatttatgttgaaatatgaaatattctgatatttcatatgttgaagatataatccccaatctgattttatttggcattaaggtctttaggaaataattagagctgaatgagattatgggtatagagttcccatgatga

SEQ ID NO: 208183 - DNA, 549 bp, Homo sapiens
gactctgtctcaaaaaaaaaaaaaaaaaaaagaagaagaagaagaagaagtccaaatgttgttagcagggttgtgcttcctctgaagactctaggaaaaaaataatctttctttattcttcctagcttctagtagctcccaggaatccttgacattatttgtcttgtagctacaatattacagtctctgtctctgtctaatatggccttgaattttgtgtatctttgtgtctctgtgtgtcctttcctcttcttacagaggtaccagttattgaatttagggctcaccctaattcagtatgacctcatcttaactaattacatgtgcaaagattctatttccaaataaggtcatattttgtgtttataggtaggcataaagtttgggggatgctatggactgaatatttcatatttatgttgaaatatgaaatattctgatatttcatatgttgaagatataatccccaatctgattttatttggcattaaggtctttaggaaataattagagctgaatgagattaygggtatagagttcccatgatga

SEQ ID NO: 208184 - DNA, 352 bp, Homo sapiens
aatcaattcccagacttgagccagttcacaggcccacaaccccttaagtgaaggggaggctgggtgatcttggggaagtacgctgctacgttgccaaaaatttmcattgttaatctttttcccagtcttcccaaagggacttacagccttctgccaggatgactgtgacttaaagaaaagaaaattctcagatatttggggaattactggacactggctctcatttgacactattatcactatgttgcctaggatggattcatgctcctgggttcaagcagtcctcctacctcagcctcccaaagtgctgggattacagacatgagccactgtggccagcagagctttgaaa

SEQ ID NO: 208185 - DNA, 430 bp, Homo sapiens
gctaaaaataaaaattaatttggaaaggtaattagatactgatacattcttacatttacacattctttcatatattcatatattcttttaacagtatcaatggtttggagttatgtgtacaaaaccatgacctatatgtaatacaactaataacaggcatttacaattcaaggcatattatatacaaagctttaacttcttatcaaaatattttgttttttttctttctgttttggcagatactatgaacacaacattcaactcacagacaccatggagcccttactaagcataaagtactgtgaaargccagggctaggacagaactaagacagggccagggataggacagaacaggggcagggtcatggccagagaaaaaccaggggcagggtcacggccagggacatgagaggaccaaggccagggc

SEQ ID NO: 208186 - DNA, 465 bp, Homo sapiens
ggtctagggcacaagcagggcaggctagggcagggcaatggcaagaccaggccatggcagggccagcccaggatagaacagggcacaggcagggcagggccagggccacggctggggcaggacaaggaccaggactggrgtccaggccagggcaagggtatggccagggcagaggtagggccagagccagggtctgggcaggaccaaggcaggtctattgcagggccagggttcagaccagggccagagcagggctgggacagggccagggccagaaccaggaaagggcaatgtcaggacaagggccgtggcaggaccagcaatggggctgggggcaggacagggacagggacagggtcagggctagggccagaatagcatgccagggtagagccacgccaaattagggccaggacagggtcaggaccagggctgggccagggcatggccttaagtagcgaaggg

SEQ ID NO: 208187 - DNA, 488 bp, Homo sapiens
gcacaagcagggcaggctagggcagggcaatggcaagaccaggccatggcagggccagcccaggatagaacagggcacaggcagggcagggccagggccacggctggggcaggacaaggaccaggactggggtccaggccagggcaagggtatggccagggcagaggtagggccagagccagggtctgggcaggaccaaggcaggtctattgcagggccagggttcagaccagggccagagcagggctgggacagggccagggccagaaccaggaaagggcaatgtcaggacaagggccgtggcaggaccagcaatggggctgggggcaggacagggacagggacagggtcagggctagggccagaatagcatgccarggtagagccacgccaaattagggccaggacagggtcaggaccagggctgggccagggcatggccttaagtagcgaagggccagggccagggtccatgccagtgccagcgc

SEQ ID NO: 208188 - DNA, 465 bp, Homo sapiens
ggtctagggcacaagcagggcaggctagggcagggcaatggcaagaccaggccatggcagggccagcccaggatagaacagggcacaggcagggcagggccagggccacggctggggcaggacaaggaccaggactggggtccaggccagggcaagggtatggccagggcagaggtagggccagagccagggtctgggcaggaccaaggcaggtctattgcagggccagggttcagaccagggccagagcagggctgggacagggccagggccagaaccaggaaagggcaatgtcaggacaagggccgtggcaggaccagcaatggggctgggggcaggacagggacagggacagggtcagggctagggccagaatagcatgccagggtagagccasgccaaattagggccaggacagggtcaggaccagggctgggccagggcatggccttaagtagcgaaggg

SEQ ID NO: 208189 - DNA, 488 bp, Homo sapiens
gcacaagcagggcaggctagggcagggcaatggcaagaccaggccatggcagggccagcccaggatagaacagggcacaggcagggcagggccagggccacggctggggcaggacaaggaccaggactggggtccaggccagggcaagggtatggccagggcagaggtagggccagagccagggtctgggcaggaccaaggcaggtctattgcagggccagggttcagaccagggccagagcagggctgggacagggccagggccagaaccaggaaagggcaatgtcaggacaagggccgtggcaggaccagcaatggggctgggggcaggacagggacagggacagggtcagggctagggccagaatagcatgccagggtagagccacgccaaattagggccaggacaggktcaggaccagggctgggccagggcatggccttaagtagcgaagggccagggccagggtccatgccagtgccagcgc

SEQ ID NO: 208190 - DNA, 608 bp, Homo sapiens
ctagtgattgtaccaaatttgtaaatcacataggatagtgggtcattttaagaatattagttatttcaatctataaacgtggatgtctttccttttttgtgttttctttaatttctttcattaatatttgtcatttttgttgtcgaaatcttttacttccttggttaaatttatttctaagtacatttttgtagctattgtaaaaggaattgctttcttaatttcttgtttcagctagtttactatcaatatatagaaatgctactgatttttgtatgttgatttatatcctgcaactttattaatttcatgtatcaccctaagaagcttttggtagagtcttatttttttccrtgtataagatcacattgtctttaaacagggacaatttgactgtctcctttccaattcagatgtcctttatttctttctctcacctaattgtcctggctaagactttcactatgtgaaatatgattggtgagaataggcatccttttcttgttccagtaaaatctttttcttgttcacagtaaaagctttcaccttttccacactcagcatgatcttagttgtagatttgtcctttatgtccttctgttttaagg

SEQ ID NO: 208191 - DNA, 608 bp, Homo sapiens
ctagtgattgtaccaaatttgtaaatcacataggatagtgggtcattttaagaatattagttatttcaatctataaacgtggatgtctttccttttttgtgttttctttaatttctttcattaatatttgtcatttttgttgtcgaaatcttttacttccttggttaaatttatttctaagtacatttttgtagctattgtaaaaggaattgctttcttaatttcttgtttcagctagtttactatcaatatatagaaatgctactgatttttgtatgttgatttatatcctgcaactttattaatttcatgtatcaccctaagaagcttttggtagagtcttatttttttccatgtataagatcacattgtctttaaacagggacaatttgactgtctcctttccaattcagatgtcctttatttctttctctcacctaattgtcctggctaagactttcactatgtgaaatatgattggtgagaataggcatccttttcttgttccagtaaaatctttttcttgttcacagtaaaakctttcaccttttccacactcagcatgatcttagttgtagatttgtcctttatgtccttctgttttaagg

SEQ ID NO: 208192 - DNA, 608 bp, Homo sapiens
ctagtgattgtaccaaatttgtaaatcacataggatagtgggtcattttaagaatattagttatttcaatctataaacgtggatgtctttccttttttgtgttttctttaatttctttcattaatatttgtcatttttgttgtcgaaatcttttacttccttggttaaatttatttctaagtacatttttgtagctattgtaaaaggaattgctttcttaatttcttgtttcagctagtttactatcaatatatagaaatgctactgatttttgtatgttgatttatatcctgcaactttattaatttcatgtatcaccctaagaagcttttggtagagtcttatttttttccatgtataagatcacattgtctttaaacagggacaatttgactgtctcctttccaattcagatgtcctttatttctttctctcacctaattgtcctggctaagactttcactatgtgaaatatgattggtgagaataggcatccttttcttgttccagtaaaatctttttcttgttcacagtaaaagctttcaccttttccacactcagyatgatcttagttgtagatttgtcctttatgtccttctgttttaagg

SEQ ID NO: 208193 - DNA, 522 bp, Homo sapiens
tagatctgtatctttatggtagagtttatttattgtagctgcattttaatttaaaacttaattactgttgctttgtttccttctggtttctgcatgatttccactgcgtctcttgtgttctgtttgtttgttttggagtttctcacattgagagatttttctcattgttgggtaaccatgactctatcttcctgtttaagaattaggggctgggcaccatcgctcaggcctgtaatcccagcactttgggaggcygaggcaggcagatcatctgaggtcaggagtttgcgccagcctggagggttggagaaactggctgttgcattagtccgttctcacactgctataaagaattaactgagactgggtaatttatgcagaaaagaggtttaattgactcagagttctggaggctgtacaggaagcatggctggtaggcctcaggaagcttacactcatggcagaagggcaaagggaaagcaagcacatcttcacgtggtggcaggagacagtgaaagaaga

SEQ ID NO: 208194 - DNA, 510 bp, Homo sapiens
aaaataatgcttctggtaagaggttgaagaccacatatgtagctctatggcctttattttatagttgagaaaactgaagctcagagctaagaactggacacagccagtgagcagcagagtcaggactaaatccctttctgctctgaatttttcaacaaatggtattaatcctcttctttgacctggaaggggcatgacacctacaacatttgatacccatggcatttgacacccacaccactcaacacccttgtgcctttattttgattaaaggtgtgyctttaaagtgatgagaatagtgtccaaataaatatgacagaacccttctatccattttctctgggaagaaatgaatattaatatctctggtaagatttgaatattaaacaaagagaaagaactagcccctttagtggatatagcatgatctggggaacaaagagacagcccagatgggagcatgttattggagagggataaggagcgtgcaaggtaaggtgtcggtgaaca

SEQ ID NO: 208195 - DNA, 476 bp, Homo sapiens
ccatagactggggggctttaacaataggcatttatttcttacagttctggaggctggaagtccaagatcaaggtgcagcagatctggtgtctggtgagggctccctttctggtttgcagatggccgccttctctctgtktccacacatggtggagacagggagagctctgatcccttccttttcttataagggcactaatccatcatgagaaccccacccccatgacctcatttaaacctaatgatctccaaaggtaattacatagggggttagagcttcaacatgcaaatttggcagggacagggggtggggaacatgaacatccagtccattaccatagagatattcaaatgggggtaaatgcttctgtggaaaatccccccgtgggagggctgctctgggctgtgtgtccaccccaacttggtgctcccacgagactgtgggaaagggtggcagtcctctatccccagtatgg

SEQ ID NO: 208196 - DNA, 476 bp, Homo sapiens
ccatagactggggggctttaacaataggcatttatttcttacagttctggaggctggaagtccaagatcaaggtgcagcagatctggtgtctggtgagggctccctttctggtttgcagatggccgccttctctctgtttccacacatggtggagacagggagagctctgatcccttccttttcttataagggcactaatccatcatgagaaccccacccccatgacctcatttaaacctaatgatctccaaaggtaattacatagggggttagagcttcaacatgcaaatttggcagggacagggggtggggaacatgaacatccagtccattaccatagagatattcaaatgggggtaaatgcttctgtggaaaatccccccgtgggagggctgctctgggctgtgtgtccaccccaacttggtgctcccacgagactgtgggamagggtggcagtcctctatccccagtatgg

SEQ ID NO: 208197 - DNA, 612 bp, Homo sapiens
ctggcacatagtaagtcctcaataaaatgaagagcatttgagatgacatgattttcccatttcccagtccagggctcatgtcactgtcctattacaggtatgacccaagatggtggtggctggatagtttccttccaaggtactctttaaggggtagacatgaaaggcagtgatcactcatsccaacaccctatgcttgtaacctgatctccccctggctggtaggcttattctgtcaagatttacccttagaaaagcatatgataagtataacaactacaaaatattgagggcatattatataccagttaatgtgctatgtgtccaatcctcatccaaccctgtctggtgttaatattattactgtcattttataggggtgcagagaggttataggactagtccaagaccagacagaggcaacagtagagccaggtggaaattcaggtctgtcatggtcacaatgctctttgtccgtggggcatggagttgcccaatatattattgttttacagtctttagacacagtgtcttcgcttgacaggaggcacgttcctttatgttgtaggaaatgcactgaacctgaataactctacaggagagctctcatcc

SEQ ID NO: 208198 - DNA, 612 bp, Homo sapiens
ctggcacatagtaagtcctcaataaaatgaagagcatttgagatgacatgattttcccatttcccagtccagggctcatgtcactgtcctattacaggtatgacccaagatggtggtggctggatagtttccttccaaggtactctttaaggggtagacatgaaaggcagtgatcactcatgccaacaccctatgcttgtaacctgatctccccctggctggtaggcttattctgtcaagatttacccttagaaaagcatatgataagtataacaactacaaaatattgagggcatattatataccagttaatgtgctatgtgtycaatcctcatccaaccctgtctggtgttaatattattactgtcattttataggggtgcagagaggttataggactagtccaagaccagacagaggcaacagtagagccaggtggaaattcaggtctgtcatggtcacaatgctctttgtccgtggggcatggagttgcccaatatattattgttttacagtctttagacacagtgtcttcgcttgacaggaggcacgttcctttatgttgtaggaaatgcactgaacctgaataactctacaggagagctctcatcc

SEQ ID NO: 208199 - DNA, 636 bp, Homo sapiens
agaattcaagttgagatttgggtggggacacagccaaaccatatcagtgcactctcttcatttgaccatgcaatgcatgtttttaataataaacatctccatccaatatgaaaactcatactgtaactgtgatttataaaacctttggcccaatctttttcctacaactacacttctctttatctaccttttatttttactttttgcttacttgagcacatgctatacatgmccctttttatgcctctcaggaggtttacagtggtggaatttcatcactcagatagctttccactccacgccctttggatcccaaaatggactgcccatttatctctttctgtgtgaaggaagtcagggttaggagagtcatctgtatatgcctcctcgtttatctctgattctttagcaaaaccaccctgaaacccaggcagatgtcaagtcagcttgtccttgagggtctctgctaaaggagagccccagtggccactgcagcctccataaatcgctgtggtcaagcatgcatcttgccatcagaccaaccaccacctgatatgtgaaattcacatttgttaattatttgctagaaatctaagaagctgttatttattgtcatgtagttgaaagcctctttcc

SEQ ID NO: 208200 - DNA, 581 bp, Homo sapiens
atccaggctggagtacagtggtacaatcatagctcactgcagccttcagctcttgagcttaaactatcctcccacctcagctttccaagtacctgggactctaggagcaagtcaccatgcctggtggatgttcttttctattgaaagtctagagtaattcatggccaatacttaattttagcagctttgttccttttgaatgagccctcaagccaaaaacatatccatcttttaacagtttcatttatttcctttraaatcacttcaactggattcaatgcaatgcatttgaacagatgtttacacagtgtgttgggcattgttatgggcacatgactgagaagagaatggtcaagtttcctgccctggacagaactaaaattttaccaggaagagagatgctgagcacctaactaataaatacacagggtaatttcatttttataagagtttccaaagcaattaccatcaccaccaaagaatcagggtagattactgggtctcgacaagtgtgtgtgtgtgtgcgcacacgtgcgtgcgcatgcatgtgtgtgtcttggggaagagataaggcctgaata

SEQ ID NO: 208201 - DNA, 411 bp, Homo sapiens
ccttggagaaatggctgattccaggccttgggggaaaaatatatgagatgaacctggagcattttgtagcaccagaatgtaaggaaatgtgtgtgtgtgtgtgtgtgtgtgtgtgtgtgtgtgtgtgaagagacacaggagccaaccaaaagagctctcaatggccaaacttggaataattggagcaagaaaataataaagtagtaatgtattatcacccaaaataaatatccaygagtccatagtgatataagtaaatacttgaataaataaatggggggaaaaaagacaactctctcttatgaagaactggaaatagttaatacagatactacaacctgaaggaggagaagtgtaagttcctggtccttaggtatgggcctacatagtgattttcttccaaagagtgta

SEQ ID NO: 208202 - DNA, 411 bp, Homo sapiens
ccttggagaaatggctgattccaggccttgggggaaaaatatatgagatgaacctggagcattttgtagcaccagaatgtaaggaaatgtgtgtgtgtgtgtgtgtgtgtgtgtgtgtgtgtgtgtgaagagacacaggagccaaccaaaagagctctcaatggccaaacttggaataattggagcaagaaaataataaagtagtaatgtattatcacccaaaataaatatccatgagtccatagtgatataagtaaatacttgaataaataaatggggggaaaaaagacaactctctcttatgaagaactggaaatagttaatacagatactacarcctgaaggaggagaagtgtaagttcctggtccttaggtatgggcctacatagtgattttcttccaaagagtgta

SEQ ID NO: 208203 - DNA, 537 bp, Homo sapiens
atgattatcaggcagagaggcctagaatgcattacagttatgcaaaacctgggtttttcataggtgtttttaatgttggtgtgaacagtggagccaaatagcatcttgtagcccctacgtgggcacgattctttcctgggcgacaccrtctgcatgccccatggtgacattcctgtgcgcttgctacagttggctagtaatcctggctttgaagaaggttttccagtgccaatcaccatgttcaagacaatgtgtgggccagtattctgggtcatgcgtcttccccaggagctttggttaaagtgagtttgaggaaaatatgggtgctctcagatgctcacagaccacgtggatgtgaaatttagacttttatttggatgataataaagacagactttaaatgttttcagagtaactggacagctctatctgtctcaataactgcaggcagttcaaattcagcaggaaactactcaggttcctcctagccctgccccattctttataacatggaaaccctgattccccccgccgaac

SEQ ID NO: 208204 - DNA, 486 bp, Homo sapiens
tctacacaactacagtcttcatcataatcccaaaggcagccataaccatgggtaattgggataatatttagaaaatatttgcatgccaaaactgacatttttagaggccatggagaaacaggtttccaatgtcaagttttgttgaaagaggacacacattattctagattctgaaagttcccttcatcttcaaagagctaggccttgccagtgtgactgtggagyttgctataagcctgaataaagagaagacagaggacatcaagttaggaaaccccacccaacaggaaggagacactcttctggccaagaggcaagttggggagggagggatgcagagagaagagaagatgagagaagttaaggctgagctagtatctgagaatacctcacatgtgccccacagcctgcctcttcctctgctacactgtggccagaaaggggtctcagtgttctacgtgcccccagagggtgtagctgcgagcc

SEQ ID NO: 208205 - DNA, 545 bp, Homo sapiens
  misc_feature (1)...(545): n = A,T,C or G
aaatatccccttggaaataaattaagtggcctctaaagtgaggtattcatatatgtaattttacaatcctctagtgatagaattaattaaatacaccaccaaattgattaattcctactgtgttaaaagagaagcactaacaatgccagttaccatgtaacatggatttaagctacaagtcatagaaatgtgatgagaagcctcagcgctgtaaaacagagggtggaggaaagcttttcctctctcaaatgagctttgcanggtatacttcttgaaggataggaagttgaagtgttcaggacttttatgtctattctactttggcttagtttacatgattcgtagtttrttagcctagaaatggccaagaaaacttaaggttcaataattagttataaatatgaaatatccccgatttttaagataaaaacaacttataaatgtatttgtctgtaaaaattgtgtatatttttacagaacatctatttctttttttatttttttatatttatttattatgctttaaattctagggtacacatgca

SEQ ID NO: 208206 - DNA, 577 bp, Homo sapiens
ggtttgcaataattaggtcagagtggagttttaaggtcacggaggggtctgatgacttacaaataatgggctctgattgggcaactactcatctgagttccttccatttgacctaattaagcttgtgaaatttacactaagccatgagctcatctttaaaaagttttattaaaagattttcagctgttccaaatgggacttattastggaatgtgttttaaaggatcatatcagatgaatgaaaggtatttgatccttcgtttccttaataataaaatgatggtttggaaaaataggctacagtctaaccacagtgctattattaggctttcttgttaaacataggtctaagcctaagtatgtcaatacaacaaatacttactgtttcatttctagtaatgaaaaaaaaaaaaaaaacaagtctttctggcataaggatgattttcatctggttattttgaaacatttttgtaaaataaatttccatctataaagaacatttttatttgtaaggaggggtatgtctctgtgcactggaagagagggaggactaaatcactgggaagtcttatgataa

SEQ ID NO: 208207 - DNA, 577 bp, Homo sapiens
ggtttgcaataattaggtcagagtggagttttaaggtcacggaggggtctgatgacttacaaataatgggctctgattgggcaactactcatctgagttccttccatttgacctaattaagcttgtgaaatttacactaagccatgagctcatctttaaaaagttttattaaaagattttcagctgttccaaatgggacttattactggaatgtgttttaaaggatcatatcagatgaatgaaaggtatttgatccttcgtttccttaataataaaatgatggtttggaaaaataggctacagtctaaccacagtgctattattaggctttcttgttaaacataggtctaagcctaagtatgtcaatacaacaaatacttactgtttcatttctagtaatgaaaaaaaaaaaaaaaacaagtctttctggcataaggatgattttcatctggttattttgaaacatttttgtaaaataaatttmcatctataaagaacatttttatttgtaaggaggggtatgtctctgtgcactggaagagagggaggactaaatcactgggaagtcttatgataa

SEQ ID NO: 208208 - DNA, 592 bp, Homo sapiens
ggtgaacatttagcctttaactggaaagcagcataatcttaaaataaatgttattttgtttttaaataatacacacatttccttcaacaaaatggaatcttataggtagctcatacatctcttgaataggggcctctggtgcctacagatataaataaatcacactgagagaatggtgaaccatgaaatgactctgttaacatgtcatctgtctagartatattttcaactctccaacagaagtgtctcaattatgaagggaggtggcctaccaaagttgatactttgatatttgatgcttttaacctcctccatcagctgcctttgcctaagtgtggaatctggcccagtgcatagagtacaacgtggcctaatggctgagagtcattgtaactggtgattttaacatgcaatgaactctgaagctcctcaaactgtgctatcttgtgaaggcatgtatcagtgctacttgtctggtcttattaaggaattctgaaaattgctaattgttataataagaattttaaccacaaacaagccaaatttactgaattcttcctttatgcccagcactgactgatactatagtggg

SEQ ID NO: 208209 - DNA, 592 bp, Homo sapiens
ggtgaacatttagcctttaactggaaagcagcataatcttaaaataaatgttattttgtttttaaataatacacacatttccttcaacaaaatggaatcttataggtagctcatacatctcttgaataggggcctctggtgcctacagatataaataaatcacactgagagaatggtgaaccatgaaatgactctgttaacatgtcatctgtctagaatatattttcaactctccaacagaagtgtctcaattatgaagggaggtggcctaccaaagttgatactttgatatttgatgcttttaacctcctccatcagctgcctttgcctaagtgtggaatctggcccagtgcmtagagtacaacgtggcctaatggctgagagtcattgtaactggtgattttaacatgcaatgaactctgaagctcctcaaactgtgctatcttgtgaaggcatgtatcagtgctacttgtctggtcttattaaggaattctgaaaattgctaattgttataataagaattttaaccacaaacaagccaaatttactgaattcttcctttatgcccagcactgactgatactatagtggg

SEQ ID NO: 208210 - DNA, 603 bp, Homo sapiens
attaggtatgaccatgtgactaagtattggccratggaatgtgggcataaggaatggaagccactcttgtgcagtcctccatattctttctacctgtgtctgccaacccaatgctgagcatccagcagaggactaaggggccctacaagatgatgggtctgcttgttaaatatggcagagctctgtcaggctgggttccccaaagactgtgaggtgcagaacccaattcccaccctacccccagctgctgtttgagttttctgtgaacaaaaaataaactttcatctgttgagccactgagaacaggaagatgtctagctagctttcctggctctaatacagaaatatatctctagaaaaatgtctgagaaaatgtgtatcaagatgttaatcagatagtggggtttgtttccttcatttggcttatttatgtattctaattacctgtaaacttttttaaggttttcaaaacaataaaatctatataccagtttcccttctggaaaactgcaagtttggtcattttcagctgatattccctaagaggggcagaggatgccaagtgttgtcattcctccattatccactgtttcactctattgc

SEQ ID NO: 208211 - DNA, 603 bp, Homo sapiens
attaggtatgaccatgtgactaagtattggccaatggaatgtgggcataaggaatggaagccactcttgtgcagtcctccatattctttctacctgtgtctgccaacccaatgctgagcatccagcagaggactaaggggccctacaagatgatgggtctgcttgttaaatatggcagagctctgtcaggctgggttccccaaagactgtgaggtgcagaacycaattcccaccctacccccagctgctgtttgagttttctgtgaacaaaaaataaactttcatctgttgagccactgagaacaggaagatgtctagctagctttcctggctctaatacagaaatatatctctagaaaaatgtctgagaaaatgtgtatcaagatgttaatcagatagtggggtttgtttccttcatttggcttatttatgtattctaattacctgtaaacttttttaaggttttcaaaacaataaaatctatataccagtttcccttctggaaaactgcaagtttggtcattttcagctgatattccctaagaggggcagaggatgccaagtgttgtcattcctccattatccactgtttcactctattgc

SEQ ID NO: 208212 - DNA, 603 bp, Homo sapiens
attaggtatgaccatgtgactaagtattggccaatggaatgtgggcataaggaatggaagccactcttgtgcagtcctccatattctttctacctgtgtctgccaacccaatgctgagcatccagcagaggactaaggggccctacaagatgatgggtctgcttgttaaatatggcagagctctgtcaggctgggttccccaaagactgtgaggtgcagaacccaattcccaccctamccccagctgctgtttgagttttctgtgaacaaaaaataaactttcatctgttgagccactgagaacaggaagatgtctagctagctttcctggctctaatacagaaatatatctctagaaaaatgtctgagaaaatgtgtatcaagatgttaatcagatagtggggtttgtttccttcatttggcttatttatgtattctaattacctgtaaacttttttaaggttttcaaaacaataaaatctatataccagtttcccttctggaaaactgcaagtttggtcattttcagctgatattccctaagaggggcagaggatgccaagtgttgtcattcctccattatccactgtttcactctattgc

SEQ ID NO: 208213 - DNA, 603 bp, Homo sapiens
attaggtatgaccatgtgactaagtattggccaatggaatgtgggcataaggaatggaagccactcttgtgcagtcctccatattctttctacctgtgtctgccaacccaatgctgagcatccagcagaggactaaggggccctacaagatgatgggtctgcttgttaaatatggcagagctctgtcaggctgggttccccaaagactgtgaggtgcagaacccaattcccaccctacccccagctgctgtttgagttttctgtgaacaaaaaataaactttcatctgttgagccactgagaacaggaagatgtctagctagctttcctggctctaatacagaaatatatcyctagaaaaatgtctgagaaaatgtgtatcaagatgttaatcagatagtggggtttgtttccttcatttggcttatttatgtattctaattacctgtaaacttttttaaggttttcaaaacaataaaatctatataccagtttcccttctggaaaactgcaagtttggtcattttcagctgatattccctaagaggggcagaggatgccaagtgttgtcattcctccattatccactgtttcactctattgc

SEQ ID NO: 208214 - DNA, 573 bp, Homo sapiens
ctaccgggtgcatcttcagtaggaactctcagaggacataggggctatgtttatcttaggagtttttatacactattcctaatgctaggaggactgggccatacacctatgttactgacagtataactacctcttgggttccctcttttttcaggaaacatrgttattagcatttttgcataatatctaagcatattaactttgatagttacatatagagatgaatatacaaggaatcaagggaagattgctgatgtaaagacatgaacacagtcttcttaaagcatatgcactgattttttatttttcacagaaaaataatagattatacaaaaagccctgaacctataaaagtcaaatgatgtatttcttcccatggcaaggcagaggtggtatttatagtcctgcaagcagctgaatggagataatttaggttccgttggcttttctggctgaaagctccagttccaatagatagggaatcccctgaatcaattataaaatggagtaactgggagatttaccgaatatcttttcaggactagaaggtaagggatatgaaagtgttttgaa

SEQ ID NO: 208215 - DNA, 550 bp, Homo sapiens
agttcattctatttcccttataaaagagctctttagaattctaatagcacacatctatttttggcaacagcgtcaagtttttgaagctattaaatataattccaaatattgtagatactaaaaagagttcattctagtgcataaattttttctttttactgatacagaatatttgtgcatatattgatgttcatgtgatgttttatgcrtagaatgtctagtgatcaagtcaaggtatttaggatatctgccctcatgtgccttataattttatgtgttgagaacattcgagtcctcatttctagctattttgaaatgtacaataaattgtcactaaatttagtaaccctactccactaccaaacatcagaacttatcccttttacctaactgtatgtttctacccattaaccaacctctcttccttatccccctaacccccgccacatatacccacattcttcccagcctctgataactattcttctactctctaccttcatgaattcaatttttttagttcccatcattggaatgagtacatgcgata

SEQ ID NO: 208216 - DNA, 522 bp, Homo sapiens
gtcgcttcttatgccggtaatcacactactttgattgctgttgctttgtagtaggtgttgaaataagaaagtgtgagtrctcttttcttatttttcaatattgcttttcgcacggggtaactttttatttgctcctgactatgtcttatttctttgcacaacctcttctaccactcacagaaccaagtgtcctaagatgcacgtttcttcaaggtttcatcttttctcacagtcacaaatgtgtctagactacagttcaggtttgttgtgatttcatgatatgactactttaagactggtctgggacagggtaaattgatagaagggagctgaaatgtgacatgagcatccttctctgactcatccagacagcgtttacttaatggtccatttacttatctatgagcactgagtgtgagaatggctcccctaatatttagtacagctcctggcttttagtaggggatgactgtgcctatttagtgtattgctgaacaaagaaatccctgactaaatgtgagt

SEQ ID NO: 208217 - DNA, 522 bp, Homo sapiens
gtcgcttcttatgccggtaatcacactactttgattgctgttgctttgtagtaggtgttgaaataagaaagtgtgagtgctcttttcttatttttcaatattgcttttcrcacggggtaactttttatttgctcctgactatgtcttatttctttgcacaacctcttctaccactcacagaaccaagtgtcctaagatgcacgtttcttcaaggtttcatcttttctcacagtcacaaatgtgtctagactacagttcaggtttgttgtgatttcatgatatgactactttaagactggtctgggacagggtaaattgatagaagggagctgaaatgtgacatgagcatccttctctgactcatccagacagcgtttacttaatggtccatttacttatctatgagcactgagtgtgagaatggctcccctaatatttagtacagctcctggcttttagtaggggatgactgtgcctatttagtgtattgctgaacaaagaaatccctgactaaatgtgagt

SEQ ID NO: 208218 - DNA, 522 bp, Homo sapiens
gtcgcttcttatgccggtaatcacactactttgattgctgttgctttgtagtaggtgttgaaataagaaagtgtgagtgctcttttcttatttttcaatattgcttttcgcacggggtaactttttatttgctcctgactatgtcttatttctttgcacamcctcttctaccactcacagaaccaagtgtcctaagatgcacgtttcttcaaggtttcatcttttctcacagtcacaaatgtgtctagactacagttcaggtttgttgtgatttcatgatatgactactttaagactggtctgggacagggtaaattgatagaagggagctgaaatgtgacatgagcatccttctctgactcatccagacagcgtttacttaatggtccatttacttatctatgagcactgagtgtgagaatggctcccctaatatttagtacagctcctggcttttagtaggggatgactgtgcctatttagtgtattgctgaacaaagaaatccctgactaaatgtgagt

SEQ ID NO: 208219 - DNA, 544 bp, Homo sapiens
tgtggttctgtgatcaagttctagtcaatgatatataaatagaagtattatatggtatttccagaaagtctccttaaaagaggggagacatgccattcttctccttcccccttctttctttttagagcatgggtatgatggctagagcttgagcagccattgtggacatcagatgaacttgaaagtgaaaactatgagctgaatacgacaaagcaaacagayagaaaactggattcattatgacattgcaaagctgccagaccagctctagtctgcttccccctaatcttccttactaagagagagaaataaacttccatcttcttcaagccactggtacatgcagctgagtctaatcctcagtcagataacctttccgagtattttcctaccatatgattagaacataatatggtaagtgatatactagaagcacaagcaccatatgtgggtagaataattaagatgctgcttactcaatctagggagtctcaaaagactttatagaagataaacttgagctggcttctgaaaattagattgg

SEQ ID NO: 208220 - DNA, 605 bp, Homo sapiens
ggttgcctgataatttgtgaaattattttgccaacctcacctgtttttttgttgttgttgttttgttttttgtttttaatagacatggtttgactaggctggagtgtagtgatgtgatcrtagctcagtgcagcctcaaactcctgggtttaagtgatcctctcacatcagtgttttgagtaactgggactaaaaacgcacatcaccatgcctggctaaattttgtttactttttgtagagatggggtatcactatgtttcccagcaggctggtctcaaactcctgacctcaagagatccttccacagtcctgtggttacaggcatgagccaccactcctagccctcttcttccttttttttttttaaagacaaattaccaaagtcataaactgagacactggcatatacaaagctaagaactctaatatatatttgaatgacagagctggataaaacaattctagaacaatatctagtggctgtgaggatattatctcatctaattttttaactcacttttcagctgaggaaactttgcagcaagattaaagaacctgaacaaagtcacaaggttagttagtggttttgcctggtttcaaagtc

SEQ ID NO: 208221 - DNA, 549 bp, Homo sapiens
gcctttttcctcacagttatgccctcctggagtttccagagtaacctacaaaatacatagaaaaagccatctcattgtaactggtaactttatgttattatcaggatgtcaagggcctccaggggagagaggagtataaagttttaagctttggacccaggtttatagagatyacagaagtctcttcgtccccaggaggaaccctctcctctattaggaggggagacttctgatgttaaaacttatgacagccaaggcaagtagtgcctccagactcctactgccccaggctttttacagtcaagaccttcatcaggcttctgaatatccaaattgcctaccttttacataccagaggggaacagggaggattaccaggatgtcttaacagagttatctgtatgaacagaaagaatagagcatttatttgcagatttatagagcaatgaaataattctgctttataactaccaaatcccaggccatgggaaggatgtggataagatttcagaatggtttcaaaatcactttatgatttaaatggttcct

SEQ ID NO: 208222 - DNA, 549 bp, Homo sapiens
gcctttttcctcacagttatgccctcctggagtttccagagtaacctacaaaatacatagaaaaagccatctcattgtaactggtaactttatgttattatcaggatgtcaagggcctccaggggagagaggagtataaagttttaagctttggacccaggtttatagagatcacagaagtctcttcgtccccaggaggaaccctctcctctattaggaggggagacttctgatgttaaaacttatgacagccaaggcaagtagtgcctccagactcctactgccccaggctttttacagtcaagaccttcatcaggcttctgaatatccaaattgcctaccttttacataccagaggggaacagggaggattaycaggatgtcttaacagagttatctgtatgaacagaaagaatagagcatttatttgcagatttatagagcaatgaaataattctgctttataactaccaaatcccaggccatgggaaggatgtggataagatttcagaatggtttcaaaatcactttatgatttaaatggttcct

SEQ ID NO: 208223 - DNA, 549 bp, Homo sapiens
gcctttttcctcacagttatgccctcctggagtttccagagtaacctacaaaatacatagaaaaagccatctcattgtaactggtaactttatgttattatcaggatgtcaagggcctccaggggagagaggagtataaagttttaagctttggacccaggtttatagagatcacagaagtctcttcgtccccaggaggaaccctctcctctattaggaggggagacttctgatgttaaaacttatgacagccaaggcaagtagtgcctccagactcctactgccccaggctttttacagtcaagaccttcatcaggcttctgaatatccaaattgcctaccttttacataccagaggggaacagggaggattaccaggatgtcttaacagagttatctgtatgaacagaaagaatagagcatttatttgcagatttatagagcaaygaaataattctgctttataactaccaaatcccaggccatgggaaggatgtggataagatttcagaatggtttcaaaatcactttatgatttaaatggttcct

SEQ ID NO: 208224 - DNA, 421 bp, Homo sapiens
gctattatgaacacctttatgcatacaaactagaaaacctagaggagacggatacatttctggaaataaacaaccctcctaaattaagcyaggacagaccaataaaaagcagtgagattgaaatagtaattaaaaagttaccaaccaaaaaatgtccaggaccagatggattcacaaatgaattctatcagacattcaaagaagaattggtggaaatcatattgacactattcttaaagataaagagggaatcctccctaaatcattctatgaagccagtgtaaccctaataccaaaaccaggaagggacataacaaaaaaagaaaactacagaccaatatccctgatgaacatagaagcaaaaatcctcaacaaaatgctagctaacagaatccaacagtatattaaaaagataatccac

SEQ ID NO: 208225 - DNA, 546 bp, Homo sapiens
caggattattcctttctctttactttggatcatgattgtcctcaccataaggtaaatcagtataagagaatttcttaggaaccccagggcatccacagagtcacaaccatgttgctaagatggcaaaatatttaggtggaaaatgtaaacttcattttttaaaaaggcaagcaagaaattccctaaattcaaattaaaaaaaaaaaaactccattaaataaatttcagtgtcaaagrtcacaaactgggagccccataagctaaatttagagcgcagatgttaccaagttagttttgatgaaaagaatgttttagaaaagttgaatttgaatcccattaggaggggcatatacatcccttctcccctctgactcactgttccctggctcttatactgacccacatcagtcttttttgttatttgactagcccctgaaggtgtgtttgtaagcctgtgtttctcaggtttcttagttgcacacaataagcagataaaaagcttttgttacaggatactaggtggctcacagaaaccctgagagggcc

SEQ ID NO: 208226 - DNA, 583 bp, Homo sapiens
cgaaaaaaatttaagaatctatgacataaaattcaataacaattacactaatccagcgcactcctgagagtgctgcctctgagaacacactcctgcatgtattttacatttatatttatcacccactacaaatcaggaccaagctaagcatgcaggaagaccacamtccgtcaccctcatgaacctcagagtctagtcatggataaagtcaattaggacaagatagctcaacaagggcaatgagtaccataggggcatagcagtcatactgaaatacatctttttttctgaccattcagttagtaagaataattgctctatctctaagggccatagaaagcaaatacaaaatgtttttgagagaagaagaattagatttgcatgtctttagaatggtatagcactcttaactcagcttcatcctcccatccaatcctcactggtgtggggcagggagctcactcagctccagaggactgatgtccacattttatcttctcctccactgaatattccacaggatgtgctgatccccagtaataggttttccaaggaagcatgaaaataataaagtctgatacat

SEQ ID NO: 208227 - DNA, 576 bp, Homo sapiens
caaacccaacatcatttgaccaggaaaatacactgtgcccactcttgtgcactgcaagatcttacaataggacatgaatgattgaaaacaatgtctaatcaatgacaagtaatatgcttcttgtcttgttgcatctgttatttcatcttttattcatttagaagtgtggtcaaatatcatcctttaagtcttctatagttcctacaaatttaggctyattgactgctttctttaggggcttactccaaaattatagaattagaatcttcctggatgggcttcaggaatttacgtgtttaacaatcttggtagatgatttcaatgaactgttagatttcagtagtggtctgtttagctcaggaactcagcttctattcaacagtgagttaattatcacctagttgttaattggttgaaaaattatgtatgtgtctaactagttcaagctacattagacttttcacaatcttttggacccatcttgcaattttcagccttgtccatattaccctttatatccagaatgcctttgactcaagtgttcctatgtaaattctactgtaccccaaataagtg

SEQ ID NO: 208228 - DNA, 576 bp, Homo sapiens
caaacccaacatcatttgaccaggaaaatacactgtgcccactcttgtgcactgcaagatcttacaataggacatgaatgattgaaaacaatgtctaatcaatgacaagtaatatgcttcttgtcttgttgcatctgttatttcatcttttattcatttagaagtgtggtcaaatatcatcctttaagtcttctatagttcctacaaatttaggcttattgactgctttctttaggggcttacyccaaaattatagaattagaatcttcctggatgggcttcaggaatttacgtgtttaacaatcttggtagatgatttcaatgaactgttagatttcagtagtggtctgtttagctcaggaactcagcttctattcaacagtgagttaattatcacctagttgttaattggttgaaaaattatgtatgtgtctaactagttcaagctacattagacttttcacaatcttttggacccatcttgcaattttcagccttgtccatattaccctttatatccagaatgcctttgactcaagtgttcctatgtaaattctactgtaccccaaataagtg

SEQ ID NO: 208229 - DNA, 586 bp, Homo sapiens
gtgtttcattaggcatgctgtgtcttctcacagataatagcaggatatactagtaatttctgtccttcttggagtagtgactgactcaattcgagaaagacaaaaggacaacggaatgctttgatgcttagactacatcgagatgcaacaataggcagagaaaagaatttctgttaagtaactggttgatatttttgagagtgtctcataaagaactattgattttgaaaatattggcttggaagatgctaaacatttatttatttatttatttgagacagagtcttgctcttttcacctaggctggagtgcaatggtgcgatctcrgctcactgcaacctccgcctcccaggttcaaacgactctcctgcctcagcctccccagtaggtgggattacaggcgcctgccaccatgcctggctaatttttttgtatttttggtagagatggggtttcaccatgttggccaggctggtctcgaactccttaccttaggcaatgcgcccacctcggcctcccaaattgctgggattacaggcgtgagccaccgcgcccagcctaaacatttatttattaaagaagggtt

SEQ ID NO: 208230 - DNA, 586 bp, Homo sapiens
gtgtttcattaggcatgctgtgtcttctcacagataatagcaggatatactagtaatttctgtccttcttggagtagtgactgactcaattcgagaaagacaaaaggacaacggaatgctttgatgcttagactacatcgagatgcaacaataggcagagaaaagaatttctgttaagtaactggttgatatttttgagagtgtctcataaagaactattgattttgaaaatattggcttggaagatgctaaacatttatttatttatttatttgagacagagtcttgctcttttcacctaggctggagtgcaatggtgcgatctcggctcactgcaacctccgcctcccaggttcaaacgactctcytgcctcagcctccccagtaggtgggattacaggcgcctgccaccatgcctggctaatttttttgtatttttggtagagatggggtttcaccatgttggccaggctggtctcgaactccttaccttaggcaatgcgcccacctcggcctcccaaattgctgggattacaggcgtgagccaccgcgcccagcctaaacatttatttattaaagaagggtt

SEQ ID NO: 208231 - DNA, 586 bp, Homo sapiens
gtgtttcattaggcatgctgtgtcttctcacagataatagcaggatatactagtaatttctgtccttcttggagtagtgactgactcaattcgagaaagacaaaaggacaacggaatgctttgatgcttagactacatcgagatgcaacaataggcagagaaaagaatttctgttaagtaactggttgatatttttgagagtgtctcataaagaactattgattttgaaaatattggcttggaagatgctaaacatttatttatttatttatttgagacagagtcttgctcttttcacctaggctggagtgcaatggtgcgatctcggctcactgcaacctccgcctcccaggttcaaacgactctcctgcctcagcctccccagtaggtgggattacaggcgcctgccaccatgcctggctaatttttttgtatttttggtagagatggggtttcacmatgttggccaggctggtctcgaactccttaccttaggcaatgcgcccacctcggcctcccaaattgctgggattacaggcgtgagccaccgcgcccagcctaaacatttatttattaaagaagggtt

SEQ ID NO: 208232 - DNA, 551 bp, Homo sapiens
ctggggcctgtgggattctcctccttactgacctgggggaggaataggtggggctgcctggaaatgggagcaaaccgcgcccggggctggaagcaccygccgaatgcacagggccagtgcccaccacagtctcagtggaggtgacggactgaaagaatgacagaggactggaagtcttcgcctctgctgaagatttccgggtgggctgctgtcaggatggtgaccctgcatggcctagagcacctctggcatgacagtgttgggagatccaccgacctgctgcctggggaaaccggggaaaattagaaaagcaaacaaacatttcaagtcctggaaatggccctgagggcaaacaaaacaagaacaaaaatacaacttttaaaccaacagaagaaaacttgatgtgcccaacagaaagcaaaggagaggaatgaaaataagcgagaagcacgtataaatcaactgcatttctctacacgaacatgaacatgtggaaacccaggttaaaagcacaacagcacccctgtcactttaaggaaaaagtacttcga

SEQ ID NO: 208233 - DNA, 561 bp, Homo sapiens
aaaatagtaaataaactccggtatactcactgatatttaccaagtgttaacgttttgccacgtcattgactctgtcatcttgtatatgcatagagctatttttgcagactcagagtaacttgccgacaacttgccccttgagccccaaatacttcagcatatttcttccaagaacatagactttagttttgtcccagaattgatgatactaactttgacaacttggctatgatgatacagagttgtgggggattttgtttgttttttaagagatgggttcttactgtgtcgcccaggctgaagtgcagtggtgtgatcctagctccctgcagccttgaactcccaggctcaagcaatcttcctgcctcagtctcctcccaagtggctgggactataggcatgcactctcatgcttggctttttttcttccccttccggttttaagatttactatcttaaacagttttaccrctcagtggcattgagtatgttcacaatgtatcgccatcaccaccattcatcttcagaaatcttctcatcttgcaaaattttaactctacc

SEQ ID NO: 208234 - DNA, 574 bp, Homo sapiens
agaaccactggtttggcccgaaagccacaggatgcatggagggtgagaacaaagcagtcagattctaacctctgggtgggcagagtggagaagggcagcaacacacccagggtgaggccagagacgaggatgggaaagcagagacttctgtgagaaaccagaaggtgcatcaataagcaaaactctaaggccgtggtccttacctcttgggcagacgcagcgaagctaatacattcaggccaccaacccggtccagtcgagaacctggagagagaggagaatgcagtcaacatcccggagaattccccatcctcatgcaggatgatgcactcctccagtggagrcaccctcctcctcgtcacatcatcaggagctgcagttggctaactgtggagtcaggtgcctggaactcaggtccagtcagccacttgttgccttcagtagtcacttctggcctctgagcctctgtgtccccaactcataaatgggcatactagtgcctgccactgtggaacatctgtttttcccatcagactggaagcttcttaaagtgcagggactgtaactgtgtctt

SEQ ID NO: 208235 - DNA, 574 bp, Homo sapiens
agaaccactggtttggcccgaaagccacaggatgcatggagggtgagaacaaagcagtcagattctaacctctgggtgggcagagtggagaagggcagcaacacacccagggtgaggccagagacgaggatgggaaagcagagacttctgtgagaaaccagaaggtgcatcaataagcaaaactctaaggccgtggtccttacctcttgggcagacgcagcgaagctaatacattcaggccaccaacccggtccagtcgagaacctggagagagaggagaatgcagtcaacatcccggagaattccccatcctcatgcaggatgatgcactcctccagtggagamaccctcctcctcgtcacatcatcaggagctgcagttggctaactgtggagtcaggtgcctggaactcaggtccagtcagccacttgttgccttcagtagtcacttctggcctctgagcctctgtgtccccaactcataaatgggcatactagtgcctgccactgtggaacatctgtttttcccatcagactggaagcttcttaaagtgcagggactgtaactgtgtctt

SEQ ID NO: 208236 - DNA, 395 bp, Homo sapiens
ggcctagggtttgggaacccctgccttatataatagcaactcaatagttccccaatgtataaatcaaaggataaatcaagagtttttctcataattgaaagacataaagtatacatacaaaaatgaatctttaatttatttattcacatatttatttactctctttctctttataccaaatgttgcactttataaaaatatgcaaaaatgagtagcacctggtgcgtgacctggaggaagtcatgctcctatggggtagcagacatttaaagaccttacttcagtgtatytagaacatcattgattgtaaaatgtaccattatattatatgctgctaagaaatatggagtactgcaaatgcaactctgacatattattcttatgatatagaattc

SEQ ID NO: 208237 - DNA, 560 bp, Homo sapiens
tgtatttctgtggtatctgtagtattatctcctgttttgtttctaattgagcttatttggatcttctgtcttcttttcttggttaattttcttaatgatctatcaattttatttatcttttgaaggaaccagcgttttgtttcatttatattttgaattgtctattttctttcaatttcatttagttctgttctgatctttgttatttctttttttccactgtgtttgggttttcattgttcctgtttttccagtttcctaaggtgtgacctcaggatacaaaattaatgtacacaaatcagtcactctgctatataccaagagcgaccaagctaagaatcaaattgatatctcaaccccttttwtaatagctgccataaaaaaaccacataggaatatacctaaccaaggacatgaaagacctctacaagaaaaactaaaactactgaaagaccgctacaagaaaagacctctacaaggaatactaaaactgctgaaatcatagatgacaaaaaataaatagaaagtgatatagtttggctgtgtccccacccaaactt

SEQ ID NO: 208238 - DNA, 525 bp, Homo sapiens
gaccctactgtgaggattctaagacagcctaggagggcctgagaatgaagtctgagattcctcctctgaccagcaaggacaagaggtggactgggtcactgaaaaatgtgcctcttgtctatgatttaaacttgtggagcagatggggatttaggaaaacaacattctgggcaaattcaaggtcagaatcagggaaatgagtaaaaaaattacctctaaaaataagaccaagtgaagaggagtagcctttgtataaagataaaagttgtttaaatcaaattgtgcagagaaaatttctagtttaatatatgaaaaagaaaagtatacacagtggttargaaaataggcagaaaaataactgtgagttcagaatccagcccttcaacttttgtgagttcaaaatccagctcttcaacttttctgcatactgaacacttacccatggaactctgttattatagatatatacgtatatctataataatatatattatatatatatttccccatttttaaatagttctg

SEQ ID NO: 208239 - DNA, 575 bp, Homo sapiens
aaaatccctaaaaaaatttagaaaagggaagtgactcctgaggtatggacaatgtccaccggcagaaaattgtggccaaaatcactatgatttggagtcaagaaataagaattctaacaccagctcygtcactacaggtagcacatccatgctgaattgatcaacctctctagaggtgtctaccctcctcccccagaaatgactgctaaaaaggtaatgaatacacctgtaatcctagcactttgggggaccaaggcaggggatcttttgatcctaggaattcaagaccagcctgggcaacatggcaaaaccccatctctacaaaaaatacctgggcgtggtggcacactcctatagtcctagctacttgggaggctgatgtaggaggatcacctgagcctatgaggttgagactgcagtgaaccatcagtgaaccatgattgcctcactgtactccagcctcagtgacatagtaagaccttctctcaaaaaaaataaaataaaataaagaaaaataaaagaaagaaaggtaaggaacttaaatacaacatggaaagagcagagcattgataact

SEQ ID NO: 208240 - DNA, 575 bp, Homo sapiens
aaaatccctaaaaaaatttagaaaagggaagtgactcctgaggtatggacaatgtccaccggcagaaaattgtggccaaaatcactatgatttggagtcaagaaataagaattctaacaccagctccgtcactacaggtagcacatccatgctgaattgatcaacctctctagaggtgtctaccctcctcccccagaaatgactgctaaaaaggtaatgaatacacctgtaatcctagcactttgggggaccaaggcaggggatcttttgatcctaggaattcaagaccagcctgggcaacatggcaaaaccccatctctacaaaaaatacctgggcgtggtggcacactcctatagtcctagctacttgggaggctgatgtaggaggatcacctgagcctakgaggttgagactgcagtgaaccatcagtgaaccatgattgcctcactgtactccagcctcagtgacatagtaagaccttctctcaaaaaaaataaaataaaataaagaaaaataaaagaaagaaaggtaaggaacttaaatacaacatggaaagagcagagcattgataact

SEQ ID NO: 208241 - DNA, 575 bp, Homo sapiens
aaaatccctaaaaaaatttagaaaagggaagtgactcctgaggtatggacaatgtccaccggcagaaaattgtggccaaaatcactatgatttggagtcaagaaataagaattctaacaccagctccgtcactacaggtagcacatccatgctgaattgatcaacctctctagaggtgtctaccctcctcccccagaaatgactgctaaaaaggtaatgaatacacctgtaatcctagcactttgggggaccaaggcaggggatcttttgatcctaggaattcaagaccagcctgggcaacatggcaaaaccccatctctacaaaaaatacctgggcgtggtggcacactcctatagtcctagctacttgggaggctgatgtaggaggatcacctgagcctatgaggttgagactgcagtgaaccatcagtgaaccatgattgccycactgtactccagcctcagtgacatagtaagaccttctctcaaaaaaaataaaataaaataaagaaaaataaaagaaagaaaggtaaggaacttaaatacaacatggaaagagcagagcattgataact

SEQ ID NO: 208242 - DNA, 546 bp, Homo sapiens
aaacttctgcattttttagtctcaattttgtttatttttgctctgatcttattactttcctctaaaaattttggattttcatggtttttgcttgttccttgaggtgcatcatgaggttgtttatttgaagtctttctaatttttttgatatagacacttatttctattaacttccattttagtacacttttgttgttttccaagactttttatgttgtatttccattttaatttgttttaagaagtttgaaaatttccctcttaatttattcattgacccattagttgttcargaacatgtttaatttccttgtgttactaaagtttctgaggttgctctcattattgatttctagttttattccactgtggtcaggaaagatacttgatattatatttattttgaattgtttgagacttgttttgcatcctaagatatggtctattctggagaatgttccatatgttgattaaaataatgtgtattctgcaacagttgggtgaaatgttctgtaaatgtcagttaggcttattaagcctagtgtg

SEQ ID NO: 208243 - DNA, 567 bp, Homo sapiens
catgatatttttaaaatgcaaatacaccctacaagaaagttaggtctctcagcggtttccaccttaatctgaattatttttaatctattattctctggcacctgacagaaatctgcctactcagagactgacagctgaggttggaaagacacatacgtgactcaaataaggtaagcgaatttcgataaagttaacttctactttcccaaggcttcatgaaattacaggtgtgttccccaaggaattttcacaaaggtcagttcgcaaacccagagcctggtgtgctgggccatgcagatcagaaaacactactatggcacttgctaagtttattataattatgtactgataataatttctcccattatgtcctctccttttccatatacagagktctcaccagtatcatctcatgcgcaatttcccactggatctctggacattgccttagctctttttcccgccttagagaggagttattctagaaacttctcgacaagaaatattcataaactctcgagctcacttcaccttgacatatgccctgactggactaggctacacact

SEQ ID NO: 208244 - DNA, 437 bp, Homo sapiens
agtattcctacctcatgctgttatagtgaggactagaaatatgttaggtaaagtatctgtgacagagcctggtacatacgtgatcaataagtaaaaactcttactgtcattattatcactattcatttcataaacagtctgtatatctgtaccagataaatcaaagaacagtaggatactgtctcyttattccttatataagctaagattctgaatcatttatgtgcgtattacaattcttaagaataagaaaaagccttggactgggaggtaggagacctggattctagtcctgaccctaattagctatatgactttgaatatgtcaactgacccccgagactgtttcatcatctgaaacagtatttacaagattaagctacacgatatctcaaattttttctaaatcacttgttctttgaaatgtgaatgcaaaa

SEQ ID NO: 208245 - DNA, 437 bp, Homo sapiens
agtattcctacctcatgctgttatagtgaggactagaaatatgttaggtaaagtatctgtgacagagcctggtacatacgtgatcaataagtaaaaactcttactgtcattattatcactattcatttcataaacagtctgtatatctgtaccagataaatcaaagaacagtaggatactgtctccttattccttatataagctaagattctgaatcatttatgtgygtattacaattcttaagaataagaaaaagccttggactgggaggtaggagacctggattctagtcctgaccctaattagctatatgactttgaatatgtcaactgacccccgagactgtttcatcatctgaaacagtatttacaagattaagctacacgatatctcaaattttttctaaatcacttgttctttgaaatgtgaatgcaaaa

SEQ ID NO: 208246 - DNA, 546 bp, Homo sapiens
gagaatggctggaaaggtgggtaggaaccttccccaaggagagtttgaaattagatttagcaattcatgcaatgttaaaattggaggagcccaagaaacaacctagtgtcttcaccctcaaactgatctttgtgtcaccctggaatttgatgcaaagatagtgggtattacttgataaaatgcgcttgggaaattctatgttaaagctaaataaggttctttcctgagaacttttgaaaaggtaattctgttgtaccttgtcacgaaaaaattacattgcatttcacttatttcatcacaggactttacacacacacacacacacacacacacacacgtatatgtataaactaaacgccagtaagatattatccagagaaacagggctagtgcctcccaaatagctctcttttcttttggtyggttctggagagaagtctgaggtcaaagtgtcatcagggttggttctttctgaaggctctgatggagaatatgttccaggcccctctccttggcttagagatgactgttttctccttgtgtctc

SEQ ID NO: 208247 - DNA, 656 bp, Homo sapiens
gtgtgacagtcaataaactttgcttttataaatggcacaacagataggcagaaatttctatcatgtttttttaataactttgtgtagactagctatcaaattattgattaaatcctcaatttagaatgtragagaaattatatcaccctctacaattaactctttttctatcttaaaattggatattttaatgaaaataaaaagaaagggagcacatttaaatttataaaaattacaaatggttaaatagatgaggcaagaatgtacataggtatataatttttctgttgctttacctgggaaaaatataaaagtatatcactattgaaatcctcggagggaaaaaaccttaaaatccgagtagacagaataattttgacattttttaagaaaaaaaaattgatttttcagagacttcaaggcatcctctgtatcaattgcaatcaacagggactgaaaaaaaaatctggggtaataaaagcagttagagaatgccctttgggcactccttcccctggagagcataattgcctttgacagagataactaatattccacatatttcccctaatcaggatgcctaaaatcattttagtcttgagaagagaaaacctgttgcattgatttcatttttaaatgtgtgtatttcttttagg

SEQ ID NO: 208248 - DNA, 656 bp, Homo sapiens
gtgtgacagtcaataaactttgcttttataaatggcacaacagataggcagaaatttctatcatgtttttttaataactttgtgtagactagctatcaaattattgattaaatcctcaatttagaatgtgagagaaattatatcaccctctacaattaactctttttctatcttaaaattggatattttaatgaaaataaaaagaaagggagcacatttaaatttataaaaattacaaatggttaaatagatgaggcaagaatgtacataggtatataatttttctgttgctttacctgggaaaaatataaaagtatatcactattgaaatcctcggagggaaaaaaccttaaaatccgagtagacagaataattttgacattttttaagaaaaaaaaattgatttttcagagacttcaaggcatcctctgtatcaattgcaatcaacagggamtgaaaaaaaaatctggggtaataaaagcagttagagaatgccctttgggcactccttcccctggagagcataattgcctttgacagagataactaatattccacatatttcccctaatcaggatgcctaaaatcattttagtcttgagaagagaaaacctgttgcattgatttcatttttaaatgtgtgtatttcttttagg

SEQ ID NO: 208249 - DNA, 608 bp, Homo sapiens
acccatttctacttaagatttcaacacctcctactttaggttcttatcaccttgtttctgagaaattaaaatggcatttctgtgttcagtaattcagatatctgatacctgtgtccacaagtttttcataattttgggttactttcttcataaaaacaaatgaaattaatgccattctctatgtgacatgtagaatctagtttggaggaccatagaagaggttttcttagggaaatctctgagaattatctggggcttacatttttcccaatgacctctgcttccagtaagaacattgccacatatggccattcttcatttctgcactgcgtgaatctaaacaggaaaaaggtatcttttccattctcttaactcctttccaacttyactctagatttgaaggcagtgtgtaagacgtttccattttacctcaacgtacacatgaattatacttctgacatgaattatactctaccaactaaaaagtaaaattatactctaccatttataaagtaaaagcaagaacatttttaaataatccaacatgttatcattaactatagttaccatgctggaaaacagatctatttaactaattactcctgcct

SEQ ID NO: 208250 - DNA, 557 bp, Homo sapiens
ccttgactaaaatatctatttacttttactctaatattctaataattatcacacctagaattaattatctcctcttgttgaatacttttgcaacaagttcacactcatagtgaaatgcactctgtctcaagtatagtgtgatgattttactttaatagaaaactgagggccacagcttaggaacaaaattgtagactagctccacccctgacctcagttacaatcctcattagaccccaatactaaatagtttgatattgaagcagtgtcatgttcaaaaatgcagttccacagacaaaagtaactacaatagaattttattctttactcttgtcttttgaaagaccttgaaagtaatccaaatatatcttgcataacagcaattgttagaataagrttgttcctctgttacatcttcccttatggtgtcctcagaggacatgctaacccaaaatctggcaccttggcagttgagaaaacagcagaagcagatgtcccttctcccctgatgcaggccatcaaaaaaatcatctgacctttctctgaagtagatcata

SEQ ID NO: 208251 - DNA, 606 bp, Homo sapiens
cctttgtatgcttttctcttatcaatatgtcttttattataggtgcctcagccaaagtgcagcgatgggtaagaaaaaaggttcccctccatgcccaccgagccatactcagaggtaccctatacttttctcctcctacaccttacatacccttcatctttatttcttccctaggctacacttcattttttttcttattttctctcctctttttctcaacactttattatataatagatttaatctgtatgaaatagacctttttagaaggatttgtagtagaaagagaacaaggttgaaaagaaaaaggtcatctttgatggggtagaatattggtctcattattctattcrtaatggtatcacaagtgttgaaaatattagcaattatcattgaggcgaaatgaagaagaaacttcacatattccacaactcagaaaatgttaaggttctttatgtatttgaccttatttaattctttcaacagccctgcagggcagcactatcataattcacatttttatgacaataaaacaaaggcagaagaaatatccaaagtcacacagctagtaactggtggagccaggatttgatctcagtaagactg

SEQ ID NO: 208252 - DNA, 551 bp, Homo sapiens
tgcgtcttaatattcaatcagactttaagtaaagagtgacraaagtccacatatggatgacagctgtttcttcagtaaatattttcccatttattgaatggaggcttatggcagtttaggatatgttccatcagacatttcagcctgaactgcctgaggactattaaaacaataacaaggatagaatttcagttttcaaatctttgctacaatttacatcttaaaaaataacagctccttcaaataaggtggtacactatgtggttaatttgaaagtatccttgcccagtagtgactgctgaaagaactgagttttcctcctggccctctaataataccaccatatttgtaaaataaaagcataattcctgtattgattttctaatcatatgaacaaagatgatgggaatttaaacattttatgactatatttttataaattatgaaatatggtaaaaagattaatgagtctattagctaaagaatgtcagaaggtctctatttaaccaataaagtagcttgcaaaattgggaagttaaaaaaaaaagaag

SEQ ID NO: 208253 - DNA, 555 bp, Homo sapiens
caagtaatgaattaccagaattggtgaacatagaactgaaacattttaaagtcaaaaaataacagatgctggcaaggttgcagagaaaagggaacacttacacattgtcgatgggatcgtaaattagttcaaccattgtagaaagcagtatggcaattcctcaaagagctaaaagcagaactaccatttaacccagcaatcccattactgtgtatatacccagaggaatataaatcattctatgataaagacacaagcacttgaatgtttaacacagcactataagcaccattcacaatagcaaagacatggaatcaacctaaatgctcatygtgactgattggataaagaaaacatggtgcatatatataccatggaatactatgcagcaataaaaaggaatgagattatgttgtttgcaggaatatgaatggagctggaggttattagcaaactaagacagaaacagaaatcaaaatacttcatgttctcatgtattagtaggagctgaatgatgagaactcatgaacacaaagaagggaacaatagacactg

SEQ ID NO: 208254 - DNA, 583 bp, Homo sapiens
ctattccattttcctcgatttatgtatctcttgaatggtttaagtgggaaattaacatttaggttttataccacatttctttgcaggaacgtttgaaaatgcctactgaataagatgatataattgcatttatttttacttttatatgtcaccataatctttaccaagaagcatgtactcactttatccctggaaggaattaagcaaactgagttgaacaaacaaaggctctgtcaggttggtacagtaattaaaatggtattatggaagttcaatgagcaggcacatcctaaatcagagaaggctctgtgccacattacagagcctttccttattcctttaatgaaagactgtccccatctatgctccgatcctgtttcttaaacagataaaatgaattcaaatatctaggacacttctgaatgctagcagtcacaaagctctacatagaacctgtgyatgtctttcttggaaaaagacaaggaaagggctcctgtcatttggtggcaggtcaatatcaggtatctgtgcggggtcttggatattcttatgctttttgtttgggggaggaggcacaggtgac

SEQ ID NO: 208255 - DNA, 571 bp, Homo sapiens
aggcctgccgggggtgggtgtgggggagagcaacaggaaaaatagctaatggattctgggcttaatacctaggtgatgaaatcatctttcagacattacttagccctcaagacaaaataatatctgatatagtcatggcttatgctctctcttcattcaagtatctgctcaaatgtcagtttttcagaaaggactccattgaccagtagatattaagaagaccacttatccccctatatgtacacacacatacatacacgcatacacacgcggtgactcatccccatcaakgtataccattgccctaattttatttttcttgtagttttcatcactgagaagttaactagtgacttatcagtgcactgtctccccacattagaatataagccccatatgagcaaaggtcctatatgtgtaattcactgccgttatttccaaaacccagaactgtgtatagcccatagtaagtgttccgtgaatatttagaaatacatacttgtatttttgcaatagcctttgctcaaaaaattcctgcctaaaatccatgttctcacctcttcagtcagtt

SEQ ID NO: 208256 - DNA, 571 bp, Homo sapiens
aggcctgccgggggtgggtgtgggggagagcaacaggaaaaatagctaatggattctgggcttaatacctaggtgatgaaatcatctttcagacattacttagccctcaagacaaaataatatctgatatagtcatggcttatgctctctcttcattcaagtatctgctcaaatgtcagtttttcagaaaggactccattgaccagtagatattaagaagaccacttatccccctatatgtacacacacatacatacacgcatacacacgcggtgactcatccccatcaatgtataccattgccctaattttatttttcttgtagttttcatcactgagaagttaactagtgacttatcagtgcactgtctccccacattagaatataagccccatatgagcaaaggtcctatatgtgtaattcactgccgttatttccaaaacccagaactgtgtatagcccatagtaagtgttccgtgaatatttagaaatacatacttgtatttttgcaatakcctttgctcaaaaaattcctgcctaaaatccatgttctcacctcttcagtcagtt

SEQ ID NO: 208257 - DNA, 331 bp, Homo sapiens
atatacattacataatagctcaatgcctatcttaggtataatcttagattgaaaatcacctagttttaaaaacattggtttacatatggtaatacacttgatctctgaccaagacaaaatatcaatattattaaagtaatgtttcttgtaaaagttccaacacaaagctctaataaatttagatgtttgttatatatctggctagaatcacctcccattattttctaactttatatgatgattaaaattaaattaagtgctacattcartatgagttcaaaaaagaattgataacttgtataattcgagagggaaaaaattgagatgattg

SEQ ID NO: 208258 - DNA, 539 bp, Homo sapiens
actctgtgggagataaacctgatgacaaaagtagagatctgagggggcaagacccagaagcacagctgattgtgggtatgttgagatacagrtgagaaagctttgtagagtctttgaaacacctctcagattctactattacagtctacacctaaggcagagccattatgttggatttatgtttatttcacaggtcatcattgctttactgcctgttttactcttattttagatctgtaagcccttagatacttgattagaaggcagcaatatgaaaaataaaatgagttatttaaaaattcttaattttctttgagtacctttatggtttctttttttcctggtttctctgaccttctggtataaggtgtgaggtagggattcaacttcacctgttttcacatgactactcagtttgtgttgtgggactatttgtcctatttgtagccacccagtgtcatttgaatcatatttctatacttgtggatgttctaaaattgtattctgtctcatcaaagtaaggcagatacaaagtcaat

SEQ ID NO: 208259 - DNA, 602 bp, Homo sapiens
gaagcccaggtgtggaaattgtatgaaatcacttccacttcatttattggccaaagcaagccagctcaggttcaaggagtggggaaattgactttatctcttgcttgcagttgttgcaacatcacatcgcagagggcacaaatactgggaagagcagagtagagtagagagagtcatttttgcaatcaatctaccacagtcagtgagaaactgaaagtgggttctgtgggagtagagagtgaggaaatgagtcatgagatggggtaaaaagaagccacatcatgaaggtgttaagaggcactaaacagtaaaagttaatttaattgcttctcggccttttgactgagaccaagtgtagtaaacgttaattcacatagggcaggaagcatayggtaaacattaaacactcactctccccgctcccccttattttccatctcatagaatgatgtcacttggacatcattgtcaagttcatttgttttaggtgtgtaccttaggcagggattgttctttccagtgctcaggatgcttgtcagcaaatattcaataaaagcttcttaccgaataaataacagagtacctgaaattattaagttaat

SEQ ID NO: 208260 - DNA, 399 bp, Homo sapiens
ttttttctgtaaacctaaaactgctctaaaatgcagtacaatttactaatttgttttaaaaaacagttaatagaaactatctaaaccaaagcatagagaggaaaaaagaaaaccatggaggcttctggcagtatagctaaaaaatcctagattccagctaaattagaataagtatgaagagtggccacaaataccctaggtatgctagtgagaaattatctgtatttctcctctgttctctgtagaaatttaaattttccccatgctgttttatcatctacctcatatcatactgaatccctacctagaaaaatgtaaaacamataattagctcaggagccaaactcctgcataattaatctgttaccaccctatacattttaatgcaaggctgaattc

SEQ ID NO: 208261 - DNA, 578 bp, Homo sapiens
ggcaccagccaggtagagaacccatctgcataataaaagattagggtaagggaggccagattttctcgctctatgcaaatggcacacctggtctgaccaatcttttgtgccttatataaatcagacaccgcctcctcaagctcatctataaccccgcccccattttgctgcagaccagaaaacccgcttgggacccctctctctgcaggagaaagctcttctctttcttttgcctattaaacctccgctctcaacctcactccttgtgtgtctgtgtccttgatttcctcggcgtgagacaacaaacctcaggtatcactccaaacaatgaggccgcttcggtatgatacttcatcccataacaaaacayatttgctcatctccaaggaagtcaacccccaatcccatctacttacaattccaggtcaaagcacaggatatcagagagtgaaagtcctctccagagccacatgtggtcctcatggtcccgtgacatagaaactgcacgacaagtcacctgttcccaccaccccttcccgtcaccttgcacatcccaatacagctgtggacaggttacc

SEQ ID NO: 208262 - DNA, 335 bp, Homo sapiens
tatggcatttctccatattgctgagactagtctcaaactcctgttcaagtgatccacccacctcggcctcccaaagtgctgggattataggcgtgagccactgcacctggcctagaaatatcttayataaaagctaagagctcttttctattgattgataatcaatttatttctcatctttattggtcactttttctcctgattatttaatatatgacttatatgaaaactgttttccgggtttttttctgggattttgcagtatctaagaataagtagataactattattttattgtaggggcgcagatctctctgctttggtacgagaagctt

SEQ ID NO: 208263 - DNA, 549 bp, Homo sapiens
gaggagagggcaaagattgctaagttagatgtaatggtgtatgcaaaggcacaaagtctggaatgaacaaaccattagcaagcaaactacttccgaagacagatgagatgtgtgggccaagctgagaggaataaaatttcccatgttttgagtygagaaatcagataaataactttaaaaagagaatgaatggccgggagcagtggctcacgcctgtaatcccagcactttgggaggctgaggtgggcagatcacttgaggtcaggagtttgagaccagcctggccaacgtggtgaacccccaaataaaaattagctgggtgtggtggcaggcgcctgtaattccagctacttgggaacctaaagcaggagaatcgcttaaacccggaaggtggaggttacagtggtccgagacggcaccaatgcactccagcctggatgacagaacgagactccgtgtcagaaaaaaaaaaaaaaagagaatgagtatccttctgcagaagttggacttaataaacaaaaaagaagaaaagaaaaggaaaagaccacc

SEQ ID NO: 208264 - DNA, 409 bp, Homo sapiens
agtacaggctgtggctggtggcttatgcctgtaatctcagcactttgagaggccaagggaggcaggagttcaagagcaacatagctagaaacagtctctacaaaaattaaaaagtacaccatcacatttctaacacacagtagaagtaccacgcttatgtctaaaatggtacagtaacaaattatatacgatgaatatcatttaggcctttagactgtgggtgagaaataattttttaatctactgtttagcaaacaaagctcctgctagaataytgaacctcataaatgctcatttttttctcatttttcatctgtctttttgttgtacttgagatttccttaactttcccttctaccccttttattttttaaaaaaatttcctccatatttaaaaaacctaagtgca

SEQ ID NO: 208265 - DNA, 408 bp, Homo sapiens
caggctggagtgcagtggcagaatcttggctcattgcaacctctgcttcctgggatcaagtgatcctgatgcctcagcctcctgcgtacgtggtattacaggcacatgccatcatgcctggctaattttttgtattttttgtagagatagggttctgccatgttacccaggctggtcttgaacaactggcctcaagtggtccrcctgcctcggcctcccaaagtgctgggattacagacgtgagccacagtgcccggccaagctaatgtttctaagtccacctgtctttttcctctatcccatgccaccaggaactattaatagcaaggcctgtgacattttggctgctaaagcacagaatctccaaacccgtgccatgcaagatgccaaattaaagtggatacaaat

SEQ ID NO: 208266 - DNA, 393 bp, Homo sapiens
attttcagtcttttcatccacaaaaccgagatggatgaaaaatgcctacgaatccgccgttcttacgtcccaggcttgtcgtgaggatcaatgggacaagcggcgtgaaccgaccagggcccatcaagtccgagaagccccggggggcatatggagggacgccggcccccttaacgggcccaaggccgggactgcggccgcccccgccagtactgcccgccggcgcccgacaccctgagcagggctcgctggtaggcccaaggatgcccaggaccacaccctgcctagcactcaggcagccccarggccggcacccgctcacctcggcccgctccggaggagagggagtggtgagaggaaagggcgcccacctgagggcacaggaatcttcta

SEQ ID NO: 208267 - DNA, 415 bp, Homo sapiens
tggaatactaagccaagtgataacatttagttacttttcttaactatgagaaattaaagtaattttatgtttggatctttggattctttgtccacttcacctattttgatgactaagtttcatttcattcaacataagacatgtgaatcatattcatactttttaccttagtacaatctgtgacattctgacaaagacagggaaaaaaattcctgcgtttccaatcactttttgggaagagagtgctttktctcaacagcattagtatagtactttgtacttttaaagagagtacaaatacattatgctatctgatcctcttaaaaaccctctgagataggctggacacattaaagacaaagacataggctcaaagagattttctaacaaagctggttagttagtggcaaaatta

SEQ ID NO: 208268 - DNA, 556 bp, Homo sapiens
ttgaacattctgtgatttgtacttcctcatttaaaaaaatttatatcatatttcaccatttttaattgtcaatatataattttctataaataatatgataagtaatgaaagggytgatttataggggtggttctttgttttataagtaaatgagaaaaatgaatgatttaaaaaaattaagttcaaggatggtaaatgcagaagttaaagtacctgcttatagaaactggtgatactttgaagttttattgtggaatgagaaacggatatgacaaaacctattttaatgaagaataagagatttgataattagccaatttaataatactggaactaagaggagtcccttgacactggaaagatctgtttaaaacaaataaaggatgcgcccccttaaacttctgacagaagatcaaaccagtaaaaatgttactggtgcctaagatgccatggcaatgtactaagaatcatagagaatgccagacatggaagacagtttcttaccataaagaaacttaaatatagaaggtttagaagatcatgtgaaaaattgaac

SEQ ID NO: 208269 - DNA, 399 bp, Homo sapiens
catatccagctttcattttctctctccttccttgccccatttaccttactcaccatattttactcccaccccaaatattatctttactatgttstgctccttcatccaccgtcagtcctaggacccacctcaccaccgtgtatatatgaatggcaagtccttcttcctatctccaagtctttgctcgtgcttccccttctgaaggctcttctccatttagcccagttcaattttccttcaaaggcaaatttactgtgcagttcacccaacaaaacatggaaggcaaaacttaaaatgtattcattctttcattcctttattcaacacactccttttaacactaggcaatgagctagattctgagaaaatatgaagtgaaaaaatatatacctggtatcc

SEQ ID NO: 208270 - DNA, 551 bp, Homo sapiens
tgtccaatattgtctaaatataatagaccatgatatggtttggatgtatgatccctccaaatgacatgttgaaatgagatgcccaatgttggaggtggggcctagtgggagatgttttgttcatggggatggattcctcattaatggcttgataccatctgcatggtagtgagtgagttctcactctgtgagttcatgtgagatctggttgtttagaagagtgtggtacctcctccctttccctsttgcacctgcactaatcgtgtcatacatctgctctgcttttgccttttgccatgatggtaaacttcctgaggcctataccagaaacatgccagcatcatattttctgttcagcctgcagaactgtgaaccaaaataaacctatttatttataaactatccagcctcaagtatttatttatagcaacacattggactaacacagaccgccatgttgactagtggacaagcaaattggaacttgttttatatgcttaatagattattgtgggtccatttctctttgttttgtgtatagggaaagaaaa

SEQ ID NO: 208271 - DNA, 566 bp, Homo sapiens
caacttcttacacagggaacacatcaaggtcactgatctgatttggctgtgtccccacccatacatcttgaattgtagctccaataattcccacatattgtgggagggacccagtgggaaataattgaatgatgggggcggtttccctcatactgttctcatggtagtgaataagtctcacaagatctgatggttttataaggggtttcccctttctcttggctctcattctttcttgtctgctgccatgtaagatgtaagatgtgcctttctccttccaccatgattgtgaggcctccccagccatgtggaagtgagtccattaaacctctttttctttaaaaattacccagtcttgtgtgtgtctttatcagcagtgtgaagatggactaatatagtcagcacaatgcaaatatctgaaaacaaacaaacaaamaaacaaacaaacaaacacctcttccaacccaaatggagcggaggtcgggtagtattttggaagatggaaaagaaaaaggtaaagaatcattttttcttctttccttctgtgagagatgatatggtggtga

SEQ ID NO: 208272 - DNA, 566 bp, Homo sapiens
caacttcttacacagggaacacatcaaggtcactgatctgatttggctgtgtccccacccatacatcttgaattgtagctccaataattcccacatattgtgggagggacccagtgggaaataattgaatgatgggggcggtttccctcatactgttctcatggtagtgaataagtctcacaagatctgatggttttataaggggtttcccctttctcttggctctcattctttcttgtctgctgccatgtaagatgtaagatgtgcctttctccttccaccatgattgtgaggcctccccagccatgtggaagtgagtccattaaacctctttttctttaaaaattacccagtcttgtgtgtgtctttatcagcagtgtgaagatggactaatatagtcagcacaatgcaaatatctgaaaacaaacaaacaaacaaacaaacaaacaaacacctcttccaacccaaatggagyggaggtcgggtagtattttggaagatggaaaagaaaaaggtaaagaatcattttttcttctttccttctgtgagagatgatatggtggtga

SEQ ID NO: 208273 - DNA, 471 bp, Homo sapiens
cacatgcggcacttttcatgtatcctgctgggctcttgaagcctcttgacagtgttaatactgattctattaaaagaacagcatttgggaccacaaaaggaaaatctcctcctgtgaaaagaaaaagtattttgtattttgatgaggggtgacaaaataaactgttacaacagaaatggcttttatagtgataaagtcagaaaagctacaaaggctccaaatgtcakacacactaataatcaacctttaagtgggacagtgtgagggaaaaaaaaggcaattaaaattttgccaccagaatctaggccatgattaattgatggatgtccatatttaccttttctcttcaaataacgtatcaatattgcattattttattaggtaccttataaatgtacctgataacttgtaaaaccacaatacgttctttctgtggataacttttgaccctgatcacttcagctttaaaga

SEQ ID NO: 208274 - DNA, 590 bp, Homo sapiens
acatataatcatggtggaaggggaagcaaacacatctttcttcacatggtgacagcaagaagtgcagagtgaagggagggacaacccctgataaaaccatcaaccttaactatgtctcatgttttctcttatagaaatttgtctttatccagaataaactttgagtcttttgctaagatacaagtggaattatcacacyctacctatatagagtggaaacaaagatgagaatttaacttttttttttgaacaaacattctacaaattctccttattttaaccactctttgtatcttcattttcaaaggaaactggtgctattaatttctgagtcttcaggaaattctctgtacattatgttgcttcttagcatgacatagcaatagccaggggccagcatggcctcactcgaaggcgggaaaagagagaaagagctgagatcagagaggcagtcaggagcagacaaggcagggtgtaggccagtgtttgacttggacttctaatgtgcccgtggtggagagacattgagtggtgatgcagaaaagaaatgtgatctggtcctgtaaagaatgattcaacctgcccagtag

SEQ ID NO: 208275 - DNA, 590 bp, Homo sapiens
acatataatcatggtggaaggggaagcaaacacatctttcttcacatggtgacagcaagaagtgcagagtgaagggagggacaacccctgataaaaccatcaaccttaactatgtctcatgttttctcttatagaaatttgtctttatccagaataaactttgagtcttttgctaagatacaagtggaattatcacaccctacctatatagagtggaaacaaagatgagaatttaayttttttttttgaacaaacattctacaaattctccttattttaaccactctttgtatcttcattttcaaaggaaactggtgctattaatttctgagtcttcaggaaattctctgtacattatgttgcttcttagcatgacatagcaatagccaggggccagcatggcctcactcgaaggcgggaaaagagagaaagagctgagatcagagaggcagtcaggagcagacaaggcagggtgtaggccagtgtttgacttggacttctaatgtgcccgtggtggagagacattgagtggtgatgcagaaaagaaatgtgatctggtcctgtaaagaatgattcaacctgcccagtag

SEQ ID NO: 208276 - DNA, 590 bp, Homo sapiens
acatataatcatggtggaaggggaagcaaacacatctttcttcacatggtgacagcaagaagtgcagagtgaagggagggacaacccctgataaaaccatcaaccttaactatgtctcatgttttctcttatagaaatttgtctttatccagaataaactttgagtcttttgctaagatacaagtggaattatcacaccctacctatatagagtggaaacaaagatgagaatttaacttttttttttgaacaaacattctacaaattctccttattttaaccactctttgtatcttcattttcaaaggaaactggtgytattaatttctgagtcttcaggaaattctctgtacattatgttgcttcttagcatgacatagcaatagccaggggccagcatggcctcactcgaaggcgggaaaagagagaaagagctgagatcagagaggcagtcaggagcagacaaggcagggtgtaggccagtgtttgacttggacttctaatgtgcccgtggtggagagacattgagtggtgatgcagaaaagaaatgtgatctggtcctgtaaagaatgattcaacctgcccagtag

SEQ ID NO: 208277 - DNA, 459 bp, Homo sapiens
gttaactaaatggagtaatgatttgacactttggctgtatatcctgagacctggcttagtttggttgattgtcaaaaatcactagaagagtaatagagaactggaaatagagtagacgtcaaatctttccatattttcatgtcttcaaaattggtcaacagttgagagaaaagaaaatgaaatgaggaggtaaaaagcaggaaagggaaaaatgttccatccagtaccagtaatcatttgaagtgttctttttgataaatatatttgttttaatgtatcttcctagccagaaacactccaatcagaagacttttgtgatgctcaaagtatagtaaaattatactattaaaagcttgttttycttttggaagtatgattcaccttattatatcttatggctattaggaagaaagaaagtctgtccaaacacaagagcaaaacatagtttcagtcattttt

SEQ ID NO: 208278 - DNA, 459 bp, Homo sapiens
gttaactaaatggagtaatgatttgacactttggctgtatatcctgagacctggcttagtttggttgattgtcaaaaatcactagaagagtaatagagaactggaaatagagtagacgtcaaatctttccatattttcatgtcttcaaaattggtcaacagttgagagaaaagaaaatgaaatgaggaggtaaaaagcaggaaagggaaaaatgttccatccagtaccagtaatcatttgaagtgttctttttgataaatatatttgttttaatgtatcttcctagccagaaacactccaatcagaagacttttgtgatgctcaaagtatagtaaaattatactattaaaagcttgtttttsttttggaagtatgattcaccttattatatcttatggctattaggaagaaagaaagtctgtccaaacacaagagcaaaacatagtttcagtcattttt

SEQ ID NO: 208279 - DNA, 575 bp, Homo sapiens
tacacctttttttcctccctttcttttctttctttgcctttctcctctcagccagtgataggtattcatgttgagccacagggagaagcgtattggtttgggaccacaggcatgcacataaaatgaatggcattttgcaaatgaagtgaactcattaaacagtcatcttcaagacattcattttctatggtaatctaattttctgatgaaagggggtcatttaaattggactgatcagtcttctttcaactccttgtcagaatctatcctgtggacccaatttcctggttcagcagggagtgtttatgtatggcccaytccacacagtggcctggacaaaggacaatgatgacagacttgcaggtggttctaatcacttcaatgagaacagtccgtggcagctgggcagttctcaagcccacataagcttggctaagatctggccagtggattctagtttaattgatagcaacaattttgaggtctcatctaggtaccctataggcaaagggaagtttgtgccaactgctgaggtttaacatctgaactggcatttacacctgggataaaccata

SEQ ID NO: 208280 - DNA, 369 bp, Homo sapiens
tcaggaggaacagtaccgaggggatggctctaaaccattcrtcaaggaccaccctcatgatccagtcgcctcccaccaggccccacctccaacattggagattataatttgacatgatatttggtggggatacagattcaaaccatatcagtcacatatctctgtttctccaagattggtccttgctaccttgtttagttcatttggtgaggtcatgttttcctggatggtcttgatacttgcggatgtttgttggtgtctgggcattgaagagtcaggtatttactgtagtctttgcagtctagactttttttttacccactcttcttaggaaggctttccaggtatttgaacttgggtattgagatc

SEQ ID NO: 208281 - DNA, 572 bp, Homo sapiens
taatgtttcagtgagatgaataattcctgggatggaaataaagatagggtactgttgaagcatgtagatagtactctggtgataataagaagtgttagggaaggctttccaaagaagcaattgcctgaggaaaaagtggaacctagtcaggcagttgcagaggaagggacattctgggcagaggaaaacaaatatacaaggggcacaaaggcctgtgaaaaacatggactgcaagcaagtggtcttactgcatatggagtgatgataaggaatgaggcagacaagggccaaatcatgaagagcctcatgtgccttgctgaggcctgtcttaaatattaaaataacttcttttatacattcatcactttgagtatcaattataaaaagactttcctaaaatatttaagtttaaaaaaaatgcttaaagaagaaaactctgccttttatttcttgattcagttaaaaagaattgtcttatttctgctgagtaattgcattattaaaaagygtgtgggctgggcacagtggctcacgcctgtaatcttagcactttgggaggcaaaggcgtgtgg

SEQ ID NO: 208282 - DNA, 508 bp, Homo sapiens
tttggaggtaaatcatgggcaacaccatgcaagtcaccagttaggcataaatttgccgtgttacacaacacctgattcatagcacacggaagtgttttgtaaattgcgtatgtgatagaccttccaattggcgttttttagccctgttaccagcttamcacatcatgtgtcttttgataatgtggcactaagatgtgggcaagaagctcccttaccttgggccacatactttgtttctgaaggtaaataaaacacatgtaccacagacaaaatagcaaataaacctgaaaaagagggtgtgggcatgtctatcgttcaggatccagtactcatagctggcgtagctggacccataatctcaaacatccgtttttgtgacaaaaaccgttgaggcccccagatctacagatttttgcctgtgtcgtgttaacaaaaggcgaatgtgtctagacgctgtgaatgtttgagagttgtgctattatggactttggagatgggagttgtacaa

SEQ ID NO: 208283 - DNA, 508 bp, Homo sapiens
tttggaggtaaatcatgggcaacaccatgcaagtcaccagttaggcataaatttgccgtgttacacaacacctgattcatagcacacggaagtgttttgtaaattgcgtatgtgatagaccttccaattggcgttttttagccctgttaccagcttaacacatcatgtgtcttttgataatgtggcactaagatgtgggcaagaagctcccttaccttgggccacatactttgtttctgaaggtaaataaaacacatgtacyacagacaaaatagcaaataaacctgaaaaagagggtgtgggcatgtctatcgttcaggatccagtactcatagctggcgtagctggacccataatctcaaacatccgtttttgtgacaaaaaccgttgaggcccccagatctacagatttttgcctgtgtcgtgttaacaaaaggcgaatgtgtctagacgctgtgaatgtttgagagttgtgctattatggactttggagatgggagttgtacaa

SEQ ID NO: 208284 - DNA, 508 bp, Homo sapiens
tttggaggtaaatcatgggcaacaccatgcaagtcaccagttaggcataaatttgccgtgttacacaacacctgattcatagcacacggaagtgttttgtaaattgcgtatgtgatagaccttccaattggcgttttttagccctgttaccagcttaacacatcatgtgtcttttgataatgtggcactaagatgtgggcaagaagctcccttaccttgggccacatactttgtttctgaaggtaaataaaacacatgtaccacagacaaaatagcaaataaacctgaaaaagagggtgtgggcatgtctatcgttcaggatccagtactcatagctggcgtagctggrcccataatctcaaacatccgtttttgtgacaaaaaccgttgaggcccccagatctacagatttttgcctgtgtcgtgttaacaaaaggcgaatgtgtctagacgctgtgaatgtttgagagttgtgctattatggactttggagatgggagttgtacaa

SEQ ID NO: 208285 - DNA, 508 bp, Homo sapiens
tttggaggtaaatcatgggcaacaccatgcaagtcaccagttaggcataaatttgccgtgttacacaacacctgattcatagcacacggaagtgttttgtaaattgcgtatgtgatagaccttccaattggcgttttttagccctgttaccagcttaacacatcatgtgtcttttgataatgtggcactaagatgtgggcaagaagctcccttaccttgggccacatactttgtttctgaaggtaaataaaacacatgtaccacagacaaaatagcaaataaacctgaaaaagagggtgtgggcatgtctatcgttcaggatccagtactcatagctggcgtagctggacccataatctcaaacatccgtttttgtgacaaaaaccrttgaggcccccagatctacagatttttgcctgtgtcgtgttaacaaaaggcgaatgtgtctagacgctgtgaatgtttgagagttgtgctattatggactttggagatgggagttgtacaa

SEQ ID NO: 208286 - DNA, 361 bp, Homo sapiens
ccctatgaacgtgctgacatgcccctgcaaagccaattgttcatttaattgtgctttgttcctttcttttttttttctacctccagccacaaaggtttgaggtaatttataggaaatacaataatgaataatgaagagtacataaaaataaactacaatatcttatcaataaaccataggatatataggattgtgctttccaatgtggcagccacaaggcacatgtatctatttatatttaaattaattaaaattamatatagttaaaatgtagctcctcaggttcacaagccacattttaagtgcttagtcaccacatgtgtccagtggctacttattggacatttcagatacagaatat

SEQ ID NO: 208287 - DNA, 535 bp, Homo sapiens
tttgctactctttggggatgaggttaggcctgtcctctcctagagttctgctctgtttctataaggataaggaactccatgagagcaaagatgaactatattggtttaacctgtgtgaagttcactttaggatcaggagtggggtgtgtaacaaacttcagaatccaatttcacttttgaaacctattttccaggccagatagaaagaccacacaccataaccatccaggtggtaaagatgaattmaggggaaacaaaatacaacagaacattgtattttaaaagtttcaaacatttgtctcaagattcagctagcagagaacttggatctgaaacttgagtcttttcatacatttactcaactgatatttcctaggtgcctacccagtgccaggtgcttcactatgctgtggatataataggaataaatttaaaaccatcttgatcataggagcttagagtcttgcagaaatgatttggcatgtgcacagattactgtaagttatggcagagacttcagtgccatgaaaaagct

SEQ ID NO: 208288 - DNA, 562 bp, Homo sapiens
cccttctctctcctgccaccttgtgaagaaggtgcctgcttcctctttgccctctgccatgattgtaagtttcatgaggcttcctagacatgcttcctgttaagcctgtgaaactgtgagtcaattaaacctctttttataatttctctgtgtcaggtatttctttatagcagtatgacaacagactaataaaatgagagaaggatttggccttacsaagagctgaaacaaatttagagagctgagcaaaatataaaggtagaagaaacagcaggaagagccctgtgggcacacccagtacccagggaaaccacttctgactgtctcacaggggcctttggggaggctaccagtagaactggggaaagaatacaaggagaaggaaactttgagatgaactttgtaataattacaaccaagcgtaaacatttatgggcagaatctgggggcagtgacgggagcaaacaggaagtgcagataggagcacagaggccatggcaggtggggagaggtggggcctgaaaggccagcttgctttctcagtggggaggcttgtagcctg

SEQ ID NO: 208289 - DNA, 509 bp, Homo sapiens
cacagaatagtgactgcaatttctgcctccgctggtacaggcaactttcgaaaaatggttttttaggctgggagtggtggctcaygcctgtaatcccagcactttgggaggctgaggtgggagatcacttgaagccgggactttgagttcagcctgatacagcgagaccctgtctctacaaaaaataaaaatacaacaggcacgggggcccacttgagggtggagggtgggaagagggagaagatcaaaaactacctagcgggtattatgcttattacctggatgacaaaatcatctgtacaccaaaccctcgcaacatgcaatttacccatgtaacaaacctggacatgtactcctgaacctaaaagtttaaaaaacatatatgatagtgaaaaaatgaaaataaaattagctgggtgtgttggcatgtgcctgtggtcccagttacttcggaggctcaggtgggaggattgcttgagcctaggagttagaggctgcggcgagctgtg

SEQ ID NO: 208290 - DNA, 352 bp, Homo sapiens
tcaagtttttggaaagtgagattgggaataacacagagtttgagaaaagaatttctgtggctgatcgtaaacttttaaaatgtagaacggcatatcaggaccatgaaactagtagaattcagctgaagggtgaggtatgtcaactsaaaaaagactggcttgtatgttcacgacaaatcactataaaatataaaataagcataaagcttttcctgtgataaagaaactacttctagttttttttttttttcctttttctttttttttttttaatgtctctttgtttggggaacttttgggatactctgattaaacccctgattaagcaccacggggcgccattcacatcaca

SEQ ID NO: 208291 - DNA, 352 bp, Homo sapiens
tcaagtttttggaaagtgagattgggaataacacagagtttgagaaaagaatttctgtggctgatcgtaaacttttaaaatgtagaacggcatatcaggaccatgaaactagtagaattcagctgaagggtgaggtatgtcaactcaaaaaagactggcttgtatgttcacgacaaatcactataaaatataaaataagcataaagcttttcctgtgataaagaaactrcttctagttttttttttttttcctttttctttttttttttttaatgtctctttgtttggggaacttttgggatactctgattaaacccctgattaagcaccacggggcgccattcacatcaca

SEQ ID NO: 208292 - DNA, 439 bp, Homo sapiens
ctttggaattgagtcgtcaagttttttttaaagagccctaggcattttcactgaaagtttcttgaatatacagaataatttaagaactgaaacttttatcatattgtcttcctacccagaaatatctaaatgtctccatttgttcagatcttcttttatgtaattaattcttaatatacttgcacatgaccagattcagagcatttctataaccccagaattagaagaaacctccaagattgcccygactacaaaatgtacatcagcaacatgcagtgcttttacacttccactgattaggtactcactacctcctaaggaaatacattttcccacaatagataatgaaatagataatgacttggataatgaaataagtcacatagggaaaatatcagagaagttctgtaattgtcctatttcataatttccttatcta

SEQ ID NO: 208293 - DNA, 543 bp, Homo sapiens
gaagttcattaaatgttttaaggtactaagcgaatgatgggaaatactgtaatagaaagatcacttaatccaggattttcaaacttcgttcctaggaacatcagatgttaacagttggcccacgcccaaacaaaacaaactaaaaaaaataaacaggccaggtgcagcagttcacttctataatcccagcactttggaaggccaagtgggcggatcacttgaggtcaggagttcgagaccagcctagccaacatggcgaaaccgtgtctctactgaaaataacaaaaattggccagccaggatggcatgcacctgtaagcctagctactcaggaggctgaggcaagagaatcacctgaacccaggaggcggagatggcaatgagcygagatcatgccactgcactcaagcctgggtgacagaggagaccctgtctcaaaaaaataaattaattaataaacaataaacaataaaatgaattccattcattatataaatttggctgcaaaaaaataagccctccttgcaaagacagagagcaaca

SEQ ID NO: 208294 - DNA, 437 bp, Homo sapiens
ttggaattgagttgtcaagtgttttttaaagagccctaggcattttcactgaaactttcttgaatatacagaataatttaagaactgaaacttttatcatattgtcttcctacccagaaatatstaaatgtctccatttgttcagatcttcttttatgtaattaattcttaatatacttgcacatgaccagattcagagcatttctataaccccagaattagaagaaacctccaagattgccctgactacaaaatgtacatcagcaacatgcagtgcttttacacttccactgattaggtactcactacctcctaaggaaatacattttcccacaatagataatgaaatagataatgacttggataatgaaataagtctcatagggaaaatgtcagaggggtcctgtaattgtcctgtttcacaatttccttatcta

SEQ ID NO: 208295 - DNA, 504 bp, Homo sapiens
aattagctgatgtttacaaacatacaggcactcgtaggtgttaatatatactctgatgccttaaggagtgtggttgttaggaatgttggagaatatatacgcatttgaaaagttaggcaaaaacatatttacactttataaggtgatcttaaagaggttttgaaaactttgctacttgtggcacaatattgctggtagatttgggggttagttttttcaccccaaatcccctggtccctgatagttctcacacaatgagaaaagcatcctcttggttggccccccttaaaatagtcacaagtcttactttctgcctctcttctcttcccctatttcatattctcctttcctctcatcttgcccayttaaaattattcaatttatgcttattgtctacaagacaatatttttctcatctggtatctttcaactcgtcctgccttatgtcatgtcattctcccaggcaaatgttactccacaaaagtcactttatgaccagcagtg

SEQ ID NO: 208296 - DNA, 537 bp, Homo sapiens
tttcttaatacgtatctaccctctgcctaggtgatattcacgaaataaggcatagataatgcatttagtaacactgagctgaatcatgcaaaacataatttgtgtgcagtttcagggagcataaaataaaagttgttttaaatatcataaaaagcaaccataaaaataaagcattctaatcagagggaagamattcaaaagctcgcgtcaaaaaggaaaacaatttacttgtgtcggtacccttaataagtgccccaaagcattccagtgctgttacattctctaatgatattacagtatgtggcacatctcatctaatctgttagtaaaatcctaaagtcacttatgtcagtctctaatgcaagccaaatgagtctttccagtaataagaagcttcgcagaattagttttcgttttgcagaaaattgccattggggctggcacttttatctaaaaatttcactcgtgcataagcaaaaaactcatatattatttggttacattccatcagtatgagaaataacattgtgagaattc

SEQ ID NO: 208297 - DNA, 609 bp, Homo sapiens
aattttccttgtctcttttgcaactctttattagtctattatytctgattcctacaggaataagttgtaggtttttgatccttttaccaagaggaagaaaacttgctttgcttattctttctttattaaagattttgcatactttgactgagtttgtggtgaaataccattttcaacgttaaatctgtttaaggtactacagattccatcaatgcatttaagcctcacccagtatgataacatttactttttcaaaaagagaatcaagagttaaatgaagctgagctaaagaaatatcaacttttacttaattatgaaaattacattttcaacagtaaaatggaaatgtcagactcccaaatgtgatactttctaggagtttaagttaacactattatcagagctttgaatgagcaaaaccagaagaaatcttagaaattatctagttactatattcccataatacagactgaggaggcaaggtcagaaggggaaagctaattacggcaggccagagacagagacatgctgagatcttgttctcctggctgtgattgagatgaatggcaggggcctgtgtttataaatgtaagtagacctacattcatg

SEQ ID NO: 208298 - DNA, 538 bp, Homo sapiens
aattaaactgagaaatttgycccagaaaagggcacaggagcacagggtatataattctaattataatttcaggaagttcatggacttcaggtcaagaacccctgtctatggcaattctgtgtggagcatgagctaacttgttagtattcagaatcaatcaccatttattacaagattactatacgtcaggcactgagctaggcactcctacttttacttcagcataatcctgatatagaccagaagtgttcttccttctcttctgttttccccatgacaactattaacatttcaaaaacagagtgttcttccaatgagtgtattttgggaaaggctaatgtagccaaattcttattttaaaggtaagaaagctaaagcccagagagaagtaacacgcctaaactcaaatggtgagttgttacagatgggagctagggtccaggtctgtctcctaggcctgagctcttcaactacatacctctaccatgagaggactcgagcccaatgaatgacaaattaccatagttcaggttacacc

SEQ ID NO: 208299 - DNA, 538 bp, Homo sapiens
aattaaactgagaaatttgtcccagaaaagggcacaggagcacagggtatataattctaattataatttcaggaagttcatggacttcaggtcaagaacccctgtctatggcaattctgtgtggagcatgagctaacttgttagtattcagaatcaatcaccatttattacaagattactatacgtcaggcactgagctaggcactcctacttttacttcagcataatcctgatatagaccagaagtgttcttccttctcttctgttttccccatgacaactattaacatttcaaaaacagagtgttcttccaatgagtgtattttgggaaaggctaatgtagccaaattcttattttaaaggtaagaaagctaaagcccagagaraagtaacacgcctaaactcaaatggtgagttgttacagatgggagctagggtccaggtctgtctcctaggcctgagctcttcaactacatacctctaccatgagaggactcgagcccaatgaatgacaaattaccatagttcaggttacacc

SEQ ID NO: 208300 - DNA, 578 bp, Homo sapiens
gaattcctgacctcaagtgatccacccaccctggcctcccaaagtgctgggattacaggcatgagccactgtgtcaggccgggagaaagactttcaactggtaattgaaaattacacaagtttaaggagttgcaraggaaaagtacaggttgctatcagagcacagaagagttgcgggggaatgtttgtgagggagaccttctttaggaagcaacacttaagacctaaggccagaggacaggaagttcattcagttaatagatggggaggagcatttgagtcagctaatgctcctgcaaggcagaggttgccactcttattttacagatgagcaaacaggcccagagaggctcagtgcttttcctgaagtccggagaaaccgctgtggttcttttcagccctgagggatattagcaaccactgaaatcacatgtggggcagaaatggacaaaatgattggctgcagctgaacactgtaggaataagcttggagtagggaaggatagagtaggcagcctagaggcagaaaatgccacctgctccgctgcacaacaggccacatgtagtcctgggaagcc

SEQ ID NO: 208301 - DNA, 578 bp, Homo sapiens
gaattcctgacctcaagtgatccacccaccctggcctcccaaagtgctgggattacaggcatgagccactgtgtcaggccgggagaaagactttcaactggtaattgaaaattacacaagtttaaggagttgcagaggaaaagtacaggttgctatcagagcacagaagagttgcgggggaatgtttgtgagggagaccttctttaggaagcaacacttaagacctaaggccagaggacaggaagttcattcagttaatagatggggaggagcatttgagtcagctaatgctcctgcaaggcagaggttgccactcttattttacagatgagcaaacaggcccagagaggctcagtgcttttcctgaagtccggagaaaccgctgtggttcttttcagccctgagggatattagcaaccactgaaatcacatgtggggcagaaatggacaaaatgaytggctgcagctgaacactgtaggaataagcttggagtagggaaggatagagtaggcagcctagaggcagaaaatgccacctgctccgctgcacaacaggccacatgtagtcctgggaagcc

SEQ ID NO: 208302 - DNA, 555 bp, Homo sapiens
gcacgtctgtgaatacacttttcctctttttaaggatcagtcatattgaattaggggcccaccctcttccagtatgacctcatcttaactaattagatctgcaatgacctcatttccaaataaggtcacatcctgaggccatggggattaagactttaacgtatgaatttttggaatacacaaagaacccataacagctttagaaaagagatggaaaatttgtctttagtaataaaagggaaggtagaggattcgtttgaacatgctggcagttttatggatatatttgtgacattccatagaaagctcgtctgattgttkccattccctcagagatgtggaaagcaaggtcagtggccgcaggtgtgggcaatggcagattgaggagaggggaagctgcaaaattgtttctagcaggtaggagagtgagtagaataagaaaatacaatatggtagccaggtagctttaagggcacacctgtggtcctttgtcctatatttaaagcagggcagtttgtgtggtcatgggtttttctcaagctcctctcagttgca

SEQ ID NO: 208303 - DNA, 387 bp, Homo sapiens
aatataaagaagttgtagtgatagaccctgaagaaaaaattggataagagggaagaaaggaccctacgtggagatactatgattacaccaattttacaggtgtggaaagtgatacacagagaagttaagtactttttgaggtttgatcaatggcagagccagaatccaaacccaggcagtgtggctcaaagcacatagctccctatgagagacacaggatcagaaaggtgggaggatggaggcaggaaagacagggcatyagattagagttacaaaactgattccttctgctgactccccacgtaacctcaaggaaggcattcctgttccctgtaatatgatattccatgactgcaatgattcccctctcatctttggagaaggatc

SEQ ID NO: 208304 - DNA, 594 bp, Homo sapiens
cctttgcctgcaccaattgcttytttttttttttttttttttttgagacagagtcttactctgtcacccagtctggagtgcatcggcatgatgtcggctcactgcaacctctgccttccgggttcaagcgattctcctgcctcagcctctggagtagctgggattacaggcatgcaccaccacgcctggctaattttttttctatttttagtagagacgggtttcaccatgttgggcaggctggtctcgaaatcctgaccttgtgatctgcccgcctcggcctcccaaagtgctgggattacaggtgtgagccaccgtgcccggccaccaattacttttaattgttatagcttataattcttttcactaatatggtatgtctattccctttcattacatatacttttcattattttccagcttaaatatgcacatttacttattagtgaattttaatataatttaaaatattttaattaaagactgaatgatataaattaatattttatcataaatgtaagtagcaaataatgctaaacaccagtgatcccacttgcctgaggggatggaacatttcctagaagtagcacgtag

SEQ ID NO: 208305 - DNA, 594 bp, Homo sapiens
cctttgcctgcaccaattgcttctttttttttttttttttttttgagacagagtcttactctgtyacccagtctggagtgcatcggcatgatgtcggctcactgcaacctctgccttccgggttcaagcgattctcctgcctcagcctctggagtagctgggattacaggcatgcaccaccacgcctggctaattttttttctatttttagtagagacgggtttcaccatgttgggcaggctggtctcgaaatcctgaccttgtgatctgcccgcctcggcctcccaaagtgctgggattacaggtgtgagccaccgtgcccggccaccaattacttttaattgttatagcttataattcttttcactaatatggtatgtctattccctttcattacatatacttttcattattttccagcttaaatatgcacatttacttattagtgaattttaatataatttaaaatattttaattaaagactgaatgatataaattaatattttatcataaatgtaagtagcaaataatgctaaacaccagtgatcccacttgcctgaggggatggaacatttcctagaagtagcacgtag

SEQ ID NO: 208306 - DNA, 537 bp, Homo sapiens
caataagtccaaagtgtagaagaagaaaccagctctgactgtggcatggggaagttatctacttcactgatttcatctcaccatcagtgaacaagagcacaggctgcacttygtcttgcgctggctgagcagagggtggaatctagctgcccagcctcattctgaccaccaaggctctttagcatgtccagtgcctacaaaatagtagtatagaggactacgaggggccaagaggggactagagttgctgtggcatcaacttctgggcatgaaaccccatcacaatcgctgacccctttacaatggctaaaccaagactgactaaagctccatagtcaccaaagagacagtgtcatgtcgctggggcccagctggaggtaccaacccagtgctggagagagaccttattcctggaagcctagagaatcagactgtgtaggaaagaaaccatagactccacagtcacccagggaactctcctggaaagttacgagagaaagcaggagaaaacaatgcactaaggactctcctatgctg

SEQ ID NO: 208307 - DNA, 537 bp, Homo sapiens
caataagtccaaagtgtagaagaagaaaccagctctgactgtggcatggggaagttatctacttcactgatttcatctcaccatcagtgaacaagagcacaggctgcacttcgtcttgcgctggctgagcagagggtggaatctagctgcccagcctcattctgaccaccaaggctctttagcatgtccagtgcctacaaaatagtagtatagaggactacgaggggccaagaggggactagagttgctgtggcatcaacttctgggcatgaaaccccatcacaatcgctgacccctttacaatggctaaaccaagactgactaaagctycatagtcaccaaagagacagtgtcatgtcgctggggcccagctggaggtaccaacccagtgctggagagagaccttattcctggaagcctagagaatcagactgtgtaggaaagaaaccatagactccacagtcacccagggaactctcctggaaagttacgagagaaagcaggagaaaacaatgcactaaggactctcctatgctg

SEQ ID NO: 208308 - DNA, 564 bp, Homo sapiens
tctataatgaagatagaatattaaatccctccccaatgaatgcagaatgttagccccctcccctacttattcaccaaatgtttcataaccaagtatcatttttctacatgcaagatgagattgtaatactcagaaattacctgaacaggagttaaggcaacatgtgtttsggtaaattgcttgtctggggccacatgagctctataagaaaattaccataggtaggaacagaagcaaggagtccattgacaatgatgcattctaggaattaaagattttcacgtacagcattcagggcccaacagtgtgggtaacagagaaaggcaccacccaaatagagaaagtaaaatcctgcaaagaataagaatgtgaactattaactatgcatatttattttccttttaactgaacagctgtgataaactgcaccagtggacagagaacataaccaaaagattgactgttgaaaaaggctgagtctgacctgatagaaaatataacagaaaaaatagatcttatttcatgacaaatctaacaaatctaacaaaattacacaagcagttt

SEQ ID NO: 208309 - DNA, 564 bp, Homo sapiens
tctataatgaagatagaatattaaatccctccccaatgaatgcagaatgttagccccctcccctacttattcaccaaatgtttcataaccaagtatcatttttctacatgcaagatgagattgtaatactcagaaattacctgaacaggagttaaggcaacatgtgtttgggtaaattgcttgtctggggccacatgagcyctataagaaaattaccataggtaggaacagaagcaaggagtccattgacaatgatgcattctaggaattaaagattttcacgtacagcattcagggcccaacagtgtgggtaacagagaaaggcaccacccaaatagagaaagtaaaatcctgcaaagaataagaatgtgaactattaactatgcatatttattttccttttaactgaacagctgtgataaactgcaccagtggacagagaacataaccaaaagattgactgttgaaaaaggctgagtctgacctgatagaaaatataacagaaaaaatagatcttatttcatgacaaatctaacaaatctaacaaaattacacaagcagttt

SEQ ID NO: 208310 - DNA, 564 bp, Homo sapiens
tctataatgaagatagaatattaaatccctccccaatgaatgcagaatgttagccccctcccctacttattcaccaaatgtttcataaccaagtatcatttttctacatgcaagatgagattgtaatactcagaaattacctgaacaggagttaaggcaacatgtgtttgggtaaattgcttgtctggggccacatgagctctataagaaaattaccataggtaggaacagaagcaaggagtccattgacaatgatgcattctaggaattaaagattttcacgtacagcattcagggcccaacagtgtgggtaasagagaaaggcaccacccaaatagagaaagtaaaatcctgcaaagaataagaatgtgaactattaactatgcatatttattttccttttaactgaacagctgtgataaactgcaccagtggacagagaacataaccaaaagattgactgttgaaaaaggctgagtctgacctgatagaaaatataacagaaaaaatagatcttatttcatgacaaatctaacaaatctaacaaaattacacaagcagttt

SEQ ID NO: 208311 - DNA, 564 bp, Homo sapiens
tctataatgaagatagaatattaaatccctccccaatgaatgcagaatgttagccccctcccctacttattcaccaaatgtttcataaccaagtatcatttttctacatgcaagatgagattgtaatactcagaaattacctgaacaggagttaaggcaacatgtgtttgggtaaattgcttgtctggggccacatgagctctataagaaaattaccataggtaggaacagaagcaaggagtccattgacaatgatgcattctaggaattaaagattttcacgtacagcattcagggcccaacagtgtgggtaacagagaaaggcaccacccaaatagagaaagtaaaatcctgcaaagaataagaatgtgaactattaactatgcatatttattttccttttaactgaacagctgtgataaactgcaccagtggacagagaacataaccaaaagattgrctgttgaaaaaggctgagtctgacctgatagaaaatataacagaaaaaatagatcttatttcatgacaaatctaacaaatctaacaaaattacacaagcagttt

SEQ ID NO: 208312 - DNA, 414 bp, Homo sapiens
  misc_feature (1)...(414): n = A,T,C or G
ttcatgtccttgctttntacttcctcatcagaaacaaccttacacatgcaagttaaagtgctctttaatttgaggggagcatattacactactccatgtgacttgctttagccagtggaatatcagcagacctgaggccagtagaggctttcaagcaattctcctgcctcagccttctgagtagctgggattacaggcacccaccaccacccyttgctaatttttgtatttttagtagagacagggtttcaccatcttggccaggttggcatcgaactcctgacttcatgatccaccagccttgctggatcatgagcaaggaaaagcattgctcatttgggcttcttcctttattccaccaccaccttgagaatgatgtgcctgggttagcttgcttgtcacaggggagagaag

SEQ ID NO: 208313 - DNA, 612 bp, Homo sapiens
cattggggtgtacaaataaagtactttctctgaatttcattagctacattaaaaaaagaaaagatcaaatgcaatagatagcactgtaatagattttgctacattaaaaaaaatccatttgaatacacagtgaactaaaacaccagagtggctaaaaagtcccttcatgcatatttacttagcagagagctcttgagaaagacccaaccaataaaccccaaccaaagcaaatccagctacttctctagctgagagggtggaatgactccaaaatattgtttcaagctcaaaaagcctaaaacaactccacataaaaaaacaaaaatctatctaattggacatttacctttttggaaataaaaggcccagtgggaaaaaaaaaaaaaaaaagaaagaaaggaaggaaggaaggaaggaaggaaggaaggaaggaaggaaggaaggaaagaaagaaagaaagaacccttttcttagatccttagaagactcgactggagcccaaaataaatccyctgaattggccaagtattaaaggactctattctccttccctgcctttagtgtgctggagccctaacaagggcaaagaactgccagtggtcaagagctcaa

SEQ ID NO: 208314 - DNA, 400 bp, Homo sapiens
cagtgagccgagatcatgccactgccctccagcctgggtaacagtgggagactccatctcaaaaaaaaaaagaaatgtaaatcacttggccagcacatctggtgagctgctcaacaacacatgtctgagcccagagtcctcatccccatcctctgtgctctgcagcttccggtgccaagcagggctgcatttcagttttccttttctgatctctcactcaatctcycaggttaaagtgctaagttttgaatgccatcaaagtatgatatagaacatttttgatccctaaagagccccataatttattttcaagaatgaaggtggtaaccttggggtcttagacagatgtaaaatccagtaattgcattctgactaaatgactgtacttacaggtaaaatc

SEQ ID NO: 208315 - DNA, 592 bp, Homo sapiens
  misc_feature (1)...(592): n = A,T,C or G
cttttccaaccctgaaattctctgatcaggaaattatcaaggaaaaagttctccttgcaggatcttttctaagatttctaaatggggactttattacacggggcaggtaattacaggaggctgcagctgcagcagagagcttcacatggctggtggctgattggtgcattttggaggctgtcatctttgttctgactgggggattggaatcctggcagaggcagggsctctcccttagcagtacagtggaaggcagccctgcaggacccaccctcaagctggtcagccctccactgactgccccaggggatggcaggcagcatctgttggcatgtgaatatcagacaagtcatggacagtaggagcagaggtgaccgttgtgacactcagcccaggagtcagtttcatatatccccagggggcacgtgggtancccaaatgggttgaaacatctgggcaagacagtagagagcagtgcgggtctgcagtgaattgtaaaactgactaggtgccaccaaaggagatggctgccactcagctctgtgagatcgtcctatggataatgtgagctcagggttcctggatcttcccc

SEQ ID NO: 208316 - DNA, 444 bp, Homo sapiens
agcgtcaggaaaatgggtttatttatggtttctagccaggactgcacttaagtttttctgatattcataactagttggggagggaaagatcactgacttttcaagcmccatgtcttcattaggcatgtggtccttaggccctgtgggaactgcctctgcaccctgtggtgtgggtgccctaaagcccgtggggttggtaaaagaggaggaaaaatccgaggttcagctcaagaatcatgtgctctgggagacgaggtacccagggcccacgtgctacctgtgacaacccacaggctttgtgtctctgcacaagtcccttagcacctctgagtctatctcctcagctctaaaatagaaaacaagaagaggctggattaaaggctggcaaaggtcccttcccactctaaataacatactgttatgaatgccaggatttgggcccca

SEQ ID NO: 208317 - DNA, 428 bp, Homo sapiens
gcgctcagttactttgcaacttggctcccaaactattccaggctctgggtctcagtttcactctcaaaataagaggcttggctgggcacagtggctcaggcctgtaatcccagcactttgggaggccgaggtgggtggatcatttgaggtcaggagtttgagaccagctggccaatgtggtgaaaccctgcctctactgaaaatacaaaaattagccgggcatagtggtgggctcctgtagtacccagctactcaggaggctgaggcaggagaatcacttggacccgggaggtggagattgcagtgagctgagatcgtgccatggcactccagtctcggcgacagagtgagactgtcacaaaaaaaaaaaaaaaagagagcraggctttagagttctgctgcccgtcactgagggtccattaaaagct

SEQ ID NO: 208318 - DNA, 575 bp, Homo sapiens
catacattcaaacatagagaagatgagggcacaaataagcataatataaaatagaaaataaagtaccttaagaggtagtacaaatgtcaagacattcagaaaaggaaaatactaacttcttacattattataaaaattcatcttttgaatcacaaaatgtaacagtattattgaacaacaaaggaaatcacccacaatctctacttacgttagcattttaacattctcttttaatatatttgattcataaaaaaagaaacccatggaatacatgtgagttattaatcrtaagagtgcaatgaacatctgttcacctactacccaacccaagactacacacaaaaccttcatcagtaattcacattcacctgcgtatattccctctgatcctgattcccttggatcaagagttaaccactattagagtaactatcattcttaatgtttatttctttgactcattcttttttggttggtttggttttatcatataatatgtgagtgactaaaagatataatgtatgtttttgcttgtttcagagctttataaagaggtattctgtaggtagtttttt

SEQ ID NO: 208319 - DNA, 526 bp, Homo sapiens
actgctacttcagtgaacacatgaatgataagaaagcaaagcagccttcttgctgatacagaggaagttttagccatatggatatgagatcaaaccagtcacaacattcccttaagccaaagactaattcaaagcaaggccctaactctcttcaattctgtgaaggctcagagaggtgaggaagccacagaagaaaagtttgaagctggcagtgattggtttatgaggtttaagaaaartacatggggaaggaaggagcaagttctgatgtagaagctgctgcaagttatccagaagatccagctaagataattgataaagacggctacactaaacaacagacttccaatgtaaacaaaacatccttgtgttggaagaagatgccatctaggattttaatagctacagagaagtcaatgcatggctttcaaagcttcaaaggacaggctctcttaggggctagggcagcaggtaacaattcagtggaagccagtgctgatttactattctgaaaatcctagggccc

SEQ ID NO: 208320 - DNA, 321 bp, Homo sapiens
atggttatttcttgatgatgtgctaaacaaggggtagattattcatgcctctcatttttagaccataaaggtaacttcctgactttgccatggcatttgtaaactgtcatggtgctggtgggagtgtagcagtaaggacgatcagaggtcactctcgtggccatttggttttggtcgccttcttcactgcaacctgttttatcagcaaggtctttatgamctgtatgttgtgctgacctcctgtctcatcttgtgacttagaatgccttaaccgtctgggaatgcaacccagtaggtttcagcctcattttacccagctcc

SEQ ID NO: 208321 - DNA, 600 bp, Homo sapiens
aggaggacaacattctcccccagagtttccagaargaaatgtagctcagtcaacaccttgagtttagcacagtgatgccccatattagatttctttcctacagaactctaagataatatgtattgttttaagctactaagtttctggtaactagttagcagaatagaagttgcagcaatagaaaacaaataccagacaagcccaaacactaagccaaatgcattcacagctttttgggccccaaacgttaaaaatatgcaatatgtgcaaagtattatggagccaaatttcccttgtttgatagccatatcctcataatgagctaggcccttttagaaattgcattaataactcagggtaccatttagccattattgcttcagtgtgttagctcttatcctgatgatgatggcctaaatctcctaagtcgctcccagggaattgctcctgtaccgggaaaagtatcaatttagattaatctttcatattatcacttttagaaagcatgtttgtagagcattttggaaccgtctctgctttacacctgggttcacgtggcactcgtttccataataaaggccaatttatactaagtatgtt

SEQ ID NO: 208322 - DNA, 573 bp, Homo sapiens
agagcaacagattcttccctagtgccttcagagagagcatagccctgccagcaccttagtttcagacttctggcctccagaactgtaatacaataaatctttgtcgttttaaactatacagtttttggtagttagttaaggcagccctagcaaactaatacaggaagactggatgggggagagagggaagggggtgcataacatgtaccaggatctgtactagaaaatcacmtactagaagatttagatatatgaataaagtgattaaatatttcagtagaatatggaagacttaaagacaggggagagtgtaaaaaaagctattcagagatcagttcagaaaaaagaaatattgctacctggctcatccaagtcagcagacgtagcaagtgtaggattccagaaataaacagaaggggaaattttaatccgttcataatagctatcaatataatgctggggcattgataatgtgattataagataagtaccttctcagtttcaatatttttttgcctttcattgagatgattatttgagagagaaaactcaagagtagaagcaagtttgggg

SEQ ID NO: 208323 - DNA, 588 bp, Homo sapiens
ccagagcaatcatcgctatgaagagataaaacctataagccttttgcacaataacaattaaatttcaattaattctaccaataattgtaaaagattagaataccaaggaactaatactttcactcctcatgtcaaagaaaaggccataggtaggtattttctattcaaggaactccccagagaatatctccattttttaaaatccataaagtttcagtagagattaaaaagagttttcccagaatgctatgactttttctttatatttccttaaatggaatagtagtckaaaacaagtagagcatttcaaatctcagcctctaaattatttttagataagtttgctaaacaggaaatgttacccataaattaataattatcagttattagcctagagttgttagctccactttacacctagttgtagtcacaagataaatttaattaaattagcataaattaaggttgtgagtattctagctttcaatacctctataattccaaaaataaaaataaaaggaaagaaagagacagttactaacacaagagaatgggtaattaaatgaattatgacaataaaggacagct

SEQ ID NO: 208324 - DNA, 544 bp, Homo sapiens
gctttcatatttaggaaaagaacatgctcttccactctcagcaaatgattaaagtcatgatgaacactgccataaaaaaccttgctttaaataactaatataaatttatataattaaagttcacattttaaaaggcagcttcctaggatgttctgaagatccactaaggcaccaattttatccccatgttgtctcttaattatcttctttattaactgtagcactctgttcttgcattgagtactagaattaaattacagaaaaatactttcgtatgctttaagatgataaatgggaacagttctaggggcaatagtctgctatccagaaaactttcaaaagtcartcctaaggaatacaaagtgcacgctgactctcctgacaaatgaagaaaagttcacttataaaagaggacaaacgatcagctattgctaatgaaatactgtaattataaattattgtttagacatgcttatccacatacataacattatctcttgatatttcctgtaaataataccataaaatgacaaactttagtaca

SEQ ID NO: 208325 - DNA, 603 bp, Homo sapiens
tggtctttacccaattacagaaaattttttctccttttgctctctacgacgacccagcttctgttcaagcctgaagcatgtttaactagttaccaatagaaattgagtatccctaatccaaaaatccaaaatctgaaatgctccagaatctgaagctttttgagtgccgacatgatgccacagaccagaatacctaygttagcagttaaacagcagtggcacaaacaacagcaggttttcagtttccatctataatgctgtgttttgattaaagggttactgtgcacttactttactgttctaggtgagaagaaacatgagatgcagttgggggaccaggaagtggatccctgaaggataaagacgcactctgctagatgggttttttaaacgtttcctccagtctatagtaacacagtgtcatagatagactgaaagcctggcactgcttgttgttgccgtggtttaatggttaatacggatattctggtgatgctactgtgttgcttagttaccctgaacagatgaatgatctttttcattgtattaatggtatgtcatacttcttactgttaagtacttacgtatgaacaggtgtaagaa

SEQ ID NO: 208326 - DNA, 603 bp, Homo sapiens
tggtctttacccaattacagaaaattttttctccttttgctctctacgacgacccagcttctgttcaagcctgaagcatgtttaactagttaccaatagaaattgagtatccctaatccaaaaatccaaaatctgaaatgctccagaatctgaagctttttgagtgccgacatgatgccacagaccagaatacctacgttagcagttaaacagcagtggcacaaacaacagcaggttttcagtttccatctataatgctgtgttttgattaaagggttactgtgcacttactttactgttctaggtgagaagaaacatgagatgcagttgggggaccaggaagtggatccctgaaggataaagacgcactctgctagatgggttttttaaacgtttcctccagtctatagtaacacagtgtcatagatagactgaaagcctggcactgcttgttgttgccgtggtttaatggttaatacggatattctggtgatgctactgtgttgcttagttaccctgaacagatgaatgayctttttcattgtattaatggtatgtcatacttcttactgttaagtacttacgtatgaacaggtgtaagaa

SEQ ID NO: 208327 - DNA, 574 bp, Homo sapiens
gttttataatcatgaggacttatgttgaagaagccaaagttgcaaacaggtattaccttcattaaattgggatcttacttaaatgagagataatcaatgtaaatattaatacagtacaggaaaagattaatatgatactctatgattgtttatatgtcataaactatatttccgtgaagttggtatcacattcagaaataacacctataaaaagaaatatttctcataatatatagcttttaattttaaagattttgtactttataaagatgttcatgcatgttggattgatcttaacccaactagattcaacattttaatccttacttagccaaaaggtacatgagttgtgcctgatttgtaaaaattttgatttgactccttttagattttayatttaaattcccaataaacccaagaaaactcgctttcaaggattagaatcactgtatgaaaaaatttacattgccacagaagatactcaatgacaatttagaatcattcaacaaaagtttgaataatatgatcaagaataggttgattgacacttttgcataaaactaatagtacaatg

SEQ ID NO: 208328 - DNA, 555 bp, Homo sapiens
actaaggtttgatccacctgcttcaaataatctaaacatatttctttctcctctttttttttttttttttgttttattaagcacttaacgtttttctcccaatgagagaagtaccagtttcaagtagaccaggatagactttagatgaccaaaagcctagatcacttcggtgagatacaggaaaactgaagtttgcacctcgtaaaattagaccatatttactcatttttaggcytctgggaagccaaatactattattaaaatcagggactcaacacatttagcaggggttatagggtttggtatcagaaagatgtgaactaacagactatagaaatttcctggcctgagagtctttatatcttctcagaaagagatgatctgattaaaaaaaaaaaaaaaaaggtgccaaagaacaaaccctgacactatgttattttcatctacaacatctgtgttacattattatttatttcaaacactaaatcaattcagagaataatgcatgtgcttaatgcagaaggagcaatgtctcttcgccgttttcaataagag

SEQ ID NO: 208329 - DNA, 361 bp, Homo sapiens
caaaggggttacaggccccatgcaactctgaaatacagtagggcagtcaaatcttaaaactccaaaataatctcctttgastccatgtctcacatccaggtcacgctgaagcaagaggtgagttcctatggtcttaggcagctccacccctgtggctttgcagggtacaacctccctcctggctgctttcatggtctggcattgagtgtctgtggcttttccagacacacggtgcaagctgtcagtggatctaccattctggggtctggaggacagtgaccctcttctcacagctccactaggtggtgccccagtagggactctttgagtgggagtgccaactccacatttcccttctgca

SEQ ID NO: 208330 - DNA, 591 bp, Homo sapiens
ctgtgtttagctatatactgcttaccatattgtactctatctgttcattcaattgtccttgtctctaagactcaagagcttcttaaggttaaggactatctttattcatagtattcttactgttgaatagagtgtccagctcataaagtgaagttaacaagtgtttagatagtttagctaatttatgcctgtattatgggccttgttatttttatttatgagtactaagaactcgaggtttggtctatggtcagagaatagactttgtttaaaaagaggacaccaagatttttgttttgtccttttgctctaatcaatttaaaaatatcaccaaaataatccagttacaccaactttgtattaatttccaaagtcaagtcacgaagtcagtctgctctgtaaatgttaacgtaaaaatatytcttaacacatttgccatgaataatatttattttttcagcttgcttgcttcagaatatttaacattttttctacatcctgtggaatgtatctatgtttatttattcctagttccaaaatggataaaacttctaagagctttgtgttatccttgcatatgcaaacgtttta

SEQ ID NO: 208331 - DNA, 609 bp, Homo sapiens
ctgtggggcccctagataatcaaaattctttctttctttgaataaggattaccctgggctatttgggagacgtctgtgcctagtcacagcatatcataaacccaatggataaggactacatgaggatggaagacacatagaagtggggattttactgacagtcacagcaggcaaaaagatatgagcaaatttcccagctccacttatcaagacaatctgtacctttggaatctaaagttaccacacaagggagacaagttgaaggctccaagtcatctgatttgaacattgaaaggaatgtgacctcattttgaaccccaggagaatgaaaaaggatatattggtckaatcagatttgcatttttaaaagataactctggctgctttacaaaaaaatagattggagagaggcaaatatggatgcaagaatacaagaggccaccataatcataggggcgatggtggcttgagcaaagtactggcagggcatatggagagattttaatggatttaatatgcaattacatatattttagaggtagaataaatagaacgtggtaattgattgaatatgagagggcagtaagggagagagaggagtcacagatg

SEQ ID NO: 208332 - DNA, 595 bp, Homo sapiens
  misc_feature (1)...(595): n = A,T,C or G
gtttttggtgggcatttcctctcctggtaataaccccagttttgttttgagggaagcatccttccccctggtcagccatgtggtttaggtgcaactggcccctactctcatcctaggatggcttgtaattggcttaagccagtcactatgcactggtctttccaaaataagcaaacaatgcaatctaagacaactcartggaaggagatattggaacctctgagggggtaagagttccacaagacactctctttcctgaagagtggctataaggactagaggtatgacctggttggcagccattttattaccaagagtggggtgcctggggctgccaggaatccactttgtggagaataaaaccagtagagcagagagcagagaaaaaatatggagagaaacaagtccttagttgaaatgagttgagctgttggatcaaattatacataaagtcagatttcaccgtactttcagttaaataaacccattattcccctcttttttaaaatgaattttctatatcttgaaatacaaggagtcctaactaatccgtgatcattntacaaagagtgtggacagtgctaaatatggccca

SEQ ID NO: 208333 - DNA, 595 bp, Homo sapiens
  misc_feature (1)...(595): n = A,T,C or G
gtttttggtgggcatttcctctcctggtaataaccccagttttgttttgagggaagcatccttccccctggtcagccatgtggtttaggtgcaactggcccctactctcatcctaggatggcttgtaattggcttaagccagtcactatgcactggtctttccaaaataagcaaacaatgcaatctaagacaactcagtggaaggagatattggracctctgagggggtaagagttccacaagacactctctttcctgaagagtggctataaggactagaggtatgacctggttggcagccattttattaccaagagtggggtgcctggggctgccaggaatccactttgtggagaataaaaccagtagagcagagagcagagaaaaaatatggagagaaacaagtccttagttgaaatgagttgagctgttggatcaaattatacataaagtcagatttcaccgtactttcagttaaataaacccattattcccctcttttttaaaatgaattttctatatcttgaaatacaaggagtcctaactaatccgtgatcattntacaaagagtgtggacagtgctaaatatggccca

SEQ ID NO: 208334 - DNA, 481 bp, Homo sapiens
gaaacaggttcttgacacctcctcttgttattaccactccttttcagctgtgagtccaatcagcccggarcttctgatgaatttgtcaccctaaggaggcaaagtatgcttccaaaactcacattcagatgtgcagatctgttgctcctccagatccgtggagcccagcgaagcaaaaatggccaccgctgcagtgtaggagagaggacagcaaaggaccgcatggatgtcttccttctgcagtacttcttgatcagttccctaatctcccggctcccatttcttcctttatttaataggcgaatagaacaggattttcttttcccttcacctccttaatcttctccaacacaaagtctatggtatagaagagaactctagtaagacagaataaaaacgttgaaactttgttaagctcataacacatcaaaatgagacaatgatcagtaggagtgggcaacagtagcaagagacaggtctg

SEQ ID NO: 208335 - DNA, 544 bp, Homo sapiens
tgccaggaatgcactgtcagaatgtccaggctgggatccatctccaaaccgggaaaaagaacaaggaggatctgttggaattctggcaaccctgggcacaagggaatgttattagcacctaatatttgaatgatcatttggtgtcaggcaccatgcaagctttatttgcattgtctcatgtaatcatcctccatgagttaggtataggtgagaaaggtgaagtttaaaaagacagttaaggctgggcatggtggctcacacctgtaatcccagcactttgggaggctgaggcgggtggatcacctgaggtcaggagttcaaaaccagcctgggaaatacggcaaaatcccatctctacaagtcagagaaaaattagccgggtgtggtggctcgtgcctgaagtcccagatacttggtgggctgaggcaggaggatcrcttgagcctgggagtttgaggctgcagtgagccatgttcgtgccactgcactccagcctggacaacaaagtgaggccatgtttcaaaaaaaaaaaaaaagacagtag

SEQ ID NO: 208336 - DNA, 537 bp, Homo sapiens
tacagatgaggaaatcaatcaagtaatttacctgaggtcatacagttagtaagtggccatgcccagattcaaatgaggtttgtcagctccaaagctcttgctttttttttctttgtatatacagaaagaaagtataaagcatttgctcttaactgccatttaaaaataatgcacatcatagcacttttagtgacaaatataagatcatataactttcaccaatatcaataacagaaaggtaatattagtaaatgggatgtcctggtrcaaattttccaggatcatgaaccatttgtcagatttttacccagtatatgattttattatttattttattttatttttctccacctggcactgaatttgcacagattttatcaaatacagcacttcaaaaatgtgaatttagtttgggtataattttcccaggaaataccagtcaaaaatatttttaccagttcttgtgtgccagttacagatttaatgcctcacagctccaaattcaacctttttgcctgttctgtgaaaataggcctg

SEQ ID NO: 208337 - DNA, 581 bp, Homo sapiens
ttacatgatccagcaattccacttctaagtatgcacctgaaacaactgaaaacctaagtccatataaaatattgtatacaaatgttcatagcagcatcattcataagagccaaaaagcagaaaaaactcaaagatccatcagctgataaatgataaacaaaatgcattacatgcatgcaatgtaatatcatttggctgtgaaaatgaatagaatcctgatacatgctacaacatagatgaaccttaaaaatattatgctaattgaaagaagccagttttgtatgattgcatttacatgaaatatccagaataggcaaatccatagagaaagaaaatagattagttgttgccagaactaagagaaaatagattagctgttgctctccttctggggagaaggaggaataaggagtgactactaatgagtatggggttcctttttggggcgattaaaatgttataaaaattagcagtaatggttgcacaactctgtgaatatactcaagaatgctttaaatgggtgcattttatagtatgtgaattatayctcaataaagttgttacaaaaaacaaccaaccag

SEQ ID NO: 208338 - DNA, 508 bp, Homo sapiens
ggcaaactttttctataaaggacaagaaagtaaattcttttaggctttgcaggccgtaaggtttctgttttgactactaactcagccactgtcacatgaatgcagacagtaaccacacagaaaagaatgagcatggctgtgttccaatacaatttgacttttgaacactgcaatttgaatttcatatcatgttcacatattatgacatagtctttttattttatttcaaccattaaaaaaggtaaaaaccattcttagcttgcagggatatacaaaaacaggtggcaggctagatttggcccatgggccagtttgcctaaacctctgacctagggmaagtgatgggtcctgtctccggaaatatgcccatatacccaaaagttcataaacagttttaagggtacacatgtgtaaaaactcctgactaaaggacaccagggtttagagttcaatatactgatacacccatgaagtctgctaccccaaatctaatgaaacatgaaaacat

SEQ ID NO: 208339 - DNA, 563 bp, Homo sapiens
aagctcagttttgcctttgttgagtgaggtgcctgtgggcatttagagaaatayggccaatgtgcaaaacatccgggaactcaggagaagggctggacaagaaacttgagaaacggtggcacacaggtagttaaaaccatgagcgtgaactggggttggatggagaagagagggccggagaagagggggctgacagcagaatcacctacacataaagaaaaaaacaggagaggaaacagccaggagcaagatggctgaacagagggctccactgattgtcccctgcaggaacaccaagtttaacaactatctacacaaagggaacaccttcacaggaaacaaaagtcagctgagtactcacagtgcctggttttgacttcccactgctgaaagaggcactgaagagggtaggaaagagtctacaatcgctgataccaccccttccccatctcccagcagtggctgcgtggcacagagaatctgtgctcttgggaggagagcacagtgattttgaagctttgctttgaattcagtgctgtcctgtaacagtggaaagcagaacc

SEQ ID NO: 208340 - DNA, 563 bp, Homo sapiens
aagctcagttttgcctttgttgagtgaggtgcctgtgggcatttagagaaatacggccaatgtgcaaaacatccgggaactcaggagaagggctggacaagaaacttgagaaacggtggcacacaggtagttaaaaccatgagcgtgaactggggttggatggagaagagagggccggagaagagggggctgacagcagaatcacctacacayaaagaaaaaaacaggagaggaaacagccaggagcaagatggctgaacagagggctccactgattgtcccctgcaggaacaccaagtttaacaactatctacacaaagggaacaccttcacaggaaacaaaagtcagctgagtactcacagtgcctggttttgacttcccactgctgaaagaggcactgaagagggtaggaaagagtctacaatcgctgataccaccccttccccatctcccagcagtggctgcgtggcacagagaatctgtgctcttgggaggagagcacagtgattttgaagctttgctttgaattcagtgctgtcctgtaacagtggaaagcagaacc

SEQ ID NO: 208341 - DNA, 578 bp, Homo sapiens
agattaagaaggaagctgaaaattttcctgagacaaatgataatggaaacacaacataccaaaacctatgggataccacaaaagcagtactaagagggaagtttacagctataagcgcctacatcaaaaaaagaaaaactttaaataaataacctaatgatgcatcttgaagaagtagaaaagcaagaacaaaccaaatccaaaactaataaagatcagcttttataaataaatgtataaatttacctcaacccaataaagayagcaactttgcttttaacaagtagctcttaaaagtcattattaaaaataatgagaaaagctgcatttatatatagaaaagatcaaggattttaatataaatcatagaagttctaaaagaaaacacgaagggagatgtcttcctatgactcaaaatccctaaatgctaaaagtgataaatatatcgctgcatctaaataaaactgaacattttctatgttgaaaaaaaaaaccaccaccattaggtgttttgtcaaaagagagatgaaccagtaaaaacaaaacaaaacaaaacaaaacaaaaaaaaactgtaaca

SEQ ID NO: 208342 - DNA, 578 bp, Homo sapiens
agattaagaaggaagctgaaaattttcctgagacaaatgataatggaaacacaacataccaaaacctatgggataccacaaaagcagtactaagagggaagtttacagctataagcgcctacatcaaaaaaagaaaaactttaaataaataacctaatgatgcatcttgaagaagtagaaaagcaagaacaaaccaaatccaaaactaataaagatcagcttttataaataaatgtataaatttacctcaacccaataaagatagcaactttgcttttaacaagtagctcttaaaagtcattattaaaaataatgagaaaagctgcatttatatatagaaaagatcaaggattttaatataaatcatagaagttctaaaagaaaacacgaagggagatgtcttcctatgactcaaaatccctaaatgctaaaastgataaatatatcgctgcatctaaataaaactgaacattttctatgttgaaaaaaaaaaccaccaccattaggtgttttgtcaaaagagagatgaaccagtaaaaacaaaacaaaacaaaacaaaacaaaaaaaaactgtaaca

SEQ ID NO: 208343 - DNA, 578 bp, Homo sapiens
agattaagaaggaagctgaaaattttcctgagacaaatgataatggaaacacaacataccaaaacctatgggataccacaaaagcagtactaagagggaagtttacagctataagcgcctacatcaaaaaaagaaaaactttaaataaataacctaatgatgcatcttgaagaagtagaaaagcaagaacaaaccaaatccaaaactaataaagatcagcttttataaataaatgtataaatttacctcaacccaataaagatagcaactttgcttttaacaagtagctcttaaaagtcattattaaaaataatgagaaaagctgcatttatatatagaaaagatcaaggattttaatataaatcatagaagttctaaaagaaaacacgaagggagatgtcttcctatgactcaaaatccctaaatgctaaaagtgataaatatatcgctgcatctaaataaaactraacattttctatgttgaaaaaaaaaaccaccaccattaggtgttttgtcaaaagagagatgaaccagtaaaaacaaaacaaaacaaaacaaaacaaaaaaaaactgtaaca

SEQ ID NO: 208344 - DNA, 578 bp, Homo sapiens
agattaagaaggaagctgaaaattttcctgagacaaatgataatggaaacacaacataccaaaacctatgggataccacaaaagcagtactaagagggaagtttacagctataagcgcctacatcaaaaaaagaaaaactttaaataaataacctaatgatgcatcttgaagaagtagaaaagcaagaacaaaccaaatccaaaactaataaagatcagcttttataaataaatgtataaatttacctcaacccaataaagatagcaactttgcttttaacaagtagctcttaaaagtcattattaaaaataatgagaaaagctgcatttatatatagaaaagatcaaggattttaatataaatcatagaagttctaaaagaaaacacgaagggagatgtcttcctatgactcaaaatccctaaatgctaaaagtgataaatatatcgctgcatctaaataaaactgaacattttctatgttgaaaaaaaaaaccaccaccattaggtgttttgtcaaaagagagatgaaccagtaaaaacaaaacaaaacaaracaaaacaaaaaaaaactgtaaca

SEQ ID NO: 208345 - DNA, 502 bp, Homo sapiens
ttctttacgtgtaaagtgtcaaaaccaacttcaaaggttgttattttgggtagaatagaaggcccagaaataaactctccatatatagtccactcattttgacaagggtgccaagaccattcaatggaggaaaggacaatcttttcaaaaaaaaaaggcactgggaagtctgggtatccatatgcaaaagaatgaaattggacccttacataatgtacaaaaataactgaaaacagctcaaagacatgaatgtaagagctaaaaccatacaactcttagacaaaaacataagggaaaagcttcttgactttgaatttggaaattatttcttgggtatgaaatacaaatatgaaatataaaagtacaggcaacaaaggtaaaaatggataaactacatcaaaatttaaaagctgtggatcaaaaggcaaaatcaacagagggaaaagacaacctagcagaatgggagaaaaatgtgtgtaaaycacgtatccaatatggggtt

SEQ ID NO: 208346 - DNA, 412 bp, Homo sapiens
ataatatttaaaagctggaagcaatccaagtgtccataaaaaggtaaatggataaacaaaatgtggcatatgcttacaatagaatattattcatccacaaaaaggaaggaaattctgacacatactacaacayggataaactttgaggatattatgctaagtgaaataagccattcaaaaaaagacaagatattattccacatatatgaggtaacctaggagaggcaacatcacagagacacaaagtacaatagtaggtgccatgggctaacagaagggggaaatggggagttattttttaatgagtacagagtttcagttttgcaagatgaaaatagttctggagatgggtagtggtaacggttgaacagcaatgtgaatgtacttaacactctgaaccatacacttaaaa

SEQ ID NO: 208347 - DNA, 440 bp, Homo sapiens
tcaggggtcactttcagataattacaaaaactccccatcattttctgttcccgaaacagtctcaattcaaggaatttgcaataattcaaactcttacctgactgtagagattttcagcctccagcttagtgatgcttttagctctttttagctttgctgaagtctatagagagggtagggagcttcygggtctcctggtcctcattagctgggttcacccctccaagctggaaccagaaggtgataggcaggtgaaaagggcataattttatgtagctggtgatgccatgatttggaggatgttttaaaactgcctgtttctctttggggcatttgtttccctctggttgtgaggcttttgtgtgtttctcagagatttccctcctacgaaccttcaactgcactttggggacatctctcttggaccagttgcatagggt

SEQ ID NO: 208348 - DNA, 440 bp, Homo sapiens
tcaggggtcactttcagataattacaaaaactccccatcattttctgttcccgaaacagtctcaattcaaggaatttgcaataattcaaactcttacctgactgtagagattttcagcctccagcttagtgatgcttttagctctttttagctttgctgaagtctatagagagggtagggagcttctgggtctcctggtcctcattagctgggttcacccctccaagctggaaccagaaggtgataggcaggtgaaargggcataattttatgtagctggtgatgccatgatttggaggatgttttaaaactgcctgtttctctttggggcatttgtttccctctggttgtgaggcttttgtgtgtttctcagagatttccctcctacgaaccttcaactgcactttggggacatctctcttggaccagttgcatagggt

SEQ ID NO: 208349 - DNA, 440 bp, Homo sapiens
tcaggggtcactttcagataattacaaaaactccccatcattttctgttcccgaaacagtctcaattcaaggaatttgcaataattcaaactcttacctgactgtagagattttcagcctccagcttagtgatgcttttagctctttttagctttgctgaagtctatagagagggtagggagcttctgggtctcctggtcctcattagctgggttcacccctccaagctggaaccagaaggtgataggcaggtgaaaagggcataattttatgtagctggtgatgccaygatttggaggatgttttaaaactgcctgtttctctttggggcatttgtttccctctggttgtgaggcttttgtgtgtttctcagagatttccctcctacgaaccttcaactgcactttggggacatctctcttggaccagttgcatagggt

SEQ ID NO: 208350 - DNA, 440 bp, Homo sapiens
tcaggggtcactttcagataattacaaaaactccccatcattttctgttcccgaaacagtctcaattcaaggaatttgcaataattcaaactcttacctgactgtagagattttcagcctccagcttagtgatgcttttagctctttttagctttgctgaagtctatagagagggtagggagcttctgggtctcctggtcctcattagctgggttcacccctccaagctggaaccagaaggtgataggcaggtgaaaagggcataattttatgtagctggtgatgccatgatttggaggatgttttaaaactgcctgtttctctttggggcatttgtttccctctggttgtgaggcttttgtgtgtttctcagagatttccctcctacgaaccttcaactgcacttyggggacatctctcttggaccagttgcatagggt

SEQ ID NO: 208351 - DNA, 263 bp, Homo sapiens
ctcaaaagccaactgctgtgtcatgttttgatgacttgctaaagaaactgggaagatgagcrtggttcaaggaggcagcgggtggaagaggggcagccaggatacgagaactgattcttatctaagcaatcaacgcaccctggctagcaataggcacacacagctcaaagtcataagcataacctctactttaaagtggtctacaatccacattggcctaaattatctggttaatttccatatcattaaacattaattgagca

SEQ ID NO: 208352 - DNA, 517 bp, Homo sapiens
taacaggttaagggttcctcctagtggccgagccaggatttcagccccattgattaatttccagacacttgcgctttctcctctcctcactagaaattggattctccctttttatgaagagcctcaaagcatcatgaaatgagttttcagtgtcagttccatgtactagcattgcctaactgttagtctaaaagtgtgrcccctgaagtcagagttcatgtcctctggtagaagggaaaatggactcataatgtcatcccaactctttggtgaataaacaaaaaacattccacttctaggctgaggacacaacttctttaaggagatttgaatgaaaagcactaattatttgccagcagtctgatatttgaatcacccacagtgtttgcagtactacagacttctgacttttctttcatccgtcaagaaatgctaccttaaaaggctgtcagtgatcagcacaatatattttaacattagataaaaaagcccatccagagccattagaataaactca

SEQ ID NO: 208353 - DNA, 517 bp, Homo sapiens
taacaggttaagggttcctcctagtggccgagccaggatttcagccccattgattaatttccagacacttgcgctttctcctctcctcactagaaattggattctccctttttatgaagagcctcaaagcatcatgaaatgagttttcagtgtcagttccatgtactagcattgcctaactgttagtctaaaagtgtggcccctgaagtcagagttcatgtcctctggtagaagggaaaatggactcataatgtcatcccaactctttggtgaataaacaaaaaacattccacttctaggctgaggacacaacttctttaaggagatttgaatgaaaagcactaattatttgccagcagtctgatatttgaatcacccacagtgtttgcagtactacagacttctgacttttctttcatcygtcaagaaatgctaccttaaaaggctgtcagtgatcagcacaatatattttaacattagataaaaaagcccatccagagccattagaataaactca

SEQ ID NO: 208354 - DNA, 564 bp, Homo sapiens
tctaaaaactttggcagaaaaaaataaccaactaagcagaaaatatatttggatggtgatatagtttacctaggaaattgatgacaattcattgaatagtttaaaagaatttgaagtcaaattttttgtgaggcaccatgtagtttaaactataattatgcttttagaattcatttttwtactctgaaatttgtttgttttctctatgcaagttactgcattagagttgtgagaatagtcatgaaatattttaggcaaaaatcccctagcgtttaacagatgcttagtgagtacttgctggattcagacaatgtactcagtcctggaaattcaatgccaaatggaaccctacgttaaaggagttgtcagcctggttggcaatttctggcaccataaccaatggttaaagcaactttgttttgttttgtattttaaatctgtagagaaatccaagaaatgagatagaagtcatgtcctgaagaaagttaaaaaatagtaagtgtggctcggcactgtggctcacacctgtaattccagcactctgggaggctgacgtgggaggat

SEQ ID NO: 208355 - DNA, 378 bp, Homo sapiens
ccgattcttctgttcctccaccctgcagccaaatactgatttccaaatgcaaagctaatcataagattctgctttggggagggtgaaaattcttaatacggtccacaggagctaattttcttgtaaactgcaacctcaacctcctgggctcaagcaatcctcctgcctcagcctcccaagtagctggtactacgggtgcatgccaccatatctggctaatttatttttaatagagacaaagtctcactgtgttgcctaagctggtcccaaacccccaaactcaagcgattttcctgccttgstctcccgaattgctggaagtgctgggattgcagatgtgagccactgtgtccagccctgcatccttctaatagggac

SEQ ID NO: 208356 - DNA, 584 bp, Homo sapiens
gtcttaaacctgaacttgggctaagcaagtaagactgctttttaaatttattttttatgtgagttactacttaaattcttcctgttctatggttaaagcatcttgtttacattacattccgaatttggcccatgcaactgggttgccactggcttaataagacaagaaaagatagagctgggaagaccaaagaagcacatatttgcctgggttcagatcctctgaatttttcctcttgtcttaattagcccttggttattttcatattcagagttgccaagggctaaagagacgatgctaaggaatgagaaggcctaaaaggttttaggtgatacaaataactccatcccatatacgtcaggttatctacagggttcccttgcttaaacrttgatagagtttcttaggttctgaaatttggaatctagatcactaggccaagagaaaccgctagctgatctattttggactccaggtgacctacaaactctgttctgctttagagagaccacttagagccattctgtgtgcatcaaaaaggaatctaacagggaaaggggatggcagatatctttggtgggaac

SEQ ID NO: 208357 - DNA, 420 bp, Homo sapiens
ttgagctctgaaactgtttacttcttytcccatcacagtgcctttctctattcactggtttactgtagggggatttgagaatccccctacagtaaaaatcctcctcaaaaaaaaagaggaaattttgtttaaacctgtttggagtatgacttaaatgtttctaagtatattccctgcttgcccagaccatctgcttattcatatatcaaggcttactatgttaatcagaaaagagttgagtatgaaatgtaaagataagtcaaatgggaaacagatactaagaaagtaatgagtctcatctttctggcctctgttgaacttagccatggttgttcctgtttattgcgtagagcagggaggaactgagcatgaatttggaagggcaggggtctcatacgtaatctcccagattagtgttta

SEQ ID NO: 208358 - DNA, 596 bp, Homo sapiens
tggaaggaatttaggccaggagcagtggatcatgcctgtagccccagcactgtgggaggccgaggcagggggatcccttgagcccaggagttcgagaccagcctggccaccatggtgaaatccccatctctactaaaattacaaaaattagccaggcatggtggtacatgattgtaatcccagctacttgggaggctgaggacaggaggattgattgaacccaagaagcagtggttgcagtgaaccaaaattatgccactgcactccagcctgggccacagagtgagactccatctcttaaaaaaaaaaaaaagagctggaaggaatttaaaagatcatttagctcattgattttcaaaccaattttaggtttcagaatcctaaaattgttttgtaggtagtgtgtgtgatatgggttggctatgtcccyacccaaatctcatcttgaattacaattcccaaaattgccatgtgtggtggtaggaacccaatgggaggtgattgaattataggggccagtctttcctgtgctgttctgacagtgaataagtctcatgagatctgatggttctacacaagctctctttgcctgacgc

SEQ ID NO: 208359 - DNA, 489 bp, Homo sapiens
ttacatgatgattcataggtggttgggaagaggtgttactagtaagcatgttctgggtgatcctctgagtgcacatgcgcagtagctgtacatacttgttcatatgtcacatgtctcatcagtatcttaaatctccacccagggtgtgttttttactattataatgagcaaagggtcagtgtgaggaccggacaaatcaaaacgtgcttgctctctacaggggaagtttcccactgaagatagctttgcttgactgagcttgagtacaatgcgaatgctgaagcttattgtgttgactgtagggttgccacatcccaagattatggtcaccacttttttgacttgctatcctgcttcaacacctacatacatatgctgtatgcagttaaaagaatgtctgtggtgtccagctgctttktgtgtatcaatcttaagctctgtgaccttggacaagttacttaatctttctaagaattagagatgaaataa

SEQ ID NO: 208360 - DNA, 547 bp, Homo sapiens
aggtatccttgctattgtctcaaggtgggcaggcctatgcaaacctatcctcagagtccaaggaagctaagaggccaaagaaagaggctgacaaatccagtttctcagaaagaatcattgaatagggacttacaaacagaagccttgtctgggtcttaagcagtagcaagacaagatggtagatccccatgccattagccccagacttggggcgtatatgccatagggaaagagcatatgtgcttcagaagggatgcatagaacaattgcttaagggtaggakttatgataagtacactctcttatacaaggaacaacagataaactagaaatcttgaagatttccagaactggagttaattagaaatcaacatggcagattagcattcaagatgaagttgctatagcctccacactccacctccataatctagctctgacaatgtcacatgccgtcctcttccgtggtggtgcctgaggctttagggaggatgatttacactgtatagctttagcagcagtgagttggcattggaaaacagattgg

SEQ ID NO: 208361 - DNA, 547 bp, Homo sapiens
aggtatccttgctattgtctcaaggtgggcaggcctatgcaaacctatcctcagagtccaaggaagctaagaggccaaagaaagaggctgacaaatccagtttctcagaaagaatcattgaatagggacttacaaacagaagccttgtctgggtcttaagcagtagcaagacaagatggtagatccccatgccattagccccagacttggggcgtatatgccatagggaaagagcatatgtgcttcagaagggatgcatagaacaattgcttaagggtaggagttatgataagtacactctcttatacaaggaacaacagataaactagaaatcttgaagatttccagaactggagttaattagaaatcaacatggcagattagcattcaagatgaagttgctatagcctccacactccacctccataatctagctctgacaatktcacatgccgtcctcttccgtggtggtgcctgaggctttagggaggatgatttacactgtatagctttagcagcagtgagttggcattggaaaacagattgg

SEQ ID NO: 208362 - DNA, 491 bp, Homo sapiens
gaaggtttgtaggtttgggttttttcaaaggcagtttaggggaaggggtaggggtggctaggcagtgggtgattgctgctgattggttggggrtgcaatcataggggtgtggaaaatggtcctcctgcactctaaattgcttctgggtggggccacaggagcagtgggtgggtccaggtggagccatcattgtaggtgtcagacatgtaaaaaacctgaaaagatatctcaaaaggccaatctagaatagtgatattgtctgcaggagtaattgggaaagttgcatatcttgtgatcagtctacaccttagcagaatttaggcttctctcctccccctggcctggtggtatctcattagcttcacaaaggtgggtgagttttggagaagggctattacttaaactataacctaaacgtcttccaaagttggctctgcctaagcccaagaaaaattaaggcagcttgaaagctaaaggcaggagatgggttg

SEQ ID NO: 208363 - DNA, 590 bp, Homo sapiens
aggtcttgctatgttgtccaggctggtctcaaactcctggtctcaagaggccctcctgccttggcctaccaaagtgttgggattataggcatgagccgccatgcttgggcccatccctgacctctttttaaggtctagaaccacatatttagttgcccatattaccactccattcaattgtcacagatacttcgaacccagtgtgttcacaactgaattctagctctttctgccaaatctcctcctctagctttccccttyccagcaaatgggatgtcactcacccagttgcttaagctagaatactgagtcatccttgaagccctcctcactgcctgtcatcatctaatcatcaagtcttgtaaaattttcttcttaaatatcttttgaacctgccactttctctccctccccactgcttctagccagatctttatcgcctcccctctactacttcaaaggcttcctcactaatgagtctacctgccttttctcttgccctgttactgtccacccaccatgcagcagctagagagatccttttaaaatgccatctcactcctctatgtaaaatccttcaagagctttcc

SEQ ID NO: 208364 - DNA, 558 bp, Homo sapiens
gccaatgtttcctgtgcccaaagaaggaagtgggcctcccttcccctcccctaggcagataatcagcctgaggcaggggtgagggctacccatccagcagcttcaggatgctctcacgctccttcagagtcttccaggcctggtccttttctttcttggtgggagtccgcttcttctgccgggcagccatgatcttgcgaaaggcgtccatgacctcgttgtcagccatgcgcacccgctgcctcagctcgtgccggctcacctcgtcctttgccagcctgtggggaccagccagccaggtgccagggtcagcccacctycagagaacaacccctccctcttcaagaccgagcctacccaccagcccaggctggcatgcctgtggattgtgtcatacagtcgtgaccaaaaagcagttactgacctacacttacatggcactatcttaagctcctgaaaaatattaactcatgttgatcacgggggaggctgtgcacatgtggggacagggagatacgggaattctctgtacctttctctcaattttgttgtgaactt

SEQ ID NO: 208365 - DNA, 578 bp, Homo sapiens
gaattctgaaagaagttagaatgtgggaagagagacttgkgagcaagcgttcacaaatgttggaatgtactgtgaggataagcagaggagcagccagtaggatgagtgcaggcgtggtaggcagccaatcatgtgggcctggcagtgaaggagctgcaggcctgaagccaggacttcaaggccaccctcccacatgtggcctgctgcctggacaagccaccctaagagtcccacagactgtatgagttataggtgacttgagacaattcactctcctcctataagctctttcaggtggcttgggaagcccctgtcaccagtcatttttatatgacagctgcatgggcggaacagctggccccctccactctattaatgtgtgtgtctactcctagctatgaaggcctcagtccaccatgccagtgcccagcttcctctcctttgtttattctgattctctttcactgtttatcaccatgaaattaccccaaatctgtgatctgcacctaaccatcaaaataacttggctcaatcgactcgaaattcccaaacagccatttcggctgttagagcgtgaa

SEQ ID NO: 208366 - DNA, 579 bp, Homo sapiens
gaattctgaaagaagttagaatgtgggaagagagacttgtgagcaagcgttcacaaatgttggaatgtactgtgaggataagcagaggagcagccagtaggatgagtgcaggcgtggtaggcagccaatcatgtgggcctggcagtgaaggagctgcaggcctgaagccaggacttcaaggccaccctcccacatgtggcctgctgcctggacaagccaccctaaragtcccacagactgtatgagttataggtgacttgagacaattcactctcctcctataagctctttcaggtggcttgggaagcccctgtcaccagtcatttttatatgacagctgcatgggcggaacagctggccccctccactctattaatgtgtgtgtctactcctagctatgaaggcctcagtccaccatgccagtgcccagcttcctctcctttgtttattctgattctctttcactgtttatcaccatgaaattaccccaaatctgtgatctgcacctaaccatcaaaataacttggctcaatcgactcgaaattcccaaacagccatttcggctgttagagcgtgaaa

SEQ ID NO: 208367 - DNA, 537 bp, Homo sapiens
tttctgtatcccccagcggcttctgctggttctcctgtgattctgtctggctgttccttctctcytctttgaggcttatcactctgtgcttccctaaaaggtataagctcacctggtctgtcccaagccctatgcttttctctctgtaccctccccaggagaacctcatttattctattagttgctgcgaacctctgtatacaaatcacccttcaacagcccctcagagttggtactcgatggcttataaataaatttaatataaaagatttcatcagccttcatttctgaataacagataattcttaaaaatgattatcaaagaataagcatataaaacaatgtgttaacctttggtgaccctttccgccactctgactgtctgacagctgatgcttcagtcttaagatgcacagactatgtcttgctttcaatgtacttcctctaaagccacttcatcacagttttaacaactgccaaattaatgtagtacttcaaaaaatccattgagaaataccctatgttgaagaagtaact

SEQ ID NO: 208368 - DNA, 537 bp, Homo sapiens
tttctgtatcccccagcggcttctgctggttctcctgtgattctgtctggctgttccttctctcttctttgaggcttatcactctgtgcttccctaaaaggtataagctcacctggtctgtcccaagccctatgcttttctctctgtaccctccccaggagaacctcatttattctattagttgctgcgaacctctgtatacaaatcacccttcaacagcccctcagagttggtactcgatggcttataaataaatttaatataaaagatttcatcagccttcatttctgaataacagataattcttaaaaatgattatcaaagaataagcatataaaacaatgtgttaacctttggtgaccctttccgccactctgactgtctgacagctgatgcttcagtcttaagatgcacagactatgtcttgctttcaatgtacttcctctaaagccacttcrtcacagttttaacaactgccaaattaatgtagtacttcaaaaaatccattgagaaataccctatgttgaagaagtaact

SEQ ID NO: 208369 - DNA, 540 bp, Homo sapiens
aagattacatttaatggaacaaaacaaattggtaacaattaggaatattcacacaatctttattttgcacaggaaaataagattgtcttgtgacggtgatcaattaaacagattgtcagatatgattccttaagctagattattaaatagaaaaaaattcactctttgtagctgcagggcagaggggacattacctccactatctcttcctgagaatcccatttgttaattatgaaggttttttttttttttttttttttgagacttaagtctagctctgtcacccaggctggagtgcagtggcgcgatcttggctcactgcaacatccgcctcccaggttcaagtgattcttctgcctcagcctccccagtggctgggattacaggtgcccgccatcatgcctggctaatttttgtacttttgtagaggtagagatgtggtttcaccatgttggccaggctggtctcaaactcctgacctcaggtgatccgccagccgtggcctcccaaaatgctgggattacaggygtgagccaccgt

SEQ ID NO: 208370 - DNA, 586 bp, Homo sapiens
gatttgcagatttaactccatatttgccaccttgaagacatcattctattgcccttatggcattcacagtttcagaaaaactatatatagtcattctttttttttttttttttttgagacrgagtctcgctctgtcgcccaggctggagtgcagtggtgggatctcggctcactgcaagctccgcctcccgggttcacgccattctcctgcctcagcctcccaagtagctgggactacaggcgcccgccactacgcctggctaattttttgtatttttagtagagatggggtttcaccgttttagccgggatggtcttgatctcctgacctcgtgatccgcccgcctcggcctcccaaagtgctgggattacaggcgtgagccaccgcgcccggccaatatatatagtcattcttaacttctctgtaaaggtagcaagtattccttgccttcctttttctttcttttaattttcttatctggttttcagttacttaaccatgatatgacatggtgtgattatctttgaaggaataactttacaatttttaaattaaaattatatatctgtatattcaaagtactaa

SEQ ID NO: 208371 - DNA, 586 bp, Homo sapiens
gatttgcagatttaactccatatttgccaccttgaagacatcattctattgcccttatggcattcacagtttcagaaaaactatatatagtcattctttttttttttttttttttgagacagagtctcgctctgtcgcccaggctggagtgcagtggtgggatctcggctcactgcaagctccgcctcccgggttcacgccattctcctgcctcagcctcccaagtagctgggactacaggcgcccgccactacgccyggctaattttttgtatttttagtagagatggggtttcaccgttttagccgggatggtcttgatctcctgacctcgtgatccgcccgcctcggcctcccaaagtgctgggattacaggcgtgagccaccgcgcccggccaatatatatagtcattcttaacttctctgtaaaggtagcaagtattccttgccttcctttttctttcttttaattttcttatctggttttcagttacttaaccatgatatgacatggtgtgattatctttgaaggaataactttacaatttttaaattaaaattatatatctgtatattcaaagtactaa

SEQ ID NO: 208372 - DNA, 423 bp, Homo sapiens
cttaacagtgggtgaaacagagccattttagygagcattcctgaaacaaaattactgctaaattttaagagtgccttttgtctgtttcacagccccaaaacaaaaaaatgtttttcaagccccaaagagacttcagaaggactttgctcctttaaatcaagcagtgacaccttctcagctcagcctttatttaattagtcacgtccagcatgctgtgacccagtgccctctgtttaaccttcactgataagagcaggtcaaggggcatgtaagtttgaatataaaaattaaaccaattttcaaggaaactatatttcctttttagccagaattaattgccaagtcagtacattgatttgtttcctgagaccaccttcaattgtaaaaactgtcaaactgaatgcaatatacaatatcctcagt

SEQ ID NO: 208373 - DNA, 567 bp, Homo sapiens
gtgaggttacatccagctaattctgagagtggcaagatctgaaattgaaaccaacttctgctgtcagggtgaaaaagaattgctattaaaaattggggccgggtacggtggctcacacctgtaatcccagcactytgggaggcagaggcaggaggatagcttaagcccacgagtttgagatcagcctggccaagagtgagaccccgtctctacaaaaaaataaattagccaggcatggtggcgcttgtgtatagtcccatctacttgggaggctgagctggaaggattgcttgagtcttgggagatcgaagctgcagcaagctgtgactgcaccaccgcgccccccagcctgggtgacagagcaagactctgtctcaaaacaaatatataatatgataataatataagtaatatgaattggaagaaaaagggaagaagtccttttcccatacatgtagtttgaagagtcacagccccagtgtcacatggcaagagtgtgacagggttagagcccaaagagtagaacttagtaaccggcaccctctatatttttagatgtgttggtta

SEQ ID NO: 208374 - DNA, 567 bp, Homo sapiens
gtgaggttacatccagctaattctgagagtggcaagatctgaaattgaaaccaacttctgctgtcagggtgaaaaagaattgctattaaaaattggggccgggtacggtggctcacacctgtaatcccagcactctgggaggcagaggcaggaggatagcttaagcccacgagtttgagatcagcctggccaagagtgagacccygtctctacaaaaaaataaattagccaggcatggtggcgcttgtgtatagtcccatctacttgggaggctgagctggaaggattgcttgagtcttgggagatcgaagctgcagcaagctgtgactgcaccaccgcgccccccagcctgggtgacagagcaagactctgtctcaaaacaaatatataatatgataataatataagtaatatgaattggaagaaaaagggaagaagtccttttcccatacatgtagtttgaagagtcacagccccagtgtcacatggcaagagtgtgacagggttagagcccaaagagtagaacttagtaaccggcaccctctatatttttagatgtgttggtta

SEQ ID NO: 208375 - DNA, 570 bp, Homo sapiens
atttattttatatatatttatataaaatataatgggcatttattttacatatgcttatgtacagaactgagtttttagcccaaaaaaataaaagtgataaagctattactaacctaataggattaaaggcatataatgtaaatgtgcacctttatttaaagaaattaagtarcaacaaaaaagtatgccggatcttgtttctgaagaccttgatttgaaatttttcattttaatacctagatgaccttagctgattaaatttaataatatttataaaaatgttttgaattgtaaaactccttaagtaatcaaggttttaagatgcaatataaatcaatcaaacaaaaaagttagtatgagtaacactagtgggaagtgagtttttaggaagattcttcctttccaagaaaggcttgagggagtgagacacttgattttgaggaggcctccatgtaaggtcagctgatagaatttactagaaattatataagggtcttccacagcccttctcactgaaaaaaaaaatccttgtaagagaatacacctggcctgtctgattatccctaagac

SEQ ID NO: 208376 - DNA, 539 bp, Homo sapiens
taatcaagttgagtgcattatttgcacggtagacaagtaaactgatggagcacaatagagagcatagacccagattctggcataaatggtacttgatttatgacagaaatagtgctgaagaacagtagaaaatggatgttctctctcaaatggtgctgagaaatttcctgtccatgtggaaagaaagaaatctgaatcttcagatcataccgtataaggaaagaattccaaatggattaaaarctgaaaggtagaaacattaaatagatagaagagtattgagattaacttcctgacctgaagataggtgctttgctaaacaagactttaaaacagtagcgtaagggaaaacatttttaaaatagcatttacatttaaatcattaacttctgtttatcaacagacactattaaaaaattagaaaggccaataaatgggcagaagaagatatttccaatgcatataactgagtagaagcatgtatcagattgtgtgaagagcttctatcaaaagccctatagagactgagtaaaatactt

SEQ ID NO: 208377 - DNA, 468 bp, Homo sapiens
aatttaatagaaattgataatagctcttctatggaagctaaaacttcaaactccgtatttttttatttatgctaatctatatttgttatggatttttacacacttattattcaatctttaataattcctataccaaaaagctggacaagatggtgaagtaaacttctccagggattgttcccccaaagaaacatcaatctgaacaactatccacgcaccagaaaaccttcataagaattcaggaaatccatttttttttcttcatcagtgttatagcaaaataatgttgaatgaaacaatgttattccagaacctgctgtacgtsttttctcttaaagtggcaattttcaagaatatatcaatggcaatgttcctggttgtagcataataataagaagaaaagaagcactgaagaacctacaaggacaggtttacattaccggaatcactctttcaccaacccacagc

SEQ ID NO: 208378 - DNA, 642 bp, Homo sapiens
tacacagtcaatttggcgccttctttaagacaattttgccagcgactctgttccattcctattataatacctttaataaaaacctaatatgtttgccgtcctgtttttcattgccaagttgacccttttcatggcagtggatactttattttgacaaaaacttagtggttagtcttgactacagaattttcttagattcaacctgcgctgactctcaggatggattgtcaactgggtacctttcaattagatcttgatcttgagaatttatgcctattggaaatctttgttgacagaagacctcttaggtttcccaagtgcccattttttttagactcgtcagttctatttttagcaatttcaagtgggaaatatttagaattatagcacagctcctattaaagagaggtataaaagtatgaaaattatccagaayttaaaaaaaaaaagggttgtgacatagtacattttatatcatcaagccactactattagaagaatatggtattggaacaggaagagacaaaatggaaaaacaaagtagtactcagaaatagatccagccaaagggaatgtactaaatatgacattttaattcattcattaaaaaactgaatatataatgattatcttttcataaag

SEQ ID NO: 208379 - DNA, 519 bp, Homo sapiens
gagacctcatctctacaaaaaaatttaaaaaattagctggatgtggtagcttgcacatgtggtccctgctacttgggaggctgaggcaggagggttgcttgaggagtttgaggctgcagtgagccatgatcaaaccactgcactctagcctgggtgacagagtgagaccctgtcctcccacccccaaaaaaagagccctaggagcatcaagggggcacagcagaatccgtcttggagctcaaggccacctcttaaaggggygagactggttttgaaggataaggtaggtatactgataggcatattagtttcaggctatacttattttatttctgtgtaatacattaccacaaattagattaaaacgacacatctttattatctcacagtttaagtcaggtacagtatagctggattctccacccaggggctcacatgactgaaattgttaccaaaatagggctttggtctaagtcccactactcccagcacagaaagccaatcactgagacaataagt

SEQ ID NO: 208380 - DNA, 519 bp, Homo sapiens
gagacctcatctctacaaaaaaatttaaaaaattagctggatgtggtagcttgcacatgtggtccctgctacttgggaggctgaggcaggagggttgcttgaggagtttgaggctgcagtgagccatgatcaaaccactgcactctagcctgggtgacagagtgagaccctgtcctcccacccccaaaaaaagagccctaggagcatcaagggggcacagcagaatccgtcttggagctcaaggccacctcttaaaggggtgagactggttttgaaggataaggtaggtatactgataggcatattagtttcaggctatacttattttrtttctgtgtaatacattaccacaaattagattaaaacgacacatctttattatctcacagtttaagtcaggtacagtatagctggattctccacccaggggctcacatgactgaaattgttaccaaaatagggctttggtctaagtcccactactcccagcacagaaagccaatcactgagacaataagt

SEQ ID NO: 208381 - DNA, 547 bp, Homo sapiens
ggagaagatgaggaagggttgtctaggaagaagaaataggatatgcaaaggattctggggaactactggaaaatgatgctagaaaagtgagtgccatgtctctagcaacatggcaaagcagattctggagaaatctgccaactcaaaacccctaagatactggggaaactattaaaacatgttttgtagcaaggctgggctggcaggaatgggaggaaactcctctgaggtcgaacaatgagaaagtgttaatcccgagaggtgagcaggagccagcacttgccctgaagccacctgctaatactggccaagcagcaggctggagataggagacaaaatctagactggagcagagggtgaaatcagattggaaatccttatgcacaccagagccctcaaagggtggaaatttcagcaagggtggttggacttttctccccaaaggaaacaaaggaatgcttgccatagatagwcaatttgccttaagatacctcattttagctcagagtggaaccaaaacaaagacaaaagtttcccctaagaattc

SEQ ID NO: 208382 - DNA, 382 bp, Homo sapiens
ctgtgagtgccagagctaggaacagtatccctggttsgatgtgtttctccccatacatactgcttctcaagggagaaattggtcagttctgttaacaatgcccaagtgttcatattgtaatgtcctcttatgaatctctcactcttacactttcttccccatcctaatccatgttctgctgggccccagatgtaaatgggatcgtggccagctcacctctttcctccccttccccaggactcccggatgtcatgcatcagccctatgagagtcttgcctcttcttcaacacacctgtgtttcaccgctgtcctttgatcaggagtcctgtctggcaaaggtgcaaagccccctacatctcttcctctcaaaacctgctgccc

SEQ ID NO: 208383 - DNA, 522 bp, Homo sapiens
cctgtgagtgccagagctaggaacagtatccctggttcgatgtgtttctccccatacatactgcttctcaagggagaaattggtcagttctgttaacaatgcccaagtgttcatattgtaatgtcctcttatgaatctctcactcttacactttcttccccatcctaatccatgttctgctgggccccagatgtaaatgggatygtggccagctcacctctttcctccccttccccaggactcccggatgtcatgcatcagccctatgagagtcttgcctcttcttcaacacacctgtgtttcaccgctgtcctttgatcaggagtcctgtctggcaaaggtgcaaagccccctacatctcttcctctcaaaacctgctgcccaactttccctctctttccagaaataataattccctccctgtcctcccacaactctacttagcactggcttgaatggtgacaagtagtgtatgtgtttccctgactacactgtgactgcttctatgatcacactgaattc

SEQ ID NO: 208384 - DNA, 555 bp, Homo sapiens
  misc_feature (1)...(555): n = A,T,C or G
gcgtcgggggcgcagggcgcacagtggactccgggggcgctggcggtgctgggggtgctgacggcgcggggcgcgcgggcggtgcgcacagcaagatgcgaggacgcagacccggctcccggaaaggctgtgcctctgggcccccaggtgcctggctctggggcgcakgaggcggcggcggcggcggcgtggggagtcctggccccactgcgcctagggcgaagcagcgtttccgcgcgtcggagactcntggggcgcccgagagcccccgcgctccccggctgtgtccgtgccccctcttgggggaacggccggcgccactgggactggcaccggcaccggtaccgggaccggctgcagccgatgggtcctgtcccgcagcccgttggtggctacggcgcggggctcgggcgcttccaagtccagtcggaaagttttatagccgttcgcgcgccgcgccggctccttgcctttccgcttgagcttcttaaggccgttcagctccttcacgcacacggtcttccacggcccgtcctcgaggaccgggatgtgctt

SEQ ID NO: 208385 - DNA, 555 bp, Homo sapiens
  misc_feature (1)...(555): n = A,T,C or G
gcgtcgggggcgcagggcgcacagtggactccgggggcgctggcggtgctgggggtgctgacggcgcggggcgcgcgggcggtgcgcacagcaagatgcgaggacgcagacccggctcccggaaaggctgtgcctctgggcccccaggtgcctggctctggggcgcaggakgcggcggcggcggcggcgtggggagtcctggccccactgcgcctagggcgaagcagcgtttccgcgcgtcggagactcntggggcgcccgagagcccccgcgctccccggctgtgtccgtgccccctcttgggggaacggccggcgccactgggactggcaccggcaccggtaccgggaccggctgcagccgatgggtcctgtcccgcagcccgttggtggctacggcgcggggctcgggcgcttccaagtccagtcggaaagttttatagccgttcgcgcgccgcgccggctccttgcctttccgcttgagcttcttaaggccgttcagctccttcacgcacacggtcttccacggcccgtcctcgaggaccgggatgtgctt

SEQ ID NO: 208386 - DNA, 541 bp, Homo sapiens
gaattcacctgagtgataccattgtatatttaggatcttgccctgtagccctgaaagaaaaagaaatacatcttcaccttgctttcttttctttcctttttggctaggctgcagctgttactataatcacagtcaagctgaaaattagctgaggaaacatattatacacaagtataacaggccaagagcttgtttccttgggcatcctaaggggtagtatgacaggcatgcaggagggacagaggtcttyaccccatctgtgtgtgtctgtgtgtgtttgtgtgtgcacactagtgatctttgtggtgtttgactccttgttcatatgaattgtggtcagtaggggagttatacctccttcgttcttgtttctgaacaagtaggtaaatcttatgcatctgaaagggaaatcatgttgattggtcccaaaaaccatagccctcatcaaatctctggcctacaattcttaatgaccgatttgaaagtagtcatatattttatagaaagtatcattctgtattatgagttataaaatgccaag

SEQ ID NO: 208387 - DNA, 577 bp, Homo sapiens
agtgtagaggatattcacatactgccaagtcatagggaaaggtctctggtttcgtaagttcctaatgccacccctcaagaaagagagaacaagtcttccctcccccagctcctgctctgacaacagccacaagaaccctggaaggccccctaggctaagtgaagtgtctgtacttgtgactgctttgagaaggttctaagcattcacttttttgtttgattttttgtccccgctaaaactcatttgctagctcattctttcactacacattagctgttcatggggaagttttgctgaagtaattccagtcttcagggaaccactatggacagaccttttccatattagtccccatgggtaagttccacaaatgccccaaaacacacctttacattttctttttaaaaatgttgatttgtttgtaagtggctactgtccattcacgagacagcgctgtggagctgcgtgagagggacttcatttggtggagctgctgttcttaggtgtggacgcygcccagctctcagatcagtgcggagaaaacccagtcgccagactgcagcccaccacaggtgtc

SEQ ID NO: 208388 - DNA, 646 bp, Homo sapiens
acaataaggcagaccaacccttggtgatatgtatgtagctatgttttgtttcattttaatgaatttgtggtctttagagataatggacaaaagtaatttatggatggacctggggcctggaagtccaagccttttcctgaagagggaggggcctactcaaggcatccactgtggaggacatccctggtgactgtaaacctgtggcatctggcttgctggcttttgccctttccttagggatctgtctggcacccaccatggctctggctctggactcatacccctcttttcataaaccctaactgcatggaaagcatgttgtaaacatgctcatgtagaaatggaaacaactcgagaatttgtatactggccttccctggtgattaatttcaattggcaataaaagccacaacctaaaggaactgaatgtttgaggaattcaaagagtcmtttctatgggggcatgtgtgtgtgtacatgcacacatgtctatgaattaagttatacacagactttgaatttcacggccagatgaccagattcttctcaaatctgaaaaaaaaatacatttaaagtctcacccaattgggcacgcagctctttgaacagtttcttccagcattatgtccctatgccctgcagccta

SEQ ID NO: 208389 - DNA, 413 bp, Homo sapiens
atgtgactgtatttagagatagggcctttaaagagataatcaaggtaaaataagattgaatgggtggggcctaatccaatatgactattgttcctgcaagagattaggacatagacatgctgcgtgcacagagaaaagaccacaagaggacacagtgagaaggaagccatctgtttatgaagatgagaggcttcagggaaaaaattaaaaattggtgatcctttggatctcaggcttacacctccagatttgtgagaaaataaatttcttttgttcaggccaggcattggggtattttgctatgaaagccctagcgaatgaatataatcagcatttcgacacagccacakcagtgattcgcgtaaggtgaaataaacagtgaagcttgggtactggaactgatctgtgaattc

SEQ ID NO: 208390 - DNA, 413 bp, Homo sapiens
atgtgactgtatttagagatagggcctttaaagagataatcaaggtaaaataagattgaatgggtggggcctaatccaatatgactattgttcctgcaagagattaggacatagacatgctgcgtgcacagagaaaagaccacaagaggacacagtgagaaggaagccatctgtttatgaagatgagaggcttcagggaaaaaattaaaaattggtgatcctttggatctcaggcttacacctccagatttgtgagaaaataaatttcttttgttcaggccaggcattggggtattttgctatgaaagccctagcgaatgaatataatcagcatttcgacacagccacagcagtgattcgcstaaggtgaaataaacagtgaagcttgggtactggaactgatctgtgaattc

SEQ ID NO: 208391 - DNA, 451 bp, Homo sapiens
agcttaagagaacacagaaaaacaagaacatcttattttatttaaaataaactagaatatattttcatttggggaagcattttcatttctcaagcattactgacattatctttcggatctccctgtgagaagataagagggcaggcctgggaacatatgctgacttttaattctggaactcagtacctccgctggggatagtgccaggaaccccagagtcttccaacctagtaggtcagggtgttggcaaatcagagtgttagtgagaatgcagscaacagttgatccggcaccaattccagtacacactggtaattatggcaggctgaggtcagttttccaaaatggaagaacgtgaaaggtcttcaagcaacatacaaggtcaacctgatttcttcacatgggcccatttgtgaaatagatcctatttctaatgatcagcttcattatg

SEQ ID NO: 208392 - DNA, 451 bp, Homo sapiens
agcttaagagaacacagaaaaacaagaacatcttattttatttaaaataaactagaatatattttcatttggggaagcattttcatttctcaagcattactgacattatctttcggatctccctgtgagaagataagagggcaggcctgggaacatatgctgacttttaattctggaactcagtacctccgctggggatagtgccaggaaccccagagtcttccaacctagtaggtcagggtgttggcaaatcagagtgttagtgagaatgcaggcarcagttgatccggcaccaattccagtacacactggtaattatggcaggctgaggtcagttttccaaaatggaagaacgtgaaaggtcttcaagcaacatacaaggtcaacctgatttcttcacatgggcccatttgtgaaatagatcctatttctaatgatcagcttcattatg

SEQ ID NO: 208393 - DNA, 426 bp, Homo sapiens
gaacatcttattttatttaaaataaactagaatatattttcatttggggaagcattttcatttctcaagcattactgacattatctttcggatctccctgtgagaagataagagggcaggcctgggaacatatgctgacttttaattctggaactcagtacctccgctggggatagtgccaggaaccccagagtcttccaacctagtaggtcagggtgttggcaaatcagagtgttagtgagaatgcaggcaacagttgatccggcaccaattccagtacacactggtaattatggcaggctgakgtcagttttccaaaatggaagaacgtgaaaggtcttcaagcaacatacaaggtcaacctgatttcttcacatgggcccatttgtgaaatagatcctatttctaatgatcagcttcattatg

SEQ ID NO: 208394 - DNA, 392 bp, Homo sapiens
tgccatttgtaaaattcagagacgtgcctgaaaacagagtccaccccagatggctcagatgaaaagaacttaaggggaccacttagctagstgtgatcagggttatgagaacaaagggtgacaaggccaaaagcaagggccagaacagcaggacaggggaacatacaggaggtattcgcgctgagatctctacagccggagatgggagtctctgtttcccatctgtcatctccaacctaataggatgccagacagcaagggaccttgggtgatgcagtctggaggatcagcctcctggggcagggaggagggagagaatgcatgggacgccaggtggcaaacggcccactgttcctaccgtactagatactggcagggcaagcatagaattc

SEQ ID NO: 208395 - DNA, 530 bp, Homo sapiens
gttaagcatgagactcagcagaaacaagaaactgcagattcagatagacaaaaacaataggtgttggaatcgctaaaaatacaaaataaacaagtgtagtatatttaaaggaaaaagacaaagtgaaagaatgaccaactaataagagattatgaaaattggccagatcaacttgaaaaagaaccgagtgaatatctaaagatgaaaaactggaaattggaaactcagtaataactggatacatcacaaattactgaaaaacagagctggtgaaattactcagaccattgcacagacaaatgtggaaatggaaaatctgagcagttaagctacatggagaggagagtaaaatcagtcaacattaaagcacgtctaatgcttcctaaagaagagaacagagaaaaaggagaaaaggtaggcgtttgaaagataatgatgatcragcactttcttggacggctggaaaaaccatatcttagattccggaagcccaagcaatccaaagtagagtaaattaaaagaaattcaac

SEQ ID NO: 208396 - DNA, 589 bp, Homo sapiens
tgtttttgtttttctaaattttaatgatgtcttacatttatgatgtaattaacttacataaaaatgtagatattctaagaattttagttttgggaaggcttttctaaatataatttaagtattaaaggactaatataagagtaacaaccaggattaggaatttatttcagggttctgtctgtactatgtttattgattataccacttagagtgatattttattttgaaaaacctgtagcagatgatagcataacacagtagttctgtttctaaatattttgtgcaaatattaaaacaatagactgatttttttggatagtctcttagagtaacataaattcaagggttttgcctcaccccgaggaaagctttttgattaaaagatgagattgaagcataatgttgctgacatttattaaatgctcagaatgtgtcartctctgggttacgtgttccaaatatcaactttcaaaataacaccacaaagaagtattattttcactaggcaagtgagaaaatagtggtccagaaaataagtcacttgcccaggctgtgttataaagctaataaatgggaacaactagaattc

SEQ ID NO: 208397 - DNA, 535 bp, Homo sapiens
agattaatgcctaaataaattgaggtcattgggaaagtataatttatatgaaactatgaaaattatgtttwttaagttccatataattgtcacggtttgatgaatttaaaagtgtatttgtagatataaattccaattttatatatcagatttttaagaggggattttacagttgaaatatcagtaaatcttatcttttttaaatggtgacatgtgttataaaatgttttggaatacagtatatcacaataataaaagaaaacagtttaaaaatctactcttgcttaaaagtttctactactaaaatgtaatatggcaatattttcttctacattttgctaatacactacctggctcctcattttttcagcttcagtaatctataatttaatactgtccataaataatcatttttggcctagattgaagctattattagcaactattagcaatacctttagtgattttcagaagcaagtgagaaaaatatgttatcattattattccatgtcaaattcaagtaaccataattaga

SEQ ID NO: 208398 - DNA, 551 bp, Homo sapiens
tgacaaatactcagcgtgatggtagcctttcctgtatcacctggtaggtaatacagtgaaggcagagacccgtctagctcaaagaagtccaggattttggtaacttcaggattcctgctggtgtcatgctgacagctgatgtgtctcagtctagataaaagaaataggttttcataaaattttatctaggttaacttctctaggctatttcttgtcaccttggtgcctattcctccttgccagaacagcctatatacaataataaaacagggtggctgttatcagcaaaggagaygaagtgggatttcttctcattcactcatttattagccattgagatgcccaggtgtgtaacaaaggccaaaactttctgaaagcctcttttccattccggctctctgaatcaatggcttaaggagtgtgcacatcctcctcattataaaatctcaatagataagcatattgagtacatagatccaacatagcaaatataaaaatttcaactttactcatagtctgatgacaaaccaacagtaaactattccaagaaa

SEQ ID NO: 208399 - DNA, 444 bp, Homo sapiens
taataatcgttacataatgtatatgtatatcaaatcaaatcattacataatgtatttgtatatcaaatcattataataatcattacataatgtatatcagatatataccttgaatatattcaatctttatttgacaacgaaatgttttaaatttaaaaaaacacacaatactgtcagcacttgaacattctcagccttgctctctcctccacaaacatcctgagtggccagagaccacaggtgttagttgagtgcaatgaagcatactttatgatgtgcttgaatgagacaaaggccctacctattcacctttaatataaagcatttagcrtggtgcctagaatgcacaggagtcactaaagtaaatgtttagttggcaaatacatacttcaaatgaaatagcaacagaaaggacaattttaaaaatcattcagtaaatatttt

SEQ ID NO: 208400 - DNA, 519 bp, Homo sapiens
ctgaattgacttagcaggattctttgataaaactaggctcagcaggccaagaatgggaccaaaacaaggcctagttgaaaagagggctcagtggattctagttagtgtttggtcagggagagagtccttgtcaatatctatgggaagaaggtgctatggaaggagcatcaccctttctccccccgacccayttggcaactcctgtcactcaataccctcacagccttcctggcctctctgaatctataattacactctttagactgaaaaacctgagaaacaaactgcctcagtaacattcatttttcatgaattatttgtgctacccaatgataccatgtctagggcaaaactccttgccactggcctctactgtgaaggaaaatcatcaggttaaatattctggaaatttaaatcttccagcttatatttctttagtttgacagttcagcattctgcatgatacttagaataggtgtatatttatttaaaattaacaacttctacccagtatttggt

SEQ ID NO: 208401 - DNA, 610 bp, Homo sapiens
tagttcctttaaaaatgaactggttaagatagtcaatctctgttcttgtatttwtaaaataaatctttctatgaaagccaggtacattcatatctgtcatatttatctctctgcacctccatgagaaaaggcttgtgctcatcatgactcctttagtaagagtttttgcttaatgtcgtcttatttgcttacacttttccacctcatttttttttcttttcaggaagcttattttttacactgtactaccataatttctaatttctagtaattaaaatactgttaccattttattttcttcttccctgttgattaagggataagaacaaataaatacaattgatcctccatcagcattttaaggatgcaaatttttaaacacattgtcctgactcctttttacaagttagagtacaaaagaatattagaaagataatcaattaagactttgatcatttcattgtagccatgtgattctttattagtgtgctttgtagataatggctgaattaaaaaacctagattattaaaactacttgcccaaaaaatgctatatttagtcatctctttaagaaataatctacagattgcccttgacttaagatggttc

SEQ ID NO: 208402 - DNA, 588 bp, Homo sapiens
cgagaaatgaaaatgaacacacattatgctttccataaataaattcaggggcaaaaagagttagagaagaggttaattgtttgtggagaaaaacaatttaaataagaaaaaattgctaaacatagaaaggcaataaaataattattgtgagaaattacaatgtactaaaaaaatcttgtttattattttgctgtggacatttagaaacaatgcataggatactgtcaagggagttgtattaagtcatttggcaattatgttttcttctcttttttgagtaagtcctccctgagtctaacatgcataagatattcaccaaagttagacrctgcctcagacactgtctgtaaaaaaaaaaaatcagaagtttatctaaaaaataaaaagaataaatgaacatttatggcaattgaagccaatccaagaaatgacaagttatgtattccacaagatttatagtgaagagttctaattcatattttagaacccacatagaaatatgcacacacagacacacatttacacacacaattcctggtgtatcccagagtcatgaattgatgtagcacattgaaataatggcaaatt

SEQ ID NO: 208403 - DNA, 572 bp, Homo sapiens
caacagattctcactacttgtattattaggatgttttggcccattaggattctttggtgtttctgtcacaagtgagaaggtatgtgaattgattctgggctaaggttattcaatgggtaaatataaagcaattatttttatccacaatgaggttgacttgtactatgcagtcatgaatctttctcaaacaaagtaagagctctactaaccctcacacatttgtcttgaagcacggttagaatgcttgagatcccttttcagactcagtaagctgataaaacctatcctttatgaataaaaatgacaagactaaagtgtatttaagaagattctcagagcataaagacacatgtttgtctatgcacatgtgtttatgtgtgtayaatgtgttctctctttttaaaaaatgaacaggaaatattagtcatttttgaacacatgcaaagaacaaaataatctcagctaaaaggaatggttttccctttttcaggaagtttaaagcaagtgtctgaatatagggcttgcaaaataattgttttctccaacagaattatagcataattactgagggg

SEQ ID NO: 208404 - DNA, 570 bp, Homo sapiens
ttcagattcttcatctaaaaaattctcaacatttaaaattaaaatattgatatcaaaaaccattgaaatacacttaaaatgcatagaatgtgctttttattttgttctttgaagaagatatgccacattttaactggtttgtcatatatgacacaatcttgtactacattcttactcatasagttggatttagaactcaggtgtctaactcagaggtgtacataattctacaaatttgaattatagttgttaattgtatttactctattttataaaatagaaatttgcatgttacaatgaattaaaaataaaattcaactttaaaaacagctgttaataaattctagaacagtaataataattttttcatcccaatatgcaaaaaaaaaattacaggaatcttctaactctgtcttgacaaggtacacttcccaataaattaactatgacagttattctatacacaaggaataattctacatacaaatggggaaaaatgtcaatgcaaatgactatgcaatgacatagaaggctggagagaatggagcatttaaaaagctgaaaaaatgg

SEQ ID NO: 208405 - DNA, 570 bp, Homo sapiens
ttcagattcttcatctaaaaaattctcaacatttaaaattaaaatattgatatcaaaaaccattgaaatacacttaaaatgcatagaatgtgctttttattttgttctttgaagaagatatgccacattttaactggtttgtcatatatgacacaatcttgtactacattcttactcatacagttggatttagaactcaggtgtctaactcagagstgtacataattctacaaatttgaattatagttgttaattgtatttactctattttataaaatagaaatttgcatgttacaatgaattaaaaataaaattcaactttaaaaacagctgttaataaattctagaacagtaataataattttttcatcccaatatgcaaaaaaaaaattacaggaatcttctaactctgtcttgacaaggtacacttcccaataaattaactatgacagttattctatacacaaggaataattctacatacaaatggggaaaaatgtcaatgcaaatgactatgcaatgacatagaaggctggagagaatggagcatttaaaaagctgaaaaaatgg

SEQ ID NO: 208406 - DNA, 591 bp, Homo sapiens
aagcttacattctatggaacattactctttgcactatctgaatgctttacatgagttacctaatatkctcctaataaacactcttgctgtcttcattttatttattaggaaactgaggcccagagaggtgaagagaattgcccaagactgcgcagctagcatgttctctctttatatcgatgttgaacaatgctttttctataataatatgtttttgtttttgtagataacttcccaaggttgttatttatctttcagttttattcatttttgtgtagaaattaaatgtttgtatgtgatcaaattatcaacttgtttaatgatttctttctttgtttcaaagactaaatagtatctgttctattttggaaaataatattcgaccatatttctagtttttaagatacttggaatatattctataaatgatataagatgggaacctaaacttagattattttttcatgataatccgtactttaaaattgatttgttgacaacaccttatttttctgttgccttgtgatttttgtttattatatgccatattcatatatgtacactctattattttatattctcttcaacaca

SEQ ID NO: 208407 - DNA, 505 bp, Homo sapiens
attcaatgttattatattaccccatctccctcaacaaacatttaggatcagcaatttagtgtggaatggtgcttgaagtcattccacttttcactttagagcataagctggttccacttacgatactgtgtattctaagccagcatcattgtaactgatagtctcttctcacccagctttgatggtggggcagctcccatgtctgcagctgtggtccaggggctgtctgtgctgaatacagcagttgctgtgacactaggcacatgccatctgcagcatctcttttttcttgcatccctgttttgagcacaggtatgtaaaaatcttctctttcttcttcccaggctgatagtcatattctctatcaatgtgatcgccaaccaccayatctggtacctgacaaagttctccccgttcttctgtctcctctcctcaagtggaatgaaggggtttcttttggagccatgagctgtgcagcctggggttaagggaggggttttgctag

SEQ ID NO: 208408 - DNA, 579 bp, Homo sapiens
tgtcagttaagcctattaggtctagcatatagttgaactttaatttttctttgctaattttctgtctaggtgatctgttcattacaaagagtggggagttaaagtaccctactattattgtattgcactctgactctttcttttgctcttttaatgtttgctttatatacttgagagctcctgtgttggattcgtagatatttataattgacgtctttatcattataaagtgaccttcttagtctctttttatggtctttgattgtagccttttttgtctaaaataagtatagctacttctgctcctttttggcttctagttgcatataataccttttctcatcccttcactatcaatctacttgtgtttttataactgaagtgagtattctttaggcagtaaatagttgggtcttgtttctttatttattcagccattctatgcsttttcattggagcattgagtccatttacatttagtgttactattgataagtaatgacttactactgtcatttgttgtttgttttctggttgttttgtatctcatttctttttgtcttgttttttggtaaagta

SEQ ID NO: 208409 - DNA, 516 bp, Homo sapiens
tattgcttgatgcctgaggaaaagaacgttctacataaaataacatttaaggaagataagtttctcattcaatcatttttagtagctaaaatatttcttccagattttaactttttccttagtctctgactctgccttaaggagcaaaatgctacaacacttccaaagcaacttaaagaactgtcaatgaaaatcagaggataggtatttggaacatttccctcatgcacaagtcaaatgatacatgccaattagaaatataatagtggtgctaatagcagcctagctgataaaggacaagagcagaagtaggtagcaattggaatccaacagcccgtgtgactcctatgtgaaattctgtgwtataatcaacaaatgagtattgagcagtatttgaagaacagtaggctgctcacttaaacataggaagtgggaacaaatttgaatttttttagaagtttcacatttgcaagagaataggaacttaaagtcaaatttagcactttcaagtcctgg

SEQ ID NO: 208410 - DNA, 429 bp, Homo sapiens
gaattctcatggacaaaagctccccatgcaaaggtcccgtggcaggagagttccctgtgctgagtgtggaaatagaggtgaagggtgagatggagattagggggtaccagactgttaggtcctttggggacatggtaaagagcttgattctttccaagagctgtaaaagctgctccagtgtatgaaggagcatgattaaaattgcaatttgaaaccatcacgtgcagggagtggaaaggcgtgaggtagagtgamgtggagcaaatccctgaaggggccatgcagtgcaggtgggtggagacggtcatgtggaaaattgactcaaatgggacctgggatctgcctcaggatgggggtggggcggagcatgggaaagagtgcaggtcattctaatggcggccgcacctaccaggtcaggccaggcctccg

SEQ ID NO: 208411 - DNA, 435 bp, Homo sapiens
ttgattctttccaagagctgtaaaagctgctccagtgtatgaaggagcatgattaaaattgcaatttgaaaccatcacgtgcagggagtggaaaggcgtgaggtagagtgacgtggagcaaatccctgaaggggccatgcagtgcaggtgggtggagacggtcatgtggaaaattgactcaaatgggacctgggatctgcctcaggatgggggtggggcggagcatgggaaagagtgcaggtcattctaatggcggccgcacctaccaggtcaggccaggcctcckcatcgggccctgctgcctcctggccctgggacttcctgcttcattgcgggtgttctggggtctctttttctcccaaggcttccttgtgcccaggtcatttcttggagacagtgattcccggaacggaaaccgtcaacagctgcataact

SEQ ID NO: 208412 - DNA, 435 bp, Homo sapiens
ttgattctttccaagagctgtaaaagctgctccagtgtatgaaggagcatgattaaaattgcaatttgaaaccatcacgtgcagggagtggaaaggcgtgaggtagagtgacgtggagcaaatccctgaaggggccatgcagtgcaggtgggtggagacggtcatgtggaaaattgactcaaatgggacctgggatctgcctcaggatgggggtggggcggagcatgggaaagagtgcaggtcattctaatggcggccgcacctaccaggtcaggccaggcctccgcatcsggccctgctgcctcctggccctgggacttcctgcttcattgcgggtgttctggggtctctttttctcccaaggcttccttgtgcccaggtcatttcttggagacagtgattcccggaacggaaaccgtcaacagctgcataact

SEQ ID NO: 208413 - DNA, 435 bp, Homo sapiens
ttgattctttccaagagctgtaaaagctgctccagtgtatgaaggagcatgattaaaattgcaatttgaaaccatcacgtgcagggagtggaaaggcgtgaggtagagtgacgtggagcaaatccctgaaggggccatgcagtgcaggtgggtggagacggtcatgtggaaaattgactcaaatgggacctgggatctgcctcaggatgggggtggggcggagcatgggaaagagtgcaggtcattctaatggcggccgcacctaccaggtcaggccaggcctccgcatcgggccctgctgcctcctggccctgggacttcctgcttcattgcggrtgttctggggtctctttttctcccaaggcttccttgtgcccaggtcatttcttggagacagtgattcccggaacggaaaccgtcaacagctgcataact

SEQ ID NO: 208414 - DNA, 422 bp, Homo sapiens
ttctaaggtggattttccctactcatgcttcctagagatttggtgaggatttgttgagtcwtgggacatttcagcttgccaaggtaaggcttcattttggctttgtatggcccttctgggatcactgatgtccctgggccaggttcatttgtatctgaaggagggaggagttagtttggaggcacagtctaagaggagagaagtggagggtgaagaggaggggacagcaactgatctctttatggcatcttatacagagttggcaccttggcaattaggatatcggggaccaaaagctgatgcaccactttaacgagatactttgtaaatgtagggcagggtggaggtcagaaacacaggcaggacttccaaaggctgtgggcactgtccctgtgaggctcaagtgacaaggtgggagacag

SEQ ID NO: 208415 - DNA, 458 bp, Homo sapiens
ggaattttaaaatacatacctgttggttagtcggtgtttccatgtgatactttttacatactcaacaatttacttatccctmcatatatagcaatatgagtgttatctaaccactaggaatttttctccatgaagtctatagtcacatgctagtgagataatttaaatatgtccacagaatacagaatatttttcaaataagtttttaaaagcttaaaaggaaaaagactaattaaaaaaaggctttaggtctttcgtaccaaacattctattaagcagatattttttgtgtaagttacttaattacacagttgagcactgtgtaaacacatctcaactctctatatcaacttatgtagctgttaaataaaaaacctatagtatgtacaatatgttgcatttttccataggaaaaaaatgagttctgtcaacatgtccagccaagctaaagtagaatg

SEQ ID NO: 208416 - DNA, 534 bp, Homo sapiens
  misc_feature (1)...(534): n = A,T,C or G
ataatatgccattaatttaactccttactggaataaaactcaactcctttgcagaggaagaggacagaattcatatctctacaacatttcaaccacaatgttcagtatataattaaaaattactaagcatrtaagtcaacaagaaaatattatctagagtcaaagtaaaattagtcaaaattaacagactcacagatgacaaagtcattggaattagatgaaaaagacttgaaagtgttagaaatatgctaagggaactatgtgaaaaaaataatataatgggtgaaaagatgaaaatttcaggagaggtataaaaaccatggaaaggacaaaacagaaatcctagagctaaaaaaaaatacaataccatacattaaaaattcattgcatatgattaacaatagagtggacatgacaaaagagatcactgaacttgcggacaggttaatacaatcatccaatctgaagcataaaatgaaaaaaatttgcaaaaataacaaagcttcagtgactcgnnnnnnnnnnnnnnnnnnn

SEQ ID NO: 208417 - DNA, 534 bp, Homo sapiens
  misc_feature (1)...(534): n = A,T,C or G
ataatatgccattaatttaactccttactggaataaaactcaactcctttgcagaggaagaggacagaattcatatctctacaacatttcaaccacaatgttcagtatataattaaaaattactaagcatgtaagtcaacaagaaaatattatctagagtcaaagtaaaattagtcaaaattaacagactcacagatgacaaagtcattggaattagatgaaaaagacttgaaagtgttagaaatatgctaagggaactatgtgaaaaaaataatataatgggtgaaaagatgaaaatttcaggagaggtataaaaaccatggaaaggacaaaacagaaatcctagagctaaaaaaaaatacaataccatacattaaaaattcattgcatatgattaacaatagagtggacatgacaaaagagatcactgaacttgcggacaggtyaatacaatcatccaatctgaagcataaaatgaaaaaaatttgcaaaaataacaaagcttcagtgactcgnnnnnnnnnnnnnnnnnnn

SEQ ID NO: 208418 - DNA, 570 bp, Homo sapiens
agggaagaatgagtccatgcrtccacctccccccagccctcagaaaacttagctaagaagatggttgccagaatgagaagagtagttcacattccttcttcattcaaatatttctttgttgcttttgaagatagtaatcaatccagaagagtaaagtccttctaaactcctctcagagattcctggtacatgaggtaggctgtgcatttacactggaaagtaaggctcctagtgataatattataattgtggtagctaacatttattgagtactttctgaggcagagagagattaattatgtaacttgcccaaagttgtatagctggtaagctgtgattctgggctaagcgcctaaacagtttgaacatcaactacttagccaatctgccttctggaacagaataaatatgaacacttagccatacctagatgatcagagaaggcttcctggtaaaggtgcagctcccaatacaagattgtatccagttcaatagatgaagaagaggtagaagtcaggcccagaacagagaataacatgagcaaatgttccagcctatgaaacagtatgg

SEQ ID NO: 208419 - DNA, 568 bp, Homo sapiens
gaaaattttattttataccctgggtaaaattaattagttaacttgaagtatggctgagttccttacttgaggaagggtacctctcctatggaaaggtaaaatttaataataaaatataggaaaattaaatccttaaattcagaaataagacaaggatgcctgttatcaaagcttccattatacattattcagaggtcatagtcattagagaaaggcaagaaaaactagttataagtaatgggaagaaagaaataaaactaccagtcttacataccaaaaakccacaaagctctactgacaaattattagaattaattgcagaatgcaacatgactacaggatataatctcaaaaaaaaaaaacaccccacattgctatcctttatactagtggcaaagagtgaacatttaatttttttaaatgacattaccatagcttcaaaaatcccaaaaccttaggaacaaacctaacacaagttgggctagagatttataaataaacttacacaactctatttaaaggcaattacaaacacttcagtaaatagagatttaaaaaatatttatgg

SEQ ID NO: 208420 - DNA, 543 bp, Homo sapiens
cccctgttaaggcattaatctgaagtgtcgcctgctgacgctagcaactgttggtataacctgtcactgcttacagaaaaatccaagagaaaagacatcagattcaaagggttcccctccaacttctttttatatcgccagtgccaaaacagcgtatagcacaacttggctgtaaagaagaagtgcagggaccagatttcactatcattaaataaaaagagccatctgggaaatcttggtgtccttagcaagctgtcattgactcctctccagccttctcttccaaagccaaggtttccttgggattgttatcatgagtaaaaacagctggttttcctcctatgaggatgctgtgtgtgccaagcacagagagagctcagaaggcagccgtgtaccaggttgcctcgcggtgggggtgtgctggacagttatcaggtgtttcatcacattcccacacagttctcaaagaagttttggaagcawtttcatccactggggcatgataatgaggaagagagttctcctggcctgtagcacatatct

SEQ ID NO: 208421 - DNA, 503 bp, Homo sapiens
cagaatgatgtgggagaagacaacaccccattgattgtcttagacagatcactgaagcagaaaactaacaaagatatttgggacctgaactctacatttgacaaaatgggcctaacggacatcggacatctgcagaactctccactcaaaaactacagaatatacattctcatctgcacatatcatatattctaaaattgaccacacaaycagccataaaacaattctcagcaaattcagaaaaactgtaatcatatcaaacacattcttggaccacagcacaataaaaatagaaatcaatactaagaaaattattcaaaaccatccaattacatggaaattaaacaacctggtcctgaatgacatttgggtaaacaatgaaattaagacagaaatcaagaaactctttgaaactaatgagaacaaggatacaacataccagaatctctgggacacagctaaagcagtgttaagagggaaatttatagtgctaaacacccatg

SEQ ID NO: 208422 - DNA, 550 bp, Homo sapiens
atcaaacacattcttggaccacagcacaataaaaatagaaatcaatactaagaaaattattcaaaaccatccaattacatggaaattaaacaacctggtcctgaatgacatttgggtaaacaatgaaattaagacagaaatcaagaaactctttgaaactaatgagaacaaggatacaacataccagaatctctgggacacagctaaagcagtgttaagagggaaatttatagtgctaaacacccatgtagaaaagttagaaagatctcaaattaacaacctaatgtcatctctagaagaactagagaaacaaaagcaaaacaaccccaaagctagcagaagacgagaaataacaaaaatcgcagctgaactgaaggaaactgggacacatacacaaaacatataaaagatcaaggagtccaaaaattggttttttgaaagaataaataggattgatagaccactagctagactaataaagaagaaaagggagataatccaaatraacacaattagaaagacaaagggcactttcccactaaccccacag

SEQ ID NO: 208423 - DNA, 572 bp, Homo sapiens
gctgaagcctgggcaacagagcgagaccctgtctcataaaataaagaaaaaaaataaataatgggagtcttgatgatgttttacaattttagggggacccggattatttaaaaatgtatgcataggaaatgagcctttattacagctttcagattgtagtattttagataaaatacctaagatttcctaaaatgctatgttgtatctttatgtytctctcctcattaaaccctgagttcagcaaaggaagtgactgagtcttagtcattcttttatccttagtacttagcacagtgctggcatgttataggtgcttaataaatgttagctggaaaactgaaatgtaatagattgagtaaataaataagtccaaagttctttttggattcagaatgagtaaataaataggaatggctgtgttccaataaaactttatttacaaaaacaggcagtgggccagtttggcccatgggctgcagtttgctcaactctggtgtagatcacaagttcttacagcctctaggcaactctatcatatagcaaccttcatggcaagtttgagattttaaaag

SEQ ID NO: 208424 - DNA, 572 bp, Homo sapiens
gctgaagcctgggcaacagagcgagaccctgtctcataaaataaagaaaaaaaataaataatgggagtcttgatgatgttttacaattttagggggacccggattatttaaaaatgtatgcataggaaatgagcctttattacagctttcagattgtagtattttagataaaatacctaagatttcctaaaatgctatgttgtatctttatgtctctctcctcattaaaccctgagttcagcaaaggaagtgactgagtcttagtcattcttttatccttagtacttagcacagtgctggcatgttatargtgcttaataaatgttagctggaaaactgaaatgtaatagattgagtaaataaataagtccaaagttctttttggattcagaatgagtaaataaataggaatggctgtgttccaataaaactttatttacaaaaacaggcagtgggccagtttggcccatgggctgcagtttgctcaactctggtgtagatcacaagttcttacagcctctaggcaactctatcatatagcaaccttcatggcaagtttgagattttaaaag

SEQ ID NO: 208425 - DNA, 571 bp, Homo sapiens
ccatgaagttcttttgccaggaacttgagaggcaaagaatatacagaatttgtttcatttatgctgacactctgtccattagaatttatcaggtctcattattttatgggtatttgttatatcttcagcctctttgttttatggttggcctccaatgggttctaagtgaagataggctatggatatgattgtcataagtaactggtgacttcccattgaagaagcctttcacagagatggaatctttgcatgccctttgctttctcatgaaagatgcccttatcagtgtaaataccaccgatgtctatgctgttcttaaggaaggtgcaagggaggaggagcttactcgccaacccttctcacccccagcttcttcctggacccatgtcctgtgggtatcycctaaatggcagtgaataatgctttctgaattctcagacctttgaaaaataagttcagtaccggaaacttagggagaacattgtcaatttttcttgaaaagggtgatggttgagggagaaattgggagtaactattattttccagactcagtttgatgtaaaaatgtttc

SEQ ID NO: 208426 - DNA, 604 bp, Homo sapiens
attttatagagtttcactctttttgtcaacactcacaaaggtagaaagtggaaagattctacaggtctgttagaggacaaagctgttgctctgcccaccacatcacccagggggaccttccccaagaggccccacctctattcagtgaagctcaatgatcatttattgagcaactggacactgtaggccccgacaaaataaagattaatcattacatcaactttcaatgagttcatcccatctaagtggggtaaaaaataaaagtacaaaccagttaagagctacttggtaaaggttctgaatgactaaccaatgctccaacagagcaggaccataactcagcctgaaggcttcctaraagaggtgatggctgaaggtattcatttacattttaaccatgattcattcacattgaacaatgcctcatcctccctgcacgccagcaccttgacttctaaggcattctctagctcaggtgtctctccattatcctctcagggaccagaaccagccacctataagaggaaaccagagccaacagaaccagccacctgtgagaggaaaccagagccaagctttcccccacccaccaacgacagcccat

SEQ ID NO: 208427 - DNA, 420 bp, Homo sapiens
ctccccgatcttggatcctagaacttagaaaaatacagaggctgctctgtcatcctactttcatcccaagcagttgagctcttatctagcttgactttgaatcctagtgggtcttggtgaccagagatgaacctttattgtaggagatcacagaaccagcttctgggcctggtgtaccagaggctggtatatagtcaacagcagaaagcaaacgaaattagtaaaatcccattacccacttgagaagacttacacaatgctcttaaaaatattttctactgggctcagtggaaaggatrgtggaaggttatggatatagttaggttttcatctttaataggaacatcaataatatctaatactcctaaagtcactccttgtgaaagtggttaaatgtaactctatccactcctctcctcc

SEQ ID NO: 208428 - DNA, 296 bp, Homo sapiens
ctgccgcccttgccatctaacaaatataggtttaaaagaaaatatccttggcccgttgytccctcttttccaaaagagaaccagttattttaagctgttttttttcctatctttaatatgttttttgaaaaatgatgtcaatttttatctcactgtgtgattcccccctccctccgagcctgtcccctttctcagaagagtcttacaaccactccttagattatttccaaagcctaccacctcgctcccttgaccctagtttctcccttcattcttcccgttcatcctccacgaca

SEQ ID NO: 208429 - DNA, 473 bp, Homo sapiens
tgaatttttctttcatatttctagtaacatcttcctgtccatttccaatgccacctgtcctactttgagaacaaatggactcagtcttgtattattccttgaaatcttcactggtcatcctgctcccacttcscccaatcctctccgttcctcctggttcttcaagctgcaccatggccagaagctccctgtctactcacacaggagtgaaatgtgcaggggtgtgatgggaaataattgagtgtcaacttgattggactgaaggatgcaaagtattatttctgggtgtgtcagtgagggtgttgttcaaggaggttaatatttgtgtcagtggactgggaaaggcagacccacctcaacctgggtgggcacaatctaatcagctgctagcacagccagaataaaagcaggcagaagaatatggaaagactagactggctgagtcttccagcctacatctttctccaatactg

SEQ ID NO: 208430 - DNA, 572 bp, Homo sapiens
gaccatatgttgaactacaaaacaaatctcgacacatttttaaaaactgaaatcccatcaaatattttttcasatcacgatggaataaatagaaatcaataaccagaggaactttgaaaactgtataaatacatggaaattaaacaacatgctcctgaacaaccaatgggtcaatgaaaaaattaagaaggaatccaacaaatgtttgaaacaaataaaaataggaacacaacatatcaaaaccaataagatacagtaaaagcagcactaggtttatagcaataaatgcctgcagcagaaaagtagaaagatttcaaataaataacctaatgcagaactaaacaaaacagagacaaaaaatacaaaaggtaaacaagtgaaaagttggttttttgaaaagataaacaaaatcaacaaaccattagctagatggcctaggaaaaagagatgttccagataaataaaatttaaaaaaataaaggagactttacaattgatactacagaaatacaaagaatcattaaagactatgaagaacaaacacttaaattgaatccagtgagattcaaatc

SEQ ID NO: 208431 - DNA, 572 bp, Homo sapiens
gaccatatgttgaactacaaaacaaatctcgacacatttttaaaaactgaaatcccatcaaatattttttcagatcacgatggaataaatagaaatcaataaccagaggaactttsaaaactgtataaatacatggaaattaaacaacatgctcctgaacaaccaatgggtcaatgaaaaaattaagaaggaatccaacaaatgtttgaaacaaataaaaataggaacacaacatatcaaaaccaataagatacagtaaaagcagcactaggtttatagcaataaatgcctgcagcagaaaagtagaaagatttcaaataaataacctaatgcagaactaaacaaaacagagacaaaaaatacaaaaggtaaacaagtgaaaagttggttttttgaaaagataaacaaaatcaacaaaccattagctagatggcctaggaaaaagagatgttccagataaataaaatttaaaaaaataaaggagactttacaattgatactacagaaatacaaagaatcattaaagactatgaagaacaaacacttaaattgaatccagtgagattcaaatc

SEQ ID NO: 208432 - DNA, 572 bp, Homo sapiens
gaccatatgttgaactacaaaacaaatctcgacacatttttaaaaactgaaatcccatcaaatattttttcagatcacgatggaataaatagaaatcaataaccagaggaactttgaaaactgtataaatacatggaaattaaacaacatgctcctgaacaaccaatgggtcaatsaaaaaattaagaaggaatccaacaaatgtttgaaacaaataaaaataggaacacaacatatcaaaaccaataagatacagtaaaagcagcactaggtttatagcaataaatgcctgcagcagaaaagtagaaagatttcaaataaataacctaatgcagaactaaacaaaacagagacaaaaaatacaaaaggtaaacaagtgaaaagttggttttttgaaaagataaacaaaatcaacaaaccattagctagatggcctaggaaaaagagatgttccagataaataaaatttaaaaaaataaaggagactttacaattgatactacagaaatacaaagaatcattaaagactatgaagaacaaacacttaaattgaatccagtgagattcaaatc

SEQ ID NO: 208433 - DNA, 572 bp, Homo sapiens
gaccatatgttgaactacaaaacaaatctcgacacatttttaaaaactgaaatcccatcaaatattttttcagatcacgatggaataaatagaaatcaataaccagaggaactttgaaaactgtataaatacatggaaattaaacaacatgctcctgaacaaccaatgggtcaatgaaaaaattaagaaggaatccaacaaatgtttsaaacaaataaaaataggaacacaacatatcaaaaccaataagatacagtaaaagcagcactaggtttatagcaataaatgcctgcagcagaaaagtagaaagatttcaaataaataacctaatgcagaactaaacaaaacagagacaaaaaatacaaaaggtaaacaagtgaaaagttggttttttgaaaagataaacaaaatcaacaaaccattagctagatggcctaggaaaaagagatgttccagataaataaaatttaaaaaaataaaggagactttacaattgatactacagaaatacaaagaatcattaaagactatgaagaacaaacacttaaattgaatccagtgagattcaaatc

SEQ ID NO: 208434 - DNA, 603 bp, Homo sapiens
cacagtattcttcacagtaattgaaacaatgatcctaaaattcatatggaaccacaaaagagtccaaatagccaaagcaatcctatgcaaagagagcaaagctggaggcatcataccatatgacttcaatatatactacaaagctatactacaaaaacaacatgsacctggcataaaaacagacacatagaccaatggaacaaaatagagaccccagaagtgaacccatgtatttataaccaactgattttcaaccaaggtgctgagaacatacattggggaaaggacagcttctttaataaatggtgctaggaaaattatccatatgcaaaagaatgaaattagactgctctctcttatcatatataaaaattaactcaaaatgggttaaagccagaaatgtaagacccaaaactataaaactactgaaagaaaacaaaggatatgctttagtacattgttctgggcaaagattttatgagtaagattccaaaagcacaagaaatgaaagcaaaaatagaccaatgtgattataccaaactaaaaagcttttgcatagcaaaggaaacaacagtgaggagacaagctgtagaatgggagata

SEQ ID NO: 208435 - DNA, 603 bp, Homo sapiens
cacagtattcttcacagtaattgaaacaatgatcctaaaattcatatggaaccacaaaagagtccaaatagccaaagcaatcctatgcaaagagagcaaagctggaggcatcataccatatgacttcaatatatactacaaagctatactacaaaaacaacatgcacctggcataaaaacagacacatagaccaatggaacaaaatagagaccccagaagtgaacccatgtatttataaccaactgattttcaaccaaggtgctgagaacatacattggggaaaggacagcttctttaataaatggtgctaggaaaaytatccatatgcaaaagaatgaaattagactgctctctcttatcatatataaaaattaactcaaaatgggttaaagccagaaatgtaagacccaaaactataaaactactgaaagaaaacaaaggatatgctttagtacattgttctgggcaaagattttatgagtaagattccaaaagcacaagaaatgaaagcaaaaatagaccaatgtgattataccaaactaaaaagcttttgcatagcaaaggaaacaacagtgaggagacaagctgtagaatgggagata

SEQ ID NO: 208436 - DNA, 393 bp, Homo sapiens
gctttgtttgtttatatgactcccttctccttcaggctgtgagaacctacagcagggactatgttgtacacatttatatttgtatacctagactaataaagtagttggcaataaaggtwctgagcataagcatggatgattggctaagttatcagtcgacttgtgttcctcaaaggagacactgctggcattttagacaagacacatctttgttgagagggactatactatatgctacaggagattaaggttctttggcccccgcccattaaaggccagcagctatccctagtcactgggacaattcacagctactcctatacatttccataccccccttgtggtgatggtaccactcatggttgagaccaactgtatctagtgcagtaggtg

SEQ ID NO: 208437 - DNA, 570 bp, Homo sapiens
gctcagcaaactgcaacctccttcaatctcaggccttgaacaatttaataagaatagctgaggatatttaatgttggttactataatctctcccccaaattttgttttaatttttgtgtttcccttagctggagagggatgacgtttccttgaaggaaatacatggaacagtaaaattattgaggcttgactcaattataatgttggaygaatctattagaatgttaggctttttagattttacttttattgctcttcccaagtagacttggaagcacaaataaatatttcttattctcttgccttaaattaacttttgagaataccttgaaaaattgaggggaaaaatctaatggcaccgataaaatggaggataataatatctccgtcattcatagacttgctatgaagactatatgaaataatatatattttatgtatatatatgtaatagtcctggatccacgtctggcatccaggaggttcccagaaatatcagttctcacctcttttctgatgaattcatactgcacaaaagcctgttacattatctgaaaaagtcatcactgt

SEQ ID NO: 208438 - DNA, 423 bp, Homo sapiens
tggatgctaaactgtgggtaattttggtcaatttcagctctttacagagtggtttagctacatatcccctgcctccaaccccatgggaggcggctgtgcacatgttcctgaaacaacctgtcttgtaggaacctggatgtggaaaaaggaccctgtcctccacatatcatggatctgggctctgaccgctgattgctgcttttgatcaaataggtacaaagaggagaggagccattgttgccctttccccattgttgcaagcccctccctctctggctgaagtgacttccagagtatttaaagggccagtaatcttttttgactcccttcattttaatcttttttccccttttgggaggcagacaataaaacattgcatakgcagggaaaattagaaagtgactgtgcatgttcagggaaaga

SEQ ID NO: 208439 - DNA, 647 bp, Homo sapiens
aataagttttttttcccttacattgagatatattgcacagcatggtgaatatagtaaatgttaacatattgtacatatcaaaattgctgaaaataaatttcaaatgatctcaccacaaaaaaataactatttgaggtgatggatatattaattcgcttgatgtaattattccacatgtattcagaaatcataacaccagtctctacacagcaagaatgaagtactggtgcatgtaacaatatggatgttgggcaaaacaaaagaagcagccaggcaaaaaagactatatactgtattatcccatttttgtaagatccaatagaaagcaaaactaagagatagagaaaggtagcagaatagcagttactctaggaatgagggttggttggaagggattaagtggcaggttggagttsagcaagaaccatgagaggaaaccttctaacagaaatttccaaggtcttcatggaagttgtgattgaatagtgtatacatatgattattacattgtacctttaaagattaatacactctattgtttttatacctgaataaaaaggtaaaagcaataataaatttaaataaataaaaaataaaaattttaaaaagctaagcataacataataaaaaattgtaacaccattttg

SEQ ID NO: 208440 - DNA, 635 bp, Homo sapiens
tttcatataaaattcagtcattcaatatgggatctcttgtgactggcttctttcacttagcacaatattttcaatgttcatatgtgctggagtatgtatcagtgcctcgttctttttattgctggaaaatattccattgtatggacatgccacattttggttgcatttacattcacatactttttttcccaaattggtctgtgtgtcttttaaacttcaagtgaaaggtggatggtttcaagacaattaaatagaaaaatgcaagtccaactcaggaatggtgatgttagtttatagttgtggtacttttcaaggtgtarcaaagaatacaattggaagattatgtgggactaaaaaaattaaaacttttaattaacctcctttctagatagcatggggattgatattattaaatgtatacacacacacacacatatatatagtattatatcaatattgccaaataaatgtatttcatgtatatatatatttgatatttctatttatatatttggtaataccaatcccattacacatacacacacacacatacatataattattttaagagagcactatataaatcactatataaatatgtaaattcattggaatgttttacatgaatatgactc

SEQ ID NO: 208441 - DNA, 542 bp, Homo sapiens
gtctacttggaacttggaatattaaagttattactccagatgtcaacagaaacaaaactgagaaattttttttaatattaagtagtgggttttttttttgtttgttgaaatgaaaaaaaaaagacagtgtatattagtattgtgtaaaagaaaactaatccatatgtaattagtttaagtcctgtaaaatttgctcatcaaaggttttttgtatagttacccaagtaggaagggaaaagtaaagcctgggaaggtgaggtacttgctcaagatcatacagctaccttgtgccaggtctggaagtaggactttccaggcactttccttttggtccactatccttttcattattgtatagtatcttaattatctagataaaataaaagaaaaacacataatgyatcagttattgtaagtgtctgtaatatatacatgccctttcaaatgttttattaggaaatgaagagttgctttattcatttgtttctgaaataatgaatctcgtgatccttagatcctcatccaatttgatagccactagg

SEQ ID NO: 208442 - DNA, 465 bp, Homo sapiens
agtgtaggttccccacaaggctaaaaacaataaagtcaaaatgaaatgatagaattcaatcaaccagaagatatggaaaaattccctcactatgaccacggaatatatgggtacaaatgtacactgtcggcaaaatcgaaatgttttgaagaaaagggagtattayctaacagtacttactttaaggaatatcagtgttgtcatctttttaggcaaaagggctattttcttaaactacttcgggttttttttttaaatgagagagtggaataaaaacaaacgactgcagccatttcagttacttaaaaaaatgcttctcttctcctgtctcctgtctttttactggtacttttaattaaacgctacaatcctaaaaaaggatattattataagtctcattctaatgacaaatactataggctatataagtagatatcatgatctgttgtaggacttcttgctttg

SEQ ID NO: 208443 - DNA, 403 bp, Homo sapiens
cggccagcctccctgctgaccagatgcccttctccctatcaaatccagagaggctttgggaagctgcagaaaaaaggaggagtctggaatcacagaccccgggrttgggaacatctccctcccaggtcccttctgggactgtctcccccatatgctttctgcaagacaccccagggtacaccacaggacctcgctgtacctgtgcaagatgtctccaatgtcctaggagaaaaaagaaggaaactgtcggttaccaggctcctagtggctgggctgactcctggcctctacttctgggctcctggacttttagctccccgctgcacttaccagggctccctgccctagggtgtcagtggaagtggagcacctttcttcaagtctaattctaaccacgggaatt

SEQ ID NO: 208444 - DNA, 403 bp, Homo sapiens
cggccagcctccctgctgaccagatgcccttctccctatcaaatccagagaggctttgggaagctgcagaaaaaaggaggagtctggaatcacagaccccggggttgggaacatctccctcccaggtcccttctgggactgtctcccccatatgctttctgcaagacaccccagggtacaccacaggacctcgctgtacctgtgcaagatgtctccaatgtcctaggagaaaaaagaaggaaactgtcggttaccaggctcctagtggctgggctgactcctggcctctayttctgggctcctggacttttagctccccgctgcacttaccagggctccctgccctagggtgtcagtggaagtggagcacctttcttcaagtctaattctaaccacgggaatt

SEQ ID NO: 208445 - DNA, 470 bp, Homo sapiens
gaattcaagatgagcctgacctacatggagaaatcctgtctctactaaaaatacaaaaaattagccgggtgtggtggcgcatgcctgtaatcccagctactctggaggctgaggcaggaraatcacttgaacccgggaggcagaggttgcagtgagcaagattgcgtttgcagaattagtgtcaacaaatgtacagttgtgatactttttaggcaaacctgatatatggaaacaatgtgcggtgtgtcttgtttgttttgaaacagagtctcactctgtcacctggttgaggtgcagtggcatcatcatagctcactgcagccttgacctactgggctcaggtgattctcccctcagcctcctgagtaactgggactaccaccaccacaccagtgagtctttctactggtgtgtttcaacataggtataatcataatgtacacacagtcttgttttatgttaagacttcc

SEQ ID NO: 208446 - DNA, 550 bp, Homo sapiens
gtttcacttttttacaatggaatacctgattgacccattactttccccacttctttacggagacatctttgtcgtgaataaaatgtccagattcatgtggacctgtttctggattctcaattctgactyattagtctattgacctttccctaatttcatattgtacttttattataagtatcatcatccccattttacaaatgaggaaactaaggcacagagaggttaattagctcgcccaattaagtaatttgctagttaatgtcagatctggaaatggaacccagggagtttagttttacggtctgtgctctcaataagctttactgcttctcaagcttaacagttccaagaacaaacattttacgtcactacatcaaaataggcttttgcgtgaagccttgggaacaggcatgccacctctgcaccctggattggtcctggtgttccccgcccagccgcaaaccgaaccgccgctgtcccagtcctaccactagagggcgcggataacttaaactggccggggacttccctcccgccgcgcctggtt

SEQ ID NO: 208447 - DNA, 472 bp, Homo sapiens
actaggaacagggatttgatctggaaagcaaacaagctgaggttcasaaagtttgaggagggcaggcagtgtggcgaagccaacagcacagcaacagtggagttgggagagaggtaggcagccttgtgcacttgctgtgtccttgaggtaggagaatgcagcaggaggccataaatacaacgctcctgggaaacccccagtcccagagagtggcactgactcacaggtgggacaggaccacagccttctgcctgctcagcaagcttttcccagagctcctcacagccctgcagacttgtggcctagttttcttggcagagttgtgctatgtgaagtgtcttaattgtttccacagcaacactcctgaggccaatagcaaacagagctaataggttccagccctgagagagtcaggaaaggggaagcgatccttagtctggaggtcagaggaaactgaccagaggggctacat

SEQ ID NO: 208448 - DNA, 516 bp, Homo sapiens
ggcagcagaaaaaactaggaacagggatttgatctggaaagcaaacaagctgaggttcagaaagtttgaggagggcaggcagtgtggcgaagccaacagcacagcaacagtggagttgggagagaggtagkcagccttgtgcacttgctgtgtccttgaggtaggagaatgcagcaggaggccataaatacaacgctcctgggaaacccccagtcccagagagtggcactgactcacaggtgggacaggaccacagccttctgcctgctcagcaagcttttcccagagctcctcacagccctgcagacttgtggcctagttttcttggcagagttgtgctatgtgaagtgtcttaattgtttccacagcaacactcctgaggccaatagcaaacagagctaataggttccagccctgagagagtcaggaaaggggaagcgatccttagtctggaggtcagaggaaactgaccagaggggctacatgttgaaaaggaggaagttctttcctaagcct

SEQ ID NO: 208449 - DNA, 504 bp, Homo sapiens
actaggaacagggatttgatctggaaagcaaacaagctgaggttcagaaagtttgaggagggcaggcagtgtggcgaagccaacagcacagcaacagtggagttgggagagaggtaggcagccttgtgcacttgctgtgtccttgaggtaggagaatgcagcaggaggccataaatacaacgctcctgggaaacccccagtcccagagagtggcactgactcacaggtgggacaggaccacagccttctgcctgctcagcaagcttttcccagagctcctcacagccctgcagacttgtggcctagttttcttggcagagttgtgctatgtgaagtgtcttaattgtttccacagcaacactcctgaggccaatagcaaacagagctaataggttccagccctgagagagtcaggaarggggaagcgatccttagtctggaggtcagaggaaactgaccagaggggctacatgttgaaaaggaggaagttctttcctaagcctt

SEQ ID NO: 208450 - DNA, 431 bp, Homo sapiens
gaattcatggatatcccttcgatgaatctaaagtttggtctctgagattataaaccatgatgcagactcgaaattgtcttgcagatgttattttctgcatatatggtgtttaaacagttaccagtattttaacaacttggcaacttttaaaaacatctggatttcaggcttttcttgaagaagtctccatgtgataaaagtttgttattgccaagaagcagctgcttccttgagatgaagcatattactgtgcagtttgccacagtttcttccattttctattgtcaattattatcatgcttgtcttacttattattttaaaggggaattaagaataaaagcgggatatctsttatactcatgttcccactgaaagtggaaaaataaataaaaagtccagttgtttactcctagcctgtttcactcactta

SEQ ID NO: 208451 - DNA, 630 bp, Homo sapiens
ttcacaaactggccattcatcattcactgataagttaatgagagttaaaagagagggaaaaaatcagggaaatgaaaaaagaaagctggaaagaacaaagacggaagggagagagggagaaaaaattaataacttatcatcttttcttcttaatatatttctataaacaataagccaacrtgccaggcctccagaactgctagtaccgcccacttcaatccatctgtcaagaactgctccataaacccagcatgtaacaaggagccttagattcccttgacattcgcatcactgggtttcatcagggcttgttcaggcagaagagttcacagagcctctgacacttcaagtcacagtttccaagacaggtagtcacggtgatcaatattgtgacattcagcgatactatcaacgtgttcacacgacagcaagacagatcctgaagaaaaatacggaattttataggtctaatacaacagaaaatcaggttcgtttttccaccgtttaagtcacgttccatggcttttgtcaacagagaagggagacggagagacggaaggactgcccccacccaatcaacccaccagtttattcctatcaaaaattgctcccacaaattttagaaagctt

SEQ ID NO: 208452 - DNA, 539 bp, Homo sapiens
aagtacagattgtacctttgcaatgacaaggcttcttatggtaattctttacagggccatcatgtcacactccctccattctcaatctgtgttctagttggagtaaatttctagatcttctaagggcccatgatccttcctctagaagttggcaggtacttttccttccacctgcaacacttgtttttaccccrtttctccctcttattcatcttcatggcttaggtatgacatcagttccactaaattaggtcatatgtctgttggatgtagacctaggttagatacctccactaggtaaccccagtgcaatctgtactttctctgtcgtaaaactcactgtcaacaagcttcagatcaacctgtgttccccaaattttccagagcatccctcactctaaaggcccccaaataaacaaatagctaaataaaattagtctctttgctatagaaatgcaacttaaacacaagccttacaggcaaatttcaataagattaccaacactaaactcatcctatggggagattatggagcagcc

SEQ ID NO: 208453 - DNA, 656 bp, Homo sapiens
cacattataaacttattggaaaattctgagacagtaattcagtaacctcagggaaaatgaaaacctctgatagcaaagcataaatgcaagatcgtaaataaaatactgatacggttggctgcatatacattaaaattttctgtgacaaaatgtgccataaaccaacttaaaaccaaaatgagagaaaacaacaaaaaaatagtttttacttagataaaatacacacagaatatataaatattgtatacatatcaacaagaaaaaacatacaacagggaaaagtgcaaaaatatgagaagaaaattaatgaaagaggaaayctaataaccattaggaaaaattgtctagtatatatgggagaagactctcccctccattactaatcagggaaaaacaagataaaacaacaaattatttcaaaaattaaaaagacacatagttcccaacagtgaaagatccaggaggccagaacctctgctttgatctccactgatcagtaccaaacacagcacctggcatagagaatatctgaacactggttgaatgaataagtaaatgaaggaatgaatactgatagacacagggaaataactgcacttaatatttgcatcttttctgattcatgtgctttattctcaagttctctgtcaaagact

SEQ ID NO: 208454 - DNA, 578 bp, Homo sapiens
aaaactctgaagtagcttctgatgagtttagatgtatgtgataagccttagagaaaccactaaggaaatcacttaaaactatagtgaaaaatgattaaaagtaataaaatgttacactagacaatatttacttgatgcaaaagaatatagtggaggaagactagcagcaaaatagacatgagacatgtagaataaaaactaaaatgagagacatcactccagcaatattgataataacattaactgtgaatggattaagctatccaatcaaaaggcagaaatcatcaggctggataaaaaacaagatccaastatatgctgtctataggaggtaatttagatccaaagatacaaataggataaaagttaaacaaatggcaaaagagatgcgatgcagaatacaaggttaatataaaaaagtcaattgctttcctttatttcagcaatgaaaaattaaaatttggaaataaaaacaataccatttccattaacaacaaaatcataatatacttaggtataaatctaacaaaatatgtacaggatctatatgcagaaaactacaaaactttgatgaaagc

SEQ ID NO: 208455 - DNA, 613 bp, Homo sapiens
aaaccaaataccacatattctcagttgtaagtgggagttaaacactaagcatacatgggcataaatatgaaaacattagacactgtggaataccagagggtggaagggatgggggttaaaaaaactacctatgggtactatgctcactacctaaatgatgggcttcatactccaaacctcagtatcgcactatattcccatgtaacaagtctgcacatgtatcyctgtatctaaaataaaagttgaaatttaaaaaacattgaaaacaagttctcagtaagaaacttgcgtacatggagaagggtttctgggaagatggcagagtagcaagcaccaagaatctgtctccccacctagacaacaattgtactggcaaagtccgtctggcgtaaatatattgtaactctggagcctattgaaggtttgaaccttccagggaaaggcttagacagtatattgcagttaatttcagtcaatttcagcaattagcacagtagcagctatccattctcaatctctagcatcatggtagacagttttgcacatgttcctggagcaagcttcacaccacttgtgggagccagagtgggcaaaacagacactatactacaaa

SEQ ID NO: 208456 - DNA, 613 bp, Homo sapiens
aaaccaaataccacatattctcagttgtaagtgggagttaaacactaagcatacatgggcataaatatgaaaacattagacactgtggaataccagagggtggaagggatgggggttaaaaaaactacctatgggtactatgctcactacctaaatgatgggcttcatactccaaacctcagtatcgcactatattcccatgtaacaagtctgcacatgtatctctgtatctaaaataaaagttgaaatttaaaaaacattgaaaacaagttctcagtaagaaacttgcgtacatggagaagggtttctgggaagatggcagagtagcaagcaccaagaatctgtctccccacctagacaacaattgtactggcaaagtcygtctggcgtaaatatattgtaactctggagcctattgaaggtttgaaccttccagggaaaggcttagacagtatattgcagttaatttcagtcaatttcagcaattagcacagtagcagctatccattctcaatctctagcatcatggtagacagttttgcacatgttcctggagcaagcttcacaccacttgtgggagccagagtgggcaaaacagacactatactacaaa

SEQ ID NO: 208457 - DNA, 614 bp, Homo sapiens
aagaatttcaatctcttccgtcttatgaaaaggtttctgccagatatatttgtctgatatataactaggaatctagtaaaacttcagaatatatagcagtttgcaaagaatacatttgaaaaactaaaattcaccagaaatcatttttgaagtattaaccaaaacagtagctttgaccaataaataagtagtttttttggtgttttttttatagtcatgattcccacgtgtttgtttagctaccccacaatcttgctggcttttctcagcagtatcttgtgatcttgcttttctttcaggagtacagtcatgtaagtgctcctcttaaattgggccttttatggagaaacatagaaacattaaacgaagtgctttgaagattaaawgtccaaagttaaaagacaaactaggctatgtaatttaggcatctaaagcttaaccctctggggccatactttctattatttggaagagcagtagagaagagcacgcacatcagagtcagtctgcccaaattcaaattggtgttctaccctttatttagttctgaaagtttgggcaaataacttaatctgcatgactcagatttgtcttctgtaaagtgggaatatgag

SEQ ID NO: 208458 - DNA, 515 bp, Homo sapiens
acaagcatgaactattgcgcctggctcctcgtttctcttaattccactcttcattccactctaatctggtwtttgtccttactactctgcaaaaacttctgtggacaaagtttcagtaacttccatattgctgtttcagtggttatcttacctgatctgtcaggagaaattcttaaaattgattattctgtctttctgacacactttatttactttttgtccagaataccatactcttggttttcttgccacctgtgctctggttgctctctttgtctcctttgctagttcttactcctctctccgcctcttaatgttggatatctaaaacctcaggcttgggtctccatctttatgtatcacttctctcacagtgatctcatccaataacaggttttaaaacccatctgtattctgatgacttcaagtttttattttctgataggccttttaaattctagatttccatattggactgcctattcaacattttcatatgaatgtataatagatat

SEQ ID NO: 208459 - DNA, 597 bp, Homo sapiens
agtttcaccatgctgttcagggtgggctaaaattcctgggctcaggtaatccacccacctcaatctcccaaagtgcttggattacaggtgtgagccactgtgcccagcctgaaatttaaaatggtatccagtacagcataaatgctcagatttttatggaatgaacaaaccacagytacacagatcaattacctttgatattatttgtatgtactccatggatttgaccaatgttttctaatttttatttttgtagaggtggtaggtcttgctatgctgcccaatctagtctccaactcctggcctcaaatgatcctcctgcctctgctttccaaagtgttgggcatgagccactgcatccagcctctgaccaaagttttaacctgagctgtatcctgctttttgtttgtttttttttgtttgtttttgtacaaatggggttgcccaggctggtatcaaactcctggcctcaagcaatactctcaccttggcctcccaaatcactgggattacaggtgtgagttactgcacccagccctgctttccttacagagcatatgaggcatctatttcctccacctactaaccaaggcagga

SEQ ID NO: 208460 - DNA, 597 bp, Homo sapiens
agtttcaccatgctgttcagggtgggctaaaattcctgggctcaggtaatccacccacctcaatctcccaaagtgcttggattacaggtgtgagccactgtgcccagcctgaaatttaaaatggtatccagtacagcataaatgctcagatttttatggaatgaacaaaccacagctacacagatcaattacctttgatattatttgtatgtactccatggatttgaccaatgttttctaatttttatttttgtagaggtggtaggtcttgctatgctgcccaatctrgtctccaactcctggcctcaaatgatcctcctgcctctgctttccaaagtgttgggcatgagccactgcatccagcctctgaccaaagttttaacctgagctgtatcctgctttttgtttgtttttttttgtttgtttttgtacaaatggggttgcccaggctggtatcaaactcctggcctcaagcaatactctcaccttggcctcccaaatcactgggattacaggtgtgagttactgcacccagccctgctttccttacagagcatatgaggcatctatttcctccacctactaaccaaggcagga

SEQ ID NO: 208461 - DNA, 606 bp, Homo sapiens
aactatacatttttaagtgttgaattttgttagtatattttatcaaaaaaaagtaaacacacatctacaatgagacatgataaggttgtaacagaagtacaatgctatggcaacatttaagaagtactgactgtacttgctgaatgaagtttcagagatcaggcatgacctgaaccttgaatagaagtgtactaggaagmcaaagagaagtagaatacatacaagaattttcaaagaaacttcaattcgtttggcatgtctgcagcataaaacagatgttaggaagttgagatcaagttggagaggtaggtaggatcagttccacagagcaccttgaataaatagataaaaactgaactgatggcccagaggcaacaaacactttgatgtattctggcccacacaacattttgtaaaatcccagcaaggcaataagggctacttaagtggagtagtgagatgcaaaagtcagagtgcagtatcctgaaggataaaaggtaggtgaagaacagcaactaagtggaattcattgttctttgaataaatttgacttgtgaaagggtgacacagaacataagacagaatgttctgtttaatgggtgtcta

SEQ ID NO: 208462 - DNA, 619 bp, Homo sapiens
atgaattcattcaacatgtacatttttgtgtaagccttctttcactcagcagaatgcttttggattgtcttatttagtcatattttttcgagactaaaataaagctaacaccagcaagcctttaatgaagtcctccctgtgcttatgaaaatgacattacttaaatctgtcatctcagaaaaatactagccgtgaaatccagacctcatctagggataaacaaaatttttcttcaagataccaagccctaggagaacatgtatttgggaattttacataaatcatgatgatgctgaaaggtaccaacccatttttgttttgctctgagccsttggaattgcatacaggaatttgttctggagtcaaaggtgtagtgttccctttgaagtcagtgagagctcctgcttagatcaggcctgtgaggaatggagcaaaaccacatacaggcaaattcccatcctttgcccattaaaaacaaaacaaaacaaaacaaaaaacaaaaaacaaaaaaaccatgcatctggttgcaatgatgggtaccaaatcttctgtctggatattttatcttttcttatttgaagtgtgaagtatcacattctttaaaagcagcatgatacac

SEQ ID NO: 208463 - DNA, 638 bp, Homo sapiens
gaattcaaagttccctacataaaattacagatttttcttttcacacagataaggctagtgtcttatttttcactgaaataaggaaacaaaacatgtcccattttctttatcataatcrgtgtcaatcagtgaagtcattacttccttaatcagaaaaaaaaaaaacacaaatcaactctaacacaaagtagggtagagctatggaattgggtgtttttcttaaagatcaatacactgaccacaaggtctgaatgcagaattttttttctgaatccctatgatgttgaaatcaaatgtaagccatttcatgatgttttaatgcaaacaaattggctacattttttttgttttttacgcaaataattggatttaggatcttgtgaaaaaaattactctttatattttgttttgaacagccgtctttattttgtgtttccgcagctctgaaatgcatgggaatgagaagcctcctccttccacgcttccctgctctggtttgtttaaagcttccctcatcatctactactaacaaaactgtggtaagggcatccactatttggtgggactattactctgtttgaggctataatttttgttccagtaactaacacttcattaagttgaaaatctttcattat

SEQ ID NO: 208464 - DNA, 638 bp, Homo sapiens
gaattcaaagttccctacataaaattacagatttttcttttcacacagataaggctagtgtcttatttttcactgaaataaggaaacaaaacatgtcccattttctttatcataatcagtgtcaatcagtgaagtcattacttccttaatcagaaaaaaaaaaaacacaaatcaactctaacacaaagtagggtagagctatggarttgggtgtttttcttaaagatcaatacactgaccacaaggtctgaatgcagaattttttttctgaatccctatgatgttgaaatcaaatgtaagccatttcatgatgttttaatgcaaacaaattggctacattttttttgttttttacgcaaataattggatttaggatcttgtgaaaaaaattactctttatattttgttttgaacagccgtctttattttgtgtttccgcagctctgaaatgcatgggaatgagaagcctcctccttccacgcttccctgctctggtttgtttaaagcttccctcatcatctactactaacaaaactgtggtaagggcatccactatttggtgggactattactctgtttgaggctataatttttgttccagtaactaacacttcattaagttgaaaatctttcattat

SEQ ID NO: 208465 - DNA, 638 bp, Homo sapiens
gaattcaaagttccctacataaaattacagatttttcttttcacacagataaggctagtgtcttatttttcactgaaataaggaaacaaaacatgtcccattttctttatcataatcagtgtcaatcagtgaagtcattacttccttaatcagaaaaaaaaaaaacacaaatcaactctaacacaaagtagggtagagctatggaattgggtgtttttcttaaagatcaatacactgaccacaaggtctgaatgcagaattttttttctgaatccctatgatgttgaaatcaaatgtaagccatttcatgatgttttaatgcaaacaaattggctacattttttttgttttttacgcaaataattggatttaggatcttgtgaaaaaaattactctttatattttgttttgaacagcygtctttattttgtgtttccgcagctctgaaatgcatgggaatgagaagcctcctccttccacgcttccctgctctggtttgtttaaagcttccctcatcatctactactaacaaaactgtggtaagggcatccactatttggtgggactattactctgtttgaggctataatttttgttccagtaactaacacttcattaagttgaaaatctttcattat

SEQ ID NO: 208466 - DNA, 611 bp, Homo sapiens
ctggaactgaatgcaaacatatgctttgttttcttttctttttttaagtattatatcctggactttatgctcccatttaagcatagaaattcagccttgtttcayttcattcatccgttcaacaactatttactaagcacacactttgttcaaagcattgaactagaaatattaaggtaaacaaaattggcgtccattcttccctggggaactaatattttaagacgtgatagagaaattacatcagtcaaggttattttattacaatcattataagtggcatgaaggtgaagtatacagtgctaagaatgctcctccaaagaaatatcacttaaataactggagaatgagcaagtctggcttaggtgaaggaggaggaattaaaaaaagatagttaataagcatagataccctgaggggagaaatagcatgacttatttgtgaaatttggagaaaaaaaaaaaagaagaaagctactgaagctagaacacaaagaacaaagtggaattgagtattgactctagagtcaaaccttagctcaataatcacttccaggttatgtgatcttgaggaacctcaatttcctcatttatcagaacggataataatat

SEQ ID NO: 208467 - DNA, 555 bp, Homo sapiens
tccacaaagaaggaagcttgtttctagtggactgctcataaagcaaggcacgcttctataaggggcttctcataagagagagtattttatgcttgagtgaggagttttctggctgtatttctgcaaggacttttatgacagtctccaaaatgaccccacctcctaagactcatgagtttgtgtagtctcccttctacatagaaaacggctgacctgtgcaacccatactgtattgaataaatcatagtgcacaacttccaaagggtaataaaagacatagtgatttccattttgctctcttggatcattttctctgggaaaaytagttgccatgcaaatatgctccagtagccctggtgtgaggaactaagacttcctggaacatccagcaaggaaatgagacctcccagccacggcaagtcagcaactgacacctcctcccaacagctctgggaatgaggcatcttggaagcaaatccaccagcctccgtcaggtcttctgatgactgtggaccgggccagcagcttgactacagctttaagaaagacactgag

SEQ ID NO: 208468 - DNA, 555 bp, Homo sapiens
tccacaaagaaggaagcttgtttctagtggactgctcataaagcaaggcacgcttctataaggggcttctcataagagagagtattttatgcttgagtgaggagttttctggctgtatttctgcaaggacttttatgacagtctccaaaatgaccccacctcctaagactcatgagtttgtgtagtctcccttctacatagaaaacggctgacctgtgcaacccatactgtattgaataaatcatagtgcacaacttccaaagggtaataaaagacatagtgatttccattttgctctcttggatcattttctctgggaaaattagttgccatgcaaatatgctccagtagccctggtgtgaggaactaagacttcctggaacatccagcaaggaaatgagacctcccagccacggcaagtcagcaactgacacctcctcccaacagctctgkgaatgaggcatcttggaagcaaatccaccagcctccgtcaggtcttctgatgactgtggaccgggccagcagcttgactacagctttaagaaagacactgag

SEQ ID NO: 208469 - DNA, 554 bp, Homo sapiens
ggtccttgggtttggaactggcacttattgaagttaacaaagagactgggagactagagtcctatctaaaggtgttgtgttggcagaaacaaactaaattattttggcagcctgtgttttctcaggcaggaacttcaagagggatagactcatcctagtgatgtggctttatgctgtcagaagttatgttaatgtcttggttgagtctttagagaccaaggttgaggtctagacaagaaagggttcagaggaaactgtctagagcttgggtaaagagaaaatctttgttactagccggttcttagactagcaaaaggctcagctgggacaaagtctttgataggcaaactaaccagtttggagccttatttcctctgtctgacctgtacatgcaaggggcaatgttcctctgccttgatcatttccaggaccaggcaccaggctactggaaacyagtcctgtagtttagaggctgctgaaattatttaaactagccaatcctacactgttcaccttgccctatcttgcctttcttaagggaactctagcaaagg

SEQ ID NO: 208470 - DNA, 472 bp, Homo sapiens
tctctggcaagtactaatggcaaaattataatctttcctcttgtcaaaactcattccttctgccttgactaatgctggataaaactgaacgaggtgtaggaactcataaagggcaaattctaaagtcactttagcatgttctaacatattgcttgttgtgtaccaaccccatatggcctaacaatgggtgattctttgtagacatgtctattgtagtcatacttaagagaaatattcaatgttacgagacatgtcttcaagatattttgatctactttattgttctttgattttacaaggtcaactatgcttttctccccagaagataaaatggcttcaatctctctttaaatcatgattttggcgtctaccccaaaacatcttggaaagtgaagtgwttcttctttggctgaatatttaaaagacagttattggctattttagcttggatagaggtaaatctataaattct

SEQ ID NO: 208471 - DNA, 593 bp, Homo sapiens
cagtgagtgatacttaagtttctgaataggaaaaaagacagacatatacaaaacttgggctctaaaccctaagactcactagggaaagaaggagaaaaaggaatattcaatgatatagtttgaactccagggttaattcatgtaaaactcactaaagggctgggctcacagaatcttcaatgagagaattaggttctagaagtctgcacaataataaaatgctcccttagtatagactagttgccctgaatattcctgcaccatgaaaacaacttgagatagtcacttctccttcaagaacacaagtcagttaaaaaatgacacattaaaaaaaaaaaatcccctcccctcaaaaagaatcacacagcctttaatgctaagaaggtaaaaaaggaaacacacacacacacacacacacacacacaccccatacaygttacatatacatacacacacatgtgtgtgtgtgtgtgtgtgtgtgtatatatatatatatatatgtttctaactatgcttaaatcagaaaaatatttttatctgctgttcaagtgaaggaaattttaaaagtaaagggtaaatccagaccacaagct

SEQ ID NO: 208472 - DNA, 462 bp, Homo sapiens
cgaggtgtgcaagcatgtctcacaagggtcagatggagttctggcctggattgatgtgtagatgctggagrgagaagctgggtttcttttggctgggtggctctgctggtatgtggtgggccttgggtttccaggtggtcattttccttatttgcagaaggaatgaggcccatatagagaatagagcaaattaaagggagagaaagagaaagaagtagggagagaggaagatagagaaaaagaaggaaaaagaagaacggagggaaggagaggaaagaaaaagagaaggaaaatgagaaggaggagaggaagaggagagagagagagaaaatgatttctttggacctcaaaattcaggcataccatggtctttgcagttacaaaagtcaataagttaccctttagctgaaacatgtctaagtggagtttcagttgttacaactgacaaagccctgcctagca

SEQ ID NO: 208473 - DNA, 462 bp, Homo sapiens
cgaggtgtgcaagcatgtctcacaagggtcagatggagttctggcctggattgatgtgtagatgctggagagagaagctgggtttcttttggctgggtggctctgctggkatgtggtgggccttgggtttccaggtggtcattttccttatttgcagaaggaatgaggcccatatagagaatagagcaaattaaagggagagaaagagaaagaagtagggagagaggaagatagagaaaaagaaggaaaaagaagaacggagggaaggagaggaaagaaaaagagaaggaaaatgagaaggaggagaggaagaggagagagagagagaaaatgatttctttggacctcaaaattcaggcataccatggtctttgcagttacaaaagtcaataagttaccctttagctgaaacatgtctaagtggagtttcagttgttacaactgacaaagccctgcctagca

SEQ ID NO: 208474 - DNA, 462 bp, Homo sapiens
cgaggtgtgcaagcatgtctcacaagggtcagatggagttctggcctggattgatgtgtagatgctggagagagaagctgggtttcttttggctgggtggctctgctggtatgtggtgggccttgggtttccaggtggtcattttccttatttgcagaaggaatgaggcccatatagagaatagagcaaattaaagggagagaaagagaaaraagtagggagagaggaagatagagaaaaagaaggaaaaagaagaacggagggaaggagaggaaagaaaaagagaaggaaaatgagaaggaggagaggaagaggagagagagagagaaaatgatttctttggacctcaaaattcaggcataccatggtctttgcagttacaaaagtcaataagttaccctttagctgaaacatgtctaagtggagtttcagttgttacaactgacaaagccctgcctagca

SEQ ID NO: 208475 - DNA, 462 bp, Homo sapiens
cgaggtgtgcaagcatgtctcacaagggtcagatggagttctggcctggattgatgtgtagatgctggagagagaagctgggtttcttttggctgggtggctctgctggtatgtggtgggccttgggtttccaggtggtcattttccttatttgcagaaggaatgaggcccatatagagaatagagcaaattaaagggagagaaagagaaagaagtarggagagaggaagatagagaaaaagaaggaaaaagaagaacggagggaaggagaggaaagaaaaagagaaggaaaatgagaaggaggagaggaagaggagagagagagagaaaatgatttctttggacctcaaaattcaggcataccatggtctttgcagttacaaaagtcaataagttaccctttagctgaaacatgtctaagtggagtttcagttgttacaactgacaaagccctgcctagca

SEQ ID NO: 208476 - DNA, 211 bp, Homo sapiens
tttgcagttacaaaagtcaataagtyaccctttagctgaaacatgtctaagtggagtttcagttgttacaactgacaaagccctgcctagcacaaggaataaacaatgttcagcagtggcatgagaacaagggacagcctgtttggtgggcagcatggcaaatggctgtccagaaaatatgacatttgggctggagggcaaagtggaattc

SEQ ID NO: 208477 - DNA, 211 bp, Homo sapiens
tttgcagttacaaaagtcaataagttaccctttagctgaaacatgtctaagtggagtttcagttgttacaactgacaaagccctgcctagcacaaggaataaacaatgttcagcagtggcatgagaacaagggacagcctgtttggtgggcagcatggcaaatggctgtcyagaaaatatgacatttgggctggagggcaaagtggaattc

SEQ ID NO: 208478 - DNA, 378 bp, Homo sapiens
ggacataatggttggccccatacagcgtgtcagatggagatgaaagtcttgcaaaggacacccgctcagcatggctagggtcatccacgayccagcatccatctctggagtgcagacaataaaaggaactgaagatgctgggcctccgacaaggaggtgactagtgaacctataatcctcaaccccaatttgtcttacagtttgggaaactataagtaatgtagcactggaaggcagtcactcaaaacagtgcctagccacgtactcactggtcaatccaagaatgcggcacaattgccctgccaaacaccagcaaacaggagggacagacaaagccagtgattggtcgagcttggcctctggcagcagggattgtct

SEQ ID NO: 208479 - DNA, 606 bp, Homo sapiens
gagtatcacaccaacaccacttcctaaatatttctgcaacccgcctgccccacattttccatatatggctgaacataggtctatgcagaaaaaactcaattctgatactgcctcttacttgaataagtgctgaggctctgggagttcagatcattataatcagccttctcattttgctttcactaaacattcattagctggttatgaaacccaaagaacagaggtcacactgagtgacagggactcagcagctgctcacagtgtaagatatttgctataatttacactaagatgtgaatgtaattatccttatcaaaatcacttcccctggcaaatttgtacattaagtcgagtaaatttcctctcattaaatcacagcatttggggactgcagtttgtytcagccaagaactagagcttggaagtaataaaggcaaagaaaaaaaaacttggattatcagcaggaagtgtgggtggtgaggagaaaggcagtatttcagagtgtgtcgaaagcccaaacctccagcagttccatgactatgtgtctcttgaatttagagcagtctttaaaatgtggcacttctcagctacctacgcatttggcaa

SEQ ID NO: 208480 - DNA, 598 bp, Homo sapiens
ggcaaatgtattccagcccccaaacagacccctaagaagcctgggcttcttcctcagaataaaatgtctgagccagtagagccacagacaacggcacgaatcacgcctgtattgaagcccatgtattagcggagggcsctgagcatgctcctcaagcatgggtttcctctccaagcctgggtttcctcacctgtaaaacagggaaaatccttagccttctcatcaccaacagagaagggaggcaactgtggttgtggggaggagcccacatcccttcatgctcacctccacactctggctctgggatcctgttggcagcatttgctgtggtcagcatcagtgttgcttgggccatttgttataaagcctgcgaaaaacactctccagtgtggagtgccaatattttccgattcagagaaaattgcatgcaaatgtatgcctctttgattctactcaagttataaaatgcagtttgagctcaataaattctggaaaagagcaaattattcttttcaacctgaagaatattgggtcatatcctgagtgcctaagcagagtgagacgggcaggactagtcaaactttttctgagctttttg

SEQ ID NO: 208481 - DNA, 596 bp, Homo sapiens
gggagtaagtctgtattattgaaatgacagtaaattcaaacatgcctaagctttttcaatgttggggaaaccatctcacagatcattcaaatgaccccaggagacatttcaccaggaacacttgttcatatccctctcccttctgccaacctctgtgctttaattatcaggggacctatctctcgattttggtttctcacctctttgtccccatgtacactggactgcactactgtgtcaaagctacttgcagcctgacctgggaaatgcacttttggattcactcaatttgctatctatttgggtggtttgggctggaaactgccctgctcacactcttggctcccagctgctcctgctttgggggcgcctagagaccccagctcatcccatgggtcacatccccacagtggggccggggatgcgactgagagttgtctgggctcctctctccagcagcattgaggatggagctcagcactgtgtgacgttggctggtggccactgcctgtttaggtcggaatggcccagcytgatgtccacatgcacctctgcgacacactggcctgcagacccccgagaatgtgctgcatgct

SEQ ID NO: 208482 - DNA, 598 bp, Homo sapiens
ggcaaatgtattccagcccccaaacagacccctaagaagcctgggcttcttcctcagaataaaatgtctgagccagtagagccacagacaacggcacgaatcacgcctgtattgaagcccatgtattagcggagggccctgagcatgctcctcaagcatgggtttcctctccaagcctgggtttcctcacctgtaaaacagggaaaatccttagccttctcatcaccaacagagaagggaggcaactrtggttgtggggaggagcccacatcccttcatgctcacctccacactctggctctgggatcctgttggcagcatttgctgtggtcagcatcagtgttgcttgggccatttgttataaagcctgcgaaaaacactctccagtgtggagtgccaatattttccgattcagagaaaattgcatgcaaatgtatgcctctttgattctactcaagttataaaatgcagtttgagctcaataaattctggaaaagagcaaattattcttttcaacctgaagaatattgggtcatatcctgagtgcctaagcagagtgagacgggcaggactagtcaaactttttctgagctttttg

SEQ ID NO: 208483 - DNA, 598 bp, Homo sapiens
ggcaaatgtattccagcccccaaacagacccctaagaagcctgggcttcttcctcagaataaaatgtctgagccagtagagccacagacaacggcacgaatcacgcctgtattgaagcccatgtattagcggagggccctgagcatgctcctcaagcatgggtttcctctccaagcctgggtttcctcacctgtaaaacagggaaaatccttagccttctcatcaccaacagagaagggaggcaactgtggttgtggggaggagcccacatcccttcatgctcacctccacactctggctctgggatcctgttggcagcatttgctgtggtcagcatcagtgttgcttgggccatttgttataaagcctgcgaaaaacactctccagtgtggagtgccaatattttccgattcagagaaaattgcatgcaaatgtatgcctctttgattctactcragttataaaatgcagtttgagctcaataaattctggaaaagagcaaattattcttttcaacctgaagaatattgggtcatatcctgagtgcctaagcagagtgagacgggcaggactagtcaaactttttctgagctttttg

SEQ ID NO: 208484 - DNA, 559 bp, Homo sapiens
taccaccttctctggttgggaagatcaagggagataatgggagtgaacacacctgtgtacartggagctgtgcaggctcctcatggttgcttagggcttggtctgaaggcctagtgaaagagaggatctgatatcaatgtaccatgaattccctggcatcctaattatttgttctttcatcaatcctgcaaacacttacagagcacctggtatgtgttcagcactgtgctaggatcaggagtcttaaccaataaacaagtcatggcctcaagccctgaagaaacaaagagatgtaccaggaggcaatttgtcagtgttctactgcattgtacattgatgtaccgcattccattgtaccagcctcagaagtactgagttatccacaggtgcttccaaaaacacacctaggaaagacacagaaagtgaaacatcatcacctaaccctgttcaggcttcagaattgctgtgaactgattcccagtggtgttagctgcaggaccaactgagtgtgtgacacaaacactttctgacaatgaaatattttgcagaaccaaaggct

SEQ ID NO: 208485 - DNA, 606 bp, Homo sapiens
tgctaggatggaaaagtgcccattgcattcacacgctgcccattgtttttctgttaaactgaggaaaggcaagattcacgctgacaaaaagttcttgaaggactactgttcgtctccccatattgggagcagtgtgaccagcattcaggagattctaggctccaaaagtggatgtgtaaagaacaaaagatgattttcccagacagccaacatgaagtggggaggactgtgagctcagagtccacccaccatggttggaattctccatgcaaccagtagagtggtgctggcctgttcccaccctcatgcatcagtttacccacatgtaaaatgggtgctaggtgctgtgaggagacaacatacatgaagcgagttagatgcagctcacacgcatggatggggagtacrtccaaggtgctggctgccactgctttcctcacagctcctgccttaggaggagtaatggcagcatcgtccccgtatccatggatgtgccattttgcctgggatcccaggtctcagccccatcttccttccccagttctcgggttgtcactgacatgagcgtgaatactgggcagttgtagaaagaacaaggaggcacgt

SEQ ID NO: 208486 - DNA, 534 bp, Homo sapiens
gttaataagagcccatttaatattgtagcaaaggcaagatcagggcaggatcaaggcagataaatttcaaacatgcctaaggatagtgaagaccaatggtgtttttcgattgtggctatatacattctaacacatccaatttttttaaaaaagtgaagcttaggccctattccctagaaattcagatttaactaatttggagtyggccccagacatcaatattttaactttcaagtagttctaggacagacaggtttaggggctacggagagacccagaatggcaagtacttagaacattcacacatcccccacctcccaaactcctaatagaaatcatttattaaccaggcccctccatgtcattggttggaatacaactttgtagtctttctcatcccaggactccaggcagcccctacccatgaagccaagttgacatatgaatgagggcatatgtgttagcccctacaagccatactgggcatgctttcccaaatctacaaattatcaagtgtgtagaaaaatagagccc

SEQ ID NO: 208487 - DNA, 420 bp, Homo sapiens
ggtctggaataaaacactccccttggctgtgcacactgcagagaggaaaaacaaaatgattggagtcagccgggcttttctattgagcacctcgacctacagattttccaatttcaagttcattcacatttcatctctggcttctacattttacttaaaaagcatttcyctatttgctattgtccactaaggaaaatgcctatttaaaaatagagtttcttttttaaagcatcttgattcacacatttcaaagctcttcagaaaacacgatttctcaaaagccatgtcattctaaaacatgctacagttgtcagatggagaaagattcaagatattattctacatgatcttttcaatgaactgatcgcatctgtctaggaataaggagagttgtcttatgttacttcaaaaaagattcca

SEQ ID NO: 208488 - DNA, 420 bp, Homo sapiens
ggtctggaataaaacactccccttggctgtgcacactgcagagaggaaaaacaaaatgattggagtcagccgggcttttctattgagcacctcgacctacagattttccaatttcaagttcattcacatttcatctctggcttctacattttacttaaaaagcatttccctatttgctattgtccactaaggaaaatgcctatttaaaaatagagtttcttttttaaagcatcttgattcacacatttcaaagctcttcagaaaacacgatttctcaaaagccatgtsattctaaaacatgctacagttgtcagatggagaaagattcaagatattattctacatgatcttttcaatgaactgatcgcatctgtctaggaataaggagagttgtcttatgttacttcaaaaaagattcca

SEQ ID NO: 208489 - DNA, 420 bp, Homo sapiens
ggtctggaataaaacactccccttggctgtgcacactgcagagaggaaaaacaaaatgattggagtcagccgggcttttctattgagcacctcgacctacagattttccaatttcaagttcattcacatttcatctctggcttctacattttacttaaaaagcatttccctatttgctattgtccactaaggaaaatgcctatttaaaaatagagtttcttttttaaagcatcttgattcacacatttcaaagctcttcagaaaacacgatttctcaaaagccatgtcattctaaaacatgctacagttgtcagatggagaaagattcaagatattattctacatgawcttttcaatgaactgatcgcatctgtctaggaataaggagagttgtcttatgttacttcaaaaaagattcca

SEQ ID NO: 208490 - DNA, 420 bp, Homo sapiens
ggtctggaataaaacactccccttggctgtgcacactgcagagaggaaaaacaaaatgattggagtcagccgggcttttctattgagcacctcgacctacagattttccaatttcaagttcattcacatttcatctctggcttctacattttacttaaaaagcatttccctatttgctattgtccactaaggaaaatgcctatttaaaaatagagtttcttttttaaagcatcttgattcacacatttcaaagctcttcagaaaacacgatttctcaaaagccatgtcattctaaaacatgctacagttgtcagatggagaaagattcaagatattattctacatgatcttttcaatgaactgatcgcatctgtctaggaataaggagagttgtctyatgttacttcaaaaaagattcca

SEQ ID NO: 208491 - DNA, 395 bp, Homo sapiens
cagaattctatttctccatcttctctaattatttagcaaaaaactttacttctttcaaactcattcttattctttacaaaaccggagagccaactttaaaaaaaaaaaaaaaacagtccttctggttttgcaatccaaataagtgggaccttgagcaagtcaacttttcagaggcccagttttcttatccacatataaragagttaatctgtgctagatggcctctgagatgctattctagctttaaaattctatgatctcatgtttctttcctatctggtttgtgtataggaattttaaaatcccatgttctttttgttatttctggtgggaaggattcttctttctctcattatgtgtctccttttgctactcttcctctaaattttgtaaca

SEQ ID NO: 208492 - DNA, 510 bp, Homo sapiens
gttcactgcaagctcacccattttattgtacttaatagaaaaaataagaccaggccgaggttataaaaacagataaatatggacttttctcctccttctttccactcatcctccagctggtatgtgctctgggccctctgggttggcagcttgtggacatatcagcatcaggggcaccccggcggctccctgggtaaggagtgtgggggacctcgcaccgcctttgctctmaactgagggccttggcttgctgcaccctctcctctcctgtcttccctccaggcccttcttccgatgcgttactaagtggggacgacttttatttggaattgctgtggggatttctctctctctgtcaccccaacaccaccgtttgctcccagggtgcctctctctctcctgtggctgtatctctggattggtccaaaggagttgcaaaaatgcaatgaaagtgaaaacgtgtagagtgagtgagatgaaacagggctcagaacagttccgttgcgaatt

SEQ ID NO: 208493 - DNA, 412 bp, Homo sapiens
gggctgtgtaaggggatccaatatggcaggtgtaggaagaaagtctaaaacmctgtttaagtatttctaataaaataagaaatcagttaagctctgaagtattaaatgtatggactgaaaccggtagtctcattcatttattaccgtaatttcatgtggtaagtaagcttcccaagaaagaatggaaattccaaaaccctctggatcatccacagcatccctagttgttcacttagcatatagacatgttgcagtttacagctatgcaattatgctgacagtaataatttaaatgaattctcacaaaatggacaagtggctccaaaagagttcatcaagaaaacagaatctgaagacaatgttgtatgaataatgcacacacaaatgagcaaaaaccacatggctgacctgg

SEQ ID NO: 208494 - DNA, 400 bp, Homo sapiens
tggtcacatattttgctcacactcctatatcttgccttttgcatttaacaaagtatcttagaagtaatttcatagtctcatgctatgatggacagttgatggatgcctgactgatgtccattctctccttctccttccctgaaatacagtacrtgctcacttaacatggttcataggttattagaaactgcaactttaagcaaaatgacatataacaaaacgagttttaccacagggtaattgatataaacaagagttaagctcctacagcatatttctggtcacagaaacatcaccaaacttctaaataaagaccccaaacacttctaatcaatcttaaacattgaaataaatgcgagctatacatttatttaagaaagattaatagaaacaagtaata

SEQ ID NO: 208495 - DNA, 400 bp, Homo sapiens
tggtcacatattttgctcacactcctatatcttgccttttgcatttaacaaagtatcttagaagtaatttcatagtctcatgctatgatggacagttgatggatgcctgactgatgtccattctctccttctccttccctgaaatacagtacgtgctcacttaacatggttcataggttattagaaactgcaactttaagcaaaatgacatataacaaaacgagttttaccacagggtaattgatataaacaagagttaagctcctacagcatatttctggtcacagaaacatcaccaaacttctaaataaagaccccaaacacttctaatcartcttaaacattgaaataaatgcgagctatacatttatttaagaaagattaatagaaacaagtaata

SEQ ID NO: 208496 - DNA, 547 bp, Homo sapiens
gaaacacaatcttatactaacatgacagtttcaaaaaaatcatattatcataaatcatagaaacatcattggcttcttttaaattgtattcaatatactaactacaccattcacaaattataacaatctatgcaaatgtacattaaagccataaaaagcttttccagcatatccttttcccacagcccaaataaaggtaaattaagaaaatctggcaaaaggcgtataygtctattgccatttcccacagcaaatagggtgttttcctctgggaataaaacattttctttaaactactgtttatagcccttatcagctcaactgcaatagagccatcaagtccaatctcttgtggaaaaaagtcaaggtcaacaagtacttgcatttttgttttttctttagctgcaattgctactgacatccaattgggtaataaacatgaggtctgtcaaatgttcccaaagaacaggtgatccaaaagctatctcagcacaaggccattgccaggtaatcaaacaatcttgttataacaattatgatttgagta

SEQ ID NO: 208497 - DNA, 552 bp, Homo sapiens
ctagctgtcctggctgtcataagtagtaggggcactcaaggaaagagtcaaactacaacagtaaatgctaataacctagcaacaagcycattggcaaattcaatattttctgcattcactctgtagttctctttttcttaaaaatatacattttttaaaaatgtaagctttgctacgtaaggtcatattctccttttcttctaatatggaaataagtaacaggaagttctgctgtcttcattctttgttacaaaataaagtgagcaacgttaggagggaatgcatatgaattgatattggtaagagggagaaagccaaactaattgtactaatcaaatagaatgcttttaggttaagcaattatggaaaactatatgcaagactgagctaatccacaaagccagacacttgagcaaaacccaactttaccaactacatttctgggactaatcaatacaacaggtagaccatgcctacattttttttttcctgaggaaaatgcttggcataaatttactgtttgggttagtttttgctaggccaacagccaaa

SEQ ID NO: 208498 - DNA, 439 bp, Homo sapiens
actcttctcatttgcttgtccatcaacagaaaatgagattctttttaacatttttgtcactggtgcccaacccagagtttcaaatgtttattattttccagcgtcatgctggaagcatgctcctctgttgccctccaagctggggctgcttcagaaagtcccagccctccccacattgccactcgctccctttgggccaccaggggacagggggatgacagtgcagagcctgtggcatccctgctgatgaagaaatctcccagatcacaagcccagctgttaacatgaatgacagtcaacaaagaggaatcacagaaacagatgcctcaagctcccagttagggtgatgctgaaggggcatttggcaggacmcacagttcacccttactttgctgaggagtcctacagcctggagatttaatagagatggacatgagtg

SEQ ID NO: 208499 - DNA, 439 bp, Homo sapiens
actcttctcatttgcttgtccatcaacagaaaatgagattctttttaacatttttgtcactggtgcccaacccagagtttcaaatgtttattattttccagcgtcatgctggaagcatgctcctctgttgccctccaagctggggctgcttcagaaagtcccagccctccccacattgccactcgctccctttgggccaccaggggacagggggatgacagtgcagagcctgtggcatccctgctgatgaagaaatctcccagatcacaagcccagctgttaacatgaatgacagtcaacaaagaggaatcacagaaacagatgcctcaagctcccagttagggtgatgctgaaggggcatttggcaggaccmacagttcacccttactttgctgaggagtcctacagcctggagatttaatagagatggacatgagtg

SEQ ID NO: 208500 - DNA, 571 bp, Homo sapiens
ccaaaaagacccagaatatttctattccttatttgtctttaattattgtgttctttttgtatgggcaccctagattgggagattcagccctaggattagagctcggagtagcatggatctcattcccaggtctccatttcttggctagcttcttttccctggacaatccattccttcacaggagtcagtaattctgcaactaatctaatgcccatttactttccttatctgactctstctgtcagtcttttcactttcatctcttctggcattactcctcatttccttaattttccctacattttcccattatgtgaaataaaaacacttcaaatccttatttcacttttctcagctataggtattacagacaactggcataccatgaagataagctgactcttacaagagtaatacaatgatgatgaaaatgaacattgagtccttattatttcctagacactctatctattattatctatttaatcctcacgccaacctaatgggatggagtagtagatccatgttagttttatttgagaggtttcagcctttgaatggctgagttcag

SEQ ID NO: 208501 - DNA, 444 bp, Homo sapiens
tgtgcaggtaaaggttgagactccatgagacatggcatagatagacgtcatggagatgaaagctgaacactgataacagaggccttgcaggttagggtgatgctggagttctcgcccayagaagaaagaaaaatctggggcattcatgtgaaccctaggaaggtcatgctttgtaaaggaataataactatgccttaatgtaagcatcctgccctgaaactaggtaaaaaaacaaaaacaaaaaacaaaatagatcattcttctaagaataaaatcaaatataagaggatgaaaagaatctaccagtaatttgattaattcatatgaattatatcctctttccttaaagggtattgagtttgtcctgccagacagatattctacaatgtattgttcacaatatctagcatataatttaacattcttaaacatttcaagaaggaa

SEQ ID NO: 208502 - DNA, 444 bp, Homo sapiens
tgtgcaggtaaaggttgagactccatgagacatggcatagatagacgtcatggagatgaaagctgaacactgataacagaggccttgcaggttagggtgatgctggagttctcgcccacagaagaaagaaaaatctggggcattcatgtgaaccctaggaaggkcatgctttgtaaaggaataataactatgccttaatgtaagcatcctgccctgaaactaggtaaaaaaacaaaaacaaaaaacaaaatagatcattcttctaagaataaaatcaaatataagaggatgaaaagaatctaccagtaatttgattaattcatatgaattatatcctctttccttaaagggtattgagtttgtcctgccagacagatattctacaatgtattgttcacaatatctagcatataatttaacattcttaaacatttcaagaaggaa

SEQ ID NO: 208503 - DNA, 613 bp, Homo sapiens
ctacaaacctgtgcagcatgttactgtactaaacactgtaggcagttgtaatacaatgataaataattgtggatctaaacatagaaaagttacagtaaatatatgacattatactcttatgcaagactaccattgtatgtggagtttgtctttatgcagctcatgactgtatacataataaatatttcaatgtggtagtacaagttaactctttggtggtttccagatggttaaaatttagaatatagcacattcgtgtatgtatgacacttttggttatggttttcataatgtttagatttttttaagttgcaacttgcagaaacccaactcaaattaataggaatgtattggcttacattaccaaaagcccaggaataaaattctgttttatctattttgggatgtaagtatgctaacatgaggtaaagatttttttctgtatcyattcttactgctgctccttctgcttttctttctatttttggcttcattcactcttattgcaggcaggctctatctatgtgccaggtgggatggtcatgactgtccacatgcatatagcttccaacctgagcatgagagagcctttagatagttccagcaagtaatt

SEQ ID NO: 208504 - DNA, 609 bp, Homo sapiens
agaaatttgtatgagtatgtacctgagtcatgcctaatattctttttttattgtctatatgtaaggtggacagcatgaagttttgatatacatacatacagtgaaatgattactagtcaagcaaattaacatatgcatcacctcacatagttaccttgttctgtgtgtgtggtaaaagcacctaaaatatactctcctagcaratttacagcatgcagcacaatattatcaacttcagtttttatgttgtagagtagagctatagacttattcatcctacatacctgcaactttgtaccctttgacctacatctccctattcctctctctctcctacccctgttaaccaccattcataatattcttaaatagaaaatctctccttaactccctaccattttttcatatgtagcctcctttctagcattactgaggatagaatgctataattggcataaatttaatagtagtcatctaaaatcaggattcaaaccaagttaatattattacaattattacaaaataactttattattaaaactttaaatgaaatacagaataaaatgtttacacttttactttggcctgggtgcatctgaagtgttgtgt

SEQ ID NO: 208505 - DNA, 430 bp, Homo sapiens
atgaatagccagtgtacctgtaaagtatgaaaggcagcacaaagcctgaaggatatatatgaaggtgggagacaatgttactaggaagtttggctcaattccacccttctcttttttcaaaggcagattaaatgtatgtgagcttaaatatactttaaatttcatttacaacccatctttcttcttccctgctcactattttggagtcaatgggaaacttaggaaccacctgacggtacccaargcccaacaaagcttcccagtgtggggtcaaatgtgtaatggcttgactttgttgtataaatgagtataccaggaattctctgggtctttgttaagttaataatactctaatcgtacatagtttacagtttgcaaagggcttttgcatgccttatttcagcctcataaaaattttgagtgtaaggaa

SEQ ID NO: 208506 - DNA, 619 bp, Homo sapiens
tagttgaaataacttttattgatttaggatcaggcaacatctcagaagtatctctgagtctttgtgatgatcataggatacagcataatagaaagtgtagaaaattgggtgaatttttcattcattcgttcacagacatttattgagctcttgttgcatattaagcacagtgacagtcactggcatgttgaaaaacaccctgacatttaaaattttttaaattccttctaaaaatatatataaatatatatacatatttgggatggagtttcgctcttgctgcccaggctggagtgcaatggtgcgatctygactcactgccacctccgcctcctgggttcaagtgattctcctgtttcagcctcccgactagctgggattacaggcgtgtgccaccacgcccagctaattttttgtctttttggtagagacagggtttcttcatgttgatcaggctggtctcgaactcctgacctcagatgatccccctgccttggcctcccaaagtgttggaattacaggcatgagccactgcacctgccttaaaaatattttttacaattattctatcagtttaatattaaaacattcagttaattagcattttatttgttgtagt

SEQ ID NO: 208507 - DNA, 629 bp, Homo sapiens
aaacttctacctggacatcctggtgtttccatacatcctctgaaatctaggcaaaggttccaaaacctcaattcttgactactgtgcaccctcagatcctacccctcgtgaaagttgccaaggcttgggccttgcaccctctgaagcaacagcctgagctgtacttttgccccttgtagccacagcaggagctgaagcakctggaatgcaaggcatcatatcccaaagctacacagtgcaggggggccttgggcctggcccacagaaccatttttccctcctaggccttttggcctgtaatgggaggggctgctgtgaaggtctctgacatgctctggagacattttccccattgtcttagtgactaacacttggctccagctgggcacggtggctcatgcctgtaatcccagcactttgggagcccaaggaaggcagattatgaggtcaggagattgagacaatcctggctaacacggtgaaaccccatctctactaaaaatacaaaaagaaaattagctgggcatggtggcacatgcctgtagtcccagctactcgggaagctgaggcaggaaaatcacttgaacccactaggcagaggttgcagtgagccaagatcgcaccactgc

SEQ ID NO: 208508 - DNA, 629 bp, Homo sapiens
aaacttctacctggacatcctggtgtttccatacatcctctgaaatctaggcaaaggttccaaaacctcaattcttgactactgtgcaccctcagatcctacccctcgtgaaagttgccaaggcttgggccttgcaccctctgaagcaacagcctgagctgtacttttgccccttgtagccacagcaggagctgaagcatctggaatgcaaggcatcatatcccaaagctacacagtgcaggggggccttgggcctggcccacagaaccatttttccctcctaggccttttggcctgtaatgggaggggctgctgtgaaggtctctgacatgctctggagacattttccccattgtcttagtgactaacacttggctccagctgggcacggtggctcatgcctgtaatcccagcactttgggagcccaaggaaggcagattatgaggtcaggagattgagacaatccyggctaacacggtgaaaccccatctctactaaaaatacaaaaagaaaattagctgggcatggtggcacatgcctgtagtcccagctactcgggaagctgaggcaggaaaatcacttgaacccactaggcagaggttgcagtgagccaagatcgcaccactgc

SEQ ID NO: 208509 - DNA, 565 bp, Homo sapiens
gaattcttatgggacatcaacattagacagccacccaaaagtggtaaatgaaagagagatagcaagatgaatcctgaagggaaagctaagagggcctcatagcaaactttygtacttacagttttccttgagtctggataatcactctagctaatggattcacctctagcttatacctattccaaactatcacttcttagtagatcagatagactcttggtaaagactcaaatggggagaggtgccggcagagctggagaaggcagtagttcttgcagcagagctgaaaataatgcagtctcactaagccagggaagacctcacagacagccaacaacacttgtatctgtgttggcttctgtggcttccttttaaatctaataatggattagtccttcccccttctgtccctcttcctgattctgagcatctgatgaagaaatgaacatggctagaaactgactggccttgtgctaaatcttaaggtatctaagggatctttgagggacagaacccacctccaccaatggtggcttttgagaggtttggttcagttaccaggtat

SEQ ID NO: 208510 - DNA, 565 bp, Homo sapiens
gaattcttatgggacatcaacattagacagccacccaaaagtggtaaatgaaagagagatagcaagatgaatcctgaagggaaagctaagagggcctcatagcaaactttcgtacttacagttttccttgagtctggataatcactctagctaatggattcacctctagcttatacctattccaaactatcacttcttagtagatcagatagactcttggtaaagactcaaatggggagaggtgccggcagagctggagaaggcagtagttcttgcagcagagctgaaaataatgcagtctcactaagccagggaagacctcacagacagccaacaacacttgtatctgtgttggcttctgtggcttccttttaaatctaataatggattagtccttcycccttctgtccctcttcctgattctgagcatctgatgaagaaatgaacatggctagaaactgactggccttgtgctaaatcttaaggtatctaagggatctttgagggacagaacccacctccaccaatggtggcttttgagaggtttggttcagttaccaggtat

SEQ ID NO: 208511 - DNA, 565 bp, Homo sapiens
gaattcttatgggacatcaacattagacagccacccaaaagtggtaaatgaaagagagatagcaagatgaatcctgaagggaaagctaagagggcctcatagcaaactttcgtacttacagttttccttgagtctggataatcactctagctaatggattcacctctagcttatacctattccaaactatcacttcttagtagatcagatagactcttggtaaagactcaaatggggagaggtgccggcagagctggagaaggcagtagttcttgcagcagagctgaaaataatgcagtctcactaagccagggaagacctcacagacagccaacaacacttgtatctgtgttggcttctgtggcttccttttaaatctaataatggattagtccttcccccttctgtccctcttcctgattctgagcatctgatgaagaaatgaacatggctagaaactgactggccttgtgctaaatcttraggtatctaagggatctttgagggacagaacccacctccaccaatggtggcttttgagaggtttggttcagttaccaggtat

SEQ ID NO: 208512 - DNA, 200 bp, Homo sapiens
ttcccccttctgtccctcttcctgattctgagcatctgatgaagaaatgaacatggctagaaactgactggccttgtgctaaatcttaaggtatctaagggatctttgagggacagaacccacctccaccaatggtggcttytgagaggtttggttcagttaccaggtatttaggagaatctcactaaaaccaggaattc

SEQ ID NO: 208513 - DNA, 609 bp, Homo sapiens
gaagaaaatgcatcaaaatagttttcttttttaattcctacatgagttatataatattcataaattaaaaatacaattaccttgttaaataaaatgtttaaaataaaaatacagaaattacctttctcttttaaaaatgttatgcgtgtctttggatcaatgtgaaaatagagtagccctagtttgacacaatactttttcccaaaaaatagctataaggaatatttctctgatacagaacttatttcctatcaactctcactataaaataaataatgtggtcccattgggaaaaaaaaaatccctcactaaactaagttttaaaagagttgaataagaaagaaaactctcagtagtgatcttacagtacttttaaaacttacagatatactcaacagatagcatagtttctgttaataaargtctcatcctcccacctgtccatccaatcaacaggtcacccaattcctgatctgctggtgtcctggagaagccctggtgtacaagacaggccatctttccactctgaagcaagcaggtcgctgcctcagtccgtccaggctgctgtaacagactgccatagagcaggcagccaatggacaacagaaa

SEQ ID NO: 208514 - DNA, 538 bp, Homo sapiens
catattttggggtggcatattctgctaccctccaagtttaaagagatttagtcaagccacatcttgaagagatcccacagctaggagcgaatacactcaggctggagagagagtgtttgaggtaatatggtggccaaaaagaagctggaagtgtgggttatgacacagcttgtggaacaaaaaaacggggacctgagaagggctgctagggagtatgacagtcttctttatcaacctgaagagaactaaatgaagaaaataagcacatatgtatctatctgtctatctatcttctttgccttttgggaccacacttatttaaacgtgacatttttttccgggactgaatgctgaagtcacacagcatacctagacacctctgcttggttctcatgagaacagatgtgtgtctcccactcactgtgtccacaaatgaacttctgatcttcctccacaatctgctctacccacagccacccctcctcagacgatgacaacttcamccttccagacacttaagccaaaacccgtgatattc

SEQ ID NO: 208515 - DNA, 298 bp, Homo sapiens
gaattcgagagggacggtgaattgtagtgggaccgccaggaggggaggttcctgcccccgagtagaacctgggagcagagccgctcggggagggcggtgggggcttcakggccgcggagggggtcccctcagggtgggccgtctcctcctcgcccgccgcaggcaggagcgcgggggaccgaaaccctgtagtttgcagcgtcaggcagcgggtctgcgcccagcgagcggctccccagctcctgggaagatgcggacccgggacgcccccgtgagctcactgcgcctggctgacacg

SEQ ID NO: 208516 - DNA, 440 bp, Homo sapiens
gataaattctgccattttcatttcactttctgaaagtcagggttggcttgtgaaaagttgttaaaaacaagctaaatgtgaactgtcaaccctcactctaagctttccctgttcagagcatcagatgaagacttcattgggttttatagtggctttccaatttttggtagtccattgaagaagagagtttgaaagttgtatacgttaatgattgtctgccctgtcctgcctgaaataccatgaytgtttatggaaagtatctttaataaagctggatacagtttggcttgggaaaaaagagttccacatcaatataactgggaacacaatgaataatcattaagaactacaacaagcatttatgtgtgacatatggactttctaacttcaaagcagttgcaattaaagacatgtttaacatgaccattaaaatgaaaata

SEQ ID NO: 208517 - DNA, 606 bp, Homo sapiens
ttcttctgtattaggagttagcaaacttttcctgtaaagagccagaaagttaaatatttcaggatttgcaggccaaactgtctcttgcaactactcaactctgccccatgtagtgcaaaagcagccctaacaagacataaccaaatgggcaaagctatgttccagtaacactttgtgtataaacacaagctgtgggtcaaatttgtccctcataacayagtttatctgcccttgttctatgttataatagtttaaataaagttcacagtgtagcaggacaagctgcagacaaaacccctcagacaccgagttaaacaaggaagggctttatttggccgggagcttcggcaacactcacgtctccaaaaaccgagctccccgagtgagcaattcctgtccctcttaagggcttacaactctaagggggtctgcgtgagagggtcgtaatcgattgagcaagcagggggtacgtgaccgggggctgcatgcaccggtaatcagaacggaacagaacgggacagggattttcacaatgcttttccttacaatgtctggaatctatagataacataaccggttaggtcaggggtcaatctttaaccaggc

SEQ ID NO: 208518 - DNA, 606 bp, Homo sapiens
ttcttctgtattaggagttagcaaacttttcctgtaaagagccagaaagttaaatatttcaggatttgcaggccaaactgtctcttgcaactactcaactctgccccatgtagtgcaaaagcagccctaacaagacataaccaaatgggcaaagctatgttccagtaacactttgtgtataaacacaagctgtgggtcaaatttgtccctcataacatagtttatctgcccttgttctatgttataatagtttaaataaagttcacagtgtagcaggacaagctgcagacaaaacccctcagacaccgagttaaacaaggaagggctttatttggccgggagcttcggcaacactcacgtctccaaaaaccgagctccccgagtgagcaattcctgtccctyttaagggcttacaactctaagggggtctgcgtgagagggtcgtaatcgattgagcaagcagggggtacgtgaccgggggctgcatgcaccggtaatcagaacggaacagaacgggacagggattttcacaatgcttttccttacaatgtctggaatctatagataacataaccggttaggtcaggggtcaatctttaaccaggc

SEQ ID NO: 208519 - DNA, 572 bp, Homo sapiens
tttggcccctatcactagcagtaagaagtagtgcttagctttcatgtttaagtaatgttaacgatgaccacagtcactgttaatcatatatttttcatattctaggttgggctgtaaagactttggcagcagaatagcccctagatatttatgaaatagtactgtatagcacataggaaatttgaacttggaaaaagtaggagtaagtctctctggctagtacattgtttagggagtattgaatttatgtaaacaaataggtcagtatgattggccccatcaaagtagcaagccttatttctaattcattttggtgatagattacagtaacttgggagcaaaaaaaacagactacttacttgaaagtgtcaaatgcaattatcacttagtgatttttcacttttaagggtcacagagaatamctgggacctggaataacttgttctcgtcactgttgccattttgctttgagattctgctgtgcttctatgaccaaataaaatgtaacaaatctctctcttctttccaacctcccaccttctgcctcctccatgctcaccaaagataccctt

SEQ ID NO: 208520 - DNA, 475 bp, Homo sapiens
atccaggttcatgatgcaggtctatccttaaaagattacatgccaaagttggaggtgagcaaaagtactccattcagaatatggaaagagaggtttctaactctgatggaacacagccagttggtctgctgggaaaagtcacatctagcagtgacatgctgaacaatctggcccagaccatatcctatcacctaaaggcccacatttgctccttctggatgaaaggagagaatgagagaggaggcgtgtccatacaggcatgagaggcctacagatccagataatacccttgctgataagcatattaaagacaagaattatggaaacaatgatgctggagctggagcatagaagcttctaaagcaggctttaacgatgcctcatctagatccaccagaggataaggctatcaccacactatatgttgatggtctggaggrtatcattactgagaccaagctaacaaatcatccct

SEQ ID NO: 208521 - DNA, 630 bp, Homo sapiens
atatttaccactctattctctttttccaaaattattttagctattctagctccagtgcctttatatataagttttagactaagattgttgtgttgtaccaaaaaccactggtttgaactttaacaggtgtttcattcaacctgtagatcaacttagggacaattggcatctttactatattaatttgttcagtccattaactttgtatgagtttctacttatttagatatttgatttctttcatcagcattttgtaatttttggaattcagattttgtatatgttctgttagacttatatcaaatattttattttagagcaattataaatcatactatattttaaatgtccaaatgttcattgttagtttacagaaatgctattaatttttttaggatgatctatcctttgcttttgatgaactcrttggttctaagaggtattttgtagattccttgggatttcctacatagacaatcatgtcatctgcaaataacaacagttttgtttcttccttctcaatacggatgcctttttcttttcttttctcttttttttccttattgtgctgtctacaacttccaatactttgaataagaatgatgagagcagacattcttccattctacc

SEQ ID NO: 208522 - DNA, 519 bp, Homo sapiens
actttctggtttttcctgctttgatttaggccttgtctggtaattttaatacctctgatggtttttcgtttcttccaatttgttaatatgttatagaaaattaactgtctggaaaacaaagcaagcaggagtttctctctctttctctggaaaacaaagcaagcaggagtttttctttctttctctctgtctctctctctctgtgtctctctctctctctctccctctcttcctccctctttctctttctctttcttcctgtctgtcagagcattgaatttttttgagttaatttctttcccattgttctttaggtcagcatcttcactatttcttagttctgttcttcattctagactctcactcctagagaaaacatttctatgatcttcagtttattctgtccaatttatttttaaatgactcaattctgtctkttgatataacacaaaattcttaacttaaacctttagagaggcaatctattttatttagttagtttatattagcctcagaact

SEQ ID NO: 208523 - DNA, 560 bp, Homo sapiens
gtgtccttcccaaggaaccactgacttcatacttttgagrttgttatcattcacattaggtattactcaccgtagttcatgattttccattttatttgtaactgctgattggttcttcctggtaggacaaactatttctgtatttcttgcttcttttaagcactctgagatctgcagagctattatatccttcgaagatatctaccatgccttccagttcctgtttgtatgtgtttgtgtatgtttagtcaattcaacagacactaatgtgttaggtattgtgcaagcttcaaaagatagaaacttatgtgtgtgatatagtttgaatctgtgtccccacccaaatctcatgtagaattgtaatccccagtgttggaggaggggcctggtaggaggtgactgaatcatgggggtggatttgtcccttgctgttctcgtgatagcgagtgagttctcatgagatctggttgtttaaaagtgtgtagcacctctccctttactctcttcctcctccttcagccctgtaagaagtgcctgcttccctttccgccatgattgaa

SEQ ID NO: 208524 - DNA, 560 bp, Homo sapiens
gtgtccttcccaaggaaccactgacttcatacttttgaggttgttatcattcacattaggtattactcaccgtagttcatgattttccattttatttgtaactgctgattggttcttcctggtaggacaaactatttctgtatttcttgcttcttttaagcactctgagatctgcagagctattatatccttcgaagatatctaccatgccttccagttcctgtttgtatgtgtttgtgtatgtttagtcaattcaacagacactaatgtgttaggtattgtgcaagcttcaaaagatagaaacttatrtgtgtgatatagtttgaatctgtgtccccacccaaatctcatgtagaattgtaatccccagtgttggaggaggggcctggtaggaggtgactgaatcatgggggtggatttgtcccttgctgttctcgtgatagcgagtgagttctcatgagatctggttgtttaaaagtgtgtagcacctctccctttactctcttcctcctccttcagccctgtaagaagtgcctgcttccctttccgccatgattgaa

SEQ ID NO: 208525 - DNA, 560 bp, Homo sapiens
ttagctaatcactttattttttttttcagagttttgacactgcttatgtttagtatgccrcctggaattaccatccattatgcatgctatggaagaactttcttttttcttctattttgcatttttatagctacaactctggacatctgttttcattcctgttgtctcctcggggacttattcttcctggctttcttattttgtcagaatcctgcaaggcattcctcaatcctttttaccttttcaccatttcttccatcaaagacaccagcttgcatttatagcatgttacattgatgagagcctcagagagaaaaacaagcataaagctgagactgcacgttactgccgtcattctgttcccctctgctcatacctcctgggaaaaaaggagggacacagttctttgtaactccctcagaaatttttcctataaatgcttgaagcaaactgccttttggcagtgcctgtttatctctgggcacctgggaccactctcttgaaatcagtctggacactagcctctatttcttcccattgaggctttattattctgctaa

SEQ ID NO: 208526 - DNA, 560 bp, Homo sapiens
ttagctaatcactttattttttttttcagagttttgacactgcttatgtttagtatgccacctggaattaccatccattatgcatgctatggaagaactttcttttttcttctattttgcatttttatagctacarctctggacatctgttttcattcctgttgtctcctcggggacttattcttcctggctttcttattttgtcagaatcctgcaaggcattcctcaatcctttttaccttttcaccatttcttccatcaaagacaccagcttgcatttatagcatgttacattgatgagagcctcagagagaaaaacaagcataaagctgagactgcacgttactgccgtcattctgttcccctctgctcatacctcctgggaaaaaaggagggacacagttctttgtaactccctcagaaatttttcctataaatgcttgaagcaaactgccttttggcagtgcctgtttatctctgggcacctgggaccactctcttgaaatcagtctggacactagcctctatttcttcccattgaggctttattattctgctaa

SEQ ID NO: 208527 - DNA, 560 bp, Homo sapiens
ttagctaatcactttattttttttttcagagttttgacactgcttatgtttagtatgccacctggaattaccatccattatgcatgctatggaagaactttcttttttcttctattttgcatttttatagctacaactctggacatctgttttcattcctgttgtctcctcggggacttattcttcctggctttcttattttgtcagaatcctgcaaggcattcctcaatcctttttaccttttcaccatttcttccatcaaagacaccagcttgcatttatagcatgttacattgatgagagcctcagagagaaaaacaagcataaagctgagactgcaygttactgccgtcattctgttcccctctgctcatacctcctgggaaaaaaggagggacacagttctttgtaactccctcagaaatttttcctataaatgcttgaagcaaactgccttttggcagtgcctgtttatctctgggcacctgggaccactctcttgaaatcagtctggacactagcctctatttcttcccattgaggctttattattctgctaa

SEQ ID NO: 208528 - DNA, 560 bp, Homo sapiens
ttagctaatcactttattttttttttcagagttttgacactgcttatgtttagtatgccacctggaattaccatccattatgcatgctatggaagaactttcttttttcttctattttgcatttttatagctacaactctggacatctgttttcattcctgttgtctcctcggggacttattcttcctggctttcttattttgtcagaatcctgcaaggcattcctcaatcctttttaccttttcaccatttcttccatcaaagacaccagcttgcatttatagcatgttacattgatgagagcctcagagagaaaaacaagcataaagctgagactgcacgttactgccgtcattctgttcccctctgctcatacctcctgggaaaaaaggagggacacagttctttgtaactccctcagaaatttttcctataaatgcttgaarcaaactgccttttggcagtgcctgtttatctctgggcacctgggaccactctcttgaaatcagtctggacactagcctctatttcttcccattgaggctttattattctgctaa

SEQ ID NO: 208529 - DNA, 306 bp, Homo sapiens
atgtttgatcttttcaaatatctgggcaacccatggcctagccatgtcaacacataaaattagccattatacaagccttccaaatttcccagctctggcmgcaggaataattaactaggtgatgtatggcacactctgatgctatgtaacagtgaaaatacgtcagagaagttgggtcaggtacctcataaaaagcttttggagacatatgctctcttcttaagcttaacttcttgctgaaatttaaagggcatttttctataggcctttctattatgcaatattttattgaggtatagcatacat

SEQ ID NO: 208530 - DNA, 642 bp, Homo sapiens
ggcttgctgtgggtgtatacttgtcttgtctagtgcctgtaaacttactcattttaagaatgatatctgtcaagaaaggagaaaagtccccattagaaggtgaagacccagaaaaacctttcagaggtttgtcccagaggtcataggtatgaaatgcagtaatagacatccagttgagggagtctgaaaggcaagggtgagaaagcatagcaagaggtaacaatctgttggattaacagtagctttcattaaccctgagccgtccctcagcacaggtgggagggaaggaaaggttgttttcttttgtccagtttyatttctttatcctgtatgaaatcttttcttttactcatggcccagaataatttctaccctgaatggcccaaatccaaactttcagcataggaatctttatgaaactcctctgatggcttagggctcattttgggtatgatcttgacctttccatctttccaaagttttcctgcttcctctagggcagtcacggcttatcctttctggctccccttttaccaccttctcctggaatttacctgacctcctcttctcacagcttggcaggctctagagagactgacctctgcagatggtttaaagggagaagctcaagggtccacagtt

SEQ ID NO: 208531 - DNA, 542 bp, Homo sapiens
gaattcagcaccctttcatgatttaaaaaaactcaacaaaatatagaaggactgtaccccaacacaataaagaccagatatgacaaacccacagctaacattctcaacagtgaaaagttaaaagcttttcttctgagatcaggaacaagacaataatgctcactctctcgacttctgttcatcgtaacgttggaagttttagacagagcaattagacaaaaaaaaaaaaagagataaaaggcatccaaacygaaaaggaagaagttaaattgtccctgtttacagatatcatgatcttctgtacagaaaactctggctgggtgctgtggctcatgcctgtaatcccagctactcaggagactgaggcaggagaatagcttgaacccgggaggtggagattccagtgagccaagattgcaccactgctctccagcctgggtgacagagtgagactctgtctcaaaaaaaaaaaaaaaaaaaaaaaaaagaagaagaagaaaaggaggagaagaagaggaggaggaggaggaagaagaagaaga

SEQ ID NO: 208532 - DNA, 561 bp, Homo sapiens
tattttgttagacctttcctttgtggtgtttggctctttttctagatttatcagaagagcattttctttagccaagtgtttgcaggtcaataactacatagccttattgatcacattctgtttttctctctatatatgatgaaaaactcttcatggactgtgttttctttggtacgttttgcacaaaatgtcmatctttctgcaattcatgtatatagagagtatatgtatttttttcccttttaaaatcttttcataaggtgtcaattcttctgtgatccacatagacaaagtaatactcgatgggtaatggaaaactaagaaagtgcaatcataacacagcttaaaaaatgggcacataacatggcattcttgggctatgctgtttacagaaaagtcaaagatccatattgtaatcaagtgtttgacttgaacccatagccatagagattggaactatatatagttctatcaacctccattccagtgaccatggtaacattttgggctgagaaaatgcctttgttaaaggtagccccaaaagagccagcagttaggttg

SEQ ID NO: 208533 - DNA, 575 bp, Homo sapiens
gaacccatagccatagagattggaactatatatagttctatcaacctccattccagtgaccatggtaacattttgggctgagaaaatgcctttgttaaaggtagccccaaaagagccagcagttaggttgaagtgttcattgtagtgagcctgtggcatgaaggtcctccccagtaaacatcagcctgcaaacagaatcactagtgcttagcaacagtgtcatagtgccactggaatggtggtagaaggatctcttcacccctagactaccacggcagattggaacccaggaatccgcagagaaaacataagatttctatctagaaaaagggagcaaaagagaaaggaagggagtggatagggcaggactstgtacttcaggggcctgcagtctctgcaccaggacaccaggagacctgactcagagaagagactagaaaccaacagaaagaaactaaacagctgtctggtaagccagtgattagtaagaaagacatcttcaaaataagttgagcattatttgttagttatccctgaaatatagcctggtcagatactaagctgcagggacatac

SEQ ID NO: 208534 - DNA, 633 bp, Homo sapiens
tcattaaaataaattgtattacaattatgtatatgaaaaattcttaacattttatatgcaattcttgcacacaatgatgtccactctaagtctggctcttcgcattgacatttgtatttgttgacattggcattggttaatatgttaatatttactttgtcrtctctcataaaggacacatatattatgggcatacttagcctgttcattgatgtgggtatttttatcctataacttgttacaattttgtacatacaaaatgtaaaactggaattatattataaatgataattaaaatgatgagtcacccataaaagtaatcaaatcctgcttcctctaaacacaagtgaacattcagttgattcctgcctcatcatataattgttgcactggtctttttccctctctatccagatgagctacttaacagccacagccctccgactttggaatagccctgcctgccatcatcatctgtcctgagaggaaggcttgcctttgaaattcctttattgtagcagacatttgctgctaggtctcttttgttagtgcacatgcctgctcttcagcctgcctgtgttcctgcacccatatttctgtgtgtctgcccctctccccaccttgcctagcctt

SEQ ID NO: 208535 - DNA, 587 bp, Homo sapiens
taatttctgttgagactatggccaacacactttataattcttcctcagagaaaacgtattgtttctacatagactctacttattaataacaatcttatgtgtggcatcactggcctgtttgtattgttttctttttcttttctttctttctttttttatatacaaaaatctccattctaagaactcaagttaggaaatgccataggattggttatgactaccgagagtaaaaatccactgaaattttaaaaaactgaaaaacgttaaacctcacaaataatgagaaaataatgcaataaacccccatgtgtacacccagcatcagcaactgtcaatattttgacagtcattttttatcctttcctcctttttgctgagatgtgaaagtgaaattctctggtacaaaaataacataaatggcttaaaagtctagctatgyttctctggtgtacaaattttctttacagtacatttttctttcctttcccacaaccattacccaaattctactggtggtcactgaaatgccgcttatgatggcctcaactagaaaaatctctttatttttctacctgcctccaaacaag

SEQ ID NO: 208536 - DNA, 587 bp, Homo sapiens
taatttctgttgagactatggccaacacactttataattcttcctcagagaaaacgtattgtttctacatagactctacttattaataacaatcttatgtgtggcatcactggcctgtttgtattgttttctttttcttttctttctttctttttttatatacaaaaatctccattctaagaactcaagttaggaaatgccataggattggttatgactaccgagagtaaaaatccactgaaattttaaaaaactgaaaaacgttaaacctcacaaataatgagaaaataatgcaataaacccccatgtgtacacccagcatcagcaactgtcaatattttgacagtcattttttatcctttcctcctttttgctgagatgtgaaagtgaaattctctggtacaaaaataacataaatggcttaaaagtctagctatgtttctctggtgtacaaattttctttacagtacatttttctttcctttcccacaaccattacccaaattctactggtggtcactgaaatgccgcttatgayggcctcaactagaaaaatctctttatttttctacctgcctccaaacaag

SEQ ID NO: 208537 - DNA, 561 bp, Homo sapiens
agtcaatcttggtcttggatattcatccttctaataagcatgattgataacaatcttgctaataagcaatagtaatatcaatcttgaatattcatgcttctaataagattggaagaataccacttgggtacttgcatataactcctactacctacatactccactccttacaagctaacaaygcctttattattattattattattattttgagacagagtcttgctatgttgcccaggctgcagtgcagtgatgcaatcatagttcactgcagccttgaattcctgggctcacgtgatcctcctgcctcagtctcttgagtagcttggatgacaggcatgcaccaccacatcttgctaatttttatagagatggggtcttgctatgttgcccagctattcttgaactcctgggttcaagtgatccttctgccttggcctcccaaagtgctgggattacaggcatgagccaccatgctcagcctaacagtgcctttaaaaacctcctgggctacattgaaaaccttattatcacatgtaacttattgtgacacaagtttgc

SEQ ID NO: 208538 - DNA, 561 bp, Homo sapiens
agtcaatcttggtcttggatattcatccttctaataagcatgattgataacaatcttgctaataagcaatagtaatatcaatcttgaatattcatgcttctaataagattggaagaataccacttgggtacttgcatataactcctactacctacatactccactccttacaagctaacaacgcctttattattattattattattattttgakacagagtcttgctatgttgcccaggctgcagtgcagtgatgcaatcatagttcactgcagccttgaattcctgggctcacgtgatcctcctgcctcagtctcttgagtagcttggatgacaggcatgcaccaccacatcttgctaatttttatagagatggggtcttgctatgttgcccagctattcttgaactcctgggttcaagtgatccttctgccttggcctcccaaagtgctgggattacaggcatgagccaccatgctcagcctaacagtgcctttaaaaacctcctgggctacattgaaaaccttattatcacatgtaacttattgtgacacaagtttgc

SEQ ID NO: 208539 - DNA, 561 bp, Homo sapiens
agtcaatcttggtcttggatattcatccttctaataagcatgattgataacaatcttgctaataagcaatagtaatatcaatcttgaatattcatgcttctaataagattggaagaataccacttgggtacttgcatataactcctactacctacatactccactccttacaagctaacaacgcctttattattattattattattattttgagacagagtcttgctatgttgcccaggctgcagtgcagtgatgcaatcatagttcactgcagccttgaattcctgggctcacgtgatcctcctgcctcagtctcttgagtagcttggatgacaggcatgcaccaccacatcttgctaatttttatagagatggggtcttgctatgttgcccagctattcttgaactcctgggttcaagtgatscttctgccttggcctcccaaagtgctgggattacaggcatgagccaccatgctcagcctaacagtgcctttaaaaacctcctgggctacattgaaaaccttattatcacatgtaacttattgtgacacaagtttgc

SEQ ID NO: 208540 - DNA, 415 bp, Homo sapiens
ctaatgtgctgtaaaatccatattcttcctcgccttccttagaaatatttgcaaaacaggttcttgccatagcaggttcatagcccacgctgtgggaccgttttgaaccacactgctctttaaaacaaacagaacagctacactcagagcaaggaggatggtagggatggcctctttctgggtatccacactgcctcttcctcccagactggctggactctgagaagagctgggaacacagagccctgttccatggaacaagcacgtcttgcttctcaaagygacggttcttttgttccattgcccaaacgtaaatcatcagttggcctccgggaactaagaccctggccatttcttttattgctctgattcttctttgttttgtagaaaaatgatgtatgactgaaaaagacaa

SEQ ID NO: 208541 - DNA, 417 bp, Homo sapiens
cttagaagttatgatttgtagataacatacttcactaaaactacatgaatgaaaaaggatgatcaggaaaaatgctttgttttggggacattcttaaattggaaaacactaaattaacatttccamagtgtcttctacagaatattatttcctaaaaagacaagaggtgtttaaagacagaaagagtattatagacccaataattctgagaaaaaagcgagatttttgaaacatcaaccgggactcttttctccaagatttttcaaaactcatagtgtgctggtgtgcattttgaatctcaaaggagggacacaatgtgaggctttaagtactgactttttatgtggattattttatgggtctggaatttgacagcacacagattaggaatcctggctaatccaaaccctttatctc

SEQ ID NO: 208542 - DNA, 417 bp, Homo sapiens
cttagaagttatgatttgtagataacatacttcactaaaactacatgaatgaaaaaggatgatcaggaaaaatgctttgttttggggacattcttaaattggaaaacactaaattaacatttccacagtgtcttctacagaatattatttcctaaaaagacaagaggtgtttaaagacagaaagagtattatagacccaataattctgagaaaaaagcgagatttttgaaacatcaaccgggactcttttctccaagatttttcaaaactcatagtgtgctggtgtkcattttgaatctcaaaggagggacacaatgtgaggctttaagtactgactttttatgtggattattttatgggtctggaatttgacagcacacagattaggaatcctggctaatccaaaccctttatctc

SEQ ID NO: 208543 - DNA, 396 bp, Homo sapiens
tgatatgtgagcttttgtgtttgtataatatatattatatatatatatatatatatatatatwtttttttttttttttttaagagatggggtcttgctctgtctcccaggctgtaatgcagcccagaactcctaggctcaagggattctcccaccaaagccttctgagtagctggagtaggtgggactataggcatacaccaccaaacctggtagtatattcaactttaaataagtgaagtggctgggtgcggtggctcatacttgtaatcccaggactttgaaaggctgaggctggaggattgcttgaagcgaagagttcaagaccagtctgggtaacatagtgagactccatctctaaaagattttttttaaataaaatgtacttaaaatttag

SEQ ID NO: 208544 - DNA, 395 bp, Homo sapiens
gaattcaggagtacagactttgatatgtgagcttttgtgtttgtataatatatattatatatatatatatatatatatatatttttttttttttttttttaagagatggggtcttgctctgtctcccaggctgtaatgcagcccagaactcctaggctcaagggattctcccaccaaagccttctgagtagctggagtaggtgggactataggcatacaccaccaaayctggtagtatattcaactttaaataagtgaagtggctgggtgcggtggctcatacttgtaatcccaggactttgaaaggctgaggctggaggattgcttgaagcgaagagttcaagaccagtctgggtaacatagtgagactccatctctaaaagattttttttaaa

SEQ ID NO: 208545 - DNA, 542 bp, Homo sapiens
atcagatctcatgagaactcactatcatgagaatagcatggggttaaccacccccatggttcaactacytcccaccgggtccctcccgattcacatggggattatgagaactacaatttaagatgaaatttaggtggggacacagccaaaccatatcacctgtatttaatttatataataaaatacatttaatctataaattatgttaaaagtacacattgaaacctgaaaggtttcaagaagtcctatactagagcaaagaaacccatttaacagtaatcagccccttgtttctcataatatttcactcaaaatctttattttccatataaaatgtatgaacaccttacggagcactctttgggaaaggatgcccaacttttaaaaggaagacccaaacaaaccggtcaacagaaacagagtgctgctgtggtgccatgcccgagacacctgccaatagtcctctgccactcgccatccttgcatcagcatctgggacatggtaattacactcgacggcctgtcactccacctctcctcat

SEQ ID NO: 208546 - DNA, 546 bp, Homo sapiens
gtttttactaactattgtgattctatttcaagaaaaaaatatatatattttgtggccaatattttaaattctttttttcattgttataagttcttatttccttctcttctattttctaatgccttttttctttaaatttattttttagttaactatttgagcatcacaagcatacttaatttaaacctgacattagaccattttatgaaatcatgtccatctagatttaacttacatactacttatgaagttgttttttactttcttagcattagttttttttttktttgtttgtttgtttctggcattttggaattcagtatattgtatcacaggaaaaggagtttcttctttaaatttattcgtattttttcaactacgttttgatttactttcatttcctcctaaccaatagttttctagtatctgttccctgacctattaattttttatactagaggcctttgttaacattttataaccttgttaatttaataaaatatgaggctttcaactctatggtggtaactagggagatccacattg

SEQ ID NO: 208547 - DNA, 544 bp, Homo sapiens
gtgggtaaatgcaatggccaatgctgagccaaggtcccagccttgacagaggtggctgagggagctctcagtgaaatgcactgaggtcttatcatggggaagggtgggagccacctcagatcccctgccaggtcagcargaaagtcatccacctcctagacacattcttgacccagttccagctatttggatcaggtagtatcctcttttcatctgcagaaatgttgatgttccaaatagagaggacctgtgactctacctctcatgcatgcctgaacctggaaggtgtttcacttgtggggtggagtgtctttccagaaaaaaaaagtggtctagaaaggctgtctatatgtgcacccattctgagcttccatggaagaagtcccagttgtgtctgcagtggttgacatcaggataaagaagttcctttcttcaagactcttcacaagtgcagagctacatgtctgctaaggtagagcagcagactttccctgctaagcccagcactgcaactttgcctgtgctgaaataaacttcctgtcag

SEQ ID NO: 208548 - DNA, 537 bp, Homo sapiens
acctcctgctgcaacatcccatggcagaagcagaagtctgtgagtaagtaaggaggcaacatttatcctttcatcaggaactcattcccgtgataacctaccaactgtcatggtattaacagcattaatacattcatgaagtctctgcctattaaaaatcccatttctcaacactgtggcattgaggattaagtttggaataaatggactttgaagacacattcaaaccatagcacttagtgaccattgagaatctttttgtctgcctactggccatttttaaatcttctttggaggaatgtctattcaagtcctttgtgtattttttaattggattgtctgtggtgatgctgttgttgagttttaagagttttatttatatattctgcatattaattatttattaaatatataattttcaaatattgtctaccattctgtgggttgctttttaccctgttgatagtatttttcrtggcacaaattttaaaattttttgatgttcaatttgtgtatttttttcattcgttgcctgtg

SEQ ID NO: 208549 - DNA, 479 bp, Homo sapiens
agaattcatataaataagcatttaacatcttcagattttagcacatgtaaattatatttcaatgttaaaattttttattggaaagcaaagctgaccccactttctccagcatttctttattgcacttacatttgacttcgatttatttttaatagtagccatgtgctctttttaaggtaataaagtatataaaggcagctccaatgtctactcacttctttaacatttgacatgacatgttacattkatcaagtgcacaacaaatatttgctttatttaatttaagaataaaatttcttattaataaataatacttattaaaatatgatttttaacaaaataggtagacttttacgtttatttattaattcatcattcatcttttagttcacttattttctctttaaatatttcccaagtatattaagcaccaaagtctgctgggctccaggcatacagtggtgaataggaaaaatatg

SEQ ID NO: 208550 - DNA, 615 bp, Homo sapiens
aagcttagcaaattattagagtgtacaaacacctcagtgaaattagggaaaacaatacataaagaagatgagaagtttaacaaagagataaaaatcrtaagaactaataagaaattctggagctgaaaaatataatgaataaaataaaaaaataaaatacagagcttcaaccagcaaactcaaaaacaaactatttgaaattatccagacagaggagaagaagttaaaagaaaaatgtgaagaaagcctttgggatctatgagattccatcaagtgaagcaatatacctattatggaaatcctagaaggagaagagagaaagaaagagagataaaggttattttaaaaaaatgaaaactttaaaaatctctaaaagaaaatagacatcctgattcaagcagcccaaagccctacacatagtttgatgataaagaggtctacactgagacacattataatcaaattgccaaaactcaaagccaaagagttttgtatacagcaagacaaaagtcactcatcacatgcaaagaagccctcataagaccatcagtggacttctcagcagaaacctttcaggccacaatagagaggaatcatgtatttgaagtagttaaa

SEQ ID NO: 208551 - DNA, 497 bp, Homo sapiens
ggattgatcctaccacaaaattaaactgtaccaccatctgtttctcacaggtaaacaatagaacatataacattggatatacyactaaatgtctattagttattctaattttataagaccacatagagaaaacccccacacaaaagaaaactattaattctcatatcattaattgcacaagactaaattatctcttatagttttaaatatgcacagttttcccaatcatagttttattaccaatatgttttgttcaggttatagaaggtctgacttcatgttataaaggtgtaattattttctaagaaatgtcatgattatcagtaaaactgctttaaaattaaattttgagtcatttaataaaacactattttgagttagtgttcttatttccaagaagactatacatgcacacaatttgtcctcctaattgccaaaactgcatctcatctagtaaggcatatattttattaaagttcacaatatgagattaataa

SEQ ID NO: 208552 - DNA, 576 bp, Homo sapiens
aagctttcctctcactggcggagaagcagagtctccaggagttgtctcctgggttggctcagggtgacagaggcatgcacaggcctactgggcgggacgaaccacatcatgtgctttccagcacgttgcttagtttttctaccctaggaggcctcaagagattgtaaacgttttaagattgagacacaattttttcagtcatgtttgcccctggcctaaaaatgtctggtaagtccagtcctggaatcccaaaggacatcttagaatgccaagtacgtcgatattaacacactcccaccctataaaatgggctgagggtcttctatgtgccagaccctgtgattctttcactagggactagagacatgaatgaatgtgcttcctccttctcagcttggtcctcctcagcatgtgcgcgagggtggtcctccagctcccagcaaggactggggcagcccaaagcacatctgctaactccgccctgagcacacatggtataccctagastcacaaatcaatactgtgattccctcatggacaaagatgggagcacactgccttagggtaaggaggcac

SEQ ID NO: 208553 - DNA, 547 bp, Homo sapiens
ttttgggacctgagtgataacttgaggctggaggctgagggtcctggttgggcacgttttactctttcagccccaggctaactgggtggcgatggctgtttgaagctccagggtcctgaagataaggagttggagctgagtttcctccgtgtgtgtcccgagcatttcaratgcatgatcctcataaaggctgagttcaaacttaaaaatcagcccaccagcaaaaggaaatagcaagggaaatataatatctgtctttgcctgcactgcgcggggaacatgaaaggatgttcttaaatttctaaccacaaacctgcctttattctggtttgggattcctttcagcctgcttatgtgtcctgggaatcccagattgcagaaatgaaaaaaagaggcagggctagtgcctgtggacgcctggcagcaagaaaggaagaagctcaacagagggagggcatcctccaccatgccccggagtttcactctcagatccaagtcaagtgtgagtccacaggctgaaattcacccaagagagtcaaaagcaaat

SEQ ID NO: 208554 - DNA, 532 bp, Homo sapiens
aaaagtataatttttagtgttaacaaaaacccgaagtatacaaataactcctacaaatcaatagcaactcagtgggaaatcaggcaaataaaaacagacacatcataaaagaggaaattgatgttcartgaacaaatacaaacattaatttcactagtaataagcggaatgcaagttgaaatagcaaagaggtagtgttcaccccaattagataggcaacacctgataataatcaatactggcaaggatgcgacctgatgggacttagccactgtagatcaggtgcattgacttagcaatttgttgaagagtctagcaatttctagtaaaatggatgtttgtgatctctaagacaacacttccctttcaagtatgtgttaaaaaaaaaaagtgtgcacaggaagacatgttaactgatgtgctttataggtctgttatcaatagtgaaaaactagaaacaattacatttgttagcaaaatggatataattttgtagtattatacaacagaagagactatgcggtagcaaaaa

SEQ ID NO: 208555 - DNA, 530 bp, Homo sapiens
gccctgtgttctttcgtaaatgactgagtgaagggaagcttctcatgtttcatgtaagcaccagtcatctaggaggagggggtataaacgaatggagatgttttaagacctttaaaattaccattctctttacagaaaasagaaagtctccaggtgaaattacacacagaattccaacacaagaaagtggtaaacatgaggatggggtgtcagacccacaccagcttgacagtctcccttttttccttcttttcttgcccagttttgatttccagcatccctttcaaaagccaacagctccaacaaaccttttttcaaaatggctgtcctaggataggtccccacggttaagacttctctaactagaattgtcttttgtctcttaaaggataagtctttgatgctaatgcattaaatcaggtagtgtcctgtgtctgttatacaatatagtagataggggctgacattttagttggtgtagtgctagtctacatagtactttgtagaaaagcgcagaaataactactgaa

SEQ ID NO: 208556 - DNA, 530 bp, Homo sapiens
gccctgtgttctttcgtaaatgactgagtgaagggaagcttctcatgtttcatgtaagcaccagtcatctaggaggagggggtataaacgaatggagatgttttaagacctttaaaattaccattctctttacagaaaacagaaagtctccagrtgaaattacacacagaattccaacacaagaaagtggtaaacatgaggatggggtgtcagacccacaccagcttgacagtctcccttttttccttcttttcttgcccagttttgatttccagcatccctttcaaaagccaacagctccaacaaaccttttttcaaaatggctgtcctaggataggtccccacggttaagacttctctaactagaattgtcttttgtctcttaaaggataagtctttgatgctaatgcattaaatcaggtagtgtcctgtgtctgttatacaatatagtagataggggctgacattttagttggtgtagtgctagtctacatagtactttgtagaaaagcgcagaaataactactgaa

SEQ ID NO: 208557 - DNA, 530 bp, Homo sapiens
gccctgtgttctttcgtaaatgactgagtgaagggaagcttctcatgtttcatgtaagcaccagtcatctaggaggagggggtataaacgaatggagatgttttaagacctttaaaattaccattctctttacagaaaacagaaagtctccaggtgaaattacacacagaattccaacacaagaaagtggtaaacatgaggatggggtgtcagacccacaccagcttgacagtctcccttttttccttcttttcttgcccagttttgatttccagcatccctttcaaaagccaacagctccaacaaaccttttttcaaaatggctgtcctaggataggtccccacggttaagacttctctaactagaattgtcttktgtctcttaaaggataagtctttgatgctaatgcattaaatcaggtagtgtcctgtgtctgttatacaatatagtagataggggctgacattttagttggtgtagtgctagtctacatagtactttgtagaaaagcgcagaaataactactgaa

SEQ ID NO: 208558 - DNA, 586 bp, Homo sapiens
gaaagtgctgctggtggaaggaagatacgtttaacggtaaagaagcatcccatgaatagtcctcaagggggcctttgaacctccacaagtgagaatggggtagggagcaagccatgcacagggcagggagccatccaggagtgtgctcttccggcgttggctctcatggcgtccctgcagcagcaagggagtgagtgcactttttctcatatttcacaagagtcttctaatgcctgtgttgagaagagcaaaatattgagaaaagtaacatgagtttggaggctgccatttcatctggaggagagaaaatggagacaaggccgcagtagaggtggtcagaattgagtcagatttgggatatkttgaagaaaactagctgaaagattaaaggtgggatgtgagaaaaagacgagtatttacaatgcctcatgttttttggcctgaggaagtggaaaacgcagtcgccatttatctagatggaagaaggcacatgggagggaccagctttagaggaaggatcaggagttgccttttgagctcaggaagattgaggcacccatcagacatctgtgtgcagtattgagaa

SEQ ID NO: 208559 - DNA, 586 bp, Homo sapiens
gaaagtgctgctggtggaaggaagatacgtttaacggtaaagaagcatcccatgaatagtcctcaagggggcctttgaacctccacaagtgagaatggggtagggagcaagccatgcacagggcagggagccatccaggagtgtgctcttccggcgttggctctcatggcgtccctgcagcagcaagggagtgagtgcactttttctcatatttcacaagagtcttctaatgcctgtgttgagaagagcaaaatattgagaaaagtaacatgagtttggaggctgccatttcatctggaggagagaaaatggagacaaggccgcagtagaggtggtcagaattgagtcagatttgggatatgttgaagaaaactagctgaaagattaaaggtgggatgtgagaaaaagacgagtatttacaatgcctcatgttttttggcctgaggaagtggaaaacgcagtsgccatttatctagatggaagaaggcacatgggagggaccagctttagaggaaggatcaggagttgccttttgagctcaggaagattgaggcacccatcagacatctgtgtgcagtattgagaa

SEQ ID NO: 208560 - DNA, 536 bp, Homo sapiens
cttgttgcactgtatagttacttcctccgtgtggttcatacamtctttccctgaaattaagatggaagttatttattgctgggcaggaaatttcttgcaatattaggggctaaaataccaagcatttattatttcaaggtttctgtgggtcaggaatctgagcatggtttagctgcctgcctcagccctcaaggtttttctataagttgctgttaacttgttgctgggactcagactcaactcctggaatgggctgggctcccttttgtgcctacgcacacggctgtggacagccctcagtcccttccatatggacatatccaggggctgcctaaagacatgggataggcttctctgtgggtaagggatccaagaaagaggtggaagccacagtctttttacaacctaatgtcaagtgatatcctgtcacttttgcaatattctaatgaatatgtgtgaaacacctggtccagcccatatttaagggaggacagcaggagttcataaataccaggagggtgggttccatgagctta

SEQ ID NO: 208561 - DNA, 536 bp, Homo sapiens
cttgttgcactgtatagttacttcctccgtgtggttcatacacyctttccctgaaattaagatggaagttatttattgctgggcaggaaatttcttgcaatattaggggctaaaataccaagcatttattatttcaaggtttctgtgggtcaggaatctgagcatggtttagctgcctgcctcagccctcaaggtttttctataagttgctgttaacttgttgctgggactcagactcaactcctggaatgggctgggctcccttttgtgcctacgcacacggctgtggacagccctcagtcccttccatatggacatatccaggggctgcctaaagacatgggataggcttctctgtgggtaagggatccaagaaagaggtggaagccacagtctttttacaacctaatgtcaagtgatatcctgtcacttttgcaatattctaatgaatatgtgtgaaacacctggtccagcccatatttaagggaggacagcaggagttcataaataccaggagggtgggttccatgagctta

SEQ ID NO: 208562 - DNA, 536 bp, Homo sapiens
cttgttgcactgtatagttacttcctccgtgtggttcatacactctttccctgaaattaagatggaagttatttattgctgggcaggaaatttcttgcaatattaggggctaaaataccaagcatttattatttcaaggtttctgtgggtcaggaatctgagcatggtttagctgcctgcctcagccctcaaggtttttctataagttgctgttaacttgttgctgggactcagactcaactcctggaatgggctgggctcccttttrtgcctacgcacacggctgtggacagccctcagtcccttccatatggacatatccaggggctgcctaaagacatgggataggcttctctgtgggtaagggatccaagaaagaggtggaagccacagtctttttacaacctaatgtcaagtgatatcctgtcacttttgcaatattctaatgaatatgtgtgaaacacctggtccagcccatatttaagggaggacagcaggagttcataaataccaggagggtgggttccatgagctta

SEQ ID NO: 208563 - DNA, 548 bp, Homo sapiens
ttacagtataatcatagaaattagtaaatgtattcctttaaaaattttacgtcctctttaaaaaagaaaaaaaaatgagttkttaataatcagttaacctggcactgagctttaaattgaatttaagaaaaaaacaaaaactctgccccattagtgcaagagtaaagttgggttgttgaaatgcaaatgcaaatgcatgtagtctccccctgtctttagtttgggaataagaaatacatatttgaacgtaaagaattttttgttgtcgttgtcactttctgtttttatttcataaggctgcttaacagttttactttagtttggagaagcacagttctgaaaactaaagggggtaaatcccgtcattatctctgcaggtgagatgggtctgtatcaactctaagactgaacgactctgaaggtgaaataataaatgacgcatgcctgaggtcttttctgggaaggaaatcgcccccaagagaagggttttttagcccagaaagcactcaggctgcctctttgcctgccctcatggttgctgagggacg

SEQ ID NO: 208564 - DNA, 481 bp, Homo sapiens
actggaatgttagtgcaaaggtaaaatgctgctaaacatttcaaaagaagcatgatagtataaaacaagtagaaacgttggaaataagcaccattaatttcattactgtatcttccatcttctctgatgcagacacttgctcccaaatgttgcgctagcaatactgaaatataaaactgatcakagtaaagaaatttattaggcagagaggctaacagaggacacactaacactaagaaatttcatatgacaacatacaaaattagtctgtgttcatctttagtatatgtaaatgaaatgtattcattttagcataccattttagccttccattcttgttttatactgtctgtctacattgatgcctgggttcatcttttctaggtcattgattttgatctgtgagtagaatattgagcacaagagattagaacaagtgggtgggatcaaactaaattgctaggttcaatagagcttttgt

SEQ ID NO: 208565 - DNA, 408 bp, Homo sapiens
gacacccctgagtcagccttcagtgtactactttgtgagcatgcacatggtgtgtgtgtgtgtgtgtgtgtgtgtgtgtgtgtgtgtgtgtgtgtgtgtctaraaaagagttctcttgaggctatattctttatgaaggaagaaagataaaaacacagagcaaggcagtatgaacccctctgcttgttcctgcccctgaatgtgagcatcttcttctgagacagaccactgtgacaaaagttggcactgttcccctaatgccagaccacatttcaaaactttccccaaggctcgacaaatcacaactctattttacctgttaaagccctgaacccaccaatacctaaacattgctcctaattccaggacctgcacctccagagaaagttaagacaatctgaaaaggcc

SEQ ID NO: 208566 - DNA, 596 bp, Homo sapiens
ttagggatggttggagtgagttcatttgtgatggcttcgtctctgctccgataccctgcctgtttcccttgctatgtagtaagcagtagtatgagtcaactcaaaacattctgggacaaagtgaagcataaaggaaggagataaaggatgaggaaacaggaggcaggggccagccggcaagcccagcatggacatcttcattctacttgccagccccttccccagggcctccccttggccaagaaaaggcccagatgaggaaggcaagatgggatgtgatgtctctytcctttcctgccatcttgtcttgctggcagggaatgctcaccttcggtcttgatcttaagagccgttcgaaccaaagcaaacagggttgcattaaacatgactgtcccgtcactgttgagaggcatgttcatggcaactaatctctgtaaacagaaaggaaggtttctttgtagaatgcaaatgagtgaccacgaccatatccttttggatgtttattttccgtttatcactcatctcttttctagtcaaccctcaattccattcaacagccatttgggggtacgcatatgatggttaatttaggtgtc

SEQ ID NO: 208567 - DNA, 480 bp, Homo sapiens
aggctattacagcatgaggttttatgatcctagcatatgtatttaaaaaacaaaaacaaaaaacaggatacatatgtatgtatctaagttaccataaaccctttttagaacaagcctgaaataaagagtcaaactgctaggacaacagctgatctcaatatctcacctggcctcccctgctatcccaacctgcagcttcttggttaaggatctcatcctttcatccttgcctagattcctcttccaactttcccacctctcctctgtcagagtgcttcactccaagtcatgggccaacctgctccctcccacacatgccagccaccttcccacctccatgtctttgccrtccctgctttatccaccaagggtgcctgccccatggacatgaacttccctctttagatgaataagcatagagctctgtgatacagggccaaaaacgcacccagcggggttgaatgcaaggaacacagggct

SEQ ID NO: 208568 - DNA, 407 bp, Homo sapiens
atttagattggttaataacttcagccaacttgacctaattgatatttataaaatactgtgttcaataattgcggaatacacattcttttcagagcaygtggaacattcaccgacatagaccatatcttggccatgaaagtctcattacctctcgattgaaattttacaaagtatctttgttctaatggcagtagatttaaaacagaagccaataacaggctgtttataaaccttcccaaatgtttggaaattaaataacctataactcaaaaaataataaaaattagaaaatactttgaaactgataaaatccaactgggaaattgtatgatccgttgaatgcagtgcttggagggacatttatagctatatcagtaaggaagaaaggtttaaactcagtagttcta

SEQ ID NO: 208569 - DNA, 621 bp, Homo sapiens
tgttcacagtcggatacaactttatcatctcataaatgtgacaaatctgaaatacagtagttactctaaatgtaaaaaatattcacaaagcttactgccatggaatttagaagagctaactgctgggggttagttttgcatggcccattggtgtctcaagaaaaccaaaacaaygatagaaacctggccatggggattggaacgggtgtcgtcttttcctttccatgtgttccttgtaggaggtaaaaatattgaaaatcatcctaattgatcatctttgaaaaaaccatgtggacatttacatatccaaagatgtagcacccagagttttagttgtaatagaggttgtagcaaggcagggtcgtgctgagtctgaaatcctcttactgctcttccctcaccatcctctcccctgcctcctcctgtgctgcttatcacggtaaagatttgtcattattgctaagtcttctctttgcttgctgtattctggtttccgatgtaagcatctcagcttcttgcattctttctttcctgactatgtattgggaaagtgagatgatagcagaagatggaaagtttgaaggtggagagacaacagggaaggacagggaaggagaaggt

SEQ ID NO: 208570 - DNA, 476 bp, Homo sapiens
atgggcagggaaaggtctagcatgccaacacytggggatggggtggggacgaagaaatagcagggagggaatggcaggaaatgaggcagaaatatacaggggccagtgcttcatggaggactttgaatattcgactaagaaaattgtatatgctttctcaagcaataggtggccagtgccaaaatatcactgcaagagtggtctggtcagctttgggcttacaaagggagtaggtagaagggctgaggccagaggcagggagatcattttgaaggcagggaggcatagaagctcaggagagagaagggcagtgcaggtctgcatgccacagaggcggccactgacgctctggcatgtatgcatcttaccaggcaagaaggggaccaggagagggctctgggaaacctcaatgtcaaaaggacaggatggagcccaacaagaagcccaatgtaaagttctaaggacagtaatacttg

SEQ ID NO: 208571 - DNA, 476 bp, Homo sapiens
atgggcagggaaaggtctagcatgccaacacctggggatggggtggggacgaagaaatagcagggagggaatggcaggaaatgaggcagaaatatacaggggccagtgcttcatggaggactttgaatattcgactaagaaaattgtatatgctttctcaagcaataggtggccagtgccaaaatatcactgcaagagtggtctggtcagctttgggcttacaaagggagtaggtagaagggctgaggccagaggcagggagatcattttgaaggcagggaggcrtagaagctcaggagagagaagggcagtgcaggtctgcatgccacagaggcggccactgacgctctggcatgtatgcatcttaccaggcaagaaggggaccaggagagggctctgggaaacctcaatgtcaaaaggacaggatggagcccaacaagaagcccaatgtaaagttctaaggacagtaatacttg

SEQ ID NO: 208572 - DNA, 496 bp, Homo sapiens
ggaaaggtctagcatgccaacacctggggatggggtggggacgaagaaatagcagggagggaatggcaggaaatgaggcagaaatatacaggggccagtgcttcatggaggactttgaatattcgactaagaaaattgtatatgctttctcaagcaataggtggccagtgccaaaatatcactgcaagagtggtctggtcagctttgggcttacaaagggagtaggtagaagggctgaggccagaggcagggagatcattttgaaggcagggaggcatagaagctcaggagagagaagggcagtgcaggtctgcatgccacagaggyggccactgacgctctggcatgtatgcatcttaccaggcaagaaggggaccaggagagggctctgggaaacctcaatgtcaaaaggacaggatggagcccaacaagaagcccaatgtaaagttctaaggacagtaatacttggtttcaagtattatttgccattaaaagt

SEQ ID NO: 208573 - DNA, 488 bp, Homo sapiens
acatgaaaagaagcaggaaaatattcacgatcaaggagggaaaagtcgatagaaacaaaagatgacagatgttgcaattaataatcaaagactttgaagtcactactatgagcctgtttaaggaactgaaggaaaagatggacataataaaagaataggtaaatctcagtaggtaaatagaaacagtacaatatctgaaaaaagtagactggacattgcagaaaaagttggtgagggcttagtgatctctaaaacaacaataagcaatctggtgtatatgaaattggagtcacaggagaataamgagattgaggaagaaaaattttaagataaataaagctgaacatgttgcaagtattgaaaactaagttaacagatccaaaaggcccaacaaacctcaagcaggggaaacacaaagggaaccactgctaagcacatcaaatttagatggctgaaagtaaaagatccagagaattttaacagaaagc

SEQ ID NO: 208574 - DNA, 608 bp, Homo sapiens
gaatgtcacaaaacacaaaagggttttgattttgattatcttgtcccattactcagaggggcaatccttgcagtgtttccatatccctctacacagtttccaacctgtgcccaccaaattaaagcaacaacaaaaaccctccaaatttcttaaatccatgctgcattcttgtgtctgactacaatactggtagagatgggaagggtttmttggtgcatttaaggaaaactttgtttcagacaccccatataccaccaaagccatcactgctaggctggtgatggtttagatctctagatcagtggttctcaaacttgaacattccttagtatcccctggagggcttgtgaaaacatagactgttgggcacactatccccagaatttctgatttggtagctgtggggtggaggccaggtaaacaggtgatgctgatgtggatgccctggggacactctttgagaaccactgccataggcaatttctaagggcatgggtgatccgccttttacaatctctctgatgcctcatgcagtcaggacagacatgtggatgtgaaaaggataggggccagcaggattcctaaatgcactcattaacacatggtgc

SEQ ID NO: 208575 - DNA, 608 bp, Homo sapiens
gaatgtcacaaaacacaaaagggttttgattttgattatcttgtcccattactcagaggggcaatccttgcagtgtttccatatccctctacacagtttccaacctgtgcccaccaaattaaagcaacaacaaaaaccctccaaatttcttaaatccatgctgcattcttgtgtctgactacaatactggtagagatgggaagggtttcttggygcatttaaggaaaactttgtttcagacaccccatataccaccaaagccatcactgctaggctggtgatggtttagatctctagatcagtggttctcaaacttgaacattccttagtatcccctggagggcttgtgaaaacatagactgttgggcacactatccccagaatttctgatttggtagctgtggggtggaggccaggtaaacaggtgatgctgatgtggatgccctggggacactctttgagaaccactgccataggcaatttctaagggcatgggtgatccgccttttacaatctctctgatgcctcatgcagtcaggacagacatgtggatgtgaaaaggataggggccagcaggattcctaaatgcactcattaacacatggtgc

SEQ ID NO: 208576 - DNA, 608 bp, Homo sapiens
gaatgtcacaaaacacaaaagggttttgattttgattatcttgtcccattactcagaggggcaatccttgcagtgtttccatatccctctacacagtttccaacctgtgcccaccaaattaaagcaacaacaaaaaccctccaaatttcttaaatccatgctgcattcttgtgtctgactacaatactggtagagatgggaagggtttcttggtgcatttaaggaaaactttrtttcagacaccccatataccaccaaagccatcactgctaggctggtgatggtttagatctctagatcagtggttctcaaacttgaacattccttagtatcccctggagggcttgtgaaaacatagactgttgggcacactatccccagaatttctgatttggtagctgtggggtggaggccaggtaaacaggtgatgctgatgtggatgccctggggacactctttgagaaccactgccataggcaatttctaagggcatgggtgatccgccttttacaatctctctgatgcctcatgcagtcaggacagacatgtggatgtgaaaaggataggggccagcaggattcctaaatgcactcattaacacatggtgc

SEQ ID NO: 208577 - DNA, 608 bp, Homo sapiens
gaatgtcacaaaacacaaaagggttttgattttgattatcttgtcccattactcagaggggcaatccttgcagtgtttccatatccctctacacagtttccaacctgtgcccaccaaattaaagcaacaacaaaaaccctccaaatttcttaaatccatgctgcattcttgtgtctgactacaatactggtagagatgggaagggtttcttggtgcatttaaggaaaactttgtttcagacaccccatataccaccaaagccatcactgctaggctggtgatggtttagatctctagatcagtggttctcaaacttgaacattccttagtatcccctggagggcttgtgaaaacatagactgttgggcacactatccccagaatttctgatttggtagctgtggggtggaggccaggtaaacargtgatgctgatgtggatgccctggggacactctttgagaaccactgccataggcaatttctaagggcatgggtgatccgccttttacaatctctctgatgcctcatgcagtcaggacagacatgtggatgtgaaaaggataggggccagcaggattcctaaatgcactcattaacacatggtgc

SEQ ID NO: 208578 - DNA, 633 bp, Homo sapiens
tgtttgaagacttaacagatgccacagaagcctcagaaatgctctctccgaggttaagctccctcctccagcaagtgggacattttcacatccaccgtcttagcttagggcagtagggatttcctaaagatgaacaaccctgtctggttacaggtagattgttcttgagacacaggccacacccctcccggccttcccatccttggcagggtcctagaatgctgtttccacttttccagatgcaatggtgagaaatttggtggtgattactgagaaaaccaactctggttatttctgacaaaatcaaagttgtttggttagggttagggttagggggtatactagtccrttttcacgctgctgataaagacacacccaagactggataatttacaaaggaaagaggtttaattgactcacagttccacatggctgaggaggcctcacaattatggcagaaaacgaaaaaggagcaagaggctatcttacatggtgaccggcaaatagagaataagagccaagcaaaaggggtttccctttataaaaccatcagatctgtgagacttactcactaccatgagaacagcatgggggaaactgctcccatgattcaattacctcccaccaggttcc

SEQ ID NO: 208579 - DNA, 507 bp, Homo sapiens
gattgcaaatctgtgggctagatcactagacccctttgtcaaagctcatctttaaaaattagtgtgtcccgaacagattctgggaaatgttgcattacataactccaaaagtcccctctggctcttacggccgacggcctctggaagggagaaggtgggaaagaacacagatcccactgtcagtgcagyaggatggtagatggctgtccaaaactctgccagcagctgttgcacataaaaaaatactaaaagttaaaaaaattcatatatgccactgacaaaataattgcctctccagagaacacataatgaagaaacgagctattgtgtatcgtccagatttgtatttgtcatctacaaattacaaaaaaaaaaaaaattgtattaccatgggggagaaagcttccttttcaataaatggcaaatctcattgaaggaaaaaattaacattgtgatcttccaaattctactgcattgaggctcaggaaaccagatgcggtgatacag

SEQ ID NO: 208580 - DNA, 585 bp, Homo sapiens
tttgcatcagcatgatccaagggcaatgtgaggcatagccccttttcctacagcctctgtggttttaggaaaatccatttagaaactggtataacagatagtgaaatacaactcccttccttcttggacttgccttttgttttctgacttaaaaaaaattgtatcrtctttccctgaacagaccaatagtgagatctgcaattgaatcagtaataaattgcctaccaaccaaaaaaagcccaagaccagatggattcacagctgaattctaccagaggtacaaagaagagctggcaccatgcctgcttaaactattccaaagaattgaggaggggggactcctctccaactcattctatgaggccagcatcatcctgataccaaaacctggcagagatacaacaaaaaaagaaaacttcaggccaatatccttgatgaacattgatgaaaaaatcctcaacaaaatacttgcaaactgaaccaagcagcacatcaaaaagctaatccactgtgatcaagtaggctttatccctgggatgcaagcctggttcaacatacacaaatccataaatgtgactcatcaca

SEQ ID NO: 208581 - DNA, 421 bp, Homo sapiens
ggcagagacagctggcccttcaggcacaggaatccttagtgattctggacacacacttcaggccccaagggttgctcaccaaccacctcttgctccctctgcatcagctggtcttgtccattaaagccaagtaagccaagatgggtgttttatgccattaggaaagacttactcagcttcrgcatcaagcaacaccagccccaggctagtctcaaactcctgacctcatgacccgcccgcctcagcctcccaaagtgctgggattacaagcatgagccactgtgcctggcctctactatcatattttgatcaggatattaacgattctatgtcatgatccagaacattcggtcaccacaaagatccctcctgttgtctttttagagcctcgcccactccttccctctcccacctaattcct

SEQ ID NO: 208582 - DNA, 608 bp, Homo sapiens
tatcatggcagaaatataaagtaaaaatcacctaagtgttcagcagtaagagagttggctaagtaaattatggaacatgcgtacaatccttttggtatgtgaaaaattattcagccacaaaaagcaactatgatgaagaaaatctattgatgttaatttwaaaaaaagaaaaagctggataccaaagtttacgtaacagcgattcttagattttacatgaaaagggattggagcaaaattaaaaaataatgatagccaagatgacgagggagtgggcgcctttcttcctctgttttcttaaatttggggttgtctaagtagctttccttgttgcaagtaatcctatttgttgttgttggttggttggtttattctctctggttacttgttggttgtcaagtcaatgaatgaaacttccagttcccttaaaagcactgcagccttctcatgcatccacttcaagcaggctacaaacctgactcagatgtgaggagctgattgtgccagttgcaaagcactgtttgttcctgagcaaatgatttaggacagttattattactcagaaagtttatttgcacagacctcactgttgcagctcataaaaacgg

SEQ ID NO: 208583 - DNA, 519 bp, Homo sapiens
tctaacgtgtggattaaaaaaaattaagcaacttgggattcattgtgttttctgtaactaagaattcatgttcttatcagttctggaaagttctgaaccatgatcttttcaaatatttctcctctttcattctctgggattctgagaagatgcacgttatgctttttcactttcyactttctttttcttcacttcttttccatattttctctctcctctttctctgtgctattggctaatttcttcaaatttgcttttctgttctttcttcaactgtatttaatcatctacttataactcatctacggagttttctatttcattaaataattttcatttgtaaaacttgacaattatctttaaaaaattcctgaaatttctgactgtctctcattttctggtcatttaaaaaagttaattattattatttatttttattttttgacacattaaaattatatatttaaggtgtaaaatgtgatgtttttgtatacatatacattgtgaaatgattaccac

SEQ ID NO: 208584 - DNA, 573 bp, Homo sapiens
agtcgtctgaacaatctttcttgctctgttatttttcacatttttcaaatttccrttggcaactgagaagcccattaggattatcagggcattttccccttttatcagaggactcttaaaggatccttgaactcaggggggcatgaaccatttagcgttgggatgccagtggggttttttgctctggaaaggaaatggcaggggtatggggaaatgggcggtgtgtcaggaagcaacgtgtctttcagatgcggcatgcctgagttttaggacaattatttaatgtgtttgaatttgtgtgttttgtggatgctgatgctcaaaatccacaaaggcagaaaccgcaacccctcctaagcttttcttccaagccatgcctgacagcacgcacattgccgagaatgattactgagctcagggtgtgaccttttcagggggaccctcggtgggatgctgcttgggaatgcagccctcccaggccaccagcaagggtgactaatgggaccagctttttcaacttctttcccaagggcaacagagaaactcctgggtaagttttgatggggcaggatg

SEQ ID NO: 208585 - DNA, 329 bp, Homo sapiens
tctaataaacaacatatctcatccatatctcatcctctgttctctgcctagtcatcctttgctctccccaactcctagcaactactgatctttttactgtcttcatagttttgcctttccaagaatgccatatagttggaaytatctaagatgtagtactttcagattggcttctttcacttaatgatatgcacttaagtctcctccatgtcttttcatggcttgatagtgggtatctttttactgctgaataatattccactgtatggaagtacctccatagtttatttatccattcacatacagaaggggcatcttggttgcttcca

SEQ ID NO: 208586 - DNA, 580 bp, Homo sapiens
gatttaaaagaattaattgtattccaatgaatacaaagaaaataaatctaagcctagacacatcatagagaaaaactgcagcacacccaagacatagagaagatcttataagcaactagagataaaggacaaatttccaacaaaataataacaattacgctggtgcacactgcacaataacagatttttttacaaaatagcaattagactgttataaacttctcaacagcatcaatggtggtcagaagactatgggaaaatatcttcagaatgctgagagaatatgattgtcaacttataacattatagtcasctaagcttgtagttcacagtgaggttatctcaagcaaataaggactaaggttactacttcagacccaacttgaaaaattttgaaaaactactacagatgaaggaaattaagcaaagaatgaagacacaaaaagtaattatgcttattttttcccacatatttataatgttttatatttaaggttaagagtgtgtgtgtgtgtgtgtgtgtgtgtgtgtacaggaagagaaacagagagtctgtgtaacagtgttctatacatgaaat

SEQ ID NO: 208587 - DNA, 630 bp, Homo sapiens
tcaagaagggaacataaaatacatgctaatgcgcccccagttgcacaattgcagcagatgaatgcctagcagatggcgggcattcatagcaggaaagccagcatgagtaaaggcctagaggctgaagtgaggtggcagagtagaagacagtgagaaggacagctgcccagacgcatataatccaatatttccaaacatcttccagttccacaatggccatgcccctccatgctctcatgaccattgagcctttctgcatgcaggtccctctgcctggaactccttcccctcctctctgtctggctacctcctagtgcactagagttctggtatgtcagctgactcacctccacaccaaatccttatgtgttgatcttaacaaacctttaaatgcttgtgtgtctttcctataaccttctagcatgtctccactgatagttaaaggaagttgaagatgaatttgtgataaatacatttggccatcctttggggttctgcccccmccatgggaaataccctaactccatgtctgccttgtagagctgtggtcagaagtcatctactggcaggatatctctgtcctccagacatgaaacagggcaatgggcttcagtaccatcctgggaattc

SEQ ID NO: 208588 - DNA, 604 bp, Homo sapiens
ttatgtctggaattggttctctccgaggggttcttggtctcgctgacttcaagaatgaagccatggaccctcgcagtgagtgttgcagttcttaaagatggtgtgtccggagtttgtgttttcagatgttcagatgtgtctggaggagtttcttccttctggtgggctcgtggtctcgctgacttcaggagtgaagccacagaccttcacagtgagcattacagctcttaaaggtggtgcgtccagagttgtttgttcctcccggtgggtttgtggtctcactggcttcaggagtgaagctgcagacctttgcagtgagtgttacagctcataaaggtagtgtggacccaaagagtgagcagcagcaagatttattgtgaagagtgaaagaaaaaagcttccacagcgtggaaggggacctgagaaggttgccgccactggctcgggtggccagcttttattcccttatttggccccgccctcatcctcctgattggtccrttttacagggtgctgattgccccattttacagagtgctgattggtccgtttttacagagtgctgattggtgcgtttacaaacctttagttagacacagagtgc

SEQ ID NO: 208589 - DNA, 549 bp, Homo sapiens
cattccggtttcttaaagtcctcaggacaaagtccctacaccctagccctgtctcacttcctgccactaatcttctcaggtgacttaattcccctctcctctccacactctcccacacacccattgctttgtccctgctggcccctctgcctggacaaccccttatccactcccccatctggctattctttttcatccttggggactcagctaaaaggtcacctatgaggagcccaccctgccactgcccccctgccaggctgtgtggggccctttctctgtgtgtgtccctgttagagcactggtggtcctggggtcctactcttttttgcttgactgccttcctactagacattccccttgagggcagggactgtgtcctttctgtgttaggccatttttgcattgctataaagaaatgcctgaggcttggtaattaattaattaattwatttatttttaacttttcttttaagttcaggggtacatgttacatacgtaagtgggtgtcatgggggtttgttgtacagattattttatcacccatgt

SEQ ID NO: 208590 - DNA, 497 bp, Homo sapiens
tgaaattgattctagtaatatatttattaaacccaatatatccaaaatattatcatgtcaatatgttatcaatatatcttacgctcttcttaaaaaattaagacttctgttttacacttacagcacatgtgaacttgaacaaaccacatttcaggtgctccccagccacatggggtgagtggctgctctaygggacagcccgaatctagggcattttctgatctcctcactaaactgtgaatgctccaaaggtacgaccatgttttattctcccagtccttagcaaggaggctcaaataagaatgttagtaaatcacactgacaataagcacagctgatatgtattgggtgcactttcaaaacactttgcaggcactacgttactgaatcttcacaagtaccttacaattccatttttcagatcaggaaaccaggctcagagaggttaagtaacttgcccaaggtcacacagccagtaagtggtacagctgatcttt

SEQ ID NO: 208591 - DNA, 602 bp, Homo sapiens
tttctctttgccatcttttctgtgtcgatttttggcagtttcatcactccggctgcttaaaccccaaaatttcagatattctcaacttttccttttctctcccatttcacattagcacatcctgtttgcattattatatgcaaactttctttaaagtatatttagaattcagacttaagtcagatcatgccattcctctgctccaacatctttgctagctccccaatactcagagtagaaacaaaagttattatgatggcttactcaagttctgtgccttgagcactggagtcacattgactttaggtcttggtattctccccttattcattctgttccagtcacattggctttcttgctattcttgcaatgtggcaggtatatttctacctcagtacctttgtcttgctaactsttctgtatgtaatgttctttctccagtttacttcatgtcttaattttctacctcaccttattcaggcattatctcaaatgtcagtgactcagtatagcccacatggccacactatttgaaaaggtaaattgttccccatctctacactcgctgtccttcttctctgccttgtttttttaccactgta

SEQ ID NO: 208592 - DNA, 625 bp, Homo sapiens
cctttttgcagcctagttagtgccaagagctttgaattttcatccttttacttggtgattttacttttaagatggtctaaccatcttaacccaaccagtggtgaagtgctgtttatgatgaaatagacaagaagcacaagaagactatgatgtgccttacaatgagaaaatatgagtgttagacaagctttgtttagcgtgaattatagtgcttytggctgtgagttcaatgttaatgaatcaacaatacgaatatccagaaaaaggaagaggaaatttgctgagctgtatatgaagttgcttcgtaaagtgcaaaactaacatctgtaccacatgataaaactatggaaaacatggaaaagtggctaaatctgtggattcatgaaatgacaggcaagcgtagagaatagcattattttgatgcggatagccaaagaaatttatgctcatgttattcaggattttaaagatgctatgctaaatccttctggactagtgctacatggcccacatgtttcaaagagtgatagcatgaacatgataaacttgcaggtgaggcatattctgcggataggaggctgtgaaaaacatttttaaaagaattctgaattctttataattatgt

SEQ ID NO: 208593 - DNA, 496 bp, Homo sapiens
tttctggtttcagaatacacagtaatcattgtttattaggcacttttatttttgtwttctagaggaaggattttcagattttactgcatattaggatcacttggggagattttttttaaatacagatatccaatgtacatacaataaatttttaatcagaattccttgggtggaacaaagatatcgatatctctttaaaattccacaagtgtttccaatgggcagccaaccttgtagaccatcctcaggtttcctacactcttacaggattttgttccttcccattggattagagggcagatatttgttaggttgtagaggtcaaagtaacaatgcatgatggtgtaaagtaaagtaaagtaaagaaaaaatattttagttaaaaaataacgtgtaaaaaaggtgtgcatacataaacatgtacacacaggtacacacatattcacactcatataaacatacaggtcaataagaatatagcttaaaatggcatatt

SEQ ID NO: 208594 - DNA, 560 bp, Homo sapiens
ctgacaataaattctccccatttttatatgtcaaacaacatcttcatttctccttcatcatgataactttcagtggttataaaattcggrgttgagagttgttttctttcatcactttcaagatgtcacccttttgtcttctgacttgccttgtttctgataacaagtccactgtacataatatgtctttttcttgggatgtcttccaaattttctttttaacttcggtgtttagcaatttgaatatgggttcctttttatacatgtgtttatgtgtgtatcgttctctgagcttcttcaatttgttttggtgtctctcattgatttttttctcattaaatcctccttaatttctttgtcattaatttcagagaattatttgccattatttccttaaatatttctttggtcctgttctctgtttctccatctgggattacaagtacacatatttaagactacttcccagaagattgcaaatacactattctacctcagctctcaatttacccgttttcaagtataataattctgtcctcaggtgtaccaaccatattgat

SEQ ID NO: 208595 - DNA, 473 bp, Homo sapiens
ataaacttttccctattcagtatgttattagctgtgggtttatcatataaggcccttatgttttgaagtatggtatttctatgcctaattcattgaraatttttattatgaggggatgttgaattttgatgtttgatttttctgaatgtattgtaacacatgtatgattcttctgtccttgattttgttaatgtgatttataaagtttatttctttgtgtatgatgaaccatcctttcatccctgggatgaatcccacttaatcgtggagtatattctttataatatattgtcgattctggtttgccagtattttgttgaggatttttgcatttatgtttattagtgatactggcctgtagtttgttttgttgttgtgttcttgtctggttttggtatcagggtagtgatgaccttgtagaatgagtttgaaaatattccctccttttaaagtttttgcgtgagtttgagaag

SEQ ID NO: 208596 - DNA, 398 bp, Homo sapiens
atttgttacattcactgaagtacagcagtaagaagacatcaacaagaacccacatcagcgaagtggctagaaccaccttgcagtagacaaatctcctcatgtctttccttgrtttctagttaacacacagattgaagacaaatgctactgtgataaatccaagccacacaggtgaactccaagatgaaagcaggatacattccactgcattaaaacaaagaagaaaatttcattaattgtacacatagatttttggataaagaacatataacatgaaatgtatgacttatttaatgttctcaaatatatcagtactcaagccttcgaatccaaaattaaaagcctaaataaatgaaagttgctagcaagctagttggctaacattttaatacctaata

SEQ ID NO: 208597 - DNA, 521 bp, Homo sapiens
agatcatcttagaacaaagggcttccatgtgacttcagtgcctgagttgatatttgctttcgcagttgtgagattattgagtaaaatccaaaggatctcacagcgtggttccaatgaagattctgctggtgttctaagagtagtatgtgatggaagagctgcctcatcacgtagcagatgaaagcacagtggcctccgcaaggtccagcccactgcatcagtgccagactcacacgtgagtggacactagackccagcccttcacaggccaatgggcaatcactcactggcaatgagggaggcaggcaatatgcagtgaaaacctttctctctttctgatgccttcagtaattgtaatagatgctcatttaatggttatttcaaaaatctggcttatgcaaagcagactaccttcttgtgtactcatgcgatgcctcgttaagttcagtaaattaagtgaaatctgatttaactgaggtctgattatccagagctaacaggctaaagttttccattgcaca

SEQ ID NO: 208598 - DNA, 569 bp, Homo sapiens
ctgctggtgttctaagagtagtatgtgatggaagagctgcctcatcacgtagcagatgaaagcacagtggcctccgcaaggtccagcccactgcatcagtgccagactcacacgtgagtggacactagactccagcccttcacaggccaatgggcaatcactcactggcaatgagggaggcaggcaatatgcagtgaaaacctttctctctttctgatgccttcagtaattgtaatagatgctcatttaatggtkatttcaaaaatctggcttatgcaaagcagactaccttcttgtgtactcatgcgatgcctcgttaagttcagtaaattaagtgaaatctgatttaactgaggtctgattatccagagctaacaggctaaagttttccattgcacataccgttttgaccaataccctatttcaaaaggcattctttgcttggaattatacaagttagaaaacaaaaatagagtgtggcagccactggtactctcctatcccaagtccattcttccctttctccatagcgacaggccccttattttatctgaggtgctaatacgctg

SEQ ID NO: 208599 - DNA, 569 bp, Homo sapiens
ctgctggtgttctaagagtagtatgtgatggaagagctgcctcatcacgtagcagatgaaagcacagtggcctccgcaaggtccagcccactgcatcagtgccagactcacacgtgagtggacactagactccagcccttcacaggccaatgggcaatcactcactggcaatgagggaggcaggcaatatgcagtgaaaacctttctctctttctgatgccttcagtaattgtaatagatgctcatttaatggttatttcaaaaatctggcttatgcaaagcagactaccttcttgtgtactcatgcgatgcctcgttaagttcagtarattaagtgaaatctgatttaactgaggtctgattatccagagctaacaggctaaagttttccattgcacataccgttttgaccaataccctatttcaaaaggcattctttgcttggaattatacaagttagaaaacaaaaatagagtgtggcagccactggtactctcctatcccaagtccattcttccctttctccatagcgacaggccccttattttatctgaggtgctaatacgctg

SEQ ID NO: 208600 - DNA, 569 bp, Homo sapiens
ctgctggtgttctaagagtagtatgtgatggaagagctgcctcatcacgtagcagatgaaagcacagtggcctccgcaaggtccagcccactgcatcagtgccagactcacacgtgagtggacactagactccagcccttcacaggccaatgggcaatcactcactggcaatgagggaggcaggcaatatgcagtgaaaacctttctctctttctgatgccttcagtaattgtaatagatgctcatttaatggttatttcaaaaatctggcttatgcaaagcagactaccttcttgtgtactcatgcgatgcctcgttaagttcagtaaattaagtgaaatctgatttaactgaggtctgattatccagagctaacaggctaaagttttccattgcacataccgttttgaccaatacccyatttcaaaaggcattctttgcttggaattatacaagttagaaaacaaaaatagagtgtggcagccactggtactctcctatcccaagtccattcttccctttctccatagcgacaggccccttattttatctgaggtgctaatacgctg

SEQ ID NO: 208601 - DNA, 634 bp, Homo sapiens
ttattctctgtctcccttagatatagagttgccaatgcggcacaagcaaaggttgttaggtgggatttatgagcagacttttcaaaagagatgggtgtacttggggggcatgattccctccttctattttcttcttgcagggagtacagatgcaatagctggagccacagaagccatattgtgaccatcaggcaccttgaacttgctggcctcgtgctaaggctctyagcgcagaagagtccggatatttcctgattactctgacacaagagaaaaataaaacctcaattcacttaaactgtggtcttctgggtctcttttattagttgccatttctaactgatgcagactatacatatagaagtggatctagaatgtcaatctttctatattaagcctggcatgtgtggtttagactcaaacaaacagcattcattctccatcatattaaattaacgttgataatttaaattgtatgtttatgtagttatgtttagaaggtgagggggttttctacaaaaataagatataagaggttaatatgttgatttacactggtataaatttaaaatcaactgatttaagtaactattaggagcctcttcatttttgttccttaaaatggaccctacat

SEQ ID NO: 208602 - DNA, 417 bp, Homo sapiens
tcctcttctccgccccatttcctctccgtcatyagcctattttcagcctgtattaattataggctgtagaaacttaccactaactaggtggctgaaaacagtagctatttattcttcctcagttctggaggccaaaagtctggtcagtgccacagggtagaaatcaaggtattgttaggatcacactccctccagaggtgagaatctatttcttgcttttttcagcttctggaggttgcagacattccttggcttgtggctgcaccactccaatctctgcctctgtgatcacatgcccttctcctctgcatgtggtctccctctgtctttctcttctcaggacacttggtattatatttagggcatccctgaatagtccagaataatctccccatctcaagatctttagcttaatca

SEQ ID NO: 208603 - DNA, 417 bp, Homo sapiens
tcctcttctccgccccatttcctctccgtcattagcctattttcagcctgtattaattataggctgtagaaacttaccactaactaggtggctgaaaacagtagctatttattcttcctcagttctggaggccaaaagtctggtcagtgccacagggtagaaatcaaggtattgttaggatcacactccctccagaggtgagaatctatttcttgcttttttcagcttctggaggttgcagacattccttggcttgtggctgcaccactccaatctctgcctctgtgatcacatgcccttctcctctgcatgtggtctccctctgtctttctcttctcaggacacttggtattatatttagggcatccctgaatagtccagrataatctccccatctcaagatctttagcttaatca

SEQ ID NO: 208604 - DNA, 417 bp, Homo sapiens
tcctcttctccgccccatttcctctccgtcattagcctattttcagcctgtattaattataggctgtagaaacttaccactaactaggtggctgaaaacagtagctatttattcttcctcagttctggaggccaaaagtctggtcagtgccacagggtagaaatcaaggtattgttaggatcacactccctccagaggtgagaatctatttcttgcttttttcagcttctggaggttgcagacattccttggcttgtggctgcaccactccaatctctgcctctgtgatcacatgcccttctcctctgcatgtggtctccctctgtctttctcttctcaggacacttggtattatatttagggcatccctgaatagtccagaataatctccccayctcaagatctttagcttaatca

SEQ ID NO: 208605 - DNA, 419 bp, Homo sapiens
gtattaagaaagtcctggagatgacgtggtaccagccttgccaaatcacttgtagtgagatttcacaatctttagttgttcataaaccagcttgcagtatctgtatccatagtgttataattgaggtttttctttaaatcaatccacttgatttttaaaaacatttatttcaaaagataatttatgtaacacttgtaaatgtaaaaccgtcaycatcagccataaatagaaggcaatcatacatataaaagcagtgagaatattaaattttgacattaccaggacatacagggttttgtctgtttcttttttttatactttagcaacttgggaattaaaatgtaacttacaacaaatggtcttttacaactaattggaagattggttttctttcttagaggtatgcaaaaataatggcg

SEQ ID NO: 208606 - DNA, 564 bp, Homo sapiens
catagtcattgaagaaaaaaattaaaaatttagataattttttraaaaaagaaattgcctgcaaactctcacctagagatgaaggtgagtgttgttaaattatacatttagttttgacaagtgagtaaaagtgatccccattttaaatgtcaaaaagtatagaaattaagtttcaagttaattaattttttcattgatacatattagttttacatattttggggatacatgtgatattttgatacctgtatacaatgtgtagtgatcaaatcaaagtaattggggtagccatcacctcaaaaatgtatcttttctttgtgttgggagtattacacatcttttcttccagttattttgaaatatgcaataaattattgttaactgtaattttcctactgtactacctaatactagaacttattccttctaactgtattttttgtactgttaaccaacttgatttataaacacacacacacaaccaaataggatctcattcgacatgctattttaaattttattttacattgaaataacttcagacttacaaaaagttgtaagaac

SEQ ID NO: 208607 - DNA, 564 bp, Homo sapiens
catagtcattgaagaaaaaaattaaaaatttagataattttttaaaaaaagaaattgcctgcaaactctcacctagagatgaaggtgagtgttgttaaattatacatttagttttgacaagtgagtaaaagtgatccccattttaaatrtcaaaaagtatagaaattaagtttcaagttaattaattttttcattgatacatattagttttacatattttggggatacatgtgatattttgatacctgtatacaatgtgtagtgatcaaatcaaagtaattggggtagccatcacctcaaaaatgtatcttttctttgtgttgggagtattacacatcttttcttccagttattttgaaatatgcaataaattattgttaactgtaattttcctactgtactacctaatactagaacttattccttctaactgtattttttgtactgttaaccaacttgatttataaacacacacacacaaccaaataggatctcattcgacatgctattttaaattttattttacattgaaataacttcagacttacaaaaagttgtaagaac

SEQ ID NO: 208608 - DNA, 589 bp, Homo sapiens
gcgtggtagcagacatcttccgcagggtcacgccatccagtgggctgtcaccacatagcgtgctggttctgtgctaagcactttacatactttatcctacagggtcttaactacaacccctgagtgagatctcttagctttgccattttatgggtgagcaagtagaggtcagagaggcaagatcctttgttcaarttacaacagctggcaagcaatggaggccaggatggagctcaggagcccaacggtccatccaccatcacctgagctaagaaatgtgaatttttttcctacaaatacccgaggaaggtaccgaagacagcttcgttgccctgggcagatggtcaccgcttggccctgcctggtcacagctagtcagctagactggatgcttctttgtttttctacaggacattcatgtctcaagggacaccaaatctagagactccacactccacaaaacctccagcctagtcccccaaattcaaccacagcctcgttcaaaatagcctgtctctggaacacactgtccagctgctccagaccttgcaagattcaggaagtcatctataccttaaataataataat

SEQ ID NO: 208609 - DNA, 592 bp, Homo sapiens
gcgtggtagcagacatcttccgcagggtcacgccatccagtgggctgtcaccacatagcgtgctggttctgtgctaagcactttacatactttatcctacagggtcttaactacaacccctgagtgagatctcttagctttgccattttatgggtgagcaagtagaggtcagagaggcaagatcctttgttcaagttacaacagctggcaagcaatggaggccaggatggagctcaggagcccaacggtccatccaccatcacctgagctaagaaatgtgaatttttttcctacaaatacccgaggaaggtaccgaagacagcttcgttgccctgggcagatggtcaccgcttggccctgcctggtcacagctagtcagctagactggatgcttctttgtttttctacaggacattcatgtctcaagggacaccaaatctagagactccacactccacaaaacctccagcctagtcccccaaattcaaccacagcctcgttcaaaatagsctgtctctggaacacactgtccagctgctccagaccttgcaagattcaggaagtcatctataccttaaataataataataat

SEQ ID NO: 208610 - DNA, 453 bp, Homo sapiens
aaagtgagaaatgcaagccagaggttaatgaattatgaaaataaatgaaaaaagaaaagaaaaaaaacaactctggtgggtgccagcagtgtggcataaaatgggagcaggcatytgcataaaggagaaaacaacactcacatatcaataataccaaaaaataaaatctaaaaggccttgcatggaaaatgatgatagctggccttgaaatgatgagtgtgattaacttacctctctgcacttaagggccaaagaaagtaaaaataaaaataagaaagagtccaaggtgaacgacggagcccaagtttacctaagtttactcctagtatcaagtgaaaatagaaaaataagagtaaaataatattagtgttagaaaacaggaagggatttttagtgaaatttatggaagttatgaatcaaatggaatcaaattaataattaaaaaaacaacac

SEQ ID NO: 208611 - DNA, 453 bp, Homo sapiens
aaagtgagaaatgcaagccagaggttaatgaattatgaaaataaatgaaaaaagaaaagaaaaaaaacaactctggtgggtgccagcagtgtggcataaaatgggagcaggcatttgcataaaggagaaaacaacactcacatatcaataataccaaaaaataaaatctaaaaggccttgcatrgaaaatgatgatagctggccttgaaatgatgagtgtgattaacttacctctctgcacttaagggccaaagaaagtaaaaataaaaataagaaagagtccaaggtgaacgacggagcccaagtttacctaagtttactcctagtatcaagtgaaaatagaaaaataagagtaaaataatattagtgttagaaaacaggaagggatttttagtgaaatttatggaagttatgaatcaaatggaatcaaattaataattaaaaaaacaacac

SEQ ID NO: 208612 - DNA, 453 bp, Homo sapiens
aaagtgagaaatgcaagccagaggttaatgaattatgaaaataaatgaaaaaagaaaagaaaaaaaacaactctggtgggtgccagcagtgtggcataaaatgggagcaggcatttgcataaaggagaaaacaacactcacatatcaataataccaaaaaataaaatctaaaaggccttgcatggaaaatgatgatagctggccttgaaatgatgagtgtgattaacttacctctctgcacttaagggccaaagaaagtaaaaataaaaataagaaagagtccaagrtgaacgacggagcccaagtttacctaagtttactcctagtatcaagtgaaaatagaaaaataagagtaaaataatattagtgttagaaaacaggaagggatttttagtgaaatttatggaagttatgaatcaaatggaatcaaattaataattaaaaaaacaacac

SEQ ID NO: 208613 - DNA, 453 bp, Homo sapiens
aaagtgagaaatgcaagccagaggttaatgaattatgaaaataaatgaaaaaagaaaagaaaaaaaacaactctggtgggtgccagcagtgtggcataaaatgggagcaggcatttgcataaaggagaaaacaacactcacatatcaataataccaaaaaataaaatctaaaaggccttgcatggaaaatgatgatagctggccttgaaatgatgagtgtgattaacttacctctctgcacttaagggccaaagaaagtaaaaataaaaataagaaagagtccaaggtgaacgacggagcccawgtttacctaagtttactcctagtatcaagtgaaaatagaaaaataagagtaaaataatattagtgttagaaaacaggaagggatttttagtgaaatttatggaagttatgaatcaaatggaatcaaattaataattaaaaaaacaacac

SEQ ID NO: 208614 - DNA, 477 bp, Homo sapiens
cccttctaaacaaaggggaaaatgtctatcatcataacttggctggtccctttttcaatgatttcctacaaagcaacccatagccaatttttcagatctactgcttaattcgtttaggtccatttttattagtactcaagttattttcctgaataattacaaagaaaaccttttcccccttactcatcagaaatagagctatataagaatagctggaacccagaaaagaaaatatacaatttcaagtttgcatggatgtattctcatttctaaacaatacaaaaaawaattgttaaattttgctattttcaggatggacattgtacatttattctctggggcaatttttccaaactttcctgctgaagaaaattacctcatcttccctatttctttcaaaaagtagtttccccagccccactcagacttgctgaatcagaatctttcaagaaggtaaaggtctgttcagggaaatta

SEQ ID NO: 208615 - DNA, 415 bp, Homo sapiens
ggtttaatagatgcagtccccagtgtataaagagcctaaatctttcccagtacagtgggattacacaacatccactgaggtcatttaaaatggttcctaaaagaccaaagcccacagccaatggaatcacaaaatcatagaaccccgaacttagatgggaccagtacagtgtgtatcaaagctgagtaatgggtgtttttaaaggaaaaaaatgacttaagcttagcctccctccatgttgatttaaactgcttttgtcatagtgttacttaaatatgtacaaccataaaacaagatgcaagcttctcatrcctctagttttcatcttcctggtgatgtcagagactctggtgtcatgataccttgggtgtggtcccacctccactgctcactagccatgtcaagtcagacaggt

SEQ ID NO: 208616 - DNA, 541 bp, Homo sapiens
tggtggttttcatttcctatcttaagctgctctgtagttgttctattgttattatttaaaattcctgagaacagacagatgctcgttttgaaacaggaatatacatttcctattgaatgagctaatactctaaaatctggttgccatattccatctctaaagttgaataataaaatgcattagaggaaacataataaaaggaaacagygaaagaaaatattatacaagacaaggcatctgtcctggttaaaacccaaaccagttaatgcagagaataggccacttggtgactttgggtctggctaatgttctcatctggaacaaaaacaataagacacttgtactggtgccgcaaatggacaggcttattatttttctaataaaatgagttaaatttgtttgaagggaggatcacagaaggatgagaagtttccttacagcaatagcattccatttaaagtaactctgttgtatattatagctcctcattcttcccatctttagctgtttcaaatcatcttacacagcattcacattttta

SEQ ID NO: 208617 - DNA, 437 bp, Homo sapiens
gtattatctgctggaaatatgttccaaaggtatctcaagttcaaactaatattccccacattaagctcatcttcccttttttctccaaacttctcttgcccctccatttctattattagataatactgattaattttgttttcctcaagtcacttctccagttagccatgaagtcctagatacactctggctttcatgtctcacggctatcccatccttaccatctctaccagccctgtttttatccctttgtcctgcttcctgcaatagccttcctaattcatctgcatggggtttcctttctacgtttcctacatcatgcacagtaagctttccaaagcataaaggtaattgttttactcctygcttaacatctttatgtgtctcattactttcagggttcagtgtgagcttctcagccagacctgtgtgatctg

SEQ ID NO: 208618 - DNA, 529 bp, Homo sapiens
aggtggtggttgctgaagtttgggtggctgtggccatttcttaaaataagacaacaatgaagtttgctgcattgattgactcttcctttcatgaaacatttctctgcatcatgtgacactgtttgatarcattttacccacagtaaaagttctttcaaaattggagtcaatcctctcaaaccccaccactgctttatcaattaagttgatgtaatagtctaaatcctttgttgtcatttcaacaaagttcactgcatcttcaccagtagtggattccatctcaagaaactatgttatttcctcatccataagaagcaacccttcatctgttcaagtttattacattatagcaattcagttataccttcaggctccacttctaatcctagttctctttctatttccatctcttcttcagttacttcctccactgaagtcttgaatccctcaaagtcatgcatgagggttggaaaaaacttcttctaagctcctgtgaatgtgtatattttgacctcctcccataaatcat

SEQ ID NO: 208619 - DNA, 529 bp, Homo sapiens
aggtggtggttgctgaagtttgggtggctgtggccatttcttaaaataagacaacaatgaagtttgctgcattgattgactcttcctttcatgaaacatttctctgcatcatgtgacactgtttgataacattttacccacagtaaaagttctttcaaaattggagtcaatcctctcaaaccccaccactgctttatcaattaagttgatgtaatagtctaaatcctttgttgtcatttcaacaaagttcactgcatcttcaccagtagtggattccatctcaagaaactatgttatttcctcatccataagaagcaacccttcatctgttcaagtttattacattatagcaattcagttataycttcaggctccacttctaatcctagttctctttctatttccatctcttcttcagttacttcctccactgaagtcttgaatccctcaaagtcatgcatgagggttggaaaaaacttcttctaagctcctgtgaatgtgtatattttgacctcctcccataaatcat

SEQ ID NO: 208620 - DNA, 400 bp, Homo sapiens
agatcttgggtggccaggtacatgatcaatgagcagtgatattttaaaaggaatatttctgaacagtggttttcaatagcgggcttaaaatattcagctaactacactgtaaacagatgtgctgtcagccaggctttgttattctatatatagagcacaggcagagtagattaaatataattcttaagggccctaggattttccaaatggtaaatgagcattagtttcaacataaagtggccagttgcattaacccctaagaagagagtcagtctgtcattagaagctttgaagcccgtcactgacttctcctctctagctatgaaagtcctagatgkcatcttcttccaatagaatgctgttttgtctacactgaaaatctgttgtttactgtagccac

SEQ ID NO: 208621 - DNA, 568 bp, Homo sapiens
agagaaacagacaatacagaaataatgcataatatttatattgtataatatagactctattaaaatatataatgwtaggtaataaaaaggcaaagtataggacaatgctgtcccatagaagatttcaatttctagcagttacattaaaagtaaaacaaaagcaattaaattaatttaatagtatattttataaaaccaaatatatccaaaatatatttacttcaacatgtaatgaatataaacattaaggagatattttacatttttccctacctaatcttccaaatccttaaaaatctttgaaattcaaatgtatttacacttacagcatttctcagtttggaagctaaatgttccaaggttaaagagaaatgtagttccatcagacaatcgagttgttttaacagagcaatattttacattccttcagttttcaaatttaaattggctacagttaagtacaactaggaactcggttcgtcgcttgcattggtcacatatcacgggctcaatactggacagcaaagtacagtataggaagttatgttgcagggagaggctgtttgag

SEQ ID NO: 208622 - DNA, 568 bp, Homo sapiens
agagaaacagacaatacagaaataatgcataatatttatattgtataatatagactctattaaaatatataatgttaggtaataaaaaggcaaagtataggacaatgctgtcccatagaagatttcaatttctagcagttacattaaaagtaaaacaaaagcaattaaattaatttaatagtatattttataaaaccaaatatatccaaaatatatttacttcaacatgtaatgaatataaacattaaggagatattttacatttttccctacctaatcttccaaatccttaaaaatctttgaaattcaaatgtatttacamttacagcatttctcagtttggaagctaaatgttccaaggttaaagagaaatgtagttccatcagacaatcgagttgttttaacagagcaatattttacattccttcagttttcaaatttaaattggctacagttaagtacaactaggaactcggttcgtcgcttgcattggtcacatatcacgggctcaatactggacagcaaagtacagtataggaagttatgttgcagggagaggctgtttgag

SEQ ID NO: 208623 - DNA, 552 bp, Homo sapiens
ttgaggtcaggagttcgagaccagcctggccaacatggcaaaacctcatctctactaaaaatacaaaaattagccaagtgtggtggggtgcgcctgtagtcccagctactccagayggtgaggcaggaaaatcacttgaacctgggaagcagaggttgcagtgagagcggagatggcgccactgagctccaccctgggtgacagagcaagactctgtctcaaaaaaaaaattaaagaaaaaaaaaaaacccaaaaaacagtgtcctaagtttgcatgataaattataggctgttccacagccaggggacaaaggactcgcaggcttttgagtccagaggttggagtggagtatgatgtatccaggtccattgctggggcaggccagttggtgttggccatagatgccagctccctgttattagaaaggtagatcatcgggttcaagcctcctccaaatggagatttttcctctgtcacattgcagacatggtccttaaggctgggacagggacctggctttgagaagcagcccatcctgcgtgtagcactga

SEQ ID NO: 208624 - DNA, 567 bp, Homo sapiens
ggctgtgtatatccattattcaacaggccaggtaaagacagaagattggccaacggcagctcaaagacagagccctggggattctcttaggtcttatggaagctgcatcagagctattgctaaactatgtcaactgtaactttccattagcctgatgacctgtgatctaccaatgccacaacatgactggaatgctcagacagttaccaaacaggaagataagccatgggtaattatttcaatagaaacttagagttgaagtgattgttcctgtaagagtctattaattagaattagattttgctgctaaactaaaaaactctcctaatagtggcctaatcataaaaagagtccagaggtaggcagcctgtggctggtgtgatgtctggtatggtgacaccaaagagtcatcagggacccaggctctgaactgtatcctctgccaacttgagcatgtggcttccattctccaggttacttcatkgtctcaaatagctattctctatcatggctatctatcagaacggcacacttcaagtaggaggaaagagagaaaggagggaaagt

SEQ ID NO: 208625 - DNA, 442 bp, Homo sapiens
agatctccacaggtgcatctgatccagctggacaccaggagatggttttggttgtaccttttcaagttccctgccagagacggcactggcttttcttcgctggctgcccagctgacatgctaggcttctctggtgaaaaacaagcatttcagagttgcccagagaggactgagtgtggaggtcatggccttgtgtcaacctggcatgctggttcaggacccactcaccacggaggtcctctgggggtttcagacacctgctcttctaccttcccgcccctgcctattccttcttgcattggaagaagggattaaatgtctgccatacttcagtggacagagcaagggtctccaggccctgctgtgccttggctggtgttatctcctctgaattcaagtcctggcagacaagcaccacrtctttgagagttgtgtgtcatttc

SEQ ID NO: 208626 - DNA, 563 bp, Homo sapiens
aaggagtttattaaatccccataagaggtgctatgaagggtgatgaggaggaggtcatgggaagagagtgaaggctggcattccgtccaggttgttcacggctgctgtgtgttctgtatgactgaccagtgcctgtgtctactggttgttaatattttacatatcacatcttgaaagatgttagagttgtcacaggacctatgctcctagccctaactgatcctgggcaagtcagtcaatttctgtggacctcagtttccccattctgttcacggttggagttaacttccctgtctccaaggttccttccagccctcaaagtttgattctctgcttctcactcaacacccttagttgcatgttcctgacctaccagccacacactttatcctcattaccgtcccttcctccaaagcaccaccccaccccacagacacagaccacagtcatcccccragccttttgcactctagggcagagcaaagtcaaagagggtggtagttacccaagtctacacctctccctcaaaccagagcgttatttctgttttcagttttccacca

SEQ ID NO: 208627 - DNA, 489 bp, Homo sapiens
attccatcttgtgtttattcctaaaataatcactgacaaggagaatataattaacatggttgatttgtactaacagagatttacctccygggaccaaggagagacccagcacccaacagctggatacctgaacaaaactggttctgttagtaagcaaggggtataacaccatacccaagtgatccaagcacatcaagaatgccaggaaaaatggggtaaagcaatatggccaaatagaagccttcactgattatacccccaccaccctcccaggaacaccaaatgtaacaactatctacaccaaaaaaatacctccgtaagaaccaaaactcaagtgagcaatcacagcacctggtttcaacttctctgaaagaggcactgaagcaggtaggagaaacagtcttgaattacgaatattacccctcccctttaccctggcagcagccgcctggtgtagagaatctgtgtgctttggggagggagaatgca

SEQ ID NO: 208628 - DNA, 581 bp, Homo sapiens
tctctgttctaattataccctgcaggcactctctagagaagccaactcggctaggattaccttgctaccatatgtaaaactttaggccctccttgccttcatctttttacaccacatgtgttcttaaaggggcataaatctgctctaacattgtgtgggaaatatgagttattttggctttctggaacattttgaaaaggacagagtttctatcagttgcatcaatgggctgagcaaagggccttatgcctcattgctgctcaggtctgctgggctggagccatcacaaatggagcccatgggcactagacaaycttcatagtgtggaaagtgggtcaagtacctgatggcaatgagcctcactccctgtggcatcacctggtctctgtcaaggcaccaagtaacctgaggagaccactcgagagagcacagaccagcaaagacactgagggaaatggctccttgagctcccatcaagaatgggaacatatgtccatttcctgcgggtgcactattagcatagcggggttgtaatccctattcataacctgaaacagctgggggcaacacagcaacacaga

SEQ ID NO: 208629 - DNA, 354 bp, Homo sapiens
tatatcttctgagacttattctctaccacgagaacagtatgggagaaactgccccatgattcaattatcycccacctggtctctcccatgacatgtgggaatgataggagcacatttcaagatgagatttggatgggaacacagccaaaccatatcaggcaggctctgctgctgactcattatgtgacttcagtctgtcttgagctgctctggatctcagtttccttgtgtgtgaaaagggaagactaatagagctgcccaaggccccttccacgtcccaatgcctgtgactccacagtggtgaataaaagcatgtttttatttaaatatttatgaaaagcatattcttacttt

SEQ ID NO: 208630 - DNA, 503 bp, Homo sapiens
atagcaatacgattgactaagacaaggggggaaaaatggaagaggagaataatggaaggaaaagagggaggctgggaaaaaggaggaagtcatagaaatgaagagagtggagagaagtgatttgaagtggacaccttgatgatgaagggaggacaaatagaaagctctaatttcatatacgatatggtgttttgtcactccatcaagcttagtaaaccaagatttcaatcagaagtgctgtagttttaaaatcagtcaaacataagaattcaacagtactttgcccatcatagctctccatattcacaggccaatcaatgatgrcattgccatagctttgagaacatacttagtggcagcgggagaaaaggtgatcctggccatagattctctggagaacctccccaggatgttcagccccactgatgaactgatgagggaaaggtgagggaagagaatgccatgtgacctcagaaacccagctgaagttggggtatagggtg

SEQ ID NO: 208631 - DNA, 565 bp, Homo sapiens
ataaattcattcatttaattctaatgacttcaaaaggcagatactattatcatagttattataaattacacatatatacttactataattatatacttacatataatacatatacttagaaataatatacaatatagaacatttataatataagcttatatgtaatattatatgcttatttgattatactggtattataatatcactcattttacaatgaggaaacaggcacagggaggttatgtggcttattcaaggtcatacatcatgtaagtggtagagctgggttttaaaccaagaggtttgcttgcagggcctgaacttgtggaattttgagctagcaggatttctagaggtcatgtcactgagatccagagaagttatataactttccaatagtcacatagaaggttacgactagtgsctatctccctgactcctgagtccagagttccttgaacacagcataactcagacatgcttattgaatctgtagataatagaaagttggaaaggaaaattctgcaactgaagatacaatagaggttcaaagtgattttgatag

SEQ ID NO: 208632 - DNA, 444 bp, Homo sapiens
tagtgcctatctccctgactcctgagtccagagttccttgaacacagcataactcagacatgcttattgaatctgtagataatagaaagttggaaaggaaaattctgcaactgaagatacaatagaggttcaaagtgattttgatagactagaatgggggctgaaccaaaaagatgaaagttaacagagacatatgtaaatttctacatttaggttcaaaagcatcaattgtacaagtgccagctrgaggagaccttgcctgaatgcagttttctggtaatgagatccatcagagatgacatgaggtgagaatgaggggatacaattttaggctgcattagcgagatgtcattcagatcacaggaaatgaggatcctccctgtgcatcccttctcctacatctgggaagtcaagtactaagctttgttcttgccaccatgtttt

SEQ ID NO: 208633 - DNA, 531 bp, Homo sapiens
aatgtatatacacacatacgtgtatacatatacatttagtatgtttatgtatatgtttgtagacagactaaaatagaggaaaatatggaaaaatgtaaacaaatggtgactctaagtaaaaagatatatagatatttattgtactattattttaacctgtaagtttaaaatttttcaaaacaaatagtaggagaaaaaaattagcacttgtcatggtaactttttttcaagaaaagttgtgtttaagatcaaaccaggtgcggtggttcatgcctgtaatcccagtactttgggaggccaagacaggaggatcacttgaccccagggatttgagaccagccctgataacatagtgaaacctgtcgctacagaaaatttaaaaattagcttggcatgktaagctgtagtcccagctacacaggaggctgaggtgggagggtcgcttgagcctgagaggtcgaggctgcagtgagccatggtcatgccactgcactccagcctcaatgcttttataagtgttcttatataagc

SEQ ID NO: 208634 - DNA, 531 bp, Homo sapiens
aatgtatatacacacatacgtgtatacatatacatttagtatgtttatgtatatgtttgtagacagactaaaatagaggaaaatatggaaaaatgtaaacaaatggtgactctaagtaaaaagatatatagatatttattgtactattattttaacctgtaagtttaaaatttttcaaaacaaatagtaggagaaaaaaattagcacttgtcatggtaactttttttcaagaaaagttgtgtttaagatcaaaccaggtgcggtggttcatgcctgtaatcccagtactttgggaggccaagacaggaggatcacttgaccccagggatttgagaccagccctgataacatagtgaaacctgtcgctacagaaaatttaaaaattagcttggcatggtaagctgtagtcccagctacacaggaggctgaggtgggagggtcgcttgagcctgagaggtygaggctgcagtgagccatggtcatgccactgcactccagcctcaatgcttttataagtgttcttatataagc

SEQ ID NO: 208635 - DNA, 492 bp, Homo sapiens
gtgacaatccacttctgggccagagtacttaaatgttgatggtaaacccaccacatttctctcttttgcttccagcacagtgacccatgatattcaaggtggtggctsctttgtcagatgaattcctgagtgaccataagcagagatctcctaacgacccatgatgggtagtgtgagcaagtatgaaccatctagtggagcaagaaatagtgcctatataagcactgagatttgaggatggtttgttaccagagaattgcctaccttatcctgactgataatcagatgtaataatatacctctgactggtgttggctccatcatacaccagggaaacagctgttgtctagtacttataacatgtaactcaaaacccctggtttaaatgaattcctgagtgcattatgcataacatttgtataattggcttttgtaaacaagacattgctatagttcttcacagaattatgctaatatcgatagattattctt

SEQ ID NO: 208636 - DNA, 606 bp, Homo sapiens
catcatacaccagggaaacagctgttgtctagtacttataacatgtaactcaaaacccctggtttaaatgaattcctgagtgcattatgcataacatttgtataattggcttttgtaaacaagacattgctatagttcttcacagaattatgctaatatcgatagattattcttcatttatctttatctgttctgagcgactgaaagaggaaagatttgttatgagaacacataaatacagtatcatgaaagggaaagaaaaagttctgttttgcggaaggcattagtcccctttgttagtcaaatgaagagagactattcattatactttaatcttaaggaatccaagattgctaaactaatggatgacatgtgactaaggaatgaattagttgaactttattctatgagttgccaccatgaactgtgcaattatagccaggtcctttaaatgctttgaatgtttttcatgygcggataagattatttcagacctaccaggccttgaagaaggatcaaagtcttgtcagagcttttgcctaaaattgaaaatatcatgttacttggactatttatttatccctgcaccttgttgcaaaaaggatt

SEQ ID NO: 208637 - DNA, 521 bp, Homo sapiens
aaaatgataaatgcataaatccacaatttgacaattctaattcttatatctcagaaattaatagaaaaaaaactacaacaataagactacaaggtattaataggagagattataaccagagcactgggagaaaaacagcaatatccaatatgcttacaactattggttgacaactcaaaagttcccaaaagaatttttgacacyaaataaaggtaaatagcctggaaaacctacaagccagcataggaaggaagtggaaaatgaaacattgattgaaaataaatctggaagtccgggcgcagtggctcatgcctgtaatcccagcactttgggaggccaagatgggtggatcacctgaggttgggagttcgagaccagcctgaccaacatggagaaactctgtctgtactaaaaatacaaaattagctgggtatggtggtgcatgcctgtaaccccagctacttggaggctgtggtagaagaattgcttgaacccgagaggcagaggttgtcgtgagccaa

SEQ ID NO: 208638 - DNA, 521 bp, Homo sapiens
aaaatgataaatgcataaatccacaatttgacaattctaattcttatatctcagaaattaatagaaaaaaaactacaacaataagactacaaggtattaataggagagattataaccagagcactgggagaaaaacagcaatatccaatatgcttacaactattggttgacaactcaaaagttcccaaaagaatttttgacactaaataaaggtaaatagcctggaaaacctacaagccagcataggaaggaagtggaaaatgaaacattgattgaaaataaatctggaagtccgggcgcagtggctcatgcctgtaatcccagcactttgggaggccaagatgggtggatcacctgaggttgggagttcgagaccagcctgaccaacatggagaaactctgtctgtactaaaaatacaaaattagctgggtatggtggtgcatgcctgtaaccccagctacttggaggctgtsgtagaagaattgcttgaacccgagaggcagaggttgtcgtgagccaa

SEQ ID NO: 208639 - DNA, 525 bp, Homo sapiens
cctaagtcagggtgttggtccccagctgcaggagggcaggaactggcactcagccccacctcagaggctgcatgatgcccagagccagggcccagctcttctagcgcaggttgtggaggggccaggggccacccagactggagggcagtgtcatgatcacagctcactgaagcctcaacctcccagtttcaagctatcgtctcacctcagcctcctgagtagctggtagctgggactgcaggcgggtgccatcatgtctggctattatattttatatacattttggagagacagtgtctcaccatgttgcccagcaggtcttgaacgcctggagttcaagcgatyctcccaacttgaccttcctcagtggtggtggtgggattatatgtgtgagccactgtgccctacctgccgcttttcttataaggatacttgtcattggatttagggcccatcctaatccaagatgagatgccctcatctcgaggtgctggatttaattacatctgcagattgttttccaaa

SEQ ID NO: 208640 - DNA, 557 bp, Homo sapiens
aagctttttaaattttttctttaagattttagatgcttaccactgagtaccagagggatgtagcctgatgcccttatcaacaaagtcagggatggtggcacacaaggtttgactactgcatacacggtcacagtgctacccccagatagcctgatttccctgccttctctggtggggagaagggctggcagagccattagcatgggcttcagccaatcctggccactttgatgctcctggtgctgacccagggtcctggagkatgggctgaggcggcggggtagagatgttcagggcagtggcccctttccatccacactggaactatttcagtattttaccaccaattcggctattcccttatcggctggctgaacatcggccctgctccaggtctcagtttcccctttgtaaagggaaagccctggattcaggggtgactaggtcatcatggtcttgagattccaggcctgtaggcagggggagagaggttcactaggagtgcagaagaccaaggttggggagaggcagagaagagagtggcctccctttggccc

SEQ ID NO: 208641 - DNA, 231 bp, Homo sapiens
tcttcttatcagcttccccctttgagattctttcctaggccagtatstctttgctctgctctcataactatttttgtaactatttctgtaagtttgtaaggattttgtaagttcctgttttccatctgtgcaacactgagaaggtcacaagacatgtctgagcaagcctaaaatagtaaccatctgctgagggcctgctggacggcccagcagaggtcaccaggcatgttt

SEQ ID NO: 208642 - DNA, 564 bp, Homo sapiens
cgttcctggccagtaattttgttttattatattaaggtgaggtttmtaccacattcttctggttacagaagtaatacatgctcattgtatacactgaaaaatgtaagcagtataaagaagaaaataaaaaaggatatgaaaatcactagtggtcccattgcctaccgtaacattatgtgctgcttcttaatctttacttcctctccctccgtgtgtgtctttgtgtgtgtgtgtctgtctgtgtggttttttgtttgtttttttggcacatagtacaatagctgacatttatatcttcccgaccagtgttgagcatggtgttaagcaattgacaaagtgtattgtatttaactcctacagaaaacctaaaaaggggaagggcagtataattaatagaattttccagatgaaaagactggggcctgagttgaggttacattttatatatggcattatattgtacttcagacatgtaacatagtaagtgtcctggagaatcttggtctgttagtctgtataataacataagcatcttttgtgggattaatagtttttccaaagcat

SEQ ID NO: 208643 - DNA, 298 bp, Homo sapiens
actatgatgatgaaaatgttctacattcatgctgcctagttcagtagccactagccacatgtggctattgagtaattgagatgtggctagtacaastgaccagctaatgttaaattttgttttatttgaattaattttaattttaatagtcacctgtggctattggctactgcactggatagcacagagatgagaaataatagaaaccttttttgttgttgtttcaatggctaacattgtcaaaagctgaattcctgttttatgtaaaattttggtttatattttctcaaagaaggga

SEQ ID NO: 208644 - DNA, 298 bp, Homo sapiens
actatgatgatgaaaatgttctacattcatgctgcctagttcagtagccactagccacatgtggctattgagtaattgagatgtggctagtacaagtgaccagctaatgttaaattttgttttatttgaattaattttaattttaatagtcacctgtggctattggctactgcactggatrgcacagagatgagaaataatagaaaccttttttgttgttgtttcaatggctaacattgtcaaaagctgaattcctgttttatgtaaaattttggtttatattttctcaaagaaggga

SEQ ID NO: 208645 - DNA, 298 bp, Homo sapiens
actatgatgatgaaaatgttctacattcatgctgcctagttcagtagccactagccacatgtggctattgagtaattgagatgtggctagtacaagtgaccagctaatgttaaattttgttttatttgaattaattttaattttaatagtcacctgtggctattggctactgcactggatagcacrgagatgagaaataatagaaaccttttttgttgttgtttcaatggctaacattgtcaaaagctgaattcctgttttatgtaaaattttggtttatattttctcaaagaaggga

SEQ ID NO: 208646 - DNA, 298 bp, Homo sapiens
actatgatgatgaaaatgttctacattcatgctgcctagttcagtagccactagccacatgtggctattgagtaattgagatgtggctagtacaagtgaccagctaatgttaaattttgttttatttgaattaattttaattttaatagtcacctgtggctattggctactgcactggatagcacagagatragaaataatagaaaccttttttgttgttgtttcaatggctaacattgtcaaaagctgaattcctgttttatgtaaaattttggtttatattttctcaaagaaggga

SEQ ID NO: 208647 - DNA, 378 bp, Homo sapiens
gagtggagtagcatgatcatggctcactgcagcctcaacctccctgggcacagggattctcccacctcagtctcctgagtaactgggaatacaagcacatgccaccatgcctgaatattttttctattttgttttggtttatttgttttgtttcgttttgaaaaaatggggttttgccatgtcacctaggctggtattgaacttttggactcaagtgatcctctctcctcagcctcccaaagtactgggattacaggtgtgaaccagcatgccatgcctatagkgatacctttaagtaacccttttttttttttttttgggcaatttttcaaagcaacaggcactttattaaataagaaagttgatgtgctttcctaa

SEQ ID NO: 208648 - DNA, 461 bp, Homo sapiens
gatgctgagtgatcagaaagtatacataccctatgattttatgtatttggaaataaaaactcacggatagtgactagaagtggatcagtggttgcctgtggatggaatggggataggcaggaaaaagtgagtagaaaaagcacaaggaaactttggtggtaaaggtaatggatatgtttkctattttcatatgttgttggttttgtagagctacaaatgccaagaattatcaaaatgtacaattgaagtatgtgcagtttattgcatgtaaataaactttttaaaaattaaccgatacaaattgacttacatgaccagaaagctcttgaaaaactctcctgttttctcccctatttttattcttgcatgcccttatagcctgtgttaacacatttctcatcttaccgttattttgtgtctacatttcaccaagtcaatataactatcaccataatttcttg

SEQ ID NO: 208649 - DNA, 461 bp, Homo sapiens
gatgctgagtgatcagaaagtatacataccctatgattttatgtatttggaaataaaaactcacggatagtgactagaagtggatcagtggttgcctgtggatggaatggggataggcaggaaaaagtgagtagaaaaagcacaaggaaactttggtggtaaaggtaatggatatgtttgctattttcatatgttgttggttttgtagagctacaaatgccaagaattatcaaaatgtacaattgaagtatgtgcagtttattgcatgtaaataaacyttttaaaaattaaccgatacaaattgacttacatgaccagaaagctcttgaaaaactctcctgttttctcccctatttttattcttgcatgcccttatagcctgtgttaacacatttctcatcttaccgttattttgtgtctacatttcaccaagtcaatataactatcaccataatttcttg

SEQ ID NO: 208650 - DNA, 575 bp, Homo sapiens
aagctaagacctcaaactataaaactagcacaaaaaaactttgggggaaatctccaggatattggtctgggcaaaaatatcttgagcaataccccacaagcacaggcaaccaaagcaaaaatggacaaatggatcacattaagttaaaagcttctgcacggaaaatgatacaagyaacaaagttaagagataatccacagaatgagagaaaatatttgcaaactactcatccaacaaaggattaataatcagaatatataaaaagctcaaacaactctttaagaaacaatctaataacctggttaaaaaaaagggggcaaaagattcgaatagatatttctcaaaagaagacctacaaatggcaaacaggtataagaaaaggtgctcaatatcactgatcatcagagaaatgcaaatcaaaactacaatgagatatcatctcaccacagtttataagacttgtatgcaaaagacaggcagtaacaaatgctagcagggaagcagagaaaacggaacacttgtacattgctcctgggaatgtaaattaataaaaccaccaaggtgaacagtttgga

SEQ ID NO: 208651 - DNA, 575 bp, Homo sapiens
aagctaagacctcaaactataaaactagcacaaaaaaactttgggggaaatctccaggatattggtctgggcaaaaatatcttgagcaataccccacaagcacaggcaaccaaagcaaaaatggacaaatggatcacattaagttaaaagcttctgcacggaaaatgatacaagcaacaaagttaagagataatccacagaatgagagaaaatatttgcaaactactcatccaacaaaggattaataatcagaatatataaaaagctcaaacaactctttaagaaacaatctaataacctggttaaaaaaaagggggcaaaagattcgaatagatatttctcaaaagaagacctacaaatggcaaacaggtataagaaaaggtgctcaatatcactgatcatcagagaaatgcaaatcaaaactacaatgagatatcatctcaccacagtttatawgacttgtatgcaaaagacaggcagtaacaaatgctagcagggaagcagagaaaacggaacacttgtacattgctcctgggaatgtaaattaataaaaccaccaaggtgaacagtttgga

SEQ ID NO: 208652 - DNA, 575 bp, Homo sapiens
aagctaagacctcaaactataaaactagcacaaaaaaactttgggggaaatctccaggatattggtctgggcaaaaatatcttgagcaataccccacaagcacaggcaaccaaagcaaaaatggacaaatggatcacattaagttaaaagcttctgcacggaaaatgatacaagcaacaaagttaagagataatccacagaatgagagaaaatatttgcaaactactcatccaacaaaggattaataatcagaatatataaaaagctcaaacaactctttaagaaacaatctaataacctggttaaaaaaaagggggcaaaagattcgaatagatatttctcaaaagaagacctacaaatggcaaacaggtataagaaaaggtgctcaatatcactgatcatcagagaaatgcaaatcaaaactacaatgagatatcatctcaccacagtttataagacttgtatgcaaaagacaggcagtaacaaatgctagcagggaagcagagaaaasggaacacttgtacattgctcctgggaatgtaaattaataaaaccaccaaggtgaacagtttgga

SEQ ID NO: 208653 - DNA, 555 bp, Homo sapiens
ttcattatttatttcattgttggatggtatcccattaaattgatataccacaatttgctcatcaatttacttttctgtttttgagttgtttccagtttttagctatgatgaataaggctacggtgaacattcatgtacaagtctttgtgtagacaattgttttctcttggtaaatacttagtggtattattgggtagtatrgtaaatatatgtttagctttacaaagtgctgcaccattttaatctcccactggcaatgtatgagtgttccagctgctccacatttttcccaatatttaatactgacaactttaaaatattagacaatccagtggatatatagtgatatctcatttagattttaatttgcaattcactgatgatatactattgagcatcacatctttcataatgtactttattttgcgaagacacatacccagcatatggaagaccctcaataaatatttgttgaacttacacaaattgaatacagaaaatgcagctcatcaaaggatttgagttaatttcctggcatttatgaaataccgagca

SEQ ID NO: 208654 - DNA, 411 bp, Homo sapiens
tcccttttcttagtcctttcagggtcttctctttgtgtttgacatttgagagtttaattataaaatgtctttggttgtcttattcagattaaatatgattgggcactttgaccatcctaaacattttaatctttctccaggtttaaaaagttttctgttatttcttygaataaactatctccttttcattcttagttcccctttaacaccaatgatatgtagatttgctcttttgttggtgtcccacaaatctcataaactttctttgtttcttttcattctttttttcattctactctgaccatgtattttcaaagagcctgtctttgagctcactgtttctttcttctgcttgatcagttcttctgttgatgccttccgttggattttcaatgtgttaattgaactttc

SEQ ID NO: 208655 - DNA, 528 bp, Homo sapiens
gaattctcttatgtgttgtttcccttttcttagtcctttcagggtcttctctttgtgtttgacatttgagagtttaattataaaatgtctttggttgtcttattcagattaaatatgattgggcactttgaccatcctaaacattttaatctttctccaggtttaaaaagttttctgttatttctttgaataaactatctccttttcattcttagttcccctttaacaccaatgatatgtagatttgctcttttgttggtgtcccacaaatctcataaactttctttgtttcttttcattctttttttcattctactctgaccatgtattttcaaagagcctgtctttgagctcactgtttctttcttctgcttgatcagttcttcygttgatgccttccgttggattttcaatgtgttaattgaactttcctgcttcaggatttacatgtgatttttcccattattttgatttctttgttgaatttctctggtaaatttctgaattatgtctctgctttctcagtgt

SEQ ID NO: 208656 - DNA, 528 bp, Homo sapiens
gaattctcttatgtgttgtttcccttttcttagtcctttcagggtcttctctttgtgtttgacatttgagagtttaattataaaatgtctttggttgtcttattcagattaaatatgattgggcactttgaccatcctaaacattttaatctttctccaggtttaaaaagttttctgttatttctttgaataaactatctccttttcattcttagttcccctttaacaccaatgatatgtagatttgctcttttgttggtgtcccacaaatctcataaactttctttgtttcttttcattctttttttcattctactctgaccatgtattttcaaagagcctgtctttgagctcactgtttctttcttctgcttgatcagttcttctgttgatgccttccrttggattttcaatgtgttaattgaactttcctgcttcaggatttacatgtgatttttcccattattttgatttctttgttgaatttctctggtaaatttctgaattatgtctctgctttctcagtgt

SEQ ID NO: 208657 - DNA, 561 bp, Homo sapiens
aggtgcttcataaccttgttcatgtattgaggttctgttggctcttgtaatggtaatttcacatgtggacagttgttcatattgatgtttctataggggtatgatagctggagaggtctgcaccactgtcttgctctgcctcgatcattatttttttctaacaagaatttgtctcctcctagtttttctttttctcttaaccgacctaggtatagccttttaatccttctccctcctctgcttctaatgtcattgcttctttgtatgcctatcatatctacatgctacatgaccttcagctggttatgtataatatataagacttaatatcctataaaatagaggtaataatagcatctacttgataggaaagttaagaatattaaatgacaccattgatgttaaatggaggtaactttctgaaatgtattaatgagacatgattctttgttctagtccacttcrtagactagactactttgtttgagttttctcttttcagtcagagaaagcaataaaattgtaatggtaaaaattaaataaaatttaacttaaaattgt

SEQ ID NO: 208658 - DNA, 522 bp, Homo sapiens
caccccaacccacaccaactgccactgaagatgaagccatggtgggcacagaaccaaaaaccccacccctgctagcatctcacccttgaggtaatgctgtgcagaggaaaagggaccttcttataccctgagtgaccactgttgcttgggggggatcagagaaggcaccttcactggccagccacccaccccaaaccagaactacctccagtgcaacagcacacacagtcagcaggggccccctggcccacaccccagctgttttgcctccaccactaggtgaatgcccacagggaggcagggacttttgcatctgctagcattctgccacagctgccrcactttggtcccctcagtgcggtggactccaaacctcgatgagccagagaacaaagttgtggcccaatacaagttccccagagttaaagcacacagtccaagaattgggagctgcatgttggccccttaaaatcctccaaagacaaaacctgttggctgaatccaccttacaccacaatcaaa

SEQ ID NO: 208659 - DNA, 522 bp, Homo sapiens
caccccaacccacaccaactgccactgaagatgaagccatggtgggcacagaaccaaaaaccccacccctgctagcatctcacccttgaggtaatgctgtgcagaggaaaagggaccttcttataccctgagtgaccactgttgcttgggggggatcagagaaggcaccttcactggccagccacccaccccaaaccagaactacctccagtgcaacagcacacacagtcagcaggggccccctggcccacaccccagctgttttgcctccaccactaggtgaatgcccacagggaggcagggacttttgcatctgctagcattctgccacagctgccacactttggtcccctcagtgcggtggactccaaacctcgakgagccagagaacaaagttgtggcccaatacaagttccccagagttaaagcacacagtccaagaattgggagctgcatgttggccccttaaaatcctccaaagacaaaacctgttggctgaatccaccttacaccacaatcaaa

SEQ ID NO: 208660 - DNA, 635 bp, Homo sapiens
tgagaaaaagactctgtgcaagaacactgaaaactcaaaaattcagcatgctttcttttctccaaatgactgcatcaactctccagcaagtgttcagaactgggctgaggctgagatgtctgaaatgatacaagcagagttcaggatatgggtaggaacaaagttccctgagtgaaagaagtatgttgtaatccaatacaaggaagctaaaaatcattgtaaaacattgcaggaactaacagacaaaatagcaagtataaagaagaaaataactgacctgacagagctgtaaatcacactagaagaattttcataatgcagtcacacggtgattgtgtgtgattgcattatgaaaattattgtagtatgtgtgggcacctgagagtgccctgtaagcagatgtggccaggctggggtcctgggagaggcaagcagactagggagggctgaggtcagaccagctccatctcatgtgcaagaccatccaacagaatagaccaagaagaggaaagaatcccagaayctggaaactggctttctgaaataaaacaggcaaacaagaatgggggaaaaaagaatgaaagggaatgaacaaaacatccgagaaatatgggattatataaacgactaaatct

SEQ ID NO: 208661 - DNA, 368 bp, Homo sapiens
cagtggtcgtcttgactcattcaatgagaagacagtwtcttggaaagaaaagacttcgttttttggttatttgtaatagtgccctaagaagtggagaattctagataatgacacatactttatgcagttaaagtttaagttcctatacttctaattaaagattgggtatttaatgacgacagttctttttgcctttgtatgcattcacaattctttttgttactttattgaaggaccaaaagtacttcttacatatatgattcttgcttattcattctaaggtgtgaaatagcctttgaggataggggaagggaactgagccatgactgctttccctggtttgggtgggtggggtgtaagatgtagag

SEQ ID NO: 208662 - DNA, 379 bp, Homo sapiens
ctttttattatagagtggaagaaatcccagtggtcgtcttgactcattcaatgagaagacagtatcttggaaagaaaagacttcgttttttggttatttgtaatagtgccctaagaagtggagaattctagataatgacacatactttatgcmgttaaagtttaagttcctatacttctaattaaagattgggtatttaatgacgacagttctttttgcctttgtatgcattcacaattctttttgttactttattgaaggaccaaaagtacttcttacatatatgattcttgcttattcattctaaggtgtgaaatagcctttgaggataggggaagggaactgagccatgactgctttccctggtttgggtgggtgg

SEQ ID NO: 208663 - DNA, 379 bp, Homo sapiens
ctttttattatagagtggaagaaatcccagtggtcgtcttgactcattcaatgagaagacagtatcttggaaagaaaagacttcgttttttggttatttgtaatagtgccctaagaagtggagaattctagataatgacacatactttatgcagttaaagtttaagttcctatacttctaattaaagattgggtatttaatgaygacagttctttttgcctttgtatgcattcacaattctttttgttactttattgaaggaccaaaagtacttcttacatatatgattcttgcttattcattctaaggtgtgaaatagcctttgaggataggggaagggaactgagccatgactgctttccctggtttgggtgggtgg

SEQ ID NO: 208664 - DNA, 379 bp, Homo sapiens
ctttttattatagagtggaagaaatcccagtggtcgtcttgactcattcaatgagaagacagtatcttggaaagaaaagacttcgttttttggttatttgtaatagtgccctaagaagtggagaattctagataatgacacatactttatgcagttaaagtttaagttcctatacttctaattaaagattgggtatttaatgacgacagttctttttgcctttgtatgcattcacaattctttttgttactttattgaaggaccaaaagtacttcttacatatatgattmttgcttattcattctaaggtgtgaaatagcctttgaggataggggaagggaactgagccatgactgctttccctggtttgggtgggtgg

SEQ ID NO: 208665 - DNA, 544 bp, Homo sapiens
gagccagagacagagacaaaaaaagctgtcctggagtctgttgcattgtgactgaatcaagttatcyataaaaggactcaaaataggagtctgggttcacagcttaaaggaatgaggctaaacagcagaaaggctcaagcaaccactggtggaggggaacaagtaagaacttgtctggagaagtctggcgccaagtataaatacccactgctgacattcacacattcccagcttgcttgtccaagggcaagcaggagtcatttacagcctgaacctaataggcatctaatattgttatgtgttgtcatatctcaaccaccaccatcaccaccactcccagctagcactcacagagcacctgacctgggatcagtgcctgaatcagaaacagaaacttctagactgatgtggttcagtggtgcttacataggctattgtttactacatctgcacccacctttcaggaagcatttggcttgtacatttagctctgtggcccactgaagagaatttcctgtgggcagtggggtgaggaaccctgcct

SEQ ID NO: 208666 - DNA, 544 bp, Homo sapiens
gagccagagacagagacaaaaaaagctgtcctggagtctgttgcattgtgactgaatcaagttatctataaaagkactcaaaataggagtctgggttcacagcttaaaggaatgaggctaaacagcagaaaggctcaagcaaccactggtggaggggaacaagtaagaacttgtctggagaagtctggcgccaagtataaatacccactgctgacattcacacattcccagcttgcttgtccaagggcaagcaggagtcatttacagcctgaacctaataggcatctaatattgttatgtgttgtcatatctcaaccaccaccatcaccaccactcccagctagcactcacagagcacctgacctgggatcagtgcctgaatcagaaacagaaacttctagactgatgtggttcagtggtgcttacataggctattgtttactacatctgcacccacctttcaggaagcatttggcttgtacatttagctctgtggcccactgaagagaatttcctgtgggcagtggggtgaggaaccctgcct

SEQ ID NO: 208667 - DNA, 544 bp, Homo sapiens
gagccagagacagagacaaaaaaagctgtcctggagtctgttgcattgtgactgaatcaagttatctataaaaggactcaaaataggagtctgggttcacagcttaaaggaatgaggctaaacagcagaaaggctcaagcaaccactggtggaggggaacaagtaagaacttgtctggagaagtctggmgccaagtataaatacccactgctgacattcacacattcccagcttgcttgtccaagggcaagcaggagtcatttacagcctgaacctaataggcatctaatattgttatgtgttgtcatatctcaaccaccaccatcaccaccactcccagctagcactcacagagcacctgacctgggatcagtgcctgaatcagaaacagaaacttctagactgatgtggttcagtggtgcttacataggctattgtttactacatctgcacccacctttcaggaagcatttggcttgtacatttagctctgtggcccactgaagagaatttcctgtgggcagtggggtgaggaaccctgcct

SEQ ID NO: 208668 - DNA, 397 bp, Homo sapiens
ttttttttttttttgagacgttatctcgctctgccgcccaggccggagtgcagtagtgtgatgtctgctcactgcaacctccgcctctcggattctagcaatactcccaccttagcctcccaagtagttgggattrcaagtgtgcgccaccacggctggctaatttttgtattttcagtagagacagggatttctccgtgttggctaggctggtctggaactcctgacctcaagtgatccacctgcctcggccttccaaagtgttgggattacaggcgtgagccaccacccccagccagaatgacactgttttgagtaacccagtatagtatgtgatattaaactaaatttggaggattctagaattctagattggctgcctatgacgacagacctc

SEQ ID NO: 208669 - DNA, 275 bp, Homo sapiens
gtgttgggttctgcttttagcttatggattttagacattgtccaaaagtgcttcggaaattgaatgtatgttgcaagtattatgtagtaagaacatgcttatgctgttgtaattcgcttagtgwtgaaatcaaatcaggttttacattgggaacttcataatttagtgtgaagccacaagacttgagaatggtttgggggagtatgtgcaatttatatagctagttgtttcttaccacccaattctgtaattttctatggtgaatatatacataa

SEQ ID NO: 208670 - DNA, 275 bp, Homo sapiens
gtgttgggttctgcttttagcttatggattttagacattgtccaaaagtgcttcggaaattgaatgtatgttgcaagtattatgtagtaagaacatgcttatgctgttgtaattcgcttagtgatgaaatcaaatcaggttttacattgggaacttcataatttagtgtgaagccacaagacttgagaatgrtttgggggagtatgtgcaatttatatagctagttgtttcttaccacccaattctgtaattttctatggtgaatatatacataa

SEQ ID NO: 208671 - DNA, 630 bp, Homo sapiens
  misc_feature (1)...(630): n = A,T,C or G
attatgtcttattggaattcagagcaggaagagaacacatctggctgggggcaggatgaggaaggacctgataaattttctattgaacaattactctaaataagtgtgctttctttagatggtaaggattagaccaggattcaagattactggattttgagtcaaagtttgagctccttgggggaaaatctgcatatatgcagagtcatggtggtaattacagtattaagccccattttggaacactttgatctgatctgattcaaaattttatttcctgaaaggtttrctcatgtcatattaaggtactcttgtctttttatttgcaaactcatttaaaatctaaatactgctgctctctgctttggacttggctgcttttcaataacaggaaggaacaatactgttttcatcagttttgtacatgggccacgagaaggcagcattttacttcttttaagatttaatgctggtctacaaaatgctgagctgtgcctggagggctttgtggtgtggaaaatcttcagaaatgttcagtgaaacccagcatcctctgattcatctttaaagaggagaaaaaattattctatgtgactctattaccaatctttgggcnnnnnnnnnnnnnnn

SEQ ID NO: 208672 - DNA, 486 bp, Homo sapiens
ctgggttgcttctactttttaactattctgaataatgctgctgtgacagtcatttaaaaatataaaaaaaattaagcatttttttggggactgagatatgcttaagataaattaaccatcataggagaacataaaacataaatatctaagggtgaactagaacccaaaggcctagtctgggtcataggatattatggaatgaaagaataacccatactgatgaaaatgtcacttaccaagatgatgatcttacagtgtaggaacagcaattgtttagctacaaaatgtgtggtaatcatgacttgcagaaataagactggtaaagtctccmagaaactttcaggattcctaaaaccagtcctttgtccaaaagtcatcttcatagtagtggccatatcctgaatgaagttactcagttcttaagagcatactgtctaggtctgaagaagaatacggagagtgaaggcagattcatggaccaaggaa

SEQ ID NO: 208673 - DNA, 369 bp, Homo sapiens
ctaggtctgaagaagaatacggagagtgaaggcagattcatggaccaaggaagatattcacaaatagaacatacaatgggggawgaaatgattttaaggagaaatgacaatgacaatgacagtggtatgtagtatgtaggggggccattgctttcaatcttggaagatgagttcaagttttgattgcatcaaaatggagtcacactgaagttctcaggtagaattagccatacatcctttgcttctgggtttctgagatattggtgacaaaactgaaactaagaacagatctattgtcaactatgattgtcttgcctcctttttttctctgatcttgtttactgcctgagtttcccttcacattttacc

SEQ ID NO: 208674 - DNA, 589 bp, Homo sapiens
tatttaatacagtattccgcttaatacagactttataaatagaatcacattttatttttaaatgtcatatcctagaggaatgtttgtacaaatcatttaaaaatgaatagtttacaaataacttagctttagtctttaagtatttacatacatttatttatgatttgtcacacataaaaggacattcttcttcttaattatatcttgctgatacttaattttaaagtttttttttgttttaattacacaactggtggtgacaatataaccctagatggctatggtatatttgttcaggtgccttgagaaataccaaaatttttgacaatgttttttttcctttgggtcagatcttttttattacaatgaaagataaatttcagtaaactaagagacagagactctacamagagtttcagtttccccttagctcctataaaatggaatgtcatgctactgagatatctcatgcactgctcttgccttctgtctgaagatgggattcatgaattacctgaatcatctggatccctagaattggattagtggctcagacaactccatcttttgggacagatgatagaaggta

SEQ ID NO: 208675 - DNA, 457 bp, Homo sapiens
agtaaactaagagacagagactctacacagagtttcagtttccccttagctcctataaaatggartgtcatgctactgagatatctcatgcactgctcttgccttctgtctgaagatgggattcatgaattacctgaatcatctggatccctagaattggattagtggctcagacaactccatcttttgggacagatgatagaaggtatctatttcctacagctaggtttttgcagtaagattacataactcttatttgatctttctcattatttttttcaggacataaattgtgttccaattctgatatccaatgatcttacctcatttggggtaggttaaagtagatactcattaggactctaaggagcatatttttctacttagtgcaaacgtcagaaagtaagtaatcatgtttaaactgacaagagctttaaccaggaagttgcctacatca

SEQ ID NO: 208676 - DNA, 457 bp, Homo sapiens
gtaaactaagagacagagactctacacagagtttcagtttccccttagctcctataaaatggaatgtcatgctactgagatatctcatgcactgctcttgccttctgtctgaagatgggattcatgaattacctgaatcatctggatccctagaattggattagtggctcagacaactccatcttttgggacagatgatagaaggtatctatttcctacagctaggtttttgcagtaagattacrtaactcttatttgatctttctcattatttttttcaggacataaattgtgttccaattctgatatccaatgatcttacctcatttggggtaggttaaagtagatactcattaggactctaaggagcatatttttctacttagtgcaaacgtcagaaagtaagtaatcatgtttaaactgacaagagctttaaccaggaagttgcctacatcac

SEQ ID NO: 208677 - DNA, 339 bp, Homo sapiens
ctgctcttgccttctgtctgaagatgggattcatgaattacctgaatcatctggatccctagaattggattagtggctcagacaactccatcttttgggacagatgatagaaggtatctatttcctacagctaggtttttgcagtaagattacataactcttatttgatctttctcattatttttttcaggacataaattgtgttccaattctgatatccaatgatcttacctcatttggggtaggttaaagtwgatactcattaggactctaaggagcatatttttctacttagtgcaaacgtcagaaagtaagtaatcatgtttaaactgacaagag

SEQ ID NO: 208678 - DNA, 339 bp, Homo sapiens
ctgctcttgccttctgtctgaagatgggattcatgaattacctgaatcatctggatccctagaattggattagtggctcagacaactccatcttttgggacagatgatagaaggtatctatttcctacagctaggtttttgcagtaagattacataactcttatttgatctttctcattatttttttcaggacataaattgtgttccaattctgatatccaatgatcttacctcatttggggtaggttaaagtagatactcattaggactctaagkagcatatttttctacttagtgcaaacgtcagaaagtaagtaatcatgtttaaactgacaagag

SEQ ID NO: 208679 - DNA, 339 bp, Homo sapiens
ctgctcttgccttctgtctgaagatgggattcatgaattacctgaatcatctggatccctagaattggattagtggctcagacaactccatcttttgggacagatgatagaaggtatctatttcctacagctaggtttttgcagtaagattacataactcttatttgatctttctcattatttttttcaggacataaattgtgttccaattctgatatccaatgatcttacctcatttggggtaggttaaagtagatactcattaggactctaaggascatatttttctacttagtgcaaacgtcagaaagtaagtaatcatgtttaaactgacaagag

SEQ ID NO: 208680 - DNA, 332 bp, Homo sapiens
agtttattctattaaaacttacattttgcagcttattacaacatatgttatgatttgaatgtgtcccctccaaagttcaatcattgccaatatgatggtattaagaagtgattaagataggtattaagatggtctttaagaggtgattaggccttacagtctcttcctggctaatggagttaaaaagcccttacaaaagagacgtcccgcartgcttggctagttgcccttccaccttatgccatgtgaggatgcagcaagaaggccctcactagatcaaatgcctagagccttgaccttgtattttccagccactgaaactgtgagaaagt

SEQ ID NO: 208681 - DNA, 387 bp, Homo sapiens
agtgctgacctttccttaaggattaagcattgaagagtggtagattgttaagattgatcattggtagcatwtctttattgagatgattttttccataacattattaagaacttaaggctctttggtttattttttaaaataagagaatactctttttctgtatctagagtattaagaattgtttagaagatgtatgataagctacatttaacatgaattttataacatatgaaatgcctttgtaagattactgtgtgtgacaggatttctgtgaggacttacccctttaaatgtgctttcatttgtttacttgagaatgtatcagaaaatcctaaattaaacattcttttacttaaaacttagcttataattagaaatatttgtaaa

SEQ ID NO: 208682 - DNA, 387 bp, Homo sapiens
agtgctgacctttccttaaggattaagcattgaagagtggtagattgttaagattgatcattggtagcatttctttattgagatgattttttccataacattattaagaacttaaggctctttggtttattttttaaaataagagaatactctttttctgtatctagagtattaagaattgtttagaagatgtatgataagctacatttaacatgaatttkataacatatgaaatgcctttgtaagattactgtgtgtgacaggatttctgtgaggacttacccctttaaatgtgctttcatttgtttacttgagaatgtatcagaaaatcctaaattaaacattcttttacttaaaacttagcttataattagaaatatttgtaaa

SEQ ID NO: 208683 - DNA, 549 bp, Homo sapiens
taatggtcagcctgattttataatacaggttaatgttctttataaggacatgatgaataatttttatgagctacagtctggtcacatagtatgtttatctattaacaggatctgactgtattttattttagagttttaagtgtgagagtacaatgttatcagatcatgttcttgaaatcattactactgaataaaaatagaatgtataagataagctatgtgaaattatatttagtgaaggagctggctgaagttttaaataactattgatctcttattttaattttattcctttacaaataaaatatttttaatttaaagtactatattattttcactgatactcctttaaatatgaatactcaatctttactttttaaactcaaatgtttgttttggttcccctcctttattaactcagctatttatttagatyaatttccaccatctttcataaaattttcagtgaaaattatgtactaaggtttgctttgaattttgtaggctattgcttatgtaagcaccattggtaattttgtcagacaaaga

SEQ ID NO: 208684 - DNA, 449 bp, Homo sapiens
atgtgccagtgctatactattctattttttttaaaggtttaaaacatttatcactaaagatactagaatgttctttgaaaacctattaagacatttaactattcttttatgctattctgatcaaaagaaagaataaaagtttaggaaagggaaaaatgcacatttcttaaaaaagtttatttctagccctgaaagaacaaaattattgaacaaagtcataaaatacagcagttaatgtcaatgtataacaattaaataattgaatgggattaaattaaaaataaaagacattataaaatttgaagacaacagaaaagacaaactataattttacttaattccatttctatcacaacaagaaaaaaaagccaatgcgttccaaccaaagatgctgaattccaaacataattgyttctcttaataaagaatagaagtgtgcttgacagaat

SEQ ID NO: 208685 - DNA, 646 bp, Homo sapiens
tttttcttatatacacacactatcaaaaaactgatttcaccagtttcaatacctactgtgggagcagcrgagacaggaagacaatctgcttcttgtattactatgaagttccactataaaaaaccccaaatgagtattaatctggattttagctataatctataatattttgacactgacatttcactagatgtggatctcagtatatttaaaaagatttagactcaaaaatggatgcaaattctttaagcatctattttgtttttttctaattttagctactacctgatcagatctaaaattattctggctagaatacagtatatacaaacgtatttaagtgagccctataaagaaatactcataggtagtttaaaatttcttgttaaaggcacaggctcgtttacagttggtggttactagactctaagcagcttaacatttatatgttaaagggaagagaattagtactatgtgccaggcactcgacacatgaagacagagttgtattagcctcggtgtcttacgcttcacaattactcatttactattctaggtaggataaaatgttccatgtttcatagtttcccagttttaactgtccctaaaagcagcagaagaaaaaagaaaaagtctaaaatataat

SEQ ID NO: 208686 - DNA, 646 bp, Homo sapiens
tttttcttatatacacacactatcaaaaaactgatttcaccagtttcaatacctactgtgggagcagcagagacaggaagacaatctgcttcttgtattactatgaagttccactataaaaaaccccaaatgagtattaatctggattttagctataatctataatattttgacactgacatttcactagatgtggatctcagtatatttaaaaagatttagactcaaaaatggatgcaaattctttaagcayctattttgtttttttctaattttagctactacctgatcagatctaaaattattctggctagaatacagtatatacaaacgtatttaagtgagccctataaagaaatactcataggtagtttaaaatttcttgttaaaggcacaggctcgtttacagttggtggttactagactctaagcagcttaacatttatatgttaaagggaagagaattagtactatgtgccaggcactcgacacatgaagacagagttgtattagcctcggtgtcttacgcttcacaattactcatttactattctaggtaggataaaatgttccatgtttcatagtttcccagttttaactgtccctaaaagcagcagaagaaaaaagaaaaagtctaaaatataat

SEQ ID NO: 208687 - DNA, 646 bp, Homo sapiens
tttttcttatatacacacactatcaaaaaactgatttcaccagtttcaatacctactgtgggagcagcagagacaggaagacaatctgcttcttgtattactatgaagttccactataaaaaaccccaaatgagtattaatctggattttagctataatctataatattttgacactgacatttcactagatgtggatctcagtatatttaaaaagatttagactcaaaaatggatgcaaattctttaagcatctattttgtttttttctaattttagctactacctgatcagatctaaaattattctggctagaatacagtatatacaaacgtatttaagtgagccctataaagaaatactcataggtagtttaaaatttcttgttaaaggcacaggctcrtttacagttggtggttactagactctaagcagcttaacatttatatgttaaagggaagagaattagtactatgtgccaggcactcgacacatgaagacagagttgtattagcctcggtgtcttacgcttcacaattactcatttactattctaggtaggataaaatgttccatgtttcatagtttcccagttttaactgtccctaaaagcagcagaagaaaaaagaaaaagtctaaaatataat

SEQ ID NO: 208688 - DNA, 552 bp, Homo sapiens
ttgtattcagattgaaaatactatatgttcagattttttaaaaaacagtattgcatgaatgttttaattaaaatattcctaaatgagcttgagcaaggaggacaggggagataagtaaaataaggctttgtggcataggagacatttggtggaaatctttcagctcaactaagatttgaaaaaaaaagagaatttttataaaaaatgtaaaggcaggatttacactgatgagcttgtggagaaaatacagagtctaacataattcaaaagagactaatcagtcaaagtrgtttcgaaggaatatcttgaagagagagaacataaaatgaagatcaggtatgtagttattttaataatctatccatgagataaaaagcattgggttttatttgtcaaaatgggacaatagttccaagaaccattatttgctcagcctaaagaggtttttacattttgaaccagcgacatattgtgctaagtaggataatatccaaatttgtgtctatatcaataattttgttctcaattaaaaacactttattcacacaactg

SEQ ID NO: 208689 - DNA, 551 bp, Homo sapiens
tttttacattttgaaccagcgacatattgtgctaagtaggataatatccaaatttgtgtctatatcaayaattttgttctcaattaaaaacactttattcacacaactgatgattatctgcatttgatttagtgctgaactgtcaaagggggactaacaaaaacaaaatattagagttgcaagcagtgtaagtggaaaataatgatcatattgaactcatcattactgaaataagaaaacaaagcaaaaaataaataagaaaaaaattgactacgtgaacatttgcttctctcctaagaatcaaaacccttaatttgctgtggcaaaaaagcatctgggtccatgaacccatgcaaaagtctactgtttctgggagataagaagaagcaaaacacatcagcttccagagaaggttaagaaacctctcataccctaccctaccccacctgacaccaggcaaaggatcactgcttctgggagagggatgcaagaaaaatactcctccatcaggagaggaacaaggattgttttggggcccaggattttgcact

SEQ ID NO: 208690 - DNA, 551 bp, Homo sapiens
tttttacattttgaaccagcgacatattgtgctaagtaggataatatccaaatttgtgtctatatcaataattttgttctcaattaaaaacactttattcacacaactgatgattatctgcatttgatttagtgctgaactgtcaaagggggactaacaaaaacaaaayattagagttgcaagcagtgtaagtggaaaataatgatcatattgaactcatcattactgaaataagaaaacaaagcaaaaaataaataagaaaaaaattgactacgtgaacatttgcttctctcctaagaatcaaaacccttaatttgctgtggcaaaaaagcatctgggtccatgaacccatgcaaaagtctactgtttctgggagataagaagaagcaaaacacatcagcttccagagaaggttaagaaacctctcataccctaccctaccccacctgacaccaggcaaaggatcactgcttctgggagagggatgcaagaaaaatactcctccatcaggagaggaacaaggattgttttggggcccaggattttgcact

SEQ ID NO: 208691 - DNA, 551 bp, Homo sapiens
tttttacattttgaaccagcgacatattgtgctaagtaggataatatccaaatttgtgtctatatcaataattttgttctcaattaaaaacactttattcacacaactgatgattatctgcatttgatttagtgctgaactgtcaaagggggactaacaaaaacaaaatattagagttgcaagcagtgtaagtggaaaataatgatcatattgaactcatcattactgaaataagaaaacaaagcaaaaaataaataagaaaaaaattgactacrtgaacatttgcttctctcctaagaatcaaaacccttaatttgctgtggcaaaaaagcatctgggtccatgaacccatgcaaaagtctactgtttctgggagataagaagaagcaaaacacatcagcttccagagaaggttaagaaacctctcataccctaccctaccccacctgacaccaggcaaaggatcactgcttctgggagagggatgcaagaaaaatactcctccatcaggagaggaacaaggattgttttggggcccaggattttgcact

SEQ ID NO: 208692 - DNA, 367 bp, Homo sapiens
tagttttatttttttaagtctgctgtatcttcactgattttttttctacttgttctactaattattgatagtgagtawtgtaatccccaactataactgtggagaaatagacaactatttctcttttgagttctattggtgtttgtttcgtttgtgttgaagctctgtgatgacatacgtagtgcttgttattcttagaattatcacgtcctcctgagaagcggaccctgttctccttataaaacgacattcttcatccctgatattctcttatctgatgtctactttatctgatatgaatatagccactccagctttcatttgattcatggtaactctttttcaatcttttacttttaatatgttt

SEQ ID NO: 208693 - DNA, 367 bp, Homo sapiens
tagttttatttttttaagtctgctgtatcttcactgattttttttctacttgttctactaattattgatagtgagtattgtaatccccaactataactgtggagaaatagacaactatttctcttttgagttctattggtgtttgtttcrtttgtgttgaagctctgtgatgacatacgtagtgcttgttattcttagaattatcacgtcctcctgagaagcggaccctgttctccttataaaacgacattcttcatccctgatattctcttatctgatgtctactttatctgatatgaatatagccactccagctttcatttgattcatggtaactctttttcaatcttttacttttaatatgttt

SEQ ID NO: 208694 - DNA, 367 bp, Homo sapiens
tagttttatttttttaagtctgctgtatcttcactgattttttttctacttgttctactaattattgatagtgagtattgtaatccccaactataactgtggagaaatagacaactatttctcttttgagttctattggtgtttgtttcgtttgtgttgaagctctgtgatgacatacgtagtgcttgttattcttagaattatcacgtcctcctgagaagcggaccctgttctccttayaaaacgacattcttcatccctgatattctcttatctgatgtctactttatctgatatgaatatagccactccagctttcatttgattcatggtaactctttttcaatcttttacttttaatatgttt

SEQ ID NO: 208695 - DNA, 516 bp, Homo sapiens
aatgcacacttacatacttacacatagacatatagcttagaaggtgtataagctctggaaaactttataattttgagttggtctggcaatatttcccagccttctctctgtacctagttatataaataaactcccttctatccagttcatctgcatctcrttattgggccatgagaataagcataaaacaaaccttcctttgatgctggtatctaagcaccaaaaaatagataccagcatcaaaagaaggtttggatacaaccttctttcattttgtttggatacaaggagctagtttgggtctgctcctttaatgtatctatgctcatattttccttcctcaattataaaataaagtagaggtgaacactgtggttagccatagattaaccaagaaagcagaaatcatctcaaatgttcacagcagaaggaatggaaagcagtggtgggtccatgaagagtggagaggctgagaattaaacagagggctctaaaataatcctgggagattgacga

SEQ ID NO: 208696 - DNA, 539 bp, Homo sapiens
gagtgaaaaaggaaacttaggaaaaaatatacccaaagagggagatttaaatagcacagtgggcagtgggggaagtgatgactaatattgctgttagtagtggtttaggaacaaaagagacaagtcagytggaaaccttctggtgtcttctgctagggctccttgctaaagctgatgctggaaaggaggaaggaaggaaagaaggaaggaaaagagggagagagggagcgaggaaggaaggaagggaagtcattagaatgtaagctgaacacccatttggtgcttttggccaaacaataatacacatgtttaaaagttcattacggtgggaacccaacttaagtagaattaatgaaattgatacagaacttgaaattcactacctaaaattattcattaaaaatgcaacatgcattgaattaatgtagcagcacctgaaggaagtcaaagaaactccagtttgaattttgggagaaaagaaagtatcatttaatttgaaataaatgaaaagaacctaaaagagcaaatggctaaataag

SEQ ID NO: 208697 - DNA, 539 bp, Homo sapiens
gagtgaaaaaggaaacttaggaaaaaatatacccaaagagggagatttaaatagcacagtgggcagtgggggaagtgatgactaatattgctgttagtagtggtttaggaacaaaagagacaagtcagctggaaacyttctggtgtcttctgctagggctccttgctaaagctgatgctggaaaggaggaaggaaggaaagaaggaaggaaaagagggagagagggagcgaggaaggaaggaagggaagtcattagaatgtaagctgaacacccatttggtgcttttggccaaacaataatacacatgtttaaaagttcattacggtgggaacccaacttaagtagaattaatgaaattgatacagaacttgaaattcactacctaaaattattcattaaaaatgcaacatgcattgaattaatgtagcagcacctgaaggaagtcaaagaaactccagtttgaattttgggagaaaagaaagtatcatttaatttgaaataaatgaaaagaacctaaaagagcaaatggctaaataag

SEQ ID NO: 208698 - DNA, 564 bp, Homo sapiens
aagataacaaatgtgaaacctcacaaaaatgaaacagcaacaaacattcaaggttgagcctgagcaacatagtgagaccctgtctctacaaaaaaattttaaaaattaaccaggtgtgatggtgcacgcctggagtcccagctactcaggyagctgaggtgggaggatagtttgagcccaggaggttgaggctgcagtgagccatgattgtgccactgcactccagcatgggcaacagggcgtgaccctgtctcaaaaaaaaaaaaaaaatcaagattgtaaagacagctaagtattgtacagtattaagaacacagacttggggatgactctacctcttgctggctgtatgatctcaggcaagttatctaacctttctatgcttcaatgtcctcatccacaaaaatgaggataataataatatgcaactcataaggttttgaggattaaatgacttaatatatatgaagagcttagaatggtaactaatagtaaatgctatatgtattagcaattattactgatagtattcatgtctaaaatatcctatgtataaaacagtga

SEQ ID NO: 208699 - DNA, 464 bp, Homo sapiens
cagaaacagtgccatactgacagttttgagaaataactgacctcctagaatcatactttactactttgatcctattttttaaaatgagtgtattttcccccagccttctacccatgacttcaactctctcttcatacmtagattttcactggggaatcatgtttgtatcccttccccttgagtggtgttagtggtgttctagattacaagctcttcttaacaaatctgaggaatttttcttcctcagaacagattttctttcctgctcaatacagtgagatatctgtaaaacatagttcagtctatctcattacacttcttcaaggtgacctacctgataaatggcacccagtctcaccggggcttttggaaatcaccttgtttgatatgacctaagtttaaattcctcttcttcgttgtagtgattccggcctgagtccttccatgccaatggcttcgaattc

SEQ ID NO: 208700 - DNA, 316 bp, Homo sapiens
gggaggcgcatgcctatgtagcagcaggggctagtgggcagcactggtgtcagggctggtgggggtggccgggtagcatcccaggcagaggccaaggtgagggagtgagtcccagggagccgggaggcacctgagaggcagggagaaggagggcagcggtgcaggggrgccaaggcagtcctgagaacccactcctccacctggacctcctatcaacccctgcctgaagcagcagcgtgctgctagctcagatgccatctgtgccatgggctgagagggagagtctgttggaacagataggggtggggtgcctaaa

SEQ ID NO: 208701 - DNA, 584 bp, Homo sapiens
cgtgggcaaagtcggtgcagccagacgacaggaggcgagagaagcccagctccaggcccatgaggcgaaccacgtgggagccccagacagcgaccacgccccaggcgaaccaaggcccgccccgttgctacagctacgctcgkagcacacctgggcaggcgctgccggacgcatgcgcaatgaacctgagggcagggcggagtcgcagcagttgtctgacgcagtcgccgtaggacgcagccccgtacgctggagcgcagcggagacaggcgcgggcgcactggccgcatagagacgcagcgcacgcgcagtcgcgtatccgtgtgatgggcgggctgttgacggcgctgcgatggctgcctgcgagggcaggagaagcggagctctcggttcctctcagtcggacttcctgacgccgccagtgggcggggccccttgggccgtcgccaccactgtagtcatgtacccaccgccgccgccgccgcctcatcgggacttcatctcggtgacgctgagctttggcgagaactatgacaacagcaagagttggcggcggcgctcgtgctggagggtgagggtcgcgc

SEQ ID NO: 208702 - DNA, 580 bp, Homo sapiens
tgggacagagggactcctgtgtttatatatgctaaagcctaaaaagaagttgtcatcttgctcatctgggaggttggggcatggaaggttcttgactaaaataccacagactsagttttcttagcaaattattatagattatcttgaacagatatttcttcattaactgtgggccctcagaacaattgccagagatttttaactgattttctttaaataatttttatcaatttcactgggaagcaggtcagtggagcttctcatgatttcatgctcaaataactctccaattgttttctgtattaattgatataatcatatggctttatttatttactttattgatacgatggattacattcatggagtttttaatgttgcacagacttgagtagatgtagagtagatgtagagtagtacttgagtagatgtagagttccacttgaacagatagaataagtcatagtatataataattttatatattgtatttgatttgataatattttgttaagaatgttgcacctacgttaataagagacattggttttaagttttccttttttctaataaatgtatc

SEQ ID NO: 208703 - DNA, 580 bp, Homo sapiens
tgggacagagggactcctgtgtttatatatgctaaagcctaaaaagaagttgtcatcttgctcatctgggaggttggggcatggaaggttcttgactaaaataccacagactcagttttcttagcaaattattatagattatcttgaacagatatttcttcattaactgtgggccytcagaacaattgccagagatttttaactgattttctttaaataatttttatcaatttcactgggaagcaggtcagtggagcttctcatgatttcatgctcaaataactctccaattgttttctgtattaattgatataatcatatggctttatttatttactttattgatacgatggattacattcatggagtttttaatgttgcacagacttgagtagatgtagagtagatgtagagtagtacttgagtagatgtagagttccacttgaacagatagaataagtcatagtatataataattttatatattgtatttgatttgataatattttgttaagaatgttgcacctacgttaataagagacattggttttaagttttccttttttctaataaatgtatc

SEQ ID NO: 208704 - DNA, 580 bp, Homo sapiens
tgggacagagggactcctgtgtttatatatgctaaagcctaaaaagaagttgtcatcttgctcatctgggaggttggggcatggaaggttcttgactaaaataccacagactcagttttcttagcaaattattatagattatcttgaacagatatttcttcattaactgtgggccctcagaacaattgccagagatttttaactgattttctttaaataatttttatcaatttcactgggaagcaggtcagtggagcttctcatgatttcatgytcaaataactctccaattgttttctgtattaattgatataatcatatggctttatttatttactttattgatacgatggattacattcatggagtttttaatgttgcacagacttgagtagatgtagagtagatgtagagtagtacttgagtagatgtagagttccacttgaacagatagaataagtcatagtatataataattttatatattgtatttgatttgataatattttgttaagaatgttgcacctacgttaataagagacattggttttaagttttccttttttctaataaatgtatc

SEQ ID NO: 208705 - DNA, 580 bp, Homo sapiens
tgggacagagggactcctgtgtttatatatgctaaagcctaaaaagaagttgtcatcttgctcatctgggaggttggggcatggaaggttcttgactaaaataccacagactcagttttcttagcaaattattatagattatcttgaacagatatttcttcattaactgtgggccctcagaacaattgccagagatttttaactgattttctttaaataatttttatcaatttcactgggaagcaggtcagtggagcttctcatgatttcatgctcaaataactctccaattgtttyctgtattaattgatataatcatatggctttatttatttactttattgatacgatggattacattcatggagtttttaatgttgcacagacttgagtagatgtagagtagatgtagagtagtacttgagtagatgtagagttccacttgaacagatagaataagtcatagtatataataattttatatattgtatttgatttgataatattttgttaagaatgttgcacctacgttaataagagacattggttttaagttttccttttttctaataaatgtatc

SEQ ID NO: 208706 - DNA, 642 bp, Homo sapiens
tcagctttaatagttaaattgggttatatttatttattctctattgcttttttttaaagtagactcaagtctctacagactaattttgccatttttttaagccttaaatttttgttgttaaaaggacacccattgcagaaggtgctaagaattgagataaagttttagcttggggccaggagcagtggttcacgcctgtaatcccagaagtttgggaggctgaggtgggcggatcaccagaggtcaggagttcaagaccagtycagtcaacatggtgaaaccccatctctactaaaaatacaaaacttaactgtgtgtagtggtgagtgcctgtagtcccagttactcaggaggctgaggcaggagaatcacttgaacccaggaggtggaggttgcagtaagccaaggtcgtgccattgcattccagcctgagagacagagaaaaacaaaaaaaaacatttagcttgaagatttttgtaaaccatctgaaatgggctgtgttttctgctttatgtagctgcaggtataaaattgttcaaatctctctactatctttgtttatgcctcccctcttgactttggtcttctctaagtacttctcagacaaagtctgaatcttgaagctcttttagctaaaattat

SEQ ID NO: 208707 - DNA, 609 bp, Homo sapiens
ggaattctgtgagaggcattaaatatatctactctaatagctttctatgacacttgaactacttaactaacacatatattttctgaagatcaataatttgagaagtgttttattcaaataaaaaagacattatctccttaggcagggtcacctagtacttcaatatagattagcaactaatctcagagaacaaatttttcggggacgaaagaaagcaccacgcctgataaggtgctgtggtatgacctaaaaggaagatgagagggcwttaaagacaagctcatcctaactcatagccttgctgacagtgattctagtcatgagccagtcaaactacccagcatttccatctctgagtggaagtggaactttttgcctgctgattcacgtccctatttagtgttcacatgctaacccatttacttatttatttagtgcactgcacaactttttccagatccaaatatttgaatggatttagggtgaataaacagagtcactgttttttttttttcaccaatgttcttcaaaataaaccaaatatatatgaacatgtgactattaaataaactttaacagaggggtgaccagtcttttgggttcctttgc

SEQ ID NO: 208708 - DNA, 609 bp, Homo sapiens
ggaattctgtgagaggcattaaatatatctactctaatagctttctatgacacttgaactacttaactaacacatatattttctgaagatcaataatttgagaagtgttttattcaaataaaaaagacattatctccttaggcagggtcacctagtacttcaatatagattagcaactaatctcagagaacaaatttttcggggacgaaagaaagcaccacgcctgataaggtgctgtggtatgacctaaaaggaagatgagagggctttaaagacaagctcatcctaactcatagccttgctgacagtgattctagtcatgagccagtcaaactacccagcatttccatctytgagtggaagtggaactttttgcctgctgattcacgtccctatttagtgttcacatgctaacccatttacttatttatttagtgcactgcacaactttttccagatccaaatatttgaatggatttagggtgaataaacagagtcactgttttttttttttcaccaatgttcttcaaaataaaccaaatatatatgaacatgtgactattaaataaactttaacagaggggtgaccagtcttttgggttcctttgc

SEQ ID NO: 208709 - DNA, 595 bp, Homo sapiens
ttcttagttgcatacttatcttttattaaattgaagaataacagaaaactgtaaagtacataagtataatatttttgtgtgcatagcttaatgatgtttttatatgtttacagccatgtgtcattcacccagacagcatatagaacctttctatatttcataaggtatcttacaactttttaaaatctatccttcagaagtatctactattcccacctttctcatcattgcttgattaaatagtccatattggttaatagtgttgatcagttcatctgtgtacctactccagatatttttgcctccttattctatcatctccaaaaattttcrgctatgaatacagatttttctgtttctcttgttagttctaccttttttgtcatatatattttaagacatatttttagataaatacttatttaggattgttatatcattctgtttacttgactacttattactacgttttatatttaatttttttctggatggtttaaagattcttctgtttgttttggtttcaggaattgactatggtgtttcagcagtttttttcctccttttcttaggttttattgtttcattttgcctg

SEQ ID NO: 208710 - DNA, 471 bp, Homo sapiens
cattgaactctttaaacattaacaattggttttttctcagattcgttttttcatgtatttttccagcatagtgtttacatttcaatttattctatgataaagatkaatatgctctccaaaaaaggtataatctagccaagaaaacttcagtaggtagaatttcagaaagctagattgagctttatttttaaaaagcactaaattctgtggtatggcccttaaaggaaatagaataatgacaacaaacagagagatcaatatagctaggagcctttatgtagtagatgggaaattacatgttttgtatttagcatatatttattgattgccagctagatgttaggctagctgtgtactggaaatgcaaggtggagatggaaaaagaaaaccaataactctggtctctagtaatttaggtgaagagaaaacatttaaacaaataaaagtacgtgcacgtgatttggatgtaat

SEQ ID NO: 208711 - DNA, 471 bp, Homo sapiens
cattgaactctttaaacattaacaattggttttttctcagattcgttttttcatgtatttttccagcatagtgtttacatttcaatttattctatgataaagattaatatgctctccaaaaaaggtataatctagccaagaaaacttcagtaggtagaatttcagaaagctagattgagctttatttttaaaaagcactaaattctgtggtatggcccttaaaggaaatagaataatgacaacaaacagagagatcaatatagctaggagcctttatgtagtagatgggaaattacatgttttgtatttagcatatatttattgattgccagctagatgttaggctagctgtgtactggaaatgcaaggtggagatggaaaaagaaaaccaataactctggtctctagtaatttaggtgaagagaaaacatttaaacaaataaaagtaygtgcacgtgatttggatgtaat

SEQ ID NO: 208712 - DNA, 501 bp, Homo sapiens
taaggttggattatatctcatttaattgagtgtggttcctgatacttttgttagtggttgacaacacagaaagaagctggctcacttaataccacttgtgacctgataagaagagtcaattctgaaatgtgcatgtttttcaaaatatgaaattatttctgtcctggggcaacatattcagaaggaaagtgaatttatgtcacattttcaatgatcaagaggaattgttctaattaacaagatcacacaaggagtggaaaaaatcagtaatrtagtctgtcattaatcaactaatttcaatacaagaggcagagtcattgattcttgttgcacattgtgcatgtttccaacactgatgaactgtagtgaactaaatttctaatttatagcacctactctacaatttatgactttcagctttattggaggaaatctacttgcccaattttaggttctatttttagttagtaaaatatattaatgttgttgccattattttat

SEQ ID NO: 208713 - DNA, 467 bp, Homo sapiens
aaaaaaaaaaatctcagtcacacagcaggataaatactgcacttatatgaagtatataaaatastcaaatacatagaagtagaaattataatgatgggtggttgccaggggtaggggaagagggaaaatgagttattgtttaatgagtgtaaagtattagttataaaagataaaataattctagagatctactgtataacatcatgatcatagttacccataatggactgcatatttaaatatgtgttaaaagggtagatctaaaggtagatctaatgttacatgtatgtgtgtgtatgttttaccaaaaaatacatttccaattattaggaaaatgcaaatcaaaatcaaaatgacatgccatttacatgaattagaatatctactatgaaaatagaaaataataagttttgataatgatgtagaactattgaaaccctcatgcattgctgatgggagtgtaaaac

SEQ ID NO: 208714 - DNA, 504 bp, Homo sapiens
ccacattctatataataatgtttatattattttttcctctacttacaaataatctttttccagctgaactttaaatttagtatcctagtttacattaaacaaataagtatattataattatatttattatatcattattaaaatgtgtgcatatggctattaaatggttctttgtatttagccccaacatctgaattccttcttttaaaagaaaaaagaaacgaaactataaaacctaaacataatctctttggaccacagaaatattttctttttgatcacccataaaggttcatgaaaatggaagaaatgaaygtccttaaatttggaaaatacatcaaaatgtgttcaggtagttggaatgtgtgtgaattcaagataagaatgaataaactggtgaattttaaataagtgatgatattttcacagaaaattaaatatctagtcagtcctcacacagggaaacaggaatatgattatgtagctatctaatcttcttaaagc

SEQ ID NO: 208715 - DNA, 433 bp, Homo sapiens
tgatgggatactgcaacacacctactagaataactgaaatttaaagtctgacagctgaaattattagtgagggtaaagaacagctaaaactctcatacattgcttgtagaagtgtaaaacggaaccatcaattcagaaaataagttgttaccttaaaaaaattcaaacaaatacctatttggcrtatgacccaacaatacccctcaggattttgattatgagaaataacatgcatatgtctgtctgcaaaacttcctgtacgtgaatgtttacagcaattttatgcaaaaaagccaaaattatcagtcaataggtaaaatgataaatgttctgtggcaggttcaaacattggaattctattaaatataaaagagagaaaataacttaacatggaagaatctgaaaacattatatttagtgaaagaagccagac

SEQ ID NO: 208716 - DNA, 434 bp, Homo sapiens
tgcatcggagtcatctaacagccaaaatgatcaagaggaagaaatagtgagcttgaagatgggctatttgaaaatgcataatcagagaccaggcatagtggctcatgcctgtaatctcagcactttgggaggtcaaggtgggcagatctcttgagcccaacagtttgaratcagcctgagcatcatggtgagaccctgtctctagtaaaattacaaaaaaaaaaaaaaatgagtttggcttggtggcatgcacctgtaatcccagctattcaggaggctgaggtgggagaatcacctgagccaaggaggtcaaggatacaatgagccatgattatgccattgcactctagcctgagcaatgtgagtgagacattgtctcgggaaacaaacaaacaaaaacaaaataaatagaaatacacggtcagaggagactg

SEQ ID NO: 208717 - DNA, 606 bp, Homo sapiens
aatattgaatgtaaatggactaaactctctattatgaagacacacacagactgaaaataaagggatgaaataagatatcccatgccaataaaagctaaaaaagagcacgagtggctatactcatgttagacaaaagagatttcaagacaaaaactataagaaaaaacaaagaggctcgcaatgcaatgatgaagstgtcaactcagtaagtggatataacaattttaaaaatacttacacccaacactggagcaccaagatatgtaaagcaaatattactagagctaaagagagagatcccagtacaataatagctcaatatttcactccagtttgaggaatgtatagttcttcaagacagaaaatcaacaaagaaacatcagacttaatctgcattatagaccaaatggaccaaataaatatttatagaacatttcatccaatggctgtagaacgcacattttttttcctcagcacatggatcatttgcaaggacagaccacatgttatgtcacaaacaattattaaatcattgaaagaaattgaaatgctatcaagcatcttctctggccacaatggaataaaactagaaatcaataacaagag

SEQ ID NO: 208718 - DNA, 472 bp, Homo sapiens
ttgtgtttgcagctagctccttctccctgaacacatttcaggaaccatgtgatctcatgtgggagtgagttcagggaatgctgaaaaatattctcatctttccctaaacaaaacttaattaaggctggtgggggtgaggtgaagaggatggggaggaatgttctatggaagccagtaaacttagagccaattgtgttcctccctccagccaataaatatgacactggcacttgcatgctggtgagttttaacctttggcttcttgaggttatgttgctcttcttcttgcccttgtctctaactgccctcactttgaaaggaatctttgtgtacttgttgctttttctttaaagaatttttttcagaattctttttgaaatcagmaagagtaaaaaaatacacatatgggatgtaacttatttttcttttatgtttaatatagaaaaagttggaagctgtagacaagcaaaaa

SEQ ID NO: 208719 - DNA, 610 bp, Homo sapiens
tattatgtatcgaaaacagaacattcataacatacccacagaatgggagaaaatatttgcaaataatatctggtaagagacccgtatttagaatatgtaaataactcctacaactcagtgacaaagacagatgagccaattaataaatgagcaaaggatctgaacrgatatttcccccaaaagaaaaacaaataatcagtaagtacatgaaaagataagatgctcactctctttagtcagcaggaaaatggaaatcaaaaccacagtgaaatagcactttacatctgttaggatggctgtcatcaaaaagacagatgggaaagatgggggaagtgaaggatagggagagatttactaaaacagcagcccccaaactttttggcaccagggactggtttcatggcggataatttttccacggatgaaggggttgttttgggatgaaactgttccacctcagatcatcaggcattagattctcataaggagtgtgccacctggatccctcacatgcacagttcacaacagggtttgtgctcctatgagaatctaatgcaaccgctgatatgacaggaggtggagctcaggtggtaatgctcacttgctggct

SEQ ID NO: 208720 - DNA, 610 bp, Homo sapiens
tattatgtatcgaaaacagaacattcataacatacccacagaatgggagaaaatatttgcaaataatatctggtaagagacccgtatttagaatatgtaaataactcctacaactcagtgacaaagacagatgagccaattaataaatgagcaaaggatctgaacagatatttcccccaaaagaaaaacaaataatcagtaagtacatgaaaagataagatgctcactctctttagtcagcaggaaaatggaaatcaaaaccacartgaaatagcactttacatctgttaggatggctgtcatcaaaaagacagatgggaaagatgggggaagtgaaggatagggagagatttactaaaacagcagcccccaaactttttggcaccagggactggtttcatggcggataatttttccacggatgaaggggttgttttgggatgaaactgttccacctcagatcatcaggcattagattctcataaggagtgtgccacctggatccctcacatgcacagttcacaacagggtttgtgctcctatgagaatctaatgcaaccgctgatatgacaggaggtggagctcaggtggtaatgctcacttgctggct

SEQ ID NO: 208721 - DNA, 610 bp, Homo sapiens
tattatgtatcgaaaacagaacattcataacatacccacagaatgggagaaaatatttgcaaataatatctggtaagagacccgtatttagaatatgtaaataactcctacaactcagtgacaaagacagatgagccaattaataaatgagcaaaggatctgaacagatatttcccccaaaagaaaaacaaataatcagtaagtacatgaaaagataagatgctcactctctttagtcagcaggaaaatggaaatcaaaaccacagtgaaatagcactttacatctgttaggatggctgtcatcaaaaagacagatgggaaagatgggggaagtgaaggatagggagagatttactaaaacagcagcccccaaactttttggcaccagggactggtttcatggcggataayttttccacggatgaaggggttgttttgggatgaaactgttccacctcagatcatcaggcattagattctcataaggagtgtgccacctggatccctcacatgcacagttcacaacagggtttgtgctcctatgagaatctaatgcaaccgctgatatgacaggaggtggagctcaggtggtaatgctcacttgctggct

SEQ ID NO: 208722 - DNA, 556 bp, Homo sapiens
gcctggtctttggttcaacacagcccctgtctcccctgccatgctccccgacctcatacctgtttctcttccctcagtacccttctacccacttatctgcctgggaaggtggttatcttagatcaatagttctcaactctgactgcaccttagagtctcttgggattgctttaaattatactgctttcctggcyctgtgtagaccaattgaattatgatcttggggagggctaccatttgtatttaaaacgtcttccaacatgatcgtgatacccagtgagggttgagaaacgagtacctcagcttgatccttgggtgggttttgatggagagagagaagagccacagagcagaggaattgaggaaaataacctaacccaatcgacagggccggtaacaccatgagctaaatgttaactgaacaccctgggaaaaatcagggcactttaaaaaaatgaatatccaaatggtgtattcatggcacgttttgctaaggtattaataaactctccccaccccagatcctgctgtactgctgtagggatttaaatcattg

SEQ ID NO: 208723 - DNA, 556 bp, Homo sapiens
gcctggtctttggttcaacacagcccctgtctcccctgccatgctccccgacctcatacctgtttctcttccctcagtacccttctacccacttatctgcctgggaaggtggttatcttagatcaatagttctcaactctgactgcaccttagagtctcttgggattgctttaaattatactgctttcctggccctgtgtagaccaattgaattatgatcttggggagggctaccatttgtatttaaaacgtcttccaacatgatcgtgatacccagtgagggttgagaaackagtacctcagcttgatccttgggtgggttttgatggagagagagaagagccacagagcagaggaattgaggaaaataacctaacccaatcgacagggccggtaacaccatgagctaaatgttaactgaacaccctgggaaaaatcagggcactttaaaaaaatgaatatccaaatggtgtattcatggcacgttttgctaaggtattaataaactctccccaccccagatcctgctgtactgctgtagggatttaaatcattg

SEQ ID NO: 208724 - DNA, 585 bp, Homo sapiens
gaattcttacatttgcagaacaaataagagaataagaccggccgggcgcggtggctcaagcctgtaatcccagcacttcgggaggccgaggcgggcaaattacaaggtcaggagatcgagaccatcctggctaacatggtgaaaccccttctctactaaaaatacaaaaaattagccgggcgtggtggcaggcacctgcagtcccagctactcgggaggctgaggcaggagaatggcgtgaacccrggaggcggagcttgcagtgagccgagatcgcgccactgcactccagcctgggcgacagagcaagactccgtctcaaaaaaaaaaaaaaaccagagattgagaataagacctttacaaggtgtattgtgtggttcaaaccagaagtatgaaaagaggtaatgaagagggatgagtgagactgaaaaacactgaggcataatatatacatgaaatggacagggaagccaaggtgaagatcaaaggtgttggatcacgtatccagggatgcaggaaagtgaggtgaagacagagagatcagtatcctctgcctctggctcagatgtgcagtcagtacgccct

SEQ ID NO: 208725 - DNA, 611 bp, Homo sapiens
aggaattcttacatttgcagaacaaataagagaataagaccggccgggcgcggtggctcaagcctgtaatcccagcacttcgggaggccgaggcgggcaaattacaaggtcaggagatcgagaccatcctggctaacatggtgaaaccccttctctactaaaaatacaaaaaattagccgggcgtggtggcaggcacctgcagtcccagctactcgggaggctgaggcaggagaatggcgtgaacccaggaggcggagcktgcagtgagccgagatcgcgccactgcactccagcctgggcgacagagcaagactccgtctcaaaaaaaaaaaaaaaccagagattgagaataagacctttacaaggtgtattgtgtggttcaaaccagaagtatgaaaagaggtaatgaagagggatgagtgagactgaaaaacactgaggcataatatatacatgaaatggacagggaagccaaggtgaagatcaaaggtgttggatcacgtatccagggatgcaggaaagtgaggtgaagacagagagatcagtatcctctgcctctggctcagatgtgcagtcagtacgccctgtggagcaaaaggggcagcctctg

SEQ ID NO: 208726 - DNA, 611 bp, Homo sapiens
gaattcttacatttgcagaacaaataagagaataagaccggccgggcgcggtggctcaagcctgtaatcccagcacttcgggaggccgaggcgggcaaattacaaggtcaggagatcgagaccatcctggctaacatggtgaaaccccttctctactaaaaatacaaaaaattagccgggcgtggtggcaggcacctgcagtcccagctactcgggaggctgaggcaggagaatggcgtgaacccaggaggcggagcttgcagtgagccgagatcgcgccactgcactccagcctgggcgacagagcaagactccgtctcaaaaaaaaaaaaaaaccagagattgagaataagacctttacaaggtgtattgtgtggttcaaaccagaagtatgaaaagaggtaatgaagagggatgagtgagactgaaaaacactgaggcataatatatacatgaaatggacagggaagccaaggtgaagatcaaaggtgttggatcacgtatccagggatgcaggamagtgaggtgaagacagagagatcagtatcctctgcctctggctcagatgtgcagtcagtacgccctgtggagcaaaaggggcagcctctgtt

SEQ ID NO: 208727 - DNA, 551 bp, Homo sapiens
atggagaaatatagagagagaacagagtacctaagacctgttgacaaaaacatgttgtcgaacacaggagtgagtcaaatttctcaaaggcataaacccatagatcaaaaacaaaacaaaacaaaacaaaaaaaaaactcagcaaatcccagacaggacaaaaacaatgaagacttcatcaaggcataccacagtcaaatagccaaaattcaaagataaaggtgagaaatcttgtttgtatgtttgagccagcgtttcactctgtcacccaggctggagtgcagtggtgcaatcttggctaactgmagcctccacttcacaggcacaaacaattctactgcctcagcctcctgagtagctgggattacaggaatccaccaccacacccggccaaggtgagaaatcctaaaagtacccagagaagaaaagagatgttacactcagagaaacaataagaattgtggctgacttctcattaataaagaaatggacagtagaaaacaattaaataacttcaaagtattgaaaaaaaatatgtcaacctagaattc

SEQ ID NO: 208728 - DNA, 548 bp, Homo sapiens
agatctgttcttttgtttcccctatyccatcacttcctttgatgacagcatcttgattttcttcagcaagccacatcgttcctcttcacttccagaccatgtggttttgggggtgctgatgccaactccaggctctagttaatcctggtctggaccattggcatatcccagacctctggcttcggtgattggtttaaggatggtcacatgacccaaggtgttcaggggagagttgaccacaggatgttagttgaaccattgagaaaacaatgagcttcctttcctaccaggctgctaaactgccataaggtgagcttggggaagtgaaaaacttctcgccaccatgtcgggaacctgtcctagagggaagtccacatcttgaaaaccagagctgagacataaagacgaggtccgtacaacagcatttgatttgggtatctgggacttttcaaataatgtgaggcaacatattccttttttagttggctggtttgttatagcaatttttaatgggatttctgtcccttgtaaccagaataatcgtgatc

SEQ ID NO: 208729 - DNA, 528 bp, Homo sapiens
catcacttcctttgatgacagcatcttgattttcttcagcaagccacatcgttcctcttcacttccagaccatgtggttttgggggtgctgatgccaactccaggctctagttaatcctggtctggaccattggcatatcccagacctctggcttcggtgattggtttaaggatggtcacatgacccaaggtgttcmggggagagttgaccacaggatgttagttgaaccattgagaaaacaatgagcttcctttcctaccaggctgctaaactgccataaggtgagcttggggaagtgaaaaacttctcgccaccatgtcgggaacctgtcctagagggaagtccacatcttgaaaaccagagctgagacataaagacgaggtccgtacaacagcatttgatttgggtatctgggacttttcaaataatgtgaggcaacatattccttttttagttggctggtttgttatagcaatttttaatgggatttctgtcccttgtaaccagaataatcgtgatcaacatca

SEQ ID NO: 208730 - DNA, 558 bp, Homo sapiens
cttataagccccccacttctcacctttgagatatcccacctttccaggcagaaccaatgtacactgtacatgtactgatttatgtctttgtctgtaacttctttctccctaaaatctataaaaccaagccataacccgaccacctcagacagcctctgtcaggaccccttgagactgttctctgagtcatggccactcatattgstgcagaataaacctcttcagctgttttacagagtttggttttgccagtaacactcacgctttgcactttgtccacctcgtccttggggtatcctcactctaaaccacagtgtttagtatatggttggcacttgatacatattgctgaataaatgatcaggccctttaagaactggttaagaacaaaacaaaagcaagactgccctttctatggaaaaataaatacttagatgtccagacatgtttatactcaacttcctgaatttcccaaaaggaaatgcggggaggggatgagatgaggtctgctctagttaacttgcttggaagcagcaattttgatcatggaactattaa

SEQ ID NO: 208731 - DNA, 558 bp, Homo sapiens
cttataagccccccacttctcacctttgagatatcccacctttccaggcagaaccaatgtacactgtacatgtactgatttatgtctttgtctgtaacttctttctccctaaaatctataaaaccaagccataacccgaccacctcagacagcctctgtcaggaccccttgagactgttctctgagtcatggccactcatattggtgcagaataaacctcttcagctgttttacagagtttggttttgccagtaacactcacgctttgcactttgtccacctcgtccttggggtatcctcactctaaaccacagtgtttagtatatggttggcacttgatacatattgctraataaatgatcaggccctttaagaactggttaagaacaaaacaaaagcaagactgccctttctatggaaaaataaatacttagatgtccagacatgtttatactcaacttcctgaatttcccaaaaggaaatgcggggaggggatgagatgaggtctgctctagttaacttgcttggaagcagcaattttgatcatggaactattaa

SEQ ID NO: 208732 - DNA, 637 bp, Homo sapiens
gaggcggctgtcctgtgtggctgctctggaaatgtgggttataccatccttgaagagaatccctgtgggtgaattataagaggttgaagacacatattgtccagagtttaaagtcacaaaaaaataaagcattttcttcgtggtaagacttatcggtagggctagaaaggacrtaattacatagaatataaattatgttttcattgcatgtatataaatggtgatgttatatatctaggtaaaaatcctgaaacatagaagtgaattaaagaagtgttttaaataacagataaatgtgcattttcctcaataataactcatttattcagttttatacttttacattgttttatgcttttatttgattctcatcataagtctatgaggtggacaaggagatattgtttgctcatttagctgatgacaaattacatgcatatttaatcaagatagaaaaatcttgattctcccttggcaaagctgaactaaggatagattaaatacatgctgcactgccccaaagaccagataaaaccctgcagctgtcattacccagacaagggaggcaaagccaggatgattctgccctggattttgtgaactgtgtcaatccattccctttgctttgggagtggta

SEQ ID NO: 208733 - DNA, 448 bp, Homo sapiens
gaattcacatgaatatttacatgtggcattggaatgaactagtgaggaaggtgttggttaatctatgtggaatccatatgaattttgtagatcattaaaataatagtggaaataacagwgggccttaaaccttgaagagatagtgcatccttttcacaaactctgttaaaagcaccgtctgtcccttttagtacggcaagcgattgcagaaaacagtagggaaacacaaggtaaatcagttttctttgttgttcgagattattttctgaaagtgtttaagctggtttcctttaataaagaaaatctcatgctaaaaaatgtaagcatttggcatgtctttcacagagggcttggaaaacaagtcccctctatatcatacacctggagtgtttaatcccaaatttgttaatgtatagacttgatgatttaaatgataaaactgcagacc

SEQ ID NO: 208734 - DNA, 557 bp, Homo sapiens
atttaggaagtaacaagtcatcatcttctgcaaagtgagagggaaattttcagaaagcattaaacagtgactttcktctcatcacaacttagggccattgccagatgtttgtgcctggccacagttcacgtggggaggagacaattctggctgactagccactgtgggaggcattcatcctgtagatgttctggagggtgacagatcttcagtttcagcatcacacataaccggctagaggcaaatttgtaaggagacattcactgcttgagatgtgacttactatctgtagacagagaaaccagatttttctatagctgtaataaatgccctttatcaagaaagtggctagcccattataaactcattggaagagacaaagaatttttaaaaagagaaacatgaagaaaaaaatatataggtcagaaatatagggtcagaaatatcatcccagatactgtgttcaccagttcccagagacgggggattttggtcaatgccagaaacaaattcatgtaacttgtagcttggttgtgtgtgtttacacaagtgcaaga

SEQ ID NO: 208735 - DNA, 557 bp, Homo sapiens
atttaggaagtaacaagtcatcatcttctgcaaagtgagagggaaattttcagaaagcattaaacagtgactttcttctcaycacaacttagggccattgccagatgtttgtgcctggccacagttcacgtggggaggagacaattctggctgactagccactgtgggaggcattcatcctgtagatgttctggagggtgacagatcttcagtttcagcatcacacataaccggctagaggcaaatttgtaaggagacattcactgcttgagatgtgacttactatctgtagacagagaaaccagatttttctatagctgtaataaatgccctttatcaagaaagtggctagcccattataaactcattggaagagacaaagaatttttaaaaagagaaacatgaagaaaaaaatatataggtcagaaatatagggtcagaaatatcatcccagatactgtgttcaccagttcccagagacgggggattttggtcaatgccagaaacaaattcatgtaacttgtagcttggttgtgtgtgtttacacaagtgcaaga

SEQ ID NO: 208736 - DNA, 557 bp, Homo sapiens
atttaggaagtaacaagtcatcatcttctgcaaagtgagagggaaattttcagaaagcattaaacagtgactttcttctcatcacaacttagggccattgmcagatgtttgtgcctggccacagttcacgtggggaggagacaattctggctgactagccactgtgggaggcattcatcctgtagatgttctggagggtgacagatcttcagtttcagcatcacacataaccggctagaggcaaatttgtaaggagacattcactgcttgagatgtgacttactatctgtagacagagaaaccagatttttctatagctgtaataaatgccctttatcaagaaagtggctagcccattataaactcattggaagagacaaagaatttttaaaaagagaaacatgaagaaaaaaatatataggtcagaaatatagggtcagaaatatcatcccagatactgtgttcaccagttcccagagacgggggattttggtcaatgccagaaacaaattcatgtaacttgtagcttggttgtgtgtgtttacacaagtgcaaga

SEQ ID NO: 208737 - DNA, 557 bp, Homo sapiens
atttaggaagtaacaagtcatcatcttctgcaaagtgagagggaaattttcagaaagcattaaacagtgactttcttctcatcacaacttagggccattgccagatgtttgtgcctggccacagttcacgtggggaggagacaattctggcygactagccactgtgggaggcattcatcctgtagatgttctggagggtgacagatcttcagtttcagcatcacacataaccggctagaggcaaatttgtaaggagacattcactgcttgagatgtgacttactatctgtagacagagaaaccagatttttctatagctgtaataaatgccctttatcaagaaagtggctagcccattataaactcattggaagagacaaagaatttttaaaaagagaaacatgaagaaaaaaatatataggtcagaaatatagggtcagaaatatcatcccagatactgtgttcaccagttcccagagacgggggattttggtcaatgccagaaacaaattcatgtaacttgtagcttggttgtgtgtgtttacacaagtgcaaga

SEQ ID NO: 208738 - DNA, 403 bp, Homo sapiens
gaattcagtgatggcatacaaccaaaaattcagtctttacaatattcctgtaaagtcagaaaaaaaaaaaacagctaaataacaagaacaaaacagcaacaaacacaaacctgagggaagggcatctgagctccagagctgtcactattatcttatttgtctagtttgtaccaaacaaatataagccatgagagaaaaacacatacaaaaaacccaggaaggtatagcacatagaatgttgtgcttttgtaaatataacaacagaactttatctaaattgactgagaaaaatcaaattagtaaaatcagtaatgaaggacatttctaatgaccttattaaatgtatacatatatyaaaacatcacattgtaccgcataaatatgtaaaattattgtttgtcac

SEQ ID NO: 208739 - DNA, 572 bp, Homo sapiens
aatatataagaagagtgcctatgatttcctaataaaaatatggcatatgttttaataataatattcaatgttttagatatcttagaaaactttcaaagcaaacttgccatagctaagtgggttaaaacagtaattacaacttaaattctttagttacatttcaaaatgcctacaaacagcaaataagataatgttggataatattctgcaaaaacaagtttcatccccacttccatgtctttattaaattgctttatatcccactttgcttaggttactgctgctgttcagaatcccttcctgaagacagggaacacgttagctggcataccaatgtgaataataagaaaaaattcttgatacatacatctgtgcaaacattctccccagctacctgaattcaatgacatcaatcataaggggcttcactgagtaaacatacatttagattttaaaatatatataagtatatggtatacctcacyagtgccattgactataattgtaaaatataattaaatttattcattgagtgttttgtatcaggagagtcactaaaaatatctttaaac

SEQ ID NO: 208740 - DNA, 570 bp, Homo sapiens
ccacttgccccactcctgagatcttattgggaagctgctgattaccagtttcaagttttttctatctattgggagactgcctttccctggtactggctgcaagcaattgttttagactatcacctgatgatcacctgacattcttggctgggcgggaggagccctctctgtcctgcttatgtctgcctgactacctactgtaacactaccaacaaccatatgagcatggaaacggattcttcatcagttgagttttcagatgagaattcaactctgactaccatcttgatttcagtcttgaacaggacctggctagtctgtgcccagatttattacctgcataaaatataaggtgataaatgtgtgttgttttaaactgctaartttgtgctaagcattatttggcaatagataactaatatatacgacattaatattttgtattaaatatagttaatacctgcttaattagccctacatatggtgtttgttgtctccttttaagaagtattaaatctatgcatcttaaaaagacacaaatagtatagattaaaatttaaatacccaaca

SEQ ID NO: 208741 - DNA, 555 bp, Homo sapiens
tccatatcttggctatttgtaatactgctacaataaatatgagagtgcagatatctttgcaaaatactgatttcatttcctttgtatatatacccagtamtggattgccaggtaaaatggtagatattttttttttttaactttctgaggaacctccatactattctcataatgactatgctaatttacagtctcaccaatagtgcataagagttatcctttctccaccttcttaccagcaatttttttttctttttgataatagctgttttaattgtcatgaagtggcatctaattgaagctttgatttgcatttccctaatagttatgttacgcatttaaaaaaatatatctgttttttctatgccttttattgagaaatgtctatgcaggtcttttgcctactttttaatgaaattatttcaatttttctactattgagatttttaatatattttgtatattagccctctgtcagatgcatactttgcaaatattttctcccattttgtaggttgtctctactcactttgaagttttttagtttgagataat

SEQ ID NO: 208742 - DNA, 633 bp, Homo sapiens
tttctcttttaattctatcagtwggttttcactttacaaaaggctccattgtttggtgtataaaagtttataattagtttttcttgctgaaaaaaatcaaatcatttatcaatatatgattccttttatttttaatattgctttttacttaaagtttagctttctatactcatgaagcaataaattccttcttttggatagaatttatgtgatatatgtttttttttaaattgccgcatgacaacttctgtttgtagcattggggttttagcatatttctatttttaatgataactgatacatttggatttattctaccatcttcctttgggctttatgcaagattttctaaatcccctggtgtatggttctaggctttgtcttttgttctccatatccttacttgtcatataaatgcaaagcttggcgcttacttacccaggctacctgaaattgctgatataaaaaaaagccatcaaaagtcatcagacgagtagcgtatttcatcttaccccagatttacttgtcaaagtctaagttcctataaagcccaatgctgctattaaatgatccaggttagaatgtataactggcttagggtgctgagaacttgggcatgtttataaaatgatt

SEQ ID NO: 208743 - DNA, 591 bp, Homo sapiens
ttgaaacatttgtacgttttcatgagttatatcatacattcgtatagaggtatgaaacaactgcagacacataagaaactgggtatcaaaggtgaatccaaagttttttatggccatcaaacatttcttagaataggaagaataaaagcagtattatcatgcactaaatgaaagcacagagtttaaagatttattactgaagatttacaattgaaaggcagatgtgcttatgcaaaaatcaaataaaatgattggataatccaaaaagcaaaacactactttggcaaagctgaaaaattaaacattgactcataaaaatcagatastgagggaatagttttgtacctcttgcctctttcaaatgatgcaagaaaatctttcaggaatctaacagtaaattcgacatcattggtgaaaataatatttggaaattattatgtattttaatttgaatatgcccttcttttcctgtgaaagacataaaacagtaaatagctgctgatttatttaattatagagtagctcagtaaaactatgtgaatattgctcttaagatgtttaaaaataaatatttttcttgctttaaaaaat

SEQ ID NO: 208744 - DNA, 662 bp, Homo sapiens
atacataataatttttaacagatagttgacttctcagaattgtgaggcgggcttagtagtgtctgtaaacggtcgcctttatgtcttgtcagagatgttggaaccagagcaattccatcttgaatagatgctaggtaaaataaggctgagacctactgtgctgcgttcccaggaggttaggtattcttagttacaggatgagataggaggttggcacaagatacaggtcataaagaccttgctgatgaaacagtttgcagtaaagaagctggccgaaacccaccaaaaccaagatggtgatgaaagtgacctctggtcrtcctcactgctcattatactctaattataattcatttgcttaccaaaaggcactcccaccagtgccatgacagtttacaaatgccatggcaatatcaggaagttatcctatatagtctaaaaactggagagaccctcaattccggggtaaaagggtaaagattttacccctttcctgggaaagctcatcaataattcatccctcgtctagcatataatcaataaataactacaattataccaatccagcagcccataccactgctctgactatggagtagccattcttttatgcctttactttcttaataaacttgctttcactttgcactgtgaaatcgccc

SEQ ID NO: 208745 - DNA, 593 bp, Homo sapiens
ccttccttaatcaaagcagcccattgccatcaacctgcccccatgtagcttgcggatacccttggggaatagtgacatatcactgtgatcacattggatgactgatggggcactaattagtggctatggtcatattggcctcagtaagtggaaatacatgtatataacctccatcgtaccaccatgactactttattcatcaactgattacatgagacctgaggctgactgrcattcaccaaaggaatcattttctttcttgattgttataatccttctatagtgaagtcactctggtgagcatccacacacaaatatctccaaagattttgcccatttgaccatccagcaaatgcacccatcagactgcattagctgcagtctgagttgctatacacccatccttttggtcatttctcctttcaaactaaatggacagccaggtatgaaccctgaatttgtgtccactggaagaattttctttccttgctccccttcagggccttctcagaggagggctgtagtgcagcagtcatacctcttggaccagttcctgaattttccttcctcaggaaactgagcatagggatctc

SEQ ID NO: 208746 - DNA, 618 bp, Homo sapiens
tgggcagtgattagcatgatatatttgtggcagtgtggcaagatccttcctcaagaggacccagctttccttccattcaaggggatctgagtatgtaaggtggctcaagtttgggaaatgattaagaggctgtggctctgttttcataaatcaatttcactggacttagagcttttctgcttacaaaatsaagacttcagtaccacctacagttgattcttgttattcacagtagttatgttctataaagtcatcatgaatattgaattagcaaatactggcccattgctcttaggagaaatatagcattaggttcctgcaaacctctggtcacaactttttatcaattgatcaatacataaccttattttatgtgcgtttctgtttaaagatacttggcctattggccaagagcattacaactcattcctgagcagagctgatctaatatatgtattttttctgtaaggcacagcacagccttcgtgcactaaagaacactacacagcactttagtactatgatgggggccatttaaacagcaaaagcaatcattaacaaaaagcacaaaaatgcagaaaatgtgccgccacatagaccatgaaaagatcacttgtt

SEQ ID NO: 208747 - DNA, 438 bp, Homo sapiens
ttcgttcctatccagaatctaaattctttatctgtcatttcagcctggttaagacccattgctagggaaccagtgtggtcatttggaggtaagaagacactctgggttgagtaagaagacacttttgatttgtcagagttcttgcattttttctttctcacctgtgcgggctgacattcctttaatctttgaagctgctgtcctttggatagggcttttgcttytatattctttgatgcccttgagggtttgtctgtggtataaggtctattcagtgattggcttcatttctgaaaattttcagagtggcaaggatcagcccagcactcctgggattcatgctctaatcctggggagctggtacaagacccagggctttgttccctgacccctgtcaatgcagacctatctgtctggcctggtttcagcctaggagta

SEQ ID NO: 208748 - DNA, 535 bp, Homo sapiens
aaagcttcctggtctaggtcaccagcatctgttgcctgggcatttggaatagacttataactttatctatctgcctccagtcttgctccattacaatccatcctctgttcttcaagccaaacaatcttactaaaacacaaatctgacactttaccattttatttaaaatgtcttgatgatatcccatttccattagaataattaattgcccacccttatcacagccccacatgaatttttcccatacagttttccatcctcgaataatagtatgctcaccatcacttctcaggctctgagaatctrttttcagtttctccattagattattgtctcttaccatcatacctgcagactttctacattgtcacactgaaattcatccccatgagttcctagatagcacctaacattcacttatcagtttaagcattatataatcaaagggacctaatctggcttattgaattaactcatgtcatctgattggaatcccataaatcttgtatgttccctatattaacacgcactcctg

SEQ ID NO: 208749 - DNA, 546 bp, Homo sapiens
taaaaattagatgttcaaacacaaagttttcctttggtgctaagtctcccttgctgtgacttaatttcatcccagttaaaaaaaatttacataagtgacaaaaacaaatacttgccttagtggttctgtttgtatcaaattaaatcccaatagctcattactctacttatatagaattatcctgttagaattatcctgctttgctcatctctccctacaaattctcattatgttgaagttatagatttaaagataaatgccacctgtaaaacatccattgttttcaagttatagatttaaagatgtttcatttcaaaatattattgtgtccaaatatctcatgttttcttgtgtgtcttttatgtcattcagtagctctataattttctttatttaactctsccgcatatccattattaactgcattcctgagtatttctttcccttccttctgttctcccctttctctctcctatgacctcaaagactgtcaattttcacttgtcccattcctttgttcagtcattaattcgtacagggctgaat

SEQ ID NO: 208750 - DNA, 625 bp, Homo sapiens
  misc_feature (1)...(625): n = A,T,C or G
atgggtaccctggctaaggaacacactccaaactcttggtattatcctcctgatagtcataacagtagtctctctggtgcaccgtattctctcaaaagttttaaatgtttgcatgcagctgtctctagaatatcaaatgatcaaatagtctctcctcaactggaatgacatgagctgaaagaaatgtgtgaccatgacggcaccataaccaatgaatgatgtactgagaccagaaacccaaaatgatggtaactgagactaaggccctaagttttggtcataccctcacctaactgagaacctgactaaaaggggaaaaatttaaaacaaacatgggtgcccattgttttggactgagcttatgtactaggcctctgtagaccagaccaaaccaaaacagaatcagttatgctaaatgtgacataatcaaactaaaactttacagaaatacacagatactagaacagggttgttttttctctgataaacaggacattccagcatagggaggtaccctctactttaatccttacaaaaaaatatcctgaagtcnttgttcccaccttacmaaacccactgttctgctatttgtcagtggctttcaaaaccaaataagtacatttaa

SEQ ID NO: 208751 - DNA, 603 bp, Homo sapiens
aggggagggaaggggagattaccaaggggttggaggatacttttgagagtaatagatatgttcactaccttgattgagatcktaagtgtatacatatgtcaaaacttatagaatgtatgctttaaatatatgcagttgattatatgccaattagtctcaaagatgttaaaaaattcactactctattctatttgatggcttatcaaagcttcaactgatttcagtattttaaaattgtaaaacttcctcagtggtgatgtaatttgggatattaaatttgcaatattaaaatttagtgttttgtctttcctttttctataaattattattattaactgtcttttaaattttgatatttctaataatcttcaaataagttttcgatatttctgtttatacatgttatataattgagttattgtaccataattactttcctaaaaccattccttgggatatctttgttctaatattttactttataatcccttcttttgatctaagtaatataatcaagcatttttcaattgtttttataacctgccttcattattctttgataaaactaatgttcatagaatttaaatcataaatacaattaaa

SEQ ID NO: 208752 - DNA, 603 bp, Homo sapiens
aggggagggaaggggagattaccaaggggttggaggatacttttgagagtaatagatatgttcactaccttgattgagatcgtaagtgtatacatatgtcaaaacttatagaatgtatgctttaaatatatgcagttgattataygccaattagtctcaaagatgttaaaaaattcactactctattctatttgatggcttatcaaagcttcaactgatttcagtattttaaaattgtaaaacttcctcagtggtgatgtaatttgggatattaaatttgcaatattaaaatttagtgttttgtctttcctttttctataaattattattattaactgtcttttaaattttgatatttctaataatcttcaaataagttttcgatatttctgtttatacatgttatataattgagttattgtaccataattactttcctaaaaccattccttgggatatctttgttctaatattttactttataatcccttcttttgatctaagtaatataatcaagcatttttcaattgtttttataacctgccttcattattctttgataaaactaatgttcatagaatttaaatcataaatacaattaaa

SEQ ID NO: 208753 - DNA, 525 bp, Homo sapiens
acacccctccccgcttttgtgtattattcatccaccttgaggaatcttttattgttttaattacactaaatgagatgagctcccacaagattcagttttggtaaagaggtaaggggctggtatatacttgcctcagttctctgttgtctggatggcaagactggtgagaagattgattggttgmattttttcccggacccatagctagagagtttaggttgacatattcaactgtcgctctaataatactcaattatttctggaaaatacactcctttgaaatcttttcctccctcttaatcactctgaaaagacactatgacaaaaaaacagtcaaaatcttcagttctccaaactcagggtcgttagggttcttttctcaaaattatcacacttgactttttgggactatttatcccaaaaagcagggtaatattatcagcacttctccatcacccatcctctccagcacccattttctcatcctgcccagtttgttctaggtttgttggctttgaagactag

SEQ ID NO: 208754 - DNA, 577 bp, Homo sapiens
tagttcagtaacattgagtacattctcagygttgtacaatgatcacatctgtctagttgcaaaacattttcatcacacccaagggcaacctcgtgccaattatgcagtcaccttctagtcccaactagcctgatttctctagcatttatgtatttgggaaattctaaataggtggaatcaaataatacatgtccttttgtggtgagcttctttcactcagcataacgtgttgaaggttcatccatgttgcagcccatgtcatcacatcattccttttttatggctgaataatatttcattagatagatataccatattttatttatactttaatatattggggtacatttgggttgtttccacctttggctattttgactagtgctgctgtatacattgcgtcatgcatttgaatacttgttcttagttttttgggctatatatctagaagtagaattgaccattcatatggtaattttccgttcaaagtttaaggactcaccaaactgttatccccagtggtttcactatttaaaattcccaccaccagaataggcttcaaatctccacatcctca

SEQ ID NO: 208755 - DNA, 577 bp, Homo sapiens
tagttcagtaacattgagtacattctcagcgttgtacaatgatcacatctgtctagttgcaaaacattttcatcacacccaagggcaacctcgtgccaattatgcagtcaccttctagtcccaactagcctgatttctctagcatttatgtatttgggaaattctaaataggtggaatcaaataatacatgtccttttgtggtgagcttctttcactcagcataacgtgttgaaggttcatccatgttgcagcccatgtcatcacatcattccttttttatggctgaataatatttcattagatagatataccatattttatttatactttaatatattggggtacatttgggttgtttccacctttggctattttgamtagtgctgctgtatacattgcgtcatgcatttgaatacttgttcttagttttttgggctatatatctagaagtagaattgaccattcatatggtaattttccgttcaaagtttaaggactcaccaaactgttatccccagtggtttcactatttaaaattcccaccaccagaataggcttcaaatctccacatcctca

SEQ ID NO: 208756 - DNA, 584 bp, Homo sapiens
cctcactcttgtatatttatttaatgaaagaaaaatgtactaaattctgaggagagttttaataattttaagttgcttttttgttctttctcccaagaaaacatgtaactaataaaaatttcctcctttctaatttttgtaacccatgttttatcttctgattcctttagataaagctttcaaatttgaaacaggaataaattatagttgtgagattagacatctttgttttaaaactcattataatggcaatkacactcacaactgttgtacatgtttgctaaagtacatatatgctttataatgatagaaaattatcctatttttgtttctatagttgcttcataagtgaagccttaattcaatcaaataacttgttagcacatataaaagattactatataggtaaccatctaaaattttgggatagaagagaaatggaaatcttgtctgaagccaatatcacagactaaaaaggatgcttagagactcttataaataactgtatgataacaaattgaaaaaaacctagataaaacataaattccaggacaaatgaaacctacccagattgaaccaggata

SEQ ID NO: 208757 - DNA, 584 bp, Homo sapiens
cctcactcttgtatatttatttaatgaaagaaaaatgtactaaattctgaggagagttttaataattttaagttgcttttttgttctttctcccaagaaaacatgtaactaataaaaatttcctcctttctaatttttgtaacccatgttttatcttctgattcctttagataaagctttcaaatttgaaacaggaataaattatagttgtgagattagacatctttgttttaaaactcattataatggcaatgacactcacaactgttgtacatgtttgctaaagtacatatatgctttataatgatagaaaattatcctatttttgtttctatagttgcttcataagtgaagccttaattcaatcaaataacttgttagcacatataaaagattactatataggtaaccatctaaaattttgggatagaagagaaatggaaatcttgtctgaagccaatatcacagactaaaaaggatgcttagagactcttataaataactgtatgataacaaattgaaaaaaacctagataaaacataaattmcaggacaaatgaaacctacccagattgaaccaggata

SEQ ID NO: 208758 - DNA, 335 bp, Homo sapiens
actattgatggaaatgtaaatcagtatagctactattgaaaacagcatggaggtttctcaaaactaaaaatagaactactatatgatctaacattcttactactggctatttatccaaaggataggaaatcagtatgtcaaaagaatagctacactcccatgtttatcacaacaytgttcactatagcctagatatggaattaatgtaagtgtccattgactgatagatgcataaggaaaatgtagtatatacacacaatggaataccattcagtcataaaaaataaaattatgtcatttgtaggaacatggaaggaactagatatcattatgct

SEQ ID NO: 208759 - DNA, 577 bp, Homo sapiens
tttgctagttgttttccttcaagagccttattaacttctcatagtaaagatacaagcaaaaactctgatagttgctgtaaaccaaataattatctaagtctcaatcaatttacagatttattgtgccaaggttgagaatattgacccatgacacagcctcaagakgtcccgagatcatatgctcaaggtgattggttttgtgctttagggcaacataagacatcaatcaatacatgtaaggtttacactggttcagtctggaaaaggaggatacctcaaagcaggagcttacatcttttaggtggattcaaagatttctgattgtcaattggttgaaagagttaagttatataaaagtctggaataaatagaaataaacttctgggttaagataagggattgtgaagaccaaggctcttaattatgtagatgaagtctgataagtggccacccttagaggcaataggtagcaaatgtttccttttcagacctttaaaaggtgatagactctaagctaatcccttcaatcagaaaaagttctggaaaggaaagaggattctctatacaatgtaaattt

SEQ ID NO: 208760 - DNA, 582 bp, Homo sapiens
agttttaaagatactactaatgctctatttccagtagtaaagagaacacttatagtacatggcatggtctggcaatagagttattcaaaacattgccattagatcctcctaatcaaatacataagagaagcaaagatctgagtgaccatgtatatgatactttcaaacatttctgtcaaactaatgagtataataagactgactggctgcttctaacatccctggacaaagtggggaataaaataatgagcttaaggatttgaatttctagctcagcaccatgtaaatgacctgaaggcatctatttctaccccaaatgagacttttatctccgatagtggcagagaagagactgctaaaaaccaaagctagaatttcattcggcagatgattgacttataaaacatactgagttcccatactgacaaggtgtctaccattaagktgggtcattgataacggcatcctgaaagattgaattgggaactatcaaaagaccctaatgaagctgggacactgagcctcaaaattctaatgagttttctttgccagtagaagcagcttctccacctatatttgaga

SEQ ID NO: 208761 - DNA, 579 bp, Homo sapiens
gctgtactcgatctacactgcagttaaaggaacatgcacacacagaaagcagaaagaaccaatgcaagaaccctagtaactcaaatggccagtgtcaaaaatccaccgaatgatggcaccagttctccaacaagagttcttaaccaggctgaactggctaaaatgacagaaatagaattcagaatatgaataagagtgaagatcattgagattcaggaggatggaaaaacacaatccaagcaaaataaaaatcacaatatagcaatatgggagctgaggatgaaatagccagtgtaaaaaagggtctgacagagctgaaaaacacaatacaagaattttgcaatgcaatyacaagtactgacagcaggatagaccacgccacacataggaaagaatctcagaaagtgaagactggtataaatgaaataagtcagtcagacaaaaataaagaaaaaagaataaaaaggaatgagcaaacctctgagaagtatgggattatatgaagaggcaatgtctacgaatctttggcatccctgaaagggaggggaagaaagtgaacaatgtggaaaacatatttca

SEQ ID NO: 208762 - DNA, 590 bp, Homo sapiens
actcaggaaactgaggcagtaggattgcttgagcccaggagttccaggctgcagtgggctatgattgcaccacttcattccrgcttgagtgacagagcaagaccatgttccctgaaaaaaaaaaatagtaacaaaaaaactgtaaagaatttataaataactaccaattgtcagtgactgagggaaaaaaagaatatggactaatagtcttgagctaggagactaagtggatagaaaagacatgcatctgagggcagtttgagaagcatgtcaatgccatcctagccctttcgattattgacccatagagagagaggttccaatgcaggtgaggtgatacatagattaatatccacacaaatgctatatcttacacaatatcacactttgctaacgctgcacataatcaagaggtacccataggcagcaagatgtttggaccaccgtatgtgactctggatttttctttcctgtaagagtcttctactttctgactgagtgtacattgtgttgctaaagaggtatgcaggttaattcataccccagttaggatgaatttaggttatgaaaatccccatttcatacctcag

SEQ ID NO: 208763 - DNA, 590 bp, Homo sapiens
actcaggaaactgaggcagtaggattgcttgagcccaggagttccaggctgcagtgggctatgattgcaccacttcattccggcttgagtgacagagcaagaccatgttccctgaaaaaaaaaaatagtaacaaaaaaactgtaaagaatttataaataactaccaattgtcartgactgagggaaaaaaagaatatggactaatagtcttgagctaggagactaagtggatagaaaagacatgcatctgagggcagtttgagaagcatgtcaatgccatcctagccctttcgattattgacccatagagagagaggttccaatgcaggtgaggtgatacatagattaatatccacacaaatgctatatcttacacaatatcacactttgctaacgctgcacataatcaagaggtacccataggcagcaagatgtttggaccaccgtatgtgactctggatttttctttcctgtaagagtcttctactttctgactgagtgtacattgtgttgctaaagaggtatgcaggttaattcataccccagttaggatgaatttaggttatgaaaatccccatttcatacctcag

SEQ ID NO: 208764 - DNA, 556 bp, Homo sapiens
ttgagcccaggagttccaggctgcagtgggctatgattgcaccacttcattccggcttgagtgacagagcaagaccatgttccctgaaaaaaaaaaatagtaacaaaaaaactgtaaagaatttataaataactaccaattgtcagtgactgagggaaaaaaagaatatggactaatagtcttgagctaggagactaagtggatagaaaagacatgcatctgagggcagtttgagaagcatgtcaatgccatcctagccctttcgattattgacccatagagagagaggttccaatgcaggtgaggtgatacatagattaatatccacacaaatgctatatcttacacaatatcacactttgctaacgctgcacataatcaagaggtacccataggcagcaagatgtttggaccaccstatgtgactctggatttttctttcctgtaagagtcttctactttctgactgagtgtacattgtgttgctaaagaggtatgcaggttaattcataccccagttaggatgaatttaggttatgaaaatccccatttcata

SEQ ID NO: 208765 - DNA, 506 bp, Homo sapiens
attctacactgtatttacttatatattgaatgatttatttatttttatttcttaatacaggacaggtttccatgggagtggaatcaytgggggaatgatatgtgtacaggtataattggaatagatgtactatatgtaacaacctgcatttttgccagcaatgtgtgaggatactgtttcctaaattcctactaacatattatcacatttttcctttgcctgcttaatggttatgaaataatatctccttgttattttagtttttatgaccctgtctaattagtgagtttgaacagttcttcttgtagttgttaaattttggggtcattaattgcttattactgtccttgatctcttttccttgagttgtctggctttctgttactatgtttttaggttctttcatatactatagagaactatactgatttttcagttcattctaaacctattaatccattagatcctattcttaattataatgtttataatcatggaaagtatta

SEQ ID NO: 208766 - DNA, 506 bp, Homo sapiens
attctacactgtatttacttatatattgaatgatttatttatttttatttcttaatacaggacaggtttccatgggagtggaatcactgggggaatgatatgtgtacaggtataattggaatagatgtactatatgtaacaacctgcatttttgccagcaatgtgtgaggatactgtttcctaaattcctactaacatattatcacatttttcctttgcctgcttaatggttrtgaaataatatctccttgttattttagtttttatgaccctgtctaattagtgagtttgaacagttcttcttgtagttgttaaattttggggtcattaattgcttattactgtccttgatctcttttccttgagttgtctggctttctgttactatgtttttaggttctttcatatactatagagaactatactgatttttcagttcattctaaacctattaatccattagatcctattcttaattataatgtttataatcatggaaagtatta

SEQ ID NO: 208767 - DNA, 554 bp, Homo sapiens
tgattgtttcctgtgcagaaaatttttagtttcatataaatccacttatttattgttgcttttgttgtcaatcttttaaaaaaacacttcaacttttattttagatacagggtatagaatgtgcagatttgtcatatggaaattgcaatacagatcccatcacctaggtagtgagcacagtacctgatagctgtttttttcattttmattttaatttttttcccatcacccctacctccattattttagtccacagtatctatgtctattgtttccatatttatgtccaccggtgctcaatatttagctctctaccccagtaattgagaacatgtagtatttaatttcctgtacctgcattactttgcttagggttacagcctccagctccatccatatttctgcaaaggccacaattttattattttttatggctgtgtagtatttcatgatgtatgaaccacattttttatccaatctactattgggcatctgggtgattccatgtctttgccgttatgaagagcataacaatgaacatacaagtgcatgtg

SEQ ID NO: 208768 - DNA, 554 bp, Homo sapiens
tgattgtttcctgtgcagaaaatttttagtttcatataaatccacttatttattgttgcttttgttgtcaatcttttaaaaaaacacttcaacttttattttagatacagggtatagaatgtgcagatttgtcatatggaaattgcaatacagatcccatcacctaggtagtgagcacagtacctgatagctgtttttttcattttcattttaatttttttcccatcacccctacctccattattttagtccacagtatctatgtctattgtttccatatttatgtccaccggtgctcaatatttagctctctaccccagtaattgagaacatgtagtatttaatttcctgtacctgcattactttgcttagggttacagcctccagctccatccatatttctgcaaaggccacaattttattatwttttatggctgtgtagtatttcatgatgtatgaaccacattttttatccaatctactattgggcatctgggtgattccatgtctttgccgttatgaagagcataacaatgaacatacaagtgcatgtg

SEQ ID NO: 208769 - DNA, 500 bp, Homo sapiens
  misc_feature (1)...(500): n = A,T,C or G
ggacatgggaagctgtaagagagaaactcccaggcaccacactataaaaggggcttttacartcttggctataggagaaaccctccnacccactagggcctcgggccttacaaatggagctgcctaaagattgcacagaactgttgctccagaaaggaacccataccaaatcccacaggcatcttactctggattaaccttagctgctagccttagctatacattttcagagtgtacctaccagggatctatagacacaactaccgccactgcactgctccaaagagggagagggtccctgagagggtccttaccaccctgctgttgagtctgaaatgtgagcatttcccacagcttcctgcccaggttgctttcctgggaggggtctaatatggtttggctctgtagacccacccaaatctcatcttaaattgtaatccccacatgttgagggagagacctggtgggaggtgactggatcatgggagcagtttccctca

SEQ ID NO: 208770 - DNA, 500 bp, Homo sapiens
  misc_feature (1)...(500): n = A,T,C or G
ggacatgggaagctgtaagagagaaactcccaggcaccacactataaaaggggcttttacagtcttggctataggagaaaccctccnacccactagggcctcgggccttwcaaatggagctgcctaaagattgcacagaactgttgctccagaaaggaacccataccaaatcccacaggcatcttactctggattaaccttagctgctagccttagctatacattttcagagtgtacctaccagggatctatagacacaactaccgccactgcactgctccaaagagggagagggtccctgagagggtccttaccaccctgctgttgagtctgaaatgtgagcatttcccacagcttcctgcccaggttgctttcctgggaggggtctaatatggtttggctctgtagacccacccaaatctcatcttaaattgtaatccccacatgttgagggagagacctggtgggaggtgactggatcatgggagcagtttccctca

SEQ ID NO: 208771 - DNA, 566 bp, Homo sapiens
gaactaaattatataaagaccaaaacacaaatgcaagagattaaggacccacaactaggttctttcaaaggataaacaaagttaatataccaccagatagactaaccgacaaaagagagaagagtcaaataaacacaatcagaaatgaaaaaggagacattgcaagtgataacacacaaagacaaaagattattagagactattataaacaactatacactcataaactagaaattaaggaaattggttaaattcccagaaatgtacaacatcccaagatttcaccaagaagaaatagaattcgtgaacatgccattaatgagaagtgggaattaattcataagaaaacttctccttcaggacaaartagattaacagccaaatcctactaaacagtcaaagaagaactaataccaattattctaatactattctaaaaattaatgtggaaatttttttttctagataattatatgagtctagtattatctgataccaaaaccagacaaaaaaggacacaacaacaaaaaaactacagaccaacacctttgatgaatatagatgca

SEQ ID NO: 208772 - DNA, 470 bp, Homo sapiens
aacatttgactgtttccaagtttagacaattatgaatatagctgctataaatatctgtacaaaggtttttgtgtgcatgtaagtttttaatttattggggtaatgaattaaagaggcacaattgggggatcatataggaatgtatatatatatacacacacacatttatatatacacttctatatgatagtggtgttcatgtatatgaaccaccaaagaaaccaccaaagtggttgtaccaccatagcagttgtaccattttgcatgtccaccagcaatgaatgagaatttatcttgctctacacccttgccatcatttracgttgtcagtatttggattgtcatcattctagtaggtgagtatggtatctctttgttgatttaatttgtaatttcctaatgacatatgatattaaatattgtgtcatatgcctacttgccatttgtatatatatccttttttgagttgt

SEQ ID NO: 208773 - DNA, 412 bp, Homo sapiens
atgctgtgctgattgcactgagtgattatgacttgcatctctctggggtggagcccccaggagacaagcaaacaatcatcggccacaaccattacaaatgtccctttctctggtgcctccaagttgggaaaggaacgtaaaccctaagattaccccagagcttcagtaggcagcccaggagtgccaagatgcaaygtacagccaaccctcacggggagaggaccccacattttcagtgcattgagaggaaatacagctgcaattgagaggaaacataggggagccaaacaatggagcaagagtctaccaactgaccaataaagctaagtgccacctactaaatcataccccaaaacttcaacagcaaaaatagctcactaacatacaccccagtgaaaccaaagacaagaac

SEQ ID NO: 208774 - DNA, 412 bp, Homo sapiens
atgctgtgctgattgcactgagtgattatgacttgcatctctctggggtggagcccccaggagacaagcaaacaatcatcggccacaaccattacaaatgtccctttctctggtgcctccaagttgggaaaggaacgtaaaccctaagattaccccagagcttcagtaggcagcccaggagtgccaagatgcaatgtacagccaaccctcayggggagaggaccccacattttcagtgcattgagaggaaatacagctgcaattgagaggaaacataggggagccaaacaatggagcaagagtctaccaactgaccaataaagctaagtgccacctactaaatcataccccaaaacttcaacagcaaaaatagctcactaacatacaccccagtgaaaccaaagacaagaac

SEQ ID NO: 208775 - DNA, 572 bp, Homo sapiens
gttttgcagcctggaaattaaccaaaggcttgaataattttaggaatatttgttcaaaaaaggtggctaaatcttgatgagaacagtgagttttctggtgttttaatttgtcctattcccacacttcgctcatatctatgagatagccttgaaaatcatcaacctcgtgtcagagacagtggctcatgcctgtaatcccagcacagtcctcccagtgggaggatcacttgtggccaggaatttaagaccagcttggacaatgcagmaagacccccatctctacattttttttttaaataaatagcttggtgttatatcttatgcctgtagttccagctactctggaggctgaggcagaaggatcatttgagcccaggagtttgaggttgcagtgagctatgaccactacactgcattcctgtctgagtgaggagcaagaccttgtctcataaacaacaacaacaaaaataaaacaaacaaacaaaaacaaacaaaacctgcagcttcaaaaatctcaccacagtagcaaggaaaaccagcagcctggaaagctactgagaaagagcagaatg

SEQ ID NO: 208776 - DNA, 572 bp, Homo sapiens
gttttgcagcctggaaattaaccaaaggcttgaataattttaggaatatttgttcaaaaaaggtggctaaatcttgatgagaacagtgagttttctggtgttttaatttgtcctattcccacacttcgctcatatctatgagatagccttgaaaatcatcaacctcgtgtcagagacagtggctcatgcctgtaatcccagcacagtcctcccagtgggaggatcacttgtggccaggaatttaagaccagcttggacaatgcagcaagacccccatctctacattttttttttaaataaatagcttggtgttatatcttatgcctgtagttccagctactctggaggctgaggcagaaggatcatttgagcccaggagtttgaggttgcagtgagctatgaccactacactgcattcctgtctgagtgaggagcaagaccttgtctcataaacaacaacaacaaaaataaaacaaacaaacaaaaacaaacaaaacctgcarcttcaaaaatctcaccacagtagcaaggaaaaccagcagcctggaaagctactgagaaagagcagaatg

SEQ ID NO: 208777 - DNA, 627 bp, Homo sapiens
gtttgctgtttaagccatcctgtctatggtatttgttatagcatcctgaactaaaatgagaaaatatttatctcacttactccacagcaaaacatactgatgatccaatgagacaactccttaccagttcctttccagaggcaaaccccttctctccctcttcccattcaacccttcaaatgtccagacaaagccctctcaccttccattcccatgcttttacgtgagagaaccagccctgcaggtagacagacccatcaccaaccttggagaacaaccyggatatcattcatgatatccaagtcaagtctattgggagggttcattcaaacaggtcaccaaattgttgattctcaacaacatagagttcttcatacaaaaaggagtctgctgctatgaaatataaagtttcctcatattgttacacagggattatttgatttaatccttataacaatctataaaaaattcataaatgtttatctctgctctgcagataagaaaactgagctagagaaggttgacaaggcatcccaataccaatggagagtggggctggaccatgaccttttgctctaggcagagcaaccctgaaaacttggtccctttagcacattctgtgcctct

SEQ ID NO: 208778 - DNA, 409 bp, Homo sapiens
ctaactgataacttgctgcagcttctatatcagtacttgttccttcaccttgcartttaatgttatagagatggtttctttcgttaaaccctcattaatcaacctctgctggcttccaaatttttttctgcagctttctcacctctctcagccactatagaattgaaaagagttagggccttgctctggattttgcttctacttaagggaattttttagtccattctcacagtgtcataaatatactacctgagactggataatttatgatcaaaataggtttaattgactcacagtcttgcatggctggggggccttaggaaacttacaatcatggcagaaggtgaaggggaagcaaagcacggcttacatggaagcaggagagagagcaagagcacaggggaactgc

SEQ ID NO: 208779 - DNA, 409 bp, Homo sapiens
ctaactgataacttgctgcagcttctatatcagtacttgttccttcaccttgcagtttaatgttatagagatggtttctttcgttaaaccctcattaatcaacctctgctggcttccaaatttttttctgcagctttctcacctctctcagccactatagaattgaaaagagttagggccttgctctggattttgcttctacttaagggaattttttagtccattctcacagtgtcataaatatactacctgagactggataatttatgatcaawataggtttaattgactcacagtcttgcatggctggggggccttaggaaacttacaatcatggcagaaggtgaaggggaagcaaagcacggcttacatggaagcaggagagagagcaagagcacaggggaactgc

SEQ ID NO: 208780 - DNA, 405 bp, Homo sapiens
cagcttctatatcagtacttgttccttcaccttgcagtttaatgttatagagatggtttctttcgttaaaccctcattaatcaacctctgctggcttccaaatttttttctgcagctttctcacctctctcagccactatagaattgaaaagagttagggccttgctctggattttgcttctacttaagggaattttttagtccattctcacagtgtcataaatatactacctgagactggataatttatgatcaaaataggtttaattgactcacagtcttgcatggctggggggccttaggaaacttacaatcatggcagaaggtgaagrggaagcaaagcacggcttacatggaagcaggagagagagcaagagcacaggggaactgccacttttaaaccat

SEQ ID NO: 208781 - DNA, 475 bp, Homo sapiens
agactggataatttatgatcaaaataggtttaattgactcacagtcttgcatggctggggggccttaggaaacttacaatcatggcagaaggtgaaggggaagcaaagcacggcttacatggaagcaggagagagagcaagagcacaggggaactgccacttttaaaccatcrgatctcataaggactccctcactaccatgagaacagcatgggggaaatcacccccatgatccagttacctctcaccaggtccctctcttgacacgtggggttacaatctgagatgagatttgggtagggacacagagccaaaacatatcaggaatgctgtggcttgtttggtcttctattcaaaccacaaaaactttctccatttcagcgattaggctattttgcttgcttttcatctgttaactgaaaaagtgattttaaatgttcttcaagaccttttcccttatatttacaacttgact

SEQ ID NO: 208782 - DNA, 475 bp, Homo sapiens
agactggataatttatgatcaaaataggtttaattgactcacagtcttgcatggctggggggccttaggaaacttacaatcatggcagaaggtgaaggggaagcaaagcacggcttacatggaagcaggagagagagcaagagcacaggggaactgccacttttaaaccatcggatctcataaggactccctcactaccatgagaacakcatgggggaaatcacccccatgatccagttacctctcaccaggtccctctcttgacacgtggggttacaatctgagatgagatttgggtagggacacagagccaaaacatatcaggaatgctgtggcttgtttggtcttctattcaaaccacaaaaactttctccatttcagcgattaggctattttgcttgcttttcatctgttaactgaaaaagtgattttaaatgttcttcaagaccttttcccttatatttacaacttgact

SEQ ID NO: 208783 - DNA, 475 bp, Homo sapiens
agactggataatttatgatcaaaataggtttaattgactcacagtcttgcatggctggggggccttaggaaacttacaatcatggcagaaggtgaaggggaagcaaagcacggcttacatggaagcaggagagagagcaagagcacaggggaactgccacttttaaaccatcggatctcataaggactccctcactaccatgagaacagcatgggggaaatcacccccatgatccagttacctctcaccaggtccctctcttgacacgtgsggttacaatctgagatgagatttgggtagggacacagagccaaaacatatcaggaatgctgtggcttgtttggtcttctattcaaaccacaaaaactttctccatttcagcgattaggctattttgcttgcttttcatctgttaactgaaaaagtgattttaaatgttcttcaagaccttttcccttatatttacaacttgact

SEQ ID NO: 208784 - DNA, 548 bp, Homo sapiens
gccttttcaggctagtatctttcacttagcaatatgcatttaagtttcctccatgtcttttcatggcttgacagctcatttcattttagccctgaatatttcattgtctgggtgctgcacagtttatttatctacttaactactgaaggacatcttgattgcttccaagttttggcagttatgaataaagctgctataaacatacatgtgcaggttttcatgtggatatatgttttcaactcctttgggtaaatactgaggagcacamttgttggattgcctgtaagagtatgcttagttttgtaaggaatggccaaactgccttccacagggattatatcattttgcattcccaccagcaacaaatgagagttcctatttttttccacccttgccagcatttggtggtgttgatgttctggattttggtcattctgataggtgtgtggtggtatctcattgctgttttcatttacatttatctgataaactatgatatggagcttcttttcatatggttatttgccatctacattttctttggtgaa

SEQ ID NO: 208785 - DNA, 548 bp, Homo sapiens
gccttttcaggctagtatctttcacttagcaatatgcatttaagtttcctccatgtcttttcatggcttgacagctcatttcattttagccctgaatatttcattgtctgggtgctgcacagtttatttatctacttaactactgaaggacatcttgattgcttccaagttttggcagttatgaataaagctgctataaacatacatgtgcaggttttcatgtggatatatgttttcaactcctttgggtaaatactgaggagcacacttgttggattgcctgtaagagtatgcttagttttgtaaggaatggccaaactgccttccacagggattatatcattttgcattcccaccagcaacaaatgagagttcctatttttttccacccttgccagcatttggtggtgttgatgttctggattttggtcattctgataggtgtgtggtggtatctcattgctgttttcatttacatttatctgatraactatgatatggagcttcttttcatatggttatttgccatctacattttctttggtgaa

SEQ ID NO: 208786 - DNA, 436 bp, Homo sapiens
gctgcctgggatttaaactgatgcattctggacccagggtccatggccaatctctattttaaagtgactcacagactttcagagggggcctgcttcttatctctccagttccctttgccrtagcttggaagaggaaacaggaaaacccaagctctctgagtataggagctttggctgcacaatgccagggccccttctgcagtagtctgagccctacctcagtccagatctgagtcagggtctggaaagagctgaggttcagggtggagttatccttgaagaggatgagacagagaaaaactgaccattcatcatcatcatcccgccagtttgagtattgaatcaatacagcctgtgtttctcatgatcgcctggtccttgagactgttgataaggcattagagagcttcatggttgttgataatctgaggaacgc

SEQ ID NO: 208787 - DNA, 436 bp, Homo sapiens
gctgcctgggatttaaactgatgcattctggacccagggtccatggccaatctctattttaaagtgactcacagactttcagagggggcctgcttcttatctctccagttccctttgccatagsttggaagaggaaacaggaaaacccaagctctctgagtataggagctttggctgcacaatgccagggccccttctgcagtagtctgagccctacctcagtccagatctgagtcagggtctggaaagagctgaggttcagggtggagttatccttgaagaggatgagacagagaaaaactgaccattcatcatcatcatcccgccagtttgagtattgaatcaatacagcctgtgtttctcatgatcgcctggtccttgagactgttgataaggcattagagagcttcatggttgttgataatctgaggaacgc

SEQ ID NO: 208788 - DNA, 528 bp, Homo sapiens
taacatgtaaggtgctgagatttgaacctaggcagcctggctccaagacctgctctctgaaaaatcatcttctaccatttctaaaaagggggctaagaacagcaatatggaccctgctggttctatggagtgacctggactctggaccctgacccttaactgtatgtggtaccctggcttctgcttattttttggactggtctgtagcattctgctacttgagcaaatccccaactgcaagaraaagcttctttttgtttgtggaggtgagggagtccgggaccagcagggaatgggcatatacttctcttacgtcatgaagatagtcattttgcctcttttttttttttttttgtcacttggacctatgtgagagaagacaggggcaggaatttgttagagtgcctacaggaaatattcttgtataaataataggtatttttatatgggatatttattgataacctatcagcactcctccaaaagcagcatctgtttgtaatgtgaacttttcgcaagtgggatttc

SEQ ID NO: 208789 - DNA, 613 bp, Homo sapiens
ctccttttctcactaaacagaatggtgatattaactgacacctatacccagacaggcacttcctcagatgcccttttggtcagtggtggccatgagggccagttcagtctgagaagatgttagtgaaagtctagtgaatggaattaggagaaagatactttgtcctgattcaaagaaataaactttgctgccatatgcttttgcccttcacccttcctgcttcctatatatcagaaatatggacatcatgtctgattatagagcasagatctcatggtcatgaaccagaaaaagacagacatacagtaaagatgtcagagaagagatcctgggaagcctgggttcttgacgacttcccacaagtagcagcatgagccagatctgttgttgcacgagagaaataaaaccctatttggataagccatgtcgtgaggtttttgttattccagcggaaccccatgttaactggaagaaaactacacataatttcttcccccaaaacaagatgaaatcccaacccatccccctgacactccctgcatctcagggtctgtgtaccttatcagtcccacctcctgccactagtcacacatgctctctgagccctagtcat

SEQ ID NO: 208790 - DNA, 611 bp, Homo sapiens
ttcctctcatttgatctcctgacacccatgtaaataaaacagggttagaggaatggaaatgttccattactaggtaaggatagcaaaaagggctttcaaatacaaattgccttggagttttgacacatgtcaggctctgtaaattccatagagatgttgtttcacaaaaatttattatgaaagtttcartcatccagaaatgttgaagaaaggcatgatgaatacccatagttcctagtcccaggtttaacaattgttaacattttgtcatattttctttatcagcgcatgaatgcctattttgcataaaatatgcatatgcatatttttctagatcatttgaaaataagttgcagactttaagacagtatactctaaatacttcgccaggcttctcctaggaataaggcatttttcagtggaactccaatgacattatactgaagtaaataaatgatatttcataatactatttaatgtatactctacattcataatttcccaatttttcaagaaatttgcttatagatatttttgaagcagaatccaatctaagtacatgaatttcttttgatgttatatctttattctctttaaatctacaacagtcc

SEQ ID NO: 208791 - DNA, 611 bp, Homo sapiens
ttcctctcatttgatctcctgacacccatgtaaataaaacagggttagaggaatggaaatgttccattactaggtaaggatagcaaaaagggctttcaaatacaaattgccttggagttttgacacatgtcaggctctgtaaattccatagagatgttgtttcacaaaaatttattatgaaagtttcagtcrtccagaaatgttgaagaaaggcatgatgaatacccatagttcctagtcccaggtttaacaattgttaacattttgtcatattttctttatcagcgcatgaatgcctattttgcataaaatatgcatatgcatatttttctagatcatttgaaaataagttgcagactttaagacagtatactctaaatacttcgccaggcttctcctaggaataaggcatttttcagtggaactccaatgacattatactgaagtaaataaatgatatttcataatactatttaatgtatactctacattcataatttcccaatttttcaagaaatttgcttatagatatttttgaagcagaatccaatctaagtacatgaatttcttttgatgttatatctttattctctttaaatctacaacagtcc

SEQ ID NO: 208792 - DNA, 428 bp, Homo sapiens
taccaaattaaaatcctcagaaccaacctctataaattctgcaagacagaatttcaatctggcaaacatggaaaggcctggctcacaaaatgtgccaaaaacccatttcccaatgaagagccatggaggtgcaccstggccctgcccaacacacccgagccagtcaaggtcagaacccgaggctcaattttaatcccaagtcatttccaatcaaagccggatggaggggcaagcaaatggaagccaccctgtgcttcccttcataatcacattaaacatcaacagctgcattgtcctcattttctcatcaccccactcagtctgaatcctgcaaaaactcagagctggtaaaaccatgtgactcctttcttggggttgtcagctttccattatccccagttcccctcctgatctctgatcctggggag

SEQ ID NO: 208793 - DNA, 412 bp, Homo sapiens
aaattaaaatcctcagaaccaacctctataaattctgcaagacagaatttcaatctggcaaacatggaaaggcctggctcacaaaatgtgccaaaaacccatttcccaatgaagagccatggaggtgcaccctggccctgcccaacacacccgagccagtcaaggtcagaacccraggctcaattttaatcccaagtcatttccaatcaaagccggatggaggggcaagcaaatggaagccaccctgtgcttcccttcataatcacattaaacatcaacagctgcattgtcctcattttctcatcaccccactcagtctgaatcctgcaaaaactcagagctggtaaaaccatgtgactcctttcttggggttgtcagctttccattatccccagttcccctcctgatctct

SEQ ID NO: 208794 - DNA, 430 bp, Homo sapiens
ccacaggtgagtttcagggatctgtgttttcacaagttccccagggaatttaggtgcaaacactaatttgagaaccactggcctraagacaagggttttagcattaaccagacctgagttaacttggtttcttgtgagctgcatgaccttggatccattccttaacttctctgtccctcattgctaagaggtgaagagcaagagtacctaccctataaaagtgtcttcatgatcagtagggagacagcattcaaagtgtttaatatagtgtctggcatattgttggaacatacttatgacatatgcaaacaatagacccatgacacatacctaacacacacatcacactcatacacacaaacacacagatacatacaatatgcattgataaaacacacacacacaaatcttcatcacacacacaagatgc

SEQ ID NO: 208795 - DNA, 596 bp, Homo sapiens
gctgctcccacccagagccgtgtatttcttcttcgtaattcacgtgagaggaagcaatagaggtgcaggttgtccacctcaatggcctagaacgacctgcacctcccctgggcatctgcaaatttccaacctgctctctgtctcagtgatatcccaagggctgcaatggacagggctaatagcatgagatatgtaagtgacagaaggtgggcatttgaatccagatgattcttttcttgcttctgttacctgtttttgagtayggtgattcatctggctgtgactcagttttttgtttcatgtgtaaaatggagctaatgatacctattacatactattgtgctgaaaattaagtgagactatgtttaaagtgcttgttcatagctgatccttaaaactcttttcctttactcatttctgccttttccccaaaggatttaaagctagactgtatgaggacaatctgtgcactggtctcatgaactttctgcttcatagtggtggagatatccccttgaagattataaactctgtaacaatctctccttgcacatgacaggtgcttaataaataaaaatggccttggatgggatatt

SEQ ID NO: 208796 - DNA, 566 bp, Homo sapiens
gttttaatttcttcactaggctgtccctcattgccatttctcagactttgaaaagactagagtcaaggttctaattaatacctctgaaatttctaaaaacttctgttgcagaactttattattcatctgcttccccccaacctcccggagcagattctagaattactttctaggctcaatatgtgggactttttctctccctcactactggaggtcttagccagtgtcaataggcaaggaagtaaaaayagcatctagaaacaaaaggaaaaaaaaaaaccctctctttatttaaaacagcacattggctttatgcaaaacaacacaaggcaagtagaaaattttaccatatccaaaaagctttgtcaatgaaaaagagtcaaagtctgtaaaacgttcgaagagatttattctgaggcaaatgtgaagaccatgacctgtgacagagcccaaggaggtcctgagaacatgtgcctaaggtgattgcattacagcttgattttatacattttagggagacagaagtttcaggcagatatcaatcaatatatacaaggtatgtattg

SEQ ID NO: 208797 - DNA, 538 bp, Homo sapiens
cacttcttttcctttcccttttcaaagttagatagatacatgtgaccaggtattataaaagctaagaagtaacatatcattttggggactaaatgtgtaagcactggtgctcaatttctactctctttttagttttttttttttttttttcttgctctggtaaatctkgaaaccccatcttgagactgaggtgttacaataatagatctagcctggaattctgaatccctgacagaggtcagtggccataaagaggtatctcagcctataaaagagaaataaaatttcattgtgttagcattcttgtttttgtagaaacatttagtttaacctgactgataggatcgttattatcaattctgttcaaagtgattgataggttgaatgctatttgaataacaatgtcaacaatattttggaaaaacttgaaaatttgatgctaacatttacaggcataagcaaaagatgtgttaaatgagatgaaaaatgtgctaataacaattgttattgtgcaaattgattacatgaattagagtta

SEQ ID NO: 208798 - DNA, 616 bp, Homo sapiens
gacactgttgggctgtcaccatgtctgctgagcctctgttgyatgtcactatatagtctttactaattttatttttctgttgtctttcattctgaaatatgattatcctagaaggtccccaaaagaaactaaattcttatgttctccttgtgaaagatctttctgtgtttcatgaagatatgaggggaaaccaaccaaccaagcaaagaaaacctattgcttcaaaggcctcagatcttatccttgagggtggccctaaaaaccaaatggaaacctatactgaaagccatttacttgttccccttttgttatctttatttaaaacctggtgaagttattatctcacttattaccaaataaactgcaaatgcaggtttagtcttaattgcatatcatgtaatattacttataacacattttgaaataagtcattatagtcagttcaatttcagaaacatttattgagcatatattctgtgctaagcaaagtgccgaatgctatggagaggatacaaaatgaacagggtgaaggattagagtggagggatcacagtaaggtggaataggaagacattaagtaaatgttttcacaaataaatgtagaattacaagtgtg

SEQ ID NO: 208799 - DNA, 638 bp, Homo sapiens
cctcctgctgaatatataagaaactactagtaaattatattcaaaaagctcactacaactgctgatagaggatccaatctaagcctttaatttgtcagaaaagtccaggcaagaaaaacagtccactgtagttgagacaaaaacacacactcaggatgtgccacaacattggtatcacagttctatgcatccawgcagtttcaaataagcatgcagtggtcaataagctcttgtcccttttctggaacaaatgtggaacattttaactagatccctgagcctacaaacccatgacagcagtgaaataaataaattggctcagatgagaattacaatataatcatcccttattcattgaaaatcctttcccattttatggtatttaatagatgcatttttgccatttctcttctcacaaaatagaaaattaatttagaaggatatagtcaattctgtttttttttaaactctcatttaagattcaggggtgcacgtgcaaggtttgttgtatatgtaaactcatgtcacgaggatttggtgaatagattattttgtcatccacataccaaacatagtatttaatagttatttttttctgatcctctttcttctcccaccctccaccctcaggtaggccc

SEQ ID NO: 208800 - DNA, 638 bp, Homo sapiens
cctcctgctgaatatataagaaactactagtaaattatattcaaaaagctcactacaactgctgatagaggatccaatctaagcctttaatttgtcagaaaagtccaggcaagaaaaacagtccactgtagttgagacaaaaacacacactcaggatgtgccacaacattggtatcacagttctatgcatccaagcagtttcaaataagcatgcagtggtcaataagctcttgtcccttttctggaacaaatgtggaacattttaactagatccctgagcctacaaacccatgacagcagtgaaataaataaattggctcagatgagaattayaatataatcatcccttattcattgaaaatcctttcccattttatggtatttaatagatgcatttttgccatttctcttctcacaaaatagaaaattaatttagaaggatatagtcaattctgtttttttttaaactctcatttaagattcaggggtgcacgtgcaaggtttgttgtatatgtaaactcatgtcacgaggatttggtgaatagattattttgtcatccacataccaaacatagtatttaatagttatttttttctgatcctctttcttctcccaccctccaccctcaggtaggccc

SEQ ID NO: 208801 - DNA, 597 bp, Homo sapiens
agaaataaattctaatattctatagcaccgtagggtaaaagtggataataacaatttattacatattttcaaaaagttaaaatagaggattttgaatattcacaacaaacagaaatgataaatctttggggtgacaaatatgctaattactctgatttgatcattacacattatatacatgtatggaaataccactctgtatcccataaatatgtataattattatatgttcactaaaaataaaaagaaaaattacaaaggaaatcagacaaattaaaaattagtaaaaagtaaaaacactacaaataccatgcaattaaaaaaaaacacatattattaggccatgcctcacatgtttctataacacatttacatrtattacttaactgtatagtttgattagctcctcattgataaaagttcgaaaaaattgttttctataggtcttatataaaagtaactaaatttttcttttacatggtttattaaaacatgattttattattaattgtatggatattttttaaccttgaatttggtaatgtgaagtaactttggagattgttttcaaatttgggaatatttctgtcaaatttc

SEQ ID NO: 208802 - DNA, 514 bp, Homo sapiens
tagtgtggaactggacccagagacagtgaaatagggagtatgtgacccactgagacaccagctggggcagctaagggagtgcttgcwtcatccctcccccagccccaggcagcacaatttgcagctccaaaagagaccacttcctttgacctaagcagcagagacagaagggtgaggaggactttatctcgtgcctttgataccagctcagccacaaccagatagggctccattcagagttctgagtccccatttccaggccctagctcctgaataacaataccagacacactttgggccagaaggaagctgccactttgaaggaaagaacccagtcctagcagcattcctcacttgctaactgaagagccctcaggctatgaataaccagaaacaatacccaggtactatgttatcagcttttggtaagagtttgagacttgctggcttcaagtcccggctcagtcagaaggaggtagagcacaaagcaggctcttgggttttcagaatctag

SEQ ID NO: 208803 - DNA, 514 bp, Homo sapiens
tagtgtggaactggacccagagacagtgaaatagggagtatgtgacccactgagacaccagctggggcagctaagggagtgcttgcatcatccctcccccagccccaggcagcacaatttgcagctccaaaagagaccacttcctttgacctaagcagcagagacagaagggtgaggaggactttatctcgtgcctttgataccagctcagccacaaccagatagggctccattcagagttctgagtccccatttccaggccctagctcctgaataacaataccagacacactttgggccaraaggaagctgccactttgaaggaaagaacccagtcctagcagcattcctcacttgctaactgaagagccctcaggctatgaataaccagaaacaatacccaggtactatgttatcagcttttggtaagagtttgagacttgctggcttcaagtcccggctcagtcagaaggaggtagagcacaaagcaggctcttgggttttcagaatctag

SEQ ID NO: 208804 - DNA, 616 bp, Homo sapiens
gtgcattgtataaaacaatgaaaatgattcattgacgtcaaaataaaataataaataaatagctactgatatcaggttaagtattctgggctcgatatgtaaataaatatgccaaagggagccttgaatatgggtagtaatgatcctagctgggttctgtaatttatgtgccattttattattgccaatgatttcctatatatcaatcattactttgaatataaattgagtgaattttccaaaaaaaagatatagagctgctgcatggattttaaaaaaagaataaaaacacaagatccaactatgtaatgcctacaatacactcactaccctttaaaggatacacagaagtgaaagtaaaaggatggaatgataktctacaccaattaaaaccaaaagcagcagcggtagccatactaatatgagacaaagtagacttttagtgaaaaagtgtaaaacaggaacaaaaaaggacactatataatgataaagggatcaattcatcaagaggatgtaacaattataaatacatatgcacccaaattagagcacctaaatatataaaacaaatattaaaggatataatgggagagatagattgcaattcagtaacagt

SEQ ID NO: 208805 - DNA, 608 bp, Homo sapiens
aagcttagaagagaagagaaggcacaaagcaggctgagaaaaaaattgccagaaaggtgggaaggaaactgggagagtgagagctacaggacagtaaaggaagggagagcatttcaaagaggaggtkccagcctgtcaatgctgatgagaagccatcaggaagagtaaagcaactgcagggcatggtggcagagaagtcactagtggcttcagcaggagaggtttgggtggaacagtggtgtaggagctagggacagtggttaaaaatcaaatgaggggagcaagaaaccaatgtgtgtcacttaggaaaattggtacagaagcaaagtgtcttagtctgcttgtacggctataacaaaataccttagactgggtaattgataagaacagaaatttatttctggaggctgggaagtccaagatcaaggcactggcaggtgtggttctggtgaggacagctctctgcctccaagatggtgccccttgctgtggtcctctcatggtggaaaagacggaaggcaaaaagggctagctacttcccttgagcccttcatactatcacagtgagtcttatgtcccaacatataaatttgggggaaacacataca

SEQ ID NO: 208806 - DNA, 608 bp, Homo sapiens
aagcttagaagagaagagaaggcacaaagcaggctgagaaaaaaattgccagaaaggtgggaaggaaactgggagagtgagagctacaggacagtaaaggaagggagagcatttcaaagaggaggtgccagcctgtcaatgctgatgagaagccatcaggaagagtaaagcamctgcagggcatggtggcagagaagtcactagtggcttcagcaggagaggtttgggtggaacagtggtgtaggagctagggacagtggttaaaaatcaaatgaggggagcaagaaaccaatgtgtgtcacttaggaaaattggtacagaagcaaagtgtcttagtctgcttgtacggctataacaaaataccttagactgggtaattgataagaacagaaatttatttctggaggctgggaagtccaagatcaaggcactggcaggtgtggttctggtgaggacagctctctgcctccaagatggtgccccttgctgtggtcctctcatggtggaaaagacggaaggcaaaaagggctagctacttcccttgagcccttcatactatcacagtgagtcttatgtcccaacatataaatttgggggaaacacataca

SEQ ID NO: 208807 - DNA, 514 bp, Homo sapiens
attttttaaaatatttcatttggcaaagctcaaaggcccttggcaccaagtctgctgtgtctagggagcaaatggatgctgacttcattccatgtcacccccaaaatgccaagctgctcagggaactgacagggtctgaaggggccacgcagaacccccagaagtggcaggaagaggatgggccagtttctgaccatcaccgaaggcaggctgccacagcaggagacactgggaatgcaggaaaaagcaggtgaggaggaagttcacrgggaagccctcgaccacagagggtgtcaggtgataggaggccttggagccagccgtggagaaaaggctagcgaaagccacaggtttcaaagactcggaaaaaaatctggggcaactctgaaggcaagggctcaaatgaggaatgcgcagtcgccagaaaggaagggaggagcacggaggccagggcatgcaggaggccagtggaggacagcagtacgtgggctagaagctggtggcctgggggcac

SEQ ID NO: 208808 - DNA, 521 bp, Homo sapiens
aggctagtcttggaaatgattacttcttaaagaaaagaaaggcacctccaacttcattcttcgatctcaatgttagaaaattccccagagaaaacacggagagtccctcttccttagaagcactccattccattccccgcctctgggctgcctctgagatcccacatcctgtgaagccaggggttccttgctctaagagagtctgagggctcaatatcatcctgaatggttccagaccacccaacrtgcagggcagcgagcacggcttcatcctcttctattgcaagtgaggtatgggaaaaaagggacagcagacagaaccagaaaagctgatgccagggctggaccagccacagcttttcatgtggcctgggctacctgacccctcctttccaagctacgaggttcccatggttacaacaagggttcataggccaggtgggtgctggcccacctggttctgtgattgtcagtctccaagggcaggcttccttcccatctctacccccagagggaaaggc

SEQ ID NO: 208809 - DNA, 615 bp, Homo sapiens
gtgctaggtgggcataattgaatcatgcgggaaatttcccccatactattctcctggcagtgaataagtctcatgagatctggtggttttataaatgggattttcttgcacaagctctctcttgactgctgccatgtaagacatgtcttgcttccccttccctttccaccatgattgtgaggcctctccagacatatggaactgtgagtcaattaaacctctttcctttataaattaccrattctcaggtaagtctttattagcagtgtgagacagactaatacaccagcctgcagaactgtgagctgataaaattctgtttattatatgtcactcagtctgtggtattctgttttatagcaacagaaaaaaaacagattaaggccatatatatatataaaatttagcaatttcaatttcagtgtttagaatagtctgtcatgttaggtaaaaatctaaaagatttctgggcttctaatttagaatatataacagatttggacttgaggttttaatttataaaaatgttactgcatttgtaaacagtatgtgattgtgccaaccaactaattatttatagcatagggaatactttattgtattaagttagtaaat

SEQ ID NO: 208810 - DNA, 583 bp, Homo sapiens
atctccaggacattggtctgggcaaaaattcattgagcaaaaccacacaagaacaggcaaccaaagcaaatacgggcaaatgggatcacaycaagttacaaagcttcccatacttaccccacttattatatatacatcactgattatttgggttaaactggactcatttcaggcagtttgcctttgttcaaatacgtgatgagaaacttaatactctaatttgatttgagccataaaacacattttaatattagcttgtattatatttattaagcttgtttttgtggaaaaaaaccttactaaaacctggataagtctagagtaagccagtttaggtgtattttgtatttagtggtggattgtatcgtaaaaatagagataagttgggaagatatattgattatgctgtcctgttgaggaaaaggtcagtgtatttggaaatttaaattttggttattgtgttcatatcatagtatacaagcatcatttaaagtttgactttgagaacttttctggtattaagtttatggaaaatgtataaaagaaatggaagttttgattatatttttatatttgtaaagta

SEQ ID NO: 208811 - DNA, 514 bp, Homo sapiens
atatcctttgtgttgccttctgtgattcaggaactccttagaaatgtttgatttaatttccaaaaatttagggatttctcacgtattttatggtctttaagatatagcaaatattgcacaactattatgtatgcataaaaactaaacataaaaagttaaaaacaaatatattttaaaaatatatagcattagaaactacttaaatggaagccaaagaaaaataatttaaaatatggacagagaattagtaaactgtcagataactttaatgaaggtaatatatgtataatcagatcctctaaaacaaaaggggattatttgaagaaataatggctaaaaaccttccwaatatataaactataaaaacacagctcaaatgatcttaagaactccatgtaataaaacatgaagaaaatgactaatatagacctattaaaagataacttaaaagactgttcatacaaaacgttgatgagcatgtggaagaactgtaacttttatatgctaatgttgg

SEQ ID NO: 208812 - DNA, 586 bp, Homo sapiens
agaatagtaggggactgttacacctttccctctcctaccactaggtgagaacgtttcctaccagattccaggaagtcttcttcgtatatcatgatatcatattttacacggtttttggacacaaggtcatccaacctgaagtgcagtggcacaatcatggctcactgcygtcttgactctctggactcaagccatcctcccacctcagcctctcaagtaggtaggactacagatactcaccaccatgcctggctaatgttttctattttgtgtagagacggggtctcattttgttgcccaggctggtctccgattcctgggtttaagccatcctcctgcctcagtctcctaaagtgctgggattacaggcatgagccactatgcccagcccatatttcaaacaaacattgatccacaaggttcttatccttcctcttccagagacttgtctctgacaacattccgtcttccaccaaaactttcaagaccctgtgaaaggtctgaaattgtatcttactttgcaaggcgaacattagaaaatgctaggctgccagacttgcatggattctggaagatgacatgagac

SEQ ID NO: 208813 - DNA, 586 bp, Homo sapiens
agaatagtaggggactgttacacctttccctctcctaccactaggtgagaacgtttcctaccagattccaggaagtcttcttcgtatatcatgatatcatattttacacggtttttggacacaaggtcatccaacctgaagtgcagtggcacaatcatggctcactgccgtcttgactctctggactcaagccatcctcccacctcagcctctcaagtaggtaggactacagatactcaccaccatgcctggctaatgttttctattttgtgtagagacggggtctcattttgttgcccaggctggtctccgattcctgggtttaagccatcctcctgcctcagtctcctaaagtgctgggattacagrcatgagccactatgcccagcccatatttcaaacaaacattgatccacaaggttcttatccttcctcttccagagacttgtctctgacaacattccgtcttccaccaaaactttcaagaccctgtgaaaggtctgaaattgtatcttactttgcaaggcgaacattagaaaatgctaggctgccagacttgcatggattctggaagatgacatgagac

SEQ ID NO: 208814 - DNA, 586 bp, Homo sapiens
agaatagtaggggactgttacacctttccctctcctaccactaggtgagaacgtttcctaccagattccaggaagtcttcttcgtatatcatgatatcatattttacacggtttttggacacaaggtcatccaacctgaagtgcagtggcacaatcatggctcactgccgtcttgactctctggactcaagccatcctcccacctcagcctctcaagtaggtaggactacagatactcaccaccatgcctggctaatgttttctattttgtgtagagacggggtctcattttgttgcccaggctggtctccgattcctgggtttaagccatcctcctgcctcagtctcctaaagtgctgggattacaggcatgagccactatgcccagcccatatttcaaacaaacattgatccacaaggttcttatccttcctyttccagagacttgtctctgacaacattccgtcttccaccaaaactttcaagaccctgtgaaaggtctgaaattgtatcttactttgcaaggcgaacattagaaaatgctaggctgccagacttgcatggattctggaagatgacatgagac

SEQ ID NO: 208815 - DNA, 586 bp, Homo sapiens
agaatagtaggggactgttacacctttccctctcctaccactaggtgagaacgtttcctaccagattccaggaagtcttcttcgtatatcatgatatcatattttacacggtttttggacacaaggtcatccaacctgaagtgcagtggcacaatcatggctcactgccgtcttgactctctggactcaagccatcctcccacctcagcctctcaagtaggtaggactacagatactcaccaccatgcctggctaatgttttctattttgtgtagagacggggtctcattttgttgcccaggctggtctccgattcctgggtttaagccatcctcctgcctcagtctcctaaagtgctgggattacaggcatgagccactatgcccagcccatatttcaaacaaacattgatccacaaggttcttatccttcctcttccagagacttgtctctgacaacattccgtcttccaccaaaactttcaagaccctgtgaaaggtctgaaattgtatcttactttgcaaggcgaacattagaaaatgctaggctgccasacttgcatggattctggaagatgacatgagac

SEQ ID NO: 208816 - DNA, 608 bp, Homo sapiens
ccactgccatgtgaaacaaaggcttaatcagcagtgggaagggccagaagaatgcagactaacagtactagaggatattttttgcagctagtaaaaggaagatggagcaggagacactgtgacaggtagcttaatgttactccatacatttcatataaactcactttcacttatttatgtcacgagtgcatttacgtatttatgtataaacaaatgtacattgaataaaattttggctatatacaaatacgtgtgtgtgtatgtrtgtgtgcattgtaactaatttatttttattttcatttaacttaatgctttgtgaacactcttccataacactaaaaattaaaatacttggactttagtggatgcatgaatgttgctatagcttgtagaatatttaagttctttgcaattttaactcttataaatgttcattgtgttcagtttgggctctcagaaatataactttactaaaaatagtaagttaaagataatgtatacttacacaattatatttaatcattccttatcataagagtaattgttagaattagtatcacctaatttagaccttttttccagacctttgcaccctatttcctaaattg

SEQ ID NO: 208817 - DNA, 567 bp, Homo sapiens
  misc_feature (1)...(567): n = A,T,C or G
tagaatgaatgagaagatgagggcctgtgaggttgcacgcatgcctgcggtggaagaaaagagcgaatgaccaccgggtgcactggctcacacctgtaatcccaamattttgggaggccaaggtgggcggatcacctgaggtcagcagtttgggaccagcctggccaacatggtgaaaccttgtctctactaaaaatacaaaaattagctgggtgtggtggcgggcacctgtaatcccagttactcgggaagctgaggtagaagaattgcttgaatcctggaggagagtttgcagtgagctgagatcatgccaccacactccagcctgggcgacagagagagactccatctcaacgacaacaaaaaatgtgtatgaacaattgtttccttctttagaaaatcatcattcccgttagaaagttcttttgtaagtattttaattgtttttccttccttttgtgatttcttcagcttctttttaaatgtattgatatgaaatcttccttcaactgatatgtctgttgccttataagtttggnnnnnnnnnnnnnnnnnnnnnnnnnnnnn

SEQ ID NO: 208818 - DNA, 610 bp, Homo sapiens
tttttattcttccaaatctcagggtgttagggctaaaaacatccaacacctagaatgttccttcttctgatagctacaatacctatttctttctctcattcaaattctttgttcagcagagtgactggttcatataggctctacataaatatttgtttataaaatacattttgtaaatctaaatatcttaaagtgtgagttaaagccagatacctcaaaatccaaatgactgaaaatcaaatgcaataccgtgaatgaagaaataaatttagcagcrtatgctttatctctatcatttttgacttgtgtaaaataaaaatacaagtgaataaaaaggtataaagagaaaatcaaagtagggagcaaataaacccaaaataaacctgatccaaacttaattgaacatttttgtttgcctttgcttggacatgagatgaaaaacctatgttaacacagttattgtttaactttttaaaataaataatggtctgttatctatgtcacagaatgttagctatgcaaaactcagtattctcctagattttatgttgcttccataagaattgatagagtaagaaaatattaagaaagacttgcattgaatgttgta

SEQ ID NO: 208819 - DNA, 516 bp, Homo sapiens
gttcttgacttctgtgcacccacgggcccgacaccatggggaagctgccaaggtttgaggtttgaaccctctgaagcaatggcctgagctctatgttggccccttttagccatggcttggatgcagggcaccaagtcctgagactgcacaaagcagcaaggccytaggcctggcccaccaaaccatgcttttcctcctaggcctctgggcctatgatggaaggggctactggaaaggtctctgacatgccctagaggtgtttttcccattgccttagtgattaacatttggcttctcattacttatgaaaatttctgcagccagcttgaatttctcctcagaaaatgggattttcttttctattgcattgtcaggctacaaattttctgaacttctatgctctccttcccttttaaacataagttttaatttcaaaccataactttgtgaatacataatactgaatgcttttaacgacaccaaagtcacctcttgaacacttcgctgcttacaaat

SEQ ID NO: 208820 - DNA, 531 bp, Homo sapiens
cctaaacttcagttcttgacttctgtgcacccacgggcccgacaccatggggaagctgccaaggtttgaggtttgaaccctctgaagcaatggcctgagctctatgttggccccttttagccatggcttggatgcagggcaccaagtcctgagactgcacaaagcagcaaggccctaggcctggcccaccaaaccatgcttttcctcctaggcctctgggcctatgatggaaggggctactggaaaggtctctgacatgccctagaggtgtttttcccattgccttagtgattaacatttggcttctcattacttatgaaaatttctgcagccagcttgaatttctcctcagaaaatgggattttcttttctattgcattgtcaggctacaaattttctgaacttctatgctctccttcccttttaaacataagttttaatttcaaaccataactttgtgaatacataatactgaatgcttttaaygacaccaaagtcacctcttgaacacttcgctgcttacaaatttct

SEQ ID NO: 208821 - DNA, 395 bp, Homo sapiens
aaattcactgttattctgatggggattcccttatatgtaactagacacttttctcttgctggttacaaaattctctctttatctttgatatttgatgttttaaatatactgtaccctggagaagacttttctggcttatttccatttggaaatttctaagctttctggattcctaaatctcttgtcagacttggagagttttcagttgttaatttttttaaaatgtctttggctttctcttcaccttctggaayttgcaacaggatatcacatatatcatatatgttttgcttattcttttttattctttcttcttttttttttggtttgactaattattttgaaaaacttgtcttcaaattttgaaattattttatctgattgatttagttcat

SEQ ID NO: 208822 - DNA, 324 bp, Homo sapiens
ctttaaggaacccaaaaagcaactcataggctgagggggtgatgagggaaaatgttaccaaaagccaagcaaattcctctctatcaaaggcttatagtgcatgtggggtagagagaaagggtgtcttttctctaaatgaagattgacatgatttttagaacacttwcacgttctgaatttaaacgtgttattacttaatggggcaatagaatcatccatttaataagagtcaggagaaaattcacagggcatgctgacttttcattcaaaggagggtcattatcactggatacactttaaagaaaaagtgacaaaaaataaatc

SEQ ID NO: 208823 - DNA, 579 bp, Homo sapiens
tctaatttgagctgttttgattattataatggtagaactagctatgaatggttgtaaaaactattacaattcaaattgtgagtgactattctgaaacatttaaaatatttctcttctctccctgcaaccaacatctcacaaaaaattttaagtagcaccatgcagttttatatttattcatttttcaaagcatctagtcaagttcaagagatagagaatggtratggttgtacaacaatactaatgcacttaatactacagaattgtacacaataattattaaggtagtaaaatttaatttatgtatattttgttccaataaaaaatctggaaaaatgttctactatttattgctcactgaagttcagcttcatctttcatttccttttcttcagcattgatcacgttataattgctttcaggtagggtgggttgagacacaaaaataaatatgttttaagtaggaaaaaccctaaaaatcatagacagcaaccattaaaatactttatggtcaataaaagtcaactaattcataataggtcactttatattaaaattcaaataatgaatgaactgaat

SEQ ID NO: 208824 - DNA, 547 bp, Homo sapiens
gaggaacatcgtggccctcgyatgtgagagcccagtgaaaaaagaggttgtgaggtggacttaagcaactggtcaagaagataaactagcctctaggtagatcctcaaaagtgagtcaaaatagctttttaaaagaagtatacgacatgcctagaagacttaacatgagtcatccttatttcctggggatgtccactcactaaagagagaattgcatacctgctgcaccatgatttagtgtctacaaggcattaaaaaaattggttgagaggaattccaaattcccctatccattagtccaatgtctctatccattagtgatctttggaggttaccacctcccagggtatcttgggccaatatgaagcagcttgaaatcatttttagctggagagggtagactagagaccagtctctataactacatttccttctgcctattcttggcatggaggggaccctgaactttttaaatgcttccatcgaatgtaaaatttaaagagttgaaagaaggtggaacagttcttgtaagtgccatagccattca

SEQ ID NO: 208825 - DNA, 485 bp, Homo sapiens
tgaccaaacgctttgttggaagaactatctccaaccctgggggaccagagtgagaaggtgagtttgacttaaataacatttcagcccagtggctccctcyctaatctctgccaggctgctagttatgagacctacgtgagaaacttgcgaaaaataagggcctccttggccccatctctgaagattctgattgcttggatctgtatatttaacaaacttccaggtgactgatttgtggcctcatttgggtccctggcttatcacaggaatcaggacctgctctatttgtatctgccagcattaaaactctagttccaggaaggaagaaccttcctgtctgcacaacatggcctcgtcagatgtcctcaaacaaatctttgggacagcacaaaggggcagggcaggactcctgggcttggcagcgtcttggctgcacctaccaccagctggaacctctcaaacactttcacccccaaatggatttg

SEQ ID NO: 208826 - DNA, 539 bp, Homo sapiens
aaacctcatttatttgtggtacatatttatttttatactttattgattctgtttgctaatattttgttgtgggtttttgcatatatgttcaagagagatattagtctgtagttttcttttcctgtaatatcttacctggttttgatattagggtaatgctggcctagctaggaactattcttttttgcttatattttctggaagatgttagataaagtttgaattaattgtttcttaaatatttgatagaattcagcagtgagatcatatgcaattagttcatttttggggggaaggttttaagttattgattaaatttttaatagatacaggccttttcagattatttatttctctcagtgtttttgttttaagtaattgatacattttatctaatttatcagatttgtgggtgtagttcytctttatctttcttttattatcctttcacctttcatggaatcagtactgatgatctctcattcatctctaatactggtaattggttttctcctcatttttctcagtaagcctggtta

SEQ ID NO: 208827 - DNA, 468 bp, Homo sapiens
tatctgggttctcttgtcagagtcgtacaaagctaaaatcaagatgttagccaggaatacagtctcatcctcagtttgggtgcccttccaggttcattcaagttgtatacagaattcagtttcttgtgttgtttgactgaggttcctrtttacttgatggctgtcaactgaaggttgttctcagctcttagaggccaccctcagaccccagatatgccattccctatttggctctgttttcttccaggatagaaggagaaagtcagctattttttcttgtattgtttcctatggttaggttttcaggttagaattactaacctaaaatctattttttcatcaatgcaaaattgactgactagggatcttaattcttttgtcatgtaatgtaacgtaatcatggggatgatggctcatcggattcataggttctgcccgcaatcaatgggagaagattacgtagggcag

SEQ ID NO: 208828 - DNA, 656 bp, Homo sapiens
attcaggcctttattttcctctagtaatttcagttttcttatagagtccttacacatctttcattacatttatttctcagaatttgagttccatgctattacaaatggtattatgttttacaaagtccttttctaattgcttttcttagtacataaaattgcaattgaatgttacacattgacattgtatccagcattatgttgtaattatcagctgtgagcacagggatactgtacagagataaccccaatgttcagtggcagtggttaaggtggtgaagctctgcatgaggtggtgggatgtggaattagccggggctgctctgcttctaaatgagtctgtgggttggttgggatagctccattctgattgcctcatgctggggaacaagctgggtcatcagacacgacctgctgtgtgttcttctccaggaggaggtggaagctctcagagggctgaatagaaacacacgaaacacatgaagccctgaagacctwagcacactctcacttctgcccacagcccattggccaaagccagtcacggcacattcaccatcattgaggcaggcaggtctgtctacgcctttctaggaggtaggcagaagcagcaaatactggctaaatgagtttaatttacatggttgctaaattct

SEQ ID NO: 208829 - DNA, 526 bp, Homo sapiens
gacttgctcaaggtcatccagccggtaagtgtggagrggaatccaacgtgggtggtcccatgccagagtttatactcatattatctcaccatactgcttccacttctggtgttttccagaaacgtgggaagtgagattcaaagggaaaaagacagacactgggtgggtgggaggaagaggcatattaacacaaagcgactgtgatacagttggctatggccataaaacaatgaccaaattacccttttggtgtttaggattgctaacagtcatgggcctaatactcctgaagcctgaggtcacctgaaagttcctgaacctcttcccagattttgcagcatggcaaaacaggttttgctgcaggatgggttatgggagcggggggagaagaagagggaaaatgtatgaggcaaagatggtcttgctaaacagatgaaacttcacaggtagcagtcctgctctcaaggaggaaaaatatagacggtagtctgaggaaaatgtttctctgtcagaccttgaaaggtgt

SEQ ID NO: 208830 - DNA, 349 bp, Homo sapiens
gatttttatcttaaatttgtatagaaattttcagtgaaatcttaggctcttttttggttccagatgaattttaggattattttttctaattctgtgaaaaatgacattggtatttaataggaattgcattgaatctgtagattgcaaatttttattattgaaatatatttttaaattttcattttaatagctttatrggtacatgtggtttttggttacatgggtgaattgtacagtggtgaagtctgggcttttagtgtacccatcaccttaagaatgtacattatatcaaatagataattcatctctcacccctctgcccctctacctacttctgtgtttccaatgt

SEQ ID NO: 208831 - DNA, 477 bp, Homo sapiens
attcgggggaagacagttaggttttgctggacagttcttgaaacagaatcttctttcttataggaaaccccattccttgtgtttgtatgggattgacatttcctcctcaggggtgggcctgagacttgagcctggccaatcagagtcctgcatccttctaatgagagtgytctggaatgtcatccaattagggacaatcagagtttttcctaagatttaacacatgaaaactgaaaggaaggctctctctttctttgtaacaggcaagcagggccttattgtgcctttttgtgccacaagcacttttgcctttgtccattttctttcctttttttgagatggagtctcgctctgtcgcccaggctagagtgcagtggcgcgatctcagctcactgcaaactccgcctcccgggttcacgccattctcctgcttcagcctcctgagtagctgggactacatgcacctgccaccactcc

SEQ ID NO: 208832 - DNA, 542 bp, Homo sapiens
gaattcaaactgtgcctttgtaaatggaaaagggtaaagtttaccagtcccacatgaccagaggcatgagtttcagagaaamccgggtagcaaatttatatctcaaagcacacacagagagataattgaagtttttaaaaggagttcctgtgtgttaaagggagaccaaaaatggatgtcaaggtaacacaaaatcttaggaatttaccataggatttttccctacttttattttaggtccagggggtaaatgtgcctgtttgttacatgggtagattgcacgaagagaccaaataattcagcttctgtgtattgccccatctggatctagtactggaagtgctgcagtcatgtcctagtgccatatagcccaacagcacagaagaaaagcatcatggcaagaatcacaactcagcgacattttaatttatgtatgacatatatcaatatctacattgggcatatgaacagttttcacagaactgtaaaacatcagagttgaaatgctcatttgtttttcatactaaaattctgaggcctgg

SEQ ID NO: 208833 - DNA, 442 bp, Homo sapiens
catttggtctagagtgcagtttaactctgatgtttccttgtcaattttctgtctggatgatctgtccaacactgaaagtcgggtgttgaagtccccaactactattggatttcaatctctctcttcctttatatytattaatatttactttatatatttgagtgctctggcattgaatgcatatatatttataattgttacatcttcttgctgaactgaccacttcatccttatataacaaacttctttgtcactttttactgttttttacttgatgtgtattttatctgagagcagcatagttactactgctctttttgggtttctattttaatgtaatatcttttttctgtctctacacttccagtctatgtatgtctttataggtgaagtaacattaagcatataattaggtgctggtttttatctattcagtcactct

SEQ ID NO: 208834 - DNA, 538 bp, Homo sapiens
cttgtcagcaagcccagatgtgtgtggagcaggaggggaaaaagaagtgtggttaaagctgtcggcagtcaaacatccaaaaatggagtcagaattaaaaagtaaacttaataggtagtarttattaagagccagtaattaagctattctccttcagctccaaatctacccttctgttctctgctttgagatgctgggcctcagattcagaaaaccgtttttctgttgatgccaatggttccttgttaagctttgtcaatagggagtgttggagagagactggaagctgaaggaagacaggacctgctccttcttgactgcttcctgttgctgtcagtaaaacccagagttgtcaggccactcatttcggggacagcaactgatttcagtttgcagtttttctaacactcattgaatcagcttattgcaccatcagagacactagcaccagccagtcagtacccccttctcagaggtctcagttgcaaatctgtggggctcctcctgtaagcctctaagttttatttattctaacctc

SEQ ID NO: 208835 - DNA, 550 bp, Homo sapiens
catggaattgttctgttgcccaggctggggagcagtggtacaatcacggctcactacatcctccgacctctcccggcccaagcaatcctccccttcagcctcctgagtagctaggaccacagctgcgtgccaccatgcyaggctaatttttaaaattttttgtagagatgggtgttcctatgttgctcaggctggtcgtgaactcctggcctcaagtgatcctccttccttgacttcccaaagtactggtattagaggcgtgaaccaccgtgcctatctgactttattttttctctaactgttcattaggtagcttccctgaaactgatcatagctttccaaggtcgtggtaaaaatttaaatagtttttccctctcattctttttaaggaaaatgccatatatatttttatgttttaagagtgattgtctatatgcagataatattaaaatctacatgctactgatttaatgattatttgtcgcctacccatacttaaactaatttttgtgaaattagttccaaaaatcacaaaataaacacttaccat

SEQ ID NO: 208836 - DNA, 552 bp, Homo sapiens
tgtttctcactattaatctagtgcattttccaggccgtgtcaggaaagaaaacgaaactcagactttatagaaagaagtgagctttgttaggattttattagtttggtgaatgaaatacattttgtgcatttatttgtttgctgaaataaaaacatttgcacattgttctgcttataaatgttatatgctcattataaagagttcagaaagatattaaggagagagtgaaatgccaccattataccaccagcagttataatcactgttaagattttgatataaattatgaactgaccaaacttcctgtgcacacaagctcaagcaagtgtgtgtataaagcaaaagtaagtggtgctacacttactgttttgtgacctgcatttttgacttaacaatttattacaatattatctctccttttttctttcatttttattcctaaagtgctgcttatgttaatcgtattcctcagatcatggttcartatcaacattttttatataaagcccttcttgtgttttctcatatagttttaatttccctttatttgc

SEQ ID NO: 208837 - DNA, 369 bp, Homo sapiens
aagtttagatttgacaatgttctatctactatgttattgaaaccatataatatttaccaaattcccatacatggtagacagtgacattaattaagaagataatttccaatttgttccatgaagtttcagtgacccactctgtaataaagaacttggaaagggaggttccaagatggccaaatakgaacagctccagtctacagcccccagcgtgagtgatgcagaagacgggtgatttctgcatttccaactgaggtaccgggttcatctcactggggcttgtcagacagtgggtacaacccacggagcatgagccaaagcagggtggggcatcacctcacccaggaagcacaaggggttggggaattc

SEQ ID NO: 208838 - DNA, 493 bp, Homo sapiens
tacctgtcatctttcctctttggttcaacttgttttatggggacatttatgtgggaaaatatctttgcttttgtaatttatgtgggaaaatatctttgcttttgtgtttttacttaagtaaaatctgggctccttttatgtcaactagcttttccactattgttattatgatagaaagtacaggctacttataaacatgattagttcaatgagaacttttagaatattgctgacctaaatctggacatctacacaatcattaattcttaccaaaatgctacaaggcaatataagcataattagcctccctgatccctgaacatagcctaatatcactcactcaatcagaatcatactggaaacgatatgaccaactatggcaggtagtagatgtccagtcacactagtattgctttcagccagatgtctctggtccttgtgagttcctttsgtccttaatggtgaaatagcaacagagggaaccaactcactc

SEQ ID NO: 208839 - DNA, 555 bp, Homo sapiens
aagattttagttactttaatgttcaaaataaaattaaaaacagattattactaaaacataagcataacaacactttaatagcattctaatcagatattattaatttcaaaatggtaggacaaaactaattatactttatacttcttaaatatcctatagttactttatgactattgagacactagctaaaacttgaaacttcaagttttcattgattcctatattattacttatttcagagttacttcatttggttcttttatctgagattggacaacagctttatttgattttcagcgacaaaattcttttcactcctgatcctccaccccaagaaaacaacagctactaatatattttccctaaagtgatcaagaaataaaagaggaattctagccaggcgcggtggctcatgcctgtaatcccagctctttgggaggctgaggcgggtggatcacctgaggtcaggagttcgagaccagcctggccaacatggtgaaactccgtctctacyaaaacttaaaaaatgagccaagtgtggtggcgcatgcctgt

SEQ ID NO: 208840 - DNA, 490 bp, Homo sapiens
taattttagattctatgtatgagtgtgatcatgtggtatttgtttttctgtgtgtcacttatttcatactaatgtcctacaggtccatccatgttgcaaataacaatatatcatccccttttatggcagaatgatatgccattgtgtatacaaccacatattttaaccacatattgatgggcacaagttgattccatatcttggctattgtgaatagccctgcaataaacatgggagtgaagatatccctttaatacactcattatttcccttgggtaaatacccagtagagacatttttcataatggttgtactactttacattcccgccagtagtatatgagcattccagtttctctgcattyttacgagcaattgttatttttgtgtcttttttacaatagccatctactgggataagatgatatttcattgtggttttgatttgcgtttccctgatgattagtgatgttgactattttttcatata

SEQ ID NO: 208841 - DNA, 451 bp, Homo sapiens
tggcatttcaaaagtttctttttctctaatgaattaagaggttgcaaaagattttcacatgaaaacaaaggcaggcatagttaaattgccaatgagggtcatcttatttatacaccagtgacaaggtttagggatattgtgttatttttttagagcttctgtaacaaatatcacatactatgtggcctagaccacagaaatttatattctcacaattctggaggtgtcaggaaggttggtttcttcagaggtctctctccctgatttctaagtggttgctttccccctgtaaacttcacatggtcttccctctttgtgtgcctgtgtcatataagaacacamgacatattggattatgactcactctagtgacctccttttaacttaattaccactttaatgaccctatctccaaatacagtcacattatgaggtactggggattaggatt

SEQ ID NO: 208842 - DNA, 587 bp, Homo sapiens
atattgtctgatattagtataatcaacctactctcttttagtaactgtttgcatggaactctttttttcatcgtttcactttcttttttttaaaaaatattgttatatttttaagttgaataaaatgatgtttgatatacatatacacagtgaaatggttactatagtcatgcaaattaacatgtccatcatctcacatagttacacattttgtgtgtgtgtggtaagagtacctaaaatttagtcttttagcaaaactcccaagtacaataaaatactattaagtatactcctaatgttacacattagatctctaaatttgttcattctayatatttgataatttgtatcctttgacctacatctctccattcttcccacaattcccacacctcacctggggtaaccactgttttattctctatctctgtgtatttgacacttttttttcttttggattcctcatataagccagatcatgcagaagttttctttctgtgtctggcttatttcacttaacataatgtcctccagattcatccatgttgtgacaaacaagggctccctctttttataaagctgaataa

SEQ ID NO: 208843 - DNA, 556 bp, Homo sapiens
tatgaactgaggaactgagatgagtattttgaaggaagacactcataggaatgtagaactaggaaaacgaatagcaggagacttgacctggattgagatatcatggaggctgcacctagcagcttttggacwgacatgaagagcaagagatgttaatccagtgaaatgatggagggcctgaagcattctaagcagtgggacctacctgtgtccagacccttaggtggggaacttgcatggggtcttctagaatgaaatgaaaggatggctagaatataaacaatggctcacatctagtgagattagctctagaggtccgacacagtcagacctttaagaggggctttagaccatctttaaagtttgatttcttgtcccaagtacaataagaagtggttatgggttggtggtgacataataatagttacactttgcgaagattaccatggctacaatgaagtagacaaatggagatggtgggttgggtgggggaatagaatttggaaggcctggtaagaggctattgtaatattgcaggtaggagatcatgagcctc

SEQ ID NO: 208844 - DNA, 568 bp, Homo sapiens
aggctaggcacagtagctcacaccttcaatcccagcactctgggaggccaacgcaagaggatcacttgagcataggagttcaagatcagcctgggtaacatagttagacccygtctctacaaaaaataaaaaataaaaatcatctgggcatgagggcacacgcctgtggtcccaactacttaggatgctgaggcgggaggatagcttgagactaggaggtcaaggctacagtgagctgtgattgcaccactgtactccactttgggtgatagagttaaactttgtctcaaaaaaaaatatggcagatccgtatgatgactactatatagctgtggaaaagagtgaaaagagtcaaagattataattgctctccaagataaagcaaaaaaacaaggtgcagaacagtttgtatagtaagatatattttgtgtaccaaaaaaaccaagaataaaactatgtatttatatttgcttgaatatacccagaaactctgaaaaactgcacatacattaatagcagtaattggctgggtgcagtagctcactcctatagtcccagcactttggga

SEQ ID NO: 208845 - DNA, 568 bp, Homo sapiens
aggctaggcacagtagctcacaccttcaatcccagcactctgggaggccaacgcaagaggatcacttgagcataggagttcaagatcagcctgggtaacatagttagaccccgtctctacaaaaaataaaaaataaaaatcatctgggcatgagggcacacgcctgtggtcccaactacttaggatgctgaggygggaggatagcttgagactaggaggtcaaggctacagtgagctgtgattgcaccactgtactccactttgggtgatagagttaaactttgtctcaaaaaaaaatatggcagatccgtatgatgactactatatagctgtggaaaagagtgaaaagagtcaaagattataattgctctccaagataaagcaaaaaaacaaggtgcagaacagtttgtatagtaagatatattttgtgtaccaaaaaaaccaagaataaaactatgtatttatatttgcttgaatatacccagaaactctgaaaaactgcacatacattaatagcagtaattggctgggtgcagtagctcactcctatagtcccagcactttggga

SEQ ID NO: 208846 - DNA, 568 bp, Homo sapiens
aggctaggcacagtagctcacaccttcaatcccagcactctgggaggccaacgcaagaggatcacttgagcataggagttcaagatcagcctgggtaacatagttagaccccgtctctacaaaaaataaaaaataaaaatcatctgggcatgagggcacacgcctgtggtcccaactacttaggatgctgaggcgggaggatagcttgagactaggaggtcaaggctacagtgagctgtgattgcaccactgtactccactttgggtgatagakttaaactttgtctcaaaaaaaaatatggcagatccgtatgatgactactatatagctgtggaaaagagtgaaaagagtcaaagattataattgctctccaagataaagcaaaaaaacaaggtgcagaacagtttgtatagtaagatatattttgtgtaccaaaaaaaccaagaataaaactatgtatttatatttgcttgaatatacccagaaactctgaaaaactgcacatacattaatagcagtaattggctgggtgcagtagctcactcctatagtcccagcactttggga

SEQ ID NO: 208847 - DNA, 568 bp, Homo sapiens
aggctaggcacagtagctcacaccttcaatcccagcactctgggaggccaacgcaagaggatcacttgagcataggagttcaagatcagcctgggtaacatagttagaccccgtctctacaaaaaataaaaaataaaaatcatctgggcatgagggcacacgcctgtggtcccaactacttaggatgctgaggcgggaggatagcttgagactaggaggtcaaggctacagtgagctgtgattgcaccactgtactccactttgggtgatagagttaaacyttgtctcaaaaaaaaatatggcagatccgtatgatgactactatatagctgtggaaaagagtgaaaagagtcaaagattataattgctctccaagataaagcaaaaaaacaaggtgcagaacagtttgtatagtaagatatattttgtgtaccaaaaaaaccaagaataaaactatgtatttatatttgcttgaatatacccagaaactctgaaaaactgcacatacattaatagcagtaattggctgggtgcagtagctcactcctatagtcccagcactttggga

SEQ ID NO: 208848 - DNA, 616 bp, Homo sapiens
cttgagaattctgtaatctcacataaatgtctattttgcttcattagtgggatttttgtcctgcatgacagtttatacagtggtctttaaagtcaagtctaaacaccatagaaggtgtacaaagccatttcctatagtgtagaaagaactcactggaactttgtttatatttattttaaagtatctttaaagacttcctattatatatttgtgtttcatattcacwatgatttatgagtatttaatatgtgctaggcactattctaagtgctttaaagttagtaatattatttaatctttactgcaactctatgaagtagatacgcttaccatactcgtttttactgctgagaaaacttgagatgtcaaagttatggaaattgcccaaaataacacaaagttaaaatgttttaatggtgacaacccaggtatgagttccacctcttaactactcactatgcaatgcttgtacagttatagaatctaaaataaataagcacaaagtaaatagataatgacaatataggatgtgtattagacatactcgaaagtgacccccccattcccatgatccctgcctcctgatattcatagttttgtgccatcatctctgctt

SEQ ID NO: 208849 - DNA, 591 bp, Homo sapiens
aggcctcacaatcatggcagaaggtgaaaggcacgtcttacatggtgacagacaagagagaatgagagccaagtgaaactggtttataaaaccactggatctcgtaagacttattcactatcatgagaacaggatgggggaacckctcccatgattcaagtatcccccactgggtccctcacacaagacatgggaattatgggagctataattgagaatgagatttgggtggggacacagccatattgtatcacagaggttcaatcgactttcaatcatattttatttgcttcctctgtgttcataatgctgataatacttttaattatcaccaccattgtacaagataactgtccccagaccaacattttttatgtgaatattaattgattgaattactgattccagagaagggaaattacttatcatcaaacttaatgcatgaagaggcaggggattctaggaagatggacgtttctgcattcttgctactctcaactccattccaactcatctgtctctcctcagccagtgactcctgagggcagtgtcaggtaagcttggagaacattagtgaaggagctatagttg

SEQ ID NO: 208850 - DNA, 426 bp, Homo sapiens
gaattcgggggattacattaaaagaaactgatgtagggccaattcagtgtccaaaatgttgtggaaaactgtcttttttttttttttttttttgagggtatggcggggagagagtcttactctgtcttccaggctggagtgcagtgacacaatcatagctcactgccacctcaaactcctgggttcaggtgagcctcccgcctcagcctcctgagtagctgggaccacaggtatgcactaccacgcatcactaattacttttttatttgctgtagagacaaagtcttgctatgttgcttagggkggccttgaactcctggatttaagcaatcatcacatctcagcctctcaaagtgctgggattacaggcatatgccactttgcctggactgagaactaagtcttgctgtgggatgacatcaagct

SEQ ID NO: 208851 - DNA, 457 bp, Homo sapiens
atttgtacagataatctccgggtacactttgtattgaaatacaccaaaccaacccaaattgaattctaaagaccaatattattcttggctttatcttactaaagaagacaacttactaaaagccaatatctatccataaccaagtataatttattgggagtttccagagctttaaaatactaawtccgagtactatttcatttattctcaacaatttcatcattttgaaaattaatcaaccgtcaaaaaagttgaacactaaatgatactagatttaaattctgcatgtgttttatcagaatacgaatagcaaaacatattacagaattataaatatgtaaattatctttgaaaaagaatctgtgtaaactgagtaatcaataatatggctttaattttaaatgttaaaagctttatctttgccacacttcagtcgtgtgtgtgtgtgtgtgtgtgt

SEQ ID NO: 208852 - DNA, 644 bp, Homo sapiens
ggttaatattcaaaatatacaaggaactcttacaactcaacaataaaaaaaaaaacctgattaaaaatgggcaaaattacaataatctacrtttctagaataaagaatagaaaactatttagggtgatggatattctgatcacactgatatgatccttataaactatatgaatgtagtaaatgatcacatgtacccctaaaatatgatgtatcagttaaaaataaaattaattttaaaatgagcaaaagatctgaatagacatttctccaaagaagacatacaaatggccaacaggtatatgaaaaaaaatgttcaatatcactaattatcagggaaatgcaaatcaagactgcaagaagataacatctcactccaatcagaatggctacaattaaaaaatcataaaacacacagtattggtgaggatatagagagaaaagaaccttgacaaactgctggtagtaatataaattagcacaaccattatggaaaaccctatggagtttcctgcaaaaaaaactataggactgatcataatttttaaagttgtttatattgttgcatcattcagccactgtaacaactctatccccattttatgtgttcagagctgaggctcagaaagaataaatgacttacgtta

SEQ ID NO: 208853 - DNA, 419 bp, Homo sapiens
aggactgatcataatttttaaagttgtttatattgttgcatcattcagccactgtaacaactctatccccattttatgtgttcagagctgaggctcagaaagaataaatgacttacgttaaggattacaacaaacaagttccaaagcagaatctgccttttaactccaaactcctccaccacatttatcatcttccttcttctgtaccaaggagggctgcagagatgcctaagaagactaaaaactaccagatctacatccaatttatgctctgargttgtgtgctttggttatgactgaccctggggttatgcatttagttaggaaggacagaatgcttagcatttttattatacatggcattcatctccaacagtaacacactctttacattatgcgatgcatttccttctggcttc

SEQ ID NO: 208854 - DNA, 558 bp, Homo sapiens
tgttttttgtctgtgtactttgtttttttgatgtttgttttgctttttaacttgtatttttgttttataagtcctttgtgatttatgctttaaagaagttctgttttgaatgtttccaggatttgtttcaagatttagagttcctttgagtagttcttgtagtggtggcttgatagtggckaattctctcagcacttgtttgcctgaaaaagactctatttttccttcatatatagtgcttagtttcactggatacaaaattcttggctgataattgtttcgtttgaggaggctgaagataggtccccaatcccttctagcttgtagtgtttctgctgagaaatctgctgttaatttcataggttttcttttataggttacctggtgcttgtgtcttatagctcttaagattctttcctttgtcttaactttggataacctggtgacagtgtgcctaggcaatgatcttttgtgatgaatttcccaagtgttctttgtgcttcttgtatttggatgtctaagtctctagcaaggctggggaagtttttctgattattc

SEQ ID NO: 208855 - DNA, 599 bp, Homo sapiens
cacagttctcaaaataggtggtggatgatctgggctggcattcagtgtgtgctttaatttaaatttagcaaatgagagagagagaaagcgaaaagacactagtcccacttcctgcagaagaggggttaggacaggccccatctagtcccccagtgattctccaagaggcccaggcctggsgaggccttcagaggcccagaacatcttgaggaccacagaacctgtccacctgagagtccccatgctctaatgctgcccagtgatgtccagtggtgaagtgacttattcccttcatgtttatttcctaaggggagagtaaaccctgcatgtggtaggttctcccttcctaagctacaaacagttggttcaaggtaatccacatacatcttgtaactgggtataataaatcaacattagtaatctcttgctacaaattaatttcggattaaacacaatatcataattatgatctcttagcaattatcaattctttatctggctaagtgctaacatatcatagtcattagttaaacctgattcttccaagcatctcagcaagtaccttagtatttaatgcttcaactcagtaataatcagct

SEQ ID NO: 208856 - DNA, 599 bp, Homo sapiens
cacagttctcaaaataggtggtggatgatctgggctggcattcagtgtgtgctttaatttaaatttagcaaatgagagagagagaaagcgaaaagacactagtcccacttcctgcagaagaggggttaggacaggccccatctagtcccccagtgattctccaagaggcccaggcctggcsaggccttcagaggcccagaacatcttgaggaccacagaacctgtccacctgagagtccccatgctctaatgctgcccagtgatgtccagtggtgaagtgacttattcccttcatgtttatttcctaaggggagagtaaaccctgcatgtggtaggttctcccttcctaagctacaaacagttggttcaaggtaatccacatacatcttgtaactgggtataataaatcaacattagtaatctcttgctacaaattaatttcggattaaacacaatatcataattatgatctcttagcaattatcaattctttatctggctaagtgctaacatatcatagtcattagttaaacctgattcttccaagcatctcagcaagtaccttagtatttaatgcttcaactcagtaataatcagct

SEQ ID NO: 208857 - DNA, 599 bp, Homo sapiens
cacagttctcaaaataggtggtggatgatctgggctggcattcagtgtgtgctttaatttaaatttagcaaatgagagagagagaaagcgaaaagacactagtcccacttcctgcagaagaggggttaggacaggccccatctagtcccccagtgattctccaagaggcccaggcctggcgaggccttcagaggcccagaacatcttgaggaccacagaacctgtccacctgagagtccccatgctctaatgctgcccagtgatgtccagtggtgaagtgacttattcccttcatgtttatttcctaaggggagagtaaaccctgcatgtggtaggttctcccttcctaagctacaaacagttggttcaaggtaatccacatacatcttgtaactgggtataataaatcaacattagtaatctcttgctacaaattaatttcggattaaacacaatatcataattatgatctcttagcaattatcaattctttatctggmtaagtgctaacatatcatagtcattagttaaacctgattcttccaagcatctcagcaagtaccttagtatttaatgcttcaactcagtaataatcagct

SEQ ID NO: 208858 - DNA, 414 bp, Homo sapiens
tggcactgtcattcatcactgtgcagtacagagcagtggctctcaaagggtggttctgaaccagcagcattagcatcactggaaattgtgttagaaatactaattaaaaaaaaaaaaacaaaacaaaaaaccctaaacctcccaattaagcatgctggggtggggcccggaaaaatgtttgaacraataaattctccatgtgattctgatgctcactgaagtttgagaaccacactaaagtgttgagaattgaggagtctgcactcatgttctttgtatttgcactgcatatacaggtcattgcgtgttctatcaatgtgaaatcaaagagctccttagagtcagaattttgcagccacaaatagacacatcttttgttatctattccctggcttttgatgtccctccactata

SEQ ID NO: 208859 - DNA, 572 bp, Homo sapiens
gacctaaatgcctcccaccaggccccacctccagcattggggatcaaatttcaacatgagatttggaggggacagatattcaagctttatcagttcctctctcccaccaagataaaattgtatatttataactacctttacctccttttcccagggtttagagacaagatgcatttaccagtccttatatctttcatgtttttatgcccgttatgagaaaatcctagctacttatgcccttgaccttgtattcccatactttctcataaatttatttccttcactcactcatgctctcyccaatagcttcaatttatcctctccatttgattcaccttagattatattatttgagaccacctcctaaaattaacactaggatcaccaggattacgttgctctgctagattttggctttatacattccagctttacgtagtgaagaagctgtgagctactaaagagactttcttcccttttttttttgtgctcctgatattgttgaatactgccgtagaaatggattacacttcaattcacctcatgcatgctaaaagacacctgtaaatgag

SEQ ID NO: 208860 - DNA, 572 bp, Homo sapiens
gacctaaatgcctcccaccaggccccacctccagcattggggatcaaatttcaacatgagatttggaggggacagatattcaagctttatcagttcctctctcccaccaagataaaattgtatatttataactacctttacctccttttcccagggtttagagacaagatgcatttaccagtccttatatctttcatgtttttatgcccgttatgagaaaatcctagctacttatgcccttgaccttgtattcccatactttctcataaatttatttccttcactcactcatgctctccccaatagcttcaatttatcctctccatttgattcaccttagattatattatttgagaccacctcctaaaattaacactaggatcaccaggattacgttgctctgctagattttggctttatacattccagctttacgtagtgaagaagctgtgagctactaaagagactttcttccctttttyttttgtgctcctgatattgttgaatactgccgtagaaatggattacacttcaattcacctcatgcatgctaaaagacacctgtaaatgag

SEQ ID NO: 208861 - DNA, 565 bp, Homo sapiens
tagtatgatattgagtgttctgtcatgagtcacctaatattcagaccttcaaagaaaggatcttttgggatccatttgtcacttttcagtattgatcaccctattgattagaatttttcacgcaaagtggtttttttttctgtaataattcaacaacctatcatgtgtcaaacactgtcctcagttctgagtttactttgtttttttgaamtacactgtaccttcttttagcttacattatagtaatctttcatttaaaagaaatttagcctttttgtagccagcccaaacacaactgactttggttcaggaaataatagctaggatagggcaattgctttcacttgacccaagtagcagtagctactgcaacgttatacagacaaggcctcctagagattctttattggaaggggttttaactttatgagctctatgaacgtagccgcaggacacattgcaccttggaacgatttcctctgtggtctatcttgccctcagccttaaatgacaatctaagtggagttgggagtgcatacagcccttttcttaaaaataattgtgt

SEQ ID NO: 208862 - DNA, 565 bp, Homo sapiens
tagtatgatattgagtgttctgtcatgagtcacctaatattcagaccttcaaagaaaggatcttttgggatccatttgtcacttttcagtattgatcaccctattgattagaatttttcacgcaaagtggtttttttttctgtaataattcaacaacctatcatgtgtcaaacactgtcctcagttctgagtttactttgtttttttgaactacactgtaccttcttttagcttacattatagtaatctttcatttaaaagaaatttagcctttttgtagccagcccaaacacaactgactttggttcaggaaataatagctaggatagggcaattgctttcacttgacccaagtagcagtagctactgcaacgttatacagacaaggcctcctagagattctttattggaaggggttttaactttatgagctctatgaacgtagccgcaggacacattgcaccttggaacgatttcctctgtggtctatcttgccctcagccttaaatgacaatctaagtggagttgggartgcatacagcccttttcttaaaaataattgtgt

SEQ ID NO: 208863 - DNA, 589 bp, Homo sapiens
tttattgtttgtgtgcagggttaaagagaagccaataagttaacatgttatatttgacatgggagctgttcactccaaattttaagaaaagccagaaaaatcacgtacaggcaaccaaccagagcgttaaaatggccttttgttaattgttaaaaatctgtatagaagtacatttttttttaatttgtaaaagtggaagcaatttgagtcactttaatttacagcatgaatggaagattctyggagtcatctataacctcagcagaaaatgtgattataaaagtttataaaaaccccagttccccagagagctatgaaatgagcagagtgcagaacatattctatcagtctcttgaaatattatttgccctcttaactgataaggcaatggaggaagaaagtaagaatgtaatacaaatatgaaaaagtgactacctttgcctgccttcaacaaacctaactttaaataaaataagaataatgaacaaatcagctaaaaaagaaaacagcttttcccctagtttcttttgaagtgaatctccctttactttttttaaatttcttggaatcctacaaattaaggcttcct

SEQ ID NO: 208864 - DNA, 589 bp, Homo sapiens
tttattgtttgtgtgcagggttaaagagaagccaataagttaacatgttatatttgacatgggagctgttcactccaaattttaagaaaagccagaaaaatcacgtacaggcaaccaaccagagcgttaaaatggccttttgttaattgttaaaaatctgtatagaagtacatttttttttaatttgtaaaagtggaagcaatttgagtcactttaatttacagcatgaatggaagattctcggagtcatctataacctcagcagaaaatgtgattataaaagtttataaaaaccccarttccccagagagctatgaaatgagcagagtgcagaacatattctatcagtctcttgaaatattatttgccctcttaactgataaggcaatggaggaagaaagtaagaatgtaatacaaatatgaaaaagtgactacctttgcctgccttcaacaaacctaactttaaataaaataagaataatgaacaaatcagctaaaaaagaaaacagcttttcccctagtttcttttgaagtgaatctccctttactttttttaaatttcttggaatcctacaaattaaggcttcct

SEQ ID NO: 208865 - DNA, 531 bp, Homo sapiens
cacagttataaatgctgctgtgttcagaacaaagtctgatcttagtttctgatctctgaacccacaaggggtgtcagtctgtgtcactccaggcaagtgctttcatgtcttggggcctcagcaaataatgaagctaaagctatagcagctcttataaacaaagatagatccaatgattaaatctaaattcatcaaccagaaacactcaytactattcaaagtgcccagggccaccaagaattcttctaataaactttctttctgaggttcctatgtcctaaaagccacatgtcacttatcaataataataatacaccttgccatttgaggttgaccaaaaatgtacttaactataaagcagtgcttctgatgagcaagagaaaacctatgtctgcaggaaaactatgatgtaattccaaccaaaagtaatgacatttaagatttgtgttatgaataactgtatattttatgcttggaaaaatacatagtgcttataacttatagaagctgccatttgaccctgtgctaccc

SEQ ID NO: 208866 - DNA, 475 bp, Homo sapiens
tgacagctcactcttggtagggaacagagtgtaggaagtgatcgtttcaaacttctcttgcagctccatctgccaaaagcccctctaccagttgccgtatttaccctggctgccaggcctctctcagctgccctaagaaaacagattaccgtccagagcaaagtcctcgtgtgtttcctttctggagatgaatcaagttctgaaagaaaggtttcctgtagcccattacaccatttcagtttgttttatctgtctccacctgcggagcagggaattaacctgctgcccagggccrggccagcgaatgcttggaaggaaagcaaagcgcacgggtgtgcgttttttgacaacagaccatggccttgttctcctcagcagagcattgtccccatgaggcccaggcccaaatctgaataggactttgtgtaactcgatctgttttccttcttggctatagtctctgtgccaaatttaa

SEQ ID NO: 208867 - DNA, 482 bp, Homo sapiens
ccttctcccccttggaactcaacagtggcttcctgtcactctgagaacagaatgcagcctcctccctgtgcatgacaagcacctccctgaggtcacagctgtggctccctgactctgcactggtccagtccagcctcaagsgcttaaatttgccactccagaaccctggtttggaccctggactctgaatacattctggtcttttcctcagggaggtcgaggcactgtcctagcttgtgacctgctcccatacctattttctcagggtggaagcagacgctccaactcccacactatgaggctggtaccattacctccaagacccaaagcctgtaggaagtatagcaggcctcacccaataccctgcagttccctcacttgctccaagtgggaggtgggtcttcacgggtccccaagatgagggccagtggctttcctctttcacaggctacagtgggagcgagtcttccaccatgggacct

SEQ ID NO: 208868 - DNA, 482 bp, Homo sapiens
ccttctcccccttggaactcaacagtggcttcctgtcactctgagaacagaatgcagcctcctccctgtgcatgacaagcacctccctgaggtcacagctgtggctccctgactctgcactggtccagtccagcctcaagcscttaaatttgccactccagaaccctggtttggaccctggactctgaatacattctggtcttttcctcagggaggtcgaggcactgtcctagcttgtgacctgctcccatacctattttctcagggtggaagcagacgctccaactcccacactatgaggctggtaccattacctccaagacccaaagcctgtaggaagtatagcaggcctcacccaataccctgcagttccctcacttgctccaagtgggaggtgggtcttcacgggtccccaagatgagggccagtggctttcctctttcacaggctacagtgggagcgagtcttccaccatgggacct

SEQ ID NO: 208869 - DNA, 493 bp, Homo sapiens
cttctcccccttggaactcaacagtggcttcctgtcactctgagaacagaatgcagcctcctccctgtgcatgacaagcacctccctgaggtcacagctgtggctccctgactctgcactggtccagtccagcctcaagcgcttaaatttgccactccagaaccctggtttggaccctggactctgaatacattctggtcttttcctcagggaggtcgaggcactgtcctagcttgtgacctgctcccatacctattttctcagggtggaagcagacgctccaactcccacactrtgaggctggtaccattacctccaagacccaaagcctgtaggaagtatagcaggcctcacccaataccctgcagttccctcacttgctccaagtgggaggtgggtcttcacgggtccccaagatgagggccagtggctttcctctttcacaggctacagtgggagcgagtcttccaccatgggacctctggccagatct

SEQ ID NO: 208870 - DNA, 515 bp, Homo sapiens
aataaatatttgcacatccttattccaatatagcagcattgtttgccatatccraaaggtagaaacaacccgagtgtttacagatggatgaataaacaaaatgtggtctatacatacagtggaatattattcagccttaaaaggaaaagaaacagtgctatatgctacagtatggaagaacctggaaggctttatgctaagcgactgaagccagacaaaaaaggacaaatacactatagttccacttatatgaggtacctagagtagtccactgcatagagatggaaagcagaatggtgtgctaggcacggtggctcacgcctataatcctagccctttgggaggccgaggcaggcagatcacttgaggtcaagagttcgagaccagcctggccaacatagtgaaacccctctctactaaaaatacaaaaattagccaggtgtggtggtgtgcacctgtaatcccagctactcggggggctgaggtataagaatcggttgaacccaggaggcaga

SEQ ID NO: 208871 - DNA, 515 bp, Homo sapiens
aataaatatttgcacatccttattccaatatagcagcattgtttgccatatccaaaaggtagaaacaacccgagtgtttacagatggatgaataaacaaaatgtggtctatacatacagtggaatattattcagccttaaaaggaaaagaaacagtgctatatgctacagtatggaagaacctggaaggctttatgctaagcgactgaagccagacaaaaaaggacaaatacactatagttccacttatatgaggtacctagagtagtccactgcatagagatggaaagcagaatggtgygctaggcacggtggctcacgcctataatcctagccctttgggaggccgaggcaggcagatcacttgaggtcaagagttcgagaccagcctggccaacatagtgaaacccctctctactaaaaatacaaaaattagccaggtgtggtggtgtgcacctgtaatcccagctactcggggggctgaggtataagaatcggttgaacccaggaggcaga

SEQ ID NO: 208872 - DNA, 551 bp, Homo sapiens
ttctttaatttattttagcaattacattataattctcaatgtatagatctttctatcttttatcacatttgccctattttatacgttttgacccaytataaatggtatttttaaaatttcaatttccggttgttcattgcaagtatatagaaacataattgatttctgtacattagccttatattctatatttttgctaaagtcacatttttagttctagtagtctttttttcataggattttctgcatacacactcatgtcatctacaaataaagatggcttttcttctttatttccaatctcaatctcttttgtttccatttcttgctgttgcactggatagcaccttcagtacaatgttgaatttgtgagagtttctgatcttaagaggaaaacactcagtctttcaccgttaagaatgatgttacctataggcttttcatagatgttcccttagcaggttgaagaagtttccatctattcttagtttgctagactttttatcaggaacgtttgttgagttttatcaaatttttttctgcatctattg

SEQ ID NO: 208873 - DNA, 551 bp, Homo sapiens
ttctttaatttattttagcaattacattataattctcaatgtatagatctttctatcttttatcacatttgccctattttatacgttttgacccactataaatggtatttttaaaatttcaatttccggttgttcwttgcaagtatatagaaacataattgatttctgtacattagccttatattctatatttttgctaaagtcacatttttagttctagtagtctttttttcataggattttctgcatacacactcatgtcatctacaaataaagatggcttttcttctttatttccaatctcaatctcttttgtttccatttcttgctgttgcactggatagcaccttcagtacaatgttgaatttgtgagagtttctgatcttaagaggaaaacactcagtctttcaccgttaagaatgatgttacctataggcttttcatagatgttcccttagcaggttgaagaagtttccatctattcttagtttgctagactttttatcaggaacgtttgttgagttttatcaaatttttttctgcatctattg

SEQ ID NO: 208874 - DNA, 584 bp, Homo sapiens
ttccggttgttcattgcaagtatatagaaacataattgatttctgtacattagccttatattctatatttttgctaaagtcacatttttagttctagtagtctttttttcataggattttctgcatacacactcatgtcatctacaaataaagatggcttttcttctttatttccaatctcaatctcttttgtttccatttcttgctgttgcactggatagcaccttcagtacaatgttgaatttgtgagagtttctgatcttaagaggaaaacactcagtctttcaccgttaagaatgatgttacctataggcttttcatagatgttcccttagcaggttgaagaagtttccatctattcttagtttgctagactttttatcargaacgtttgttgagttttatcaaatttttttctgcatctattgagacatgcaatcttctagtgccgtcattttacaagctcaagtgaagtgtagggcacttacctttctttacgtcctactatcctctctgtttataatataattgcttaaatattttctctgcatatatttaggatcacattagatagttataatttt

SEQ ID NO: 208875 - DNA, 613 bp, Homo sapiens
cttccaagtcagctgttgatggtagtgaagacccaaggcccagagagggagcaactggccctagagttgcatgatgagtcttcagtggcaaggccgagattagaggtctgtactcagcattcagctattggtggacagaactcgtcctttgcttcctaagtgcggcttcagtcctgtcatggccctgcacttccccgattccctgcccactccgtccccacttcttcaggtgcttccccatgggaactggtagaatagtgttagaaagccacatccatagtatggcctcttgaggatttctggtttgtgtgactttgagcaagtcctcccctgatgttggaggattcttacccctgaagttggggaaggagtgaaatcttgatggtaggacatcygctcacatgtcctttgagacttaccacgtttgtcaccatgtatttagcacagctgcctttcatctgcaaatacagcctgggagctctttatgttttatctaattttaattcttataacaatcccatggagttgttaggtagtaaagtgctctctctgtttttacagatggaaatctggagactgagtgaggttgagtaatttgcccgaggttggcaag

SEQ ID NO: 208876 - DNA, 613 bp, Homo sapiens
cttccaagtcagctgttgatggtagtgaagacccaaggcccagagagggagcaactggccctagagttgcatgatgagtcttcagtggcaaggccgagattagaggtctgtactcagcattcagctattggtggacagaactcgtcctttgcttcctaagtgcggcttcagtcctgtcatggccctgcacttccccgattccctgcccactccgtccccacttcttcaggtgcttccccatgggaactggtagaatagtgttagaaagccacatccatagtatggcctcttgaggatttctggtttgtgtgactttgagcaagtcctcccctgatgttggaggattcttacccctgaagttggggaaggagtgaaatcttgatggtaggacatctgctcacatgtcctttgagacttaccacgtttgtcaccatgtatttagcacagctgcctttcatctgcraatacagcctgggagctctttatgttttatctaattttaattcttataacaatcccatggagttgttaggtagtaaagtgctctctctgtttttacagatggaaatctggagactgagtgaggttgagtaatttgcccgaggttggcaag

SEQ ID NO: 208877 - DNA, 515 bp, Homo sapiens
atagcctaggcaggtagtaggctatgccatctaggattgtgtaagtatactctgtgatrttcgcatcacaaagaaattgcctaacgatgcatttctcagactgtatccctctcattagcaatgcatgattgtatctgtaaaaatctaaggcccagacctcagtcttttggtgttcattctgctggtttactcagtttgcaccgttgaagacccagtcctagaaaggagctttctaaattattgtttaattagtgtaatccaagaatttatgagacttttggaaaagcagagcgctagaagtgccacctttcggaggtcacggatttagtcaggtgacccagcaaactcaactcgttggggttagagatggagaattagaaccaaagctgaatcactttctgcttatcactcatagactgccagattttctttttttgttggagggaaagcaccttacaacaaataataatactattttgaatttcagagctttccctttttcaaagcactttacc

SEQ ID NO: 208878 - DNA, 515 bp, Homo sapiens
atagcctaggcaggtagtaggctatgccatctaggattgtgtaagtatactctgtgatgttcgcatcacaaagaaattgcctaacgatgcatttctcagactgtatccctctcattagcaatgcatgattgtatctgtaaaaatctaaggcccagacctcagtcttttggtgttcattctgctggtttactcagtttgcaccgttgaagacccagtcctagaaaggagctttctaaattattgtttaattagtgtaatccaagaatttatgagacttttggaaaagcagagcgctagaagtgccacctttcggaggtcacggatttagtcaggtgacccagcaaactcmactcgttggggttagagatggagaattagaaccaaagctgaatcactttctgcttatcactcatagactgccagattttctttttttgttggagggaaagcaccttacaacaaataataatactattttgaatttcagagctttccctttttcaaagcactttacc

SEQ ID NO: 208879 - DNA, 576 bp, Homo sapiens
agcatggaatgactttctcttagagaacttatgttgcttccttgagaccaccaatttcttcccaaaagcttgtgagccttatttcgtgtctcttttgggttttcttggaacttggaggaagtctgttcttctgtagtttttagaatccattcctctggaaaatggtggtggtgtttgcttattcccagcyttccagactctctccctttttctccagtatctctaagatgtttgcaagtttgtctgaagtgagatctgcacatacttgaactacagcaagaatgggattgacccacatgctctgtgcccacgaccaggctgacagggccgcatgtgggctctctggcatgggctttaggcagctccttcccctgagaagctgttggatccacatgttctcacggtatcaaaaacggcaggaagagaaaactaacctggtggagatgaaacttagtgggaacactccgctttcctcccctgctccgtgtgtgagcacttggctcagaaatgcactgtggctgagacagccctatctggcttcacctaagcctacccccgtgttgagttctttaactt

SEQ ID NO: 208880 - DNA, 576 bp, Homo sapiens
agcatggaatgactttctcttagagaacttatgttgcttccttgagaccaccaatttcttcccaaaagcttgtgagccttatttcgtgtctcttttgggttttcttggaacttggaggaagtctgttcttctgtagtttttagaatccattcctctggaaaatggtggtggtgtttgcttattcccagccttccagactctctccctttttctccagtatctctaagatgtttgcaagtttgtctgaagtgagatctgcacatacttgaactacagcaagaatgggattgacccacatgctctgtgcccacgaccaggctgacagggccgcatgtgggctctctggcatgggctttaggcagctccttcccctgagaagctgttggatccacatgttctcacggtatcaaaaayggcaggaagagaaaactaacctggtggagatgaaacttagtgggaacactccgctttcctcccctgctccgtgtgtgagcacttggctcagaaatgcactgtggctgagacagccctatctggcttcacctaagcctacccccgtgttgagttctttaactt

SEQ ID NO: 208881 - DNA, 420 bp, Homo sapiens
aagcttggtttctgatgagaacctgactgtccagacagtagagagttcacaatcacccttttctgctgggtgatgtcccagaggaaagcctgggtcctcaccctagtgaggccattcaccagactcagatcagtttccttatccaccaaacatggtcagagcactgggctgctcagcatctcggtgtgcctgagaagtaataagaggatgaacccagtcagcacatagttgttgatgaggctcggatctcaaacgcyggggacagaccgggaaataagacagaccacagtctgccttttgggagtggagtgagagacagacagatgataattgaacattcaggataagtgctgataatgataagtctatgaataaaataaaataaaatcacaagatagagagaaatggtggggaggaagg

SEQ ID NO: 208882 - DNA, 548 bp, Homo sapiens
caagcccaacacacatttaaacatgtcagatgagctgtgtggacgtgccagggttccctcaaacactattcgatatcctttcaawcagcgtttaaagatagctaataagcaaacaattctgttttctttagttttgcttttaatgaaggacaagggattaagacacacagagactggccagacaaatgggaaaccgaccagaccagcccatgaccaaaatatcacaggcagaccacccgcaaatgcagaggcctcagagtccacagtgggcagttggaaccaggccccagggaatctttcagctgcattccggctgtgatcggcgggcaacaggtagaggtgctggagggggatgagtcgtgattttcagtgtctgtcatattcgatcaagtgtgtcatagagcttcctgtttcatctcccagttattctgaaacaaaaacatgcatgaaaaacacaggtcactgccaaccacactgacagtcgctctagtacatggaaactgaaaagggaaagacatatcatgaatgccacaataagccagagaatc

SEQ ID NO: 208883 - DNA, 548 bp, Homo sapiens
caagcccaacacacatttaaacatgtcagatgagctgtgtggacgtgccagggttccctcaaacactattcgatatcctttcaatcagcgtttaaagatagctaataagcaaacaattctgttttctttagttttgcttttaatgaaggacaagggattaagacacayagagactggccagacaaatgggaaaccgaccagaccagcccatgaccaaaatatcacaggcagaccacccgcaaatgcagaggcctcagagtccacagtgggcagttggaaccaggccccagggaatctttcagctgcattccggctgtgatcggcgggcaacaggtagaggtgctggagggggatgagtcgtgattttcagtgtctgtcatattcgatcaagtgtgtcatagagcttcctgtttcatctcccagttattctgaaacaaaaacatgcatgaaaaacacaggtcactgccaaccacactgacagtcgctctagtacatggaaactgaaaagggaaagacatatcatgaatgccacaataagccagagaatc

SEQ ID NO: 208884 - DNA, 548 bp, Homo sapiens
caagcccaacacacatttaaacatgtcagatgagctgtgtggacgtgccagggttccctcaaacactattcgatatcctttcaatcagcgtttaaagatagctaataagcaaacaattctgttttctttagttttgcttttaatgaaggacaagggattaagacacacagagactggccagacaaatgggaaaccgaccagaccagcccatgaccaaaatatcacaggcagaccacccgcaaatgcagaggcctcagagtccacagtgggcagttggaaccaggccccagggaatctttcagctgcattccggctgtgatcggcgggcaacaggtagaggtgctggagggggatgagtcgtgattttcrgtgtctgtcatattcgatcaagtgtgtcatagagcttcctgtttcatctcccagttattctgaaacaaaaacatgcatgaaaaacacaggtcactgccaaccacactgacagtcgctctagtacatggaaactgaaaagggaaagacatatcatgaatgccacaataagccagagaatc

SEQ ID NO: 208885 - DNA, 509 bp, Homo sapiens
accacactgacagtcgctctagtacatggaaactgaaaagggaaagacatatcatgaatgccacaataagccagagaatcaaatttatcagcatctattcaaatattggcaagcaacaaacattgctggcggcaatggtggtgcgggacatggggtgtccacataaacagaattcagaagagactgaaaaggcagatgttcccaaaagcctgctgctttgtttggggccagcctgtgtgtttattgaaaagttgattcagttctgacttcctggtcagggtctgactcctgatgggccctgaggctcttcccctacatgcccctgttgacttggatgaagagtcacacaaggacttacaggatggcacaggtgttcgcccaggtggtgccctgcactcccctctccaaaggcccaaagagacccaatgagagatcccygtggaattccagcccaatgaggtcctgagactccccgggagacatggcctcccaggtgcatcaaataatca

SEQ ID NO: 208886 - DNA, 490 bp, Homo sapiens
attcaggattgtgtgttggaggccaacattgggtaccatgagtggaaaccatgaactggggcaagtcctcctggtacacacacccagctactttttccttcctcttctgcccyatcccagggaaccctctttgcagcatctcacccactggccaaacttcagggtcttgtcttcatacttactgcttttttctaagggaaaagttattgagaaggcagtcaaggttcatttatttttaaccaggagacagtgcccccaaacaagaactgagtccctagttatggaatgtcagacacctcgcagcaggtggtggttctgaaacacccggatccagatggcagccaactccacccacatgtcaggcgggcgacagcatttccggacatattccttgtttagatgaggagattctgcccccagtaacattccttcaagcagcaaaatgatgctagatctttccagaggtcacagactgaaggcttgggggcta

SEQ ID NO: 208887 - DNA, 490 bp, Homo sapiens
attcaggattgtgtgttggaggccaacattgggtaccatgagtggaaaccatgaactggggcaagtcctcctggtacacacacccagctactttttccttcctcttctgccctatcccagggaaccctctttgyagcatctcacccactggccaaacttcagggtcttgtcttcatacttactgcttttttctaagggaaaagttattgagaaggcagtcaaggttcatttatttttaaccaggagacagtgcccccaaacaagaactgagtccctagttatggaatgtcagacacctcgcagcaggtggtggttctgaaacacccggatccagatggcagccaactccacccacatgtcaggcgggcgacagcatttccggacatattccttgtttagatgaggagattctgcccccagtaacattccttcaagcagcaaaatgatgctagatctttccagaggtcacagactgaaggcttgggggcta

SEQ ID NO: 208888 - DNA, 490 bp, Homo sapiens
attcaggattgtgtgttggaggccaacattgggtaccatgagtggaaaccatgaactggggcaagtcctcctggtacacacacccagctactttttccttcctcttctgccctatcccagggaaccctctttgcagcatcycacccactggccaaacttcagggtcttgtcttcatacttactgcttttttctaagggaaaagttattgagaaggcagtcaaggttcatttatttttaaccaggagacagtgcccccaaacaagaactgagtccctagttatggaatgtcagacacctcgcagcaggtggtggttctgaaacacccggatccagatggcagccaactccacccacatgtcaggcgggcgacagcatttccggacatattccttgtttagatgaggagattctgcccccagtaacattccttcaagcagcaaaatgatgctagatctttccagaggtcacagactgaaggcttgggggcta

SEQ ID NO: 208889 - DNA, 548 bp, Homo sapiens
ttcatccatttctttaataagaggccatgttactcatccaaggccacacagctggggaagcagcagcagggcctggcaggaagatgttctggtggaagtgaggccattcatcatgtccaagaagctgtcatctgggtggccagcgttgggtgagaggccaactcatacacttgttggaaggttccctctattggaccctgggcatttctatttaacccraacacgcctctgcataagtccaggtatctccatcagatcttctccgcaggttatcctcataggcaactggacgaggggcccatccccaatacaaccaggctgcacagactcctgctcccaccgctgggtagcagagacacagcctcctgccctatctcacaaatccatggatgtgacccatgggagtgacttccatttaaagttttgggcaaatctcggagattgctgttttcaaccactggggaagcttaaagccaaacagtcctactggcatagaagtaagcctcatttgttttctatctgaacacatgttttacatcaagagaagg

SEQ ID NO: 208890 - DNA, 548 bp, Homo sapiens
ttcatccatttctttaataagaggccatgttactcatccaaggccacacagctggggaagcagcagcagggcctggcaggaagatgttctggtggaagtgaggccattcatcatgtccaagaagctgtcatctgggtggccagcgttgggtgagaggccaactcatacacttgttggaaggttccctctattggaccctgggcatttctatttaacccaaacacgcctctgcataagtccaggtatctccatcwgatcttctccgcaggttatcctcataggcaactggacgaggggcccatccccaatacaaccaggctgcacagactcctgctcccaccgctgggtagcagagacacagcctcctgccctatctcacaaatccatggatgtgacccatgggagtgacttccatttaaagttttgggcaaatctcggagattgctgttttcaaccactggggaagcttaaagccaaacagtcctactggcatagaagtaagcctcatttgttttctatctgaacacatgttttacatcaagagaagg

SEQ ID NO: 208891 - DNA, 548 bp, Homo sapiens
ttcatccatttctttaataagaggccatgttactcatccaaggccacacagctggggaagcagcagcagggcctggcaggaagatgttctggtggaagtgaggccattcatcatgtccaagaagctgtcatctgggtggccagcgttgggtgagaggccaactcatacacttgttggaaggttccctctattggaccctgggcatttctatttaacccaaacacgcctctgcataagtccaggtatctccatcagatcttctccgcaggttatcctcataggcaactggacgaggggcccatccccaatacaaycaggctgcacagactcctgctcccaccgctgggtagcagagacacagcctcctgccctatctcacaaatccatggatgtgacccatgggagtgacttccatttaaagttttgggcaaatctcggagattgctgttttcaaccactggggaagcttaaagccaaacagtcctactggcatagaagtaagcctcatttgttttctatctgaacacatgttttacatcaagagaagg

SEQ ID NO: 208892 - DNA, 548 bp, Homo sapiens
ttcatccatttctttaataagaggccatgttactcatccaaggccacacagctggggaagcagcagcagggcctggcaggaagatgttctggtggaagtgaggccattcatcatgtccaagaagctgtcatctgggtggccagcgttgggtgagaggccaactcatacacttgttggaaggttccctctattggaccctgggcatttctatttaacccaaacacgcctctgcataagtccaggtatctccatcagatcttctccgcaggttatcctcataggcaactggacgaggggcccatccccaatacaaccaggctgcacagacycctgctcccaccgctgggtagcagagacacagcctcctgccctatctcacaaatccatggatgtgacccatgggagtgacttccatttaaagttttgggcaaatctcggagattgctgttttcaaccactggggaagcttaaagccaaacagtcctactggcatagaagtaagcctcatttgttttctatctgaacacatgttttacatcaagagaagg

SEQ ID NO: 208893 - DNA, 465 bp, Homo sapiens
gagtcttctcagtggagtctggtctgggtagagatgtcaaaggcaaaccatcacctccttgacttgttggctctaggtgatgatgctaacctgacctggagggatagcccttctatggggtgggcaggggcagccagaggtgttctgaaaaccagagaagtctcctcactggaaaacatttattcctgggatctgtcagttgatggcagaaatgttcattgttaaagagccrtttctttggcttattaattggtcctctgttagccagtcaacaatactgtacccagcacagatatccttgagaaatgaaggagaaataaagtctttcctagataagcaaaaactgatggaatttatcatcactagactgaccctacaataaatgcttaagagagtcctacatctggaagcaaaagggctatattcaccatcatgaaaacccaaaagtataaaactcattggtaa

SEQ ID NO: 208894 - DNA, 476 bp, Homo sapiens
gtaactcgttctcattgctgggtggtatctatcttatggtccctttctcatcatcatgagcatttaagtgaagatcgtcttcaggatttccatgtgctcatgtgrgagagtaagtcctgaaagtggaacatcacctgtaaatatattaaagacagggttttccaatttaactgggaaagtctccagactcagctggagctacattatctgtttctctaagaaagaatttttctgtccataaactcattgtattagtccattcttgcactgctataaagaaatacctgagactgggtcatttacaaagaaaagaggtttacttggctcacggttctgcaggctgtagagcaagcgtagtggattctgcttctggggaggcctcagaaagcttccaatcatggcagaaagcaagggggaacaggtgtcttacatagcaggagcaggagcaagagagagtgagaggggagatgcttcac

SEQ ID NO: 208895 - DNA, 485 bp, Homo sapiens
gtaactcgttctcattgctgggtggtatctatcttatggtccctttctcatcatcatgagcatttaagtgaagatcgtcttcaggatttccatgtgctcatgtgggagagtaagtcctgaaagtggaacatcacctgtaaatatattaaagacagggttttccaatttaactgggaaagtctccagactcagctggagctacattatctgtttctctaagaaagaatttttctgtccataaactcattgtattagtccattcttgcactgctataaagaaatacctgagactgggtcatttacaaagaaaagaggtttacttggctcacggttctgcaggctgtasagcaagcgtagtggattctgcttctggggaggcctcagaaagcttccaatcatggcagaaagcaagggggaacaggtgtcttacatagcaggagcaggagcaagagagagtgagaggggagatgcttcacacttttaaa

SEQ ID NO: 208896 - DNA, 476 bp, Homo sapiens
gtaactcgttctcattgctgggtggtatctatcttatggtccctttctcatcatcatgagcatttaagtgaagatcgtcttcaggatttccatgtgctcatgtgggagagtaagtcctgaaagtggaacatcacctgtaaatatattaaagacagggttttccaatttaactgggaaagtctccagactcagctggagctacattatctgtttctctaagaaagaatttttctgtccataaactcattgtattagtccattcttgcactgctataaagaaatacctgagactgggtcatttacaaagaaaagaggtttacttggctcacggttctgcaggctgtagagcaagcrtagtggattctgcttctggggaggcctcagaaagcttccaatcatggcagaaagcaagggggaacaggtgtcttacatagcaggagcaggagcaagagagagtgagaggggagatgcttcac

SEQ ID NO: 208897 - DNA, 476 bp, Homo sapiens
gtaactcgttctcattgctgggtggtatctatcttatggtccctttctcatcatcatgagcatttaagtgaagatcgtcttcaggatttccatgtgctcatgtgggagagtaagtcctgaaagtggaacatcacctgtaaatatattaaagacagggttttccaatttaactgggaaagtctccagactcagctggagctacattatctgtttctctaagaaagaatttttctgtccataaactcattgtattagtccattcttgcactgctataaagaaatacctgagactgggtcatttacaaagaaaagaggtttacttggctcacggttctgcaggctgtagagcaagcgtagtggattctgcttctggggaggcctcagraagcttccaatcatggcagaaagcaagggggaacaggtgtcttacatagcaggagcaggagcaagagagagtgagaggggagatgcttcac

SEQ ID NO: 208898 - DNA, 441 bp, Homo sapiens
gagagaactcagtaccatgagaacaacaccaagagggtagtgctaaactattcatgagaaatccacccccatgatccaaccacctcccaccaggccccacctccaacactagggactacggtttgacaagagatttggtggggacgcaaatccaaaccctatcactcatttttttctcccttcaatcattcaaccaacaattgctgagcaactcctgtaggtcaggcactgtrctgggggctgggaacagtgggaataaatcctatgggtctctgcccttgtggagattccagagtagggctgcccggatgttcttgcattgtgcacagtgcagagacaggaggctcctggatattctggcctaggcaactctaaccctgaaaaatgaacaagcccatcacattctattcatgtggttatagtttacctgaaacctcaact

SEQ ID NO: 208899 - DNA, 445 bp, Homo sapiens
cgcagctcccaaaagtgtcccaagggttagcactgaccagcttgctgggtttgaaggaaccacaatgcatcgggtgtggctctcttcctgctagctgctccgaagtgagctcctactgattctattcagttggacgctcacattcagcgagtccagggggtttttcatgctttgagcatttttaagagtctgctatttgcccagttcagtgaggggcactcaggatgtatcagtggttcaggctgacttggttcctgcctaggggaagayccacaagaccagtacccaatgcagggatggcatggatggtaggggaggcttggaggccctaacccactcttgaagggatgacagaagcctcccaggctgggattggaaggatgaaaggagcagacaggccagggtagagggcattgagtcccagtttgagcgaagggctggagca

SEQ ID NO: 208900 - DNA, 505 bp, Homo sapiens
ttggtctgcatggtgaagggcccaggactgatgggcgggggctcatttgcataccacaacaccagggagagtcctgtcacctgccctcctgagtcctgaagaaaacccttcacyccaattccctgtacactacttctaaaggcaggaaatgtgtacagttctagaattacagtcacataaaatgctagaagaataacgtgatttatttaagtgcttagaggtacccccttgaagtttgtgttacctggaagttggcctcggggaaacacctcattgaccttctctcaaggataaatgagatgcagggacagggaagggagaaaggttattttaacatttcattcacagtccctgggattctttggagagcaccttaggaatgttcttaacctgagtcctcttactaagtattatcacatagtctgccaggctggcattattaaccctactttgcagctgaggcaactacaagagatgaccctatcgggctagtgaagtggaattc

SEQ ID NO: 208901 - DNA, 440 bp, Homo sapiens
accacaacaccagggagagtcctgtcacctgccctcctgagtcctgaagaaaacccttcaccccaattccctgtacactrcttctaaaggcaggaaatgtgtacagttctagaattacagtcacataaaatgctagaagaataacgtgatttatttaagtgcttagaggtacccccttgaagtttgtgttacctggaagttggcctcggggaaacacctcattgaccttctctcaaggataaatgagatgcagggacagggaagggagaaaggttattttaacatttcattcacagtccctgggattctttggagagcaccttaggaatgttcttaacctgagtcctcttactaagtattatcacatagtctgccaggctggcattattaaccctactttgcagctgaggcaactacaagagatgaccctatcgggctag

SEQ ID NO: 208902 - DNA, 440 bp, Homo sapiens
accacaacaccagggagagtcctgtcacctgccctcctgagtcctgaagaaaacccttcaccccaattccctgtacactacttctaaaggcaggaaatgtgtacagttctagaattacagtcacataaaatgctagaagaataacgtgatttatttaagtgcttagaggtacccccttgaagtttgtgttacctggaagttggcctcrgggaaacacctcattgaccttctctcaaggataaatgagatgcagggacagggaagggagaaaggttattttaacatttcattcacagtccctgggattctttggagagcaccttaggaatgttcttaacctgagtcctcttactaagtattatcacatagtctgccaggctggcattattaaccctactttgcagctgaggcaactacaagagatgaccctatcgggctag

SEQ ID NO: 208903 - DNA, 563 bp, Homo sapiens
agaattctcagatgagttagcaaatagtggctggagataaactgaaactttgagcaacctctggactgactctgattaccctccacaccctacctgcrcagggaggagagaccacaaagccagcagcaaacagtaaacttttccaagaatcagagaggaaggagttcctgacaccctgcagcaaaaacaacctcaaaattcccctgaagacagacccatgggagctggggtcaaggtggccttgcgcttcaccgaggaggtgtcattaccaaacgtgctggacattggctacctacggaagaaagattaaggactgaaagaaaatagtggagaacatgcttatgacatgggggtaggacagggaaggccttgagcaagacacaaatcacaaaagcaaatagagaaagagtgatgtctaccttcaacgaaatgtgaaacttctgattcaaaatcggaaacctctataagctgagataaaagacaagcaacagagttggagaagatatttctaacatttgtatgtgtgcaaatgtatgtgtgtaatgtgcttatacatatacata

SEQ ID NO: 208904 - DNA, 562 bp, Homo sapiens
gaattctcagatgagttagcaaatagtggctggagataaactgaaactttgagcaacctctggactgactctgattaccctccacaccctacctgcgcagggaggagagaccacaaagccagcagcaaacagtaaacttttccaagaatcagagaggaaggagttcctgacaccctgcagcaaaaacaacctcaaaattcccctgaagacagacccatgggagctggggtcaaggtggccttgcgcttcaccgaggaggtgtcattaccaaacgtgctggacattggctacctacggaagaaagattaaggactgaaagaaaatagtggagaacatgcttatgacatgggggtaggacagggaaggccttgagcaagacacaaatcacaaaarcaaatagagaaagagtgatgtctaccttcaacgaaatgtgaaacttctgattcaaaatcggaaacctctataagctgagataaaagacaagcaacagagttggagaagatatttctaacatttgtatgtgtgcaaatgtatgtgtgtaatgtgcttatacatatacata

SEQ ID NO: 208905 - DNA, 562 bp, Homo sapiens
gaattctcagatgagttagcaaatagtggctggagataaactgaaactttgagcaacctctggactgactctgattaccctccacaccctacctgcgcagggaggagagaccacaaagccagcagcaaacagtaaacttttccaagaatcagagaggaaggagttcctgacaccctgcagcaaaaacaacctcaaaattcccctgaagacagacccatgggagctggggtcaaggtggccttgcgcttcaccgaggaggtgtcattaccaaacgtgctggacattggctacctacggaagaaagattaaggactgaaagaaaatagtggagaacatgcttatgacatgggggtaggacagggaaggccttgagcaagacacaaatcacaaaagcaaatagagaaagagtgatgtctaccttcaaygaaatgtgaaacttctgattcaaaatcggaaacctctataagctgagataaaagacaagcaacagagttggagaagatatttctaacatttgtatgtgtgcaaatgtatgtgtgtaatgtgcttatacatatacata

SEQ ID NO: 208906 - DNA, 580 bp, Homo sapiens
aagcttggaagcagggacatgcaagcgaggtacagcatatgctatcaagtggcaatgtccttccagtaggaaagccgctgttgtcatcagtttaggcaggtgctgggattaagcacatctaccactcagaaaataatacmaataagaaccacggtccacatccaacatgggtctcccaaattctctaaaatgtggaagtgtgcagatcttagcatctctgtcctttctctcgcttcgaggaagttgggctcctgggcactgcctcatcaatcatgcccagtacctgtgtacaggtgcctcccctgctctctggagcatcgggactggaaggattgggaacagaacggagctttgattgatcctcttgtccgcacttgtcgctttcaactccctgtggtggagggtgacagtttagtctccctgtcttctcctggggtcccaccggctcctgaatcaaatcctgctcttcccctgcgtattctgagtggcctgcacactctgggctctctctctccttgacccctggaacaccacctctttggttcttagtaatccggagccttcctacctggtagtagca

SEQ ID NO: 208907 - DNA, 575 bp, Homo sapiens
agcatatgctatcaagtggcaatgtccttccagtaggaaagccgctgttgtcatcagtttaggcaggtgctgggattaagcacatctaccactcagaaaataatacaaataagaaccacggtccacatccaacatgggtctcccaaattctctaaaatgtggaagtgtgcagatcttagcatctctgtcctttctctcgcttcgaggaagttgggctcctgggcactgcctcatcaatcatgcccagtacctgtgtacaggtgcctcccctgctctctggagcatcgggactggaaggattgggaacagaacggagctttgattgatcctcttgtccgcacttgtsgctttcaactccctgtggtggagggtgacagtttagtctccctgtcttctcctggggtcccaccggctcctgaatcaaatcctgctcttcccctgcgtattctgagtggcctgcacactctgggctctctctctccttgacccctggaacaccacctctttggttcttagtaatccggagccttcctacctggtagtagcactgacatcctcttcatccactggaagct

SEQ ID NO: 208908 - DNA, 575 bp, Homo sapiens
agcatatgctatcaagtggcaatgtccttccagtaggaaagccgctgttgtcatcagtttaggcaggtgctgggattaagcacatctaccactcagaaaataatacaaataagaaccacggtccacatccaacatgggtctcccaaattctctaaaatgtggaagtgtgcagatcttagcatctctgtcctttctctcgcttcgaggaagttgggctcctgggcactgcctcatcaatcatgcccagtacctgtgtacaggtgcctcccctgctctctggagcatcgggactggaaggattgggaacagaacggagctttgattgatcctcttgtccgcacttgtcsctttcaactccctgtggtggagggtgacagtttagtctccctgtcttctcctggggtcccaccggctcctgaatcaaatcctgctcttcccctgcgtattctgagtggcctgcacactctgggctctctctctccttgacccctggaacaccacctctttggttcttagtaatccggagccttcctacctggtagtagcactgacatcctcttcatccactggaagct

SEQ ID NO: 208909 - DNA, 580 bp, Homo sapiens
aagcttggaagcagggacatgcaagcgaggtacagcatatgctatcaagtggcaatgtccttccagtaggaaagccgctgttgtcatcagtttaggcaggtgctgggattaagcacatctaccactcagaaaataatacaaataagaaccacggtccacatccaacatgggtctcccaaattctctaaaatgtggaagtgtgcagatcttagcatctctgtcctttctctcgcttcgaggaagttgggctcctgggcactgcctcatcaatcatgcccagtacctgtgtacaggtgcctcccctgctctctggagcatcgggactggaaggattgggaacagaacggagctttgattgatcctcttgtccgcacttgtcgctttcaactccctgtggtggagggtgacagtttagtctccctgtcttctcctggggtcccaccggctcctgaatcaaatcctgctcttcccctgcrtattctgagtggcctgcacactctgggctctctctctccttgacccctggaacaccacctctttggttcttagtaatccggagccttcctacctggtagtagca

SEQ ID NO: 208910 - DNA, 580 bp, Homo sapiens
aagcttggaagcagggacatgcaagcgaggtacagcatatgctatcaagtggcaatgtccttccagtaggaaagccgctgttgtcatcagtttaggcaggtgctgggattaagcacatctaccactcagaaaataatacaaataagaaccacggtccacatccaacatgggtctcccaaattctctaaaatgtggaagtgtgcagatcttagcatctctgtcctttctctcgcttcgaggaagttgggctcctgggcactgcctcatcaatcatgcccagtacctgtgtacaggtgcctcccctgctctctggagcatcgggactggaaggattgggaacagaacggagctttgattgatcctcttgtccgcacttgtcgctttcaactccctgtggtggagggtgacagtttagtctccctgtcttctcctggggtcccaccggctcctgaatcaaatcctgctcttcccctgcgtrttctgagtggcctgcacactctgggctctctctctccttgacccctggaacaccacctctttggttcttagtaatccggagccttcctacctggtagtagca

SEQ ID NO: 208911 - DNA, 467 bp, Homo sapiens
tgacgtaacctggcttcactgtgccttggtttcttcatctataaaccctattttagaggatggttgagaggattaactaagtaaatacatgtctagtkcttatggtcctggctaagaaaaaaacccttgagactttcagataatctgaatacacacttgttgtcttgagtctgatctgaagggaagctttcagtggtggtgcaagaggatactgtaaattaaatcttccattctaaaaagagatatggtagctgaacacatacctataccctgagggctaatttggccattgtcctttttacttgaagaggttgttgtcctagatcctatttcctgaggcttatttcagaccaactgggaaaaaataaatgatgttaggatttaacccaggctcaaacaggaaggctggccagacccagggccacctggggagtcaagggggtgggagctctggctcagtcaatagc

SEQ ID NO: 208912 - DNA, 419 bp, Homo sapiens
acccagctatcgtaaaagaaggttattattatagtcacctttagccagagccaactagtgacaagttccagttggtttgctcatccatttaggaacctgcagggttcagatctctatccctatttcacaaaggcccatctctcaccccattttcaccaagactttgtggctgcctccctcccatgcccaatggatggaccagatcaaacgatctgacaccatcttggttcaattgccttgacttgcactggggctcagaaaatgataccccraagtatggcgcttgagcatgctaagtactttgaactgaaggaaattggaaagcttcagaagcaaggactctctgaccttctcctgctctcctatctcttacccctctttattttccctgccaaagcaagtcatagaaatcagaattc

SEQ ID NO: 208913 - DNA, 520 bp, Homo sapiens
tgatataaaccatacaattcatccacttaaagtacacaagtcaatgtttttggtatattacattattgatttttttaaattgtggtaaaatataaaatataaataacataattttccattttaaccattttaagcatacaattcagtggcattcattatatttccaatgttatgcaaccatcaccactatcttctgcaagactctttagtttctaagatattatttacctcattatttatcactgaaaatctatgctctaagagatgattttcgtcgggtcaacacttatctcgtgagccatgatgtaaattsggaaagtacattggcatcagttttggtgaagttccaactctgtgtgcattaaggaagtcattccctgtgaattgaagagggcatatctgaacaccaatagattcactgcttccctcaaagaaatcacttggctgtcgaaaacatgccttttggtttgattccattttgaaggcattccttaggaagcagtctctgaggtggagatta

SEQ ID NO: 208914 - DNA, 594 bp, Homo sapiens
  misc_feature (1)...(594): n = A,T,C or G
tctatgactttttgcttgaaacttgnctgatcctttggtttttcagtcaagaaaacttgttttttcttttgagctatttacagcttttaacaatgaagtatactcctgtgagcaaaatttggagaatgtttctttctctctacctggtttctccagaatttggaaactatttgtgagtattcttaaattatggcaatatagtcatttgcataagtacaataagaatctgttttataggagcacagttggagacgctggttactttaccaaggctttgactgaaatggcattcttttaaatagaaacagactgctttaaggaatcagaggtgatttatagagccaataaaatcccttgaaaaaactggtcctcacataccttctctacccagtccctgtacaggaktcctaacctgtggtaagtaaagaatgccactttctaacaagcccaggagccccaagttaactttggacctccataggagaggaattcatccaattcatacaggtatttgcaggcacaaataaatccatggatgggttcaaggctttagaaggtctaatctgagactccttatggaaaaagttctaagaa

SEQ ID NO: 208915 - DNA, 527 bp, Homo sapiens
gaggaattcatccaattcatacaggtatttgcaggcacaaataaatccatggatgggttcaaggctttagaaggtctaatctgagactccttatggaaaaagttctaasaatgccaatttgaaagagagcttatatgacaaataattattcgtgttgcattttatataactaatcaggccaaatataagactaaaacttatttttgcaaacaaattggttctaccatgatttgtcttggataaaaatgagagaatggagaaagattataatacacctattgttagattctagtcttgtctcgtttttgaggttttttttaatatgtattattttctacagtttggactgaatcttaaatcttttctggattacaagtcttcaaactaacattttcaaaatatcacccatttttctgactaaagctcaatagaattgctactacctctttcctgaggccctataggctaaaacgtatttcttacgatacaggcaagaagaaaatgtcaaacagccaccgtcctcctct

SEQ ID NO: 208916 - DNA, 527 bp, Homo sapiens
gaggaattcatccaattcatacaggtatttgcaggcacaaataaatccatggatgggttcaaggctttagaaggtctaatctgagactccttatggaaaaagttctaagaatgccaatttgaaagagagcttatatgacaaataattattcgtgttgcattttatataactaatcaggccaaatataagactaaaacttatttttgcaaacaaattggttctaccatgatttgtcttggataaaaatgagagaatggagaaagattataatacacctattgttagattctagtcttgtctcgtttttgaggttttttttaatatgtattattttctacartttggactgaatcttaaatcttttctggattacaagtcttcaaactaacattttcaaaatatcacccatttttctgactaaagctcaatagaattgctactacctctttcctgaggccctataggctaaaacgtatttcttacgatacaggcaagaagaaaatgtcaaacagccaccgtcctcctct

SEQ ID NO: 208917 - DNA, 527 bp, Homo sapiens
gaggaattcatccaattcatacaggtatttgcaggcacaaataaatccatggatgggttcaaggctttagaaggtctaatctgagactccttatggaaaaagttctaagaatgccaatttgaaagagagcttatatgacaaataattattcgtgttgcattttatataactaatcaggccaaatataagactaaaacttatttttgcaaacaaattggttctaccatgatttgtcttggataaaaatgagagaatggagaaagattataatacacctattgttagattctagtcttgtctcgtttttgaggttttttttaatatgtattattttctacagtttggactgaatcttaaatcttttctggattacaagtcttcaaactaacattttcaaaatatcacccatttttctgactaaagctcaatagaattgctactacctytttcctgaggccctataggctaaaacgtatttcttacgatacaggcaagaagaaaatgtcaaacagccaccgtcctcctct

SEQ ID NO: 208918 - DNA, 569 bp, Homo sapiens
taattgacaaggaacaggaaaaaatgtcatggagaacarggtagtgtcagggatggattgaaagagaagagtaaaaattgtatcacacaatggtggcagggacatgaagacacaactgaaagcaaaacttttgagggtaaagaagacagccatcaagaaagaaccaaagtaagaaagagctgcaaccgtggggaaagtgggagttgtataagaaagatgatgacccaccgcagctcagcaaggccactgcggccagactgcctctccagattcctcctctctgggcaggccatctctgaaaaaaaggcagtagccccagtcagggacttacagataaaagccccatctccctgggacagagcacctgggggaaggggcagctgtgggcgcagcttcagcagacttaaacgtccctacctgacagccctgaagagagcagcagatctcccagcacagtgtttgaactctgataagggacagactgcctcctcaagtgggtccctgacccccatgtatcctgactggaagacacctcccagtaggggctgacagacaactcatacaggata

SEQ ID NO: 208919 - DNA, 569 bp, Homo sapiens
taattgacaaggaacaggaaaaaatgtcatggagaacaaggtagtgtcagggatggattgaaagagaagagtaaaaattgtatcacacaatggtggcaggsacatgaagacacaactgaaagcaaaacttttgagggtaaagaagacagccatcaagaaagaaccaaagtaagaaagagctgcaaccgtggggaaagtgggagttgtataagaaagatgatgacccaccgcagctcagcaaggccactgcggccagactgcctctccagattcctcctctctgggcaggccatctctgaaaaaaaggcagtagccccagtcagggacttacagataaaagccccatctccctgggacagagcacctgggggaaggggcagctgtgggcgcagcttcagcagacttaaacgtccctacctgacagccctgaagagagcagcagatctcccagcacagtgtttgaactctgataagggacagactgcctcctcaagtgggtccctgacccccatgtatcctgactggaagacacctcccagtaggggctgacagacaactcatacaggata

SEQ ID NO: 208920 - DNA, 520 bp, Homo sapiens
agtacattaaaattttcctttgtgatttttacctcttgatgtatgatcactttttttataattttatagatttcttttgagtcatgctcatatgtaagtagcttcaagctaatttagaaaattaaactatatacagttaatcatctgccaggaacaaatgtcacagaattctggcttctgttttccctaactaaaatttactggcagaatgtcaacaaaactaaaatgagagaagaaacacatgcyccttagcaagtgacatccagtattgctattcaaatgaactggggtaattccactagcctgaatgaatttgaagtcagtagtttataccttttaactttaattcctcacattgccacacttctgaatatcttgggcaaaggactttcctgttcatcattgcaatgttcaatttgacactgtgagataggaaaggcaggtatcatctccctttgcatggatcaggaaaccaaggctcagaaacaatcatgattgattctccaaccactaaagcttg

SEQ ID NO: 208921 - DNA, 379 bp, Homo sapiens
ttatctaagaccaccaaggtgataactctacragtctgaaaaaaacacagcattattggacttgggacccaagtctcttttaatacctgaaagtctttccaagaagaacaggcacaaacaagtttagaccgtgaagactacaataaacacctaactcttcaatgcccaaacaccaaagaacatctaccagcatcagcatcatccaagaaaacatgaccttaccaaataaactaaataagccaccagggaccaattctggagaaacagagatatatgacctttcacatagagaattcaaaatggctgttttgaggaaaagtcagagaaattcaagataacacagagaaggaactcagaattctatcagatatactttaaa

SEQ ID NO: 208922 - DNA, 618 bp, Homo sapiens
ttggttatttctttttcttttcttctgctgggtttgggtttagtttgttcttgtttctcaagttccttgaggtgtgaccttagattgtctttttgtcctctttcagactttttgatrtaggcatttaatgctatgaagtttcctcttcttttttttttttttttgagacagagtttcactcttgttgcctaggctggaatgcaatggcacgatcttggctcactgcaacttccacctcccaggtttaagtgattcttttgcctcagcctcccgagtggctgggattacaggcacctgccactatgcctggctaatttattttattttattttattttttagtagagacgaagtttcaccacattggccaggctgttcatgaactcttgacctcaggtgatctgcccgcctcagcatcccaaagtactgggattacaggcatgagccaccatgcctggccaaagtttcctcttaacactgcttttactgtatctcagcagttttgataggttgtgtcactcctattgttcagttcaaataatttttaaatttccacctggattttattgttgactcaaaattcattctggagcagattatttaatttctatgtatttgt

SEQ ID NO: 208923 - DNA, 506 bp, Homo sapiens
ctgctgggccaacttgaatggcgggagacctagacctgcgttttatccagtggaatgccgtccatgacagaatggcaaagagagacaaattcagagcacaaagtacaccagattcgctacaatctaagacttgtcacactaatcctttttctcattaattaaaaccttgcasaggaggcaaacagtgatttttatcattctcttaaccagtttgcacagagaatggccagaagcccggctagcaggaaattcttacctttcgctggccagagtttagggtctcctttctctgagtggctctggtgaccctacttgccactatattgttatgaatttttagtatttccttttgttttccatgagtatggaaaacatggaacagacacaattgttacacataaaatagacatcattaaaaaagaaagtgttatgtggaagggtttaatacaaatagaaaaaggtctgacatttaacaaactactgatgaattcctttcaccctttctt

SEQ ID NO: 208924 - DNA, 569 bp, Homo sapiens
attttgttataggagtctcagctatgaacttagtggtgggtaaggaaagatatcttttctcttctacaataggcttggaaatttctagaatttgtggaaaggaaatggtatttaaagagaaagggatgagagtaaatcccaccttaaaaccttgttgaggcgttttcttgtctttgccatgagcaaatattgttttgaaagttttaaaacatatatatgggagatgttatattcacttyaaaattccatataatttgcaagagctatcaaaataaaataattgtcattgcaactctgccaactgcaagcccaataaagcaaaagaacactgaacaacctggatttaaatcctggagtcacttctcagtcacattaccttcttttctacttacttagttaactctgagccagtttcttcacattttaagagaatcgtggtgaagattaaatgaaataacatgtaaagagtgtcttgctcaattttgcatacacattaggctttcaacaaatactagtttctttccattttttctgaatgacatcagagctcagaaaatgcagcggctcaa

SEQ ID NO: 208925 - DNA, 587 bp, Homo sapiens
aagctttcaaagttgatgaatgtaaggtgtcttgtttcaaggtagatgttttcacatacagatgtcttaccagagatttttcattgagcaaatatttcatattttatttaatagattttctattatttatcttagtgattttattctgctgaatgaaaaattttcattactgactagccatcttggtattaaaatcatttcagttggtagcaagactatttttcaaaaaatctttcttctgatttccagatcaattttaaaaggaacatcttgaattatgcagatcaactctatatctgagtgtgtgaaattgatagattctgaaatatcatgaaatctgagttgcattgttaaacagtaacattagtggagtggcttcaattgactggagtacaaagttgaggaatgtttattcggaggcaggaagaccatgaagtataaagcccatgtttgctcctatattttgtatttgtgtatataattaggaaattattgttattgctgytgtttaccttagaatttcatgtaatgcactaaagctcatcttagtgattctgaacaacactgagaagacgtagggacctgaa

SEQ ID NO: 208926 - DNA, 527 bp, Homo sapiens
tggggggccgggattccatccatcaaaatcacattacctgagccgctgttaggygtataatatcgtcaatgcccagggtggcagagatggcactctgaggagtgaaactggaggaaacacccctcacccccagaaagaagcaggggaagagctacaaaagaatgactgaagagattgcttaagttggtaacataggggagcagcccctacagtgtgagaagagactgtcatcagcaggtctgagaagagcaaggggcaacttcacaccccattccatctttcaagtcctttcagtctgtagagctccacatgaagaaatacggagagaagagaaagggcaggagccagacagttgccccagtgtcctcaggggcacaggaagctgtgctctagccagaggaaactgacagcagagaaggcatgaggctgaagcaagatggcaggtcctctcaggagggtccttggtaacagagggagccaggataaaactgagaatctacagaagatggaagcagagggagtctgga

SEQ ID NO: 208927 - DNA, 527 bp, Homo sapiens
tggggggccgggattccatccatcaaaatcacattacctgagccgctgttaggcgtataatatcgtcaatgcccagggtggcagagatggcactctgaggagtgaaactggaggaaacacccctcacccccagaaagaagcaggggaagagctacaaaagaatgactgaagagattgcttaagttggtaacataggggagcagcccctacagtgtgagaagagactgtcatcagcaggtctgagaagagcaaggggcaacttcacaccccattccatctttcaagtccttkcagtctgtagagctccacatgaagaaatacggagagaagagaaagggcaggagccagacagttgccccagtgtcctcaggggcacaggaagctgtgctctagccagaggaaactgacagcagagaaggcatgaggctgaagcaagatggcaggtcctctcaggagggtccttggtaacagagggagccaggataaaactgagaatctacagaagatggaagcagagggagtctgga

SEQ ID NO: 208928 - DNA, 645 bp, Homo sapiens
tacattgcctccttgactttcctgctcctcctatatatttgttttttcatacacacctcttttaagtaaaatataacccagtttgaattttaataccctattgctttcctttacatttttaatcacaaaatgatgtggccacccaagktggttttagtacaaacacacaaaattcactggaaataagtaaaaccacaaagtcagtgatctgaaaactgaaagaactgtctttctggctattctttgcatgaataatatttattgtagtaagcttcctctctcagaaaatctgtttatgaaatgtcattctgttcacctactgctctttcacacgtacatgagtcctgtggggcattattatgtctgtgcctgtgttcctctttgaagtgagctcttctcacttgcataaccaagactgatcaaccatgaagctttttgttttttttggtttttttgacagacagttattggagcttgaaatgggagaaaaagtctgaaagaactgctttcagatatggatacaaggagccttctcctttcctgaacctcacgctcctacacacacatttctctctagtgtgaactattacagactaaaatatcaaacatttggcttacagtattgatgtttccacttcataagta

SEQ ID NO: 208929 - DNA, 355 bp, Homo sapiens
aaataaataaactgtggtcttaattttgtgatatcaagtgttttaaacctttgatatgtgacaaactttccaaaatcaaattctaaattagctttttttaacctgattaaccctgttagatattagttcccctagaatccaaaagaaacatattcagtttaatataattaatttaatttaaatcacatggaaaacattgtcaagtataaaatagtgcttaattttatttgggttatatycatataaatgtgttattaatatagttttcaaaattgtaattctgtcaatatattatcagtcataattattatcattatgtgccactggcataaccaaatttacttgtcaattgtgt

SEQ ID NO: 208930 - DNA, 355 bp, Homo sapiens
aaataaataaactgtggtcttaattttgtgatatcaagtgttttaaacctttgatatgtgacaaactttccaaaatcaaattctaaattagctttttttaacctgattaaccctgttagatattagttcccctagaatccaaaagaaacatattcagtttaatataattaatttaatttaaatcacatggaaaacattgtcaagtataaaatagtgcttaattttatttgggttatatccatataaatgtgttattaatatagtttycaaaattgtaattctgtcaatatattatcagtcataattattatcattatgtgccactggcataaccaaatttacttgtcaattgtgt

SEQ ID NO: 208931 - DNA, 613 bp, Homo sapiens
gtcaaacttttgttctatgcagaccttcaactgattggaagaagttcacccatattatggagtgcaatttctttttctcaaagtctacactttaaactttttataataaatgttaatctcctccaaaaaacacctcacagaaacatgtagaataatgtgtgaacaaatagctgggcacggtggcccagccaagtgatatataamattaactatcacagaagggaaagaagaaagaaagagaaggaaaggaaaaaattaagaaaaactgtgatcatctatgtaaaaataataggacctagtagtgactcaccaaactgtagtttattttattaatcttgttgtcatgatattctttttatctgtttatccatctctattttacaaatgacaatttgagatttggagataaatcccctgatcaaagacatacagcctctctctttcctgtctgtcctactgaggtcattccgtcaatcactggataagcttggtcatttatcagtctttggttaattctgagatggacaaaatattcaggttttgtatgtaacagacttagttccctgtttggcaagaccaatcagaatgatcacttaagagtataatagaattc

SEQ ID NO: 208932 - DNA, 613 bp, Homo sapiens
gtcaaacttttgttctatgcagaccttcaactgattggaagaagttcacccatattatggagtgcaatttctttttctcaaagtctacactttaaactttttataataaatgttaatctcctccaaaaaacacctcacagaaacatgtagaataatgtgtgaacaaatagctgggcacggtggcccagccaagtgatatataacattaactatcacagaagggaaagaagaaagaaagagaaggaaaggaaaaaattaagaaaaactgtgatcatctatgtaaaaataataggacctagtagtgactcaccaaactgtagtttattttattaatcttgttgtcatgatattctttttatctgtttatccatctctattttacaaatgamaatttgagatttggagataaatcccctgatcaaagacatacagcctctctctttcctgtctgtcctactgaggtcattccgtcaatcactggataagcttggtcatttatcagtctttggttaattctgagatggacaaaatattcaggttttgtatgtaacagacttagttccctgtttggcaagaccaatcagaatgatcacttaagagtataatagaattc

SEQ ID NO: 208933 - DNA, 568 bp, Homo sapiens
atgaaaggttaaatatctccacaggttgctactctatgttcaccttatcttatgtaaagtgctgatttactgagcytgagacaaatacatgattgatgattctcctagctgctccttttcacttgtaatgtggattcagtaatgttaccataccctccctctttcccctccagccctcttttcccctttaaatattggagccttcaaaaccatccttagagaaaggaacagacctgtctcctggtcatgtcatttaccttggcaaaataaacttctgaattgattgagacctgtctcagatactctttggtggacagggccatgctgggtatttttaagaagctgaaacagagtgaacagtagacaggactggtgatgcatctactcttgatgcatccagtagcctctctagggcccaaggcaagaggtcctgttcagggctgcctccaagccagttctccttctgtgtgggcctcaccatttccaaatgacttcaccagaggtcttggcaaaaggtttagagttcaaaatggagattaaaactccctcagagattggggcatgaatg

SEQ ID NO: 208934 - DNA, 556 bp, Homo sapiens
atatctccacaggttgctactctatgttcaccttatcttatgtaaagtgctgatttactgagcctgagacaaatacatgattgatgattctcctagctgctccttttcacttgtaatgtggattcagtaatgttaccataccctccctctttcccctccagccctcttttcccctttaaatattggagccttcaaaaccatcyttagagaaaggaacagacctgtctcctggtcatgtcatttaccttggcaaaataaacttctgaattgattgagacctgtctcagatactctttggtggacagggccatgctgggtatttttaagaagctgaaacagagtgaacagtagacaggactggtgatgcatctactcttgatgcatccagtagcctctctagggcccaaggcaagaggtcctgttcagggctgcctccaagccagttctccttctgtgtgggcctcaccatttccaaatgacttcaccagaggtcttggcaaaaggtttagagttcaaaatggagattaaaactccctcagagattggggcatgaatg

SEQ ID NO: 208935 - DNA, 631 bp, Homo sapiens
atgtggagatgaaggggctctgctgcaggaggtggcatgtgaggggcctgggtagagactgtggtgactgacactttagccactggctgaacaaagggctctagtggaaaggcgctgctggcctgggtctaactcctggacctgtcctggtgacttaggtttttgtttaacatctccatttttgagcatcttcaaacataaactaccacaaactggagggcttaagcaacagacactatcatcttgcagttctagaggccagaagttcaagatcaagggtttatagggctgatyccttctggaggtataagggagaccctgttcctagcctctcccccagctcctgggggattgtgggccacatctggcgttccttggcttgtagactcctcactccaatctgatctctccattcatcttcacacagcgttctcactgtgcgcctggctctgtggtcaaatttcccctttatgtaaggacgtcagttatgttggatcagggcccaccctaatgacctcattttgatttgattacctctgtaaagattctagctccaaataaggtcacattacaaggaactgggggtgagaacttcaacatatgaatttggggggggtgggaccaaaataaa

SEQ ID NO: 208936 - DNA, 631 bp, Homo sapiens
atgtggagatgaaggggctctgctgcaggaggtggcatgtgaggggcctgggtagagactgtggtgactgacactttagccactggctgaacaaagggctctagtggaaaggcgctgctggcctgggtctaactcctggacctgtcctggtgacttaggtttttgtttaacatctccatttttgagcatcttcaaacataaactaccacaaactggagggcttaagcaacagacactatcatcttgcagttctagaggccagaagttcaagatcaagggtttatagggctgattccttctggaggtataagggagaccctgttcctagcctctcccccagctcctgggggattgtgggccacatctggcgttccttggcttgtagactcctcactccaatctgatctctccattcatcttcacacagcgttctcactgtgcgcctggctctgtggtcaaatttcccctttatgtaaggacrtcagttatgttggatcagggcccaccctaatgacctcattttgatttgattacctctgtaaagattctagctccaaataaggtcacattacaaggaactgggggtgagaacttcaacatatgaatttggggggggtgggaccaaaataaa

SEQ ID NO: 208937 - DNA, 634 bp, Homo sapiens
attcagaaaagcctctttctttacctgcataatctcttccaattcataagcttatataacactgatgccagaacttaagtttcactgtttcctctaagagatgaaaaaaaattagaccaaggtaagagaaagacgaacttcgaggttaccaattaagtcaataaggctagaatttgaatttcctggccactacagtatcgaattttattttatgattctttgaatcagaaaaatcgtttgtaaatgactccaatttaatacagccacacccagatgatggttgctgactctcctcagtgggtaaatctaggatgaacaccctccagggtttcctgggggctagacaacaaagaaattagagctaatgaggtcggagttgttaggggccaaagtgtagttttgagaaatgtggcagcgttgtgacacgagaaaagcacatgaggaatgtgtcttgggaagatgagatgaggtcagaagcgaggagaaaggatggatgggataggaagacaggtgcataaaaggcataaacagactytgaatagcttgcgtgtatcaggctcctcttctcaatttttgaaaaataacacttggtagactgtgcagaaatgggtgtatgtattatgtgcctgagatt

SEQ ID NO: 208938 - DNA, 634 bp, Homo sapiens
attcagaaaagcctctttctttacctgcataatctcttccaattcataagcttatataacactgatgccagaacttaagtttcactgtttcctctaagagatgaaaaaaaattagaccaaggtaagagaaagacgaacttcgaggttaccaattaagtcaataaggctagaatttgaatttcctggccactacagtatcgaattttattttatgattctttgaatcagaaaaatcgtttgtaaatgactccaatttaatacagccacacccagatgatggttgctgactctcctcagtgggtaaatctaggatgaacaccctccagggtttcctgggggctagacaacaaagaaattagagctaatgaggtcggagttgttaggggccaaagtgtagttttgagaaatgtggcagcgttgtgacacgagaaaagcacatgaggaatgtgtcttgggaagatgagatgaggtcagaagcgaggagaaaggatggatgggataggaagacaggtgcataaaaggcataaacagactctgaatakcttgcgtgtatcaggctcctcttctcaatttttgaaaaataacacttggtagactgtgcagaaatgggtgtatgtattatgtgcctgagatt

SEQ ID NO: 208939 - DNA, 634 bp, Homo sapiens
attcagaaaagcctctttctttacctgcataatctcttccaattcataagcttatataacactgatgccagaacttaagtttcactgtttcctctaagagatgaaaaaaaattagaccaaggtaagagaaagacgaacttcgaggttaccaattaagtcaataaggctagaatttgaatttcctggccactacagtatcgaattttattttatgattctttgaatcagaaaaatcgtttgtaaatgactccaatttaatacagccacacccagatgatggttgctgactctcctcagtgggtaaatctaggatgaacaccctccagggtttcctgggggctagacaacaaagaaattagagctaatgaggtcggagttgttaggggccaaagtgtagttttgagaaatgtggcagcgttgtgacacgagaaaagcacatgaggaatgtgtcttgggaagatgagatgaggtcagaagcgaggagaaaggatggatgggataggaagacaggtgcataaaaggcataaacagactctgaatagcttgygtgtatcaggctcctcttctcaatttttgaaaaataacacttggtagactgtgcagaaatgggtgtatgtattatgtgcctgagatt

SEQ ID NO: 208940 - DNA, 596 bp, Homo sapiens
aattttgtggcatacggaacttatatgaaattcaaatttcaatgtcatgcataaagttggattggaacacagtgccactcccccatccatttacatattatctatagctgatttctggatccaaaggcggaatatttggaatagagatcatatagctcacagagctagaaatattaactatttgaccctttagaaagaagatttgccaacttctaatgcagaggacttattaactagagaaacatgttctcaaaagtgacatttctttttttcttttttcctttagtgcggttgtgttattaacttgaaatgcagyttggttactttgtttctgttcgcattccatgtggagtttttttcttccgttcttattaattatatttgcgtatgcaaaatattaatatagttctaaaagtcagatctagtaggttcttgaaaactggacttcaagctaaatgatgtataatgaaaccaactttaccacaggctaattgatataaataggacttaagttcctgcagcatatttctaatcacaaaaacatcatcaaacttctaaataaagagcaaaacacttctaatattaaacattgaaat

SEQ ID NO: 208941 - DNA, 572 bp, Homo sapiens
gtttttcagcacttggaaggcacagctggctaccagaaacacacaggtggagctggcctaaggacagatggacagagcaggaagctgtagaaacaaaacaaaagcgtcgtacattcaactataaagtaagaacaggggaaagggggtgttaggcttcctccacctcagccagagaccagtggtcgctatggaatgtgccgaagctgtgaggtttgctaatggggtagaccagggacctttaccctgaaatgctggcaggcctggaagcctcaccctgcccttcccacgcttatggcaaaataaaagcaaatcctggtacttgcttctttcctcatgcctctgcacattcaccctaaggatragagacagcacaaagccttgtggagcagtcacccaaggctagagccagacacctggaccttacagctctgtcattcattatttccaaacttcccctttctgtctgtcctatttttctcttctctctcttctctctttctcattttgcgttttacccatctttaaatatactttaagtggtatctgaacaaagcaggaaatacacacattaa

SEQ ID NO: 208942 - DNA, 265 bp, Homo sapiens
ctctgattggatgtctaatactcactggattcctgcctttactgccatatctgcttgcyccaccttcttcctcatcttacctgatgtcaatttcattctcttagttccatagataatcaatcaatctatcttgggtttgtccttaacgtctctttatgtcatattccacgttgaatctgccaccaaattatttagctaggccttcaaaatataccctacatcctatctcttctcaccctttttttcagtgctgtcacctgggttc

SEQ ID NO: 208943 - DNA, 570 bp, Homo sapiens
acagcgtgttgaaaggattttcccaggggaaagatttgagctggctttttgtgatgataacatttagataggcaagaagaagagcctgctggtgggagtgggagggatgatatgggcaaaatactgagaacacaagaaagaatgtaaaccccaaagcaggtgatgacagtggaaactgcaagaaagggtcaaagtagcaaatgttgagaaggggataccactgsggggagataatatgtaggaggagaaaaaaggagtatgaattcaaggggagggatctcagttctcctttccctttgggaccatagtgtgtcagttaacctctccaggactgtctcaatttcctcatctgcaaaatgggagaatttggatagctgatttctctagccattggttagcatggctgccactgttaagaggagctattaagcttgtcaggtagaaccaatggcattcttcccagaaatagaaaaaaaattccaaatttatatggaatcacaaaagacccagaatagtcaaagctatcctgagcaaaatgtacaaaactggaggaatcacattacctaactt

SEQ ID NO: 208944 - DNA, 432 bp, Homo sapiens
gaaacaaatccatgcatctacagtgarttcattttcaacaaagttgccaagaatatacagtgtggaaaggatagtctctttaataaatggtgatgggaaaactggatatccatatgcagaagaataaaactagacccctatctctcactgtctacaaaaatcaaaccaaaatggattaaagattgaaatttaagacctcaaattatgaaagtatggcaagaaaatcgtgggaaagctctcaaggacattggacagggcaaatatttcttgagtaatatcccacaagcacaggcaaccaaagcaaaaatggacaaatgggattatatcaagttaaaaagcttctgcacagcaaaggatataatcaacaaagtgaagagataacccacagaatgggaaaaatatttacaaactactcatctgacaagggactaa

SEQ ID NO: 208945 - DNA, 555 bp, Homo sapiens
tcctcatagttcagttctaaactgtttttttcagcttccacatctactcccacaacacaacttactttcctgcagcacttaacttcttgccatcccttaaatgtataaagcccttcgcagtttcagtctaggccatatgctgcttcgtttgcttaaagcatagtggcaggtcttasttaggaaagttttctgcagtgatccaaagtttacagtcatctttagacccctacagttttatttgctaaccttttttttaacttctaaatttctccgcattattatgttattatattttctgcttacttagctaattagaaataacctttttcctgagctctaagtattggaaaaacaggtggaatgttccactatttacaacatccatttgatactctaataaatttcagtaacaatttaagaaccctgtcgctgaaataaagcaagagtttgttttttattagaatccgtgcaattgcaaataacaccttttttaaaaacaattacgagttctttccaattagacttttgtaaaaatcttttcaaggttttgagagg

SEQ ID NO: 208946 - DNA, 560 bp, Homo sapiens
tcttctgcttggtgaactcctatcatccctgcagatctagctcaaatgttagtttcttgttagctagcatgaggtggccgcattgagcccacagtgaagatgtcccttgccccagttaatttacaattgttctaataaccatgtcaccttagtttaggcytacaacctggctctgttctgacctcacttggctctttttcagacaggcatcttcttaggcttgtatccagttcatctaaaagcagtatcaggttatttaagtataaattaaaaatgagggatgtggttgccataagccacttaagcctgaaattagaggtctcagaattttgctccttggcactcaggttctgctctgtgacttcatcaagtggtctggggggcactcccttgcttgtaagctttggcacacctcaaattgtcattttagttctgcattatgatgaacactcattctgacctccctgtattgaaatcgggtctgtaattatatgtgcccaataaatgtctgcagaaccagaaatttattttatggccaagaaatgattataggagaaaaa

SEQ ID NO: 208947 - DNA, 401 bp, Homo sapiens
aagttgtaatatactctacagttgtttcatttttagtacacttttgggtatagttactaatgttggytttcaaaaacaatttcatcattcctatggcaaaataagccacagaccacagttgccaaatatagatcaggtgtttctctctttctctggggtgaagtgggaaactactcattttatacatgttgattctggccagaagcatgcccaaaacatttagaatttcccgtccagaaactttgctgtgtgtcacagggagcacacccaacatagaaacatttaaggaatgtgctgttattctgtctttgccatagagcatagtacaataggagcaactagatataagtttattatttttgtgtgatttaggtctacatggtcccagtaatttttcactt

SEQ ID NO: 208948 - DNA, 562 bp, Homo sapiens
gttctgaatttctttttgtgaagagtttgtgtaaggaatgagaggaggaaagtcaattgtaactctaagagtgaccaaggtctttggcttaagcagtttgaaggattgatgcattaatttatatgaggatgatgatgggttgggaaggttttgggaaaagacttaggattttattttggaaatgttaagtttgatatatgtatcagactgtcaaatgcatatgttggataggcagttccatatatgaatctggaatttaggagagctggtgatatgaatttgggagttgtaggcaaaaagtagtatttaaagctatagaaaaatgataagataattaatggagtgagtatagataaataaaagaagacaagcaaaagactgaatcctggggcacaaggttaaggggcaaggtagacaggagatttgtaaaagagcagccagtgaattataaggaagttcaattcaatasaatatcataaaaaagagccaatgaaagggccagtgatcagttgtggcaaatgctgctggtaagtcaaaatgaataatgaggattgagcattat

SEQ ID NO: 208949 - DNA, 591 bp, Homo sapiens
ttgtgtttggttctctatttagcaaagtagagggtatactccgggttgtgccaagcaggtgtgagattctggggtaaggctcgaagtagagtcgcttcagcatctggctagattraactcagaaccctaatcctgggcaagttaatgtgaattaatcagtgtttatcgggcacctactaagcatgaaatgttgctctggattatgctgaaaagaggcagaaggataaaaattggtttccatggaatttgaggagaaaaataaagtaagttttaattaaagttgtgagtgttcactactcagagtgagatatgcgaatgagaaagaattcaggaggagaaagagaggaagagtacattagagaggtctccctgaaggaggtggatcttggttaagccttagaggataagaagacttgggtagaaagaaagttctagccatgccaggctccagaagccccctgcagacccagagccaaggagccttcttccttgaggaccttggccttatatgaagaacttaattcctcagctccgtgaattcagaaattttgtaaaaatgaggcaatgttaacccaaaagatggccagaggg

SEQ ID NO: 208950 - DNA, 591 bp, Homo sapiens
ttgtgtttggttctctatttagcaaagtagagggtatactccgggttgtgccaagcaggtgtgagattctggggtaaggctcgaagtagagtcgcttcagcatctggctagattaaactcagaaccctaatcctgggcamgttaatgtgaattaatcagtgtttatcgggcacctactaagcatgaaatgttgctctggattatgctgaaaagaggcagaaggataaaaattggtttccatggaatttgaggagaaaaataaagtaagttttaattaaagttgtgagtgttcactactcagagtgagatatgcgaatgagaaagaattcaggaggagaaagagaggaagagtacattagagaggtctccctgaaggaggtggatcttggttaagccttagaggataagaagacttgggtagaaagaaagttctagccatgccaggctccagaagccccctgcagacccagagccaaggagccttcttccttgaggaccttggccttatatgaagaacttaattcctcagctccgtgaattcagaaattttgtaaaaatgaggcaatgttaacccaaaagatggccagaggg

SEQ ID NO: 208951 - DNA, 409 bp, Homo sapiens
agacaatgacaaaatgaatattctcactgttacaatgaggtgatctcagtcaccatgataacaatcggtggtatccaagctagaaacaaattcaaataaatgactttattcctaattatctaccataggaaccaataatcacaatccagagaagatagctggaatactgtgtagatttttagccttccctctattattcacctctcaktgagtttccatttacagatgtataaacttatagacctattatgaagatttgggtactccttaccagcaacctccagttggcatttgaggaggtgattctcagataacatagaagctgctcactttacattctctaaataagtagtcataagcagtatactgtcattgcattatgagcccttataaatactgtgtgttgaat

SEQ ID NO: 208952 - DNA, 377 bp, Homo sapiens
tcatacttaatgtatcattcaccaaattgcttctctcaaaagtacttttagatcatgtttattatgataatattatatgctattatcaatttacatgtgatagttagtgcctaatacaacaacagagaaagaaaaatatattcaataaaactgtgttaggataactgaatgtctacagggcaaaaataaaattagagttcatgtaatattattcatttattataactactatacagctgagatggtttggctgtgtccccacccaaatctcatcttgaattgtagttcccataattcccacgtcatgggagggaccaggtggacttaaytgaatcagcagttcctgcatgctgttctagtgatagtgagtcagttct

SEQ ID NO: 208953 - DNA, 525 bp, Homo sapiens
ctcactccctgctgccactctggaatcagaactcaactgtctactctccagccctctgttgtcctggcagcagagcctcttggagtgtgcctgcctgagatccatcttgctctctgcccctgacaagggagggttcctgtcctgggtgcaagccttgcagcatcttggggcagggcatagtggccaccctccctgtttcttgctagcagcaccaccatcggctgcacctctgtcggaatgcttctggaatcttctgctcaatattatgtttgtgagattcgtctatattgtagcacctagttgatatttgttcatttccattgcgtaaagtatattccattgtatgaatgtgctattcatccatttaccattttctacattaccttgctaattttagctcttaaagaaaaagccactgtggacattcttatattttccaatgyaaaatttgttagctatatgtgtaggaatgatatacagggtatgcatatattcgactttattggataacaccaaatagtttcc

SEQ ID NO: 208954 - DNA, 535 bp, Homo sapiens
tgcaaataatacgatcttatatttggaaaaacttaaaatactctacaagacaactattgaaactgataaacaagttcagtaaagctgcaggatacaaagtcaacatacaaaaatcagtagcatttctacatgccaacagtgaacaatgtraaaaagaaattttaagaagtaatcaattttcaatggccacacataaaatttaatacctaggaattaacttaaccaaaagaagtcaaagatctctataatgaaaactataaaacactgatgaaataaattgaagaggacactaaaaaggaaaaatattccatgttgataaatggaaagaaaaaatattgttgaagtgtccatactactcaaagcaatctacagattcagtgcaatctgtatcaaaataccaatgacattcttcacagaaatagaaaaaacaatcctaaaatttacacaaaaccacaaaagacccagaatagccaaagctatcctaagcaaaaagatcaaatctggtggaatcacattacctgatttcaaattatac

SEQ ID NO: 208955 - DNA, 280 bp, Homo sapiens
ctgaaatcccagtgagacagaaccattcactcccctggaaagggggctgaagccagggagccaagtggtcttgctcagcaggtgccgctcccgcggagcccagcaaattaagaaccactggcttgaaattctcactgtcagcamagcagtctgaaggcgacccgggacgattgagcttggtgggggaaggggcatctgccattactgaggcttgagtaggcggttttctcctgacagtgctaaggaagcctgggaggtttggactggctgggcagaattc

SEQ ID NO: 208956 - DNA, 538 bp, Homo sapiens
tgtttgcatatgctcttcccacgctctaccgttttttagagttatattctatctacattgcctgaacttaataccattgcatactgcagtctttctttaaacctcatttagtcttagttctaaaagtaactatatattctacatgtttaattctcttcagtcatttggttttctgatgttcattctctactacattccttaccaaggacttatggaaacaatatttactgcagtctttcatgttgataactgtttgtatctaaaatcataaaatcattggttcatattttctttcctagaatatcctccattttgttgtgaaagaaagtgtgactcttgaaaagtctgctaacgatgtaatatctacaagtcatttgctatttttgtttcttttgcctagatggycaaatattttttttgttttcgttaaaatccagtagttttatttgaatatgacttggtattagtttttctaagttgtatacggactcaagtatatggacttctctttcaatatatagattcaaatttattttat

SEQ ID NO: 208957 - DNA, 588 bp, Homo sapiens
aagcaggagttgagtaatgtttcaacaatattctaagaaaagataaaagtcatgagatttaagtttgggtctgtgatctgtgcttacaatgaagtacaataaaaacgtttaaaatgtggaaataatcaaaggggaaattgcaaaattttgctgcgtagttttacaacagcttcatccaaaccatgactattgctgattagttaaatgatagtaatattatatagtcaggctgtggcacacattctataggttgtataagcctgggacttatgaaaagatgacaaatttgtgaaacattctgggttttgttcaaaagagatacaacagaaaaataagacaacaggagactaaaagtgtgtttaataatctcagggaaataaatagtagagcaaataaaacattacctaggccgggtgtgctggctcacgcctgtaatcccagcactttgggaagctgaggcaggtggatcacaaggtcaggagttcaagccagcctggccaacatacygaaacctaaaaaaaaatacaaaaaaaattagctaaaaaaaaatctactaaaaaaaatacaaaaaaaattagcccggcatgg

SEQ ID NO: 208958 - DNA, 543 bp, Homo sapiens
tgtgatatcatctgagaactcgtgtaggtatggatcacgctctgttttttccagacctctttggttctgcataacctaatgcaatctgccatttctttattgggctattataattaatcatcagacaagactaaaaagggacaggcatgtggaaatacagaaaggttgagagaagggctgaagacatggagattctctgtttcctatrgctaattccaaaaatcagtgttctaattactgattttgctaattgtttcttgtttaaccaattataaaaaaggtgctaaacttgagtctcgattatcaaatacaagatgtgtgtaatataagatataatattcaagctgaacattacttggtcatcacaacattaataaaaaagggttattttacttaaaacattgttgttcttggtcaagggaggctaaaaagaaatctgagaaataaatgtgttgattgaagtctataatagaggtggttgagaaaagaacctcttctaataatgataagatggattcctaaatggtaggaaaagggtataac

SEQ ID NO: 208959 - DNA, 515 bp, Homo sapiens
tggatccacttaaagttaacttctagtgagtatggttcacactttcttgttttttcatgactcattttcttttgttaagaactgaatattttaggtaatatgttatctcacctctagattatgttttgtttttctgaaatttttcttttctgtttttctttttagtaccttgtattgacttacaatgcaaaatctgtctccctcccatggtatatccaatgatacttccacattttattaccctggcttcatagttttaaatttttaattgctcagtttttaaatttaaatttaaagttttattccaggctgccttagaaagtccaaatttggtctgagcacagttgctcattcctgtaatcctagtattttgggagatagaggcaggaagattgcttgagctcaggagtctgagactagcctgggaaacwtagtgaaggcctgtctctacagaaaatacattaaaaaataattagttggtttcaatgatgtgtgcctgtagtcccagctactga

SEQ ID NO: 208960 - DNA, 566 bp, Homo sapiens
aaatcttgggagcaaagcagatgctctcctggtcttcagaaaacctacagtctagtgtcctcaaaactaaacccttaaatggttttgatcacaaagaataaagtgtttcagatagcaagaaaacttatttcaggaactttctgtcttattaactgctttttcttaactgctgctcttgtaaataaaatactgatgacctttcagtaaagaagaaaaattaccttaatcttcctacatcataattctgtgataaccctttgcttgkatctacagactttatagctcagtgagagcccaagtgattaacttcaatttctgtactgacaatatagtgtaaggcctacagataagaagtttgagctcacccagctgtggaaagagaagctgcttatgaatttagctctttgtccctcacaagccaaaaactgacagaaaaattcatgaggtcactgatatggtttggctgtgtccccatccaaatctcatcttgaattgtagctcctataatcctcatatgtcatgggagggatccagtgggaggtaactgaatcatggggttgggtttt

SEQ ID NO: 208961 - DNA, 629 bp, Homo sapiens
gctgtcttctccctgtgtctccttatattgtcttctctgtatgatcatctctgcatccaaatttccccctttgacaagtacccctgtcctattgtattagggcccagcctgatgacctcatttttacttgattacctctgtaaagtgcttgtttccraataagatcacattctgaattacagcgggttaggacttcaacatatgtattttgggatggacccaattcaacctataagtctccaaaagggaaaactctttgtgcttctagaatagctcatgagttttctcaagatttgacttattccttgctcctaagtgagcaccagtgaggaaattttcagaatggaaaagggtgggaatgttgaaattactattctgggaattctttgagaaagacatgaggctgttggcaaactgtgaaatgtttgatattccatgtgaattactatgcttaagattcaaccattgattcgacagttcacagggaatttgaattgcttagcacaaattaactttatctcttttcattaactttatctcttgctctgacttttcagtaacagacaacaaaagagttgaaggaggcagaggctctattgatgtcagaattcttgcacttgatttgagga

SEQ ID NO: 208962 - DNA, 629 bp, Homo sapiens
gctgtcttctccctgtgtctccttatattgtcttctctgtatgatcatctctgcatccaaatttccccctttgacaagtacccctgtcctattgtattagggcccagcctgatgacctcatttttacttgattacctctgtaaagtgcttgtttccaaataagatcacattctgaattacagcgggttaggacttcaacatatgtattttgggatggacccaattcaacctataagtctccaaaagggaaaactctttgtgcttctagaatagctcatgagttttctcaagatttgacttattccttgctcctaagtgagcaccagtgaggaaattttcagaatggaaaagggtgggaatgttgaaattactattctgggaattctttgagaaagacatgaggctgttggcraactgtgaaatgtttgatattccatgtgaattactatgcttaagattcaaccattgattcgacagttcacagggaatttgaattgcttagcacaaattaactttatctcttttcattaactttatctcttgctctgacttttcagtaacagacaacaaaagagttgaaggaggcagaggctctattgatgtcagaattcttgcacttgatttgagga

SEQ ID NO: 208963 - DNA, 629 bp, Homo sapiens
gctgtcttctccctgtgtctccttatattgtcttctctgtatgatcatctctgcatccaaatttccccctttgacaagtacccctgtcctattgtattagggcccagcctgatgacctcatttttacttgattacctctgtaaagtgcttgtttccaaataagatcacattctgaattacagcgggttaggacttcaacatatgtattttgggatggacccaattcaacctataagtctccaaaagggaaaactctttgtgcttctagaatagctcatgagttttctcaagatttgacttattccttgctcctaagtgagcaccagtgaggaaattttcagaatggaaaagggtgggaatgttgaaattactattctgggaattctttgagaaagacatgaggctgttggcaaactgtgaaatgtttgatattccatgtgaattactatgcttaagattcaaccattgattcgacagttcacagggaatttgaattgcttagcacaaattaactttatctcttttcattaactttatctcttgctctgacttttcagtaacagacaacaaaagarttgaaggaggcagaggctctattgatgtcagaattcttgcacttgatttgagga

SEQ ID NO: 208964 - DNA, 481 bp, Homo sapiens
gtaatctgggcagtgattttttacttttagaaatgcatctaattttcaattggattgatgggaaaatattttatattatttccaaatatttactagagaaattttgtcttctcaagaacttatttctctttaggtttgagataatcttttctatatggtcttatcaattcaactattggatcctgcatcaatattctctgttcaccggaaggttttcaagtatatttgccgaataatcgatgaatataccactgtatttattagaagaaactatacaaaattgccaatatttggccatttttgacctacaaaaatgttaagtttgtaatgtttaacgtagaacatgttaatgatgagcaggcagcattcctacttgggtctgtcaggttttcmttcattcagaggctacaatgtcgttccttacccttgtttgtttctcattttccttttctctcaaattcttatctttcacatgtagctt

SEQ ID NO: 208965 - DNA, 549 bp, Homo sapiens
aagcttctgcacagcaagggaaacaatcagcagagtgaataaacaacctgcagaagagacaatatggattcatatccaaaatacgtaaggagctcaaacaactcaatagcaagaaaacaacccaattttttaaatgggcaaaaaatgtgaatagacgtttcccaaaagaggacatacaaatggctaataggtatatgaaaaaatgctcggcatcactcatcagcagagaaatctaaattaaaagacatcacctctcacaagttaaaatggctgttataaaaaaaggtgaaagataagaagtgttggagcagatgtgaagaaaacggaactcttacacactgttggtgggaatgtaaattagtagagccattaaggaaaatagtatggaggtttttcaaaatatcaaaaataraattaccatatgatccagcaatcacactactaggtatacatccaaaggaaatgaaatcaatatgttgaagaaatatctgtactcccatgttcactgtggcattgttcacaatagccaagatatggaatcaacctgaa

SEQ ID NO: 208966 - DNA, 589 bp, Homo sapiens
atatttcaaaatataatgctgtttgtgataaatatgtacaatgtttattctcaattaaaaataaataggagaagaacgaaaatggcgaatgaatcctgtgccttcaactgggatatccaggttctctcactgggactgactaggtggttggtgggacccatggagagtgagaaaaagcaggtggagtggagtgacagcccacccaggagctgcacagggcaagggaagctcccactcccagccaagaggggcrgtgagtgattgtgctaccttgcctgggaaaccacactttatccacagatctgtgcaacctgtggatcaagagatcccctcgtgagcccacgccaccaggaccttgggtcccaagtacatagctatgcagactctaggcagcaggctggagactgcttaagatgactgagttcccggagcagaagggctgccgccatcactgcagctccagtcagcaatttcccctgcaggtaccagggagactgggcggtttggaccaggaggaattccccacagcacagcggctatggcagatcttggccagattgcttctttaggtgggaaccagatccaaccc

SEQ ID NO: 208967 - DNA, 589 bp, Homo sapiens
atatttcaaaatataatgctgtttgtgataaatatgtacaatgtttattctcaattaaaaataaataggagaagaacgaaaatggcgaatgaatcctgtgccttcaactgggatatccaggttctctcactgggactgactaggtggttggtgggacccatggagagtgagaaaaagcaggtggagtggagtgacagcccacccaggagctgcacagggcaagggaagctcccactcccagccaagaggggcggtgagtgattgtgctaccttgcctgggaaaccacactttatccacagatctgtgcaacctgtggatcaagagatcccctygtgagcccacgccaccaggaccttgggtcccaagtacatagctatgcagactctaggcagcaggctggagactgcttaagatgactgagttcccggagcagaagggctgccgccatcactgcagctccagtcagcaatttcccctgcaggtaccagggagactgggcggtttggaccaggaggaattccccacagcacagcggctatggcagatcttggccagattgcttctttaggtgggaaccagatccaaccc

SEQ ID NO: 208968 - DNA, 489 bp, Homo sapiens
ctggttctggacatgctgggagaagagatggctgtgtgggtccccaccagttcttgctgggtgtggtaagagtgtgaggctctcatgcctrtctcggccactcctaggggttatgtttgcagggagcagcctaagggataaggaaacatcttcccccagacagacagcagacttgctgtgaaagaggtcaactccctaagcttagtgctccttggccattatacaaaccatcctcaacctgccctaacttttcttgtgagtgcctggtcaggtttagtgaagaacttgtaagtgggttcaaatactgtaccttctgagatttctatattattatgctagctcacactctgcctttaacaattaattaaaaatcttagttgaattcttcttgccaacttgtacggcatctagaagcctctgccctgggcaaggaagtgctcatggcccactcctccttggatgtgcctgttgatttttaaatttcaagtt

SEQ ID NO: 208969 - DNA, 489 bp, Homo sapiens
ctggttctggacatgctgggagaagagatggctgtgtgggtccccaccagttcttgctgggtgtggtaagagtgtgaggctctcatgcctgtctcggccactcctaggggttatgtttgcagggagcagcctaagggataaggaaacatcttcccccagacagacagcagacttgctgtgaaagaggtcaactccctaagcttagtgctccttggccattatacaaaccatcctcaacctgccctaacttttcttgtgagtgcctggtcaggtttagtgaagaacttgtaagtgggttcaaatmctgtaccttctgagatttctatattattatgctagctcacactctgcctttaacaattaattaaaaatcttagttgaattcttcttgccaacttgtacggcatctagaagcctctgccctgggcaaggaagtgctcatggcccactcctccttggatgtgcctgttgatttttaaatttcaagtt

SEQ ID NO: 208970 - DNA, 549 bp, Homo sapiens
aagaaacatttctttctactcaatagcagtgatgacaagataaaaccctagagcacctgtatatttttctccaagctaaatataaccccaatatgttgagakgatgaattggtcttgatttccctcagcattctgacacctttctacaagtatttataatactgccagtaattattcatatatagactgagttcccttctggattagatgtctttgcatgtagagtttatatctaatctgcctacacgtttccagcttctagaacaatgctcaaaacaaaggaagttttcaataaatgcttcttgaatgagtatctattgtaatcccaataatgactcctaactactatactaattttgtaacaataatgtaccataattacttcagcttttgattaactgtaactcacaatgtatcatttctgtttgatcaattacctttcatcttcgctttttgtcagggcctttcttcttgaacagcctactcttcatgtgttgccattctcctgctataagataattaggcggatgaaaccaagactagatcatt

SEQ ID NO: 208971 - DNA, 394 bp, Homo sapiens
cagaatgtgggttaaatctgtagcaaatggcgcaatcctcaagtcacttagatcaaactaaattttagagtccctgactcaccagaccagattgctgaatagagctttacacttaatatgtaaatatgtcactataagaataacatttttggccaggtgcagtggcttacacctgtaatctcagcactttgggaggctgaggcaggcaggtcactggagctcttgagtttaagaccaggctggccaacatgatgaaaccccatctytactaaaaataaaaaaattagctgggggtggtggtgtgtgcccatagtcccagctactcgggaggctgaggtggaaggatggctagagcctgggagatggaggttgcaatgagctgagatcatgcctg

SEQ ID NO: 208972 - DNA, 598 bp, Homo sapiens
gtaacctgctcttgtgttcaactgccaagctgtaatcaatctgggtgtttctgtacctctcttccattttctgtatataactttccttttactgtccgtaaatatttttcaaccaaacagcagcaccggagtctctctgaacctgttctggttcagggctttctgatttgtgaattattctttgctgcattaaatcccattaaatttaatttgtttaaagtttttcttttaacatggtaattaagagacttctcaaaagtaaactccagctcagaaagttctatatatgaattcaatgaaacattcaaggaacatacatattcttaaactctttttaagactagaaaaagagaaaatatcccaaactaatttaataagcccaattgaaccttgctaacaaaattagacaatgacaatatcaacaaggaaaacyataggccatttttactatgtgaaaatccaaaacaaggtattagtataccaaatcaaatagtatataaaatataagcagttaaagaatgaaagaaccgtttaagatttttaaaaatatatgaatataatttacccttttattactgcataataaaaaacttatttg

SEQ ID NO: 208973 - DNA, 526 bp, Homo sapiens
tttgtgcagcttccagtatcaataacacaggataggacttcatttcccaggcatataagtgactcacactaaactagacaaattcgataacctctcactttcatttagagaaatgatcataaagctgccagtggggcaccatgtgattttcaaggcgggcagcacaattgcaaaacaatacttgcaggaatcatagaggaagagaacaattgtttccagcacctcccttatctcactatatggacagacagtgcatagagggacattcycagatgccacagcacttgagtgttttggtaaagtcctgatggagaccagggaaagcggcaagagagtgaggtgtgcagcacacagcacagtcactgctccacagcaccagagatctggaggcacacgtggaaccaaatgggccaaaaaaaaaaaaaaaaaaaaaaaaggaattcatagtcctcaggccaagaattctccatttaacctcattcttgactctgccaacccacgcgatcatttattaggagttaacaga

SEQ ID NO: 208974 - DNA, 603 bp, Homo sapiens
aatgcaaattttgcagctaaggattttagtctgctctggttgctgttcacagaatcaaagatcaaaggtcagtgaataagtagtctttctttgatctagatagatttctcctcaacgtgaaaaagtattgtgtttaaagattatgatgatatgacattgcactctagtgtattttctgtcaacagtgaacagtgcaagcactgccttataaagctagcatatatgattgcacaaagtgtggatttttctgtgttcataaatgggaagaattaactatgttaaaatgtccatactacccaaagtgatctccagatttaatgcaatctctatcaaaataccaatgacattcttcccagaagcagaaaaaagaatcttaaaattcatatgaaatcacaaaagaccctgaatagccaaagcaatcttgagcaaaaagaacaaagttggaggcatcacattaccttacttggaaatagactacaaagcaggaggcagcaggggttgctggagagttagggaaccacttyctcttgcacacaggcttcctggcctgggacagtcccagcgccctcgcatctgcccagcaccaccaccctttatcttctc

SEQ ID NO: 208975 - DNA, 607 bp, Homo sapiens
acagcccagcatagaatacaaactacagtacttaaacataaaatcactgaattttgtcatcaatattatgaaaaactaaagcaactgacatttgaagttttcctaagtggaaaggtagtagataaatgactgctaatgtttctgacaaaacaaatacccatacagtgcagaagatttytttatgaaaagaagaatcaatcagtatcctttaaaagtagtaagcctaggaatactattttttttttttttttttttttttttgagacggagtctccctctgttgcccaggctggagtgcagtggcgtgatctcggctcactgcaacctcggccttccgggtcaagcaactcttctgcctcagcctcccgagtagctgggactacaggcgcgcgccacaatgcccggctaatttttgtatttttagtagacacggggtttcaccatattggtctcgaacgcctgaccttatgatccgcccgcctcggcctcccaaagtgctgggattacaggcttgagccactgcgcccggccagaatactattcttaactgccaatcttacatacagaaaatgtgaattacaatatactatgcatgcaattttaaggc

SEQ ID NO: 208976 - DNA, 573 bp, Homo sapiens
tcccgatgggaacgcgcccacgccgcagctgggactcgggagaggctagggggaccgcgtggccttgctgtggaagggacccgcgcgggcccgccgcgaagggggccctgcctggcgcgacctggggagagccggggccggccgggtggagggcgcacggggacacacggacacgcacagacacagacacgcgccccgggctgaggagggtggtgggaggaccgcyggccgccccccgcgcggagccccagggaacccggactccagccgcaaagcggagaggcgccagcagcaatcagccacctcaggggcggcggagtccaagcccctctcagccggaccgtaccgcctaaaccctcctcgggtcctccttcctcacgtatgaggtctctgtaccgaggcggctggttccatcgcagccccgagccaacccgccaatcccgcaggacactaaccgctccggccgccgcaggttctcccgggactgccccctccagggggccgctgtcccgccccacgccgggggccgccacaggacgagttctctagctccagccgggcgaggcgccaggg

SEQ ID NO: 208977 - DNA, 532 bp, Homo sapiens
atatcctacatatatttcaatattcaatctcgtgtatatatttcagtaagagttcgtaatttttatatagattttcggtttacagaattccctctcatttcttctttacagcagaatttctttataaattttgagtgattcccttttgggagggatacttgggcatgaagtttcactccaatgcctttctaggaagctttgccttctccatgtgggtaaattattcaagtttattttttcctcccctcttttcatttgcacactgtggaactctctgaacttacagactcggcttactttgctgaatgaacccaggtctgcagaatgtaatgagattatacagggtttctaacacatattctgaccttctacatacttcaggggcctctgctgacttcagagaatgggctaggatccttaaaactggctttagctttcagaatacatacttccaggaaatgcrttcttccacctttccattgtacagtatggatttctttgtctgcttaatttgacttgtactaagtaggaa

SEQ ID NO: 208978 - DNA, 591 bp, Homo sapiens
tttttgacacaaggcctcatgctgttgcccaggcaggactgctgtggcatgaacatggctcactgcatcctcttgacctcctgggcccaagccatcctcccacctcagcctcctgtgtagctgggaacacaggcgcatgtcaccatgcctaactaaaagtgtgtgtgtgtgtgtgtgtgtgaaacagaccctcaccatgttgtccaggctggtcttgaactcctggactcaagaaatcgtcccaccttagcctcccaaagtgctgggattattacaggcatgagccaccatgcccagccctcccttgtttttgacataggtgtttacagctaaaaatttccctctaatcactgattttgctgcattccctgagttatgctatgtggkgttttcgtttccattcatcttgttttctaatttcccttatgatttcttatttgagtcataggccatttagaaatgtgttgtttactttagacatatttgtgaatttctaagtgtctttctgttattgattaatgattttgtatgattttaaaccttttacatttattgagacttattttatgaccatcaactatttttgatcta

SEQ ID NO: 208979 - DNA, 660 bp, Homo sapiens
gacatatggcacttcttaagatgatattccatggtatgtgataaaagatgcactttgcaatagctgcttttctttctctttttttctcgtttttttcctttctgtctttctctcctttttcttctaagaattctttctttattgaacttaagagcaactaacagaaaggcagaacaatggtcagtcgtcttaatatcagcacagaatgggaagatattaaacgtggtcattattctggctagctagaaaataactctagctttctacgtagtgatgaataaggaaaaggactctataaacctcctggaagaaaaacagttgtttttaagcctgcaaatttcatttagcttttaaacaatattaaacggtaattatttcttttttattgctttataatgcttttttcggtagtgttagaatttattgtggaaacagtattaaaacggatttagtctcctatccattgagttgtacrttactaacagaactatgtgaagatcctgattggttagttcatcaaataagtaattaatacctgaaatgctcaagaaaatttggtttgaacctttttaaaaaaataagtataatttaagaactaagaaatggacactgattcatatgctaaagtataattagtattggtattaataataaaagagt

SEQ ID NO: 208980 - DNA, 540 bp, Homo sapiens
agaggtgaagtattggaacaattaatgcaattatctatcaggttatttttgagaacacgcaacaattattgccatgctaacaggaacaaaccaggactgtcccgggaagcctgagctgtgtaatcactcttcatttgttttatcaacaaatatttaagccttaagtgacattttattttttataaaagctgtattttgtttatattaagcttttctgtgatagtttgttgagctatatttaggcatagaatttatgacactgaaaatattagrtaagtctcactttcatcatttctcatgttacttctatgtttgaagttgatatagtttgaatgcttgtcccctccaaatcttatgttgaaacatgatccccagtgttggaggtggggcctagtaggaggtttttggtggatccctcatgaatggcttggtgccttcctgatggtaatgagtgacttcttgctagtttagttttcttgagatctgattattaaaaagagcctggcaccccctcctttctcttctgctccccctcttgcc

SEQ ID NO: 208981 - DNA, 523 bp, Homo sapiens
atgggattttttttcttcctgattttttgagttccttatagattctgggtattagtcctctgtcagatgcatagtttgcgaatttattctcccactctgggttgtctgttttctctgctgattacttcttttgctgtgcaggagctttttagtttaattaggtcccatctatttatctttgtttctgttgcatgtacttttggattcttggtcatgaactctttgcctaagctaatatccagaagtttttctgatgtaatcttctagaatttttatggtttcagatcttagatttaagtctttgatccatcttgrgttgatttttgtataaggcgagagataaccattatgttttggcatgcattgttgacgagaaccctatgtgactttatttgtcattattttgttggtaatctgtcttggttctctctaaccttttttggggggaacattttattttcaaagcctcacagataggcttttttttccctttttttaaaaaaagctttgagagataattcac

SEQ ID NO: 208982 - DNA, 580 bp, Homo sapiens
aagcgaacaccaccatgcaattatgggggcattcaaagagaagggaaccaggagccaactacaagagctcacaatggccaaagctaggacaatttgagcaacacaagaaataaagcagtagtagactataacccaaagtataaaataaatgtctatgaattcatactgacataaataaatggttgaaagaatagacaaatcttccatacagaagaaatatgagcaatttatgcagatactccaccctcaagtcggtggagcataactccccactccttaagtgtgggctgcccatagtgactttcttccaaagactgaaatataggaagagatggggagaaagcacctttagggtggagaaacctgacgaaacctacctcaagccagatgatcaaggttaaggtcagtagtcataagtcataagtcatgatgttatgtatccttaatataacatgataagtatgatactttgcctgtgtagtcttcctcccaaaaacccacaatcccagtgcaaccatcagaaaatmattaggcaaatcccagttgaggaacattctataaaatacctgacctatactcc

SEQ ID NO: 208983 - DNA, 535 bp, Homo sapiens
gcaggtactgttgtaccaaggacaggatataatcctgtggtgttggctctgctctcaaaatggtgcagtgctatggcagcttgggttccagaagtgggatttagcccaagttccatctctggaacaatgcagttgtgggtgctccatgcagcaccctatactaggctcagggatcctgagagccaacaggcttttctgtatctaggactgcaggtttcttgggtggaaatgtgaacagctgggcaatacctcacttamatttttcctgcaatggagcattcctcctggctctgggctgaactggcctactgccctactttcctctctacattgccatcttaagttttccatgcctcagagggtccctgttttttctctgctggattccagtgttctcccctagatgatctacttgatgtgtgtttatgtacttgctgttttggtccttctttatggagaagacaggcactgggcgcctctcttcagctacttcatacaatcatccttgagagctgtttggcagtaaacatgacag

SEQ ID NO: 208984 - DNA, 610 bp, Homo sapiens
ccttttttgccttttgggaacgtattctttttatgtaatttgttggcagaaagctgttcagataacctcctggttttcagccttcctactcattctctcctttggtatctgccaaccctgataccagagccttttctagtggtctcccaggcagattgttttccttcctgtatgagttttgggctgtggtgttttaaactgtttcgtctgtcctctcttttatggtttggctctgtgtccccacccaaatctcatttgaattgcactcccataattcccatatgttgtgggagagacctggtgggacataattgaatcatggggatggtttctcccgtactgttctcatggtaatgagtaagtctcaggagagctgatggtttgataaggggaaacccrttttacttggttctcatttctctctcgccaccacatgtaagaagtgccttttgccttctgccatgattgtgagacccccccaaccacgtggaactgtaagttctattaaacctatttcttttgtaaattgcccagtttcgggtatgtctttatcagcagcatgaaaatggactaatacggtaaattggtaccagtatagtggggtgttgct

SEQ ID NO: 208985 - DNA, 619 bp, Homo sapiens
tctgtgtagtcaacaatgtaatgaggttatatttgtagttagaataatcaacccttttctctccatgtgctaaatactttgaggatttcttctactttcatacttgcattccctcacttaacaaacatttattgatcactagctatctattgaattaaactgagacattacccaaagccttgactcttttatcttgtccatttaattgaaaagaatatgtaaaattcacaaaacactgcattcctggatttgcaaaagataaataagttagaagatctattctggrtacccactttggtatggtatctcagatatactcaatgaacctcgagtctcccctcactgggcagttagtgggaaggtgtacttaattatacaacatcactgacctgtatccattttagatgaagttgagatccagagaatgatacagtcaattataaagaggttaaagctatcccacaacaacttatttttctgaaaatgtgaactatgcctttctgcccagtgcagccccagaacatgtcacaaaatgtggctcatatttggcatatattttgaattgaattatagttacaaacattattgtattatatgaacacatacccaataataaata

SEQ ID NO: 208986 - DNA, 480 bp, Homo sapiens
caaggagttgggaccacaggtgcgtatcactatgcccagctaatttaatttttttttttttagagacgcaatctccctatgttgcccaggctggtctcgaactcctgggctcaagaaatcctcccaccttggcctcccaaagtgctgggattacaggtgtgagcctctgtgcctggccctatattttattttaaagatataatgccattgcctgcttaatagactacagtatagcataaacataagttttatatgcactaggaaaccaaaaatttgtgtgacgtgcttaattgcaatatttgccttatgggggtggtcttgaaccaaacttgcaatatctccattgcaagcctctatacaactaattgttcttatgtgctttgtttatttatgtatttaagsctaacgttacatttatgagttgatggatcgataggtagatgactagacatagacaggtggacactaagttggttaaaa

SEQ ID NO: 208987 - DNA, 628 bp, Homo sapiens
gaggttgtgggagcagtcctggtgaaaaacgatgacagctgggaacttaaatgagggtgatggcagtgaagatgaaaagaagtggccagccttgagagaaacttcggaggggagggaacctgcagttgttggcatggagagctggaggcaggccccagaggtgggcgcttgtttttgtggatttactggctttggaaatatgcttggctttctctagttggtcctgaattggaagtggaaacaataaaagcatggaaaactggcagtcattgactaagtcctggccattctgktctgattgctgcagaggcataggtcagagatcgtcttacacggtcagaccattgtctgttggcacattcagtttggtctcccttccccttttggtcattctctcattggagagtttggacagctcaggggaggctagagatccagatcttcacagcttgggggttgtctggttgcctccataggcaatcatttcatgagaattcttttatttgtgttgttgtagcatcatggagatcatctgatgacagagcagctgcacagaagcattgcagactctgcagaggatgcaaccaacagcatcatgaccactgtgacaaaacaagactaatagttc

SEQ ID NO: 208988 - DNA, 415 bp, Homo sapiens
tgccaaatatctgccatgctcccagggtgttcaccacctacgtcaactcaacaggtacagtcagggtggcaagcagtggccaaaagcctggttccctgtgtaacagttaatccaggcaatatgccayctttcctgagtgaagaaacacaacgatgtgacatatattaaatcacaatcgatccactctacaatagcatatcagaaagcattgttttcagcagtctggaggcagtggagtatgacaaagaacatagttttgaaatcagatttgggttcatgttctagctctgccacttatgtgctgtgagaattttagttaagttaattactccttaagttttccttctaaaataaaaatgggatgaaactagtatctaaaagtatggcctggattctaaatccagctcctgaattc

SEQ ID NO: 208989 - DNA, 556 bp, Homo sapiens
aatagacattaggtaaataaacacaaacgtatatgtaaatgctagcaagatttagccatttatgcaaaagataygtattgagcacctaacttatgccagacacttttccaatcatttgggatagagtagtaaaccaactaaatttaaaatctctgctatcacaaaccttttatttaaatagagcttatactgtaaagcaaagttaaaagaacaagagtatagtgatatgcaataactagggacagtggccttgccatttcctggtgacaggaaaggcgactgtgagcaattggcatttgaattgggatctgaaacatgagcccatgttattagatgagagcaagattacatgaagctgtgtgtggaataggggttacagcttccaaaaaaaaagaaacagaatggttggaggccttgtagtagatggtaacatgaaaagggccaagaaacagatagaggccactggggctagaatgcactgaaaggcgcacagagagaaaagagaatgctaaagagctttgattgagtcaaatattgctgggctttgtggctatgt

SEQ ID NO: 208990 - DNA, 495 bp, Homo sapiens
aatcatgacaaattgttttctcatttcttttgtaattttatgccatgaactcctgtctttgtgagtggtaggggacagstatcccttctggactgagtttttgaagtgtgactcctgatggttatgtatttgcttcctgaaaaagaacctgaaaatattgcctacctataacttatcactgtattaattttttatcttgaggattctggatttacatgggtattgtaaaatcatttctaaacctgatggctgcccaagctgagggactctatattttaggtgacaataactttttttttttagtgagagtccagacaggaacagatgagcttcattgtcatcatcctgtgctggagagtgaattttcttctattttcccatttctctctgggaacaaccagctttattcgggcatctcattcacctccaactgtctacctcacacttttcagtaagaccaaatcccttaggaagcaagacacataattcccttgg

SEQ ID NO: 208991 - DNA, 547 bp, Homo sapiens
atatgtttcaaacatctggaatagattcatgccaaggaatcattcaaattaccatacaattttattgctgttttccacaagcaattcacctggacaagaaagtaatttcattacttaattcatttattccattaagagctgtagtttctcttttgtgtcagtgattcagtgactgggctgggtgaaattctggagttacagcagttagaagacattttcttaattctaatatcaatgcatctgtctataatttcttagcctacagatcaataaattatataaactcatgattttgaggtcattgctatgtaccaggcattgtgctccttttatgtaagatacttaataattctgttagtaacccttgagaggatatgttttrtgcacattttcttgttagataaattgagatgtggtgagattgagtaaaatttgcccaagttcacataactagcaaatgtcaaagcagtgatgaaaactgagtagtcagactgcaaagtgttcacaatttatctactgtcatacatattatttgagagcaaaccaa

SEQ ID NO: 208992 - DNA, 553 bp, Homo sapiens
aggagttccttcatcgattctttgaaataatataatatgtttggtactagcacttctatgtatgtctggtagaattaggatgcgaatccaactggtgcagcacttttttggtttggtaggcttgttattagtgattcaatttcagaactttttattggtcttttcaggattttattttcttgctggttcaatcttgggaggctgtgtatttccaggaatttaccaatttcttccaggttttccagtttctgtgcatagaggtgtttataatagtctctgaggatttcttgtatttccgtgggattgtctgtaatgttgcctttgttttttccaattgtgtttatttaaatcttctctctttttttcatkaatctagctagtggtctatccattttgtttaatcttttgaagaaaccaataagacttttagtttcattgaattttaaatgaattttttgcatctccaccctttgctttgagtctatgggtgtcattactcaattttgttcagttctgctctgagtttggctatttcttttcctttgctagcttt

SEQ ID NO: 208993 - DNA, 511 bp, Homo sapiens
tattagcagagtgagttccaagcaaatataacaggtgtccttattaaaagggcaaatttggacacagagacacatagagaaggaggatgatgtgactgcacagggagaatgatatctacaaaacaaggaacaccrgaggccaccagatggtaaaagaggggcatggaatagattgttgcccacagacccgagagaaccaacactgcggacatcttgattttggactcccagactcgagaactatgtgacaataaatttctgttatttaagctacatacatttttgcaattagataaggtcgctccagaaaagcgatactagatttttgtccaaatcactctcaagatgatgtatgagttctccacagatcatcttggggaatgacttaatatcattgttactgagaagtgtagtagaggataattagcttcagagtttattatcatgcaggaatgttctgaattgggataaatataaacaaaaatgtttatttactctctgtgtgaagctt

SEQ ID NO: 208994 - DNA, 511 bp, Homo sapiens
tattagcagagtgagttccaagcaaatataacaggtgtccttattaaaagggcaaatttggacacagagacacatagagaaggaggatgatgtgactgcacagggagaatgatatctacaaaacaaggaacaccggaggccaccagayggtaaaagaggggcatggaatagattgttgcccacagacccgagagaaccaacactgcggacatcttgattttggactcccagactcgagaactatgtgacaataaatttctgttatttaagctacatacatttttgcaattagataaggtcgctccagaaaagcgatactagatttttgtccaaatcactctcaagatgatgtatgagttctccacagatcatcttggggaatgacttaatatcattgttactgagaagtgtagtagaggataattagcttcagagtttattatcatgcaggaatgttctgaattgggataaatataaacaaaaatgtttatttactctctgtgtgaagctt

SEQ ID NO: 208995 - DNA, 511 bp, Homo sapiens
tattagcagagtgagttccaagcaaatataacaggtgtccttattaaaagggcaaatttggacacagagacacatagagaaggaggatgatgtgactgcacagggagaatgatatctacaaaacaaggaacaccggaggccaccagatggtaaaagaggggcatggaatagattgttgcccacagacccgagagaaccaacactgcrgacatcttgattttggactcccagactcgagaactatgtgacaataaatttctgttatttaagctacatacatttttgcaattagataaggtcgctccagaaaagcgatactagatttttgtccaaatcactctcaagatgatgtatgagttctccacagatcatcttggggaatgacttaatatcattgttactgagaagtgtagtagaggataattagcttcagagtttattatcatgcaggaatgttctgaattgggataaatataaacaaaaatgtttatttactctctgtgtgaagctt

SEQ ID NO: 208996 - DNA, 511 bp, Homo sapiens
tattagcagagtgagttccaagcaaatataacaggtgtccttattaaaagggcaaatttggacacagagacacatagagaaggaggatgatgtgactgcacagggagaatgatatctacaaaacaaggaacaccggaggccaccagatggtaaaagaggggcatggaatagattgttgcccacagacccgagagaaccaacactgcggacatcttgattttggactcccagactcgagaactatgtgacaataaatttctgttatttaagctacatacatttttgcaattagataaggtcgctccagaaaagcgatactagatttttgtccaaatcactctcaaratgatgtatgagttctccacagatcatcttggggaatgacttaatatcattgttactgagaagtgtagtagaggataattagcttcagagtttattatcatgcaggaatgttctgaattgggataaatataaacaaaaatgtttatttactctctgtgtgaagctt

SEQ ID NO: 208997 - DNA, 422 bp, Homo sapiens
tgactgtaataatgatagaattagaatactcttaattttcattatgattgaagctctgtaacaggttgttacaacggtgtttaggaagcaagcatcatctagcacttacagatgaggaaactgaggttcagcacttgcctgatgtcactgagctgacaagaactctctagcttggatggaatccagatcaagcccacagctgtgttytctcccacacacccaatgacactcatcccagaatgtggtcctgaacaagaccagtgtggggctagaccttgctgccagagtacttagatcactggcaggttttgaggaaacctggggtaggctttgtgtttcacgtatcccaggatttctcctaaggactgcaaaataagtgagggtatgactctctcagggattaagtcagctctgatggaatt

SEQ ID NO: 208998 - DNA, 649 bp, Homo sapiens
tttctcataccacgctgtgrttgttactttgtgtaaacacagagactggataaatcatctgttggacagcactgagagacagctgtctcaggtgaagtgctccagtcccacttctggaggcttgagaagccctatcatgatgttttgactcattaccctgagccttcatcagctgatgaaactaatttttttcatcagctgattaagattcaaggtaatgagtcaaaacatgccagtagtaattcccaactgcattgaagacaagatgttaacttttccatgcacatacatgcatgcagacagacacaaaatgaaccaacacagcctccttgcatatagaaaagttcattttgttaacgaagggggtgacaattaccacatacatctaaaagggggaaagaaaaattggttgaccaaacaattgaactgattaataattttaataagggagaaatggcatgaaattaattcatgagagaacacaactggagaaaagaaaataaaaatcacacaggaaattgccatgcacaaatccaaacagattctaggaaaaaccaaaattccaaatgctttgtgcttcctcttgaatcaacaagtgcacttcagaatgtttttgatggcaactgtatctaagcttaaagttccagga

SEQ ID NO: 208999 - DNA, 557 bp, Homo sapiens
tccacagcggatacattccaagactccccgtggatgcctgaaactgcaatacattgattttccccaaacaatatatatacatatatatatatatatatatatatatgctttataaataaagcttaatttatatattaggcatggtaaaagattaayaataacaataataaaatagaactattataaaaatattctgtaataaaggttaggtgaatgtggtctctctttctctctctctctcaaattatcttattgcgtgcaatattttgagactgcagtggactgcaggtaaatgaaacctcggaaatcaaaactctagataagcggggattgctgtcttctgtaaggttctgctgttgaccctctgacatcttcacttctcataattttctgggtgtggcactgactcccatcactatccatatgctgatatcacctgtaattctatttcccattcatcttgctcctctgctgaagatcacactctctacctgcctagtagaaacccacacagaaaagtcccaaagccaccacacactcagcgtttaaaaaaaaaa

SEQ ID NO: 209000 - DNA, 562 bp, Homo sapiens
gcacatatttatggaactctctaaaataggtagcaaggagtaattattatattaacttacagcaaaagtgtctataaaatctggataccctgttgatatactaggccaaattcgcaatcttctcaaaaatctctttgatctcttgccctcaaaatgctttagaaaaatcttaaataygcactgattctattttcttcttttattatttcctcttctgttgtatggtcaaattaattttttccacaagtatctccctgtctgtatcagttagggtgctttcagctacaagtaaatcaatgcgtgttcaaaccaaaagtcacatgaataatgaggaatttatcttcttacataagaaaggtaaaggcaaggtgagtccaggatagttatttggcagcttaacaaagtgaggccttcagtttgttcattctgcaatttttttgtctgtttgttttgcttttatggtaataaaatggttgaaacaattccaaataatattcttacaccaaaatgaagataaagagaaataaggctacaaagaatcacacagtaccatatatacgta

SEQ ID NO: 209001 - DNA, 364 bp, Homo sapiens
acataataatcaaatattgttgttaaagaagaaagagctactctatggatttcctagtaacacttcatacgaaaaaatattaaaagcataatttaaaaattattatactaattaagataactgtatacacacacaaaagatagtrtaaagaatgttttataatttatttcacaaagagggggaaaagatcatttaaacattcagcacaaaacacttcttttttcatatgattaagctgtgctgcacattaggaatgccaattaaagtttcaaattatatttctggaaccagctgccagtagcatccatcttcctcaaaagtagcatctgtgaagctggtggcatgggaccagatttttggacac

SEQ ID NO: 209002 - DNA, 537 bp, Homo sapiens
gccaagcctgtttttgagactgggttccttttttaggggaatatttgtttctcattcaccacaacaccatgagagatttgtatctgtattttaaaagctcttattgcatgggatttctgcaccaaagatgttcattaagtattcaggaactaaagaaagagtcacacacagttgtggggatgtgttaagtccactgtaagataagttagtctataaatctatcatctgacctttgtaagtccccatcactctggtagaccagggtagcatttggggtacctcctggtcataatttttaaggtcgtacccagcaaattacttcaagctttaaactgagattcttgaagacagaaacagaccatctctcacaaatcttgaacccagcttcaaacygtgcttattctgtattggatcagagaggcttgactataaataccagcatgaagacagttaaatatttttgaagaaagatagcatcatcaaatcctctacgaatttttcaaaacaatatccagcacttatcaggtatttcaggaa

SEQ ID NO: 209003 - DNA, 576 bp, Homo sapiens
agtctgaaatctttaattcctaaaggtacttacatttgggagctgacagaaggcttcgtcaatataggctaaatcatcatttccttttgataggattggtgtattccacttggatctatgttattgtacaaaagagttattgaagctccctcaggatcatagatttattaaattactattaattgttatacttgtgaaaacactgtactgacatgaatmagtgacaggctaaataaaaaattttaaaaggtggaaaagaaattaaatgctttctacggaagagataaatatttactcttctattcaaataaacacaatcagaaatgacaaggaggatattaccactgactccacagaaatataaacaccatcagagaatatcatgaacatctagtttatgcatataaactagaaaatctagaagaaatggcttaattcctgggtacatacattcctccctagactgaaccaggaagtaattgaatccctgaacagaccaataacgagctctgaaactgagcagtgttaaatagcttatcaaccaaaaaaagcccagggccagatggattcacagct

SEQ ID NO: 209004 - DNA, 576 bp, Homo sapiens
agtctgaaatctttaattcctaaaggtacttacatttgggagctgacagaaggcttcgtcaatataggctaaatcatcatttccttttgataggattggtgtattccacttggatctatgttattgtacaaaagagttattgaagctccctcaggatcatagatttattaaattactattaattgttatacttgtgaaaacactgtactgacatgaataagtgacaggctaaataaaaaattttaaaaggtggaaaagaaattaaatgctttctacrgaagagataaatatttactcttctattcaaataaacacaatcagaaatgacaaggaggatattaccactgactccacagaaatataaacaccatcagagaatatcatgaacatctagtttatgcatataaactagaaaatctagaagaaatggcttaattcctgggtacatacattcctccctagactgaaccaggaagtaattgaatccctgaacagaccaataacgagctctgaaactgagcagtgttaaatagcttatcaaccaaaaaaagcccagggccagatggattcacagct

SEQ ID NO: 209005 - DNA, 367 bp, Homo sapiens
tgttgatctttaaatccccatttgctctttgcctttccctatttttgctctatttatgcggtatcacagataagttggatgagaatccacattggattaaatatttgctcttttgagaatttgccaatttaagcattttaattggcctattacacatggctgaatgagtcaagcgattcaccatggctaaatcccatttgactacatagggataacgcactattttagcactctttcttgcctagatgtttaagatttcttggtgtatatattatctttgaatttaaattctgcctgccatttgktagtgtcttttttagcattttccttagagtaaggaacatcttttttgtgtgtccatgtgaga

SEQ ID NO: 209006 - DNA, 473 bp, Homo sapiens
ggcgttgggaggatgtaaagcttgatcaattaggatctcatagaaacgaagcacaaatgcactagtgcagacccaggagttggaaaatgaacycttgcataagtatgtagatcatgccctctctcagtctggcactatacctgtcatattgagttatataagccaaacacttccttttaagcctacatccattccagttggattttctgatgtttgcaacaaaagtgctaattgatatatttagatatttacaaaaagcaaaatgaataatttttcagctaacttaggtgcaaaaggtagagttgggttttgaaaaaaaaataaaattgcatgttatatttgaaaaataaaataccatttttggatagcatgaaataagaaatgttttactcaacagttaatccaagatagacaaaaataaatgggagaaatgacaaacagaggctgcatgtacacggcatgaactaagcaaa

SEQ ID NO: 209007 - DNA, 477 bp, Homo sapiens
cttgctatcatctttttttattatagccaccttagtggatataaagttatatctcattatttaatttgaatttccctaatgaataatgtgttaagcatctttccatstgcctattggccattacttttttagagttgctcattttgaaattgggttgtctttttattactgagctataagaacatatatcctggatacaaggtgcttatcatatatatgatttgcaaacattttctcccattctgtctttttactttcttgatagtatcatttgcagcataatttttcttaattatgataaagtctaatttatttatttttttgctgtttgtgcttttggtatcatatctaagaaaacattctctaactcaagctcatgaagatttactcctctgtttccttctaagaattttccagctttagcccttcatttagttctagaattcattttgagtgaatttttttaaagatgtaagg

SEQ ID NO: 209008 - DNA, 584 bp, Homo sapiens
cagtgagaaatatagggcccagggaaggtaaatgacttttttgggatcatgcaactggaatccaagccaggaccaaaattcgtatctcctgaccatctgtctatccagttcgatttccagtttgacaactttctgacactccctatccaacctggttgttttaaaggaaagcacaggaaatgaaaagcctgtgtgctcagtccatttcccttctttctgaaaattccaaatagctttttcgcagccttctattctaagcctaaatcctgttctttttgctatcagtagcaagtaatagataggctctttacacagagctggtaatcacttcttgattgactccagaccaaaattaaacttgctcttgctaagcaagctcattggctttatgaacagagacttttcagttatccaagaccatcatacctgcttctraaatgtcctgttttctctgttattatgaactgcttcagcatactgcagttaactgttagcactcagaaaaaaaatgaattctttaacttcttaaatataaggatgtctttgagaggccatggcatatttgatgaaagttttttagtaga

SEQ ID NO: 209009 - DNA, 414 bp, Homo sapiens
gaattcattttgagtgaatttttttaaagatgtaaggcaagtgtctaactwtattttttttgcatgtgggtatccagttgtccagtaccatttgttgaaaagatcatgctttcaaccacttaatgtcatgacacacttgtcagatgatttatacttttaaaagatattgtgggacaggatcagcttcatgcttgtgtgatctgtgcagttgctctgagccctacgcttagaagtgccctgtactaggcttaatgctctgctgtgaccgtactgaaatacaaaataatttattaataaaaagcccacattttcattttgcactgtgcctgaaaattatgtaggcagtctgttatcgggaaaagcaaaggaggccagagtagaagcctagaaactttttgtaaaaaaactgttgta

SEQ ID NO: 209010 - DNA, 431 bp, Homo sapiens
ctttaatgccttcttattcattatatataatatatacatatatttctctctttcatacatatatatagacaaacatattaatatataaatatatgtctcatatatttataaaatatattcatatataaatatgtaaatrtatgtataacttatataaatatgtttttataagtaaataattttatatctgatatataaactatgaattatatattttattacatataatatataccctaaagaataaatatatattaaaaatatttttatataatttatataatataagagaaatagtggaagcaaaaatctagagtacaattttttttacttcttttttttttttttttggaggtagggtcttgctctgttgcccaggctagagtgcagtggcgaaatcttgtctcactgcaacttccgccttcagggct

SEQ ID NO: 209011 - DNA, 401 bp, Homo sapiens
  misc_feature (1)...(401): n = A,T,C or G
gcaagtgtctaactatattttttttgcatgtgggtatccagttgtccagtaccatttgttgaaaagatcatgctttcaaccacttaatgtcatgacacacttgtcagatgatttatacttttaaaagatattgtgggacaggatcagcttcatgcttgtgtgatctgtgcagttgctctgagccctacgcttagaagtgccctgtactaggcttaatgctctgctgtgaccgtactgaaatacaaaataatttattaataaaaagcccacattttcattttgcactgtgcctgaaaattatgtaggcagtctgttatcgggaaaagcaaaggaggccagagtagaagcctagaaacyttttgtaaaaaaactgttgtagaatagaaatgagaaaannnnnn

SEQ ID NO: 209012 - DNA, 499 bp, Homo sapiens
ttctgtataacagttaagaatagaggatagttttattttacaccctgtcataaactttcactcaccctctcacatacacactccacagaagtagaattgcctgggagaaggaagctgctttgaggtccctatgaagactatgagattcatatcattatcattatcattttccagactttttatgtaaagggaacatacaccagtagttttcttctagtctaaatctctcttatgatgtaaaatactttttttttcattctaaaatgaagattgccaamggtgggccctatatagaatacagaaattggtgacggaaataaaagtgaaccagagcttactctatgagggaagacttgtgggtagggggtatggaaagatccgttttaacatgatgaatccattctcctcattgttccaaagaatttatggcatcttaatatcatttaatggagcccataagagattaattttctcagtctaattaaccaaaataaggtat

SEQ ID NO: 209013 - DNA, 418 bp, Homo sapiens
atctctaacaaaggtcagtaattaagagcggaggggtcttatctctggtgtcatccagtcttttttagtcattttacagaacaaaaaataaccgaagcggagttcatctataatgtggagaagccaaagtggcagctgcatgttacaygactgaggccacacagtcacatttctctcaaggctcaaatcatttaaagttctaacagccttaagtttgaattgtttaatttcacaataggcatgactgattaaaacattggccattggtgaccaactgaactttcagtgtctcttctccctggagattggggttgggctgaaagtccaaatcctctagtcctgccttggtcttcctggtgaccagccccatctcaaagccacctagggctgccagcctctgccaatcatcagcatacaa

SEQ ID NO: 209014 - DNA, 464 bp, Homo sapiens
acatacaaagctataattaagatgaagcaatgaaagccaaaacattaaaattttaaaacttgcttgttacttgttagaaccagtactacactaggagttaggtaatatatacaattattttcaagtagattacttacttatgttgctctaacacgtcctcttcaccagtgcactgttaaactaatcaaaaactctacacatgtatatcccacaatagcagcacacactactgctcacctgcaaagctgtcagtctcaaatgatggggtaatgaaaggaaataaaaagtagataagtaacatawtaaggagaaataatgggaattagcagattcatgcagttcagttctttcaaccagccagcttgctagcaacaatggatggtttctgttgaggaaggtcctctggagtgggaatgtggtcacccgtgactccatcttatccagagctgcagtaggaagttgct

SEQ ID NO: 209015 - DNA, 497 bp, Homo sapiens
gcactatccctggaagagcaccaaggagatggtgctaaaccattcatgagaaaccacccycatgatccaattacctcccaccaggccccacctctaacatttgggattatgatttgttattaaatttgggcagggacacagatccaaaccatatcaatgtatcttgtaagatgggtctgatcagaagaaattctctcagtttttgtttattttagaatctctttattttacctgcatttaaaaaaattaataaacgttattttctaggcagttttaggttcacagaaaaattgaatggaaattagagatagttctcatatacccctgtgtccccaaatgcacaacttccctcactattggtattctgcaccacagtggtacatttgttacaactggtgaacctacagttgacacatcattatcacccaaagtccatagtttgcattacagttcactcttggtgttgtacattctatgggttttgataaatgtataat

SEQ ID NO: 209016 - DNA, 425 bp, Homo sapiens
gccagaattctattttagagagactttatcatatcaaaatagttgggagccaccgagatagtttataattggggattctactccaaactgtgatttcttctctttcctcactagaagtctgcatccttcccagtacagtatcaacaaacactgtagatccacgttggctccggtccctgttttctcagctgttggagagaaaagagcaagggtttttttaaaacgtatcccttcattttctagctgtgtaactttgcatttacttaaattctgataatttctttttcctcagaatatgaaaaatccctacctacctcttagagatgcagtgagaatcaggtaagaatacatgggcggtgttaggtcatcagtgcaggaatcgatattgacaaawgcttacattcaagtccaacaaacctgcctca

SEQ ID NO: 209017 - DNA, 621 bp, Homo sapiens
tgcaggggcatggcctcatgaaaagcctctactacagcagtacggaggggaaatctagggttggagcccccacacagagtccccactggagtactgcctattggagttgtgagaagagagccactgtcctccacatctcagaatggtagatccaccagtagtttgcactgtgcacctggaaaagctgcaggcactcaatgccagcccacgaaagcagccaaagggggtgtaccctgcagagccacaggggtggagctgcccaaggctgtgggagcccactccttgcatcagtgtgctctggatatgaaatatggaatcaaaggagattttgaagctttaagatttaatggctttcctgctgggttttggacttgcacaaggcctctagccccttttttggccaatttctcccttttgcaatgggagmatctacccagtgcctgtacccccactgtacttggaagtaactaatttgctttttattttacaggctcataggtagaagggaattgccttgtctcagatgggactttggacttgaacttctggattaatgctggaatgagttaagactttaggggactgttgggaatgcatgactgcgttttgaaatgtgaggag

SEQ ID NO: 209018 - DNA, 621 bp, Homo sapiens
tgcaggggcatggcctcatgaaaagcctctactacagcagtacggaggggaaatctagggttggagcccccacacagagtccccactggagtactgcctattggagttgtgagaagagagccactgtcctccacatctcagaatggtagatccaccagtagtttgcactgtgcacctggaaaagctgcaggcactcaatgccagcccacgaaagcagccaaagggggtgtaccctgcagagccacaggggtggagctgcccaaggctgtgggagcccactccttgcatcagtgtgctctggatatgaaatatggaatcaaaggagattttgaagctttaagatttaatggctttcctgctgggttttggacttgcacaaggcctctagccccttttttggccaatttctcccttttgcaatgggagaatctacccagtgcctgtacccccactgtacttggaagtaactaatttgctttttattttacaggctcataggtagaagggaattgccttgtctcagatgggactttggacttgaacttytggattaatgctggaatgagttaagactttaggggactgttgggaatgcatgactgcgttttgaaatgtgaggag

SEQ ID NO: 209019 - DNA, 442 bp, Homo sapiens
taggttttagctctttggccaaaggtgtttgctgactccacgcctgacacagaccgaaacactaactgatctcaatttcaggcaatgctagaaaaccacagttctccccaacatgaacaaagcctaatcccatgtgcacagcaggatggttttaaaagatgccattttgttgttgttgttgttagcaagctgattctaaaagacaaagagaaaaaatagagtaccaaaatacccatgcagrgtttcttcccctaaaggcagcagttgtatgggaagcattcctgcctctctggggaagagtgagcccggaagagggatcagggttctaattccatggttcagtgctagctaaggggacctcatacctctagaaggctcctagtaatagcgaaaagggaggatttatatgattgaagagaagaacaataacaacagtactgtg

SEQ ID NO: 209020 - DNA, 446 bp, Homo sapiens
atagtggggataagagccacatttgaatgttaaagaacaagaataagccatatacttcttcaaagtcttacttccctgcatagtgggaagaagtcaaaggaaatgattctttagatcattttagaaaataaagctcaaaacaaaattgaaaaaaatgtatcaaaatttaaaccctatattccaaatagtgctggatttttttgagcatgaactattttattttaaaggatagatatgtggagtctattttaaagatcgttgctccagatttcttatgcacaaaacttttgggaattttcaaatcacaggaattacatatgtgaatagcttttctgttttataccctaatcccacataacacagttctaggcacaaaataaggccaatgaccacaaactgcttagtaaatagaaatcagaawgtagtaaaaatattattagattaga

SEQ ID NO: 209021 - DNA, 618 bp, Homo sapiens
tatttctgacatgaatacaatattgtctactagggaagctcattagagctgagagctcaggtgttttattggtggctggtcacataggcacccctgccacccaactttgactaccaaaattctagatacctagaggaaagtaggtattcagcctaaacaatattgtttgtgtaaacagtttaggtgcaatgaggcattcttatcagagaaaaatgrggactatctcaaaatacatgttcccagatggcagccaagggccaaccttgcaagcaggcttgaagatatccgactcaggcctgctgtgttaactattttttgtagaatagttctacttatttccctcttaggaatatctgactttttctagagatgaaaaatcctagaaagatatttggaggtttcttagctaattcgattgtgtgtatctttccaaagtgggtatacttcagaggggtgccttatgtataacataaaatgagtcattttaccacctgcattatcagccattatgaacctttgtgttacttgctaatattcatcaagttcaaatggtgctccatgcgttatattcccacaccgatgcactatcttaaagattttctgtttatttattcataa

SEQ ID NO: 209022 - DNA, 560 bp, Homo sapiens
gattctgtctcaaaaaaaaaaatgtgtatatatatacatatatatatatatatatatatacacacacatatatatatacgtatatatacatatatatatacatatatatacacacacatatatatatatacacacacacacatatatatatatatatatatgatatcttgatatctgtatcccatcattaaatattttggccaattyaattggttcattccgcatgggaaggatggttgaaagattgtggccaggaagaataagtcaatctgtcttttgattacatagattagccatttttttttcaaaattgttgtttcagtagtcggaatccctggtgcagctactctaagatctgttcctatatgcattattatctgcaaacattcctacattaattgacttgcccctcagtcaacttcaacatccattgctcttattattgccttttactataaatatattagtgaccattataccttgctcagtgtaacagaaattatatatgctaaagaacaaagtttttatgagcaattacttagaaacaccttagtaagtca

SEQ ID NO: 209023 - DNA, 337 bp, Homo sapiens
tgtttctatttgttttttctttagaaattctcatttttacttgacatttccaatattatttcttatctctacaaagataattattattcctctttaaaattttatattttcctgcatcttattttacccttatatagtttgtcttaaaaatcctgctcatcagctgtcttgaattgttgtcctatggttcattgtctctgggaggtcacagtcacttatamtcctctcaatctgggaaaatgtgaaaaattcagaccttatttttttccctttttataattttaaataattaaacatttcaaaacaaaaatctaaaatatcaaaatgtagactgaac

SEQ ID NO: 209024 - DNA, 427 bp, Homo sapiens
acccacagctaaaaccatactgagtgggcaaaagttggaagcattcccctggagaaccagagcaagacaagaatgcccacgctgaccatttctattaaacatagtactggaagtyccagccagaataatcaggcaagagaaagaagtaaaagtcatccgaataggaagagacgaagtcaaaccacctgtctttgcagacaatatgattctatacttactaatttccatagtctctgcccaaatgttcctagaactgataaacaacttcagcaaagtttcacaatacaaaatcaatacatgcaaatcaggagcatttctatacaccaataatgtccaagctgacagccaaattaagaacccaatcccgttcacagtcctcaccaaaagaataaaatatgtaggaacacagctaaccaaggaagggaaa

SEQ ID NO: 209025 - DNA, 453 bp, Homo sapiens
ggctttgtttttcttgctttgtagaaaaaaacagcatttatttatttattcattttgttgttgtcagagtcaaaatgtaaatttcttcttccatttactttgacattgcactgtatatgtactatttttgaaaagagtggcatattctgtgaacaggtctttcagagacaaaggaaataaaacatggagaacaatgcaagtttcatcctctgataatgggtagatggtctacggccataccaccctgaacrctccccgtctcgtctgataatgggtagatgttctcaaaaggcaaagtatatgaaaaactttaatgtaagaagaacataacataacttttatatacaattatataattcaacataacgttaatcatcattttattagcacttttttatcattgttagatatagaaacatagatgcattaatatatacataaacatgacatatt

SEQ ID NO: 209026 - DNA, 453 bp, Homo sapiens
ggctttgtttttcttgctttgtagaaaaaaacagcatttatttatttattcattttgttgttgtcagagtcaaaatgtaaatttcttcttccatttactttgacattgcactgtatatgtactatttttgaaaagagtggcatattctgtgaacaggtctttcagagacaaaggaaataaaacatggagaacaatgcaagtttcatcctctgataatgggtagatggtctacggccataccaccctgaacactccccgtctcgtctgataatgggtagatgttctcaaaaggcaaagtatatgaaaaactttaatgtaagaagaacakaacataacttttatatacaattatataattcaacataacgttaatcatcattttattagcacttttttatcattgttagatatagaaacatagatgcattaatatatacataaacatgacatatt

SEQ ID NO: 209027 - DNA, 526 bp, Homo sapiens
aatagtagtaattatctttgctaggtaatagtaatagcttttattggtggggggagggttagacacacatttctytagcttatttttatctagacattttctgcttgtgtattattttacaggttataaatgttcttcatttctccaaggtgtcttcttagttattggcagcttagtatccacttaaatagcattttgtataagagcagtatacaagctattatttaaaaaaactgaatatgtattatcagattgtcaattatatgaagtaactgcattgttggttctcaggaaactaaatgtttgtgaccaattcctggcattttcaaccaagagtgacttctgactttggcaaaacagaaataaaaatgactaatcaattcatcgtttattctctagaaagactagaacaaacacaataaattagcacataagggctgttttactccttctagaatcaggaatcagggcctcaaattgaaaatgtggatttcagttttgcaggcttcatctgtgtctgggaggc

SEQ ID NO: 209028 - DNA, 526 bp, Homo sapiens
aatagtagtaattatctttgctaggtaatagtaatagcttttattggtggggggagggttagacacacatttcttkagcttatttttatctagacattttctgcttgtgtattattttacaggttataaatgttcttcatttctccaaggtgtcttcttagttattggcagcttagtatccacttaaatagcattttgtataagagcagtatacaagctattatttaaaaaaactgaatatgtattatcagattgtcaattatatgaagtaactgcattgttggttctcaggaaactaaatgtttgtgaccaattcctggcattttcaaccaagagtgacttctgactttggcaaaacagaaataaaaatgactaatcaattcatcgtttattctctagaaagactagaacaaacacaataaattagcacataagggctgttttactccttctagaatcaggaatcagggcctcaaattgaaaatgtggatttcagttttgcaggcttcatctgtgtctgggaggc

SEQ ID NO: 209029 - DNA, 526 bp, Homo sapiens
aatagtagtaattatctttgctaggtaatagtaatagcttttattggtggggggagggttagacacacatttctttagcttatttttatctagacattttctgcttgtgtattattttacargttataaatgttcttcatttctccaaggtgtcttcttagttattggcagcttagtatccacttaaatagcattttgtataagagcagtatacaagctattatttaaaaaaactgaatatgtattatcagattgtcaattatatgaagtaactgcattgttggttctcaggaaactaaatgtttgtgaccaattcctggcattttcaaccaagagtgacttctgactttggcaaaacagaaataaaaatgactaatcaattcatcgtttattctctagaaagactagaacaaacacaataaattagcacataagggctgttttactccttctagaatcaggaatcagggcctcaaattgaaaatgtggatttcagttttgcaggcttcatctgtgtctgggaggc

SEQ ID NO: 209030 - DNA, 526 bp, Homo sapiens
aatagtagtaattatctttgctaggtaatagtaatagcttttattggtggggggagggttagacacacatttctttagcttatttttatctagacattttctgcttgtgtattattttacaggttataaatgttcttcatttctccaaggtgtcttcttagttattggcagcttagtatccacttaaatagcattttgtataagagcagtatacaagctattatttaaaaaaactgaatatgtattatcagattgtcaattatatgaagtaactgcattgttggttctcaggaamctaaatgtttgtgaccaattcctggcattttcaaccaagagtgacttctgactttggcaaaacagaaataaaaatgactaatcaattcatcgtttattctctagaaagactagaacaaacacaataaattagcacataagggctgttttactccttctagaatcaggaatcagggcctcaaattgaaaatgtggatttcagttttgcaggcttcatctgtgtctgggaggc

SEQ ID NO: 209031 - DNA, 599 bp, Homo sapiens
gtggtcattttcccagtgctaaattgcataactggcatagatatacttagcagctggcagaatcccacatttccatgacctccaaggtgagggctacaacaatagaaaaggttaaatggaagccacaagagctgcccctacctagaaaaatagtaaataagaaatgatatcaaaaccctgagaagattgtgaagatgggtgccaccatcaaaaatttcaaagatgctggattggtaattaccagcacattctaattcaactctcccatttggcctgtgcaaaagacaggtggaccttggataatcacattggagtattgcaacttaatacagttgtgaatcaacatgcagctgatattctagatatggtttattttttgagcaaattaatacatctcctgtcacatggtatacagccattcacttggccagtgcccttttctttattcctktccataaggaccaccagaggcaatttgccctcagctggcaaggccagcaatacacatttattaaccttgttcaggtgtatattaactttctggcttcctgtcataatcttactcagagagaccttgattgctcttcacttctgtaaag

SEQ ID NO: 209032 - DNA, 463 bp, Homo sapiens
ggctacaacaatagaaaaggttaaatggaagccacaagagctgcccctacctagaaaaatagtaaataagaaatgatatcaaaaccctgagaagattgtgaagatgggtgccaccatcaaaaatttcaaagatgctggattggtaattaccagcacattctaattcaactctcccatttggcctgtgcaaaagacaggtggaccttggataatcacattggagtattgcaacttaatacagttgtgaatcaacatgcagctgatattctagatatggtttattttttgagcaaattaatacatctcctgtcacatggtatacagccattcacttggccagtgcccttttctttattcctttcyataaggaccaccagaggcaatttgccctcagctggcaaggccagcaatacacatttattaaccttgttcaggtgtatattaactttctggcttcctgtca

SEQ ID NO: 209033 - DNA, 463 bp, Homo sapiens
ggctacaacaatagaaaaggttaaatggaagccacaagagctgcccctacctagaaaaatagtaaataagaaatgatatcaaaaccctgagaagattgtgaagatgggtgccaccatcaaaaatttcaaagatgctggattggtaattaccagcacattctaattcaactctcccatttggcctgtgcaaaagacaggtggaccttggataatcacattggagtattgcaacttaatacagttgtgaatcaacatgcagctgatattctagatatggtttattttttgagcaaattaatacatctcctgtcacatggtatacagccattcacttggccagtgcccttttctttattcctttccataaggaccaccagaggcaatttgccytcagctggcaaggccagcaatacacatttattaaccttgttcaggtgtatattaactttctggcttcctgtca

SEQ ID NO: 209034 - DNA, 599 bp, Homo sapiens
gtggtcattttcccagtgctaaattgcataactggcatagatatacttagcagctggcagaatcccacatttccatgacctccaaggtgagggctacaacaatagaaaaggttaaatggaagccacaagagctgcccctacctagaaaaatagtaaataagaaatgatatcaaaaccctgagaagattgtgaagatgggtgccaccatcaaaaatttcaaagatgctggattggtaattaccagcacattctaattcaactctcccatttggcctgtgcaaaagacaggtggaccttggataatcacattggagtattgcaacttaatacagttgtgaatcaacatgcagctgatattctagatatggtttattttttgagcaaattaatacatctcctgtcacatggtatacagccattcacttggccagtgcccttttctttattcctttccataaggaccaccagaggcaatttgccctcagctggcaaggccagcaatacacatttattaaccttgttcaggkgtatattaactttctggcttcctgtcataatcttactcagagagaccttgattgctcttcacttctgtaaag

SEQ ID NO: 209035 - DNA, 586 bp, Homo sapiens
gtgaagaaagaggacagattcacccagatgtgcctataaactagatcaacataaaaaatgtactgaatatagaagtaattaaagcaatggttaatgctctgaatagggctgctgtgggtggcagcaagcttgtgctgttcagtgcagctggaagtgtcttttgctgtggtctcgatttggggtactttctgaagtatttaaggaaggacagaaacagaacaagccttgagatggtgaacaccatcaagaactttgtgaatactttcaatcaattttaaaagcctgtttttgtatcagtcagtggcccatccttyggaataggtgcatccacactgcctctttgtgatttcttctgagctaatgaaaagccttggtttcaaaccccttatatgacatctggacagagtccagatggctgttgtgttactttagttcctacttgaactttgcatcatccagcctccttaattattgtggccatgagacattacttcatcccttgattgatcccaggccaaggtctcaggccaagctgtcacttcagctccttcttggtccagggccaagttccaaggctgagccttgt

SEQ ID NO: 209036 - DNA, 490 bp, Homo sapiens
ttgtcagattaggacaggtgaaaagcagatattctaggctcctaaaataatgtgggaacaggcccagagcaactttggacatggtgtgtttgggtgcactggatgcttttcttttgagaaggaargttgatgtgttgaagtcatggaaagcaagattgtccagaaaagacagatggatagaagtcttgaatttgagacaggcatgtttctatttggtatgtttgttgataagaaggccttaagcagggaatcatgtgctgagaatattgttttagaaagatatgttgaattctgtttgggatgtgctgattaatacttaggtggagaagttttgtggatgggaacatgactgaggttgaaggtacaggtggaaatacaggccaaaggcatttgtgagcattgtggggaaaacaaatgtgggtagaagatcagggctgaaaagtgcacacagggagaagggagctccatgaagtacagactcatgggcaga

SEQ ID NO: 209037 - DNA, 490 bp, Homo sapiens
ttgtcagattaggacaggtgaaaagcagatattctaggctcctaaaataatgtgggaacaggcccagagcaactttggacatggtgtgtttgggtgcactggatgcttttcttttgagaaggaaagttgatgtgttgaagtcatggaaagcaagattgtccagaaaagacagatggayagaagtcttgaatttgagacaggcatgtttctatttggtatgtttgttgataagaaggccttaagcagggaatcatgtgctgagaatattgttttagaaagatatgttgaattctgtttgggatgtgctgattaatacttaggtggagaagttttgtggatgggaacatgactgaggttgaaggtacaggtggaaatacaggccaaaggcatttgtgagcattgtggggaaaacaaatgtgggtagaagatcagggctgaaaagtgcacacagggagaagggagctccatgaagtacagactcatgggcaga

SEQ ID NO: 209038 - DNA, 519 bp, Homo sapiens
atgagtaaagaagacagaattactatttccaatagaaagraaaacagtgctgtttgaaaaccccaaatgaagccttggtaaacctacagatgaatagaaatgaaaaacactttctactgtgcatattatcaggcttcgaaagaaccagaacaagacttcttaattactctgaactgttcttgttgaaatcacaaactagaaaaaaactcacagattctttggaatggctgagagaagctttagcaatacatgtgtctccatctcctaattcaattaagggatacacaattttaaaatattactttatttctcagccatcctctaatatcagaacaaaactacagaagcaggctgtgggatcagatagcactttgaaagactttctggggtggcttttatcttttaaaacaagaactggggagaggagacctagaaagaagaggggagtcgcaagagaatgaaagaggcattactggcctcttcacaggcctacaagagccggaatctccaagaggcacc

SEQ ID NO: 209039 - DNA, 519 bp, Homo sapiens
atgagtaaagaagacagaattactatttccaatagaaaggaaaacagtgctgtttgaaaaccccaaatgaagccttggtaaacctacagatgaatagaaatgaaaaacactttctactgtgcatattatcaggcttcgaaagaaccagaacaagacttcttaattactctgaactgttcttgttgaaatcacaaactagaaaaaaactcacagattctttggaatggctgagagaagctttagcaatacatgtgtctccatctcctaattyaattaagggatacacaattttaaaatattactttatttctcagccatcctctaatatcagaacaaaactacagaagcaggctgtgggatcagatagcactttgaaagactttctggggtggcttttatcttttaaaacaagaactggggagaggagacctagaaagaagaggggagtcgcaagagaatgaaagaggcattactggcctcttcacaggcctacaagagccggaatctccaagaggcacc

SEQ ID NO: 209040 - DNA, 537 bp, Homo sapiens
aattaaggttagaaggcaataatgaagagattaaaaaaaagctacatgaatttggaaattaaacacccttgtaattcgtggtwtaaaaaactcaatacaattttagaatgcttagaattgaaccatagttaaaatatgaaacttctctctattcctctctctctccctctccctctctcttcctatctggaagagaagggagctaattgaagaagctaatctttttcaatgaagaacaccccaaatactgaaaagaagaaaaaggacagatggcatttcatggtaatcccttcccccaagagtgtagaatgtttctttagcttctttgatagtttgtttatttatttattaagtacttactataaaccagactctgctttaatttgtgatgaacaacctagagattaagtcctgccctatggattttatattagagtgagaaaaacagatagctaagtctggagctcaggggtgaggcccaggttggaattatagattcacttgaccaaggtgaaacctggtgtgccccctcctact

SEQ ID NO: 209041 - DNA, 537 bp, Homo sapiens
aattaaggttagaaggcaataatgaagagattaaaaaaaagctacatgaatttggaaattaaacacccttgtaattcgtggtttaaaaaactcaatacaattttagaatgcttagaattgaaccatagttaaaatatgaaacttctctctattcctctctctctccctctccctctctcttcctatctggaagagaagggagctaattgaagaagctaatctttttcaatgaagaacaccccaaatactgaaaagwagaaaaaggacagatggcatttcatggtaatcccttcccccaagagtgtagaatgtttctttagcttctttgatagtttgtttatttatttattaagtacttactataaaccagactctgctttaatttgtgatgaacaacctagagattaagtcctgccctatggattttatattagagtgagaaaaacagatagctaagtctggagctcaggggtgaggcccaggttggaattatagattcacttgaccaaggtgaaacctggtgtgccccctcctact

SEQ ID NO: 209042 - DNA, 537 bp, Homo sapiens
aattaaggttagaaggcaataatgaagagattaaaaaaaagctacatgaatttggaaattaaacacccttgtaattcgtggtttaaaaaactcaatacaattttagaatgcttagaattgaaccatagttaaaatatgaaacttctctctattcctctctctctccctctccctctctcttcctatctggaagagaagggagctaattgaagaagctaatctttttcaatgaagaacaccccaaatactgaaaagaagaaaaargacagatggcatttcatggtaatcccttcccccaagagtgtagaatgtttctttagcttctttgatagtttgtttatttatttattaagtacttactataaaccagactctgctttaatttgtgatgaacaacctagagattaagtcctgccctatggattttatattagagtgagaaaaacagatagctaagtctggagctcaggggtgaggcccaggttggaattatagattcacttgaccaaggtgaaacctggtgtgccccctcctact

SEQ ID NO: 209043 - DNA, 537 bp, Homo sapiens
aattaaggttagaaggcaataatgaagagattaaaaaaaagctacatgaatttggaaattaaacacccttgtaattcgtggtttaaaaaactcaatacaattttagaatgcttagaattgaaccatagttaaaatatgaaacttctctctattcctctctctctccctctccctctctcttcctatctggaagagaagggagctaattgaagaagctaatctttttcaatgaagaacaccccaaatactgaaaagaagaaaaaggacagatggcatttcatggtaatcccttcccccaagagtgtagaatgtttctttagcttctttgatagtttgtttayttatttattaagtacttactataaaccagactctgctttaatttgtgatgaacaacctagagattaagtcctgccctatggattttatattagagtgagaaaaacagatagctaagtctggagctcaggggtgaggcccaggttggaattatagattcacttgaccaaggtgaaacctggtgtgccccctcctact

SEQ ID NO: 209044 - DNA, 563 bp, Homo sapiens
cacctagatcagatactaacccgcagatggagctcaatacatattacttgaatgaacaaataaatgaatggatgaatgaattaaattttttcattgcttttcccttctaaccaccaaactgcctatggatcttactttgagaattaaaaagaaaatgataagccatcagaggtttttaagcaaaagaattatatcaatagaatggtattaaaatagacaaggtcrggagatgatttaaagtttggagaggctagatccaaagagtttagttaaaaagtcaaccaatgaaagagataaggaagggcataaatttccaattaccaggacttcttaagtggtttatttcaaacctacaattcacatatccatagatacattatcaatgtttatctatacatacattgcatacacacacacacacatatacgttgaacaagactagaagaagctaaggacatttctcatcatatggatataatacatatacaagcttatcacttgagtcatagttagaacagccataaatcctagttttcctggcacagtctcagtttatacttgtt

SEQ ID NO: 209045 - DNA, 563 bp, Homo sapiens
cacctagatcagatactaacccgcagatggagctcaatacatattacttgaatgaacaaataaatgaatggatgaatgaattaaattttttcattgcttttcccttctaaccaccaaactgcctatggatcttactttgagaattaaaaagaaaatgataagccatcagaggtttttaagcaaaagaattatatcaatagaatggtattaaaatagacaaggtcaggagatgatttaaagtttggagaggctagatccaaagagtttagttaaaaagtcaaccaatgaaagagataaggaagggcataaatttccaattaccaggacttcttaagtggtttatttcaaacctacaattcacatatccatagatacattatcaatgtttatctatacatacattgcatacacacacayacacatatacgttgaacaagactagaagaagctaaggacatttctcatcatatggatataatacatatacaagcttatcacttgagtcatagttagaacagccataaatcctagttttcctggcacagtctcagtttatacttgtt

SEQ ID NO: 209046 - DNA, 563 bp, Homo sapiens
cacctagatcagatactaacccgcagatggagctcaatacatattacttgaatgaacaaataaatgaatggatgaatgaattaaattttttcattgcttttcccttctaaccaccaaactgcctatggatcttactttgagaattaaaaagaaaatgataagccatcagaggtttttaagcaaaagaattatatcaatagaatggtattaaaatagacaaggtcaggagatgatttaaagtttggagaggctagatccaaagagtttagttaaaaagtcaaccaatgaaagagataaggaagggcataaatttccaattaccaggacttcttaagtggtttatttcaaacctacaattcacatatccatagatacattatcaatgtttatctatacatacattgcatacacacacacacacatatacgttgaacaagactagaagaagctaaggacatttctcatcatatggatataatacatatacaagcttatcacttgagtcayagttagaacagccataaatcctagttttcctggcacagtctcagtttatacttgtt

SEQ ID NO: 209047 - DNA, 610 bp, Homo sapiens
gccaggatggtatacacgcttccgaaccctgttggagggtagggaatcactctgtggttctccctatgtayacattaataaatttgtatgccttttctttaattgtaactgcccaatgggttcctcttgcctgctgcacagaaaatccaatcacactaagacagtggtgttgtggtagagaaaacatttaattattgctaagccagccatgcaggacaggagacatttctcaaatctgcctcccaaaagctcggagcctaggatttgtaaggataatttggcagagagaggctagggaatgggtgcagttgatggttggggatgaaatcagaagagtgtttaaactgtctttgtgtgctgagtcagtttcaggggagggggagtagtcacaggaccagttgacttcattccttggtatgacttagttccttgctgtgcatttgggctgtcatcagaatgcaaaagtctgaaaaatatctcaaagaccaatcttagacactatttgacaataatgatgttatctataggagcgactggggaagttacaaatcttgtgacctcccgaagatggccatcatcatctaattatgcctacatcttagtagaattc

SEQ ID NO: 209048 - DNA, 333 bp, Homo sapiens
cactttctgtgtcagctctgccgatgtgtagaacagaaggtgctaattgcaccttaaacctattccctatttttctgcattaactctgattgttcctttgggttgatcttggaaattctgatgactatgtgcctggggaatkatcgaattgtataatatcttgcaggggttctctgtttcttgtatttctatgttgacctctctagcaaaattgggaacattttcattgattatattctcaaatatgttttccaagttgcttactctgtcttctctctccagaatgccagagtcatagatttggttactttgtataatcccatatatctcaaa

SEQ ID NO: 209049 - DNA, 333 bp, Homo sapiens
cactttctgtgtcagctctgccgatgtgtagaacagaaggtgctaattgcaccttaaacctattccctatttttctgcattaactctgattgttcctttgggttgatcttggaaattctgatgactatgtgcctggggaatgatcgaattgtataatatcttgcaggggttctctgtttcttgtatttcyatgttgacctctctagcaaaattgggaacattttcattgattatattctcaaatatgttttccaagttgcttactctgtcttctctctccagaatgccagagtcatagatttggttactttgtataatcccatatatctcaaa

SEQ ID NO: 209050 - DNA, 584 bp, Homo sapiens
ctgctgcagcagaactccttgacattttagtaatgtctaaaatggccaaatctacaacattttgaaatcttggcatargtcatgataccatgtactctggtgttcttcaggatttcctaccacaccaatagcagcttaatacaaggttagagaacaaggctgttgttactaacaagagcatgtaacaggcgttatttttttctttgtgataaggaagctttataataactaggtcagactatatttctgattttgagattcaatttggaaaattccaagaaatacttataatatcccaaagaataatttagagttgtgtaaacttagtggttcattgtctcttcagaacaggaattctcagttatatgtaagaaaataacatatagatgtaatgaccattggaaaatatattaagccacattgtatctatgaaatttcattatgggcaacatcagatatccatggtttgggtgattcaggaaaacaataacttaaaaatatatattttgtgattgtcacaatgttccccgggtcacacagatagaaagagggatcggattcaagtttgtcaccttgagtctgtg

SEQ ID NO: 209051 - DNA, 583 bp, Homo sapiens
gatataattttctacattttacataatttgggagtgtcttctttcaaaggagctttaaatatattggaatttattgggcaactgctaactcagaagcaagtggttgtccatctattggcttccagagagaggttgcactgsttcatttaggcaactggaatcccatttaccagaaagctaatcaacaagatggctagttacatttatgagtatttcttttagaggcatttagtttcaatcccacagatggtagctgcagaccattagtttctgagccaagcttttcagtgtcctattgtacttagcaagattgctatgcagcaacacaattattccaaattcagcaagagtcagcgggcctaaaacaaagctatgccataacaatttaatcccagctcaccttcccctttgctggataaataatcaaacacctgctgaattctgttccatataatgagaacatcttagcaacaaagatcaaagaacactgacatttgatctctaagtagaaccccattataaaaaaggatttttattacgtggtgtcggatagctattttgtgggtcagataatgctgggaca

SEQ ID NO: 209052 - DNA, 482 bp, Homo sapiens
ttgagaacaaatatacagaagaaggagaatacttttggttcaagttacccatggattaagggttatgtcacgagactcattttttgtagcgttgtgtatcattttcctcagttcaggctcagtgaacacccaaacctcaatttttaccacctttgtccatccacttaaaactttgacagattttgaagcagrtacctgtgctctgggataccagtcatctttgcggtttacaagagcactttcaaacatccacagaaaaaggaaaaaaaaaagtttgtgctaatgacctggtgattttttttttcctatgatctcccagtaaagtgtaaactactctcatagctgtcaatagaaccactgagtaaccagtgcctaccttatttgaggcggttttaaggtcaaaggaataattatgaatgaacacttttgcttgctagaggaaaaatacattaggaaaaagaaggcagcagctcaaatgtcta

SEQ ID NO: 209053 - DNA, 567 bp, Homo sapiens
tctttaaaatctgattatgtgcagatattaggtctattttgttattattacacatatgtttttatgattggcacaatatttatgttttgatttttcctttcttgactaaattaatcatagtataatatctaaatgaagcaatatatattactkagaggacaaaaatatttaaagaaaatgctgcagttgaaactgcaagttactttttaaaaaaatcgtattgatcagttgctttgctgtaatttagactcagtcataggaaaatgcactctttttgtgttaaaaggttatgtgaacacaaaggttatgtgatttcattaattcactcagcaaatcacctttgatattatcttcataagctttataaatgcaaggacagtgttcatatggttcagtattttttctgcagcgaccagagtcctggtcccgaaatcaagtgcataaatgctatgtacaatgtggaatctcagtaattcccagttggcaaattatgaggataataataaaacctatatgaggatatattttattttttatgccatcccatatatttctgtctcacatgaa

SEQ ID NO: 209054 - DNA, 594 bp, Homo sapiens
actcagtatgagttagagatgtgatgtaattgcctaaaagctcatatgatattagattatatttgtaataagaatgtgtccagcatgacaacctgtcttactctaggttggtcacatctgcagccatgcctaaaatagtacattatgttttgaaagctgcactttactaaagcagagacaaaatgtgttcagagtacgacacctaggattataaaagggttgaggagtaacctgaaggaatgggaacctttggcctggaggaggtaagatatagtgcgggactgaaaactgtcttcaatatttgaaggctgacttggagaatatggaatttagacataggataaaagagggaggaaagtgtggaatggtatgtaaatcttgtctcaatttacrtagaaattttataactatgaccaagatgtctggcaagtagcagttgtccctgaattgggcaaaggccaatcactgctcattgcaaatgctgagcgagctatatctaaatgcagttggtctgagggaacagagcgccttgtccttggtaccttctaaacctagatgtgaatgacacagaagtgtcccagaccttaactgggt

SEQ ID NO: 209055 - DNA, 588 bp, Homo sapiens
acctctgttttctctagtctacagaggtcagttgaaggactcacatgctttaatcctaatcaatgtgttgaatgaaaaatacacgaagaaaacaattccacataggggcagattttttaaataataagagaaaaaaaagagtgatcataataattagaaatgaaccaaaggccacgtgaattttaagtaaaataagtccctggggataaaaccaaattaaaaagttattaatggaagttcttaatggcacaggagtccttagacaaggcaggggaaaatygtgagtcagcactgaattaataacaaaatgccctctctattaacaaaattataccacagtgcaactgaataagatgacatgggaagtcacttctgcatcaggcaaggtaaatactataagaaatattatagaaaaattagtccaacccttgttttaatagagaagcaactgagaccaaacgggaacactttcttaaaggaaaaacaaacatgtcgttcttcacaaggtggcagtaaagagaaaaatgagagtcaagcaaagggggcagcaccttataaaaccatcagattttgtgagaacttactcac

SEQ ID NO: 209056 - DNA, 588 bp, Homo sapiens
acctctgttttctctagtctacagaggtcagttgaaggactcacatgctttaatcctaatcaatgtgttgaatgaaaaatacacgaagaaaacaattccacataggggcagattttttaaataataagagaaaaaaaagagtgatcataataattagaaatgaaccaaaggccacgtgaattttaagtaaaataagtccctggggataaaaccaaattaaaaagttattaatggaagttcttaatggcacaggagtccttagacaaggcaggggaaaattgtgagtcagcactgaattaataacaaaatgccctctctattaacaaaattataccacagtgcaactgaataagatgacatgggaagtcacttctgcatcaggcaaggtaaatactataagaaatattatagaaaaattagtccaacccttgttttaatagagaagcaactgagaccaaaygggaacactttcttaaaggaaaaacaaacatgtcgttcttcacaaggtggcagtaaagagaaaaatgagagtcaagcaaagggggcagcaccttataaaaccatcagattttgtgagaacttactcac

SEQ ID NO: 209057 - DNA, 622 bp, Homo sapiens
atgcatgaccattcatagtgatgtttataatgtacactaaatatttataatgtacactaaatattattagaatgttaatgaaatattaaggaggtgacctgagataataacacaagaagtactgaactgttaaattagcattgcaatattgtctttacagttgttgaatattctatgtaacaaaacacatttagcactagaaactgtagctataacacttaataaaaatatttttgtatgtttgaaacctcatttataaagttgcagagttacaatctgtattattttccttccaatttattttccacagagaaggtaagataattgtaatagtggaaggaaaagaatagcttactaaatcaaatacttgttatatagaattatgggcaatttaaagtaatccttaaaaagcatatatttttgcctagtattacttaaaattcaccattaaaaaacacatgtacatagatatatagtaacagctaattgaaatgttgtatataatggcttcatattgctccatttcctayttgggcatttaaaacagcaggtttctacagagatctacactggaaatcagagttttgtaattctgaaggagcagtagctgattgtctaaaga

SEQ ID NO: 209058 - DNA, 562 bp, Homo sapiens
atacataagccattgatttttggaagttgtttgttatttcaaaataacctattccattccttctgacagaaggaatcagaataaggtcaaattttgtgtttataccctggtgcaatatacccaggtaacaaacctataagggtaccccctgtatctaaaatggtgacagagcgagactccatctcaaaaaaaaaacacaaaacaacaacaacaaaaaaaaaacaaaaacaaaaaaaaaggatgtccaagacttttgcctgcaaatttgtttatggtatgaatggtcccakcaactaacaaactccaaagatccactgcttttgttttcccaggtatatatagtgtgctatcacatgcagtggcttgcccccatatatgtggaacagattcaaggtaaaaaaccagccaggaattctttgagatagaaatgctcaccagctgatttagatcacaatgagcatgggcctcttaaaatagtatgcatagataaacttgatttttgtatcccggaattctcaaactgatttgagaataatgtgccaagttcatttgcaccactcga

SEQ ID NO: 209059 - DNA, 563 bp, Homo sapiens
atcttgatcccatcaaaacccaaatggacatagaaatgcctgatagcctctttcaattaaactgtcatggccccagcatctcaaatcgatgctgttgggtacttcttagtctgcaaaggctctcctttccctaaagggtagagcccacaataaacaggactggaccaggatctctaggttccagagacattgatttgggaatgtacacataggctgcagggtgaaaatcctggaagtggaggcatagaaacacagtggtttttccttgagtttttaagagcttcatctgcttctgggccttctttgccctctcactctcattctgactgcctctcaatctaaagattcctcttcctcttttggcaaccataggtacagctgacttgcccatatacccactgcacagtcctcctgcctgtctcagttgtgtgagttgttwgacatttccagaataattaataaaagaaagagaaaactaatttcattgaggagcacctctgtccctgagcctttgtataaatgtatatacacaattatgtgtatgcacacacacatttggtggt

SEQ ID NO: 209060 - DNA, 563 bp, Homo sapiens
aaaagaagcatctcaccaacccctttaaataagaacttctcatgtttcatcacatgagttttcaaaaatagaaagcagttgaagccactggttgccctatgagtaaaagcaaaacatttcttttgcagggggtgaaaatcactgtcttatgcattatttgtaagtagcaatcattgagcattagtacctatataaactttaaaaataaaccactgttccccactgctagggaagagggtaagagcctaagagcagttactctatctatgaagccactaacttccttcatggcaagaatagctcctttggggttagccatattttcagaaaatgcctgagccactgtaactgatggagaataaaggtgagatgaaactctctggtctttatcttttgctgtcctactttcatctgcttatgatttaaagggtgaaactacagtcttgtccagcaacagaaggccttyctaattctgatggccctaagtcaggctcttgtcttttgtccagcttcatctccctccacatcctatcagtcttccctcatgctatgctgaaaagctt

SEQ ID NO: 209061 - DNA, 415 bp, Homo sapiens
tgtgtagcattagcactgcatgcaagcaacccctcgcacataggcagaactgacaaaggcagcacatccagagatgcaaatatcatgttcaccatatcaacattccgacttcatayagattttataaaattttaaatgtttccatttgtatagtacaaatttggataatcattcactgaaagccttcctaaatcaaaaggtatgtaggagggctgaatgaatccctgttctctgaagttccgtaatatatggaaggtgtgatttcgcctagagccaaccacaggggtaagttctctttaggggtgagccttgaaccttgaccagggtagcctcaggaggggtgtttcaaaggagagatcatgttcagttctacattgatctggggccatactaagttaggccttctgggaattct

SEQ ID NO: 209062 - DNA, 392 bp, Homo sapiens
gataaagtgtccaaaacatctagcccatgctggtgtgatagcaagaactcagtaaatattactgctcattatatcttgttccatttaatcctgtgaagtaggcactgtccctctttaatagacaagaagactgtctcagagtggtccagtracttctataaagttttctgcagtatgttgcagaggcaaaatttagaaccaggacttgactgggcactctgataaaaccgctaaccaggagttcttgttctaggctgccaggaaaatctatgctacccttgctagaatgatggcctctactgagagacaaagttgcccttaaaggcacaaattcacaagtcaacatttctacatgtagaaaaactttcaaaggaccagattcagcagtcaac

SEQ ID NO: 209063 - DNA, 564 bp, Homo sapiens
ttggcttgtggcagcataatggtgttctttctgtgccactttacattctcttccctctagtgtctgtccctgtgtccaaattccccaaccccccaccttttttttttttttttttttagatccagtctctgttgcccaggctggagtgcaatggtgcaatctcagctcactgcaacctccgcctcccaggttcaagcgattcttgtgcctcagcctcctaagtggctgaaattatagttgcacgccaccacgctaatttttgtagttttagtagagacattttgtcatgttggccaggcgggtcaaatttccccttttaatagacaccaatactggtttaragcccaccccaatgactgcatttcaacactgattatctttatagggaccctgtttccaaatcagatcacatctgagatactggaggttaggacttcaacatatctttttcaggggacataattcaactcatatcagatatgtgttctctagcattgtctataacctcgagctccactggtgaagctccttccctcttgtggggtatatcgactgctattaact

SEQ ID NO: 209064 - DNA, 621 bp, Homo sapiens
tttttttcagtgggcacctgtttcaggcttgcctctctaatgaagaaaacctgggtggtggaagctctcattgtatttttaaaatacagatcaaatcctgttgcagcaagtgaatgggccgatctaactgttttttaaggtaaaataaatatttttattttttgtatttttaattgatgtaaaagataacttgtttaaagtaataatagtaacaatgtatkggttggttatagggcagggataagtgaaatgaataaatgctttactgacagtttgcttggcagttctcctctgatttccaatagtagctattcagtgccttcgccacccttctccctgatctctgtcaagcccactctttctcatacttgtcagatgatctttccatgggaggacaccagatgggagttacctcactcacctgcatctgcacctatcctttccttttccctctaggctcagaggatggcagatccctcctccctccgcttacgaacttggtgctgtgcccttaggcatctctccggtactttttctcgtttactgtatcctcaagctctttgactcatttaccttcttagattctttttatctgtaaagtaacggcaataaatactaatt

SEQ ID NO: 209065 - DNA, 621 bp, Homo sapiens
tttttttcagtgggcacctgtttcaggcttgcctctctaatgaagaaaacctgggtggtggaagctctcattgtatttttaaaatacagatcaaatcctgttgcagcaagtgaatgggccgatctaactgttttttaaggtaaaataaatatttttattttttgtatttttaattgatgtaaaagataacttgtttaaagtaataatagtaacaatgtattggttggttatagggcagggataagtgaaatgaataaatgctttactgacagtttgcttggcagttctcctctgatttccaatagtagctattcagtgccttcgccacccttctccctgatctctgtcaagcccactctttctcatacttgtcagatgatctttccatgggaggacaccagatgggagttacctcactcacctgcatctgcacctatcctttccttttccctctaggctcagaggatggcagatccctcctccctccgcttaygaacttggtgctgtgcccttaggcatctctccggtactttttctcgtttactgtatcctcaagctctttgactcatttaccttcttagattctttttatctgtaaagtaacggcaataaatactaatt

SEQ ID NO: 209066 - DNA, 624 bp, Homo sapiens
gctcactgcaacctccacttcccgagttcaagcgattctcctgcctcagcctcccaaaaatacatgttttaaaattgataaaagtgatgtattgtcttatgttcaaattagtaaactgaaacagcactttgatgaacagcaggccataaaaacacttttaaagagtattatgaagcattacagatgcttttttttttttggactagctgctcatttccaaatagatttatttgatagcttttctcatttaataaaaggatgaattagaaaaatatgaacagattgtgataaccaaaaataaatgaacttgaccacttggaagaggagcaattgccaatggactagaaaataatgtaggagaactttggcatgcacaatttatgtatgaataaaaaataaaatttttgacatttaagttttgaacaagctgcctagatgtgaatttcagaaaaaataacattttaattttctaaaaaataatgttttactctaatatgtactcaactrtgttttacctaataatttaaaatattccgtttcttcctctgtctctctgcctatcctttccttcttcattttaaacattcaaaagtaatatcctgatgaggctgactatgatgaaga

SEQ ID NO: 209067 - DNA, 490 bp, Homo sapiens
gcaccttgccaatgtcagtaatctattgccttttttaaacatagtctcctctggtaatctctactcactgattcttcacctaggagccacttctcatgttaacaatcaagaaacwatgtcatcagtgatgctcagcatcatcttgaaccttctgcacactatagcaccacatggctgtgagtgagtgatgccaactctatggtacctggcatggtgctgagatgactgttacattgtgctgagatgctcagcttggctactggactatatccctgcaggaagtcttagaaacatttctcatgcagctcaagacatattattctaaatttttttctcaatttagtatgtgtttattttaaaagtcactaattttgctactatattccaacaaagagtaaagtcataacagaaatggagagcaagatgtatcgtacttacaaaaagcctgttatgacaacacctcaaagctgcaatgggttggcaaatacac

SEQ ID NO: 209068 - DNA, 573 bp, Homo sapiens
gctgccagctttgccccacttcacactgcaaacacagcaattgacagagatccttccccatcctcctctgtggcttgtacaggtgttaattttgggaacgctggaggatgttggctgtaattcccacagaatccagtaggtggcactagaaaccagattaaggcctttgttttgccattacacatggtcccagtttccctaaaggcaaccaagacaggatgaaagtacaatcgcagagggaatacatttttttctttctttcttctttccttccctccctctcttcccttccttcataaaatgagttttaatcaaaacatctcaatttctttctgaaaagctagaaatgtagacagaaaaatcgttcagcattgatctccctctgcgytgacacgaacatcatactgaagctgacatctgtacctatattttagagtctgcaatttgtctgaaaagtcccaccagatttggggcatgagagttgaaaagggtaggctttctatctcttgaattcaggactggaatgtatatgaagaacttgaatttacctaatcggtgggaagagaacatctg

SEQ ID NO: 209069 - DNA, 428 bp, Homo sapiens
tattgtgtatcctccattcttcctttttccaaaactatgtgtgtgtgtgtgtatgtgtgtgtgtttttaatagtatatttaaatattctggccttgttcygacaatgaatatttaatatgagaagcagataatttgcttttttccttcatgaatacctgaagcaagagaatcaaataaatacctagagaaagacacatcacaggatcctgggctatgatcctattgccatgattagatgggacatttgtttgtcctccctagagaaaggccagaagagagtgtattttctcaatcaaaaagagattgaaccaaatatttgtgatgagaagaaaagactacaataaactttattatcattcacaaatgtttgttgtcttttcctaggggaggccacttccttgcttagccatggaacttgctttaagca

SEQ ID NO: 209070 - DNA, 312 bp, Homo sapiens
aaatccagtctgaagactagcaatacattttgccaggagctcatagcttaccttgaagaaatgttttaggtttgacacctaaaagaggaagacccttgagagcaagggtmatgactgccttcttcaaagctatatcccagtacccagtactgtgcctagcacatagctgatgctcagtgaaagaaaaaatattttaatctattaaataaataacaaaaaaatgaataaataaaccctgaccctaaacaggccatcctatctgcttgttggtttctcccatatgctatgcatgccatttcatcttttaaaatt

SEQ ID NO: 209071 - DNA, 312 bp, Homo sapiens
aaatccagtctgaagactagcaatacattttgccaggagctcatagcttaccttgaagaaatgttttaggtttgacacctaaaagaggaagacccttgagagcaagggtaatgactgccttcttcaaagctatatcccagtacccagtactgtgcctagcacatagctgatgctcagtgaaagaaaaaatattttaatctattaaataaataacaaaamaatgaataaataaaccctgaccctaaacaggccatcctatctgcttgttggtttctcccatatgctatgcatgccatttcatcttttaaaatt

SEQ ID NO: 209072 - DNA, 572 bp, Homo sapiens
tacagggttgttgctaatagcatcctttgtgcttgtgtgtatttttattttgttttgtaaaatagttccttgtcaagctatatagccatttgactgagagctaaggccaggaaaagttaagtgatatacccaggggtcaatagtgaaggctagagcttgggtccccaggcacgtggccccatgcctgctctgctagcccatgctgccaggcagtttctgtgcccgatttttttaacagactgtaagcatgagactggagccagcctagcttatcactacatgtgctttatttcatacactggctgcattcacagaaagttgtatttaagtaaaatrtttgcatatcgaatctttttttcacttacattttaattttagagatgtgttcccacagaaaataatttagccccaatatgtaaagataaatcctaattagaatcagaacattcatgaaagacagtgtagtcaatacagatctaattctcctacaatgctttctcaagaaagcccatgtcaaatatccacaaaggctacattgaaatagctgcctattaaattgtggccccatggtt

SEQ ID NO: 209073 - DNA, 585 bp, Homo sapiens
tctatgagtctgcaagaactaaagcattactgkgtttagggtgcctcctaatgcagattcagctacagtgaacaaaaacatagatcacaacacccaagtcccttcaaatacctggaaagccttcacaaaagcataggtacaatcaagcccagactgtgaagactacaataaataccttcaatgcccaggaactgaggaataatcacaagcatcaggaccatccatgaaaacatgaccccaacaaaaaaaaaaaaaactaaataatgcaccaaggatcaaacccagagtgatagagatatgtgaccttgcagacagaattcgaaatagttgttttaaggaaagtcaaagaaattgaagataacgcagagaaggaattcagaatcctatcagattaatttaacaaagattgaaataagaatcaaacagaaattctggagttgaaaaatttaattaacatactgaagaatgcatcaaagtattttaatagcagaattgatcaaggagaagaaacaattagtgaacttgaagacagggtatttgaaaagacagagccagaggagacaaataaataaataaataaataaa

SEQ ID NO: 209074 - DNA, 397 bp, Homo sapiens
aattctctctacaataactctgagggattgttttcctggctttggtttgaacattttcagggacaggcactcactacccctgatacaacctctctctattgtcagttggttctaactcaaaatgcctctccttagcttagcatacactaagggtcagtaggataggaagaacttagaatcaggagcgtgatgtagkggaagatgagaaaagtggtttggagccagattcatggaagttctcaaatgtcatgctaaggagtttggatttattaggccacaggacacattctgaatcaggcgacaccatgatgggtctcgtgggaggacaatgcctgccacagcttagagtatgacctggagaagagggagattagtgacagtataaggggatatcagg

SEQ ID NO: 209075 - DNA, 579 bp, Homo sapiens
cttataattttcaatagttgggctttaaggcatataaaaattagatggctggacaaaaaacaaatatttactgatcacctattatgtgacaagttctgttccaggcactggaacacttctgtgaacaagataacatcctgtcgttcaaaattgtacattctagcagaagactacagacaataaacacatgaacaaaacaagtaaatgaagtgatacctggtttcaaaaaaagggtgatggaaaagataaaatagggtaatgtggtagagagaaggcttcttcagccaaggcaaaggtcctcaaagatgtctctaaggaggtaacacrtaagtcataaactaaataatgagtggcagacttgtgaagatctgggcaactgtattccaggcagagggaacagtaaggaaaagagcttctgaggcaggaacaagcttggagtatcatggtctggactgtcattcagcaaatatattccctccctactcccactgtggacagaacatattaccatggcccctgatgttgagtttgaccgtatgaatttactttggccaatggagcataaatagatgtgatata

SEQ ID NO: 209076 - DNA, 366 bp, Homo sapiens
ccaggtgaggaaggtgcactacttctgtgaccatgtctgtctttggcttctttgcagaggctgaagttggtgtgcttgccacagccggactggggcccattcttagctcaacaccgcggggagcgttacaagaacatgatcgaccccttgggaacctcttccttgggactcaaactgccagtgaaggatttggaactgggcactcagtgctagtcyagtggtgtgggatggtccagacttgatcctgtttttcctctctgcctcctcctaatgttttccatagctctcctcccatttttcttcatctttcttcctacatcttggttcacatccacgcatgagagtgattatgtagaaaagtaggca

SEQ ID NO: 209077 - DNA, 580 bp, Homo sapiens
gttgccctcttctcacatctctactaggcagtgacccagtggggattgtgtgtggaggctctgactctacatttcctttctgtactgccctagcagaggttctctatgagagttttgtccgtacagcaaactgtgcttggataagcaggcattgccatacagcctctgaaatctaggcagaggttcccaaacatcaatttttgacctctgtggacctacaggcccaacaccacataaagtctgccaagacttggggcttgcaccctctgaagcaatggcctggctcagggaaccatttttctttcctaggcctctggacctgtgatgggagtggctgctgctaaggtctctgacatgccctggagacattttccatattgtcttagtgattaacattcggctgcttgttacttatgcaaatgtctgcagctggtttgaatttctccccaaaatggattttttctatckcattgtcagtctacaaactttccaaacttttatgttctgcttcctcttgaattctttgctgcttagaaatttcttctgccagatatcctaaattatctctttcaaattcaaa

SEQ ID NO: 209078 - DNA, 554 bp, Homo sapiens
tgccgcttttatctagactgaaagtccatcatggcctcgaatcaatgctgtacatgcagcattttccagtgtttgttagcacgctaggtcaaataaatggcattaaaaataccaccaaagcactgcatgataaaagtaagtttgggaaatgctgggtaagtaagtttaaagagccagtaaaatatactgtttaagaaaatgtgctgaggagccagatacctgggtttgactctgagatccatcactttactagctgggtgactcttggcaaagcagccaacaatctgtgcttcagtttcctcatctgtgatgcgagrgtaataataccttactgttttgtacagattaaatgccaccacacatttgaagtacctagcacagggactaatactttatgacatgatttgaagagctctcaatatgctaatatttattgtgattttccaagaaagagagtcatgcttcccaaatgtatttaatcttataactcttcttttctaagggcggcttacatgcccagtggcccttgggacccatttgggaagctccccaag

SEQ ID NO: 209079 - DNA, 540 bp, Homo sapiens
ttttctcttctgttttattgtagaagatgctggttatgggccacattagatrggttgtacagtctaggaatggattgcagcctgcagtttgaaaaacactggaacagctagggagtggtggtgacatgcatggcacaattttagatggagcatccagaaaagggtctttgaggacctgaagcttgagcagaaatcacagaggtgaaaggagggagctgtgtgacgatttaggggaagagctttcctggcagagggaacagcgtgtgcaaagaccttgagtggaatcaaattgggttgatgtgttgttctgtatacagatacatgtgtcttttacctggcccatgtgctgtaatagagttaaaacatcctaagtctgctgtaacaaaccgccaccaacttagtggcttcgaacaacacggatttattctcttacagttctggaggtcagaagtccaaaataagttagcagggctgtgttccttttgaaggctctaggggaaaatctgtccctttatcctttccagcttctagaggctcatg

SEQ ID NO: 209080 - DNA, 420 bp, Homo sapiens
ttaggaaaacagtcaaggggcacctcataaagaatgagggagaaaagagtaagcatttgttaatattagtgtctaccaggtactgcttgagatcgctgcatacattagcatttgcaccagtcctgcaaggaaggtgttagaagtaccttggcatagatgtagaaactgaggcttaaagagttctcaaatgggatttgagctgattctacccaactctgaattgtattaatggcaatcgcaataaatagcaacttgtaggtgttgagtgtttgctatgttttaggctgtgttccgataatcttatttactccacatcacaaccctttgaggttgatactatsaggatcactattcacagatatgaaatctgagagtcggaaagaattcttgcttgaaacaaagcagctggtcagtggtggg

SEQ ID NO: 209081 - DNA, 419 bp, Homo sapiens
taggaaaacagtcaaggggcacctcataaagaatgagggagaaaagagtaagcatttgttaatattagtgtctaccaggtactgcttgagatcgctgcatacattagcatttgcaccagtcctgcaaggaaggtgttagaagtaccttggcatagatgtagaaactgaggcttaaagagttctcaaatgggatttgagctgattctacccaactctgaattgtattaatggcaatcgcaataaatagcaacttgtaggtgttgagtgtttgctatgttttaggctgtgttccgataatcttatttactccacatcacaaccctttgaggttgatactatcaggatcactattcacagataygaaatctgagagtcggaaagaattcttgcttgaaacaaagcagctggtcagtggtggg

SEQ ID NO: 209082 - DNA, 613 bp, Homo sapiens
tcctgggcaacctcagtctataaacccattcacctcacccacaacctcaaccgactctttattctttttctttgactggcacgggagactttgagatacacttgcttctgtatgtatagcctcccaccttttccaggacccactaggtatgctgagttttccaggcagtcatgagaactttgtcagttcatcccaaagtctatgatcatttctcctttctgttggtatcagcccactcccaaattgtttgccatttacttttgtaagtcctgtctttaaggaarccatggggctcctggttgctattgtaggttgtctcagtcagccactactgtgtaacaaacaaccacaaacatcacagtgccgtacagcaggaggtatttctcgctcctgtgcctgagggtcacatggggtggcttggcttccggccacaggtctacaggtcacctggggcagctttgttccaaatacctttcatcctactgggcttatatcgtgtttttctcgtggcaatggcagaaatgcaagacagcaagccctacagcacaagcacatttcaactcctgctcatgtcacctccattaacatctcatttgcaaaaacaagtaaaatg

SEQ ID NO: 209083 - DNA, 613 bp, Homo sapiens
tcctgggcaacctcagtctataaacccattcacctcacccacaacctcaaccgactctttattctttttctttgactggcacgggagactttgagatacacttgcttctgtatgtatagcctcccaccttttccaggacccactaggtatgctgagttttccaggcagtcatgagaactttgtcagttcatcccaaagtctatgatcatttctcctttctgttggtatcagcccactcccaaattgtttgccatttacttttgtaagtcctgtctttaaggaaaccatggggctcctggttgctattgtaggttgtctcagtcagccactactgtgtaacaaacaaccacaaacatcacagtgccgtacagcaggaggtatttctcgctcmtgtgcctgagggtcacatggggtggcttggcttccggccacaggtctacaggtcacctggggcagctttgttccaaatacctttcatcctactgggcttatatcgtgtttttctcgtggcaatggcagaaatgcaagacagcaagccctacagcacaagcacatttcaactcctgctcatgtcacctccattaacatctcatttgcaaaaacaagtaaaatg

SEQ ID NO: 209084 - DNA, 398 bp, Homo sapiens
aatttcttgtgctcatctaagaaagaaaaaaataaatacaaagtgaagagcaaattagtgagggcctactttggcctcagacctgttttatttgcctaaaattctaaatttaaatgccatttggtagcacatgtacagtcagcagcagatcgtctttgtgttcgatgtattcattcgcattatctgactggtccctgaaaacatttgagcttgagactccagaagttctctttgagaggccaaaccaggcaagagaatgtgactctgaatgttttgcctatttgctatgtgagaccctgayaaagtagaaattcaggattcatgtgacctaggagactgtaacacactgggaagtgtcctgatttgggagacaggagacagtgctccattaaattcaa

SEQ ID NO: 209085 - DNA, 618 bp, Homo sapiens
aacagccagcgagactcaaaaccaagtagaaaagtgcaaagccattgagtctgtccacaaggctcatccttccctcctgcatgtcctctccacccagcacactagcatcctctagctctccctagttttacaaaagcatcttatgtcagcctccctcctccttagtccttttcaggtcaagctatatattataccttatcagaggcacaggtaggttatttatttatgcatgaatggatgtcatgacacacttacttattcagtctctcaacaaacatgtgctgagtatccattttgtgctaggagctgcactggacactagaaaaatatcccctcagtaaactcagtaaacacagtggtaagaaagattggcccatgctcagtcatccactcttccactttgttgcattttaagaggataataygtaggctttagcctaaagtaatagactctaactgagggattttaagcagaaatatacatattttaaatagcagtgactccctcagaactctccaagcccagggcatgcaccctttctctccattcaaaagatcagctgtgagcacagcatacaaattgttcaatgacatattaaatggaaattttcctgtaat

SEQ ID NO: 209086 - DNA, 485 bp, Homo sapiens
aaagggtaacagatacctggcctggtggctgtacatttttaatttggtttcataaatacttactgakgacattttttatgccaggcttcatgctagatattatggaaaaagatgaataatacacagatactgctcttgagatgttctcagtttagcaggtgaagcagacaggtaaatataatattatagcagtgtaagccctgaacataataggtatacaaaatatagcctgttagataatctgcagcttcatttgtacggtacaacagtctcgtgtttctttctacttctctagttccttttacatgtacaacaatttcagtgtgggttttgcatcctcattccaatgggaattcctgtctcctccttgaatatctctaagtcagcttgtaatttccaatgacaatcaaataagttacctgctaggtatttataaaaatgatatgaatgagttcaccaaatgtataaaattcaaacaataatca

SEQ ID NO: 209087 - DNA, 485 bp, Homo sapiens
aaagggtaacagatacctggcctggtggctgtacatttttaatttggtttcataaatacttactgaggacattttttatgccaggcttcatgctagatattatggaaaaagatgaataatacacagatactgctyttgagatgttctcagtttagcaggtgaagcagacaggtaaatataatattatagcagtgtaagccctgaacataataggtatacaaaatatagcctgttagataatctgcagcttcatttgtacggtacaacagtctcgtgtttctttctacttctctagttccttttacatgtacaacaatttcagtgtgggttttgcatcctcattccaatgggaattcctgtctcctccttgaatatctctaagtcagcttgtaatttccaatgacaatcaaataagttacctgctaggtatttataaaaatgatatgaatgagttcaccaaatgtataaaattcaaacaataatca

SEQ ID NO: 209088 - DNA, 485 bp, Homo sapiens
aaagggtaacagatacctggcctggtggctgtacatttttaatttggtttcataaatacttactgaggacattttttatgccaggcttcatgctagatattatggaaaaagatgaataatacacagatactgctcttgagatgttctcagtttagyaggtgaagcagacaggtaaatataatattatagcagtgtaagccctgaacataataggtatacaaaatatagcctgttagataatctgcagcttcatttgtacggtacaacagtctcgtgtttctttctacttctctagttccttttacatgtacaacaatttcagtgtgggttttgcatcctcattccaatgggaattcctgtctcctccttgaatatctctaagtcagcttgtaatttccaatgacaatcaaataagttacctgctaggtatttataaaaatgatatgaatgagttcaccaaatgtataaaattcaaacaataatca

SEQ ID NO: 209089 - DNA, 589 bp, Homo sapiens
tttggggtggcattttcctacccttcatgcctaagtttacaactaacataccaaagtttaaaggtgaatgtaatggttaatactgagtgtcaactttattggatttaagaatgcaaagtattgatcctgggtgtgtctttgagggtgttgtcaaaggagattaacatttgagtcagtgggctagggaagacagacycaccctaaatctggtgagcaaaatctaatcagctgctaggaaatataaagcaggcagaaaatgtgaaaaggtgagactggcctaggctcccagcctacatctttctcccatgctggatgcttcctgccctcaaacatcagctccaagttcctcagttttgagactcagactggctctccttgctcctcaaggtttcagacagcctattgtggaatgctgtgatcaggtaagttaatacttaataaactcctctttttatatctatctatcctattagttctgtccctccagagaaccctgactaatacaggttttggtaccaggagtggttctagaggaacagaatattaaagatggagttcttttgtcggttttggggtttctgtagttggc

SEQ ID NO: 209090 - DNA, 585 bp, Homo sapiens
aatgctaatagagacctgaacttgttcccaaatgtaatatttggttctaarccctgaatgtaattgaggagggggtaaaaaagactttcttcatgctgtttactgcaagcaacaaccttcaccccaagttaaacaattttttttaagtatccaaatatccaatcccaaccttgtctctattccactaatgaagtccagactctgttttgagcaccagaaatgaggtctggggatcagcctatgccagaagctatagagcagactcgagattggttttgaagggaacagaacagtttggactgttctgtaaacactttggcatgttttgcattgaagccttgctataatcaaggcatagaaaatactccacctaatgtgccactgaaccttggaacatttagtttttgggagtatatctttaatttataaaatgaaattttttcagctctattggctaactgaattaactcaagaacagctcaagtttatattgttccaggagcaaacaaggttgaggttagatggatgcaaatttcagtttaatttaagggagcatattccaacactagaacttagaggagctta

SEQ ID NO: 209091 - DNA, 566 bp, Homo sapiens
tttcttttgctttggatttcatcagattggttatcacatgcctgtgcatgcatgcgtatatgcataagtgtgtgtggtgtgacaattcatcctacttagcattcagtgagcttctcaaatctgtgggttaagtttwtctgttaaatttggggtaaaatttgaccattatttattgaaataatctatatgactttccttatcactttttcttctaggactccaattgcatgatattgttccacaaatctctgacattttcttcatttacttttctcattgtaactcagtttgaacaattcatcttatcttctttttaaattgactatgtttttgtgcatgctagtctgctgttcagtccatctaattacgtttttatttcaaacattatgtttttctgttctagaatgtcatttcattcttttatagttcctattttctctccaaatgttcaatctctttgctcattgaatccattctttcttgtaaattttttaacatatcagtaataaagtttttgcatgctatattcattttctactgctactgcaacaaaccaccaaaaattt

SEQ ID NO: 209092 - DNA, 566 bp, Homo sapiens
tttcttttgctttggatttcatcagattggttatcacatgcctgtgcatgcatgcgtatatgcataagtgtgtgtggtgtgacaattcatcctacttagcattcagtgagcttctcaaatctgtgggttaagtttatctgttaaatttggggtaaaatttgaccattatttattgaaataatctatatgactttccttatcactttttcttctaggactccaattgcatgatatygttccacaaatctctgacattttcttcatttacttttctcattgtaactcagtttgaacaattcatcttatcttctttttaaattgactatgtttttgtgcatgctagtctgctgttcagtccatctaattacgtttttatttcaaacattatgtttttctgttctagaatgtcatttcattcttttatagttcctattttctctccaaatgttcaatctctttgctcattgaatccattctttcttgtaaattttttaacatatcagtaataaagtttttgcatgctatattcattttctactgctactgcaacaaaccaccaaaaattt

SEQ ID NO: 209093 - DNA, 566 bp, Homo sapiens
tttcttttgctttggatttcatcagattggttatcacatgcctgtgcatgcatgcgtatatgcataagtgtgtgtggtgtgacaattcatcctacttagcattcagtgagcttctcaaatctgtgggttaagtttatctgttaaatttggggtaaaatttgaccattatttattgaaataatctatatgactttccttatcactttttcttctaggactccaattgcatgatattgttccacaaatctctgacattttcttyatttacttttctcattgtaactcagtttgaacaattcatcttatcttctttttaaattgactatgtttttgtgcatgctagtctgctgttcagtccatctaattacgtttttatttcaaacattatgtttttctgttctagaatgtcatttcattcttttatagttcctattttctctccaaatgttcaatctctttgctcattgaatccattctttcttgtaaattttttaacatatcagtaataaagtttttgcatgctatattcattttctactgctactgcaacaaaccaccaaaaattt

SEQ ID NO: 209094 - DNA, 551 bp, Homo sapiens
acccatttgcatttgttttatgaaaacacagtgatttacccctttctgtatgtatattatactgcaataaaaagttgtattttaaattgctgattctaaccaagattttattcagaaccayagaaaattctcaactatataatatttaaagggatagtagggttaatatcattgtacagtactgtattaaatccagttgacaaaatgacatttccattgaacttcaaatgtatttactgcaaacaggagctttgttctgtcaaagcaattctctcagtcatgctaaaactaaattaaattaaaatataaattacatttataaagtttatttcactagaatttggtcaaaaagggaaataaaaactagctacacaataaactgtttactttctggtaggcagaattttaagttgacctcctgtgacctttgtctttgtaaaatctattcctcttaagcatgggcagaacctgcaaactcaatgagttatcactctcatgattatgttatattacatgacaaaagggatttttgcatatgtaattagtttact

SEQ ID NO: 209095 - DNA, 460 bp, Homo sapiens
aaatttttcaaggctttattgaattagctcttactgcttgctctggggccaatctgtccgatgatttaaaagcagttcttttcattcccagtagacaataagaataaaagaactaatatcacttaaaatatttttctttgaaaattaattcttatttttgttttgtatgatatagactattttgtctattactttaatataatgctatcattatttggagcttcacttaatacttgaagtgggcaatagcacattagaaaattgggttttctaatctaaccaggaagaattttttccagtcatcaytggaaatttgaaaaagaggaaaatgttacataagaagacttttctatagtggtggaagaaggggaaataggggccggatggtgcccacttatttgatccgtttgacagattatttcaactttaacctcttgagactgtgctaataataggttca

SEQ ID NO: 209096 - DNA, 577 bp, Homo sapiens
taattccagcaattttatcacacctttgggctttcaatacatcaatacaacatccagcttcatttttagtgacttctttcttccatttcttacccagcttctactccatgattcatctttgtaatcattccttttcatacattctctttcttttcataatatttacttggaaaaaatttcaagcatggataaatgtaattctccatctgctttgtgcctaaaactctgcagttgactataactggagaaaacacagaaccatgttcactggtttctctttcacttcgtgataacagaacttaaataaattttaagtttaaaaagaaactattttatttctctaacaaattcattctcctcaatgcctacttcatactttctgcatcctcttcaaagtatcatacctccccccatgtctcaacaaatgagtgaaaatagaagtaatcagaaaagacattccacatcctcctaccatatctacccacttaccaaaatctgagctcttatgctgttttktttttttttttttgctcaacatattaaactgtctatgctcctatgtgaaaacttatccact

SEQ ID NO: 209097 - DNA, 508 bp, Homo sapiens
tgaaatactactaagaaataaaaaagaacaacacaaatgaatcttaaaattcacttaaaaatattattaagtgaaagaagccaggcacagaacatatgcatttataattcatcttataaatcattctatttataagaaatccaaaatcaaacaaaactttatatacacrtaaaactagaaatcagaacattgattgactttgtgcacatgaaaaagggggaggagtctggaattaatttcaaaaaggacatgaaggaaatttcaaggtgataggtatgttctatatattgctttgggtaatgataatgtgggtatatatcatcaaaactcatcacactaaacatgtatacttagatataaaataaaataaagctagagaaaaaaacctacataaattttgaaattaaatggggggcactctaatagctttaaccttgtattgaccacaaacataaaattgagcacatgtgaaggggtggggatcaaaaagtcggcattcgtcatgaat

SEQ ID NO: 209098 - DNA, 567 bp, Homo sapiens
attttaatcagcttaattgcattaagtttttttccagttcttttactcattccaaatgagacatgcaccaacaccttatttaattttgaatctattatcagggagttgactgaaatgcaagcaaaacatctttttccaaacatttctttgcacatgttagtgactgctaaacaaatttcattattatttaaaactagaaggctaatgctacttcagatatatttatttattgcacattgcaatggttaaaaactcatatatttgttgtggtttaatttaaaaagataaatgaacactgagtcttatacaaggagtcttatacaaggaagagaaatgaatgtctaaacactgagtcttatacaagcagtctaatacaaggaagataaatgaatatctaatcgtgtttgtagcacattccaggcaatgccgttagtcacagttctaactacatttctaactcaagaaaattacccmaaaaaaaacacatcttgatttttgaaaacataaagaaaagtccctacaacatcaggagaaggtgaagcatgagaaacagatcaggatcaggtg

SEQ ID NO: 209099 - DNA, 577 bp, Homo sapiens
ctcataactggtctccgtgtttctgctgatactcccatgccacaaggaattttacagctaaaggacacttatgaaacaaccttcacattgctcccatttcagaaaaaaaaggccatgtcctcaatgtattcaacaaaggctcacatagcctgatcatcattccttctcatctsctacctctcttcctcttactcatctttatcgacactggcctccctgcctcctattatctctgaataaaatgtcttctaaaatagcacatggaggtgatctcaggatcatggtggatgggaggcaggactagattgcagctccagacagagcagcatgcagaggcttgcattgtgaattttagctccagatcgactgcaaggacaaaacagcaattctgagaggaccacagaccctctgaaggaagcggactgctcttgccgtacccagtagacattccaaatactgtgagtgccccaactacggacgtggaaaagggagaccctcctcttctgaacacaccccccgactagagaagctgaagtctgtttgccagcgaagttcccaactttacttggaactgagt

SEQ ID NO: 209100 - DNA, 593 bp, Homo sapiens
tatgcatcggctgcattctggggaagtgctgtttcccctgctgtgarcactgtcacatactgcccaaaacacccttcagggctcagcggacttctcccagctccgagagtgctaatggtgacagccctcagctgtcttggagaccatctctctgaagacacctgctttgcccaaggtcatgccctcctcccaggggcagccaatacctaataagtggccaacatgtggatctaaaggcccagccccctcaacacaactccaggcaacttggaagggccatcccagctccagaggtcttactgggtcaatgatagccttcattgagactgggctacaacccaatttctccttcagcccaattcttccttcccttccattcaacacgtgtggaccccaagagcatgctctaacttattagaacccacacactagtctcccgctatctcagattctgcttcccagggacctgcccaagtccccacagtcttaggagcggggccaccttttgggcactcaccggacttggggttgcagagcacaggggggctgctgctgagggtggggctgctgctgaagtagccgctgctgccaca

SEQ ID NO: 209101 - DNA, 607 bp, Homo sapiens
agctgggtgtggtggcagtcctctaatcctagctactggggagtctgaggcatgagaattgcttgaaacaaggaggcggaggttgcagtgaaccaagatcacaccactgcactccagcctaggcaacacagtgagactccagcyaaaaaaaaaaaaaaaaaaaaaaaaaaaactgatgaacctacacaatacatcattatcacccagagtctatggtttacactggggtcactcttagtgtcgcacatgctatggctctggttaaatgtataatgaccggtacccaccattatagtatcagacagagtagtgcccctgccctaaacattcaaacaggtactttttttagtaatttcttttaatacatatcctatttccacaatatcagaaataacggaagaggaaggacatttgactcctgcaggattggagacactaaagtctgttctccgcagatacatcacagcccaggattccagcttacacagatgagggtccgccatagtatttggcctcccctggcttggccaaggcaggggacacccatgcacccccaggcttacgaggatatggtttgtgcctggtcctgattactctggctctaaaa

SEQ ID NO: 209102 - DNA, 607 bp, Homo sapiens
agctgggtgtggtggcagtcctctaatcctagctactggggagtctgaggcatgagaattgcttgaaacaaggaggcggaggttgcagtgaaccaagatcacaccactgcactccagcctaggcaacacagtgagactccagctaaaaaaaaaaaaaaaaaaaaaaaaaaaactgatgaacctacacaatacatcattatcacccagagtctatggtttacactggggtcactcttagtgtcgcacatgctatggctctggttaaatgtataatgacyggtacccaccattatagtatcagacagagtagtgcccctgccctaaacattcaaacaggtactttttttagtaatttcttttaatacatatcctatttccacaatatcagaaataacggaagaggaaggacatttgactcctgcaggattggagacactaaagtctgttctccgcagatacatcacagcccaggattccagcttacacagatgagggtccgccatagtatttggcctcccctggcttggccaaggcaggggacacccatgcacccccaggcttacgaggatatggtttgtgcctggtcctgattactctggctctaaaa

SEQ ID NO: 209103 - DNA, 607 bp, Homo sapiens
agctgggtgtggtggcagtcctctaatcctagctactggggagtctgaggcatgagaattgcttgaaacaaggaggcggaggttgcagtgaaccaagatcacaccactgcactccagcctaggcaacacagtgagactccagctaaaaaaaaaaaaaaaaaaaaaaaaaaaactgatgaacctacacaatacatcattatcacccagagtctatggtttacactggggtcactcttagtgtcgcacatgctatggctctggttaaatgtataatgaccggtacccaccattatagtatcagacagagtagtgcccctgccctaaacattcaaacaggtactttttttagtaatttcttttaatacatatcctatttccacaatatcagaaataacrgaagaggaaggacatttgactcctgcaggattggagacactaaagtctgttctccgcagatacatcacagcccaggattccagcttacacagatgagggtccgccatagtatttggcctcccctggcttggccaaggcaggggacacccatgcacccccaggcttacgaggatatggtttgtgcctggtcctgattactctggctctaaaa

SEQ ID NO: 209104 - DNA, 481 bp, Homo sapiens
aatttatgcaaaggaattgtctcacatgattgtgggggatggcaagtttgaaagtggtagaggctggaaactcaggcaggattaatgatgccatcttaatgcaaaatttcttctctgggaaatctcagtgtttgacttttaaggcctttcaatggattaaatgaggcccatccacactattgaggatattggactcctgctgtctgagccatttgtttacttgctgtgttcatgagatccagccccagctctagcagaatgcagagagaattcacagggtgtttcatgatgaggacggtatccagaagccaaatgasctgggaacatcatgagttttaaaattctattcctatgtggcaacatcctttcttaatctttaagcagagtagaaggagactcaatttggtggcactgctatacaccttggagcatgagcaggagacgtaaagccataactaaagatcacagtgcctctggtcca

SEQ ID NO: 209105 - DNA, 620 bp, Homo sapiens
gccaaattccacacaaatgttggtgttgctttgtttcacactgtatgtgctcttcttcatagacagtactaagcactaaagtacttactggtcatttgcctaaagtgaatttcttaattgcataaaatgaacaatggtattggtgaactttgagtcattaatttatgtaccaggaatgaaatacctatcatgagttttcctctagactctaggtgacactttagccttcaaggtaaactgagtaggagaaaaaatttactggttttctgtttatttgtttttgcttctaattattgtttatttgtcctttgttctcctttggtttttacttatatatacatatataagaccattttttcagtttctaataagaggcttttatttagttctatgaatagtcattttgtttcttaggcatttctaataattcatcmtttcttctatttatctagaattcctaagctaaatttgtcaagcctacaaaaactgacagagcatactagacatttaaaattttgttgattttacttagctcagatgatctagagagctacaagagctttaagatttctggcaaaaaataaaagacttatttttacaagttcagaacagaaatagta

SEQ ID NO: 209106 - DNA, 490 bp, Homo sapiens
ctttaagatttctggcaaaaaataaaagacttatttttacaagttcagaacagaaatagtacattccatattttgttatttggaaaagtagatgagaatagaaatattaaaatggtgtttatttaccaaggtaatttagttcaatccatattttaagttggtttcagatcttttctcttaatgaggaaaaacctatgatatgggtacaaaattttaatgttcaggaaagattggccttgtccttaaggaaattatattgattgggatttctctcaaactactttagttatgttgaccattattaaaattaagtgacattcatgtggattaagtagtaattaatttwaaaaagtgagactttctagcaatttttgatctccagccatttatcactgatgggctttcatgcgtgtacttgaaaacaaaatatgcacaagtgttgcactggtctgaagattttggtggtgaaatcttcacctaatcagttgtc

SEQ ID NO: 209107 - DNA, 481 bp, Homo sapiens
gcaagcccccaaaatctggccataaactggccccaaaacyggccataaacaaaatctctgcagcactgtaacatgttcataatggccataatgcccaagctggaaggttgtgggtttacgggaatagggcaaggaacacctggcccacccagggcggaaaaccgcttaaaggcattcttaagccacaaacaatagcatgagtgatctgtgtgttaaggatgctttcctgctgcagttaactagcccaacctattcctttaatttggcccatcccttcgtttcccataaggaatacttttagttaatttaatatctatagaaacaatgctaatgactggtttgctattcataaatatgtgggtaaatctctgttttgggctttcagctctgaaggctgtgagacccctgatttcccacttcacacctctatatttctgtgtgtgtgtctttaattcctctagcaccgctgggttagggtctc

SEQ ID NO: 209108 - DNA, 481 bp, Homo sapiens
gcaagcccccaaaatctggccataaactggccccaaaactggccataaacaaaatctctgcagcactgtaacatgttcataatggccataatgcccaagctggaaggttgtgggtttacgggaatagggcaaggaacacctggcccacccagggcggaaaaccgcttaaaggcattcttaagccacaaacaatagcatgagtgatctgtgtgttaaggatgctttcctgctgcagttaactagcccaacctattcctttaatttggcccatcccttcgtttcccataaggaatacttttagttaatttaatatctatagaaacaatgctaatgactggtttgctattcataaatatgtgggtaaatctctgttttgggctttcagctctgaaggctgtgagacccctgatttcccacttcacacctctatatttctgtgtgtgtgtstttaattcctctagcaccgctgggttagggtctc

SEQ ID NO: 209109 - DNA, 453 bp, Homo sapiens
ccactgcactccagcctgggcaaaggtgtgagtctccatctcagaaaaaaaaaaaaattaaacatttgagtcttcaactggaatggcctctcaacctttratgctctcatggtattacacaaatattgacaacaaaatcttctgaaatctaacgactctaatattggctacttcatcagaatattttgtttgggggaaaaagtgtttttgagtacttatcgtgtcctaggcctatgtaagtatctttctatgtgtcatcaatgtaatttaatttagcattcacagtaggattatgagttgggtattttatcagcattattttatattttgttgccaaactaggcaattgctcatattctgtgctttgtacacagtagttctaggatttgattaactgatgtttgacacttaggtaaggattttctttttccccctcacttatctgactgtatc

SEQ ID NO: 209110 - DNA, 453 bp, Homo sapiens
ccactgcactccagcctgggcaaaggtgtgagtctccatctcagaaaaaaaaaaaaattaaacatttgagtcttcaactggaatggcctctcaacctttaatgctctcatggtattacacaaatattgacaacaaaatcttctgaaatctaacgactctaatattggctacttcatcagaatattttgtttgggggaaaaagtgtttttgagtacttatcrtgtcctaggcctatgtaagtatctttctatgtgtcatcaatgtaatttaatttagcattcacagtaggattatgagttgggtattttatcagcattattttatattttgttgccaaactaggcaattgctcatattctgtgctttgtacacagtagttctaggatttgattaactgatgtttgacacttaggtaaggattttctttttccccctcacttatctgactgtatc

SEQ ID NO: 209111 - DNA, 453 bp, Homo sapiens
ccactgcactccagcctgggcaaaggtgtgagtctccatctcagaaaaaaaaaaaaattaaacatttgagtcttcaactggaatggcctctcaacctttaatgctctcatggtattacacaaatattgacaacaaaatcttctgaaatctaacgactctaatattggctacttcatcagaatattttgtttgggggaaaaagtgtttttgagtacttatcgtgtcctaggcctatgtaagtatctttctatgtgtcatcartgtaatttaatttagcattcacagtaggattatgagttgggtattttatcagcattattttatattttgttgccaaactaggcaattgctcatattctgtgctttgtacacagtagttctaggatttgattaactgatgtttgacacttaggtaaggattttctttttccccctcacttatctgactgtatc

SEQ ID NO: 209112 - DNA, 343 bp, Homo sapiens
atgagttgggtattttatcagcattattttatattttgttgccaaactaggcaattgctcatattctgtgctttgtacacagtagttctaggattwgattaactgatgtttgacacttaggtaaggattttctttttccccctcacttatctgactgtatcaaagagtgggtcacttatgttaggttaagatgtgtggatctggtgacaccaatgctatgtgtaccaccattcattaaggttaacttgaacattgatcatctgcttctaattcaaagtctcttcactacatcattgctacccttagcggaagaaattattagatccaggcttgtgaatgtcac

SEQ ID NO: 209113 - DNA, 408 bp, Homo sapiens
tgattgcatttggataccttgttttttcagcccccagtggaaaataaaaatggatggaggcaatgaataaggatcacctataaaataatttcttttaactatcagaactacatatgattaagcctctagatttatcaacaaatttacaaaaaaatgtagagtataaggaacatgaacaatgacatcatggagatgaaatggggcagatcaagaatatgtaaaattttrtagaaaaaataacttagtttcagtaaaaacaatgtatttatagatgaatacttatttatcaataaaatgacatcatctgtgagttaaaaaaaaattccagagccaaaatatttttaaaatgtagttggtatgtaaatgaaacaaaattggtcaaatgtacacaattgttaaagttatatg

SEQ ID NO: 209114 - DNA, 634 bp, Homo sapiens
tatgaaatgttcttctgaaaactttatcttcccaaatgtaaagaaaaaaaacttcagaattttttttttagraactattatatcaatgtcagtttagaattaacttgttgaagattgatagattctctttgcatttcctatattttgaacactgcaaaatttcaagttcacaatgctacattggcacaagaaactaaggtaatatcctctgatgttttaacacctgatattatatttttggagtaattttatggacatgcctttaagaaagtggcatttcaagagtaatactgtatgttatactcactgtaactagatacaaatatgccttataaacaatatttttaagatttctgctctactgcttttgccacacatgaattctgtctagactttgagggcaacattcagttacaaagccccagtaaacatatttaacaatacttacattatcacaaaattatgaaggtgcccaatgtgctgaggctttgccctttaacatgagcaatccgtgtatttgtgctgtgcttctctggaaaaagtgacttcaacactctttctgggctgtaataatagagtgctttccactcttcctctccagaaatgcaagtctcatgacaattaccacaatgga

SEQ ID NO: 209115 - DNA, 578 bp, Homo sapiens
cacttccaagtaactaacacatcaatgaaaaaaaatcataatggaaattagaaaatgcttttatatgaatgaaaattgaacacacaacaaacatatttatggaatactgctaaataagggcttacgtatgcatgtataatgaaaacctgccatatttaactgaaatcaatagcctcatattctcgaatcaacagcctaaactttcaccttaagaaatagtcaaagaatagcaaactaagcccaaagcaagcagaaggaaggaaataaagcttagcattaaaacaacaaaacagagactagaaaacagtgggaaaaaatcaatgaaaaaatgtttttcatatgtgatgatttgtctagttttggcatcttattctgtggcctcatagaatgtgtttggcagtgttaaatccctttatmttcttgcaaaagtttgtgaaggatttatgttaattcttctttaaacatttagataaagacaccacaggaaaagaaaaggtacacagaccagaatcccttaaaaatatagacaactgtatcctcaataaaatgctaacaaaacaaagcaacatgtaaaaaag

SEQ ID NO: 209116 - DNA, 426 bp, Homo sapiens
taagactggcagtgatatgctgtttgctcacaaagcctatcttgttcttttcatctagttttctccacttgtgcttatttaatcttcttttaatcacctttctgtttcttcttgcctacagtcatcatccttcccattttcagctgcctgtttggccacaactgtcttaaatctcaggttcaygaccctcctccctacaaaatcggccacttcctcctcctgtttctcaccagctccttcctctgcccagtctgcctggatttcagtttcttgttccaggtttttctttcaaccagtcccattatctggtgcatttctttgtttcgtcttctgatcccctacttcctctacttacacactttgtggagacctaggcgtgatgactaaagttttaatgtgttaatatatatgatggaaacttgatct

SEQ ID NO: 209117 - DNA, 601 bp, Homo sapiens
tcttgtgcacttgttggagaatgaatgtaaaaaaggcaaataatagcattcaatttttgttaaagtagcttggacctcttgaacccactgccaaagttgcaagatayccccacccacagtgttctccagaccccaaattaaaaagcagtggtgcatacacttgctgccctagatgtctcactgcaaacctctacccacagtctcatttactgtaaccagaggaaaataattccatttgttttcaaatcaatattcagttcttaggttatgcactctcttgtatgtgtggccctttgactcttttttttttcttttttttctttttgagacaggttctgactctgttatccaagctggagtgcagttgtgatcatagctccctgtaacctctgcctcatgggtcaagtgatcctcccacctcagcctttccagtagctgggactacaaatatgtgtcaccatgcttggctaacttttgtattttttgtagagatgaggttgtgccatgttgcccaggctggtctcaaactctggggctcaagtgaacctcccaccttggcctcccaaaatcctgggattacaggcgtgcagcccatgcctgg

SEQ ID NO: 209118 - DNA, 590 bp, Homo sapiens
gggcaccctcatgaggatggaacagtgaatccttccaaggtcatacttccttctgtattgctgatgcttctagagttgcaaaaaaacagaaaactagtctggctaatgaacataggagatgactttttacatatcaggaagctcatggatcaatgggaaggcaaagaaccaagctttaaaaaataataaagagcagggaagctcctggggcttcacagcaaacactatttaaatttgaggatrtccccagtggagtacatggtatggaacaattttcctcttcttggatcacttatctcatgactagaaatcctgagagaagcataaaatgatgtgtcaccactcagctaaaggagggttgtgccccttgattgatgatcccaccaagtcagcccctgatgtggaaataaattgagcatagtcatcaaagatgggatggactgggggcaacaggacactgaactctcctctgcccccaccctcagcgagcctgacttatttcttgcagtcctcatgcttgtgctgcctcttgccctcagcctcttaaaagcgtaactgcacacttacatcatgactccaactgtatttca

SEQ ID NO: 209119 - DNA, 569 bp, Homo sapiens
gtatccagaatatataaataacttttaaacctcaatattaaaaagataacttgatatttttaatgagaaaagaatctaaatagacagttgtctggcaaaagatatgagggacaataagcacacacaaagatgctcaatattaattattaggaaaatgtgcatgaaaactaccatgagtttccacttcatacccactagcatgactacaattttgaggataggcaataatgaattttggctaggatgtggataaattagaagcaccagatattactggtgggaatgtataataatgaaccaactttggaaagtgatttgatagtttcccaaaatgataaacatatagttactgtatgacccagtaaccacttctaggtatatacccttgaaaaaaggtcaaaatgtggaaacgactcaaatgtccatcaattgagraatgcatagacaaaatggaatatgtccttacagagagttaattataatcctgaaagacacaatccacaatcccaaacgctacaatctctaaagatcaaaatcataaaagtataaatctaaaaggaggcaattta

SEQ ID NO: 209120 - DNA, 569 bp, Homo sapiens
gtatccagaatatataaataacttttaaacctcaatattaaaaagataacttgatatttttaatgagaaaagaatctaaatagacagttgtctggcaaaagatatgagggacaataagcacacacaaagatgctcaatattaattattaggaaaatgtgcatgaaaactaccatgagtttccacttcatacccactagcatgactacaattttgaggataggcaataatgaattttggctaggatgtggataaattagaagcaccagatattactggtgggaatgtataataatgaaccaactttggaaagtgatttgatagtttcccaaaatgataaacatatagttactgtatgacccagtaaccacttctaggtatatacccttgaaaaaaggtcaaaatgtggaaacgactcaaatgtccatcaattgagaaatgcataracaaaatggaatatgtccttacagagagttaattataatcctgaaagacacaatccacaatcccaaacgctacaatctctaaagatcaaaatcataaaagtataaatctaaaaggaggcaattta

SEQ ID NO: 209121 - DNA, 597 bp, Homo sapiens
tagccacctccagcttccccaggccaatagcctcatcacaacacatattttctactataaaactttccactttctttgcctacstgtgagtctctgtcaaaacagagtgagtctggctgccttccttcctgtagcaatctctgcattaacaagtttctcttttctcatttaggtggtcttcttttatttctattccaataatgttacaataaaataattgataaatgaaaacataataaagattaatacaaatataaaagggcaaaaaaggaggactaaagaagcaaacaacatatggaacaaaggaaaagcaagtaagtatacaatatgtagagcagtaattacattaaatataacttaactggacaaaaaaatctaattcaaaatcaaaaccttgtcagagagggttttaaaaaggagggacccaccaatatgttaattacaagttaaatataattacattttgaacaaagggcacacaacttgattgagtataaaatggtagaaaaatatatattatgcaaaacgaagcagaagaaatatgatgtggagaaattaatagcagttaaaatataatgtatgtttaatagaagtgaa

SEQ ID NO: 209122 - DNA, 414 bp, Homo sapiens
ctgtagcccccacctcccagggtcaagcgattctcatgcctcagcctcctgagtagctaggatgacatgtgcatgccrtcacacccagctaatttttatatttttagtagagacagggtttcaccatattgcccaggctgatcttgaactcctggcctcaagcgatccgcctgccttggcctcccaaagtgctgggattacaggcatgagccactgcacccaccactaaatcatagatataactcttgacttcaaggagttagctaataatttgtataaatgaaaagaacattggtggcaataccagaaaattaatcaataatccatcagtgtgtcaaaatgtaattttaaaacaatgaaacaattctgcttacactcatgttgtttatcttttacagagatgtgtaaccaata

SEQ ID NO: 209123 - DNA, 675 bp, Homo sapiens
ggactgaactaagttctaaatggaattagaacaaaattgattattttttgtttttaaccaaagtacttgggcttagagggaagatcagataacttataaacaaactgaataatccatatttgctctgcacgtctgakttgaaagctgaatgaaaattttgcctagcatagttattggaacatagtacatagttacaactaagatttattttgcagtctaaatttataataattaggagtatacaaaggagaaatgatgcacagtcaaaaagctgtttatatttaactctttctggtaataaatgaagaaaggaaatcacattaggctgagagcttattgggggcaggaggtatgccttacttatctctctatctccgtcatccaacatagtccttagaacagctgcattcagtaaatgaacacattaatgaattactccatacgaaggtcaacctgtggagaagcagagttaccaaattacgcaggttaccagggatgatattttgtggttataataaaaactcacaatttcctagagggtggtcttaaattcacaaactagttgtgtaatcttggccaaattatttatgtagtctacatcagtttactcaatctacaaagtagaatacattatctgccaaccttacagatttgttgtgagaaataaataagaac

SEQ ID NO: 209124 - DNA, 561 bp, Homo sapiens
gaaaaataagatgtccatttatcttttgtgtgtgtatatttgtatatacaaacacacatgtatatttttgtgaataatgtaaggataaaattgaaacttatttctccacccctctgggttgtaatgataaaccataaagatgtatatggaaatgtcagggatctagaatagccgaaacagtcttgaaaaagaacaggtttgaaggattcatacttcctgatttcaaaatgtattacaaaactacagtaaataagattgtatggtactggcataaaaatagagatataaatcagtggaataaaatggaaagtccaaaaatgaactcatacatttgtggtcagttgattttcaacaaaggagaccaagacagcttaatggaggtggtgggggagtgggggaaaggcygggggtggagggggaaaattagttttttcaaaaagtagtgctgagacaactggatgtctgcatgtaaaaggataaagctggacccctccctcacatcatatgcaaaattaactcaaaatggatcatagacctaaatataacagtgaaaactgtaca

SEQ ID NO: 209125 - DNA, 588 bp, Homo sapiens
aagctgaactacaactctgatgacattacctaaacactcgtgcttccatatttccatgccttactcacgtaattttctctacctagtatccatcagatagatacagataaaaagcctcaggttgccagtatggcaacctccctataaattagtctgagtgattccatcagttagaagcgatttatccctctaaattcccatgaaattataaaagtctctctcataaagtgctcactatattttttgtggttttctggttatctttttaaacctcttatttcccaaaaataaatacaaatgatcatggacaaactaactgaaatccatacctgtaagaaacttacacagtcctttaactctgtaagtgtacatttcttataaacaggcccaatttagctcagtaaacagatgagtcactatctcagtctgcagaatgcagaaggatctgcattcaggtcagtgatgatcttgcaggttttygcaagaaccatgaaattgtcttgggttaatataagtacccattatgttatgggggattcctcaacgcaaagtgagcttcataggtgtttccatgtccaatgagtgagc

SEQ ID NO: 209126 - DNA, 603 bp, Homo sapiens
caatgccttgataattcctttgttccaagtttattgtgtagatgcaataagataattcatgcaaaatgcttcacacagaagctgatcagaatctaataaagtcccagtaagcattagtttctatttttgctgttattattgtctgaacttatttctggattctcaagtgctttggtgatacggtaaaagaaaaaagaatatagtcatgtctttggctccctgaaggtccaaaaaggtagggaaaactaaatcaaatggaaagacagcttctrtcagacccccaagctaaaccccagaggtaggacataaccccatcatcttagacataaagtccgtgagggccccagaacaaaggtatgtatatgttatttcttccagactcctgtgttaaatcttcaagtcctgtgcagggctctgggaaaggtgaccagaatctttaatgagggcagcaaggactgcttaggtggcctgaatccttctcatctcctattttgtgttccatagatgcaccatgctgcctcctgctatgtggcctttgcacctgccatcctggccacatggagtaacttcccttctaccacgttcacaactcacctcaagctt

SEQ ID NO: 209127 - DNA, 611 bp, Homo sapiens
ttgcctacttagaattatgtgccataactacactcgaaacagggacagagaaaggaaacaggatttggcacagaaatggttgcagtggccccacagaaaatagtcaaggaatacatgcaacataggatggtagagcttgagatgattacagcataggatggaaaggaaactatgrgattaagaggacaaaggtcacagaagttggctctgaagctcagacttgaaagatgaaaaaaaaaaagaagaaggaaatatgtagaatgctgagacaagagaggccgcgattagtatgtggcacaatagacattttgcaaagctcaaatgccaagtggcaaaggtacaatcgtcctttctgaagaggattcctgccaaccagtaattgtcacattgcaaaacatcctggaaggaatcagaagttgtgcctctatagagcaaagttaaatgtaggttttatttttatgttgccaatttatttagagaaaatcaagctggaccatatagaaaagaaaagccacctggaaaattgtaatgatttgattattcaatcatttaaaatacagatgcaattacatatttggaacatctatgactgatcttcaaagatgcatgaa

SEQ ID NO: 209128 - DNA, 646 bp, Homo sapiens
tgtgttttaaaggatgactctggtttctgagttgagaatagactatgaagggcaaagtgaaagcagatagaccagtgaggatgctattgcagtaatccaagaatcccattgatgatgactcagctagggtaagatatgggtaattaaaaatggttgaattctcaggatagtttggaaatactatcaatgcaatttggtgatggattaaatacaggatgtgagagaggtaagaaaaaaaaagagtgtcaaagataactctatggttttgtcctgaaacactggaattgatatgccttcagttgagatggggaagtctgtgagcaggagagatttgggagggagggatggggagcattagtagtttgggtttggaataggtcaagcttgtgatgtctattaaacctccaaatgcagatgtaaattaggcagcctggaattcaagagagaggttaggtaagagtttaaatttggatatgtttggcacaaaaatggcacttaaagcyatgatattggaaaaaatgagaaaaataaggggtagagagaaagaaaagaaccaaggttttgcatcagaaattcatgtggataatgagccaaccttgccaactaggtgcagccaggaagagcttcttcttccaccaagagaaag

SEQ ID NO: 209129 - DNA, 658 bp, Homo sapiens
aaaaattgacaactggaacccagtaaactaaaaagaaactgtcaacagagtaaacagccaacctacagaatgggagaaaatatctgccaactatgtatccaacaaaggtctaatatccagaatctataaggaacttaaatcaacaagcaaaaaacaaacaatgctgttttgttatcaaaaagtatgtcttattcattcctttcaattttttgtacccrttaaccattcccacttccccctaataaaaaacgtgtaaatgacatgaacagacacttctgaaaggaagacatacacatggtcaacaagcatatgaaaaaatgctcaacatcactaatcattagagaaatgcaaatcaaaatcacaatgagataccatcttacacatgtcaaaatggctattactaaaaagtcagaaaacaacgtatgttgtatcagaaagataatccaccatgatcaagtgggtttcataacaaggatgcagagatggtttaacatacgcaattcaataaatgtgatataccatataaacagaattagaaacaaaaatcacatgatcatctcaatagacacagaaaaagcatttgacagaatccaacatcctcttatgattaaaactctcagcaaaattggcatacaagggatatgcctccatgtaataa

SEQ ID NO: 209130 - DNA, 473 bp, Homo sapiens
ggataaagaaaatatggtacatatacacgaaggaatactacacagccataaaacgaatgaaaataatgtcctttgcagccacaaggatgcagctggagggtattagactaagcaaattaatgcaggaagagaaaaccaaattgcatatgttcttgcttataagggggagttaaacattgagtacatatgaacacaaagatygaaataatagacactgggccctacttgagggtgtatggtgagagaagggtgagggttgaagaaaacacctttggtactatgctcactatctgggtgatgaaatcatttgtacaccaaaccccagtgatatgcaatttacccatgtcacaaatgtgcacacttacttccaaacctaaaacagaagttagaaaataaaaaaaaatttgaaattcatgcatattagtttcctgttgctgttgtaacgaattaccatacatttagcatcttaaaac

SEQ ID NO: 209131 - DNA, 456 bp, Homo sapiens
agtatgttcccagatggcagcagtccctcaccagggcaggtctgaagcattgctgtgagaggtattctggaatacttagcttacagcctgtttctccaactatcctaattttctgatcatcaaataatttttaacaagcctcatttctgcttaaattaactaaaatagatgcttttgtctgcaactaagaactctgatagattcacaaaaaccttagcaaacaatatctttcaaatttttggcaatcttgtaggcagttaattttrttactcagatataaacaatgacttttcacatcctttagaagaagctgtatctagatgtagtattatcaggagcattgttttgcatagggacaaaatggtaaatctacaatttctccacccctttttatgtcattcctttactagtattgttatcatcaaaacattctgaataattcatttagagctaagg

SEQ ID NO: 209132 - DNA, 546 bp, Homo sapiens
tcaaatagcctatcttcaagctcactaattatttattctgcttgatcaattctgctattaagagactctgatgtattcttcagcatgtcaactgcatttttcacccctagaatttctgcttgattctttttaattatttcaatctctttgttaaatttatctgatagtattctaaattccttctgtgtatcatcttgaatttctttgaatttccttaaaacaaccattttgaattctctatttgaaaggtcacatatcttcatttctccaggcctggtctctggtcccttacatagttcatttggtgaggtcatgttttcctggatgatgttgatacttatatatgttctttgatgtctgggcattgaagagttaggtgtttattgtaaacttcacagtctgttcttcttgggaaggctttctaggtatttgaaaggacttaagccctaygcccaataatactgtgggttttgcagacttctggaggtattgttttggtggtcttgaataatttccagatgaattctctttatcaccaggcactct

SEQ ID NO: 209133 - DNA, 558 bp, Homo sapiens
aatactgtggtttaaatgtgttaccccaaattcatatgttgaaaacttaatctaaaatgtaacagtgttgggaggcggagcattttggaaagtgtttaggatatgagggctttgccctcagaaatgaagtaccattgttataaaagagcttgatgaaggaagattgtcccttttactccccagccttccrcatctgaggatgtagccaaaaggcttcaccagacaccagaagttgaccctttgattttggacttcctagcctccagaactctgagaaaataattttatatctttataaattacccaatctgtggtatgctaatatgacagctcaaaatggattaaagcaaacattattgacatcttaatattgtcttcccagtctatgaagacagaatgtctttcaatttatgtcttctttcatttatttcagatacatttggaacttttcattatgcaagtgttttaccttcttaattgattactattttactctttttgatgttattacagatataattttaaaatatttacttatgagagtgttgacagtttata

SEQ ID NO: 209134 - DNA, 558 bp, Homo sapiens
aatactgtggtttaaatgtgttaccccaaattcatatgttgaaaacttaatctaaaatgtaacagtgttgggaggcggagcattttggaaagtgtttaggatatgagggctttgccctcagaaatgaagtaccattgttataaaagagcttgatgaaggaagattgtcccttttactccccagccttccgcatctgaggatgtagccaaaaggcttcaccagacaccagaagttgaccctttgattttggacttcctagcctccagaactctgagaaaataattttatatctttataaattacccartctgtggtatgctaatatgacagctcaaaatggattaaagcaaacattattgacatcttaatattgtcttcccagtctatgaagacagaatgtctttcaatttatgtcttctttcatttatttcagatacatttggaacttttcattatgcaagtgttttaccttcttaattgattactattttactctttttgatgttattacagatataattttaaaatatttacttatgagagtgttgacagtttata

SEQ ID NO: 209135 - DNA, 636 bp, Homo sapiens
gatcagttttcttcatccatttttctttctgtttctcaaatttgacaatttttttgtcctatctttgaaatagttttttcgcttgctcaaatctatctctaaaatattccagtggattttcattttcatttttattttcatttttcagctccagaatgttttttctgtgtggtttatgttaggttttatatctctttagacattttttatttgttcatacattttgttattgactatctctgtgtcatcttttggttctttgagaatctttaaggctgttgtcttaaagtctttttctagtagttctgtcattaggtcttttttggagacagtttttatggatttactttttcttttgagtgggtcatactytcctgtttcagttttttattaaccttgagatttttttggtgctgttttttgttttgttttgtttttgtttcttcatagttataggctgtctctgtgtgaaagatcagtctaagttgtaagcttaaggtattctcaggtcttttctgagcttggccctacccctgagcatgcatggtgactttctaaattttcttacatatgtagttgcttttgtatattctactcttcaatgtctgactctcaaaaaaagatgaagaaaaaaat

SEQ ID NO: 209136 - DNA, 535 bp, Homo sapiens
gaattcaattaattccctagaatgacttatagaatgaagggaaacactggcttacattcactggtttatcaaaaaggatattagaaagtgtattaatgaataccagatgaagagatgctagggtaaggtatgggagaatcacatggagcttccatcccctctccaggtgagctaccctccaggaaccacatttggctatctggagcatctctgaatcctgtccatttgggtttttatggagggttcattacataggcatgattgattggatgattggccattggtgatcaacttagccttcggcctctctttcctccccagaggttaggggatggggctgaaagtcccaatcctctaatcctgccctggtctttctggtgaccaatcctcattgtaaaccaaaaataaaattytaagctccccaaacaattgaaaaattgaataaaattctaagtcccctctagaccaagtgcattcctaagttaacctgaaaaactaattcaggccatgatgggaagtgagggttggatatgcc

SEQ ID NO: 209137 - DNA, 466 bp, Homo sapiens
gaattccaagccagtgggtcttaacttgtgaggtgtcgtggaagtggggcttgcagaacaatgctgcttggctccttggattcagccccctttctaggggaatgcatggatggatctcctgacttgccaggattcctggggctggagtatgtaaaacttctgggtctcagtgtgtgactccayggctgctctgctgagtccatacagctttgtgtatggtgcccaaggccctggtggcatgggctcatgaggggatctcctaatcctcaggttgcaaagatccatgggagaagcatggtttcctgggtggggtcacacaatcactcaccgctttctttagctggggttgggagttcctttggctccatgccactcccacatgggctgtagccacaccctgcttttcttcattttccacggatcctagtggtttgcctagtcagtcccaatgtgagaacctggatat

SEQ ID NO: 209138 - DNA, 581 bp, Homo sapiens
aaggatcattctgaggggaggaaacagcagatacaaaggccctgaggcaggaggaggggagaatttggtcttgaggtcagagaaaccatgggggtcagatcatgtaaggccatgcggaccactgtaaggctggtagattttaccttgagggtggtagaagccattggagggttttggagtaaagaagggaggtggactgatctagcttttagcaagcacactctaggcgttgctgtgtgagacagattgaaggcaggacagcaaggagaccagmcagaatgcagggctgaggggagactagtgggatttcaaggtgaggttgagatttgctgatgaaccagaaagaaaactgaggaggactccgaggttctggtcttagcacctagaaagaaagaggccattaactgagatgctggaggagctggtttaggccatgttaagttgtgatgccaacccagcatacccaaatgcagcagaaaagcaagggtggagatttttggggaaggtcatcctcaatggaaatataaatcttgggagcttctcattgtcctttgtcccaattttcgactttgacctcaggt

SEQ ID NO: 209139 - DNA, 591 bp, Homo sapiens
aagctttaaataggaaatactgtggaaactggaccttactgaatataaataaaagttttaaatgtacagatatgtacagagcaattgaggtgcttatcatcgatgacagatagtgggtggttttgtatattaagattcatgtgggccaggtgcggtggttcatgcctgtaatcccagcactttgggaggccgaggcgggtggatcacgaggtcaggagattgagaccatcctggctaacacggtgaaccccgtctctactaaaaatacaaaaaattagccgggcgtggtggcaggcrcctgtagtcccagctactagggaggctgaggcaggagaatggcatgaacccaggaggcagagcttgcaatgagccaagatcatgccgctgcactccagcctgggcgaaagagcgagactctatctcaaaaacaaacaaacaaacaaaaacttcagaattgttaactgcagttgactttgatggagggagatggaccaggtggctggaggaacaggcacagagaagaaaactttttcttgttttttttttttctaactagtagctgtgcagctttaaactttttactttataatg

SEQ ID NO: 209140 - DNA, 591 bp, Homo sapiens
aagctttaaataggaaatactgtggaaactggaccttactgaatataaataaaagttttaaatgtacagatatgtacagagcaattgaggtgcttatcatcgatgacagatagtgggtggttttgtatattaagattcatgtgggccaggtgcggtggttcatgcctgtaatcccagcactttgggaggccgaggcgggtggatcacgaggtcaggagattgagaccatcctggctaacacggtgaaccccgtctctactaaaaatacaaaaaattagccgggcgtggtggcaggcgcctgtagtcccagctactagggaggctgaggcaggagaatggcatgaacccaggaggcagagcttgcaatgagccaagatcatgccgctgcactccagcctgggcgaaagagcgagactctrtctcaaaaacaaacaaacaaacaaaaacttcagaattgttaactgcagttgactttgatggagggagatggaccaggtggctggaggaacaggcacagagaagaaaactttttcttgttttttttttttctaactagtagctgtgcagctttaaactttttactttataatg

SEQ ID NO: 209141 - DNA, 618 bp, Homo sapiens
gttatattgaattaacagattatgaaaataatttatcataatacaaaataaaataaagtaagtaaaataaggttagtataagcaaagaaaaatgatcaaattattccaaacatagrgactggggaagattgtatattaacctcaaacaaaatatttatctcagattagtgtaactgtctgttccttctctgtctttcccactaagctgtgaatttatataagtgggctggtgagatgaattgagtctccagctcagtatttcctatgcctactacagatttctgagctaacagacaatcttctagtctttaggttgattaggatgtaaattatccacatcttaaaagatgagtgccagctctataaaggtctttccaaggtaagtgaaaggtgttggactgattgcacaagtctgttggtgtatgtttaatgctccacttgaggaatgtagaaggaaatgtttcgcgagtgaagtatataggtagtttatagtatagaatgccttgatatcgtatagaatgccttgaatcccatacaatagaatcatataattactcattttgtaagtaaacttctgagaattgtcttcgtaacagcataacataatctgagaggtca

SEQ ID NO: 209142 - DNA, 618 bp, Homo sapiens
gttatattgaattaacagattatgaaaataatttatcataatacaaaataaaataaagtaagtaaaataaggttagtataagcaaagaaaaatgatcaaattattccaaacatagagactggggaagattgtatattaacctcaaacaaaatatttatctcagattagtgtaactgtctgttccttctctgtctttcccactaagctgtgaatttatataagtgggctggtgagatgaattgagtctccagctcagtatttcctatgcctactacagatttctgagctaacagacaatcttctagtctttaggttgattaggatgtaaattatccacatcttaaaagatgagtgccagctctataaaggtctttccaaggtaagtgaaaggtgttggactgattgcacaagtctgttggtgtatgtttaatgctccacttgaggaatgtagaaggaaatgtttcgcgagtgaagtatataggtagtttrtagtatagaatgccttgatatcgtatagaatgccttgaatcccatacaatagaatcatataattactcattttgtaagtaaacttctgagaattgtcttcgtaacagcataacataatctgagaggtca

SEQ ID NO: 209143 - DNA, 519 bp, Homo sapiens
ggaatagagaagatgacaaaataatctaaatatattttaaaagtataaaacaccctaaacatattttaaaagtgtaaaacacacaaagattctaacctaataactttagatatgaatgaaatctrtaagactaaaggcaaaagtaactgtacctagcactgttctctatttggtaaagttatttcccattggcatatgtgttagcaattctgcaactcctgtgcatggatattcaaattgaatgattaagtaaatgaacagcagatggtgagagccaggtttctcgctgtgggaataggaatacaagcaagaaaacgaggttagaatgacctgtgtagtaatgaattagagaatctaattaactcgtttactttaatatagatgcagatgaatatatatacctgtatgtgtatgtatatctatttgtatatgtgcatataaacatggactaatatacatacatatatatatatttgttcagcttagagagcatagaagcaacaagaaccaagtagtaat

SEQ ID NO: 209144 - DNA, 597 bp, Homo sapiens
tggacataaaaatgagaacaatagtcccagtggactcctagatcagggaaggagcaaggagcacaggggttgaaaacctacctattgggtactaggcttgctacctaggtgacaagatgcatgccccaracctcagcatcacataatatacccatgtaacaaacctgtccatgtaccccctgtacctaaaataaaagttaaaattattttaaaaagcgaaaataaaaataaaacccctatattgtaagtgctaagtgcctagcacatagcatgtttaataatgctgatcaggcaaacgaatgaatcaatgaatcagtataaaatcccacaggaaacagagaaaggcaccttgcccattggtagtggcaacagagcaggggcactaagcagccatggatctctgtaagtttaccatgctctaagaggaagggagagagtggcaaacatatgaaaagcaggtgataggaaattaaagacaaatcttatctagcgttagctctgattatcaagttggtggtgactttagcaccatctacccccagtcaaattcatttctatctagggaataaatggagggaaagaaggatggaaagctga

SEQ ID NO: 209145 - DNA, 438 bp, Homo sapiens
gtcttgatctcctgaccttgtgatctgccttcttggcctcccaaagtrctgggattacaggtgtgagccacggcacccggccaagaatgaggttttgtccaaagaagggagtcatctctaatttcagcagttctaaaacaatgaaaacttgcatcattattatggtttatatcacacagcattacaattatttggttacttaacctgatttccaccagcctgttatcaactcaaagagaagaattttattttacgagcctttgtactgtgcttgacaaaatatttagttcatgcatggcccacaataaatacttttaagagaatatacaaaattaagctcataaaatctgtgaatgacataaagctagggagatgggcagctcatacattggatgagtacaaaatcaataatccaagttatctctaaaatcaagctaa

SEQ ID NO: 209146 - DNA, 438 bp, Homo sapiens
gtcttgatctcctgaccttgtgatctgccttcttggcctcccaaagtgctgggattacaggtgtgagccacggcacccggccaagaatgaggttttgtccaaagaagggagtcatctctaatttcagcagttctaaaacaatgaaaacttgcatcattattatggtttatatcacacagcattacaattatttggttacttaacctgatttccaccagcctgttatcaactcaaagagaagaattttattttacgagcctttgtactgtgcttgacaaaatatttagttcatgcatggcccacaataaatayttttaagagaatatacaaaattaagctcataaaatctgtgaatgacataaagctagggagatgggcagctcatacattggatgagtacaaaatcaataatccaagttatctctaaaatcaagctaa

SEQ ID NO: 209147 - DNA, 573 bp, Homo sapiens
tgaattctcatcacctctgttactaaagtgcttggagctaaagcacttttatttccttttgtgcaagtattctatttttwaaaaatttcaaagtgatatctcagggttttcttgagcatcaagggatcacagagctcaaagaaaaggtttaggtgtggattagaataaagtggtttgaagagtgaaggttagaaacaggatctgcaaggggatattaaataattgttgctaagtttatagccctgaaacctaaatggtgaaaaccaaaaattcagagagtcacaattgctggttaatctagaagctgtgctttaatcgttctttcatttattattcatctgttcattcaataaacatttggtgagctcctactatgtgcagagttctaaggaggaaacagtgatgaataagatagaaactctaccttacagcagttttcagtctcactggaaaggaagatatgcaaattactgctataaaacagggagatatacatatatatatatatttgtgtgtgtatatatagatatatacttacatacataaaatacgtataaacaaagatctgaggaa

SEQ ID NO: 209148 - DNA, 575 bp, Homo sapiens
ccctctgactcgtcttagggctcatcacttgtagtttgcaggtttataagacaccatctgtgcttttgttgctgccatgatttcataatctatttatgatggtcaataaaatccaratattacttcaagggtacaccaatcatgctgttaattctaaaaattattttattcttatactgagaaaaagttggcagatgagggggttcactggattttatgtatagcaactgacctgagattgatgaagtgtgctaaccatttctttggatagtctctgagcagaaaaggttgcaaactcttcaagactttttcacatagtctgtcttatcacagaccaaagctttcctgttgaccagctgcatataattgtatctttgtctttgaatcacagacaaagctagacatcagccatcagtaataaaggacataaacaaataatggagtgatctgaggccactgacattttatcaagacataaactgtattttcagttctaaagaacctactaaaataactccaactaaccagtgttgtgcctcatattatttattttgcccatttcaatataagcccca

SEQ ID NO: 209149 - DNA, 575 bp, Homo sapiens
taaaccatcaaatgctattcaagtgttggcttttattaataagcaggaaaagcagattattagatgaaggaagaaaatatgagaagacgatcaggaggattaactactaaagtaaggatcattgagtggagaaagtctttggggtacttcaagacttacagacatacaacatacattatataaaactctttgtacttcaggttactaaagttcttccagtgaaagggattctgaaagagraagcaatatgttttaatgaaagtgttagaatagagtcaaacaaacttggaagttagtcttgacatgaccacctacaaactctgtgaccttgggcagattactaaacatctgtctccttatctataagatatcctcctagtctacttcaaatgaaggtaaatgtgctttaccaaaagtaagagattcttattaaaagagatgtatacagtaatgtagacaaaattttgccttttgatgcttttcctagaaatagttattcttaccctgatttttaatcactgtgctcacaaatttctgtaagataaaaatctgtataccatgcactaatgtaaatg

SEQ ID NO: 209150 - DNA, 420 bp, Homo sapiens
cggacaaatcttttcccccttcatgatagaaggggtcacatgtaatcaacctactaccagagagctggctggttcactaatgcatggtgtcatataatggatttggagttggtctcagcaagaggtatagccaggccaaaccttgtaagggaaattttcatatggttaaatgcatgaatctgtcccatgtcttccctttaactactttgtttcttgagctyattgtatgaaccctggcttggaggggaaaggaggctaacggacatccacagaggctcactgtgtccttctgattatggagaggctgttttgcaatggtggccttctggtgcatattcacataggacacacatattttcagactctgagccagcacttttgaagacatctgttgtgaaagatttgcggggttttttgttt

SEQ ID NO: 209151 - DNA, 464 bp, Homo sapiens
tactcagtttgtggcaatttgttgtggcagcctaaataaacaaatacaatgacactccgttctccctcctaggatatcaggtgtccttttcattttggctaactctactaaaactgggtctttgcttaaatgtatgttttcaaaagattcttctctgatcctcccagatcttggttcagcatctctcctctgcattcctatagaactactttgtattcatccacaggtgtatatttccccatctgtaaaactttgtatgttgatcttaattgttcttcatcaaatccttggtgcccaccaagatcctggcacatggtaaatgctcagtagttatttataaaataaatgactggcataatcagagctgggctaaaagtttcctgattcccatggcattgttttccctaaaactttcctttttatatacatctttatatgtgtcrtatttatttattagtaagagg

SEQ ID NO: 209152 - DNA, 503 bp, Homo sapiens
tagcatgcactttctccattttgaggcccataaaaaccttgggctcagccacatgtcaggactacctgcctgcaggtaggagctacccacttcaggtctcctctccaatgagagctgattaaaactcaataaaactttctccrccttgctcaccctcctgttttccgtgtaacctcattcttcctggagactggataagaactcaggacctgtcgaatggcaggcataaaaagtgctataacacattcctggccagctctctgagctatgagtgggagcaaaaggagctgtaacacattcctggccagctcaccaagctgtgacatgctcccattcaccagactgcgggagtgaagagcagcaaccctctgggaacccagaccttgggattcccccagccagagctgtgacattatagctatcccaccctctgccagcattgggcagcattgggaatgtcagcattcccatgtgataggaagcagctgcagtgctagcccagc

SEQ ID NO: 209153 - DNA, 569 bp, Homo sapiens
actagaaaaaaatttacaacacataaacttgataaggaaagcatatacattttttagtttaaaagttcaataattagaagacaattttttaaatggtgaacatttttgaacagatacttctaaaaaagaaatttataaatggccaataagcacatagaaatgctcaatatcattaatcatcaaggaaatacatttaaaatactttgagatatcgctacacaatcactagaataattaaatactgacaacatcaagtgttggtgaggatttgtagcaactggaattctcatacatttctgataggattgttaaattgtacaaccatttgttgtacaatttatagaaagcagtttgacagttttttatatagttaaaacacacctatcataaaacaattccatgaatttgcccaagagaaatgaaaayatatgtccatacaaagactttcactaaaatgctcatgtaagctctattaatgatatccccaaactgaaaaaaacccagacagtcatcaagagttgaactgatgactaaattatggtgtatcttccaagggaatactactgttt

SEQ ID NO: 209154 - DNA, 551 bp, Homo sapiens
ttgtactcatggaattcatatcccagatcagccattttcaattggtgatacattgggaaatcacttaagctctttgaacttcactttccttatttatgagaattatacctattcctgaggtttgttgttctaaaggtatgatgttagacacattgacaaattaggacgcttggcttaaaaaaaaatgctcaaaatatttttaaaaagagtaaatatctccagtgagcttgtgtctcatggccctctgactttgtgtaatttggacactgtcattaagttaccagaattgcagagctcctgtgctgggagtgcatacagatcagcatccacatctctatttctctccartacaccagggcatctttcgttaactaccaatcctatcacactagtaatgaacaacctaaccttgaatactcctctcaatactgaacccccacctacatccctccctctcgtacccagatcatgcatatagttcacattagatattacttatatctaatttctgtgacatgcgtatagttcacattagatattacttatctcca

SEQ ID NO: 209155 - DNA, 611 bp, Homo sapiens
ttggaaacaaaaggagatcctattcttcagtagagcccatggacatttagaaacaaggattagtctgggcacagtggctcatgtctgtaataccagcagttttggaggccaagacgtgaggatctcttgatcccaggagtttcagaccagcctgagcaacacagtaagccctcatctctacaggaaatcaaaaaattaggcaggcgtggtggtttgctcctgtagtcccagctgctggggaggttgagctggatcaattgagcttggaaggttgaggcttcagtgagccatgaccatgatcatgccattgcactccagmctgtgtgacagaatgagaccctgtctcaaaaaaaaaaaaaaaaaaaaaagtaaaagaaagaaagaagaaaagatttcctcttccatgaccttttaaaatttatctctgtttcaataataaatactcataataacaaaaacttgaccttttattatatagttgtgacttttccatttcatgggttaatgtttattcactttccaacagtgtggaaaaattttaaacccagttagttcctgaaaccagtggttgccaataactactgagatgaatttagataaagttagaggga

SEQ ID NO: 209156 - DNA, 664 bp, Homo sapiens
cctggatacaaattctctgacagatgtgcaatttgcaaatgttttctatcaattattgtcttatcttttcagtttcttaacagtgtcttttgcagagctaaagcttatatttcggcaatgtccaattaacttgtttttattctatggattatgctcttagtgctatatctaataatttttgcctaaactcaggtgatgcgtattttctygtgtgtattattctaaaagtttaatagttgacattttacatttagatctgggattcatttttaattaaattgtgtacgaggtattagatttagttcaaaatactttttttggcatatgaatgttcaattatcttatcaatctttattgagaagattaggggctttctccattgaattgcctttgatcttgtccaaaataaactgaaatttttatgtgcttttacttcagactttgtgtattagttcattttcatactgctgtaaagaactgcccaagactgggtaatttatgaaggaaagtggtttaattgattcacagttgagtgtggctgggaaggcctgaggaaacttacaatcatggcagaaggtgaagaagaaacaaggcatctttttcacaaggtgacaggaaggagaagtgcagagtgaatgaggaatagccctttattaaaaccatc

SEQ ID NO: 209157 - DNA, 491 bp, Homo sapiens
gttttaaatttcactttgtaactgttcattgttagtatatacatttttaagaattgaccttatagtctatgctcttacaaaatttatttattaagtataattgttcttatatatttctttggattggctatgtccaaaatcatgtcatctgtgaatagggattattttatctcttcttttctaatctgtgtactttttaatggctttgttttcgttgccttattgcactggctaagacttccaatattgtgttcagtacttgtggtgagacacccttcccttattctcaattttaggagtgaagcattaactctttcactattaaatgtgatagcagctgtmgatttgttagagatactccttatcatgttgaggaagatactttctattcctgatctgctcagagttttaatcatgaatggatgttgagttttgtcaactgctttttctgaaataattgagataatcatgtagtttttcttctttaatgt

SEQ ID NO: 209158 - DNA, 477 bp, Homo sapiens
ttatttatgtaaatattgtacttactgagtaaatttttctaaaaacatggaatccttggctagaagaaaggcttgggaaattaatatttagctrtacagatagtgtgagagcaccagaggaatttacctaactctggagctatgtgctgacatttcaaagaaaaaggaggcctggagacttatagacatctctatgctgtaagatatggagatactcaggcttatatggccactggagagatgcattcacatgttgtatgcacaattgttctttcctttttattgctgagtaatgcttccttgtttagataaaccacagtttgtttatcctttcagcagtgatggacatgtaatttatttcctggctgggattacattgaataaatctttcttcttcaaagtgaattactctgccttttgttgaaatgtgactcatcctgttttatctttaggcatggtcatcctgcagcaattttt

SEQ ID NO: 209159 - DNA, 588 bp, Homo sapiens
tatgtaaatattgtacttactgagtaaatttttctaaaaacatggaatccttggctagaagaaaggcttgggaaattaatatttagctatacagatagtgtgagagcaccagaggaatttacctaactctggagctatgtgctgacatttcaaagaaaaaggaggcctggagacttatagacatctctatgctgtaagatatggagatactcaggcttatatggccactggagagatgcattcacatgttgtatgcacaattgttctttcctttttattgctgagtaatgcttccttgtttagataaaccacagtttgtttatcctttcagcagtgatggacatgtaatttatttcctggctgggattacattgaataaatctttcttcttcaaagtgaattactctgccttttgttgaaatgtgactcatcctgttttatctttaggcatggtcatcctgcagcaatttttagagaaattatcattttcattctagagtagtttctcccgccctgatgtgttcattaaatgaacgccctgatggtgtacattaaaatgtgamcatctcttcattctatttcaaggtc

SEQ ID NO: 209160 - DNA, 575 bp, Homo sapiens
aagctgagggatgaatagttctagataagtgagataattagaacaattagaaacaaatgcagaataattgcatatttcttttagctattcatacagtgaaagttctggggcaagaactatgctttacatgtgctagcttcagcattgggtgcactattggcactaaaaaacaaaaagaggttgcaagtaaattttgctattatttccaaggaaaattcacttggaaaagggcattgcacttcacatagcttaataacggattataatttctraaacattcaaaagctaatttataaatctttaatttatcccaataaaacaaaaaaaaactattgttctgaatcaagttgtttatgtgatctatgtgatctagattttcagcagactttttacatgtgatgcatcacacaaataggaaaataaatgaaggtaaaatattgtatgtgtgtatatgtctgtctatgtatcagtaatttatatatatagtttatataacacattcttccaaaatgatttcaaatggattactaaaaaaagttataagtagaattcaataaaaaaaacttgactaaact

SEQ ID NO: 209161 - DNA, 575 bp, Homo sapiens
aagctgagggatgaatagttctagataagtgagataattagaacaattagaaacaaatgcagaataattgcatatttcttttagctattcatacagtgaaagttctggggcaagaactatgctttacatgtgctagcttcagcattgggtgcactattggcactaaaaaacaaaaagaggttgcaagtaaattttgctattatttccaaggaaaattcacttggaaaagggcattgcacttcacatagcttaataacggattataatttctgaaacattcaaaagctaatttataaatctttaatttatcccaataaaacaaaaaaaaactattgttctgaatcaagttgtttatgtgatctatgtgatctagattttcrgcagactttttacatgtgatgcatcacacaaataggaaaataaatgaaggtaaaatattgtatgtgtgtatatgtctgtctatgtatcagtaatttatatatatagtttatataacacattcttccaaaatgatttcaaatggattactaaaaaaagttataagtagaattcaataaaaaaaacttgactaaact

SEQ ID NO: 209162 - DNA, 611 bp, Homo sapiens
aacataagcttcatcaagttcaagacacttttataagcaataataccgaccccacaaaaactaaggtccatgggaatttaaccatgtcaaaacggtcttttttacattattagctgaagaaaaatgggtgccctttcaagttttttaaaaatcaggaaagaaaaagaagaagttagtggcagccaaatcggggctaaaaggtggatgcctaataatttcccaytgaaactctggcaaaacttttttttttttttgagacagaatctcactcttccaggctggagtgcagtggcaccatctcagctcactgcaacctccaccacgtccctcgttcaagcgattctcctgcctcagcctcccaagtagctgggactacaggcacctgccaccacacccagctaattttttgtagttttagtcaagatggggtttcaccatgttagccaggatggtctcaatctcctgacctcacgatccacccgcctcagcctcccaaagtgctgggattacaggcgtgagccaccgcgcccggccaaaattgtcttttttttttttttttttatgagagaaatgaggaggaacattgttgtggtggagaagaattctctggt

SEQ ID NO: 209163 - DNA, 411 bp, Homo sapiens
gtagtgggtggtgggaggagctcttcccagttcacagctgtggtccccctacctaccctgtcattctggctttcagctgtagcacmgcgtgatgtggcttgctcaggcagggaaggggcccacgtaggccctggaagtgggctgtgcctattttggtaggtcattctggggtcacagtatcctggcattgttcagaaggggcacggcttctgggtgggcctgtcactcagcttgatggggacggaggcatgtgctgggggcgcccagagcagtggcctctaaatcaagggcccagggcaggggcttatcttgcccaggtctaaaggtgatgttgctttagcctacatctatttgaggacaggccttggcagacagcaggagtcattctccaactgcgttatatttgaattc

SEQ ID NO: 209164 - DNA, 411 bp, Homo sapiens
gtagtgggtggtgggaggagctcttcccagttcacagctgtggtccccctacctaccctgtcattctggctttcagctgtagcaccgcrtgatgtggcttgctcaggcagggaaggggcccacgtaggccctggaagtgggctgtgcctattttggtaggtcattctggggtcacagtatcctggcattgttcagaaggggcacggcttctgggtgggcctgtcactcagcttgatggggacggaggcatgtgctgggggcgcccagagcagtggcctctaaatcaagggcccagggcaggggcttatcttgcccaggtctaaaggtgatgttgctttagcctacatctatttgaggacaggccttggcagacagcaggagtcattctccaactgcgttatatttgaattc

SEQ ID NO: 209165 - DNA, 411 bp, Homo sapiens
gtagtgggtggtgggaggagctcttcccagttcacagctgtggtccccctacctaccctgtcattctggctttcagctgtagcaccgcgtgatgtggcttgctcaggcagggaaggggcccacgtaggccctggaagtgggctgtgcctattttggtaggtcattctggggtcacagtatcctggcattgttcagaaggggcacggcttctgggtgggcctgtcactcagcttgatggggacggaggcatgtgctgggggygcccagagcagtggcctctaaatcaagggcccagggcaggggcttatcttgcccaggtctaaaggtgatgttgctttagcctacatctatttgaggacaggccttggcagacagcaggagtcattctccaactgcgttatatttgaattc

SEQ ID NO: 209166 - DNA, 411 bp, Homo sapiens
gtagtgggtggtgggaggagctcttcccagttcacagctgtggtccccctacctaccctgtcattctggctttcagctgtagcaccgcgtgatgtggcttgctcaggcagggaaggggcccacgtaggccctggaagtgggctgtgcctattttggtaggtcattctggggtcacagtatcctggcattgttcagaaggggcacggcttctgggtgggcctgtcactcagcttgatggggacggaggcatgtgctgggggcgcccagagcagtggcctctaaatcaagggcccagggcaggggcttatcttgcccaggtctaaaggtgatgttgctttagcctacatctatttgaggacaggccttggcagasagcaggagtcattctccaactgcgttatatttgaattc

SEQ ID NO: 209167 - DNA, 599 bp, Homo sapiens
tgatgatgttggggacattgctgaaggaaaggcagctcagtcactacccagttcttggtaggctccatcccttttgcttctgagtagaagagagttccaggaaagggtgagacactttcctttttagtgaaaacccaaagacttgaacttgcctcatctctgggagaggaaaacagatattctgtaaggaggtaggkgaggaaagattgcagattctgatacacattcctacttacctcttattatctcattattcccatttctaataactatgattctgatcatgaaatgtgtcttctttgctcattccttaaacaaaggcattaatgtctttatctcagcctttcttatttgctgtacaccttcaaatgctagcaattttggctacacatgaaagttttgaaaagctcagaagaacaatgagcaataatgctaatctttagcagtaattatacattaataataattacaacacaatcaccctataaaacagggtctcacaatgatttttaagtcacctactgttgtctcatattttcttggtcaatacttagcaatatcactgttatatcagaacaacttattgccctaatagcaaa

SEQ ID NO: 209168 - DNA, 494 bp, Homo sapiens
attgggggccccagagaagatggagcaagatggccaaataaaagcccccagcaatcatgtctyctgcaggaacacaaaattgaacaactatccattctcacaaaagcacctttataagaactaaaaatcaagtaaacaatcacggttcctcattctaacacatactaaggaaagagacactggagagggtaggaaagatagtcttgaattgctacccctttcctagcccctggtggtagctagtagctgcacagcacagagacagaatacgtgtaattgggaaagggagagcgcggtgattgtggaattttgcgttggaactcagtgttgccctgtcacagcagaaagcaatatgaagcagaattcagccaatcctcacagagggagcatttagaccagccctagcaaaaggcaaatcatttgtcccagcagtgggaacctgaattccagcaagcagcaccaccatcagctaaagaacttcgggatcctaaata

SEQ ID NO: 209169 - DNA, 524 bp, Homo sapiens
gagcagaagagagaaagagagagagagagagaatgaatggggaagttccacacttttaaaccatcagatctcatgagaactcccttactatcatgagaacagaaaagaagaaatccacccctatgatccaatctcctcccaccaggcccctctcctgacatgtggggattacaattcaacatgagatttggatggggacacagaaccaaaccatatccttctgctcctggccccttccaaatatcatttccatcttacattttgaaaccaatcatgccttctcaacagtcccccaaagtcttaactcattctggaattaactcaaaagtccaagtccaaagtttcatctgagacatggcaagtccctcccacctatgagcctggaagataaaaaacaagttagctacttccaagatacattagggaggtatygggtaaatgttcctattccaaaagggataaattgaccattttataatgggacaaattgaccatggggctacagaccccatgcaagtccaaaa

SEQ ID NO: 209170 - DNA, 278 bp, Homo sapiens
tcctatttatttttatttttgttgcatttgctttttgggtcttagccataaattatttgcctgggccaatatccagagagttttttctaggttatcttttagaatttttatagtttcagatgttagatttcagcctttgatccagttkgagttgacttttgtataaggtgagagatagggattcagtttcattcttctacatgtgggtatccaattttccccaaaccattaataggtttaatagggtgaagaagggaattttcttaacctgatacagt

SEQ ID NO: 209171 - DNA, 213 bp, Homo sapiens
aattaaaaccaatcttccctttcttctgcaacctctgatgcagagaccagccttctaactccaaagtctgtaataaattttctctccaggtctcctttktttggacatctggacatgcccaaagtcatatgcgcaagtatataagtagggaaaagggatttgccaaatcctctaggcagcacccaaaaaatatttactggtaagatatgtaaa

SEQ ID NO: 209172 - DNA, 593 bp, Homo sapiens
gagatcttgaaaataccagccgttgagaactcccagtggggaagaaagatttttttctccctactcaaattcagtcttcttgtaagtttctaatcatgtgtggccatttccagtgtcatagcygactttctttggtgttagcaaaatcaggcaggaaaataaaaaaaaataaaataaggaaaataagaaccaaataccctatcagagatgttgggttacttgaaacactatagtataaatacagctaaatgccctttagagacaaggatgtgcactctcaccactcttgtttaacttattgctggaagctcttaccagagaaatcaggcaagagaaggaaataaaaggcatctacgttagagaagaggaagcgaaaattttcttttttgcagatgacatgatcttatatatagaaaaacttaagtactccaccaaaaaggtcttagaactaataaatttagcagagtttcaggatacaaaatcagcataaaaaatcagtagcatttttacacaccaataacaaactagctgaaaaagaaatcaagaaagcaatcccatttacgatatctacaaaaaaacctctcagaataaat

SEQ ID NO: 209173 - DNA, 440 bp, Homo sapiens
catttgaacgctcagttgagacaggtttgttatgtaaagagaaaagacctagtgggagaaatctgggttcccaaaacatgggacaaggatatctagatggaaggcctttgtaaatatttattcagcaatcaaggttgaactgtataggattgcagatacggcccacacattctcaaagctagcatttccactgtgctgggaaatgctgaagaaatcgttcctcaacaaggcaacaggtggctcaggagctgccccccacctccaacctccattccagcttgccaggcaaacaattaggattaaattccatgaaaagtcctgctaaggacttgctgggtttgaytgggatgagggggaacataaaggagaaactatacacttcaaaagttgcaaaaaaaaattatttatatagccatatgcactggtaggcaccagaagag

SEQ ID NO: 209174 - DNA, 533 bp, Homo sapiens
ggtttgttatgtaaagagaaaagacctagtgggagaaatctgggttcccaaaacatgggacaaggatatctagatggaaggcctttgtaaatatttattcagcaatcaaggttgaactgtataggattgcagatacggcccacacattctcaaagctagcatttccactgtgctgggaaatgctgaagaaatcgttcctcaacaaggcaacaggtggctcaggagctgccccccacctccaacctccattccagcttgccaggcaaacaattaggattaaattccatgaaaagtcctgctaaggacttgctgggtttgattgggatgagggggaacataaaggagaaactatacacttcaaaagttgcaaaaaaaaattatttatatagccatatgcactggtaggcaccagaagagtgctcctgggattggattttagatgtacttgattaagaggcctgaacataagactggataaacaggaattcattgacttgagagcattttcttaaracatatgacccaaaaggata

SEQ ID NO: 209175 - DNA, 537 bp, Homo sapiens
gaacttcatgactcagtgaaccaatactttccaaatgactaatgaatgttgctacaaaggtatgcatagataaaagatccaaaatgcaaaataaactcatagatttggatgtagcacagtataaacagtttatcaatatggtttcaggttctactttgcaactaacctctaagaaactactggcacctgttgaattttagcatgatattaaagaaataatccacaattacctaraaaggatattaacttactcttccctgttctgactgtgtatctttgtgaagtcaccttttcttcatattctgcaaccaagtcaatatattacaaaagagtgaatgcagaagcaaatacgagaatccagctatcttctattaagctacaggttaatgagatttgcaaaaataaaaagcaatttcactattcctactaaactgtttccttttctagaaatatatttttataaatgtatattatgttaacagagtgtagttttattattttaaaatgaattaataaatatttttaaatttcttaaat

SEQ ID NO: 209176 - DNA, 537 bp, Homo sapiens
gaacttcatgactcagtgaaccaatactttccaaatgactaatgaatgttgctacaaaggtatgcatagataaaagatccaaaatgcaaaataaactcatagatttggatgtagcacagtataaacagtttatcaatatggtttcaggttctactttgcaactaacctctaagaaactactggcacctgttgaattttagcatgatattaaagaaataatccacaattacctaaaaaggatattaacttactcttccctgttctgactgtgtatctttgtgaagtcaccttttcttcatattctgcaaccaagtcaatatattacaaaagrgtgaatgcagaagcaaatacgagaatccagctatcttctattaagctacaggttaatgagatttgcaaaaataaaaagcaatttcactattcctactaaactgtttccttttctagaaatatatttttataaatgtatattatgttaacagagtgtagttttattattttaaaatgaattaataaatatttttaaatttcttaaat

SEQ ID NO: 209177 - DNA, 537 bp, Homo sapiens
gaacttcatgactcagtgaaccaatactttccaaatgactaatgaatgttgctacaaaggtatgcatagataaaagatccaaaatgcaaaataaactcatagatttggatgtagcacagtataaacagtttatcaatatggtttcaggttctactttgcaactaacctctaagaaactactggcacctgttgaattttagcatgatattaaagaaataatccacaattacctaaaaaggatattaacttactcttccctgttctgactgtgtatctttgtgaagtcaccttttcttcatattctgcaaccaagtcaatatattacaaaagagtgaatgcagaagcaaatacgagaatccagctatcttctattaagctacaggttaatgagatttgcaaaaataaaaagcaatttcactattcctactaaactgtttccttttctagaaatatayttttataaatgtatattatgttaacagagtgtagttttattattttaaaatgaattaataaatatttttaaatttcttaaat

SEQ ID NO: 209178 - DNA, 516 bp, Homo sapiens
tatattccaactccccattgatactgcttctagctaagcttttattttgtcccatatcaatactggggtggtatgctgcctgctccagtttcatcatgttcctcattgggacccctatggctaaggaacttagagttaaaatacttacagccaattaaatgttttaggccagacaagaatggaggtgggcagacacttaataacccaaattgtcccttataatcatatgtgataaaccctgggcctggagaaattgaatagttttaaattctgcaggtaaawtaaagaattaacaacacttcaaacaaaaatatcatatgccttgcctagttttgagaatgacaggaaaggatgctcacaggtagctaaacatttaaattatttactatcaagcacagaataaattatattaattcagatagaggcaaaactattaagtgaatacaagcttgttgtgtttcatgaaagcagtttactttgattgttccctttgcctgggtctaaagatgaggcttt

SEQ ID NO: 209179 - DNA, 659 bp, Homo sapiens
taaccctttcttgtggtaaaagacacagacatccaataagcatccaaagtgattttaaggtttttaaattaaaccagaaattcactttataatgagctttaatctcattatatttacttaataatcattattatgttttaatagtttattgaaatttcttatgaaaactgtgatattagacaaagctagatatcatttaaagtgatttcctggctaatcatttttaaggtctgaacattagataaacacctaaataagaatcaaaattgaacacacaggcattttgytgataactcagatgatctgatattttcattgaaccaacaatcttatattggtctttatataattctgaagacatttctactcttatcaataattttaaaaccagctttatctaccacagatttatgtgaaattgaaaagcatttggacttgcttaatttatgagtactcatttatttataatccaactggatatcatggtaggtgcaacacatagcatgatacatgtaaatacacataaacatatctaaacacatatacacatacataaaaagagccagtaacttttacctcaaaattctagtcataagatggcaatataaattcacccttttgtagaagttagctggatttaaattatttctgacaagatt

SEQ ID NO: 209180 - DNA, 437 bp, Homo sapiens
gtgattccatgagtgagaacgtttcagtgcaccattgctggctctgargtatagatgctcacacacaaaaaccagagagaggtctctggagcttaaagccagctgtcaggcagcaaatgagaacctcactagtgaaaccaaaataaagtggattctgccagcaacgtgaatggcattgggagcagattcttgctagaactgttgattagagcttagccgatggacaccttgattccagcctagtgaaaccagaagcacagtaatgagatgatccagatttcaacctacaaaaccatgaaataagaaatacatgttttaaaaaaactaagttcgtaataatatgttatggcagcaaaggaaacaattgtagcaccctaccagctggctagtagccctagttgtggtcagcctagtagatcttttcttcccttgtccct

SEQ ID NO: 209181 - DNA, 437 bp, Homo sapiens
gtgattccatgagtgagaacgtttcagtgcaccattgctggctctgaggtatagatgctcacacacaaaaaccwgagagaggtctctggagcttaaagccagctgtcaggcagcaaatgagaacctcactagtgaaaccaaaataaagtggattctgccagcaacgtgaatggcattgggagcagattcttgctagaactgttgattagagcttagccgatggacaccttgattccagcctagtgaaaccagaagcacagtaatgagatgatccagatttcaacctacaaaaccatgaaataagaaatacatgttttaaaaaaactaagttcgtaataatatgttatggcagcaaaggaaacaattgtagcaccctaccagctggctagtagccctagttgtggtcagcctagtagatcttttcttcccttgtccct

SEQ ID NO: 209182 - DNA, 598 bp, Homo sapiens
ataatcttttaggattgtaagattaaatgtagtttccatcctttttgcatttttctcaattttcaaatctcctacagtgaggctctgctattaacatcgtgtaaaaaagcattatgaagacaactggaatagaaactccccaaatgttgtggcttggtcttggatggggatgtagagtcaatgtctgtgataggattggggatggcccctggtgaggaccaagctctgtccttctggattccttctggcctggttgcctccatagttgatatagttatgtgtctccacccaaatctcatcttgaattataatccccgtaatctctatgtatcaaaggagagaccaggtggaggtaattgagtcatgggggcagtttctctcatgctgttctcctgatagtgagtgagttcccacggcatccgatggttttttaaggggcactttccccttctctcagcacttctccttcctgccaccttgtgaagaaggtgtcttgctccccctttgcattctgccatgattgtaagtttcctgaggtctccccccgaygtgaagaactgtgagtcaattaaacctttttcctttaaaaattacccag

SEQ ID NO: 209183 - DNA, 609 bp, Homo sapiens
ataatatgaacataaggatgtttatggaacctccttagaaaagaaccttatggaacttctaaacctaaaagttatccaaaataaaaaacttactaagtgatcataattcaagattaaatagagtggattacaatatcaaagaatttgaagtcaggcaatagaaattatagaaatcaaagcacagatacagatataaaaaataycaaaaaagttttaataagctcagtgccctgtgggacaatattatatacatctattttgtgtacagaagtagaagagaaaaatattttcagaaataatgacacaaattttcaaaatttgatgagaatcataaaattgtcttttagatatctgaagatataggatggatcccaactcaaaattttgtttaaatgttaagactgatgatgcctcacacatactactatgagattgtgaaaagatttattactcacagaacaaggcacctgggaagaggaaggtaggtttccaaagctggtctggaaatggtttgggagaacagggaagaaaaggaagctgacttggggttttaattgtgtttaagaaatgaggagaggtgaaggttcaccaaagaagggaacactgggc

SEQ ID NO: 209184 - DNA, 587 bp, Homo sapiens
agaagcatttgtatttaaattaggagcaagagagatgttcctggtatcataattgtcattcagtaatctaatccaatgcaataaaacaagaaaaaaaaactactagaagagacagtagaataataatttacaggtamtttttttacatagaaaacccaagatgatgaacaaactgttagaactcaaaaagatagtttagtaagtatattggattataatcatatctaaaacccaatagtgctttaattcacaattcataactaattagaatgtataataaagtaaaagtatgtcttacaatatcaattaatattcatgaaaaataaatgtaagaaaaatgtgtgttgactttatgaaaaaactacaaaatgctattgaaaaagacaaaagatctgaataaacagtgatataccaagagtcaagaaaatgtcaattcttttccaaattcgctgtaaacccaatggcattccaataatcatcacaagagttttcatggaattaaaaaaaaatatgtaacagaatctaaaattcatagatgaaactgaaggtacagattagcaaaaaaagctcaggaattaaaaaaagca

SEQ ID NO: 209185 - DNA, 587 bp, Homo sapiens
agaagcatttgtatttaaattaggagcaagagagatgttcctggtatcataattgtcattcagtaatctaatccaatgcaataaaacaagaaaaaaaaactactagaagagacagtagaataataatttacaggtaatttttttacatagaaaacccaagatgatgaacaaactgttagaactcaaaaagatagtttagtaagtatattggattataatcatatctaaaacccaatagtgctttaattcacaattcataactaattagaatgtataataaagtaaaagtatgtcttacaatatcaattaatattcatgaaaaataaatgtaagaaaaatgtgtgttgactttatgaaaaaactacaaaatgctattgaaaaagacaaaagatctgaataaacagtgatataccaagagtcaagaaaatgtcaattcttttccaaattcrctgtaaacccaatggcattccaataatcatcacaagagttttcatggaattaaaaaaaaatatgtaacagaatctaaaattcatagatgaaactgaaggtacagattagcaaaaaaagctcaggaattaaaaaaagca

SEQ ID NO: 209186 - DNA, 468 bp, Homo sapiens
gtgtgctgattaatgaggcatgcaccactaagtccaggaccagtctcacaaatggtccagcaagactgagagttcctggagatcaattccccagctctaacagctgccatagtcttcgggttccaaactcttcaaaatccttgggtgattctgaaggtggaagggaggaaagtagacttcyttctcaaaactggagtgggtgtctttgttctgcttttcaatctaggctttctctcctcccataatgtgacaatgatggatgtgtcagcaaaagtcctttatggaatattttctcagcccattagttatagttgaaacgaccttctatttagccataccaatttaataattcctgaaagtcccactttattactaggtagagatattttggcctatatagaagcctccatatgaatggctgcaggataaactctttgtctccactaagtggaaactaatattaactaa

SEQ ID NO: 209187 - DNA, 468 bp, Homo sapiens
gtgtgctgattaatgaggcatgcaccactaagtccaggaccagtctcacaaatggtccagcaagactgagagttcctggagatcaattccccagctctaacagctgccatagtcttcgggttccaaactcttcaaaatccttgggtgattctgaaggtggaagggaggaaagtagacttccttctcaaaactggagtgggtgtctttgttctgcttttcaatctaggctttctctcctcccataatgtgacaatgatggatgtgtcagcaaaagtcctttatggaatattttctcagcccattagttatagttgaaacgaccttctatttagccataccaatttaataattcytgaaagtcccactttattactaggtagagatattttggcctatatagaagcctccatatgaatggctgcaggataaactctttgtctccactaagtggaaactaatattaactaa

SEQ ID NO: 209188 - DNA, 551 bp, Homo sapiens
gtatcacaccttccttatttgcttttggatttggggagttttcaagcactctgattccttaccccatgttgtttgtctttcctgacagctatgactagttcaacctcacctatttttaatattgccctatcccaaagacaaatcttaagtttaacaggaatgattttaagaactcagggtagttggtaagcataaaataatagtatgacttactgagcaagaattatgctaagggctttgtgtattctcagttaatcctaacrtcacccctacaaattgtatatcattcatccaagtgcacacaagaatggataattctttaactattcataatgtgcatttgagaacattgaaaagacattaaggcacaaccagtctcaagagacaaatttagtatttgcaataatccaggagatgaagtattttaagacaatgatgaaaacagggatatacttcaaataaaaacatacgaggatggaagggtatggtataatctgtgatatatatgtatatatctttacagatacacatacatactcacatatatattt

SEQ ID NO: 209189 - DNA, 625 bp, Homo sapiens
tcatatatactatatgaatattagctttccttctgtgtgtccttctaaggaaaagcagatgaacgttcctaatatttattggcagatgtcaggtagcaaaatgtgagaatgactaagaatgacatcttagttgtccacaagtgccatagaaattagcattcatcacaccaacrtcttccttctatatgcatattaattttctgtgatctttctgcatttgggactattttagaatagttaatagattctcaactcatgtgaccagtttttgtgaggaaatgtataaagcaaaggttgtcaggagtcatgaaatagcaatttgaggataattgctactgattcagcatgattgaaatccaaagataaaatttggtagaggaagattgcaatatgttcactttttcatgctctagggcctcccattaaacaacggaacagttgctcaccttgggtaggcacattttttttttctgtgtttttacaagctactaagaagatggtctctttgagaacagtaagtagaactgcactattacgagaaaatttcctcaaaattatgaaatgcccattttaccaaagtaggagggaactcaggaaaatggggacgccaaatgggtggaagtac

SEQ ID NO: 209190 - DNA, 507 bp, Homo sapiens
caaaacatcatgttaaacactatgaatagacctaagttttgttcattaaaatataatgaaaaaaaactaaaaggttgaggtattcagctgagcctgaagatagtgagatagagatgagtcttggttgtattcactgtacacaagcagttggrtgtgtagactgattgataagttgagaaagttaagaaaaagaaatgtattttagataattttcagatttggaatttgatggattggaatggtttcatttacctatataaataacagaagactgggctatgttttgcctgcatttggagccagatgaaaagtgataaaaggttcaggtttttgcctgatgaatgtgagaggcccatggagacgtggatgtaaatgtttgctggaaaacgtgatagatgtttctggagttctggagagagttcatcttgagctatacatggaggagtcatcacgtttatgtattggagacattattgttgttgttgcttttgttgttattgccattgt

SEQ ID NO: 209191 - DNA, 484 bp, Homo sapiens
ttccatcagtagtgtataaggatttctctttcttcagatgccccccagctttcattatggcctgtcttttcgataaaagtttgtttaactggggtaggatgatatctcattgtacagaaatttaacttaattaaaatttatttaaggttgaataagtagatttttcaagtcatttcaatgaaactatagtgatatttggattcctaatttgataattgaaatacttatttagatgtaccaagaaccccaacatttttggcttgtcaatatgttttatgatttttattcttttgtctaaattgccaagggaatattctctatcttctttttcagtttggatataaaagatrtgttcttaatcaattgatgttcttctttttatttctgaatatacccatggcattaaaacgctatcacattataggatgggtcagcccacattttggtggcagcagaaggaaggttgatagctagtgagcaggga

SEQ ID NO: 209192 - DNA, 666 bp, Homo sapiens
gccatgccattatttacaccttgataattacaaagttgcagtgccccttccccatgtctttgtttgctttgggatgtcaacttaaaatttctcacaaatgagtcagtcaagaaaaataaaaagcacagttatatgagttgtgtgttgacacactgaaaaagtaactatgtttaagcaatgacactgtcgcaaaaaaagtactgcctgaaaataacattattgaaagctttaaaaaaaaggtggygactagattttaccaagttgccagttggtaataagctatatatatatatgtataaaatacacttatatgttaactttgtatgtggatatagatatagttatatattcctgttttttgtgtgaacaggtatatatgggatttatcaaattgatatttgaatgctactaacattttggtgcctaacaaatttatattatctatttgggcaactggaaatgaacctgactgccagactctaactgaataaaaacattagcatgccagttttgtatttaatgttagacaacatttcatgcattgatgagtcctgttaaacactgagcattctttatatccattgggaactttaaaatttccataagaaagaacctgcctgcttatgaaatcaaatgtttaaagtcacatacaaaagcctgaagacc

SEQ ID NO: 209193 - DNA, 596 bp, Homo sapiens
agaagcttggaatatctgacctcaacatttcttccccagagactgttaagaattaaaattctatgattctgtcattttagccaaatcaaaggaaagagaactggaatagaacaccagacctcagttcctgccactaagctggcttcaaacaaatcatgtcagaaaaagaaaaacaaaaaaaaagaaaaaaaaaaaggtatccttcttgctttgaatagctaaatagaaaataacctgcccttttttttttgagacagagtcttgctctgtcgcccaggctggagtgcagtggcacgatctaacctcactgcaacttctccctctcargtttgggcaatttctcttgcctcagcctcctgaggagctggggctacaggcacgtgccaccatgcctggctttttttttttttttgtatttttagtagagatggggtttgaccatgttgccaggcttgtcttgaactcccagcctcatgtgatccacctgcttcagcctcccaaagtgttgggattacaggcgtgagccaccgcacctggcctagaaaataacctgcctttgatgagagactggtcctcaatcctccgacttgacccag

SEQ ID NO: 209194 - DNA, 569 bp, Homo sapiens
agcacattccagtctataatttcaactaagagcaaaatgaacaagagccccatagactcaatccttaccctttagaagctggtaattggaaaaagtggccataatgaagagcccaaaagaggaaaatgtaattaaccaggagctgtgtatagtgtttaatttgattttcttagcttgttagctcagctggttggagtgtggtgttaataacgttaagattgcaagttcaattgccatatggrccagttagtttcactcaattctatggctacggaccaaatgagttctattggtcgcaagaggaaatagacaagagagggtggattagagaaaatctattaataccactgtcaaacaaactcaaaacactactgtcaagggcagggctgcagtgaagactgcattttaattatttaaaagtgggaaaatgtaaaattctgagaggtgaaaattgagacaaaaatttagactttctgaacactataattagtgtcctttatcaaatcaggagaagtttgcctgataaatgtatttcagttgcttcttaactgagttctcagacatctaaa

SEQ ID NO: 209195 - DNA, 578 bp, Homo sapiens
ggacctctggtgctgagctgctggcaggagagctaaaatcccgcatattgggagagctttacaaaaggcattttccccctcacattaactttagaaatgtgataagggaagcattagtatctatatctaaaagagcaaggtgaaaagatcagctcaagttcttgctgctggtttgacactgagtcaaaatgagcataggtrtcctgcactagggctgcttatgttggagaaatcacatccaatgggaggaaaggacccatcatccctgaagtagcccaaacataacttccccagatggagcagtggtttggaagcattcctgctgtttttaattattagatttgaaaagcacatttgtcccaaatttgctattaacttttaatttaagcattttatctttttccccttacaatgaaggtcaaattcaaactccacaaaggtgaattaagcacttcttgtttcttaggcacttttacataccatatgccagttaaccctcttaataattccatggtaccagaaccatgaaatggagacctaaaggttgagttcctttttgtttctaataaacctaggtc

SEQ ID NO: 209196 - DNA, 358 bp, Homo sapiens
agaaactgaatcatgatcacagagaaattaggtagcttgcataaagtccccacagctagtaatagtagaacsagtattcaaacccaggtttaggaacaaagcctttcataacgaccctttactacttttctatacagaaaatgtggtaaacatataccaacaaaatagccccaaattgctttttgtattccttttttcctgtactagttttcccttacttcagtatttcatagtgcagctgatgaaattatcattctaaaacacagatctaaacacaagacttaattgtgtaaaagtaatttaatggcttttataactaactccttaatatgtaaacagttcctttcacaatctgacc

SEQ ID NO: 209197 - DNA, 485 bp, Homo sapiens
taggggtccagttttaatctttggcatatgtagctagccagttatcctagcaccctttattgaatggagagttctttcttcattgcttgacattgtctacttagtcaaagttcatagggttgtaagcgtgcagctttatttctgctcttctgtcatcaagagctctaccagtgatcttcatcaggaacacttggttcagtgttttagaatcacttgacagtgattctaaaataacacaagataatgctaagctacagaaaccacatgtatatatacattgtgacgtaaattacacaccttacctttattgccraagtagtttgcttcagttatctattttaggtaatctgagcaaaattacaatgtgaaatgtaaaataacaaatagaaaaaatagctttgcagcacttaaattaatgagcattatgaaaataaataattgtattgagtgatataacagtctcagacattttatatttctgattc

SEQ ID NO: 209198 - DNA, 399 bp, Homo sapiens
tattttgcaatgatcaaattagaataatcagcatatccatcatcttaaagagttataatttctttgtgattagaacacacaaaaccctctcttttagctatttttttatatatcatacctaatttttggttgtagttacactactgtgccataggacactagaaattatttttcctttctgattgtaactttgtatccattgaccatcctcttttcatcttcgtctccctcctactttccccagtctctgataaccactgatttattcactacttctrtgagacaattttttttagatttcacatgagaacatactccgcttgtgtttctgtgtctggcttatctcacttaacatcctcaagattcatcgatgttattgcaaatgacaggattacagtc

SEQ ID NO: 209199 - DNA, 568 bp, Homo sapiens
atatttaatgtctacatctcagtgagtttgaggaaatgtatacacctttaaaactatcaccaccatcaagatcataaacatatctctcaccttccaaagtcccctccctcctcctttattattattctgaagcaaaccttttaaattgacatttatctttagtattccatcctatttagctatgtggtattattcactaagcacattcatagcccttctgcctgtccatctaatgagaggcagagtggaataatttggaatcacataayatagggttttcatattcactctgccgcatacttgctttgtgattttgtgcaagtcacttaactctctgatcctcagtttcttcacctatgaagtggagatagtgatggtactttgcaagggttttgtgaggatttaataaatataaagttcttattacaatgctggacatcacagacactcaacagtgtagcttatttttgaaacgatgattattgctctgagcttcctgctttacttccaaaatatctactatggttttgatattttccattagtaatctgtttaaaaccttaattaa

SEQ ID NO: 209200 - DNA, 567 bp, Homo sapiens
gagcaccctcgtgagggtagttagttcagctactttagcacttgtgcccagggagagatgtgctgtgttagtccatttttcatgctgctgataaagacatacccgagactgggaagaaaaagatgtttaattggacttacagttccacatggctggggaggcctcagaatcatggcaggaggtgaaaggcactaattacatggtggcagcaagaaaaatgaggaaaatgaggaaaaatgaggaagaaaagcagaaactcctgataagcccatcagrtcttgtgagacttattcactatcatgagaatagcatgggaaagacaagcccccatgattcagttacctctccctggatccctcccacaacacatgggaattctgggagatacaattcaagttgagagtttggtgaggacacagccaaaccatatcatatgctttcaacaatatcattcagggcaactattgcatatctcactttatgggtccctagtttaataaaagaacttccatccataaagacaatccagtctgggttctctaagggggtttctttgaggtcctccct

SEQ ID NO: 209201 - DNA, 555 bp, Homo sapiens
tggtaatattaatcagaatagggaattaacattaacgaagctgttgtggaagaaaataattagtttgattttagacattttgagtttggtgcactggcacactatcttggggaaatgtaaagcaaatattacagtcttatacttctgcctgctgcgaacataggttctagtggatttattataattattccttaatttattcaaaagattttcttaagcatctactttataccagatactgattggggcctttggtattcagcagtggataatataaagtccttgtcttcattctaataaagaacacattttatcctcttctaggacatgaaaaagataacttcattttacagatttcttctgtgttatgatagcacagtaattgaattgataccttagcattatccagtatcttagccaaaactttactttttaaygtaatttcattttattatattatacaataaaagagctagctgcttaaccttgaaattttcgaaatgaaagagtaatagaaataaggtatagaacagaaactaaaggaaaacagtctta

SEQ ID NO: 209202 - DNA, 418 bp, Homo sapiens
caaagattaggttacttgggaatatattctgcttaaggaatcatcagtatattcaaatgagaatcgcaggataagattcacaatttgggagtaataattaaatcagaattaaagattagagtatagaatttgaaatattgagaatagaaaagaattcaggataaakgagataataaagaagttcaatgagcaaagaaaagagaatgaatgacatagtctgggaattgcactcattgggccagcagaagaaagaagagagactctggagaatttcagaaaagaagggaagaaaggcatactagaataatatacaggcacagaagtaaagacaggaagaatgctaatcaggatcacgagctgagtaatcaaggagttatgttaaggatcatgaaaagctggtaactcgaaagtcattgct

SEQ ID NO: 209203 - DNA, 250 bp, Homo sapiens
accccccaaaggcctcacttccaaatcccattatgtagggtattaaatcttcaaaatttgaattttaccggtacacattcagtccgtaggacattgtgagagttttgtcaatagtaacttgaatttttctatgcgcactataccacrgaccagctgcatcaatgtcacctgggagcctgatacaaatgtggaaattcagacccgtcttatacatatgtagtcaggatctgcattttagcaagatcccctc

SEQ ID NO: 209204 - DNA, 608 bp, Homo sapiens
ttcaatgtcatcttattactctggttagcagtttcctcttaatgtattggtctgagtggattttttcccttttttctgagttcagttaagcatgaattgggatttcccccccagtatttctatgtattttgagtgaaagggtattttagaatttgtaacattccctaggtcctcatgccatatatatatatatgcatatctatttcctccttctttcaaatttcctctttcaaatactcaaatttccactacaagatgctttatatttagactayactttttctagttttaaacctttttttcctcaagaattaatgctcttttaatgaaggaagaaataagtgcatttttattatttactagaataattcaacttcttatttatattttggttaagtatttactttttaggccagctctatagcaataactttcagaatgattgctttctaaattttgtcttatgacgttaatagcctgtctctgggattcaatgttttcctccggaatttagtctgtgttttactaaagtatatccaaatttttttttttttcaaaaaagatgcatggtggagtgtgggggcgactttttgaatggtgttgtaact

SEQ ID NO: 209205 - DNA, 367 bp, Homo sapiens
agcctgtctctgggattcaatgttttcctccggaatttagtctgtgttttactaaagtatatccaaatttttttttttttcaaaaaagatgcatggtggagtgtgggggcgactttttgaatrgtgttgtaactaaaatgccttatttctttctttcacttgaatctaataggacataaagttgtagaaacaaattgttctccttctttgggaacttctagtattcaactttacttacaagctttgtacattttctctgaatatttttagattttaaaaaaaattctttatagtgtgtcatacattaggtatttctagctctgcatctctttcttattactcatcaagtcttttcagtgtgaagatt

SEQ ID NO: 209206 - DNA, 205 bp, Homo sapiens
ctcccggcctgggagcaggctccagcctgctgcggaaggatggacagctgcacagttggccacctcagggacgtggcacacaggggacccaccgctgccactgccactcccacaacccctcctgccamcaccgcccgtgcctcccagccactgccatcactagtaacttctgtgaagacaatgtgcacactagttttaatggcat

SEQ ID NO: 209207 - DNA, 446 bp, Homo sapiens
gaattgaaaatgcctctaaaaagccaaatgaaaacaaaacaacaacaaaaaaaaattgtgatttcaactgtggtggccttgaatttatagataaatttgaaaaattaatttttattataatttaagttttagggtacatgtgcacaatgtgcaggtgtgttacatatgtatacatgtgccatgttggtgtgctgcacccattaactygtcatttaacattaggtatatctcctaatgctatccctcccccctccctccaccacacaacaggccccagtgtgtgatgttccccttcctgtgtccatgtgttctcattgttccattcccacctatttttgcaatctactcatctgacagtcattaaatcttaaagctccagaataacctcctttgattccatatcccacatccaaggcacactgctgcaaggggtgggctccaaagac

SEQ ID NO: 209208 - DNA, 584 bp, Homo sapiens
tttccaagtatgctgtgatctaaccatgtaagcctaaattgtgtcaaaataagttctaaataagagggactgaaattaattaccttgtaaagaaaagtgagaaaagacaaataaaaagcttcatacagcctactgaaataacaaaaggaaaattaggataagaagaaaggatggattttcatggtgccagaaaaagcttcatatggattaagaaggaaattgtagcaaccaacactctggttatgggactcgatgaatcgtctgtgttgtcctctgaaagtcytcctgtctttgtctttcctcacatcatttagccacatgtcctcctctgctccttgccatctggaaaccactctttcttctcatcgtgcttcaggtgtcagtttaaaaaattctccaggaacatcttgccttacctcactcagttttgtttatgccctgccttttatggagagtaatttctgaagaccatttattactattatcattaggttttgagaagttattatctgatatctgcctttctgctcaacaccatattcccagttcttggtttataccttgcaatcagagaccagtatata

SEQ ID NO: 209209 - DNA, 584 bp, Homo sapiens
tttccaagtatgctgtgatctaaccatgtaagcctaaattgtgtcaaaataagttctaaataagagggactgaaattaattaccttgtaaagaaaagtgagaaaagacaaataaaaagcttcatacagcctactgaaataacaaaaggaaaattaggataagaagaaaggatggattttcatggtgccagaaaaagcttcatatggattaagaaggaaattgtagcaaccaacactctggttatgggactcgatgaatcgtctgtgttgtcctctgaaagtcttcctgtctttgtctttcctcacatcatttagccacatgtcctcctctgctccttgccatctggaaaccactctttcttctcatcgtgcttcaggtgtcagtttaaaaaattctccaggaacatcttgccttacctcactcagttttgtttatgccctgccttttatggagagtaatttctgaagaccatttattactattatcattaggttttgagaagttattatctratatctgcctttctgctcaacaccatattcccagttcttggtttataccttgcaatcagagaccagtatata

SEQ ID NO: 209210 - DNA, 563 bp, Homo sapiens
acttccttacactttcctccctgatgccatacaaacacccctatcaaatacaagtgttcagtccaacaaaccaaaatataatttgcrttattctgctcaataactaagttaaacatttcatatataaattggctcaatgaatatagagttatagacctatgaaggcaaaataatagagctttctacaaaaaagttctacttgtaaaattgaactaagacatccagccctcattgttaccctgacattaaacaagttacctacaacacaggaatgatgtggagaaaacacgacttaagagcattcatattctcaatggatatatccacacatcttcacaaatcctcacatttccaaatacctttatagcctattatctattccataaaatacagcaaagtaggatgtcatcaaagcaactccatttgtaaagatgatgaataaaaaagagcagtgccacatagaagaatgacagtcagccaggacatgaatctggctagactaactatcataacgcacaaccctaaatctcagtgatttaatgcaataaatttttatttattga

SEQ ID NO: 209211 - DNA, 618 bp, Homo sapiens
caggtgagatgtctgaaagcctgagttaaaaacctttaccaggaaagagaatagctggtcctgtcagacaagatatttatcaatacaagtgattgctgtgggtttaactcagtgccttcaaaattcatatggtgaagkcttaacctcattccagtacccagtgaccttgtttgaaaatagaatttttgcagatttaattagtcaggttaagatgaggtcatactgaagtcaggtgggtccctaatccaatatgtgcttaggggaaattgggatacagacccacatgcaaagagaataccaagtgacgatgaaggtagaaatctgggtgatgcttctacaagctaaggaatgccaaagattgctagcaaaccaccagaagctgggtgagatgcatagaacagattctgtctcacagccctcagagggtaccaaccctgctaaaccttgatcttggagtttgagcctcaagaactgtgagacagttaagattctgttgtttatgctacccaatttatagtattatggcaatgctagtaaatgaatatggtgctatatgtgtggcttggtagtacataaagcaggtcaatggttctacatctgtatcatggtttcaaatca

SEQ ID NO: 209212 - DNA, 524 bp, Homo sapiens
tggaattcactgtgatcatctgtgctggaagtagggctccttgatagggtcagtgaggagggtcttttaaattaatttcctggtatacagatcaggkaataatataatctcagtgttgaaatggatcttaattgtcacctaattcaaccactcacctgagaatctcactgaagcacctatcttttagacttgcccagtttcctatgtgaaaactaaggacatgcacaaagtcacagaattatcagtgacaatcaggactaaatccagagaaactagtacatttcaatttccttcttttgttcctagataaatccttctgagcttagtttctattatgctatggtcagagaaaagatatttgtgtttattataagctataacagtctatgtgtttttacggtatgttaaatgctataaaataattaagctatgatattgatttataaggcccttcttttgttatcgtaacagtggggtcttaatagaacataggtcatggttgcacataattggatgattatatg

SEQ ID NO: 209213 - DNA, 629 bp, Homo sapiens
cggttcaattcaacagcggctcttaatgaaacactaatctcttcccattgatcacagaagagttattttaatttctgtatctttgacattctgcttttgggtgcaggaaaatccttgcccgaaatatatgctatagggaggtagtgtggagtgrggttcagggagagggttctggagtcagcttgccagggagaagccaagtccaactctcgcgttgagttgcttactaactggacatcctcaggcaagtcacttaaacccacaacagccactgttgttcactagtcggcttgaagtatagctagtacctagatcataggattgtagtgagaattaagttagacaaaatgctgagaacagtggctagcaaaaagtaagccctcaataagttgcaggtgcaattaataggaaagaagattataagatttggtgcttttcttgtcagcatgaaaattgaggtgttcacatttattacggcatcttctcaaggctaagctttgacttcaacaatcctgtgatattagatatgattacctctatttttcaaataaggaaatcgatgattaaagaagttacagtaaccttcccaatatcacacagtgagtggcaaacttgaaatttgaaacaaa

SEQ ID NO: 209214 - DNA, 629 bp, Homo sapiens
cggttcaattcaacagcggctcttaatgaaacactaatctcttcccattgatcacagaagagttattttaatttctgtatctttgacattctgcttttgggtgcaggaaaatccttgcccgaaatatatgctatagggaggtagtgtggagtgaggttcagggagagggttctggagtcagcttgccagggagaagccaagtccaactctcgcgttgagttgcttactaactggacatcctcaggcaagtcacttaaacccacaacagccactgttgttcactrgtcggcttgaagtatagctagtacctagatcataggattgtagtgagaattaagttagacaaaatgctgagaacagtggctagcaaaaagtaagccctcaataagttgcaggtgcaattaataggaaagaagattataagatttggtgcttttcttgtcagcatgaaaattgaggtgttcacatttattacggcatcttctcaaggctaagctttgacttcaacaatcctgtgatattagatatgattacctctatttttcaaataaggaaatcgatgattaaagaagttacagtaaccttcccaatatcacacagtgagtggcaaacttgaaatttgaaacaaa

SEQ ID NO: 209215 - DNA, 567 bp, Homo sapiens
tcaaatttatttctaaatgttttattatttttgatactattgtatatattttcttaattatattttgttagtcattgcaaatgtgtagaaataaaattgatttttgtatgttgatcctgtattctgcaactttgccaaacttgtttattggttctaatagatttttagtaagtccctgagaatttccggtatgcaagatcatgacatctgtagagatagttttacttctttttatttccaatctgggtgactttatttatctattttgcccartggaactgagtagaacttccagtatgatgcagaatagaagtggcaaaagatgatacctttgcttttttctgatctcaggaagaaagcatccagtctctcgccatatgtacaatgtcaacagggggtttgttgtagttttccttcatcattttgaggaatttcccttctattcccagtttgttgagtatttctattgtgaaagagtgtgaatgttgtcaaacattccttgcatatttattctatgtctgttgagatcatcatgcggcttttgttcttctgtctattgatattctc

SEQ ID NO: 209216 - DNA, 567 bp, Homo sapiens
tcaaatttatttctaaatgttttattatttttgatactattgtatatattttcttaattatattttgttagtcattgcaaatgtgtagaaataaaattgatttttgtatgttgatcctgtattctgcaactttgccaaacttgtttattggttctaatagatttttagtaagtccctgagaatttccggtatgcaagatcatgacatctgtagagatagttttacttctttttatttccaatctgggtgactttatttatctattttgcccagtggaactgagtagaacttccagtatgatgcagaatagaagtggcaaaagatgatacctttgcttttttctgatctcaggaagaaagcatccagtctctcgccatatgtacaatgtcaacagggggtttgttgtagttttccttcatcattttgaggaatttcccttctattcccagtttgttgagtatttctattgygaaagagtgtgaatgttgtcaaacattccttgcatatttattctatgtctgttgagatcatcatgcggcttttgttcttctgtctattgatattctc

SEQ ID NO: 209217 - DNA, 567 bp, Homo sapiens
tcaaatttatttctaaatgttttattatttttgatactattgtatatattttcttaattatattttgttagtcattgcaaatgtgtagaaataaaattgatttttgtatgttgatcctgtattctgcaactttgccaaacttgtttattggttctaatagatttttagtaagtccctgagaatttccggtatgcaagatcatgacatctgtagagatagttttacttctttttatttccaatctgggtgactttatttatctattttgcccagtggaactgagtagaacttccagtatgatgcagaatagaagtggcaaaagatgatacctttgcttttttctgatctcaggaagaaagcatccagtctctcgccatatgtacaatgtcaacagggggtttgttgtagttttccttcatcattttgaggaatttcccttctattcccagtttgttgagtatttctattgtgaaagagtgtgaatgttgtcaaacattccttgcatatttattctatgtctgttgagatcatcatgyggcttttgttcttctgtctattgatattctc

SEQ ID NO: 209218 - DNA, 474 bp, Homo sapiens
cctctcttctcaagataagatcaaaatagataaactaaaaattatactttttaaagagtctattgaagagcagaggattctaagccttgacaaactgaattccagagaaaggcaagwcattaatatgtgagccaggagatgaagaggcttcagtacatggggccaaaattctggaaaggatcagcccacaaatgggttgagccttttgattacagtgagaggtaatgggatagattaggatttgccacagaactaaaaacaaacatgaaatactctgcttgacaactctccctgccccacaagcctcccttaatttttgcaaaaagagtagcagtcaaggagctgggcaggaaaaagaatttgtgtcaccttgggcattctcattgtagttgattccagagacattccagctccagttgaatccaaaggtaaactaaaactgtactgaaatgcagcccagccctctgccagctc

SEQ ID NO: 209219 - DNA, 229 bp, Homo sapiens
tgatcccagcagccacagtatggctctgtgcaggagaagaaagggccaagactcaagggacccagacttctggaagtgtcattgagcatttgcctagcctaccatatctttgaataccatatctttttgttgaaacataataaatccccattttctgaagccacatggaggccttattattgcttctaatctttggagtatttrggacagagaataagcacagcttgga

SEQ ID NO: 209220 - DNA, 545 bp, Homo sapiens
aaaatgatgataacatttgctttgtgtrtctcacaggactgttgtgaagaccatgtcagaaaataaatgtgtaagcatttcataagccaggaggcattatgcaaataaatgcaaatataggcaatgttaattagtaaattattcacaggatcttatttcattaatacccttcctgcttcctgtagctcttttgggaattccatttccagttagtgaaggccagggcaatctgttggcttgcatctgtcatttactctactatgaaacatttgctgtgtgccagccatcatactagacactgagaatgcaaagatgagaaaaatgtgacctctcccttctgggaccttagtctaggtgaagaagactaagacttactgacttagacttacttacttactaagacttacttacttagactaagatatgtatgatacaacttgtaatccaaaattttaagtgacattttgtgaataatgattaagagctaagcactgtgctacttcctagggttataaaaatgtataaggcatagtctttgcacttga

SEQ ID NO: 209221 - DNA, 536 bp, Homo sapiens
agaattcactcagtcggctgccaaagaccacccagacacttgcagctgcctgtgcagaagagcaaggccgttcgggtaggttacattctgttatcttcattctctgacagccaagctactcttaaggattccattattgctatgttattaagaagaagaatttatgcagtactcacacacaaccttttgcaaaggctgcacgaggtttagtcatgcaaatgtccaccttgtaatacccatgaaaagcatagttaagaggccaaagacagaagaaaagggcatcccaatagctgaaatgggtatacaaaagccatgtrttcttgcctaaggaggccccgattatgctctcccttgtagcctgttaggaatttatgtgcaatgtgaacatgcttggttatccagctttccaatccgttaaggaataaaaactgcacattaaaaaggaagcaatcaaatagccatgagagctggtacaacaacacccgccatcatgacaagcgcaggcagcaaggaaagtttacattttgttctctgta

SEQ ID NO: 209222 - DNA, 476 bp, Homo sapiens
aatgagtattgaaaccaagacatscagcctactcattggcaaacacttactcagccccacccgtggaccatatgccctgctgggaactgcacacatcaaaatgaaaaacacacacagagagagagaaagagataagtggatctttaggacacaacgcagtgagtgccagacaagcccttctcagatgggtgtgcacgttgttaagtgagcaggactggagccacccagcggcggccaccagtcacctgcagctaggcaatgcgcatttaaatcgattacaatcccatcctgttaaggatcaggcactcgggtgtcatggcggctggtggctccatttggacagtgcgggcatgggtcacttcccgttcatcacagaaagttccagcagacggtgctgcacaagggtctcaactgcactgtcccttcaggaagccatgtgtcgcttacatttaagttaaaattaaagttcagaattc

SEQ ID NO: 209223 - DNA, 441 bp, Homo sapiens
aacttttggtgaatgagtattgaaaccaagacatccagcctactcattggcaaacacttactcagccccacccgtggaccatatgccctgctgggaactgcacacatcaaaatgaaaaacacacacagagagagagaaagagataagtggatctttaggacacaacgcagtgagtgccagacaagcccttctcagatgggtgtgcacgttgttaagtgagcaggactggagccacccagcggyggccaccagtcacctgcagctaggcaatgcgcatttaaatcgattacaatcccatcctgttaaggatcaggcactcgggtgtcatggcggctggtggctccatttggacagtgcgggcatgggtcacttcccgttcatcacagaaagttccagcagacggtgctgcacaagggtctcaactgcactgtcccttcagga

SEQ ID NO: 209224 - DNA, 441 bp, Homo sapiens
aacttttggtgaatgagtattgaaaccaagacatccagcctactcattggcaaacacttactcagccccacccgtggaccatatgccctgctgggaactgcacacatcaaaatgaaaaacacacacagagagagagaaagagataagtggatctttaggacacaacgcagtgagtgccagacaagcccttctcagatgggtgtgcacgttgttaagtgagcaggactggagccacccagcggcggccaccrgtcacctgcagctaggcaatgcgcatttaaatcgattacaatcccatcctgttaaggatcaggcactcgggtgtcatggcggctggtggctccatttggacagtgcgggcatgggtcacttcccgttcatcacagaaagttccagcagacggtgctgcacaagggtctcaactgcactgtcccttcagga

SEQ ID NO: 209225 - DNA, 341 bp, Homo sapiens
aagggtgctgcacccagagagggcatggaagctctgtgtgccaaccccctttccccaataccttgacctatgcccctctttcatctggctttccctgcattgtgttcttgataataaaaatgtaatcataagcatagtgctttcctgasttatatgaatggttctagtgaattattgaacctgaatagaggtgtggaaactccaaaatttgaagccaagtcagacagaagtgtgggctgcctgagttccctacttaaatctggcatctgaagcaggggcagtcctgtggaactaaacctttaacctgtatggtctgcactaactccaggtagctagtgcca

SEQ ID NO: 209226 - DNA, 646 bp, Homo sapiens
tgttgttgtttgagacaggacctcactcccattgtccagggtggagtgcagtggcgtgatcacagctcactgcagtcttgacttcctaggttcaggtgacttcctcacctcagcctcccaggtacctggaactacaggggtgcaccatgatgcgtggctaagtttttcagtttttagtagagatgaggtttctccatgtttcccagactgatctggaactcctgggctcaagcaatccaccgcctgggcctcccaaagtgctgggattacaggtgtgagccactgctcccagcctcaagggatttgtttaatgaaattaatatgtaccttaatatataaatcatatatagatggatttagtatattataaaacatattaaaaataatttaaaagttaattttattatataaactaaataaactaaaagttaatttttatagtatgtcttttttctcacagacttttaaaatatgcaggtagtttccaaaayagaattgaggaatttgggttgtactgagctaaaactgggagagatgatctataagctatctattattttacaatggaaaattgtgtctgacgctaataaaataatttatttaggattctctttacagtctttccctgtctccacgtttgttgtaa

SEQ ID NO: 209227 - DNA, 569 bp, Homo sapiens
gaaaagaagcaatagaatttgtacttgctgagaattttcctaaattggtgaaaagttttttaaaaaatcttaagcaaaataattaaaaataaatctcaacttagatacataacaatgaacctgaaggaccaagcccaatcttaaaagcaaccagagaattacttacaaaccataaaaacttgttggatataaatctacatacagtgaaagaaaccctgatgctgggaggaggaaaaccgaggtcaatgaacgggacaccgagacctttatggggtgatggaaattcctataccttgattatcaaaacccattaaacagtatgtatattatttacattaacaaattgactcccaataacaacatgaatgaatctcaaaatgtaatgtataaatgactctacctaaaaaaaaaagcaaatgtagttaagttataaaaaatgcaaaycatattatctgttgttaagatacacatatatgttggaaaatacaaaaccatggataagaaatactcaaatcaatttcaagatagtaatactaatttggaagtaggggaagggaaagtgtccacat

SEQ ID NO: 209228 - DNA, 601 bp, Homo sapiens
tggtggcactaatctcgcagtccctccagggattctacattgttttattttattatatatgtataaaatatatatwtttttaaatagatttactatttactatggcttccatttagcctttcccaccataatgatccttaccctaccagtcagggagccagtgtgggggtctttcagctgctcagtatgtccatgctaattatgcattctggcactggggaaatgacaggatgagtctggggacccacaggacccactgtaagttggacctgagctaaaactccattaatgacctgacttccataatcctctgctttaactggaggaccacaatgacgttttgggtcccctggaatcaacatcagctcagagccagtgtccagtagtccgtgaaatgtctgatcatttccctttcctcaatgcgcagttaccctggtaaaaggccagagatgaaattgctaaatcatgatagttctatttttaattttttgaggaatgtccatgctgtttaccataatggctgtaccaatttatattcccactaacagtgtactagagttcccttttatccacatcctctccaacactttttttttttttt

SEQ ID NO: 209229 - DNA, 601 bp, Homo sapiens
tggtggcactaatctcgcagtccctccagggattctacattgttttattttattatatatgtataaaatatatatttttttaaatagatttactatttactatggcttccatttagcctttcccaccataatgatccttaccctaccagtcagggagccagtgtgggggtctttcagctgctcagtatgtccatgctaattatgcattctgrcactggggaaatgacaggatgagtctggggacccacaggacccactgtaagttggacctgagctaaaactccattaatgacctgacttccataatcctctgctttaactggaggaccacaatgacgttttgggtcccctggaatcaacatcagctcagagccagtgtccagtagtccgtgaaatgtctgatcatttccctttcctcaatgcgcagttaccctggtaaaaggccagagatgaaattgctaaatcatgatagttctatttttaattttttgaggaatgtccatgctgtttaccataatggctgtaccaatttatattcccactaacagtgtactagagttcccttttatccacatcctctccaacactttttttttttttt

SEQ ID NO: 209230 - DNA, 601 bp, Homo sapiens
tggtggcactaatctcgcagtccctccagggattctacattgttttattttattatatatgtataaaatatatatttttttaaatagatttactatttactatggcttccatttagcctttcccaccataatgatccttaccctaccagtcagggagccagtgtgggggtctttcagctgctcagtatgtccatgctaattatgcattctggcactggggaaatgacaggatgagtctggggacccacaggacccactgtaagttggacctgagctaaaactccattaatgacctgacttccataatcctctgctttaactggaggaccacaatgacgttttgggtcccctggaatcaacatcagctcagagccagtgtccagtagtccgtgaaatgtctgatcatttccctttcctcaatgcgcagttaccctggtaaaaggccagagatgaaattgctaaatcatgatagttctatttttaattttttgaggaatgtccatgctgtttaccataatggctgtaccaatttatattcccactaacagygtactagagttcccttttatccacatcctctccaacactttttttttttttt

SEQ ID NO: 209231 - DNA, 418 bp, Homo sapiens
agtcaatggcaagtgtacaacactgagatcgagctggaagtagggatggtactaatccagatagctggttkaccaggcttactatccctagagagtaggtagtaattctgcaaaagagtttccccatcttgacaccactgtaatcaggggagtatgtgtgagagaatgaagaggaagtgatagatataggaaaacattttctaaattagttctaaaatgccagaaggagaagactaattaggttttggtgttttagccctagagcaataaagtttctaaactccattatgtaatacaacaacaatttatttctttccaacctcttacatcattaaatctagtgaaatactactcatttctttcccctcttctcaaatactcactctcttgccctatttcagagtcttattgtctgcaa

SEQ ID NO: 209232 - DNA, 556 bp, Homo sapiens
taaaaacttcgcccacattttgcaaggagtaattgttttctgagggttgttttctgaatttttacattgcttgggaagcatgtgcaattgtttcttccttgtgctagagcagtctgcctcttctgtcccccagcactttaaactcatgccagacaagagaatgataataaaactaaccacttgatagctaaaacatatgccagacactctctatgacaagttctatcagaaagattttacagacattgccccactgtcctatttgagcttacaaaaaattaatagatgagaaaattgaggctcagaaatgttaaataatttcccccatgagtatgcagccactgagtgtcagagtctgaatgtaatctcargtttgtctgaatctggaagtcataatgtttaccgccataatatattgcccttcaatgacaatatgagattattttctttagcttctgcattggtcctctaaggacattccacaaacatttaatgaacatttacaaatgttggtccaggcgttaggctctgcggacacagatgaataagacatgat

SEQ ID NO: 209233 - DNA, 574 bp, Homo sapiens
gaagaaagctcctgctctccagggagctagagctctgcctacattggaggtgaagaatggtatactctggtgctcggaaaagaaacttgtgtgtggcagatgaaacggaggtcaggaactcggaggagacaatggggtaccaggatctgtggactgaagaaggaccatgccatttaactccagctcccctagaagaaacactttggtaagatcatccctcctgtgtgtgccatgctgtaaggtttatggattcccttgataacatctgaagtgatgctgccactgtcagtgccctcctgctggtggcttcttattgaaaacacctgtgtctctgcctgcggtggttctctggctatgggagtaagctcagctgaggcaaagkgcaggctggaaatgcctgggagtgaatgcccaggagcagccctcaatcagtgatcaacggcagctggtgcataaataccccagctccctcacccctcgtgggatgggggttggggaacaacaacctctcaaaggtctccagcagaattgagcctcagttgcccacagtggtaacttgcccattagtaccatc

SEQ ID NO: 209234 - DNA, 395 bp, Homo sapiens
gtgaatagggatgaaaatttccatgtttattgaaatgaaaaacaacaaatgatttaagggttaagtgtgatttgcaacttgccttttctcccaggtgatatcccttcattaattctttttctgtctacacaggatgaaggccccttccctttcccaaatttctcaaggtttttaaaccccaaaactgctgacttcagacttggcctctttgcctagtttactcttacttgtccttcagcactcagcatgaatgtcacttctcagggaagctttccaaaaccctttagtcctgtatcaggcagagctcttgattgcaaggggtggaaaaacaaacttaaagtgacttaagtcaaaaagggtgacygttggttcagataatggaaaagcccagctag

SEQ ID NO: 209235 - DNA, 414 bp, Homo sapiens
ggcagctccccacctcctctctcttgttcctgctttccccatatgatgtgcctgctctcactttgccttccgtcatgcttgtaagcttcctgaggcctccccagaagctgatgccagagctatgcttcctgtacagcctgcagaaccatgagccaattaaacatattttctttataaattacccagtctccagtatttctttatagcaatgcaagaacggcttaatacatccctcaactcataggcccctgtagacctcagttttatacctggaggacccttttgctaacagatgactgttgaggttgctaggaaggctctgtttattcatttyctccattcctacatggttgttgactgtaaataccctggggactttcacacagagttttggagtaggtcatgctgaagatc

SEQ ID NO: 209236 - DNA, 593 bp, Homo sapiens
ttaacaaaacttgtgacggcatcaggatgaagcccaccattttcttgtgtcttgctggcccacagcgactaatttaaatgtttgttcatataaactaaactggtagcaggaacaaatcactttgattggtttacctgcttacataagaagccaaaccaccaggaagatgacagccaaaagttgatagataaaaatgtcaacaaactctcttccattttttgaattttcattcaagagtaaagacagtttcactrtagtttgtagttcctaactttcctacctgtcatctaacattgaataaatgttattgatgcactatggtatcctaggtgctagtttaataagtagttagataatgaggaaagaaaacaatcaagggtactttcaaacatacttctggtaacctagagatcctgccttttattcccagtctactcttcctaagctaatttaatttatttatagtctgaccagtctcttgtatatgtattgacttgtactgactttttttgtctttttttctatttcttatttctgtcagcattacaaatgtattatttacatgcaacaaaaattaccaattttaacttatc

SEQ ID NO: 209237 - DNA, 593 bp, Homo sapiens
ttaacaaaacttgtgacggcatcaggatgaagcccaccattttcttgtgtcttgctggcccacagcgactaatttaaatgtttgttcatataaactaaactggtagcaggaacaaatcactttgattggtttacctgcttacataagaagccaaaccaccaggaagatgacagccaaaagttgatagataaaaatgtcaacaaactctcttccattttttgaattttcattcaagagtaaagacagtttcactgtagtttgtagttcctaactttcctacctgtcatctaacattgaataaatgttattgatgcactatggtatcctaggtgctagtttaataagtagttagataatgaggaaagaaaacaatcaagggtactttcaaacatacttctggtaacctagagatcctgccttttattcccagtctactcttcctaagctaatttaatttatttatagtctgaccagtctcttgtatatrtattgacttgtactgactttttttgtctttttttctatttcttatttctgtcagcattacaaatgtattatttacatgcaacaaaaattaccaattttaacttatc

SEQ ID NO: 209238 - DNA, 576 bp, Homo sapiens
caatgaaactaatgttagtttttgaaaaaataaaccaattgamaaaactttagccagactaactaaactaaaagggagaaggcaaataaataaaatcagagatgaaataggagacattacaactaatagcatagaaattcaaaggattattagaggctactatgagcagttatatgccaataaattggaaaacctaaaagaaatggacaaattcctaaacacatgtaacctaccaagactgaaccatgaagaaatccaaaacccgggcagaccaataccaagtaataagatcaaagacataataaaaagtctgtcagcaaagaaaagcccaagacctgacggcttcaatgctaaattttaccaaatacatagggaattccactcaaattatttcaaaaagtagaggtggagggactactaaactcatttaccaggtcagtattatcttgataccaaaaccagaaaaatatatcaaaaaaagaaaaaaaaaaaaaagaaaactacaggccaatatccctgatgaacattgatgcaaaaatcctcaacaaaataccagaaaattgaatttgacaacac

SEQ ID NO: 209239 - DNA, 368 bp, Homo sapiens
gtttattgcagcactgttcccaatagccaagatttggaagcaacctaagtgtycatcagcagatgaaccgataaagaaaatgtgctacatatacacaatagagtactatccagtcataaaaaggaatgagattctgtcatttgcaacaacatgaatggaagtagagatgattatgttaagtaaaataagccaagcagagaaagacaaacattgtatgttctcacttatttgtgggatctaaaaatcaaaacaattgaactcatggagatagagtatagaaggatggttactggagactgggaagggtagtgggggttggtggggagtgtggatggttaatgggtaaaacaaaagaagtagaaaaaaat

SEQ ID NO: 209240 - DNA, 537 bp, Homo sapiens
acaacggataagtctatatattaccatttgtcagagctatcaagctatcaaaatattctcattcttagctatggtagtttacatactttattcagtgtaccaaagtgcaatttttacatgctttctgagggtcttagaaccatgcattttctccaaaatatacaaccttcaaactgaaagtaatctcaatatatgctgccaaaatcatgtgaaatgaaatcttattttgccagccctaacaaaattgtgaaaaaggtcaggcttgtctttcattttttcattctttgtcaatttatctcartctatatacatgcctgtaagatatatcctgaattttatcatgtctcatcacttccatagttatcactctagtcaaaatcgccatcatcccttattaggactattggaacagcctccaagatggtctctctgttttcactcttgtttctttattctctattccataagcagacagagtgatccatacagaacataaatataatcatcttgtttctctgctctcccccacagtggctt

SEQ ID NO: 209241 - DNA, 419 bp, Homo sapiens
tgtttcttaaaaattatgtaaagttaacttttttaaaataatattggccttcttttacaaaaaacgattcttaactacagattcaatttatttaattgaataaaactaataaaataatcactagaaattattttattagttttggtctcagrctcctgagctcaagtgatccacccacctcggcttcccaaagtgctgggattacaggcgtgagccaccacacccagacagtgtcattgaagtttttaaacttattgcatactggtaggcaataaatttaaattagattctgctgtgctttttttttcccccccacacttcctaagttgaatccttaggtggccctaacgaatactagaagaagagcgaagatgtcatggaaaggatacttggatacaatctcatttgtccctttcctg

SEQ ID NO: 209242 - DNA, 565 bp, Homo sapiens
ggttaaatgaaaggttgtctggcttcactggtaggattctgaacctggattagatatacagctgtccaatggatcagcttcccacatcctagagttccattatggagttacaaagagaatgacagcacttggcaagtcccaggcctaatcatagcacagagaagtgacttttggaaggtacattactaagcaattaggacccatttaataaattacctcttatggaacactttgaaccctagtggtctgaagaggttaatgcacctctcacaactgagtgctactcagtttccaggggtaacttcaaggccacagctaatccaaaccttcttctcatcaatggcctcttactcttgagccacttctgtagtctggcatcagtaagcccacacacttgcactactcccctctgcgtgccagatgcttcattttcttgcagctgaatccaytgggcgcagtgctcatgaggccaaaagactttgtgctgcacattaacttcctccttgggctttcatgcttcttatttgggagtctttctgtttctcttatttatagagagttttaa

SEQ ID NO: 209243 - DNA, 444 bp, Homo sapiens
ccgtggaagtggagcctgcagaatgaggctgcttggatccctggattcagccccctttctagggatatgtagggatggatcttgccgcaggtcctggggccagagtatgtaaaactcctgggtctctgtgtgtgcctgagcggctgctcttcagagaccccacacagctctgtgtattggacccaaggccctggtgtcatgggctcaagaggggatctgatgcatrggttgcaaagcttcatgagagaagcatggtttcctgggcagggtcgcacagtcactcaccacttcccttaagtggggtgggggttcccttggctctgtgctgctcctggatgggccatcaccccaccctgctttttcttcattctttgtgggttgaattatttgcctattcagtcccaatgtaagaacgtggatatttcagttaaaggtgctgaattc

SEQ ID NO: 209244 - DNA, 667 bp, Homo sapiens
aattctgtcaccctcaaaagttcctttgtgtccattcccagacattctgttaatacccccagccctaggtgaacaccaatctgttctctgtttctatagattagttttgcctgttctagaactttatgcaaatgaaatagtatatgttctattgtgtttaacttcttttgctcagtaaagagagagagagagagagagwgtgtgtgtgtgtgtgtgtgtgtgtgtgtataatagattcaggggatacacgtgcaggttttttgcctggatatattgcataatggtgaagtttgggtttctagtatactcatcacccaaatagcgaacattgtacccaataagaaacttttcaaccctcacccctcccacaccctccctctttttggagtctacagtgtctattatttccctctgtatgtctatgtgtacccattgtttagctcccacttcaaataagaatatgcagtatttgattttctgtttctgagttatttcacataggataatggcctccaattccattcattttgctgcaaaagacatgaatcattcctttatataaaggctgtgtagtattccatggtgtatatatccagttatctattgatgggcagttagattgattccatgactttgctattgtgaatggtgctgagataaacataca

SEQ ID NO: 209245 - DNA, 403 bp, Homo sapiens
tctagatctgaagaatttagcacaagaatgggtctatattcaagggaccaaagcaaacttccaacaagcacacaaatttttacacggacagaaagatatttacacgatcttcttcaattataaactccatctgaaccaccaatcctaacacaattcagtgctttactccaccttgtgtgtgttttcatcagactattgtgtttatgtgcrtttgattcacactgtatttatatgataatcccaacatctaaataataaaatatcagaatgcaacgaatatggaaacttcaaattctaaaggtatgatccttgtgcatcatacgttgaatcatatggcaaagatattctacaaacattcttgatgaaaaattaaattagtaaggttatatgtgaaactgaacaa

SEQ ID NO: 209246 - DNA, 593 bp, Homo sapiens
atagcatatacaattatgtgcagtatgtaatacttgatagtgatagtaaacaactatgttactggtttatgtgtgtgttaatactatattatacttttatcattattttagagtgtactccttgtaactyattttgaaaagtgaactataaaatagcctcaggcaggtccctcaggagatgttccagaaaaaggtagtgttctcataggagatgacagcttcatgtatgttattgtccctaaagaccttatagtgggacaagatgtggtggtggaagacagtgatgttgattattttgactctgtttaggcttaggctaatgtgtgtgtttgcagtgtcaacaaaaatactttaaagagtaaaaataaatttttaaatggaaaaaagcttatagaacacatataaagaaagaaaatatttgtgtacagctgtgcaatgtgtttgttttgaactgtgttgttataaaagagaaaaaagttaaaaactattaaaaagtttataaagtaaaagaattacttttattcgtaagttaaggttaattagtaagctaaggctaacattttttttttacttaccagtatcctaacaaggaa

SEQ ID NO: 209247 - DNA, 398 bp, Homo sapiens
cattattggtcatcacaacaggaggggaggaagggaggcactactggcatctagtggttagagtccagggatgctgctcgaaaacatcctacaatgcactagggcagcctgccacagtaggaaattgtccagcccaaaatgtcaatggtacagcatcagagttgagaaactctggcctagggtagttctctccttgccagaactgcagggaaattcactttctcttcattcagtttcgctctcttatcattctactggtttcttacattagtccaggtatcytattttatattataaccttatcatttttttgctgtaagatgcttgaaattatttttggaaagaagtagtagattatataaattcaatgaatgtaattttaaatgtttaggtgaatc

SEQ ID NO: 209248 - DNA, 621 bp, Homo sapiens
ttctgagctgtttcttccttctcttccccaaagtcccatatctgtcagaactaattgtgtttttctggccagcccctctgttccagaaaattttcccactcaagtatcaaaatatagccactctgaagtgagatatttaaacttttcatgttggaaggcacatgagaaactcatcctttatcatataattgctggtaaatgaaaatgtgtgttctcattccaaggagtatttgtattttaacagcaaatatttccttaataatcagaatgtctaatgaaattgtgtattatttagcctatgctatagactgaatgcttatgttcccccaaattcatacrttgaaacctagtccccagtgtgatgccaattgggaggtgaggccttggggaggtgcttaagtcatgagagctctgctcttatggacggatttagtgcccttataaataggccctagagagtggtcttgcccctttcaccatgtgaggatgcagggagcaggagccatctttgaaccagaaagtgggccctcaccagatagcaaatctgcttgtgcattgatcatgaacttcttaatctccaaaactgtgagaattaaagttccattgttcataaaccaccac

SEQ ID NO: 209249 - DNA, 621 bp, Homo sapiens
ttctgagctgtttcttccttctcttccccaaagtcccatatctgtcagaactaattgtgtttttctggccagcccctctgttccagaaaattttcccactcaagtatcaaaatatagccactctgaagtgagatatttaaacttttcatgttggaaggcacatgagaaactcatcctttatcatataattgctggtaaatgaaaatgtgtgttctcattccaaggagtatttgtattttaacagcaaatatttccttaataatcagaatgtctaatgaaattgtgtattatttagcctatgctatagactgaatgcttatgttcccccaaattcatacgttgaaacctagtccccagtgtgatgccaattgggaggtgaggccttggggaggtgcttaagtcatgagagytctgctcttatggacggatttagtgcccttataaataggccctagagagtggtcttgcccctttcaccatgtgaggatgcagggagcaggagccatctttgaaccagaaagtgggccctcaccagatagcaaatctgcttgtgcattgatcatgaacttcttaatctccaaaactgtgagaattaaagttccattgttcataaaccaccac

SEQ ID NO: 209250 - DNA, 640 bp, Homo sapiens
taaattcactttgaacaggctataataagcacttacttttggtgtgagtaaataacaaataaatcacttaagaaaatacggcattattccccctcatggtgcatttaaactagaataaaaaattgttacgagaggaagatgaagtcaccaaaagagctgagaattgttaaagaatgtcaggcagaatactcataaggttgaactgawaacataattaggtacttgctaaaaacttaccaagatacaacctgggcaataacaccctctagaatggcaaccagactatatagagtgttaaaaagaagaatcttggtaaaaatgaggctagcaattaaaaatgagaaaactaaggataaacagaaagggttctagaaacaattcaggaagagatatttgaaaggcatgtggtatgataaagttcaagtgacataaaattaatagtaatatcatgaagcaaaaagcagaaatggaaagatatagaacgaaaggggataatcacttgaatcacaagattatatatttgagttcagtacactgaaatatttcatttttcaatatgaaagacatatagtgacctctaggcactcattttaatatacaagagccattaaaaaggcacttcaaggtgttagcaggatct

SEQ ID NO: 209251 - DNA, 410 bp, Homo sapiens
agccaggcaatatattacaggaaaacagggagaacataatttttgccatttactcttacctttgcctagcccagtgcctggcaaacaatagattctcattatgtattttttttgaatgaattaataaatccaagtaaaataattgatgttttggaattatctaagactgttaaaatcagttaaatatagttaatgtgaagcaaaaaacagtaaacaaaattaatgtaatatacatgctgatgttattttagaaaaaacacaataatttacaaattcctttcaataattcaattaacttttatgagatttgattgaagacaaatctatgaatgctttkttgtaaataaaaggtaatccttgtaataagcaaaaataaattaacataacaaatatcaatttacagatagatg

SEQ ID NO: 209252 - DNA, 619 bp, Homo sapiens
gtggagaggatattccccaaactaactctgtctctgacatttaggggtttgttgtaatagtaacaccttgctagcaatcatctactagtgatttgctcatggaacatgctggagagaaggagtgtctgagtcctagaccctctcccatcccagtacttgtaaatgtcaccttattttgaaataggagctttacagatataataaagttaaagatctcagggtgagatcatcytgaattaagattgagtcatggatatgaatatatgcatatatatatatatattgcatgcatgtggaggcaggttgtatataatataatatgtatatatattacatatgtatcgtgtgtgtgtgtgtatatatatatatatgtgtgtgtgtgtgtgtgtgtgtgtgtgtattatatacaccctgcctccacatgcatggcctccctcattatcagtatcctcccctagagtggtacaactgtcaaaattgacttgcctacattaacacaatgttgtcacccagtggtaaatatacataacataaaagatataatttaatcattttaaattctaaaactcagtgatattgaatacattcacaatgttgtgtaattaacactgttttcata

SEQ ID NO: 209253 - DNA, 624 bp, Homo sapiens
aaatctgcaactgatggattcaagttaggattttgttgttgttgttgtgcttggtcttataattacctaagatatatctctggaagttttcagtataaaatccacaaggtttgaagaactcattctattttgcctattattgaaaaataccctgggtaccaaacatgctcaagtgaatgaatggtgtccaggacaaaacccagcaggtgtccaggcaatggcctcccaccagagatcttgtcagcatgccgctctgagcactgtgctgccttagtgtctttctgtcctggtttcaatgaagtctttctccgtaatgtcagtttttatactttttgacctagtaggacatcatgtgatgaattttcatgtgatatgaattcagcctaggtgtgtcttaggattggtttagagggaagactgaagcaggtgaaatggcaaccccttgcatacacacccataataaattgaaaaatattctgcatgacttaatgatatcttttaaaatgggaaacaaaatctttcttgttcattagaatcattacatcaactaaagtcattataactaaagtcatcrttacatcaactaaaatacaaaatacggaatctgatcttcagcagatgttg

SEQ ID NO: 209254 - DNA, 585 bp, Homo sapiens
agatctaaatgatttctatagaaagctattataccaaagggaattctgattctggctaaacactamatctgaacttgcttgggaaggtcactaaaacaaccagccagtttcctgccaacaacttagactattatttactggaagggtcaaaatgcctttaagtattagtaatgaaatttataattgactaatttgaaaaaagaaatctctgggtaggaggaggagggaagatagtggttgcagtactggaacagctgggtgcaatgtggacgcagtggccttggcaggtctccttcatctcagcattttaccccaatcccaggtccacacaagtgcttctcttgacacttctcaaaaatgggagaagaagaataaaaccgtttatcctccacaactgcctgcagaacctcagagaccagcagaaatctaccaataccaaagaaaactaaaagacagcaaagacaagatgttgtatttggcaaaattggtaggagaaatgtccactgaccaggcttagctcaactgggattcagcgacaaaaagggacccaaatcattaaagatgttctcttagaagcacaagacg

SEQ ID NO: 209255 - DNA, 558 bp, Homo sapiens
gaattctgattctggctaaacactacatctgaacttgcttgggaaggtcactaaaacaaccagscagtttcctgccaacaacttagactattatttactggaagggtcaaaatgcctttaagtattagtaatgaaatttataattgactaatttgaaaaaagaaatctctgggtaggaggaggagggaagatagtggttgcagtactggaacagctgggtgcaatgtggacgcagtggccttggcaggtctccttcatctcagcattttaccccaatcccaggtccacacaagtgcttctcttgacacttctcaaaaatgggagaagaagaataaaaccgtttatcctccacaactgcctgcagaacctcagagaccagcagaaatctaccaataccaaagaaaactaaaagacagcaaagacaagatgttgtatttggcaaaattggtaggagaaatgtccactgaccaggcttagctcaactgggattcagcgacaaaaagggacccaaatcattaaagatgttctcttagaagcacaagacgtggcagtgaaaga

SEQ ID NO: 209256 - DNA, 544 bp, Homo sapiens
gaattctgattctggctaaacactacatctgaacttgcttgggaaggtcactaaaacaaccagccagtttcctgccaacaacttagactattatttactggaagggtcaaaatgcctttaagtattagtaatgaaatttataattgactaatttgaaaaaagaaatctctgggtaggaggaggagggaagatagtggttgcagtactggaacagctgggtgcaatgtggacgcagtggccttggcaggtctccttcatctcagcattttaccccartcccaggtccacacaagtgcttctcttgacacttctcaaaaatgggagaagaagaataaaaccgtttatcctccacaactgcctgcagaacctcagagaccagcagaaatctaccaataccaaagaaaactaaaagacagcaaagacaagatgttgtatttggcaaaattggtaggagaaatgtccactgaccaggcttagctcaactgggattcagcgacaaaaagggacccaaatcattaaagatgttctcttagaagcacaagac

SEQ ID NO: 209257 - DNA, 561 bp, Homo sapiens
gctattataccaaagggaattctgattctggctaaacactacatctgaacttgcttgggaaggtcactaaaacaaccagccagtttcctgccaacaacttagactattatttactggaagggtcaaaatgcctttaagtattagtaatgaaatttataattgactaatttgaaaaaagaaatctctgggtaggaggaggagggaagatagtggttgcagtactggaacagctgggtgcaatgtggacgcagtggccttggcaggtctccttcatctcagcattttaccccaatcccaggtccacacaagtgcttctcttgacacttctcaaaaatgggagaagaagaataaaaccgtttatcctccacaactgcctgcagaacctcagagaccagcagaaatctaccaataccaaagaaaactaaaagacagcaaagacaagatgttgtatttggcaaaattggtaggagaaatgtccactgaccaggcttagctcaactgggattcagygacaaaaagggacccaaatcattaaagatgttctcttagaagcacaagacg

SEQ ID NO: 209258 - DNA, 563 bp, Homo sapiens
ccaatttgaaaccctgtctcaaaaaaaacacaaagaccaaagttaatgtgcttgtaagtttataattcagaaaatgaacctacttcttttatgaaaatgaaatctgagaaaaacacaagattggttgtcaaaataaccaatataaagtcaagtactgtcagtaatgtaaatgaagtataaaactgttctagagacctaatacacaccatggcatattaaaggatttataactaagtggagacatactgcctaggaacaaggcattatgaaatttctgacacatttccctaccattaaaagaaaatacttcatttaaaatggctttagtctttctgtaattttcgcaaggygtaagcactgattgttctgtgtgactcttccaagccctcagctcatgagtagcctcagttctcaaccctgactacacattagattcacagtctggggatgagggatgaggcaggtaccagagtggtggtttttaaatgcttcccagtagactgatatatagccaaaggaaatcgtaagataaagaaaaaagaaaggagttaaattgtttgtac

SEQ ID NO: 209259 - DNA, 535 bp, Homo sapiens
ggagaaaaacacaaatgaccgagactggggactacccaggtgggaaacacattgaactcggggagaggctggtgcaccctctgtgtctcaggtagtgctggtggagtttggwtattagcatagtctccactgggacacctgctggctctctgaggccagctgcacccctgtgtagaggagggggtgaccctacccaggcacagacagtgtctggttatttgcccagaacttcctgttcaggcctttgacttgaatgctctcttactgttccagtccagtgatacgccaagttctctaagtcctctgaatctccctggagctggaagtgagatggaagagaaggtaatatgatttgaacttatttatttggcttctttccttacttaactttcatcttcccccccccttttttttttttgcgacctgctgcctcattttccattcataaatgttgccttcatatatttaaattccttcagaatgccactagtgacagatgttggagcatctgtttccatggcaaggcaactgctgg

SEQ ID NO: 209260 - DNA, 233 bp, Homo sapiens
tcagctgggggcaattttaccccccaggggactttgggcaacttctggagacatttttgcttttctaatctggccttcctctacttgcaaatactatttaatcttccgaatttctaccccattttcccctcccttttccctgtccttctagccaccactcaccagtagtcagtccctccctggcytttccccatttggttcctctgtctcctttgtcacggttaggtggccac

SEQ ID NO: 209261 - DNA, 620 bp, Homo sapiens
ttgaagggagtcactggtaactaggaattagcatcaaaaccctttagccacatttgaacaacaaaagaggtttggagggagtggatctcaggctaagtctacctggagtccactgttaagttcaattctgtctgttccayaggcactgtctatcatctcaaagtgctgggagagcattattctcttaggagttgcatttctatgcaaatttgacaagaaacaggtatgaagttcttaaaaaaaaaaaaaagaaaatacaaagtaacaatctcagcataatagttttcagccgtgaacctaggcttaaagacaaccagttgaataaatcaaatgatcatgaagaattaggtgagacttattataccatgtgggctattttcttattttgtgtatataaattccccaaaggaatgtatccaggtacagcatgtagtatgagcaaaagcacagacatctctttgtttagctggtacacagcaatcctattacttagcattccatgactggcttgaattaaagcagagagagctaactctgttttaaaaaagaccattagtacaatttgaacaaaaagtttactgaggatgttgccagtattacccctgggtggactaaaggat

SEQ ID NO: 209262 - DNA, 620 bp, Homo sapiens
ttgaagggagtcactggtaactaggaattagcatcaaaaccctttagccacatttgaacaacaaaagaggtttggagggagtggatctcaggctaagtctacctggagtccactgttaagttcaattctgtctgttccataggcactgtctatcatctcaaagtgctgggagagcattattctcttaggagttgcatttctatgcaaatttgacaagaaacaggtatgaagttcttaaaaaaaaaaaaaagaaaatacaaagtaacaatctcagcataatagttttcagccgtgaacctaggcttaaagacaaccagttgaataaatcaaatgatcatgaagaattaggtgagacytattataccatgtgggctattttcttattttgtgtatataaattccccaaaggaatgtatccaggtacagcatgtagtatgagcaaaagcacagacatctctttgtttagctggtacacagcaatcctattacttagcattccatgactggcttgaattaaagcagagagagctaactctgttttaaaaaagaccattagtacaatttgaacaaaaagtttactgaggatgttgccagtattacccctgggtggactaaaggat

SEQ ID NO: 209263 - DNA, 423 bp, Homo sapiens
ccaggttaaaaaggctagccaatgcttgtgtaaaaaaaagaacaccacatattgttgtattatatgcaattggaaatgttcagttatcgcactttggtatccttttcagaaaaaaaaaaaatctcaaaacttataaacataagcatggcattttacattgtaccaactgagtaacagtaaatagatgaggtgtgaccactataacttcttgaccaactttctatcttgaaactacacacatccaaccctaccagctaccattctaattctacaggatattttccagtgagacaagctgtacaatgaccactcttttcaaaacattccagaccatttccattttcttrgatcataatatcgtgctttttctctttctgttttttaaactttatcccttcttgtacagatgaaaccagtccttct

SEQ ID NO: 209264 - DNA, 423 bp, Homo sapiens
ccaggttaaaaaggctagccaatgcttgtgtaaaaaaaagaacaccacatattgttgtattatatgcaattggaaatgttcagttatcgcactttggtatccttttcagaaaaaaaaaaaatctcaaaacttataaacataagcatggcattttacattgtaccaactgagtaacagtaaatagatgaggtgtgaccactataacttcttgaccaactttctatcttgaaactacacacatccaaccctaccagctaccattctaattctacaggatattttccagtgagacaagctgtacaatgaccactcttttcaaaacattccagaccatttccattttcttggatcataatatcgtgctttttctctttctgttttttaaactktatcccttcttgtacagatgaaaccagtccttct

SEQ ID NO: 209265 - DNA, 423 bp, Homo sapiens
ccaggttaaaaaggctagccaatgcttgtgtaaaaaaaagaacaccacatattgttgtattatatgcaattggaaatgttcagttatcgcactttggtatccttttcagaaaaaaaaaaaatctcaaaacttataaacataagcatggcattttacattgtaccaactgagtaacagtaaatagatgaggtgtgaccactataacttcttgaccaactttctatcttgaaactacacacatccaaccctaccagctaccattctaattctacaggatattttccagtgagacaagctgtacaatgaccactcttttcaaaacattccagaccatttccattttcttggatcataatatcgtgctttttctctttctgttttttaaactttatcccttcttgyacagatgaaaccagtccttct

SEQ ID NO: 209266 - DNA, 574 bp, Homo sapiens
tcctaaccattttcaatcagcttcagataagtttctctttctctggaaccaagaaagggtagcaaagcataactttgaaatttatttttgacctattctcaaggaagactggaaaatagtctattaatgatattgaatacatttacctatggtggtgaacatttgcatttttgatagtgaattatttggttacaccattgacacctttattaatttgcaagaactctttaaatattgtggcataaactctcctatatgtgttacactcatttttcctactttttaaaaatgtgttgccgtttgctttgctttcaaaatgaactttaaaaaagtttttcttttttaaatatagggttacttcatttttaaattatatttatttagtttttagatctcaggtacgtaagattatattaatcatatgcctaattatggtgcaccattaacaatggttcatgtgacatgcctcctttgattgattgatagatggatttctttttatctcyattctccaatcttcttcctccccagattcattatgcaactactctactgtatttgatatctatctctc

SEQ ID NO: 209267 - DNA, 168 bp, Homo sapiens
cattcgattctattcggtgattccattcgattccatttgataatgattccaatcgagaccattcgatgattccattcaattccattcaatmatgatccctttcgagtccattcagtgattccattccagtccattcgatgattccatctgattccattcaatgaatcc

SEQ ID NO: 209268 - DNA, 289 bp, Homo sapiens
tcggtgattccattcgattccatttgataatgattccaatcgagaccattcgatgattccattcaattccattcaataatgatccctttcgagtccattcagtgattccattccagtccattcgatgattccatctgattccattcaatgaatccattcgawtccattctatgacgattccattcatttccatatgatgatgattccattcgattccattcaatgataccattcgattccattcgatgatgattgcaatcaattttattcgatgattccattcgaatcc

SEQ ID NO: 209269 - DNA, 289 bp, Homo sapiens
tcggtgattccattcgattccatttgataatgattccaatcgagaccattcgatgattccattcaattccattcaataatgatccctttcgagtccattcagtgattccattccagtccattcgatgattccatctgattccattcaatgaatccattcgattccattctatgacgattccattcatttccatatgatgatgattccattcgattccattcartgataccattcgattccattcgatgatgattgcaatcaattttattcgatgattccattcgaatcc

SEQ ID NO: 209270 - DNA, 601 bp, Homo sapiens
attgatgatggttatttttgattccatttgatgatgattacattcgattccatttgatcataattccattcgattccactcgatgattccattcgattccattyaatgatgattccattcgagttcattgactgttccattccattccattcgatgattccattcgagtccattcgatgattctattcgattgcatttgataattccattcgattgcattcgataattccattcgattccattggaggataattccatttgagtccattcgatgattgttccattcgattctattcggtgattccattcgattccatttgataatgattccaatcgagaccattcgatgattccattcaattccattcaataatgatccctttcgagtccattcaatgattccattccagtccattcgatgattccttctgattccattcaatgaatccattcgattccattctatgacgattccattcatttccatctgatgatgattccattcgattccattcaatgataccattcgattccattcgatgatgatttcaatcaattttattcgatgattccattcgaatccattcgatgatgagtccat

SEQ ID NO: 209271 - DNA, 601 bp, Homo sapiens
attgatgatggttatttttgattccatttgatgatgattacattcgattccatttgatcataattccattcgattccactcgatgattccattcgattccattcaatgatgattccattcgagttcattgactgttccattccattccattcgatgattccattcgagtccattcgatgattctattcgattgcattygataattccattcgattgcattcgataattccattcgattccattggaggataattccatttgagtccattcgatgattgttccattcgattctattcggtgattccattcgattccatttgataatgattccaatcgagaccattcgatgattccattcaattccattcaataatgatccctttcgagtccattcaatgattccattccagtccattcgatgattccttctgattccattcaatgaatccattcgattccattctatgacgattccattcatttccatctgatgatgattccattcgattccattcaatgataccattcgattccattcgatgatgatttcaatcaattttattcgatgattccattcgaatccattcgatgatgagtccat

SEQ ID NO: 209272 - DNA, 601 bp, Homo sapiens
attgatgatggttatttttgattccatttgatgatgattacattcgattccatttgatcataattccattcgattccactcgatgattccattcgattccattcaatgatgattccattcgagttcattgactgttccattccattccattcgatgattccattcgagtccattcgatgattctattcgattgcatttgataattccattcgattgcattcgataattccattcgattccattggaggataattccatttgagtccattcgatgattgttccattcgattctattcggtgattccattcgattccatttgataatgattccaatcgagaccattcgatgattccattcaattccattcaatmatgatccctttcgagtccattcaatgattccattccagtccattcgatgattccttctgattccattcaatgaatccattcgattccattctatgacgattccattcatttccatctgatgatgattccattcgattccattcaatgataccattcgattccattcgatgatgatttcaatcaattttattcgatgattccattcgaatccattcgatgatgagtccat

SEQ ID NO: 209273 - DNA, 601 bp, Homo sapiens
attgatgatggttatttttgattccatttgatgatgattacattcgattccatttgatcataattccattcgattccactcgatgattccattcgattccattcaatgatgattccattcgagttcattgactgttccattccattccattcgatgattccattcgagtccattcgatgattctattcgattgcatttgataattccattcgattgcattcgataattccattcgattccattggaggataattccatttgagtccattcgatgattgttccattcgattctattcggtgattccattcgattccatttgataatgattccaatcgagaccattcgatgattccattcaattccattcaataatgatccctttcgagtccattcaatgattccattccagtccattcgatgattccwtctgattccattcaatgaatccattcgattccattctatgacgattccattcatttccatctgatgatgattccattcgattccattcaatgataccattcgattccattcgatgatgatttcaatcaattttattcgatgattccattcgaatccattcgatgatgagtccat

SEQ ID NO: 209274 - DNA, 446 bp, Homo sapiens
gaattccatttgatgacaattscattcaataccaattgatgatgtttatttttgattccatttgatgatgattacattcgattccatttgatcataattccattcgattccactcgatgattccattcgattccattcaatgatgattccattcgagttcattgactgttccattccattccattcgatgattccattcgagtccattcgatgattctattcgattgcattcgataattccattcgattgcattcgataattccatttgattccatttgagaataattccatttgagtccattcgatgattgttccattcgattctattcggtgattccattcgattccatttgataatgattccaatcgagaccattcgatgattccattcaattccattcaatcatgatccctttcgagtccattcaatgattccattccagtc

SEQ ID NO: 209275 - DNA, 446 bp, Homo sapiens
gaattccatttgatgacaattccattcaataccaattgatgatgkttatttttgattccatttgatgatgattacattcgattccatttgatcataattccattcgattccactcgatgattccattcgattccattcaatgatgattccattcgagttcattgactgttccattccattccattcgatgattccattcgagtccattcgatgattctattcgattgcattcgataattccattcgattgcattcgataattccatttgattccatttgagaataattccatttgagtccattcgatgattgttccattcgattctattcggtgattccattcgattccatttgataatgattccaatcgagaccattcgatgattccattcaattccattcaatcatgatccctttcgagtccattcaatgattccattccagtc

SEQ ID NO: 209276 - DNA, 446 bp, Homo sapiens
gaattccatttgatgacaattccattcaataccaattgatgatgtttatttttgattccatttgatgatgattacattcgattccatttgatcataattccattcgattccactcgatgattccattcgattccattcaatgatgattccattcgagttcattgactgttccattccattccattcgatgattccattcgagtccattcgatgattctattcgattgcattcgataattccattckattgcattcgataattccatttgattccatttgagaataattccatttgagtccattcgatgattgttccattcgattctattcggtgattccattcgattccatttgataatgattccaatcgagaccattcgatgattccattcaattccattcaatcatgatccctttcgagtccattcaatgattccattccagtc

SEQ ID NO: 209277 - DNA, 446 bp, Homo sapiens
gaattccatttgatgacaattccattcaataccaattgatgatgtttatttttgattccatttgatgatgattacattcgattccatttgatcataattccattcgattccactcgatgattccattcgattccattcaatgatgattccattcgagttcattgactgttccattccattccattcgatgattccattcgagtccattcgatgattctattcgattgcattcgataattccattcgattgcattcgataattccatttgattccatttgagaataattccatttgagtccattcgatgattgttccattcgattctattcggtgattccattcgattccatwtgataatgattccaatcgagaccattcgatgattccattcaattccattcaatcatgatccctttcgagtccattcaatgattccattccagtc

SEQ ID NO: 209278 - DNA, 549 bp, Homo sapiens
caattccattcaataccaattgatgatgtttatttttgattccatttgatgatgattacattcgattccatttgatcataattccattcgattccactcgatgattccattcgattccattcaatgatgattccattcgagttcattgactgttccattccattccattcgatgattccattcgagtccattcgatgattctattcgattgcattcgataattccattcgattgcattcgataattccatttgattccatttgagaataattccatttgagtccattcgatgattgttccattcgattctattcggtgattccattcgattccatttgataatgattccaatcgagaccattcgatgattccattcaattccattcaatmatgatccctttcgagtccattcaatgattccattccagtccattcgatgattccatctgattccattcaatgaatccattcgattccattctatgacgattccattcatttccatctgatgatgattccattcgattccattcaatgataccattcgat

SEQ ID NO: 209279 - DNA, 499 bp, Homo sapiens
atgacccgtttcatttccattctatgaggattccattcggttccatttgatgatgattcctttgaattccatttgatgacaattccattcaataccaattgatgatggttatttttgattccatttgatgatgattacattcgattccatttgatcataattccattcgattccactcgatgattccattcgattccattcaatgatgattccattcgagttcattgactgttccattccattccattcgatgattccattcgagtccattcgatgattctattcgattgcattcgataattccattcgattgcattcgataattccwttcgattccatttgaggataattccacttgagtccattcgatgattgttccattcgattctatttggtgattccattcgattccatttgataatgattccaatcgagaccattcgatgattctattcaattccattcaacaatgatccctttcgagtccattcaatgattc

SEQ ID NO: 209280 - DNA, 499 bp, Homo sapiens
atgacccgtttcatttccattctatgaggattccattcggttccatttgatgatgattcctttgaattccatttgatgacaattccattcaataccaattgatgatggttatttttgattccatttgatgatgattacattcgattccatttgatcataattccattcgattccactcgatgattccattcgattccattcaatgatgattccattcgagttcattgactgttccattccattccattcgatgattccattcgagtccattcgatgattctattcgattgcattcgataattccattcgattgcattcgataattccattcgattccatttgaggataattccayttgagtccattcgatgattgttccattcgattctatttggtgattccattcgattccatttgataatgattccaatcgagaccattcgatgattctattcaattccattcaacaatgatccctttcgagtccattcaatgattc

SEQ ID NO: 209281 - DNA, 499 bp, Homo sapiens
atgacccgtttcatttccattctatgaggattccattcggttccatttgatgatgattcctttgaattccatttgatgacaattccattcaataccaattgatgatggttatttttgattccatttgatgatgattacattcgattccatttgatcataattccattcgattccactcgatgattccattcgattccattcaatgatgattccattcgagttcattgactgttccattccattccattcgatgattccattcgagtccattcgatgattctattcgattgcattcgataattccattcgattgcattcgataattccattcgattccatttgaggataattccacttgagtccattcgatgattgttccattcgattctattyggtgattccattcgattccatttgataatgattccaatcgagaccattcgatgattctattcaattccattcaacaatgatccctttcgagtccattcaatgattc

SEQ ID NO: 209282 - DNA, 499 bp, Homo sapiens
atgacccgtttcatttccattctatgaggattccattcggttccatttgatgatgattcctttgaattccatttgatgacaattccattcaataccaattgatgatggttatttttgattccatttgatgatgattacattcgattccatttgatcataattccattcgattccactcgatgattccattcgattccattcaatgatgattccattcgagttcattgactgttccattccattccattcgatgattccattcgagtccattcgatgattctattcgattgcattcgataattccattcgattgcattcgataattccattcgattccatttgaggataattccacttgagtccattcgatgattgttccattcgattctatttkgtgattccattcgattccatttgataatgattccaatcgagaccattcgatgattctattcaattccattcaacaatgatccctttcgagtccattcaatgattc

SEQ ID NO: 209283 - DNA, 313 bp, Homo sapiens
attcgagaccattcgatgattgcattcaattcattcgatgacgattccattcaattctgttcaatgattccatcagattccatttgatgatgattccattcgattccatttgatgatgattccatgcgattccattagatgatgacccctttcatttccattcaatgaggwttccattcggttccatttgatgatgattcctttgaattccatttgatgacaattccattcaataccaattgatgatggttatttttgattccatttgatgatgattacattcgattccatttgatcataattccattcgatt

SEQ ID NO: 209284 - DNA, 542 bp, Homo sapiens
tgaattccatttgatgacaattccattcaataccaattgatgatggttatttttgattccatttgatgatgattacattcgattccatttgatcataattccattcgattccactcgatgattccattcgattccattcaatgatgattccattcgagttcattgactgttccattccattccattcgatgattccattcgagtccattcgatgattctattcgattgcattcgataattccatkcgattgcattcgataattccattcgattccatttgaggataattacatttgagtccattcgatgattgttccattcgattctattcggtgattccattcgattccatttgataatgattccaatcgagaccattcgatgattccattcaattccattcaataatgatccctttcgagtccattcaatgattccattccagtccattcgatgattccatctgattccattcaatgaatccattcgattccattctatgacgattccattcatttccatctgatgatgattccattcga

SEQ ID NO: 209285 - DNA, 542 bp, Homo sapiens
tgaattccatttgatgacaattccattcaataccaattgatgatggttatttttgattccatttgatgatgattacattcgattccatttgatcataattccattcgattccactcgatgattccattcgattccattcaatgatgattccattcgagttcattgactgttccattccattccattcgatgattccattcgagtccattcgatgattctattcgattgcattcgataattccattcgattgcattcgataattccattcgattccatttgaggataattmcatttgagtccattcgatgattgttccattcgattctattcggtgattccattcgattccatttgataatgattccaatcgagaccattcgatgattccattcaattccattcaataatgatccctttcgagtccattcaatgattccattccagtccattcgatgattccatctgattccattcaatgaatccattcgattccattctatgacgattccattcatttccatctgatgatgattccattcga

SEQ ID NO: 209286 - DNA, 542 bp, Homo sapiens
tgaattccatttgatgacaattccattcaataccaattgatgatggttatttttgattccatttgatgatgattacattcgattccatttgatcataattccattcgattccactcgatgattccattcgattccattcaatgatgattccattcgagttcattgactgttccattccattccattcgatgattccattcgagtccattcgatgattctattcgattgcattcgataattccattcgattgcattcgataattccattcgattccatttgaggataattacrtttgagtccattcgatgattgttccattcgattctattcggtgattccattcgattccatttgataatgattccaatcgagaccattcgatgattccattcaattccattcaataatgatccctttcgagtccattcaatgattccattccagtccattcgatgattccatctgattccattcaatgaatccattcgattccattctatgacgattccattcatttccatctgatgatgattccattcga

SEQ ID NO: 209287 - DNA, 564 bp, Homo sapiens
ttaattacaatacagtgcagacagcaattgatgctcagtaaacccaccttatggatgggaaacaattatttgacatgacttgcatagttagtaagtgatgggcaaagattttgttaacatcttctgattccatgaactattctttggagagaaacctttgggaaattttgcttaatgcttatcaaagtattagcagctctcaacatttacttaattaattaacaaattctaataattgagccagagacagtgtctcatctgtgctgttcawactagagaacaatcagaatacaattgggtagatatggaacaatatactggatcttcacacagacacacacacacagacacacacacacacatcttttcagggttgcacacaatgtatttagttcaaatgtggctaacctaaacaatttgccaaatagagcaagcacctaaatgggccagagagtaccagcagagacatttttgggtcaaaaggataccgatcttttgtggtcattgccagcttctactgctgcagatgcaaaaatcatgagtggaaacattcccatttactcc

SEQ ID NO: 209288 - DNA, 531 bp, Homo sapiens
tgaaaccactaaggcacaggcaaaacaagtcaccctaattaggcattatgggagaatacagtataaccacactaactgataagtaaagggtgaatttcttctaagttttaatatttaatttctaagacaaaatcattgaaactagaaggacaaaatcctgtcgtgacatggttaaatgtttcctagcatgcagattggttttcttcagccatttatttggaaaaataatatattttagctcrattttcacgattatataagacttactacattatgtaattcttatgtagtaagtcttctataatctgtgcaaaggatacaaggaacctttcaaaatgttcatggaagatgtgtattatgaaaaatctatgcatgaatttcaacaatattttatactaaaataagttcatactaacttgctataacaggtctcaatagggtccaggttgaggtgctaagattgataagccataagttcagaaagagcccttgtcagagtaacatgagttctgccaaaattaaagcagaacg

SEQ ID NO: 209289 - DNA, 571 bp, Homo sapiens
taaaacttaacctatgatcccttcattttggaatgtatattctatctaactttgcttcatttacatgagtatacctttctcctcccccaaaacataacagttcttgaagggcaagactgtgtcataatcacctctattttcccaacttctaacacagtgcctaatacatattaaaaactacctgaatatctgtcgaatgtaaggatgcagtattagtcactagaaagtgccagagctttgtccatattgtttgaagtttttatgtttaatcttggggaaaagattttctgaggacacaccatacaattgttgatgacagatactttttacaactaactgtcttagcctgttttgtattgctataacaaaacatcygagactgtgtaatttataataaaattaaatttttttggttcatggttctggaggctgggaagtccacaatcaaggggccacaactggagaaggccttcttactgtgtcattccatggcagaaggcagaagggcaaaacagagcaagaacaacagagaacaagaggggatcacacttacttttataggaaactcact

SEQ ID NO: 209290 - DNA, 571 bp, Homo sapiens
taaaacttaacctatgatcccttcattttggaatgtatattctatctaactttgcttcatttacatgagtatacctttctcctcccccaaaacataacagttcttgaagggcaagactgtgtcataatcacctctattttcccaacttctaacacagtgcctaatacatattaaaaactacctgaatatctgtcgaatgtaaggatgcagtattagtcactagaaagtgccagagctttgtccatattgtttgaagtttttatgtttaatcttggggaaaagattttctgaggacacaccatacaattgttgatgacagatactttttacaactaactgtcttagcctgttttgtattgctataacaaaacatctgagactgtgtaatttataataaaattaaatttttttggttcatggttctggaggctgggaagtccacaatcaaggggccacaactggrgaaggccttcttactgtgtcattccatggcagaaggcagaagggcaaaacagagcaagaacaacagagaacaagaggggatcacacttacttttataggaaactcact

SEQ ID NO: 209291 - DNA, 507 bp, Homo sapiens
tgcacgcacaccacaaaacaaagaacgggtgaaaagggcacacacacacttttgcagtttgcaccaaaccgaaatcaaaacccaaatcagagtatccagaaatccaagccaggtcaaaaccaaaaccaaagtatcaagcaatccaagtcargtcaaaaataaaaaccaaagtgccagtacaggcatgccgtgggtgatgaggccacgcttccactcaaatggagtaggcaagttcccaagaccggtcctgtcaagcagttcaaaccaagtcaaaaccaaaaccaaaactgaagtgctgataaaggcatgccatgggtgatcaggtcacgcttccactcaaacggagtgggcaagtttcaaagactagtcttaccaagttttagatgtccagactccaagtgcctgttccttcccggtgttcagccactgcgttgatcctccacgggggcctgccacacactgctctggcgaggcatcccaccggggcaagtgcctacccgggggcgc

SEQ ID NO: 209292 - DNA, 492 bp, Homo sapiens
atatcagagaaagagtgtccttgccatccacactacagcaaaactttggaggcttgaaccttgggtttgtaatctcacaactgagaggggtcccttcacactcttggaactctacacccattggaacccttaaratgaaactaaccaggaaaatttctccccagaagaagatggcatccttgatgtgaatggcttttcccaaggtcacggatcaatacttctactatcacaagagtcttatctttgaatactttttccttgtttatgactctatgaacaatagaaatggaaagggggtccattatgtgcacttatagggtatacttttatttgtgaaggattttgcagccagccttatacatgaataatcttatactttagtagataaaagataaaggccaatgtatgtgagaaactttagtggtacataagttgcctcataatcagtcaaaactcttcttaacccacatcttggattaaagagaacattgc

SEQ ID NO: 209293 - DNA, 614 bp, Homo sapiens
gagatctgattgctgctgaaagtggcttttagtgggaagaagagctgaaaaggggatggagtggaaagataatcttcccctgaagtctcctctgtaaagctatgccatcaagctgtccctctgaagtcaagccacttctctacaatgtccaactgtagtcttggatgtccagctgcttctctgtctgccagctgagcctggggtgtttaggggcatgggatgtgggggcagagcaggcaacatttgargggggaaacagggatgtaagttctcactttgggccatggtatcaggctttttggcttgagggtggggccctcaccagggacctgccctcttcttcccagaatttccctgcctcttgtctctatcactagaagatataaaaatgattccaatcaaaattggagagatgaaaactgtgatgtgagagatgcaaagtaaactggatgggattaatggcagattatacattgcagaaaaagattagtgaacttgaagacataataatagaaactacacaaaaggagaacagaaagaaataagaccaagggaaaaaaagatggaaaacagagatcagtaggctgtgggaaaacattaagaggcctaataca

SEQ ID NO: 209294 - DNA, 614 bp, Homo sapiens
gagatctgattgctgctgaaagtggcttttagtgggaagaagagctgaaaaggggatggagtggaaagataatcttcccctgaagtctcctctgtaaagctatgccatcaagctgtccctctgaagtcaagccacttctctacaatgtccaactgtagtcttggatgtccagctgcttctctgtctgccagctgagcctggggtgtttaggggcatgggatgtgggggcagagcaggcaacatttgaggggggaaacagggatgtaagttctcactttgggccatggtatcaggctttttggcttgagggtggggccctcaccagggacctgccctcttcttcccagaatttccctgcctcttgtctctatcactagaagatataaaaatgattccaatcaaaattggagagatgaaaactgtgatgtgagagatgcaaagtaaactggatgggattaatggcagattatacattgcagaaaaagattagtgaacttgaagacataataatagaaactacacaaaaggagaacagaaagaaataagaccaagggaaaaaaagatrgaaaacagagatcagtaggctgtgggaaaacattaagaggcctaataca

SEQ ID NO: 209295 - DNA, 312 bp, Homo sapiens
gaccaagccaaaacttcagcatttactcagtcattgtaagaacgttggcttttactcaaagctgaatcaaaggagggtgcagggtattggaaaggtgtggtgtgacttatattttaagagaatcactttgcccgttttgttgggaatagayggtagggacctaagggcaggagcagtgaaactaaacagattgctcttgcaacagtcccagtgaaagacaactgtggcctaaccggagctgtagtagtgaagatactgagaaatggccatccagcttctgcatgtattgtgaaggtggatccaacaggattt

SEQ ID NO: 209296 - DNA, 572 bp, Homo sapiens
tttacatacatgctttagcttgccaagtagatctggccatcctggccacatgatggcagaattctttgtatccactctgttgatttatcctaccccatataagtggatttgaccttctctggtagcaaagaggggcaaagagaacaatcaaaatggtcaccagcatcttgggttgcatcagaaagccactaggagaatgaacttcctttattctccccaaaactgacaggcagaacaggcaattccacaactataaacacttggcatatttactctgcttgaaagtctctgaaaactctaaaaaaagttaagattttttttttttaatgaacccttttggccaggtgcagtggctcacmtctataatcccagcagtttgggaggctgaggagggaagatcatttgaagccaggacttcaagaccagtctgatcaatatggtgagacttcatctttataaaaagaaaaaaaaaagttagccaagcgcggtaacatgtgcctgtagtcctaactactgaggaggctgagaagggagggtcccttgagcccaagagtttgaagctgctgtgagct

SEQ ID NO: 209297 - DNA, 563 bp, Homo sapiens
taaaataaataagaagtcgttgcttagctcaatcacctaccaygggacatttatctactgatttgatttgatctgggggcaaaggtttcagccttcagcctggtagtagccatatgcaaatgtatttgtgtctctcccaacctgacagataaacagacaggcatctagaagttatcaagtaaatacttagatgggattcttgtgttcagtgtgagtgttctcaaaatttcagtaaagagttctttcccctgggacattagatgtggcttaataatggccactagtatatttgtatttgcaatcaggcacaatgaacagaattgctcccaggttatcatttgggaatttaaacacactctttttcttttgccaggtccatttctggcatgtatggaatgaatcagtgtgccatccttttaaggcccattcattgtcttctggttttattttacgtccatttcttcctcttactagagaaaacaattgaattttgtggaagccccaggggtttgtgaatttcagagggacagggttttacctggaaagagaaaggatttttgatt

SEQ ID NO: 209298 - DNA, 563 bp, Homo sapiens
taaaataaataagaagtcgttgcttagctcaatcacctaccatgggacatttatctactgatttgatttgatctgggggcaaaggtttcagccttcagcctggtagtagccatatgcaaatgtatttgtgtctctcccaacctgacagataaacagacaggcatctagaagttatcaagtaaatacttagatgggattcttgtgttcagtgtgagtgttctcaaaatttcagtaaagagttctttcccctgggacattagatgtggcttaataatggccactagtatatttgtatttgcaatcaggcacaatgaacagaattgctcccaggttatcatttgggaatttaaacacactctttttcttttgccaggtccatttctggcatgtatggaatgaatcagtgtgccatccttttaaggcccattcattgtcttctggttttattttacgtccatttcytcctcttactagagaaaacaattgaattttgtggaagccccaggggtttgtgaatttcagagggacagggttttacctggaaagagaaaggatttttgatt

SEQ ID NO: 209299 - DNA, 543 bp, Homo sapiens
gcttcagccccctttccaggagagtgaacggttctgtcttgctggcattccaggtgccactgggatatggaaaaaagctcctgcagctagcttggtgtctgcccatatggccccccagttttgtgcttgaaacccagggccctggtggtgtagkcacccgagggaatctcctggaatgcaggttgtgaagaccatgggaaaagcatggtatctgggctggaatgcactgttcctcatggcacagtcccttatgacttcctttggctaggggagggagttccccgaccccttgtgcttcccgggtgaggtgatgccccaccctgcttctgctcgtcctctgcgggctgtacccactgtctaacctgtcccagtgagatgagccgggtacctcagttggaaatgcagaaatcaccgaccttcttcattgatcttgctgggagctgcagaccggagctgttcctatttggccatcttgcccaggaatccccagctttgttctttttgcttgggattgctttggctatatgggcttttttggttccg

SEQ ID NO: 209300 - DNA, 543 bp, Homo sapiens
gcttcagccccctttccaggagagtgaacggttctgtcttgctggcattccaggtgccactgggatatggaaaaaagctcctgcagctagcttggtgtctgcccatatggccccccagttttgtgcttgaaacccagggccctggtggtgtagtcacccgagggaatctcctggamtgcaggttgtgaagaccatgggaaaagcatggtatctgggctggaatgcactgttcctcatggcacagtcccttatgacttcctttggctaggggagggagttccccgaccccttgtgcttcccgggtgaggtgatgccccaccctgcttctgctcgtcctctgcgggctgtacccactgtctaacctgtcccagtgagatgagccgggtacctcagttggaaatgcagaaatcaccgaccttcttcattgatcttgctgggagctgcagaccggagctgttcctatttggccatcttgcccaggaatccccagctttgttctttttgcttgggattgctttggctatatgggcttttttggttccg

SEQ ID NO: 209301 - DNA, 543 bp, Homo sapiens
gcttcagccccctttccaggagagtgaacggttctgtcttgctggcattccaggtgccactgggatatggaaaaaagctcctgcagctagcttggtgtctgcccatatggccccccagttttgtgcttgaaacccagggccctggtggtgtagtcacccgagggaatctcctggaatgcaggttgtgaagaccatgggaaaagcatggtatctgggctggaatgcactgttcctcatggcacagtcccttatgacttcctttggctaggggagggagttccccgaccccttgtgcttcccgggtgaggtgatgccccaccctgcttctgctcgtcctctgcgggctgtacccactgtctaaccygtcccagtgagatgagccgggtacctcagttggaaatgcagaaatcaccgaccttcttcattgatcttgctgggagctgcagaccggagctgttcctatttggccatcttgcccaggaatccccagctttgttctttttgcttgggattgctttggctatatgggcttttttggttccg

SEQ ID NO: 209302 - DNA, 543 bp, Homo sapiens
gcttcagccccctttccaggagagtgaacggttctgtcttgctggcattccaggtgccactgggatatggaaaaaagctcctgcagctagcttggtgtctgcccatatggccccccagttttgtgcttgaaacccagggccctggtggtgtagtcacccgagggaatctcctggaatgcaggttgtgaagaccatgggaaaagcatggtatctgggctggaatgcactgttcctcatggcacagtcccttatgacttcctttggctaggggagggagttccccgaccccttgtgcttcccgggtgaggtgatgccccaccctgcttctgctcgtcctctgcgggctgtacccactgtctaacctgtcccagtgagatgagccgggtacctcagttggaaatgcagaaatcaccgaccttcttcattgatcttgctgggagctgcagaccggagctgtwcctatttggccatcttgcccaggaatccccagctttgttctttttgcttgggattgctttggctatatgggcttttttggttccg

SEQ ID NO: 209303 - DNA, 598 bp, Homo sapiens
aacaatagcatgagcgatttaggccttaaggacatgctcctgctgcagttaactagcccaacatattcctttaattcagcccatcccttcatttcccataagggatacttttagttaatttaatrtctatagaaacaatgctaatgactggtttgctgttaataaatatctgggtaaatctctgttcagggctctcagctctgaaggctgtgagacccctgatttcccacttcacacctctatatttctgtgagtgtctttaattcctctagtgccactgggttagggtctccccagctgagctggtcttggcaactgctaaattaaaactttaaatgatcacaaaatgatttgtcataaaagcatgtatatggccaggcacggtagctcatgcctgtaatccccgcactttgggaggccaaggtgggcagatcatctgaggttgggagttcgagaccagcctgaccaacatggagaaaccccatctctactaaaaatacaaaactagccagatgtggtggcacctgcctgcagtcccagctacttaggaggctgaggcaggaaaattgcttgaactcaggaagcagcagtcgtggtg

SEQ ID NO: 209304 - DNA, 598 bp, Homo sapiens
aacaatagcatgagcgatttaggccttaaggacatgctcctgctgcagttaactagcccaacatattcctttaattcagcccatcccttcatttcccataagggatacttttagttaatttaatgtctatagaaacaatgctaatgactggtttgctgttaataaatatctgggtaaatctctgttcagggctctcagctctgaaggctgtgagacccctgatttcccacttcacacctctatatttctgtgagtgtctttaattcctctagtgccactgggttagggtctccccagctgagctggtcttggcaactgctaaattaaaactttaaatgatcacaaaatgatttgtcataaaagcatgtatatggccaggcacggtrgctcatgcctgtaatccccgcactttgggaggccaaggtgggcagatcatctgaggttgggagttcgagaccagcctgaccaacatggagaaaccccatctctactaaaaatacaaaactagccagatgtggtggcacctgcctgcagtcccagctacttaggaggctgaggcaggaaaattgcttgaactcaggaagcagcagtcgtggtg

SEQ ID NO: 209305 - DNA, 546 bp, Homo sapiens
tctgtaaagttttctaggtagagcattatatcatcagtgtaagataatttaacttcctttttttctgtttagatgctttttatttctttagtttgttggattgctctgactaagacttctagarttatgttgaataggagtgttagagtgggtattcttgtcttatttttattctaatggagaatgcatgcagctattgccttttcagtataatgttggctgaggatttgtcatagatggctcttatcactttgaggtatgtttcatcaatgccttgtttgttgagaatattttcatgaatgaatattggattttcttcaatgctttttctgcatctattgtgttaatcttataatttttggcttttaattatttttacatggtgaatcgcacttataacttgcatatgatgaaacatccttgcatatgtggaataaaaatcacacggttgtggcaaaataactttctcatttgcttatgaactcagcttgccagtatttcatgcaggatttttgttttaatgtttatgaaaaatatcggcctgga

SEQ ID NO: 209306 - DNA, 546 bp, Homo sapiens
tctgtaaagttttctaggtagagcattatatcatcagtgtaagataatttaacttcctttttttctgtttagatgctttttatttctttagtttgttggattgctctgactaagacttctagaattatgttgaataggagtgttagagtgggtattcttgtcttatttttattctaatggagaatgcatgcagctattgccttttcagtataatgttggctgaggatttgtcatagatggctcttatcactttgaggtatgtttcatcaatgccttgtktgttgagaatattttcatgaatgaatattggattttcttcaatgctttttctgcatctattgtgttaatcttataatttttggcttttaattatttttacatggtgaatcgcacttataacttgcatatgatgaaacatccttgcatatgtggaataaaaatcacacggttgtggcaaaataactttctcatttgcttatgaactcagcttgccagtatttcatgcaggatttttgttttaatgtttatgaaaaatatcggcctgga

SEQ ID NO: 209307 - DNA, 496 bp, Homo sapiens
gagtatggagtgatcatcaaatctgtcctttaatttcaaggctctcagyctccatgttaaaatgctttggaccagtttcctttcacagagaatctaaccattgtatgaggctgggagaagtcctggaacaactgaggttttctggccagggcacatcctggtgttattcaaggcttctggactgaatccagcctttgacagctcatctacgtgttggtaaaggatctccaactatcttgtcacaaaatttttcttctttcctgtctgtggttactgtgtcttctatcctatctgtgtatgcaatgtgcaggaagtcttggtaaatcctgcagtactggggagcacgtggtatttccaagccaacagtgcaacgaagtggcaatagaaatcctcttcatgaggcacattgtcagtcctttgccatgcactgtagtttcccaactctcctccctttttgcactgctaaaaatcaggctctatgcctcttctgtgaatg

SEQ ID NO: 209308 - DNA, 536 bp, Homo sapiens
acaagtttccatttaccagactttttgggaatgacgaaaataggtgaattccaagggctgtctgatggttctaaatggccagcttttaatggctcctcaamtaatttatgggctcattgtaatttctctcccttcaaaggccactgttctacctaaattggatcttgagagagccacgtcaggggtaggggaggaataacaacagtggccattattagaaagaggtctgcagagtaaccccccattgggctaataggtcccatccacaaatattaactgggatgggcatgatttgaggttgtataactgctttccttctctctgaatcatgacatattaaggggtgtgtgctctgcttggctgtgtgcacttccctgatgatgacaattttttgtttctgagtgacccaaggccaagtttctggccagttttcatcactgatgatcaaaatgttcaccctgtgtccaataggccagtaaaatttttattttcaatttttaaggtaatcatgagtctctgatcagtgattgattggt

SEQ ID NO: 209309 - DNA, 645 bp, Homo sapiens
gaattctgagatgattctcctgacctctgccccctggtgttaatgctataattatgtgacatggcaagagaaattttgtggatgtcattaaagttagtaatcagcagaccttatgctagggagatgggtgggcctaacctaatcacagaagccctttgaaagcagagtcttctttggctagaaaaggccatcagaggttcatagtgggagacagatttgacttgaggctggttttcagttactgagttggaggggtccytgagacagaactgagaacagtctctaggagcagagagcagcaccttggctggcagctataaagaaggacctgggtccgggcgcagtggcccatgcctgtaatcccagcacttgggaggccaaggcaggtggatcacctgaggtcaggagtttgagactagcctggccaacatggtgaaaccccgtctctactaaaaatacaaaaattagccaggcatggtggcaggtgcctgtaatcccagctactcgggagactgaggtagaaaaatcgcttgaacctggaggtggaggttgcagtgagctgagattgggccactgcactccaacctgggcaagagagcaagactccatcgcaaaaaaaacagaattaagaaagacctgcgttac

SEQ ID NO: 209310 - DNA, 547 bp, Homo sapiens
tacttcaagtccttttaatctaggaaggccctataagagaaattaaacctcagtatttttcgcagaaataaaataggccacttttttttttctttgagatggagtctcactcttttcatccgggcaggagtgcagtggcatgatctcggctcactgcaacgtccacctcccrggttcaagagattctcgttactcagcctcccaagtagctggaattacaggtgcccgcgaccatgcctggctgatatttgtatttttattagagatagggtttcaccatgttggccaggctggtctcaaactccttacctcaggtgatccaccctcctcggcctccaaaagtgctgggattacaggcatgaacctctgtgcccagccaaaataagccatttcttgagggcatactttccatccctcaggatggctacagtcaggggatggcaaactccatttgccagcctccagccaatggaaagtcattaaaatcctgcaccaagattttcacttaggaacttccaacagtaattaacacaactagaaaaagtcc

SEQ ID NO: 209311 - DNA, 554 bp, Homo sapiens
aatggctggtccatataggtttgcagtgattttggttcttccattctcaaaagaaataatccagcccagagacgaagagtgggtttgaagcataagtggggggttgttgaaaggaaataaagtacccttgggaaagaaccaagggtgtgacttgagagatcaagtgccagagaaaggtcatataccagttaaactccaayatttggcctctcagtgtgcatgcttgggtgtcttgcccaatatttgagattttatgaaacagctgctgcccctgagctcaggatgtgttctgtgtttaggaggtttccccctccctggtaccagctgagaccatttgtcaatcctgagctgaccacctgataatcacctgacattcctggggcacattcccagggtctctaccttaccccactcattactatctgactacctgctctaactgggtgatcaagaatattcttttttctttttttctttttttaagatgcagtttcacttttgttgcctaggccagagcgcaatggtgcgatctcagctcatcacaacctccgcct

SEQ ID NO: 209312 - DNA, 554 bp, Homo sapiens
aatggctggtccatataggtttgcagtgattttggttcttccattctcaaaagaaataatccagcccagagacgaagagtgggtttgaagcataagtggggggttgttgaaaggaaataaagtacccttgggaaagaaccaagggtgtgacttgagagatcaagtgccagagaaaggtcatataccagttaaactccaatatttggcctctcagtgtgcatgcttgggtgtcttgcccaatatttgagattttatgaaacagctgctgcccctgagctcaggatgtgttctgtgtttaggaggtttccccctccctggtaccagctgagaccatttgtcaatcctgagctgaccayctgataatcacctgacattcctggggcacattcccagggtctctaccttaccccactcattactatctgactacctgctctaactgggtgatcaagaatattcttttttctttttttctttttttaagatgcagtttcacttttgttgcctaggccagagcgcaatggtgcgatctcagctcatcacaacctccgcct

SEQ ID NO: 209313 - DNA, 466 bp, Homo sapiens
ttctcaagaagcacctgaaggctgtaatccacctaaaaagaaagtaaaaattaaaaaaaaaaaaaagaaaagaaaagatggatccaggaagcccaggatctagtccaagagagaagcaaagggaatcccaygataacagtgaaggagatccaggatcacacctgagcaccaggcatcaagagcagcccctttagattagagcattgaaaaggctctggagagatttcttaagaagttgaggaagtacctaatgttttcaaatttattgaaaggagatttatacaagtggaagagagtttgggtatcaaattattgataagtacatagaaactaaggaaatgattaaaatgataataattcactacagggaacacaaaattttatgcagaaaggaaaaatcattatagcatgcaatatagtgtagctacctaaacactgttaatattattacatagtcacgattaca

SEQ ID NO: 209314 - DNA, 398 bp, Homo sapiens
agtagttactggtctgccctcctagctttttggacatrtccttactgttcataacaataccgaaagcctgcctttgcccttcagagccatagtcttcaggaagcacacatggccagtgctgcttttgagtgatttcttctgctgtgtagttgagttctcaaaagacagagatatttcttgcctgtgttgtagcctgtgctatgagtggcttttccatggcacctacatctggtggggagcttgagccatcacagtttctaactgagaaacctggttggtgatgcaacaggccaaagagggtaagaaaaaagaagagaagggaaatctatgctttctgtgtcttgcagcacatgctgtggatagatattagtcattgattcttggttgtttcattgctg

SEQ ID NO: 209315 - DNA, 609 bp, Homo sapiens
ctcaaagtactttgtgaggattacttttctaaaacaccgcatccacccacattctcacatccacatgaacattcatgcactcgtgaacagcacacatcttgagacggtacaaagtagcatcaacaaagggcaattaattcaaccattggagcctgtatgaaatagctgtatacagactggtttaacaaacttgaaatcaggtgcaatgatctccccttggcttagagataaggataatctatatacttaaaacaaaaattgagggattaaactttctggctccctacaagtaggaactataaaatygaaactcaatttcatcagcctcttagcagatgtcatgaacatcagcaaaatagtagaaactctaaaataggatgcttttggcttaagccaaaatttgtttcgagtgaatatgtgacattttaataaatctattattatgctagactgctgttgagggctggtctggtatcctcttgaacttgtcctaaacactgaattcccacctaaactaattcttaccacagttaaatagttcagtctacccttaaacaatcacttaaaatgtccactgaaagagggtagcatcttttctgatatgtctat

SEQ ID NO: 209316 - DNA, 581 bp, Homo sapiens
ttttgggggtaagaggtgtaatagctactctctaattgctaaacttgaggtggttattgagagcagcaggaagcagcgaaatgcctaggcagatggggcaagtccccaatgaaatcccacctccaagctgaagacattttaaagcctgaaagccgagctacaagttaaatccgccgatcagattgagaacttgtcttcctatttggcacactttcctctgattggtccccactcttcacctattatacatatacctaccmtttcctaactgttttttttacactattgtgcccaactttgggtggtgtcttcgctttaaccgtttctgcatgctcacaaaccaatcagcatgcactcctcattctgagtccataaaagcctctggatccagccacatgggggactttcccacctttgggtagggggccactactacatcccctctgtgctgaaaactgtttcatcgctcaataaaattcttctctgccctcctcacccttcagtgtccagggtaccctcattcttccccgggcacgctgcaagagcttgggaaccgctgaacatgggtgcaagctataaca

SEQ ID NO: 209317 - DNA, 581 bp, Homo sapiens
ttttgggggtaagaggtgtaatagctactctctaattgctaaacttgaggtggttattgagagcagcaggaagcagcgaaatgcctaggcagatggggcaagtccccaatgaaatcccacctccaagctgaagacattttaaagcctgaaagccgagctacaagttaaatccgccgatcagattgagaacttgtcttcctatttggcacactttcctctgattggtccccactcttcacctattatacatatacctaccctttcctaactgttttttttacactattgtgcccaactttgggtggtgtcttcgctttaaccgtttctgcatgctcacaaaccaatcagcatgcactcctcattctgagtccataaaagcctctggatccagccacatgggggactttcccacctttgggtagggggccactactacatcccctctgtgctgaaaactgtttcatcgctcaataaaattcttctctgccctcctcacccttcagtgtccagggtaccctcrttcttccccgggcacgctgcaagagcttgggaaccgctgaacatgggtgcaagctataaca

SEQ ID NO: 209318 - DNA, 649 bp, Homo sapiens
aatttaactaaagaagtgaaagatctatgcaaaaaaataaataaaacactgatgaaagaaattaaagtggacacaaaattagaaagatattccatgcccatgaattaaaataaatattgttaaaatgacaaacctacccaaaataatttacagwttcaatgcaatccgtagcaaaataccaattacactttttcacagaaatgtaaaaaaaaatcctaaaatgtatatgggaccacaaaataatttgtatagtcaaagcaatctgagcaaaaagaacaaagctgaaggcattacataacacgagtttaaaatatactacaaagctgtagtaatcaatacttaaattctgtggaccattgtgcaataaaagttataaaatgtaagtataagctaatcacagacatttcttatgcagagtattttagttattttaataaaaatttaaggacaagtgccagttatctcttcaaaaaatgtacttgtatcttttatttacaattccattttttttaaaaagaacaactagtgcttaatacagattacttaaagatagtggtactgattttctgggagaggatggaaaacagatgagatttagatcttggagaacagcttggaaaatagctaaaatggatagaattaagtaaaa

SEQ ID NO: 209319 - DNA, 649 bp, Homo sapiens
aatttaactaaagaagtgaaagatctatgcaaaaaaataaataaaacactgatgaaagaaattaaagtggacacaaaattagaaagatattccatgcccatgaattaaaataaatattgttaaaatgacaaacctacccaaaataatttacagawtcaatgcaatccgtagcaaaataccaattacactttttcacagaaatgtaaaaaaaaatcctaaaatgtatatgggaccacaaaataatttgtatagtcaaagcaatctgagcaaaaagaacaaagctgaaggcattacataacacgagtttaaaatatactacaaagctgtagtaatcaatacttaaattctgtggaccattgtgcaataaaagttataaaatgtaagtataagctaatcacagacatttcttatgcagagtattttagttattttaataaaaatttaaggacaagtgccagttatctcttcaaaaaatgtacttgtatcttttatttacaattccattttttttaaaaagaacaactagtgcttaatacagattacttaaagatagtggtactgattttctgggagaggatggaaaacagatgagatttagatcttggagaacagcttggaaaatagctaaaatggatagaattaagtaaaa

SEQ ID NO: 209320 - DNA, 449 bp, Homo sapiens
  misc_feature (1)...(449): n = A,T,C or G
actttgtatgaagactagggtganagaagaggttattaacaatgcaattgacctctgaactcagcttttaataaaagcaagaagaaacaagattttattgtagtgggttgatctttcagactgaaagtgtagggatatttgcaaatacataagaagcaacatccgtggtaagtaataagagtsacaaccactattcttcccagttattgtagcaaagacctacagttgctctgtaaattctcagtaaatttactagatccatctaattctactactgattaatgcatagatttttttaaaaacagtgccatcacaaccacacagaataaaaacatttaaaatatttttgcataaaatattttattaatccttacaataggccttgatatcgaacactacaattttaatttttcagtgaagtagctgtgactctttgatattaaggttgt

SEQ ID NO: 209321 - DNA, 430 bp, Homo sapiens
  misc_feature (1)...(430): n = A,T,C or G
gtganagaagaggttattaacaatgcaattgacctctgaactcagcttttaataaaagcaagaagaaacaagattttattgtagtgggttgatctttcagactgaaagtgtagggatatttgcaaatacataagaagcaacatccgtggtaagtaataagagtcacaaccactattcttcccagttattgtagcaaagacctacagttgctctgtmaattctcagtaaatttactagatccatctaattctactactgattaatgcatagatttttttaaaaacagtgccatcacaaccacacagaataaaaacatttaaaatatttttgcataaaatattttattaatccttacaataggccttgatatcgaacactacaattttaatttttcagtgaagtagctgtgactctttgatattaaggttgt

SEQ ID NO: 209322 - DNA, 432 bp, Homo sapiens
  misc_feature (1)...(432): n = A,T,C or G
tgtatgaagactagggtganagaagaggttattaacaatgcaattgacctctgaactcagcttttaataaaagcaagaagaaacaagattttattgtagtgggttgatctttcagactgaaagtgtagggatatttgcaaatacataagaagcaacatccgtggtaagtaataagagtcacaaccactattcttcccagttattgtagcaaagacctacagttgctctgtaaattctcagtaaatttactagatycatctaattctactactgattaatgcatagatttttttaaaaacagtgccatcacaaccacacagaataaaaacatttaaaatatttttgcataaaatattttattaatccttacaataggccttgatatcgaacactacaattttaatttttcagtgaagtagctgtgactctttg

SEQ ID NO: 209323 - DNA, 542 bp, Homo sapiens
cacttgggcaacataaccarcattgaatagaatttctgacttgcctcagagaacgtgatgtcttctctcacttaccaattgtaaatttcttactaaaattgatagcttaaaaataatttactgttttattccatcacataatggaatatttaaatttcagggcagtcttgactttttaagttaagaaataactttgtggtatccgtctgagagcttagaatatctataagtccccaaactgggagaaggtatgtgtcctccacacccatcaggagttgttggtaagtagcttctgtgtgaggtgagtgagtgagtgaggcataggtaattatgtataccttttgaaataacagttgctaataatttatccaggttcttagtatcaacctcaagctctgaatagatattagtaaatctatgatccctgatccagtcagccattcaatttttgttgttgttttgctttataaatatttttttcatagtttccactctacttcttttccttcattactgaatgccaaacttaattcagaattcca

SEQ ID NO: 209324 - DNA, 601 bp, Homo sapiens
ggatagactgattaacacaaccatgttgtaattagtctttagtggactctcaagatttttttctacagtcaaaggttccacttccattaataatgatagcccacaatataaagattcccagagaatagtgagaataagagaggttattaatgtgaagagctaatacgagttgctgcccttcatagaagattctgccaagcctttgaaaattcatcaagaattcctacagaataatggttgatggtaatggaaaattctcctggtatattctaaagggaacaaaaaagaaaggctaaaaatgttttgtctktttttaaagaaaataacatacatatgcaaaaataagactaaataaaaagtgatcacttgtgtcttgttgaaatgacagccgattttaaaattttccaaatattcactatattattttttaaagttaaaaaaaaagctttattgagatgtaattcactgtttaaaagtgcatgactcacctttattatattcaaagggttgtgcaaccatcattaccattaattttagaaacatttttgccatccaccccaaaataaatgctgtcccataacagttaattcttatttatttc

SEQ ID NO: 209325 - DNA, 581 bp, Homo sapiens
catcactatattgtaaattcttatctctgtatactgtacttctacatacaaatgttatgttaaagaattacttcatccccatgtgaccatctcacctcayaatcaaatgaccctaaatccctcactaacctacccccgccctcactaaaattaataataaatgctggtatatccagtgcattgttggcaccacaggaccagaaggcggtgaccccccgtacccagctttcactattttgtgtgtgtctattatttctcaacctgccgatccacctgggaacaaagagagagccccattacattgcgggctgctggtcagatcccacaatagagttcatgtcctttgcagtgacatggatgaagctggaaaccatcgttctcagcaaactatcgcaaggacaaaaaaccaaataccacatgttctcactcataggtgggaattgtacagtggtgttcttttttaatttattgagttggaattttgataggtgattatcagattttttttccttttctaacatattaaggctgaaagttttcctttaaatacaacttgatctacatcacatacctattaacat

SEQ ID NO: 209326 - DNA, 646 bp, Homo sapiens
gatgatttttgcctggagaaatcaacacacacttggttaactttcaaactaacctagtaggaaatttacacagtgaaatctgaacctactgctgttgcctcaagtgtgagcggctggctatttagcacaagcttatgttctatgtaacttttgtctgtatgtgatcaataccytatttcatctttccaagtataactagatagtgttgaggtatgtcagacacttgagtactgtgcgccattcccaactttaccctcttcttatacttatcaatggatgaatgtgaaaggtttagaaatttcagatattgaggagatgagcaattaaatgttacaatgtataatcttttataaggataatagttaaatgagtgccgttacatgttatacccattgagaattatccagctcaaatttgccaaccccagccaaaggtaactagtcaatttctcaaaaccaaaaagtgaaaaccaaaacaaaatcaagaggagaggaaatatgtgaatataagacacatagtgtaggagttctggatgggcattttatacagagaaggctttgaaatgagagatgagggagatactggaatttggtaggcctgtcaaagacagagaaaaataaaaagaaatttagaaaccattgctctg

SEQ ID NO: 209327 - DNA, 646 bp, Homo sapiens
gatgatttttgcctggagaaatcaacacacacttggttaactttcaaactaacctagtaggaaatttacacagtgaaatctgaacctactgctgttgcctcaagtgtgagcggctggctatttagcacaagcttatgttctatgtaacttttgtctgtatgtgatcaataccctatttcatctttccaagtataactagatagtgttgaggtatgtcagacacttgagtactgtgcgccattcccaactttaccctcttcttatacttatcaatggatgaatgtgaaaggtttagaaatttcagatattgaggagatgagcaattaaatgttacaatgtataatcttttataaggataatagttaaatgagtgccgttacatgttatacccattgagaattatccagctcaaatttgccaaccccagccaaagrtaactagtcaatttctcaaaaccaaaaagtgaaaaccaaaacaaaatcaagaggagaggaaatatgtgaatataagacacatagtgtaggagttctggatgggcattttatacagagaaggctttgaaatgagagatgagggagatactggaatttggtaggcctgtcaaagacagagaaaaataaaaagaaatttagaaaccattgctctg

SEQ ID NO: 209328 - DNA, 531 bp, Homo sapiens
  misc_feature (1)...(531): n = A,T,C or G
aatatctgcacagaaaaagaaaataagactgaatgtctnggtcctgtaggaccctgaagaaactgaaaggttgggcacggtcgtcacgcctgtgatcccagccctttgggaggccgaggcaggcggatcacgaggtcagaagatcgagaccatcctggctaacatggcgaaaccccgtctctactaaacacacacacacacactcacacacattagccgggcatggtggcgggtgcctgtagtcccagcttctagggaggctgaggcaggagaatggcatgaaccygggaggcggagcttgcagtgagccgagatcacaccactgcactccagcctgggcgacagagcccagctccgtctcaaaaaaagaaaaagaaaagaaaagaaattgacagagagaagccagctacgtaggcaatctgattttttttttttaagtctccccttggtatgtgttttgctttcaaatgtacattaggtgagtggtgtaaacaaatattttaccaccatgtaatgaggcggatcactagc

SEQ ID NO: 209329 - DNA, 520 bp, Homo sapiens
taaaacaacaataaatttttaaaaaacttgccaagttcaaaaatctaattattcaaagccaaagtataaaaccagttctgtgtggctcagggaatgagtttctatctaccactcckgaatcttccaacactaacatggcatctgtataacttaagattttttatttgcaaatcttaagagtttacttagcggaagactgaaacaaactcaagatgttgggaaaagttgtgttcatttaaggaatgaatacaattaataagaaacaatgactgacatgatgcctaagtcattcaaagggaaaacacaaacaaacccaaaaatatgaatgttgacgcactcactgagccagaatgtgaatgcagtattgcagaaagttctgactctatttaattaatatgtgcttttggcaaaataagtgaggatttggcccaagataatagcttagacatctgtgtactaggacctctgagcaagtgctccgtgtcatctatattcagcatcagacaattttgttataatc

SEQ ID NO: 209330 - DNA, 551 bp, Homo sapiens
ttttctttagccaatgacgtacttgacatctgtgcttggatatatcataatcattttaatctcagcatgtctaaagctgatcttctagttttcccatgtaaatctgatctgtccttagttgttcttcctcaaatgggtatcamctcatccttgctttcctcactctacctgccctcacatatctgatctattagaagacctctcagtgttgcctctgtttaatatcaagtccatccacgtctctttatcttcactgccactgacttagcccaacctattataatctcttctgtgggtgactgcactggactcttaacttgtgtatgtgcctgaagagctcttcccacatatcctttatattagccagagtgatttttaaacagaaccatgtccacaccctttttaaagtttttagactacaagaaacaaacaaaaaaatggccttaatacccaacagatccttggatattctggcctcttgttaagcctcagttgtgtttaaagcagtaggaggtgatatggtttgaatttttttccccttcaactctcat

SEQ ID NO: 209331 - DNA, 646 bp, Homo sapiens
catgtccacaccctttttaaagtttttagactacaagaaacaaacaaaaaaatggccttaatacccaacagatccttggatattctggcctcttgttaagcctcagttgtgtttaaagcagtaggaggtgatatggtttgaatttttttccccttcaactctcatgttaaatgtgattcccaatgttggaggtggggcctagtgggaggtgactggatggtggggktggatccctggatccttaggaatagtttagcatcatccctttggtgataagtgagttctcactcagttagttcatgacagctggttgtgtaaaagagttctggaacctccctcctctcactctcttgctcctactcttgtcacatgatacacctgctgccccttcgccttctgccatggttgtaagatcccttaggccctcagcagaagcagatgctggtaccatgtttcctgtacagcctgcagaattgtgaacccattaaacatcagtactttataaattacccagcctcagatattcctttatagtgaagtaaatggactaacacagcaagtttgggagtggggataacaggaataagactgaggggggaaaatgcatgttattccctatctatcttaatggctagcaaagaaccag

SEQ ID NO: 209332 - DNA, 328 bp, Homo sapiens
cttacacccatgttcatctctgacatttcctcctgatcccccattttattatttacatagctggtttcatgtagctttaagagctcagtgacatttctgacagacataagacctttttccrtgaagtggcctaaatgataatatgtaaagaccgaaaaccaactggagtatttgtttgtcagccttgaccattcagaaaaggcctgacactggtgtgttcgaacgaaagaggacaggtgatgggagagtgggagaaagagcctgggactgggggattggcagactgggggcctaggttcaaggccgaggtctgccttgatgcattgtt

SEQ ID NO: 209333 - DNA, 533 bp, Homo sapiens
gttataatttagacagattctcacaaagtggcacaagggaatgtacaagaaagttcactgaagcattggtcataatatcaagaaaacctatatacaacataaatatctaacaattcaggaatggaaaaattccactggaatataaaataggtggagtctaaacacaatggaacatcatacagcagttaaagtgaacaagaaacatgtaaacaaacatgaataaatattgaaaacctaatggtaataaaagcaagtttcgaaaggatatgaaagggataatatctaagcatgtatttttaaatatacaaaacaatactttatattgtttatggataaacacacatagtaaaagaggcttttaagtgtatctgtagtgtttctttaaaaaaaaatacagaagtgattttagcaagattgtgagatataaggttaatatacaaaagtccatcmctttcctatataccagcaatgaataagtggaatttgaaatataaaatatttaggtataaatttaacaagattttacaagatct

SEQ ID NO: 209334 - DNA, 577 bp, Homo sapiens
ttaatagcaacatatgtaaccgtgatggaatggtaaacttaatgttgccaaattttcttcctactttatacaatgaaatgaatcctgagaaacctttatggttgaaaagcattaaaataagtaatacagtatgtatacattcagatttcctgactgtatctactttacaggtgatatttcaatctcacatgtcaggtcaaaattaagatggtgtaccacattataaactgacttcaccctgagtgtggcactcagcctttgagtggattctggatgatagtaaccatatgtgggccaataaatgtagaaggagcaggttagccaaaatatttttgtggatagcaatatgctcacattccagctatctctgctctgtggctcctggggaacctcacaaacccagtgaaattcccaagtctggagatttttttttttaaaccaaaatggtagcaatccacctcttgacatttcaaatggcaattcctacaaactgatttttatttyaaatgttggagccctcctatctacccaaataattctacagaagactatataaacaaaaaaagaaagtgctctt

SEQ ID NO: 209335 - DNA, 577 bp, Homo sapiens
ttaatagcaacatatgtaaccgtgatggaatggtaaacttaatgttgccaaattttcttcctactttatacaatgaaatgaatcctgagaaacctttatggttgaaaagcattaaaataagtaatacagtatgtatacattcagatttcctgactgtatctactttacaggtgatatttcaatctcacatgtcaggtcaaaattaagatggtgtaccacattataaactgacttcaccctgagtgtggcactcagcctttgagtggattctggatgatagtaaccatatgtgggccaataaatgtagaaggagcaggttagccaaaatatttttgtggatagcaatatgctcacattccagctatctctgctctgtggctcctggggaacctcacaaacccagtgaaattcccaagtctggagatttttttttttaaaccaaaatggtagcaatccacctcttgacatttcaaatggcaattcctacaaactgatttttattttaaatgttggagccctcytatctacccaaataattctacagaagactatataaacaaaaaaagaaagtgctctt

SEQ ID NO: 209336 - DNA, 577 bp, Homo sapiens
ttaatagcaacatatgtaaccgtgatggaatggtaaacttaatgttgccaaattttcttcctactttatacaatgaaatgaatcctgagaaacctttatggttgaaaagcattaaaataagtaatacagtatgtatacattcagatttcctgactgtatctactttacaggtgatatttcaatctcacatgtcaggtcaaaattaagatggtgtaccacattataaactgacttcaccctgagtgtggcactcagcctttgagtggattctggatgatagtaaccatatgtgggccaataaatgtagaaggagcaggttagccaaaatatttttgtggatagcaatatgctcacattccagctatctctgctctgtggctcctggggaacctcacaaacccagtgaaattcccaagtctggagatttttttttttaaaccaaaatggtagcaatccacctcttgacatttcaaatggcaattcctacaaactgatttttattttaaatgttggagccctccyatctacccaaataattctacagaagactatataaacaaaaaaagaaagtgctctt

SEQ ID NO: 209337 - DNA, 595 bp, Homo sapiens
ggtcaacattacttttaaaataatattaggatataagctgtttcttcccctttcattctcttgtgagtgtactgtgcagttttccagaggctacagatgagtgccatcaccacagattgaaagcagatgcaggtatgagaacccatctatttagccagatgttatggagatgttcaaaaataatgaaacaatggtacttgctcactaattcattttgttttgaaaatatatcttcattaacatatgtattggttaacatatgatttatttattatagttgttaaatgacataataaatatatattataaaatatctgttttaatttccagtacagtaaatactgataaacataaacaaaaccttttaggawcctcagtgattttttaagaatgtaactagattctgaaatcaataagtttcatatactgacataatccttagtcatattcccttaaaacattccctgaaaacaccttgtacattggccttaaagaaacaaaatacagagacacaaatatataaaacgattttttcaaataaaacttttaattgtgttattaagtatttacttcttaattcaatttcatcattcaa

SEQ ID NO: 209338 - DNA, 464 bp, Homo sapiens
aattacttaaaagaagcttaatttaacttctgaagatgaaaataaagaaagcaatttctttataatgaagtcacattttctcaaaacaaaaaatgcttttctcctctataaaacttgttgagcaagtgtggtttaaagcaggaatatttaaatggagaatatgatttggtatcccctgaggtaagatcagttttcaaaggattaagcttgggaattttctcaaatgatttacctgctaatctggtaggccatgagagccagagtggcactacattttgctttatttctcagcctgggtgggcctaattttgggaataaggtagagaaatttgtgcttggaataawggaaaataaaaactgaaacatctgtgtgtcaagtacacacatctatatagtttgctgaatatctgtgaaacacactacatcttagacctttatttacctactgtgcaggagaatacaag

SEQ ID NO: 209339 - DNA, 412 bp, Homo sapiens
  misc_feature (1)...(412): n = A,T,C or G
nnnnnnnaggaggttaggagccaggagagctgatttacatgattgttagccaagagtgtgcttccaagtggacaggaggacttgaagccagtacacatggtcagaagaactaactccagcataagcagcaggttctcatttattcttaagtgaggacatytatgctaaagtgaagacagagagattgtttttgagccagaaggctgactcaagaaaactatattcctttatattcttgaaagggctattcatggagtgggtgtcccacagaaaccaagctacacagttagtgaccgccctagcactctttacataaaacttattattatgtgactcatccagcctcaccacatactgagcttctcctaagcagcaaaagccgtttgttttatcctgagagtgactggtagga

SEQ ID NO: 209340 - DNA, 414 bp, Homo sapiens
  misc_feature (1)...(414): n = A,T,C or G
nnnnnnnaggaggttaggagccaggagagctgatttacatgattgttagccaagagtgtgcttccaagtggacaggaggacttgaagccagtacacatggtcagaagaactaactccagcataagcagcaggttctcatttattcttaagtgaggacatcyatgctaaagtgaagacagagagattgtttttgagccagaaggctgactcaagaaaactatattcctttatattcttgaaagggctattcatggagtgggtgtcccacagaaaccaagctacacagttagtgaccgccctagcactctttacataaaacttattattatgtgactcatccagcctcaccacatactgagcttctcctaagcagcaaaagccgtttgttttatcctgagagtgactggtaggatt

SEQ ID NO: 209341 - DNA, 584 bp, Homo sapiens
gttcagtcttggccctcactatactgactatatgggcaaatagtttattgcttcattctagaaatagttctactttaaaaatttggccaaattttcatttttattttatttttatttttatttttatgggtacatagtaggtgcatatacttatggggtacatgagatatttgataccaacatacaatgtgtaataatcacatcaaggtaaatggggtatctatgacctcaagcatttatcctttctttgtgatatgaacattccaattatactcttttttgttattttaaaagtatcataaactatatttgaccataatcactctgttgtgctattaaatacaagatctyattcatatcgtctaactatatttgtgtaccaattaaccatccccacttctcccactttccactaacctttccagcctctggtaactgtcattcaactctttaactctttatctcaattgttttaatttttagctcctacaagtgagtaaaaacatgcaaagtttgtctttctgtgcctggcttatttcacttaacaaaaggtcctccagttccatccatgttgttgcaaatga

SEQ ID NO: 209342 - DNA, 482 bp, Homo sapiens
ggatcatgaaaaattaaagatcatggaagggtgctgagagattatggagcccagctcttgtctttacaagtagggagactgaggcccagggaaactagtgaccttgttcaaagtcacatatcaagtccaatttaagtcttgactgacgttcttccatgacaatgtttgaaatagctccacattctcttctgtgtgtactttatcatttttaaaactaattttcctccrttttcaagtttttaacttgcacaagtcctccagtcagtagtattggtgtgttcaccttgattttaagtatttcattactgtgactgtaccacagtatccataatatgctcatattaattattctcaacttacccactctttctgttctttttcttaataactccatatgccctttccctatgtgatgagttctttatgaatggcagtttcagattggctgctgggtattccctgtactttttctttattgagcc

SEQ ID NO: 209343 - DNA, 588 bp, Homo sapiens
gtattttcttattttctttgcattcagctatccctctaagagtgggcccataaagaatcttgcaaattagatgtcctagaggtgaaaatgttagtaccatagccagtcctagcatttagacctcataaaattattgtgtcagataatgggagcagggactataaagttcaagggactgtcaagttgaaattagacatgtaaagaatctgcatgcccttagctacaggaatataaacataaagatatagaaggtcagtctttctcagtagctgaatcaaagtyaaaagacatacaattttaagaataactcaaaaaacttccctgacattaactaccatcacatggtcagtgcacttctacctctacccaaattactttgctttatggccagaacagcaaataactaaaatctctgaacatgagaaactttgtgtcttacaagctggttctacggttgatatataatgctaagtttcagtaagttggtgatcagatcagattctttgcattcagaacctatatcttaccacatttcagatttgtagtcattaagaccgggaaacagaaaatacagactttttgtcttct

SEQ ID NO: 209344 - DNA, 546 bp, Homo sapiens
gcaagactgagtgggatctcctgcaagaatgtcttttttccacctcaggggtattttctattgtactatactagtttttcccaaatagcatatattcatttattacctgtgccctcttctacaacaactgactcaaagtctctggagaaatggtcaaaactctgcatttttttcatgtttcccagctgatccttatgtgcattaaagtttaagaacatgtgctccaacacctcacaggctttttagtaaagtcatttccccatctatatttgcaggactctctccttcagactcagttctaataattatatagttgatgatgattattacaataacaacataactctgaggcacaggcattagttatgttgcttgaagtaacatatctagtaactgatgayataaggattagaaccacttttgagctaaagattgggcaggcaggtcaactgagtaaaaggatactaagctttactcacaactctcctttataatgacagggcattgcaactggtccagactcctgtgtctccattaagtcatgcc

SEQ ID NO: 209345 - DNA, 559 bp, Homo sapiens
ccatggggatggaaccaagtcattcataagggatccacccctatgatctcaaacacctcctactaggcctacctccaacattgcaggtcacattttaacaagaggtttggaaacgacctacatccaaactatatcagaagcagaagtcagagtgatacaatttctggaattgatccactagtgaaggaatgcagaaagcctccaggaggagctataaaatatgagggaatggattatctccagagcctctagaatgaatgcagccctgtcaacttcttgattccagcccagtgaaaaccatttccgactrctgacatccagaactgtgaggtcatacatttgtgttgtttgaacaaaccactatgtttgtggtcatttgttatagcaacagtaggaaactaatagcagcccctagttgctttccttgctctaaaccgttcttctccatgatctgttctcaatctagcaaccagagtgaccctggtaaaacctaagtcatatcattctactgctttctgtttcactcagaagaaaaacagaaatccttacaatgacctgt

SEQ ID NO: 209346 - DNA, 559 bp, Homo sapiens
ccatggggatggaaccaagtcattcataagggatccacccctatgatctcaaacacctcctactaggcctacctccaacattgcaggtcacattttaacaagaggtttggaaacgacctacatccaaactatatcagaagcagaagtcagagtgatacaatttctggaattgatccactagtgaaggaatgcagaaagcctccaggaggagctataaaatatgagggaatggattatctccagagcctctagaatgaatgcagccctgtcaacttcttgattccagcccagtgaaaaccatttccgactactgacatccagaactgtgaggtcatacatttgtgttgtttgaacaaaccactatgtttgtggtcatttgttatagcaacartaggaaactaatagcagcccctagttgctttccttgctctaaaccgttcttctccatgatctgttctcaatctagcaaccagagtgaccctggtaaaacctaagtcatatcattctactgctttctgtttcactcagaagaaaaacagaaatccttacaatgacctgt

SEQ ID NO: 209347 - DNA, 532 bp, Homo sapiens
cttcccaccagtccccatctccagaactgggggtaacaattcaacatgggatttgggtggggacaaatayccaacttatatcatgctccaaatctggtgatgacaagaagaataagaagcaatctcaatcctgatttctactcttagagtctagtagatgagaccaagtggctaccaggcaactagataaaaaggaacagcattaaagagcagcgttaaaaagagaatgagagaatttatgtaacctggaagtcatggagaaaaaagaaaaaacaatccaaatgatagggcagggccaggggacaagacaaaggaaatagaaattgaatacttcaggacaagttgaacttggcaatgggctgagaaggaaaaggagatgaaaagggggagaattgtaaggaacctaagaataagcctagagtgggagaaaatgtggaaccagtcagagtcagtatggctagagtgtaggtcaaaggaaatatgtggaaggagatgggttggacacataagaagacaccacattatggaggca

SEQ ID NO: 209348 - DNA, 626 bp, Homo sapiens
tcaggccacccaaagaaattgcctcccaagttacagagacaggctgtgtatcaggatggcaaatgggaggttgcctgaataaaataaacaggcagtgtagaaaaatgaggttgattttaatatgattattttacatattggcctagatgggtagaatctatctacagcttctgttttagagaagagcaagacatgttggaaactacagggtcaataaagtcaatgtagtagtgagctttgaagaacctgaacctcaaataatcgaattctaccctgttgatcaccataccctctactaccaccaccataagtttaacaagagagacattaagaggtattacagcaccgctttcttactagctgcacaagtgtccaacaattctaattctgaccactgatcagatcaaatctgagctgaagcatggggttctaggccataattgccctattcractctgatctaaatttttgtttttaatttaccactatgcaacaagggcaacagggatgaaaaagcaaaagagaagatggaacaaagataagttgtccaggcttccctgagaggccaagcttcaagcccagtaactagtgagctatattgccatgtatgaaaaccaggggtgtcc

SEQ ID NO: 209349 - DNA, 411 bp, Homo sapiens
ccatattgtgcttaggcaaattcttaaaagatggtaacacattaagctaatcattaacactcctttatggatgtgacaatagaccaacttcaatttcatagtcactaaaattctaccctttaaggacagtatgtagaatcaaactacaaaaaaatgtagtttggtatatagcagaaagaacatagaactgagaaagaagaatctgctttctgcttacacttataccactaattatttctatgcacacttaygcccctaattaactgtgtgtctttgaataggtcctttttcccctctgatcaaccatgagtgaaatatgaggactggaatacatcatctcttaagtgtcatgaacactactacatgattctctgaatctttttcagtcctgatatggggaaagtgaaaggt

SEQ ID NO: 209350 - DNA, 443 bp, Homo sapiens
tggatggcaacaggcttgggtgacatggagctgttgccctcgccaactaaaaagcagctttaattatgtctgtaactcgaattaactaattcagagcatatttattgaatgttaaccacatgctaggcactcttccaggcactgaggatatagcagagagyaaccttccagtgaggaaatcataaaagcagaattaaaaagtaaaacatatagtatgttctttggtgataagtgctatatagaaaaataaaggatgaaaggaggaagagaataatggaatggtaaggtcaattctttttttgttgtttgtttgataggccttttattaagagtgtttgcaacatgtctcctatgccgtgggtgtcagtcagtgtcacaatgcaagctttgttctgaaaaagaatctcatagattttataggctctagaaggagagtgacattc

SEQ ID NO: 209351 - DNA, 443 bp, Homo sapiens
tggatggcaacaggcttgggtgacatggagctgttgccctcgccaactaaaaagcagctttaattatgtctgtaactcgaattaactaattcagagcatatttattgaatgttaaccacatgctaggcactcttccaggcactgaggatatagcagagagtaaccttccagtgaggaaatcataaaagcagaattaaaaagtaaaacatatagtatgttctttggtgataagtgctatatagaaaaataaaggatgaaaggaggaagagaataatggaatggtaaggtcaattctttttttgttgtttgtttgataggccttttattaagagtgtttgcaacatgtctcctatgccgtgggtgtcagkcagtgtcacaatgcaagctttgttctgaaaaagaatctcatagattttataggctctagaaggagagtgacattc

SEQ ID NO: 209352 - DNA, 566 bp, Homo sapiens
gggggtggggtgcagataatagagggcctcttgttattgagcaaaaggagcttgctgccatatgcactagaagccaatgctatgacaccgggttttgagaaaataaacactgtgtattgaaagtcaactctcaaggagataggagccaagctcaaatctccctatgctggcttcaaggcagtatattttaactagaaaaggttcagggagtggattttgagattagtaagtgactggtggaaggaaaggagagctctggaaaggccttgggcacgtgcagttatctcctcatgctacttctgggttgcatgtgcaaattcagggggagttagtagaaaacgtggtgtaaatttgggctgtgacatcagcaagctcgctctgcacagactccagtaggccacattggttccaaaggatttcagccagtttttttaatctcataagcagagggagattcagtgtttcagcaagttggtttttttttttccttttctttttttatttttttttgttttgttttgtttatyttttgagatggagtcttgctctgtcacccaggctggtga

SEQ ID NO: 209353 - DNA, 542 bp, Homo sapiens
ctatgatggctataacttttttaatgggaattaaatgttggccaggatgtggagaatatgggaaccatgtaccctgctggtgggaatgtaaaatgtttcagccactatggaaaacagtttgacagtttctcaaattaccatagatttagcatagatctagcaattctacttctaggtacatattcaraagaactgaaaactgatactcaaacaaatacatatatactcatattcatagcagcactattcaaaatgaccagaaagtgaaaacaacccaaatgttcatcaatggacaaatagataaacaaattgtggcatatacatagaatagaatactattcatttataagaaatgaaataccgatacatgctacaacatggatgaacctcaaaaatatttgaagtaaaaagagccagtcatgaaagaccacacattgtagaatttcatgtatatgaaatatctcgaataggcaaattcatagaaacagaaagcagattggtggttaccagagaacagagggagaagaatatgggaagcaact

SEQ ID NO: 209354 - DNA, 673 bp, Homo sapiens
catattgtaggcagtgtcctattttatcaaggacatttaggtaaaaattttataagctgacggtgcatatacttcatcatggataatacccagtagttattactagataaaaattttgatatataaataaaatttaaatatgccagagagcttgcttatttctggtaaattcatttgtaaggcaaattatcacactcttcttttcatgggcacaaattattttttccccagtgtgtgtagamcagtaagacaggaaaatacatctagcagtcaattcatagagctttttctttttgatcttcagaatgctaaaacatgtatatttctatagccaatatgaaatgttggtaatagggttcttagaattttattataaactatctagaaaactctaagtaatttgtagcttagacatagatgtgtaccaaaaagatgttggtatctttatttaaaatgcagtggatttatactttttggacaaagaacaacacaaattttagggatttgatagaatgtataagccaggcacaaacatattattatatcaaaacagatataaaatagtatttagattacttcaaaagctatgaaattaaacttttcttgcctgctcaaatacaatccagtatcccaaatgtgtaatagttaatatacttccttctgtccagctgtg

SEQ ID NO: 209355 - DNA, 418 bp, Homo sapiens
gggtagtttccaagccccaaaccaaaagtctgttagataccgctttcaagcaactggtgggatgagttttctaatyagggtgtttcagcttggaaacatcttagctcaggggcgcaaacaggatgtttggagctgccttctctgggaacaaagtgatgtgtgaccacccttttctcactcattatggacactgagctcttagtgtcataatttgggtttctttatcagccacaagaaatccgtttcatccagagaccttgaggtcttatttccagtttcatttcataacctttaaagccactcagtgatgtatttcaaatctatgtcttcatttttatctcccaatccttttttgtcttagaattaaagccatatttttgtttgcttgtttgtttcccatttttatctcaaactgtct

SEQ ID NO: 209356 - DNA, 382 bp, Homo sapiens
ttggaatgtcatatcctgaataataattctcacagttttagaaattactgatcacaatcattgcctrtgtcagtaaaaagagatataaccctaataatcaggaatacttcttagtatttttcaatcaaagtgatattttcctgtcagtggccatttcttttgtgcttactcaagtcctaggtaatatgtatatgaacacttggatatttcatacacctcgtaaaaacttcagtggaatgaatgcatttctttggagagaaatgaggcaaacttggtatttatcttatcaagaaagcaggttattcgaccattttaacacatgatataaattaaattatagatgaaatatagatgaaatccaatgtattgaaaacattaagaa

SEQ ID NO: 209357 - DNA, 382 bp, Homo sapiens
ttggaatgtcatatcctgaataataattctcacagttttagaaattactgatcacaatcattgcctatgtcagtaaaaagagatataaccctaataatcaggaatacttcttagtatttttcaatcaaartgatattttcctgtcagtggccatttcttttgtgcttactcaagtcctaggtaatatgtatatgaacacttggatatttcatacacctcgtaaaaacttcagtggaatgaatgcatttctttggagagaaatgaggcaaacttggtatttatcttatcaagaaagcaggttattcgaccattttaacacatgatataaattaaattatagatgaaatatagatgaaatccaatgtattgaaaacattaagaa

SEQ ID NO: 209358 - DNA, 278 bp, Homo sapiens
ttggaatgtcatatcctgaataataattctcacagttttagaaattactgatcacaatcattgcctatgtcagtaaaaagagatataaccctaataatcaggaatacttcttagtatttttcaatcaaagtgatattttcctgtcagtggccatttcttttgtgcttactcaagtcctaggtaatatgtatatgaacacttggatatttcatacacctcrtaaaaacttcagtggaatgaatgcatttctttggagagaaatgaggcaaacttggtat

SEQ ID NO: 209359 - DNA, 382 bp, Homo sapiens
ttggaatgtcatatcctgaataataattctcacagttttagaaattactgatcacaatcattgcctatgtcagtaaaaagagatataaccctaataatcaggaatacttcttagtatttttcaatcaaagtgatattttcctgtcagtggccatttcttttgtgcttactcaagtcctaggtaatatgtatatgaacacttggatatttcatacacctcgtaaaaacttcagtggaatgaatgcatttctttggagagaaatgaggcaaacttggtatttatcttatcaagaaagcaggttattcgaccattttaacrcatgatataaattaaattatagatgaaatatagatgaaatccaatgtattgaaaacattaagaa

SEQ ID NO: 209360 - DNA, 468 bp, Homo sapiens
gctaaaaaatatccagggttcctagatgtgagggcagcccctttgttggccaatgacaagttacatggtttacccctgtcctatatcatcacctgtcaatatgacatcttaagagatgatggactcatgtacatcacgcgactktagaactctggagttcaagtgacacataaccacagtgaagatggattccatggagcactttcctataatgggcttaaaattgagtatggaatagaaaatcagtatatgagttggctaagtgaaaatctatagtaaaaatgtaagcaatggtttatttaaaatgtataaggctcagaacaggaaacaaattagtgaaaatcaaagggttgatgtttgaattggtctttatcatctgtgacctttctaaggtcctcatagccatagtgggttttggttttgtttttatttattggccgctagcaaattcttctccattttatttat

SEQ ID NO: 209361 - DNA, 619 bp, Homo sapiens
tccaatggattttggtttatataccactactagtgagttttgaacatccagatgatttgctgttgtttgttaacatctttttcaatcagattgaagaactccctttagcatttcttgtagaacaggtctggtattgatgaaatccctcagcttttgtttgtctggaaaagtctttataactccttcatgtttggaggatattttcactggatatatgattctaggataagtttttctctttcagccccttatatgtcatgccactctctcctggcctgtaaggtttccactgagagttctgctgccagacatattggagctccattgtgcattatttgtttcttttctcttgctgcttttaaaattatttatttatccttgacatttgagagtttgattattctgttttcaggtagcctactttgggttaaaattgcttgtttttctacaatcttcttatattgwatgttgatgtctttctctaggtttggaactttttctgttattaaacctttgaataaattttctttccctatgtctctccctcctgtttaagaccaataacatagatttgcatgattggaacggttttctagagattcttaagtgtgctttatcc

SEQ ID NO: 209362 - DNA, 578 bp, Homo sapiens
atttctgacattttggggcacccatcactcaagcagtgtacatggtacccaaaatgtagtcttatccatcaacccactcccacccttccctctgagttcccaaagtccattgtattattctcatgactttgcatcctcatagcttagctcccgcttaygtgtgagaacatacaatgtttcagtttccattcctgagttacttcacttagaataatggtcttcaatttgatttaggttgctgccaatgctattattttattccttttatggctgaatagtatatatatatataaatatatatatacattttgtctttatccactcattgattgatgggcatttgggctgataccatgtttttgcaatggcaaattgtgctgccataaagatgcgtgtgcaagtatctatttcgtataatgacttctttttcctctgggtagatacctagtaatgggattgctggataaaacagtaaatagacttttagttctttaaggaatccccacactgttttccatagtggttgtactggtttacatttccaccaacactgtaaaagtgttcccttttcatcacat

SEQ ID NO: 209363 - DNA, 580 bp, Homo sapiens
tttttggttttttggggggtttttttgtttgttttttgagatggagttttgctcttgtcatccaggctggagtgcaatggtgccatttcggctcactgcagcctccacttcctgggttcaagcaattctcctgcctcagcctccccagtagctgggattccaggcatgtgccaccatgcctggctaatttttgtatttttagtagagacggggtttcaccatgttggccgggttggtctcaaactcctgaccrcagatgatccactggcctcggcctcccaaagtgttgggattacaggcatgagccactgtgcccagcttaaggttattttcttaactataatattctcatttcagatgctgctcctcctcatggcatagaaggttttgttgttgtcattgttgttgctgttttttattcccttctgccaactgtgatgtattttcaccagtgccgtaggacagctttattggtgtccttcactcctgcatgttagggttttatttcttaagagagatagaggacaaggatcccaatggacttctgccaccattctgcagcagctgccatttccctccc

SEQ ID NO: 209364 - DNA, 569 bp, Homo sapiens
tactaaggcagaaaatggtatagctttcaattttacatttgtagataagtttccraagtgtttgtagaaatactttcagaatttaaataataagtaaaccctaggatcttattgtttgacccaattaaaggttaagatttaagtgtgttttcaatagcaaattaaggcttctctcaagttagaaaacttagaaagtggttttaatttgagagtatatcattcttatcaaattcatataagctttttaattaatacctatctttctttccaaataactcagaaatttgtttatgaactggaactatcactgtggatattgaaaagtatcacataaaagagtgaaaaccattttgaaaatggtttcatttactccctttaatcttctcaccttatctagaaaaagtggcgggacttcaaacaatctgtttaccaaatgaattctcattagttgttgatggaccaaagaagatttaactaaagcaatctttattgctatagaaaaacacaaggctaacactgacataaatcatgttatgtgcacatatagacattcaaaataaggcaaaata

SEQ ID NO: 209365 - DNA, 569 bp, Homo sapiens
tactaaggcagaaaatggtatagctttcaattttacatttgtagataagtttccaaagtgtttgtagaaatactttcagaatttaaataataagtaaaccctaggatcttattgtttgacccaattaaaggttaagatttaagtgtgttttcaatagcaaattaaggcttytctcaagttagaaaacttagaaagtggttttaatttgagagtatatcattcttatcaaattcatataagctttttaattaatacctatctttctttccaaataactcagaaatttgtttatgaactggaactatcactgtggatattgaaaagtatcacataaaagagtgaaaaccattttgaaaatggtttcatttactccctttaatcttctcaccttatctagaaaaagtggcgggacttcaaacaatctgtttaccaaatgaattctcattagttgttgatggaccaaagaagatttaactaaagcaatctttattgctatagaaaaacacaaggctaacactgacataaatcatgttatgtgcacatatagacattcaaaataaggcaaaata

SEQ ID NO: 209366 - DNA, 550 bp, Homo sapiens
ctgagtgctagctcataaaacttagtgaagataattaataacaggtgtgcacagctcattgtgagtggtaactaggggagaagatgggaaccagggaaaaagatrgtaaaggggagggagtggagacctttagagacaaggtgggaaagtgaaaaaggaaaaagagaacttggtaaataatttctagcttttcttctaactgtttttatatgaaatataaacactaacatgtaaaaagaaaatatttgaaggtataaaacccactggtaaaattaagtacgtgaacaaactcagaacgtgataatactgtagttgtggtgggcagtccactcacaactctagtatgaagcccagaatacaaatctatcaaaaataataatacctagaacaacttattaagagataggcaatatctattctatatttaggttaagttatatgatgatattattcaggacttttatgttcctataaatttgtcccctatttgttctataaaatgagagaagagttttgaaatcttcaactataactatgggtttatcaattc

SEQ ID NO: 209367 - DNA, 610 bp, Homo sapiens
atggtaatattgttgtttctgttgagaacaggcccccaaatctggccataaactggccccaaaactggccataaacaaaatctctgcagcactgtgacatgttcgtgatggccatgacacccacgctgaagttgtgggtttatcaaaatgagggcaaggaacatctggcccacccagggtggaaaactgcttaaaggtgttcctgagtcacaaaaaatagcatgagcgatctgtgccttaaggatgtgttcctgctgcagataactagccagagcccatccctttgtttaggcccatccctttgtttcccgtaaggaatacttttagttaatctataatctatagaaacaatacctatcactggcttgatgtcaataaatatgtcaataaacatatgctgtcaataaatatctctgttagtggctctcagstctgaaggctgtgagtcccctgatttcccagtccacattctatatttctgtgcatgtgtctttaattcctctagcgctgctggattagggtctccatgatcgagctggtcttgtcaagtggtgcccatacatggggcttgaacccaggtcgaagggtcgccagagcaatggttggagaa

SEQ ID NO: 209368 - DNA, 484 bp, Homo sapiens
tttcttttacattgaagattggaggggagctatgttgaaaaaaagaaataattttaaaacatttgctaattttacaaagcacttctacatcaatttgtagctactgagcaacctagactattttccctctgttagaaataagccctcgttctcttagagaatcagataatgatgaaaatccattaatatcatgaacataaaggaatcttttaatgaaaaatagttcattaaatcaacatttgttggccatctattctttgccagacactctgctagttactcaatttatagttttaataagacatgtctcctgttctcyctttggcaccttcctgcaatctcaccgtggagacagtatgtggaaaatgatgctttggagcctatgtactgaatcagagtttctggagaggggcttagaatctctggggtggaatctgctgtcttatcaaattcccaggtgattttgatgtatcctaaaatttga

SEQ ID NO: 209369 - DNA, 484 bp, Homo sapiens
tttcttttacattgaagattggaggggagctatgttgaaaaaaagaaataattttaaaacatttgctaattttacaaagcacttctacatcaatttgtagctactgagcaacctagactattttccctctgttagaaataagccctcgttctcttagagaatcagataatgatgaaaatccattaatatcatgaacataaaggaatcttttaatgaaaaatagttcattaaatcaacatttgttggccatctattctttgccagacactctgctagttactcaatttatagttttaataagacatgtctcctgttctccctttkgcaccttcctgcaatctcaccgtggagacagtatgtggaaaatgatgctttggagcctatgtactgaatcagagtttctggagaggggcttagaatctctggggtggaatctgctgtcttatcaaattcccaggtgattttgatgtatcctaaaatttga

SEQ ID NO: 209370 - DNA, 572 bp, Homo sapiens
agctagtcatctgacaggggattaatatccagaatatacaaagaactcaaacatctctacagcaaaaaacaaacaaacaaacaaacaaaaaagtaaaacacccaaacaatccaatttaaaaatggccaaatgatctgaactgatatttctcaaaagaagacatacatcaggccaaaaaatgcatttaaaaatgttcagtatcactcatcatcagggaactgcaaatcaacacaacaatgtggtatcatcttaccycatttaggatggcaattatcaaaaataaaataaaataaccacaggggcttgtgccttagtcccagctactcaggaggctgaagctggaggattgctggagctcaggggctcaaggctgcagtgagccatgatcatgctactgcagtccagcctgggtgacagagcaagattctgtctctaaaaatacaaataaaaaagacagaaaataacaaaggctgatgacgaggatgtggagaaaatgaaactcttgtacactattggtggaatataagttgttacagccactatggagaacagtgtgaaggttcctcaaaaac

SEQ ID NO: 209371 - DNA, 564 bp, Homo sapiens
catttaaaaatgttcagtatcactcatcatcagggaactgcaaatcaacacaacaatgtggtatcatcttaccccatttaggatggcaattatcaaaaataaaataaaataaccacaggggcttgtgccttagtcccagctactcaggaggctgaagctggaggattgctggagctcaggggctcaaggctgcagtgagccaygatcatgctactgcagtccagcctgggtgacagagcaagattctgtctctaaaaatacaaataaaaaagacagaaaataacaaaggctgatgacgaggatgtggagaaaatgaaactcttgtacactattggtggaatataagttgttacagccactatggagaacagtgtgaaggttcctcaaaaactacaaatagaactaccatatgacccagcaatgcaactactggacatctattcaaaggaaagaaaatcggtatattaaagagaaatctgcacccctatgtttattgcagcactactcacagtagccaagatatgaaatcacatagatgtccaacaacagatgaattaagaaaga

SEQ ID NO: 209372 - DNA, 545 bp, Homo sapiens
ctttcacagtcagggtatggttcactatatttttcactatctttatttttgtgcctattgcaattttataacatgacttttaaattcaccttgtaacaatatgacctcgaattttagctgatagaattctttcaatccaacatatagtattttggtggttctatgtgtagttggagaatcaggtcaaagatgtggaattgagttttgatattgaatttatggcacttatcagctatggagatggaacccatgaaaaggaayataaacatatgtatctgaatgccagagctatttgagctgcaaaaacagattttttggccatcggtatatattggtacttgaaaccacgattatacttccttcggtaactgacattttatagagtaagcagaagaggaacccgcacagaaaacagaaaatataagcagaaatatttcacaagatcaaatgagtgcagagtcatggaaactgaaagaactaggagttgttttgaaaaggaagtgagagagaaacattagagtggaaatttctcttgcatttcataa

SEQ ID NO: 209373 - DNA, 555 bp, Homo sapiens
aattctttcaatccaacatatagtattttggtggttctatgtgtagttggagaatcaggtcaaagatgtggaattgagttttgatattgaatttatggcacttatcagctatggagatggaacccatgaaaaggaacataaacatatgtatctgaatgccagagctatttgagctgcaaaaacagattttttggccatcggtatatattggtacttgaaaccacgattatacttccttcsgtaactgacattttatagagtaagcagaagaggaacccgcacagaaaacagaaaatataagcagaaatatttcacaagatcaaatgagtgcagagtcatggaaactgaaagaactaggagttgttttgaaaaggaagtgagagagaaacattagagtggaaatttctcttgcatttcataattaggaagcaatttgaaaccttgcttagagggcagattgcaatgagacaagaaatgattgaatctaacaaattgagactgagcatattctttcaagatatttgaacaagaaagggagaatagaatttggaagca

SEQ ID NO: 209374 - DNA, 514 bp, Homo sapiens
actgtttcagagactccttgcaacattttctctcagtgagatcacaattgtacacttgttaattagcatatttgggacccataatggaacacttaatgaatgtctaagacgaaatcatataaccctgtcgtgtttgagcagaatattaattaggaagctgtgaagtttcagagagtgacacattacagctccaatagttagaggaaaactagaccagtcagcctgattttatctgtacaagagcttctccacgaataaaaaattaaaaagaaatttagagccccaagggaaaaattaaagatcttatagaatggcaggaaaaagtaacaagggcaaagaaagtcaaattacaacagatgtactttttggtgggtcatttggattttgctggcgggataaccccagcaggaggggtattttcacatcrtttagcagaggtcacagcagggatgaggagttctaatcactttattagaattgcaaagtcattaaaggaggcatgagcatgtggaaa

SEQ ID NO: 209375 - DNA, 514 bp, Homo sapiens
actgtttcagagactccttgcaacattttctctcagtgagatcacaattgtacacttgttaattagcatatttgggacccataatggaacacttaatgaatgtctaagacgaaatcatataaccctgtcgtgtttgagcagaatattaattaggaagctgtgaagtttcagagagtgacacattacagctccaatagttagaggaaaactagaccagtcagcctgattttatctgtacaagagcttctccacgaataaaaaattaaaaagaaatttagagccccaagggaaaaattaaagatcttatagaatggcaggaaaaagtaacaagggcaaagaaagtcaaattacaacagatgtactttttggtgggtcatttggattttgctggcgggataaccccagcaggaggggtattttcacatcgtttagcagaggycacagcagggatgaggagttctaatcactttattagaattgcaaagtcattaaaggaggcatgagcatgtggaaa

SEQ ID NO: 209376 - DNA, 609 bp, Homo sapiens
atttctttacagtggcaaattcttacagttggcaacaaattcatttttctgaaaacattttgctttcattttcagaagatatttttgctggatctagatttctaggtgagacttccacttgtttccatgaaaaaataagataatcttgaattagctctggctgtcaattagaaaataaaaaatttactggtgggtttattagtctgttctyacattgctagaaggaaatacctgagactgggtaatttataaaaaaagaggttcaattggctcatggttctgtaggctgtatagcaaacatgatgtgggcatatgattggtttctaggaaggcctcaggaaacttacaatcatggcagaagacaaaaggagagcagataccacccatggccagagcaagaaaaaaagggaatgagccaagccaagtgctgcacttttaaatagccagaccttacaagtattcactcactatcatgaggacatcaccaaggaatggtgctaaaccattcatgagaaatttacccccatgatctaatcacctctcaccaggccccacctccaacattggggattacaattcaacatgggtgggaacacaaccctatatcat

SEQ ID NO: 209377 - DNA, 501 bp, Homo sapiens
ttaattttcagtctggatgatctgttcattgttgaaagtggagtatttaagtcctctatcattactgtgtcagtctcttattctcttcagatctattaatatttgctttatatatttaggtgccctgaagttgggtgcatgtatatttacaattgtatcttcttgatgagttgactcctttatcattatatgacccttcttctatcattttatagttttgacttatactctactttatctgatataactatcactatctctgctttcctttgttttccatttgcatggaatattttcatccattcactttcaatgtgtctgtgttcttaaaggtgacctgaaccttttataggcaggatacagttgggtcttgttttttatccattcagccactgtgtcttttgattggataataaaatccatttaygttcaagataattattgataagtaaggacttactactgctattttgttaacaattttgtggttgttctgtagat

SEQ ID NO: 209378 - DNA, 506 bp, Homo sapiens
ggactgtggcaaccacaaaggactggcaggacccagggagctgcaggattcccagaggtctaaccttcaatgcaaatttcctacaggaagaaagagtgcagtgtgccaaagcaccccttgggactaaggacaccaaagcatgtgtttttctgtgcctaagagctcctcacttgtgagctgaaggtgactgcacttctcccattggagacgtgggtgcagccagatggtaccagtgcttgcaracagatgtgtagagggagacttcttcccccttacccattgctctggatgcaaccacagctcttctggcaagagactggcatgggtatgcctatagatgaccattccaatgctattaggggcagctgtacctccctgggtatgtacccaccaggcctgggcttgcatgaatggctggcccctcgtcctctctatagggagtatcagcattcctgcagtggagattgggcaacctgcaaaactgtcagcttggggctgagggaaga

SEQ ID NO: 209379 - DNA, 640 bp, Homo sapiens
ctgcatagtttgtaattggagtttgctttatagcaccaaagcctgacaggtaaagtctgctggcttcaccggggcacctagataagggcttagaaaagtaaaaaggtttaagagaaaggtgggcagcacggagaggtttgggtggagtgttggcagtaccaagaagctttttagggcagtttgtccctaacagttaggcctctaggaaatgagtaagtgggattagtgcctttataaaagatgttgaagggagctgccttgccctttccaccatttgagaacacagcattctcttcttctgtcatgtaagagagcaggaccttatcagacatcagacactgaatatgctgacgtcttgatcttgcacttcccagcctccaaaactgtgaacaataaatacctgttgtttataggttacccaatctaagatattttgtcatggttgtctaagcagactaaaacggagtccaacagagaatgtgttggagattatgtttatacaataactttatcatgactttagcctgaatacrtaaagaataagacatttttccatttgtttcatttgtctgaaatgtctgtaggatggcagactttagcattaggatacatataattttctgaaggaatgttaaattct

SEQ ID NO: 209380 - DNA, 593 bp, Homo sapiens
aggctattgctacagaattctgtgacaattgtgaggtaagaacagtcccgaagtgatggaccaacgagtcagaggcaagataactgaaagcctctgtccccactgtcttccgagagctgtggtttgaccaggcagccccctatgcctcttccagactcaggcttctctctgcttctgcagtttctccaggtagatttgagggggcagagagttagcggtgaactagcagcctattctagttcactctcttgttttagccttccagcttcctgactctctaatcagtcagcatttcctttccacctgtaacagscttcatgaccttcaagccctttttctctaatcattgaaacttctagaaccgtagacactaatatacagatacattctttaaattattctaaatagatggttaaaacattacaatccggaacttagatcccaaatttcccatttttcaagttgttttaggagctactttggatctgacatgcttaactggttcttcaataacaaggctccatagcttatactgtaccccaaatagtatcctaatatctttaaaataaaaaataaataaataaaataaaaag

SEQ ID NO: 209381 - DNA, 600 bp, Homo sapiens
atttattggaactatttggaggttttttgaaatttactttggttctcagttggatcctggaaactttatgtcctcatactctcagagagtggtgtaacttactaatgtctttgggttataagtcagcaaggagtcagcataatgtaaggtggccaggtagacagggtttgactcttgcttttgtcacttgctagcttgaacaagtcacacagcacgtttgagcctcatttcagtcatctataaacctgtcataaatgttggtcagtattaaaggtcttgtgtggtataaatctaatactctaagtccatcacatctcttgaagaaaaagacttcatataacacaatgggtaaaatagattggtttacagagtttatctttgcaaaacaaaaccatattgtttaccatatgcaaaagtcacttttttycagctttgcctgtctttattgctagaattcttgtaataaaaatctctgccttctccttagattattattctagggatgatctgatgaccaggggtccagacaccatgctccaacttctacagtctcctcccactgccctttatccaaaattattgcccttttcagaagaaagt

SEQ ID NO: 209382 - DNA, 580 bp, Homo sapiens
aaatttgacaaaattaaataaattatttatgcaaatgtatctttatagtatctcatatctaccaacctccactatgtaacaatgctttataacacataaatataaggcaacaacaacaataacctaccaaacacctttgattctattttattgcttcttccttggttcttgaacctatggaataattctgagctgcatcagtctaagkgttcttcttctgatgaatgtatgcttttgaaggggtgttgatctactaagacaagaaagctggaagcaatatgtcttgctttcgtgatgtctagaataacttgcaaatcataatgacataggctgtcttcttatttttttagctctgatacttgcaaaggtgcccagaggctaataaatgatgggcaaatctcataaatataataaatacataataactaactaaataaataatagatatatagctttactattgactttcatgagagatgtgtgtataggaagtagagatacaggttgacagtttttaaagtgctttataaaagggtctatttaaatataatatattgctattattctaaaggcaaataca

SEQ ID NO: 209383 - DNA, 466 bp, Homo sapiens
tcaataagacaatcttttttaagaaaccaaggctgccaacactaaggagcatacataattagatttttgtgattctgctttatatcagtgttttggtgaaatacartgtgtaggtggatgctgtaatactggcttccaagtcatttggaggaaaataattatgcctggggcactggaaaaatttcaattttgaactagatatgtgaaagtattaacaatcacgcctactgagatgaactgtctaccggtgacatttaaaactagcctattcatttctattctttatgggctagatgtctatttcaggaatttatggcaaacatctgatccaaaagtagttatgttcttgacaacaaaaagtgataaagaagctgtagagagcaatgaaaattgatggggatagacagtgataaacagcaaaagagacccattaaaggccaaacgactggtgaagctgaagagaagg

SEQ ID NO: 209384 - DNA, 603 bp, Homo sapiens
tgacactttgaattacatcagaactctacatggcaatgcaaaacgagagcctttcatctgaaaaatgaaatacttaatgatttcaatcagttcgtacctcccctaatttgagatctgcataacgtattcagtgcctggatttctttcatatctctaaaatatttataaaaacaattcattctcttgttttctacctacctccccccctttcaagatgaaggtaatttgttttctctggtagaagttgcagagggcagcgggggattggggaagagcagtgtagttatagaaagcaccaaatggcatttccaagctatctgagaatattaacgtttgagtgtgtcagatctgcccaggggcaggaggcttaagatcatttttctccgctgaggtttaatgattgaatgcattttgtctgaaggaaaaaaaaaggaggaaataaattttttgaaaaaggtttatatttacagagagtgcctracgaactagttaacattcttactatcaggaaagcctaaaccattcataaataaaccattttaaaccacctttacccacatgcagcactctttctttcagctccctttagcaatttgaagtaca

SEQ ID NO: 209385 - DNA, 635 bp, Homo sapiens
ttgattatatctgactgctcttttctctctgaattgaattcagggggaaagaaaccagttcatttaaagcttaaaaataatttcacattagcctttttcttcgcccaaacaagactgtttgtgtctgtctcaaagcccggctcttccgcttgtgcgcacctcttttccctggtttgtatttcagaggcaacttgcttccctttggcctttgttctgctctggtttctgtaaatcagtttaccttggcaatcataacattctataacattggggaagtgttttcatataactccagcttccttgacgtgtataaaatctttatggtttatctttatggatgggtgggggaaatgagactcatatccagtcarcatttggtgagtgtttaccacgtgctcgatgctgggtaatgacctcatgtgagtacttctcacagcttcgtcaagtaagtaccacccccattttacagatggagaaactgaagctcagagcagtgaagtgactccccccgggtctcacaactagctagtgatgtagtacaggttttcatcaaggtctcttgactccgaagtcatattaatctggcaaatgaggaaactgaggcacaaagcgattcaaagggctgcagctgtttg

SEQ ID NO: 209386 - DNA, 559 bp, Homo sapiens
gtgagccccatttgaccttgcagtcatggcttccaggaatggactccaaaacaaaaacaaagaaataaaactgaggataggggtgcaaagatgtatgggcaaagatgtccactgctgtgttgtttataatactgaaaaactgaaggcaaccttaatgtctgttactggaaatggggtaaataaattatggtatatccaaacaatagaataaatgggtgactgttcaaaaaatgatgtcaatatttttatattgctatggagacatgcctgttttatatgcaagtgaaaaatttagttaacaaaataatatgtgtagtataatctagtttatctaaaaatgtctttaaaaggctggacgaatacatcaaactggtaactgtggatatggatgggagaagggattatgtggacatttttattttctttatatttgaattttcacaatcatatctgatgtggaaaaatgaagatatagcgttgagaaacagaggcacagcggacaggtgggagcaaakgcagtcggctcctccttctgttcccccagccaagtggggctttc

SEQ ID NO: 209387 - DNA, 625 bp, Homo sapiens
gcttgcctggcatcactcctattagtttttaggtctgccaaacttggtggcctaaaacaacagaaatgtattctcccacagtgctagaggtgwaatgtctgaaattgaggtgttggtggggctgtgctccctccgaaggccctagcggggatccttcctaacatcttccagcttctggcggctccaggcattcctcggcttgtgactccatcactcgtctctgcctctgtcttcacatgggcttcctccctgtgtgcctgtcttcttttttctgtctcttatgaggacatctatcactgcatatagggcacaacttaatcctggatggtctcatctagagaactttatctttattatctctgcaaagactcttaggctcaataaggtcacattccgaggttctgggtggatgtattttttttggtggtagtggggtgggcagggcactactcaaactcaccgcaacatccctaccaagtactgaaacagagcgttaataccagacaggaccaattccaaagcccatacctttaatggtcacacaataccaggagtgttcctgtagaagatttacaatgacagtgagctttctttgaccagtttggaacctggggcctgcagctct

SEQ ID NO: 209388 - DNA, 625 bp, Homo sapiens
gcttgcctggcatcactcctattagtttttaggtctgccaaacttggtggcctaaaacaacagaaatgtattctcccacagtgctagaggtgaaatgtctgaaattgaggtgttggtggggctgtgctccctccgaaggccctagcggggatccttcctaacatcttccagcttctggcggctccaggcattcctcggcttgtgactccatcactcgtctctgcctctgtcttcacatgggcttcctccctgtgtgyctgtcttcttttttctgtctcttatgaggacatctatcactgcatatagggcacaacttaatcctggatggtctcatctagagaactttatctttattatctctgcaaagactcttaggctcaataaggtcacattccgaggttctgggtggatgtattttttttggtggtagtggggtgggcagggcactactcaaactcaccgcaacatccctaccaagtactgaaacagagcgttaataccagacaggaccaattccaaagcccatacctttaatggtcacacaataccaggagtgttcctgtagaagatttacaatgacagtgagctttctttgaccagtttggaacctggggcctgcagctct

SEQ ID NO: 209389 - DNA, 625 bp, Homo sapiens
gcttgcctggcatcactcctattagtttttaggtctgccaaacttggtggcctaaaacaacagaaatgtattctcccacagtgctagaggtgaaatgtctgaaattgaggtgttggtggggctgtgctccctccgaaggccctagcggggatccttcctaacatcttccagcttctggcggctccaggcattcctcggcttgtgactccatcactcgtctctgcctctgtcttcacatgggcttcctccctgtgtgcctgtcttcttttttctgtctcttatgaggacatctatcactgcatatagggcacaacttaatcctggatggtctcatctagagaactttayctttattatctctgcaaagactcttaggctcaataaggtcacattccgaggttctgggtggatgtattttttttggtggtagtggggtgggcagggcactactcaaactcaccgcaacatccctaccaagtactgaaacagagcgttaataccagacaggaccaattccaaagcccatacctttaatggtcacacaataccaggagtgttcctgtagaagatttacaatgacagtgagctttctttgaccagtttggaacctggggcctgcagctct

SEQ ID NO: 209390 - DNA, 581 bp, Homo sapiens
tttggaggtgtcatttgtgactgtgatgagaaaagagaggcaagggaaggtggggtgtttgcttatgagcctgcattcccagagaaggttggcttttcctaccaaaacccagatccctgtcattggtcaaaaaatatgtactgaggacctgctatgtaacagggacagattgctacagcagcaacatggtctgtgcctttatagcttatgggttagagtgacaggatatcacagtgacttaaaagccataaatggggcacagttcttgttagctaaggctgagtcacaaactgcccccagactgtgacttaagacgacarcaatcttaaaacaacaatggcagtaatattgctcacaaatctgcagcttgggctgggctcagtggggaaggcttgtctcttctccacgtggcattggttgggttgactaagagctgggggatctatttccaaagtggcctattcatatgactggcaagatggtgcttgctgtcagctgggagctcagctggggctgttggctgggaggcctaagttacctccacatgggcctctccatgtgttctgggcttcctcacagca

SEQ ID NO: 209391 - DNA, 576 bp, Homo sapiens
cagttatttaaaaaggagaactcccagtgtttcctctggttttaaaggacaacaaaaaatgtaatagcctggaaaaaagaaatgagtccatttgatcttaagtagaaatgcttattttcatgggaaacgcctatcaacctgatcttgaaatatacctgaatgagctgaattcttgctcctttggcagcgcactcattcatttcagtttcttctattttattttattttattttttgcctttgttctgttatggtctcgtaagctctcagaggatcataaatctttttgcaaactgtgatatgctgatttggagatccagattaaaagtgtgcaaaattggagtttcaaagagttgctattattattatctattaacayaacactgtaatagtaataacaaaaacatcaataataaaagcaattataaaagagtcagtctttcccagatttttcattttgcctttaaataaaaaaaaaaagtgaaaagaaggctttgtttctaaatgcctattcccaataatggaataatgagatattaatatagtaaaaaattcatgcattcctatgcctgaagct

SEQ ID NO: 209392 - DNA, 595 bp, Homo sapiens
tgcctgtttccccttctgccatgattgtaagtgtgaggcctccccagccatgtggaactgggagtcaattaaacctctttcctttataaattacccagtctcragtatttctttatagcactgtgaaaatggactactacaggagtattggctgctgtttgttcctatatgataattccccttgaccaaagaaatctgtctgtatgagtccattttctgctgcttataacagaatactgaaactgggtaatttataaagaaaaggaatttatttcttatggaagttgagaagtccaaggtcgaggggccacatctaatgagggccttgttgctggaggggactctctgtagagtcccaaagtggtgcagggcatcacatagtgagagggctgagcatgctactcgtgtttctcttcctctttgtataaagtcaccaggctcactcccatgataacccattaatctgttcataagggtagagccattatgacccaatcacctcttaaagtctccacctctcaacactgccacatcatggattacatttcaacataagttttagaggggataaatattcaaaccatagcaatgtcat

SEQ ID NO: 209393 - DNA, 595 bp, Homo sapiens
tgcctgtttccccttctgccatgattgtaagtgtgaggcctccccagccatgtggaactgggagtcaattaaacctctttcctttataaattacccagtctcgagtatttctttatagcactgtgaaaatggactactacaggagtattggctgctgtttgttcctatatgataattccccttgaccaaagaaatctgtctgtatgagtccattttctgctgcttataacagaatactgaaactgggtaatttataaagaaaaggaatttatttcttatggaagttgagaagtccaaggtcgaggggccacatctaatgagggccttsttgctggaggggactctctgtagagtcccaaagtggtgcagggcatcacatagtgagagggctgagcatgctactcgtgtttctcttcctctttgtataaagtcaccaggctcactcccatgataacccattaatctgttcataagggtagagccattatgacccaatcacctcttaaagtctccacctctcaacactgccacatcatggattacatttcaacataagttttagaggggataaatattcaaaccatagcaatgtcat

SEQ ID NO: 209394 - DNA, 572 bp, Homo sapiens
gtgagctgagatcgtgccactgcactccagcctggacaacagagcgagactccatctcggcaggtgggggaaagatatatatgaagcctgtaactgaaaaagcaagcggtagctttgtaagcattatttgtggagatgaaggatttgagggtacttttcctagttgcttcagagtagaaaatgggatgggggactaagaggactgctgatatttgaaaaaacggtgggggtggggaggaactaagaggactgctaatatttaaaaaaaaaaaaaaaaaaaagycttttggatttgttttcctaaacagactttatgcatgtataagtttgtcaaaactgaaaatgaatacatgtatgaaataagtttaaatgtgtggataacccagatatgtcatctgtcattcatctcctgtgtctttgtacagtcttgtgcaatttagatacacaactcaattttactttgggtaaaataatccatttttacaaaagcagaagtgagcaatgtggacatgaaggaacatttctttagtgaagacagtctatggataactcaagagtccccttccttaatt

SEQ ID NO: 209395 - DNA, 367 bp, Homo sapiens
gcaatcataaacttttaagacaggcaggcagacacatatatgcacacacctctgcacccaggcatctttttttccatcccaggctcttttttctgatgcacagttacatatgaaacctctgagtttctgggcccatgtggctaggggagcagatacttcagggaagtaaaggtgcacttaagagagtggcaaaggaaagtttgtagttgttgctttatcaaggtttgagatgtttacttctttattctgtgtcctatgttcttggagttatycagggagtaaatcatatctcgttaatacagttgtcattatacaccaagagttgcagtaattatgttgctgttaccataaatgtctttcaaccttg

SEQ ID NO: 209396 - DNA, 613 bp, Homo sapiens
gaattaaaatttaaaatcattatacattatatcaggttaaaccatatgacactgccatttttgtggatgaaaaccaggagaatatcagcaatttcatagagctcaacctaataaaatggattgagcagaacattcaaaatgggcaacctaaaaagagcaaaatggagcccaggactcaagatctgacattaggtagactgaatgagtcagtttaactcaatgggagaaaaaaagcatttaacagtcagaaatgggttggtcaaacatcgtcttctaaggacgatcattagaagaggaaaagaaaatctggcctttctcattcaagcagtatttagaaggaagagttttctacgttcacaatgaggttacagtagtatttgtatcctaactgagggattaaaatgttgactacttaccagagttaagaggaggacacctgtgccagacactgtgtttagcaatttgcagtatacactctacatggatcctttcgcctratcttcccaatgccctatgcaatgtagtatttaatattattacccccaattgccagatgaggtaactaaccggtctttgagaagttaagaaaagcctgagtccatcacacattcca

SEQ ID NO: 209397 - DNA, 592 bp, Homo sapiens
gaagcttggaatacaggcataagctaccacacccagctatattacaatttttaaatgagaagaaaatttctactattgatgtttatgtaggtaatatctgctttaacaggataataaagtagtatgcaaagtttggggaatgcagtcttccctaagggaagacacttttacttaactgagtataaaaattgcaaatagatacagmttattcattttatagctgtgccaaacatacaaaacaaaacgttctggctccacagtcttacaagatacttatccttctaaattctcattgttaaaagaataattcccaaatttataaagcagactttttagttattattatagaacacaaaaaaagtgagccttttctacacggtggcaaatcaaattctttcctcagaagaaaactctgtaggaacttgtatgcattatggaccaaaaaattcagaagtcactctctctcaaaaataaacaccaccaccaccaccaccaccaccaaacaaagaaacaaacaaaaacaatcacagtgctatcctgaaaagcatttcgcaattttaaagattaacaactactctgtatatgtgcaggg

SEQ ID NO: 209398 - DNA, 479 bp, Homo sapiens
gctgagtgctaatagataaggcaatgagaaaaaggcctcgaaggcatttcagagatctttgggatagcccctcccatcacaggcccagcagcctaggcggaaagaatgctttcaagggctaggcccagggtgcagctgtcctgctcagcttcaggagactgctccctgcatcctggctgctctggctccagcctctgctcaaaggggcccaggaacagcttgggccacagctctggagggtgcaagccgtaagccttggtagttcctatgtggtattaaatttgcagatactcagaattcaagtgtggaggaggcttggcagttttcccctagatttcaaaggaaatatcagaaaggcttggtgccacaagagaagcccgcctaggggcagagsccccatagtgaaactccactagggcagtgccaaggggaattgtagggttggagcacccacaaagtccccccactagggcactgct

SEQ ID NO: 209399 - DNA, 646 bp, Homo sapiens
ttgaatcaagagactaccttgatagtctaccttgtcttccttaaagtaggtttatagcttaccttaaggctaaaatcaatttaagtaaagatagtgagaaccctggctgaaaatctctccgaactcctaacattgacttagcctgcctaaagtagctgagcaccaggtgttttcaccctgcctcatttttcttatcagccagcctcccaggctgttaacttatgacagttgagactcttcaatattgaggtcagaggaaaactggtccaggactgaagctgaatattattagcatgctgctgataccatcctgaggtaccaaatcactgaccccagctttagaaaayattaaatagttttcaggcctaaggacaggacacatgatttgggtctttgaagttgatacttttatgtcaaatttagctttgggatacaagtgaactgacataactaattgccttagttgccgaaaatgtggctttaaagcaggaaaatatcagttactgtttaagtcaaattatactatgaaagctttgcacttacaaaatgatttcacatgcattgtctccactgattctcctaataatccagcagtgcaggccaggagatagtttcattctatttcacagatgacaaattggagagc

SEQ ID NO: 209400 - DNA, 449 bp, Homo sapiens
tcaccgttcagcatggttgggaaggcttcaggatacttatgatcatggcagaaagggaagcaaacatgtccttcttygcatggtggcaggtagagaaaaatgagaaccgagcaaagtgggaagccccttataaaaccatcagctctcatgaaaacttactcactatcaagagaatagcataggggaaactgcccccatgattcaattacctcccaccaggtccctcccacaacacgtggggattatggaaactacaattcaagatgagatttgggtggggacacagccaaaccatatcagcatgtaataagtgattaataagtttctttgtataaatgaatagataaaccatcctcttattgccaatgcctcctaaaaagacatttcgttttcctaccttataacagaggagggatacagacaatgtggtgcatcagaatcagctaaag

SEQ ID NO: 209401 - DNA, 554 bp, Homo sapiens
cagccgtggatttctgtatagaaaatgcttcattcactgcaaagggccaaactttaatttgacataatgctagttcttcattttacaaagtacctttcttcatttttgacctgaaaattcttactaggcaactgaattagaaaataattgcttagaaaaaygaaaactagaagccaaaataaggggaaaaaactaggttgttttcctccttcgagacttaattttaaccacagcacagagaaatatattagtgcttttttcctgcatttttataggcctccttgtctgtaaaagctactataaaggcttaatttaaataaaaagtttacaatgttaatcctgagcttctatacgtgaatgtatcttttgtatacttacgggccttcttaagtatgctccatgagcctacattgcccttatagaaatgagggtctggaccatttttcttgctgctttatctactgagttcttccatgggccatgcctcagtggccttcaggctgaagcattcttggtacctaagtaggctttctgttattttgtcaaaatgcagg

SEQ ID NO: 209402 - DNA, 360 bp, Homo sapiens
tttgaggggaaaaactgagtcatatttatatttcccatagttcacaaagcaatattatacactgaataaattgagtacattgaatataaattcatgtatggttggatggattggtgtaagcagaagaaaagtgggaggaatcttctttagatgatatgccctgggtcttgcctcttaatgtacatcaactttatgtttaaagacttccattgtggtgaataaaagtatccacaataatgtaatcatttcttgtttctcccattctccctcacctataaagagatgcatrtacatattaacagacacaattaaaaacatggaaatttttcagaattcagttgttagagactgttctttcta

SEQ ID NO: 209403 - DNA, 646 bp, Homo sapiens
ctattttttctttaatcaattatagttatttatatttacctagatattgttcatttttataatttgtgttaaattaattgatattatgttgtttaaaatatcacttaatacttttaaatatgttctacgtctgtgtttatttgcccttttaaactttctaattttgactatttctttcttctctcttttttttcaatcagtcaagctagagaatgattttattagtcttttcaatagaaaagcttttggcatrgttgttttctctttttctttttcattaatatattcccttcattatttcctttcttctagttactgtagatttacaatgttattcatttcctaatttcttgatttaaatgtttaactcatttttaatctttccccctttctaatttgtgttaaagattataaattttctccaagtactagcttcattttatgatctttaaaaggtagtgcttatcttgtcatttgattttaaatattttgtaacttcaataacacattttaaacagtaaattattttaaaatgttttgctaattttcaaatatattggcagtttctaactataattctatttttttatacttactcgtgccaaggtataagaaaacagatgtgtatttcgattttctggggctt

SEQ ID NO: 209404 - DNA, 622 bp, Homo sapiens
ggctttgtttctggatgacttcagtgagacaagcctcagctcagcactcctgggctgcatgctgtaattgtagggggctgggaccaggcccatggctttgttctctggccccttaaggttgagcacctgctgtactgaagagacccaggtgttcccagtccactgacaataacattccaatgggggagggggtcccagcaaaagtgtttcactgggacagaggcagcaggatccacagtcacatgtgtgtgctgccagcagtagagtagcagcacctgtgcacatacacacacacagaagcaggcagtgacagtgaggtctgcatacatgcaatagtggcggtgaagcaacaggatctgcatacacattccagtaacacagtaggggatggccgtgggtgartgagtgccagcaaaacagagggagaggctgtggacaagcatgcactagcttcacctgcagaagctctttgacagataggtgacctctgccagagaaggagctatgacagtggcactgggaagcactgtggttgggcatgtgaggctgcactgcaattgagctcagccaggcaggaaccctgggagaggccggcagacagattggtgctcagaccagactg

SEQ ID NO: 209405 - DNA, 622 bp, Homo sapiens
ggctttgtttctggatgacttcagtgagacaagcctcagctcagcactcctgggctgcatgctgtaattgtagggggctgggaccaggcccatggctttgttctctggccccttaaggttgagcacctgctgtactgaagagacccaggtgttcccagtccactgacaataacattccaatgggggagggggtcccagcaaaagtgtttcactgggacagaggcagcaggatccacagtcacatgtgtgtgctgccagcagtagagtagcagcacctgtgcacatacacacacacagaagcaggcagtgacagtgaggtctgcatacatgcaatagtggcggtgaagcaacaggatctgcatacacattccagtaacacagtaggggatggccgtgggtgaatgagtgccagcaaaacagagggagaggctgtggrcaagcatgcactagcttcacctgcagaagctctttgacagataggtgacctctgccagagaaggagctatgacagtggcactgggaagcactgtggttgggcatgtgaggctgcactgcaattgagctcagccaggcaggaaccctgggagaggccggcagacagattggtgctcagaccagactg

SEQ ID NO: 209406 - DNA, 622 bp, Homo sapiens
ggctttgtttctggatgacttcagtgagacaagcctcagctcagcactcctgggctgcatgctgtaattgtagggggctgggaccaggcccatggctttgttctctggccccttaaggttgagcacctgctgtactgaagagacccaggtgttcccagtccactgacaataacattccaatgggggagggggtcccagcaaaagtgtttcactgggacagaggcagcaggatccacagtcacatgtgtgtgctgccagcagtagagtagcagcacctgtgcacatacacacacacagaagcaggcagtgacagtgaggtctgcatacatgcaatagtggcggtgaagcaacaggatctgcatacacattccagtaacacagtaggggatggccgtgggtgaatgagtgccagcaaaacagagggagaggctgtggacaagcatgcactagcttcacctgcagaagctctttgacagataggtgacctctgccagmgaaggagctatgacagtggcactgggaagcactgtggttgggcatgtgaggctgcactgcaattgagctcagccaggcaggaaccctgggagaggccggcagacagattggtgctcagaccagactg

SEQ ID NO: 209407 - DNA, 224 bp, Homo sapiens
ccagttgcttttattcattccatgaatatgtaggatagcatgatggttttgcagtccctgtaggcattattataggtggaacyctttgcaaagcctgcattttaaaagattctgaaatacttttgtgggtgtcctgtttcagatgctagaaagatgctaatggacccttctgactttctttttggtgcctctcttaggcagcattttcaaaagatcactaactc

SEQ ID NO: 209408 - DNA, 224 bp, Homo sapiens
ccagttgcttttattcattccatgaatatgtaggatagcatgatggttttgcagtccctgtaggcattattataggtggaactytttgcaaagcctgcattttaaaagattctgaaatacttttgtgggtgtcctgtttcagatgctagaaagatgctaatggacccttctgactttctttttggtgcctctcttaggcagcattttcaaaagatcactaactc

SEQ ID NO: 209409 - DNA, 522 bp, Homo sapiens
gcatgatggttttgcagtccctgtaggcattattataggtggaactctttgcaaagcctgcattttaaaagattctgaaatacttttgtgggtgtcctgtttcagatgctagaaagatgctaatggacccttctgactttctttttggtgcytctcttaggcagcattttcaaaagatcactaactcatacatgggctttacctctctagatgaagctgcacgatgtcaaggtaagcaaatgacccttgcttcttttcagggtgagagatgacatgcattgatttccaaagaagttcccagatgatggctgaaacgcagactttgaattgtttttgcagttattaaaataagaaaaaccccaataattatgaagtctttatttttttaaaaaatagtttctctggtatctttagtaagttggttctgacctacacaaatgtcatttgtttgtaagagctgtatatgaattacttcatttaatccttctaaggattttatgaggtaagtcttaatattatctc

SEQ ID NO: 209410 - DNA, 522 bp, Homo sapiens
gcatgatggttttgcagtccctgtaggcattattataggtggaactctttgcaaagcctgcattttaaaagattctgaaatacttttgtgggtgtcctgtttcagatgctagaaagatgctaatggacccttctgactttctttttggtgcctctcttaggcagcattttcaaaagatcactaactcatacatgggctttacctctctagatgaagytgcacgatgtcaaggtaagcaaatgacccttgcttcttttcagggtgagagatgacatgcattgatttccaaagaagttcccagatgatggctgaaacgcagactttgaattgtttttgcagttattaaaataagaaaaaccccaataattatgaagtctttatttttttaaaaaatagtttctctggtatctttagtaagttggttctgacctacacaaatgtcatttgtttgtaagagctgtatatgaattacttcatttaatccttctaaggattttatgaggtaagtcttaatattatctc

SEQ ID NO: 209411 - DNA, 496 bp, Homo sapiens
gcacccacttattgagatttttcacccttccaatttgcttcaaatgctgaatgaccatagaatggtcaaggttgagttcttcagcaactcctcacgtagttgtaagaggatcagcttcgataattgctctcaattggccgttgtcaacttctgatggccagccactatgcttctcatcttcaagcctctcatctcctttgcaaaacttcttgaaccaccactgcactgtaygtttattagtagttcctgggccaaatgcgttgatgttgtgagttgtcttcactgctttatgacccattttgaagttgaataagaaaatcactcgtttgctttttgttaacatcatttgcatagtctaaaataaatataaaataagcaagtaataagtaattagccaaaaaaaagcaagaaatgtgcatcaaaatgatgtataacattaccacatttatttaagaatgtattctaatatcaaacggcaaacttcaacaatgcaaac

SEQ ID NO: 209412 - DNA, 496 bp, Homo sapiens
gcacccacttattgagatttttcacccttccaatttgcttcaaatgctgaatgaccatagaatggtcaaggttgagttcttcagcaactcctcacgtagttgtaagaggatcagcttcgataattgctctcaattggccgttgtcaacttctgatggccagccactatgcttctcatcttcaagcctctcatctcctttgcaaaacttcttgaaccaccactgcactgtatgtttattagtagttcctgggccaaatgcgttgatgttgtgagttgtcttcactgctttatgacccattttgaagttgaataagaaaatcactcgttygctttttgttaacatcatttgcatagtctaaaataaatataaaataagcaagtaataagtaattagccaaaaaaaagcaagaaatgtgcatcaaaatgatgtataacattaccacatttatttaagaatgtattctaatatcaaacggcaaacttcaacaatgcaaac

SEQ ID NO: 209413 - DNA, 496 bp, Homo sapiens
gcacccacttattgagatttttcacccttccaatttgcttcaaatgctgaatgaccatagaatggtcaaggttgagttcttcagcaactcctcacgtagttgtaagaggatcagcttcgataattgctctcaattggccgttgtcaacttctgatggccagccactatgcttctcatcttcaagcctctcatctcctttgcaaaacttcttgaaccaccactgcactgtatgtttattagtagttcctgggccaaatgcgttgatgttgtgagttgtcttcactgctttatgacccattttgaagttgaataagaaaatcactcgtttgctttttgttaacatcatttgcatagtctaaaataaatataaaataagcaagtaataagtaattagcmaaaaaaaagcaagaaatgtgcatcaaaatgatgtataacattaccacatttatttaagaatgtattctaatatcaaacggcaaacttcaacaatgcaaac

SEQ ID NO: 209414 - DNA, 581 bp, Homo sapiens
tcaaattgggatcaaaaggaggtccataaaatgcagttaactaatgtatttgtttcctcttttcatttagatgttttccttttatgttttttgtttaacgttgttgaagaaacaggttatttgttctttagtgtctcaaatagtttgagttttgctaactacatctctctggtggtgttgaatgtgttcctcagttccctatatgtttagtgaatttgttgaccagactcaggttcagattttggggggagggcaaaactatttcatggatagtgttgggtatatccatcagcaggcacatgacatctgtttgtctctctttttgtgatgttagtagctaccaaaagtcattgtctatgttcattaaatcactgggagttgagacatagtagaatgttaattctattattttatcgttattagcatagttaattctattattttatcattatttatcattatcatcatacttccctaaaaaaacacttgtccttactacytatccaatttggctatcctgaaacatagtatctatgattattgtaggcatcctcctgactttaacaataaacatttggctc

SEQ ID NO: 209415 - DNA, 593 bp, Homo sapiens
aattcccatttgattttttttttgtagattctgattctcttttgtaatttctttatcttgcaatatatttccttggatattttaatcacagttattttaatgtttatacagattttcctcaacttatggtgtggttgcatctcaataaatgtatataatamgttaaaattatcatgacccaaatatgcatttaatatacctaacctatcaaacatcatagcttagcctagtctaccttaaacatgctcagaacacttagatttgcctacaattaggcaaaatcatctaatacaaactctagttataagaaagtgttaaatattttatggcatttattaaatcttgttctgaaagcaaaagagcaaaatggttttatggataattgaagtatggtttctactgcatgcgtattgcttttacaccactgtaaagtctaaagtcaaaaaattgtaagtcaagccttcgtaagtcaggggctgtctgtatttgatatctcctataactagaccaactagctaggtctctttctctatattttttctcttaattatatttcttggcataccaggcaaattagcattgattactcagta

SEQ ID NO: 209416 - DNA, 547 bp, Homo sapiens
ggaagctttaaaatatgacacgtctgaagtgaaaaactccagaatgtccagctcatttctctgcacctcactgctctccagtattttgcacccttaagttgtgatttccttggcagctccacaggctaatttttgtgtttgtatccctatgagtttggtaaaagctctatttgggttctctttttagtggtggttttcagctcagtttctcagtgcctcacccaccctgcaatatgccaagacttgtctccttcaggtagaaaggagagcctttcatctttgcaattccattttctccacaatgttgactttcaaattccagttgtttcagcatacacatatacatatatatacacacctacatacacatacacacacacacacacacacacacacmcccgacacagcctcttaatccactgatttagtaggagtgtccaaaaatatactatcaaggtttgcatacatatatgcaaatgtactcatacgaccacaaattgttctatgtgccaagaggataaagaaaacagggtactaagaaaacaga

SEQ ID NO: 209417 - DNA, 548 bp, Homo sapiens
gctcctctcaaagctgtcactttaccttgtccttggaagaactttccaaattgcttaggattcagcaagtgtttaattaaataaatgtataggcactaaatctggaggtcttagtaaccaccttgaggtttagtgcctatacatttattttaaaatcattctttgaaaaagamaaataacacaggctaaatagtcttaaaacaaatgagtgtaacacacatgttttcaggcttccttttgatcccgtttgttttaagcccaagaggtggggagaagccatgttgtctgtgcctctgtctctcccacaatgccttacaaagtgtcttactcagactgggtcttgagagaatatttatcaaatgaatgaagatacaattttaaggttgggaggacatttataagtaacatagtccaaccctcttattttaaaagccaagacaatgagacccagagaagaaaatgaccagccaatggtcacattgcccttaagatcaaagctatggctgtgacctaaatttcctaactcatgttgcagtgctgtttctact

SEQ ID NO: 209418 - DNA, 608 bp, Homo sapiens
gctctggtactggactaaggagctcccattgagcttttttcaactgagaattgacattgaataaagtatgtttaattttgtatatagaaggaaccaaaagcaacasatcaaaaaattggaaagtcaagaagctaaaaggcaagacaccagtgtagtactccaggcttgagtggtgaacactccactaattttttcccaacctactggctatgcctttgagtctcctttgctgggtacttttcatcttcttggcccttaaattttggagtgtcccagatttccattgtcaagtctcttttcttctctatgtacaattatacccttatgccatgacattaaatagcctgcatatgctaataattcttaattgcatgcttaatattttcatttggatgtctagccttacatgtagtcagataaaaacctgacattttagtattcctctggaactttctcctcctctcttcattcagtggctcaaggtcagtcttgactcttccttacacaatgcttgtcagcaaattacatctattttcaagttttgaccactttatacttccccaataccctagtgcaagcttccatcagccttccacttttctcactta

SEQ ID NO: 209419 - DNA, 577 bp, Homo sapiens
attaacattaaaaaaatagtcaaccatataccaaacactgtgaaaggcactttcacatacataattacatttaattctttccagaaaccatttttacagatggagaaattaagacacaaagaggtcaagtggtttgtgcaaggtctcacagctagagggtgttggactaggatcctattccatttctatttgattcccagaaggctgcctcaaaaaactacaaattcacttccttaatgacttctttactcttcggaattttctcaatctgtcatgtctctatgcttttcaaaggggtcagaaatatattatayatgtaatatatgtataaatataacaaatatgtttaacgacatttgaaagacaacttgatttttgaattaaaaacgttttcttcacatagaacctttaaatgcataattgccttgacttgagtggattatctgaattattggttggctccgaacactctgctttagagtttaagtcaaattattttgagtactttactatcgacttactgtaatatcaggccataatgtttgcattgtgggtgttaaaacataatcatgttgat

SEQ ID NO: 209420 - DNA, 454 bp, Homo sapiens
gtgtacaggatggaacacgaaggcagactaggagcgtgaccactgaagcacagcatcacagggagacggttaggcctccggataactgcgggaaagcctgactaatgtcaggccctccacaagaggtggaggagtagagtcttctctaaactcccccagggactactaagtagcaggtgtttttccttgacaygctaccgctagaccacagtctgcttggcaacgggcatcttcccagacgctggcattacccctagaccaaggagccctctggtggccctgtctgggcataatagaaggctcgcactcttgtcttttggtcactcctcactatgtcccctcagctcctgcctctgtatggcccggtttttcctaggttatgattatagagcgaggattattataatattggaataaagaataattgctacaaactgatgattaatgatattca

SEQ ID NO: 209421 - DNA, 407 bp, Homo sapiens
acaggataaacataagcttttccacctggttctgtaggacctccatattctggccctgccctaatcctgcaagctcctctcccatctcactggtgtccacagcccctactctcaagccacactggacttcacaccattccttacaccacactgcaatttcccatttctctactttggtccacactcgttcctccacttggaatgcccctccccttgtcccaatcgcagtcacagttgtccccattcagatagattcaagtcttccattcttcatgaggcaacatacactccctggaaagctcaccctcccattcgcccttagaactccattagtactatacatgtgatgtggtsttgtaagccacatttgtaagtgcttgtaagagcataaaagcatcggtcttccc

SEQ ID NO: 209422 - DNA, 446 bp, Homo sapiens
gaattcatgagcccagctcyttttgatcccccctctacctgtccttactttaagggagcccaaatgggacaaagtactttaacactgcatttctagcaaggtaggtaactcctagcaaagtgagctcttaccccaacagtaaaaaataaaggttttatgagactccttataggatagggagaaggataaaagactgtttcttccacaggaggaatcaaagcacttctcttgtatgcttcaccacttgtccctgggtctgatcttcgaggttcaaccttcctgggtgcttttctgaatccgcatttttgttgaataaagaagttaaacctatggggcaaaaataacagatgagaaacacagtagcgtcttgcaaatatcaacttctatgaacctccacttggcctgcatcatcaccatctcaatttattctcactctacagtccaaa

SEQ ID NO: 209423 - DNA, 443 bp, Homo sapiens
cagggagttctctagggagacagggcattgcacaattcctatcaactgagacagaagagctacaagagaggtacagatacagtctagggcggctgaggcagccagggggtttcatggaggctttggcatctgggccatgtcattcttcagggacaggcaggttgagagcaggtggatatgggagagagaagggcaaagggccttttaggtagatggaactatctgactaaagacagataaaargcttggagaatgcaagatgtctatagccaaccgcacctgcaaaggaagagtggaaaatgaagaaggcaaggctagggccaggctgtgggaacgcctgaaacaacagggtaagaagtttggtgccgctgcgtgattgcaaaaaagcaaacatgtgctggctggtctcagtaggcctccgggagcggtaatcattgtgtatg

SEQ ID NO: 209424 - DNA, 443 bp, Homo sapiens
cagggagttctctagggagacagggcattgcacaattcctatcaactgagacagaagagctacaagagaggtacagatacagtctagggcggctgaggcagccagggggtttcatggaggctttggcatctgggccatgtcattcttcagggacaggcaggttgagagcaggtggatatgggagagagaagggcaaagggccttttaggtagatggaactatctgactaaagacagataaaaagcttggagaatgcaagatgtctatagccaaccgcacctgcaarggaagagtggaaaatgaagaaggcaaggctagggccaggctgtgggaacgcctgaaacaacagggtaagaagtttggtgccgctgcgtgattgcaaaaaagcaaacatgtgctggctggtctcagtaggcctccgggagcggtaatcattgtgtatg

SEQ ID NO: 209425 - DNA, 443 bp, Homo sapiens
cagggagttctctagggagacagggcattgcacaattcctatcaactgagacagaagagctacaagagaggtacagatacagtctagggcggctgaggcagccagggggtttcatggaggctttggcatctgggccatgtcattcttcagggacaggcaggttgagagcaggtggatatgggagagagaagggcaaagggccttttaggtagatggaactatctgactaaagacagataaaaagcttggagaatgcaagatgtctatagccaaccgcacctgcaaaggaagagtggaaaatgaagaaggcaaggctagggccaggctgtgggaacgcctgaaacaacagggtaagaagtttggtgccgctrcgtgattgcaaaaaagcaaacatgtgctggctggtctcagtaggcctccgggagcggtaatcattgtgtatg

SEQ ID NO: 209426 - DNA, 568 bp, Homo sapiens
agaactgcagttcttccttctggtcaggagagggcaggagaaggcagaaaataagctgcccccgcttcactttttttttttttatttttttttttggtttaccagtccccggcatctagagtattcgcatttgcatgcattattatattcatagttttgctcgaaagtttgccttttcctctgaacctagttagctgctgccttgtgaggcttgattccccaatattaactttgtggactgatcttaatgccaaacttaaccaatcttataaaatcttcgcctgccaaagcataactaacctaatttaagaattgaactacccaaactgarctacctctgtagaatccttgctaagtctattctccagtgtcaccccacagagcttgtgttaggggcaaccatgagcagctgagctgcatgaacccctggtcctcctcttttctaactttgcaggaaccaaaagagactgaggaaggacttcatgggggacaggcctccagacccccagtggctacaggccatcctccctaggaccagggctggggctgctcaggcggggcactgcgc

SEQ ID NO: 209427 - DNA, 607 bp, Homo sapiens
gaattcttgattctgaccaaagaaaaagcttgaaattaaaaaaaaaaaaaaaagcttagcgagtttgaagcctgcattctaaacagaaaccaataaagaatgcagaaatggagcagcagatgctggctggtcgcagtggctcacacctgtaatcccagcactttgggaggccaatcagggcggatcgcttgaggtcaggagttygagaccagcctggccaacacggtgaaaccccatctctactaaaaatacaaaaattagtcgggcgtggtggcaagtgcctatagtctcagctactcgggaggctgaggcaggcaaaggttgtagtgagccaagatcacgcctctgcattccagcctgggcgacagagcaagattccatctaaaaaaacaaaacaacaacaacaaaaaaaaaaacagaatgcagaaattgttttcaggggaaattgttcttttttgccgttgttgcagtacggcacgcttaggcaaggtgcctcatcctagccatgtgtaccaatagggcacccagacttgctcactctgtagcttcaagcagaggtgttggggaggcctgtgttcttgctgctgcctgagtgagctatagattt

SEQ ID NO: 209428 - DNA, 607 bp, Homo sapiens
gaattcttgattctgaccaaagaaaaagcttgaaattaaaaaaaaaaaaaaaagcttagcgagtttgaagcctgcattctaaacagaaaccaataaagaatgcagaaatggagcagcagatgctggctggtcgcagtggctcacacctgtaatcccagcactttgggaggccaatcagggcggatcgcttgaggtcaggagtttgagaccagcctggccaacacggtgaaaccccatctctactaaaaatacaaaaattagtcgggcgtggtggcaagtgcctatagtctcagctactcgggaggctgaggcaggcaaaggttgtagtgagccaagatcacgcctctgcaytccagcctgggcgacagagcaagattccatctaaaaaaacaaaacaacaacaacaaaaaaaaaaacagaatgcagaaattgttttcaggggaaattgttcttttttgccgttgttgcagtacggcacgcttaggcaaggtgcctcatcctagccatgtgtaccaatagggcacccagacttgctcactctgtagcttcaagcagaggtgttggggaggcctgtgttcttgctgctgcctgagtgagctatagattt

SEQ ID NO: 209429 - DNA, 606 bp, Homo sapiens
gaattcttgattctgaccaaagaaaaagcttgaaattaaaaaaaaaaaaaaaagcttagcgagtttgaagcctgcattctaaacagaaaccaataaagaatgcagaaatggagcagcagatgctggctggtcgcagtggctcacacctgtaatcccagcactttgggaggccaatcagggcggatcgcttgaggtcaggagtttgagaccagcctggccaacacggtgaaaccccatctctactaaaaatacaaaaattagtcgggcgtggtggcaagtgcctatagtctcagctactcgggaggctgaggcaggcaaaggttgtagtgagccaagatcacgcctctgcattccagcctgggcgacagagcaagattccatctaaaaaaacaaaacaacaacaacaamaaaaaaaacagaatgcagaaattgttttcaggggaaattgttcttttttgccgttgttgcagtacggcacgcttaggcaaggtgcctcatcctagccatgtgtaccaatagggcacccagacttgctcactctgtagcttcaagcagaggtgttggggaggcctgtgttcttgctgctgcctgagtgagctatagatt

SEQ ID NO: 209430 - DNA, 365 bp, Homo sapiens
tccctctcctcccatctcccactattactctattatgctgcctactggcagaaattcagttcccaaactgggaattgttgtttgccatgttttgagccccaacatcacagagtatagaatgagtttagaggtaagaaaaactgcataatgaatcagcacaatctcaataatttttgacasaaagagtataatttgttagtttactttctctctatttatatactatcatcggtgcaggttcctgcaattaaatatgtaataaagtttcatcaagtggcactttgaattagtaattttcaactcaatgcatttttattctataattcacgactttccatttgtttctctgtaactttggtagcaaa

SEQ ID NO: 209431 - DNA, 459 bp, Homo sapiens
aaagcaacaccaggcagaactcagctggagcccatggagggattatttagacccagccagaagggaagtgcccatcccatagtcagaacctgagttgtggcaagcctcaccattgttgcctaaagtgctctgggattctaaataaactttaaaagcrgtctagggcacaaggactgcaattcctgggcatgtcctggtactgtgctgggctcagagccagcagacttgaggggcaagtgacctagtgagataccagcttggtcggccaagggattgcttgcaccacacctcctcaactccaggcagcacaacttgcagctccaggaaagactccttcccttctcatgagaagaggagggggaagagtaaaaaggtctttgttttacaacttgaatactggcttagccagagtaggacagaacaccagcagaattgtgagggtccgatttcaggaccccg

SEQ ID NO: 209432 - DNA, 455 bp, Homo sapiens
gcaacaccaggcagaactcagctggagcccatggagggattatttagacccagccagaagggaagtgcccatcccatagtcagaacctgagttgtggcaagcctcaccattgttgcctaaagtgctctgggattctaaataaactttaaaagcggtctagggcacaaggactgcaattcctgggcatgtcctggtactgtgctgggctcagagccagcagacttgaggggcaagtgacctagtgagataccagcttggtcggccaagggattgcttgcaccacacctcctyaactccaggcagcacaacttgcagctccaggaaagactccttcccttctcatgagaagaggagggggaagagtaaaaaggtctttgttttacaacttgaatactggcttagccagagtaggacagaacaccagcagaattgtgagggtccgatttcaggacccc

SEQ ID NO: 209433 - DNA, 593 bp, Homo sapiens
cttgaaaaagtctgagcaatctttaaaacaggagtgaagaggagaaagccataccagtcctagtggtgtctgaartgtcctctggtgatctctaccacactttgaccacacctccatccccagctgtgtacacataacaaaggttatcaataaataatgtattcatctactggattgcagtgaaagccccgattacttttctcctatgtttggactaaaggtattggctttcttcagatataaccaaggaatatgaaatgcatttagggaaaagatcaaaaagtacatggaggcctggctagtaagaaggaatattataatttgccttcatatgataacactgtaactgcttaagtactcctcaaaaataacttttcatggtatgtctttactgatccactaagaactcttacagtattaaatattttacactatcaaaattctggagaatgcatcctttcctatgtaaccctctatttgataagataaaagaattttgccattcattgtgccttacacaaatggtttatcttatcaaaacaaatagtgctctaaaaacaggatttttttttaagtaagcaagatctttttta

SEQ ID NO: 209434 - DNA, 512 bp, Homo sapiens
attttgtataagacaacctactgaaaatagattcctcacaattcagaagtccatttaccaaaaaggagcccactttatwttcatggttgataataaaaatcgtattttttcattcacaaatatttatgtattcattctctgtttcagaccctatatgaggttctaaaggatggggaaaatataaaatgcatcagatttccaagatgctaatatgcaaagcaaataacaaaatgtagaaaataaatgctaaaggttttgtactaggttaaagaaatgtaggtaaaattaattcccgtgatgatataaagtgtgaaggcaggcttctcagagaggatgatatttgaattggatcttgaggtaagtccggaaggttgagaaagattttgttaaataaacaagggaataaggccatttcatggttttaaatgggcacacacaaaaggctaggtggccaaataaacaatacagttcatgagatagataagaaatgcctaaagaaaatactagaattc

SEQ ID NO: 209435 - DNA, 427 bp, Homo sapiens
agatttctcctagtggggcccatgctgaaagttcaggtatagctgtgaatgtttcctcattgtttggttcagctcatcaatacagctaatgaggatttggaagcagatctgattatttcaaaaattaggaagcaaagtargtttactgtaaaaatgtccttttaatttatttttccaggacattgcaatgcgggaagcaggtgataggatgggattttgagtctaattgaggagagggaatcctaatataacaggagtcaaaaactttactgtaactcagagaggcgaagacaaccaatactcaccaggagttgggaagagactactaaataccaagccgaatttaaaacttagctcaattggataattcatatgatttctctatgtcattaataccgtttctctggaaaaagagaaagcttagttt

SEQ ID NO: 209436 - DNA, 535 bp, Homo sapiens
tttgctttttaccttgggtcttacctagggtaactctatatgtcccaggttgcatgtgacagtctcagttcacaccagttgtcctggagtaattattttacattgaaaattgtcccagaatgcataatacgttttatggaaaatcaatttttttaagctaaaatattttattccttctataaccttttcatawgtaaagtaaaacaatttatttttttatttttattttttattatactttaagttttagggtacatgtgcacattgtgcaggttagttacatatgtatacatgtgccatgctggtgcactgcacccactaactcttcatctagcattaagtatatctcccaatgctatccctcccccctccccccaccccacaacagtccccagagtgtgatattccccttcctgtgtgaaaatcaattcttataccatttctcttcctttagataagaaggaagggccctctcccgttcagaaattcaaggtaaccctgtgatccttttatataggagagctcactctatctt

SEQ ID NO: 209437 - DNA, 464 bp, Homo sapiens
ttctcttacctctctttttggtataacatttaaagcactattggattttcagactgtatctactatatctttaatcttcttttttgtgttatttatctttttggctcttcaagcttcattttgcctgttacctgagttgatatgacccatctttcccatctatcaatttacaaatgatctcttcagctgtgtaaaattacttatgccatttttaaggttttaatttttataaggttattactttgttttagaatttttttwaaaaaacctcaaattttctgctgaaattcgtaaccctcattttgaattcattgaacaaagtaggacagttttttcatgttgtatggctgatagctctaatatctaaattttgtagagcatttctattgtctgctgattcaacttgctttccttcattgtttcttgcttacttgtttgcccaagtatattttatagtgtttggg

SEQ ID NO: 209438 - DNA, 444 bp, Homo sapiens
ttctcttacctctctttttggtataacatttaaagcactattggattttcagactgtatctactatatctttaatcttcttttttgtgttatttatctttttggctcttcaagcttcattttgcctgttacctgagttgatatgacccatctttcccatctatcaatttacaaatgatctcttcagctgtgtaaaattacttatgccatttttaaggttttaatttttataaggttattactttgttttagaatttttttaaaaaaacctcaaattttctgctgaaattcgtaaccctcattttgaattcattgaacaaagtaggacagttktttcatgttgtatggctgatagctctaatatctaaattttgtagagcatttctattgtctgctgattcaacttgctttccttcattgtttcttgcttacttgtttgcccaag

SEQ ID NO: 209439 - DNA, 624 bp, Homo sapiens
ggaagtgggacgaagaaagaggaagctctcgggaactcccaccaccccacaaagggggaattactcttttcttccatcagaatggyggcagaaacctgtgaaatacatccatttgtctttgtttcttggaaggggttcatgttaatttatgtctaaaattaacaagcctggcattggttattcaaatgctttttgcccttttaaaaatatagacaaaaataatgttttaacctttcttccttctaaaagtagaaaagaattgcattactgaaaaatacctgttattaattcttagactttgttgtgcacaagggtattgtcattcaattctgtaggcagtcaagaatcagagtcggtgcttttagaatccaagtacataggcttaagctctggtccctcccgttattgattctgcaatcttgagaaagttaattgacctctctgaaccttagctttttaatctgcaaaatgagaaaaatcttaaataataacaacctcagaggattactatatgcatttgatgcataaaggtacttagtgtaatacctgcctgccacatcacaagaactcaacaaattatagatatttttatttcatgtaaatgcacatgtttgtatacataaa

SEQ ID NO: 209440 - DNA, 572 bp, Homo sapiens
aatgtcttcaaggttggagttttgataaacaagtacattagtagagatccacgggggttgatggttgatggcttatgcaagggaggcattgctctaactgaccacagaacatattctgggtaaggaagagaaaaaattacattagggcaatgaggaagagtgaagtgttggatatagtcaatgaattttaacttctattatttcttaaatgttattaaaattagagacccaactggagtgaactggaatgtttggtattgatattatagagtaggcacagtaattgatcataacacattctaggattgaccatgagagttttttatccactaaaagaacaagattattaggggagagaattccaaacagctgggattctaggtagctcgacggrtcatctagataaatactgagattaccaatgtaattgtgagatattgtcagtgagctcaaaatcttttaagatatgagggagagtaacacagggctcaggagttgactacaaaaaggactgatagtggtggtaaggtctattgcaagctttttctgtaaagggtcagataataaatatt

SEQ ID NO: 209441 - DNA, 624 bp, Homo sapiens
tggttaattgtcagtgggagagaaaggaacaggtattgaatggacctctgtattgtaagagtaaaagagaaattcccaaccaaccaattattaaacctcctaatattaagaatttatatctarcatttgaaaaatttgatctagaaatttaagaacaggtagaatttccttcatcatccctgttatttcctctcttagtgcttataagtacaaactccagaacagtctagtttgagtttgagtttcaacatcatcagtgggttggcttccacaaacccaagttttctaacctacagaatggaactaaaatccccacctgaagaggtggtggtgaggattataggagatgcaggtaaagggcttagtatagtacctggcccagggttttaaacacttagtaaatataaaatattacaattattgtttattctagggagaaatttgaaggacaagcagcactgaaaaattcaagcaaaaacattagcagtcaatatcccataatttgaaattaaggattaaaattaggtattattttcatctgtttttgtttctcttattttaataaaaaagctgtggaagcccccagaaataactgccagcttttggagggtgtctctggatgtt

SEQ ID NO: 209442 - DNA, 620 bp, Homo sapiens
ggtaatttgtactttatttacttacaccaaaatttacagaatgccaatacagtcaaaatatagtgtcaggtactgaagaatatttaactaggaatcaaagaactcaagatctcttactctttagatctaagatccaatgtataatgctaccctaaattactttattcttaatagcatcactctatccagagaaaatacacgacattctagcttctctgatttggttttgcagatgggtctacctataaccttcccctcaggggtagagaggagtttagctggcagtttatttctgtttctactcacacgcctagcatatgagaaggctgggattagagccaaaggagaagcctggaacacccaggtgatggcatgtttggatccttataattctctatgaaagagtgaagagactcaaaggctatggctctccagcttgagtgggcatcagaatcacctggaaggcttcctaagacacattattkctgggcccccacccccagagttcctgagtcagtaggtttaagttcagattccagaagttgcattcctaggaagtccccaagcaatgcaaatgctactggtttaggaccagctgaactaaggtaagccctgacact

SEQ ID NO: 209443 - DNA, 644 bp, Homo sapiens
tgtgcattggcccctcttagacatgactggagccgaagcagtgggaatgcaggccaccatgtcctgaacaggagggccctgggcctgatccactaaagcatttttccctcctaggcctccaggtctgtgatggaaggggctgccatgaaggtctctgacatgtcctggagatatttttcccattgtcttagtggttaacattctgctacttgttatttaggcaaatctctgcagcaggcttgaatttctccccagaaaatggggttttcttttctrtagcatcgtcagcctgcaaatttttcagacttttatgctctgcttcctcttgaatgctttgccacttagaaattttttccacctgataccctaagccattgctttcaagttcaaagttccacatatctctaaggcagtctctttgctaaagcatagcaagagtcacctttgttccagcacccaagaagtttctcatctctatctgagacaatctcatcctggacttcattgtccttatcactgtcagcattttggtcaaagccatttaacaagtctctaggaagttccaaactttcccacatctttctgtcttctgagccctttaagtctccaggaagttccaaactttcccacattttcctgtcctt

SEQ ID NO: 209444 - DNA, 635 bp, Homo sapiens
ttcccagtttgtggcttgggagactgcaaaacttgcatgggagacttcaatccaaaatgaagatgaagtagcaatgactgagaaacatgtaacagtgaaagtctagtcagaaaaacagaaaccaactgaggcattttaagcagaaagaatttaatacagggaattggttacataaatgatgaaagagctaaacagccaaaagtggtcaccacctctagagctggaaggacaaagagagaatacagcattaccagaaccagaaactaaagccatttggtgagagttaaaaccakggcagggatcactccataggagctggaaacacaaagaatggggttaaccaataagagctaaaatttcatatacaaacaaaagtagccactgctggaagcctcatttaaagcaaaaaggaggagaaatgctctggttcatctgctctgcagtgcctctcattagccaaacctacctgaaaaccagttggtaatggaacctgggaaacatagctccctgcaacagagatggcattagctctccaaagggtccagcagaaggcacaggagtctctctatgttgcccataaacactattgaactcaactatctgattcagagcaggcttcagcacgaatactgcaa

SEQ ID NO: 209445 - DNA, 662 bp, Homo sapiens
atatccttttaaaatttcttattacccagtttggccaatatttctggttttgaactttaccaaaggtaacctcccaggtgctcagcgaaaggaaaacttaggatagtccatggtggagaagagactagacaaggttatgtagatattaaaccagaaaaggcttgctttctaagcagggaattgaacctggacttctagtrtgaaaggccaaaaccttatgtaccaagctataccacagggaaagttccactgttcttcccagaaggagtctagagtagttaattttgagcttgtagaggcttttaactacttaagataatttttagagctaactatgacataaaacctaaaattcgtgttccctggaaggtggagaccaagagaaagtactgccacgtggttacaaggtcaagctcccaaggacatgaaacaagatggagaccccatccagtttttcatttgtttgtttcagggacctgcaggaaagtttgttattgaccagcctgctgggccatcttgagcagcgagcttatggggtcctaagcccatgttttatcttaaggcaccccttgacacagaaaaacaaattcatagcacaaatatatcagtttaagactagcctcggaattcttttttgcattaatcaaaactttacagaagag

SEQ ID NO: 209446 - DNA, 579 bp, Homo sapiens
ccatcagctttcaagttttcccttttgggggaggaaaaagctctccgtgtcccacgatcctaattctgtcacccatagttgtcagcaaagagtgcaaggcagattattccaaagaaaacagcagttgacatcccgtagtgccaaccctgttcttagccaaaagggactttaccaagagccctcatttgtaaatgtacttcagtgcattgttgttcattcggaacgttccactgtaagttacctttagtaagattttgccatttctgtaagacttcactgcctcccaggcytaaagtataagccagaaggaactcagttttccagaaattaaggattccatttttacctaaaatattggctttactctcaggctctcttgattaacttatccaatgattttttttcctaccgatgcaggcaagaaaaatgaacaaaagggtagagcacaaaaatccttgtgaattttcaaaagccaaactctataacccctgaaatattactgcttactaccagttcctttctgacccagtcagatgtaagaggcctctaactggatccaagccagttaattcccggatc

SEQ ID NO: 209447 - DNA, 601 bp, Homo sapiens
accacagcgtatataacccattgtgtctgacttttcactcaaccttgtgtctaagattcatccatattgttgcatatgtcaggagtctttttgttgttgttgcaatgtgtgaattgtaagactaccacaacttaagaattcatcagtgcagattattagctacagacgaggagaaaaagttagaagatttgtctcctaatcttattattaagtagctacatgaacctctctctgggcccattttcctcaactgtgagtgaagaggtcaggctaaagaatcactagcaatttttctaattctaaaggccaaagaatgtatgtgaatcacagaccaaacaagcatctggaagatatgaaaaaaatcacatatctgacaaagaactcatcctagaatatgtaagtgactcctacaaatcaataagcaaagaagaaaagtcaattaaaaatgggaaacatgmgtgtgtgcatgtgtgtgtggtatttgctgctattgttgttatagtaaagaaaaaaattgttcagtgggaaaccttagggtcatcatgatgaccatgtaataaatattttcaaatatgcagaaatgttgggccatccacatgat

SEQ ID NO: 209448 - DNA, 608 bp, Homo sapiens
ggcaccaagtagaatcatggcatgcagtaagtgctccatatctgaatggktggtagatctaggtcagtactgtccaatagacatatgagagccacaaatgtaagccatgggtcatttaaattttcctagtagccatattaaaaaaagtagaatgaaactaattttgataatatgttttatttaacctaatataaccaaaatactttcattccaatatgtaattgccataaaatattgattatgttatattctttttttcaggctaagtttttgaaatcccatatgtattttatacccacagcacatcccaatttgtactagccatatctcgagtgctcactagctgctgtattggatagtataattctaggtggaggtgattgtcaggcagtagattatgataactgcacttcgaaagacaggcatcaatctaaaatcacctgtatggaagaggaaaccaggtaataggatgaactttgtaagagagagaatactaaaagagaagggaacctaagatagaatgggggaacaattcattttgcaaaggtttggtttttccattagactgcccagcccctgaaaagaggtgaattagtaatagtgattca

SEQ ID NO: 209449 - DNA, 406 bp, Homo sapiens
agttaagtgataagaatttagtaaaacatgttttttgccctcaaggaattccaaggttcctggaatttttagagtaggcatctccctaagggtcttccaatttccacctcaaacaccaggggttcctttcatacttccttaggggaacatctcccatttttccccagatgttctccagtctgcccacctctgccaaatagtccctgaatgaatgaatcatgattttcaaacctctctcccataacattttccacattagaacaaaattttgttctacatccttccttgcctaagtctccaaagaaggtgctaatgaataataaaatgcaagccctgcagggaactgtaggaaggcrgccagacgataaatatcttctaataaatggacccagctcaacaggagata

SEQ ID NO: 209450 - DNA, 501 bp, Homo sapiens
tggggctgtcttggggaaagctaggacatgcagtcaccaaggttatcgaccatacccatgaaaagtgccctgcacctactcatttctaataaataaataaacaaaaaatatggcatggttatgggatatttggatcctcaggacttcaatcattttgacagaaaaaaaaaaatcacaaaagaaataatttccccagagtcacttgcattttgaatatattctttaagtttatccataatagcaaacaattaaaaggtaaatcacaactaataataartggagccaatttttgaatagcatagaaaattaataaattgtctacttcatcttttaatgtgggaatcatgtgaatgttacaaggattacagaaaagagcaggtgtttaagagcagcagaatgactaggactatttcagttccctttctaccaactaatctgagttgaataatccattatagttaaaacaaaaatatattatattaactaaaacttcacctcatg

SEQ ID NO: 209451 - DNA, 560 bp, Homo sapiens
ctcagagatggactgtaactcaaggaaggtagtctcagttctttgcagtttcctgatagagtggcagaaagatcattctctcctgattttaatgatcttaagacacaaaagctatgttctgagacttccagtggttattgtgtctttgttactgtcacctaggaaaaatatctcagcatcaataaaatatgagttcaacacttgattagacccagaaaagagtagatggagatgtgcccatgtaaatggaaatgtagaaatataaaattcacaagattatttaagtccttcatccagtcttgacagaagctagacgactccatgagggcaagtcataacttgtcctcatggcaatgacttgcctccaagcaggggtaatatgagctgccaagttcattgccctcatgacaatgaactcttcatgsagttcacagttgtgtggaagaggtagagtaaaagtgagagctgaaggtcagagtgttctgcacaaaggaaggaggcaaagagggcagttaggagattaaggacgcatctcagaagagaaatgataagggcagaaa

SEQ ID NO: 209452 - DNA, 615 bp, Homo sapiens
tctctgggtcaagtcagtgtgaccgaaacttcttcttggacttttttaacagagctcaactgtttttcccaatccctcctgtagggaggtaatgttccattctaatcctcttattctaccaaagaggaaacttgagtccacacaagaggagtgagttccttcttgttaacagtgagtgggatgggtatagggtttagacctggtggtctacagatgaaaatgttacacaaatataagagttgatcaatacaaaacatagaaaccttagtggactgtgtctctttgaacaaaactttgccatcttggtctttgctatcacatctattctgaagacctgccttagagtgccaaatttcatatctcttaatgtcatcctcaaattcggtgtagattattctttatctcttataaatcttgtttcttattgaatatgcattagagaagctgcaatgggactccckttttgacatgcaacatacaagaccttaatgctgcataacagagaatggatagtacctattgatggacaaaaactgaatgtatacatcttctttcaacaacccttcaaaacaaactgtaaatcctgggtgcaagataaatgttctgacatgacat

SEQ ID NO: 209453 - DNA, 630 bp, Homo sapiens
tagaaatttttaatatgttccatcaaattacacatacatgcatacacacatacacacacacatacacacacwcacactgaacttctggtatggtctgcctctgtttgtgggttaagaatcagagtttatagcaatatgaatattatgactagcatcatggcccaatagctggtaggctttaaataggttgacaggattttgaattagctcctgtagtagggaaaaaaaatctcagaatttcaaaattatttaatatattttaggttaaagaaaatgtataatcttcccttggtatctgccgggaattggttataggaccctcccctgaataccaaaatccaaggatgttcaaagtccttatatacaatggcacagtctttgcatataacctacacacattctcccatatgtgttaaatgatctctaaattacttataatacccaataccatgtaacagccatgtaaatagttatgatactgtagtttcaaattttgtattattttgcattgttgtattacaattttttgttgttttctgtttttctccccaaatatatttgatgtttggttggctgaattcacaaatgtggaacccatgaatatggaaggcctactacaatttattttcc

SEQ ID NO: 209454 - DNA, 560 bp, Homo sapiens
taataattttaggttaaatttgattccattcataaagctrcttagcacagttgccagcctgttggcgatgctcagtaaatattaattcttttctggaagttcttctctttgagcagtagactaatgaggaagagaaactcattggcaaaggaggaaagtgaattcttggaaatgtcattgtagctctgaatgtaattgcctatgcagaaggactcttcattcaaaggtaagaaaatatttcatattcttcagtcctggacaatatatttcccatgacaagaaaatgtttttcaagcatcttggtttttgatcttgacaccagtgttctcatccttggccacagatatgtaaccagttgcatgttttcccccacttaggccaaaacttgcaaatagggccattaattaccagaatatgtcatgcacaaagtgtagtgtttctattaatggaaaaacaaattcaggcttctaagttttagtccaacctggactcctaattgcatgctgcttttacttgtaccctttttcattatactaatacaatataaaagttcctaataa

SEQ ID NO: 209455 - DNA, 494 bp, Homo sapiens
gtgaattccaggtcggcatgcctgagctatatgacagtgactgggtcaaatgatttcatctgtctgagccccaatctcctcaaaattaagttgaggtctctttgcccattgggataacactacctacttcatacttttgtttgtttttgtgaaaagtaaatgaaatgatgtttgtaagaggatggtgctgtgtctggccagtagtcagtattgagcgcatgtaaaaaagaagaaacactaaacttctctttgtaataaattaattccagatacatgtttttggagactgactatgaggggaggtccacaggctmtttgactaggggagaaggtccattattgttgcttctccaggttcacttgagataaaaacaagtagagaaggcttcagtttcacagagggtccagcaatgcagtgaatcttgaatgttgaaacagtaagagttctgaacagcttatctaacagattcagtgtggcagagactaagggggga

SEQ ID NO: 209456 - DNA, 557 bp, Homo sapiens
taagtttaaagcaggaggtgcatatttcatgcaatacattaaagtgtaaatattaatttttaaaagagtgaaccaaatcggcttaaaagtatatacaatgctcatataagcacatactgtctattatcacctgtcacggaaaacaatgataaattaataactgaattctgcatgattgctggatattggcacatgagtgccatgctcacttaaatctttaggagacctttggaagctttttctctctgtagatatggcaacagttatgtgaggaatatagagagcactgtggaagacttagtccttattgctctcttacttctgatattaaagttgagtttttagattatagttgttattgggtcaycgtgaaatatgggaaaaccaacaataaatgtttcatggtgtactaactgtgtgataggcacaggccaagtatctaatcctcacactaaccctatagggtagccctctgtattcctttttcatatttgagaaaacagagtattaaataagttctggtcaggcctgggacttcttattcaccatgtgtcaca

SEQ ID NO: 209457 - DNA, 519 bp, Homo sapiens
tgggtgggctgttctgaaggacttctttctaatgtacctcaccaaaccactccatcacactaagattagactaaactctgccacatttttaaatggctttttcgtatatctatatataccacagagtgttcccacccctcttcattttaagaaagcagacatcaacaatagcctcataatgatctcattgttgtttcaaataatccaatctttgaaacctatttctttcttttcagatgtattagtgtcgtttatcaaaagtaatgggatttttttttaagttaagggtaaaagaaaagtaatgggatacagcaaactagtcaagtgcttagtacaaacgcagagcattttctgaagcatatgtggaacacttcttagacaggcaggactttcaaaggcaatattaagtgtcttttgtgggtctcagataatatrgctcacttaattagattttccataattccaggtaatcctattgtgaaattacagatgtgaattttgacttgcctgacagaaata

SEQ ID NO: 209458 - DNA, 567 bp, Homo sapiens
ctattagggtctcttttattcagagtagagagtagctcagtcagtgtcagtatggtgagggccactcataactgaatcttgtaaaaaatggaaatctgaaagattaacaagtgctcaatataagaaaatgttgagtaagtgtaccctgtattcctacacaatgaggacgacagcagtattttccacaacagtaaagcaaaataaaattatcccaagtaaactaaataagaaggctttccatgaactggacacttgttagaactaagttaatatggagtagtcagttgattccaatatgtgcccagaattagaatactcaactagatctgtaygttacctattcttcttgtttcttctgatcagcagccagagatcactagttggttcacaaaaataagcagtcaatctaaattgcagaaaaaatctccaaaacaatagaccagaccagaagctaattacagatgtactatagtttttgaaacaatttttctctctggtccccatttttattaaaaacaaatcatggtagaactgatttgcttgcaaaataagttttagccttactat

SEQ ID NO: 209459 - DNA, 555 bp, Homo sapiens
gtactaacaataggaataatataatgaatgtttattgagtgccaaatgtggtgtttgatagactctaccatttactaactgtgtgatcttgggcaaggyactgaacctctctgaactctagttccctcactgtaaagacagggatgacgatgcttgctctgcaaagctttccaggggtttctaggcatggggaggacttgtgtggtgctggctgcataagagtcgcctgggaaacttgttaaaattaagattcttggcactacaaggagagaatctgatgcaagaggtctacaatggggtccaaggatctattcttttaaaaacagccccctcctccagatgtttctgatgagcagctagatttgctgttgctcacagcccctggcttttgggttggacattctgtctacttgacttatgagagtgtctggcagattgttcctcgcatgatgtattcagaggaaaatcttgggaggtatcttgtttgctgtgttcaggctcccccttcccactctgttccccttctcaacaaatggtacctccatctacttagaa

SEQ ID NO: 209460 - DNA, 527 bp, Homo sapiens
cagggatgacgatgcttgctctgcaaagctttccaggggtttctaggcatggggaggacttgtgtggtgctggctgcataagagtcgcctgggaaacttgttaaaattaagattcttggcactacaaggagagaatctgatgcaagaggtctacaatggggtccaargatctattcttttaaaaacagccccctcctccagatgtttctgatgagcagctagatttgctgttgctcacagcccctggcttttgggttggacattctgtctacttgacttatgagagtgtctggcagattgttcctcgcatgatgtattcagaggaaaatcttgggaggtatcttgtttgctgtgttcaggctcccccttcccactctgttccccttctcaacaaatggtacctccatctacttagaaaccccagggttattctgaacacatttcctctcttgcggactctcttatgccgtcaccaacccatccccaggtcttgaagctgtctgcttctccacctccactgcccctgc

SEQ ID NO: 209461 - DNA, 527 bp, Homo sapiens
cagggatgacgatgcttgctctgcaaagctttccaggggtttctaggcatggggaggacttgtgtggtgctggctgcataagagtcgcctgggaaacttgttaaaattaagattcttggcactacaaggagagaatctgatgcaagaggtctacaatggggtccaaggatctattcttttaaaaacagccccctcctccagatgtttctgatgagcagctagatttgctgttgctcacagcccctggcttttgggttggacattctgtctacttgacttatgagagtgtctggcagattgttcctcgcatgatgtattcagaggaaaatcttgggaggtatcttgtttgctgtgttcaggctcccccttcccactctgttccccttctcaacaaatggtacctccatctacttagaaaccccagggttattctgaacacatttcctctcttgcggactctcttatgccgtcaccaaccmatccccaggtcttgaagctgtctgcttctccacctccactgcccctgc

SEQ ID NO: 209462 - DNA, 459 bp, Homo sapiens
ggagaagtgacttgaaggtgatttatatctataaaaaaaaaatgtggatatatatttggcaggaaaactcagccgtttctcagtgtcaggcaaatggctcagagcctggttaaagattaggcttttaatgctggtgttggatgggtggagggaccaagactgacacagtcttcgaaagagttatccagaggctgcccaggcaagcattctgctcccactcacttgagtgctcattccccttttgccctccaccttggtcttctggacaaagataattcactgcctcaaccataatggaatggctgacctggctgacctagcatattcccctcrctgcacccccccaccctcgcactcatcagctggacccaaacagtttattctgagttgtgaaacttacttccaaccctcactttattatatgaaatgtcaatgttggttttaaagcataaagcattg

SEQ ID NO: 209463 - DNA, 563 bp, Homo sapiens
caatagtaatcacactgacctcaggccccggatactcctttcagatgtctttccagtgcaagaggaagaaaaatttccagcggtctccatttttrtcccaaagcttactgagtgcaggttccttttacccttaaatgttttacattgaccaaaaccttatgactttctgatggtgggtcagaggttattccctagctggttgattatgtctgctgcctcatttctgacccttaactgtaacctgatactgaattctgtcttgtgactctgggctctggcccaaactaatagcaatctcgttacattccccgatttcatcagaatgggatattggggctgctagggaagactgattatacccagttacaggctatagcacctggcagaagagtgtattcatgctaactgaaagctggcattaaccttttcagcaagaggtacttcttgaggacaactaaatttgatgaaatgttaatactgcattatccaaggacatttcccagtacaaagtgggattggtctgacagttcgggatgcatgaaccttcctcttttttttttttt

SEQ ID NO: 209464 - DNA, 566 bp, Homo sapiens
actgatttcatttccttcagatatatacccaagagtagaattattagatcatagggtagttctattttaattttttcaggaaatttcatactgtttttcataatggccatgctactttacaatcccacaaacagtgtgcaagtgtttccttttctccacatccttaccaagacttgttttgtccttttgataatagccattctaactagagtcaagaggtgtctcactgtgattttgatttgcagttctctaatgtttagtgatgttgagcattttttcatatgcctgtttgccatttgtgtttcctctattgagaaatgtttattcaggtcttttgcccatttcttcaatyaatttttaaaattgtttttctgctaagtactctgtgtgttctgagtaataacctttgccaggtgtatagtttgcaggttgtctttttactctgttgtttcttttgttgtgcaaaagcttttaaatttgatgtaattgcacttgtctatttttgtttttgttacctgtgcttttgaggtctcatttaaaaaaatccttgctcagcccagtgttgt

SEQ ID NO: 209465 - DNA, 566 bp, Homo sapiens
actgatttcatttccttcagatatatacccaagagtagaattattagatcatagggtagttctattttaattttttcaggaaatttcatactgtttttcataatggccatgctactttacaatcccacaaacagtgtgcaagtgtttccttttctccacatccttaccaagacttgttttgtccttttgataatagccattctaactagagtcaagaggtgtctcactgtgattttgatttgcagttctctaatgtttagtgatgttgagcattttttcatatgcctgtttgccatttgtgtttcctctattgagaaatgtttattcaggtcttttgcccatttcttcaatcaatttttaaaattgtttttctgctaagtactctgtgtgttctgagtaataacctttgccaggtgtatagtttgcaggttgtctttttactctgttgtttcttttgttgtgcaaaagcttttaaatttgatgtaattgcayttgtctatttttgtttttgttacctgtgcttttgaggtctcatttaaaaaaatccttgctcagcccagtgttgt

SEQ ID NO: 209466 - DNA, 583 bp, Homo sapiens
tgagatatatttttcttttgaaggtttttctctactacgatgaaccttaagatgggrgcaggtaagactagtttaatttgggatgcatttcttactgtgcattcttctttccactaagataaaagtggttaggaggaaaaatccctgggaaaggttggagtagggagaattctcttgttactctgttactctgtgcaggacatggcatgctactgaaagttataagcaggcttctaccttatcataacttttatttggtcttagaaatattttatttttatttatatgcatacaagcaggaccagccaccagtataggcctaacactgtgccttcagtgctctgggcttcagcctgtctgtcttcaggtctcctggggagctccaaggacaccaatacaccaaaggagacatggcagcgctcatcaacattgaatttcactgtgaaagtgtgtcaggttgttattcttcatggatctctgagaatcaggcatcatggatgagggctcagagatgagaatttttggaatctggagcatgtagtggcagtgtgaggtccctgagcatctggaggtaagggaacat

SEQ ID NO: 209467 - DNA, 415 bp, Homo sapiens
ttgaaaactcaagagtaaactaaatatacctcttgcattgaccaatggccattgtctcctttttaatctgcagcctttgtgctcctatctacagcctaaatgtcactcttttagtgacaaaatagtgagtattcagctgtgtgagatactggagggcccaaagccctttgaaatatactctgctatcaaggggtttgtagaagaaatagagacacataaatatctatgatacaagctcctaggtaatacaagtgacaaatgaacacttaagtagccaaagaagagactgcttaagagctgttttttaaatactagctaagagttttccaagttgtgaagataatacacatttactatagaaaattaaacyaatacaagtaaatacatagaagaaaatttattatttcaccacaca

SEQ ID NO: 209468 - DNA, 610 bp, Homo sapiens
gatgtatcactggcattttgttcaatctgcataagctgctgtgtagaacaggaaattgcaaaaggaacacgagtcactgactatcatgcccatcactaatttatccatgtgaggttcatttcctccagcaaagcccaggattggaaatgatggatgctttccaggggccccgatccatcatcagatgaatacgcagccccctccccaaggaagctcctggttcattgagatgcktaattctctccttattttcattactgtttctcgtttgtatggattatttttcttcagtaatctgggctttacatgactgaataagaaaatcatttgttcatggatgcatttatccattcattcatttagtcaataaaaatgcattgagagtcactttgcgctagtcccactatataatgtactgaaaatagaaatgtgaatataaattcgttctagccctcaggatttccagtcttggagatccatgatcagataaaccaggcagtgcttacaatgaactatatacttgaagaaaggactatctctgtactattgctatgggagagtagtaatagctgtttttttaaaaaaattgttacctgtgtgccaggcactg

SEQ ID NO: 209469 - DNA, 393 bp, Homo sapiens
tcatttagacagtaggtgtcagagctcagcattgactgtggaagcttcaattcagaagctgcactttttgctattctaagactacaacttgagcctatgcttaaggattgcctgctgagctatctggtctgagaggtgaggtgaacaaaaatgagctctggctggacttgkttcagaaatagaagatgccatcgagacagggaagtggcaggtaatgggaatccaggcctttggctgttttggataagagtgaaaactggaatgtgggcaggtagaagactagaatgaaactgtacacacagcagtgatcctggagccatcatcccacccagtgttctgtatcaaggaggacaacaagatgaacccatatgcaccaaggctttagaacccctg

SEQ ID NO: 209470 - DNA, 417 bp, Homo sapiens
cctaccctaccctaccccaaggagttttttcttcacccacaaaggactctggagkcggagcctttgaccctttgactaaatgacccttggaagagcacaggctagaaactcatgtggggataaaattcaagctagagacaggcaaaatttaagtctttcgaagtgcagcatctagtgagaatttaagaggaaaatatgtctgagtttaggtcattgtcctgtgagctgagaccctgggtttcagttttgtttctgtgtgagctccggcaggtgaatgaacctctgtggttctttgtttttcatctgacaaatgagttaacagtgttgttctatatgctttatgagaagaagtgaggtatttgtgaaaatgcttttaaaagatctttgccactatcaagtggtattccatatgaattc

SEQ ID NO: 209471 - DNA, 587 bp, Homo sapiens
gaattctggatgatgtagaacattcaggaagtgaattgaggctaccaggaatcttccyccaagttaatcttctaagtatggccacagaaatatttcccatcccccatggtcttcatacaatgtgactctagcattcctcccatccagagacagagtctgttccctctccttgagtctgggcagatttgcgacttcagcagactttatgttacgtgactcccaaggttaggctataaaaggtgatgcaatttccatctactttcattagaacatataacagaaaataaaactttgctatccttgatacataaagaagtcttacaaaaccaaaaggaaaaaaatctatgaaaaataagaaaaggatagttttggaggcccagaccaccatgtgaaaagggggaggcctccatgccaggccacatggaaaggatacaggagggtgtttgggatgagctcccagccagcggtggcaaccaccactcctgtgagtggtgacacctccaggtgatacctgccccagttgctgagtcacctccatctttggagtcttgcaggaagctccagaaattgtggagcagaaacatgct

SEQ ID NO: 209472 - DNA, 487 bp, Homo sapiens
ttgttcttttttgaacccacgcgtgtgccatccactcacataattcagagtacaagatactctgaattataattaggtgtgtgtagggcaaggattgcattttccttagccccaatgcagtaattacacataataagaattcaataagcatttsttgaataaatacatgacagcatagcatcctttccccctcgctgccaggaaagaaatatcacaatgttagcaatcatgtgtaacttacaacaatagaaaaggaagaagagagacaagtcagatgggggagcttaatgactgcacttggctttacccatttttccataccatccacagccatccctcacatacccttctctgtccaacagcccctacactggtggatacagacacctgctcaccagacataaaatacacatcacgatatgcaacatattaaagacaacaacaaagtttatggcaagcactaagtgaaatcatcctaatggggttt

SEQ ID NO: 209473 - DNA, 525 bp, Homo sapiens
tcttttctttctttttctttttgagacacagtctcactctgttatccagggtgaagtgcagtggtgcaatctcagctcactgcaacctctacctcctggattaaagcgattctcgtgtctcagtcacccgagtaactgctattataggcgggtgccaccatgccggattaatttttgtatttttagtagagatggggttataccatgttgcccaagctggtcccgaactcctgacctcaagtggtccgctcacctcggcctcccaaagtgctgggattacaagcatgaaccactgcacccggccttgtctcccattttgttgaatcaaatctctcttcctcctctacagtctctccttcttcattggtttmtttccctcagccatcagtgattctcaagcgggtcacctaatctcctaaaatgccttcttttgagtttatggcttttttcctagctgtcactcttcaaaatgttagaaaagtatataacacgtgcctacacttctgaaccatggagcactaaagc

SEQ ID NO: 209474 - DNA, 600 bp, Homo sapiens
tataatcatactaagctccacttgagttctactagtgtgctgaccctttaccctgttgaacgtcagctagtgccaggccctaaagcagatatactaacactacctcctttaaagtgttaactgagctagaacaaaactcccttttacagaagtactgattttcttatcgctttcaaatatggaaaatacatggcagatcaaatatgaattccatgatccccaattgaaacatgagactccaagaaatatgagaccaacttattgaaaatgatgcaagaaaataatgagaaaatatttcctttttgagtgacaaaacaccataaagaaaatgttaaggaagctagttgttcaatcattgaaatggcataacttgtgacacaaaagaattggaaccaaaaagtcctgtcatcctttggagaaggaaaaaagcaataaataaagtggttttgcaccatgtggcagcctatccccagatctgaatcggaaatagagactttagaaaataaaggctctgttactattgaccaaactgaaaggttagataccgaaactcatcktattgactttgacaaaattcacatactttgttatgacaataaa

SEQ ID NO: 209475 - DNA, 610 bp, Homo sapiens
gcaacataagaaaggaaggtgctcacaagtgrcagagctgtgatgtcttgttactgagcaatgtgcaaaatgctggcttatcacacactacataatgcgactgagggcaggaaacactgccaaccccttcaaatacaagaaagaagttcaaatgcaaaaataggctaaggaggtctaattttgcattacttggggttattggtaagacattgagtcatggtctaattggcaggtttttttcctttcatgtgaaaataagatttttttttacaactaatagtgtattaaagttaataaaatgcagtcagtccatatttggcgatgggggaagagcgtgtaaaaagtgttgcgtatatgaagagagacgggcaagccagatggagccgtggcctcggggagtgaaccaacaaaggcagggacatatatccagccatgcagggtcatatcagagctgtgttttcattctaagagcaatgagaatccatgaaacattccagtgggactgcggctagggtcagggtggggagagaagacttgtcatttttaaagctcagtctggctgtgctatggagaaatggccccaagtgggtcctgaatgaatggtccacac

SEQ ID NO: 209476 - DNA, 442 bp, Homo sapiens
ttaaaagtataaattttatcctaaatattttttatctgtatcatgcaaacttcaaaatatactttttaatgttctaaattagtgtaaattagggcaaaattaagctaaaattttcaattatattcctttgtgtctgttgyatagaaagcaattttcaacacaaagttaaattttagtatcattaaacactgtttgattttatattaatttgatttcactgaactctatgtttgggtacttgtggacaaatcatggttgtataaaatttgtgttcgtgtttaactttgaatatcaactgttgcaatgaagtgcatttgaatgtttcctttaatacctgggcacaataaaagttaaataggtactcctccaactcctactctgaagtgcaaattagcacttcctttttcaggtacaatatggtgctaaataaagtttgtcttga

SEQ ID NO: 209477 - DNA, 472 bp, Homo sapiens
acattattttggagctttgagatcgaatgactgccctgctgggtttcagacttgtacagggcctgtcgcccctttgttttggycaatttctcccttttggaaggagaggatttacccaatgcctgtagctccattatatcttgaaagtaacttactttttttttttttaaattttacaggctcataggcagaagggacttgccttgaatcagatgagactttggacttggacttttgagttaatgctggaatgttaagactttggggggactgttgggaaggcatgatcatgttttaaaatgtgagaagaacatgagatttgggagaggctaggggcagaatgatgtggtttgtttctgtatccccacctaatctcatgttgaattgtgatcccgagtgttggaggtggaacctggtgggaggtgactggatcatggggacagatatcccccttgctgttctcatgatagta

SEQ ID NO: 209478 - DNA, 343 bp, Homo sapiens
ttcttctgcttatctaagttttattcatctaagcactgctcagctgacatagatttgcctgcttccctgtagatatcttctacttcattcatcgctcattgatctgctgtttcccagtgatgctttatcrtttgattcctacctcatagattaataggtttgcagaatactaagctcagctttttaatgtttatacatgaggaaattgagtatcaaggaatttggtgtcattaatcaagatggcgcatatgatatcaatatagtgttttgaaggaaagacattgagcttctcttggaatgtggaacttgttttacctgttgagtacctaagttgaaggttatt

SEQ ID NO: 209479 - DNA, 635 bp, Homo sapiens
acatatatgtacccattacttatgataataagtgttgtgctcatgtatcttagtggtaaatatacaacaaaaatatatttatttttctttgacacaacattatctctaggaaaaaatttgtggttcttatacagtacatgtttttgagcctaaacagtatgtgartttctcctttaatctatcttgaagaagaaagggtattcccaatggcagagccctagatctaaacctcaatgagctctgttactactggatggagctcataacagcgtcgggaagccaggccaggtggtcatgcttgctgagtcatttagctgcaactgtccttgccttgtttcctgatagtacagtttcctgctaatgactataaaagaacaatggcaataccaaatgaaatcaacacctgaaaactctcattttccaccgcctacccacttcccaccccactcacagcagtctctgtccacatcaaaaaggttaatcacgtctcagtgtggtactgaggaacatctcacaaagtcatactcatttgctgaagaaagaagaaggaagaaaattttcacttctgagtatcatgtcctctcttagttgaaagaaggagacaagtagaaaggaggagaagaaacacaacgggc

SEQ ID NO: 209480 - DNA, 635 bp, Homo sapiens
acatatatgtacccattacttatgataataagtgttgtgctcatgtatcttagtggtaaatatacaacaaaaatatatttatttttctttgacacaacattatctctaggaaaaaatttgtggttcttatacagtacatgtttttgagcctaaacagtatgtgagtttctcctttaatctatcttgaagaagaaagggtattcccaatggcagagccctagatctaaacctcaatgagctctgttactactggrtggagctcataacagcgtcgggaagccaggccaggtggtcatgcttgctgagtcatttagctgcaactgtccttgccttgtttcctgatagtacagtttcctgctaatgactataaaagaacaatggcaataccaaatgaaatcaacacctgaaaactctcattttccaccgcctacccacttcccaccccactcacagcagtctctgtccacatcaaaaaggttaatcacgtctcagtgtggtactgaggaacatctcacaaagtcatactcatttgctgaagaaagaagaaggaagaaaattttcacttctgagtatcatgtcctctcttagttgaaagaaggagacaagtagaaaggaggagaagaaacacaacgggc

SEQ ID NO: 209481 - DNA, 458 bp, Homo sapiens
caaaaacactctcacatggatgcgtgcacaacacacccactcactgatgtgtacaaaaatgccgaaagacaccaaagcctcggttcccctgtttccccacccccatgcctggtaaaagagaaaaagaaacaggcagctggggctctgggagccaagagccgatstcttctttagaagaggaaaagaggaggaggaggaggtgggccaggggcttggtccaatcattctgctcttggccactgctgaggggcatggctgaggctttggtatcaacctttaatgcccacccccaaaacagcgaagcaaggatagtatttcctgggcaccagtaacacccatcttgcttcccttgtctacccagcaaacttctgaccctccctctggaccacctcacgcaatggcataccggaggggaggtccctatgaccccagctttggcctgccaagtgacaccaagg

SEQ ID NO: 209482 - DNA, 456 bp, Homo sapiens
gcactgaagcaagtgggaggaacggagagaactccaagcagaggaaatagcacatagcaaggcagggggaagagaaagaacatgacactctcaggaygctgcaagttgtggggtgcagctggagggtaagcgattggggagctgagcagggaccaacgaggacattggtgagcctgcagtttgaagcaaaggaaagtctcatggaaggtgtttaagcagaagagtatgaatcagatttgtcctggctagagtatggaggatgaattgcaaggggcaagcctaaagtcagaaagacaagttgaaggctggtctaggcatccatgggagagatgatgatagacctgcgtaggtagtgacaaagggatggagagaagtgcatacgctgaagaggcattgtggaggtggggtctgcaggacttggagcattcatagaatgtgaggagcgagggaaggtta

SEQ ID NO: 209483 - DNA, 537 bp, Homo sapiens
tgcacattaaaatcatcaggaagcttttttcttggcttttttttttagatggaatctccttctgtcacccaggctggagagcagtggcacaattatagctcactgcagcctcaaattcctgggttcaagcaatcctcccacctcccaagtcactggaactacaggggtgcaccgccacatctggctattttttttttaacttttagtagaggtggggtcttgttatgttgactaggctaaccaggaagcattttttttttttaaattccatttttgggccaggtgcggtggctcacgcctgtaatcgtagcactttggaaggccgagggtggattgcttgagcccaggagttcaagaccagcctgggcaacatggcgaaaygctgtctctactaaaaatacaaaattagccaggcgtggtggtgaacacctgtagtcctagctactcaggagactgaggtgggaggatcacctgagcccagggggttgaggttgcagtgagctgaggttgtgtcactataccccagcctgggcaaca

SEQ ID NO: 209484 - DNA, 537 bp, Homo sapiens
tgcacattaaaatcatcaggaagcttttttcttggcttttttttttagatggaatctccttctgtcacccaggctggagagcagtggcacaattatagctcactgcagcctcaaattcctgggttcaagcaatcctcccacctcccaagtcactggaactacaggggtgcaccgccacatctggctattttttttttaacttttagtagaggtggggtcttgttatgttgactaggctaaccaggaagcattttttttttttaaattccatttttgggccaggtgcggtggctcacgcctgtaatcgtagcactttggaaggccgagggtggattgcttgagcccaggagttcaagaccagcctgggcaacatggcgaaacgctgtctctactaaaaatacaaaattagccaggcgtggtggtgaacacctgtagtcctagctactcaggagactgaggtgggaggatcasctgagcccagggggttgaggttgcagtgagctgaggttgtgtcactataccccagcctgggcaaca

SEQ ID NO: 209485 - DNA, 608 bp, Homo sapiens
cttccttgccctctttctataatggtctgcatagcatccattccctagtgcctgccctgaatgagtttccaggaccccacatcctcagcagctggtgtggtaagtttccctacacaatcctgggtctgtagtcccatctgtgagtccattgctcatgatttgatctcatcttactgccaagagtcttctcttttagatctggatctctgcctcaaatcaagtctattgccagtgttcatctaactctgactccctacctctgccmaaaacagtgcttttaacagttttcttgttgaagcattgccttttatttttctattgcctactctgcccctaagaatatatctgttaattcattcctctttgtcttgaccattttactgcatatagtcctcattggtggcaatgcaatggaggattaagcaaaagcatcaaagggcgatgtttctgattgtgtaagtaaatcactgttaatatttgacattgtgtggtgtttctttgtgggggagtaaatgtgtgtgtgtgtgtgcacgtgtgtgtgtatatatatgtgtgtgtgtatgatcttgatctgtgatagaggcgccccagctgtctttgttcaaaga

SEQ ID NO: 209486 - DNA, 472 bp, Homo sapiens
aaattaaattaatcaaagcagattattttgcactggtaacaatctcttccgtaatactttgacattawccctttctgaacttctataaatggaatagcttgttccacccaatttaacacagctttatatccattcagtggcaagctctctaacaaaaaattgcatggtgttttacaattgatcaaatcttctatgtattttttcattttatgactttaacccttaacagtctctatgaatgagccattatctccaacacctttattcacacttgcacaaatgcgccaagtttagagtgctgttaagtgacagagttggattaatcggaaaatctggaattcagctcacattctgacacatgcttggctgtctgatcatagaaaaaccactggcttctcagttacagttttcttatatgtaaaatggacataattatgatttaaccatcccatacaattataagaggattaaa

SEQ ID NO: 209487 - DNA, 519 bp, Homo sapiens
catgtggaagttcttcccttcagatcacaattctgaatgcaccttccttctctgtaaatgttctaaggctgctactgacacgacaattataaagctatcttttttgtaataagggatccccaatcttataaactttaattttactgagataaaagcacagattccacagaccattgaatatcttgagagwcatttaagacccatgctcctttctaagtaccagtgtgaggataatgttgggagcaggcattggagtagagaccccatcaggagatcaggtccagctcagaaaccaataccctgatatcagccctgatatcttgccttgggcctctagacagagaagtccactcaatggctgaatttgtataacctccttctagtgtttcatacggtggaatgtgttacgttcacgcatccttttctgggacagtgtttctatttggaattttgcaatattatttaatctatactttacatttaactacataaatttatagccattcaattgttcttatc

SEQ ID NO: 209488 - DNA, 519 bp, Homo sapiens
catgtggaagttcttcccttcagatcacaattctgaatgcaccttccttctctgtaaatgttctaaggctgctactgacacgacaattataaagctatcttttttgtaataagggatccccaatcttataaactttaattttactgagataaaagcacagattccacagaccattgaatatcttgagagtcatttaagacccatgctcctttctaagtaccagtgtgaggataatgttgggagmaggcattggagtagagaccccatcaggagatcaggtccagctcagaaaccaataccctgatatcagccctgatatcttgccttgggcctctagacagagaagtccactcaatggctgaatttgtataacctccttctagtgtttcatacggtggaatgtgttacgttcacgcatccttttctgggacagtgtttctatttggaattttgcaatattatttaatctatactttacatttaactacataaatttatagccattcaattgttcttatc

SEQ ID NO: 209489 - DNA, 577 bp, Homo sapiens
ttttaggtgtgcagctttattttaggggtctctattctattccattggcctgtgtgtgtgtttgtaccagtaccatgccattttggttactgtagccttgtagtatagtttgaagttgggtaatgtgatgcctccagctttattctttttgcttagagttgccttagctackaatgggaaaagttggaagcattcctgctaagaactagaacaagacaaggatgtccactctcaccagccctattcaacataatactgataatcctagtcagggcagttaggcaagagaaaaaaataaaaagcctcttaataagaaaagaagcaattaagtaagaaaagaagaaatcaattatctctctttactaatgatatgattctatgccaaaagaccacaatgattctgccgaaagattcctatatctgataaacgacttcagcaaagtatcaggatacaaaatcaacatgcaaaaatcattaccatttccatataccaataaagttgaatctaagaacaaaatgaagaacacaatctcattgacaatagccatacacacaaaaataaaatacctagggatac

SEQ ID NO: 209490 - DNA, 577 bp, Homo sapiens
ttttaggtgtgcagctttattttaggggtctctattctattccattggcctgtgtgtgtgtttgtaccagtaccatgccattttggttactgtagccttgtagtatagtttgaagttgggtaatgtgatgcctccagctttattctttttgcttagagttgccttagctacgaatgggaaaagttggaagcattcctgctaagaactagaacaagacaaggatgtccactctcaccagccctattcaacataatactgataatcctagtcagggcagttaggcaagagaaaaaaataaaaagcctcttaataagaaaagaagcaattaagtaagaaaagaagaaatcaattatctctctttactaatgatatgattctatgccaaaagaccacaatgattctgccgaaagattcctatatctgataaacgacttcagcaaagtatcaggatacaaaatcaacatgcaaaaatcaytaccatttccatataccaataaagttgaatctaagaacaaaatgaagaacacaatctcattgacaatagccatacacacaaaaataaaatacctagggatac

SEQ ID NO: 209491 - DNA, 475 bp, Homo sapiens
ccagctttacacacaaacaccgaggaaagaccacgcgaccacacatcaagaaggtggctggctgcaacccaggaagcaccctcatcaaacactgagtttgctggcacctctagcctccaggactgtgagaaagaaatgtctgctgtgtaagtcacccagtctatgatatattgttatggaagcctagtyggctaaaccatgcagcctccatttccatcccaatctcctcatgaaaacttcaataaagcctcctgttgagacaaacttcaaggtgggtgcagggcaagagaaagagcctcccaacaggttcacctaggaaattcctagctgtccatagtatagtcactccctcaccattgcatccaaccccatcccatcaagattgagtctgtaatgggaacgagtctggcttatacatatatttactgtactcggcattttatcagtttatgtctttaaaagagaactcaaatca

SEQ ID NO: 209492 - DNA, 475 bp, Homo sapiens
ccagctttacacacaaacaccgaggaaagaccacgcgaccacacatcaagaaggtggctggctgcaacccaggaagcaccctcatcaaacactgagtttgctggcacctctagcctccaggactgtgagaaagaaatgtctgctgtgtaagtcacccagtctatgatatattgttatggaagcctagtcggctaaaccatgcagcctccatttccatcccaatctcctcatgaaaacttcaataaagcctcctgttgagacaaacwtcaaggtgggtgcagggcaagagaaagagcctcccaacaggttcacctaggaaattcctagctgtccatagtatagtcactccctcaccattgcatccaaccccatcccatcaagattgagtctgtaatgggaacgagtctggcttatacatatatttactgtactcggcattttatcagtttatgtctttaaaagagaactcaaatca

SEQ ID NO: 209493 - DNA, 469 bp, Homo sapiens
ccgaggaaagaccacgcgaccacacatcaagaaggtggctggctgcaacccaggaagcaccctcatcaaacactgagtttgctggcacctctagcctccaggactgtgagaaagaaatgtctgctgtgtaagtcacccagtctatgatatattgttatggaagcctagtcggctaaaccatgcagcctccatttccatcccaatctcctcatgaaaacttcaataaagcctcctgttgagacaaacttcaaggtgggtgcagggcaagagaargagcctcccaacaggttcacctaggaaattcctagctgtccatagtatagtcactccctcaccattgcatccaaccccatcccatcaagattgagtctgtaatgggaacgagtctggcttatacatatatttactgtactcggcattttatcagtttatgtctttaaaagagaactcaaatcagaaaagcttccaa

SEQ ID NO: 209494 - DNA, 336 bp, Homo sapiens
tgtgtttctgcagtttttattcagacttcaaatatattattgtgggataatacagaatttcctgatgccaggaaattaatgtgtctgtgactttatggggagagaaaagtggatggtttgaggytggtacttttcctggaatctgtcctataagtctcatctcttggctgattttgatctgcattctttctgtctaataaactatacctgtgaatgtaataactttcagcaaaatctgtgaatctttctaggaaattatagaacctgggatagtttggggaaccatcagaacttgcagttggtgtcagaagtgagagcggtctcgtgtagactctg

SEQ ID NO: 209495 - DNA, 504 bp, Homo sapiens
tgagggcattcctgctgtatcatcttgtagtggaaggtgagaatattagaaaaaagcaagagctcaaactcccatccttaagcctttttataatcatcatgaatccattcctaaaggtggagccctctagacttaaacacctcatgttacaycccaacttccagcagtgttgcattgaggcgtaagtatccaatacatgctttttggggggacatattcaaaccaaacctgaagagatctttgctaatataatatatgcagattcattttctcttctgctttccacttcgactcactcagtatttaaatattacgtttggataaatctgtatgcatgccagtaatttgtaaagagatgaaaacaaaagtcaccttatgatattgttttaattatataatattagcactagaagtgattaaagtttatcataatcttatttaataaccatatacttatttaattcccttgtcactgaatttgaaatactggtatttcttacagaa

SEQ ID NO: 209496 - DNA, 547 bp, Homo sapiens
aaataaacatatagaaaataatcaaacacatgacatgaggamatttttcttttgagttggagaaagactcgaatctgtagaatgaatagtttgataaaagatgatacatacctaggcatttcctgataaaatttatgcacttcagggataaagatgaaaaggtagatgaatagacagagagatagttggaaatgtagactccagaaacaaagacacccccacttccagaaacaaagggcaatttagctatataaaaaaaatcaagaaaccagtttggtaattggacaatgtaaaggaaagagtagaaaatagaagatagtaaaataatatctacaaatatttatggaaaagtaatgtctcactaaccatattccatcaccccaataggggaaaggaaatgatacttgcagctactaaaatattcagagcctatcacctactaataccacggaagaaattactaaagcaaggactataatcaaacaacaaattattcaggagagagacctcaaaactgaaatgaataaagatgaaagagaacaagggt

SEQ ID NO: 209497 - DNA, 482 bp, Homo sapiens
ttccatcaaaagaagccaagaaaaggcaagtaaattagaagtaaaactaggataaagaagtgccacacaatccaagagaaaaaagtgcttaaatgaagatggagttctcaagtatatcaaaaattgatgagagatcaaaatgaaaaataaagaagaaacattgatttaacaaagttctgacactgggggatcmccatggcaagggcagttcatttgactagttagaataaaaaggaggacataaaaggaagcaagaaaaccatacacaggaaaaaaaaccacacaacacttttgatacaaccttatttatttatttatttatttatataaaattatacatgttaatctgagtatacataaaaacatctttcaacctaaatgttttaagaggaaatgtaaagtaaaatcttttcaagtagggtagtttctgtactgataaggactgtgagtgggattatggtgagaagtagaagttgtggaga

SEQ ID NO: 209498 - DNA, 486 bp, Homo sapiens
tgcctagtaggtgttatggaagtgttggctattttcttcttgatgctaccaaaacttcatatgtggtgtgtgtcatcctgtattttgatttctcatcatttttgtcatttgctcttctgtttttctcacaaaactatgattttccaaaagggaatgaaacactatggcccatcttgaaatctgtcctgcagactactcttttataatccatgagctgagcatgattatttttttaccttttaaaaatattgttagacataagaatatgcaagygagaccatgtgtggttcacaaagcctaaaatatttaacatctggctcttaatagaaaaatatgtcaaaccttgttctagagaaagggaccatatttcattaattgttacattcaatatgtgtttgataaagcaaaaaaaggataaagaatagaaaggctggaagatgcccaagaaaaatacatgtaaacactgtggaaggagcaattaattct

SEQ ID NO: 209499 - DNA, 486 bp, Homo sapiens
tgcctagtaggtgttatggaagtgttggctattttcttcttgatgctaccaaaacttcatatgtggtgtgtgtcatcctgtattttgatttctcatcatttttgtcatttgctcttctgtttttctcacaaaactatgattttccaaaagggaatgaaacactatggcccatcttgaaatctgtcctgcagactactcttttataatccatgagctgagcatgattatttttttaccttttaaaaatattgttagacataagaatatgcaagcgagaccatgtgtggttcacaaagcctaaaatatttaacatctggctcttaatagaaaaatatgtcaaamcttgttctagagaaagggaccatatttcattaattgttacattcaatatgtgtttgataaagcaaaaaaaggataaagaatagaaaggctggaagatgcccaagaaaaatacatgtaaacactgtggaaggagcaattaattct

SEQ ID NO: 209500 - DNA, 601 bp, Homo sapiens
tttcaaatttaagtccctccgtggtctctttcctggatttatcccagatcccaaaatggaacttaaaaataaaaaagtaaagagcgaaaaaaggaattagtgttatgcattccactcattcttcttttttagacttttaaatatgcacagattacagtcttttcttattcttgtcacttggccaagatttgcaacgcatatgaaactcattgctgttatactttttcattatgaatcagtctttctactcacctgcgctgttattcctggagctgcttgttgggttctttcaatgcacaaagttcaacctattattccaagtgtgtagctttgttagtgtcaaagaggaaacaaaacatcyctgtaggaacacagtgagccttgggacagaaggtgaagatgacaagggtttcttagtgcctgttatgagtcagatttctccagataaacagaacctataggatatacatagatatataagagggatttgttttgggaaatgactcacataattatggaggcaaagaagtcccatgtcatttgtaagttgaagaatcagaaaagccagtgataaaatttagcctcagtgcaaaggcctgag

SEQ ID NO: 209501 - DNA, 601 bp, Homo sapiens
tttcaaatttaagtccctccgtggtctctttcctggatttatcccagatcccaaaatggaacttaaaaataaaaaagtaaagagcgaaaaaaggaattagtgttatgcattccactcattcttcttttttagacttttaaatatgcacagattacagtcttttcttattcttgtcacttggccaagatttgcaacgcatatgaaactcattgctgttatactttttcattatgaatcagtctttctactcacctgcgctgttattcctggagctgcttgttgggttctttcaatgcacaaagttcaacctattattccaagtgtgtagctttgttagtgtcaaagaggaaacaaaacatccctgtaggaacacagtgagccttgggacagaaggtgaagatgacaagggtttcttagtgcctgttatgagtcagatttctccagataaacagaacctataggatatacatagatatataaragggatttgttttgggaaatgactcacataattatggaggcaaagaagtcccatgtcatttgtaagttgaagaatcagaaaagccagtgataaaatttagcctcagtgcaaaggcctgag

SEQ ID NO: 209502 - DNA, 608 bp, Homo sapiens
cttccttgccctctttctataatggtctgcatagcatccattccctagtgcctgccctgaatgastttccaggaccccacatcctcagcagctggtgtggtaagtttccctacacaatcctgggtctgtagtcccatctgtgagtccattgctcatgatttgatctcatcttactgccaagagtcttctcttttagatctggatctctgcctcaaatcaagtctattgccagtgttcatctaactctgactccctacctctgccaaaaacagtgcttttaacagttttcttgttgaagcattgccttttatttttctattgcctactctgcccctaagaatatatctgttaattcattcctctttgtcttgaccattttactgcatatagtcctcattggtggcaatgcaatggaggattaagcaaaagcatcaaagggcgatgtttctgattgtgtaagtaaatcactgttaatatttgacattgtgtggtgtttctttgtgggggagtaaatgtgtgtgtgtgtgtgcacgtgtgtgtgtatatatatgtgtgtgtgtatgatcttgatctgtgatagaggcgccccagctgtctttgttcaaaga

SEQ ID NO: 209503 - DNA, 595 bp, Homo sapiens
cttttgaacatggccgtgatgtttgcagagcagggactgggggagacggatctagcagaacctgttctgttggatctcgtattgtaccttggctgactgctgagggtcrccactttgcaccagaaaccaggctggaaggaagtgacggggactgcataatcactgtctccaagcaggtggtcgatttcttccctactttttaggaatggagatggatggagagcaccggatggtctaatctcagccataattaaaatttcagtcgcacacacttaaaggcaaacttgcatgaatcaatagcgtattgatctacactacatttattctccctcacacattgcagaaaatgtaattatcacttaattataaaattgccattttacaataccacatctgactgcctcagcctgcagccagaagcctgagtggtggcccctgccttgctgtcctagcacagaggggacccaggctccccatgcaagctcatccaggagaaaggtctcattgagcttttgtgcctctgaaacccattgcttacaagcatgcctcccctctaaggagtggactgaaggagcagctgctcccttctgcttgt

SEQ ID NO: 209504 - DNA, 599 bp, Homo sapiens
  misc_feature (1)...(599): n = A,T,C or G
tcaacattctgataatctcatcaggactactgttgatgcaaagcacccggataaggaccaccctaaggacmcttttgcccaaacctctattcacacttctgtaggcaccagcataacctagaatgagataaaataatagaatgtctagtaagctaatcattataatatctgcaaccattattgagcactgattaaatgccaagcactgtctaaacacttcccataaagtgaaggtaggttacagagtaaagttattttctattggtgactactaagaggctatgaggtcctctaaagtatttgtctggtctgtggatatctaattcagttctgcacatgggaaggagaactgaagacatcaggctctgggaggcgacacacctcttgccctacgttggggcagatttgaagctttggtgaagggaagggttagggatcacgtagggtttgggatgctgcttacagaaaagtggggtgtttcagcattctagggtcctcttatcagccattggcagtaagtcctcaacaatgattctcttcttctagcctttacctcctaaggagagctgaagnnnnnnnnnnnnnnnnnnnnnnnnnnn

SEQ ID NO: 209505 - DNA, 599 bp, Homo sapiens
  misc_feature (1)...(599): n = A,T,C or G
tcaacattctgataatctcatcaggactactgttgatgcaaagcacccggataaggaccaccctaaggacccttttgcccaaacctctattcacacttctgtaggcaccagcataacctagaatgagataaaataatagaatgtctagtaagctaatcattataatatctgcaaccattattgagcactgattaaatgccaagcactgtctaaacacttcccataaagtgaaggtaggttacagagtaaagttattttctattggtgactactaagaggctatgaggtcctctaaagtatttgtctggtctgtggatatctaattcagttctgcacatgggaaggagaactgaagacatcaggctctgggaggcgacacacctcttgccctacgytggggcagatttgaagctttggtgaagggaagggttagggatcacgtagggtttgggatgctgcttacagaaaagtggggtgtttcagcattctagggtcctcttatcagccattggcagtaagtcctcaacaatgattctcttcttctagcctttacctcctaaggagagctgaagnnnnnnnnnnnnnnnnnnnnnnnnnnn

SEQ ID NO: 209506 - DNA, 319 bp, Homo sapiens
ctattttttttaaaaaaagccactrtgatacacaatgcagcagcatttatgtattaatttagaaaaattacattttgtattggtttaagttttcctttccagaaacacgggatacctttccatttattcagaactagttttctgtccttcaataaagtgttatatttatattggtggtgtatctttcttgattaattcattctcaaacattttatgattttgtggctcatgtaaatgaggtctttttcccctcattttgaacttggtgctgctaaaaaagagaaaagctactacttaccatatattaaactgcatctag

SEQ ID NO: 209507 - DNA, 439 bp, Homo sapiens
gccatataccagtcccaagtgagtcagtgaggcccagatggctcagtggctgtttggactgtgtttttctatttctttgaagaacctgtagatgtctaatgtttgatctgcttttctgccttgaagccaacagatacagcacaggcgatggagaatgggctggtgagtctccatgcctacactgtgactggggctgagcaggtaaggctggctgctggcctgtccagctctcccctggcctctgccccagtgttcttgttcctctcaataggggccagaatcacatgaaagcccaagaaagatgaaatgaggatatatcrcccttgcctctgtggtgacatgcaccatggacagcctcagctccttctgttcaaccagaagttctgactcccagtgtcctcctttctgagaacccaccagagatgttgctgtcctgttg

SEQ ID NO: 209508 - DNA, 439 bp, Homo sapiens
gccatataccagtcccaagtgagtcagtgaggcccagatggctcagtggctgtttggactgtgtttttctatttctttgaagaacctgtagatgtctaatgtttgatctgcttttctgccttgaagccaacagatacagcacaggcgatggagaatgggctggtgagtctccatgcctacactgtgactggggctgagcaggtaaggctggctgctggcctgtccagctctcccctggcctctgccccagtgttcttgttcctctcaataggggccagaatcacatgaaagcccaagaaagatgaaatgaggatatatcgcccttgcctctgtggtgacatgcaccatggacagcctcagctccttctgttcaascagaagttctgactcccagtgtcctcctttctgagaacccaccagagatgttgctgtcctgttg

SEQ ID NO: 209509 - DNA, 555 bp, Homo sapiens
agacctccacccctcttgctgtctggcctatgttccaraacaggcagggagctgtggggaatccccacgcccacctagggcaggtgacctggctgaggaagaaggcttgaggacaggtctgaggggatggcagcactggctcaggacagcccctgggttgacggaacgtgcatctggtggtctgctggctggagtcccaggagccagcccctgcagaaagcctctgccctcatctcccccagggccatgccatccgactgtatcttaagttcctgcagaaagctagagttttctgaggtggggcttaatggtatatgtagttcagctggttggctgccacgtctggttaaggattagagtggggagaaaagagaatgtttggcgagaagaacaggggcaaagattcctgtcatctctccatcacctctctggcttcagacctttgagaaccagtggtctctagtgggccactgggtgcatctcccgaaggcagtgtgtggctgtgatgggagacagcgcccctctgtgtctctggtctgcaggctgggacagggt

SEQ ID NO: 209510 - DNA, 594 bp, Homo sapiens
tgcatcaagagtggccactccacgtcaatcatatcacatctctttctactagacgcagtatcttctttctacaaatacattgtagaacacattaactcctgggcatggcgagacccagggaaggtctctgcatcatccctgcttgctggatggggcagaaagagatgaggcgtgtaaagtgcatgtttcctgttctcaaatccaaggggctatttgcttttctggcatctttaattccttgatgttcttcatccccattcataagtgctctttagaagccagttccagaaccctgatcgcatggcacaccctatgctataggcaataatgataaaataggtaaaacagggaaacaatgtggaaatcaccaaaaactgttatgactggtccattcccaaattctgatgagtagaaagggatatttggcacatgaatgaagaatctgaraagctggaaagtatggatatgagttttaaccccagttttgcaacttttggctgtgtgacctgggcaagtcccttcccatcttagtctattaatccgtgagctgaggattatgatgcttaccctgtctgccttgtgtttgtttagtgg

SEQ ID NO: 209511 - DNA, 515 bp, Homo sapiens
atcccatatttcctcattctttaaataaagtaaatatctggaaagtacaggaaagaatttttttttctttttgaatttggcaagtggaataaaatgaaagccaaagaaaaagtctgtcaaaaatattttcttctcagtttcattgatgacattcctgtcaggtttttggaaaggccataacatacagatgttaamtgcttacttggaattgaaaatacatgtccattccttgtggtaaggaatgaatcaagcagtctgtctgcagtcttgccctgatttttatgaaactgaccatactgagttttacattaagttttacattgagcaataaataaggtcaacatcaccaaagctttgctgcgaaataactctcaatgttgctttgtgtgactcaacaagaattcacttttaatgtctagttcagttagagactgatgtggaaaagtaatcaatggctctataatggaaaataaaaattactactaattgtgtgggacagagtgctgaaaccatac

SEQ ID NO: 209512 - DNA, 505 bp, Homo sapiens
gaaggcagagtacaaaaatatttcaattcatgaatattgctagtaaattcctcttctcattttctccaagaatgcaacttgatataaaatacttgtcaaaaaatttatataaattcaccaaactcataacacatctggcccagttatcttgtatattagttagaattaagtttggttgtggcaaaactctaccttgtctgtaacataagaagaaaacagtagcataactcctcttataggaaagtctttgtaggcattcaggtgttgtataacacttttctgttactgttactmtaggcattgcctctactctcaatctacactcatcttgcaccaaatcaaatacacttcctaagtaagttggtgtctcctgttcatccatcacactgctccctcctctttaggaatgtgtatccctgtagttgccactttatatgtgcttttatctttttggctcaaaatagcccctgggctacatccagcttcaaaggagacagggaaacag

SEQ ID NO: 209513 - DNA, 556 bp, Homo sapiens
tacaaaattaacataaaaaatcaggtgcatttctatatactaacaacactaaagctgagaaccaagtgaagaactcaacctcatttacatggacatgaagatggaaataatgagcctgctttaatgtgatccaaatgttcatgggaaactctaaagcagttttgaagaatcttagtgattcaaagaacatggctcaaaaactactcttcttcaggacatattgttaacccagtaattgcctgagtgattaactatgagggatattaaatccctagaacaaatcaaaaacacagtggccccttatcttggttttcacagcaacttctaacaccactggcaaaagtctcactgaagtagaaagcatcttcatgtaaaaacgttttaaaagcactcctcttgcaggtgtctacccatctcaatgacatgtttttggggtgcacatacatatttcagaggattactgcaggcctagccccaatctcaacatcamtaagttgacagctgtctgtagttatttgttgaattcaaatgaaattatacaactgagtaaagcata

SEQ ID NO: 209514 - DNA, 314 bp, Homo sapiens
tatgcaatggagagacccaaatgaattgcattgtcatgtataatgagcctttgttttgaggtatgtaacccattttctcacttgtcatgcttttcaattatgtctctcacactgtattatccacaaarctgccaagggatgttcaaatcaagggtggcgacaaaagtcaagattcaaggaactgagattcaagaaactgagatttgccagaataatatctgtagaaaaactatttcctaggtgaatatcaaaataaggaggaattaatctaattttcaatttctgatatttatgactatttatcccaaatagtg

SEQ ID NO: 209515 - DNA, 568 bp, Homo sapiens
aagctttacactgcggctcagcttctgtgctgtgtgccctcagtaaaatggctctccatccaaatgaaactcacttctgatagccaagaggcataatcagagctacatttaaacatcagacttgcatttaaaaatcccccccaccccgattaactcacagttgacttgcctactcactggtttactatcaatgaggatgggagatcagacagattaggatcaaggctgcagctctaaccacattaagtgtggaggcagaaaatcatatttattcaaaggattccctcaaactgaaaactcaagagtctggtggaaatgccaccgttagagggtgggggttagkggaaggacacatggactctagtacctccccaatgtgacctgggttttatgttgaaacactccgccatccatagtgagctttaagcgtgtgtgtgtgtgtagattcatgttaggacaccctcaacagttactagttaatatatgaagcaccctaagcaggaagtaccaagacagtggtgttagtgagcatttgaaagatcccaaatggtgtttatattcccagagg

SEQ ID NO: 209516 - DNA, 609 bp, Homo sapiens
cacctttcataactgaaaccttctacttgttcagtaataactccctatctctccctacccccagcccctggcaaccacgattctactctctgcttctatggttttgactattttacaatcctcatataagtgtgaccatgtagtatttgtccttctgtgactggcttatttcacttagcatagtgtcctccaagcttatctatattgtcacgtatttcagaatttccttttttaaggctgaataatattccactgtgtgtatagactatattttctttattctttcatccatcaatgagacacttaggttgtttctatatcttgactattgtgaagaatgctgcaatgaacttgggcgtgcaaatatctcttcaagatcctgatttcagttattttggctatatacccagaagtgggatyactggatcatatgatagtgctatttttaatgtttttaggaatctctgagatggtttggctgtgtccccacccaaacctcatcttgaattgtagctcccctaattcccacaagtagtgggagggacccagtgggagataattgattcatggggatggtttccccatactgttctcatggtagtgaataaa

SEQ ID NO: 209517 - DNA, 573 bp, Homo sapiens
tgaaaccttctacttgttcagtaataactccctatctctccctacccccagcccctggcaaccacgattctactctctgcttctatggttttgactattttacaatcctcatataagtgtgaccatgtagtatttgtccttctgtgactggcttatttcacttagcatagtgtcctccaagcttatctatattgtcacgtatttcagaatttccttttttaaggctgaataatattccactgtgtgtatagactatattttctttattctttcatccatcaatgagacacttaggttgtttctatatcttgactattgtgaagaatgctgcaatgaacttgggcgtgcaaatatctcttcaagatcctgatttcagttattttggctatatacccagaagtgggatcactggatcatatgatagtgctatttttaatgtttttaggaatctctgagatggtttggctgtgtccccacccaaacctcatcttgaaytgtagctcccctaattcccacaagtagtgggagggacccagtgggagataattgattcatggggatggtttccccata

SEQ ID NO: 209518 - DNA, 558 bp, Homo sapiens
gactgagtaaaagagagatgattccaattacagcaactgcagcctcaaacacatagagcccttattatgccccaggcacttctaatccactgagagatattcattcacttcctccaattaacaatctcaggaggtcggtactattattgtcctattaatagatgatgaatcatgataagcctgaagcktggacagcttaataaccttgcccgaagtctctcacacacaatgaactgttttgtcaggaaaagggagagtccctattgggtggcaaaaacaagagatggaagaagtggaagatgctctgagaaacagagaagtaactgaatcagaaatggagtcattggagctgaaaccggaaggcagagtgagaataagcctgggtgaggtgagctgttgatgggagttgaagataaaggtgttggccaaagatgtgccagaggaaacatgaactggaaagtgaggggccttgcaatctatctaaggaaactagaaatttatcttgagggcaatgggcagccatggaaaattttattcaagacaatgacagagattagg

SEQ ID NO: 209519 - DNA, 558 bp, Homo sapiens
gactgagtaaaagagagatgattccaattacagcaactgcagcctcaaacacatagagcccttattatgccccaggcacttctaatccactgagagatattcattcacttcctccaattaacaatctcaggaggtcggtactattattgtcctattaatagatgatgaatcatgataagcctgaagcgtggacagcttaataaccttgcccgaagtctctcacacacaatgaactgttttgtcaggaaaagggagagtscctattgggtggcaaaaacaagagatggaagaagtggaagatgctctgagaaacagagaagtaactgaatcagaaatggagtcattggagctgaaaccggaaggcagagtgagaataagcctgggtgaggtgagctgttgatgggagttgaagataaaggtgttggccaaagatgtgccagaggaaacatgaactggaaagtgaggggccttgcaatctatctaaggaaactagaaatttatcttgagggcaatgggcagccatggaaaattttattcaagacaatgacagagattagg

SEQ ID NO: 209520 - DNA, 426 bp, Homo sapiens
agcctccatcctgcacactcccttctaagtggctgtccacttcattgcttagatacctccaatgatagggaactcgcttctctacaartgcaaggccaaagaggctggcattagaatcagagcactttgggccctgaagtgggacaggatgaaggacctgactaggatgaacaaggaccttttggggcctgctccctctctgccagtcacacctggcatacattcaggtctacaagccattccaggctacagcttcttcaggagttaagcatcctgagagctctgtaggtgggtagcacctggtcattcctcacatcccctcagacaacgctcccttacgtctcctgtggccacccatgctctgcttggtgccccaggaagcgtacaggctgcatgcacgccagcctcaggcttgccaggccctcc

SEQ ID NO: 209521 - DNA, 426 bp, Homo sapiens
agcctccatcctgcacactcccttctaagtggctgtccacttcattgcttagatacctccaatgatagggaactcgcttctctacaaatgcaaggccaaagaggctggcattagaatcagagcactttgggccctgaagtgggacaggatgaaggacctgactaggatgaacaaggaccttttggggcctgctccctctctgccagtyacacctggcatacattcaggtctacaagccattccaggctacagcttcttcaggagttaagcatcctgagagctctgtaggtgggtagcacctggtcattcctcacatcccctcagacaacgctcccttacgtctcctgtggccacccatgctctgcttggtgccccaggaagcgtacaggctgcatgcacgccagcctcaggcttgccaggccctcc

SEQ ID NO: 209522 - DNA, 426 bp, Homo sapiens
agcctccatcctgcacactcccttctaagtggctgtccacttcattgcttagatacctccaatgatagggaactcgcttctctacaaatgcaaggccaaagaggctggcattagaatcagagcactttgggccctgaagtgggacaggatgaaggacctgactaggatgaacaaggaccttttggggcctgctccctctctgccagtcacacctggyatacattcaggtctacaagccattccaggctacagcttcttcaggagttaagcatcctgagagctctgtaggtgggtagcacctggtcattcctcacatcccctcagacaacgctcccttacgtctcctgtggccacccatgctctgcttggtgccccaggaagcgtacaggctgcatgcacgccagcctcaggcttgccaggccctcc

SEQ ID NO: 209523 - DNA, 426 bp, Homo sapiens
agcctccatcctgcacactcccttctaagtggctgtccacttcattgcttagatacctccaatgatagggaactcgcttctctacaaatgcaaggccaaagaggctggcattagaatcagagcactttgggccctgaagtgggacaggatgaaggacctgactaggatgaacaaggaccttttggggcctgctccctctctgccagtcacacctggcatacattcaggtctacaagccattccaggctacagcttcttcaggagttaagcatcctgagagctctgtaggtgggtagcacctggtcattcctcacatcccctcagacaacgctcccttaygtctcctgtggccacccatgctctgcttggtgccccaggaagcgtacaggctgcatgcacgccagcctcaggcttgccaggccctcc

SEQ ID NO: 209524 - DNA, 640 bp, Homo sapiens
tgagtgtgttttagagaagagggaggggatgaaggtgatctgaaagcagcagttagtagcaggacagtcacttatctacctgtaaaccccatggtatataaagtgtgggagggaaaatagccaccaygtaagagggctgcagggaagcaggaccactggggaagaatgagaagatgaaaggaatattaactgattttatttatgattcatcatgagtccaagagggcaagtggaagggtttcaggaggagatggtgagtttatgacttgagtaataaatgcctgctgttgctatgtgccaggctctagagtagtcacagacgatataaagatgaacaaagacttgacccctgctcttaaaaagctattaatctagtgagagaaacagacacaggtagatcaatgatttatatgagctatgtgccataatagaagaatggacaaaatgctgtttgagtccaggagagagaatcatgaatttttattgggtatgtctagaatatttctctgagaaggtatatcagttatctatttctgtataacaaactcacaaactataattgcttacaactacagtgatttattgtttcttatgattatgattccatgaaccggcaatctgggcagttctgctggtctca

SEQ ID NO: 209525 - DNA, 640 bp, Homo sapiens
tgagtgtgttttagagaagagggaggggatgaaggtgatctgaaagcagcagttagtagcaggacagtcacttatctacctgtaaaccccatggtatataaagtgtgggagggaaaatagccaccacgtaagagggctgcagggaagcaggaccactggggaagaatgagaagatgaaaggaatattaactgattttatttatgattcatcatgagtccaagagggcaagtggaagggtttcaggaggagatggtgagtttatgacttgagtaataaatgcctgctgttgctatgtgccaggctctagagtagtcacagacgatataaagatgaacaaagacttgacccctgctcttaaaaagctattaatctagtgagagaaacagacacaggtagatcaatgatttatatgagctatgtgccataatagaagaatggacaaaatgctgtttgagtccaggagagagaatcatgaatttttattgggtatgtctagaatatttctctgagaaggtatatcagttatctatttctgtataacaaacycacaaactataattgcttacaactacagtgatttattgtttcttatgattatgattccatgaaccggcaatctgggcagttctgctggtctca

SEQ ID NO: 209526 - DNA, 396 bp, Homo sapiens
gcgctctctctctctctctctctcaggagatgacacctaattatttccaaattagacagctttccatgagccaaactractaatttgacttcttgcatattgtctgatctccagtaagccacacaacatatagtacttcaaagcttagctttctgaaagccaatactctgtctaatgttaggggataagaatgaatgccagattcatagtccagatttaaaactaggagggtcaagaaagacactgttttctagaatcaggagtgagaagtggcatgattagagtggtctttcatttgttttaagatgacataaagtaaggaataaatgtaaacccttatacttatggcatagatatatagttagaacaacacacaatttgagagataagtgactc

SEQ ID NO: 209527 - DNA, 396 bp, Homo sapiens
gcgctctctctctctctctctctcaggagatgacacctaattatttccaaattagacagctttccatgagccaaactgactaatttgacttcttgcatattgtctgatctccagtaagccacacaacatatagtacttcaaagcttagctttctgaaagccaatactctgtctaatgttaggggataagaatgaatgccagattcatagtccagatttaaaactaggagggtcaagaaagacactgttttctagaatcaggagtgagaagtggcatgattagagtrgtctttcatttgttttaagatgacataaagtaaggaataaatgtaaacccttatacttatggcatagatatatagttagaacaacacacaatttgagagataagtgactc

SEQ ID NO: 209528 - DNA, 450 bp, Homo sapiens
tgggtgcaatttgggtttctgagtgttttcaagtcaattcagccaagcacccctccctcctgccatcaaggtgattgatggtttcatgggggaggggtgaagaaatgagggggaagggagggagcagagccctgtggcttgtccaccctatgggcttaacctccccaccccctgccctgccagcttccccaggtttttgtaggcrtcaaacgagacatataggaaggctctttccgcagctaggaggggctgtgcttggcccagctcccagggccagttgccctccagataattggggtttggcatgagccttgggggtgggctcctggctttgcagcactgagccttatggggaaggatggccccattaaatgtaggggtgagcacacacaaaatcctttccgttcccacggggcctctttctggacagcaattatatgctggcttcag

SEQ ID NO: 209529 - DNA, 455 bp, Homo sapiens
ttctcgagaacttcttctccatttacagtcactgctaatagctgaagggtgcagtgaggtccacccaaatgacagatgctcaggaaagatgagaaggacttggaatacctgctcctttgcagaagtgttgctccctgtccggtgccactctgatatcaccggcttgtgtgttacacacactcagtgggcatttagtacatgcatttacagcattaattgtcaaggacaaagactgacaaatgggggagaactggaccggaaggtttcaaaccatcatcctgggttgggatcccaatgrtagatcctagtgaggcaacacccctgatgctggagaaatatttgcttctacaatctcagtccctcactaacgttgactgtgaacctgctgttgggtgctgtgaagaacacaaaaatggacatgatgccatccaagtttatagttcaccacggaggag

SEQ ID NO: 209530 - DNA, 571 bp, Homo sapiens
tttcagttcctggaacacatgatgtatatgctcacctacttgtatgttgcatgtgctgaacctcttcaagtgttcacatatcttgctttcacattgtcttcaaatctctgcccaagtgtcccctaccaccttatataactacccctatacctgtattctcttttttttttttttttttttttttttgagacagagcctcagagtctctgttgcccaggctggagtgcattggcatgatctccgctcactgcaacctccgcctcctgggttcaagcagttctactgcctcagcctcccgagtagctgggactacaggtatgcaccaccatgcccagctaatttttgtatttttagtagagatggggtttcaccatgttggccaggctggtgtcaaattcctgacctcaggtgatccgcctgcctgggcctcccaaagtgctgggattacaggtgtgagccacgcccarccctgcattcctactctgctccttcatggccctttccatcaactatcatgccatattagttgatggaaagggccatgaacgaacagagtaaaaattctgtctcc

SEQ ID NO: 209531 - DNA, 648 bp, Homo sapiens
aaacaacccatacttaataaaaaatacataaaaattaaatgaatgttaatatgaaaccaagagcagagttacactttttatgacaaaaaaagaaccagagaaaagcacaaagaaagattctgcagcgttgattccagttcttagttttggtggtgtgtttgcaagagtttatttttattatgtttcataacttacatataacagatttgcatgcattactttgcatgtatcagatactatataataatgtttttaaaataaaaatttcccggttaccgaagataacccttagacattaattgtggagaaggagatctaatccaaaaccacagatacatttatttatgaaaattttgtacttagagamctttcagctaagaaaagaaattcttcctttctcacatgagaactttatgctacctaatgaagctccctactttggggcaattttctgtctttatttaagtgatactagtcttttggctgtgtagaaattttaaaaaaaatgatagctacatctcctgttcccaagagaatgcaggaaaagaataaggtgtgggagacaatcttgtagcttattgataagtacatacaaagacaaaaattgtgcatagtgaatgctccatctagcaattcagaattgttatt

SEQ ID NO: 209532 - DNA, 389 bp, Homo sapiens
aagggaaattatctgtacatataagtttcatttttaaaaattttaagcaaatgttcaagcatccgtcatttgaacagtatcataacttcaggaactttcrtggttatgagtatgaattctcacaacacaaacacgtgatgagagtataggttgaattttgggatttcaagtcaagcagtcttcaaaagaggcctggttagcctttgttaattaattgtgtgtgtgtgtgtgtgtgtgtgtgtgtgtgcgtgcagctttttttgtgatggggtggtggggaaagaaatctgttgactactagtcagtgatttagcgggcaaaaaaggcaagttttctgtcttttctttaatattcactttggttcttcagtcttcatctagatttctctt

SEQ ID NO: 209533 - DNA, 634 bp, Homo sapiens
gctaacatccatatcatcaaactcccagaatgaaaacagccagccagtgagatggaaaaattatctgaagaaataatgacagagcagttccccaaamtggcaaaagacataaacgtacagatttaagaacctaagcaaaactcaaatagggtagacacaaagatattcatgccgaggcacatcataattgaacttctgaaacataaagagaaaggaaaaaagtctgaaaagcagatagagagaaacaatgcattacttacagagaaacaccaattcaaatgacagcagatttcggatctgaaactatggatgtcagaagtattggcataacattcttcgagtactgaaagcaaacaactgccatgcacgaacttcatatccagtttcttctttggcttatattaatgaactattaactaaactttctgtgtctaggattgcaactacccttctccaacaatcaagccccagtatttccaaagtgacctttctaaaacaaacaaatatctgatcatgttatgcaaataaacctttctatcttcttttcctctaacttgaacttttctgttaaaaatcattcaatggctttccatcttccttacaattaaattccacactctttcatacatacaca

SEQ ID NO: 209534 - DNA, 593 bp, Homo sapiens
ctaatactaaaaattcaaaaaataacatgttggtaaggatgcagagaaaatggaacacttacacactgttagtgggaatgtaaattagtataacctgtatggaaaaccrtatggagatttctcatagaactgcaaatagaactgccattctaggcagcaatcccactactggctatctacccaaaggaaaaataattagatctaaaagatacccacactcatatgtttatcactgcactattcacaataccaaagagatggaatcacctacgtttacatcagtgaaggactagatacagaaaatgtagtatatatgtgcaatggaatactactcagccatataaaagaataaaatcatcttttgcagcaacattgatggaactggaggctataatcttaagtgaaataactcagaaacagaaagtcaaacaccacatgttctcacaagtgagagctaaataatgtgtacatatggacataaagtatggaataatggacactggagattcagtagtgtaggaggtgggtaaaggatgagaaataaattaatgggtactatgtatattattcaggtggtggttacactaaatggc

SEQ ID NO: 209535 - DNA, 433 bp, Homo sapiens
aatatttatttatagctttgttatattaaccttctcatctatcatttgtgattctgtttgtttattcccatggtttcaagtttttatttgtagtcatttccttagcccaatacagctttgcatccaacccacatgttctgtgctgttattagacaatatattacaattctatgtgttattaagtccaacaatactatatacacatatagtgtatgaatgtatgtgtgtgtatatayattatatatgtattaaataggtatgtgtgtgtatacatgtgcagactaggcatcctcaattcaaaaaattcaaaatctttaatgctccaaaatccaaaacttttgagcattgacatgatgccacaagtggaaaatttcacacctaacttcggtgatgggtcacagtcaaaacacaggcccacaacacacagttcatt

SEQ ID NO: 209536 - DNA, 497 bp, Homo sapiens
aggattgatttatggctgaaacattctgtgagaatgcatcattcacagccacttcagtaaccggtgttctctggggaaacccaaatctgatgtttaatgttaaaaggggtctattttcttctgcatgcatctgcataactactgtcagtgtcgatgagagtttcaggcacatactgagaagagaatatacacctcactacttaagtttcgcctgacttctttttttaaataatgtcatagcaaaatgatttctctatcttgattyaaaaccaggaaaagaaaaaaaaatctccagcaagcaaatctgtccagtgagatgcactaccagcataagttcacagaccagttctgtagttatagattgcctcgggcattcagctgctggggccccaggcttttcctccccttctgaggttttccctgtaagtgacttgcctgtcactctcaagtctaatttaaaaatagtgtgcatttaaattttgagaatgatttcttag

SEQ ID NO: 209537 - DNA, 629 bp, Homo sapiens
tatttatgcccagcaaaatgttgcttaattacttatgcaccactgtttgsttgtattttaagctctctctaccacccacaggcagacgttaaacagctgctaaaagctagctttagtcttgcctgtttgaaattagcatacttgagctttgaaaaaactttgttaccaatttacatatgcatagagactgatatttagactcaccatatgatatgtccctcaagagcttttcttattgcctccatcctcaggtctcaacctagagactgtaaatctagcaggtgattaattctatacccttgagaaactagcaattagcacttgcaaccagtaaaaaattgtcatttcaaaaccctgtttactatgcccatgtattttctatgaactcacagttaactctaaatagatgggtatggcaatatctgcagacatttctgtctctttatgtaaaatataatattgccaccagctaatcaacctattaaatatatataattgacattcctttttaaatataaaatagcaagatgtagcaagcatggaaacactatacatgatgttttatgttactaaaccttaatcagttcatttcaacatgacgactttgtagggtttacctgttctgtgtc

SEQ ID NO: 209538 - DNA, 514 bp, Homo sapiens
tatcatgttaagcaagaaataatatgactcatttgctaattatttaatcaaacttgagggaaaccagattcagttgtattggagattctgcacatttagctctaaagattcttatctasgtccatttctagtcattcacttaataaacttttattaagtgcccagtatgtttcagtaactattctaaaccctaagtatacaaaaatgaatagaatagggcttaactctcattttgctcccattccagtgggagagacagattcaaacaaaatgcattaagtgtaactatggaggtgcaggcaagggctgggagagcttaaggagcaagtattgaaatccacttagaaaagtcaggagaatttttaagaagaggtaaggaattgagctaaattttacaccgtgagtagcagtttgccaggcagataaggtggagaaggacgtacctgaaaaagagtccagcatatgaaagcaggaagttgaaaaagaaaaaagcaagggagagagacggcatgtg

SEQ ID NO: 209539 - DNA, 513 bp, Homo sapiens
gggtcacattggttagtaatcccacttcttcatatccatcataatgttggctcaaaaagtcagagatggagtgaggtatctgccaatgatgagtattcccccaaatttacctttacagtattttcacatttattgactctagtgttttattgtatcttataaatctttgcatcygtagaaactttcacagtgaccaacacattgtagtacctaagtaaacagtcaatgactaagtgaataaatgaataagtgaatctcagcatttcctcgtgataaaacactaagcacaaactgggatggattacagacttttctgagaccatgccttggtgcacatatgggaaccctttgcttcacccaccattggagaagagatatctgcagatgctctgcaaatctctgactatgtgtatgtgtgtgtgtgtgtgtgtgcgtgtatgtgtatatatacacacaaacttgtgaatacactataaaaagcagcaaagttaatagaaaaaaatcagcctccat

SEQ ID NO: 209540 - DNA, 526 bp, Homo sapiens
tggaaacaaccttagtgcccataatggtgaactggataatgaaaatgtggtacatatacaccatggaatactatgtagtcagtcataaaaaagaatgaaatcatgtcctttgcagcaacatggatgcaactggaggcattatcataagtgaaataatgcagaaacagaaaatgaaatattctrtgttctcttataaagtaggagcagctaaaccctgggtatacacagatgtaaatatgggaacagcacacactggtggctccaaaaggaaagagggaaagagaggggcaagggctgaaaaacttgttaggtactatattcactctctgggtgacagggtcaatagaagccgaaacctcagcattaggcaatatacccttgtaacaaacctgtacatgcattcccctagtctcaaatgaaaattaaaaataaatattttctaaaaaaaaaaacaacaaaatgcagctacagcttcatgagttaattgttaaataagatgacatgcccaaaatggcaggtggtatat

SEQ ID NO: 209541 - DNA, 526 bp, Homo sapiens
tggaaacaaccttagtgcccataatggtgaactggataatgaaaatgtggtacatatacaccatggaatactatgtagtcagtcataaaaaagaatgaaatcatgtcctttgcagcaacatggatgcaactggaggcattatcataagtgaaataatgcagaaacagaaaatgaaatattctatgttctcttataaagtaggagcagctaaaccctgggtatacacagatgtaaatatgggaacagcacacactggtggctccaaaaggaaagagggaaagagaggggcaagggctgaaaaacttgttaggtactatattcactctctgggtgacagggtcaatagaagccgaaacctcagcattaggcaatatacccttgtaacaaacctgtacatgcattcccctagtctcaaatgaaaattaaaaataaatattttctaaaaaaaaaaamaacaaaatgcagctacagcttcatgagttaattgttaaataagatgacatgcccaaaatggcaggtggtatat

SEQ ID NO: 209542 - DNA, 583 bp, Homo sapiens
cctccctccttaattttttggaatagtttctgtaggaatgctaccagctcttccttgtatgtctggtagaatttggctgtgaatccatcaggtcctgggctttctttggttggtaggctatttattactgatttaatttagcagctcattatcrgtctgttcagggaatcagtttcttcttggctcagttttgggagggtgtatgtgtccaggaatttttccttttcttctaggttttctagtttgtgtgtgtagaggtgttcatggtattctctgatggttttttgtttttctgtgaggtcagtggtaatatctgctaacatggtttggctctgtgttcccacccaaatcttatgtctaattgtaattcctagtgttgggggagggacctggtgtgagacaattggatcatggaaatggatttcccccttgttgttcttgtgagtgagttctcatgagatcttgttttttgaaattgtgtagcacttcccccctagccctctctctctctcctgctccgccatggtaagatgtgcttgcttccccttcaccttctaccatgattgtaagtttcccagctatg

SEQ ID NO: 209543 - DNA, 596 bp, Homo sapiens
cacaacttcaaaagttactctttttgaaactctcttattttttagagctcattaagagtttgtcacttatttttttttgtattatttacgggggcagaaaaggcagaagtagtgagctcttaaaaccaagtaaagaaatgctttcttaaatttatatttaccaattttaagaatktatctaggactttgtgaataaacttttctttgcaatagccatgcaggtggtgcctatttttctttctatttcctaagaaacattaatcttttaggaatacctgagatgtatgggcagatttggggaaattatatatgtgaatataattatatatggggaaattatatatgtgtatatatatgtgcgtgtgtgtgtgtatgtatatatatatatacacacatgcatttatacatattcatatgttaactcattctgaattactaacattatattttgattacaagtaaaactagatccgtttctggttggaatacagaaaagttacagcaaatctgtactttcaaaactaggaaactatactatcatgtaagttaaaaggcatagaaaactgtggttataagaaatctaaaagacctcaatt

SEQ ID NO: 209544 - DNA, 596 bp, Homo sapiens
cacaacttcaaaagttactctttttgaaactctcttattttttagagctcattaagagtttgtcacttatttttttttgtattatttacgggggcagaaaaggcagaagtagtgagctcttaaaaccaagtaaagaaatgctttcttaaatttatatttaccaattttaagaatgtatctaggactttgtgaataaacttttctttgcaatagccatgcaggtggtgcctatttttctttctatttcctaagaaacattaatcttttaggaatacctgagatgtatgggcagatttggggaaattatatatgtgaatataattatatatggggaaattatatatgtgtatatatatgtgcgtgtgtgtgtgtatgtatatatatatatacacacatgcatttatacatattcatatgttaactcattctgaattactaacattatattttgattacaagtaaaactagatccgtttctggttggaatacagaaaagttacagcaaatctgtactttcaaaactaggaaactatactatcatgtaagttaaaaggcatagaaaacwgtggttataagaaatctaaaagacctcaatt

SEQ ID NO: 209545 - DNA, 487 bp, Homo sapiens
ggtggctgacacctgtaatcttagcattttgggacccagaggcagaattatcacttgagcttcaggagttcaagtccagcctgggcaacacagtgagactttatctctacaaaaaatttaaaaygatttgttgagtatggtgacacgtgcctataatcccagctactcaggaggctgaagtggggggatcacttgagtctgggaggtcaaggctgcagtgagctgtgtttgcaccactgccctccagcctaagagacagagaaaaaccccgtcaaaaaaaaaaaaaaaagagtaaaaagacagtatttacaaatattttcaatttaatttaggtaacttattttaaagtaaaaggtaaaataacatttcagtgcctttttcccacatttacctatgttaggattgaatgttatacacttagatcttttatccactgagaacctattttgtaagggacaaattgaacatcaaattttaagggtttttc

SEQ ID NO: 209546 - DNA, 650 bp, Homo sapiens
tgaattaatgtgattccttcagttttattacttttgcttaggataactttggctattctgagtcctttgcggttccatataaattttaggattattttttccatgtctgtgaagaatgtcattggtattttgaaggarattgcattgaatctgtagaatgctatgggaggtatggacattttaacaatattgagtcttccattccgtatacatgaaatatcttatattttttgttgtcctcttcaccttttttacttacagagatctttcacttctttggttaagttaattactaggtatttaattttattagtggctattctaaaagggaatactttttaatttctttttcaggtatttatttatttatttatttatttatttatttatgcttgttttttttttgagatggagttttgctcttgttgcccagactggagtgcaatggcccaatctcagctcagtgcaacctctgcctcctgggttcaagcaattctcctgtctcagcctcccaagtagctgggattacagatgcccatcaccatgcccggctaatttttgtatttttagtacaggcggggtttcaccacgttggccaggctggtctcgaacttctgacctcgggtgatccaccaatccccaccttccca

SEQ ID NO: 209547 - DNA, 622 bp, Homo sapiens
cattgaagcatggagttattgatctttccctatgcttaagcagaggacaggatatttggaaaacacggcagggccaaaaagaaggggtgtggatcarctaggtttattaaggatacatgtgtttcctgtgggtaaagagaatatgtgataggtagctgggtttgatcagcaagtctgtgaggtgtacaacgtgtggcagaaggtcatgcagaagcactgggaaagttgtctatccggagagatatctctcacatcaggcagggggtaaggtctcttagtttttcactcaaccagttatctcactgcagaattagtatttggatgctaaacacacaaagatcatccaggacaagtgggaattaactagaaaagcatcaatgatcagcaaagagaacactatagcatcagttaaacatacatttcaagacttgacccttctcctccattctacctcccatcccctatccttagataagctgtacactagatgcgtgaagaagaccacattcttttcaatcagatgtaaacaagatataagattggttgtttaaattgagtaagtctgagttgtaacaagggcaaaaaacttgaattaataattgtattagatatctcttttgca

SEQ ID NO: 209548 - DNA, 663 bp, Homo sapiens
agttaagaggtgtgaatcggtgtcgcgatgttgttagtttaacttgaatccagaaacagaataaaacatattggtgttttatttttcatttgttgagacatggtgttggccataaataaggttgactgttaaatctctcacagattgaaatgtatcctgatgagaaacaacaggtaattacatgtggagtacctgctgcatttacagtcattcayaggaaggtgccagtaatatttatccaaggttctattattgaactatggcattgttgaaagccgtctttaatgagaaaactagggttataaatgttttaaaatctgtgaaatttatcttatcttgaatcttatcactatacttttctttacataatcttaatatgcattttaaattttttgtaggctttagatactcggcataaagcagggaatctgaatatgtaggctcgaaagcttgacattgcaaaagaaaaatgaagtacaatttgaacaaacagatggagtgggaacactagacaaatatgttatcaggtgaactagaggttcacttgcatcatggacagatctgggtttttggtaacagatccaacagtcagttaaatatctccctttgataatagattgggaaatatgagttagagcattgcctctccaggaaaatgaaagc

SEQ ID NO: 209549 - DNA, 537 bp, Homo sapiens
ataaggcctctttcaaggtgacagtcaactgcaatctctgcaaacacacaatacagttctctgttactgcagatgatcttatgtctttaattgatattttaaaataattatcccacacttcyattatttattctagatctctcttactcttagtgtatgctttggctggtctagtttgcttgcctgatagggtgaccgagatcttcattgtttgatcatattgagctgtggttgctgcaattgcccacttgccattagacctcgtctcttcacagaagcacaaaatttgctccattaaacccaagtgtcatgaatgctagttatattcctgcctaccctccataatgtatccaaaaccttagctcctcaaagtaatcagagttgattacccccaccagtacagaatttgtggagcctgatattacaggtgttaattacagctttatgttcactgtaatgcaagcttgtctaacccatggcctgcaggacacatgcagcccaggaaagctttgaatacagccccaatacacgtttgta

SEQ ID NO: 209550 - DNA, 537 bp, Homo sapiens
ataaggcctctttcaaggtgacagtcaactgcaatctctgcaaacacacaatacagttctctgttactgcagatgatcttatgtctttaattgatattttaaaataattatcccacacttccattatttattctagatctctcttactcttagtgtatgctttggctggtctagtttgcttgcctgatagggtgaccgagatcttcattgtttgatcatattgagctgtggttgctgcaattgcccacttgccattagrcctcgtctcttcacagaagcacaaaatttgctccattaaacccaagtgtcatgaatgctagttatattcctgcctaccctccataatgtatccaaaaccttagctcctcaaagtaatcagagttgattacccccaccagtacagaatttgtggagcctgatattacaggtgttaattacagctttatgttcactgtaatgcaagcttgtctaacccatggcctgcaggacacatgcagcccaggaaagctttgaatacagccccaatacacgtttgta

SEQ ID NO: 209551 - DNA, 537 bp, Homo sapiens
ataaggcctctttcaaggtgacagtcaactgcaatctctgcaaacacacaatacagttctctgttactgcagatgatcttatgtctttaattgatattttaaaataattatcccacacttccattatttattctagatctctcttactcttagtgtatgctttggctggtctagtttgcttgcctgatagggtgaccgagatcttcattgtttgatcatattgagctgtggttgctgcaattgcccacttgccattagacctcgtctcttcacagaagcacaaaatttgctccattaaacccaagtgtcatgaatgctagtkatattcctgcctaccctccataatgtatccaaaaccttagctcctcaaagtaatcagagttgattacccccaccagtacagaatttgtggagcctgatattacaggtgttaattacagctttatgttcactgtaatgcaagcttgtctaacccatggcctgcaggacacatgcagcccaggaaagctttgaatacagccccaatacacgtttgta

SEQ ID NO: 209552 - DNA, 537 bp, Homo sapiens
ataaggcctctttcaaggtgacagtcaactgcaatctctgcaaacacacaatacagttctctgttactgcagatgatcttatgtctttaattgatattttaaaataattatcccacacttccattatttattctagatctctcttactcttagtgtatgctttggctggtctagtttgcttgcctgatagggtgaccgagatcttcattgtttgatcatattgagctgtggttgctgcaattgcccacttgccattagacctcgtctcttcacagaagcacaaaatttgctccattaaacccaagtgtcatgaatgctagttatattcctgcctaccctccataatgtatccaaaaccttagmtcctcaaagtaatcagagttgattacccccaccagtacagaatttgtggagcctgatattacaggtgttaattacagctttatgttcactgtaatgcaagcttgtctaacccatggcctgcaggacacatgcagcccaggaaagctttgaatacagccccaatacacgtttgta

SEQ ID NO: 209553 - DNA, 469 bp, Homo sapiens
agaaaaaattacaaaaataacagttttcatcccgtaggatggctgtattatargatttgaacgttttttccagtttatttaaaaagttaaatataaattttaaagacagtttttaaacgtacattattctagacttttaaattgtgctactgtttcatttgacattattagcatatccccctataaactaaatgatacccggaaatatgcttcaccatgtttatatctacataaagataataatagtaaaaataaagcaaagtttctcaaccacagcactgttgatatttgagactagataattctttgttgtagggagctgcactttagatgaaaggacatttaccagaatttctggcctctacccactagttgtcagcatcacctcctccattctgcccaccccttctcagattttcacaaccaaatacgtcttcagattttgtcaaatgtctctccagggcgcaaa

SEQ ID NO: 209554 - DNA, 469 bp, Homo sapiens
agaaaaaattacaaaaataacagttttcatcccgtaggatggctgtattataggatttgaaygttttttccagtttatttaaaaagttaaatataaattttaaagacagtttttaaacgtacattattctagacttttaaattgtgctactgtttcatttgacattattagcatatccccctataaactaaatgatacccggaaatatgcttcaccatgtttatatctacataaagataataatagtaaaaataaagcaaagtttctcaaccacagcactgttgatatttgagactagataattctttgttgtagggagctgcactttagatgaaaggacatttaccagaatttctggcctctacccactagttgtcagcatcacctcctccattctgcccaccccttctcagattttcacaaccaaatacgtcttcagattttgtcaaatgtctctccagggcgcaaa

SEQ ID NO: 209555 - DNA, 503 bp, Homo sapiens
tggaatcagaatagtgtaattgcataattggttggtaatctatttcaccaattttttttttttttgagatggagtctcactcygtcaccagactggagtgcagtggtgcaatctcagctcactgcaacctccgcctcccaggttcaagtgattctcctgcctcagcctcctgagtagctgggactacaagtgcgtgtcaccatgcccagctaatttttgttgactggatttcgctatgttggccaggatagtctcgatctcttgaccttgggatctgcccatctcggcctcccaaagtgctggaattacaggcatgagccaccacacccagctcaccaaatttttttgatagaaataagcttactttacaagattccctttttcattaatatttgaaattctgagaacattttattatcactaataactcacatgatcaagtgggctaaaatcagtcacaacatgaagacataatactttacattgatcttttacaaattaat

SEQ ID NO: 209556 - DNA, 503 bp, Homo sapiens
tggaatcagaatagtgtaattgcataattggttggtaatctatttcaccaattttttttttttttgagatggagtctcactccgtcaccagactggagtgcagtggtgcaatctcagctcactgcaacctccgcctcccaggttcaagtgattctcctgcctcagcctcctgagtagctgggactacaagtgcgtgtcaccatgcccagctaatttttgttgactggatttcgctatgttggccaggatagtctcgatctcttgaccttgggatctgcccatctcggcctcccaaagtgctggaattacaggcatgagccaccacacccagctcaccaaatttttttgataraaataagcttactttacaagattccctttttcattaatatttgaaattctgagaacattttattatcactaataactcacatgatcaagtgggctaaaatcagtcacaacatgaagacataatactttacattgatcttttacaaattaat

SEQ ID NO: 209557 - DNA, 566 bp, Homo sapiens
ttttattatgggataatttttcccttttttgtatcttagctatgactacttcctttgtatcttaatctatttttaatttttcctctcatttttatatatttgaagtttatgttccttgcctcaaaagtttaaagtgatctttgtctaactgtgattctgttttctcatacaaaactttcagaatgtgttcttcattcaatttctcctgcaatacttttccttccaaaaagttgcaggttttatttgtcctattttgttttcatttgtgtttgaatagaatagttctatccattctttgcttccctaagaattttgatgatttccagttgatctccttcctgtttatctggagaccatcaaatacttaatgctggagggcagagatgatggcttctattgtctgtttagtcaatcagttttctggagtagaagaaggtagctggcaagatctaagtcttagttatctgaaatcagaacaytatcttgtgctttctttctaagcttatgaaaatattcacatctagaaccagcttcattttttaagtatatattttcccactggaata

SEQ ID NO: 209558 - DNA, 333 bp, Homo sapiens
tttcagcggtaaaagtactaatgaagtttctagaattgttacctaaggattctgactaytacaatatgctgctgaagaagttagcccctccacttgtcactttgatgtctggggagtcagaagtgcactatgtctccctgaggaacatcaacttaattgtccagaaaaggcctgaaatcttgaagcaggaaatcaaagtcttctttgtgaagtacaatgatcccatctatgttaaactagagaagttggacatcaggattcatttggcatcacaagccaacattgctcaggttctggcagaactgaaggaatatgccacagaggtgaatgttg

SEQ ID NO: 209559 - DNA, 297 bp, Homo sapiens
cattttaacataataaaggatgaaaacgatwttatttcaattaatgctgaaaatgcatttaataaaattgaatgtgacttcattataaaaatcctcattaaaatggaaatagaaggaacatctcaacaaaataaaagccatatacaacagacccacagctagtattatactgaatgagaaaaacctgaaagcctttctctaagatttagaacatgacaaggatgcccaccttcacacctgttattcaactagtactgtaagtactagctagaataatgacaaaagagaaagaaatgg

SEQ ID NO: 209560 - DNA, 297 bp, Homo sapiens
cattttaacataataaaggatgaaaacgatattatttcaattaatgctgaaaatgcatttaataaaattgaatgtgacttcattataaraatcctcattaaaatggaaatagaaggaacatctcaacaaaataaaagccatatacaacagacccacagctagtattatactgaatgagaaaaacctgaaagcctttctctaagatttagaacatgacaaggatgcccaccttcacacctgttattcaactagtactgtaagtactagctagaataatgacaaaagagaaagaaatgg

SEQ ID NO: 209561 - DNA, 600 bp, Homo sapiens
aagaaagcctatgacagtgtatttggaaagattggcatttgagacaatgaactgactaaggaatatatgccctcgtccaatgtgaacaggcaccatgcaatcagctgggggcctggatggaacaaaaaggtcgaaaaaaggagaatttatcctctaattttctcctccctttggacatcagaaccccagattctctggccttaggactctggaacttgtaccagtagactccaaggttcttaggccttcagatttgtactgagagttacactgttggctttctgtttctgagatctttggacatgaactcaaccatgccactagcttctctagttaacccagatagaagtcggactatcacgagacttctcagtctccataattgaaatgaccttgttgtctggagtaacacctgaagttcgttgtctcacaaccatggagaacaaggacaccgacacacaaagagtggggttgacacagggagtttaataggcaaaagaargagaatagctctcagcagcagagaggggtcccagaaaaatgggttgcccatccatagcaaaatgcagggggttttatagatgagctggtagagaggca

SEQ ID NO: 209562 - DNA, 492 bp, Homo sapiens
caagtctcctttcacatatctctcttttcatctatctatctatctatctatctatctatctatctatcaactatctatctagagagagatatcctactgattctgactctctggaaactcataactaatacagattttgataccaggagtagttttagagaaacataattttaaggatgagtttcctgaattgattttggggtttctgcaattggatctctaatctgattggatttaaacatgctaaggactctacttccagtagtagagtgagcactgagagtcgatggtaagaactgtttatagagatattcaaaatatctgcatcagatactcctaatcatccacttataagygacaaggaacttagtgaccctatatatagtacttccaaatacttgtagaaaactaacattggttggttacttctaatgtcactggacaaagtgatgaaagaaaaggatgagctcagggatttgaattcccctttca

SEQ ID NO: 209563 - DNA, 459 bp, Homo sapiens
cacacaaggcacaagtcttgcactctcaatctcaaatatataactctgaaagtgagtagctctttaggttttgggacctagttgtgtcattttctttaccctagttccaaacctatttttaattttctaaaaataaatgagccctattttgctttagtgcttaaaattttctacttgttataaaaatgtagataaagctgttttttattatttaattatttatgattgctccattgtctccaagctttcatagtttctgaagaaaattgcccgtatttgtgtgtttgtgtgtgtatttcttttgatgtggattattttttcatctctgatgccttttaagatttttctctttctcactgattttcagaaattagacaatagtttaccttgccattttgtctttatttgtgattctaataacattttggcaatcrtttcttcaaatttttggttttgttc

SEQ ID NO: 209564 - DNA, 191 bp, Homo sapiens
aacagaactaccattagacccagcaatcccattactgggtatatatccaaaggaatrtacattgttctattataaagacacacgcacacatatgttcactgcagcactattcacattaacaaagacatggaatagacctaaatggccatcaatagtaaagactggataaataaaatgttgaacatatacac

SEQ ID NO: 209565 - DNA, 191 bp, Homo sapiens
aacagaactaccattagacccagcaatcccattactgggtatatatccaaaggaatatacattgttctattataaagacacacgcacacatatgttcactgcagcactattcacattaacaaagacatggaatagacctaaatggccatcaatagtaaagactggataartaaaatgttgaacatatacac

SEQ ID NO: 209566 - DNA, 439 bp, Homo sapiens
tgagaaaactgtatttatcagtgactgaaaatccttggattaggacctaactcccacctacttgttcttgtagatactctgtctaaatacagatatagatagatacagatacagatacagatatagacatagatacaagtacagttacatagaaaaataatattataagatatcctgaaatatatataatatgttagttyctaacattgttttaaaagttagttgtttaaccaatcaaagcagaaacaacttaaacagactttacaaaaattcatcagatttaataaagttgtctattcgaagatagggacttttttcttttttaaaaattaaatgagaaagcaacaattggtaaattcaaattcctttcttatcaaaacacgtattttgaatttttattgtttaaaacaatatagaatttgaattaatagctatctta

SEQ ID NO: 209567 - DNA, 439 bp, Homo sapiens
tgagaaaactgtatttatcagtgactgaaaatccttggattaggacctaactcccacctacttgttcttgtagatactctgtctaaatacagatatagatagatacagatacagatacagatatagacatagatacaagtacagttacatagaaaaataatattataagatatcctgaaatatatataatatgttagtttctaacattgttttaaaagttasttgtttaaccaatcaaagcagaaacaacttaaacagactttacaaaaattcatcagatttaataaagttgtctattcgaagatagggacttttttcttttttaaaaattaaatgagaaagcaacaattggtaaattcaaattcctttcttatcaaaacacgtattttgaatttttattgtttaaaacaatatagaatttgaattaatagctatctta

SEQ ID NO: 209568 - DNA, 439 bp, Homo sapiens
tgagaaaactgtatttatcagtgactgaaaatccttggattaggacctaactcccacctacttgttcttgtagatactctgtctaaatacagatatagatagatacagatacagatacagatatagacatagatacaagtacagttacatagaaaaataatattataagatatcctgaaatatatataatatgttagtttctaacattgttttaaaagttagttgtttaaccaatcaaagmagaaacaacttaaacagactttacaaaaattcatcagatttaataaagttgtctattcgaagatagggacttttttcttttttaaaaattaaatgagaaagcaacaattggtaaattcaaattcctttcttatcaaaacacgtattttgaatttttattgtttaaaacaatatagaatttgaattaatagctatctta

SEQ ID NO: 209569 - DNA, 472 bp, Homo sapiens
ataaagaaatgaaataatcatatatctcattatataattatactaaattgatctcgacacattttcttagcaatatataccaacattgtttccaatattgtttattacaaatgatgctacagttgaaatctttatatctgaacgcttgtgtgtgtgtgtgtacctattctgtgtataacactgattttatttatttgtataggcctggaagtggaaatactgtgacataaaatagaggcacagcaaattattcaagatgtcgacaaacagcattgtttccaagtttttgttcccttacaatccttgccattggcaatctctcagaatcccgtgttgcttaacatttrgtagcttagtaaatattttaaatctcagagattttacctaactgataccagggtttttaaaatttgtttatatagattaagcgtctttgaagaaataacagtatgcaaaaaatatggttgctatt

SEQ ID NO: 209570 - DNA, 557 bp, Homo sapiens
attttacctaactgataccagggtttttaaaatttgtttatatagattaagcgtctttgaagaaataacagtatgcaaaaaatatggtygctattcttcatgttaaaactatcttaaactcttttccagaggaaaaaataacaaaatagaaaccaatgaaggtcttttgcttggtgattacatatattgattacctgtgtaagttaaacagattgggaaaaggaaatatccaaaattgtgcctagagtatatcatgacatcatgtatatatgtaaataagttaactttgcaatcgcaacatagagacaaatgttattttaaatgaataaaaataagtagaacatgacgtaatatttcagcatattaaatttaggagtaaaaacctttgacatccctgaaaatctttggtaaaaagtccagattatgataacttggctttaatgaactaggaaatagatggataatggcacacacatttttagcattgtagggattattttcactggttgtaggatcaacacacttggtttaaataatggttctgagaatttaattaa

SEQ ID NO: 209571 - DNA, 557 bp, Homo sapiens
attttacctaactgataccagggtttttaaaatttgtttatatagattaagcgtctttgaagaaataacagtatgcaaaaaatatggttgctattcttcatgttaaaactatcttaaacwcttttccagaggaaaaaataacaaaatagaaaccaatgaaggtcttttgcttggtgattacatatattgattacctgtgtaagttaaacagattgggaaaaggaaatatccaaaattgtgcctagagtatatcatgacatcatgtatatatgtaaataagttaactttgcaatcgcaacatagagacaaatgttattttaaatgaataaaaataagtagaacatgacgtaatatttcagcatattaaatttaggagtaaaaacctttgacatccctgaaaatctttggtaaaaagtccagattatgataacttggctttaatgaactaggaaatagatggataatggcacacacatttttagcattgtagggattattttcactggttgtaggatcaacacacttggtttaaataatggttctgagaatttaattaa

SEQ ID NO: 209572 - DNA, 557 bp, Homo sapiens
attttacctaactgataccagggtttttaaaatttgtttatatagattaagcgtctttgaagaaataacagtatgcaaaaaatatggttgctattcttcatgttaaaactatcttaaactcttttccagaggaaaaaataacaaaatagaaaccaatgaaggtcttttgcttggtgattacatatattgattacctgtgtaagttaaacagattgggaaaaggaaatatccaaaattgtgcctagaktatatcatgacatcatgtatatatgtaaataagttaactttgcaatcgcaacatagagacaaatgttattttaaatgaataaaaataagtagaacatgacgtaatatttcagcatattaaatttaggagtaaaaacctttgacatccctgaaaatctttggtaaaaagtccagattatgataacttggctttaatgaactaggaaatagatggataatggcacacacatttttagcattgtagggattattttcactggttgtaggatcaacacacttggtttaaataatggttctgagaatttaattaa

SEQ ID NO: 209573 - DNA, 567 bp, Homo sapiens
tcactgaaaggtgggatgtgcaattcttgacaaagaaaataagtaggattgactctaagatttttgctttgagacaaatggtcgtaggtgagaatgtgcatttcaaagttgagatgtttattagcttctcaaaagaagacagcataagaagttggatgtaagagcctggcatttagaagagaagtaagaggtagaggtacaaatttgcaagttcttagcataaacaatattgtaaaccatggctctgtgagaactcatcaagggagtgggggtggacacagaagtgttccaaagactaagaaatagcatacaaagacataagaagaaagccaagaggacgtgttctggaagccaaagaaaaaaagctgggtttttttgtttgtttgtttatgtgtttttgtttgtttgttttttaattaaagaaaaagagactactgatagatcaataaaatgagaataaaaaattaacctttaaattttggaacatgaaaataatyagtgatttgaaaggaacatttaattgaaatggtcaatacttttctagtattttaattgtaactcatgcct

SEQ ID NO: 209574 - DNA, 606 bp, Homo sapiens
gaagcttaaaatcatagctctcagacaaatataaaatgaataggttttaaagatattaacttgaattaataaataacaaatagatgttttaaatgacacaaagggaatctgagaaactgggacatttagaagcaatttagcaaaataacattaagattgcttggttaaataaataaatatagattgatatataacagtgtcataaatctgtgaggttatctgttctactaaggagatatatttgtatctttacaggaaaaaaaagttcatggtgcaaaatccctttactaaatctggtacctttaattattattgtatagcacttaagtataggaacttgaatatagccaatatattcctaaagatctaaattactctccaaataaaatgctttttgtacataattttttctattcccattaattatctttcacagttttattttgttttgattttttcatktgttccttccccctccccttggcattcagttaattcttctattttctttcccaaacaggcacattatcattaaatgtaatggttggctgaatcataaccacatttaaatattgctctgttttgccatttgtttttcttccttct

SEQ ID NO: 209575 - DNA, 406 bp, Homo sapiens
atgacattttagacaaagaataacagaaaatttatcatccaaaagcaccttccaaagaaatttcaaaagacaaatttcaaacaaaggaaaatgatcacagataaaagatttgggataaaataaataataatgagaaaaatagaatatatatgggaggtataaaaaagaaaataaaatttacttcaatacaaaattgaaatgtgtaaagatgttttggtgggggtctccattgctcttcagctttgattatttaaaaaactctcagaactcagagaagcaattatactcatgtttacagtttattaaaacaaaaggatgcagagtcrtatcaacaaaggaaaaagattctcagggcaaattccaggagactccaggaacaaacttacaagtgtccatcacagcagaa

SEQ ID NO: 209576 - DNA, 478 bp, Homo sapiens
tattagcctgtcaatcattaggaaagtaagagcaatttacaaagcatctaccactgtgctagtacttgctcacatgttctcatccacctaagggaatattcaaagcatcttaatagttgctactaattcatataatttaattaatagaatagcaaatacattctcatcttatttcacatttttaacatacacaagatatagctattttatagtgattaggtttagtaaaaataacactgataaaactcaactgttagcatgtacagttttaggctacrtatttttcaaaacaacaaaatataatttttttagactcaacttgaaattttgtaaaaaataaagtttcagaaatagtaaactatcacagaacaagaagcataatagaaagtagaaattgttttactataaaaaatactataaataaaagggctaaatgtttcttaatattcgtatactgataccaaatattagatgcctt

SEQ ID NO: 209577 - DNA, 491 bp, Homo sapiens
gcaaaaacgtgcacaccacttgggaactagataagcttcatragacctctgccattgctaccccacaggaaacagtgaacctccacacacacactgagcataatgttaccacaactagcatctgagaaagccaacatacaaagattttaaataaccagggaacttatacagtcttcacccctgaaagcacccagagctgaattaggttacaataaactataaacattaaagtcacatcctcaaagtgaaaaaaaaaaaagtgaaaaatcacagtcaaatcaaaaaataaattcaaaaataattagaagatatagtctcaaaagtaattagaagatatactctatccaaatgagaagaaaccagaaaaataattctggcaataggacaaaatagggttctataacacctcaaaaagaacacactaagtccccagcaatggatcccaaccaagatgaaatctttgaaatgccagaaaaataattcaaagaaat

SEQ ID NO: 209578 - DNA, 491 bp, Homo sapiens
gcaaaaacgtgcacaccacttgggaactagataagcttcatgagacctctgccattgctaccccacaggaaacagtgaacctccacacacacrctgagcataatgttaccacaactagcatctgagaaagccaacatacaaagattttaaataaccagggaacttatacagtcttcacccctgaaagcacccagagctgaattaggttacaataaactataaacattaaagtcacatcctcaaagtgaaaaaaaaaaaagtgaaaaatcacagtcaaatcaaaaaataaattcaaaaataattagaagatatagtctcaaaagtaattagaagatatactctatccaaatgagaagaaaccagaaaaataattctggcaataggacaaaatagggttctataacacctcaaaaagaacacactaagtccccagcaatggatcccaaccaagatgaaatctttgaaatgccagaaaaataattcaaagaaat

SEQ ID NO: 209579 - DNA, 491 bp, Homo sapiens
gcaaaaacgtgcacaccacttgggaactagataagcttcatgagacctctgccattgctaccccacaggaaacagtgaacctccacacacacactgagcataatgttaccacaactagcatctgagaaagccaamatacaaagattttaaataaccagggaacttatacagtcttcacccctgaaagcacccagagctgaattaggttacaataaactataaacattaaagtcacatcctcaaagtgaaaaaaaaaaaagtgaaaaatcacagtcaaatcaaaaaataaattcaaaaataattagaagatatagtctcaaaagtaattagaagatatactctatccaaatgagaagaaaccagaaaaataattctggcaataggacaaaatagggttctataacacctcaaaaagaacacactaagtccccagcaatggatcccaaccaagatgaaatctttgaaatgccagaaaaataattcaaagaaat

SEQ ID NO: 209580 - DNA, 491 bp, Homo sapiens
gcaaaaacgtgcacaccacttgggaactagataagcttcatgagacctctgccattgctaccccacaggaaacagtgaacctccacacacacactgagcataatgttaccacaactagcatctgagaaagccaacayacaaagattttaaataaccagggaacttatacagtcttcacccctgaaagcacccagagctgaattaggttacaataaactataaacattaaagtcacatcctcaaagtgaaaaaaaaaaaagtgaaaaatcacagtcaaatcaaaaaataaattcaaaaataattagaagatatagtctcaaaagtaattagaagatatactctatccaaatgagaagaaaccagaaaaataattctggcaataggacaaaatagggttctataacacctcaaaaagaacacactaagtccccagcaatggatcccaaccaagatgaaatctttgaaatgccagaaaaataattcaaagaaat

SEQ ID NO: 209581 - DNA, 193 bp, Homo sapiens
tcaaaatgagcttagatgaaattttaattgccatactcaagccacttaaatagttaaccaagacattctcccttgtttctayagtgatacatagtattgaaaattgctttgactgcacactcaaattattacaattcaactttcttcaacatcataaattgaaaggatatcatgtggatctttgttgttccca

SEQ ID NO: 209582 - DNA, 607 bp, Homo sapiens
gaattcacgagcaagaccctagactgtggtgtttgcaggaagaaaccaagcagggtaaacaagcttaggaccggctcgtttgaataatttcagtgggctctggggcataagagctgtccctggttctctggtttttggccctagcgtgattaggacagaagcacagtggcctggagtgtgacagccctatagagtatttgtttgggaattggttagtttgtatttgtaaagcccatcttcatgcgaagttcaggggagacttcgtagccagaagctgaggcarggtgactccagcatactatccatcttcaagaacaagatgtgtctgaattgctgtatgttataaagtttcgatgtctaatagagcaaatctttcatcctgttggttctctttgatttaatttgcttttttttctctctaagtactgttctcggaataagccaatctgatatgtgtgtcactattccaaggaatgagtagatcacactttatttttctgcttcttgtgaacattaattagttcagttttctgaaattttcaatgctattgtgattttttaaaattaacaatgctactttgcttattgtgtacttgtcaccagaaat

SEQ ID NO: 209583 - DNA, 606 bp, Homo sapiens
gcaggaagaaaccaagcagggtaaacaagcttaggaccggctcgtttgaataatttcagtgggctctggggcataagagctgtccctggttctctggtttttggccctagcgtgattaggacagaagcacagtggcctggagtgtgacagccctatagagtatttgtttgggaattggttagtttgtatttgtaaagcccatcttcatgcgaagttcaggggagacttcgtagccagaagctgaggcaaggtgactccagcatactatccatcttcaagaacaagatgtgtctgaattgctgtatgttataaagtttcgatgtctaatagagcaaatctttcatcctgttggttctctttgatttaatttgcttttttttctctctaagtactgttctcggaataagccaatctgatatgtgtgtcactattccaakgaatgagtagatcacactttatttttctgcttcttgtgaacattaattagttcagttttctgaaattttcaatgctattgtgattttttaaaattaacaatgctactttgcttattgtgtacttgtcaccagaaatgcaagagctaagatgtctctggaaatggaattc

SEQ ID NO: 209584 - DNA, 546 bp, Homo sapiens
gtttatgatgatttttcattttaccaatggtgatttagaaggaacagatactcttgatatragtgggaccaaacttacaaatcatcttgctccagtcagtttttgtgctggtttgaaaatttttttcatactctgagattcaggctaaattgcttttaaaattttaaagctttgtgtttcaaatttatattcttgatgagatgtatagagtgagaatgagatacattgtctttttattataaacaatcttgctttagtagctactgaagtttacttttgaaattgtatttcttaaatatttctgttaattatagaaaattgattttgtattctattttatatccattaactttgctcatttagtaattctaataatcctaggcattctccacaatgcattgtaagataatgtatacatttcataggatgacaatttttaggtacacttaatggtatgggactatagattattggaattttctttggtttaaaattggcaaactatttttaaggggaagttgttaacaatcactttctacaatatgt

SEQ ID NO: 209585 - DNA, 393 bp, Homo sapiens
agacttgcagagacagaaatgactgtcaygtgttcttatacacataaagccctagaaacaggagccacagcacatcatgcactggggccatatggggaagtaccagagtcagtgaaggcaaaaggagcaagactaaagcatgagccagagcctttaatatggttttccttggaaggaatgagtgagacagtgtaagcagctgagcaggtttaagactgggtagtgtgagtactttttgtgtaatttagtccctagtgttccagcacctgattctggggtgacgaaagcagagggataatgtcccagaccacaggagccatataataagagtcaagtgagggtgtggattctggattggttggtttgcatataaataacatgatcataggcaag

SEQ ID NO: 209586 - DNA, 392 bp, Homo sapiens
agacttgcagagacagaaatgactgtcatrtgttcttatacacataaagccctagaaacaggagccacagcacatcatgcactggggccatatggggaagtaccagagtcagtgaaggcaaaaggagcaagactaaagcatgagccagagcctttaatatggttttccttggaaggaatgagtgagacagtgtaagcagctgagcaggtttaagactgggtagtgtgagtactttttgtgtaatttagtccctagtgttccagcacctgattctggggtgacgaaagcagagggataatgtcccagaccacaggagccatataataagagtcaagtgagggtgtggattctggattggttggtttgcatataaataacatgatcataggcaa

SEQ ID NO: 209587 - DNA, 223 bp, Homo sapiens
atttaattatggagagacttgcagagacagaaatgactgtcatgtgttcttatacacataaagccctrgaaacaggagccacagcacatcatgcactggggccatatggggaagtaccagagtcagtgaaggcaaaaggagcaagactaaagcatgagccagagcctttaatatggttttccttggaaggaatgagtgagacagtgtaagcagctgagcaggt

SEQ ID NO: 209588 - DNA, 394 bp, Homo sapiens
agacttgcagagacagaaatgactgtcatgtgttcttatacacataaagccctagaaacagragccacagcacatcatgcactggggccatatggggaagtaccagagtcagtgaaggcaaaaggagcaagactaaagcatgagccagagcctttaatatggttttccttggaaggaatgagtgagacagtgtaagcagctgagcaggtttaagactgggtagtgtgagtactttttgtgtaatttagtccctagtgttccagcacctgattctggggtgacgaaagcagagggataatgtcccagaccacaggagccatataataagagtcaagtgagggtgtggattctggattggttggtttgcatataaataacatgatcataggcaagt

SEQ ID NO: 209589 - DNA, 383 bp, Homo sapiens
cagaaatgactgtcatgtgttcttatacacataaagccctagaaacaggagccacarcacatcatgcactggggccatatggggaagtaccagagtcagtgaaggcaaaaggagcaagactaaagcatgagccagagcctttaatatggttttccttggaaggaatgagtgagacagtgtaagcagctgagcaggtttaagactgggtagtgtgagtactttttgtgtaatttagtccctagtgttccagcacctgattctggggtgacgaaagcagagggataatgtcccagaccacaggagccatataataagagtcaagtgagggtgtggattctggattggttggtttgcatataaataacatgatcataggcaagttg

SEQ ID NO: 209590 - DNA, 393 bp, Homo sapiens
agacttgcagagacagaaatgactgtcatgtgttcttatacacataaagccctagaaacaggagccacagcacatcatgyactggggccatatggggaagtaccagagtcagtgaaggcaaaaggagcaagactaaagcatgagccagagcctttaatatggttttccttggaaggaatgagtgagacagtgtaagcagctgagcaggtttaagactgggtagtgtgagtactttttgtgtaatttagtccctagtgttccagcacctgattctggggtgacgaaagcagagggataatgtcccagaccacaggagccatataataagagtcaagtgagggtgtggattctggattggttggtttgcatataaataacatgatcataggcaag

SEQ ID NO: 209591 - DNA, 396 bp, Homo sapiens
agacttgcagagacagaaatgactgtcatgtgttcttatacacataaagccctagaaacaggagccacagcacatcatgcactggggccatatggggaagtaccrgagtcagtgaaggcaaaaggagcaagactaaagcatgagccagagcctttaatatggttttccttggaaggaatgagtgagacagtgtaagcagctgagcaggtttaagactgggtagtgtgagtactttttgtgtaatttagtccctagtgttccagcacctgattctggggtgacgaaagcagagggataatgtcccagaccacaggagccatataataagagtcaagtgagggtgtggattctggattggttggtttgcatataaataacatgatcataggcaagttg

SEQ ID NO: 209592 - DNA, 393 bp, Homo sapiens
agacttgcagagacagaaatgactgtcatgtgttcttatacacataaagccctagaaacaggagccacagcacatcatgcactggggccatatggggaagtaccagagtcagtgaaggcaaaaggagcaaractaaagcatgagccagagcctttaatatggttttccttggaaggaatgagtgagacagtgtaagcagctgagcaggtttaagactgggtagtgtgagtactttttgtgtaatttagtccctagtgttccagcacctgattctggggtgacgaaagcagagggataatgtcccagaccacaggagccatataataagagtcaagtgagggtgtggattctggattggttggtttgcatataaataacatgatcataggcaag

SEQ ID NO: 209593 - DNA, 383 bp, Homo sapiens
cagaaatgactgtcatgtgttcttatacacataaagccctagaaacaggagccacagcacatcatgcactggggccatatggggaagtaccagagtcagtgaaggcaaaaggagcaagactaaagcatgagccagagcmtttaatatggttttccttggaaggaatgagtgagacagtgtaagcagctgagcaggtttaagactgggtagtgtgagtactttttgtgtaatttagtccctagtgttccagcacctgattctggggtgacgaaagcagagggataatgtcccagaccacaggagccatataataagagtcaagtgagggtgtggattctggattggttggtttgcatataaataacatgatcataggcaagttg

SEQ ID NO: 209594 - DNA, 400 bp, Homo sapiens
attatggagagacttgcagagacagaaatgactgtcatgtgttcttatacacataaagccctagaaacaggagccacagcacatcatgcactggggccatatggggaagtaccagagtcagtgaaggcaaaaggagcaagactaaagcatgagccagagcctttaatatggttttccttggaaggaatgagtgagacagtgtaagcagctgagcaggtttaagactgggtagtgtgagtrctttttgtgtaatttagtccctagtgttccagcacctgattctggggtgacgaaagcagagggataatgtcccagaccacaggagccatataataagagtcaagtgagggtgtggattctggattggttggtttgcatataaataacatgatcataggca

SEQ ID NO: 209595 - DNA, 400 bp, Homo sapiens
attatggagagacttgcagagacagaaatgactgtcatgtgttcttatacacataaagccctagaaacaggagccacagcacatcatgcactggggccatatggggaagtaccagagtcagtgaaggcaaaaggagcaagactaaagcatgagccagagcctttaatatggttttccttggaaggaatgagtgagacagtgtaagcagctgagcaggtttaagactgggtagtgtgagtactttttgtgtaatttagtccctagtgttccagcacctgattctgrggtgacgaaagcagagggataatgtcccagaccacaggagccatataataagagtcaagtgagggtgtggattctggattggttggtttgcatataaataacatgatcataggca

SEQ ID NO: 209596 - DNA, 400 bp, Homo sapiens
attatggagagacttgcagagacagaaatgactgtcatgtgttcttatacacataaagccctagaaacaggagccacagcacatcatgcactggggccatatggggaagtaccagagtcagtgaaggcaaaaggagcaagactaaagcatgagccagagcctttaatatggttttccttggaaggaatgagtgagacagtgtaagcagctgagcaggtttaagactgggtagtgtgagtactttttgtgtaatttagtccctagtgttccagcacctgattctggggtgaygaaagcagagggataatgtcccagaccacaggagccatataataagagtcaagtgagggtgtggattctggattggttggtttgcatataaataacatgatcataggca

SEQ ID NO: 209597 - DNA, 400 bp, Homo sapiens
agacttgcagagacagaaatgactgtcatgtgttcttatacacataaagccctagaaacaggagccacagcacatcatgcactggggccatatggggaagtaccagagtcagtgaaggcaaaaggagcaagactaaagcatgagccagagcctttaatatggttttccttggaaggaatgagtgagacagtgtaagcagctgagcaggtttaagactgggtagtgtgagtactttttgtgtaatttagtccctagtgttccagcacctgattctggggtgacgaaagcagagggataatgtcccagaccacaggagccatatartaagagtcaagtgagggtgtggattctggattggttggtttgcatataaataacatgatcataggcaagttgttta

SEQ ID NO: 209598 - DNA, 401 bp, Homo sapiens
agacttgcagagacagaaatgactgtcatgtgttcttatacacataaagccctagaaacaggagccacagcacatcatgcactggggccatatggggaagtaccagagtcagtgaaggcaaaaggagcaagactaaagcatgagccagagcctttaatatggttttccttggaaggaatgagtgagacagtgtaagcagctgagcaggtttaagactgggtagtgtgagtactttttgtgtaatttagtccctagtgttccagcacctgattctggggtgacgaaagcagagggataatgtcccagaccacaggagccatataataagagtcaagtgagggtgwggattctggattggttggtttgcatataaataacatgatcataggcaagttgtttag

SEQ ID NO: 209599 - DNA, 409 bp, Homo sapiens
ctccatttaattatggagagacttgcagagacagaaatgactgtcatgtgttcttatacacataaagccctagaaacaggagccacagcacatcatgcactggggccatatggggaagtaccagagtcagtgaaggcaaaaggagcaagactaaagcatgagccagagcctttaatatggttttccttggaaggaatgagtgagacagtgtaagcagctgagcaggtttaagactgggtagtgtgagtactttttgtgtaatttagtccctagtgttccagcacctgattctggggtgacgaaagcagagggataatgtcccagaccacaggagccatataataagagtcaagtgagggtgtggattctggattgrttggtttgcatataaataacatgatcataggca

SEQ ID NO: 209600 - DNA, 330 bp, Homo sapiens
attctggggtgacgaaagcagagggataatgtcccagaccacaggagccatataataagagtcaagtgagggtgtggattctggattggttggtttgcatataaataacatgmtcataggcaagttgtttagtatttctagaaattagctaaccctaggaggagcactctgccttgaaacccatatggtctcaagatgtcaaagcaaaacaaaaacaataaccatgattaatacagcaagatggaataagctatatattgccttaaggaagaagttacttggctctctatggctgatcgtcataacctgaaagatttgttctcttgactt

SEQ ID NO: 209601 - DNA, 330 bp, Homo sapiens
attctggggtgacgaaagcagagggataatgtcccagaccacaggagccatataataagagtcaagtgagggtgtggattctggattggttggtttgcatataaataacatgatcataggcaagttgtttagtatttctagaaattagctaaccctaggaggagcactctgycttgaaacccatatggtctcaagatgtcaaagcaaaacaaaaacaataaccatgattaatacagcaagatggaataagctatatattgccttaaggaagaagttacttggctctctatggctgatcgtcataacctgaaagatttgttctcttgactt

SEQ ID NO: 209602 - DNA, 330 bp, Homo sapiens
attctggggtgacgaaagcagagggataatgtcccagaccacaggagccatataataagagtcaagtgagggtgtggattctggattggttggtttgcatataaataacatgatcataggcaagttgtttagtatttctagaaattagctaaccctaggaggagcactctgccttgaaacccatatggtctcaagaygtcaaagcaaaacaaaaacaataaccatgattaatacagcaagatggaataagctatatattgccttaaggaagaagttacttggctctctatggctgatcgtcataacctgaaagatttgttctcttgactt

SEQ ID NO: 209603 - DNA, 458 bp, Homo sapiens
aaatacatttttgttacatgagtcaggagttaaagaaataaatgaaagatgagagattaggatataaagtatatagggtgccagttcatataacactttayattaaaggaatttgagcttttgtttgaaacaatggaagctattgggagttttaaggggattgatatgaaggaggtaaaataggagtctatagcactaatctaaagtggtaagtgaatggaagtcaaagctatttagtggagtaggttgaaccaaaattgatgactaagtaggtggtatctaaaggaaaggaaaagtttgagtcttgggtatctggcatgcatagtatactaacagtgatatacacagttactttcaggctcactgaatgagttagtggtcaatgaaatacagaacaaagtcatgcaattcactttcaagttgtgttcttgaaacttcccatggcacccatgaagatt

SEQ ID NO: 209604 - DNA, 606 bp, Homo sapiens
gttcatctctctatattcattttctaatgctggtccaagaaacaggttgagatgctaagtagggaggccrtagaaaacatcattgaaaagatagcatttatgcaaaaatttaaaggtggtgagggattaaacatgtagatatctgaaggaagggaacccaggcagagggaaaagacggtgcaaaagcccaagacagccccatatctggcttgtttgaaggggttcaaggaaaccagtgtggctggagatgagtgaggaaggggagttaacgatgagcacacagaagtaatttgggccttgatatacgtttttaatttttaaaaatatatattatatttaaatgacataataattgtacatatttacagggtattttaaaactcacactgccttagaattttaccatcaatgaaagagagggtcactacaggtcctaagaagagaagtgacacgctcttttatgtaaaaaggatgactgtggatattgtgttggtaactgactgtaagaggacacttttaggaaaagtcccctctttagatattgactttatccaagaggaaaacagtagtaattcacacctcagtagacatggtgagaagtagttg

SEQ ID NO: 209605 - DNA, 606 bp, Homo sapiens
gttcatctctctatattcattttctaatgctggtccaagaaacaggttgagatgctaagtagggaggccgtagaaaacatcattgaaaagatagcatttatgcaaaaatttaaaggtggtgagggattaaacatgtagatatctgaargaagggaacccaggcagagggaaaagacggtgcaaaagcccaagacagccccatatctggcttgtttgaaggggttcaaggaaaccagtgtggctggagatgagtgaggaaggggagttaacgatgagcacacagaagtaatttgggccttgatatacgtttttaatttttaaaaatatatattatatttaaatgacataataattgtacatatttacagggtattttaaaactcacactgccttagaattttaccatcaatgaaagagagggtcactacaggtcctaagaagagaagtgacacgctcttttatgtaaaaaggatgactgtggatattgtgttggtaactgactgtaagaggacacttttaggaaaagtcccctctttagatattgactttatccaagaggaaaacagtagtaattcacacctcagtagacatggtgagaagtagttg

SEQ ID NO: 209606 - DNA, 581 bp, Homo sapiens
ggtgagggattaaacatgtagatatctgaaggaagggaacccaggcagagggaaaagacggtgcaaaagcccaagacagccccatatctggcttgtttgaaggggttcaaggaaaccagtgtggctggagatgagtgaggaaggggagttaacgatgagcacacagaagtaatttgggccttgatrtacgtttttaatttttaaaaatatatattatatttaaatgacataataattgtacatatttacagggtattttaaaactcacactgccttagaattttaccatcaatgaaagagagggtcactacaggtcctaagaagagaagtgacacgctcttttatgtaaaaaggatgactgtggatattgtgttggtaactgactgtaagaggacacttttaggaaaagtcccctctttagatattgactttatccaagaggaaaacagtagtaattcacacctcagtagacatggtgagaagtagttgattctacatattataaagtctttgagtttaagcaaccagaggaaggacttgccatcaaatgaaatggataagcataaacaggtttggtagta

SEQ ID NO: 209607 - DNA, 581 bp, Homo sapiens
ggtgagggattaaacatgtagatatctgaaggaagggaacccaggcagagggaaaagacggtgcaaaagcccaagacagccccatatctggcttgtttgaaggggttcaaggaaaccagtgtggctggagatgagtgaggaaggggagttaacgatgagcacacagaagtaatttgggccttgatatacgtttttaatttttaaaaatatatattatatttaaatgacataataattgtacatatttacagggtattttaaaactcacactgccttaraattttaccatcaatgaaagagagggtcactacaggtcctaagaagagaagtgacacgctcttttatgtaaaaaggatgactgtggatattgtgttggtaactgactgtaagaggacacttttaggaaaagtcccctctttagatattgactttatccaagaggaaaacagtagtaattcacacctcagtagacatggtgagaagtagttgattctacatattataaagtctttgagtttaagcaaccagaggaaggacttgccatcaaatgaaatggataagcataaacaggtttggtagta

SEQ ID NO: 209608 - DNA, 581 bp, Homo sapiens
ggtgagggattaaacatgtagatatctgaaggaagggaacccaggcagagggaaaagacggtgcaaaagcccaagacagccccatatctggcttgtttgaaggggttcaaggaaaccagtgtggctggagatgagtgaggaaggggagttaacgatgagcacacagaagtaatttgggccttgatatacgtttttaatttttaaaaatatatattatatttaaatgacataataattgtacatatttacagggtattttaaaactcacactgccttagaattttaccatcaatgaaagagagggtcactacaggtcctaagaagagaagtgacacgctcttttatgtaaaaaggatgactgtggatattgtgttggtaactgactgtaagaggacacttttaggaaaagtcccctctttagatattgactttatccaagaggaaaacagtagtaattcacacctcagtagacatggtgagaagtagttgattctasatattataaagtctttgagtttaagcaaccagaggaaggacttgccatcaaatgaaatggataagcataaacaggtttggtagta

SEQ ID NO: 209609 - DNA, 443 bp, Homo sapiens
tttaagcaaccagaggaaggacttgccatcaaatgaaatggataagcataaacaggtttggtagtagctgggagatggaaatcaacaatttctcttgagtcatactttctttgagatttccattaggtatctgaagtaatcagaaactagccaggaaaactgaaatcattgagaatttaaaacaaagggaattgatacaggtaattgatggtagaaataactttaaaaaaattaaagccaaccaggggacagtgaggcaacctacaatttagcaacaatgggaggctactatcaccttcccttggagaacagggataggaggctgtactactggagctgcagggagggatatttgggggaagytggaaccacagtgggcctatgtaaaggagcaggagcctggaaaaaatgtaactgttattagggatgacagggagaaaatg

SEQ ID NO: 209610 - DNA, 428 bp, Homo sapiens
ttaagcaaccagaggaaggacttgccatcaaatgaaatggataagcataaacaggtttggtagtagctgggagatggaaatcaacaatttctcttgagtcatactttctttgagatttccattaggtatctgaagtaatcagaaactagccaggaaaactgaaatcattgagaatttaaaacaaagggaattgatacaggtaattgatggtagaaataactttaaaaaaattaaagccaaccaggggacagtgaggcaacctacaatttagcaacaatgggaggctactatcaccttcccttggagaacagggataggaggctgtactactggagctgcagggagggatatttgggggaagctggaaccacagtgggcctatgtaaaggagcaggagcctgkaaaaaatgtaactgttattagggatg

SEQ ID NO: 209611 - DNA, 565 bp, Homo sapiens
catcccctctgtcttatgaactgaactgggcagagtgaggaatgggtctcaggaaaaatagacccattatcatcacgacattcaggtggaagtgtaaaaaatgcaattggatttatgcgtgtggaatttgggatagagatatggcatggaaatataaatttgggagtcattagcatttacactgcatgtaaaaccacgagattggatgagataaccaaggaaagaagtacagagaaagatgatggtggggggaaataaaatactgaggcctggagcattccaacattgagtctgaggaatagaagaaaacactaaaagagagagagagagagggagacagagagagagagaagtatacaaataatataaaaccagggagtcaaatgaagatagtattatgagaataatctacttcaaatgctgctgataaatcaagtaaggtgagaaaaataactataagattaacaaagtggaggacaggtttaattagagtagtggggggcaaaaatctgtatggaaatgaaatgattaaagagaaaatgcarggagcaaatgacacggtgac

SEQ ID NO: 209612 - DNA, 601 bp, Homo sapiens
tccccacttaacccatacatgattattttatctttgaaattattcagaaagcatgatactgagcaaaatcttcaatstgagtccgatttgacaattcaatgctttttgtgggttcagattggcactgagagcaggattgtcttttagacccacacaccaaaatagtgaatgttttctttttctacctgggctccttttcaaaaggaaataatggaaaaatatgagaatttgttctcaggatagttggctgtacatttttggtatgaggtagtggaatctttgaggcaggttaagggaaataagtcttaccattgaaatctgggggccatagactacagtctgggagtacgggtctagggagtacatggacaaagggaaattgggtacaaatcccattgactgactcctgctagcatacttgtaaaagctaaccttttaataggttagtttttaataggaggagatgatagtgggagaaaaagctgcgagattacattttattcactggaaaaccttcttatccctccctggtttcttggagaaatttcatgtatccttagaaatgactcaaaatattgattattggacaaactatttatgt

SEQ ID NO: 209613 - DNA, 372 bp, Homo sapiens
tacaaatagaagctggctgataaatccagctagaatttaaggcacagcccaaggtgcaaattaattcctggaaattagtacaratcaacttaggacattccttaaactccaactaaatcctataaattagtgcagatcaacttaggacattccttaaactgtgagaagtaatttatctttcataggacccaccaataagcaataaactcagagactgtcaagactgttctaagaatcttgtctacccatactcacaaaataactggaaagagttcagaacgtgaatacagcattgtagtactttcctagggctgctggaacaaattaccacagactgggtagcttaaaacaactgaaatttattatttcaca

SEQ ID NO: 209614 - DNA, 372 bp, Homo sapiens
tacaaatagaagctggctgataaatccagctagaatttaaggcacagcccaaggtgcaaattaattcctggaaattagtacagatcaacttaggacattccttaaactscaactaaatcctataaattagtgcagatcaacttaggacattccttaaactgtgagaagtaatttatctttcataggacccaccaataagcaataaactcagagactgtcaagactgttctaagaatcttgtctacccatactcacaaaataactggaaagagttcagaacgtgaatacagcattgtagtactttcctagggctgctggaacaaattaccacagactgggtagcttaaaacaactgaaatttattatttcaca

SEQ ID NO: 209615 - DNA, 372 bp, Homo sapiens
tacaaatagaagctggctgataaatccagctagaatttaaggcacagcccaaggtgcaaattaattcctggaaattagtacagatcaacttaggacattccttaaactccaactaaatcctrtaaattagtgcagatcaacttaggacattccttaaactgtgagaagtaatttatctttcataggacccaccaataagcaataaactcagagactgtcaagactgttctaagaatcttgtctacccatactcacaaaataactggaaagagttcagaacgtgaatacagcattgtagtactttcctagggctgctggaacaaattaccacagactgggtagcttaaaacaactgaaatttattatttcaca

SEQ ID NO: 209616 - DNA, 415 bp, Homo sapiens
atcaaatagaagtggtacaaactatagtaagagatatagagtataaaaataagagtaaaaaacagaaattgagagattaaaaayatctaaaaattttctaaacataaaacttaggcaaagaatagtaatacccatgtaatggttatttctaagaacaaaaattaaaataaaaaataatattaattatttgagcatgaaggtaaaaggataagaagtttatattgataatagacttcttgatagcaacattttatacaggatgataatcaagaaatggtttaatgattatgaaacagataacacagtagcgagatgagattttattcatgcaaactatgaatcatgtctaaggaatgtagaccttcatgaatatttatgattttaaaaaacattgttcctgtgatggcttttttag

SEQ ID NO: 209617 - DNA, 582 bp, Homo sapiens
gaattcataaagaaacaagctcaacgtcgggcgcagtggctcacacttgtaaaatcccagcacttaggtaggctgaggagtgtggatcacctgaggtcaggagttcaagacaagcctggtcaatatggcgaaaccccgtctctactaaaaatacaaaattagccaggcatggtggcaggtgcttgtaatcccagctactcgggaggctaaggcaggagaattgcttgaacctgtgaggtgaaggttgcaatgagccgagattgtgccactgcwctccagccaggtgacaagagtgaaaccctgtcaaaaaaaaaaaaaaagaaagaaaaagaaagaaaaagagagagagagagagagaaagaaaaggagaaagagagaaagaaagagaaagaaagaaagaaaaagaaagaaagaaagaaagaaagaaagaaagaaagaaagaaagaaagaaagaaaggaaaagaaagaaagagaaagaaagaaaaagaaagaaagaatttgaagaagtaaaattatgggaaaaacgtgtttagtctaagttacggcaaggtttcactgaacactgtgaccttcagtgttgct

SEQ ID NO: 209618 - DNA, 415 bp, Homo sapiens
atcaaatagaagtggtacaaactatagtaagagatatagagtataaaaataagagtaaaaaacagaaattgagagattaaaaatatctaaaaattttctaaacataaaacttaggcaaagaatagtaatacccatgtaatggttatttctaagaacaaaaattaaaataaaaaataatattaattatttgagcatgaaggtaaaaggataagaartttatattgataatagacttcttgatagcaacattttatacaggatgataatcaagaaatggtttaatgattatgaaacagataacacagtagcgagatgagattttattcatgcaaactatgaatcatgtctaaggaatgtagaccttcatgaatatttatgattttaaaaaacattgttcctgtgatggcttttttag

SEQ ID NO: 209619 - DNA, 560 bp, Homo sapiens
aagcccattttgcttatataaacatactaatgacagctcctgacaaacaatttgtttttttgctggcaggagagtgattatctatcacagaaatgcttttagcagaatgtacttggtcgtttagaattgcttatggttaacaaagtagaaggttgtggatttatggggctccctggaaaatgtcacatataccacatatgtaactatctgcataaaaattaagatatttgataattgagmcaggtatctccatgtaaataaattgtcggcatacctctctagaagtctcatctatctgcctgggcaagggagtatctaatgacagaaccaaggatctaaagaatcagattaagagatctaaataattctctgatttgcccatgcctaatgattacctgagttcgtgaaattactagtaaagctttatattttgtaagatcttagattctgataagtctaatgtcacaatccaatcagtttttcctatctcaaggaatcatgtccatataatggaattaatcctgaaactctgaaaagttttaatattctggggtcagggt

SEQ ID NO: 209620 - DNA, 560 bp, Homo sapiens
aagcccattttgcttatataaacatactaatgacagctcctgacaaacaatttgtttttttgctggcaggagagtgattatctatcacagaaatgcttttagcagaatgtacttggtcgtttagaattgcttatggttaacaaagtagaaggttgtggatttatggggctccctggaaaatgtcacatataccacatatgtaactatctgcataaaaattaagatatttgataattgagccaggtatctccatgtaaataaattgtckgcatacctctctagaagtctcatctatctgcctgggcaagggagtatctaatgacagaaccaaggatctaaagaatcagattaagagatctaaataattctctgatttgcccatgcctaatgattacctgagttcgtgaaattactagtaaagctttatattttgtaagatcttagattctgataagtctaatgtcacaatccaatcagtttttcctatctcaaggaatcatgtccatataatggaattaatcctgaaactctgaaaagttttaatattctggggtcagggt

SEQ ID NO: 209621 - DNA, 560 bp, Homo sapiens
aagcccattttgcttatataaacatactaatgacagctcctgacaaacaatttgtttttttgctggcaggagagtgattatctatcacagaaatgcttttagcagaatgtacttggtcgtttagaattgcttatggttaacaaagtagaaggttgtggatttatggggctccctggaaaatgtcacatataccacatatgtaactatctgcataaaaattaagatatttgataattgagccaggtatctccatgtaaataaattgtcggcatacctctctagaagtctcatctatctgcctgggcaagggagtatctaatgacagaaccaaggatctaaagaatcagattaagagatctaaataattctctgatttgccyatgcctaatgattacctgagttcgtgaaattactagtaaagctttatattttgtaagatcttagattctgataagtctaatgtcacaatccaatcagtttttcctatctcaaggaatcatgtccatataatggaattaatcctgaaactctgaaaagttttaatattctggggtcagggt

SEQ ID NO: 209622 - DNA, 346 bp, Homo sapiens
tgataagtctaatgtcacaatccaatcagtttttcctatctcaaggaatcatgtccatataatggaattaatccwgaaactctgaaaagttttaatattctggggtcagggtagatgagaaggagtctccatatgacttataaacatgtaaggagaaatagtaaaattgttgtaaaattaaaagaagaacagaaattcataaaataagctataacaatcaggttaaacaacaaaaacaaaaagcaaagcgtctatcagtaacatgattgaatagaagagccgagagagagttgtcagtggtaaaggaataaatattatctcatttgatagagtgattgtattagtc

SEQ ID NO: 209623 - DNA, 346 bp, Homo sapiens
tgataagtctaatgtcacaatccaatcagtttttcctatctcaaggaatcatgtccatataatggaattaatcctgaaactcygaaaagttttaatattctggggtcagggtagatgagaaggagtctccatatgacttataaacatgtaaggagaaatagtaaaattgttgtaaaattaaaagaagaacagaaattcataaaataagctataacaatcaggttaaacaacaaaaacaaaaagcaaagcgtctatcagtaacatgattgaatagaagagccgagagagagttgtcagtggtaaaggaataaatattatctcatttgatagagtgattgtattagtc

SEQ ID NO: 209624 - DNA, 531 bp, Homo sapiens
ttctgataagtctaatgtcacaatccaatcagtttttcctatctcaaggaatcatgtccatataatggaattaatcctgaaactctgaaaagttttaatattctggggtmagggtagatgagaaggagtctccatatgacttataaacatgtaaggagaaatagtaaaattgttgtaaaattaaaagaagaacagaaattcataaaataagctataacaatcaggttaaacaacaaaaacaaaaagcaaagcgtctatcagtaacatgattgaatagaagagccgagagagagttgtcagtggtaaaggaataaatattatctcatttgatagagtgattgtattagtccattttaacactgctgataaagacatacccatgactggacaacttacaaaagaaaatggtttattggacatacagttccacatggctggggaggactcacaatcatggcaaaaaggagcaagacacatcttatgtgggtggcagcaggcaaaaaaagagcttgtgcagagaaaatcctgttt

SEQ ID NO: 209625 - DNA, 531 bp, Homo sapiens
ttctgataagtctaatgtcacaatccaatcagtttttcctatctcaaggaatcatgtccatataatggaattaatcctgaaactctgaaaagttttaatattctggggtcagggtagatgagaagkagtctccatatgacttataaacatgtaaggagaaatagtaaaattgttgtaaaattaaaagaagaacagaaattcataaaataagctataacaatcaggttaaacaacaaaaacaaaaagcaaagcgtctatcagtaacatgattgaatagaagagccgagagagagttgtcagtggtaaaggaataaatattatctcatttgatagagtgattgtattagtccattttaacactgctgataaagacatacccatgactggacaacttacaaaagaaaatggtttattggacatacagttccacatggctggggaggactcacaatcatggcaaaaaggagcaagacacatcttatgtgggtggcagcaggcaaaaaaagagcttgtgcagagaaaatcctgttt

SEQ ID NO: 209626 - DNA, 346 bp, Homo sapiens
tgataagtctaatgtcacaatccaatcagtttttcctatctcaaggaatcatgtccatataatggaattaatcctgaaactctgaaaagttttaatattctggggtcagggtagatgagaaggagtctccrtatgacttataaacatgtaaggagaaatagtaaaattgttgtaaaattaaaagaagaacagaaattcataaaataagctataacaatcaggttaaacaacaaaaacaaaaagcaaagcgtctatcagtaacatgattgaatagaagagccgagagagagttgtcagtggtaaaggaataaatattatctcatttgatagagtgattgtattagtc

SEQ ID NO: 209627 - DNA, 531 bp, Homo sapiens
ttctgataagtctaatgtcacaatccaatcagtttttcctatctcaaggaatcatgtccatataatggaattaatcctgaaactctgaaaagttttaatattctggggtcagggtagatgagaaggagtctccatatgacttataaacatgtaaggagaaatagtaaaattgttgtaaaattaaaagaagaacagaaattcataaaataasctataacaatcaggttaaacaacaaaaacaaaaagcaaagcgtctatcagtaacatgattgaatagaagagccgagagagagttgtcagtggtaaaggaataaatattatctcatttgatagagtgattgtattagtccattttaacactgctgataaagacatacccatgactggacaacttacaaaagaaaatggtttattggacatacagttccacatggctggggaggactcacaatcatggcaaaaaggagcaagacacatcttatgtgggtggcagcaggcaaaaaaagagcttgtgcagagaaaatcctgttt

SEQ ID NO: 209628 - DNA, 346 bp, Homo sapiens
tgataagtctaatgtcacaatccaatcagtttttcctatctcaaggaatcatgtccatataatggaattaatcctgaaactctgaaaagttttaatattctggggtcagggtagatgagaaggagtctccatatgacttataaacatgtaaggagaaatagtaaaattgttgtaaaattaaaagaagaacagaaattcataaaataagctataacaatcaggttaaacaacaaaaacaaaaagcaaagcrtctatcagtaacatgattgaatagaagagccgagagagagttgtcagtggtaaaggaataaatattatctcatttgatagagtgattgtattagtc

SEQ ID NO: 209629 - DNA, 407 bp, Homo sapiens
gctctttgccttaagaattgcctctttccaccatgcatatttcacctgtgtgggaattcttgcagatctctgtattattgatagtcattttgctctgatattttatacaaagctgaatcagcaacagtatgactaaacacaaccaaaaaagaaagctagaaagattatattagacacttacgtgtatggatcattatggtgaggactgctaaaaaaaaaaaaaaaaaaaaaaccttcagccaaaataaatttacagtttaatcgagtaatgaatgattcataaattggaaagcccccacaatcacagcagattcagagagactccaggsgtgtctcatggtcagaatgaatttatagacaatacaaagtaaagtgacgcatagaaatcagaagtgaggtacagaaac

SEQ ID NO: 209630 - DNA, 538 bp, Homo sapiens
tagcccaacaaccttggcacatgttcttaggatctcctgggctgtgtgacaggccgaggtcactcatatttgcctcagaataaatctcttcaaatatttcwcagagtttgactcttttcttcaacacgcattaccactgtagtagctctgaagtggttgagttggaggtaacccaccaacaaccctcctcatggaaatttctcttgaatgaaaatatgggaggagtaaattcttcactgccaaatactatttcaaattctttcaagcataaggtaaattcattatttaacataaaagtcaatcaagaggtaaaaagaggtcacagtttgcttacatattttctggcacttctttgctattggctgtgtcacttttacccttaacatttctgcaaaaatgtctgcagacatttagggtcatcatattcagatacaaccttacccagaagaccaagaaagagacaccaagagaaacatttatcttaaaaactcttaaggtaatttgccctgatttgcctttgtactgaattgggccatat

SEQ ID NO: 209631 - DNA, 538 bp, Homo sapiens
tagcccaacaaccttggcacatgttcttaggatctcctgggctgtgtgacaggccgaggtcactcatatttgcctcagaataaatctcttcaaatatttctcagagtttgactcttttcttcaacaygcattaccactgtagtagctctgaagtggttgagttggaggtaacccaccaacaaccctcctcatggaaatttctcttgaatgaaaatatgggaggagtaaattcttcactgccaaatactatttcaaattctttcaagcataaggtaaattcattatttaacataaaagtcaatcaagaggtaaaaagaggtcacagtttgcttacatattttctggcacttctttgctattggctgtgtcacttttacccttaacatttctgcaaaaatgtctgcagacatttagggtcatcatattcagatacaaccttacccagaagaccaagaaagagacaccaagagaaacatttatcttaaaaactcttaaggtaatttgccctgatttgcctttgtactgaattgggccatat

SEQ ID NO: 209632 - DNA, 538 bp, Homo sapiens
tagcccaacaaccttggcacatgttcttaggatctcctgggctgtgtgacaggccgaggtcactcatatttgcctcagaataaatctcttcaaatatttctcagagtttgactcttttcttcaacacgcattaccactgtagtagctctgaagtggttgagttggaggtaacccaccaacaaccctcctcatggaaatttctcttgaatgaaaatatgggaggagtaaattcttcactgccaaatactatttcaaattctttcaagcataaggtaaattcattatttaacataaaagtcaatcaagaggtaaaaagaggtcacagtttgcttacrtattttctggcacttctttgctattggctgtgtcacttttacccttaacatttctgcaaaaatgtctgcagacatttagggtcatcatattcagatacaaccttacccagaagaccaagaaagagacaccaagagaaacatttatcttaaaaactcttaaggtaatttgccctgatttgcctttgtactgaattgggccatat

SEQ ID NO: 209633 - DNA, 529 bp, Homo sapiens
agtactgaagccttagaagccttggatatattgaatatgttctattttagaaagaaaaggtgagataatgtatgctggcagtcaaccaacagcatatgctcctaatgaacaactggagagtcatttaagttcaatgttggggattttattagaaactgtaagatgaacacacaattcattttctctttccttgtaaatttggacaatatttgctatattcgcctatattttggcatagaaatttaggttctaagtatatagtagtgatgtagccttcttacagggtcacatagacccagaattaataatttttaacactctttttatyctctctgggtggctaacattaaaacaatccacagaaaacccccaagagctatgtattgaggatggcaaaaccacagatgggaaaataataaatctttgaatgaccctgcaggaaatcacagatagcattcctattatttaagcaagcaataacttttattgttttaagagttggaggtttaattttttcagcattactgtt

SEQ ID NO: 209634 - DNA, 574 bp, Homo sapiens
gataaagacttaggtgtgccgaggaatgaattcatcttatgtatcttgagtgtaatgtcttatttctcctgaatctgagaatttgatgtctttcattagggatgtcagtaaatctcactaatgaatatattagactccagtttaatatatgatagtcattttcattctgtctttcatrtcactgaatcctttctctttattgttcatttttatacatctcttaatagtcaaagtgaatttaactatgttttacgttatgtggttattctcactttagctatctctaatatattatgaatgtgtcagttgtgtgtttactattgtttgaattaaacttttaaatcattcattttaattcttacttaattcaaacttgtttgttatacattcttataattccagtatctggagtctttcttcatgtgattcttttatctccctgttttcctcctatattcttttcatgcaccatctttctctgtgtgttttgttttgttttactgtcaattcctaactaatagaagtatatttatgcaaataattttaggatagaattgaaataggtttcccaaaa

SEQ ID NO: 209635 - DNA, 574 bp, Homo sapiens
gataaagacttaggtgtgccgaggaatgaattcatcttatgtatcttgagtgtaatgtcttatttctcctgaatctgagaatttgatgtctttcattagggatgtcagtaaatctcactaatgaatatattagactccagtttaatatatgatagtcattttcattctgtctttcatatcactgaatcctttctctttattgttcatttttatacatctcttaatagtcaaagtgaatttaactatgttttacgttatgtggttattctcactttagctatctctaayatattatgaatgtgtcagttgtgtgtttactattgtttgaattaaacttttaaatcattcattttaattcttacttaattcaaacttgtttgttatacattcttataattccagtatctggagtctttcttcatgtgattcttttatctccctgttttcctcctatattcttttcatgcaccatctttctctgtgtgttttgttttgttttactgtcaattcctaactaatagaagtatatttatgcaaataattttaggatagaattgaaataggtttcccaaaa

SEQ ID NO: 209636 - DNA, 574 bp, Homo sapiens
gataaagacttaggtgtgccgaggaatgaattcatcttatgtatcttgagtgtaatgtcttatttctcctgaatctgagaatttgatgtctttcattagggatgtcagtaaatctcactaatgaatatattagactccagtttaatatatgatagtcattttcattctgtctttcatatcactgaatcctttctctttattgttcatttttatacatctcttaatagtcaaagtgaatttaactatgttttacgttatgtggttattctcactttagctatctctaatatattatgaatgtgtcagttgtgtgtttacyattgtttgaattaaacttttaaatcattcattttaattcttacttaattcaaacttgtttgttatacattcttataattccagtatctggagtctttcttcatgtgattcttttatctccctgttttcctcctatattcttttcatgcaccatctttctctgtgtgttttgttttgttttactgtcaattcctaactaatagaagtatatttatgcaaataattttaggatagaattgaaataggtttcccaaaa

SEQ ID NO: 209637 - DNA, 574 bp, Homo sapiens
gataaagacttaggtgtgccgaggaatgaattcatcttatgtatcttgagtgtaatgtcttatttctcctgaatctgagaatttgatgtctttcattagggatgtcagtaaatctcactaatgaatatattagactccagtttaatatatgatagtcattttcattctgtctttcatatcactgaatcctttctctttattgttcatttttatacatctcttaatagtcaaagtgaatttaactatgttttacgttatgtggttattctcactttagctatctctaatatattatgaatgtgtcagttgtgtgtttactrttgtttgaattaaacttttaaatcattcattttaattcttacttaattcaaacttgtttgttatacattcttataattccagtatctggagtctttcttcatgtgattcttttatctccctgttttcctcctatattcttttcatgcaccatctttctctgtgtgttttgttttgttttactgtcaattcctaactaatagaagtatatttatgcaaataattttaggatagaattgaaataggtttcccaaaa

SEQ ID NO: 209638 - DNA, 557 bp, Homo sapiens
aatagtgtaagagtgttctcttactacacttccaatttggctggactttgaactttgtctctggtcccctgctttttacagtcccaagaaacatggcctcatccttatcaggaccagagaatgctctcaaggtaaaaccttaattttcataaaattgttgtcttcttgcctgataattgtgacactaaagcaagatttttttaatgtttcaaccaacttttaagaattattttagtggtaggactgagccaggtttctaatccacactactgcagataaaaaaatgacaaaaggtaactttcaaaaatagaggccgggcgtggtggctcaygcctgtaatcccagcactttgggaggccaaggcgggcagatcacgaggtcaggaaattgagactatcctggctaacacggtgaaaccccgcctctactaaaaatacaaaaaaaattagctgggcgtggtgtcgggtgcctgtagtcccagctgctcgggaggctgaggcaggagaatggtgtgaacccacaaggtggagcttgcagtgagccgagatcgcgccaca

SEQ ID NO: 209639 - DNA, 366 bp, Homo sapiens
aaatacaactttagtgaagtakatccatatgttatcaaatagcttaaaactaacttttgaaaaaaaaagtcaatgtgactacttaaaaattttgttcagataattgcagggataccagtttgaaataatctaacttaaaatcatacatttatgtacataaaaataaatttggtatcaatgaaaacactaaatctagaaaacaatctaacttctgaaattattctaaaatagtataagaatatattttatacatgcttgtaatgtaggaagggctctttaaaagtgtgacacaattcataaaggaaaaaatgtttaaagataaatactgattaattcactattaagccagattcaggtaaccctact

SEQ ID NO: 209640 - DNA, 366 bp, Homo sapiens
aaatacaactttagtgaagtagatccatatgttatcaaatagcttaaaactaacttttgaaaaaaaaagtcaatgtgactacttaaaaattttgttcagataattgcagggataccagtttgaaataatctaacttaaaatcatacatttatgtacataaaaataaatttggtatcaatgaaaacactaaatctagaaaacaatctaacttctgaaattattctaaaatagtataagaatatattttatayatgcttgtaatgtaggaagggctctttaaaagtgtgacacaattcataaaggaaaaaatgtttaaagataaatactgattaattcactattaagccagattcaggtaaccctact

SEQ ID NO: 209641 - DNA, 544 bp, Homo sapiens
tatcaatgaaaacactaaatctagaaaacaatctaacttctgaaattattctaaaatagtataagaatatattttatacatgcttgtaatgtaggaagggctctttaaaagtgtgacacaattcataaaggaaaaaatgtttaaagataaatactgattaattsactattaagccagattcaggtaaccctactactaatttacacaattacatagtgaatctttgaggcttagatgctaatatatatgaagtaactaaaataaaaactaataaattccttgtaattggtttgcatttatttcagcagaaatgatatattactattttatttataattataaaagcatgtgttaattttcagtatgctattctgtaagtgaaagtatgtttgaaaattgtaatggtggagaaaaatttagctgcactctacttaaaactaaacatacacacattacagatagagtccaatgagtttttaaaaaatttattgagctataattaacatattaaaagccaaaaatatgtaagatagattattagata

SEQ ID NO: 209642 - DNA, 544 bp, Homo sapiens
tatcaatgaaaacactaaatctagaaaacaatctaacttctgaaattattctaaaatagtataagaatatattttatacatgcttgtaatgtaggaagggctctttaaaagtgtgacacaattcataaaggaaaaaatgtttaaagataaatactgattaattcaytattaagccagattcaggtaaccctactactaatttacacaattacatagtgaatctttgaggcttagatgctaatatatatgaagtaactaaaataaaaactaataaattccttgtaattggtttgcatttatttcagcagaaatgatatattactattttatttataattataaaagcatgtgttaattttcagtatgctattctgtaagtgaaagtatgtttgaaaattgtaatggtggagaaaaatttagctgcactctacttaaaactaaacatacacacattacagatagagtccaatgagtttttaaaaaatttattgagctataattaacatattaaaagccaaaaatatgtaagatagattattagata

SEQ ID NO: 209643 - DNA, 544 bp, Homo sapiens
tatcaatgaaaacactaaatctagaaaacaatctaacttctgaaattattctaaaatagtataagaatatattttatacatgcttgtaatgtaggaagggctctttaaaagtgtgacacaattcataaaggaaaaaatgtttaaagataaatactgattaattcactattaagccagattcaggtaaccctactactaatttacacaattacatagtgaatctttgaggcttagatgctaatatatatgaagtaactaaaataaaaactaataaattccttgtaattggtttgcatttatttcagcagaaatgatatattactattttatttataattataaaagcatgtgttaattttcagtatgctattctgtaagtgaaagtatgtttgaaaattgtaatggtggagaaaaatttagctgcactytacttaaaactaaacatacacacattacagatagagtccaatgagtttttaaaaaatttattgagctataattaacatattaaaagccaaaaatatgtaagatagattattagata

SEQ ID NO: 209644 - DNA, 473 bp, Homo sapiens
agattcaggtaaccctactactaatttacacaattacatagtgaatctttgaggcttagatgctaatatatatgaagtaactaaaataaaaactaataaattccttgtaattggtttgcatttatttcagcagaaatgatatattactattttatttataattataaaagcatgtgttaattttcagtatgctattctgtaagtgaaagtatgtttgaaaattgtaatggtggagaaaaatttagctgcactctacttaaaactaaacatacacacattacagatagagtccaatgagtttttaaraaatttattgagctataattaacatattaaaagccaaaaatatgtaagatagattattagatatgctctgacatatttatacatccgtgagatcatcattattgtcaagatagtgaacatataaatccacaaaatgtttcctcatgactacttttaataatcccctt

SEQ ID NO: 209645 - DNA, 473 bp, Homo sapiens
agattcaggtaaccctactactaatttacacaattacatagtgaatctttgaggcttagatgctaatatatatgaagtaactaaaataaaaactaataaattccttgtaattggtttgcatttatttcagcagaaatgatatattactattttatttataattataaaagcatgtgttaattttcagtatgctattctgtaagtgaaagtatgtttgaaaattgtaatggtggagaaaaatttagctgcactctacttaaaactaaacatacacacattacagatagagtccaatgagtttttaaaaaatttattgagctataattaacatattaaaagccaaaaatatgtaagatarattattagatatgctctgacatatttatacatccgtgagatcatcattattgtcaagatagtgaacatataaatccacaaaatgtttcctcatgactacttttaataatcccctt

SEQ ID NO: 209646 - DNA, 567 bp, Homo sapiens
ccagacagatcacagccaatttctatcagacattcaaagaagaactggtaccaagcctactgaaactactctaaaagactgagaaaaagggaatcctccttaactcattctatgaagccagtatcaccctgataccaaaaccagaaaaaggcatatcataaaaaaagaaaactacaaatgaacatctctgataaagacatacgcaaaaattcttaacagatactggcaaatcaaatccaaaarcatatcaaaaagacaattcactataatcaagtgagtctcatcccagggaggcaaggatgactcaacatacgcaaggtaataaatgtgatgtattttataaacagaattaaaaaccaaatacgtatgatcatctcaatagatgcataaaaacattcagtaaaatccagcattgctttatgataaaaaccctaaacaaactagacatagaataaacatatctcaaaataataaaagctatatatgacaaacccatggccaacatcatattgaatggggaaaagttgaaagtcttcccactgagggctagaacaagttaaggatgcc

SEQ ID NO: 209647 - DNA, 359 bp, Homo sapiens
gttctgttgatctatttagtctttcttgaggacaatatcacacagtcttgactatttcaaaatcatgaacatggtatatctccccaaattttatcttttatttgagatatctggaaagcatataggtctagaagttgaaatttgttytacctatattagttagtcttcaagtagaaatgatgatggaaaagattgcagtgatcaaaattacctagggagaatgtatagcatgaaagagtaataagcagttcatgcagatctctgatttagcttacacacctagaggaagattaaatgaagatcaatttgcaagtgaatttaaaattttgtgacaaaattttaggagcaaaattaggaca

SEQ ID NO: 209648 - DNA, 359 bp, Homo sapiens
gttctgttgatctatttagtctttcttgaggacaatatcacacagtcttgactatttcaaaatcatgaacatggtatatctccccaaattttatcttttatttgagatatctggaaagcatataggtctagaagttgaaatttgttctacctatattagttagtcttcaagtagaaatgatgatggaaaagatkgcagtgatcaaaattacctagggagaatgtatagcatgaaagagtaataagcagttcatgcagatctctgatttagcttacacacctagaggaagattaaatgaagatcaatttgcaagtgaatttaaaattttgtgacaaaattttaggagcaaaattaggaca

SEQ ID NO: 209649 - DNA, 359 bp, Homo sapiens
gttctgttgatctatttagtctttcttgaggacaatatcacacagtcttgactatttcaaaatcatgaacatggtatatctccccaaattttatcttttatttgagatatctggaaagcatataggtctagaagttgaaatttgttctacctatattagttagtcttcaagtagaaatgatgatggaaaagattgcagtgatcaaaattacctagggagaatgtatagcatgaaagagtaatargcagttcatgcagatctctgatttagcttacacacctagaggaagattaaatgaagatcaatttgcaagtgaatttaaaattttgtgacaaaattttaggagcaaaattaggaca

SEQ ID NO: 209650 - DNA, 359 bp, Homo sapiens
gttctgttgatctatttagtctttcttgaggacaatatcacacagtcttgactatttcaaaatcatgaacatggtatatctccccaaattttatcttttatttgagatatctggaaagcatataggtctagaagttgaaatttgttctacctatattagttagtcttcaagtagaaatgatgatggaaaagattgcagtgatcaaaattacctagggagaatgtatagcatgaaagagtaataagcagttcatgcagatctctgatttagcttacacacctagaggaagattaaatgaagatcaatttgcaagtgaatttaaaattttgtkacaaaattttaggagcaaaattaggaca

SEQ ID NO: 209651 - DNA, 583 bp, Homo sapiens
agattaaatgaagatcaatttgcaagtgaatttaaaattttgtgacaaaattttaggagcaaaattaggacaccgtgktgttacagaatctaaagaactattttgagctgcttttgaaaaataaacataaaagttaccaatctgtatgactgacttttgcaacactttctcattgaaaacacatattctacaaaaaaaacattatttttgtaaccttatcatttgggactcactttatctagcagatctaagtacttatacgtttttacgtatgttcccatctataaattatctgttatattttcaatgacattttcttcttctaataaaagcatgctcaattttaactatttgtcttaacttattttggagattcaaggtacattttgttgttgtttttattattttattttattttattttactttaatttctgggatacatatgcagaatttgcaggtttgttacataggtatacatgtgccatggtggtttgctgcccctatcaaaccatcatctaggttttaagctgcatgcattagatatcagtcctaatgctctccctcccctttccccccacgcc

SEQ ID NO: 209652 - DNA, 583 bp, Homo sapiens
agattaaatgaagatcaatttgcaagtgaatttaaaattttgtgacaaaattttaggagcaaaattaggacaccgtggtgttacagaatctaaagaactattttgagctgcttttgaaaaataaacataaaagttaccaatctgtatgactgacttttgcaacactttctcattgaaaacacatattctacaaaaaaaacattatttttgtaaccttatcatttgggactcactttatctagcagatctaagtacttatacgtttttacgtatgttcccatctataaattatctgttatattttcaatgacattttcttcttctaataaaagcatgctcaattttaactatttgtcttaacttattttggagattcaaggtacatttkgttgttgtttttattattttattttattttattttactttaatttctgggatacatatgcagaatttgcaggtttgttacataggtatacatgtgccatggtggtttgctgcccctatcaaaccatcatctaggttttaagctgcatgcattagatatcagtcctaatgctctccctcccctttccccccacgcc

SEQ ID NO: 209653 - DNA, 351 bp, Homo sapiens
gactaaagtttggtgaaggagagagtctttgtcagtatttgtgttaattttttttaattactaaaagtgaggcttatttgcattcttcaaggacttaccaattaataagctatgttaaaatctccagttttaatgtctatttcttctttcaacttctgttatttctgctttatgaaaattgtaattttgtgtatgttattaatatatattttatttttaatgtagaatgaagcatgawtccttctgtagaataaatttcccttccttatcctgttaaatttattttgtcttaaattctatcttgtctcaatagcaaaattctgacaactatttcaggatcttgctatcata

SEQ ID NO: 209654 - DNA, 593 bp, Homo sapiens
aagcttcaaaagaatttatcagagcaagcatgcttgtctttttctaggtatcggggcaaaaatattcagtcaccttaatgttattggaaagttaaggtccatagtataaaccttagagcacctacctaacaggacaaaataagcaaaaacatatgactaataatctattagttgaaataaaataaaattcaaaattaaacacttaatccaaggtaaagcatcaaaagtggaaaatagtaataaagaacagattaaattttatggaaaataaattttatgatagtagatttaaggycaaaatatagataacaatattaaatataagtagtctaaaactactatttaaagtaagaattttaagactaaatttaaaaagtaatgttaaatcaatataaagacaaaggttggtcagaaaaaataggttgaagatagctgtacttcaccatgatacagtaagaggaactaaactaaattctttacaaaacaaacaaacaaaaaacaaaaaaacacacacacaaataaaaactaactgcagacaaaatataatcaacagtgattttttaaccattgacaagaagctgaggatgctgatc

SEQ ID NO: 209655 - DNA, 381 bp, Homo sapiens
tcaaacctttttcttggtcaaataaacttagtgaaatttaacatgtcttagttgcattttttttaaacaacattcaaagacctacaaaataggacagggaacttgtatttagactatactgtctaaatgcaacgtatttatgctagttatttgtgtgttatagagaatatagtgatattgatatactttaagtcatttatgtacatcgggaagaggaaaaaaaaagttacccaattcaatggaagtcaaacgaagaagcagaacagagctwccagaaaaacatgataagagttaaagaagatgggagctcaaagaggaaaactgtcactgaatttggggaacttttccttgcaagccaagttaacttttattcagatagaa

SEQ ID NO: 209656 - DNA, 497 bp, Homo sapiens
tttatgtttaacatagatgatgaactgattttctatgaagacaaaggacaatagaaaacacatatttttacaacawatctgaaacaactagataaatttatgaaaatcaaattaatttttttatttctaactttttctgttgcccaggctggagtggtgcaatcatagctcactgcagcctcgaactcctgggctcaagaaatcctccttcttcagtctcctaatgcactggggttacaaatgtgagtcatcatgcttagcctaacgtcaatgtttatcccatatcatttacaaatttgcgatgaatccaatttgagatgctcataaacataaatatgaaacataaatataaaaactaatactataaagcatataagagaacaatcttgcatcttagggaggcaaaatattacatctttagggaggcaaaaatatttcagacaaaacaaacagaaaatgtagccataaaggaaaaaattatataaatagggcttcct

SEQ ID NO: 209657 - DNA, 423 bp, Homo sapiens
aactttcatttgttccccaacaaattattgagcatctactatgtatattctaggcccatttgtagggactggggaaaaaatagtgaaaataacattcagaatgtcttggcttcacagagctgttgttccagtgttgggagaaaaacagtaattaataccacaaagtatcatgtgttgtatgccagatggtttaagttctattctaaaaaatgtggcaaagaaggggaatagagagttctgggcacaagaggtgctggatactgaacaagatggttgctgaaagcctcgatgggtggtatcatctgaatacaatgartggttatgagagaatgagccaagagcataattgagagaacatattttcagggagcagaaatagcaaatgaggccttggtgtatgaacgcacccgtgaggttccacta

SEQ ID NO: 209658 - DNA, 538 bp, Homo sapiens
aaatagcaaatgaggccttggtgtatgaacgcacccgtgaggttccactaaggatgccaatgtgatacagcagaggagatgagrtcacactccatggggagatggtcacataaagcttcttagaaaatggtaagaacttttgtttatttaattggcagccatgaagggttttaaacagaaaagcaatcgcctctttaaagaattagcagtaacagtttgactgatctgtgaaaatagaccatagcatagcaaaagagaaaacagggaaattagtgaggaaactatcgtgtaaactattcctgaagctgttgtaaactataaactatgtaaattataaattgaaattgttctatgcaaacaatatatatttgaaccctgtatattagaggcaaaagtccatgatattggcaatgttttggcctgaactatgggaggaacagagttggaattactcacctgggtttaaatttgggaggagcaaatttgggattagaggataggaaagatcaatagttttatttttaacaggcttaatttt

SEQ ID NO: 209659 - DNA, 596 bp, Homo sapiens
aaagcttcttagaaaatggtaagaacttttgtttatttaattggcagccatgaaggrttttaaacagaaaagcaatcgcctctttaaagaattagcagtaacagtttgactgatctgtgaaaatagaccatagcatagcaaaagagaaaacagggaaattagtgaggaaactatcgtgtaaactattcctgaagctgttgtaaactataaactatgtaaattataaattgaaattgttctatgcaaacaatatatatttgaaccctgtatattagaggcaaaagtccatgatattggcaatgttttggcctgaactatgggaggaacagagttggaattactcacctgggtttaaatttgggaggagcaaatttgggattagaggataggaaagatcaatagttttatttttaacaggcttaattttaaatagacacttaatcatataatatattttaaataaattattaatcataaaataatgtcaggctaattttaatactcacctatcaattataaataaataaaatgataagaaaatacataaaatccgcaatagttgttgtaattagacagtggagttacttgtgatttta

SEQ ID NO: 209660 - DNA, 596 bp, Homo sapiens
aaagcttcttagaaaatggtaagaacttttgtttatttaattggcagccatgaagggttttaaacagaaaagcaatcgcctctttaaagaattagcagtaacagtttgactgatctgtgaaaatagaccatagcatagcaaaagagaaaacagggaaattagtgaggaaactatcgtgtaaactattcctgaagctgttgtaaactataaactatgtaaattataaattgaaattgttctatgcaaacaakatatatttgaaccctgtatattagaggcaaaagtccatgatattggcaatgttttggcctgaactatgggaggaacagagttggaattactcacctgggtttaaatttgggaggagcaaatttgggattagaggataggaaagatcaatagttttatttttaacaggcttaattttaaatagacacttaatcatataatatattttaaataaattattaatcataaaataatgtcaggctaattttaatactcacctatcaattataaataaataaaatgataagaaaatacataaaatccgcaatagttgttgtaattagacagtggagttacttgtgatttta

SEQ ID NO: 209661 - DNA, 596 bp, Homo sapiens
aaagcttcttagaaaatggtaagaacttttgtttatttaattggcagccatgaagggttttaaacagaaaagcaatcgcctctttaaagaattagcagtaacagtttgactgatctgtgaaaatagaccatagcatagcaaaagagaaaacagggaaattagtgaggaaactatcgtgtaaactattcctgaagctgttgtaaactataaactatgtaaattataaattgaaattgttctatgcaaacaatatatatttgaaccctgtatattagaggcaaaagtccatratattggcaatgttttggcctgaactatgggaggaacagagttggaattactcacctgggtttaaatttgggaggagcaaatttgggattagaggataggaaagatcaatagttttatttttaacaggcttaattttaaatagacacttaatcatataatatattttaaataaattattaatcataaaataatgtcaggctaattttaatactcacctatcaattataaataaataaaatgataagaaaatacataaaatccgcaatagttgttgtaattagacagtggagttacttgtgatttta

SEQ ID NO: 209662 - DNA, 557 bp, Homo sapiens
agttttatttttaacaggcttaattttaaatagacacttaatcatataatatattttaaataaaytattaatcataaaataatgtcaggctaattttaatactcacctatcaattataaataaataaaatgataagaaaatacataaaatccgcaatagttgttgtaattagacagtggagttacttgtgattttaatgatgtaggaattattctgtttttttaaataataaatctttattaattttataattatcaaagatgctataaaaagaaatattttttattactatgctactgatgtatttccattgcattgactaacaaaattaatactagaattttcaaaagtatccacagtggttactttatttgcactgttaattcagctctttttaagtatgccttctagttccctaattgatataattcagagactacacttggacacaatttaatgaataagcaaattaggtccagttattccaatatgaaattccttttaattatgggctacttttggagatgtagaataatttgaatgtttaatttggtgac

SEQ ID NO: 209663 - DNA, 596 bp, Homo sapiens
aaagcttcttagaaaatggtaagaacttttgtttatttaattggcagccatgaagggttttaaacagaaaagcaatcgcctctttaaagaattagcagtaacagtttgactgatctgtgaaaatagaccatagcatagcaaaagagaaaacagggaaattagtgaggaaactatcgtgtaaactattcctgaagctgttgtaaactataaactatgtaaattataaattgaaattgttctatgcaaacaatatatatttgaaccctgtatattagaggcaaaagtccatgatattggcaatgttttggcctgaactatgggaggaacagagttggaattactcacctgggtttaaatttgggaggagcaaatttgggattagaggataggaaagatcaatagttttatttttaacaggcttaattttaaatagacacttaatcatataatatattttaaataaattattaatcataaaataatgtcaggctaattytaatactcacctatcaattataaataaataaaatgataagaaaatacataaaatccgcaatagttgttgtaattagacagtggagttacttgtgatttta

SEQ ID NO: 209664 - DNA, 557 bp, Homo sapiens
agttttatttttaacaggcttaattttaaatagacacttaatcatataatatattttaaataaattattaatcataaaataatgtcaggctaattttaatactcacctatcaattataaataaataaaatgataagaaaatacataaaatccgcaatagttgttgtaattagacagtggagttacttgtgattttaatgatgtaggaattattctgtttttttaaataataaatctttattaattttataattatcaaagatgctataaaaagaaatattttttattactatgctactgatgtatttccattgcattgactaacaaaattaatactagaattttcaaaagtatccacagtggttactttatttgcactgttaattcagctctttttaagtatgccttctmgttccctaattgatataattcagagactacacttggacacaatttaatgaataagcaaattaggtccagttattccaatatgaaattccttttaattatgggctacttttggagatgtagaataatttgaatgtttaatttggtgac

SEQ ID NO: 209665 - DNA, 468 bp, Homo sapiens
taaatagacacttaatcatataatatattttaaataaattattaatcataaaataatgtcaggctaattttaatactcacctatcaattataaataaataaaatgataagaaaatacataaaatccgcaatagttgttgtaattagacagtggagttacttgtgattttaatgatgtaggaattattctgtttttttaaataataaatctttattaattttataattatcaaagatgctataaaaagaaatattttttattactatgctactgatgtatttccattgcattgactaacaaaattaatactagaattttcaaaagtatccacagtggttactttatttgcactgttaattcagctctttttaagtatgccttctagttccctaattgatataattcagagaytacacttggacacaatttaatgaataagcaaattaggtccagttattccaatatgaa

SEQ ID NO: 209666 - DNA, 569 bp, Homo sapiens
aggctggagtggtgcaatcatagctcactgcagcctcgaactcctgggctcaagaaatcctccttcttcagtctcctaatgcactggggttacaaatgtgagtcatcatgcttagcctaacgtcaatgtttatcccatatcatttacaaatttgygatgaatccaatttgagatgctcataaacataaatatgaaacataaatataaaaactaatactataaagcatataagagaacaatcttgcatcttagggaggcaaaatattacatctttagggaggcaaaaatatttcagacaaaacaaacagaaaatgtagccataaaggaaaaaattatataaatagggcttcctcaaaataagattttctattcatcaagagaaagcattgaaaaaaattaaaaggcaggacacagaatcagaggaattatttttaatacatacaaatgacttagaagatcttaataagtagtactattcagtaataaaatgtctaacagcctctccccaaataggcatgggtcttgaatatcttacaaaggaagatatgcaatgtcacatgaacaggcac

SEQ ID NO: 209667 - DNA, 497 bp, Homo sapiens
tttatgtttaacatagatgatgaactgattttctatgaagacaaaggacaatagaaaacacatatttttacaacatatctgaaacaactagataaatttatgaaaatcaaattaatttttttatttctaactttttctgttgcccaggctggagtggtgcaatcatagctcactgcagcctcgaactcctgggctcaagaaatcctccttcttcagtctcctaatgcactggggttacaaatgtgagtcatcatgcttagcctaacgtcaatgtttatcccatatcatttacaaatttgcgatgaatccaatttgagatgctcataaacataaatatgaaacataaatataaaaactaatactataaakcatataagagaacaatcttgcatcttagggaggcaaaatattacatctttagggaggcaaaaatatttcagacaaaacaaacagaaaatgtagccataaaggaaaaaattatataaatagggcttcct

SEQ ID NO: 209668 - DNA, 569 bp, Homo sapiens
aggctggagtggtgcaatcatagctcactgcagcctcgaactcctgggctcaagaaatcctccttcttcagtctcctaatgcactggggttacaaatgtgagtcatcatgcttagcctaacgtcaatgtttatcccatatcatttacaaatttgcgatgaatccaatttgagatgctcataaacataaatatgaaacataaatataaaaactaatactataaagcatataagagaacaatcttgcatcttagggaggcaaaatattacatctttagggaggcaaaaatatttcagacaaaacaaacaraaaatgtagccataaaggaaaaaattatataaatagggcttcctcaaaataagattttctattcatcaagagaaagcattgaaaaaaattaaaaggcaggacacagaatcagaggaattatttttaatacatacaaatgacttagaagatcttaataagtagtactattcagtaataaaatgtctaacagcctctccccaaataggcatgggtcttgaatatcttacaaaggaagatatgcaatgtcacatgaacaggcac

SEQ ID NO: 209669 - DNA, 474 bp, Homo sapiens
gagagggaagaattatttttgaagacatggaatttttattttctattccttagaacagtttagtttaccctaaatagtaactacctattattttcctctgctaatttttcttgaggctcctaactttatcaggtgaattttaagacatctgtgaggctgggcacggtggctcacacctgtaatcccagcactttgggargctgaggcaggcagatcacgaggccaggagttcaagaccagcctggccaacatggtgaaacctcgtctctactaaaaagaaaaaaattagctaagtgtggtggcggtcgcctgcagttccaactactcgggaggttgaggcaggagaattgtctgaacccgggaggcggaggttgcagtgagccgagatcgtgccactgcataccagcctgggtgacaggcaagactatatctcaaaataaatacatacatacatacatacatacatacatacat

SEQ ID NO: 209670 - DNA, 474 bp, Homo sapiens
gagagggaagaattatttttgaagacatggaatttttattttctattccttagaacagtttagtttaccctaaatagtaactacctattattttcctctgctaatttttcttgaggctcctaactttatcaggtgaattttaagacatctgtgaggctgggcacggtggctcacacctgtaatcccagcactttgggaagctgaggcaggcrgatcacgaggccaggagttcaagaccagcctggccaacatggtgaaacctcgtctctactaaaaagaaaaaaattagctaagtgtggtggcggtcgcctgcagttccaactactcgggaggttgaggcaggagaattgtctgaacccgggaggcggaggttgcagtgagccgagatcgtgccactgcataccagcctgggtgacaggcaagactatatctcaaaataaatacatacatacatacatacatacatacatacat

SEQ ID NO: 209671 - DNA, 569 bp, Homo sapiens
aggctggagtggtgcaatcatagctcactgcagcctcgaactcctgggctcaagaaatcctccttcttcagtctcctaatgcactggggttacaaatgtgagtcatcatgcttagcctaacgtcaatgtttatcccatatcatttacaaatttgcgatgaatccaatttgagatgctcataaacataaatatgaaacataaatataaaaactaatactataaagcatataagagaacaatcttgcatcttagggaggcaaaatattacatctttagggaggcaaaaatatttcagacaaaacaaacagaaaatgtagccataaaggaaaaaattatataaatagggcttcctcaaaataagattttctattcatcaagagaaagcattgaaaaaaattaaaaggcaggacacagaatcagaggaattatttttaatacatacaaatgacttagaagatcttaataagtartactattcagtaataaaatgtctaacagcctctccccaaataggcatgggtcttgaatatcttacaaaggaagatatgcaatgtcacatgaacaggcac

SEQ ID NO: 209672 - DNA, 343 bp, Homo sapiens
aaaaagccaaactatgaagcttcaaagacargatgttaccttgtgcaaaaccctgacttggggaaaaactgtgtttcaagagtggaaagagccctgtctcattaggagtgagggtcttgaatggtgcctgtggttgtagacagcagagcagagctttagcatcctggagatttgtaattgtactccacaagtaactaaaggatttaaggcagaggagggaaagaatcttgcttacattacaaaaaataaaaaagaaaaagaagaaataaaaaaatagaaaaaaatgtaatatatattattattattacattggtttatagtaattggtttatatctaatttgt

SEQ ID NO: 209673 - DNA, 343 bp, Homo sapiens
aaaaagccaaactatgaagcttcaaagacaggatgttaccttgtgcaaaaccctgacttggggaaaaactgtgtttcaagagtggaaagagccctgtctcattaggagtgagggtcttgaatggtgcctgtggytgtagacagcagagcagagctttagcatcctggagatttgtaattgtactccacaagtaactaaaggatttaaggcagaggagggaaagaatcttgcttacattacaaaaaataaaaaagaaaaagaagaaataaaaaaatagaaaaaaatgtaatatatattattattattacattggtttatagtaattggtttatatctaatttgt

SEQ ID NO: 209674 - DNA, 595 bp, Homo sapiens
ttgtccttttttttttaataggaccttcccattttcacttacagttttgaatacatttatacatttccttcttcaaacgtcatttaaattaaaagtgtttctattttctccagatggagtttcaatgctcataaacatttacattaggagagaatatagtacctattatctaacttaagttgaaaaagaatgaaactgtaaaatatatttaccaaaataactaaagatttatttatcttcrgtaggcctcaattagtttacctttaaaaagcattcattgatacaaattgtaaaaatccatgtaacagacatcaatcaaatgtgatttttctccagtttattattttctgccaggggaaataaaatgcaataatcacattttaaatatacatctttttaaatgattctgttgttatacatatgattgttattaatatttttactattattgaatgcccctgtactgacctttccaatttgatagtgcagtaagaaataaacttttttttaatattgagaattggaaatgacctggtaatttctttgtactagagaccactaattgtccatataatgcattctttcattttgttta

SEQ ID NO: 209675 - DNA, 595 bp, Homo sapiens
ttgtccttttttttttaataggaccttcccattttcacttacagttttgaatacatttatacatttccttcttcaaacgtcatttaaattaaaagtgtttctattttctccagatggagtttcaatgctcataaacatttacattaggagagaatatagtacctattatctaacttaagttgaaaaagaatgaaactgtaaaatatatttaccaaaataactaaagatttatttatcttcagtaggcctcaattagtttacctttaaaaagcattcattgatacaaattgtaaaaatccatgtaacagacatcaatcaaatgtgatttttctccagtttattattttctgccaggggaaataaaatgcaataatcacattttaaatatacatctttttaaatgattctgttgttatacatatgattgttattmatatttttactattattgaatgcccctgtactgacctttccaatttgatagtgcagtaagaaataaacttttttttaatattgagaattggaaatgacctggtaatttctttgtactagagaccactaattgtccatataatgcattctttcattttgttta

SEQ ID NO: 209676 - DNA, 595 bp, Homo sapiens
ttgtccttttttttttaataggaccttcccattttcacttacagttttgaatacatttatacatttccttcttcaaacgtcatttaaattaaaagtgtttctattttctccagatggagtttcaatgctcataaacatttacattaggagagaatatagtacctattatctaacttaagttgaaaaagaatgaaactgtaaaatatatttaccaaaataactaaagatttatttatcttcagtaggcctcaattagtttacctttaaaaagcattcattgatacaaattgtaaaaatccatgtaacagacatcaatcaaatgtgatttttctccagtttattattttctgccaggggaaataaaatgcaataatcacattttaaatatacatctttttaaatgattctgttgttatacatatgattgttattaatatttttactattattgaatgcccctgtactgacctttccaatttgatagtgcagtaagaaataaacttttttttaatattgagaattggaaatgacctggtaatttctttgtactagagaccactaattgtscatataatgcattctttcattttgttta

SEQ ID NO: 209677 - DNA, 585 bp, Homo sapiens
aacctttgtattccccaaaagagaaagagatattacataaccaaattccaagtatgattaaccaatatttttctaaaatgttccacttctcaattctgtctactaatttgaaataactgagcaaaatacatttgcaacatgataattcttcaaactcggctcttataccaagcagtactgatgattggggcattaamaaaaccaataaaattgttttgcaaaacaaaaacgaagtgaaaaatatgctcagcttatcttacacaatattgttttctatatcaaaaatggctagatagccttagaaaaaatggcatatacattatttacctaaaagttgtagtaatctgggtagaagcttaaagtgacctatcctgtcatatagttgtcattaactaggatattaattattcttaaaaggatgcaaaatttttccaagggatgtgcatctgcagacagttttaagggactattgtcaagaactgtgaaggatctgagcttacaagttagcctgcttcagttttatggatgttggcagaagacacataactgtttggtcagagacagaaagacttccattatttgcag

SEQ ID NO: 209678 - DNA, 585 bp, Homo sapiens
aacctttgtattccccaaaagagaaagagatattacataaccaaattccaagtatgattaaccaatatttttctaaaatgttccacttctcaattctgtctactaatttgaaataactgagcaaaatacatttgcaacatgataattcttcaaactcggctcttataccaagcagtactgatgattggggcattaacaaaaccaataaaattgttttgcaaaacaaaaacgaagtgaaaaatatgctcagcttatcttacacaatattgttttctatatcaaaaatggctagatarccttagaaaaaatggcatatacattatttacctaaaagttgtagtaatctgggtagaagcttaaagtgacctatcctgtcatatagttgtcattaactaggatattaattattcttaaaaggatgcaaaatttttccaagggatgtgcatctgcagacagttttaagggactattgtcaagaactgtgaaggatctgagcttacaagttagcctgcttcagttttatggatgttggcagaagacacataactgtttggtcagagacagaaagacttccattatttgcag

SEQ ID NO: 209679 - DNA, 585 bp, Homo sapiens
aacctttgtattccccaaaagagaaagagatattacataaccaaattccaagtatgattaaccaatatttttctaaaatgttccacttctcaattctgtctactaatttgaaataactgagcaaaatacatttgcaacatgataattcttcaaactcggctcttataccaagcagtactgatgattggggcattaacaaaaccaataaaattgttttgcaaaacaaaaacgaagtgaaaaatatgctcagcttatcttacacaatattgttttctatatcaaaaatggctagatagccttagaaaaaatggcatatacattatttacctaaaagttrtagtaatctgggtagaagcttaaagtgacctatcctgtcatatagttgtcattaactaggatattaattattcttaaaaggatgcaaaatttttccaagggatgtgcatctgcagacagttttaagggactattgtcaagaactgtgaaggatctgagcttacaagttagcctgcttcagttttatggatgttggcagaagacacataactgtttggtcagagacagaaagacttccattatttgcag

SEQ ID NO: 209680 - DNA, 380 bp, Homo sapiens
tatctggacttcactgggagaattatgagtggccagagatactacattttgagctggatgccagaccttgaaagaactctgcatttttcattttgagagaagtcggtgtgttttataatgggaggaagattaaagcaggtattttggcatcagaaggactgaccttgacagagattggtgagataacattatttctttctttggaccacaagraaatgctgtatttttcagcctcaattgcaggtaggatgagaccatttcactggtgaatgaaatgtaggtagaagttatatttcccacttttagactgagctataagatacctcacgcaatgcttctcatactcctctttatattaaatgcagaggattcagtgaaaa

SEQ ID NO: 209681 - DNA, 380 bp, Homo sapiens
tatctggacttcactgggagaattatgagtggccagagatactacattttgagctggatgccagaccttgaaagaactctgcatttttcattttgagagaagtcggtgtgttttataatgggaggaagattaaagcaggtattttggcatcagaaggactgaccttgacagagattggtgagataacattatttctttctttggaccacaaggaaatgctgtatttttcagcctcaattgcaggtaggatgagaccatttcactggtgaatgaaatgtaggtagaagttatatttcccacttttagactgagctataagatacctcaygcaatgcttctcatactcctctttatattaaatgcagaggattcagtgaaaa

SEQ ID NO: 209682 - DNA, 343 bp, Homo sapiens
taatataatctaaacctgctttaaagtccgagtgtagtttatgttatatgttcctgtaattatttgtcatctgtggctcaaatcccttttactaaaatactttgcacttcaccataaacaaacttgtgcaaacaaacaagacacagaagcgatataaaactcccaaaatcaagttactaagtttcagtaacaaataaacctgaatgtrtaattaaatagattataataatgctgaaaattctgtattttaggttctttatgatctagagttcttcacatgtatttagtaaaccattccaagtgctatatttcttgctaataaaaccaaataacaatgttcagg

SEQ ID NO: 209683 - DNA, 397 bp, Homo sapiens
agaacctaaataagtgctattcatctattcagagctrtttcaaaaaattaagtgaatgttttcttcagtattctcagtcaaatcttgcttcatacttattataaataccctgaaggagtcataccaatgtgttctctgtaaatgccatgaacaacactttgtttttgtataacggttttcatgactattgtattaatagcacatttaataatatttcaataggtcaaaattatgtcatatgttttcttacaaatttttgtcattttttagaattaatgctacagcccagaaaataaatattattatgaaagcttgtttgtaaaaactttcagtaattttatatctttttggtaagattagtggcttctattgtatatatttacaatggatatcaatg

SEQ ID NO: 209684 - DNA, 336 bp, Homo sapiens
atcaatcccactactggttaactactcaaattaaaaaaagtcattgtatcaaaaatacayctgcatgtatatgtttattgcagtacaattcacaattacaaagatacagaaccaacctaagtgctcctcaaccaatgagtggataaagaaatgtggtaaacatacaccatgacatactactcagccctaaaaagaatgaaataatgtcatttgcagcaactccaactggagctggaggccattattctaagtgaagtaactcaggaatggaaaaccaaatatcatatattctcacttttaagtggtagctaagccatgggtatgcatacagagtgg

SEQ ID NO: 209685 - DNA, 577 bp, Homo sapiens
tctttgctgagagctttcctttaacttaataaattctatacaattcagaacaatgtgctctccctccgtttttagagacatgtcccttaccccaacctccaatggccacaggtacacatgtgagacaaatgggagagtggcaactcccaaccccctcccctcccgtctggggcacatagccaagggccccacttggctaggtggccagcwtttcctgctcactcttccctctccccatgcacccacagtgtctttcctcccctggctgagccagaaaggaggagacagcaattaaaatgttctctccctataggaggaactcatttgcataagaataaaaggtttctcctccaggcatcttccccaccctgcacttaagctgttttattttatttttttttcttttctccactttgtaaggagttaacttttatgagaggttttttgttggtttttgtttttgttttttcttattaggccaggaccccaattcccaagacagccttttctctcccttgtttaaggaagacccagctccaaagctttaggttagcatgactcattgctgccgattagg

SEQ ID NO: 209686 - DNA, 547 bp, Homo sapiens
ttggggtccttacttcattcacaattctagatagtcttctagttatgacaaagtctaagaattttatttttaaataaattattatcatatttttctgttaccattttttggttggttttccatgcagtttgtgcctacttccaggaggaagacacctacacacatttactcttctctrctttctttacaaatttgaatatgaaaaagagagccaggaattgccaaaagctggttactccaagaccctaggcattctgtcaaaatctaacttggatgatcatgtaaaatacttatcattttattaatatcagtatgttcattcaaatggtaacaagattttcacttgatttctaaatcactgatcttaagtgaaaaatatcaaaatagaggacttcacaaatattatcatttagaacatcctcactttaaacaacctaaagttatttttaatgttgaatcaatcatactctgaccttctccataggaaaggaaaatgtaaatatcccagacagcagagagcaaactgtcataaaaataaaactgtact

SEQ ID NO: 209687 - DNA, 547 bp, Homo sapiens
ttggggtccttacttcattcacaattctagatagtcttctagttatgacaaagtctaagaattttatttttaaataaattattatcatatttttctgttaccattttttggttggttttccatgcagtttgtgcctacttccaggaggaagacacctacacacatttactcttctctgctttctttacaaatttgaatatgaaaaagagagccaggaattgccaaaagctggttactccaagaccctaggcattctgtcaaaatctaacttggatgatcatgtaaaatactyatcattttattaatatcagtatgttcattcaaatggtaacaagattttcacttgatttctaaatcactgatcttaagtgaaaaatatcaaaatagaggacttcacaaatattatcatttagaacatcctcactttaaacaacctaaagttatttttaatgttgaatcaatcatactctgaccttctccataggaaaggaaaatgtaaatatcccagacagcagagagcaaactgtcataaaaataaaactgtact

SEQ ID NO: 209688 - DNA, 547 bp, Homo sapiens
ttggggtccttacttcattcacaattctagatagtcttctagttatgacaaagtctaagaattttatttttaaataaattattatcatatttttctgttaccattttttggttggttttccatgcagtttgtgcctacttccaggaggaagacacctacacacatttactcttctctgctttctttacaaatttgaatatgaaaaagagagccaggaattgccaaaagctggttactccaagaccctaggcattctgtcaaaatctaacttggatgatcatgtaaaatacttatcattttattaatatcagtatgttcattcaaatggtaacaagattttcacttgatttctaaatcactgatcttaagtgaaaaatatcaaaatagaggacttcacaaatattatcrtttagaacatcctcactttaaacaacctaaagttatttttaatgttgaatcaatcatactctgaccttctccataggaaaggaaaatgtaaatatcccagacagcagagagcaaactgtcataaaaataaaactgtact

SEQ ID NO: 209689 - DNA, 547 bp, Homo sapiens
ttggggtccttacttcattcacaattctagatagtcttctagttatgacaaagtctaagaattttatttttaaataaattattatcatatttttctgttaccattttttggttggttttccatgcagtttgtgcctacttccaggaggaagacacctacacacatttactcttctctgctttctttacaaatttgaatatgaaaaagagagccaggaattgccaaaagctggttactccaagaccctaggcattctgtcaaaatctaacttggatgatcatgtaaaatacttatcattttattaatatcagtatgttcattcaaatggtaacaagattttcacttgatttctaaatcactgatcttaagtgaaaaatatcaaaatagaggacttcacaaatattatcatttagaacatcctcactttaaacaayctaaagttatttttaatgttgaatcaatcatactctgaccttctccataggaaaggaaaatgtaaatatcccagacagcagagagcaaactgtcataaaaataaaactgtact

SEQ ID NO: 209690 - DNA, 578 bp, Homo sapiens
gtaaagctaacccatgtaaaccaaactaggccaggaattagactatattagygccccagactcccccaagtgtcccttcctaaaagaagctcctctcaccctaagttttatgtataatttttttgctgtgcttcaaaaaggtatagcatgtatgcatctctgaacaacataccttagtgttttttggcctgctttgataattactatgaaatcctctttctgtattattttgtgccacactccttttgttcaacatatgtttatgagtgacagccctgttgttgcaagcagttgtaatttatttattttcactgctctataatatttgattgtttatatagatgagaattttctattttattccttatatacatttgtgttattttaaagtttggttgcttaggagcaaagtcaatatgaaaatacttggacatatgctctcagaattatatgcataagtttatctacaacatataactatccaaggaattttaggagcaaacatatgtggatacttatttaatcacagactaactttttttcaaatcagttgtatcaatttatacttcttcctgtgg

SEQ ID NO: 209691 - DNA, 578 bp, Homo sapiens
gtaaagctaacccatgtaaaccaaactaggccaggaattagactatattagcgccccagactcccccaagtgtcccttcctaaaagaagctcctctcaccctaagttttatgtataatttttttgctgtgcttcaaaaaggtatagcatgtatgcatctctgaacaacataccttagtkttttttggcctgctttgataattactatgaaatcctctttctgtattattttgtgccacactccttttgttcaacatatgtttatgagtgacagccctgttgttgcaagcagttgtaatttatttattttcactgctctataatatttgattgtttatatagatgagaattttctattttattccttatatacatttgtgttattttaaagtttggttgcttaggagcaaagtcaatatgaaaatacttggacatatgctctcagaattatatgcataagtttatctacaacatataactatccaaggaattttaggagcaaacatatgtggatacttatttaatcacagactaactttttttcaaatcagttgtatcaatttatacttcttcctgtgg

SEQ ID NO: 209692 - DNA, 507 bp, Homo sapiens
caattttccttaactcatcatctgtcttatgaaatactaacatatgtgcaataaaatgcaacaggatgtcaattacagctttttaaaaatagtcaaaagcccattaaatagattaaatgtccaccaatagagaaatggctaagtaaatatgacatatctaagagttaaagaaatgataaagattaacrtgtgttgaatcactaagatttccaatacatattaaattgaaaaataaaaacacattattgtggttaaaaatacacaaagtattagattatcaaatcagactcacatgcatcggagatcttatgcaaacttaactaataattttatggataaaaattattgtgaggtacaggtggagcaaggtaaggtcagatagcactgtgagaatccctgggtcctttcctcccacatcaggtatgctttgaacaaggataatagatgatgattctgagtaagatgtgcggtcatctcacttacacagaggagatatttagatcacaa

SEQ ID NO: 209693 - DNA, 507 bp, Homo sapiens
caattttccttaactcatcatctgtcttatgaaatactaacatatgtgcaataaaatgcaacaggatgtcaattacagctttttaaaaatagtcaaaagcccattaaatagattaaatgtccaccaatagagaaatggctaagtaaatatgacatatctaagagttaaagaaatgataaagattaacgtgtgttgaatcactaagatttccaatacatattaaattgaaaaataaaaacacattattgtggttaaaaatacacaaagtattagattatcaaatcagactcacatgcatcggagatcttatgcaaacttaactaataattttatggataaaaattattgtgaggtacaggtggagcaaggtaaggtcagatagcactgtgagaatccctgggtcctttcctcccacatcagrtatgctttgaacaaggataatagatgatgattctgagtaagatgtgcggtcatctcacttacacagaggagatatttagatcacaa

SEQ ID NO: 209694 - DNA, 306 bp, Homo sapiens
tcaatatccatgtgataaattgagttagaaagccaatgagagcttagctaatataaaggtgatggaattcactatcaaaacttytcagagacttagaaaaaatatggaaaattagtgaaaatgtaagagaatgaggctcgaaatcaagataattaaactgcaaactttaagaaggcaggaaagatatcctttacttagtttgtcttgtccaactaatggttagttgaatgccatgcacataacacatccctctgagtacttattgaataaatgtagaatgtcattctggaataaattgaggcaaga

SEQ ID NO: 209695 - DNA, 306 bp, Homo sapiens
tcaatatccatgtgataaattgagttagaaagccaatgagagcttagctaatataaaggtgatggaattcactatcaaaacttctcagagacttagaaaaaatatggaaaattagtgaaaatgtaasagaatgaggctcgaaatcaagataattaaactgcaaactttaagaaggcaggaaagatatcctttacttagtttgtcttgtccaactaatggttagttgaatgccatgcacataacacatccctctgagtacttattgaataaatgtagaatgtcattctggaataaattgaggcaaga

SEQ ID NO: 209696 - DNA, 306 bp, Homo sapiens
tcaatatccatgtgataaattgagttagaaagccaatgagagcttagctaatataaaggtgatggaattcactatcaaaacttctcagagacttagaaaaaatatggaaaattagtgaaaatgtaagagaatgaggctygaaatcaagataattaaactgcaaactttaagaaggcaggaaagatatcctttacttagtttgtcttgtccaactaatggttagttgaatgccatgcacataacacatccctctgagtacttattgaataaatgtagaatgtcattctggaataaattgaggcaaga

SEQ ID NO: 209697 - DNA, 522 bp, Homo sapiens
ataaaggtgatggaattcactatcaaaacttctcagagacttagaaaaaatatggaaaattagtgaaaatgtaagagaatgaggctcgaaatcaagataattaaactgcaaactttaagaaggcaggaaagatatcctttacttagtttgtcttgtccaactaatggttagttgaatgccatgcacataacacatccctctgagtacttattgaataaatgtagaatgtcattctggaataaattgaggcaagaaactagaggratagcagtgtgaaaagtgagattaatttatttggtatagagtcagtaaatttaagtgggccatttgaaacaacaagcttaaaagaaaaccaaataagcattttcaatgcatagaaatgcaaccatttttctccttctgtactttatccattcaaacattgcttgaaaaaaaatataactttcagtcttgcttttttatctccaccaaactcagataattttggtcgttgatgacctttctaagctaattcctatttta

SEQ ID NO: 209698 - DNA, 516 bp, Homo sapiens
gcacataacacatccctctgagtacttattgaataaatgtagaatgtcattctggaataaattgaggcaagaaactagaggaatagcagtgtgaaaagtgagattaatttatttggtatagagtcagtaaatttaagtgggccatttgaaacaacaagcttaaaagaaaaccaaataagcattttcaatgcatagaaatgcaaccatttttctccttctgtactttatccattcaaacattgcttgaaaaaaaatataactttcagtcttgcttttttatctccaccaaactcagataattttggtcgttgatgacctttctaagctaattcctattttagaatgctatggacgaatgaatctcaaaacttcttttaaccaatttattttattccatttcctaaggaatagaaactttttacctccaacccaggggagctatgaaayaaactccccatttatttccaatccaaacacatttgataaaacaggcagaggaattttttatcagatctg

SEQ ID NO: 209699 - DNA, 641 bp, Homo sapiens
aggagtcaagaaatatcttgggaagctttttcaaataacacgcagtccctttaccatctgcctaattgaggaccactggtatactatgttggtatctagagctaaataataatgatcaagttgatggcaccatgtggctttagttactggccattgctaacagttttctttttgccagcagagaatgttaattttgctatggattttagcaaaactacacttgtgcacaattgctttattagagaaatgacaagagataaccatatgcagctctcaaatgacccacattataatgtctagtacatgggcgaaaattctgttttcttatttattattcatttattcatccattcaataaatatttaaatgcatgcaaaaatgagttcatgatttcttttctctgaagatatttaaaacttagtattgggagggagaaaagctagcactggtattcagatggcgaatgttgctgagatgggmttaatgaagcctcttaggatcagttggactgctagcaaatgcttcatttcctgtggatttctcccctcacaagctgagcagagcttcaacagttctcacaacaattatcacccacttgtcctgtaggtctcaagtttttttgcattcatcaggttgaagga

SEQ ID NO: 209700 - DNA, 501 bp, Homo sapiens
tattctaggtatattgatattactagaactttgaaagtgtgctaacgactgaataaatgcaaacaagccaggattagtatgattaacttttcagaagatgcatttcagtaagtatacaaaggcttgggaaaaaatttgtgattgtattttcaaaaaataggaaaagggaattatcctgaattaaaaatgctaaatatatttatgctatgctagaaattatcttaaggtgatttatatttatgtatgtataygtataaaggaaaaaacaaagcataggtctatattcttttaatttagtatgctgtcaaatcttcataatatctttaataattactattgattaataagacatttctgtttcaagtggttttctaataggagttagtgagcatcatttctgtatacacctaatcagaaaataatgtgccaaatgaaaacttgagttctacaatagtccaagagaaaaagttactttaaactcgtcctttgacaaataatata

SEQ ID NO: 209701 - DNA, 501 bp, Homo sapiens
tattctaggtatattgatattactagaactttgaaagtgtgctaacgactgaataaatgcaaacaagccaggattagtatgattaacttttcagaagatgcatttcagtaagtatacaaaggcttgggaaaaaatttgtgattgtattttcaaaaaataggaaaagggaattatcctgaattaaaaatgctaaatatatttatgctatgctagaaattatcttaaggtgatttatatttatgtatgtatatgtataaaggaaaaaacaaagcataggtctatattcttttmatttagtatgctgtcaaatcttcataatatctttaataattactattgattaataagacatttctgtttcaagtggttttctaataggagttagtgagcatcatttctgtatacacctaatcagaaaataatgtgccaaatgaaaacttgagttctacaatagtccaagagaaaaagttactttaaactcgtcctttgacaaataatata

SEQ ID NO: 209702 - DNA, 627 bp, Homo sapiens
gaagtcttgttcgaacacatattgccacaattacagttagagacttcatcaccccctcagtgactgataaaatcactagacagaaaattagcgaagatataggagaacagaagaacactatgaaccaagaggatctaaatgatatttctatcaacagcagcaggatcacattcttttcagaaggctgtggaacataggccaaggtggaccaacatgctgggtcataacacaaacctcaacaaattcataaaaattgaaatgatatatgttctatgacaatcatgaaatcaaattggaaactaacaatagaaagacaacagctaaatctccaaacacttgaaaataagacaacactgtccaaataatctatagtgyaagagaaaaatctcaaaagaatttttaaaaattcatagaactaaattgaaagtgaaaatacgacataataaatctgtggaatgcaaataaagcagtgctgagaaggaaacatgtttgtattagaaaatagaaaagtctcgaatcaataatctaagttcctaccttaaaaaaacagaaaaagttctccactctcactgctccacttgactagcctaaaacaaaacaaaacacagaaaagggtcaaaataaacc

SEQ ID NO: 209703 - DNA, 575 bp, Homo sapiens
agggcaacaattgtagaaatcatgtttgcaattcggtaaaggtgaccagcagtttggtcaagaccaaaatcagcctactatagccaagtgacctcttagaacaattatatgaatttcacagaccagtaagaagccaccactaagcagaggcactcctgtgcacaacctgccmctttaaaaacacatattgccttcatgtgataagtgtgtaggcctttgataatggtaattctcctactcagatgctggcccaagaatgggacatgttcgccctatcacttctgtttccccatgtaattaagaactgaccacttgtagatgtggacccttatttggaaaaagggctcatgctctagaggacatgtcagacttctttatagatatcaacctctttgcattatttaacatttttgtatttcaagcctcttttcaaaataaattataagctaacatacttgttcatcgggcatgtttgtggaccctagacacgcatcagtattagtttcttacttccccttcaattcactggataatagatcttagtgctgaaatgcttctttcaattaaacttgcag

SEQ ID NO: 209704 - DNA, 488 bp, Homo sapiens
tacaatgacaaggggctaagtacacacctcacttatatttaacatagggaaagaagagattgtcaataaggygcttatacttagagatggaaaattttgagtgggtttatttgctgtgtggtgtttggtgttaagcgtttctgtttacatgtatgtttgagggttttactccttacaatagagtaaatctcagaaaggcacagaatattgcactgatctgaacaaattattttttaaagccatcaattaaaataataaaattataaacaattgggggaatgcagaatatgtatatatctttttatatctcagtacctgtgaagagcacagaacacctctgattaagcatttgtttaaattaagaaattaatttatagtaaaaatgccaagaggaattaatcaaaaattatcatgtataattcatttccagatcatggaatatatttgcggctaaggaaattatttggctatctactgtaattcttgga

SEQ ID NO: 209705 - DNA, 615 bp, Homo sapiens
aatgccaaagttaggaaaaatcaactctaaaaattgcaatggggcacataaaatcaggttaacacaaaaagaataagatatattattatttctttcattgttatttttggatttctgttctctgtgttttttctaagtagtttcctaaaacatcaatgtctctgtctgattccaacttcccaaatgrctttatcccaattactcctccctgccacacctgcttcagaaaacttaatcttcaaaatgctcctgaaatggaactttctctatagactttttaccctctgaataataagtacctcccactcatcctccactcctttctggagttaagcaagttgattataaagttcattttgagagaacaaataaaccaaaatacccaggaaatcaaagagcaacagtgaggagtctagtcctgcctggtatatcacataccacagtgcctcaagtaccacaaagtgcttaatgcacagaacaatcaaacaaaatgtaaaaccctgaagcagacccaattgcatatggaaatctagtatatgataagggcagcatgtcaagtcagtgaagaaaaagatggactttttagcaagtagcattggaataactagagaatta

SEQ ID NO: 209706 - DNA, 568 bp, Homo sapiens
gtagtggctacattaatatcagacatcagaacaaggagtataaccaagagttaagagaagctttttttttgtttctttttttttttttttttgagacagagtcttactctgtcacccaggctggagtgcagtggtgmaaccttggctcactgcaacctctgccctccgggttcaagcaattctcctgcctcagcctcccgagtagctgggattacaggtgcctgtcactgcgcctggctaattttttgtatttttagtagagatagcatttcaccatcttggccaggctggtcttgaactcctgacctcatgatccacccacctcagcttcccaaagtgctgggattacaggtgtgagccaccgtgcctggcctaagagaaacatttgataatgacaaaatgaaacaggtgaatgtgtcaagaaaatttaacaattttaaatgtgcattcacttactgataaagcttcaaaatacagaaagcaagaattagcagatgtgaaaggtgaatacataatctataattatggttggagattttaacacccgtctcctagtaatcgatagaat

SEQ ID NO: 209707 - DNA, 396 bp, Homo sapiens
tataatgtgtgagatgaagaatatacaaaatgaggttaatgacagatgagacactgcagaaaaaaagaaaggtgaacttagtgacatagcaatagaaattatgcaaactaaaacacaaaagagaaaaaggactagaaggaggagtaggaaaacagtaacaacaatacattatmaatgaactctgaggcaattccaagtggtttaatatatgtgtaatgtgagtctctgaaggaggggagaggagatcagaaaaaaatatttaaagaaatactggctgaaatttttccaaaattagtgaatagtgtaaatccagaagtccaagatcaacaaaccgtaattacatgagaaaaaattcactaaactacatcacaatcatattgctcaaatccagggata

SEQ ID NO: 209708 - DNA, 391 bp, Homo sapiens
aatatacaaaatgaggttaatgacagatgagacactgcagaaaaaaagaaaggtgaacttagtgacatagcaatagaaattatgcaaactaaaacacaaaagagaaaaaggactagaaggaggagtaggaaaacagtaacaacaatacattataaatgaactstgaggcaattccaagtggtttaatatatgtgtaatgtgagtctctgaaggaggggagaggagatcagaaaaaaatatttaaagaaatactggctgaaatttttccaaaattagtgaatagtgtaaatccagaagtccaagatcaacaaaccgtaattacatgagaaaaaattcactaaactacatcacaatcatattgctcaaatccagggatacagaaaaaattgta

SEQ ID NO: 209709 - DNA, 590 bp, Homo sapiens
gtctcctcttttatttttttcatatggctatgcaatttattttccttggcaccttttgttccatcaacatgtgacaaaatarggatagagataggggagaaggatccaactgggggctttaagcctttcctacagctgcaactgttctctccaaagagcaagggtcactttcttaggattcctaccgtgtctgcaattttttaaaaaaaactttctgtgaggttcttggagaagaacctatgaatgagtatgaattccccttgtgtctgtgacccccagggtttttagagactcttgttcgcttataataaacctttagcaattagttaaaaaatttagcttactttttcttaccattgtccagtagtatctgtttcaggtaagcaagtgcttgtgactcttctgtccttagattttggattcgttggtcctgcagcctcagctgtataagttcaagaaccgtggtgaatttgcatattgtctggtgtttgttgttattgtgagggtgggagcagtgctttttaaatctttctacattgtaagcagaagctggaaatctaggttcctttttattcttgataagaaatact

SEQ ID NO: 209710 - DNA, 590 bp, Homo sapiens
gtctcctcttttatttttttcatatggctatgcaatttattttccttggcaccttttgttccatcaacatgtgacaaaatagggatagagataggggagaaggatccaactgggggctttaagcctttcctacagctgcaactgttctctccaaagagcaagggtcactttcttaggattcctaccgtgtctgcaattttttaaaaaaaactttctgtgaggttcttggagaagaacctatgaatgagtatgaattccccttgtgtctgtgacccccagggtttttagagactcttgttygcttataataaacctttagcaattagttaaaaaatttagcttactttttcttaccattgtccagtagtatctgtttcaggtaagcaagtgcttgtgactcttctgtccttagattttggattcgttggtcctgcagcctcagctgtataagttcaagaaccgtggtgaatttgcatattgtctggtgtttgttgttattgtgagggtgggagcagtgctttttaaatctttctacattgtaagcagaagctggaaatctaggttcctttttattcttgataagaaatact

SEQ ID NO: 209711 - DNA, 519 bp, Homo sapiens
aagttctgttgtccttacattgtaaagagcactggacgagcaggtaggggatgaggattctgtcatttataggtacagagcaggcactctggctctctgggtctttttatccttgactgtgtgtattgtgagtaattattatttcaacagggtcttgggaagctcaaataaatccatatatgagatagaacttaaattttatatgtattattttactttatttattcttgaaatatctaacaaacttaataatgacacaaacctgttagtttgttgtaacaatttattcagtgtttagcaccagccctgcaccttgtaagcatgtaagtggtgatttactgttagaaatgatagcttttgctgtttataatactttgctattaataataataatawatatcaagtattttaaaactgtaaaactgcacaaatgcctgtttttgagcttattctacaaaaatataagcacttattattgtcagatatgatgcaataaaagtaacttaggcaatatttaca

SEQ ID NO: 209712 - DNA, 572 bp, Homo sapiens
tatacttttctaatttttctgaaatgcaattcttctaaaaattaaacttttagctcaagaaattttgttgtgactaattttaaaaatcctgatttatttaggaatactgttttcagagagaagctatctccagtgagttctgaagatagtatctttttcttgttctatagaatttttgtttcagatgccctttattgggttttatatgttcactcatcatcaaatgagatgtatttagacatagatttttcaatgtgtatgtgacctggattaaccttagccactttttaaatttttcgtgggtacatgagatgttttgatacaggcatgcaatgtgaaataagcacatcctggggaaggggacatctatctcctcaagcatttatccttttacttacaatccagttatactcttcaagttatttaaaaatgtaccattcagttgttattgactatagtcaccctattgtactaycaaaaagagggtctgtcttcttaacttcctttggttactgatagatgcagtggtctgaagccagggctgtggggatgcatagtcccatgactgactg

SEQ ID NO: 209713 - DNA, 385 bp, Homo sapiens
ctggaaatgccctaaatcacttcataagcctgtggtgtcagcatgaatactgtggtttgttgtcagaagtaaaagaatacacggtcctctctaccggaaacaaatgtgcccagctctaaccatactaccctgttttttgtttcgttttaaaatgcctcttaaggagaaactccaagaacttacaygacaattttcagacagactatggcattttctttatcctattcagatttgcatgaatgttatgctagaggtatcagttgtataaattcatgtttctaacttctgggtttcaaaaagttgaacatcaatagctgtctcccatcctaattaaagagagtatgcagtaaatccaactgtcactgtgcttcaaatcaacaaaatg

SEQ ID NO: 209714 - DNA, 408 bp, Homo sapiens
caacctcctcagcagcaccttttcttaatttcacaagcttagcagttagctaaactttatgtggtagtagtgctaaattattaaacatatttattaaatcacttyaatataatttgctttattggcccttattattctcttaattttccattaagttcaatttattaaatctaattgcagagatggttaggaggagaaagaaaccaggcagtctgtgcatgttgccacaataaaaggccagcacttcaaatattcaattttccttattatctggggctatgaagctataactggttgcttttactgacgtcagccaaattacatttccctttttacctctatttatacaacaagaggtgaggtttgagtttatttctgaattgttgcaggataagttataacaattaa

SEQ ID NO: 209715 - DNA, 408 bp, Homo sapiens
caacctcctcagcagcaccttttcttaatttcacaagcttagcagttagctaaactttatgtggtagtagtgctaaattattaaacatatttattaaatcacttcaatataatttgctttattggcccttattattctcttaattttccattaagttcaatttattaaatctaattgcagagatgrttaggaggagaaagaaaccaggcagtctgtgcatgttgccacaataaaaggccagcacttcaaatattcaattttccttattatctggggctatgaagctataactggttgcttttactgacgtcagccaaattacatttccctttttacctctatttatacaacaagaggtgaggtttgagtttatttctgaattgttgcaggataagttataacaattaa

SEQ ID NO: 209716 - DNA, 408 bp, Homo sapiens
caacctcctcagcagcaccttttcttaatttcacaagcttagcagttagctaaactttatgtggtagtagtgctaaattattaaacatatttattaaatcacttcaatataatttgctttattggcccttattattctcttaattttccattaagttcaatttattaaatctaattgcagagatggttaggaggagaaagaaaccaggcagtctgtgcatgttgccacaataaaaggccagcacttcaaatattcaattytccttattatctggggctatgaagctataactggttgcttttactgacgtcagccaaattacatttccctttttacctctatttatacaacaagaggtgaggtttgagtttatttctgaattgttgcaggataagttataacaattaa

SEQ ID NO: 209717 - DNA, 515 bp, Homo sapiens
tcttcctgcttataatgcctggtgggaatacacactgccatatggagaatctttttttacctccacctctctctgctcgatagtcatgtttgctagtaattgtggtgcatgaatagatttgagagatgctgataggtcaagtcaaatagataatgactgtctacatctgaaacagttatcaggcattagttggggttgaaagttgttttgtttatttttccccaactgctgtgtgtttccaggtggaaacaagtaayggtgactggccaaatccacattttacctactgcccaagttcttctcttgtttgacaatctaaccaattctgtggattccaaaagacaagctagtttgtcagtggaaagaatccagaactgaaaaataagacctaccactaatattgccccctttattgaaatgtgttcaaaatactaagcctcaacttctttatgtctaaaacaaaaagactggaccaaatgatttccaaggctccctttagccctaaaattcttcca

SEQ ID NO: 209718 - DNA, 505 bp, Homo sapiens
ggaatggatgagagagtaaaaaaagcttaagtcattgtccatttattcatcatctaccatcttggatgatgcctaatgacttacagaactgaatgtggaggtaggtcattccaatccagagtcctggacctgaagatggaggagctatggggcagatgagcttgatatttaatggtgatattgccagagtggttgaccttcataaataatctacctccttgttttgtggggcccagcaaaggtgcatggggccagattcaaatttgtcagaaacctaagcaattggttaacttayaggggtcatttgagaagctgtaatgtgttttctatatcatgtttcatataggtcattaccaattaaaagcattatatgagtagtcattattaaatgtgtgagactgttcattccctcacatagcatactaaaattatggtaggtgagagattccagtaaggtgcttattaatcccgtgttataacgacagtaagcaggaatttttaatcc

SEQ ID NO: 209719 - DNA, 593 bp, Homo sapiens
ggctcatgtgataacatgaatgattttctgtaaaaataccagaacacagatttttttggggaaagtatggtgcttgtatattgacctatatattcagattttcctttctattcaaacttgtaactctcttaggaattcatatttctaaaaatagaaatagtggtttaacagggaactytctcataaatatgcctctttcaaacacattttaatcacacaaggactcatgtaataatttgcatttgatatgtattagaattctgttttattctattgatggggtcttccctatggcaggcactttccaagtgctgtagagcaatagaaaataaagacccccaccctgaaaggaacttatactctaggagatgctgataagcttaaatatcattataaagcaaggcaaagtgaaatatgtgctaatttaaggagcataagcaaagcgcaatagggtttcacagaagagagaaattacctctatttggggaaccccacacaatatttatagatgggatagcatttgatgtagactttataaaatttgccaggttacagaaagaaaagggagaaaaagcattaagatgaaaatgaaa

SEQ ID NO: 209720 - DNA, 593 bp, Homo sapiens
ggctcatgtgataacatgaatgattttctgtaaaaataccagaacacagatttttttggggaaagtatggtgcttgtatattgacctatatattcagattttcctttctattcaaacttgtaactctcttaggaattcatatttctaaaaatagaaatagtggtttaacagggaactctctcataaatatgcctctttcaaacacattttaatcacacaaggactcatgtaataatttgcatttgatatgtattagaattctgttttattctattgatggggtcttccctatggcaggcactttccaagtgctgtagagcaatagaaaataaagacccccaccctgaaaggaacttatactctaggagatgctgataagcttaaatatcattataaagcaaggcaaagtgaaatatgtgctaatttaaggagcataagcaaagcgcaatagggtttcacagaagagagaaattacctctatttggggaacyccacacaatatttatagatgggatagcatttgatgtagactttataaaatttgccaggttacagaaagaaaagggagaaaaagcattaagatgaaaatgaaa

SEQ ID NO: 209721 - DNA, 607 bp, Homo sapiens
aagaagataattagataattaaatacagaaaagcagcagaatattctaaatactcatgagtaaaaaaagaaatcatggtaaaaattacaaaatattttgaattaagtgctaataaaatatggcatatccaattttgtagaatgcagctaaaacaggaagtagatgaaaattcaaaatgtttttgaagtagaattttaaaagtaagtgtggtctatttaaaactttattaaatttctgtattatagccacaaacaattagaaaatcatatataaattgtaccatttaaataacattaaaatcaccacaaataaatgtgatgaayggcgtacaagccatgttttcaagcaactataaaatattatgagagaaatttaagatgaactaaatgaaatctgtaacattcctaaaaagatgcattattataaagatagcaattccccccacatggacctacagtttcaatacaaccctatgcaaatttcaaaagatatttttgtgcaaattgacaagacttttaaaatgcatgtagaaatgcaaagtgcttaaaaatacaaaggcaatctacaaactggagaactacattattggttagctaataaagtagag

SEQ ID NO: 209722 - DNA, 547 bp, Homo sapiens
caagattttctttaattcttacattaatctgaatctacaggtttcctaaccttgtacaaaacatctttgttgtcctggaacttttccaggatttctagattaggagcagacattctcccagtccctgtgaagcagctcccaaaatcgtgagccacaaccgkcttgctaagctaacctattgcctgtggagaaaatgaaagacaaaagaaccagtacctcaattcagcagtggaaaaaccaattagcagtagcttgccccatgatattagttccaccacactttcaagaaaaggagattaatgattttaaagtgggtaagcattttattactgggaaatgtaaatatgtgatacgggagattcagttgttgatgggaaacagtgaagatttttccattccgcctctaatgtactgtttgggatggtttcacctcctctccccacagttccagcagacatctgagcatgctctcttttcttgctccgtggttgatgtctttgctcagctgaatcagagctttgaaattattaagaaactggaatgccct

SEQ ID NO: 209723 - DNA, 540 bp, Homo sapiens
ataaaatgagtcttctttttctctgggtctgtggcaatctgaaaaatgctattgttttgtggtgttagtcttctctgtcaccccatcccagtttatttgtaattctgtactagtaaattcagttgtttccaggattcccatctgatttcctacacttcctgtttctttaatatggatttatcatcttaaaaacctatttattgttcacttcgaggactcagttacttataatcgaagaaattaccatggatttccaaattactcccayttcaaatgtggtgttttctagctgaaagtaagccttggcaatttcacattcaaattgccaagtgttttagcagacattgtagtatagtgcaatgtatattgaacttggagccatgaaaactgatttctgattacaaatcaaccaataattgtaattgaatctcaatagttcaagttttttatgaatttagttttcatatttgacatattgattttgataaaccaagttcatcttaaggccccttctcctcttaaaatctaaaatggcttacc

SEQ ID NO: 209724 - DNA, 568 bp, Homo sapiens
ctggctccttagataacagaattgcatgcctcccccattatctgtattttcaaatcatttttctaacacctgcaakgtattgttgaagtcatttgtttaaatgttggttacatttcctactagatcataatcccttttggagcaaccactgtgtctcttttgctttataatgttagcatccagcacaaggtctggctcatgatacagatttaataaatatttattaaagaaaagagggagaaaacaggtggcacagcagacactaccacagatgctgtcaagtattaaggtgactgaagaatccacagtgcaatcttacaaattagacagtaaatcctgtggtcatccttataaatgctgtcactcatactactttatatacactgttaaagaacagtttttaaaagagagtataattgtgatatccatgcagttataaaatgtgtcaaaatgttattcatcaattagtgagagaaccaggtaagatgttactactgtctcaaaggagaattccagaaaccaagcatatacaagcaataagaaaagctggaatagaggcaagacagat

SEQ ID NO: 209725 - DNA, 572 bp, Homo sapiens
tatacttttctaatttttctgaaatgcaattcttctaaaaattaaacttttagctcaagaaattttgttgtgactaattttaaaaatcctgatttatttaggaatactgttttcagagagaagctatctccagtgagttctgaagatagtatctttttcttgttctatagaatttttgtttcagatgccctttattgggttttatatgttcactcatcmtcaaatgagatgtatttagacatagatttttcaatgtgtatgtgacctggattaaccttagccactttttaaatttttcgtgggtacatgagatgttttgatacaggcatgcaatgtgaaataagcacatcctggggaaggggacatctatctcctcaagcatttatccttttacttacaatccagttatactcttcaagttatttaaaaatgtaccattcagttgttattgactatagtcaccctattgtactaccaaaaagagggtctgtcttcttaacttcctttggttactgatagatgcagtggtctgaagccagggctgtggggatgcatagtcccatgactgactg

SEQ ID NO: 209726 - DNA, 572 bp, Homo sapiens
tatacttttctaatttttctgaaatgcaattcttctaaaaattaaacttttagctcaagaaattttgttgtgactaattttaaaaatcctgatttatttaggaatactgttttcagagagaagctatctccagtgagttctgaagatagtatctttttcttgttctatagaatttttgtttcagatgccctttattgggttttatatgttcactcatcatcaaatgagatgtatttaracatagatttttcaatgtgtatgtgacctggattaaccttagccactttttaaatttttcgtgggtacatgagatgttttgatacaggcatgcaatgtgaaataagcacatcctggggaaggggacatctatctcctcaagcatttatccttttacttacaatccagttatactcttcaagttatttaaaaatgtaccattcagttgttattgactatagtcaccctattgtactaccaaaaagagggtctgtcttcttaacttcctttggttactgatagatgcagtggtctgaagccagggctgtggggatgcatagtcccatgactgactg

SEQ ID NO: 209727 - DNA, 572 bp, Homo sapiens
tatacttttctaatttttctgaaatgcaattcttctaaaaattaaacttttagctcaagaaattttgttgtgactaattttaaaaatcctgatttatttaggaatactgttttcagagagaagctatctccagtgagttctgaagatagtatctttttcttgttctatagaatttttgtttcagatgccctttattgggttttatatgttcactcatcatcaaatgagatgtatttagacatagatttttcaatgtgtatgtgacctggattaaccttagccactttttaaatttttcgtgggtacatgagatgttttgatacaggcatgcaatgtgaaataagcacatcctggggaaggggacatctatctcctcaagcatttatccttttacttacaatccagttatactcttcaagttatttaaaaatgtaccattmagttgttattgactatagtcaccctattgtactaccaaaaagagggtctgtcttcttaacttcctttggttactgatagatgcagtggtctgaagccagggctgtggggatgcatagtcccatgactgactg

SEQ ID NO: 209728 - DNA, 494 bp, Homo sapiens
aaaatactaaatgaagattctcatgtgtaaatatctttgctcatcctcaagcgaagtgtcttataattaaaatcactactgcaaaatattcattaaactttcacacgttggcaacatttttcaaaaatatttaaggaaattgacagtatatactactgtakataatctattctaaaatatagctattttacttttatgatgtaaagatacaatatgtaatgtaattctgaaatatattgggcagccctagttttgctcaaagtgggtattgaagtgactaatataaaaatagaacgagcgtattgttaacaaaatgctaatcctttaatttcatctttgaaattacccctgcattcaggctgtttttacaatgtaaaaccaacaaattgagccactcattgtaaagaactctaagccagttgttggaaatcatatagaaaaagcagtaggttttgtgaatagtaagaacatactgacttaatatttaaagtgca

SEQ ID NO: 209729 - DNA, 546 bp, Homo sapiens
ttttacttggagtagctatagaacctttccaagggctacattttattgacgaggtctggctctcaagttttttaatctttggataggtctgtagagctccagataactggataactcaggctatgcaatgtgctttttgtatagtatcttattgaatccatctgacaacccatggaggaaaatgtggttattattgtttccatttacatatgagaaaactgactcttgaagacattcaaggccccacagaaagagaagagctgagacacgaatccagttatcgctaacaccmattattcttctagaaaatcacacttacataaaataagatgctctcaaagattctcttttttaaaaatctaacaacatttagcctgggctcaatataaatgcgacgcgatttcttataccttttatacctatgcccataatacagcacactcataattaatgtttaaaatgatgagccaaatgtattgaaagtctttagttaccatcatagcccctctaatgtatttcataaaccacagaagtggacattttggc

SEQ ID NO: 209730 - DNA, 539 bp, Homo sapiens
acagacaggaacatccttcactcctctcacccccatataactagaataataatgaggaagacatgagatataaaggccaaaggccattcttttcaggtcattgcaagaatatgtaaaatgtgtacctaggagtagatgtgttacatggtttcacatcctatatcctcaattaaacagcaaaaatttacatttacaaaagaactgatcaacctagagttaaaaggccatctcaacaaaaggctttgatatggcatttcaaatttaactatattctagagaatgcctctgaattggttagctcaactattccaatttactcattatgtagtaatgaaccagtgccttagattyaccaccatatctgcccacaattttcagaatactcaggggagccacacagctcatctaattctgatgaggcatctcacctaaaacatgcccctggacaccaagggatatcaaagaggactcaacaaagttaattactattcctaacaaatcagctcatagtacccatctaacctggtggaagatctaaa

SEQ ID NO: 209731 - DNA, 564 bp, Homo sapiens
gaagacttactatgtgccaacaactactccaagggctttccgaggatttactcttttaatactcacaataatgagttagttctgttactattcccattttacaaatggagaaactgagatttagattaagtaatttacccaatgatacacagctacactggcagagttaaaataaatattttttgcatattctaaatatgaattgtgaaccctaaatatgagttatatatacctggacaattctgacaagattggtagacatttaggctwtttccagtttgaaattcttatcagtaatgctgctatgaacattcttgtgcaagcttttgtatggacatatgttttcaattctcttgggtatacacctaggaacagtactgagtcatgtaatagttttatatttaactttttaagaaaatgtctaacttaccacaaatgcaaactgtaaccacaatggatgcataattttacattcccaccaacaatgtatgagggttcttatttctcatcctcaccaacatttgttattttcttcttatttttatagccattctattgagtgtg

SEQ ID NO: 209732 - DNA, 454 bp, Homo sapiens
gattttctgagtgtctaataaatatgccaatgtgcattgtgatcttcagraacactttcactctgggaatattttaaggaactcagttttctttatggtactttttgggaaataatagtcgctggtaataatgagacttggcattactttataaggataaaatctagtgctccttttctctggtccaccttaggccttgggcttcaattctatcatttctgggagtgatggaaatgtgatcttcagatttatggcttgtagacggtgactgactcagacacagctgtggtgaacatgtgcataagagcaggaggtgcagtcatgccctgagacctcaggattatcatcagatgacctgggtttctgtatctgccctactagatgctaattctgtgctcttaaatagttcactagatctctttgtacctcagtttcctcatcagcaaagtaggca

SEQ ID NO: 209733 - DNA, 419 bp, Homo sapiens
tgagaaaattacttaatgcctctgctccttcatttcagtatttctaaaatgaagataataatacatgcgttccaaagggttgttcaagtgaaatagcataagcaaaataactaaaaataggaaattgatttaacaaatataccccatgagtatgaatatcaagccataaatttcggctcagagaaaatataacttctctattctctataactaaacttaacttctaccaggagctccatgctgctagtgrtggggtttgttcttagtctattcagggtaagcaggtcaaatcaggacatccagtctcttatgtccctatggatgtatctgagcactggtgggatgggagggaacaatcacctgcctgaccatcagttgccctatgcccacagtggcattcactgagataccattgattc

SEQ ID NO: 209734 - DNA, 438 bp, Homo sapiens
acatgaaaacatcaacccagcttttattctttctatgaaatgaacagtaaaataattttaaccaatttktggaaatttgaaaataactattttagatataaaactttaaaaaatcaaattcagactttaattgagcaaaatattaagggaatttattaaatactatagtgtcaagcatgacttaaatattgctacaactttgaaggaactcagaatctaatgaaaaatagatatgggaaggaaaagggaaagaaacaagcgtatgttgagtgcatgatatttgccaaacactcagttatgaattttacatatattatattattttcatagatattgttatggctatttaaaaatacaaagaaagtgaagttcagcaaggctaactactttttccagatagctcggctaagaagttgtagaaacagaattcaggcccag

SEQ ID NO: 209735 - DNA, 430 bp, Homo sapiens
ttggaaaattttgctggcgctctgtatatgtctgttttgtagtgaccctaaagagagcagataaactgatgacwagaaggaatgcaggccaccgagcctcctctgattctaaccctatttctcatcttgccctttctcactgctagtcttctgcatcattcactctccaggattctgcctgctcttgccctgtggaggatctgggagtggagatattagaggctctgggcagtaagttggaagacagtgctgcccacacacacagcaggctctgggtgtgggctccactcctgtcttggcagtttctcaaacttctgtaacttaccctgtccactctcctcctgctattctataggattccgtctaggaacaaaagcttacttactatctcatattcttctaaatttcttatctatgctcacatgaattc

SEQ ID NO: 209736 - DNA, 509 bp, Homo sapiens
gcttttcttgcattcatttctttctcctgtgcaaaatattcaaagcaagcacattctttttgagcttactatatattcgcaaaaccacataaagaataacaatgctttataattccratggtgatagtaatattaataaaccaatttccatttttaagcttagtgtatattcacaaaaccacataaagaaaaacaatgctttataattctgatggtgataataatattaataaaccagtttccatttggttctttgatcaactaatcaacatattcattgaactctgcatcaagcatcaggatgtatactttggaaattacagagatgattcaggagcaggccctattcttaaaagtagtcaattctatgggaaagacaaggcccagaggacactggctttaaatatcattgacctagatagccagttttccctcctgaaacatcacaaataccccttgtcactgcccatctgaaacatatttgtgcaataccaaatgcagaccatatc

SEQ ID NO: 209737 - DNA, 594 bp, Homo sapiens
ctcattatcaaacagaagggccaattgtatatgaatgtttatatacacatacatatctattgtgtatgtccacataaacatatgtacacacacacacactcttatggggtgatatcaaaatacttaaccagtgcagtgcaatatgggtatcaattaagaatagataccataaatgacacatatatgtgtgtgttgcgtgtgtacaattgtgttagtatagaaaatgtctagcgggtacacagcatgctgttaacaggaatacctttaggtgtggcaggtgataagaaaaggtggagagacttcatttgctaagccatatagcgctgtcctttgaaaaagaaagtagcacaaacaatstcctgtttgtccagtggtttgcagttttaattatcctgatagttgaagttattcaaggtagttgtagacgttttaatctgactcctacgagaattgctgctattttccaaataaaaattgatccacaaaatgaaagtcgaatactactaggacttgactaggtgtcatgcaagtactagttttggctttttctctgagccttagttttcttatctgtaaaatgagaacattgttttc

SEQ ID NO: 209738 - DNA, 648 bp, Homo sapiens
aactatcctgcttccacaatttatcttctgtccattagagtaggacaagtcccaggttacccaaaccctcwttgtagaatttaaagacagtgccttgcagacaccaacacatttatattcagtatcagattataacaatagcaattccattacactggccagggatgcaatacattctaatgaagattaaggaaatggcagaaaggaaggagaggtttagaggaggcgcccctgggccaagtataggcagcaagagagggcacagagcatgagagaaaatgctgaatggacaaaggaaagagaataggcacagggtggaccatggacccattatctgtttctcacgttcatttccagttttccacaattcttcagttcttattatggggtcttacctgggaagcctttgagggtgtgtttttttctctctgttctacttcctcaagacatctttttacctctacacacgagttttcatcacgaagttcactcttttccccacctccactatctccaataaactctcaatgtaaagttaaactgattgggctgtgggtcagttgcattacatttaaataagcacagagaacatcaaaaacttcaggaaacacagtgcagatatctgcagctaccctttgataaacccag

SEQ ID NO: 209739 - DNA, 421 bp, Homo sapiens
aactctcctataaatctaaacttatctcaaaataataagttaaaaatatgcatatttccaagatttgttcactgaaaaaacctggaagcaatgataacccaagaattatgagtaaacctagcacccaagttttcttgaaatattatttccactaaatgataacagcgcttcctggcacaatggctgattccaggtgtaggacaaaaaatataagagagaaattttgtatttgtcagggttctccagagtaagtgattrtgaaggcaggcaagttctaagatctgcaaggtgagctggcaagctgaggaactaatggttttgttctagtttgagtcctaaagcctgagaaccagcaggctcaagacccagaaagagccaatgttttagtttgagttcaatgactagaaaaaaaggaaatgtc

SEQ ID NO: 209740 - DNA, 391 bp, Homo sapiens
ggcggggtactatctctaattttagtgaaattaactttagttctgggcttgactgcaccctagttctacaacttttttcaagacaatttctctttctccattaatggtcgaaggagtgagtacaaaatgctggtcggatcagctcagaaaccatcttgcaaatgctgtcaggttacttcacatgaagtgctctatgagaaatgaaaactgtcagcctgtgcttgggaatccatacgtttcattgtcaatactttttcagytctgaagtttcatagaaaggaaagaagttgctttccattcctctcttatactttctcaaattctgacacctagaaccctatatgtagtggttttctcttgatgtttttgcaatttgtcagggcccgaagcc

SEQ ID NO: 209741 - DNA, 477 bp, Homo sapiens
ccaggcaggtaattagatcatgatatcaaaattctacccgaattatttccttaccraggaggacagcagtggcatgcaggatgtctgcagcatggtggagttatggtagactttggacaagtggtagttggcttcaatgacttggagctaggcctgaagaggggtttcagaacagttttaaaattcacatattccaaaccagaaaaaggcctttaagcccaggtcaaccaatggccttttatgtgtaacaacctccaatttaaagatgttgaaatcctaactctctttattatcgagtaattaagcaatgtaaaggagatcatcattgatggtgatatggtttggctctgtgtccccaacccaaatctcatgttcaattgtaatccccaatgtttggaggtgaggcctggtgggagggtgatttgatcatggggccggtttcttattggtttagcggtcaccccccagtgctgtcct

SEQ ID NO: 209742 - DNA, 468 bp, Homo sapiens
gtcttcatctttagtggtcagctatgaagaggacagttctgtgatytgcaaaatttcttaaaccctatctaaggcttctgttaccatgacttgggtgttttcttgggctgtgctgataatatttataatccctgtggtgggagactcaatagtcatggagtggacttctgccatggagagatagtaatgattctataggcttagtacatcactgcctcaaggagatatcaaattcacatcaatggactcttccctccttcttttgtatctgaacaaatgaggatctgtataataattgtctcctgaatcatgatgaactttgtgaatgtgattgtggaggccaagaagtcccatgtcatgctctctgcaagctggaggaccagagaagctgatggtgtaactcccacatgcattatctaacatcagtttgagtccaaaggcctgaggaccagaggagctaacggtgtg

SEQ ID NO: 209743 - DNA, 590 bp, Homo sapiens
gggagacatggatattaccactatgtgaccagaaacataacggscactaatttcttatatgtatcttacaggctcaaatctagtattctccaggtcacactgcattcctaggttcaaattcaggttatgcctcccttttgtctccctgtgtcctacttcataggataagagggttgcatttttttaagagaaggtaataactgaagcaaaagggtaacatcgcagcgttcatcgcatttctttctgggaatccaacctgcaacagattctgagatggaaattagcagacagaaggtttattggggagtacttttgggatcctccagtgtggaagggaagcaactggaactaagcagaaggagaagtcaagctacaatgccgtctgggtctaatatcacagccagccctgtgggaagatctaaagataaaattattctgcaaagctgcccagagctggaacaagaagattggggctttttatattcctggacaataatttattggatgcagtctatcccaggaagaggcatgacttttaataagccacaattctgcctctctggggattctcaagaaggctgacagcagag

SEQ ID NO: 209744 - DNA, 590 bp, Homo sapiens
gggagacatggatattaccactatgtgaccagaaacataacgggcactaatttmttatatgtatcttacaggctcaaatctagtattctccaggtcacactgcattcctaggttcaaattcaggttatgcctcccttttgtctccctgtgtcctacttcataggataagagggttgcatttttttaagagaaggtaataactgaagcaaaagggtaacatcgcagcgttcatcgcatttctttctgggaatccaacctgcaacagattctgagatggaaattagcagacagaaggtttattggggagtacttttgggatcctccagtgtggaagggaagcaactggaactaagcagaaggagaagtcaagctacaatgccgtctgggtctaatatcacagccagccctgtgggaagatctaaagataaaattattctgcaaagctgcccagagctggaacaagaagattggggctttttatattcctggacaataatttattggatgcagtctatcccaggaagaggcatgacttttaataagccacaattctgcctctctggggattctcaagaaggctgacagcagag

SEQ ID NO: 209745 - DNA, 647 bp, Homo sapiens
gctaaagataaaacctaaggattttaaaattaaatctcattaaactaaaattgatctatagagtgcagtatgagaggctgctgcctgagttctaaatgcaacctctcttttgacattcagtgcctacggtatctgagtccctgaaagctatrgccatgtaaagccaaatggagtaggtcttcagtattatctctcatttatggttttgaggtctccaggaaaattctctctccactatctcaatatttccttttctaatgttgtcagtaggttttgttaacatgcagtttttctggcattcttttattctttccacatttaagttcctccacaatcttatgcgacaactctacagcatgctttgttcttcacatgctctggcatcaactctttgattcagagaagtatagagacacactggtgtagtcaataccttttctttatgccttcatccctgctaaatgatgccctcatttgggctgtcctcttccttccctccttccgctctgcctaagaaaattcagcctgtggagatgatccagctcacatcaagttcatccagagtagtgcagtctttgattacttgatggttcttctgcttctgaacccaaatatttactgtctagagttgtctttttatgtgtata

SEQ ID NO: 209746 - DNA, 486 bp, Homo sapiens
atacatttacttaatgtgtattatatatagcctatatattttttattaaacacttccacacttaacactgtatctaccaaactatcagtttcagattaagcttattaagtgtactctgtttgatcataagtataaagagttttctcagcaataattcttattcttccatgccaaatcacatggattgatcttacaggaagtyaacaaatcctatatttccaaataaataggcccaaataatttataatgtgatggtgttacttgtcttctatattctggtagaatcgatggacagctaccttatgtgctttcaatctggaaaagtagccagtttgtgatgttctttttgatttctgactataatttccctccataatattccctgttgtctgaaacacctacatatctgaagctaacgggcatctttatagtaagtgatgctgaaataacttctgacctacagctccaggaagagtggctaatcga

SEQ ID NO: 209747 - DNA, 486 bp, Homo sapiens
atacatttacttaatgtgtattatatatagcctatatattttttattaaacacttccacacttaacactgtatctaccaaactatcagtttcagattaagcttattaagtgtactctgtttgatcataagtataaagagttttctcagcaataattcttattcttccatgccaaatcacatggattgatcttacaggaagttaacaaatcctatatttccaaataaataggcccaaataatttataatgtgatggtgttacttgtcttctatattctggtagaatcgatggacagctaccttatgtgctttcaatctggaaaagtagccagtttgtgatgttctttttgatttctgactataatttccctccataatattccctgttgtctsaaacacctacatatctgaagctaacgggcatctttatagtaagtgatgctgaaataacttctgacctacagctccaggaagagtggctaatcga

SEQ ID NO: 209748 - DNA, 563 bp, Homo sapiens
aagtttatcatctgaataataaaaagattgcagtaaatctccagagatgcttttagcctggcattattattattattattattattattatwatattattattattattattattatcaatgctcttactctcattttctgatcttactcttagggacctgcaataatccagaggggtaacaggatcaggggtttagctttacagctctccagaacaaaccctcttctgagtctgtccctttttactgacgctcagttcaaactcagaaaagtaggtagatggatatgtggggtctgcttatctttactttatggggatactggtagaaatgcaaaatgcaagaccgacactcttctcatttttaatttttaaaatattagtgctgcctgtgggttttaatatatttcccctctgctgattttagtgtctacttttctatttaaaaagcttaatactgagctttaagggtttccaattaagcttaaggaaaatatgaaaagaatgaaagtgtctgcctgacaaccatcctgttttttgagacaaaaaggttgatttttgtaat

SEQ ID NO: 209749 - DNA, 438 bp, Homo sapiens
ttcaacttaagatggggttatctcctgataaactcatcgtaagttgaaaataagyagaaaatgcattcaatgcacttgatctatggaacacaatagcttagcctagcttcaaatgtgctcagtgatatgagcttacagttgggcaaaatcatctagcagcacagtactctgtagaatttcggttgcttaccctcgtgattaggtggtttactgggagctgtagctaccagctgctgtccagcatcttgagagcctatgaactgctttctacccacagttgcaccaccgtaaagttgaaaaatcctaagttgaactgtattaaattgggggctttttgtaatcatttaggagtattaataatatgtaaacagtaagagggagaaatatacagcaataaatgcagatggctcattcctaatttgagaaacaagataatgc

SEQ ID NO: 209750 - DNA, 438 bp, Homo sapiens
ttcaacttaagatggggttatctcctgataaactcatcgtaagttgaaaataagcagaaaatgcattcaatgcacttgatctatggaacacaatagcttagcctagcttcawatgtgctcagtgatatgagcttacagttgggcaaaatcatctagcagcacagtactctgtagaatttcggttgcttaccctcgtgattaggtggtttactgggagctgtagctaccagctgctgtccagcatcttgagagcctatgaactgctttctacccacagttgcaccaccgtaaagttgaaaaatcctaagttgaactgtattaaattgggggctttttgtaatcatttaggagtattaataatatgtaaacagtaagagggagaaatatacagcaataaatgcagatggctcattcctaatttgagaaacaagataatgc

SEQ ID NO: 209751 - DNA, 438 bp, Homo sapiens
ttcaacttaagatggggttatctcctgataaactcatcgtaagttgaaaataagcagaaaatgcattcaatgcacttgatctatggaacacaatagcttagcctagcttcaaatgtgctcagtgatatgagcttacagttgggcaaaatcatctagcagcacagtactctgtagaatttcggttgcttaccctcgtgattaggtggtttactgggagctgtagctaccagctgctgtccagcatcttgagagcctatgaactgctttctacccacagttgcaccaccgtaaagttgaaaaatcctaagttgaactgtattaaattgggggctttttrtaatcatttaggagtattaataatatgtaaacagtaagagggagaaatatacagcaataaatgcagatggctcattcctaatttgagaaacaagataatgc

SEQ ID NO: 209752 - DNA, 422 bp, Homo sapiens
gggccactaccagatctgtacttcctctatcatagcagcaatattctatatagtgatgatttatttgtctctatttaacccactggatagtgtgctttcatagataagtcttactctatattcccagcacccagcataatatcagggacataataaatgcctatccaatgcagaatgaatgaatggaacatggataagcccaaagagttcargttgaagagagacattatggacattcaaaagcctagagaacaagacaaagtttcatatacttatgaggaaaaaaaaattgccttctctgtgtcagtgaaatgctattgttaattcataaatgaagtagtagtctcatcacgacagtcttctgggtggtttcatcttatattgtgaacaaaggaatgggtggcagaagagggaggaagaaa

SEQ ID NO: 209753 - DNA, 493 bp, Homo sapiens
tttacattgcttctctccataactgtaaaattaaaattcttgagcggaatgatcccttacagattttttttcagccctaatagtttatgctgctatgattctagctaatcaaatctactcctgacagtttctcaccactgtggaaagtactacaaaaagaccagttgggaactggcagctaatcttccatccttctgatagctttgctgaaaagccarttcaacttaccccgtttatacatgttgaacttgcctagatgcctgacctttgtcagattttgaagagaagaaagtaaaggaaaggagaaaccttctctccatccaacttttactacacatgaagtggtaggtcagcattaaatgactttttatctgtttctgccttgtgtatcagaatatggattttcctaagtgacatcaagcttaaaaaagaaattagctagtaaatgttttcctatctattgacacaaagtaaaattatgatggctttaaac

SEQ ID NO: 209754 - DNA, 544 bp, Homo sapiens
tctgtaagattttatcttgttttgagtgtccaaatgtatttaagaacattgcaaggttttgttttgcaattttactgtatttgttggtcaattaattgattgccattagaatgtgactttttaaataacctttcatacagaaataattctgttactataaaggaaaaagagtcaataactaacaccagtaaaacaagtaatgaagcttttaaagataaaaaagaaatctctcatacctccaccattctaaacacaacagatttcctttgagcctatcctttttactgacagtagccagaaaacaactgtgaatgaagggctttccagatcaattcttaaatcaaaaagtgttggaaaactcagatttamaaaagagagaaacattaggagcttgtgtcctggtcaagaaatgaccaatgaactccttgataagcttcacgccctcacctgtaacatggacttaataatagtacccaccgttcatctgtaacatggctgtaataatggcacctactcgttgctgttagcattgaaggagccaacg

SEQ ID NO: 209755 - DNA, 587 bp, Homo sapiens
tggacttaataatagtacccaccgttcatctgtaacatggctgtaataatggcacctactcgttgctgttagcattgaaggagccaacgtatgcaagccaatcacttaacaaatgtccattgttctgcttgtcattctttgcttatacttcctgacaacaagmagaaaccttagaagagtggtctgttcactttagggaaggctaagtcagcattaggtgtcttccatcttaaagcacacaagacagactgggtagagcagcagcgtcactgatcgccactctaatagctctctggctaagtttctcatgtcctttgcggtgttaactacaaaatgcatcgaccagattctcctcatagtttcttcacagggccagaatgacaccaaaagtagagtaggcccagtgacctgataccagagagccagaacactcagcagagtgcacagtagggtccttgcatagggtcacctgaagacctgagaccatcttcgggagagtcaggagtggaacgtgctgcttcttaaaaagaatctaggatagtagatttatcttcttcccttctcctctctaggtttcacctgaagct

SEQ ID NO: 209756 - DNA, 450 bp, Homo sapiens
attctgagtttgacatgccagtctgaaattttaatttgttaatttaaccttttcacgaaaagaaattagataccataacatcaccaagtataaccagcaatggtgtatttraagttccatttgaatatgaggccttccctggggtttgggttatttcaacagcttttttaacgatatgtatatccactacattccagttactctcctatggtcataggtatattggcaaaggcagacaagtcagctaaatgaaattaagtttaaaagtggaagatggacattgataaaaaatagcaatttattaacttaaaattatcgaagatgcttcaaaccaagaaaagattataggagaacctaatgtagtttgggaactgaaagaaataacctctgagaggccttgaaaaactaattggacatagataagagaagagagaaaagacaaagaatcag

SEQ ID NO: 209757 - DNA, 450 bp, Homo sapiens
attctgagtttgacatgccagtctgaaattttaatttgttaatttaaccttttcacgaaaagaaattagataccataacatcaccaagtataaccagcaatggtgtatttaaagttccatttgaatatgaggccttccctggggtttgggttatttcaacagcttttttaacgatatgtatatccactacattccagttactctcctatggtcataggtatattggcaaaggcagacaagtcagctaaatgaaattaagtttaaaagtggaagatggacattgayaaaaaatagcaatttattaacttaaaattatcgaagatgcttcaaaccaagaaaagattataggagaacctaatgtagtttgggaactgaaagaaataacctctgagaggccttgaaaaactaattggacatagataagagaagagagaaaagacaaagaatcag

SEQ ID NO: 209758 - DNA, 459 bp, Homo sapiens
ctacaaaagtaagttcaaattccttagtcttacattcaaagccttcccgtcctcgggccagctttatatgtttacgtagttttccagctctttctgtgattccctatctgctacctacctcaaaatcctcactagtgaactactttgagtttctagaacatctcttgtttctggcggttggtacccccctttcctagaattgtatgatgaatacttgtttgatccacttttgttaaaatgaagtaatactttggtcaacttgtcgtttcctatgttttctagcttgattgcttatggtawatattcagtaaatgtttgcttaatgaacagatacacataggcatattttggaaaaggacttagaggaacctagaccaagtattaatttcaaactcttcgcatttttctttacatcaaaagattttcactgaaccatttgtaaggtcagagtattgactt

SEQ ID NO: 209759 - DNA, 601 bp, Homo sapiens
ctcagctgtaaagtattaagaaaatacttgtctttgcattcagtgattttcttgagagatccctttatgttaggtcctaaatttgtagctaatatttactgggcagctcctgcgtgtctgacctcattaagtgctttacaaacatgtctcgtttaacccttacaaaaccttaacgattatcaacctatccccattttttagctgaggaacacaagactaggataaattaacccatttaaaggtcacatcgttggatgagtggtgggctcagatcattaacccaaatctgtctgactccstgtctaccatgctctttagcatcatgtatgatgcctgtcaatgaaaatgaatgtctggaaagcgtaacactaagtgaaataagccggacgcagaaagaaaaatattgcatggtctcacttacatgtggaatctaaaaatgtttaatacactgattgtagtagtagctcaagcctgtactcctgaagacttgggaggctgaggtggaaggatcccttgatgccaggcgttagacagctgcctgggcaacatagcaagactcccatctcaaaaaactggaaaaaaataaaaaattaaaaaaaaa

SEQ ID NO: 209760 - DNA, 568 bp, Homo sapiens
tgctactgatcatagtctacactgtatctgcacatgatgaatggtgctgcatgttccaaataagcaacacagwcactttggtaatgcattcatatctatccaagagaggaaacatacaaaggcccttttaattttccttcattacatgtcattggctcaattaaccattatatatatacatatgtacaattaaattctaataaatttctgctttctcatttttggcttctcttaagatttatggctgttagtattaatttgtttgctctacatagcatttttctccctctttacagcagcatgccttttgaatctgaacattcttctgtgtttgccccatttcagtattgcttactaacatttaatatattttgcttttttttttattttgctgacaaagttgcattgatgaaagctgacttgcaaggtagatagccctgtgtgtatataacaagactgaaaccccataatacacagtggaaaccctaaaataacatattttacatttctgcagtaactgttatttgggttcagatttcattcttttcctttcttgaacgttgtgcaa

SEQ ID NO: 209761 - DNA, 568 bp, Homo sapiens
tgctactgatcatagtctacactgtatctgcacatgatgaatggtgctgcatgttccaaataagcaacacagtyactttggtaatgcattcatatctatccaagagaggaaacatacaaaggcccttttaattttccttcattacatgtcattggctcaattaaccattatatatatacatatgtacaattaaattctaataaatttctgctttctcatttttggcttctcttaagatttatggctgttagtattaatttgtttgctctacatagcatttttctccctctttacagcagcatgccttttgaatctgaacattcttctgtgtttgccccatttcagtattgcttactaacatttaatatattttgcttttttttttattttgctgacaaagttgcattgatgaaagctgacttgcaaggtagatagccctgtgtgtatataacaagactgaaaccccataatacacagtggaaaccctaaaataacatattttacatttctgcagtaactgttatttgggttcagatttcattcttttcctttcttgaacgttgtgcaa

SEQ ID NO: 209762 - DNA, 578 bp, Homo sapiens
aaggacataaattttgtatctgcagcccagaaagctgagtttttgctttaaaaatgtgcaaamttaaaattagaaaaattgctctagacaattggaaggcactggaataaacattctttgggtccaattttaactgaccaataagcatagagtctgcctttcatggtagtcttctttgaagtctatttttgggttgttttccatatatttatttgattttatttatttatatttatttttaaagctagagtgagttttttactcagccctatagattggaggaaaaatatttttaatttaagccccaggatatatttcgtcttcagactgaaacctgtacccttaagggtactcaaatcctgatgtgtcaatggctactgctgttggccacaagaaatctgatcaaacctgttctcacacatattctgggggattatgaagactttgatactcaactgactttattcattctatctcttgatgcttttcaacagggctgctatcccaggtggggttccttggaagcaaaggcatatttgcatgtggcaagtttatggggaacactgttagcatcaaca

SEQ ID NO: 209763 - DNA, 578 bp, Homo sapiens
aaggacataaattttgtatctgcagcccagaaagctgagtttttgctttaaaaatgtgcaaacttaaaattagaaaaattgctctagacaattggaaggcactggaataaacattctttgggtccaattttaactgaccaataagcatagagtctgcctttcatggtagtcttctttgaagtctatttttgggttgttttccatatatttatttgattttatttatttatatttatttttaaagctagagtgagttttttactcagccctatagattggaggaaaaatatttttaatttaagccccaggatatatttcgtcttcagactgaaacctgtacccttaagggtactcaaatcctgatgtrtcaatggctactgctgttggccacaagaaatctgatcaaacctgttctcacacatattctgggggattatgaagactttgatactcaactgactttattcattctatctcttgatgcttttcaacagggctgctatcccaggtggggttccttggaagcaaaggcatatttgcatgtggcaagtttatggggaacactgttagcatcaaca

SEQ ID NO: 209764 - DNA, 578 bp, Homo sapiens
aaggacataaattttgtatctgcagcccagaaagctgagtttttgctttaaaaatgtgcaaacttaaaattagaaaaattgctctagacaattggaaggcactggaataaacattctttgggtccaattttaactgaccaataagcatagagtctgcctttcatggtagtcttctttgaagtctatttttgggttgttttccatatatttatttgattttatttatttatatttatttttaaagctagagtgagttttttactcagccctatagattggaggaaaaatatttttaatttaagccccaggatatatttcgtcttcagactgaaacctgtacccttaagggtactcaaatcctgatgtgtcaatggctactgctgttggccacaagaaatctgatcaaacctgttctcacacatattctgggggmttatgaagactttgatactcaactgactttattcattctatctcttgatgcttttcaacagggctgctatcccaggtggggttccttggaagcaaaggcatatttgcatgtggcaagtttatggggaacactgttagcatcaaca

SEQ ID NO: 209765 - DNA, 582 bp, Homo sapiens
ctgtgtagtacacctctaggcctgccaaacttacatcccccttcgctatccactggatttcttacccttgacccttcaaaattttaatggcctagtgctatgcagttatctatattcatctataatgtctctctaaaacacataaaacttcttaaaaagtttcaaaaagggagacactataatgaagagttgtgttctcagataattaagattagtatagtgattttataaaatccatagttaccctttttcctttagacaaaatatccaatgccctatttccagccttttgcacatattttttattttgtccgtttccttcacagtggatcacattctgctcacttatgttgatttagaaggtttgaagctaaagataycatttgagtgcagccctgatgattttcatctttgctttaatttcattgtttgtttttttcttttagggctacatcccttctttttattatgagtactttaattttttaatttcctattctcataaagttatatgagtgaaaagcaatacaatattcaaacaattgtaaaaacactggtctaccaataaaggtagtaattaat

SEQ ID NO: 209766 - DNA, 602 bp, Homo sapiens
aaatgacatgataacaactcccctaacatacatttttaggattacttatatctatgctcagttggcggaaaaaagtcactcaactcacacagagatttctcagcttacaaaatggcaacagacctgagcaaactaaaaatgcttaagaaatatttctaatcacaaaaataagaaattagcttattttgaaatataagtatttatactcatcaactagcatagagttaaatagggtgttagttattcttattattttcttcagcaggaaaatttttaccttgaaaagaccttgagaagatcggaaaatttacaatggagaaaaaaataaaagtaggacctaattaacttagcttctttcctttcgtgacaagctctgtgagggctccaggatatgcactcccactccttaagtataagtttgatttttaccctcccacaagaaggctgttttctcctagcagatagggcctctctgcttctcagagkcctggctattatgacatctgatgcaagccaggccaggttgcaatcacagaaccaccagtggaccttttgtctgcctttccaggagcagagcagtcccttttggagctgctggaatt

SEQ ID NO: 209767 - DNA, 427 bp, Homo sapiens
aagttgatggatatgttcagtaatttgattgtggtgttttcatgggtgtatatttacacaaaaacttatgctaatatgtgtactatttattgtatgccaatcatacctcaataaagcctaaaataatattagaaaggtacatatgagcaatgaataaatactataaatgttaaaaaaaaacaccacatatttgtatagactttatacagggttacttgtatagtgacttttatgttgggactttaaattattcctttaacatagagacaattggataatttgaaatctgcrtataaactgactagcaataagaaatgaattgattgttgactgaaaagagggcaaaatggctccttctgggagtattaattgataacatcaagaaaatctctttttgtgaaatgtcagcaaaggtgacaactcttat

SEQ ID NO: 209768 - DNA, 612 bp, Homo sapiens
atacaaacacggaaaagtagcggagatagcaagcatgttcaaaaaagaagaatcagcgcacatgataatgagtggaagaatgagaacaaatttaaagatgattaagacttcagagagtaaaaatctgggaaatggagatggcacggtcagaatgggggaaaatgccatgttataattattttatgaacacattatgaacttggatatgacccattttaggctttgattgaatatgtaaatggaaataccttaaaaaacaaagtgaagagtcaaagtaaaaaattgatatttggaagtcttgtgaatgaattgagttttttatgggtatggaaagggatgaatagaaatctcctattgagacttaaaaagagtaaaargaagaaaacaaggataaaaaatggaaagaaagtaggaagaaaaggagaaatggttggaagaagaaagaaagacaagaaatgagaaagaaagcaacggagagagaaaagaaaaacatttcaatgaaaaaaagaaagttaagtgaatcaaagaggaaaaggaccaaaccaagattaaaaataattttttcagaaggaaggaggtggccaactttctgaaataaaggtgaaacatatg

SEQ ID NO: 209769 - DNA, 612 bp, Homo sapiens
atacaaacacggaaaagtagcggagatagcaagcatgttcaaaaaagaagaatcagcgcacatgataatgagtggaagaatgagaacaaatttaaagatgattaagacttcagagagtaaaaatctgggaaatggagatggcacggtcagaatgggggaaaatgccatgttataattattttatgaacacattatgaacttggatatgacccattttaggctttgattgaatatgtaaatggaaataccttaaaaaacaaagtgaagagtcaaagtaaaaaattgatatttggaagtcttgtgaatgaattgagttttttatgggtatggaaagggatgaatagaaatctcctattgagacttaaaaagagtaaaaagaagaaaacaaggataaaaaatggaaagaaagtaggaagaaaaggagaaatggttggaagaagaaagaaagacaagaaatgagaaagaaagcaacggagagagaaaagaaaaacatttcaatgaaaaaaagaaagttaagtgaatcaaagaggaaaaggaccaaaccaagatwaaaaataattttttcagaaggaaggaggtggccaactttctgaaataaaggtgaaacatatg

SEQ ID NO: 209770 - DNA, 471 bp, Homo sapiens
gccagtttgcagaagattaagaatattttgtatataaatgaaaaatcaggaaatgtgcttgaatgcttatcagttgtctctgctggatttaaaagtaaaaaaaactatataaagtgaaacaataaagcatcgaggtcaaataaaaacctctaaaaggagaatctgaacaaataactaactgcttagataaaaatatgttctcatctggtttgcatgtagatgagacagagaaagtgagagagaaaaataaaactaccatttatgtgtttgtcctacctttttctcattcttmctgatggttgcgttctcccagtttcaggagacagtttgtctggttgatgaggtcatcatcagttttgattttatgttcttccctctttgccatcatgtattcttcagcacctgcttccagcacttccatgggtcatgcacccccatctcattacagatagaatccttattttaatgaac

SEQ ID NO: 209771 - DNA, 552 bp, Homo sapiens
cacatacattgtccaaatttaaacataaatgtattcatggaacmaatgcccttgcctgtctctcacggactgatgctttatgtatttctcttctgaatttataattggaaatgactgtagtcaatgcctcaggacaggagtgcattattgcaggctcattgactttaaaaaggtgtgtagatatttcccattaattagaataaaataagatcaaataataatagcccaattcgtgataatttcgttcttgtaattgacatcatcatacaaatgagttctacgacaatggaatatactcagttagaatttcttcaaccttatttactttaattttcccttattaaagtttaaattcaatcaatttttgcttactaaagtatatctgagaagttcacattaggtggatgtgaagtataaaatttaattatataagatgtcaggttaaaatcatagtaaaatttgtcaaacttcaaattacaagtaactttcagatagtttattgtcacacgcttaaattttctgcatcaaaaatcttttctataagtgatttca

SEQ ID NO: 209772 - DNA, 509 bp, Homo sapiens
acaattgtaaatacatatgcactcaatgctggggcacccagatatataaagcaaatactattatagccaaggggaaagatagtccaaaatacaataatagttggggattttaacgcaccactttcagcactgaacaaattatctagacagaaaatcaacaaagaaatattgaagttaaactgcactatagaatatatggacctaacagatatttacagaacagttcacccaataactgcagaatatacattctattcatcagcacatagaacattctctaggatagaccatatgttgggccacaacacaagtcttaacaaattgtaaaatactgaatttatatctagtatattttcagaccacaatggaataaaactagacattgatartaagaggaactttggagattgtacaaatccatggaaattaaacaacacacttctgaacaaccaatgggccaatgaagaaattaagaatggaataaaatttttgaaacaaataaaaagaga

SEQ ID NO: 209773 - DNA, 581 bp, Homo sapiens
ataaaaaccgtatctgagtatgtycagatgttaaatttgacagacaaaaacttctaagcagctagaactgaaggaaatcatgttacaagaattataagaaggtaataataagtaatcaataaagaatctcaataagtatgtagaaaatatgaaaaggaacgatggaaatttgagagtggaagagtaaaataactaaaacaaagaattagctagaggggctcaatagccgagtaaaggtagcagaggaaaaaaataatcagtgaacctgaggataaatcaatagaaatcatctccaatctaagtaagagagataacagattttgaaaatatctcaacttgatctgtacatgtaatacagttcctataaaaaactccttctgaaatctttatgaaaagtctttagaatagctaaaacaatcttcacaattgaataataaagtgaaaagaatcacattcatctatattaaaggcttattatatagttacagcaattaagagtgtgatattggcaaagagacagagaaagataaacagagctgattagagaacctagaaatagatccaaacaaataagcccagct

SEQ ID NO: 209774 - DNA, 581 bp, Homo sapiens
ataaaaaccgtatctgagtatgtccagatgttaaatttgacagacaaaaacttctaagcagctagaactgaaggaaatcatgttacaagaattataagaaggtaataataagtaatcaataaagaatctcaataagtatrtagaaaatatgaaaaggaacgatggaaatttgagagtggaagagtaaaataactaaaacaaagaattagctagaggggctcaatagccgagtaaaggtagcagaggaaaaaaataatcagtgaacctgaggataaatcaatagaaatcatctccaatctaagtaagagagataacagattttgaaaatatctcaacttgatctgtacatgtaatacagttcctataaaaaactccttctgaaatctttatgaaaagtctttagaatagctaaaacaatcttcacaattgaataataaagtgaaaagaatcacattcatctatattaaaggcttattatatagttacagcaattaagagtgtgatattggcaaagagacagagaaagataaacagagctgattagagaacctagaaatagatccaaacaaataagcccagct

SEQ ID NO: 209775 - DNA, 581 bp, Homo sapiens
ataaaaaccgtatctgagtatgtccagatgttaaatttgacagacaaaaacttctaagcagctagaactgaaggaaatcatgttacaagaattataagaaggtaataataagtaatcaataaagaatctcaataagtatgtagaaaatatgaaaaggaacratggaaatttgagagtggaagagtaaaataactaaaacaaagaattagctagaggggctcaatagccgagtaaaggtagcagaggaaaaaaataatcagtgaacctgaggataaatcaatagaaatcatctccaatctaagtaagagagataacagattttgaaaatatctcaacttgatctgtacatgtaatacagttcctataaaaaactccttctgaaatctttatgaaaagtctttagaatagctaaaacaatcttcacaattgaataataaagtgaaaagaatcacattcatctatattaaaggcttattatatagttacagcaattaagagtgtgatattggcaaagagacagagaaagataaacagagctgattagagaacctagaaatagatccaaacaaataagcccagct

SEQ ID NO: 209776 - DNA, 520 bp, Homo sapiens
aaacaaagaattagctagaggggctcaatagccgagtaaaggtagcagaggaaaaaaataatcagtgaacctgaggataaatcaatagaaatcatctccaatctaartaagagagataacagattttgaaaatatctcaacttgatctgtacatgtaatacagttcctataaaaaactccttctgaaatctttatgaaaagtctttagaatagctaaaacaatcttcacaattgaataataaagtgaaaagaatcacattcatctatattaaaggcttattatatagttacagcaattaagagtgtgatattggcaaagagacagagaaagataaacagagctgattagagaacctagaaatagatccaaacaaataagcccagctgatttttgaaagagatgaaaaaatcaattcaatggaacaaggatagacttttcaacaaatgatatcagagcattagacatcaataggcacccccatcccctgcccaaataaaataaacctcaacataatcctta

SEQ ID NO: 209777 - DNA, 520 bp, Homo sapiens
aaacaaagaattagctagaggggctcaatagccgagtaaaggtagcagaggaaaaaaataatcagtgaacctgaggataaatcaatagaaatcatctccaatctaagtaagagagataacagattttgaaaatatctcaacttgatctgtacatgtaatacagttcctataaaaaactccttctgaaatctttatgaaaagtctttagaatagctaaaacaatcttcacaattgaataataaagtgaaaagaatcacattcatctatattaaaggcttattatatagttacagcaattaagagtgtgatattggcaragagacagagaaagataaacagagctgattagagaacctagaaatagatccaaacaaataagcccagctgatttttgaaagagatgaaaaaatcaattcaatggaacaaggatagacttttcaacaaatgatatcagagcattagacatcaataggcacccccatcccctgcccaaataaaataaacctcaacataatcctta

SEQ ID NO: 209778 - DNA, 491 bp, Homo sapiens
tgtgcctatgaaactcttgataggaaggtttaaaataaattagcctggcaaaggaaccctgtgaatctaagtagaatgagataaatagtagaatgagtaaaatatycaggcaatgcagaaggaacataatatactgtctttcatttacaaacatgatgttcttgacccatctttgatagacttatggatacagaaaacaagaacagaaaagattgagtgctaaatggaggtagaattattaggtttcagcagataatcctattttggaccctagccctggataaaatttcctctgtctaaatcttaatgaccttgagcaagtgtctaactcatcaaacctcatctgtggaatagggttgataaaggtagctggcagagttgtgagagaagattgaagtgatttaatacataaaatacaacacaaagcctgtcccatggtaaatacttctaaatattggacattgttgctatttttattatttgagatccaa

SEQ ID NO: 209779 - DNA, 580 bp, Homo sapiens
ctctttctcttctcccttgtctttatgaaatgaacmggccatcttttatattctggagtcttcatataaaaatcatgaacctggctgggcgtggtggctcacacctataatcccagcactttgggaggccgaggcaggcagatcatgaggtcaggagttcgagaccagcctggccaatatggtgaaacctcgtctctactaaaaatacaaaaattagatgggcgtggtggcatgtgcctgtagtcccagctactcgagaggctggggcagaagaatcacttgaacccgggaggcagaggttgcagtgagccccagcctgggagacagtgagactccatctcaaacaaacaaacaaaaagaatttctgtctccttattgcaaaaaacacatatgaagctttcctataaacttacttttcatctgttattctatggcacttgggtgggcctttaggttttcctaccttcttcaaaataatccaagacaggaaagagatgaaaaaacagttgtatatccatccttacttggttcaatgtgaagggaagacagaaaataaaagaaaactcttgatcaacctctc

SEQ ID NO: 209780 - DNA, 548 bp, Homo sapiens
caagactctggctcaaaaaaaaaaaatgtgtatatatatatatgtatatgtatatgtatatgtatatgtatatgtatatgtatatgtatatgtatatgtatatgtatatgtatatgtatatgtatgtataggccgggcgtggtggctcatgcctgtaatcccagcactttgggaggccgagacgggtggatcatgaggtcaagagttcaagaccagcctggcaaagatggtgaaaccccgtctctactaaaaatacaaaaattagctgagcgtggtggcaggagcctgtaatcccagctactcaggagcctgagccaaagaattgcttgaacctgggaggcagaggttgcagtgagctgagatcgtgcctctccgctccaggctgggcgacagagtgagactctgtctcaaaaaaaaaaaaaaaaattcaataaatattcttgggagctgaaatcaggawctagtgagttcagaaatgtcagcttttattaaatatgtttataatagaccgagaactagcaacagaagttttaaatacctgtcatagg

SEQ ID NO: 209781 - DNA, 576 bp, Homo sapiens
tacaagagatgtttccaaggggacggaaagattggatagttttaatacaattaatttccagaactcaaattctttttgcactatttcctaaaatgtatcttcctgastctgtgcatatgttgttctggctttatgacaccaattcaaattgcatgtttgtaatcttccttcttctactttacattagaaaggcaaacatttacccattcaaactcttacctgctcaggggtacaaaaaactgtcaggaacaattggcaataattgatgcatctactgaaaaagtgaatgactctaaactggctcaaaagttgtttttgcatgtaggtgcttgtaattatctgttttcaataaaataagggagcttcaaattaattttttaagtaatgaataattcatattaattctaatgatgcagaaatatgagattaagttgtacattttcaaggaatttttaaaaactgagtttcattgctataatttcttatttctacataaatatttatgtgaaaagttcttcaacagttacatgtataaaaaaatgaggaacaggccaggtgcagtggctcacacctgta

SEQ ID NO: 209782 - DNA, 559 bp, Homo sapiens
gcccgttccaccacagcctgtcccagaggattgtaaaggattctggtaatgtgggaaattccccattattgcatagataaatcaraagccttactaacatatccaggggtgttgtctgtttttatctgatatggaagccccataactgcaaacaagaatacagattttttttaacatgggctgtgctccccctgtttggcaggtagcccagataaaacctgagatggtatctacagaaacatgtacatatgaaagtctgccaaaggaactaacatgagttacacccatttgccataaatcattaggagttaggcctctgggattaacgccaggttcctgatttggaagtacaaagacctgacactgagggcagctgtgaacaattagcttagcctccttccaggtgaaagcaaatttattttttaatccagcagcattgacatgagtgagattatggaactcctgagcttcctgggttgcaaaagagaccaaacagtcaaccttttggttaccagcagatatgggtcccagtaaagtggtatgagatctaatatgtgca

SEQ ID NO: 209783 - DNA, 365 bp, Homo sapiens
gtacataaagtatgctgttcacagaggtggttcaacaattccacttccaaacagcatttcccatcagcttttaaaagctttttgcaaaacatgtcattctgttactattaaatacatcaagcacttccaaatatctagaaagactagacattttatgtaacttgttcatgtacacagcagtgttaaataaaattgcacacacataacaatggttataatctgaggtatcttctaaatgtgtgttttggccttgaccatcaccccctcacctccttctctctgctttcaatccagtggacaagyacaggcatgtgtaatgcttagagatggttgaacaaattcctttccaaaagtcatttacagaa

SEQ ID NO: 209784 - DNA, 502 bp, Homo sapiens
ccagtgaaaaggaaagagatcaggcacctgcttaaagtcaagttttggttgagcagctatgctatactgcggggatcctttccaccctgggcttggcttagactctccaaagcctgaaggctagaacagctaaggaacccaaacagcaaatatggtagccgagacttcccgctctgggagctccttcttaggaagatgcaatgccactactggtagctggctggaattctacgccagtgggtcttccctggtgaggagtcatggaagtgggsccgcaggctgttgctgctcagttcctttaattcagcctctttccgagtgttatgtatgggagtataacctctcactttgctggagctgcagctgcttttgctggaaagcccgaatatctaagtctccagggtctctagtgcaccgcgaggggctgtctgccgagactccacatagctgtctgtcagactgaagattgaaggccctggaggagtgggttcacgaaggagat

SEQ ID NO: 209785 - DNA, 652 bp, Homo sapiens
gtataaaaattgctgtatccattataactatttagatgttaaaactaaaagaaagaacttttaaaagttttaaagcatctaacatgttactttttcattactgaaaatatagcaaattaaaattattgctaagaaaattcatatagctcaaaatctattcataatttattcttagctacattaattttatacactattcatataagcttatggaaaaatttctaaagatactaaattaggaaatattatttcaggtttggttagtaaacattaaagggaaagtattttcctcagcttaatgactttaatggaagattgatatttttcagaggaccttataaattttctaaaattatttttaaccttgtgacttcgtaaatattgcatattagaagatattcttgtgttatacacattagctaacaagtatatttgtggcataaatttgttttatatgtaatttgtaatatttgtctcttggatgtgttatatattgacttctayatattaggttggtgcaaacgtaattgcagtttttgctaattacttttaatggtaaaaactacaattacatttccaccaacctagtatgtgtctatatttaaataaatgaaagctagaatctgtaatcaaattttgtacttaaattttg

SEQ ID NO: 209786 - DNA, 612 bp, Homo sapiens
catgtacctcaattatttttttaaaaatattttaatctaaactccatcaccatgttaatttaatgtggtaagctttaagaaatatatatttttgaagataattttatattgagataaataatgatctatacttattttgttgctgaattacaacataaggtagatkcaaagtcttattgatatttaatctatgtatcaattatattaatgataagctttaaaaaagctttctgtcataaatatacttgcaaaaaaaaatctcatcctttaaagtataaggaaatgggctagttttccatctttgttgtctgtgtatacgtgaggatttagtcccaatgaaactccatattcccaagcatcgggatgtgaagattctatgatctatacatgtaataccatccccaaaacattaaaattttccattaaaaaaatctgaatacaggtatattacctcagaaaattcaaagccagaaattaactacgagcttaaactgatgaaaaagagatgttctgagggattaactgtcttacataagatacagatatgtcctacttatttataaagctaatcaaattattccctttttatcttttaaaataagttataaaaaa

SEQ ID NO: 209787 - DNA, 633 bp, Homo sapiens
tgtcttgtttctgttctcaggggaaatgctttgaacttttccccattcaatatgatgttggctgtgggtttgtcatatatggcttttattattttgaagtcagtcccttatatgcctaatttgttgagagtttttatcataaagttatgctggattttgtcaactgctttttctgtatctattgagatgatcatatggtttttgtttttaattctgtttatgtgatgtatcacatttattgacttgcatatgttaatccattcctacatccctggaatgaaacctacttgattatgatgaattagctttttgatgtgctgttggatttcattaactactattttcttgagaatttttgtgtctacgtttatcagaaaaattggtctgtagttttcttttttgttatgtccttccctggttttgatatcaaagtgattctaactttatagaatgatttatggaggattccctttttttcagccttttggaataatttcagtaggattggtacaattattctttgartgtctggtagaattcagctgtgaatctatctggtcttgggcttttttgttgttgtcggcaattttaaaattactgattcagtctcactacttgctattggtctgtcca

SEQ ID NO: 209788 - DNA, 585 bp, Homo sapiens
caagcttagtgaggaaggcatgtcaaaagccaagatataccgaaaactgggactcttgtaccagttagccaacttgtaaaggcaaataaaaagtattgaaggaaattaaaagtgctactctaggccaggcatggtggctcacgcctgtaatcctagcactttggaaggccgagatgggcggatcatttgagggtgggagttcgtaaccagtctggccaacatagtgaaaccccatctctactaaatatacaaaaattagccaagcatggtggcatgagaatcactttaaccagagaggcagaggttgcagtgagctgagattgtgccactgcactccagcctgggcgacaaagcaagactctgtcttaaaacaaaacaaaacaaaaaaagtgggggctgggcacagtggctcacgcctataatcccagcactttgggtggccaggcaggtggatcacctgaggtcaggagttcaagaccagcctggacaacatggtgaaactccacctctacaaacatacaaaaattagccaggcatggtggtgggckcctgtaatcccagctacccaggaggctgaggcaggag

SEQ ID NO: 209789 - DNA, 558 bp, Homo sapiens
ctttggttatgaatcataccaatttattttcaaataccaagccaaacttacatttctcttgcagtctgtaaatggcaatatttgtcttttaaaaacacactttttattaaagtgtagcatacatatgcatatataacagcagatgcacaaatcatacatgtagagtttgatgaatttttaaaatttgaacacctcgctaaaaaacagctctcaaataaagtaagagaagattacccgcccacaaaaactctatacatgcctctttccaatcactaccccagaggtgatcactatsctgacatctaacacaatgtattcattatgactgtgtgtgaagtttttataaatggaattgtatagaaggtgcctgaggttttctgtttaaaattttgtttattagattctccaatgttgttccataaagaaatagctcttacatgctcacttctgtataatctttatgtatgtgagtgtaccaaagttacctgtctattctattggtaatagatattttggtcgtttctaacttggggttattacaatggtgctgaagcgaac

SEQ ID NO: 209790 - DNA, 527 bp, Homo sapiens
tttaacttttaaaaatttattgttttttatgaagacattttattttataaagatttaaaaaaaattctcattctattgcccgggctggagtgcagtggcatgaacatggctgactgcagccttgaactcctgggttcaaacaatcctcctgtctcagcttcttgactagctgggacaacaggcatgtgccattatgcccagctaatttttgtattctttgtagagatggggtcttgctatgttggtcaggctggttttgaactcctggcctcatgtgatcttcctatcttggccttctatagtgttgggattatargcatgagccatcatgccttgccaataaattttatcttatttatgattttcttaataacattttttctctattttattgtaataatgtagtatataatacacataacacacaaaatatgtgctaatatactgtttatgttaccagtaaggctttgggccaatggtacacttgtagtagttgagttttgggggagtcaaatgttataggcaga

SEQ ID NO: 209791 - DNA, 597 bp, Homo sapiens
cattcacttatataaaatagaatccgtctatatctgtttttgtaatcaagcaatttatcctaagcaaatgtctaatgtacaaacatatttgcatgttaatgacctcaaggtagtataaaccaatgaatcgtgatttatttaatcgcactccatctcaaaaaaaaaagtttcttaaaattcaagtgctaggtaaaagcatgtggacattgagactttgatacgtattaaaaactgcacagcaaaagtgaaacaatttgcctttccagcagtcttatgtgagagtatacagtccatgtactttacagagctttgtgttagcattctttgtaaccttagtaaatttggtaaacgaaaaattatattggataatttaaatgctggcttccttatataacaatgtaaggaagtaacaatgatctcactttctttgttatccatttttatatacactattgttatcrcctgtggtgtccatttgcccccttttctaccatgaaaatttttgcatttgatatacgatagctttctaaaatattaattgatgattaatataattaataattattttaatattttacctataatattgtcaaaaat

SEQ ID NO: 209792 - DNA, 597 bp, Homo sapiens
cattcacttatataaaatagaatccgtctatatctgtttttgtaatcaagcaatttatcctaagcaaatgtctaatgtacaaacatatttgcatgttaatgacctcaaggtagtataaaccaatgaatcgtgatttatttaatcgcactccatctcaaaaaaaaaagtttcttaaaattcaagtgctaggtaaaagcatgtggacattgagactttgatacgtattaaaaactgcacagcaaaagtgaaacaatttgcctttccagcagtcttatgtgagagtatacagtccatgtactttacagagctttgtgttagcattctttgtaaccttagtaaatttggtaaacgaaaaattatattggataatttaaatgctggcttccttatataacaatgtaaggaagtaacaatgatctcactttctttgttatccatttttatatacactattgttatcgcctgtggtgtccatttgcccccttttctaccatgaaaatttttgcatttgatataygatagctttctaaaatattaattgatgattaatataattaataattattttaatattttacctataatattgtcaaaaat

SEQ ID NO: 209793 - DNA, 578 bp, Homo sapiens
ttaaacatgtggtagtaaaaatgaaaaattctattgcagggttggaaaataaaattgaggatctcccctatacgagcagggtccggggtctgagagcttctgactcaaaacaggagccccagccctcagcccaagctggccacacagcctcagccagccctaaggggccgcagcagatctctctctacctagtccctaaggccccagaagctccacagcccattccttccctcctgacctcttgcaggggccaggcaggctgccaggtgtgactttggaggccacaaatccctcactgccacagagcactytaagaggctgaaaaatcccttaacacacacagcctttcactccttagtcagaggtgaggccgaagcacaagctctctgggggaggaaaacggtaactgaaattcactctaaagaatatgtggggcccagagtcttcctggactctcctgtactcaatcacaacagagtacggcttaggggatggcgtatggggacaaagagattgcaagttttgaggacgccatccacctggttcacaatggaggtctctcccagcctgctgaattc

SEQ ID NO: 209794 - DNA, 415 bp, Homo sapiens
ggtcacctttggcccacaaccaaatctggcccatcacgagtttctgtgtggctcaagaactaagaatgactcataaagatggatatttgaagtagataaaaaatagtcactttgatattttccccaaaagaatttcattattctagatctgtattacaaaacaattgatttgattattattattttattataatattacattttgaatttcatcaacaaagttttgtggtaatttgtcttccttcttatacctagataaggacctacataatatctttgatttgcctcttggtccacaaagcctaaaatatttattatctgsctctttacagaaagaggtttgccattccctaaactagagctacatagatcaacatgggcttatctcacaatcatggcattgagtaaagaattc

SEQ ID NO: 209795 - DNA, 517 bp, Homo sapiens
tactctcccccttttcctacggatgtggctttctgagagccaagctgcagtgattgttatctctcttctggatctagccacccagcaagtctaccaggctctggctgatactgggggttgtctgcacagagtcctgtgatatgaaccatctatgggtctctcagccatggataccagcacagtatttggggtgtctcccaggtcctgcaggagcagtccacttccttgagagggtctgtgggtcctctcgggattgccggtttgtttttgcactcgttctggagctaaaattcacmatgtgagcctccgcatgctactctgtccatccgagttggagctgcaatctcagcactacattttaaggctcataaccacttcgtaaggcctattgacatccatgccagcttttaaaatgtgggctgtctttgctgtgctccttgaacagcctgtgaggttgtcagccctggggtgccagtggcagcccaggatgctttcccattgtgtgttgtgggctgcc

SEQ ID NO: 209796 - DNA, 566 bp, Homo sapiens
tcaaatacttaaagagcccctaagctaaccaggattgcaatgcattgtgggctgcaacaaaatgcaccaaaacaaccctaaaaacaaacagacaaacaaacaaaacacctgaagcccctgactaacaatcaataggcaacatccaggaagattgtaaccccatagtactcagcctattgggaaccgggggaggcacctgcgcactagggtataaattgcttgttgaaactttgctgggtgtgcctgcatgccacacacccaatcttgcaagaccatcattaaaagtctcactttcgctattctcggggtctcygagtccattctttgggtttgaatgggggagtttgtttctcagaagcctatattccatccatgaagatgaggtgatctccaggctgcattagggaactcatatattcccagaggagggaacaaaagcagtagaatgaattgcagctgggaagactggtacgatagacaccagaactgccactctccacagagaggggtaaagaaagctgtggggccaaaagaagtccagctcagccacataggtggaccaagat

SEQ ID NO: 209797 - DNA, 493 bp, Homo sapiens
gctccagttgcaattatcttccccttactggaaattaggtctgagggctttgggagaacagggagtaggtaggcagcttcatttcagttggaaaagatccctgggcatttcaagaaagaatagacaaatcagttatttaaaaatatgacacactgaaggcatgagccttaaaagttttgtttcagattctgtaatgttggacgcttatcacactgaaaaactctgtgatttccagaacctcggggtcatgatgctacaagataatgttcattagatacaccccccaaaacccaaatactaaattatgtttagttccttccccatcattatttacagagctgtttacttcttagttttgctttttgttcttaaaagaccttaaacgacctattcaatggatgtyaactttttctgctgacaggttgtttgaagaacctgaaagaactcaatgtgggtttcaactatctgaagagcattcctccagaattgggag

SEQ ID NO: 209798 - DNA, 176 bp, Homo sapiens
aaggaatggaggtcaaagagaaagaaggtattggtaaaactcttytcaaaaattatggtttaaacagtaatgatatcatctaatatatgggattaaatttttaagataaaaatttaaaaatggggggcagaagggggagcagcatgcactctaggaaagggatgactagaaccaaa

SEQ ID NO: 209799 - DNA, 584 bp, Homo sapiens
agctatttcaatacttttatatttgctgttgagctgataactgttgtcccatgatgaaaccctagcttgaaaattccctcaaacttggaaatcccaagcaggcacccattacttaytgactgggcagtcactttacctttgttctcaagggttctgtcacaatctgttgctgagttcctcataggggacaccagctgctgggttcatgctgcagaccctggctgagtgactgatgaaaggagtactcagacacaggtatgcagtgtaagagaagctaggggactgtccagcactagtggctgaagaatgagcagtcccaaacagctggggctgcttgcttttattcaatagagacataatgctgaaagcctggagtaaacacaatctgcgggtaattagcattattcccccctttcagggagcagtcaggcagcatggatgatcaaaggtcagctcctggtcaacataagtaaacaaacctgtttaagataaattcccctacccttccttgaacccactccttgccctctgcctcagggttggagaacagctgccttcagcttattttcccccaaagctgtgca

SEQ ID NO: 209800 - DNA, 558 bp, Homo sapiens
atggagcgcaattttagtgggatagaatgggtaataattgtattttaataaacaattatatgttaggtaattgtttattgctttctaatacaaaagtttcagtggaatctcttaattacacctatagaaactggaggcacccatttccttctcaattgtgtgtaccacaactttcctggtattcacagtcatctagtagatacaatcatataaatttttaaaaaaattttactgtatgtgtttgagggatataacataatgttataagataaatatacactrttttttaattctaaggataaagaagtcactgttgccctaggaaattgttttatagtgagcagcccataccaaaacaatttgttttttcaagttttatgccattcttattgcaaagtcactgaataccacagataattagatctgtgattatgctgtattcatttttacccttctagtcaatcaacaatatttctaacttaaccacaaaaataaaaaatggaagagctatgggaaaaaaagccaaacaacaacagcaacaacagaaaacaaaccaat

SEQ ID NO: 209801 - DNA, 619 bp, Homo sapiens
attctaatttgggctgggtttatagttttataaytcttatggcaaattttgacaccttatagtattctgcagggataagtatgaaaccattgattgatcaataaatgcaaacaaaaatgctaactattcttaaggcatttctaatattactttaccaataattttaaagccagcttatttattaaagattttacttaagttatatgaacttaaaaaagcatttaacttagtcttttttctaatgaagtatttaagcatttttatttttctttaagccaattaattagagctcttttatatatatttagtagtgaaactttatgtatacaacacataaatacatagacatattaggcatgctgatagaagtacatcttatagattcataaaacctctttttatttcctattttagactcccagattctccataacctgtttcattaccctaggcagttgtcagctatgtagccctaaatttgcatattaaaggaaaaactcttaggtgaaaaatcatgtagcaaaatttacatctcaaattacagagagaaagtcagctggaggaaaattaaaatggatgtaattgtcaagttaaacataaaatttagaaatctataata

SEQ ID NO: 209802 - DNA, 458 bp, Homo sapiens
tccacaactaagttatcaatatcaaaagtataatgaagtgtgccaatatacgagtttcaggctgggctttagttccctaccttatcgggaaacaatcattgttctcttaattttatgaaaagtaaaaatgaatatgtttaaaatgcatcatattaaaatgtgtgcaattacttaattaaaaatgtcaatttatgatttctctatattgacatgtatttctaaattgtagttgacattatttaatatattcaaatagcttatawgcatattaataaaacattataataaaaaatcattatatatatttacgaattaatgggatctttaaacatgttaaatttgttttggtgtaatattacgaaccatgttaggttttaaatttcatttgcatttcaatccctggcatgtagatatcaaagctaaatcccagtcttcgttgtaatgaagttcatgttttg

SEQ ID NO: 209803 - DNA, 602 bp, Homo sapiens
aatgtatatggaacaaaaaaatagcctgaatagctgaagcaatccttagcaaaaagggactatattaaactataaagctctgcacagcaaaagaaacaaacagaatgaagagacaatgtcttgaatgggaaaagatatttgcaaagtactcatctgacaagagactaatatccagaatatacaatgaactcaaacatcttaacagtgaaaaaaaaaaaagaaaagaaaaaaatcccattaaaaataggcaaaggacgtgaatagacatttcgcaaaagaagacatacagatggccaacaagtaaattttcaaaatgtttaagtcatgaatgtttaagtcatcacggaaatgcaagtcaaaaccacaatgagatattatctcaccccagttggaataactattattaaaaaamcaaaaaataacaagtgaggataaggaggaaaggaaggggaactcttatacactgtttgtgtaaatgtaaattagtacaatcactatggaaaacagtatagagatttttcaggaaactaaaattagagctaccataagatctagcaatccccctactgtgttatctacccaaacaaaaataatcagtatat

SEQ ID NO: 209804 - DNA, 542 bp, Homo sapiens
aggggagggagcaggcagcaatctttgctgttctgtagcctctgatggtgatacccaggtgaacagggtctggagtggacctccagcaaactccatcagacctgcagaagaggggtctgactcttagaggaaaaactaactaacagaaagcagtaacatcagcagcaagcaaaaggacacccacacaaaaaccccatccaaaggccatcggcatcaaagatcaaaggtagataaatccacgaagatgaggaaaaaccaacacaaaagggctgaatattccaaaaaccagaatgcctcttctcctccaaatggttgcaactcctctccagcacaggcacaaaacaggacagagaatgaatttgacaaattgacagaagtagggttcagaaggtcggcaataacaaacttctctgagctaaagaagcatgttttaacccaatgcaaggaagctaagaaccttgataaawagttacaggaactgataactagaataaccaatatagagaggaacataaatgacctgatgcagctgaaaaacacag

SEQ ID NO: 209805 - DNA, 544 bp, Homo sapiens
ttgggcagtggggtccaaatgtcaatctaagtatatgccattgttttttcagtcatatttctgttttgaactgtatttgttgttgagatatggtcattattttaaataagtaaaatccactgaagtctttaatgccaaaaaagtgtttagttttcataaacgttttatgtgggtttgaaaagaatatactgattgctgtgttctatgtatgaccatttgatcaagattttmattgggttgttcaaatttttatatctttactatcattttaatctttgttttgtctattaatgtgccaaatgggtgaatattctccccattttcctagttgatttgaaaatttctttatgaggtactattaacttttgctttatatgtgactttaatcattattacaatacatagttttataattgttatatcttgatggaataaacattttatcaaatgcattgaactttttacttctaagaaaacttgcttgctcttttatcagatattaatatagctttagtgttttcctgcgatatgctttctcaataat

SEQ ID NO: 209806 - DNA, 544 bp, Homo sapiens
ttgggcagtggggtccaaatgtcaatctaagtatatgccattgttttttcagtcatatttctgttttgaactgtatttgttgttgagatatggtcattattttaaataagtaaaatccactgaagtctttaatgccaaaaaagtgtttagttttcataaacgttttatgtgggtttgaaaagaatatactgattgctgtgttctatgtatgaccatttgatcaagattttaattgggttgttcaaatttttatatctttactatcattttaatctttgttttgtctattaatgtgccaaatgggtgaatattctccccattttcctagttgatttgaaaatttctttatgargtactattaacttttgctttatatgtgactttaatcattattacaatacatagttttataattgttatatcttgatggaataaacattttatcaaatgcattgaactttttacttctaagaaaacttgcttgctcttttatcagatattaatatagctttagtgttttcctgcgatatgctttctcaataat

SEQ ID NO: 209807 - DNA, 580 bp, Homo sapiens
ctatgcaccctggataagacagaggcaaatgtatatagatttagtcaatgaacaaagttctgtttgctactacctgtgatgctgtggcctcttcctgttatatagcatttcctttgactaaatggtcatttgtagtatataaaatcttgctaacaatatctcactgacccacttcccagtatagactagcatagcatttttagacatacaactttaaggaggagtgtattctttcaatgtcagacatttccttaaaatgttttaggcatttgttgtaatggagtatggaagacacacacacacataaataactgtcatgaaagaagtttatactcacagattgctagaaactgaaggcagggcatgccatgcaggaccacatggggaagcacaaggggccaatcaagtgtcagagggagtaaggagaaaatgtgggcgagartctttattgtggcttccacagcacaggcaaaacagggtaagcagacttaatattgggtaatttgaataatttaaataggctgtgaagtacaaaggctgcccctagttgcctgatgcctgggcttgcgtgattgcagga

SEQ ID NO: 209808 - DNA, 642 bp, Homo sapiens
agaaaatgcaaaatataaaaaccataattaacacagatataagctcagttgctccatacagaattccagggtaccaccttagggcccagtcctttttcttcaaacctcagtcattgccccatgaagggccagcctatccagacacactgtacctgcatttggtttattgtggtgtgaggtgatctccagttgtgttcatgggatcttttggggtcaagtagctttcattttcagcccttgaaagcaaactatgtcttttgcttccctcctggacaatgagaatattgtaaaacggctatctgggcagttgttggggcaggatccttcatatctgatgggcagattctcctttttaaatattttaagtagaagcctttttattatatccttttttggaaaatagagtttgaataagttcaaggattcatgaaaagtatgtttactcactgtgagaggaacatcaatccgttactgtatcacctgggtgaatcacttccccagtatcatttgtgtaatttcaagttttctccagaagaaaataaaatccaagttaattttttgggtctctctctctctctcwcacacacacacatacacacacctccttttcctttttaaaattttgagataattgttgattca

SEQ ID NO: 209809 - DNA, 512 bp, Homo sapiens
ctttccaagctatatgactttgtttttgttttcttgtctgattatttagtcacagtttttgatatatatttatttatagcacttgttaccttctgtcatattatataatttatgtttagattttatttactttactatcctagtaaagtattagctccatggagtacacatttttgtttggttgtgttcattgttgtatccctgggccctaaaattatgcctgcaatattctaggcactcaaatatttgtttaatgaatgagtaagtcagagtatgtcacattcgtatttaaaaacatccaatagtgtctcatcacacttaaagcaaactgcatattcctyaccatgatctataaggccttatgtattttggctcataccactgtcccttattcccatacccctccttcactgtgcttcatctgcacacttgtcttcctcaaccataccaagtttatctaaaccccagagcctttattcatgctgttgataatttgttctgccttcctaaag

SEQ ID NO: 209810 - DNA, 601 bp, Homo sapiens
tttttaaacactaaagttagtatttgcaacttaaggttttcccataaaacctcatggaaatgtaatgcaatgcaaatactgcatatatttttggtggtttctttctcttataaacttgataataattagattccctgggcagtcaattcagttcttgttgttttaaggagagtgtattagctcctgtaacagtttctgttacaagagttataagaaatagaacataagtaatcaagatagaaaaaagttctaatagagtrcaacttctgcactgattacacattgagtaaatattctcattctggtccttgtgtagtagttttactatgtttgctattgttttcatattccaaccaattttaagggtcctatcaaaaaatcccttgaggctgtagtttaacactgaaaaagggttttcatatgttccctgaatatggtcagtcaatcatttcattatgttttttgtcatgaacacttccttaagctataaggactcatgaatgttttagaagaacaacatttcaatttctatctattctcagacattgcttgtttctattcttctttaatatttgctctacatgaacatcaattttctgtt

SEQ ID NO: 209811 - DNA, 421 bp, Homo sapiens
tttgagtgccaatctaattagtttgacctctattattcagttaagggaatacaatagggtcctagcaaaaaagaaatgacatgcttaaactaggtaattgaggagaatttaatggaaggattactgtgcttataaacatgatagcaaggttaaggaaatcctacaagagccagtgaagtcagaattatcttggtgtaccaatgtgggaatctgttgtcacttctaagtctgaaggagcaarggaagtgagtagttgttcaaatcctaagagaagtgtagcagtagcattaggtgtagggaggtcacccaaaaaactgtacttttactagaggaatgtagccactgaaaactcacaatccagtaggagggaagccagggacataaataccccagtcttaatcctcttctgccctcgggtccc

SEQ ID NO: 209812 - DNA, 596 bp, Homo sapiens
atagggtttcaaaaactcctaaaattatcaagtaaaatttatatatcatttagatatgaatcatgttttaagaatggcaaaactaaatgtatgaaagaaaaaggcaaagggaaaattagctaacatcacaactgttataagatatcactgtgaacaactgactattgattcatcatagtcacaatttgggattatttagcttgcaaactgcaatgttcacttctgtattccagatgaatggagatgtataatgaaatcctgagtccctacgatgcctattaatcttccactatttgtggttgaagtaatgtaagttatggctgggtgattttgtcctgaattattcacagaaacattcccctgaactcactcttccttccctggtaccgtgaaaacaactatattgaatttacaattggtgattttaagtatgtgctcgggagaagaacatgggaagaagtgagaaaatctgccctgctcagctatggtgtttatcaaagtccaygcctatggacttaaattcaatatagggaaatctctcatcaaaaggctaatttagtatttaatagatttagagaataaaaccattggcacat

SEQ ID NO: 209813 - DNA, 365 bp, Homo sapiens
cagtaaatccatgtgattctgtgctttcctttgatggaagacttgtaactactgattcaaccttctcaattattattgatcttatttattattatataataagtaggattttattatccaatttgttgacacataattattcagcgcagtctcttgtaatcctttggatttcttttgaatccgttgtaatgtctcctctttcattactgattttgtatgtttccttttttttttartctagcctaaaatttgtctattttgtttaattaaaaaaaaacctcttagtttcattgatcttttctcttatttttctggcctctaacttatttattctctgattctgttatttccttccttttactaat

SEQ ID NO: 209814 - DNA, 606 bp, Homo sapiens
atagtctagtctagtggattgaggtttttccagaaataaagacatcagtctaatttttttttaagaggaagaggagtaagaatgttcttcactcttccacatgaaaggaacttattggaaaagcatttctgtcctctttctgtccctttacacactctatctcaaagaagcagagtgacttatctactgggtgttatttgagaaaaatyattaagcatgttcaggtcagcaactctcctcttcattgcagactcttcatgtgggaagtccacctccctaagtccaaatgaataaatatgcccagttccagatttcaataattagctcgcacactagactagcagagctaaaattaagttctctaatctgacctatacctataataaagatcacattttggccttcatttttgctttttgttattttagcaactttttcaaaacccatgaaaggtagagatcaactacttattgggaccccttaatagaccttaagagagtcctcaaattagaggttacatcaagtgccaaacaaataaaaataatacttttgacttacagggaaatgcagtatatcaattataaaatatttaaaactagcaaaaag

SEQ ID NO: 209815 - DNA, 606 bp, Homo sapiens
atagtctagtctagtggattgaggtttttccagaaataaagacatcagtctaatttttttttaagaggaagaggagtaagaatgttcttcactcttccacatgaaaggaacttattggaaaagcatttctgtcctctttctgtccctttacacactctatctcaaagaagcagagtgacttatctactgggtgttatttgagaaaaattattaagcrtgttcaggtcagcaactctcctcttcattgcagactcttcatgtgggaagtccacctccctaagtccaaatgaataaatatgcccagttccagatttcaataattagctcgcacactagactagcagagctaaaattaagttctctaatctgacctatacctataataaagatcacattttggccttcatttttgctttttgttattttagcaactttttcaaaacccatgaaaggtagagatcaactacttattgggaccccttaatagaccttaagagagtcctcaaattagaggttacatcaagtgccaaacaaataaaaataatacttttgacttacagggaaatgcagtatatcaattataaaatatttaaaactagcaaaaag

SEQ ID NO: 209816 - DNA, 540 bp, Homo sapiens
tatggggatttcttttgagttatagtttatctagaatcttcaagggaacgtttttgctttgtgttgcttttgcaccctccccaccccaagctgattgtgtcattgtgtctctttcatgcagttggtagaaaccactgagatctgaacaccccacagaaatccaggatccacatgtcaccaatcaagtaaatgtgtccttatgcttttatttactgttttatttttatgtgactactcrtttatgatgcatgttcatttccctgaaattcaagggaacccaatagaatcactatgtttggcttaaatataaagggcatggggaagaaaaatgaatagaggagcttcgtatctgaaaaccaaaagaacctgacttcgattccataggttcttactcagggactggaagcaatcattcagtaggtttgttattctcctataagtgtgtgcaaacttagtggctagtcatttgtggagctttctgagtcatgagttcctcaattcaatacattttcaaaggcagctatgccctacaaataaaca

SEQ ID NO: 209817 - DNA, 594 bp, Homo sapiens
catgagagtgctgtagacacgtgagctaggcaggacaaaagattcagaaccactatattacattaatgcataaaaagctttgaaatggtggaaagctgggagaagacggtagatcccagctctagaccacttacatctgtgtgagttagaacaagcatcacaaatcattgctatcacagatgacagcaattgtcatcatcatcaccttcattatctcatcatctcatcatyatcatctctactgctaatacagttaatacttattgagaacttatggaatgggtattattttaaatgcctttcagctgcacacaaactgtttatagtatgtattgttttatccctaatttgataagaggaaactaaggcacagggaggttaagtgatttgcccaacaagatgataatttgcagagacagcaagtcctgtagtgtgagatgccagctctgaaccaccctgctttaccagggataggtgtgttagaaagattacatgagataatctaagactgtgttacatgtattatgtggctatgcaaaggggatataatcatgagagaaccaagttgcttcccaattcatggtgtactagtca

SEQ ID NO: 209818 - DNA, 559 bp, Homo sapiens
agtataacagtagtaattatagatttaaaaagagaagacctcagtaattacataactaggttctaataaacctggaactggttttagactactatttctatggattttgtattatattgattttgggtggagttgctagaacagccatgtagggtatatgattttagaaaattaaaaagttaactgctagcagtgcttatcccatacactattcaattcttctgtatttatgtcttaattttaatcatagaaagaattgctaggcaaaataaaatgtcctctactgtgttgtttcacagccataaaatacagaaaacattctgtgcaattttgttgaaagtcaaataagaatgaaataaatataaaccaaagaagtcattgcatgttgtctgctgaattgcctcactgataaatttwactttctacttcatgctcagtgtactctggaatcaagttcaaggttaacgccttctttggtggagtgacattttaaactcagaatagagctggagatgcccatataaattacctggaaaaactcctttattttcagaagaag

SEQ ID NO: 209819 - DNA, 620 bp, Homo sapiens
tccattatttagacttgattaaaccacttaaatagtgtgtgtttgagcaaagtgcaagtcttatgtatstgaaagtaattttattttttaaaagctaaatatatcttttatttgaaagatcttgatataaacatataataatatataaatatcaataaaattatagttttgattgtgctttattcaatttcataactagtacattatctattttctactactgctttaaaatgtattcagcagaaagggtttttattcatagtcaaaacaacaatgaaatatgtgttcctgcttggctgaaagggaatgttatttttaattgtctcaaaagtatcactataatggtgatatgcagtctacatataaattattatatggatcaacaagtttaataatctcacaaggtctactaaatgatcactatcagtgattattcaaaattacagttcattttatgctaattataaaattgtacctgattttccaataatagctatgactcataaaacacttctaattaatacctgtgaatgtgggtgcaattaaatattaatgagatttaacttttagaataatgcaccaccaatccattcatctccaaaaatgccagtagattaaaa

SEQ ID NO: 209820 - DNA, 620 bp, Homo sapiens
tccattatttagacttgattaaaccacttaaatagtgtgtgtttgagcaaagtgcaagtcttatgtatgtgaaagtaattttattttttaaaagctaaatatatcttttatttgaaagatcttgatataaacatataataatatataaatatcaataaaattatagttttgattgtgctttattcaatttcataactagtacattatctattttctactactgctttaaaatgtattcagcagaaagggtttttattcatagtcaaaacaacaatgaaatatgtgttcctrcttggctgaaagggaatgttatttttaattgtctcaaaagtatcactataatggtgatatgcagtctacatataaattattatatggatcaacaagtttaataatctcacaaggtctactaaatgatcactatcagtgattattcaaaattacagttcattttatgctaattataaaattgtacctgattttccaataatagctatgactcataaaacacttctaattaatacctgtgaatgtgggtgcaattaaatattaatgagatttaacttttagaataatgcaccaccaatccattcatctccaaaaatgccagtagattaaaa

SEQ ID NO: 209821 - DNA, 245 bp, Homo sapiens
ccagctcttcattcttttaagtacctgaaaaaaatgtcttccaaaaatggttttcctgaagcaaatatgacagtatttcaacgacagcacccacctcaccatctctcagaattaagtgactaagaactgttagggatcaacaatagtacctacctcatatcattttgtaatgattatatgaattaattcatttaaatcactcagagyagtgtgctagaaataagtgttagtttttattattacta

SEQ ID NO: 209822 - DNA, 607 bp, Homo sapiens
gtttttatttttttttaattttttatttttttccagttttttgagatgggagtcttgctatgttgcccaggcagctgtctaacgcctggcatcaagggatccttccacctcagcctcccaagtcttcaggagtacaggcttgagctactactacaatcagtgtattaaacatttttagattccacatgtaagtgagaccatgcaatatttttctttctgcgtccggcttatttcacttagtgttacgctttccagacattcattttcattgacaggcatcatacatgatgctaaagagcatggtagacagggagtcagacagatttgggttaatgatctgagcccaccactcatccaacgatgtgacctttaaatgggttaatttatcctagtcttgtgttcctcagctaaaaaatggggataggttgataatcgktaaggttttgtaagggttaaacgagacatgtttgtaaagcacttaatgaggtcagacacgcaggagctgcccagtaaatattagctacaaatttaggacctaacataaagggatctctcaagaaaatcactgaatgcaaagacaagtattttcttaatactttacagctga

SEQ ID NO: 209823 - DNA, 654 bp, Homo sapiens
atgttgtcaagggtacctcgtcttctctttaaaacaaaactaatttcaaaggttgcttaatcaaatcacaatgaagtttcatacttttcaatttaacaaaatatcacagaaaagcatgcatcatagaaaatcatatcttcctagataatgaatttccaacaggtaattttggagagtctctatttataagctaagaatgatgatttgaatatttaaagatatgcactgctgacaaataggagtgtatttatggagtacaagttttagttatctaaggtttctaaatccccaggagctcaagaatgaagaaaccatgcactgataatccgaacctggatagatgaattctagacagcaacttgtgyactcccctcacagccacagaggtaggtggaatgtataatacattgtcttgtggaaatcataagctcaaaaggaccctagaattatcttcattgctatctcatgatgaccttttcataatatgcagccactgatcttcacgtctcaaattataatagtcaataaagaatcactttatataaaaagtatttgacttatttcacttatttgaattccagggtagggagactgtttgcagggatatttagcttagctttcaaactatctgtggttcctaactgtcacaacatt

SEQ ID NO: 209824 - DNA, 604 bp, Homo sapiens
ctgtgcagcaagcctctattactcactctaaattaattaacaaagctggctctatcagacacaaatttagcaatgtcaacatactttacactccaataaatgtttgtaaaaaatatacatgggctcccgtatctcttgtttaaactgcctgtgatgttataatcagggaatatttttagatcttattgaacatgctatttacatatagggytctctcccttcttgttctttcttgccaactgtcccttgcctaagtgtgcccacttcagcctcacgtcaattctgcaaaggctaacatattcccttacatagattgaaactttctgaaaaagaaaaccaatcagcatgtacaggtctgctcaattattggttgctctggatccttgctacatgaacaataatataattaacttcggagtagattagcttctaactcataacataagtatatgaataaaaggttactttttgaaagcctataattcttcaaatgtcatcttgtagccaacacgaaacattcaggcaattatgtttctattaataaatgtaacaggaatataacacttccttcagtgaaagtttacagtgaaagccaggtacccag

SEQ ID NO: 209825 - DNA, 415 bp, Homo sapiens
tacaacaattgagcggctataagagaagctcgtaagaaaggtgaggaatctagggcaattcccgggtttctgcttttgatgacctagtagcaactcacagtatattgagatagggaacgtataaggagaratagaactggatgggaagttagcttggtttgggaaatgacttagaggagaatgaataacatgtaaatggagccagttgcaaagaatataattatatatgggaatgtgtaaatctgtagagccccaaggttaatattaaaaagacaagaactagccatcaaataagttgaaattttacaccatagatattactattgactaaaagaggtagctgttaggtgcccttctcacaatgcaaatgaggagtgtggatctgggtagctgtgattacccccataatggtgaa

SEQ ID NO: 209826 - DNA, 393 bp, Homo sapiens
ataattgatattgcattagaacattccatgggatttgaaccagcctctttcacactttagatttcaggctagtataattccctcaccacacaaggcagaaccgaaatccctgaagttcaacaggacgtatccaatttcaacaactttacaattttcaatatctgtacaggatttttgcaaaaacccatttcaaatatcccattatcagttccacgtctttttgtgaataccaaaatatattagctagaccgtcatcttattttagctttagaawgtatatcagattttttttccagacacaagcaattaaaggattggaaaatagctcatggaaagctccaaagaattgatcctcagagagcaaatcttgtaacaccaaacaaccacaattcc

SEQ ID NO: 209827 - DNA, 580 bp, Homo sapiens
tgtctcattactggtgatgctagctttgatcacctggttaaggtgctrtctgtcagatttctctgagtattaataaatcattaaagcctgaggactagcaaggtatatccagcttttccctgtaaaatatgcagaatttttggctatgctattcaagtgaactgtgagatctggtgctccttttcatgtgatcaccattaccaggttgaggagtcccatgtctcttcataatacttatttcttacccaggtataactaagtcgaccatgttttttcttatcagaataatttaggcaatctgtgtccttatctgagattgttgtattaggtgaaatcattccaatttcttatatagctgcagatactccatcatgctgatggatgtaggcatgggatggatcacataaataaatctttcctatgcttgtttcagaatcaggagtcttatggtattcatcattgaatcagtggtcctgacttagcttgaggagtgtattagtcattattaataattagtaagtgaataaaagcacataattttttataaggatacctagaattaaagcaagatccctttctt

SEQ ID NO: 209828 - DNA, 529 bp, Homo sapiens
gtattagtcattattaataattagtaagtgaataaaagcacataattttttataaggatacctagaattaaagcaagatccctttcttcaggatgcatactttttaaaatggatatttcaataaaagacaattmtcatatattataatagttcaaaaattaaaaataagttagtggatgttgaaaggcgagaattaaccttggctggaatgaatgtggaaagcatgacaaaagaaatcaaggtgcagcagagaagcctaaaccagcagaagtaaaagtgactttgagaggagaatgtgtattgcatttgtgaatgcctaggtaaatccagttagagcttagtctgagataatttctgagtcaaaaactaatattcccttctgttccagtccaaaataattagtaaatggttttgacgagggcctagtcaggtaaagaatgacttaagtatagcagataggcaggaagaagataaatgagtagaactaacattaggaaataaacaaaagttaaggttctggttttagcct

SEQ ID NO: 209829 - DNA, 375 bp, Homo sapiens
gctcacaggttagctcctgtacctgcagctgtagcataaaaaccagaagttaacaactctggcaggctacgattgtaaagtggctttgacaaactttgatgattcacaacgtggcttaggctttgtctcatgcatattagtggaaatgtactgtctttatttcctggttccagccactcttcacaatattcctgagggagatatgtgtccaaaggggcaaaggaaaacaaaggagccctttagtattagaccagtatgaccatatggccaggtttgccaggacaatgctggatataaggtgtaattatcatagcasattttttactctcaaagtgtacccattctgatgacaaatcatatggctaccctaattat

SEQ ID NO: 209830 - DNA, 540 bp, Homo sapiens
agtaaggtgcatgaccctgactcgcatttgatttcattaagttccttttttggtcttaagagcataagactaaaataagattatttggggtaagattttaattacactcatactatattccattgccattattacttgaatgtaggtatgggtagatagtatagctccatagatcattaccttttggttttgatcaaatcaaaaaggtgttcctgatcatttagttattagactttacattaaaatattgtaaggatctagaccctcaaagctttagcctacaatattctcatattgcttacaaatactctggcactgattttccctgggtttgtaggagtagccttacctgtgcttttaaatcagcattccccarcatggtctaatagtttctcaagatgatccatgaaaataaagtgtttttttcattagtttgggaaatgatgtatgggatagctcttcaacccactctcaaatagatacaacgtatgttagcatattaaggttcgtgatcaggccaggctcggtggcttatgccca

SEQ ID NO: 209831 - DNA, 540 bp, Homo sapiens
agtaaggtgcatgaccctgactcgcatttgatttcattaagttccttttttggtcttaagagcataagactaaaataagattatttggggtaagattttaattacactcatactatattccattgccattattacttgaatgtaggtatgggtagatagtatagctccatagatcattaccttttggttttgatcaaatcaaaaaggtgttcctgatcatttagttattagactttacattaaaatattgtaaggatctagaccctcaaagctttagcctacaatattctcatattgcttacaaatactctggcactgattttccctgggtttgtaggagtagccttacctgtgcttttaaatcagcattccccaacatggtctaatagtttctcaagatgatccatgaaaataaagtgtttttttcattagtttgggaaatgatgtatrggatagctcttcaacccactctcaaatagatacaacgtatgttagcatattaaggttcgtgatcaggccaggctcggtggcttatgccca

SEQ ID NO: 209832 - DNA, 557 bp, Homo sapiens
catcagatctcatgagacatcactcactatcacgagaacagcatgggggacaccactcccatgattcaatcacctcccaccacgtctctctcttaacacktggggattatggagattacaattcaagatgaggtttgggtgggaacacaaagcctaaccatatcagtgacatactggaccaaaccctagaataggaaaagacatagtaaaatacaaggaattctgaataaactatggacttcagttaatgtatcagtaatggtctactaatttcaacaatttaaccatattaatgtaagatcgtaataatagggaaaactaggtgcagggtatatgggaactctctctacgatattctcagtttttctgcaaatgtaaaacttctaaaaaattaaatctttttttttttaagttaaaagggattttcttcttcaacaaaattgtgagctagatgatctgggacacccttccactgcacaacgaccagattctgggaaaaaaaaaaaaacttatctatgcattactgaacttgaagaaagtaggaggaatttccatgt

SEQ ID NO: 209833 - DNA, 509 bp, Homo sapiens
tgattcaatcacctcccaccacgtctctctcttaacacgtggggattatggagattacaattcaagatgaggtttgggtgggaacacaaagcctaaccatatcagtgacatactggaccaaaccctagaataggaaaagacatagtaaaatacaaggaattctgaataaactatggacttcagttaatgtatcagtaatggtctactaatttcaacaatttaaccatattaatgtaagatcgtaataatagggaaaactaggtgcagggtatatgggaactctctctacgatattctcagtttttcygcaaatgtaaaacttctaaaaaattaaatctttttttttttaagttaaaagggattttcttcttcaacaaaattgtgagctagatgatctgggacacccttccactgcacaacgaccagattctgggaaaaaaaaaaaaacttatctatgcattactgaacttgaagaaagtaggaggaatttccatgtgtcctcctgacat

SEQ ID NO: 209834 - DNA, 509 bp, Homo sapiens
tgattcaatcacctcccaccacgtctctctcttaacacgtggggattatggagattacaattcaagatgaggtttgggtgggaacacaaagcctaaccatatcagtgacatactggaccaaaccctagaataggaaaagacatagtaaaatacaaggaattctgaataaactatggacttcagttaatgtatcagtaatggtctactaatttcaacaatttaaccatattaatgtaagatcgtaataatagggaaaactaggtgcagggtatatgggaactctctctacgatattctcagtttttctgcaaatgtaaaacttytaaaaaattaaatctttttttttttaagttaaaagggattttcttcttcaacaaaattgtgagctagatgatctgggacacccttccactgcacaacgaccagattctgggaaaaaaaaaaaaacttatctatgcattactgaacttgaagaaagtaggaggaatttccatgtgtcctcctgacat

SEQ ID NO: 209835 - DNA, 509 bp, Homo sapiens
tgattcaatcacctcccaccacgtctctctcttaacacgtggggattatggagattacaattcaagatgaggtttgggtgggaacacaaagcctaaccatatcagtgacatactggaccaaaccctagaataggaaaagacatagtaaaatacaaggaattctgaataaactatggacttcagttaatgtatcagtaatggtctactaatttcaacaatttaaccatattaatgtaagatcgtaataatagggaaaactaggtgcagggtatatgggaactctctctacgatattctcagtttttctgcaaatgtaaaacttctaaaaaattaaatctttttttttttaagttaaaagggattttyttcttcaacaaaattgtgagctagatgatctgggacacccttccactgcacaacgaccagattctgggaaaaaaaaaaaaacttatctatgcattactgaacttgaagaaagtaggaggaatttccatgtgtcctcctgacat

SEQ ID NO: 209836 - DNA, 509 bp, Homo sapiens
tgattcaatcacctcccaccacgtctctctcttaacacgtggggattatggagattacaattcaagatgaggtttgggtgggaacacaaagcctaaccatatcagtgacatactggaccaaaccctagaataggaaaagacatagtaaaatacaaggaattctgaataaactatggacttcagttaatgtatcagtaatggtctactaatttcaacaatttaaccatattaatgtaagatcgtaataatagggaaaactaggtgcagggtatatgggaactctctctacgatattctcagtttttctgcaaatgtaaaacttctaaaaaattaaatctttttttttttaagttaaaagggattttcttyttcaacaaaattgtgagctagatgatctgggacacccttccactgcacaacgaccagattctgggaaaaaaaaaaaaacttatctatgcattactgaacttgaagaaagtaggaggaatttccatgtgtcctcctgacat

SEQ ID NO: 209837 - DNA, 392 bp, Homo sapiens
aacttgatttcattataaaatccacataatagasagattataaaggaaaagaccaatagttcttacctacctctagtcatcagaaggttccaatagagcctaataatcagaaataatcaaacaggtttaagtcagtttggcaatacactgtgtaagacagcctgctttagaaggtccttggttccttggtagatgagtatgtgttctctttttctgtgtagcattgattaccaccttgtagaaacacaaatgctaattctggaagtgaattatagaatcatatagtccgcttatttatggagaaattaagaaagattaagtcactttctcaaggttaatccatcagctagatagtggtgaaagaaagaacagatcctggatcttgtgataca

SEQ ID NO: 209838 - DNA, 489 bp, Homo sapiens
caggctctctttaccttgtcctgttctagtcctctaaattctatgatgcaaactcattctcacaagagaatcatgggccccaaatcttaccatctcaaacttacacatatcttttgagcacttttatgtattcagcttcaggcagatgctggcttttctcctgatgtgattgagaggattataatcacttcaaaggaccttcccttccctgaagatgctgtccgatttacctcatttgattcatgtcatgcaccactggcctaccatgtcttggtaagcaccacagcactattggcactgttctgtggttaytagagttcttttactttaattgtttcactttatcttcaaaacaatcttacaaaggtataggtataatgagggaatagggtcacagaggctactcataaggttaataaccaagacttgaattctattctggttcctaaattaaggcactttttgttatatcatgtttgctaatgaact

SEQ ID NO: 209839 - DNA, 627 bp, Homo sapiens
gcagtcggtactaagactctcccgatgggtggcttcggctcaaggacgccctgatggccttgccaagcctgtcttagactgcacggcagggcagtctagtgcttccgcccaggstggccaaccttcccggtgtgccccaactgtcccaccttcaatcttgtcacagaagcccctcagtcccaggcaatcctacttctacccaaccttccttccctctctccttcatgaaggatcaagcttaatcatggtctgaccatttcctagcctccctcctatcccatttcctctcacaggggtttcctctaataaaatccttgcatgtttaatcccaatgcagtgtctgttttcagagcacccagcctactgtgaagaccctgcaaagccttcctgtatgacttctcagagaaaaaaatgagaaattttgatcactgtgtgatcatctcaccaatctctgtggtcggaatctcacttggcaacttaccaggactagcctctttcagctcttttattttaattttatattttttgtagagatggggtcatgttatgttgtccaggctgatctcaaacttctggccttccacgttggcctcccaaagtgctgggattacaggcgtgagccactgc

SEQ ID NO: 209840 - DNA, 607 bp, Homo sapiens
ctggcttttctcctgatgtgattgagaggattataatcacttcaaaggaccttcccttccctgaagatgctgtccgatttacctcatttgattcatgtcatgcaccactggcctaccatgtcttggtaagcaccacagcactattggcactgttctgtggttattagagttcttttactttaattgtttcactttatcttcaaaacaatcttacaaaggtataggtataatgagggaatagggtcacagaggctactcataaggttaataaccaagacttgaattctattctggttcctaaattaaggcactttttgttatatcatgtttgctaatgaacttgagatcttaatagtaggtccatcagctactaatcagagaggttcattgtatrggctggggcaaatgtagaatggttcatatataatcacccaaacatacctttctcaatataccacatcatcattcttgtgttattaacacagtattttttgttagagattttagtgacattagttgaactgatagcctcagtcaactcagaatcacttagaatctgatgggctgctaaaccctttgacataagccataagcatttttaccatgc

SEQ ID NO: 209841 - DNA, 505 bp, Homo sapiens
aacaaaatctttgtgccatacagaacctaaaggaatatttattaatggatttctttaaatatgtcataaagtttgaattttcatttctatttttaggcaaggcaggacccaatcattaaaaaacgagccatccracacaaacgaaggttttcctgcgaagaggtagcaactgaataaatatttgaactcaaatgagattaatcagccattaggtcatgaaaacggaaaacatctcaaagacctaaaataaatccctgagataaacaaaaacaacaaaaactatgttaagctgtttatttctcagtacgatgcactcagagtccatggacaatgaaaataattatttaataaaacctctgaagcttaatgaaggtaaaagacccgtgtataagcaagtgatgaaacgatggggaaggcatttttgaaatcatctcttgaggtctcattgttgtttaaagatgctgaaattcttagtctatagaaatttgtaatggagtttaaaaca

SEQ ID NO: 209842 - DNA, 589 bp, Homo sapiens
agagagggtgtaagtagagatatttgcaaatctcaaagaagtcttgtgaaaatggtgagaaataaaggtggggaggtggctcttgtgtggctctgggaaaatggtaagagataaaggtggggaagtgggccttgtgtggctctgggaaaatggtgagaaataaaggtggggatgtgggtcttgtgtggctctgggaamatggtaagaaataaaggtggggaggtgggtcttgtgtattcctgggagggaaaaagtaaaggagcacttgtggaagtgaatgcacctcaggatgtgggatagccaatggcagaagcttgcctggatcctgatattcccagttcccacacggcctggttcacctgtggccccaggtgcttgtcccattcagttcggtgcacctggatgcgtaaccacccaagtgctctctgatttctgccttcaaatgtaggctcgtcctctgtgcttctccattaaaccaccatccagtcttcactcttgaattgcagtgtgtgttttgctccgcatgctcacctgcttttaaagatcctttcagtcagagatggagaagggaaaatttctccaccagctc

SEQ ID NO: 209843 - DNA, 576 bp, Homo sapiens
ggagaatatagtatagagtttcctcaaaaaaaatctaaaaatagaactaccatatgatccagcaatcccactgctagatatttactcaaaagaaaggaaatccatatattgaagagatatctgcactcctttgtttattgctgcagtatttacaatagctaagatttggaagcaatccaagtgtccatcaaatggtgaatggataaagaaaatatggtagagatatacacaatggagtattactcagccataaaaaaagaatgagatcctgtcatttgcaacaacatggatggaactgcaggccattattttaagtgaaataatagaggcaccaaaagataaacttcacatgttcttgctcatttgtgggagctaaaaattaaaacaattgaacccatggagatacagaatagaatgatggttaccacaggctgggaagggtagagggtgttgtgagggaagtaaggatggytaatgggtacaaaaatattgttagatagaatgattaagatcaagttcttggtaacacaatggggtgattacagtcaacaataatttattatacatttaaaaata

SEQ ID NO: 209844 - DNA, 488 bp, Homo sapiens
caaaagccaagcagatgctgccattcttcctgtacagtctggggaaccatgagccaattaaaccccttttttccttttaaaaaataaattacttagtctcaggcatttcttcctttctttttttttcacaaatcatgtgtttgtttattttgaaatcactagaatcatcttggttttcattcttgtyagaaacctctcaagtttttctttagaagacaaagcatggccatagaatctgaagggggccttaccaacctcataaatttttctgtcagttatctactgtaattagtctgttctcatgctgctaataaagacatacctgagactgggtaatttataaaggtaagaggtttaatgagctcacagttccatgtggctggagaagccttaaaattacagcagaaggcgaaggaagagcaaagtcacatcttacatggtggcaggcaagagagagcatgtgcaggggaactgtgctttataaaacc

SEQ ID NO: 209845 - DNA, 543 bp, Homo sapiens
gacttggtcttgggctttagtcactcatattgggttcataataaacctttttaaatcttttacagtttgactctctttgttgacactcaattgccttcagctcaaaataattcttatgccacagtggcatattttggggtggcatagtctgacatacaataccccaaacaaaaactgtctgtgatagtctataaaaaccaactatttaggcaggaggcccagagtaccaagacaaatggggaatgtaggtcccctacacaccttcacactgcataaggggaagacagcccaggtagctcattctatccaatgtaggagataaaattctctaaaaagccattctgggttggagaagtttcaaagatggtttttgcctccaatttctgggtacatctctgacctttaatattgctaagtatgttaagaacaagaagaaaagtcartgccctttctttccctctcctcattttcttcttttggtttttcagaataaattgaggtgggagagaaataaactccttggtttctaagcagtgcaaggaa

SEQ ID NO: 209846 - DNA, 626 bp, Homo sapiens
attctttctgtcatgagtaccctactccgtgagttcctactccaagtggtaggaaccccaggttcacatctttacagcaccctaacctgaaaggcaaaatayggcctttcctgctccttcaggagaaaagtcccagataatgcctctgctggctccaaattggatcacaagtccatactaaaaatctcaaaaatattacctgcctataatatatcactcaaaaattacgttgagttttaaaacgttaataggagggctgggcgcggtggctcacacctgtaatcccaacactttaggaggccaaggcgggtggatcacttgaggtcaggagttcaagaccagcctagccaatatggcaaaactctctctctatcaaaaatacaaaaattagccaggcgtggcggcacatgcctgtaatcccagcaactctggaggctgaggcatgagaattgcttgaacccaggaggcagaggttgcagtgagccgagatcacaccactgcactccagactgggcaacagggcaagactctgtctcaaaaaataaaaataaaaataaaaacaaaaaataaaataaaatgttaataggcatgaacatagaaaagaagcaaagagagtaaaacaccaa

SEQ ID NO: 209847 - DNA, 616 bp, Homo sapiens
ggctttcacatataaacaacaactagtttgggtagaagcacttttccataaaaagttcatgaatacatattgttcttcagctttcttttcatacttaatggctggtattgggcatatttcatgttagtattatagctctaatccactcttccatctactgcctaggttatacatatttaattatgtgtaataaataaaagagaaaacaacattcacattatctgatggagaagaaatgaaggaagtttcatttttattttgtggatttccagtgctttttttgttattattattgcttgcttcctttgttgtacttgttctctaaaattaaaatttgttttctcaaaatgtcttttatatctttctatttgttaaaggaaatatatttacaatacttcccttttgcagcatattccaacttcagcttatttaactacttcatgctattaactgtaaatccaagtttaaatctgtagctacyctgatcagaaggggatttatcatcatcagaagcagaaattattcatgagttgcaaataaaagaaacagaagaaaatggtgtatgcttcacttttgcataatcacttgaaatgtttttctacatacttgaactaac

SEQ ID NO: 209848 - DNA, 580 bp, Homo sapiens
aaggaacgctgacctcacccctgcccagatgtggtcatggagattggagagcagcagcagtcacttggccggaatgcaaagcaggtgggagaccactgggtatcagcaagggcaaataggtgcactatgaagtcttctgttttgactctccagcatccaaaccccctttctactgtgggggaaatcccagaggaggtgggggcagggcacacttttgggaagccttacaaagaaggcactagcatgtgacttaggttctgccatctccatgtcccgctctggaccttgagacagtcatgtaagggcacagtgaacttgagaaatttttcacagcacaagcagcagttcaaatgacggtcccatgactcatcaggacatgaggtatattgtaacattaaacatgccatacccaatattgttcaggcttcagtagggcaggaaaggacttccaatactcacttctgccctaaaagcaccacttcctgtcatgtgatgtagtctattgtctgttctcatgtgacaatttgggggaagtkgggggaagacaatttgaaaacagaggttagtagaatttttaata

SEQ ID NO: 209849 - DNA, 544 bp, Homo sapiens
gtgccaggcattgggaacaacagatgcaaaggttctgggtggggagtaaatctggtaggtttgagacagagcaaggaagccagagagctaaagctgagtaagggagggttgggtaayggtgtccaaatcacaagggttttatgggacattaaaaagattttgggagatggaaagccagaagaggctacaattaagttattgactcgattgtgtcagctgaggagtaatggggcaaacacagttgcatgacttatttggggagattaattaggtagtgtttgctgggttacactgcgtaacagtaaaccacttcaaaatctcagtggtttacattaacatgatttatttctcactctgtatgtttgtagttgcgggttggctggcatggttctgcttcagatcacaggtcagattcagacactatgcacatcttctcattcagtgtctcaggccagaggaacagccttgaataggacatgactttctcatggtggaaggcacgggaggaaaagcccagctgaactcatacttgcccctccctccc

SEQ ID NO: 209850 - DNA, 544 bp, Homo sapiens
gtgccaggcattgggaacaacagatgcaaaggttctgggtggggagtaaatctggtaggtttgagacagagcaaggaagccagagagctaaagctgagtaagggagggttgggtaatggtgtccaaatcacaagggttttatgggacattaaaaagattttgggagatggaaagccagaagaggctacaattaagttattgactcgattgtgtcagctgaggagtaatggggcaaacacagttgcatgacttatttggggagattaattaggtagtgtttgctgggttacactgcgtaacagyaaaccacttcaaaatctcagtggtttacattaacatgatttatttctcactctgtatgtttgtagttgcgggttggctggcatggttctgcttcagatcacaggtcagattcagacactatgcacatcttctcattcagtgtctcaggccagaggaacagccttgaataggacatgactttctcatggtggaaggcacgggaggaaaagcccagctgaactcatacttgcccctccctccc

SEQ ID NO: 209851 - DNA, 547 bp, Homo sapiens
tgggaacaacagatgcaaaggttctgggtggggagtaaatctggtaggtttgagacagagcaaggaagccagagagctaaagctgagtaagggagggttgggtaatggtgtccaaatcacaagggttttatgggacattaaaaagattttgggagatggaaagccagaagaggctacaattaagttattgactcgattgtgtcagctgaggagtaatggggcaaacacagttgcatgacttatttggggagattaattaggtagtgtttgctgggttacactgcgtaacagtaaaccacttcaaaatctcagtggtttacattaacatgatttatttctcactctgtatgtttgtagttgcgggttggctggcatggttctgcttcagatcacaggtcagattcagacactatgcacatcttctcattcagtgtctcaggccagaggaacagccttgaataggacatgactttctcatggyggaaggcacgggaggaaaagcccagctgaactcatacttgcccctccctccctcctagagaaaaga

SEQ ID NO: 209852 - DNA, 547 bp, Homo sapiens
tgggaacaacagatgcaaaggttctgggtggggagtaaatctggtaggtttgagacagagcaaggaagccagagagctaaagctgagtaagggagggttgggtaatggtgtccaaatcacaagggttttatgggacattaaaaagattttgggagatggaaagccagaagaggctacaattaagttattgactcgattgtgtcagctgaggagtaatggggcaaacacagttgcatgacttatttggggagattaattaggtagtgtttgctgggttacactgcgtaacagtaaaccacttcaaaatctcagtggtttacattaacatgatttatttctcactctgtatgtttgtagttgcgggttggctggcatggttctgcttcagatcacaggtcagattcagacactatgcacatcttctcattcagtgtctcaggccagaggaacagccttgaataggacatgactttctcatggtggaaggcacgggaggaaragcccagctgaactcatacttgcccctccctccctcctagagaaaaga

SEQ ID NO: 209853 - DNA, 435 bp, Homo sapiens
atccatatcacagtcctcagagcagcagtagacttgcacacactagcatctggacyccaaagccactgtcaatccatacatgcctgtgctcccagatccaagctccttgaccactccacaggtatcatgcatcagacattagtaccactgtcactagaagcacacccaccagccaaatccagaaccaagaggtgtcacctctgccacagcttcccttagggaagtaaaagagattagaagaattctgtcaggctttcccactgttgcagatacctacagccttggccactgtacaccactgaaatttttacccatatcaaccacagccgaaaaagctacatgaacactaaactgccacaacctcactggatcctgaattgccacaccccacccagctagtgtactcacaaccacccataggtgaagatcttttca

SEQ ID NO: 209854 - DNA, 473 bp, Homo sapiens
atgttgtttgcatatatatttagaattgttatatcctctggctgagttgatcctgttattattatgtaatgatcttctttgtcactttttactgttttgacttagagtcttttttatctgatatagatatagctgttcttgcttgcttttggtttttgtttgcatggaatttttaaattctatccttttactttgaatttccataggctacatatacttgagtcattttttaaaaaatccattcagttggtctatagcttttaagtggggaactcatttatattcaaggttactrttgatacacaagggctaatatggtttggatctgtgtccccaccaaaatctcatgttgaattgtaatccccagtgttggaggtggggcatggtgggaggtgactgtataatggggcaaatttcctataaatggtttagcaccatcctcttagtactgtccttgtgatagtgagttctcg

SEQ ID NO: 209855 - DNA, 701 bp, Homo sapiens
aactgatgaaattgaacaaagtctcagatattgacccttttatatatggaaaattttgttgatgacagagccagcagtataataaatggctttgggacaactggttatttataaaggaaaaaactaatttgatatatgatcaaatatgatactgatgatrtaagtatatgacctggagcaagaaacaatcacaaaacaaatacaaatcataaaaggcaatattgataaattcacctatattaaatttataagctctgtatataaataattcataaagagaggggcaagagaaatttcaaacaggggcaaaatttggatcatgtatacctgacgtatatgtgtatttaatcacatgaaggattatctagattatatagataatgtctacttatcagtaagtaaatgattaaacaaatcattacaaaataaaaaggcatttcacagtggatcagtttttatttttcactcatttttatcaacaatgatctagatttagcagtatcagtaattgatgctgtgggtttcctcagtaattgagaaaggcactgttctcgttaaactaggagtggtttaaattattgtagaactatggctacaatgagtggttgaattgatatacgctaaagtttcccatcaggttccagtgcaggaagggaagttttgagaaccccggaatctttcttgacagtggaaagaattag

SEQ ID NO: 209856 - DNA, 593 bp, Homo sapiens
tacaataatagaggaggacgtcaacatcacagtcatagcactagacagatcatttaacaaagaaacactgaacttaaactggattttagaccaaatggacttaatagacatttacagaacactctaccaagcaattacagaatatacattagtttgataagcagatagaatattctccaaggtagaccatgttaaagcaaagccataaaacaagttttaacaaattttcaaaaatcgaaatcatatcaagtgtcttctcagactacagtggaataaaactagaaatcaataccaagagaaacttcagaaatgataaaaatacatggaaatttaaacagtaggcttctgaatgatcactgggtcaatgaaaaaataagatataaatttaaaaattttattaaatgaatgaaaatgaaaacacaacataccaaaacctgttagatacagcaaaagyggggctaagaggggtttatagcattaaagcctacaacaaaaaagtagaaagaccacaaattaacaacttaacatcacacttcaaaaagctggaggaaaaagaataaaccaaacccaaagttaacagaaaaaaacaaata

SEQ ID NO: 209857 - DNA, 594 bp, Homo sapiens
tcagtaaatggtagatattgccaccactgatcatcccacatttacctatgctgatatttggcagatgtccccaagaatctgtgtgtaggccaggtgcagtggctcacgcctgtaatcccagcactttgggaggccgaggtgggtggatcacctgaggtcaggagttccacaccagcctggccaacatggtgaaaccatgtctctactaagaatacaaaaaattagccaggcatggtggcgggcgcctgtgatcccagctactcaggaggttgaggcagaagaatcgcttgaacctgggagatggaggttgcagtgagttgaggtcactccactgtactccagcctgagcaacaagaacgaacctccatctcgaaaaaaaaaaaaaaaaaaaaaagaatctctgtgtggaagtctgcaaaagcaaccaygttgggtattaggaggaacacaggcctcggccgctgagggtctgctttctaatcccagctctgccaccacaagctttgggcaaggtaccgcctctctgagcctcagtttccttatccaattgatctaaaggtggaatggacatgctggctgttcatcatgactgct

SEQ ID NO: 209858 - DNA, 414 bp, Homo sapiens
tcacaggctcaacaccaagtgaaatcttccaaggcttggggcttgcaccctttgaagccatggcctgagctctacattggtgcctttcagctatggctagagtggctgggatgcagggcaccaagtccctaggctgcacacagtgctaggaccctgggcctggctcatgaaaccactttttcctcctaaggctctagacatgtaatgagaagggctrccagtaaggtctctgacgtgccctggagacattttctctatagtcttgggcattaacatttgtctcctcattacttatgcaaatttctggagccagcttgaatttttctcagaaaatggaattttctttattattgcattgtcaggctgcaaattttctgagattttaatgctctgcttcccttttaaagctgaatt

SEQ ID NO: 209859 - DNA, 512 bp, Homo sapiens
catacaaataagtaatcaaatgatatttagccaaaattttaggataagcttattatctaaatatgttaattaatttttttaattagttaatttaaagaatgttacattatatttctgaattttgtgatgcatatgatgtttttctgcctttggagcatgagatttgttctgatttattttgttgactctaattgtatatccactttcatacctaattatatatttccaagtttggatctaaccctggtaaaacckttatagaaagaaaatcccttaataaaacaatgctagcaaatgggaacaatacaagaaaattcaggtactacatttttgaaaaagataattgaatattaaaaaaggtcagttctacttgaatttatctataaattgaatagaatttcatcccagttactaaaaggatttttaatttgacaaaaatatattaggttatatttgaacattaaacatatgaaatcagtaggaacatcataaaatgagaagtgtacagaacc

SEQ ID NO: 209860 - DNA, 467 bp, Homo sapiens
ttgttcaacatcattaatcattagagaaatacaaaaaaaatccataattaaatactactatacacctaataaaatacctaaaatttaaaatactaktattaccaaatattggcaagaatatggacaacaggaacttcgtacatttcttagcccactgtaaaatggtaaaaccgctatgtaaaactgactggcagtatcatacagtgtcaaacattacctatttttatgacttagcaattccattcctaagtattttcacaagacagataaaatatttgttcataaaaagttttttccaataatgtacttagaagccttactcaaaacagctccaaattgaaaacaacttaaatcaacaggaaaattagaaacattggtaaatagacaaaactactaatattaacacaatatacaacaataaacatgagagaaagaagacagataaaaagcatacactctggatgatt

SEQ ID NO: 209861 - DNA, 409 bp, Homo sapiens
tacacctaataaaatacctaaaatttaaaatactagtattaccaaatattggcaagaatatggacaacaggaacttcgtacatttcttagcccactgtwaaatggtaaaaccgctatgtaaaactgactggcagtatcatacagtgtcaaacattacctatttttatgacttagcaattccattcctaagtattttcacaagacagataaaatatttgttcataaaaagttttttccaataatgtacttagaagccttactcaaaacagctccaaattgaaaacaacttaaatcaacaggaaaattagaaacattggtaaatagacaaaactactaatattaacacaatatacaacaataaacatgagagaaagaagacagataaaaagcatacactctggatgattct

SEQ ID NO: 209862 - DNA, 561 bp, Homo sapiens
cagtcaaatcttaaggctgcaaaatgatcccctttgactctgtgtctcatatccagggcatgctgatgcaagaggtgggttcccatggtattgggcagctttgctccttyggcttggcaggttgcagcctccctcctggccactttcatgggctggcattgagtgtctacaacttttccaggtgcacagtgcaagctgtcagtgaagctaccattctggattctggaggacagtggcccttttctctcagctccactaggccatgccccagtagggactctgtgtgggggctccaaccccacatttcccttctgcactgccctagcagacattctccataagggccctgcccctgcagcaaattttgcctggacattcagacattttcatacatcctctgaaatataggcaaaggttcccaaacctcaatttttgacttctgtgcactcacaggctcaacaccatgtggaagctgccaaggtttgggcttgccccctctgagaccatggtttgagccctttgagccatggttagagtggctggacaccataggctgctcac

SEQ ID NO: 209863 - DNA, 535 bp, Homo sapiens
cttgagctactataacaaattaccataagctgggtgatttatacaataaacttttatttctcacagttatggaggctgtaatgtttaaggtcagggtgcccaccaattcacttctggggagggcactcttcctgcattgtagatggctgtctttttgtagtcycacatggtggaaagagagagagaaatcatctctctgatatctctttgtaaaagggcaccaattccattaatgagggctcgactttcatgacctaattaactcccaaagtcctctccctccaaatatcaacacattggggatttatactcttgcatatgaattttgggggtacacattcaatccatagcagagaggcaaagggagattgaacttgtgttgaacaaaatataaaagaaatgagaaaatatggctttaaggaaggtctggaagcataaaataatatgttttctgaatttaatttcagaaaatatttctaatgtattcaaagacaagcaaatgaagtgtacaaacaataaaaaatttggtcaattt

SEQ ID NO: 209864 - DNA, 535 bp, Homo sapiens
cttgagctactataacaaattaccataagctgggtgatttatacaataaacttttatttctcacagttatggaggctgtaatgtttaaggtcagggtgcccaccaattcacttctggggagggcactcttcctgcattgtagatggctgtctttttgtagtctcacatggtggaaagagagagagaaatcatctctctgatatctctttgtaaaagggcaccaattccattaatgagggctcgactttcatgacctaattaactcccaaagtcctctccctccaaatatcaacacattggggatttatactcttgcatatgaattttgggggtacacattcaatccatagcagagaggcaaagggagattgaacttgtgttgaacaaaatataaaagaaatgagaaaatatggctttaaggaaggtctggaagcataaaataatatgttttctgaatttaatttcagaaaatatttctaatgtattcraagacaagcaaatgaagtgtacaaacaataaaaaatttggtcaattt

SEQ ID NO: 209865 - DNA, 685 bp, Homo sapiens
atacatttctgttcagatgctactaatattatgttatctaaataacttttctgacagatattcttttttggagtagggctcttttttaatcttaatgcttgtattttaaaaattatattttctctacttaaaagcattcactgcttgctcaagtattttgagtacatctaattttattgcactgtcaaagaaaatatttttactatagcaaaagtcaacagtcacaatatatttaagagaagcagggcataaagtctaatcctcattttattgatggtttgagaaacgaagtaaattcttcttgaaaaataatatgaattctttctgactcctaccttttatttcttagcgaaaattaaatttcctttggcagaaagtaagcaatataggcttgtatatctgtgagatatagttgaagcaataatacttactgaacaattaatctttttgcggtgttgttcagttagwtctggcagtctctcacagaggagctttggaataattgcaatttacaacctaaattgagcacaactttaaccacaattcaaaatggtaaaataattgaaaatatttagaaagcacttatattggggaaaattcatttccccacaatatatttaatattttcttccacttttggttgtcactgacggcctacttgttcatcatactcaaaatgtagtct

SEQ ID NO: 209866 - DNA, 685 bp, Homo sapiens
atacatttctgttcagatgctactaatattatgttatctaaataacttttctgacagatattcttttttggagtagggctcttttttaatcttaatgcttgtattttaaaaattatattttctctacttaaaagcattcactgcttgctcaagtattttgagtacatctaattttattgcactgtcaaagaaaatatttttactatagcaaaagtcaacagtcacaatatatttaagagaagcagggcataaagtctaatcctcattttattgatggtttgagaaacgaagtaaattcttcttgaaaaataatatgaattctttctgactcctaccttttatttcttagcgaaaattaaatttcctttggcagaaagtaagcaatataggcttgtatatctgtgagatatagttgaagcaataatacttactgaacaattaatctttttgcggtgttgttcagttagatctggcagtctctcacagaggagctttggaataattgcaatttamaacctaaattgagcacaactttaaccacaattcaaaatggtaaaataattgaaaatatttagaaagcacttatattggggaaaattcatttccccacaatatatttaatattttcttccacttttggttgtcactgacggcctacttgttcatcatactcaaaatgtagtct

SEQ ID NO: 209867 - DNA, 636 bp, Homo sapiens
taaaatctttcatatttatggtactttaacattgaagcttatgattatcctgtaaggagaccacaacagaaaataatttcatgtcttataattgtgaaaacaatgattatgtgatttgcccagcatcatatgtaaaawcctgtactcaaaccaaggtcaatttaaatatttttataatggattctgttgtatggtatatgcaatgtaattatctttggcaatagtaaattttaagagaatttggatctaataatctctatcaaaatttttgtgtaatgaaagaaatcacaaatgacttgaatagagttttatgtttttaaagtgtataatgcatttatttcacttacttcaattttgttgtgtcattggtttataaattcagatacacatgaatagcattctacatgtttaacaatggtatctaacagtgtgcttactatatcccaaaatatatagtaagcaaagtgaatcattgtgttacaagggttaataaacattgtccaaaaatttatggtctatttggtctgaattgtgatgataatgggttttaatgccatttatgtgctatattttttaaaatttgaatttgttagtgataacatcagtaaaaagtaaacattgatcttatactgatga

SEQ ID NO: 209868 - DNA, 473 bp, Homo sapiens
aggaattcctattgctacttcctcttatttgtttaaagagaaaaaattttgtataaggctagttagtcaaatacttcatcagatttgcaaattttcaaaatatcaatgttccagaaggattyggatgtttacaaatacttgtatgcatattatcactgtttataagtgacttacattctggataacactacataaatattttatcatgagattgtaataccctgccagtctatgtgttactttctacggaagacttctaaggagtttataaaatatttttaagtttataaaatatttttctcttttatgcatatttttaatatatgttcaatattgtatttgatattttttctcatcaaatttcatattaaaaaaatttcaaattaaagcccttttattcataccagtacgcctctcaatacaatcaggcttcttcagttttataaaatatacttagtccccttaaaaagatt

SEQ ID NO: 209869 - DNA, 619 bp, Homo sapiens
aatttttaagcttacttttccactcttaagggtgatgctgttaattagtatatacatgtcatttgaatttcataaaccaaaatttttttgcaatttcatgtgtctacagaaatatctcaatgtaagccatgagcaaaacttgattcttctaagaattgagagaggaaaaaaatatctatcttgatatcaggctaactagttttatttttataattgaaatggcgggaaacactcaaatcttyctgagaattctcttgattggataaatcacaggttggttaatttgtcaggctacctttccagagaatcaaggatcttattactatgaatctgttcagcaagaaccattgccagtaatcaaataccaagacacgttctgacagtggtaattaataatacagatttgtttattggcctgtaaaattgtcagagtatgtgtttcctattgcaaaggcatattttaaatgaacacacacacaaaacaacccatgacaaagagtatcatcaagcattatataatatgtaatgatttgttgggaggtgattttcactatttttaaaataaatttagcttgtatcttccagattacaaaatcaaaaaaggacacatgggaacagg

SEQ ID NO: 209870 - DNA, 619 bp, Homo sapiens
aatttttaagcttacttttccactcttaagggtgatgctgttaattagtatatacatgtcatttgaatttcataaaccaaaatttttttgcaatttcatgtgtctacagaaatatctcaatgtaagccatgagcaaaacttgattcttctaagaattgagagaggaaaaaaatatctatcttgatatcaggctaactagttttatttttataattgaaatggcgggaaacactcaaatcttcctgagaattctcttgattggataaatcacaggttggttaatttgtcaggctacstttccagagaatcaaggatcttattactatgaatctgttcagcaagaaccattgccagtaatcaaataccaagacacgttctgacagtggtaattaataatacagatttgtttattggcctgtaaaattgtcagagtatgtgtttcctattgcaaaggcatattttaaatgaacacacacacaaaacaacccatgacaaagagtatcatcaagcattatataatatgtaatgatttgttgggaggtgattttcactatttttaaaataaatttagcttgtatcttccagattacaaaatcaaaaaaggacacatgggaacagg

SEQ ID NO: 209871 - DNA, 580 bp, Homo sapiens
gtgtctttttggttaaaaggattgttttcttttgggtacatacccaataacgrgattgctgggtttaatagtaattctgttttaagttctttgagaaatctccaaactgcttttcacagtggctgaagcaatttacattcttactaacagtgtataagcatttccttttctccacagccttgccaacgtctgtcgtcactgttgtttatgaattttttttttttttttttgagacagagtctcactctgttgcccagcctggagtacagtggcacaatctcggctcactgcaagctcctcctccggggttcatgccattccaaagtgcttgggttaccatacccagcagtttttgactttttaataatagccattctgactggtgtgagatagtatctcattttggttttaatttgcatttctctgatgattactaatgtggcatgctctttcatatatgtgttggccacttttttgtcttcttttgagatgtgtgtgttcatgccttttgcccacatttaatggtggtgttttttgcttgttgaattgttcaaatttcttatagatgctagacattaga

SEQ ID NO: 209872 - DNA, 591 bp, Homo sapiens
ctgactaagtgaaaaaacagttctggacaatgttttttcactctccaattaaaggtttatatttytaaaagcattaaagtacactttagaaagcaattatatttacctatcaattttagaaaatcaagtatttaaccaaataatttttggtttgtatccaaatgtgatcattctaaagtttgtacatactgtaaaatgaaagaactttgggaggtcgaggcaggtggatcacgaggtcaggagatcgagaccatcctggctaacatggtgaaaccctgtctctactaaaaatacaaaaaattatctgggcatggtgacatgcacctgtagtcccagctactcgggaggctgaggcaggagaatggcgtgaacctgggaggcagagcttgcagtgagccaagatcgcgccattgcactccagcctgggcgacagagtgagactccatctcaaaaaaaaaataaataaaaaataaaaattaaaaatgtaatggcatgctacagaaactatctatgccactaggagtagacagcttttcaactttgaagtgttattaacttcagagcctttacaaaattttttaacttattgaa

SEQ ID NO: 209873 - DNA, 591 bp, Homo sapiens
ctgactaagtgaaaaaacagttctggacaatgttttttcactctccaattaaaggtttatatttctaaaagcattaaagtacactttagaaagcaattatatttacctatcaattttagaaaatcaagtatttaaccaaataatttttggtttgtatccaaatgtgatcattctaaagtttgtacatactgtaaaatgaaagaactttgggaggtcgaggcaggtggatcacgaggtcaggagatcragaccatcctggctaacatggtgaaaccctgtctctactaaaaatacaaaaaattatctgggcatggtgacatgcacctgtagtcccagctactcgggaggctgaggcaggagaatggcgtgaacctgggaggcagagcttgcagtgagccaagatcgcgccattgcactccagcctgggcgacagagtgagactccatctcaaaaaaaaaataaataaaaaataaaaattaaaaatgtaatggcatgctacagaaactatctatgccactaggagtagacagcttttcaactttgaagtgttattaacttcagagcctttacaaaattttttaacttattgaa

SEQ ID NO: 209874 - DNA, 613 bp, Homo sapiens
gcaacccagcagtgtggccatggagatattttagtcttgtgtggccatgtagatatttcagtctcaggccagagattgaagtaactgctctggagtggaataggggcctccatagccagaattgtggaaatcccatcagaagtaggtatgggattatgctctcctcagttgcaggcctggggtgggaggagggctgctacagttgcagtattttcaggtcaacaggacttgcaacsaggaccaccttagtgacctggaactgatctgcatttgccatagttgggtgccaagcctgctcttctgagatcatgttgtagcagggcccactctactccacccccaagcataaatccaggcattaggagcacccactttcctggaccacctcacacttcctggacatgattgtggtggaatggggtgctctctgcttcatgcccaggtacatctccagatattcagagcaactgctcatttgtgtcagcagcctgagccaccccactcatcctggacatagattgtgaacaagattctctctactccatgcccaggcagatctccaggcagtcagatcacctgcttacctgattcagcagcctgagtcaccccatcc

SEQ ID NO: 209875 - DNA, 613 bp, Homo sapiens
gcaacccagcagtgtggccatggagatattttagtcttgtgtggccatgtagatatttcagtctcaggccagagattgaagtaactgctctggagtggaataggggcctccatagccagaattgtggaaatcccatcagaagtaggtatgggattatgctctcctcagttgcaggcctggggtgggaggagggctgctacagttgcagtattttcaggtcaacaggacttgcaacgaggaccaccttagtgacctggaactgatctgcatttgccatagttgggtgccaagcctgctcttctgagatcatgttgtagcagggcccactctactccacccccaagcataaatccaggcattaggagcacccactttcctggaccacctcacacttcctggacatgattgtggtggaatggggtgctctctgcttcatgcccaggtacatctccagatattcagagcaactgctcatttgtgtcagcagcctgagycaccccactcatcctggacatagattgtgaacaagattctctctactccatgcccaggcagatctccaggcagtcagatcacctgcttacctgattcagcagcctgagtcaccccatcc

SEQ ID NO: 209876 - DNA, 609 bp, Homo sapiens
cttttttccttttgtttgtttttgtttgtttgtttttgaaacgcgggtcccactcacgtatcacccaggctggagtgcagtggtgtgatcacagctcactgcagcctccacctcccagggtcaagcagtccttctgactcagcttcccaaatagttcggaccacaggcacatgccaccacgtccagctaatttttttattattatttgtagcaacaargtctccctatgttgcccaggctggtctcgaactcctgggctcgagcaatcctcctgcctcagcctcccaagtactaggattataggcatgagccactgcacctggccctggctttcctttttataacaaatagtgcttatttgtgatgctgcaacagtccctccaaaaataacaacaagcttgagacaaacccacaatcttcctcaggtattagactacatcgcacaactcttgctgaggtaactgtccctctgtctccattcaaccaacctccaaactctccgccctgaaggcaagggacacatcatcatatgccttttctttccttttgcccaatgtctgtgagcattccctagatctccccttttacagacacagcaaagtgatcaat

SEQ ID NO: 209877 - DNA, 595 bp, Homo sapiens
aaaagctttgaattaaccctgtttgatatctgatataattatagcataatagggcatcttcctggttagaagagtataagttgcttcaaataatgtgctgatcctaacttaatgagttttgatttgctatgcggatatgtgtctgaagcctattgtcttgttcatactagaaagcagacttggtctgagacaagcacttcartgatactgactcatgcctcataaagtgatgatggagatgctatgcatggcccctcttctcctcgtatagttctcataaaacaatagaatgatctgttcaggcttctgtgctcctttgaggcagtatcactagcccatatgttttaagaaccatcttgttcacacaccataaggccaaatcaactggagcctcattcccacattgaagtccagttcttccatggatccagcattcctttgactagaagcatttgcgtgaagacccagcagtgcactattttgatgtatccaagtaaagtcatcttttaacataaggagataccttcttgcactttcttcagctgagatggagtttggggatggccatgcatcctgttctcttctggggatcaac

SEQ ID NO: 209878 - DNA, 595 bp, Homo sapiens
aaaagctttgaattaaccctgtttgatatctgatataattatagcataatagggcatcttcctggttagaagagtataagttgcttcaaataatgtgctgatcctaacttaatgagttttgatttgctatgcggatatgtgtctgaagcctattgtcttgttcatactagaaagcagacttggtctgagacaagcacttcaatgatactgactcatgcctcataaagtgatgatggagatgctatgcatggcccctcttctcctcgtatagttctcataaaacaatagaatgatctgttcmggcttctgtgctcctttgaggcagtatcactagcccatatgttttaagaaccatcttgttcacacaccataaggccaaatcaactggagcctcattcccacattgaagtccagttcttccatggatccagcattcctttgactagaagcatttgcgtgaagacccagcagtgcactattttgatgtatccaagtaaagtcatcttttaacataaggagataccttcttgcactttcttcagctgagatggagtttggggatggccatgcatcctgttctcttctggggatcaac

SEQ ID NO: 209879 - DNA, 534 bp, Homo sapiens
tctcggctcattacaacctccacctcccggcttcaagcgattcttctgcctcagcctcccaagtggctgggactacaggcgcgcaccaccatgcccggctaatttttrtatttttagtagagatggggtgtcaccatattggccaggctggcctcaaactcctgacctcatgatccgccctccttggcctcccaaaatgctgggattacaggcgtgagccaccgcgcccggccagtcatctacttttttattgtgctcttttccctcaggtgtggttagaatttcaggatttcctctacgcccaatctttcctattaaactctctcttgtcttcaatttgcagtccctcttcttgtcagcttcttctatgtaaacagcagacctcaaatcatacaatcaccaactcttaatgcagaaggcactttaacttctccataaccacaccactacttctctcttggaaacatcaagctaaattattacagaaaggtctgtctaaaatagagggcaaacctactgcctagatattccctc

SEQ ID NO: 209880 - DNA, 583 bp, Homo sapiens
gaaaatcatctaatttctccaaatccattctgtgcaacactagtctcatgagttgcgttttgcaaaacaaatgttttcctgatcaggtaagtttgggaagaatgacatattctcctcttggaattttcaagcacactaaaggtgctgagaagtccagtaatgaagaaacctgccttaacttgttctgttacacacagcatttccaaaacctactcaaataatcttttctacacccaccccaaacaccttttaacatttggctgaatacttccaagaaaactgatgtggtccaaatttcccattatatggatttttaaaactagactctaagagaggtgaatttaccccagattacacagctgttaaagacagaagtatgtgtggcatcacccttgattccatctccaaagacaaatatccctaaaggacttcagctctctctccctaagcccatgtgtagtctcagaatcttgtamaacacagtcaccccatcaacagaagttggcatgtgagagtaaatttacttgtcattcctaaactggcttccacgtgtttggactctgggtttctaaagtaacaatgt

SEQ ID NO: 209881 - DNA, 583 bp, Homo sapiens
gaaaatcatctaatttctccaaatccattctgtgcaacactagtctcatgagttgcgttttgcaaaacaaatgttttcctgatcaggtaagtttgggaagaatgacatattctcctcttggaattttcaagcacactaaaggtgctgagaagtccagtaatgaagaaacctgccttaacttgttctgttacacacagcatttccaaaacctactcaaataatcttttctacacccaccccaaacaccttttaacatttggctgaatacttccaagaaaactgatgtggtccaaatttcccattatatggatttttaaaactagactctaagagaggtgaatttaccccagattacacagctgttaaagacagaagtatgtgtggcatcacccttgattccatctccaaagacaaatatccctaaaggacttcagctctctctccctaagcccatgtgtagtctcagaatcttgtacaacacagtcaccccatcaacagaagytggcatgtgagagtaaatttacttgtcattcctaaactggcttccacgtgtttggactctgggtttctaaagtaacaatgt

SEQ ID NO: 209882 - DNA, 549 bp, Homo sapiens
agcaattgagggggtgttatggactgaatcatgtccccccaacaactgtgtgtttaagccctaatctttaatgtgtatttggagatggggcctttaaagagacagttaaggttaaatgaggtcataagggtgtggctgtgagccaatatggtagctgtcttattagaaaaagaggcatcagtgatacacatgcacagtgaaaaggtcactaaaagacctagtgataaggtggccatctgtataccaagaaaggaggcctcgggagaagccaaaactgccgacaccttcaccttagacttctaacctctaaaactgtaagaaaatatagatctgagtggcttaagccactcagcctgtgatrttttgttgtggcagccctggcaaattaatacagagggaaactcagatagactctaaacgtgtttgaaatatctcaggtcctgcttgcacatcaagtgacaaggatggctgtggaaacctggcatctaaccatgtttcttagaaagagcaagttcatagcatgcttctccttttttattggcaaagcag

SEQ ID NO: 209883 - DNA, 501 bp, Homo sapiens
atctattatgaggttattcttattcttcttcttatttttttttttttgagaagggtctctctctgtcgtccaggctggagtgcagtggagcaatgtcggctcactgcaacttctgtctcctaggctcaagcaatcctyccacttcagcctcctgaataactgggagtacacatgcgtgctatcatgcctgagtaatttttgtatttttgtagagagcgggggtctcactatgtttcccaggatggtctggaactcctgagctaaagcgatcagcccaccttggcctcccaaagtgctgggattacaggcgtgagcgaccaagcccagaagaatttattcttatgtatagtttagagtgtggattcaattttatctttctcataatggctatcacgttgtcttcccaccatatattaaatagtcatatttgccccagtgatttttttagatgccatatgattttttttctaccatattttaaatttacatttatatttaggt

SEQ ID NO: 209884 - DNA, 593 bp, Homo sapiens
  misc_feature (1)...(593): n = A,T,C or G
ctttccattcattcaagtctagttnttggtattttaggagtgtttcanaattttcttcataccgattttgcacatgtcttgttaaatttattccttagaattcatcttttttttgttgttattgtcaataggactttctcctctattttattttctgattggttactgttagtatttstaaaggctgttgatttctgttatgttagttttacatcctgctaactttagaattttttaattgctttgttagttttactttgtttttctaagattttacaaatattatgtcatctgtaaattgctagctttaggactgaggtgtatatattttattacattaataaaaaaatacattaattcctacattcttgagtgcttttttgacagcattgcttcatcaggtgtagtggaatggtgatttttctagtcctgtcattacttttgctatttgtgcatgttgttatatttagtttttgacagttttattgtggtatataattgatgtacaatacacatatttaaagcatacaatttaattagttttgacatacttatatagctagataggttattatatagtctgttactaaatt

SEQ ID NO: 209885 - DNA, 561 bp, Homo sapiens
ttcatatgaagtgataaattaatggatcaatgaggcaaagtacaggagatgctgttggctcctgctcctaccacatcccctcagccttccttactcccttgtatattgaaggctttctaaggaaagtacctgggattctccatctgagggctttctttggaatgttcagtccacaggtgtggggcagaaggaagtgctgagactcctgaaaacagctcctgccaagatggatggtaaagcctccccactaccctagggtggctctgaggagcacyctgcacagcctccagagtttccctctggactgagctaccacttcctgcaatgatggctttagttcaccctgtgtttggcttccttcccttccttgtctcacttctcactccctggttagcttcctgataccacctctcaaataaaccaactgaagagaatgtcacaacaaatgaaaatcatggggagggaggagacatccccatagagggtgatttggatagtttctatgcagcacctgggctgttaattggacttcgcaaacctggaattggagaaggagcatgg

SEQ ID NO: 209886 - DNA, 489 bp, Homo sapiens
gcttggctttgcattctgatgatgcatcatgtgaagaacaagcacaaaggtaatttgatcttttgaaattaaagttgtattctaaataagttacagtctttaataaagaaattgaaaaaaaatcctgtttatcttggctgccctttcctggtgacagtttttgaaattctgaaatcatctgctaaaactcaagtcattttttgctgcataagtttttgaaacaacctatgcataaccatcgaacgactcaggtgtagtcagttcatcctttgtcaggctccttgttggcctcttcaaagagcatcaracagttttggagaaacagcatagaaatgtgttaactataatcttttctccattctcaacctcaatatatttccaaattgaagaagaacattgttatggactgcaaccccggggagccctcaccaagacactaaccctgctgtcaccttgattttggacttccagtctccaaaaccatgagaa

SEQ ID NO: 209887 - DNA, 557 bp, Homo sapiens
gaccctgtctcaaacaaacaaacaaagcgagtgtactattgacacagaataaagagaccaaaaaagataatagagagtccagaaataggccagcatatatatagtcaatgggaaaattataatctttcaaaaattacgatagaccaatgggaaaaatatgaactttgtccaccccctagcaccataaataaaaattaaattgaggcaaatcatagacataagtgtaaaaagtaaaatgatagtgcttatggaagaaaacacaggcaaacagctttatgaccctgctgtaggcaaagktttcttaaataggacacaaaaagcactaatcagaaaagattgctaaatttggtcaagcacggtgctcacgcctgtaattccagcactttgggaaaccgaggcggatcacctgaggtcaggagttcacaaccagcctctactaaaaatacaaaaattagctaggcatggtggcgggtgcctgtagtcccagctacaccaaaggctgaggcatgaaaatcacttgaacccaggaggcagaggttgtagtgagcccagatggc

SEQ ID NO: 209888 - DNA, 539 bp, Homo sapiens
tctgcagcgacttcagcagcatgttctgyagacaccctgatgcgagaaccttcacggcagactcaggaaacctggagcaaaggccccagagccccgtaacagaaagaaaaagcaacagtaatctcagagaatttcagtaacaggtgatgccagatggccagagcttgcatagctgaggaactctggtaaagtcacctggcaaactccccagacctgcacctgctatctcactaacagaggaccctttgcctggctttgctgtgaaggcaggggacagacctttcagatgggtcccatcctacagagaagccaggtgaataaattccgctatcccaggctccacttggcaaatgcagggccagaaagaatcctgggaaggcagagctgcctgccaagagtgagctgggaggggtagactctctggcctagctctctcacccagaacaagggaaggactagccttcccacaccccagcaatacagctagtattctgcaggcacgaggccctctggatattggggtaggccctgccaactgt

SEQ ID NO: 209889 - DNA, 594 bp, Homo sapiens
ggccaatatgcatgaaaaaagtcaatcaatcaaaatttttcctgaggaagcccagacattagataaaaaaatttaaattagctattttacatatgttcaaagaactaaaggaaatcaggcctagagaagtaaagtatgagaacgatacctcaccataaagactacatgaataatgagatagaaattataaagagaaaccaaatataaattatggagttgaaaagtacaacaacttttaaaaattcactgagaggatygaacagcagttatgagcaggcagaagaacgaatcagaaaacctgaagataggtccactgagattatcaagtatgaggaataagaagaaaaaaatgaagaaaaataaacagtgcctcagagacccatgtaacaccatcaagtgtaccaacatatatataagaggagttttaaaaggaagggaggatgatgtgaaaataatattagaagaattaatgtccaaaacctccccaaatttggtgaaaagcattgatctacacgtccaagaggtccagtgaactccattaatataaactgaaagagacctacacctagaataaaactgtcaaaagccagagag

SEQ ID NO: 209890 - DNA, 594 bp, Homo sapiens
ggccaatatgcatgaaaaaagtcaatcaatcaaaatttttcctgaggaagcccagacattagataaaaaaatttaaattagctattttacatatgttcaaagaactaaaggaaatcaggcctagagaagtaaagtatgagaacgatacctcaccataaagactacatgaataatgagatagaaattataaagagaaaccaaatataaattatggagttgaaaagtacaacaacttttaaaaattcactgagaggatcgaacagcagttatgagcaggcagaagaacgaatcagaaaacctgaagataggtccactgagattatcaagtatgaggaataagaagaaaaaaatgaagaaaaataaacagtgcctcagagacccatgtaacaccatcaagtgtaccaacatatatataagaggagttttaaaaggaagggaggatgatgtgaaaataatattagaagaattaatgtccaaaacytccccaaatttggtgaaaagcattgatctacacgtccaagaggtccagtgaactccattaatataaactgaaagagacctacacctagaataaaactgtcaaaagccagagag

SEQ ID NO: 209891 - DNA, 516 bp, Homo sapiens
tggcaaccatctcatcacaggtccaaaggcctgggaggaggaaatggttgtgtgggcrgggcccaggatcttgctgctttgtgcagtcttaggacttggtgccctccatcccagctgcaccaaaaaggggccaaagtacagctcaagccattgcttcagagggtacaagccccaaaccttctaggcctccacgtggtgttgcacctgtggctgcacagaagacaagaattgagctttggaaaccttcacctgtatttcagaggatgtatggaaacacctggatgtccaggcagaagtctgctgaaggggtggaaccctcatggagaacctttgctagggcaatgtggaagggaaatgtggagtcagagcccccacacagagttcccagtggggctgcctgatggagctgtgagaagagggccatcatcctccagaccccagaatggtagacacactgacagcttgcactgtgcacctggaaaagctgcagacactcaatgctagccggtgagagca

SEQ ID NO: 209892 - DNA, 649 bp, Homo sapiens
tttgaagtgcagaatatatggaccatacctgaatttagtattttttcaacatgtttctaaagcagatgatttggtgcaatgccagcttacatgtggggataaagaaaagtctatggattgaacctrtatgcatttttgctgaaatatggattaaaatcagaaaataggttaaaattcaggggaaatcaggttaaatgaaatttagataaattatatcaaaaatgtaacaatttctcagagagataacataatgcttattgcagtattgctaaatcccaggtttgttaattaatagataaagaaatctactttaattgcatctaattaagataatttagactccagagtattctgtgttgttgcagaaaagaaagtaagaatgaagactaatggtagagaacgtaggtctctctgcttttgcagatacatgttataactaataattttaaatatttaaatactttaattagaaaattttaagtaaatagttgaattagaaacgtttaagagcattataattttatcaccaatgcttttttaaaaaaataaacacatctacagcccatatgttattataatgtattgaatacttaataatctgtttttaattacttctgttacatcaaaatgagtctttactgacaatgtg

SEQ ID NO: 209893 - DNA, 614 bp, Homo sapiens
tctgtcttttcttttccaggtactcatgtctatgggaaagtgtgcgtgtgtgtgtcgggggggcagtggtgggaggacagtctgataaaagccttgtctttactttggaattgattataggagccacaatgctctacaagtggtcaatatttacatgatttctattgagcttttcttttttatgtccttttctcaaaaacaaactgaccagtacaattaagaaatatactaatagtattttatggacaaacatttgaatcataataaaataaagaaaaaatgattcccacagaaacatatatatatatacacatatatatatatcacaatttatggattatttaattgtcccatgaatcaaggcaagagactcaacaatgaaagaaactccttccttggtgtcctctttcattaaatcattagatgccccaagttaaaaggcctgagctttggcatcagttataaaccatgtgatttatatccattatctaattttccattcactaygtaatcagatgaaaaaaactaatatttttctagggactataatttgttcaaaatcacttatctaataaaggttaaagccaaaatttaaacatatatctgccagattt

SEQ ID NO: 209894 - DNA, 354 bp, Homo sapiens
ctgtaatgatttttttgtcatttcaattattgtacttttcacctcaaaatttctatttgattctgttataattttaatctctttattgatgttcttggtttaatgaaagtgtcattatacsttgctttacttctttaagcttggttttctttagtttttttgaatatatttatactatcaatttaagccattgtctcctgataccccacccttttcaaaaagtctcttttgcttgtttttcttcttgtgtatcaaattcctgtttctttacatatcttataatatgttgttgaaaactgaatattttagatagtatactattgcaattctactgagttgctgaacctgaactca

SEQ ID NO: 209895 - DNA, 562 bp, Homo sapiens
tagttagttttctaatttcataaaagaggaaactaagtctcaggcattcctcagttgccaatatcatgagctgttgtcttatggagccaagattcaacgtgaagcctattgccaaagctgacttgctcttccttcaaaacttatactggcagacgtagtgagtggtttataaacacagggctttctcctattttgtagaaacttacaatatatttaagaactaaagagggccacttaaaataacaagccagtatatcaccagtgaataaaccgaagggtaagaaaatatggactctgcctctggaatccagtggtagatgtttcaagtgatttaggaaaaaattaatgaatacaatagttgtttcttttattttcttttgtccaagtttatatatgcaataaaaatatttctcagcttttaggaagcattgtttacagacctaattgttaagcgttaattgrctttaactgcctaataaaatgaactatgtaatcttaggaactactagatcgttgcacagattttgagtctttttatcaaggaatcttccttctgctccat

SEQ ID NO: 209896 - DNA, 576 bp, Homo sapiens
cctggaagaaagctttttaaaaataactgacattgaggatgccaataaacattgatgccatgcgcgtgccagctgtgaaatcattagtaggtgaaacaccctaccgtgcaaacagcttcaaactgatttgagggatgtattttagccaaaggcataaatgaattcatgaatttgccctacttactgttctctgtctcagttctgtcttttmaaatttttatttatttatttcttgtattcatttaggttggtggatatagcatctgaataggcagagtgctctatttttttcttgatgaaaagggaattgctattacagtctgttatccaaaaattaccataacaaatctgcccttccaattagctggtgcatggaaagattagttgaaatttggcctggaactttttattaagactaaataggaaaccatgtgtatatattggtattagtttgtgttatgagacacatagacacacatattttatttctgctataaacaattacgagaaataattaggttgctctatatatccacagagaacaaaaataggacctatggatacagactaaaataa

SEQ ID NO: 209897 - DNA, 557 bp, Homo sapiens
tgaattcatgaatttgccctacttactgttctctgtctcagttctgtcttttaaaatttttatttatttatttcttgtattcatttaggttggtggatatagcatctgaataggcagagtgctctatttttttcttgatgaaaagggaattgctattacagtctgttatccaaaaattaccataacaaatctgcccttccaattagctggtgcatggaaagattagttgaaatttggcctggaactttttattaagactaaataggaaaccatgtgtatatattggtattagtttgtgttatgagacacatagacacacatattttatttctgctataaacaattaygagaaataattaggttgctctatatatccacagagaacaaaaataggacctatggatacagactaaaataactcattttgaataatggagaattttctaatgatatagctggctgaagagagggttttgttctctttttttgtttgtttgctttcccatagctagtaagtttcctgtccctgaaataaatagatgctggatacctacttg

SEQ ID NO: 209898 - DNA, 627 bp, Homo sapiens
tatccataaaatacaaatgcatttgtgttcactaaatctataaagattaaaaaaaaaaatcatggatgtggagagcaaagataaaacattcagcacaatatctaaatgtttaaatctcctttccctagtaattcaaatcagtgtgaaatagtggaaaaagcaagggcttaggagtcccatagatctgattttgaccctgggtccccaccatcttttttttgtttccttgaacttttttacttaacccctctaagcacttcaaattttctatggacatttaagataatacatgcagagcactgagctcagttagacaccaaatgcatactaacagctctaattatttctgattaatgaacaggatcataacttaaattgcttttatgtaaatgaaaccccacatatccctatgccagtacacactgttctaaaattgaaagaattttcaattgaaaattgaaagtaaaaactagggcggaaatttttaaagtaccaaacatcacctaagaaattcgttaaaatgtacattcctgaacccttacatatagatttggtttattcyttctggaaaagttcccaggaatttgtctttttaaaaagaatctgatttgttcctgatgttggcgg

SEQ ID NO: 209899 - DNA, 433 bp, Homo sapiens
gcctatacccaggaatgaacaaggacagcgtggaagttggaagcaagatggagtcggttaagttggatctctttcactatctcagtcataattttgcaaaggtactttcactctaaagctttttaataagctttcaccttggctctaaaacttgccttggtctctctctctytccctcagtctaattctttctgaggaggtaagaattgaggttgctgcagacccatatggattcaccaccactaacagcttcaaaatctttccctacaaaatgactcatatttcacggatcagaatgtggagcaattttcactttaggtttttgttgaagacaatagaatgatcagctgatattagtgggacctagcagcaggatgtgatactaacagaagtctgagcagagcaagcaggtagacagacagtcaaagacaag

SEQ ID NO: 209900 - DNA, 396 bp, Homo sapiens
  misc_feature (1)...(396): n = A,T,C or G
gtatgactcatacacaggngggaaataccagtaaaaaaaggccaaatgttgaagtaaacactcaaaaacttcaaaacaccaatggtaaatatgttcaagaaaggaaagggaatcatgcttacaaaagtaaaggaagttttggttttgagggttttttttcaagatggcagattggaggcagtgttagcatgcctctcccactgggacgcacagaatagtgggtacagattcacactgagaaatttttcccctagaaccaccacaggaacatagaaggaaaaccaaaagaatccacagaccctctgaaagaagcgacaggctayagcctcctccatgagacaggcagaacactgtacattcccagagtgtgagaggtggagagtctgcctccaagca

SEQ ID NO: 209901 - DNA, 404 bp, Homo sapiens
actgttttttaatagcaagcagcctatcaaaattatgcaaaagtataggtggacagactgatctctgacctagcttacctccttcactttttaaatgaggaaactaagtcccagaaagggcatgtgctagttcaatttwatttaatattgtttgcttataactcttccaaatattatttagacagttcatagaaagggcaaatatggcaatatagataaaatgggaaacttagattaaataaataaagtgaaatgactgaagcattgactaacacatcccattgcattaacataaatccaagtagataattataatagtgtatgaaaaatgcagtaaaaatatgtgtacagtaaagtggtgaatctgaggaaatgtttaattctgtatggggcaatcaagaatt

SEQ ID NO: 209902 - DNA, 544 bp, Homo sapiens
acctcagcctgaattttattgttcatatcactatcagcattttaggcaaagccattcaacaagtctctaggaagttcctgactttcccacactttcctgtcttcttctgagccctccaaactgttccaacctctgtatgttacccagttccaagtagcttccacattttcaggtaccttttcagccacgctccactctgctggtaccaatttactatattacttcctttttakgctgctgataaagacatacctgagactgggaagaaaaataaatttaacagacctacagtttcacttggctgtggaagcctcacaatcatggcataaggcaaggaggagcaagtcaagtcttacatggatggcagcaaacaaagagagagtttatgcaggggaactccctttcttaaaaccatcagatcccctgagacatactagctattgctagaacagcctaagaaagacccatccccatgattcaattacctcccactgggcccctcccatggcatgtgagaattgtgggagttacaattcaacatgaa

SEQ ID NO: 209903 - DNA, 620 bp, Homo sapiens
tcattcctcactttccaattctccttagtcatttggagaggcccaaaacatctctgccatcaatcatcaagtgaacatgcattcccacacaatactgtatgctcattaatctcttttaatctcttaactcccaaattcttcaagtctgtcctttgcaaagtaacttctgtcaacagcaaagcactgatatactctaactctgctctaaatgttcccttcattctcttcctgtaactgaaatctggctattccatgacaacatcatttcccctatagctctttcatgacacatttttggcctcttaargactttactaccaaaatttccacccccgtgaccctttctctgcatacagatcctcaattactagtaatcatttcatcttcttcaaaaaacaaaaactaaaacttgacatccacatctcactcaacgtccaccccagctacaatcttctctctgttgccctcaacaacaaaacttacagaaaaggtctttcatagacaatatcaccactttcttacctatgttttttcttcacaccacctaggttgagctctcaggcatatatctttattgagtctattcttttcaaggttatcaatgacccatatgttaccaa

SEQ ID NO: 209904 - DNA, 620 bp, Homo sapiens
tcattcctcactttccaattctccttagtcatttggagaggcccaaaacatctctgccatcaatcatcaagtgaacatgcattcccacacaatactgtatgctcattaatctcttttaatctcttaactcccaaattcttcaagtctgtcctttgcaaagtaacttctgtcaacagcaaagcactgatatactctaactctgctctaaatgttcccttcattctcttcctgtaactgaaatctggctattccatgacaacatcatttcccctatagctctttcatgacacatttttggcctcttaaggactttactaccaaaatttccacccccgtgaccctttctctgcatacagatcctcaattactagtaatcatttcatcttcttcaaaaaacaaaaactaaaacttgacatccacatctcactcaacgtccaccccagctacaatcttctctctgttgccctcaacaacaaaacttacagaaaaggtctttcatagacaatatcaccactttcttacctatgttttttcttcacaccacctaggttgagctctcargcatatatctttattgagtctattcttttcaaggttatcaatgacccatatgttaccaa

SEQ ID NO: 209905 - DNA, 659 bp, Homo sapiens
ggatattaacagcagcatgtcattgtaaaataaaaatgctatatgtgggaccagcctccagagttttagaatgcacaagtaattaacgtaagcagacggctcaaactcccaaatactcttacagtttcaccacttcttacttaatccacacacaggcgctcatactgagttcttacatacgagtaaactgaaaaggaaaaagcataggcctggctgacagatgtattcgcacagtagtatgttccatcttgcagtgcatagttgctacattacaacccaacttgcagggaggtagtagaagacagtggagaagagaaatcttttcttaagcagaatgtcaagcagtacatctagtaattctcttacacatacattttttaagttgatgtatggtattgatctatattgattcataggtggtgactaagtcttgtcttgctggtaaatgaaataataatattagaatatttgcaataagaaggattggaagatatatatggatgggcgttctaggatgaggaaaaaggaagaattcatgtactgactagatattttccagaagtatctatcacagaagtatctatcaataatcgggtagacaagatgaaccatcctsttgatgttattcaacctcattcttcaagtattccattgctttc

SEQ ID NO: 209906 - DNA, 346 bp, Homo sapiens
attgggaaaatgtaattttcaaaagtaacagtgaatatgttttaaatccaccatgtgctagaatatgtyttaaacttctgagtcttggaagaactgtgagttttattcctagctgtacataggaaacagagaagatgaggggaaatgaaatggcctacatatgtaacaaaaaactacataaccaacattttttgttagtccatctttggcatatttacataaggagaaaaaacaaaacaaaataaaaacatttgaaatagcacaaagacccttgtcttattagcttttcagaagcttgtttgcatagatgtcatggtgctctgtttggaatacagccccaaaccat

SEQ ID NO: 209907 - DNA, 346 bp, Homo sapiens
attgggaaaatgtaattttcaaaagtaacagtgaatatgttttaaatccaccatgtgctagaatatgtcttaaacttctgagtcttggaagaactgtgagttttattcctagctgtacataggaracagagaagatgaggggaaatgaaatggcctacatatgtaacaaaaaactacataaccaacattttttgttagtccatctttggcatatttacataaggagaaaaaacaaaacaaaataaaaacatttgaaatagcacaaagacccttgtcttattagcttttcagaagcttgtttgcatagatgtcatggtgctctgtttggaatacagccccaaaccat

SEQ ID NO: 209908 - DNA, 596 bp, Homo sapiens
ctctgttctctatccattcattcttcctaataatcatttattgccsctcaagagaattcctcttctcccacttcccataactggttttgtgagaatctaagcccttattctttctgtaacctcaagatggcatataagcttctgtatctccttgggaagttgactcttcattctgaaacctcttgtgtatacacagtaagtttttatgccttttctttaattaatcagtctttggttagttgatttttcagggaaactttacagggccaaaggccttggttcctacacaatgtctattttagcatgacatattctgtatacaccaattaaactagcttagaagtactataaagaattgatacagtctcccgtatcaatgagataaagcaaagacccctcttaggggcctgctgggacctctccccaagcataaaattttaaaaatacatatctctagtccctttgaaacaattctaggcacctagttagcaaaaataaatgaacaacctgataaccaagaagatggcaataacttcaacaatagcctcccaagcaagtcagagtcacatggtgttttggttgcctctgaaaactaa

SEQ ID NO: 209909 - DNA, 596 bp, Homo sapiens
ctctgttctctatccattcattcttcctaataatcatttattgcccctcaagagaattcctcttctcccacttcccataactggttttgtgagaatctaagcccttattctttctgtaacctcaagatggcatataagcttctgtatctccttgggaagttgactcttcattctgaaacctcttgtgtatmcacagtaagtttttatgccttttctttaattaatcagtctttggttagttgatttttcagggaaactttacagggccaaaggccttggttcctacacaatgtctattttagcatgacatattctgtatacaccaattaaactagcttagaagtactataaagaattgatacagtctcccgtatcaatgagataaagcaaagacccctcttaggggcctgctgggacctctccccaagcataaaattttaaaaatacatatctctagtccctttgaaacaattctaggcacctagttagcaaaaataaatgaacaacctgataaccaagaagatggcaataacttcaacaatagcctcccaagcaagtcagagtcacatggtgttttggttgcctctgaaaactaa

SEQ ID NO: 209910 - DNA, 522 bp, Homo sapiens
tttaagaaaaaaaaaggagaggggacttttcatacaataaaagaagatatctgaaaataatagaaaatatttgtattaatccaaaagttctttgcttgcccttagtatatcttccaataaattgaattattgaaggaaatgttattatatatcaagggaaatgamaatattatttacccatagcttgatttcttatatctaaaaaattgtgaatttagtacttacaaatataagagacatagtgactgaagccagtaataaaaataaaaaatattatgtcactgtcatcacatcgcattataaatatccttaaaattatcctcttgtgtcattatccacatatgaatatttcttatgatagcatacaactttatttactttctactatctggaaaaattattaacattttagacatgagcttgtcaaattaaaaaagctcacagcaactgtttcacattagttgcaaaagtcatcacttggccaacatttaaaactagttgtcaaaataaagacaaaaactt

SEQ ID NO: 209911 - DNA, 507 bp, Homo sapiens
gtctcagcattgggatagcaatgaaggagagatgggaaagcataccttagccttttaccatttcattttaaagttctgcttcataggaccctatcttagataatatcagaagcatgagaggaagctggatcagtttccaaatattagttaagaaggaggttagtrcacaaagtagagaaagtgaaaaaaaaattgaaggattttccaatgtttccactaaaataggagagatattaaaactatctttgcaaagattatgacagtgagagaaatctagcatggctggttccatcttacttctagcctcacaggctgaccatctttgctcatttctgggcataggccgaggaaaacatgggagaaatttagtttgtagtttaacctggaagcaaagatgataataatccccccgaaagctacccctgttcttgctaaaggactgaaaactaataaaaggccatgagattaggattatgggatgggcctgaactctgctaaaatgtaggc

SEQ ID NO: 209912 - DNA, 509 bp, Homo sapiens
atgagctccaggtgattcataggcatggtaaagtttgagaatcactgcttttctgggttccagtagttttttcatttcatggagaggcaatgacagctccaacttttcaaaggcccatttgttgtactattccttgtgctttccctacactttgccaaaatctttgcaaatatcttatttttaattaagtctttttcaaattatcccaattgtctagctatctgtgagaatcctagcaygatagatccattagactatgtactccatgaggacagagactttgtctgtttagtttactgctttatcgctaggtcttaaaacagtttttgggctatagtgagactctcaatattttttgataaattgaacaatgcctggcagtaaatgttagtttgtattagcattattattattatttaatatcattgttatgttaacctctagctttgatgttatcctaagacacaatgaatactgatatagtcaaaatctggattaccaagattgat

SEQ ID NO: 209913 - DNA, 509 bp, Homo sapiens
atgagctccaggtgattcataggcatggtaaagtttgagaatcactgcttttctgggttccagtagttttttcatttcatggagaggcaatgacagctccaacttttcaaaggcccatttgttgtactattccttgtgctttccctacactttgccaaaatctttgcaaatatcttatttttaattaagtctttttcaaattatcccaattgtctagctatctgtgagaatcctagcatgatagatccattagactatgtactccatgaggacagagactttgtctgtttwgtttactgctttatcgctaggtcttaaaacagtttttgggctatagtgagactctcaatattttttgataaattgaacaatgcctggcagtaaatgttagtttgtattagcattattattattatttaatatcattgttatgttaacctctagctttgatgttatcctaagacacaatgaatactgatatagtcaaaatctggattaccaagattgat

SEQ ID NO: 209914 - DNA, 524 bp, Homo sapiens
tctcgtaagtgtgaagtatatcacaatataaataagcaaaataaataaaacaccatgaagaaaagtattgaacattatagcctacggtgatcacgttggcttacttagagtttagaaagataaatcttagaagaatcagtagaaagtcgttccagaataaatgggagaaaatgtagtcactagtcatmaatctttgcctatatctactaaactgccagaggctcttctcaaagaagacaatcatacagcttactaaaggagtcttttcctctaggattatgtaccatctttattaaaacaatcttctatgtgtgaggaaattaaattaatagccaaagttaggtcttgcctatcccatctaagaccaacctgagtttatagcaacatgaatatttataaaatatgtatctcattatcagacaaaaagatatgtgtgcaaagatatcaattatcttctctccaaaattgtagaatagaaatgtttccaagctagaatataaagttatttctcccctagaaaatac

SEQ ID NO: 209915 - DNA, 464 bp, Homo sapiens
ggattcatacatgtgaatggagatcagaacagtactaatattgttatgcggcacttaagtaactaacctttaatcatgttcagaaatggcacagaaacatccatgaatttaagcctccctgagactcaccatgtataatctgagacccaggattaaaatcacttctacaattttcctcattgagagtagtctcagctacatttgaatgagtctcttcagtttgccatggaaaatttatttatacctatcttagggagtatattttgatgcaatctcatgctcacattcatcaggagcagttatacttcactttaagttatgatgcttcttttaaagatgaaggagccaatgagaaataaccattaacaacatttcttggktagaatcatctcttttattcttttcagcatataaccctggagttttgatcacacagttggcaaacagcttgtgtattaaaaaaa

SEQ ID NO: 209916 - DNA, 532 bp, Homo sapiens
tggctatcctggctagagtctggcaataagaaatttaaaaggattttttgtaaagaaaaaaaagctctgtagttaaaatcagcttaattaaaataagatatccaagctgtacatatatttaaaagacctttatgttttttctcttcttggatcttatttttctgaaggaaagaaaaggttttycttttcagttgactgaattgtttttcccagtttagtcttcttgccactcttgatgtcaacatgagagaacttaagataaactctaacagcctgggactcctggggaaaagcagagaaggtgccacagaccccattttaggaaaaacctccattttcctcatggaaccccaggaattgagagaaaatagatccctctaaaatctaaggctttgttctgtttcacactgcattagctgacttttttaacttttggggggtatcagaaattattttgcattatgggagagcttttagccttggtgtctaacaactaggtaggaaatatattttaagggatggctaatggcag

SEQ ID NO: 209917 - DNA, 558 bp, Homo sapiens
atccctaattccaggcactgcatgtgcttggggcttttcttataatatcataaatatgaggagaaagtttcatagcarggaaactaggagttgagtttgcacagtttggtttcagttatatgctctgtgcatttagttaaatttcagctgtcttcttggcttatctaagtgttgtgttcccaagaatgaggatactcttcaattactttatctttcctctttttctgtaatatattacaaacccatacatatccccttaaatttgcagacttattgtgttctctttccactaaacttacataatttcttcctccaataaagtagattctattctaatcagcattacctgaatccaataatgtaaatgatttcttaggtgtaggtgagaaaattgttctataaatgaaacaaatgttcagtttttcttcaatttcatcctttttagtctgaaaactatttattatggagatatctctaaaatgagctttcatttatatctacaagaaataaaattagttaatgtagtccacattagaataaggaatcagttgagaggaa

SEQ ID NO: 209918 - DNA, 558 bp, Homo sapiens
atccctaattccaggcactgcatgtgcttggggcttttcttataatatcataaatatgaggagaaagtttcatagcaaggaaactaggagttgagtttgcacagtttggtttcagttatatgctctgtgcatttagttaaatttcagctgtcttcttggcttatctaagtgttgtgttcccaagaatgaggatactcttcaattactttatctttcctctttttctgtaatatattacaaacccatacatatccccttaaatttgcagacttattgtgttctctttccactaaacttacataatttcttcctccaataaagtagattctattctaatcagcattacctgaatccaataatgtaaatgatttcttaggtgtaggtgagaaaattgttctataaatgaaacaaatgttcagtttttcttcaatttcatcctttttagtctgaaaactatttattatggagatatctctaaaatgagctttcatttatatctacragaaataaaattagttaatgtagtccacattagaataaggaatcagttgagaggaa

SEQ ID NO: 209919 - DNA, 557 bp, Homo sapiens
tactatgaagtggtgccaaatgtctatgcattatgtgttacaaattagaaaggagccttttccaataaactcatcttgagtaggttgggaataactaagaaataataaggaaaggaacatgtgacttgaaataaaggttcaattcagagtagtttggaggttattttttgtcttcttcttttaaaaacacatttaaacctagagtagcaaaccctgacatgaactaatcactgcyttcaattattcagttgtccaaaaaagagagcataatttactgttttgttcaaaagatatttattgaacattttgttaacctgtgttgggctgtagaaacacagtaatgaagcagatgcagactctgcccctgaactgtgttcaccttttatgagtttgagagtaagggaagcatggaatgctagaagaatcactggaagaagcattcaatccagccttggagctttacctggtgtttcccagaggagataatatctaagctaaatcctgaacgatgacaaggaaatacattaattctatttttagatctttgttattataca

SEQ ID NO: 209920 - DNA, 557 bp, Homo sapiens
tactatgaagtggtgccaaatgtctatgcattatgtgttacaaattagaaaggagccttttccaataaactcatcttgagtaggttgggaataactaagaaataataaggaaaggaacatgtgacttgaaataaaggttcaattcagagtagtttggaggttattttttgtcttcttcttttaaaaacacatttaaacctagagtagcaaaccctgacatgaactaatcactgccttcaattattcagttgtccaaaaaagagagcataatttactgttttgttcaaaagatatttattgaacattttgttaacctgtgttgggctgtagaaacacagtaatgaagcagatgcagactctgcccytgaactgtgttcaccttttatgagtttgagagtaagggaagcatggaatgctagaagaatcactggaagaagcattcaatccagccttggagctttacctggtgtttcccagaggagataatatctaagctaaatcctgaacgatgacaaggaaatacattaattctatttttagatctttgttattataca

SEQ ID NO: 209921 - DNA, 599 bp, Homo sapiens
taaatgtgcaaatgccttcttgctgccctgtcagtctcagtacattcactttatagctgctggcaatattgaaggttccttttttgtttgtataaactctaatttctatcaaggtgtcatggatttttaaaattagtatttcattacaaatgtctcagcattggttaactaatttttggcaggaccattattgatcaagcaaataaattcaacagccacttgggaaaaagaaaaagaaaaaaaaaaacagatattcatcacaaatctcattgttagcataaactctctggygtggttcaaggtctcctgtatataaagacactcttatcagacaagatagtccaaagcctcagagtttatcttccaggaaccagttgagggacagtgttttctttaaaatgtgaagggttggagtaccacaagcctgctgacttaacccctttaatgcctccattgtgtcatgatatttaactgtccaaccatattttatgatccttgggtatcagtgtagagcatggctgacactgattttttatttttatttttagttattatgcaatatatatttgagttaatttttatttttagttatttttagt

SEQ ID NO: 209922 - DNA, 591 bp, Homo sapiens
aaaatcttctacttaattctcaggatttagtcccttctctatattccagttctgctaactagctctcctgttctctgttggctgaaactcttaatgaacatgttgaggatctcagactgtgtaggactaaggcctgcatttttcatgcccatctctaccagggacctgagtcttgtcttgaggcctagtacaatgactgttgacttttgtgtctgtggaaagatctgactggcttgaattacaggcttggctctaaacatagcatccattcccagagtttgtaggctctgccctctcttttgtatcccaagttttacccacatcgaatcccttatacattgcattctccagaggactttggagaactgtggtgccacgttctggtgtctcctcaacagctgtggatggccttctctctacctcactgctaagagtaattttaggtttgtcctttcttattctgcctctgccatgccctaatatgggacacagactgtatctaatcattaattaatatctcamctcattcataaaacacaatactcaataattgtctgtgcacagacagcagataaagaatccatataatga

SEQ ID NO: 209923 - DNA, 534 bp, Homo sapiens
gggaaatctttataaaaccatcagatgtcctgagaactcactcactagcatgagggtaactgtccccatgattaaattacctctcaccacgtccctcccacaacacgtggggattatggraactacaattcaagatgagatttaagtggggacacagccaaaccatatcagatggacataagtacctatcaatacttcctaaacagatgtatgttaaatagtagtaacaacatacctacatatattagcattcccatttatttaaataaatacaattaagcatgccctattctattcaccattcttttatggttatgagtatgtcttgtatacttcatattatcatgaaatactggccttatatagactcaatatattccaattagccacaattaccatcattattttgatgcttaaatcctcacaactttgtccttttaagagtgccccaaaatcctttaaaatgtccctgttctctgacaataattatttccaaatctatctgcattgtccttgccctaagacttggaataa

SEQ ID NO: 209924 - DNA, 365 bp, Homo sapiens
tacagtatttgccccatcccttctcttcaccttcccatttcagttctcactggcatgttttcaaatgctagtgtctgcttcttttttcctgaggtctttttgcccagggtctgggttccacttcttgactgacaggctggaagttccagccacctgagagcagccctcaaccaatgactcaaggaagttggatgtaaatattccaactccctcacttgcaggtgggataattctgaggctgcatttcactytgaatcccagagctctaagttaccagcagtggcaacttgcaagaaaatgtaacctctaccagtttctttccctttcctctctcatttttccactcttctatttgtattgtaatc

SEQ ID NO: 209925 - DNA, 485 bp, Homo sapiens
caatgaacagaaatatttttgttactcttttcataattacttttaagcttttctgaatttattttgaatcactgatctatttttgtagctacaacactatgataattttaaaattccaggtgtatgcaaataatctgaaaattaattagctgagactaattcaccttagtttgcagctaccttgttactcttgaacatactttaaggacataatgataattaagaaaaataatrttttggggacagtaataatcttgtatttcacacttatgaaatgtagatgagcacaactgaataattaatcacttttcctctgatactgccaaaccacctgtggaccacttactaatgtgcaggcagtggtatgttggtaattgtttaacaactggttctctggggaggagattctggggaggaggtcccttgatttgcagcatttgccaaatttggtggtgtaaatactcccactatgaccaattttaagc

SEQ ID NO: 209926 - DNA, 517 bp, Homo sapiens
ggtgtcatgctgtctttaaattttatgaaaagaaggaattaggaacaaattctggacgatgttctgcagcacatagaggttgaggttaatttattttaattccgtattgctacctgctggtaggttacaatggatgggtgacagtttacagtatctagaggcacggctctcagtagaggactaaagacaccgtcacagtatctagaagtcagtgttctgagtctgaaggctctgagaaggtgccatagaagtgggccaggcaagtcctgcctgcaaagggagtaaaccagcgaggcataacattataccgacaaatcggaaaaaggctggctgtttcgaccaagcacactttctaataaaaaaatggtgaaggaaagacaggtgtgcctcatggagcamgatgataggattcacattgaggataaatgtaaaagtatttaaataaatatagccaattgggaaaaatattaaatgtataaattttgaataagcataaataaatttagccacaaggaga

SEQ ID NO: 209927 - DNA, 493 bp, Homo sapiens
agtaaatatatagtgcataatcggccacttctccatcctgaactcctgccagacattgctaatcaaactcatcactctaacctgcaagttcagmaggggttaatttcaaaaatatatggggaactccaactcagtagccaaacacactcaagtacgcccacacacatccacatgaaacaaaagcatgttgaaaaatgagcaaataacttgaatagacattttttccaaagaagacatacaatggtcaataagtatatgaaaaaaaattaaccacattaattatcagggaaatgcaaaggaaaactacaatgagataccaccccatacttgttaggatggctattatcaaaaaaccaaaaagaccaagtgttggcaaggatgtggagtaattggaacccttgtacattgttagtgggaatgtaaaatggtacagcagctatggaaaacagtatggaaggtcctcaaaaaaattaaaaatagaactatcatatgt

SEQ ID NO: 209928 - DNA, 493 bp, Homo sapiens
agtaaatatatagtgcataatcggccacttctccatcctgaactcctgccagacattgctaatcaaactcatcactctaacctgcaagttcagaaggggttaatttcaaaaatatatggggaactccaactcrgtagccaaacacactcaagtacgcccacacacatccacatgaaacaaaagcatgttgaaaaatgagcaaataacttgaatagacattttttccaaagaagacatacaatggtcaataagtatatgaaaaaaaattaaccacattaattatcagggaaatgcaaaggaaaactacaatgagataccaccccatacttgttaggatggctattatcaaaaaaccaaaaagaccaagtgttggcaaggatgtggagtaattggaacccttgtacattgttagtgggaatgtaaaatggtacagcagctatggaaaacagtatggaaggtcctcaaaaaaattaaaaatagaactatcatatgt

SEQ ID NO: 209929 - DNA, 497 bp, Homo sapiens
tctagaacttcagggatagtaaatatatagtgcataatcggccacttctccatcctgaactcctgccagacattgctaatcaaactcatcactctaacctgcaagttcagaaggggttaatttcaaaaatatatggggaactccaactcagtagccaaacacactcaagtacgcccacacacatccacatgaaacaaaagcatgttgaaaaatgagcaaataacttgaatagacatttttyccaaagaagacatacaatggtcaataagtatatgaaaaaaaattaaccacattaattatcagggaaatgcaaaggaaaactacaatgagataccaccccatacttgttaggatggctattatcaaaaaaccaaaaagaccaagtgttggcaaggatgtggagtaattggaacccttgtacattgttagtgggaatgtaaaatggtacagcagctatggaaaacagtatggaaggtcctcaaaaaaattaaaaatag

SEQ ID NO: 209930 - DNA, 434 bp, Homo sapiens
tatgttctagtccttcagcctgaaatattaatttgcttcacaaactcctgctaatccttgacagccagttcacatcttccagaaacctacctttttcataattatgtttctgtgccttcctgtataattcataattgcaatgtgtggagttaagtgcctacttttccctctggtggactgagtttcttgagggtgaatgtcaaatcttatccatatgtacatgactattacctagcacactgcaatcatataatacatgttgactgcatatttgcggaattaaatttttatggaaaccttgaagaatatcagaatagaatatcagcytagaatatcagagaaaggatatattaatctactccacttatttgtagattcaactaaagcccagtggtattcattgacaacaaaccaactttactttggccccaacc

SEQ ID NO: 209931 - DNA, 554 bp, Homo sapiens
ctagctgggattacaggtgtgtgccataatgccaagctaattattgtatttttaatagagacagggattcatcatgttggctaggctggtctcaaactcctgacctcgggtaatccacccatctcggcctcccaaagtgctgggattacaggcgtgagccactgtgtctggccaatatgtcttatatgttaattgcttttggaaataatacttgacctttttacactgccataacactgatagtacctattaacatgtcatttaaatttttcaacaagaagaatgccatgctcaattagaaccttagctaatgaattttagttcaaactctgcatagaaaccccaaatttacttaaaatttgtgcagagatctcatttttgtgtttaaaaattttctataaaaatagaattaggacaytgattaatacaaaagacattttattaaaatgaaatgattgttaaattaatcaaacatacataaatcactcttgctatctacatgaattcatgtattcattcatcaaacataaattatttactacattaccaagtac

SEQ ID NO: 209932 - DNA, 530 bp, Homo sapiens
ggaaatcctcttaatctgacaaataaaaatataaaatcatcttttatttagaataaatatttagaactgtttctctcctgcccccatatggtaaagatattggatatgaaaagagttcacatcttttataaaatattttgcaaaagatatagaagttttctttaaatgaataagtatcttgcttgagatttgttaaacttcttggattggtagtttactgttttttggtcaaatactggaatattttyagtcaatatttttcccgaatatttctctgccccattctcactctcctttttttactgggactctaatttcatatatttttggatgacttgagaacatctcacgtgccactgagtctcttttagttctttccgcacttcagtttgcataatttctattggccaatgttcaaattcactgatgcaatacatttttacttaatatattatatttttagttctaggtgttttatgttattccgttaagcaatttctaaatctcttcatgaattatgcagttctctt

SEQ ID NO: 209933 - DNA, 434 bp, Homo sapiens
tacctactgtcatccaaaggaagcataaaaacatgatgttttatatgaatacaaaactttayatatatatatagttatgatcacacatgtttagttaatgtattaggcaccctgaatagaagaattttcataataagattgataagatatattctgcatcaatcctacattctttgttaaatagaaccacacaaaattcaacaatgacacccctctggaatcttgggacccccagaagccctgtagctgaatggcaaacagaatgaggctggtaatgagttgcattgggtgaagtccctgccccaatatttactaaaaataaaatgttcaaaggtgtctcagccttcttaagcttcatttcctttataagataaagaaataataaaaataacattacctatctcagagtgttagttagagaaaaacagaattat

SEQ ID NO: 209934 - DNA, 521 bp, Homo sapiens
agattatgcatctttctctcctataaagagcatttctctagaaacattttgggctcttgttctctcagaattgacacattccagaatagctcctagttgcactgattgttctctagtttatgaacaaagatgtatatcatttcctatctttttttgcccctcaccttttgcctaaacagttccatgtgatctctgtatatcatatygtgggtgagtttgagttagtctgatgcctcctaaagggactagatctgactcagattaaagacagccatacacaccacaactccaagaccacctccaggactaaagagatgttgaacaagataagggtgactactctcatcactccaattcaacacagtactggaaatcctagctaaaacaatcacataggagaaaaaaataaaaagcatccaaattggaaaataagatgtcaaactacctctcttcactgatgatatgattctacgcctagaaaaccctaaagactctgctaaaagactcctggaacagctaaa

SEQ ID NO: 209935 - DNA, 521 bp, Homo sapiens
agattatgcatctttctctcctataaagagcatttctctagaaacattttgggctcttgttctctcagaattgacacattccagaatagctcctagttgcactgattgttctctagtttatgaacaaagatgtatatcatttcctatctttttttgcccctcaccttttgcctaaacagttccatgtgatctctgtatatcatattgtgggtgagtttgagttagtctgatgcctcctaaagggactagatctgactcagattaaagacagccatacacaccacaactccaagaccacctccaggactaaagagatgttgaacragataagggtgactactctcatcactccaattcaacacagtactggaaatcctagctaaaacaatcacataggagaaaaaaataaaaagcatccaaattggaaaataagatgtcaaactacctctcttcactgatgatatgattctacgcctagaaaaccctaaagactctgctaaaagactcctggaacagctaaa

SEQ ID NO: 209936 - DNA, 521 bp, Homo sapiens
agattatgcatctttctctcctataaagagcatttctctagaaacattttgggctcttgttctctcagaattgacacattccagaatagctcctagttgcactgattgttctctagtttatgaacaaagatgtatatcatttcctatctttttttgcccctcaccttttgcctaaacagttccatgtgatctctgtatatcatattgtgggtgagtttgagttagtctgatgcctcctaaagggactagatctgactcagattaaagacagccatacacaccacaactccaagaccacctccaggactaaagagatgttgaacaagataagggtgactactctcatcactccaattcaacmcagtactggaaatcctagctaaaacaatcacataggagaaaaaaataaaaagcatccaaattggaaaataagatgtcaaactacctctcttcactgatgatatgattctacgcctagaaaaccctaaagactctgctaaaagactcctggaacagctaaa

SEQ ID NO: 209937 - DNA, 521 bp, Homo sapiens
agattatgcatctttctctcctataaagagcatttctctagaaacattttgggctcttgttctctcagaattgacacattccagaatagctcctagttgcactgattgttctctagtttatgaacaaagatgtatatcatttcctatctttttttgcccctcaccttttgcctaaacagttccatgtgatctctgtatatcatattgtgggtgagtttgagttagtctgatgcctcctaaagggactagatctgactcagattaaagacagccatacacaccacaactccaagaccacctccaggactaaagagatgttgaacaagataagggtgactactctcatcactccaattcaacacagtactggaaatcctagctaaaacaatcasataggagaaaaaaataaaaagcatccaaattggaaaataagatgtcaaactacctctcttcactgatgatatgattctacgcctagaaaaccctaaagactctgctaaaagactcctggaacagctaaa

SEQ ID NO: 209938 - DNA, 578 bp, Homo sapiens
tgttcctaccacccacccccagccaaaaaaaaaaaaaaataataataatctcatttacaatagccacaaaaaaatacatctgaccaaggaggtaaacgatatctacaagaactataaaatattgctgaaagaaatcatagatgatgcaaacaaacggaaaaacatgccacgctcatggattaraagaatcaatattgttataatggccatattggccaaagcaatctacagattcaatactattcttatcagactaccagtgtcatttttcacagaattagaaaaaaaactgttctaaaattcatatggaaacaaaaaagagcctgaatagtgaaagaaatcctaagcaaaaaagacaaagctagaggcatcacactacctgacttcaaactatgttacaaggctacagtaatcaaaacaatatagtattagcaaagaatcagacacatagaacaatggaacagaatatataacccaaaaataaagttgcacacctacggccagctgatcttcaataaagttgacaaaaataagcaaaagaaaaggagatactattcaataaatggtcttgggataac

SEQ ID NO: 209939 - DNA, 557 bp, Homo sapiens
ttgtgatgtgcttatttctcttgtggggtgtggagggtacttcctgaatcatagtgggagatcaattttttgttcattcttttcagtgcagatccttaagagtataatcaacactttttgatcctccctgagccaaattgattgctccttcttctacatccaaccaaaattttgtatacttcttattttagccttcctgagatttagaaatacagcagactgtgggctttagagacagagagatgmggtttcaagtactgtctctgccactaattaaccatgtaacttaaaacaagttgttcatcagtagagtagggataataacaactatttctttggcttggtgtgagagttaaatatgctactgaatgtaaattccacagagaaatgtctggcaccttatagacacacagtcaattgcaggatggcccatgtgtggtaagataagagagagagaagttagatcacaacctccatctatataccatagtatgaacaaaaatagatgtcctattgctgcactggccaccatcaaacacatagaatggtactgtttt

SEQ ID NO: 209940 - DNA, 557 bp, Homo sapiens
ttgtgatgtgcttatttctcttgtggggtgtggagggtacttcctgaatcatagtgggagatcaattttttgttcattcttttcagtgcagatccttaagagtataatcaacactttttgatcctccctgagccaaattgattgctccttcttctacatccaaccaaaattttgtatacttcttattttagccttcctgagatttagaaatacagcagactgtgggctttagagacagagagatgaggtttcaagtactgtctctgccactaattaaccatgtaacttaaaacaagttgttcatcagtagagtagggataataacaactatttctttggcttggtgtgagagttaaatatgctactgaatgtaaattccacagagaaatgtctggcaccttatagacacacagtcaattgcaggatggcccatgtgtggtaagataagagagagagaagttagatcacaacctccatctatrtaccatagtatgaacaaaaatagatgtcctattgctgcactggccaccatcaaacacatagaatggtactgtttt

SEQ ID NO: 209941 - DNA, 334 bp, Homo sapiens
aattcttaaactcaacaataacaaaattaacaatctgattttaaaatgggataaagatctgaagacacctcaccaaaaaaatgtgttgatgacaaacatatgaaaagatgctcaacattttacatcattagggaattgtaaatgtaaagaacaagttactactatatacctattagaatggttaaaaytgaaaaaacaaacaataccaaatgctagcaaggagatagagcaacaaaaactgttcttcaatcctggtaagaatacaaaatggtacagccaacattggatacagtttggcaatttcttatacaactaaaaatatacttactatatg

SEQ ID NO: 209942 - DNA, 581 bp, Homo sapiens
ttactgactttacagaaatttttaaaaatcatgaggaaaaaagatgaacaattatataccaacaaattagataaactagatgaaatgagaatggtcctagaaatgtacaaattaatttaaatgactaaaaaagaaattgaaaatatcggcagacctgtaacaaataagtagatttaatcaataataataaaataaccctctgaacaaaaacagtcaaggacccaaagtcttcactagtaaattctagcaaacattttaaaaagcattaagaccaattcttttcaaactatttaaaaaaatgaaaaaagagaaaatgcttaactcattgtatgaggtcagcattaccagaatatcaaagccagataaagacatcacaaaaaaggaaaattacagataaacattctttatgaatatatatgcaaaaattctcaataacataccagaaaamaaaattaaactgcatattgaaagaatatgaacaagtagaattttccccaggaatgaaaagtttgttcaacatgagacaatcaatcaatccaacgcaccacaaaaatagaacaaagcagaagaaaaatcataat

SEQ ID NO: 209943 - DNA, 525 bp, Homo sapiens
ataaattttgaaatatttacataatagatttctaagcyatggtgaacatgaattaaatatggtaaatcaattttgaagacagtttggcagtttcttacaaaaccaaatatactcctaccataaaaatccagaaatcatgctcactggtatttacccaaatgatttgaacttgtgttgatacaaacaactgtatatgaatatttataacagctttacttataattgccaaaacttgtaaacaaccaagatatccttcaggaggtgaatggatatactgtgtgcattcagaaaatgaaatattatgcagcaccaaaaagaaatgagctatcaagctgtgaaaagacatggaaaaccttaaatgcatgttactaagtgaaagaagccagttgtaaaaacctacatactatggtatttccactatatgaaattctggaaaagacaaaacaatagaggctggaaaaggatcaatggttgccgggaatttgaagggcaagaggaagagatacacaggcccagcataaggga

SEQ ID NO: 209944 - DNA, 525 bp, Homo sapiens
ataaattttgaaatatttacataatagatttctaagctatggtgaacatgaattaaatatggtaaatcaattttgaagacagtttggcagtttcttacaaaaccaaatatactcctaccataaaaatccagaaatcatgctcactggtatttacccaaatgatttgaacttgtgttgatacaaacaactgtatatgaatatttataacagctttacttataattgccaaaacttgtaaacaaccaagatatccttcaggaggtgaatggatatactgtgtgcattcagaaaatgaaatattatgcagcaccaaaaagaaatgagctatcaagctgtgaaaagacatggaaaaccttaaatgcatgttactaagtgaaagaagccagttgtaaaaacctacatactatggtatttccactatatgaaattctggaaaagacaaaacaatagaggctggaaaaggatcaatggttgccgggratttgaagggcaagaggaagagatacacaggcccagcataaggga

SEQ ID NO: 209945 - DNA, 587 bp, Homo sapiens
aaggatcaatggttgccgggaatttgaagggcaagaggaagagatacacaggcccagcataagggatgtttatgtcactgaaactattctttatgatactgtaatggtggatgcataacattatgcacttgtcaaaaccacagaactgcagatcacaaagaatgaatctaatataaactacagactttagttaataataatgtattaacactggttcatcaattgtaaaaaatgtaccactctggtgcaggattctgatgaaagggcttatgagaaccctctctagtttctgctcaatttggctgtgaagttaaaactgctataaaaaatatttaaaggggaaaaaataatagaatgtatagattcatgtatggatttgaataaatctcaaaatgtaagtgaaaaactgcagaaatctacactagagtaaaattagtattagaaaaattgaaaatatgctatttgttgtttgmatgtatacttattaagtgtaataatataaaatcatgcaaggcctaaagaagtatcaggtttcaagatgatacttttttctggaaaagaagaaatatggaattaaggagtggtac

SEQ ID NO: 209946 - DNA, 392 bp, Homo sapiens
gcaggggccttggaggcagccaatctggacttgaacatcaggtctgccaccractatctccatacccttgagcaagccacttaatcccacaagtcattctaagatgagaaggttgaatcaggtcatgggcaacatcccttccatctttaatagtctatagctctgagttaaaacagttgcacaactgagcttaggggttccccattttagtaggttatagtcattcaaaggacattgattacctttcaaaatagtttctataacttatacagtatcttgtggtattctctacaacaaattaaacatctctgtatttcaggtcagtgctgtgtttttgataaggcatctgcattgacatgggaatcaacatgtttgaggagtgtgctgtgtct

SEQ ID NO: 209947 - DNA, 506 bp, Homo sapiens
agatcacagaacatggcatacgtcacaaaaattatctgttacagtcagtcattaaactgaaccacaaggacctgagacatttgaagaaaatttacagcatgaaaaaagaagcctaaagtggaaaaaaagaattatctgatcccagctaaattagagttgatcaaggaaaagaacatttaaattattctaataagcatattcagaataaaataataaccatattcagaataaaatattctgaatataatattattagaatataaattattctagtaagtaattttcagaaagaacaaaaagttttttctcccaaaaccaaaaatgggcctctggagaaatgaagcaaacagaaaaaagaaactttcaaaaaaataaacattttattgyaaaaaaaaaaaaaaaaaaaaaaactcagtagttggattgagaatagatagcattaaataccaagactaagctcgaagaaagttttcttgtagttaaaaaataatgtattttcagattga

SEQ ID NO: 209948 - DNA, 634 bp, Homo sapiens
gtaggataagttgccacattcttgtttcttaggattagcatttccacgatctctgccccaggccaagccaccagcaatgtttgtctaaattactgcaacagcctaggctagtgcaactgctggtattcctctcatcccttggacacaaatctccatttyccatgaagcaattggaagagtctttttaaacatgcaaatcatatgtggtgacatatgagaagtttcaaaacttttagtgtcttcatatgggagctgaataagatcctcactcttagtcacaacccacaaagccttgccaatatcctaaccaaacaccaaacctcatttcttactactctcttccattttcactctccattccctctagcttcatcctcatggtctgaaacattctctcctccatagccttgtgtggcttgctcctcatgtgtcaaatcccacttttaatgtttctgccttacagagaccattttctattgccataccttgttctttttcttcatagaaccaataaaaaactatattttcttcctttacttgtttttttcctgtcttcaccaccaaatagttggctttatgagttttaatattaaaagaactgattgagacttttttgcttctctatctccacatg

SEQ ID NO: 209949 - DNA, 632 bp, Homo sapiens
  misc_feature (1)...(632): n = A,T,C or G
caagtgagaggaactggaagcaacaggaaagagctgggcggtggacagagaggtacaactgaggaagctattgcagcgccaactttctgattattgctcaatcagtttcagtgttactttgtatctatcagttgactgattctacatgtgctttacaaccatgaatgctgggcagtttggcttgaaatttttgattaggttatcacatcgagcactgctatgactgaggatggtggggcacaggagcttaagactggtattggtagatggagttgaagattgcgtgtgtggatggaagtaaagatgaagatagagatgattttgggtggggctgaanatgagaagtgggggcggagatgaagatggcgtggtgaaccctggcaacattagctatgggaaaacaggattaggcagatctttgattgaaagaattgaaccacaggcaagaatataggacagattctgaccaaaatagaagattctagaatgagctagtcagaatattggcacaaaataaatgaattggtgctcagagcagaactccatacctactaggacraaaagcctaagtcacattgcgggtggctgggcaccaaatgctaactaacttcatcttccagggactggaccta

SEQ ID NO: 209950 - DNA, 364 bp, Homo sapiens
gggttgttagtataggtgattcacataaatattaacaaccccaatgttactgatttcttttctctcttacttacacaggatttcattctcttttttctccaagtcacagccaattgtctgaaagtcttcagggtgactcacaggggatactgacaattctaaacattttaggccagacatcacctccatagcctgctgggcactgcttccccttaactagaaaccacctstattacaccagtgctaccctagagccagagctacaagcaggtctttgaaaaacaagaggagaatgccttcttccctttgacatatgttatgctagatggttatcttagtttgggtttctagaaacagagcctga

SEQ ID NO: 209951 - DNA, 540 bp, Homo sapiens
ctcactctcctctgaacttgattcctcaggggccgcttgtgcagcatcttgccttggccttgctagagatggatagattgggacatagagaggtggaaactccctcttctcgggcaaggcctgcagaacaggttttttatgttttccttaaggcttttcctttctttccaccatccctttaggttcttttgctacctcagatctggcacgagctaccagggtcttacaggaagtctcataacaggcttgtaaacacttggggtgagtttgaatgatgctcagccaggagtcaatgtatgggaacgggtccaggtacccaggctgttctttgactctggttatgaccctaaacacaaggccarttatctctctgtctatcgttacttaggccagccacccaacactaaaagaaggccaatctatttcacagagagttctcaatctctgaggggttaatttaactccataatatccattaaaacctttcttgaaattctccaacatccactccaatggagtaggctttgatgcttttcctcc

SEQ ID NO: 209952 - DNA, 536 bp, Homo sapiens
aatgactgtcatcatgttacatttttgcaagtttgttgcattatgacctgggttcaaatgacctacaacactgaaaaatctggggaccttaagcaaatcaccaaatgcctctgagactcaatttgttcacctgtgcattgggtgccttgctttccttacagagttttgtgaggttaaaatataacaataatacacctgaaacttcacacatttaagtaatcttttataacatatctgctaaacttaaagtggctagaataacctttattatctgatctctaactaagaaatgccatttcctgtaggaacttaaaccccaatctgtatccacctcagaaccatcttctgtgtttgcaaagatcactaacagtggtatttccaaattatcatcaaccagtgttgctgtttgcatagccagtggrctttctagcaacacttattgatgataatttgatacatgattgttgctgatccttcccgaacatagtagattaaagaaaaatgcaagtttacagaagccagttacgcttagctga

SEQ ID NO: 209953 - DNA, 536 bp, Homo sapiens
aatgactgtcatcatgttacatttttgcaagtttgttgcattatgacctgggttcaaatgacctacaacactgaaaaatctggggaccttaagcaaatcaccaaatgcctctgagactcaatttgttcacctgtgcattgggtgccttgctttccttacagagttttgtgaggttaaaatataacaataatacacctgaaacttcacacatttaagtaatcttttataacatatctgctaaacttaaagtggctagaataacctttattatctgatctctaactaagaaatgccatttcctgtaggaacttaaaccccaatctgtatccacctcagaaccatcttctgtgtttgcaaagatcactaacagtggtatttccaaattatcatcaaccagtgttgctgtttgcatagccagtggactttctagcaacacttattgatgataatttgatacatgattgttgytgatccttcccgaacatagtagattaaagaaaaatgcaagtttacagaagccagttacgcttagctga

SEQ ID NO: 209954 - DNA, 629 bp, Homo sapiens
acatctctaggataaaggaacttttagtacatgtatcagagttctccagagaatcacaacaaataggatgataagacggataactgatagatgatagatagatagatagatagatagatagatasatacatacatacatacatacatacatacatacatagacagatgatagatagatagatagacagatgatagatagatagatgtagattttacggaactggctcatgtgattgtgggagttgacaactcccaaatccataggcaggacaacaggctgtaaactcaggcgagaataatgttgtagtctcgagtttgaaatctacagagcagctggcaggctagcaactcacacaggagctgatgttacagtcataaatttaaaatctttagggcagaccagtaggttggagacacaggcagcctttctatgttgtagccatgagtcagactttcttcttggaagtaaagtcctccttggaaaccaagttttttcttaacacttttgattcattgaatgatgttcacccacattatcaaaggtaatctcttcagttaaaatcactgattacatatgttaatcacatttacaaaataccttcacagcaacatctaaactactgtttgac

SEQ ID NO: 209955 - DNA, 506 bp, Homo sapiens
atctcttcagttaaaatcactgattacatatgttaatcacatttacaaaataccttcacagcaacatctaaactastgtttgaccaaaacactgagcaacatagcctagccaagttgacacataaaatttaaccatcacagcttaccccttgttagcttggcacccatacacatgtacttaagccatacttaatctctaaataaagacaatagtgaagtcatactttcaattaacatgatagaactgtcctgtgtacaaatgaaaacatgctaggcagggcacagtggctcacgcctataataccagtactttgagaggctgaggcaagtggattgcttgagcccaggtgttcgagaccagactggataacaaggcaaaaccccatctctaccaaaaaaacacacaaaaaaatagctgggcatggtagtacatgcctgtagtcccagctacttgggaggcagggggagaatcacctgagcccaggagattgaggctgcagtgagcc

SEQ ID NO: 209956 - DNA, 506 bp, Homo sapiens
atctcttcagttaaaatcactgattacatatgttaatcacatttacaaaataccttcacagcaacatctaaactactgtttgaccaaaacactgagcaacatagcctagccaagttgacacataaaatttaaccatcacagcttaccccttgttagcttggcacccatacacatgtacttaagccatacttaatctctaaataaagacaatagtgaagtcatactttcaattaacatgatagaactgtcctgtgtacaaatgaaaacatgctaggcagggcacagtggctcacgcctataataccagtactttgagaggctgaggcaagtggattgcttgagcccaggwgttcgagaccagactggataacaaggcaaaaccccatctctaccaaaaaaacacacaaaaaaatagctgggcatggtagtacatgcctgtagtcccagctacttgggaggcagggggagaatcacctgagcccaggagattgaggctgcagtgagcc

SEQ ID NO: 209957 - DNA, 543 bp, Homo sapiens
agaaatcatagatatatgactgaatataaaaattcttctctcttaatttccttaaaatacatatctaaagcaaaaataagaacattgcatagcaggttttgtaatgtatgcagatgtaatacataaacgtatactatgagagaacggaggatggcaagaggacttatattgttataagattctaagattttactggaaagtagtaaaatattagctccaagttgacaaygaaaagttaatgaaatttaatgtatccctaaattgacccccaaaacgcaaagaagtattgcttaataattgaagtataaattaaaattagaaccctaataacattaaatgtatccaaaagtaggcaaaaaaggagaaacaggaataaaaaatagaatggccacagaaaacaaataggaaaatggtagacacaaattaacccatataaaaaaatacattagatctaaatggactaaacactcaattaaaagagattgccagaatggataaaaacgtaagacttgtatttgctgtctacatgatacacacttaaaa

SEQ ID NO: 209958 - DNA, 534 bp, Homo sapiens
tgaaacacagtttttaataataattaaagaaaaactaattttttccccattgtataatgacatgtactgtttgtgttaagataaagcaaaatgtgtcaacatttggaactgacataattttgggaccgaatgtattttaaaatgtggactgaactttaagtatgtgttaatgacttgaaagtacagttaaaaaactgctttcttcttttaagattcttagatgttgcatttaaagaaaactcttattattatttttttctttttacaaattctttgtttgcttataattttcatagtttaaaastgtccatattgtgaaatagtaatttaaaaaaagtctagactggatgactgcatataaagggcttaacatgagataatttttgtggataaatggtatgtattctatttttggccactaaatattttggaagtttttgttttctatttttattttagttacagtttaaataaagatgtattttccatcatttctctcttcctgtcttctaatagtcatatggaattatgtta

SEQ ID NO: 209959 - DNA, 606 bp, Homo sapiens
ggctagctggaacagaaataaaaaaagaaaagcgaaatgtaaatgtacaggtggtcagtgctagggaggcattttgcattcccaaagtcagataaaccagggtaattatgaccttcaatatgagatcaaaggtctaaggttacagatcagactatgcaagcaatgtctacaatggtgaggtcagcccgtcgcggtggctcacgcctataaccccarcagtctaggaggccaaagcaggtggatcacctgaggtcaggagttcaagattagcctgatcaacatggtgaaaccctgtctctaccaaaaatacaaaaattagctgggcagggttgtgcatgcctgtaatcccaactactagggaggctgagacaggagaattgcttgaacttgggaggcagaggttgtggtgagctgagatcttgccactgtactccagcctgggtgacagagcaagactccgtctcaaaaaaaggaaaaaaaaatggtgaggtgaagtcctaaactcattgattgtactatgatgccctcaccagcagaaaccctacacctccagagctctgcccactttgacagagtcaaagagtctttcttctctgtcactctcct

SEQ ID NO: 209960 - DNA, 535 bp, Homo sapiens
aaaccatcattgctgccagctataggatactttggtaagtttcagtcttagaggaagatttgttcttcaaaatcctcccaagccagagaggtcagtaaaagtacttgagcagattaagtgaatttgatttatctcaattactagacagtacattttccataggaaattattagaccacatgtaagtctggcacacacaatgaattctttaatttttcagtaaagtaaggagagaggtgagttcattggaagagaagagtaggattaaagggctttttcagtgtgcagtgattgtgtgtgttcatccatttgcccagccagttcattaggaagaactccrtccatcagtggattatcaaaatgtgtgctagaaacaattcatctgaaaacaaattgcagactgcagacagagatttaaagacaaaaaaaaatgtttactgggacaattctgcttgttatgggattgagctaggttttagttttcagtttcagttctctggccgactccatgcatggctttgaatatcacagaatta

SEQ ID NO: 209961 - DNA, 564 bp, Homo sapiens
tcaggtgttaggggcatggtcaaggagaacctggagggacgagggtgtggttccagtcaacaatgctgrtgagaatctgagacacaggtaggtttgtggtgcagaagaaggcagggagagggttcagaaacgctagtaactgagctgtagataatggtttcaaagtcagggtgggccgaggtcagcatcaacgcaggcaagacaaaggtgaatatttctcaagtcaagtcagtgggtgccagaagctgctactgaatgcgagagtccaacacaggagtactgaagtctaaattggggcctggtatggaaagtccatggcaggtaaacggataaaaaatcagtaagcaaaaggcacactgtagaggttggctttcatcatgaggaagtttcctgttcctgctcccaggtttaaatggctgctgagaggcaagaacttctgtcctgctgctgcctaggctctgcattagaagcaggcaattggaagggcctagtgggagctgggaggtgaaggaaaggaatggtagtgtgaaaatgacccagggatgcatagtttcccaggggaag

SEQ ID NO: 209962 - DNA, 423 bp, Homo sapiens
aagaaggcagggagagggttcagaaacgctagtaactgagctgtagataatggtttcaaagtcagggtgggccgaggtcagcatcaacrcaggcaagacaaaggtgaatatttctcaagtcaagtcagtgggtgccagaagctgctactgaatgcgagagtccaacacaggagtactgaagtctaaattggggcctggtatggaaagtccatggcaggtaaacggataaaaaatcagtaagcaaaaggcacactgtagaggttggctttcatcatgaggaagtttcctgttcctgctcccaggtttaaatggctgctgagaggcaagaacttctgtcctgctgctgcctaggctctgcattagaagcaggcaattggaagggcctagtgggagctgggaggtgaaggaaaggaatggtagtgt

SEQ ID NO: 209963 - DNA, 491 bp, Homo sapiens
tcctgaagattttcagttcactttgcctagatccatcaaagaaatcactatctacggcagctgtatgaaaagtatttctaaaatcacaacactgaaaagttgaaattastccttactccatgggctgcagaataaatattgtattggcaggcatgaaaacaacattaatctccttgtacatccccatcagagctcttgggtggctatgagcattgcccataagcagtgatacttggaaaaaaaaaattttctgagcagtaggtttcaaaggtgggcttaaaagattcagtaaaccatactgtaaacagatgtggtgccatcagacttttttgttccatttatagagcataagtagagtagatttagcaaatttcttaagggccctaggatttttggcatggtaaataagtattgccttctaatttaagtcactagctgcattatcccataacaagaaattcagtctgtccttcattgaagccaggtattga

SEQ ID NO: 209964 - DNA, 580 bp, Homo sapiens
ataaagtatacagcatataagcacttatgggcaatgttagcagagagaaagtgtaatgaagaatgaaaaagaaatactaaagatcaaaacactgtaacagaaatgaacaatgccttggatgggctcactagtagacaggatatggaaaaggaaagaatctctgaacttgagtatatagaaatagaaaattccaacacaggaaagcaaagagaaaaaaagactaaaaaaacccgtaacagaatattgaagaaatgtgggacaactacaataggtgtagcataggcayaatgggaatatcataagaagaaagaggtaaagaaacagaggaaaaatgcaaagcaataatgcatgagaatttccccaaattaatgtcagacaccaaatcacagactggcaagttcagagaacaccaaagagaataaatgcccaaaaaataacacctaggcatatcatattaaactgcaaaaaaatcaaagatttaaaaacagttaataaaatccagaaaaaaataagcccttaactatagaaaaacaaagacaagaattgtatctcatttctcagaaacatgcaagtaagaaca

SEQ ID NO: 209965 - DNA, 580 bp, Homo sapiens
ataaagtatacagcatataagcacttatgggcaatgttagcagagagaaagtgtaatgaagaatgaaaaagaaatactaaagatcaaaacactgtaacagaaatgaacaatgccttggatgggctcactagtagacaggatatggaaaaggaaagaatctctgaacttgagtatatagaaatagaaaattccaacacaggaaagcaaagagaaaaaaagactaaaaaaacccgtaacagaatattgaagaaatgtgggacaactacaataggtgtagcataggcataaygggaatatcataagaagaaagaggtaaagaaacagaggaaaaatgcaaagcaataatgcatgagaatttccccaaattaatgtcagacaccaaatcacagactggcaagttcagagaacaccaaagagaataaatgcccaaaaaataacacctaggcatatcatattaaactgcaaaaaaatcaaagatttaaaaacagttaataaaatccagaaaaaaataagcccttaactatagaaaaacaaagacaagaattgtatctcatttctcagaaacatgcaagtaagaaca

SEQ ID NO: 209966 - DNA, 558 bp, Homo sapiens
gagctgcagtatcactttttattcattcattcacaaatatttatcaaatgccaatatttgctagcaccatctacttggaacacggttatacttaggataaaagtattgattcgggtatccactctagggattaccaccagccttgttcagtgacagggagggtgatgaggcagagtggagcgacttaacctgatttcatgtaagttaaaatgtccacgttgggaagtgaaggtgcaagagaactaaattgcatcttcctagtggatatgttttgtcagagttagctctatattaaaaaaaaaaaaacaggatttgtgaaccccctaattttttaaattcagtatttaaatatcttatctaacaaaatgtttctatattcctgggcgatgtgtaaattttttgttaacctgtatgtatcttttgtgatagagactcasctataggatttagtgttgtttagtggacaggtttctattaataatggtacattcacaatgcatggtactttttgacttttaaactacataaaatgtatattattacccactaaagaaggct

SEQ ID NO: 209967 - DNA, 653 bp, Homo sapiens
aaattagtctggcagttcctcatgtagttataaagttactatatgacccagaaattctactcctagataaatacctaagagaaatgcaaacaaygtaaatgcccattgactgacaaatgtgatctatccatacactaaaatattattggaccataaaaaggaataaagtactgatacatgtacaacatggatgaactttgaaaataatatgcaaagtgaaagaagccagtcacaaaagaccatatattatacgatcttattttatgatatatccagaatacacaattctgtaaagacagaaagtagattagcgtttacttaggcctgggaagagggggaagggagataaaaggataaaaggatgatagctaaagggtcacatgtttctttttgaggtgataaaaatgttcttaaactgactgtggtgatttggtatatctgtgaatatactaaaaagccacttaattttgtagtatgaatgggtaaattgtatcaaacttgaattacatcccaataaaagctgtaaaaaatgcaattccctctggaaagggaatgcatgcttaatccaatggcttttcaattaggagctatctgacaagaaggttcaactaactaacttggaataacaggattcagaatggttacatgttctg

SEQ ID NO: 209968 - DNA, 587 bp, Homo sapiens
ctatgttctctgaggaaatgagatccaaaaaatgaagaaatgatctctctgttgctggactacagtaaattcagtttttatttccattataaacccagtttgattttttataactcaactgatttaatacaaaatataatctacctgttctcagcatttttatggggaatagttcttaagaatgacttcatccactaagaacggtttctagaaggaaaatgaaggtatataaaaagatctttctaaattgctatrtagaatttatttttagttttaaaatgacagaaatgaagtaataataggttcaagataaaaataaaactgttggtttaaagaaaatacatatatcaatgccatacaaaattgtacatatgccaattaaaatcataaagacttcctgaattacaattatcgagataaaggtcttttaaaattttgtcactgctacagtgattaatgattttagaccaaagactagggaggaagaagccagtgtgagaagttcaaagaatgtgtatgcgggctctatctttaaggaaacaacaaggtttaaatcaagaaattgaaatcctatacacttaattgaa

SEQ ID NO: 209969 - DNA, 620 bp, Homo sapiens
gtcccaatttaaatataaattagctttgccttgtggtgttgaattgtgctgttttgatccatctgagcacaatttattatctataaaatatggtaattgtgaagatcagctgacatttaggaagcttaagttagggacaatgatggaaaaatttattactgtgtaaaagttaaaataggatttagggatgtggcttatgcatttgtcttagcttagtaaaacaaatatgattaatggaaacggtattgtttcgacaaatcactggaattttcaattcagaaatgtataaagtgggaagagaagggttggctcacacctgtaattccaacactttgggagaccaagcagggaggattgcttgagctcaggagttcaagaccagcctgggcaacatggcaagacctcatctctactaaaaattagaaacaaaaaacataaaacaaaaaaatactagccaggcatggtggcrtgtgcctataatcccagctatttgagagggtgaggcaggaagatcgcttgagcccaagaatttgaggctgcaatgagttctgcacttcagcctgggcaacagagtaagactttgtccaaaaaaaaaaaaaaaaaaaaaaaaaaaaaaaaac

SEQ ID NO: 209970 - DNA, 516 bp, Homo sapiens
gatccatacacaaattttctaatataaccagtaacttattgtctaagtgatgtaggcactttcttatctgaatacttgttacatgtaatatgtgtttgttctgttatatgtaatatgtgtttgttatatgtaatttgacattgcctattttattttatctacacattgtaggaaaaatgtaatattgttaaaaattattaataaactattcaactaaccatttagaatcttctgtgtttcaagtacaactttggatgctagtgataccgagagattataaattatcttggcctcaggactttactgctattcacarcaataattcccaacctggctgatcatcaggaccacatgagaaatcttgtgaaaattataaattcatagatcctaaaataaaagcaacaattacattgcttagtacctaacttcaagagtaggggacttccagctcatacaatcatcttgctgttttctgccttcatagcccagagaatgttctccttattctagcccttc

SEQ ID NO: 209971 - DNA, 634 bp, Homo sapiens
tacaaattactagctaaatttctaacttgtaccttcttttattagtatttcctatgttggatttacaatgaaaacacctttaggaagctagtaaccatacaagccagtgtccaatatctcacacagctagatttcaaatcattcattattcacttgtagactctaagaacattcatggaatattccattataacttatttagaaatacacagtsatttactggattctgtaataacctctatgagaggagtaactttgagctgaaacagaaaatcttaaaagccatcttttatgaattattcagaaatcaataataaagtttatgtcttaatactgaaaaaaatgtgttctattgttgtaattgtataagttcatacataatgaataacttcaaacaagcattcaaaatttgaagttaagaacaagaatttcctttcctttggtgaaaatagaacaaatttggcaaataaaataatttaaaataataagtttttcaagcttgtgggaagtaaattatattgagcctaaagtgtctatcattatttcaatttaagtgccttctgcactctttcctatatatgtgaatgtgcatgtgtttgtaagtgcaacacacaaaatatatacaggacaatga

SEQ ID NO: 209972 - DNA, 634 bp, Homo sapiens
tacaaattactagctaaatttctaacttgtaccttcttttattagtatttcctatgttggatttacaatgaaaacacctttaggaagctagtaaccatacaagccagtgtccaatatctcacacagctagatttcaaatcattcattattcacttgtagactctaagaacattcatggaatattccattataacttatttagaaatacacagtcatttactggattctgtaataacctctatgagaggagtaactttgagctgaaacagaaaatcttaaawgccatcttttatgaattattcagaaatcaataataaagtttatgtcttaatactgaaaaaaatgtgttctattgttgtaattgtataagttcatacataatgaataacttcaaacaagcattcaaaatttgaagttaagaacaagaatttcctttcctttggtgaaaatagaacaaatttggcaaataaaataatttaaaataataagtttttcaagcttgtgggaagtaaattatattgagcctaaagtgtctatcattatttcaatttaagtgccttctgcactctttcctatatatgtgaatgtgcatgtgtttgtaagtgcaacacacaaaatatatacaggacaatga

SEQ ID NO: 209973 - DNA, 634 bp, Homo sapiens
tacaaattactagctaaatttctaacttgtaccttcttttattagtatttcctatgttggatttacaatgaaaacacctttaggaagctagtaaccatacaagccagtgtccaatatctcacacagctagatttcaaatcattcattattcacttgtagactctaagaacattcatggaatattccattataacttatttagaaatacacagtcatttactggattctgtaataacctctatgagaggagtaactttgagctgaaacagaaaatcttaaaagccatcttttatgaattattcagaaatcaataataaagtttatgtcttaatactgaaaaaaatgtgttctattgttgtaattgtataagttsatacataatgaataacttcaaacaagcattcaaaatttgaagttaagaacaagaatttcctttcctttggtgaaaatagaacaaatttggcaaataaaataatttaaaataataagtttttcaagcttgtgggaagtaaattatattgagcctaaagtgtctatcattatttcaatttaagtgccttctgcactctttcctatatatgtgaatgtgcatgtgtttgtaagtgcaacacacaaaatatatacaggacaatga

SEQ ID NO: 209974 - DNA, 458 bp, Homo sapiens
ggctagccctgcctgaaaatgaaatgatgaacttgacttctcaagcccacatgacttctagagcatgagatagtctgctgttctgctgctgaaagtcagcaacctagcayagggataaggaacgtggactctggcgctaactgcttggggtaaaatcctggtgccaccacttaccagtttcccctggttagattactcagccactctagatttgttttcccatctgaaaaaaaaaaaacggcgaaaataaaaatacctaccctctgtattagtccgttttcatattgctgataaagacatacccaagattggacaatttacaaaagaaggaggtttaatggacttacagttccacgtggctggggaagcctcacaatcatgacagaaggcaaagaggagcaagtcacaacttacatgaatggcagcaggcaaagagagagaacttgtgcaggggaact

SEQ ID NO: 209975 - DNA, 458 bp, Homo sapiens
ggctagccctgcctgaaaatgaaatgatgaacttgacttctcaagcccacatgacttctagagcatgagatagtctgctgttctgctgctgaaagtcagcaacctagcacagggataaggaacgtggactctggcgctaactgcttggggtaaaatcctggtgccaccacttaccagtttcccctggttagattactcagccactctagatttgttttcccatctgaaaaaaaaaaaacggcgaaaataaaaatacctaccctctgtattagtcygttttcatattgctgataaagacatacccaagattggacaatttacaaaagaaggaggtttaatggacttacagttccacgtggctggggaagcctcacaatcatgacagaaggcaaagaggagcaagtcacaacttacatgaatggcagcaggcaaagagagagaacttgtgcaggggaact

SEQ ID NO: 209976 - DNA, 386 bp, Homo sapiens
ataaataattgaatcagagcattttaacatctagatgtaatatatcytacaagaattgttttaagaataacatttgtctttatcagtcccacctgtgggagtttgaatgtggtagaatttgtgtcattgtgatgtacaaaaaatcttattatctgttttttattatgtagtgtatagtttttatatcactactgtttgagataaatgtgaccttttaatcttcttattaaacttttaaatacaattttttctttaatcattccaggtctctgactaacatgctcaatttcaaacatgtactctatctactcataagttagaaaattttgatactctccacttagatgactaagtttctaagaaaaccccatcactctattttggtc

SEQ ID NO: 209977 - DNA, 496 bp, Homo sapiens
tggaggataaagatgagggtgaggtggggatgccaatcataatgttctggggttcctctgggaggctttggttgtgaggtagggcaattgaatagctgggctttgtgggattgccaggaaattctttgacccccagctccagagggtcactggggtgagaccacacattggggtcattgctgatgacactgaagcatctgtaggtccctgcccatgtggaggtgacacggttcatgaggaagacagccttgtgttcattaccctgggatgttcattgcctttggttcttggtggtgtgaaatccatcttatttggtgagaataaataaaccaagttcaaattttgagaaacattgcaacttcatattctctcgtgatgccacctcagtgcctggcatgattgagagaaagggtttgtcataagctgtggtcattaccagcttcagaggttcactcagactagtggtctctgcttcartagtaacagtggtacagcc

SEQ ID NO: 209978 - DNA, 551 bp, Homo sapiens
aacactagaatattggtttcaacaagtagactattttattttataaacttcactagaatattatcaacagcagtattagaaaatggaaagctaatgaaattaggaagcagcatcggcatactgcatamcatgtttctcatcactctaatgcagaatctaatggatgagaaatccatctttcaacttaaaaaaaaagcagcctataaagctagaaaaatagaccaccatttgacaaagttattagggaatattttgctatctaaattcaataaactgcattagtggaaccagtttcttttataagaaaagagcagcacactttcttcttgctatttattatagttccaaagcctgattatcttactagtgttttgttttcctttagcaagatctgaagtagaaaccgactaaagattaaagaattataaatattctctttttataaagatgttttcctgactctattatagtcagaggatattacaaatactgaataatatcaaattttcagaaatcaatacttttcaccaatactgggttgcctacctgtg

SEQ ID NO: 209979 - DNA, 572 bp, Homo sapiens
tagactattttattttataaacttcactagaatattatcaacagcagtattagaaaatggaaagctaatgaaattaggaagcagcatcggcatactgcataccatgtttctcmtcactctaatgcagaatctaatggatgagaaatccatctttcaacttaaaaaaaaagcagcctataaagctagaaaaatagaccaccatttgacaaagttattagggaatattttgctatctaaattcaataaactgcattagtggaaccagtttcttttataagaaaagagcagcacactttcttcttgctatttattatagttccaaagcctgattatcttactagtgttttgttttcctttagcaagatctgaagtagaaaccgactaaagattaaagaattataaatattctctttttataaagatgttttcctgactctattatagtcagaggatattacaaatactgaataatatcaaattttcagaaatcaatacttttcaccaatactgggttgcctacctgtgaaatatggcttttaatatcaaaccctgattttatttgatatcatgac

SEQ ID NO: 209980 - DNA, 572 bp, Homo sapiens
tagactattttattttataaacttcactagaatattatcaacagcagtattagaaaatggaaagctaatgaaattaggaagcagcatcggcatactgcataccatgtttctcatcactctaatgcagaatctaatggatgagaaatccatctttcaacttaaaaaaaaagcagcctataaagctagaaaaatagaccaccatttgacaaagttattagggaatattttgctatctaaattcaataaactgcattagtggaaccagtttcttttataagaaaagagcagcacactttcttcttgctatttattatagttccaaagcctgattatcttactagtgttttgttttcctttagcaagatctgaagtagaaaccgactaaagattaaagaattataaatattctctttttataaagatgttttcctgactctattatagtcagaggatattacaaatactgrataatatcaaattttcagaaatcaatacttttcaccaatactgggttgcctacctgtgaaatatggcttttaatatcaaaccctgattttatttgatatcatgac

SEQ ID NO: 209981 - DNA, 572 bp, Homo sapiens
tttggggccaggagtttaagaccagcctgggcaacatagtgaggcctcatccctaccaaaacacaaacaacaacaacaaaaaaagcttagggattagcctgtaagttcctcttctaggccccaggaattcacagcagtggtggagtcttgctttggagggtcatttcaactgcaccaggagaaaacctacrtgtctatcacaggcctgggaatactgccagtcaccaaactctgaaaatcagctcactggaactctagaatttaatggaagagtttgaaatgcctaattttagaataattttctatgtaatacaaaatgtgaggtttgaaggggtcttttgatatcatttatgccacaaacgggttggcataaatgccacaaatgggttagcataaatgaggatgttgatatctatgtagcggagaaaaggtaatttcttttcctctctcatcacaagggtcatggtggacacacctgtaattaaagacaagttaacaagataaaagcataccaaatatatttgacaacactttacatgaccataggaggcttcagaaataaagacccaaag

SEQ ID NO: 209982 - DNA, 490 bp, Homo sapiens
tgatatcatttatgccacaaacgggttggcataaatgccacaaatgggttagcataaatgaggatgttgatatctatgtagcggagaaaaggtaatttcttttcctctctcatcacaagggtcatggtggacacacctgtaattaaagacaagttaacaagataaaagcataccaaatatatttgacaacactttacatgaccataggaggcttcagaaataaagacccaaagactaaaagaaaactgtgtatttttatgcttaggttcagtaaggaatggatagtcatgtaaaaggatgactgaataaaagggatatgatctaatggtaataaactggaagtaamttagcaaggcctgtttgttcagattcttcttggtctctccatgtagcattccttcctcctgagtatgaggcaggatccctctgggatgatctactttcagacaagataagtcagaaactttctttatggtcaattctcacacaa

SEQ ID NO: 209983 - DNA, 552 bp, Homo sapiens
atgaactttaacccatactctgctaataaattcgagtttaattttagagtttacatattctcttatcatctcaccccagttaaaatggcttttattaaaaagatagagaataaagaatgctggcaamcttgtggagaaaggggaacccccgtacattgttggtgagaaagtaaactagtacagaatggaaaacagtatagaggttcctcaaaaaactaaaaatagaactgccaagtgctacagcagttccactactgggtatacatccaaaagaaaggaaatcaatatattgaagagatatctgcacatctatgtttattgcagcactattcacaatagctaagatatggaatcaacctaagtgtccatcaacaaatgaatggattaaaaaaatgtgttatatatacacaatggaatattattcagccataaaatattaaattttataatttgcagcaacatcagtggagctagacatcattacgttaagtaaaataagccaaacacagaatgacaaacaaatattgtatattctcaaacataagtgggagc

SEQ ID NO: 209984 - DNA, 370 bp, Homo sapiens
aacaaaagtataaaaggaacacagctcgacctcctctagtgtataatcaattgcccttagaataaagattgtcttctttaaatttaactttctaatcattagtacaagcccacttgctaatacctgcacagtgaaaggtaacaaacaagaatgttgtttaaaatagctttttctttctgtcttagtctgttttgtgctgccataatgctacacactggtaacttataaagaacagaaatgtatttatcacagttctaaagtctgggaagcccaagatcaagtcaccagcatttggtgtctagygagggctacatcctccagagcagaggaacactgtgtcctcacatggtggaaggcaatggcaaaggct

SEQ ID NO: 209985 - DNA, 352 bp, Homo sapiens
taagtcatttatttgctcccacatctgagcataggatatttgaatcagccaggtcacatcttgaatgctttactacttataaatttttttcacctgatattctaaatcaggggtgttcaatcttttggcttccctgggccacattggaagaagaattgtcttgggccacacataaaatacactaacgctaacaatagctgatgagctaaaggaaatggaaaaaaaaatctcatcatgttttaagaaaatttacaaatttgtgttgggctgcattcaaaaccttcatgggccacatgtggcctgtaggctakaggttcaacaaacttgctctaaatcatcactgtttagttca

SEQ ID NO: 209986 - DNA, 590 bp, Homo sapiens
gagcataggatatttgaatcagccaggtcacatcttgaatgctttactacttataaatttttttcacctgatattctaaatcaggggtgttcaatcttttggcttccctgggccacattggaagaagaattgtcttgggccacacataaaatacactaacgctaacaatagctgatgagctaaaggaaatggaaaaaaaaatctcatcatgttttaagaaaatttacaaatttgtgttgggctgcattcaaaaccttcatgggccacatgtggcctgtaggctataggttcaacaaacttgctctaaatcatcacygtttagttcaaacttctgcagatcactgtggcatgaacagaatgcagccaagctctttactaaggcctaacatgtgtgccttttgctccagtttccaataagctttttattccatctgagacctcagaaatctggccttcagggtccatattactatcagaattttggccacaaccatttaatcagtctctaagtaattccaaacttcctctcatctttctcatcttctgagccctccaaaatgttccaacctctgcccattactcagttccaa

SEQ ID NO: 209987 - DNA, 635 bp, Homo sapiens
caactcaaaaaatgttgcttaaacaattgactaaaaggaaaaataaaaattaattcctagtttatactattctaaaagaatgtatatgaattaaagacctactatatccatgtaatccctgaatccaaaattttaaaaaaattaaataagaagccctagtgtaaaaattaacactgaattttctagaacaaaatacttgtcttcattatatcagagagcaaagtattttttaaaaaaactcaaaattcacaaattataaaagcctgttaaatttgattacagcaacatgaaagctattacatgacaaatgatctgataaatgaatttaaatgacacattacaaagtgacaacacaaagcaatgtttagctgacaaaggatttgtatctaaaatctacaaataaaccaataaggaaaacacaattgcatagaatatgggtaaaatatatgaatggaatcttcacagaaaagaaaacctaactgtcaaataaatacagatgttcaaccttgctaaaatgaggaatagttgsaatggttggaagaataggaaacaatgatgggaaagatctaatataaagtagatatttcagggtcaaataggggaagtcaaaggttccaggaggaggcatgaaagcc

SEQ ID NO: 209988 - DNA, 644 bp, Homo sapiens
ggcagtaaaaaggccagaggaaaatggaagagtcaatgaactggaaagcctcaaagggcacaatgatgtccatgaatgtcaactagaaaacctagtgatggcagtgaggaacttgaattagtgatgttcagagttggagcaattgtgtggtgccatgttcyagattgtgacagatggcgaaagtcatttattagaaatgaaaaaataaaggaactagataatccaatttggataacttgtccacataaatactcaataagttaggaaagagaaccatagacctagtatcaaaatatcaaagaatatggggaaatgactaggagataagtagaatgcagtcacaagtaacttgagagggctacacaaaatctagaatacactctcctaaaatagagaattgtgatatatacatgaaggagtcacttcagtgggtctttggagtacatatatgattgcaaactatattctgaaatatagccatatgttataaacagtaaaacaaacacagcatttaaagtaaaatataaaaattccacatcggcatggcttataagaatgtggcatcagcactacagagaatgagaacaagaatctaatatgttcttcttttagttattaaaattacttgacgggtccaatatccg

SEQ ID NO: 209989 - DNA, 644 bp, Homo sapiens
ggcagtaaaaaggccagaggaaaatggaagagtcaatgaactggaaagcctcaaagggcacaatgatgtccatgaatgtcaactagaaaacctagtgatggcagtgaggaacttgaattagtgatgttcagagttggagcaattgtgtggtgccatgttccagattgtgacagatggcgaaagtcattkattagaaatgaaaaaataaaggaactagataatccaatttggataacttgtccacataaatactcaataagttaggaaagagaaccatagacctagtatcaaaatatcaaagaatatggggaaatgactaggagataagtagaatgcagtcacaagtaacttgagagggctacacaaaatctagaatacactctcctaaaatagagaattgtgatatatacatgaaggagtcacttcagtgggtctttggagtacatatatgattgcaaactatattctgaaatatagccatatgttataaacagtaaaacaaacacagcatttaaagtaaaatataaaaattccacatcggcatggcttataagaatgtggcatcagcactacagagaatgagaacaagaatctaatatgttcttcttttagttattaaaattacttgacgggtccaatatccg

SEQ ID NO: 209990 - DNA, 644 bp, Homo sapiens
ggcagtaaaaaggccagaggaaaatggaagagtcaatgaactggaaagcctcaaagggcacaatgatgtccatgaatgtcaactagaaaacctagtgatggcagtgaggaacttgaattagtgatgttcagagttggagcaattgtgtggtgccatgttccagattgtgacagatggcgaaagtcatttattagaaatgaaaaaataaaggaactagataatccaatttggataacttgtccacataaatactcaataagttaggaaagagaaccatagacctagtatcaaaatatcaaagaatatggggaaatgactaggagataagtagaatgcagtcacaagtaactygagagggctacacaaaatctagaatacactctcctaaaatagagaattgtgatatatacatgaaggagtcacttcagtgggtctttggagtacatatatgattgcaaactatattctgaaatatagccatatgttataaacagtaaaacaaacacagcatttaaagtaaaatataaaaattccacatcggcatggcttataagaatgtggcatcagcactacagagaatgagaacaagaatctaatatgttcttcttttagttattaaaattacttgacgggtccaatatccg

SEQ ID NO: 209991 - DNA, 644 bp, Homo sapiens
ggcagtaaaaaggccagaggaaaatggaagagtcaatgaactggaaagcctcaaagggcacaatgatgtccatgaatgtcaactagaaaacctagtgatggcagtgaggaacttgaattagtgatgttcagagttggagcaattgtgtggtgccatgttccagattgtgacagatggcgaaagtcatttattagaaatgaaaaaataaaggaactagataatccaatttggataacttgtccacataaatactcaataagttaggaaagagaaccatagacctagtatcaaaatatcaaagaatatggggaaatgactaggagataagtagaatgcagtcacaagtaacttgagagggctacacaaaatctagaatacactctcctaaaayagagaattgtgatatatacatgaaggagtcacttcagtgggtctttggagtacatatatgattgcaaactatattctgaaatatagccatatgttataaacagtaaaacaaacacagcatttaaagtaaaatataaaaattccacatcggcatggcttataagaatgtggcatcagcactacagagaatgagaacaagaatctaatatgttcttcttttagttattaaaattacttgacgggtccaatatccg

SEQ ID NO: 209992 - DNA, 497 bp, Homo sapiens
agtagaatgcagtcacaagtaacttgagagggctacacaaaatctagaatacactctcctaaaatagagaattgtgatatatacatgaaggagtcacttcagtgggtctttggagtacatatatgattgcaaactatattctgaaatatagccataygttataaacagtaaaacaaacacagcatttaaagtaaaatataaaaattccacatcggcatggcttataagaatgtggcatcagcactacagagaatgagaacaagaatctaatatgttcttcttttagttattaaaattacttgacgggtccaatatccggctggagccttctactggcttgaagcaagcaagacttctgaatgttttttgttcagaagaacttggcttgagataatttttggctgtacttgaagttgagtaactgggacatgaaagtagggctgctcgaaagagagccaaagaacccagcctgctgcctgaggcaatgtgtgtccgtc

SEQ ID NO: 209993 - DNA, 497 bp, Homo sapiens
agtagaatgcagtcacaagtaacttgagagggctacacaaaatctagaatacactctcctaaaatagagaattgtgatatatacatgaaggagtcacttcagtgggtctttggagtacatatatgattgcaaactatattctgaaatatagccatatgttataaacagtaaaacaaacacagcatttaaagtaaaatataaaaattccacatcggcatggcttataagaatgtggcatcagcactacagagaatgagaacaagaatctaatatgttcttcttttagttattaaaattacttgacgggtccaatatccggctggagccttctactggcttgaagcaagcaagacttctgaatgttttttgttcagaagaacttggcttgagataatttttggctgtacttgaagttgagtaactgggacatgaaagtagggctgctcgaaagagagccaaagaacccagyctgctgcctgaggcaatgtgtgtccgtc

SEQ ID NO: 209994 - DNA, 508 bp, Homo sapiens
aatggacttcttttgaggaatatatgttctggagatgtactgtagcagctcgccactgagcatgctccccaaggagataatatggttagaaaactgagcttggacctgtgagagccacagaaagctggactccaaattcaatcccacctcaaaattgtgtcccagattagcattagtagccactctcccatcccagctctggagccatcttttagccccaaaagactgggtagggtggttttaagtaaaaatcaggcattatgagggttttgtgtgtgtgtgtacaattttctttgatgtgatcaccattcttaagcagatgtattttatcaaactacccatattttttagtgataaaaatactgtactgtgcataaaagccatcagatacaatatcttatggttacaacaaacctgcagatgcyttgattcaaagtactcactcttgagatgaaagaatagagatttggtaacattcagtaatcttcccaatgtcatggagctagat

SEQ ID NO: 209995 - DNA, 505 bp, Homo sapiens
gtcccatggaaaactaatgaatgacttagagaaataattaattaaaaaggaaacctcaatggctaataaatatatttaaagtttctcaactttacttgcaaatatagaaatgtaaatgaaagcaacaggaagacaccatttcatcatgaaggcaaaattaagtctgaaaataccaaatattggcaacaatgttgagaaagagatactggtgtatactgctgcaataaaaattgtttcaagttctttttagtgtaaactgcttgagattctttgaagaccaattttgaaatatctaataaggcaaagatgtgtatatctcacatacacaacaattctagttttataatacttataaggagacatgagctaggatatcggatgtaacattgttagtaacataaaaaacttaaaataattgagatgtccattagcatggaaatggataaatrtttgcacagtggaactatttagtgactaaagtgattaaagaaaactgtatttccca

SEQ ID NO: 209996 - DNA, 585 bp, Homo sapiens
acatgcattgccatcaagctttggcaggcctgcacttgaccttttgtactttctattatctaaatacttatttggctttaggaaaccagccatgtgtgtctggaattattactaaatgtagccctcagattgcaataccattttacaactttaagaaaagggtaaaattggcaatattgcggttttgaaaaatctcttctgagtgaaggcatggaccactatctacttcaacttccactgggtgcttttgcctaaagcactgtcaggctacagccttacactaataatatgactaactgtagyctgtaggaccaaatattccaggttacaatcttatcagaggaagacagaaactgcagagaggagatgaaggtcacccccacaccccaattctattgccctatttttttgggatttaaagacagacagaggaacccctccatctcatggttggatctcagatatatctgcctttgtcataggtttccagctggagaagtggtttccaagtggagaagcctaaatttctagcagttctcaaaggcaaaaataaaaatccagatatgttcattacttttatctagc

SEQ ID NO: 209997 - DNA, 584 bp, Homo sapiens
gatggttttaaaaacgtgagtttccctgcacaagctctctttttttgcctgctgccatccatgtaagatgtgacttgctcctcctgccttccaccatgatcatgaggccttctcagccatgtggaactgtaaatccaataaacctttttccatataaattacccagtctcaggtatgtctttatcagcagtgtgaaaacggaccaatacacttggtttatttatttttttagtaatgacaaaaaagacaggtaagttttttcatactacccaatttcacatctgcttatgatacataaaagacatattaatattttgacatttaaaatgcatattgcaatcatagatgcataaaatcaaaaggaaataattctgatttcatttttatttctattcatattttctccaagttaagaagatctttgcttaacttatttttaggaacactgtgttacatatgtttcctcaaaaacttttggttttggctcctacatctaaagagcttaaaagttgtcactcctgttcttacaacaagaaaaaaatkaacaaactggaaatcagtgacttttcttggactcattaaag

SEQ ID NO: 209998 - DNA, 495 bp, Homo sapiens
ttttcttattctatgattctcaagagcataactgttacaagatcaatttttacagcaatttctctttcaaactagatgatgtacaggcccaatatrgagattttcttttctttttttaaccactcaaagtccatgctaaaataaatgtccttgtattctccctatgccaataaatgtgcttgtagtctccctatccctctccctatgtttttattttctgtttttaaccttttggttgagtgcaggctcttgaggtcccaactttatattggtggtctcattccagatccattctgagccctacattctctgctcctctttcggtgcattaaaacccaaaatttagcacatccccaagagtagagttgcagcttatgttcttattactgacttatctctttatgttccctgtcatttctggtttcccaatgactttaaagaatgcctaagaggaacctttatgttctttgctccctatgttcttggaaaacagaa

SEQ ID NO: 209999 - DNA, 513 bp, Homo sapiens
ctgcttgatgctctatctccctgtggccaagctaatacctaaggtgcaaggcactgtccactttacttttccytctgcttttctcgtgcagaagaagtttctccctgtaggtagtcgccacagctgggaatgtgctgagtctcaccttaagccagccaatctcagtctctctcaaggcccatggtgtagtatctgggtatcactgctgattatttaggttcaagggctctttaatcagcacatgatgtgtcctagcaggactggctccttcccttcaaggcagtgggtccccttctggcccagggtgcttctagaaatgtcacccaggagctggggcctggaaagggggcctcaagactctgaacactgccttatccaagtgtgaccgagctggtagccaagatggaaaacaaagtcttttttttaacttttccctcttatctcctcaagtagaaggaagaagtctcttttggagttgcaagctgtggagcctggtgttgggggaggggtggc

SEQ ID NO: 210000 - DNA, 513 bp, Homo sapiens
ctgcttgatgctctatctccctgtggccaagctaatacctaaggtgcaaggcactgtccactttacttttccttctgcttttctcgtgcagaagaagtttctccctgtaggtagtcgccacagctgggaatgtgctgagtctcaccttaagccagccaatctcagtctctctcaaggcccatggtgtagtatctgggtatcactgctgattatttaggttcaagggctctttaatcagcacatgatgtgtcctagcaggactggctccttcccttcaaggcagtgggtccccttctggcccagggtgcttctagaaatgtcacccaggagctggggcctggaaagggggcctcaagactctgaacactgccttatccaagtgtgaccgagctggtakccaagatggaaaacaaagtcttttttttaacttttccctcttatctcctcaagtagaaggaagaagtctcttttggagttgcaagctgtggagcctggtgttgggggaggggtggc

SEQ ID NO: 210001 - DNA, 604 bp, Homo sapiens
agatcttgtaggtgttcttcattttaaaaaattcttttccttttcatttctctgtgtatttttacatagcctgtcttcaagctaattctttattctgcttaatcaattatcctgttgactctgatgcattcttcactatgtcaattgagtttttcagctccagaatttcttcttcatttttaaaaattaatttgatttctttgttacatttcgctgataggattctgaatttattttcactattatcttgaatttcattgagcttcctaaaaacagctattttgaattctgtctgaaaagccacatayctctatcactacaagacttatcactgatgctttatttagttttggttagatcaagttttcctggttggttttgatgtttgtggatgttcatcgatgtgtggacactgaagaattaggtatttattgtaatctttacagtctgggattgtttgtacccatgcttcttgtacaggctttccaagtattcaaagggaattgagtgttgttgtataagtttttgttcactgcagacaaactgcgttatggtccaccctagatcagtaattatggacttttgcagactcatagaggtactg

SEQ ID NO: 210002 - DNA, 570 bp, Homo sapiens
gaattcccttgaatactaagaagagactcttgttcttttctcttacttttccccaaacaaatggagcctctctctccatgctaagctgcctacagttggggkagcagtgacacaagtagccttgtggccactaccactgcaactgtactgggtcagccctgaagccagcacaacaccgggtctcatgcaatgctcatggcaaccactacctagctacagccaatgttcattcaaggcccaagggctcttcagtcagaaggtgtcaaatctagccaggctggtgtccttccattgagggtggcaagatcccctccttcatacagggtcagttcagaaatgccatttgggagccagggcctaaagctgggaaccttaggaatctactttgtgttctagtctattgcctctgagctgacacccaatctataagacaatgtccttcccaatattccctctcttttcctcaacaaggagtctttccttgtggacatcactgccccaggcccatagcaagtgctacctagctatcacacatgttcaatcaaggtctcttcaatcagcctgtggcaa

SEQ ID NO: 210003 - DNA, 642 bp, Homo sapiens
agactcttgttcttttctcttacttttccccaaacaaatggagcctctctctccatgctaagctgcctacagttgggggagcagtgacacaagtagccttgtggccactaccactgcaactgtactgggtcagccctgaagccagcacaacaccgggtctcatgcaatgctcatggcaaccactacctagctacagccaatgttcattcaaggcccaagggctcttcagtcagaaggtgtcaaatctagccaggctggtgtccttccattgagggtggcaagatcccctccttcatacagggtcagttcagaaatgccatttgggagccagggmctaaagctgggaaccttaggaatctactttgtgttctagtctattgcctctgagctgacacccaatctataagacaatgtccttcccaatattccctctcttttcctcaacaaggagtctttccttgtggacatcactgccccaggcccatagcaagtgctacctagctatcacacatgttcaatcaaggtctcttcaatcagcctgtggcaaatgctgcatgccaatgtctctctctcagggcagtgggctcccctctagcccagggtggatcaaaaaatgctgtcccagtgccaaggcctgaattc

SEQ ID NO: 210004 - DNA, 477 bp, Homo sapiens
tgactcccagctaggctgcatcctccaccattggaatcaatttgaccctgacaacctaaaaagaaaactgtgatgattaatactgagtgtcaacttgattggatagaaggatgcaaagtattgatcctggatgtgtctgtgagggtattgccaaaggagattaacatttgagtcagtgggctgggaaaggcagacccactcttaatctgggtgggcaccatctaattagctgccagcatggctagaatataaagcaggcagaaaaacatgaaaaaactagattggcctagcctcccrgcatacatctttctcctgtgctggatgattcctgcctttgaacatcggactccaagttcttcagttttgggactcacactggctttccttgttcttcagcttgcagacagtctattgtgggatgtggtgatcgtgtgagttaatactacttaataaactcatacgtataatatatatcat

SEQ ID NO: 210005 - DNA, 477 bp, Homo sapiens
tgactcccagctaggctgcatcctccaccattggaatcaatttgaccctgacaacctaaaaagaaaactgtgatgattaatactgagtgtcaacttgattggatagaaggatgcaaagtattgatcctggatgtgtctgtgagggtattgccaaaggagattaacatttgagtcagtgggctgggaaaggcagacccactcttaatctgggtgggcaccatctaattagctgccagcatggctagaatataaagcaggcagaaaaacatgaaaaaactagattggcctagcctcccggcatacatctttctcctgtgctggatgattcctgcctttgaacatyggactccaagttcttcagttttgggactcacactggctttccttgttcttcagcttgcagacagtctattgtgggatgtggtgatcgtgtgagttaatactacttaataaactcatacgtataatatatatcat

SEQ ID NO: 210006 - DNA, 550 bp, Homo sapiens
taggatctataggatatggttgtgaattggatggcaaggtaagaaagggaggtgttggaataattccttggtttctctctcaaacaactaaaggtasctagttcatgtgttgaacttagggaagagatcagaatttccatcttgaatatttttgtttgagattcatatcgattctaagtggaaatcaaataggcaattataaatgagtttggagctcaaaaataaggttttaggatggtatgataaattttggagtcatgccgggtgcggtggctcacgcctgtaatcccagcactttgggaggccgagatgggcggatcacgaggtcaggagatcgagaccatcctggctaacatggtgaaaccccatctctactaaaaatacaaaaaattagccgggtgtggtggcgggcgcctgtagtcccagctactcaggagactgaggcaggagaatggcgtgaacccgggaggcggagcttgcagggagccaagatcgcgccactgcattccagcctgggcaactgagcaagactccgtctcaaaaaaaaaaa

SEQ ID NO: 210007 - DNA, 606 bp, Homo sapiens
tgctgggttacagacgtgagccaccatgcctgaycaagtcccgtttaatggtaaagtatgttgcaaggactctactactaatactagtagtgaaagcatcagattttctaagtgattctaaaataggtatgaagctatcctgaatataaggccattctcccctgcatatctttgtgggtttttttggaatgggcctattaaaaaggtgaagaactgccacaggacataagccatagacttattagaaagtccatagtactgctcctcccatcaatgacattactctgcatatacaaaattcgctcaactgtttcagtattttgcccatgtgaaacaaatggctccacgtcagttattagtgtattataagaggggggtttagcttcaaaaatacttaggcaaacatgactgttaaaatttcagatccaaagtattttcaaagtgttttctcacattatacttctgtgaaaataatacatccaaggtggagaaaacttcacagctaaattataaattttacctgtctacaagaatttgattggttatcttccaatcttcaactccagagatttcttttgcctccagcttctgtttcaaactatttat

SEQ ID NO: 210008 - DNA, 367 bp, Homo sapiens
ggctgggccccagcaccagtgttctgaggtcgctatggagcctgttcctcgccaagtgggcggctccccggccatgccccaccaggctgccctgccccaggaggagaagcaggtgtgggcctgtgagcgggaccggctgaagaagcggyggctgtgggaggccaggcagaggggcagccgggagttggcagtgccacgttctggccatgcgacggcggcgccaggacaggcgggaggcccgtgaggcctggaggcagtgccgtggggaggcagagcagccggagcaggacgaggacaggacagagcgcgaggccaggggacagaggcggtggtggaggagggggcaggcaaggtcctcgcccaggga

SEQ ID NO: 210009 - DNA, 597 bp, Homo sapiens
gctaatttttgtatttttagtagaaacggggtttcaccatgttggtcaggctggtctcgaactcctgacctcgtgatccacccgcctcggcctcccaaagtgctaaggattacaggcttgagccaccatgcccggcctctcctgtgtaatctcartgtacttttcatcctcaggaaatttaacattgatataatactaatatgtaaatacattctgtctatattcaaatgttgccagttgtctaaataatatcctttatagatgtattgttttttgctttttaatccagaatccaatcaaggatcacacattgcatttattgttatcatttctttgagacaggatctcactctgtcacccaggctggagtacagtaggcatattcatagctcactgcagcctcaacctccagggctcaagtgatcctcttacctcagcctctccgactgctgagactacagacactacaggctatcacacctggctaattttatttttttgtagagatgcggtctcactatgttgctcttgctggtctccaactcctgagctcaagcgatactcccacactggcctcccaaagtgctgggattacag

SEQ ID NO: 210010 - DNA, 315 bp, Homo sapiens
catggactattttaacatttgaaaaggttttcattctagttctaatacatttgtgatccaaaaatcattaaaattgcctacaaaacaggaatgcagacttgtctcaattaattttgttcrattaaggaacaacaaaaattttacatgtacagttattctcatccagtctccctcctcttcctccccactgcctgccacttttccatgctgagatttgatatggaaagatatccataaatctatcagccacaagggaaataggtcaccttttcacaggatttgctacagtggatctatgaaatcttatttaagtaa

SEQ ID NO: 210011 - DNA, 595 bp, Homo sapiens
taatatttttaatcaaggagtgcttccttagcccacactgaggttgatatattaagtacagtgtatatgtgtgtatatgcatacatgactgtacatagacatatgtgtgtatatgtttacatataattgtatatagacataaaaacaaacatacaccttattgttttcctraaatatgaagaagtccaaactgtgaaacatttcttactccaagggtttcaggttgacctgtaccatgatttatccatcctactggacctgtctctcctcttcaggtcaacctctgtccatcctcttcaaaggagcagttgctcttttcatatgtcagatccaaaaacactgactggaccttaaatattagcagacaatgtcactatacattgaagagcctaaaactaaagtctactccctcttgccttcttttaacttcttagatgaagatgcctggtaagttgaaattagaacccctctaggggcatgaccatttctttctctttttgacttctttcctgaactgtagctaggctagagggaatccatactgaaaatgtacatatagagacacaagccaaaaatatgtgctccaaatggcctt

SEQ ID NO: 210012 - DNA, 595 bp, Homo sapiens
taatatttttaatcaaggagtgcttccttagcccacactgaggttgatatattaagtacagtgtatatgtgtgtatatgcatacatgactgtacatagacatatgtgtgtatatgtttacatataattgtatatagacataaaaacaaacatacaccttattgttttcctaaaatatgaagaagtccaaactgtgaaacatttcttactccaagggtttcaggttgacctgtaccatgatttatccatcctactggacctgtctctcctcttcaggtcaacctctgtccatcctcttcaaaggagcagttgctcttttcatatgtcagatccaaaaacactgactggaccttaaatatyagcagacaatgtcactatacattgaagagcctaaaactaaagtctactccctcttgccttcttttaacttcttagatgaagatgcctggtaagttgaaattagaacccctctaggggcatgaccatttctttctctttttgacttctttcctgaactgtagctaggctagagggaatccatactgaaaatgtacatatagagacacaagccaaaaatatgtgctccaaatggcctt

SEQ ID NO: 210013 - DNA, 674 bp, Homo sapiens
gtaatatttttaatcaaggagtgcttccttagcccacactgaggttgatatattaagtacagtgtatatgtgtgtatatgcatacatgactgtacatagacatatgtgtgtatatgtttacatataattgtatatagacataaaaacaaacatacaccttattgttttcctaaaatatgaagaagtccaaactgtgaaacatttcttactccaagggtttcaggttgacctgtaccatgatttatccatcctactggacctgtctctcctcttcaggtcaacctctgtccatcctcttcaaaggagcagttgctcttttcatatgtcagatccaaaaacactgactggaccttaaatattagcagacaatgtcactatacattgaagagcctaaaactaaagtctactccctcttgccttcttttaacttcttagatgaagatgcctgrtaagttgaaattagaacccctctaggggcatgaccatttctttctctttttgacttctttcctgaactgtagctaggctagagggaatccatactgaaaatgtacatatagagacacaagccaaaaatatgtgctccaaatggccttttaccaaagagccttgccttatgggtaattggcaccatctcaagctattaataaagtggtattctgattatcatttgg

SEQ ID NO: 210014 - DNA, 573 bp, Homo sapiens
tatgtaagatgtgactttgctcttccttcatcctctgccatgattgtgaggcctccccagccatatggaactgtgagtctattaaacttctttcctttataaattacccggtctcaggtatgtctttattagccacatgagaatggactaatataccaggtcttatcaggtctcattttgtcatttgtttctccktaactacactgatcaaagtagtaattttactatatttgtgtgattctttgatgaatatcatcttccccattccataaggcaaaaaccataacttttttgtgctcatcagtacatcctctgtcacatagtgttcaatacatgtatttattcaagaaactaaaagttttaaagtttttatgttctttaacctacataaagaacaaacttcagtgtggaaatcctatgcaaggaaaattacaagatatagagaaatgtttctttccagtaaagacattggaggagaacactaacagaagtcaaagggaaatctaattaatattggctttaaagaagaaaaattatgcaattttgttggagagcaaagtagtcaggtacaag

SEQ ID NO: 210015 - DNA, 573 bp, Homo sapiens
tatgtaagatgtgactttgctcttccttcatcctctgccatgattgtgaggcctccccagccatatggaactgtgagtctattaaacttctttcctttataaattacccggtctcaggtatgtctttattagccacatgagaatggactaatataccaggtcttatcaggtctcattttgtcatttgtttctccgtaactacactgatcaaagtagtaattttactatatttgtgtgattctttgatgaatatcatcttccccattccataaggcaaaaaccataacttttttgtgctcatcagtacatcctctgtcacatagtgttcaatacatrtatttattcaagaaactaaaagttttaaagtttttatgttctttaacctacataaagaacaaacttcagtgtggaaatcctatgcaaggaaaattacaagatatagagaaatgtttctttccagtaaagacattggaggagaacactaacagaagtcaaagggaaatctaattaatattggctttaaagaagaaaaattatgcaattttgttggagagcaaagtagtcaggtacaag

SEQ ID NO: 210016 - DNA, 582 bp, Homo sapiens
ataattagcttccaaatcccaaaccgtgagtgtaattagtaggtgtaatcataatggtagcatgtcatttttgtggaggccgtagaattgcatctctgaattatgaatgayacaatgaaagcttattacttcattacactaattaagaattagtgataatttggttaccagctagactgatactttgtttcattagcgaaagagttatagagtaagaagaaatgtatttgtatattgattctgtcacttttatctatgtgtatggcttcaggctagcttatttactaagtctcttgtttttgcatctgtgaaaaagagaaaattaaatgtcttacagcattattgtgaagattaaatgagaaaatgtaggtgaaagggtttgaaaactattaatcctcattcagaacaaaggccttataatctacaaaaatatacgtgttaaggaaattcatattatcataatttttaataagcagtcaataaaatgcttttttacaagtaatttttaaagtattattacaaataatatatcaaattacaatcattcttaattacatattaaagtagaccaaaaagaactgg

SEQ ID NO: 210017 - DNA, 582 bp, Homo sapiens
ataattagcttccaaatcccaaaccgtgagtgtaattagtaggtgtaatcataatggtagcatgtcatttttgtggaggccgtagaattgcatctctgaattatgaatgatacartgaaagcttattacttcattacactaattaagaattagtgataatttggttaccagctagactgatactttgtttcattagcgaaagagttatagagtaagaagaaatgtatttgtatattgattctgtcacttttatctatgtgtatggcttcaggctagcttatttactaagtctcttgtttttgcatctgtgaaaaagagaaaattaaatgtcttacagcattattgtgaagattaaatgagaaaatgtaggtgaaagggtttgaaaactattaatcctcattcagaacaaaggccttataatctacaaaaatatacgtgttaaggaaattcatattatcataatttttaataagcagtcaataaaatgcttttttacaagtaatttttaaagtattattacaaataatatatcaaattacaatcattcttaattacatattaaagtagaccaaaaagaactgg

SEQ ID NO: 210018 - DNA, 591 bp, Homo sapiens
tcataatggtagcatgtcatttttgtggaggccgtagaattgcatctctgaattatgaatgatacaatgaaagcttattacttcattacactaattaagaattagtgataatttggttaccagctagactgatactttgtttcattagcgaaagagttatagagtaagaagaaatgtatttgtatattgattctgtcacttttatctatgtgtatggcttcaggctagcttatttactaagtctcttgtttttgcatctgtgaaaaagagaaaattaaatgtcttacagcattattgtgaagattaaatgagaamatgtaggtgaaagggtttgaaaactattaatcctcattcagaacaaaggccttataatctacaaaaatatacgtgttaaggaaattcatattatcataatttttaataagcagtcaataaaatgcttttttacaagtaatttttaaagtattattacaaataatatatcaaattacaatcattcttaattacatattaaagtagaccaaaaagaactggcctatttgccaactgtatataaaattaataaaaacgcatttattgaaattagtttag

SEQ ID NO: 210019 - DNA, 607 bp, Homo sapiens
gtcattctcccattgtgttgatgaatagaacctaggtttcttctattcatattaacctctttaacaaaaggtagcttggtcatggtctcagcattccctcccaaacattctttttcattctttacatggccagcctgatagttttccaaatctttctgttctgcttccattttaattataaattccatatttcaatttctctctttcctcattttattgtgcacagctacaagaagccacacagcacctagaacactctgctgtttagacatttctatggccaaatatcccagttcattgctcttaagctctgccttctacaaagtcctaggacacagacacaattctgccaaattctttacaactatattacaaggatggcctttcctccagtttccaatatgtcattcctcatttatttctaagatctcatctgaaaggcttttactccccatgtttctactggcattctagtcatgaccayttaattaatctctaataaatttcagaatttccttatagctctcctattctgatccctcactagaattgccattaacactccatttacagcaatctaggcttttttctagcctgctcctccaaa

SEQ ID NO: 210020 - DNA, 586 bp, Homo sapiens
tattacgttttatgtaatatatatatgtgtgttatgtatatcaaattttatacacacatacatatataaaggtattttaatctatattttaactctgagttactgagtaaaaacttaaacctcygagctcctaatatattaaaatgtacatgtaagtgttcactctacatgtttgataagaatgagctatcatatttctgatctgcatatgtttcgttaaaatcattaaaaagcattatttaaatgcttccttattggcccccaaatagtatcaaaagtatgtatacgtgtgtatgagagacagtatgtgtgtgcagaggtttagtttgattttctactctcaaaaattattttctgtttactaaaaagagtctataatttagctcagttaggaccccaactctgtgacaaattgtggcacttcattttggaccccctgacattttgttcactgtgtaactcttctgcataaacactgactcaagccacaatccacaatccaagacactgtaagaatggatggaaacagaatcatgtgatgtgaaatgcagagtcatatctcagctcctataataactgtcacaga

SEQ ID NO: 210021 - DNA, 502 bp, Homo sapiens
tacattgcatgcagttatcaaaatatcacatgtacccccaaaatatgtacaaatattatagatcaatcaaaatatgtttaatgcaaaacttatccagaaattcccatcccccttatatgcctcattttccccataacatttattcgacacactacgatatttcatttaagatgtcactaattacaaggcttaccattttaaaaatattatrccaaagaagacatgtccaactaaactatgatatatcatcagttattaagaggcatccttatctcaaagatgataagttgtggccaaaaaaaaatgtatttctttaaatccatgaaagtttgttttatttacctgttttattactttgttttatttcctgtttcccccattagaattaagctccaagaaggtaaggacttttatctttattttttacaactttaacagtgcctagagaaatatgatatgtatcaacaattattttttgattaaatgaatgaaagtaagtaaa

SEQ ID NO: 210022 - DNA, 502 bp, Homo sapiens
tacattgcatgcagttatcaaaatatcacatgtacccccaaaatatgtacaaatattatagatcaatcaaaatatgtttaatgcaaaacttatccagaaattcccatcccccttatatgcctcattttccccataacatttattcgacacactacgatatttcatttaagatgtcactaattacaaggcttaccattttaaaaatattataccaaagaagacatgtccaactaaactatgatatatcatcagttattaagaggcatccttatctcaaagatgataagttgtggccaaaaaaaaatgtatttctttaaatccatgaaagtttgttttatttacctgttttattactttgttttatttcctgtttcccccattagaattaagctccaagaaggtaaggacttttatctttattttytacaactttaacagtgcctagagaaatatgatatgtatcaacaattattttttgattaaatgaatgaaagtaagtaaa

SEQ ID NO: 210023 - DNA, 439 bp, Homo sapiens
ttttaaagaaattgtttcattatggcaaataccagccttttgggagatactactagatccccctgggcacaccagagcactctcatcactggggatgctgtggaaaacagaaatgacaagtactrtgacttggtatttgggagtttgtgggtgacaggagagaaggacatttgtactagaaaagttagagaaagatagtataaatctgtggatatggacaaaacattttgtgagtgggattatcttaaaaaaaaaaagaaaagaaaaccccaaaccgaagattgccatattacgtattcaaactttctataatgctcctgtattcattcttaaatatcatttttagcatgtggctttctttctaatgctcatcttcattctagtcccacattttttccatatttagattcatttaacattctctgtatagctgatttac

SEQ ID NO: 210024 - DNA, 561 bp, Homo sapiens
ggaggcagaggatgggcttagcctcagctcagacatgccaatccctcccccacccatgggaaacgctgcagcatgttttcccatgtctcaggagagacccatgacatgagcagggtggggactcacattctctttacagagtgagattttgaggckgagaatagggaaatgatgttttcaatgagaaggcgaaagccagtactgcagcctgggctcctgaattttaggtgtacccacctttgcaccccacatcactcctgtgggcagcaagctgtgctcccttgggcaagccactgagcttcctctgggcctcactttcaccatctattaaaatggaaaaataagacccatgtaactgcaacacaggtttactagcaactgctctcatttactaagcacactgactgggcttgttgttaagttttttcattcgcattattttgtttgatctcgtggcatctcaaaaggaagtgttagtctccttattctacagatgcggaaatagaagccctggaagactaagtatctttccccaaactacatagccagtaagaagcaaag

SEQ ID NO: 210025 - DNA, 561 bp, Homo sapiens
ggaggcagaggatgggcttagcctcagctcagacatgccaatccctcccccacccatgggaaacgctgcagcatgttttcccatgtctcaggagagacccatgacatgagcagggtggggactcacattctctttacagagtgagattttgaggcggagaatagggaaatgatgttttcaatgagaaggcgaaagccagtactgcagcctgggctcctgaattttaggtgtacccacctttgcaccccacatcactcctgtgggcagcaagctgtgctcccttgggcaagccactgagcttcctctgggcctcactttcaccatctattaaaatggaaaaataagacccatgtaactgcaacacaggtttactagcaactgctctcatttactaagcacactgactgggcttgttgttaagttttttcattcrcattattttgtttgatctcgtggcatctcaaaaggaagtgttagtctccttattctacagatgcggaaatagaagccctggaagactaagtatctttccccaaactacatagccagtaagaagcaaag

SEQ ID NO: 210026 - DNA, 623 bp, Homo sapiens
tgacaccacccaaggaattgttcttcccttaaggaaaggttatgtagtccccacctgcctccacccagcttccactttgccctgaagtcacacatctggccaggtcactccccttccatggtgtcccactgcctgaaggcagcatctagtctccttaatgtagccataaagtcccacgtggcctggccttgcttgcatctctgccctgactctgctactccccccttcccattccatgttgtgtccttggtgcttgaggttcactgggtcagctttggcctggctctatttcaggccttaccacatgctgctttctgctcagatggttcctctcttccctcttccactcggtagctcctactcaccacccctcacatctcaacctggaagtcatcttctatgaggawtgtttgctggccctctctgacaccatatgaggtgtctcggggcatcctgggcccccatgaactcacacatcacattgtatttcagttgtcttcttacccatctgtgcccctgacctggctgcaagtctcccagattagggtttatgtcctactccccctcaaatccccagtcctggcccatggctggcaaaaatgattgcttgttgaattgaagaa

SEQ ID NO: 210027 - DNA, 633 bp, Homo sapiens
tgaccaagcccatacataacctgggcatgaacaccccactgtggttatttctgcactcaggawcaagctggtcctattgcccagctctctgctgtatgggcgagtatagagggggagataataaggactacttctcattgcactcctgttatatgccagccattagtaagggactttataggcagagttcattttgttttatgttctcaaccacctggagaggttagagttactatcttcactttggagatgagaaaactgaggctcagagaggttaagtgacttacctgaagtcagcaaaatggaaaggggaaggagtaataggtagtctacacatacgaagctcctgttaggccctgtctccggctctcacttttagtgcttatggcagcaacaaattatctagtccaaaatgtcagtagtgctgaaggtttaaaatcactgctgcagaagcatttggggctattcctggcacacagtcagcatttgataaatgtgtgttaccatcaatgaacttagttagctctcttcttcacctacttcaatatttattgcatgcccactgtgtggcaggaacacaagaaacacttcagtgagcaagacacacatagcctgtcctcatgaacgcagcct

SEQ ID NO: 210028 - DNA, 594 bp, Homo sapiens
catatcgttaaaaggcctgacttcacccagctggttgctggtttgtgtttatgtttcccttttcccttctcccctaccaaaaatggtcccctccccccagagaagactatttccttttgttgcggggaaactctgaattggtggttgcttagaaaacacatagaagtgtgtagcaagttgaagttaaaaaayagttcatgaaatgcaaaactccatttagcccctatctgccaagaaataaatagtttaaaaaatgaatttcagatcactgacaatgatgactgtgtttatggcagtggagttgtctgtcttcagcaggccatccttgcaggcatacacccagcatttagaaattaaacaaaaacacattgaacttgctgcattagctgttgccacattggaacgctaatgggtttagtgaccacaaccgacccaggccagcgtgtgtcaacagccaaaggagcaacctcagtcactgtttgtgctttgcccaagttgttacaagcttaattctttgcagcttacttttcctgctgttttggcttctcccccaccatgtcttagaaagtgtagccccagcccagcctcacatag

SEQ ID NO: 210029 - DNA, 553 bp, Homo sapiens
tccggtgcccggaacccggttttgccaaacttcgcaatctcctcacctgagggcacccgccaagatctccgtggcaggaccacgcatcgcgcctcatgctctgggccggagccagatgagcaatcatgcatcccactacccaagtccctactactctggggactttgcaggaggtgagcgcctaaccctatccrtcagccccagtgcttaagtatcctcccccagaggtaagaatgaggaggtcccccatgaggttccatgtcaaggcagcagtctccgtggagccccagtgggagcggtctgggatacgcgggcgagccaaggggtccaggcggggaagttggggttcagcctcccgccggtcggtggctctggaaggagcgcagacaaccaggcggcaggcaggcagcggctgcggagtggacctctctctttcagcagatgccgcgggggatggggaacttagagaaggggagacaaggagagtgtaccccgcctcccggcaccccagcccgtagtacggctttaaaatcctgcagagtttgtcataggc

SEQ ID NO: 210030 - DNA, 586 bp, Homo sapiens
cctcggcgtgctggaggtagcggacacaaatccaccaaccctgcccctccggagtccccaaaaccacgggcatctggaagcgtctagaaattccggtgcccggaacccggttttgccaaacttcgcaatctcctcacctgagggcacccgccaagatctccgtggcaggaccacgcatcgcgcctcatgctctgggccggagccagatgagcaatcatgcatcccactacccaagtccctactactctggggactttgcaggaggtgagcgcctaaccctatccatcagccccagtgcttaagtatcctcccccagaggtaagaatgaggaggtcccccatgaggttccatgtcaaggcagcagtctccgtggagccccagtgggagcggtctgggatacgcgggcgagccaaggggtccaggcggggaagttggggttcagcctcccgccggtcggtggctctggaaggagcgcagacaaccaggcggcaggcargcagcggctgcggagtggacctctctctttcagcagatgccgcgggggatggggaacttagagaaggggagacaaggagagtgtaccccg

SEQ ID NO: 210031 - DNA, 606 bp, Homo sapiens
ttgctactcatctgtgaagcactgcacctgctctcaaaggggcttgcagctcagtgggagacttgtgccgctgaagtttgatttgggtcactggcatccaagtctgcagtgctaatggaacagcagaatgggcattctctgcagagcctggacagggctcttgctcactggatccttccttggtttctcagagcagctaactagaagccatggttggcatagtctggtgtatactgacccttcktcacaggaaattgtcataggaaagctttccagcactttcatttctctcttctcctcttcctttcatctctcatgtgcttaaagccctgaagatgggtatccgataccatctttctgtttaaattggcagctacttctggcagtctggtagtaaagatgcctcaaattggcctagggttttaaggtttatttcaatgtaattttacagctaactaatctactttattatttaaagtatccaaaaaggttgataagattgttttaatgatggcatgtctaatgtggggatatcacatacatatgtatggccattttccatttcctgccatggctgacattactagttatcctaacttctttttc

SEQ ID NO: 210032 - DNA, 540 bp, Homo sapiens
gacctaaatatgccaggctcattttcatgtcagtctatgtactagctgttccmtctacctggaatacttctctcctgggtctgtgcatgaataactttctctccccatccatgcctttgctcaaagatcatgaaatgttcctgttctgatcattgtcttcactatccctttatcctgtctgattttctccttagcaattagcatgacgtatttctttgtttaattagtacctaccccactgaaatataagaaccaggaaggggagctttacctctcttgttccctactgtatcctagttcctggcacatagttcgtgttcaatatatatttgctaattgcattaatgaagacatctgaactcaatttaggtgactggtcattctttttccatcttcattgtccttttaaaaagacaatgtctttgtgttttttggcttaaagttattgtgttgacaacgaagaaaataaaacaaataggactgggtaaattttcttttccttgaagaacgttggattatccttctagaacctggagataa

SEQ ID NO: 210033 - DNA, 472 bp, Homo sapiens
gggatggagacaggaaatctgacaagcctgccttctgaggttgtgygtttaagaagactcatcttcaagatcccactcatgcaccagctgcctccttgcctataggccatggggcttccatggctggcagcagcagatgctctaaggaagcccctcctcttccaacaaaaggagtgcctgatgacatgcatcgggccatctgacaaacatttgtgagcatcttttgagtcccattatctccttaagtcacacgtcagtcactacctactgtccctaggcatgaagccattgcataggcaggactcctcgagggaggatgagtttttattacaaggtcaccacaccccattatacagggctcatgaaaaatgtttcccgcccaacttcaagaaactagggcctgtaaaaacctacctcctgctttcagcaggaaagctcagcttggaaactccagggtggttaggtagacaag

SEQ ID NO: 210034 - DNA, 612 bp, Homo sapiens
tttctatatgtaatggaacaaaaggggaattctcttttcctatatatgttccttacaaaaaaaaaaaaaaaagaaatcaagcagatggcttaaagctggttataggattgctcacattcttttagcattatgcatgtaacttaattgttttagagcgtgttgctgttgtaacatcccagagaagaatgaaaaggcacatgcttttatccgtgaccagatttttagtccaaaaaaatgtatttttttgtgtgtttaccactgcaactattgcacctctctatttgaatttrctgtggaccatgtgtggtgtctctatgccctttgaaagcagtttttataaaaagaaagcccgggtctgcagagaatgaaaactggttggaaactaaaggttcattgtgttaagtgcaattaatacaagttattgtgcttttcaaaaatgtacacggaaatctggacagtgctccacagattgatacattagcctttgctttttctctttccggataaccttgtaacatattgaaaccttttaaggatgccaagaatgcattattccacaaaaaaacagcagaccaacatatagagtgtttaaaatagcatttctgggcaaat

SEQ ID NO: 210035 - DNA, 612 bp, Homo sapiens
tttctatatgtaatggaacaaaaggggaattctcttttcctatatatgttccttacaaaaaaaaaaaaaaaagaaatcaagcagatggcttaaagctggttataggattgctcacattcttttagcattatgcatgtaacttaattgttttagagcgtgttgctgttgtaacatcccagagaagaatgaaaaggcacatgcttttatccgtgaccagatttttagtccaaaaaaatgtatttttttgtgtgtttaccactgcaactattgcacctctctatttgaatttactgtggaccatgtgtggtgtctctatgccctttgaaagcagtttttataaaaagaaagcccgggtctgcagagaatgaaaactggttggaaactaaaggttcattgtgttaagtgcaattaatacaagttattgtgcttttcaaaaatgtacacggaaatctggacagtgctscacagattgatacattagcctttgctttttctctttccggataaccttgtaacatattgaaaccttttaaggatgccaagaatgcattattccacaaaaaaacagcagaccaacatatagagtgtttaaaatagcatttctgggcaaat

SEQ ID NO: 210036 - DNA, 485 bp, Homo sapiens
gacagtgttttggaaagagtatttataaattacaataaaaaatgatccaaaaggtgatctgagctaaagacgaacaaacaaaaatgtgatggagttaataatgttagggttgtagtttttttttttttttttttttttgagacagcgtcccactttgtcccccaggctggagtgcagtggcatgatcttggctcacttcagtctccactttctgggcttacgcagtactcctgcctcagtcccccaaatagctgggactataggtgtgtgtgctaccacgcctggctaatttttgtattttttgtagagatggggtttcactatgttgccgaagctggtctcgaactccagagctcaagctatcagtctgcctcrgcctcctaaagtgcttaggtttacaggcgtgagccactgcactggaccctgtagaattttttcattcagttctgctgtgaagactgaagtgctgaatccttaaatatagt

SEQ ID NO: 210037 - DNA, 485 bp, Homo sapiens
  misc_feature (1)...(485): n = A,T,C or G
ggaattcgatacagttcattacacagggtaggtacctaacacgtctttactacagaaatatttacatttacccattaaaatgtcacaaacagttaatggttaggctaggattcacctcttcaaatgacaacatgaaaggattgngaagctctgatggcagaagagaagaccctagataaactctgcatttgacccagaaaacatgtcaaatcctatgatcttgtctaaagttcaacaatgccctgtagctatatattctagtgctcctaagttttacaacctttccttcctttagaaatattcacgatgtgaatgctgaggcataaataaataaaagaaatattcacttgagcaaataatccacaagaatcctttaagaagtagtctctgcagagattaggggagactaaagagacataactaaatgcaatgtggtatcctggattggacagtggaacasaaaaagggtattagtggaaaaattc

SEQ ID NO: 210038 - DNA, 630 bp, Homo sapiens
accaaaacaaagctctcttaaattctttctccattatatttctttycaactcctccctgagtaatacatatttagtgggaataaagtttttattttggccaggtgcggtggctcacacctgtaatcccagcactctggaaggctaaggtgagtggatcacttgaggtcaggagttcgagaccagcctgaccaacatggtgaaaccacatctctactaaaaatacaaaaattagccaggcatggtggtacgcgcctgtaatcccagctcctcaggaggctgaggcaggagaatcgcttgaaccaggaggcagatgttgtagtgagccgagatcacgccactgcactccagcctgggagacagagcgagactccatctcaaaaaatttttatttccaagagtataaaattattctgcatttaaaagcaacattataaccccacatctaaaagacccagggaggagtgaaaaacatttgttggaagtgtactttctgtatactaagtttccttgttctataaaaatatggtaatatttgtttgatacattcgacaaccgcaaccaaaatttattttgagtttacagtccgcaacatgaatttctaaaaatatcatactaacattcagtttaat

SEQ ID NO: 210039 - DNA, 541 bp, Homo sapiens
agatctggttgtttagaagtgtgtagcagctctccgcccctcttcctcctgcttctaatcatgtgagacgtcttgctcccactttgacttccaccatgattctaagtttcctgaggcacccccagaagtcgagcagatgtcagaatcacgttacctgtacagcctgtggaaacataggccaattaaacctcttttatttataaatttcccagtctcagatatttatagcaatgcgagaatggactaatacagtgacctttcagacagagaattcaaatagctgttttgagaaaactcaacaaaattcaagataacayggagaaggagttcagaattctatcagaaaaatttaacaaagagatttaaataattaaaaaagaactacgcagaaattctggagttgaaatatgcaactgacatattgaagaatgcatcagagttttttaatagcagaaggatcaagcagaagaaagatttagtgagcctgaagacagactatttgaaaatacagtcagaggagacacaagaaaaaagagtaaga

SEQ ID NO: 210040 - DNA, 560 bp, Homo sapiens
cctgtactactccttccccagcccctgagctacccggggcagaccttccaaactcccaagaacctattgtgagccaaggatgtcaacaaagctaacaattgacacagtatcaatggtatttggatcacggcagcttctatcccaattaagcctatacacccggccactgtttttaaaaaacacacttcagcacagtcttgactatgacattcagtctggaataagggcaatcctgaaatgcttgttgaatgagtcaagctcatcttttttctgagtttaaatagaataactatggagcatagtggactggaaccaccaggcactagtcaggtgtctactgctgatcaaatgtaatctgagagggcccttaatctctgagcctcagtctctttaccataaatatgtctaaggtcccttcaakaactaacgtgacatgatattctgtcagtcttgactaaatgttctgcttatttgaattcagatcatggtctccaccgtctctacgctcttttgaaaaccacacccaacacaaccaaagctaaaaatagctagagagagac

SEQ ID NO: 210041 - DNA, 535 bp, Homo sapiens
  misc_feature (1)...(535): n = A,T,C or G
tataatcgagaatatacggggtttggttttctgttcctgtgttagtntgctgaggataacagcttccaactccatccatgtccctgcaaaggacacaatctcgttcctttttttttttttacctctktttttagagaaagagtcttgctttgtctcccaggctggagggcagtggtgcaatcatagctcatggcagcctcgacttcctggactcaagctatcctcctacctcagccacctgaagaaaataattagctgtctggacaattttatcctttacctccaaggcctaaacaatacagaagtaaactttggcaagaagagctttggtggagatgcttctgtagttccttttcccattcagaacctaatggtaggatcagggtctctgctgacccgtccctgccactttcaggtgtacgtaaagccacagggacctacaatgcctgggcttgagctttcccagctgggaaactgaggtgaagaggactaacttagagaggtcttttcagtatggtaaaacattagcccaaag

SEQ ID NO: 210042 - DNA, 535 bp, Homo sapiens
  misc_feature (1)...(535): n = A,T,C or G
tataatcgagaatatacggggtttggttttctgttcctgtgttagtntgctgaggataacagcttccaactccatccatgtccctgcaaaggacacaatctcgttcctttttttttttttacctctttttttagagaaagagtcttgctttgtctcccaggctggagggcagtggtgcaatcatagctcatggcagcctygacttcctggactcaagctatcctcctacctcagccacctgaagaaaataattagctgtctggacaattttatcctttacctccaaggcctaaacaatacagaagtaaactttggcaagaagagctttggtggagatgcttctgtagttccttttcccattcagaacctaatggtaggatcagggtctctgctgacccgtccctgccactttcaggtgtacgtaaagccacagggacctacaatgcctgggcttgagctttcccagctgggaaactgaggtgaagaggactaacttagagaggtcttttcagtatggtaaaacattagcccaaag

SEQ ID NO: 210043 - DNA, 535 bp, Homo sapiens
  misc_feature (1)...(535): n = A,T,C or G
tataatcgagaatatacggggtttggttttctgttcctgtgttagtntgctgaggataacagcttccaactccatccatgtccctgcaaaggacacaatctcgttcctttttttttttttacctctttttttagagaaagagtcttgctttgtctcccaggctggagggcagtggtgcaatcatagctcatggcagcctcgacttcctggactcaagctatcctcctacctcagccacctgaagaaaataattagctgtctggacaattttatcctttacctccaaggcctaaacaatacagaagtaaactttggsaagaagagctttggtggagatgcttctgtagttccttttcccattcagaacctaatggtaggatcagggtctctgctgacccgtccctgccactttcaggtgtacgtaaagccacagggacctacaatgcctgggcttgagctttcccagctgggaaactgaggtgaagaggactaacttagagaggtcttttcagtatggtaaaacattagcccaaag

SEQ ID NO: 210044 - DNA, 544 bp, Homo sapiens
gagcagaacaatttttccccgaatrcaagaacgcagaaaggtacatttttattttcaatgttctgatattagtacaatttatattttgtgtctgttttaaggcatgtaaaagaatagtggcatttttgcagaaaataagccataaattcagccataaatatttataaagaaagattatgaggcagcatttccttttctccagtgagtagaaatactcacttaaaatcattctaccctctttctcccaattaacagaggtttcctactgctgtgagatgataccaaataaataattttactattctaaaaaagcagttgtgtatcagcgatgttcaacacatgtgtagagtgtatttttgtttgttcatttgctttatatgggaacacaattagggaggagaggctaacccttgtctgtgcatgtgtgtatgactgactcagttattaaaaatatacatttataagcctgtaaggatgcgtaaatatgttaagcacatatatgtttatactgttgaaatatgtgaactaattttcatttttaaaa

SEQ ID NO: 210045 - DNA, 531 bp, Homo sapiens
aagcttttataaaaggtgtgggaataagtgactatttctttcccaacatacggatgaaytgtactagtggttaaaaaaaggagagttatcttctggcttttgcttaggatgtaaaaggctggtcagggcatcctttgtacccttataatatagaaaatagatcatctgtaaattcatagttgttcttggattcatcagagagctgaggttttggggcagccaactaacccaaaatctaaaggaagatattcacctgaaaggagacacagactatgagcatttgcttttttgcagcagatgctggaccccataaaatgtgttcagaagaatgcaactacaatttttgacaaattgctaaaaactgactttgttttagcatgagtgcatagaatccctgggagctgcagtcagaaggggaaattgcaggtatgtgcatgatcaccacagagctcaccaggtacttacaagagagattaagagcatggtgggagtcctgagaaagccttcatcttgatgcaggcacaggagtgg

SEQ ID NO: 210046 - DNA, 477 bp, Homo sapiens
ctgcttaacagaagtcatgagatgcctgggtaactgacaaagaacaaaggacagtaatagcagtagccagagtatcagcataatttcctcrtgcctgttccccagaccctgacattcagaggaccaggtgactcctatagacacgtaagggtatggaaactccctgacttagttttcagcattccaagaattgccccgcaagaaaaaatggccaacacgatatctgcccacctctcggtggtttcagagtctctgtgatcttggcaccttaagttctagcagcttcagccagtctctaatgcctcaaatctaaactttttctattttccctgtatttcacgtgggttttcttttccttgagttgcttgcaagatgcttcaacttagccacacctggaatatattacatatttgtttcttgtttattttccatcttcttctttaggaacgtaagctctgtgaagttcggttactttgg

SEQ ID NO: 210047 - DNA, 477 bp, Homo sapiens
ctgcttaacagaagtcatgagatgcctgggtaactgacaaagaacaaaggacagtaatagcagtagccagagtatcagcataatttcctcatgcctgttccccagaccctgacattcagaggaccaggtgactcctatagacacgtaagggtatggaaactccctgacttagttttcagcattccaagaattgccccgcaagaaaaaatggccaacacgatatctgcccacctctcggtggtttcagagtctctgtgatcttggcaccttaagttctagcagcttcagccagtctctaatgcctcaaatctaaactttttctattttccctgtatttcacgtgggttttcttttccttgagttgcttgcaagatgcttcaacttagccacacctggaatatattacatatttgyttcttgtttattttccatcttcttctttaggaacgtaagctctgtgaagttcggttactttgg

SEQ ID NO: 210048 - DNA, 561 bp, Homo sapiens
acatcatactcagtggtagaaaactgaaagctttcttctaagttctagaacaaggcaaggatgatcactcttgccaattctacaattctactcaaaatagtactggaagtcctaaccagaacaattagacaagaagaagaaataaaaggtatccaaataaaaatgaagaaacaaaactatatctacagataacatatttttaaataaaaaatcctagagactcacaagaaaatctgttagaactaaataatgaattcagcaaagttgcagggtacaaaatcaacatataaaaatcagtagtgtttctatacagtaacaaaaatgtatcaaaaaaatcaagaaaacmatcccatttaaaatggcatcaaaaataaaataatatgaaataatcttaataaaagagataaaagaactgcatacagaaaactataaaatattgatgaaagaaattgaagatgcaaaataaatgaaatatatcccatgctcatgagttgaaaaaattaatattgttaaaatgttcatataccgaaagatatctacatattcaatgaaatccctatg

SEQ ID NO: 210049 - DNA, 561 bp, Homo sapiens
acatcatactcagtggtagaaaactgaaagctttcttctaagttctagaacaaggcaaggatgatcactcttgccaattctacaattctactcaaaatagtactggaagtcctaaccagaacaattagacaagaagaagaaataaaaggtatccaaataaaaatgaagaaacaaaactatatctacagataacatatttttaaataaaaaatcctagagactcacaagaaaatctgttagaactaaataatgaattcagcaaagttgcagggtacaaaatcaacatataaaaatcagtagtgtttctatacagtaacaaaaatgtatcaaaaaaatcaagaaaaccatcccatttaaaatggcatcaaaartaaaataatatgaaataatcttaataaaagagataaaagaactgcatacagaaaactataaaatattgatgaaagaaattgaagatgcaaaataaatgaaatatatcccatgctcatgagttgaaaaaattaatattgttaaaatgttcatataccgaaagatatctacatattcaatgaaatccctatg

SEQ ID NO: 210050 - DNA, 561 bp, Homo sapiens
acatcatactcagtggtagaaaactgaaagctttcttctaagttctagaacaaggcaaggatgatcactcttgccaattctacaattctactcaaaatagtactggaagtcctaaccagaacaattagacaagaagaagaaataaaaggtatccaaataaaaatgaagaaacaaaactatatctacagataacatatttttaaataaaaaatcctagagactcacaagaaaatctgttagaactaaataatgaattcagcaaagttgcagggtacaaaatcaacatataaaaatcagtagtgtttctatacagtaacaaaaatgtatcaaaaaaatcaagaaaaccatcccatttaaaatggcatcaaaaataaaataataygaaataatcttaataaaagagataaaagaactgcatacagaaaactataaaatattgatgaaagaaattgaagatgcaaaataaatgaaatatatcccatgctcatgagttgaaaaaattaatattgttaaaatgttcatataccgaaagatatctacatattcaatgaaatccctatg

SEQ ID NO: 210051 - DNA, 589 bp, Homo sapiens
cagctacacagacatgtagctggcagctttagttctatacccttagtcatggtttaaaataaatagaaaacaaaaaactcacatttccaggtgtcaaagagctctcctttcttgtagaaggtcagtgtattcttgaacaaacmaaccaaccgacaaataagattttctgtcatctctaacccaacagaataggtctccacctaaaaaggatgatcaaataggctataaaaccaaattcacaaacatttctggcacattaggaaataacttctgagttatataaaaaccaaaaccagaaacaaaaacaaaagcacagaatccacgggaaaaaagaaacaaaagagtcagcgaaggtaaagttccattgccacttggaatttgctgcagaagccaagagaggatgtttgcttccatgcctacacacagattggctctggaaggtgcatttacagggatatcttggtggaacctctgatttgaataaacttatgcaaagatttctttaactcattggctaaaggaagactgtaagactggttcattaactctataaaaaataaaataaaaatgaatgcctaaactaagatct

SEQ ID NO: 210052 - DNA, 589 bp, Homo sapiens
cagctacacagacatgtagctggcagctttagttctatacccttagtcatggtttaaaataaatagaaaacaaaaaactcacatttccaggtgtcaaagagctctcctttcttgtagaaggtcagtgtattcttgaacaaacaaaccaaccgacaaataagattttctgtcatctctaacccaacagaataggtctccacctaaaaaggatgatcaaataggctataaaaccaaattcacaaacatttctggcacattaggaaataacttctgagttatataaaaaccaaaaccagaaacaaaaacaaaagcacagaatccacgggaaaaaagaaacaaaagagtcagcgaaggtaaagttccattgccacttggaatttgctgcagaagccaagagaggatgtttgcttccatgcctacacacagattggctctggaaggtgcatttacagggatatcttggtggaacctctgatttgaataaacttatgcaaasatttctttaactcattggctaaaggaagactgtaagactggttcattaactctataaaaaataaaataaaaatgaatgcctaaactaagatct

SEQ ID NO: 210053 - DNA, 471 bp, Homo sapiens
tagtagcagcagtcaatctaggtaaacaaagcaatattagtttcactatgtatttagaccaataggaggaggtagcttggtcttttttaagctatattttaatatttaaagcacatamtttaatgatagtacagtatttaacacatgtggtatagtccacatttctctgtatctgtcctgtcctcttccctagtgaatatctcctattctaatcattgctgagaatttcctgggcccattctcaatcatcactgctcacagttagtctcaggtaaccactgaattttgaagcttcagttgctaaagctacctaaattgacaatttcatacccaagacactcatgtaaacctcacaaggttgtgagaaatgaatgtgataatgtatgtaaaagcacatggcacagtcactggaaaactgtagttaagggatggttttcattgattcaatgcatttatttcacttcttactag

SEQ ID NO: 210054 - DNA, 471 bp, Homo sapiens
tagtagcagcagtcaatctaggtaaacaaagcaatattagtttcactatgtatttagaccaataggaggaggtagcttggtcttttttaagctatattttaatatttaaagcacataatttaatgatagtacagtatttaacacatgtggtatagtccacatttctctgtatctgtcctgtcctcttccctagtgaatatctcctattctaatcattgctgagaatttcctgggcccattctcaatcatcrctgctcacagttagtctcaggtaaccactgaattttgaagcttcagttgctaaagctacctaaattgacaatttcatacccaagacactcatgtaaacctcacaaggttgtgagaaatgaatgtgataatgtatgtaaaagcacatggcacagtcactggaaaactgtagttaagggatggttttcattgattcaatgcatttatttcacttcttactag

SEQ ID NO: 210055 - DNA, 551 bp, Homo sapiens
actctttccatttgttttcacttccatctgacttctacttcaaagttataagacaaaatctatatttattacttgtatttgttaataaataaaaatggaacaataaaaaatgaacaaacaactgattcatacaataacacagatgaatctaaaatgcctttttaagtgaaataagtcagacaaaacatctacatattatacgagtctttgtaagtgacattctggaaaaggatgactgacagctcaatggttgctagagagagtggaaggaaaagccaggggacaaaggagcagtawgagaaaaatttgggagtgaccgaataattctgtacattattttggtggtggaaacataactctggatttcccaaaaaccatgggacctccaaaagattgataaataaaattggtagatggcatttaaccaagtgatcaagagtaacatcaccagtaataacatatatccatatcatgtatccctgatataatgtgctgagaagtgatagccatgctaagaattcataacttcaacctaatcataagaatatatc

SEQ ID NO: 210056 - DNA, 487 bp, Homo sapiens
tatatgaattgagcagagattacacaggtttcctactgcataaaaatttggagtataaatctttccaggttaaaaaggccctagtaagtacctcaggtttgccacagacctgccctaacaaagcacaaaaacaagactccatgagtttaacgtaattagcaaataatttgactctgacagaataaaggtaacactcttcagaggaaaataacagaattagtagtttctacaataaatcagaattttcagaaaaaatttagcagataatcaaagaagtagaaaaatgttaccaatgatcacaagcacacacacatacacagaaagcacttagtagaaatagacaaaatatgactaagagttgaaattaccagacaagaaatttaaagkagctattaaaaataggctcaatgtagtaaacaaaaatatatgcttataatgaataaaaattagaaaatcttagcatactaattgaaaatattttaaaaac

SEQ ID NO: 210057 - DNA, 579 bp, Homo sapiens
tagtccattcttacactactatgcagaaatgctcaaaactgggtaatttataaagaaaaagaggtttaatggactcgcagttccatatggctgggaggcctcacaatcatggcagaaggtgaaggaggagcaaaaggcatgtcttacatggcaacaggcaggagagcatgtgcaggagaactgccctttataaaaccatcagatctcatgagacttattcagtatcgtgagagcagcatggaaaaatcctgcccacatgattcaattccctcccatctggtccctcccacaacaatatgtggggattatgggagctacaattcaagatgagatttggatggggacacacccaaaccaaatcagatagcaatagtatataccacctaaagttattaygagaataaacagaatttatttatttgtagtggggagagagggccgaggagataagccaagaaggaagctacatggagtaccaatcttcatcgcacacatttgggccatgaagagtagatgacacttgagcctcctggctggtcatggaccaatgcaatacaaagcagagctcagccccagagg

SEQ ID NO: 210058 - DNA, 579 bp, Homo sapiens
tagtccattcttacactactatgcagaaatgctcaaaactgggtaatttataaagaaaaagaggtttaatggactcgcagttccatatggctgggaggcctcacaatcatggcagaaggtgaaggaggagcaaaaggcatgtcttacatggcaacaggcaggagagcatgtgcaggagaactgccctttataaaaccatcagatctcatgagacttattcagtatcgtgagagcagcatggaaaaatcctgcccacatgattcaattccctcccatctggtccctcccacaacaatatgtggggattatgggagctacaattcaagatgagatttggatggggacacacccaaaccaaatcagatagcaatagtatataccacctaaagttattacgagaataaacagaatttatttatttgtagtggggagagagggccgaggagataagccaagaaggaagctacatggagtaccaaycttcatcgcacacatttgggccatgaagagtagatgacacttgagcctcctggctggtcatggaccaatgcaatacaaagcagagctcagccccagagg

SEQ ID NO: 210059 - DNA, 444 bp, Homo sapiens
cagcaatagtacactatttattttgttatttggaaaagtaggtgagaatagaaatttttaagtattgtttttttccaaagtaatttaatttaatcaataatttgagttggtttcagatcttttccttaagtaatgaggacaaactgtgatatgggtacaaagttttaatgttgaggaatgttggccctgtccttaaggaaactatattaaataggatttatctcaaactactttagttgtatttaccattattaaaatttastgacattctcttagattaattagcaataaaaacttgtgaaactttctagtggtttttaaatttttatcctaagtcttttattactgatgatgggccttcatgtgtgcacttgaaaataaaatatgtacaagtgtggctctggtttgaagattccattgatgatagttacctaatcaggtgtc

SEQ ID NO: 210060 - DNA, 562 bp, Homo sapiens
ttcacctcttatttggctggatttcattatagtctttttttttaggaagggtccatgagtgttgtctccctggagttcttttcagtggtcaaaaacatctgcttgctgccttttacatgaataacatcttgactggcatatcatacaggaaaacagaatcccttctaagttttttaaacaaaaagatgacaagttattggaagacctaaagttgcaaacaggcagggtttattttacttgagatcaggagctgcagaacgttcatcaccactgaaggagcttagggtgctggctgccactgagaaggtcaggcttgtctgctgctaccacagttgccagagacagaaaagaaacagcttttacctttcctctacctcctaatctcacacaagtgcctcccacttgtaaaacctaatccagaactaaggtggcaagggaatccaaaaaatgtggttccttagcttctagcccctgcaatacaggtatgagcagagaagtaaagatatatatatmtctttacttatatatatatatgtaatttgagaataagtttcagaaatga

SEQ ID NO: 210061 - DNA, 460 bp, Homo sapiens
aattgccctaataatgtttttttttttttctggtaaatctctctttttttttttttaagacagggtctcgttctgtcacccaggttggagtgcagtggcatgatcatggctcactrcagtcttgacctccccggctcaagtgattctcctacctcagcctcctgaatagctagggacacaggcacccaccatcacacctagctaatgttttctttctaatttttttgtaaagggttctcattatgttgccagggtgttctcaaactcctggcctcaagcaattctcctgccttgacctcctaaaatgctgagtttataggcatgagccaccatggctggcctggaaatattttatatcttgatatgggtggttgtcatatgtgcatcatcacactgtgcacttaaaatgttatttatgttactttaagtaagctataccttaattaaaattttttacatg

SEQ ID NO: 210062 - DNA, 460 bp, Homo sapiens
aattgccctaataatgtttttttttttttctggtaaatctctctttttttttttttaagacagggtctcgttctgtcacccaggttggagtgcagtggcatgatcatggctcactacagtcttgacctccccggctcaagtgattctcctacctcagcctcctgaatagctagggacacaggcacccaccatcacacctagctaatgttttctttctaatttttttgtaaagggttstcattatgttgccagggtgttctcaaactcctggcctcaagcaattctcctgccttgacctcctaaaatgctgagtttataggcatgagccaccatggctggcctggaaatattttatatcttgatatgggtggttgtcatatgtgcatcatcacactgtgcacttaaaatgttatttatgttactttaagtaagctataccttaattaaaattttttacatg

SEQ ID NO: 210063 - DNA, 460 bp, Homo sapiens
aattgccctaataatgtttttttttttttctggtaaatctctctttttttttttttaagacagggtctcgttctgtcacccaggttggagtgcagtggcatgatcatggctcactacagtcttgacctccccggctcaagtgattctcctacctcagcctcctgaatagctagggacacaggcacccaccatcacacctagctaatgttttctttctaatttttttgtaaagggttctcattatgttgccagggtgttctcaaactcctggcctcaagcaattctcctgccttgrcctcctaaaatgctgagtttataggcatgagccaccatggctggcctggaaatattttatatcttgatatgggtggttgtcatatgtgcatcatcacactgtgcacttaaaatgttatttatgttactttaagtaagctataccttaattaaaattttttacatg

SEQ ID NO: 210064 - DNA, 651 bp, Homo sapiens
ttgatgttcatcagggatattgggctgaagttttctttttttgttsttgtgtctctgccaggctttggtatcaggatgctgctggcctcataaaatgagttagggaggagtccatccttttttaatgtttggaatagtttcagaaggaatggtaccagctcctcttcataactctggtagaatttggctgcgaatccatttggtcctggggcttttttgggtagttgactattaatgcctgaaatgtcttggcatattcagggattcaacttctccctgggtttagacttgagagggtgtatgttcccaggaatttattcatttcttctagattttctagtttatttgtgtagaggtgtttataatattctctgatggtagtttgtgtttctgtgtgatcagtggtgatttcccctttatcatttttattgtgtgcatttgcttcttctctcttttcttcttcattagtctagctagtggtctatctattttgttaatttttgcaaaaaaacagctcttgggttcattgattttttgaagggtttctcgtgtctccatctccttcagttctgctctgatcttagttatttcatgtcttctgctagcttttgaattgtttttgctcttgcttctcattcttttaattgtgtt

SEQ ID NO: 210065 - DNA, 546 bp, Homo sapiens
gaattctggttcagtatgaacacgtagtgttacccgacttcctttctaaaccactcattaaatgaaaaatacaaatgataacaatattaaaggaaaactacacacaaaaagtaaaaaagaagaaccattagctaacaaaagctatctatcattttttggcttttggggttttcctttagagacagggtctcgcgctgtcacccaggctgcggtgcagtgatrtgatcataactcactgcagcctcggtgtcctgggctctggtgatcctcctgcctcagcctccagaggagctgggagtgcaagtgtgtgccactgccctctgaaagaaaatgagcggaaggggttactgtcaaaacatgctagacaaagctgtagctcaaaatgtataaagaaggacttaaagctgaggagagacagatcagttgccccactgaatccaaggagagacttggcctagagaattgtccattatggtagaagtaagaataagaagtggggctgaaagtcaggacatttcttgaacatctctgtgtaagcctgaggca

SEQ ID NO: 210066 - DNA, 567 bp, Homo sapiens
cccaactacagaagggagctgagctctagtatatcttgatagagaaagagctagcagctgtatatgctgcccttcaggctcatgagagcgtgacagcatgggctacggytgtcatgtggatgacttaccagatagcaggatgggtgtgctcatggataatgatccccaagactgggacagtgcagacatccactttagcaaagtggggcacctacttagagcagcagagtacactcagtccaagtcccttagcagcagagctgcaagaggtcttgggacctgtagtcctaatgcaagataaggccaaggggcctgagacacccctagaccctgagccatcaccatttaaggaagggtatcctcaattcctaacatggcatggtatacaaatgggtctagctgaggtgctagtgctgcctggaccactgtcgcagtccaacctagtactgacaccatatggtttgaaactggatgtggacaaagtagccaattggatgaacttagagcaatatgggtggtgatcaccaagtgttggggtgatcagacccaacactaggccttggaggc

SEQ ID NO: 210067 - DNA, 567 bp, Homo sapiens
cccaactacagaagggagctgagctctagtatatcttgatagagaaagagctagcagctgtatatgctgcccttcaggctcatgagagcgtgacagcatgggctacggctgtcatgtggatgacttaccagatagcaggatgggtgtgctcatggataatgatccccaagactgggacagtgcagacatccactttagcaaagtggggcacctacttagagcagcagagtacactcagtccaagtcccttagcagcagagctgcaagaggtcttgggacctgtagtcctaatgcaagataaggccaaggggcctgagacacccctagaccctgagccatcaccatttaaggaagggtatcctcaattcctaacatggcatggtatacaaatgggtctagctgaggtgctagtgctgcctggaccactgtygcagtccaacctagtactgacaccatatggtttgaaactggatgtggacaaagtagccaattggatgaacttagagcaatatgggtggtgatcaccaagtgttggggtgatcagacccaacactaggccttggaggc

SEQ ID NO: 210068 - DNA, 514 bp, Homo sapiens
gctgtttgtcctgctgtaactgccttattttgctcggcataatgtcttcaaggttcagccatgtcattgcatattctttttatgcctgaataatatttcatcgcgtatatcacattttctttatctattgatcttttgatggacatttagatgtttccacatcttaggtattgtgaataatgctgcaatgatcaccagggtgctaatctcttcaagatcctaatttcaattcttttggatarataccaagatcacatactagttgtatttttaattttttgaggaagcttcatcctgttttatgtagtggctgcaccattttgcatttccatcaacagtacacagggtttcaatttcttcacatccttgccagcacttgtcttttcataagtggcttgttttcagaaatttaagagatttccacacttgttcacatgtgtgtcaagatgggcactttcttctattagcatatttatcatctttgtccaatatcaacacataagaaacaaagaaa

SEQ ID NO: 210069 - DNA, 448 bp, Homo sapiens
actgtaaagcattgtattaatataaatattaataattcaaatatccatgtaattttctgaaatacatgtagaatatgttgcattaaacatcaaagttattcataacaactgctagaaatgaccactgccatgcattgtggcttscccgaatgtcttaaaatttagctcttacaattaataactatataatactccatgtgatattttctttaactagttttaaatctctagaagtattagcatgtacacttactaaaagacaattccacacgctagaatgggatgatttttagtttagaaaatacggtggccaaagatttctggttcctaaaatacattctgagaatttctttgttacccaattttaccttgccaaagccatgaatcatgttatcttgttgctaatatgttgacaaattggttgaaagatatgttgatcatttgcaaa

SEQ ID NO: 210070 - DNA, 584 bp, Homo sapiens
tgcttgggacaaagtaagagcttgccaaatgttagttcctccctttgcccattttctcctgctttttgaaaattgaatctcatatttttcttctatgtatggttaacagtcatttaaattatcattaamatttattttttgctcagagcatttatgtgaaactggggtcaaaaaatttgccttatttcacaacaccttctagtttcttctgagatggctttgttttcatattacacacttctgctacctctggcatggattgagtttacagacattcttccagcacattgaagaaaatatcgaagtttaaaataaaatatgttactatgtatatagttaaaaagcactaaaagtccattttagtcagtcttttttactcaaaatacaaaatcaaatttaaagcttccctggatgtaaaagaggaactaatggttttaggatacttttgttttacatttccccttaaaaacagaaccaacaactttaaaaatggagtgaagatgactgaactagtaaagttaatacatctgatttattatggaggtgaagagtaaaattggttctgaattttgtgactcaacacc

SEQ ID NO: 210071 - DNA, 476 bp, Homo sapiens
gagttcctagattagacgctttagcaaaatgagagcgtaaactaagcaataggaagacttgggatgaagaaaacagagaattctgcacaggaaaacaaccatgaaaatttcaggataacaactatgctgagggtcagaaaaaaatcctaactgaagtagaaggatggattattccaggagaaaggacaacacggaaaaaaagtgaaattgctgtattatttgatatgtttgagcattggggagagaattctataagttctgtaagtaagggaaagttctrtaagtaaaggaaagttctataagtaaggaatatgactcatgataatgtaagcactaactatgaccccattgggatgatagggaaagggtatgaggtgaagggggccatatcaaggagtcaaaaagtaatgacaaaacggataaatccagaagtagcagcatacacatatttagaagcacagaggaaataaaaaaca

SEQ ID NO: 210072 - DNA, 591 bp, Homo sapiens
gtaattctgttttaagttctttgagaaatcactacactgctttccacagtggctgaactaatttacattcccatgaacagtgtacaagtgttccctacctctggagccttgccagcgtctgttatttttcgactttttaatcatagccatcttgacttgtgtgagatggtatctcaytgtggttttgatttgcacttctctaatgattagtgaaacatacatagcttactggtacagcagagctctttcctggatatcaagtctctggtctaaatatcctcaaacaaggagtcagaacatcttttcacaataattaacatatgctgccacttgctgatgttgagatcctgagtttagtgcatttttgatataattgaatttagtattcaccacaaccctattagataggtactcactacctgaatctgttctgaatcattctaatctcccacatttccttctcttactactttgtgcatagatagttttgcttataactatgaatacgtggtggggaaaagtgcagatcatgcttgcttagtgatcgctactacttttgcagggctttcttccccaacccctgcttttttc

SEQ ID NO: 210073 - DNA, 546 bp, Homo sapiens
tagtagatgcttcataaatatttgtcaaaaaattgaatgaaatgacttgtgattgaaaacaaagttaaattaaactttaatctttttcttataatttatgcttaaacaaattccatatgtagtaaagagagttaaatattaatagtgatatcctcaaagtgttagaagactcatatataggagacaatttttctaagccgttgtcataaaggaaaaggttgattaaatagcctagctaaagattaaaactttctattacataaaaayttcataaataacattcaaagacagataacttaaaaaattttgctaaatatataatgagtactatataaattatatatatggtaactttaagaaaatacaaatctcagtattcagcaagaaaaatgctaacagacagtcacaaaaatagatgtggcccaataaaggaattttctacaaaaagatatagattcaatgaacatattaagagacgcttaacttcttttggaattacatatctcaagtgaaacagaaaaagttcaattaaaagaaataatatta

SEQ ID NO: 210074 - DNA, 436 bp, Homo sapiens
tttccttcttgattcctttctcccactttggcccagactttcacctttgcttctccttgaagtttctaactggctcaatatttttaaatctgctttttttgaactataatttgcatataaaattgcaaamtttggtgagttttgacatatgcatacaatattataactgccatctcaactatcatgatctagaacattctatctccctcaaaattccctcatgtccctttgaagtcaatcccttcctctcccccaagcaacctttgattttatttccatccctacagttttttcttttctaaaattttgtgcaaatggaatcatgcagcatgtcattggtctgatgttaaagcttatgctctttacctagacgtactccctgtctttaaaaacagaaaatggcgaagtagttaaagtgagctgaaattgaacccat

SEQ ID NO: 210075 - DNA, 431 bp, Homo sapiens
aactcatacttccttatttcaaaatttattgcaaagttataataatcaaaatagtgtgacactgacataaagaccaacatataagcaactggaatagaatacagaatgagtaaataaaccctcccatatasggtcaaatgatttttgacaagagtaccaaggtcattcaatgaagaaagggcaatgttgtcaacaaacagtgttgggaaaactggatacatacatataaaagaatgaacttggacctctctttatataggaaaattaatttaaaatagatcaaaggactaaatgtgcaacctaaaactataaactcttagaagatgggggaaaggcttcatggaatttgatttgataatgatttcttggatatgacacgaaaggcatagggcaataacaacaacaacaaaaaaaaacagacaaaatgaact

SEQ ID NO: 210076 - DNA, 389 bp, Homo sapiens
ttagtgatttcatattaactactgctgctgtaatgctgtatgcaacatatactctacatatttagactacaggatgaataagtatgcccatgtatcatatgtaggtatatgtatatgrctatattctttctgcccaacgaaaaaatatttaatagaaccattaaaataaaaatttaaaacaagtccatatagaatggagggataaggggagaaaataataattaaaatctggaataaaaatgttagtgagaaattttttatttaaactacattgtattatccctataaacacaactcaaaaaaatttattgcacacctagaagcaagtaaagttgtgactctcctgaccaaatattagctcatgctttgggcattgctatggtctgaat

SEQ ID NO: 210077 - DNA, 605 bp, Homo sapiens
tatttaaactacattgtattatccctataaacacaactcaaaaaaatttattgcacacctagaagcaagtaaagttgtgactctcctgaccaaatattagctcatgctttgggcattgctatggtctgaatgtgaccttcaaattcatatgttgaaacttaatcaccaatgtgatagctttacaggttgggcctttaaatgatgattaagtcatgaggatggagccctcatagatgggaataaggcccctataaaagggcttgaaagagtgggttcattctcttttggccttctgctgtgtgaagacatggcatccctcccctgtggacgatgcagaaacaatgtgccattttggaagcagagttagccctwaccagacaccaaacctgccgtcacctcgatcttagacatcccaggctccagaactgtaagaaataaatttctgttgttcataaattacccagtctgtagtattttgtcatagcagcacaaatgcactgattaaagcaacattactcacttaatcttaacagctcaacagctcagatccaactgtgtggacgacccctagccactgtacagaattgcacagcaaaaattttatg

SEQ ID NO: 210078 - DNA, 549 bp, Homo sapiens
agtgggatttgcagagacagaagagtccaaagtgaaatttgtcaaagattaattcagtgctcgtggtaagaatttattattttctttgtatttcttattatgtgactcagtatccacaaagacagtaaagaataacattgattttgactgctgattgtctatacattgttgtgaggaaacatcagagagggagactcagagagtaaggacagggaagtcaaatagacctaggttggaattccagctctgccctagcatctctctgagatcagttgctayggctgtttgaccagagttatagcttgggtataacttccagcatgtgggaggcactcaaaaagtgttagtaataatccttaattttaactactacttgctacccagttcacacaaattatcacttccaactaaactgtacatttctgagtgaagaaaatgtatttatcctccaagatatagaatttttggattgctgatgattaatagcttaatccaaacatctatagcctgttttactagatttgtccctcttccattgctcttgagctt

SEQ ID NO: 210079 - DNA, 337 bp, Homo sapiens
tgaaacctggagggtacatggtggatagagatagacatgctgccaaatatcctacgctgctcataacagactctatccctatgcctaatacagagttatcagttctaaatgtcrctggtgccaaggctgaaacatcttggtccaatgatgcattggggatgaagacattgacaatatgagaaatgggatcactaatggaacaaaatcaggaagaaagagaaagggaggagataaaaatgttactcttagaaaagttttataagcaactattatcctcatttcatttcattttttaacaaatacagagattgaagtccagagagtttaaatgatttac

SEQ ID NO: 210080 - DNA, 431 bp, Homo sapiens
ctgcctcttttctctctcttcctaatataaaaaggagcacttattcagtgttaacaattttctaagtttctgattctttagttttgattgctaaagttaaaactaaggtcttcaaaatgcctcaagattagcaataaattgtgctcttaatttttcttctttatatttttatggcatcttttatttctgcttgatttatttgaaactgtgtctttaacagtttaggtgtcaaatggcagttctgatgacaggatctgacatcactgtatggaaggttgaatattgctgttttacaagaggaggtaactacgaaaattataagatgggatgttgtttcacaaaaaaactaagtaattccatctcataaatataattgaaacatyttgtgagtctatggtttggaattttttacatacatttctggaaatttt

SEQ ID NO: 210081 - DNA, 510 bp, Homo sapiens
tttactcttttttatcatctgtcactcctttacctctgcttccctaaaccagagagaaaaaaaatcgtatatcaatatgcagaaatgcaaaagttacttgaaataaatagtgttggtttaggactttatgttttagctcaattctaaacatccttgtgattcctaaactatggcaggataagctttccagggaacatttaaagcttgccgttcagagagarcagtaaagtgccatgtatatgttaactctaagaattcttccttattgacaaattgaattgggcaaaggtgtggctgcacggctggtattttatctgcaactgtcaaactctggtagttctttttcattttgactttttattctattttccaatctattatcctctttctatcttctggtggatatctgttgacctttaatccttacttactgcatacactttggtgatcactttatggaaggatccttgctagggctcagatgctgaggaagaaatggcatcaataaaa

SEQ ID NO: 210082 - DNA, 570 bp, Homo sapiens
taaaacttcttttatgggctgttgtgaggactaaatgaaataatgtatgaagccttaatatataaatgttagtttttaaattatttttatttaaattataacaaatgctataattattgttggaggaaacttcctgttgtctgacctcacattactatgaggaggttcttgaggccaaaattcacataggattaggctttgtttgttactgtgtttattacctctgttgatgtgacataaatatgtaccaatgaaggcattaataaaatggaactactgtttcamccaaatgagtaatttagaaattacgtatttggaggagaaatactgtgttagctttgctgcagaacaaaacacccccaaaccatttattaggaaatagttctgtggcttggctgggatggcttttctctgctccatgtattttgattgcacttctgcatttgcagtcagccgctggtctctgataaccttgctcacatgtatggcagttggtactagctctcagttgggccacatgtctatagcagcctatcttgaacctgagccgcaagagagagggaatacccc

SEQ ID NO: 210083 - DNA, 392 bp, Homo sapiens
caccaacttcagtcaggctgtcrttgtaggaaagtgttttttcctatagtgtaaagttaatggatcctagcgattgtacaatggttcaatgttcttggtgctcacattcttcctggggaatgtggattttttgatagttactaaatatttgtaacttcattagagtcttagttttttaatacttacaaacgaaagaaaatagacattttgttcttatggattttaagtacagtagaagctactatagtttacaagtttactgtttaaagtttactgttctacttagaattgattgtgtaactgcatctttacgacacactggaatctgtagaattggcccatatatgtaagcttataccagaatgagttgtgatgatttagtagggggatta

SEQ ID NO: 210084 - DNA, 526 bp, Homo sapiens
cactcccttcacctgttgtttcaattagtgcaaatgccatcattccagtcatctaatcccgaattcctagactaatatctggtaaagtacatcaccatttcacatccyataacttgccagaagttgagaattttacttcagtattatagcttgggtttatcttcttctgcaattgctcatcctttgatggcctttaaagtttcctatcaattatttcagtgattccaaattggtatcgtctcctcctgtgtctctctacccacatccatgcagcatattcaccatcctgcttaagaagaaaactttatttgcttctcatatcttataatgtcttcattcaggcattcttgtctcccagttgtcactttctctatttccgtcatagctccatctagctgctacatcccagatgtcttcttcctgggtgtcccaatttcttcagaatgtttagtcccactgtcctttaacaaataaataatactagttccagactctatgtcatatgcagttggaaaatcctccacaa

SEQ ID NO: 210085 - DNA, 526 bp, Homo sapiens
cactcccttcacctgttgtttcaattagtgcaaatgccatcattccagtcatctaatcccgaattcctagactaatatctggtaaagtacatcaccatttcacatcccataacttgccagaagttgagaattttacttcagtattatagcttgggtttatcttcttctgcaattgctcatcctttgatggcctttaaagtttcctatcaattatttcagtgattccaaattggtatcgtctcctcctgtgtctctctacccacatccatgcagcatattcaccatcctgcttaagaagaaaactttatttgcttctcatatcttataatgtcttcattcaggcattcttgtctcccagttgtcactttctctatttccrtcatagctccatctagctgctacatcccagatgtcttcttcctgggtgtcccaatttcttcagaatgtttagtcccactgtcctttaacaaataaataatactagttccagactctatgtcatatgcagttggaaaatcctccacaa

SEQ ID NO: 210086 - DNA, 491 bp, Homo sapiens
caattatgtgagcaatatcatgkccttgatatctgtacaaacacaatactatgtaagagcctatacacagtatattcactgacatttatatatcaatttgcatattattagctttttttagagagaaaattgattcaacttcatcttgtccttggtgaaatgaattatatctgactcttcttgtaaaacatcaaggctattaaaacaaacagattttcaaaagcaaatgaaggaaataaccttgctcctgcccttcagtagtaattctgttgtttttgcgttctagtatttactttcacttaaaagaaactggtcaaggttaacacattaggcagtcctgcctagcagaaaatatttttaatagtaatttgctggaagcaatggcttggggttgtgcagtgtccctggaactggcagtttaaaatctcagataggctgactcatcccttccacatttggaggtttaaaaaaataaataaataaatgaggca

SEQ ID NO: 210087 - DNA, 491 bp, Homo sapiens
caattatgtgagcaatatcatggccttgatatctgtacaaacacaatactatgtaagagcctatacacagtatattcactgacatttatatatcaattygcatattattagctttttttagagagaaaattgattcaacttcatcttgtccttggtgaaatgaattatatctgactcttcttgtaaaacatcaaggctattaaaacaaacagattttcaaaagcaaatgaaggaaataaccttgctcctgcccttcagtagtaattctgttgtttttgcgttctagtatttactttcacttaaaagaaactggtcaaggttaacacattaggcagtcctgcctagcagaaaatatttttaatagtaatttgctggaagcaatggcttggggttgtgcagtgtccctggaactggcagtttaaaatctcagataggctgactcatcccttccacatttggaggtttaaaaaaataaataaataaatgaggca

SEQ ID NO: 210088 - DNA, 431 bp, Homo sapiens
tgagaacacatggacacagtgaggggaacatcacacatcggggcctgtcggtgggtggggagctaggggagggatagcattaggagaaatacctaatatagatgacaggtggatgggtgcagcaaacaattaygacacttgtctacctatgtaacaaacctgcacattctgcacatgtatcccagaacttaaagtacaataaaaaataaaaaaatacaaaaaaaaattagccaggcatgttggtgtgcacctgtagtcccagctactcaggaggctgtggcaggggaatcgcttgaacccgggaggcggaggttgtagtgagctgagattgtgccattgcactccagcctggcaacagagtgagactccgcctcaaaaaagaaaaaaaaaaattaaaaagatgactatttcactttcaaacagggatcgtt

SEQ ID NO: 210089 - DNA, 343 bp, Homo sapiens
tccccttccaacaaaaaaaagaaaaccagaaaaaagagtccaggattgctaatctatataaaagtcctaaacaaagcaaatacggctaataccatgtcttattaaattgaaccctcacttactggagtgataaaaggtgataagatctatgggactgaatccattttacacaccactattcagactaatcctccccgtggttcagggaacaaagagttctgccatggggaaaacaggggtcctgctttttattccckaactctcctgttcttgctggtcaaagcaaaagccattaatctaatactctgcacttgtattcagagccacagcatcttaaagcaat

SEQ ID NO: 210090 - DNA, 496 bp, Homo sapiens
tacatttatcagctgctaaacctgggttgcctcattgcagtaccatactctaagataactaaagatggatgaggaaattgagtttagagaggttacatgaaacacccaagataaacagtcaaaggctgagctggaattcaaacccaattatccatgtcttattaaacatacatcttttcacagccttatatctgtggtctgaatttctgagccccttctaggtacaagctaaaagaagtagcaatcctccaaaaaaaatatggaaagtggggaagggagaaactttacagtggagaaacctggcaagtactatcttagccaagtgaccaaggttagcattattagtgtttagtcagtatacctataaacaaatgtggagaaaggagacctcttaactactattggtgrggatgtaaattagtataaacattatggtcaacagcactgaggctcctcaaaaaaataaaaatagaactatcatatgatccagcaatcc

SEQ ID NO: 210091 - DNA, 536 bp, Homo sapiens
aagaattacaacagtttaatgttactggagatttgagtcagaaagtggaagcatacttaaggtgttagactaaatcatgaagggtttcatatgccctgttaagaaatttaaactatatcctctgaaatagatatatcactgcagctttcatacaggatgaattagaagagggcaagataggagtaaggaaatcaggtaagagatgagagcttaaactaaaatagcagcaatgacaaggaggatagcaggcrgtaatgtatccaggaaatatgtaaaaggtaaaatttataaaaattgaagagtaagttgaagacgactacagatgtctaggttagatgactatttacatgtccatgtgattagctaagttaaagaattagggaaatgaagcaggttagattggtgttttgttaggatggtggggcaaaacctgccaggttcaatcttggtcatcctgacatttatgtaacctttggaaatcaagttaatcatttaataaatggttaaaacgcaggtaagaagcagagctggatttg

SEQ ID NO: 210092 - DNA, 536 bp, Homo sapiens
aagaattacaacagtttaatgttactggagatttgagtcagaaagtggaagcatacttaaggtgttagactaaatcatgaagggtttcatatgccctgttaagaaatttaaactatatcctctgaaatagatatatcactgcagctttcatacaggatgaattagaagagggcaagataggagtaaggaaatcaggtaagagatgagagcttaaactaaaatagcagcaatgacaaggaggatagcaggcggtaatgtatccaggaaatatktaaaaggtaaaatttataaaaattgaagagtaagttgaagacgactacagatgtctaggttagatgactatttacatgtccatgtgattagctaagttaaagaattagggaaatgaagcaggttagattggtgttttgttaggatggtggggcaaaacctgccaggttcaatcttggtcatcctgacatttatgtaacctttggaaatcaagttaatcatttaataaatggttaaaacgcaggtaagaagcagagctggatttg

SEQ ID NO: 210093 - DNA, 562 bp, Homo sapiens
catatgtatatattcacatacctcagtgaaaatattaatgaattagagttatgtgaaaaataaggtgctttaagaagattgactagctctagtactcattgtcaattgactttcaattgatggtacmtcatataccaaataccaaattagaagataacaccagaagttgccacatgggtcgtctcagctataactgaggaagaagatagaaaactcacagcatcctaggggatgtctgtaaacgtataaatggtgtcttacacatttcagttatcctaacagaagggccactcttccagagaaggtggactgaaattcacaaggatggctcctagacaccaagagaaagtttaaagatatcccatataatctccttattaggtttgggaagtgtgcaactttcaaagatgttatttttcatatcaaacttaactgttacaaatatttggggaaccataaatattaggattaaaaacattcaaaagctcttctttcaaagacaaatcctattcacattttggactgtatcctattttttgttatatttaacagaaattaatct

SEQ ID NO: 210094 - DNA, 562 bp, Homo sapiens
catatgtatatattcacatacctcagtgaaaatattaatgaattagagttatgtgaaaaataaggtgctttaagaagattgactagctctagtactcattgtcaattgactttcaattgatggtacctcatataccaaataccaaattagaagataacaccagaagttgccacatgggtcgtctcagctataactgaggaagaagatagaaaactcacagcatcctaggggatgtctgtaaacgtataaatggtgtcttacacatttcagttatcctaacagaagggcyactcttccagagaaggtggactgaaattcacaaggatggctcctagacaccaagagaaagtttaaagatatcccatataatctccttattaggtttgggaagtgtgcaactttcaaagatgttatttttcatatcaaacttaactgttacaaatatttggggaaccataaatattaggattaaaaacattcaaaagctcttctttcaaagacaaatcctattcacattttggactgtatcctattttttgttatatttaacagaaattaatct

SEQ ID NO: 210095 - DNA, 621 bp, Homo sapiens
atttgtatgtcttcttttgagaatgtctgttcaagccctttgtgtacatttaacagggtcagtttcttgttattaagtagtttgagttccttgtatattttcagtattagcccctgayccagtgaattatttgcaaatattttttcccaatttgtagactgtcttttcactctattaattgtttcctttgctgtacagaagcattttagtttgatgtaatcccatttggtattgtaaactagtagccatattgaaaaacagtacggaagttcttcaaaaagctaaaagtaggattaacatatgatccagcaatcccactattgggcatatacccaaaaagattgaaataagtatgccaaagagatgtctacactcccatgttcattgcagcattattcactataaccaagataaagacaaatctgacatgtctatcaatggatgacttgatttttaaaatgttgtatagacgcagtagaatactattccgcttttaaatacagtagactctaacatttgcaacaacactgatgaatctagaggacataactttaagtgaaataagccacacatggaaagacaaatactgtataatgccacttatatgtggaaatttaaaaa

SEQ ID NO: 210096 - DNA, 425 bp, Homo sapiens
atgaataagttctggagatctgtattacagcatggtaaccatagttaataataatataatttatgattgaaaattgttaagggagtggatattaaatgttctcaccacacacacatgcacaaatgttagctatgtgaagtgataaatatgccaattagcttgattgtggtaatcatttcacaatttatacatcaatcaaaacaccacattgtacactgtaaatacatacattcacttgtcaattatacctcaataaagaaaaaaactgaagacrtaataataaagttgtcctctgctatcaataaaaataaaaattagggtcaaaagcagtggctcacgcctgtaatactagggctttgggcgtccaaggcaggcagatcacctgaagtcaggagttcgagaccagcctgacctacatgcacaaa

SEQ ID NO: 210097 - DNA, 562 bp, Homo sapiens
ttaagcattgtattaatttgacaaatcagtaaagcacatagaaaataagtacgttatttgacatttaataggcaattaaaagaaaaacaaaaaattaatagtggtttcctttggatagcgagactagctgggaatggattttagagagggaagaygtcaactagatttgatattttgtttaatttactaaatagaataacttaaccgaaaaaagaattggttttataataaaaagtttaatacaaaacatattgaagtaaatattatctctgaaatattactaatagtttaaaaataagtttaattttgcttaagcattacggaagtcatcacctcagaaatatcagaaatactttaagattgtcaatgtgttgaatgatagtattgaatgaactaaaccatttaagacaaaacagtcaaaaccactattaacatactgaaagtcttgatgtagtcatgcattctataaatactctttttttattgataatatgatctggacaaggttgagaggatggatacttagtaaaaccaggaactatgatcttcagccaaacataga

SEQ ID NO: 210098 - DNA, 580 bp, Homo sapiens
aatcttccacctccatctctttagtgtcagtcattgacatctcagttcattcatttggtcatatcatatttccctgattgattttcatatttgtagctgtttattgatgtctgcacatttatgtaggtatctgttctagtcttcagtcttgcattgtttaggagcttccttcagcactaaacttgtccagagatttagggtasgttgattcgtgagatccctaaatccattacttatattttaatcttgaggcactagggggtacactaagcccaggactgccatggctgaaattctttggccacaaaggctgaatacagtgcagggtcacacctaaagctcattactgccaagaccagtgcagcgctggggcatgcccaagtcctgcagtttctatagcttacccaacactgaggtttatttaacgcccaaggttgctatagttgactagtggtgatataggccagatttcaagtttgtctttccaggttcctgggttcctgtctggcactgagccctgagctcccatttggcactgtagcagttctaaaggctctgctcagaggcgcaatctggtgtc

SEQ ID NO: 210099 - DNA, 588 bp, Homo sapiens
ggggaggggtgatgtgggaaatgtgaggctgtccattctactgccttcaattagtcttttcctgttattatgataagaccaggtagtactgtgatctctcttctggttttcttacatctcatgaagatttgtttgagtgtggatagttgtttgaattgatgtttctgtgggagaacaatcgatcaatcgctggagaatcctactctgccatcttactctgtcactctttatacatatttcaaaaygccatataaacaccataaatacatacaatttttatttgttaattaaaattaattaatttttttaaaggaaaagataaaaaaattgacaagtggaaagaaattgtgtgagttaaaccaaagtaattctgagcatgttattatagtagtctttatattttattacccttataaagggttgtttaattatagctctctcaaaacagattcagcttatctggaacctcaggcatctaaataaagagtggatcatacttacatgagtgtcaatacatgctatatcatgattctcagaaagagggagaagatgaccttccatttaattatgtaatgagattcatcacta

SEQ ID NO: 210100 - DNA, 585 bp, Homo sapiens
gtaattctgagcatgttattatagtagtctttatattttattacccttataaagggttgtttaattatagctctctcaaaacagattcagcttatctggaacctcaggcatctaaataaagagtggatcatacttacatgagtgtcaatacatgctatatcatgattctcagaaagagggagaagatgaccttccatttaattatgtaatgagattcatcactagaaaattaattgacatgtctcctgtgacactgtctaatcaatgttgaagacagttgactatcatttaatttaactcatttaatattataaacacacttctcattttaagcctttgttggcttctatctatacagtgctctatatttttttcaaatatactcattccatctatattcctttattctgcagatggctattgaatgcctactatatgctaaggattatgctasactctggagaaagaatggtgcacaaaacaagacatgatctctgatctgcttatagcaatggtttcactgctaaggttccacattaaactcacctgagggagattttaaaattcactgaggcccaggcccat

SEQ ID NO: 210101 - DNA, 433 bp, Homo sapiens
cagggtgtacttgggcaggctgctatcttgggagagcatgtgggattagatacttaggtttggtttaggggagccactgtgggggtagtgtgacaatatctgggttggaaacttyggagcattcaccaggagccagaggaaatatctggctcttcatgaagttggtatcttgaaaaaaactgatggtctactaactccaaccagtctccccataagtcaccccagcaaagagatccagggtagccctgccccaaaacacacacacacacacataccctacctacctacctacctggtaaagatggtggttcccaggatggaaatttctgcttccagactcagagtaggttgaatgtcttattagaccaggggttggcaaacttctcctgtaaagggctagatggtaactattttaagttctgtaggccttaaa

SEQ ID NO: 210102 - DNA, 433 bp, Homo sapiens
cagggtgtacttgggcaggctgctatcttgggagagcatgtgggattagatacttaggtttggtttaggggagccactgtgggggtagtgtgacaatatctgggttggaaacttcggagcattcaccaggagccagaggaaatatctggctcttcatgaagttggtatcttgaaaaaaactgatggtctactaactccaaccagtctccccataagtcaccccagcaaagagatccagggtagccctgccccaaaacacacacacacacacataccctacctacctacctacctggtaaagatggtggttcccaggatggaaatttctgcttccagactcagagtaggttgaatgtcttattagaccaggggttggcaaacttctcctrtaaagggctagatggtaactattttaagttctgtaggccttaaa

SEQ ID NO: 210103 - DNA, 445 bp, Homo sapiens
ccctttgggggagttttaagccagaatgtgacaaagtcacttacaggaagactggaatgtagccatagttgaactctaacatcgtctatagraccatttcccgtctccagttaggttctaggcatactaagctgctcttgcttcctcaatcaaaacatgcgcttctatttttttttttttttttttggcctctgggccttggcgcttgcagttcattctgccagacccattcccattctagttggctcctattcgtacttggcttaaggatcaccacctcctggaagtctttctagaaccagaggccggggcaagcgcctcttaggctcccacagccccctgtgttcctcactccaggtctgaccttctgggtagtagttgtctaattaggtgcgtatctccttcgactggggtgccgtgagtacaggagtatggttcactgcag

SEQ ID NO: 210104 - DNA, 559 bp, Homo sapiens
gaactttctcttggtcactgttttggttttttacagacagggtattgctctgttgcccaggctggaatgtagtggtgtgatcatagctcacttcagcctcaatctcctgggcttaggtgatcctctcaccttgacctcccaaagtgctggaactatgggcatgagctaccacccctggctaatttttaattttttttttcttctttttgagatggagtttcgctctcgcctccaggctggagtgcattggcgcgatctcggctcaccgcaacctcggcctcccaggttcttaattttttttttttttttttttttagagatggggtcttgctatgttacccaggctggctttcaattcctgggctcaatcaatcctcccaccttggcctcccaaagtgctggggttacaggcrtgagccatcatgcctagtctgtcttggtcattgttgtctctttctcacacagagcaagaggaaccccataaactgttgtttcctgaatgatggaaccatcttgttgggttagacctgctcttatcccattttatagatgagagatc

SEQ ID NO: 210105 - DNA, 273 bp, Homo sapiens
tgaaacctccctcatcagcacaaaaacagcatgtgagaaaccgtccccatgatccaatcacctcccaccaggtcattccctcacacatggggattacaatttgagatgagatttgggtggggacatggagccaaaccataacactggaagatgtgtctgtctctgcccctggactttgagtctccygagggaagggctggggctatgttgtcagtgccacacacacatctcagggctgggcacagaggagggtttcaattatagtttgtcgaa

SEQ ID NO: 210106 - DNA, 571 bp, Homo sapiens
ttgcgccactgcactccagcctgggcaacacagcaagaccctgtctcaaaaacaaaataataaagaaatgaagaaataaaaaataaactcgctctctatcaaaaccctacaatgactctccacctcactcggagtaaaaaccaaagcccatggccaggagcggaggctcactcctgtaatcccagcagtttgggaggctgaggcatgaggatgacttgaggtcaagagtttgagaccagcctggccaacatggagaaaccctgtctctactaaaaatacaaaaaattagccaggcattgtggcaggcgcctgtaatcccagctacttgggcaactgaggcaggagaatygcttgaacccaggaggcagaggttgcagtgagccgagatcgcgccactgcactccagcctgggtgacagagcgagactctgtctcaaaaaaaagaaataaaaattaattaaataaaaataaaaattatcctaagggaagagagatggggccctgatacagaagtgcacagccccagacaccctcaaagccagcatggtctctgtgaaagatgcaccctacag

SEQ ID NO: 210107 - DNA, 642 bp, Homo sapiens
aatccttacttataaccaatgcacaaaacaataatatactaacactcttaacacattaatagaataagacaataataatatcatacagtataataatacacttacataaagcaggcatcataccttattttacacccatgctttctttacctgctccttggtaagcaaatatttttttctaagccaaacaggtctcatayattggagaagccacaccctttccagagtcatattccagttctctttacctctttaaccctgcaacactccccccaaaactcacaccgactcacacataaccgcacatacacactcacacatacttactcatttctgttctcatcaattttaattttcttcccaacacttagagtgaatggcaagtggagcttttacttggaaactagtagaaaaaaaaagcatgagagttaacaggcctgtgatagtatcgttgttggttattagaattagtgctggaggaaagagaggcttaaagaagttccatttgcagtaagcggcgtggcacgaggagccatggagtagctgtgtgaggacgctggtgcaagtcaacctgctaacgtcactagagttagtgccaaaattcatcttccaagactattccagagaacagacccaggccat

SEQ ID NO: 210108 - DNA, 642 bp, Homo sapiens
aatccttacttataaccaatgcacaaaacaataatatactaacactcttaacacattaatagaataagacaataataatatcatacagtataataatacacttacataaagcaggcatcataccttattttacacccatgctttctttacctgctccttggtaagcaaatatttttttctaagccaaacaggtctcatacattggagaagccacaccctttccagagtcatattccagttctctttacctctttaaccctgcaacactccccccaaaactcacaccgactcacacataaccgcayatacacactcacacatacttactcatttctgttctcatcaattttaattttcttcccaacacttagagtgaatggcaagtggagcttttacttggaaactagtagaaaaaaaaagcatgagagttaacaggcctgtgatagtatcgttgttggttattagaattagtgctggaggaaagagaggcttaaagaagttccatttgcagtaagcggcgtggcacgaggagccatggagtagctgtgtgaggacgctggtgcaagtcaacctgctaacgtcactagagttagtgccaaaattcatcttccaagactattccagagaacagacccaggccat

SEQ ID NO: 210109 - DNA, 578 bp, Homo sapiens
tgctaacgcaacaaggtgaggagatcaaggaccaagagctgcctgagttgtccatacagggccaccatccaccagaagcagaccagctccagctcagagccaagcctgctcacaagccctggggttgagacgagaattcccccaggcataaagtttcctgggccaccatcttggagagtggaaactcagcccagtttatgggaattcccggaagtcccgcccaggaatttccgctggcctctcattggccagaccttgtcagctggctgcactgctgggaaatacagcgttttgtgtttgccggtttgttttattttctttttagctgggcacattagcagcagggttctgcaagtaaaggacagaattgtttaaactggcaatacaaagatttggtgagagtgaagagcaactgggaatcataggttgatgcaaaagtaattgcggtttttgccattccttttatggcaaaaacacacacacacarttacttttgcaccaacctaatacatcagttggagaaaaggttgacagtttcttacatgcttaaatttacacttacaatattgcccaattat

SEQ ID NO: 210110 - DNA, 575 bp, Homo sapiens
gaattcaacaactgcctgcagaaccgagatctcttaaatctttgtcatcctaattgtgatacacgagtggtctagaatgatgccagccaaattccaagttcagaaaagccaaaattcggacaaaaatgcacaggataatctattatgtatggttgaagtgttggttcaagaagtctcgaagtacaaattggagatcagaatccaycagttctgctctcccaaaagtaatgaatattcttaactgggacctcagctgaggtgggctggagccaagacacaggacaaccttctggttcactgccaagaccaatgtctgcaggtagttgagtcttttcaccaaggcactagtatgcatgattttttctggaccccttggcagatggttttggtcaaggccaaatgtgactatagccaagcctcttggagaatggggctatttccaggcttgagcctaggtgcataatcagcagatcaaccacttgggtatcagactgcactcaaaataactgtcctaggtcttgggcatcattggtgttgcataatctcctacctgaatcctgaggcttctgcagaga

SEQ ID NO: 210111 - DNA, 596 bp, Homo sapiens
ctttataactcactgagaagtttgaaagtcgagttttctggagaagcacaattagaccccagtactcttcttgggggcatcacatcttatgctaacctacatttttacaatttccggcttatttgtcagcacaagccatgtgtgaagtgtgcatggatctagatgggttgagaatctttgcttgtcctgctctaggttcctgcatatgtctctctctctctctttttttttttttttaaacctagtttcaattgtcccagtctgttttactgcaataagacttaraatgatctggacagtctggcccactggggagcatatcctttctcagattttttccacattttctgcttatgtgttttggccttaattctccactcttacttctcaaaggaccattagaagggtgatatcattgcaccacagtgtgatatgaagtatgaaagaggaatggctgtttttcatcctgaggcaagtgcttaattcataattgtatatgagaggcagtgtggaggggcagaattagagatgtgaaaatgtttataagtaaaaattaagatatagtctattacctgatctcttttacacctgttttt

SEQ ID NO: 210112 - DNA, 533 bp, Homo sapiens
cttttcttgctaactatacatattgtcaaaagaacctctgacctcgtaaataatagtaattgggaaaaaaaaagtttaatttgacagaacttcacccatgcaaccctgtttccattcctgagccattcctcccttgctgagttctgggagccctttgtattagtacrtatcatttgtcatttaaatgtaggaacttgtattgctcttatcacttgatttccctcttattttcaagaccagagatgtctagagaccagcaactgaattttataactgtttgccttccagcacttatatcagtgggcagtgcttaccaaactctgtgtgtgtgtgtgtttctgtccacagtgatgataataactttcagatattgggggaaaaaatatttcaaaacaattttgaatttaaatgaattatgtttctgtacatgatttcttttcactgtttttacaatattaagtaaagtgtggatttgaagctttgctaatattcgcagcttaccaagtggccaagaaggttttgacaccttccct

SEQ ID NO: 210113 - DNA, 533 bp, Homo sapiens
cttttcttgctaactatacatattgtcaaaagaacctctgacctcgtaaataatagtaattgggaaaaaaaaagtttaatttgacagaacttcacccatgcaaccctgtttccattcctgagccattcctcccttgctgagttctgggagccctttgtattagtacatatcatttgtcatttaaatgtaggaacttgtattgctcttatcacttgatttccctcttattttcaagaccagagaygtctagagaccagcaactgaattttataactgtttgccttccagcacttatatcagtgggcagtgcttaccaaactctgtgtgtgtgtgtgtttctgtccacagtgatgataataactttcagatattgggggaaaaaatatttcaaaacaattttgaatttaaatgaattatgtttctgtacatgatttcttttcactgtttttacaatattaagtaaagtgtggatttgaagctttgctaatattcgcagcttaccaagtggccaagaaggttttgacaccttccct

SEQ ID NO: 210114 - DNA, 533 bp, Homo sapiens
cttttcttgctaactatacatattgtcaaaagaacctctgacctcgtaaataatagtaattgggaaaaaaaaagtttaatttgacagaacttcacccatgcaaccctgtttccattcctgagccattcctcccttgctgagttctgggagccctttgtattagtacatatcatttgtcatttaaatgtaggaacttgtattgctcttatcacttgatttccctcttattttcaagaccagagatgtctagagaccagcaactgaattttataactgtttgccttccagcacttatatcagtgggcagtgcttaccaaactctgtgtgtgtgtgtgtttctgtccacagtgatgataataactttcagatattgggggaaaaaatatttcaaaacaattttgartttaaatgaattatgtttctgtacatgatttcttttcactgtttttacaatattaagtaaagtgtggatttgaagctttgctaatattcgcagcttaccaagtggccaagaaggttttgacaccttccct

SEQ ID NO: 210115 - DNA, 471 bp, Homo sapiens
aatggctgcttatgaatagcccgggatgtgggttgggtcctccttcccggtcacccgcctccagggtggacatgcctgcctgcggcccccacctctttgctgcatgacactgtcttcataataaacatctctgggtgacacaagattgatgcctccatagaggcttcccgtggctcacacaatgccccttttgtaggaattcatgtttttctgcagggcaatgcttgctgacactgagctgcttttgccaagatcataacccccactcctcaccccaaagctttyaggaatgaagaatttggagctgccgttaggcctgcggatccgctgggtttctgctcggagctgattgccactgaaggctgcttggaccaagtccatatcccatggaactctgggctgggatgatccgaccccttacaaagggctctccccgggaatgccatgcaaagcatggtccccaggctccta

SEQ ID NO: 210116 - DNA, 591 bp, Homo sapiens
tgtgtgtcatccgtgagcaggctatatatatacatagtctctctctatatagacaggaggttattttaaggaactgactcatgcagttgtggaggctggcaagtctaaaatctgcagggcaggctggcagccgagccccagggaagggtggatgttgccactccagcctgaaggctttctgaaggcagaatcccctcttcccggggaacctcagtctttttctcccacggccttcacctgattagatgagacccacccatagcctggcaggtctttggcttcactcaggggctactgacttcagtgttcatcgcatcccaaaaataccacagcaacatctaggcaggtgtttgaccgaatakctgagaaccatgccaagccaagctgacacataaaactggctgtgacactgcttatcagtcgcagtgaatgacgcctccctgcagtgagtgtccaggccccacacccagcagcctccttcatttcccttttcctttcacatctgtcagcaagccctgtcaattctgtcctcagaatacaccctgcatctgttcccatcttctgagctaaaaccctcttccgagccaccac

SEQ ID NO: 210117 - DNA, 563 bp, Homo sapiens
aagctttattgctcacacaaagcctatttggtgttctcttcacacagacgggcataacagtttaatggcccccatgtcctttgaaacgaaggcagagaaggaagagaaatgccagtaggtcttgctggtaaaatacaaaagaagcgatgtaagactgaagcctcactgtggccagtacttcatcgcctcactttgtccctgctctgccccatgatcaccactcaacatgagttcactgtggcttatccgactggctcagcccattcccagggcctgtccccaagcaaagctcaaactagacagccggaytgattttgccctttgtgaaaggactctcaggtagggtagctgtgttgcacgtgaaacccaggagtcccaatggcaaagccaggtacagagaaattacaattaaaccctggcatgggcaactgggccgagatgggacaccccagtcctttgttgctttgcctggtgctctgtgtgggcaccagagactttgggcggcgctggtttcatggatgaatgacaaataccctctagcacggcccagacagagctccaca

SEQ ID NO: 210118 - DNA, 563 bp, Homo sapiens
aagctttattgctcacacaaagcctatttggtgttctcttcacacagacgggcataacagtttaatggcccccatgtcctttgaaacgaaggcagagaaggaagagaaatgccagtaggtcttgctggtaaaatacaaaagaagcgatgtaagactgaagcctcactgtggccagtacttcatcgcctcactttgtccctgctctgccccatgatcaccactcaacatgagttcactgtggcttatccgactggctcagcccattcccagggcctgtccccaagcaaagctcaaactagacagccggattgattttgccctttgtgaaaggactctcaggtagggtagctgtgttgcacgtgaaacccaggagtcccartggcaaagccaggtacagagaaattacaattaaaccctggcatgggcaactgggccgagatgggacaccccagtcctttgttgctttgcctggtgctctgtgtgggcaccagagactttgggcggcgctggtttcatggatgaatgacaaataccctctagcacggcccagacagagctccaca

SEQ ID NO: 210119 - DNA, 585 bp, Homo sapiens
tgttctcttcacacagacgggcataacagtttaatggcccccatgtcctttgaaacgaaggcagagaaggaagagaaatgccagtaggtcttgctggtaaaatacaaaagaagcgatgtaagactgaagcctcactgtggccagtacttcatcgcctcactttgtccctgctctgccccatgatcaccactcaacatgagttcactgtggcttatccgactggctcagcccattcccagggcctgtccccaagcaaagctcaaactagacagccggattgattttgccctttgtgaaaggactctcaggtagggtagctgtgttgcacgtgaaacccaggagtcccaatggcaaagccaggtacagagaaattacaattaaaccctggcatgggcaactgggccgagatgggacaccccagtcctttgttgctttgcctggtgctctgtgtgggcaccagagactttgggcggcgctggtttcatggatgaatgacaaataccctctagcacggcccagacagagctccacagtgggagtttcatcatcaggtgtcrccaaatttagaaattctgttgccaaagc

SEQ ID NO: 210120 - DNA, 585 bp, Homo sapiens
tgttctcttcacacagacgggcataacagtttaatggcccccatgtcctttgaaacgaaggcagagaaggaagagaaatgccagtaggtcttgctggtaaaatacaaaagaagcgatgtaagactgaagcctcactgtggccagtacttcatcgcctcactttgtccctgctctgccccatgatcaccactcaacatgagttcactgtggcttatccgactggctcagcccattcccagggcctgtccccaagcaaagctcaaactagacagccggattgattttgccctttgtgaaaggactctcaggtagggtagctgtgttgcacgtgaaacccaggagtcccaatggcaaagccaggtacagagaaattacaattaaaccctggcatgggcaactgggccgagatgggacaccccagtcctttgttgctttgcctggtgctctgtgtgggcaccagagactttgggcggcgctggtttcatggatgaatgacaaataccctctagcacggcccagacagagctccacagtgggagtttcatcatcaggtgtcaccaaatttrgaaattctgttgccaaagc

SEQ ID NO: 210121 - DNA, 407 bp, Homo sapiens
attgtaggatctaagaaagggaagcagaacgggggtttttatgtacattatctcattctrtccttattcagacacaaaaatccctgtaggaaggcacagtcccatcccaagaggagaaactaaggctcagagaggtgaaatgaccagcccaaggtcacccagctgacaggagtctggttgagtctctctgtctgcatagctcatgttctttgttgccacccatgaatattttcagatactttcaagacagctagcataaaaaagacagtgacttccttttattggtctagtcatatattcctcatccatattgttctcaaaaatcccaacagtagtgtggaatagatcttgttatctctctctcccataacatagataaagtaactgaggtctagagaagtgaattc

SEQ ID NO: 210122 - DNA, 525 bp, Homo sapiens
gaattcatattgttctagataaaatggaaagaggcaacttctacatgtttcatccctgagctctgatatcatctctccccagaatgacaaagagtagaggggccttctgtcagttttgcaagctcttgaccagttgcagtgtcaggacaacaggatcattgtaccaagctcctaatttatcaaaggagaggacatgcctgctttgggtgcttggcatttcttgatcagtcattttgtaacttgcatggcctcttgaagatctggttaaatccagttcaaattccatttctccagtctatcatattctgaagcattctgtcgtttgtatagaatttcactgaagatttgagagagatgaggcaggcacagggagagatcatatgttaaggcccacagcctctccctcctcttccccaaccttctccctctcctgtgcaaccaagaaatccctcccctcttctagtgcaagaaggttccacccataktcagtgccctacaaggtagccattcaaaatattgcttctg

SEQ ID NO: 210123 - DNA, 420 bp, Homo sapiens
caccttggcctcccaaaacactggcattacaggcctgagccaccttgccaggccctgaactctttattgtgttgagggtctgagtacctcaagctcttttttttgcccccaagcagcccagatgtagaacacagcgccttttctttatttcttcaaaacatggctcacagaagacagttgggtatgtaacagaaactactaaaggtccagagggatgaagagggttggtttgcattgtagttcttagggatccaccagccagccctgccctgttttatccccctgattggttttctcctgaagtcccttctcacgctcctgttactcagctcccttttcctcctctacctcctttgtcctttttyttcttctttattggcagctccctcttacttctctgctcctccctcactcgaattc

SEQ ID NO: 210124 - DNA, 420 bp, Homo sapiens
caccttggcctcccaaaacactggcattacaggcctgagccaccttgccaggccctgaactctttattgtgttgagggtctgagtacctcaagctcttttttttgcccccaagcagcccagatgtagaacacagcgccttttctttatttcttcaaaacatggctcacagaagacagttgggtatgtaacagaaactactaaaggtccagagggatgaagagggttggtttgcattgtagttcttagggatccaccagccagccctgccctgttttatccccctgattggttttctcctgaagtcccttctcacgctcctgttactcagctcccttttcctcctctacctcctttgtcctttttcttyttctttattggcagctccctcttacttctctgctcctccctcactcgaattc

SEQ ID NO: 210125 - DNA, 542 bp, Homo sapiens
agatctcagaacaattgcagggtaaatggatttataaccatgcctgtggatcaactgttgagagaacttcatatgctgtttacaagacagaacaaaataagcagtctttagtatttcagcaattgtgattatcattggtaaaattatgcttagtaaataaagtttaataatgcaaagaataaattaattacttaacaagaccaggaatgtgtggacttcatagcartttgcttaagcgcagtgctcatttccctgttttgaaaataaaattaagtaggccattttgttccacagagtgtatagtaagagctagttatatttaagttaatctttatccttttctgcctgccaaagacacagttttatgccatttatatttttgtgccttccttttcgtttattatataagtccgttagctagtatttatattctgtttcatatttttactatttatttggactaccttgcccattaaccctaatttttaaaatccctgagcaaactttgtgttatactgaccttttttgctacagggctgttt

SEQ ID NO: 210126 - DNA, 428 bp, Homo sapiens
agatctcttggattccactagtcacagccaacactactctatggaaacattgtcctcttttcttctgtgcctgaactcccaaattaatttctagtttgaaaatattctgaccgggtgcagtggctcacacctgtaatccacacactttgagagactgagatggggggatcacttgaggccaagagttcaagaccagcctgggcaatgtaatgagacctctctataaaaaacacaaaaattagccaggtgtggtggtgcacacctgtagtctcaactactcagggggctgagcgrgaaccctgtctcaaaaaaataaaaaataaaaaacttgttttctgtcctaccagattcccatgtgggcggtggctggggaaaggcattgatgatgggagcctggagagaattcttattggagagttgatgacatc

SEQ ID NO: 210127 - DNA, 542 bp, Homo sapiens
cagtgacccctatctcctagtaatccctttcccttgagtgagctggatttacagatgcaattttgaataatagaaccttgtagaagggatgagttgtcacttctgagattaggttatataaagactgtcacttctttctaagggctctttctcacttggatggtcyccagaaagtcagctgccatgtcacgaagtgccctgtgagaaggacctgtaaggagggacggagggaggcctctaaatgacagccttcgaggaactgaatcctgctggtgaccatgtgagggagcttggactccggtccccctgtgttgagccttcagatgagttggcagccccagctggtggcatgactgtaacgtcctgaaacaccttcagccagaaagcattcagctaaaccacacctgtatttctgacccaaagaaattgtgagataataaacatttcttctcttgaactgctataccttaagctaattcgttacacagcaatagataacaaatactacctctggacccctgcctgccaccataccaaattcc

SEQ ID NO: 210128 - DNA, 577 bp, Homo sapiens
aattgtaatgtttcagtgagatgaataattcctgggatggaaataaagatagggtactgttgaagcatgtagatagtactctggtgataataagaagtgttagggaaggctttccaaagaagcaattgcctgaggaaaaagtggaacctagtcaggcagtgcaagaggaagggacattctgggcagaggaaaacaatatacaaggggcacaaggcctgtgaaaacatggactgcaagcaagtggtcttactgcatatggagtgatgataaggaatgaggcagacaagggccaaatcatgaaragcctcatgtgccttgctgaggcctgtcttaaatattaaaataacttcttttatacattcatcactttgagtatcaattataaaaagactttcctaaaatatttaagtttaaaaaaaatgcttaaagaagaaaactctgccttttatttcttgattcagttaaaaagaattgtcttatttctgctgagtaattgcattattaaaaagcgtgtgggctgggcacagtggctcacgcctgtaatcttagcactttgggaggcaaaggcgtgtggatc

SEQ ID NO: 210129 - DNA, 464 bp, Homo sapiens
cttctatcttcccttaaaattgcaagatggatgttgctgttccagccttcacagttgaatcaaattcaagaagacaatggagagaaggttgtgccagtcttgtctgccttttttatttttaaatttttaaaccaatttttaaattttaattgacaaattaaagttgtatgtatttatgatgtacaayatgatgtctcaatagatgtataccttgtgaaattactaaatcaaactatttaacatatggattacttcatatactcctttttatggtgagaacacttaaaatctactccattagcaagtttcaaatatacactgtattattattaattacagccatcatgatgtacaaagtctgactcttgttttcaattggaaaatcaaagtattttcccaaagtctcctttgcagatatctgcaaaggccttattccagaggccatcattcaccctagctgcaac

SEQ ID NO: 210130 - DNA, 523 bp, Homo sapiens
cttgttgagtgagtcctctctccttccgagggcttaggcatttcatcattaatcaaggcatttagtgagttgacttaattcagtctttgactgcatttgattgccttcatcttgcatctggttctaccagctgcataattttttcttctactttcatttgcatttattttctgttgaatttattcccatgccatcagttttggtttcttcagtttcttctgsgatatctttttcttctgtgcaatctcctcttctggtttagtaacaatctgttcctattccataatgatcagctcagtgtggcagggagagctcatgtatgggttaatccaaccatgagctctttaaatctggccgtgcatttttaggtgctttgtttacctgcataagctcaatgaccagagagtctacatctaaatccctcagttcaacatgactctgcatttttatgcacatgcaagaaaaattcagcactctttttgggctactgtccctgtgtccaacctcactgtttggcctgggc

SEQ ID NO: 210131 - DNA, 567 bp, Homo sapiens
aattcaggagcagtgctcagccaacgcctgatagaagtaagtactgtatacagctgacccttgaacaatgaggaagttaggggcacctaccctcacacaattgaaaatctgcatataatttttcactcccctcaaaacttaatyactaatagtctagttttgactggaagccttactaataacataaatagtctattaacacatatttttatatgcattatatactgcattcttacaataaagtaagctagagaaaagaaaatgttattaagaaagtaataaagaattgtaccccagaacttaaagtataataataaaaaaaatagaaaatatatttactactcattaagtggaagtggatcatcgtaatggtcttgatccttgtcacgttgagtgggctgaggaggatgaggaagaggaggggttgatcttgttgtctcaggagtggcagaggcaaaagaaaatctgaatacaagtaggcccacaaagttcaagcctgtgttgttcaaaggtcaactgtatacatccacagttccctcatccctcaggtgggatatatctaaggca

SEQ ID NO: 210132 - DNA, 567 bp, Homo sapiens
aattcaggagcagtgctcagccaacgcctgatagaagtaagtactgtatacagctgacccttgaacaatgaggaagttaggggcacctaccctcacacaattgaaaatctgcatataatttttcactcccctcaaaacttaattactaatagtctagttttgactggaagccttactaataacataaatagtctattaacacatatttttatatgcattatatactgcattcttacaataaagtaagctagagaaaagaaaatgttattaagaaagtaataaagaattgtaccccagaacttaaagtataataataaaaaaaatagaaaatatatttactactcattaagtggaagtggatcatcgtaatggtcttgatccttgtcacgttgagtgggctgaggaggatgaggaagaggaggggttgatcttgttgtctcaggagtggcagaggcaaaagaaaatctgaatacaagtaggcccacaaagttcaagcctgtgttgttcaaaggtcaactgtatacatccacagttycctcatccctcaggtgggatatatctaaggca

SEQ ID NO: 210133 - DNA, 449 bp, Homo sapiens
ggttcttggctctcatgcaaggaagaattgggggggagtccacagagtaaagtaaaaacaagtttattaagmaataaagaaataaaagaatagcttcttcctaggccgagcagccccgagggctgctggtggctatttttatggtcatatgctaaacaaggagtggattattcatgagttttctaggaaaggggcagggatttcctggaaatgagggttcctattccttttttttcttttttttgtcacccaggctgcagttcagtggcgcgatctcggctcactgcaacctccgcctcccaggttcaagcaattctcctgcctcagcctcctgagtagctgggattataggcacgcgccaccatgcccgactaatttttgtatttttagtagagatggggtttcactgtgttggtcaggctggtctcaatctcctgaccttgtgatcc

SEQ ID NO: 210134 - DNA, 476 bp, Homo sapiens
tgtgtttacatcccactttgcctccaactgtctggggccactggaggaatcccaggtcattgtacttcttcctcacaacacacagttggaagacgggtggccagtagactgctttgggcaagggaagtggcttgaggagagctggttttcttatgtgtttctggagctcaaatgtttcccaactaggaggagctcttcattctccagggtgctcatcccagccacagcagcttcctgttgtaggaactgcrtctggagttcttcactctcccagataatcagaagcttgtagtgagcatgactgataggaaggacccttggttttctcaagtcattttccacagcaacagccaggagggaaaccagggtagccacaaaaagccggcagagtggaatgcagaatcttgattatacacttattcattcatttactcattcaacaaacacttcttgagcatttcccatgtgccaggata

SEQ ID NO: 210135 - DNA, 476 bp, Homo sapiens
tgtgtttacatcccactttgcctccaactgtctggggccactggaggaatcccaggtcattgtacttcttcctcacaacacacagttggaagacgggtggccagtagactgctttgggcaagggaagtggcttgaggagagctggttttcttatgtgtttctggagctcaaatgtttcccaactaggaggagctcttcattctccagggtgctcatcccagccacagcagcttcctgttgtaggaactgcgtctggagttcttcactmtcccagataatcagaagcttgtagtgagcatgactgataggaaggacccttggttttctcaagtcattttccacagcaacagccaggagggaaaccagggtagccacaaaaagccggcagagtggaatgcagaatcttgattatacacttattcattcatttactcattcaacaaacacttcttgagcatttcccatgtgccaggata

SEQ ID NO: 210136 - DNA, 612 bp, Homo sapiens
atctgaacactccttggtatcttccctgtggagagtaaaggagtgagaaaaatctaaaatctgacttggtttaacctgaagtcaatgagaagaataaaaatcactaaagcaattgagtttacttggaagtgacaagattaaatgttctgcttcagagagtttgggagactcaagacagaaattcagttcagtgggaacacgcrcacacacacacacacacacacgcacacacaaagctaatatgttttcacccttgagaagatgctgggaaattaataattactacattggcaaagggtttagcctatggtaagtgctccctaaatgggaaataaatacatactatataataaaaacagaaaaatcgaaagccacccttggcaatggcccgtgtttcaagttgatagagggggtgggagctgagaatcagcctaggctccattctcttcctccttccccctgactatccctttattggtcaacactttttgcctgctgagtctcaaaagcagagcacagcaaaagacgtggactctgagtgcctgccacaccataaatacttccagcgggagcagatatttatggtgttataaatgtcagtggcaggcccag

SEQ ID NO: 210137 - DNA, 612 bp, Homo sapiens
atctgaacactccttggtatcttccctgtggagagtaaaggagtgagaaaaatctaaaatctgacttggtttaacctgaagtcaatgagaagaataaaaatcactaaagcaattgagtttacttggaagtgacaagattaaatgttctgcttcagagagtttgggagactcaagacagaaattcagttcagtgggaacacgcacacacacacacacacacacacgcacacacaaagctaatatgttttcacccttgagaagatgctgggaaattaataattactacattggcaaagggtttagcctrtggtaagtgctccctaaatgggaaataaatacatactatataataaaaacagaaaaatcgaaagccacccttggcaatggcccgtgtttcaagttgatagagggggtgggagctgagaatcagcctaggctccattctcttcctccttccccctgactatccctttattggtcaacactttttgcctgctgagtctcaaaagcagagcacagcaaaagacgtggactctgagtgcctgccacaccataaatacttccagcgggagcagatatttatggtgttataaatgtcagtggcaggcccag

SEQ ID NO: 210138 - DNA, 612 bp, Homo sapiens
atctgaacactccttggtatcttccctgtggagagtaaaggagtgagaaaaatctaaaatctgacttggtttaacctgaagtcaatgagaagaataaaaatcactaaagcaattgagtttacttggaagtgacaagattaaatgttctgcttcagagagtttgggagactcaagacagaaattcagttcagtgggaacacgcacacacacacacacacacacacgcacacacaaagctaatatgttttcacccttgagaagatgctgggaaattaataattactacattggcaaagggtttagcctatggtaagtgctccctaaatgggaaataaatacatactatataataaaaacagaaaaatcraaagccacccttggcaatggcccgtgtttcaagttgatagagggggtgggagctgagaatcagcctaggctccattctcttcctccttccccctgactatccctttattggtcaacactttttgcctgctgagtctcaaaagcagagcacagcaaaagacgtggactctgagtgcctgccacaccataaatacttccagcgggagcagatatttatggtgttataaatgtcagtggcaggcccag

SEQ ID NO: 210139 - DNA, 456 bp, Homo sapiens
atttgggttgttttcacattttttgctattgttatgaacattcgtgtacatgtgttttatgcagacatatgtcttcaagtctcttgggtatacctaggagtcacagtgctttcttatcrcttagaatttttgtttgtgttatttaaaaagcacttttagagttatttagacatcaattttaatcacatatcactctgcacatacttttttttgaaaaaagaaaagacaagtaaaatacattaactaagatattccaaaaatgtcttcagtacaaagtctgtatcttctaaatgatttttaaaatcatggttgccagtgtccacgttttcctacaagatattctccactgtgccattaagaacattaaagaggctgggtgtgttggctcatgcctataatctctttgggaagccaaggaaatagtatcacttgaggccaggagttccagaccagcca

SEQ ID NO: 210140 - DNA, 431 bp, Homo sapiens
aacaaatatttcctgaggacctagagctggatttggcctgcgggaaatggtggtaaacaaaagacagaaggcctcttccctcttggggattacacacctcctgaaggggaggtagacacactacatgttacttataggcacttccaagtaagtaagaggtgtaaggctagaagcagggccctcaaatagtccaggggatagagaaggactctctgaggaggggattcttgagctgtgatctgaaggcagaaggggagttaactccaccaagatggagggggaaagcatgccaggcagagggtagctcacaggcaaagaccctggggtgggaagaaacttggtgyctgtgaggagctgtaataggaagtgtgaccaggaagcagagaggggccagggaaagagaaaagggaagaggttgcagaggtgagcag

SEQ ID NO: 210141 - DNA, 511 bp, Homo sapiens
tgtaaataattaagacccaaattgttagttgttgttgccataattaaaccttaaatttggcaccaaacttttgagcagctaaagtaaaagtaagactaggtcagttacctaactcttcttattagagaaaacaagggaatcttcgtaacctaagttgaaaactctgattagctgaagctttatgctgagaaagsttttcttatcttttccttttacttaaaggtcacctgaaattagccctttagccaattccctgtggaaaatgtcctttgagtatttaatgctgtcaaacctctctctgaaagaaagatctttttccatttttcccagcctgactgtctgaagctgaggacctgtattctctgtagtagttcctagtcctcctgtttgacttacagttgttgtttctctttcttaaagttcaggtttctttgcaactcgcattttcaaaccatcaaactagtttcaagcagatttacatgtttagagatttttagtttgggtctaagtt

SEQ ID NO: 210142 - DNA, 583 bp, Homo sapiens
ttacacattgaggtggaagggagcctccttctggtcaatcacatagaagcgaattttgtttttcactgaaagttctactttgcctactttattgctggacttgcaaccagcttctcttactaaaaaaaaaaaattctgcagtaatcatgtaagaacaaaggggggaaaaatcactctaaactacgacagcagaaatatgcccagacatatacatacttcaaagcaaaggaagttctgtactgtttcaattactaatcatttaacacaacaaattccaaagaaaacacaacctacatattgaatatattctttagttatgggaagatttaggacaaactctgtaagctaaataacttgaaagtgaactttttgtatgaccttttctttaaaatatttattattttaatgtagtctacatgtagactcctaatatttatttataataaatgtactataggagcataaatcctgatttatttattttaatttacaaatacatcaatctgattaatggagtcatttttctgtcctrtcacattaaattacatccatagtcaaacacctaaagtaaattataggctta

SEQ ID NO: 210143 - DNA, 586 bp, Homo sapiens
agcacaaaaaggtaagacttataactcaagcatatttcaagcatttgcttgaaccaagcctggcaatgtaccatttgccaaagcaagtcatatggccagggccaagtcatgtggccagggtgaaatgatgagaagggtcagggtgaaggaaggaagtaaatatttctaagcaactgtctaatatatcacagttctctatattgtttataaatatttatattcttttcctgtgcaaaatatactcacccccatctcaagtctccaaaagtgtcttgtccattgataacatttggttcagagttcaagatctcatggccaacataaaatcctgttgtgctccctgtgtgatccagagacccatgatctaaacagataagttaccgtccctcattgcattcaatatacaacagtggaactgggacgagatacccacaataaacactcgcacttgaaaaaggaaagaatgagaggcrcatggcaattgctcactggtccttagcgattctgaaagcccattgtcaatatgttgccattttattctgagggaaaaatatgttctttgatttgacccaagatctgatccctg

SEQ ID NO: 210144 - DNA, 558 bp, Homo sapiens
atctccaatagtagaatgcctctaaacatataaatatccttctagaaaaaaagagatttgctatttgtcatggtgggatccaggttctctgatagaatcaatggtgagttccaatatttgaaaagtaatttataagggcattaccttaagcattgcccacttggtccataactagaactgatgtttcaggacatgagaagctgctctacattacgtccttacttctgtttttccttgctttaaagaagctagaaatatttgaggactatgcaaatactgaacaccatggggattttgttgtaattgttttttaattacttttgagagatttcacacaattatgcataaatagctctgggtgttttctaaaggcttagtttcaatattgtggctgttcattcatcatcatatggatagctstggtactatcgggccccaactaggatcagttttagaggagatctatggcaatgttccttatagtaagacattgggtatagaggtcgagtgacacagacacgagaatataggagagtcctggactgggaaggaaggaat

SEQ ID NO: 210145 - DNA, 579 bp, Homo sapiens
aaaaaacaaactctctaagtaatgcaagaaggaaaatagttaacacaaggagctagaatattgggaaaacattgagtatgttgaaagagcagagactaagaaaagccaccttaactctcaggtccactgcaagctttctgagagtcaggcaactgcagtaaacaagaattcactgtgtgtgtttgtagctgcctctaggccaaaggcmgataatttttaggagaattcccagaagccgtttcaaaacttcatatctgctgaagctcacatatatcccactgatgccccaagagcaataagacatttttagcctctcttaagctttctgtttctcacatgaatgcctctcattggtaaatctaggccacaatccagttgtgaaaacagaataaaagggaaaaacagaagaatttctaaatagtgctaacttgccaagagtcagagatagtgatggaaaataacttttatactaaacttggtactatattattccactgaagataagatattcattaaaattttagcccagaactttttagtttgtcaaaagattatggaatttatttataatgatatgtg

SEQ ID NO: 210146 - DNA, 617 bp, Homo sapiens
ccacaaaaggtaaaaaaatggcatgtgtgcaggttggacaaaccaaatgacaagttccccatgatgccccaagtggggccaagacctacttgcattgctcacagtggttttttgtgtattctctcctctgtggtgtaaaggtgttgttgaaaatgtcaaaaaggcctgaaggtacccctatagataacagtgataagagaaagagagggtatttatgtttttctatagcacagaaagtcaagctggttgagaaactgaacagcagtgtaagtatgaaacatcttacagatgagtatggtattggaatgaygtatgtcatgtagctgtatgacctaaagaaagagaaggataagctgttgaagttccataccgcaagtgatggacagacattaaagaaaaatagaaaaacactgcataaagctaaaaataaagaacttgattatatattggaagtatcgatccatgagtgttgtagtgaacacatgtgtaatggtacactgatcacgaaacaagcaaaaatctattgtgataaactgaaagtggaagagaattatgaatattcaggatgatagtggaaatttaagaaaaaacacagttggccaggcctggtggctcat

SEQ ID NO: 210147 - DNA, 457 bp, Homo sapiens
ctctacaaacacagttccctatctttatgtctaaggacctgagcaagcgctttaataatgagcatgggaaatcagtaaattatttatagttggttacttaattatacttaactgtgtagcaaactttttttctgtagtgccagttgaatcgttctcattcaatttctcataattttaatcaaagaacactttctaatgttattttagactcctatgargatagggagtttcatggaaattgtggttaagattcttatactttgagagggcagaacacacaagtagcagcccttatagactactgcagtaataagacattgctctgtggaagtagtctgccgttatacttactccttttttttaaatgttctttatacaagcaaacaagtgaaaagagaatgaaaataaataacagcactactaccaataaaaaaactaagaactcttacacagaagt

SEQ ID NO: 210148 - DNA, 552 bp, Homo sapiens
agaaaacacaggtgcctaattcacaagctacaaaaaacagtataaaggtgaccatctggggaaagctggctgacttaattttcctatgagcttaccgtctgttccttatttctcttccagactccatattctgaccttgaaaatgcatctacatattttgctacatgcatttccttctaaccataaattwacaggtattaaatagatctaattatgcaaaggatataatacaacaaaggacatattatgttgccttttacgtaatctcagtttaaaaaggttttgtttctggtgatgacgcttttcagccttttagccattctataaattcctacactttccatgatacgcctgcaagtgcagacaagcacagttctaagaaacaaatgctgcttataggagggtggtttacaaggtgtagaaaaaagttagatgtctgagaatgtggagacgaggaaacgggagcctgggattgtgatcttgatgtgttcgcaatgaattatgaggcaataccagccggagaaaagagaaggctaaaacagcgaggaattc

SEQ ID NO: 210149 - DNA, 599 bp, Homo sapiens
aaagaacagatcagggtggaaaacaagaggtgtagacccattacaacggggagaaggataaaagccaaaaaccctctatcccaggaatggggtgggaaagagagggcaggaaacagtcctagtcctgaaatcctttgatagtatatgtatattrttatagatttcctaccactggaaaggggcagggaactctcccacacaagactctccatagacagaaggctgaatttagtctggcagaccaaagaaaggcaggatcctgagaaagccctatgcttgagacccagacacacagaggcttcctaagactgaggctggaccaggacaacagagaaacaccttcgtctccaccaccaagctcattcactatcaagtcacaagcaattgcagtctacccctgggggaaggtagagggcaaagagacagaatctctcggtgacacatgtgcacagtggagcacctcaaatggttaagttgaaagtcaatataaaatacaacttctctttttatttttcttcaatgctttataagcagaggttgaaaagtattaggcccatatagtaaatagttcacagaccagtctccgtcccaactattca

SEQ ID NO: 210150 - DNA, 599 bp, Homo sapiens
aaagaacagatcagggtggaaaacaagaggtgtagacccattacaacggggagaaggataaaagccaaaaaccctctatcccaggaatggggtgggaaagagagggcaggaaacagtcctagtcctgaaatcctttgatagtatatgtatattgttatagatttcctaccactggaaaggggcagggaactctcccacacaagactctccatagacagaaggctgaatttagtctggcagaccaaagaaaggcaggatcctgagaaagccctatgcttgagacccagacacacagaggcttcctaagactgaggctggaccaggacaacagagaaacaccttcgtctccaccaccaagctcattcactatcaagtcacaagcaattgcagtctacccctgggggaaggtagagggcaaagagacagaatctctcggtgacacakgtgcacagtggagcacctcaaatggttaagttgaaagtcaatataaaatacaacttctctttttatttttcttcaatgctttataagcagaggttgaaaagtattaggcccatatagtaaatagttcacagaccagtctccgtcccaactattca

SEQ ID NO: 210151 - DNA, 502 bp, Homo sapiens
ggctatgtctgtgaaattattttaacagagcaggcaaagcatctttttagaataattatcagagtctttcacacgaatgcatgctgatggggagggcaatatgtctctatgaaaaatggaacctctgccttcaccagattaattacgctggatcttgcataaagaaactccatatgtactccatatgtacttgcagtatcaagatttttgttccattaggagttccgcttgataacatctgttgggaggaggcaacgcacacacacacacacacacacacayacacacacacagacacacacacacacatcgacattcaggtgagagataaaaatcagagttttactgaaacaatcatagttttcactcagttgcatgccaaatgggaatgccacagctgttattttcactataactggctttgaaatattggcaaaataccagagttcaagagtaggttctatcaagtgaacagaggtgctattaattttttttattctaa

SEQ ID NO: 210152 - DNA, 561 bp, Homo sapiens
ctgaatttagttattaaaattttagtgccatacctctcgaatagctgtacaaaactcactctgaagcacttttttgagggattgtagcttgtgcactggtacttctccagattcctgtagtttttcccagtaattcaattgctcttgcaacatctgaatgaaaaaaaatgaaaatagagaaacctagaataaattgtatctcatcagctgaaagtactattattccagttggatgatgacattgaaaagcaagtggacttaaattgcataatcagaacttatattcatagctttttggtctcatcttttggtaaaaagtcattttaatttgttccacacatctgtcacttcatacattttctttgatgggatttmatgtaatttgtgtcatacaaatgaatttgaatattatgtcagtaaagagttggacacatgtctattatttattctgatactccaataacgaaactaattcatcaattttgcctctgaggtgcttcctttcagttcaacttttcctttcccatttcagtttgtcatagctacaacgttacatgtatt

SEQ ID NO: 210153 - DNA, 591 bp, Homo sapiens
acgtcatttaagtaaatttctgagccagatactttccctttatatcagttctatcttttctggatcattttttgaactattcttcagttttaagtcctcatattcacaaattcttctgtgaatttatagytctggatactaaattcattgatcaaagtttcacttaccaaggcagaacggctactgaaaataaactttgcttcagctgtaaaacaagggtacctgtgtagtatatattttctccttcaaactgttataagtcatgggtaatcaatacagagctggaaaaaaaataaagtgttcaaggtacatcacacaatgtttctaggcacgtttgctttatgtaggacataacagctctcctgttattgattatacctttttataattgtttaaatctattctccaaaatagaactccagcgaactttcttagactggcttcaaatgaactaaatctctcctcccattaggccattgatcagtgatggagctaaacctacagtggagtatttagatgaaacaccagttcatacaactattgaccactcattatataatacttctgggccaaggacaaagtctgtgggga

SEQ ID NO: 210154 - DNA, 591 bp, Homo sapiens
acgtcatttaagtaaatttctgagccagatactttccctttatatcagttctatcttttctggatcattttttgaactattcttcagttttaagtcctcatattcacaaattcttctgtgaatttatagttctggatactaaattcattgatcaaagtttcacttaccaaggcagaacggctactgaaaataaactttgcttcagctgtaaaacaaggktacctgtgtagtatatattttctccttcaaactgttataagtcatgggtaatcaatacagagctggaaaaaaaataaagtgttcaaggtacatcacacaatgtttctaggcacgtttgctttatgtaggacataacagctctcctgttattgattatacctttttataattgtttaaatctattctccaaaatagaactccagcgaactttcttagactggcttcaaatgaactaaatctctcctcccattaggccattgatcagtgatggagctaaacctacagtggagtatttagatgaaacaccagttcatacaactattgaccactcattatataatacttctgggccaaggacaaagtctgtgggga

SEQ ID NO: 210155 - DNA, 565 bp, Homo sapiens
tgtgaatggctccctttagttttcactgaattcatgctttgttatgttattccaatgcctttgaaaaaaaaggcattaagaagtttgagaaacagcaaaagaccatatgctttaatcctacctggctctttttatcttaatatttcttgccttgttacaaagtaatttttaacatatttttattttctaaaatratagctttaaaccagtgtaaaccaagaacatctatataatacctctaagatgtccgcaaccatttcttcatacaatccctgagctccatatctcccctattttattttttatattctttaagggagattttactttgaaatgccattaataaaacattctaccaacatattaaaacttgctaacttgtacccaaaattatctttcctgtaaaccattcaaatttattattctatcctttaattttttattatttatttatttacttatttacagacaaggtctcactctgccgcccaggctgcagtgcagtggcgcaatcacagctcaatgtatccttgacctctgcggctcaagtgatcctcccacctca

SEQ ID NO: 210156 - DNA, 565 bp, Homo sapiens
tgtgaatggctccctttagttttcactgaattcatgctttgttatgttattccaatgcctttgaaaaaaaaggcattaagaagtttgagaaacagcaaaagaccatatgctttaatcctacctggctctttttatcttaatatttcttgccttgttacaaagtaatttttaacatatttttattttctaaaataatagctttaaaccagtgtaaaccaagaacatctatataatacctctaagatgtcygcaaccatttcttcatacaatccctgagctccatatctcccctattttattttttatattctttaagggagattttactttgaaatgccattaataaaacattctaccaacatattaaaacttgctaacttgtacccaaaattatctttcctgtaaaccattcaaatttattattctatcctttaattttttattatttatttatttacttatttacagacaaggtctcactctgccgcccaggctgcagtgcagtggcgcaatcacagctcaatgtatccttgacctctgcggctcaagtgatcctcccacctca

SEQ ID NO: 210157 - DNA, 661 bp, Homo sapiens
ggtgtgaagtggtatctcactatggttttaatttgcatttccctaacaactaatgaggttgagtatgtttttataygttttttggccatttatatatcttcttcagataaattttcattcaaatactttacctttttaaaattagacatttgtcttttattgtagagttatctctacaagagatgcaaaagaatgaatatccagtttttctaataccatttgttgaacaattattttttcccattgaactgtcttggcacccttgttgaaaattagttgaccatagtataaagggttatttctgtaataacagctctacaatactggaattcccttattagatatgttattagcaaatattttttctattctgttttccttttactttcttgatgatgttcattgaaacacaaaaatttttaattttgatgcaattcaatttatttatctttttcttttgttgtttattcttttgttttcacatctaagaaagcctaatccaaggtcacagtgatttactcctacattgtcttctaaaatatttaaaggttaagctcttatatttaggtctgtgtccatacacatataatatttgtatatggtgtgaggtaggagatatgtcttcattctttacatgaactctatgtttactattttgaag

SEQ ID NO: 210158 - DNA, 411 bp, Homo sapiens
ggaagtgttggcacttttagaaacccccaggagcttatattttgctgaaggtgaaattaaccccttgtccaagagtttgtacagctcakggcttggctggatgaaagtcacgtttctggagccatggtgtaatcctaggcttccccataccccagggaaatgctgtgtggagggtgtgggcacctcccaggtgattctctgttccttctttgggcaaggttagccttgtgcccatctccctgcgccaacagagtggaagatctctggggtcagtgactgggctaccatcatcctggcagctagaggggactttatatcagcttatgggattggcttgcatccctgggttatcgggggcgttggagtcaacagctgcggtgggttaagggtggctgcagggtctgacaaatt

SEQ ID NO: 210159 - DNA, 571 bp, Homo sapiens
agtagggtaggtgggatatggggacttggagggatggcatggagagctgctaatcaatgtatacaaacattcagttatgcaaggtgaatatgttctagagatttgttgtacaatgtagtacctacagttaacaataccatattgtgcaattttaaacaattgttaagaaggtatatcttatgttaaatattcttatcacaaaaataaacaaaaacccaaagggacatgggtaaacttttagaggtgatggacaattatatggtatgcaaattatatttttacaaataaaatcaaaatgagcactactcttgtaagtcactttacaggtaggtacaccagacaaaatgtgtacttttattaccttgattctggtaatggtttcycgggtgtatccatatgaccaaattctccaaattatacacattaaagatatgcagatttttgcatatcaattatacttcaataaagccaggtgaaaacaaataaagtcaatcaagctaaaattgttacaggatttctgaaggacaatcagaccctactacaaaaagcttcaaatgtatgaatgtactgt

SEQ ID NO: 210160 - DNA, 618 bp, Homo sapiens
tcatgataaatgtttatttatataagtgagcatatatttgtaaatatgcacatatgtgcttttaataacctagaaacccattagtgtgaatcagaggagtatgcaagaagcaaagtttgtacgcccaaataattaaaaatatatattctattattaacttagtctgatcttcaacagacattaaaagaacttaaatatgtaccttacaatcaccatttattaaactttccttttctctttaattcacagctcttcttgtttcaaattcattcccttaattccttcttcacaatctgccttttaaaaatataactttctccctttttcagttccttaaatttargaaagaattcttcccatttaggaaggaagtaaaggaaaatcaaatttgtagttttagtatggctttcaaacttccttgaaccatcacttatagaaagaaacacattatacttttcaattcagagaaatatacatagaagtgaaaagagatgaaaaaaatattgcagtggaccgtaacattttcactatatcctcttgcacttaaaaaaattttggttatgactcatccagttgattttattatccattaatgggtcatgggtagcaataagaaac

SEQ ID NO: 210161 - DNA, 561 bp, Homo sapiens
ttcttttgccaaatatgtgatgggctaactgactagcttacaagtagggtaaaatatcagacttgtcacatctcttggcattcataatcctctagggtagatattacaatgtctacttytcagatgaagaaactgaggttttgtcacataaattatggtatcaaattattcatttacttttttgttcaatcaagctatgtctaaatgttaggagtccaggtatgaatgatgtatggagaatctatgcccctggcttgatcttaaatactcttgtccagaaagtcatctttaaatgagcaatgcttatttttttcttaaagataatctgggccgggcatggtggctcacgcctgtaatcccagtactttgggaggctgaggtgggtagatcttctcagctcaggagttcaggaccagcctggccaacatggtaaaaccccatctctactaaaaatactaaaattagccaggtgtggtggtgcactcctgtaatcccagctacttggtaggctgaggcaggagaatcacttgaacccaggaggcagaggttgcacagtaagcc

SEQ ID NO: 210162 - DNA, 500 bp, Homo sapiens
ttccaataatttttaaatattagtaggtaataaaaatcatgctggctaaagaatataaagaaatttccattcctgtaagttttcccctcccaaagaagtgaaaatgtactgcataagtagaaagaaatttatatctccttttactatttaccgcctctgaaagagaaaaattgagaaaaggaaaatcatgaagttctataactgaattgcaaatgatttggtattctgatcaaattgaattggacrtattttaggcaagaaacatttaccacagtatgaatatcttaattcatatgtgtccttggtatctaaataaaagtatttcagagcagaaatcaatcaataagaatatataaaaaacataacaccaccacagcaccaccactaccaccacccctttactcccaggggaataaaggaagaatcataataataatcatggtaaaccacaaataaggaacagctacaagttcacagctcatcttcatcccctgagcata

SEQ ID NO: 210163 - DNA, 479 bp, Homo sapiens
cagttttgtctcaatggactagggacttaaaaaaaaacaaatactaagttatactataatcaaccctccacctttttcagtggttattttgaaagatgattgttggtaccaagctactgtttccccatatctcagtaaggcccctagcacagagagaacctccttctgggcacctccttgccatcacatttccttttcttctgagatttcggcatggccatgtaaaccatgtggtggtgagatataatttagtcaaaattgaggaagcttataggatctaggtattattaaacatatttttattcagtgcttacaaagtgctaggcactgtatttagcactgagatttatcagtgaaaaaaacagacaaaattcctgccctcaaggagcttatatcttagtgaagagggacaatgaatgaacaaatgaatgaataaatgaatgaatgaaygaatgtgatacaagcaagggccaaaggcc

SEQ ID NO: 210164 - DNA, 399 bp, Homo sapiens
acgctgaaccacctctatatggcaagaggatcttatgcaaatcaccattataacatgtaccgtcattgtatttcagtacttatatcacataatagcactatgttttaactgattacttatctttatctttcatgtaaaagcactatgttttaaatgattatttatccttatcttcctgcggactgaaagctccctaaaagcaggaaccagatcttatttgacacactgccttgaacatagcagggccatactctyattgcatgaatgaacactcaagtatgtaaagtaggacagacattgagctaatcaaatctatgtctctaaggcttatcctttaaaaaaatgtttaggggaacaaagaagataaagtcaggaaaggctttttagacaatctgttat

SEQ ID NO: 210165 - DNA, 579 bp, Homo sapiens
tcttaggttaagtagtttgcctgacattacccagctagtaagtgggtaatgtgggggatctgggcttagaccctggtttttcacagcccataartccatcacaccagattgtcttctaaaatactgcaacatataaattaacctgatgaatgtcattgttttaggcctgttctgaagaggtggtaaaaataaagtgtgaaatctatacctcactatctatgactaaatctattcaggtcttgactttggcagtcatcggcattcaccttgagcaagtgctgaataaatatcccattaagataagagagctgtagatcttggccttgcaattaaaatttgtactgggaagtttgcaaggctagatggatgggaagagcagaaagataaatagtaaagaatactgaacttgctataggcagcaactacgctgtggtgtgaatagcatgtgtatgtgtatatgtttgtgtatgttggtctaaggtataggtgtaaatcgttgggagctatacaaatcgaaaatgtttccttaccctggtgtcctggggtattgagtaattgcaatggccttgaacttgtagg

SEQ ID NO: 210166 - DNA, 579 bp, Homo sapiens
tcttaggttaagtagtttgcctgacattacccagctagtaagtgggtaatgtgggggatctgggcttagaccctggtttttcacagcccataaatccatcacaccagattgtcttctaaaatactgcaacatataaattaacctgatgaatgtcattgttttaggcctgttctgaagaggtggtaaaaataaagtgtgaaatctatacctcactatctatgactraatctattcaggtcttgactttggcagtcatcggcattcaccttgagcaagtgctgaataaatatcccattaagataagagagctgtagatcttggccttgcaattaaaatttgtactgggaagtttgcaaggctagatggatgggaagagcagaaagataaatagtaaagaatactgaacttgctataggcagcaactacgctgtggtgtgaatagcatgtgtatgtgtatatgtttgtgtatgttggtctaaggtataggtgtaaatcgttgggagctatacaaatcgaaaatgtttccttaccctggtgtcctggggtattgagtaattgcaatggccttgaacttgtagg

SEQ ID NO: 210167 - DNA, 569 bp, Homo sapiens
atagtcaacatgtgttcatatgaataacaatatccagcatatttagacagagcataatactgctggcatacatcctaatctctaacttgagtataagaaaatagtagaaaaaataataattatattagatactttgaagagttgtaaaattttaaagccaggaaaaattattgggttattaattatggcacatgcagtttcttttagtcttacaaccgtgtcccatgaaatgcatcagataaactctggtgtcctcccactggtcatcatctatgctgtgacccacttgccccaatccatccttgattcacctcgtttctgaccttattacacatgcmtatgacctattgttcattctcctcactgctgggatttgacagccaggactgtcttaattcctcacaagttcctcctttctacctttgggctggcttggagaaacacacctctcagttttaccaggtataaggccccctattttgataccactccaacttctatattgagtagcatatttactagtttattccaggcctttaaggatgattcagattttttaaaataaaaaa

SEQ ID NO: 210168 - DNA, 553 bp, Homo sapiens
gactttgagaccatcctgggcaacataatgaaaccttgtatctacccaaaaaactcaaaaattatccaggcatgttggcatgtgcctgtaatcccagctacttgggaggctgaggtgggagaattgcttggacacaggaggcggaggctgcagtgagctgagatcacatcactacacttcagcataagtgacagagtgagtcctgtctcaaaagaaaaaaaaagattcaacatatgaatgttggaggacacatttagaccatagcacctattgaattcacatgccacgtttcttatcttttacatttctacatatarttggtaaactctgaactttgtattttttttactttaaaataaacttttaaattttactcaatagttttagtaggtttttttagcatcaaacaaaatagattttatttatttcaataggtttttggggaacaggtggtgtttggttacatggataagttcctcagtggtgatttctgagattttgctgcacctgtcacctgtgcagtgtacactgtattcaatgtatagttttttgt

SEQ ID NO: 210169 - DNA, 606 bp, Homo sapiens
aagtagtttgtccaagatcatacagctcaaaattggtggatccacattttgaacccaagcagcctgaccccagggtctttgcttttcaccattgtactaggctgtttctaaaggaactcatctctgttcctgagagaaagaaaagctttttcaagtacttagttctgtctttttatgtgtggaacattatatagagaaccctgaaagacgtagtgaaccaagttcttaacgaactctctttgctgaaagttaaagatttaacataaaaatgcacttgactaatggcatctatgtatgaatctttgtcagtttcactagctttttgcatgttcatgaaacgcttcactttattcttattagaatacaaaatrtaagccccgtgtacatgtgctgtaatactagagaggaggagtaggagaaagggggaaggaagaaaggaagggctgaatcttcacagaaatgcatataatataaggaaagaaataaaataatcagtctctgcctatgagatttgacgttatgaactgaaaagtttaatggtggccatcaattggtgctttagcctggagatatggaataaaaatgtcgatcttaataacaattttc

SEQ ID NO: 210170 - DNA, 575 bp, Homo sapiens
tatgtataagcatgaagagaatcaagggtcagtaaacagctcacattggattaaaagacagatgaagctctaatcatatatgccaggcactctaacacatatgcagatacatagatgaataacgcaccacccctaagcttgaggagttgtcatttgagtgtggtrgagagtcatataaataaatgcttacagtatagcctgttagaggcaacagtataaatataaacatcagagtgattaactttgtggggcaccattgtgaggtgtgtgtcatggaaggcttcactgagttcactaggtggacaagaggaggtgagaaggagcattctaggcagaaagaattgcatgcccaaggcacagaaatatggccattttaataattagaaattcattattgttggaagatagagatgggagagtgaaggtaggacagatcagtggctggagatctaaacagaagaaacattatgaggcagttcttatgccattgtttaggagcctgtgtttatctgtagatactggtggtggcattaaaggatttagcagagggactgggttgccctggtgttgtagat

SEQ ID NO: 210171 - DNA, 575 bp, Homo sapiens
tatgtataagcatgaagagaatcaagggtcagtaaacagctcacattggattaaaagacagatgaagctctaatcatatatgccaggcactctaacacatatgcagatacatagatgaataacgcaccacccctaagcttgaggagttgtcatttgagtgtggtagagagtcatataaataaatgcttacagtatagcctgytagaggcaacagtataaatataaacatcagagtgattaactttgtggggcaccattgtgaggtgtgtgtcatggaaggcttcactgagttcactaggtggacaagaggaggtgagaaggagcattctaggcagaaagaattgcatgcccaaggcacagaaatatggccattttaataattagaaattcattattgttggaagatagagatgggagagtgaaggtaggacagatcagtggctggagatctaaacagaagaaacattatgaggcagttcttatgccattgtttaggagcctgtgtttatctgtagatactggtggtggcattaaaggatttagcagagggactgggttgccctggtgttgtagat

SEQ ID NO: 210172 - DNA, 254 bp, Homo sapiens
cacaagtgaggtagagaatacttgaggacaagcagcattcgtgagtgtgtgtggtggggtgctaattatggcagtgttaagggtgagtaattcaaggctgagcactgtgaattaggagtgcccgtgggacagcaggtggcaggtctgttaggtggtgggatatgagyatctggattccatggtcaggttggcatacttcatagggactctcgcatctaggcattttgttcttgggaaaaaagataccctgaaac

SEQ ID NO: 210173 - DNA, 566 bp, Homo sapiens
cattcatccactcattcacttagcgaaataaatagtacctgccaagagccaggccctcccttgggtgctagggagacagtcattaaacaagacaaaccaggtccctgccctcatctataatgtatctcctttttggagccaatttgtcttcctttatcattagtagaaacagaaatattgtttgttatgcttgagcagccatacaaaatactacrgactggtgacttaaacagtagaaatttattttctcacagttctggaagctgggaaatccaaagatcaaagttccggccaattcagttgctggtgagggctctcttcctggcttgcagacagctgccttctcactgtgtcctcacatggcttttcctcagtgcatacacacagaggcagcaagggagtgagttctgtggtgtctcctcttataaggaaactaatcctattggatcagtgccccacactatgactttatttaattacttctttactctaaatacagccacactgggggagagagcttcaacatatgaattggggaggatacatatatttggtccacaacaaat

SEQ ID NO: 210174 - DNA, 491 bp, Homo sapiens
atagtttgtgttcattagtatcccccttttggtctctgagaagctttagaaagacttcacactcttgtggcttaaagaaatacctcgctacagtttctagaatagtcctgaagctgggagtgcactgggagcccacattcccctcagtgtcaatgttctaacctatttccaaagcagctcattaaatcacactttccctttgtattgtcacctactgttagttattctcatatatttcacccaaaaaactgctttaactacccaaaaatatgatgtcccctaagctttttaaaaatacataaattagaaaatcattagcatataaatcataccactggaaaaaatattgtaggttgatggagctaaggtgggttttctaacacaaagacaagttagaaagcccaatggagaawgaatatttattcataaatccaagtgaaattaattggaacaatttagtgacagtttcaaaacaatggcacccatcagag

SEQ ID NO: 210175 - DNA, 439 bp, Homo sapiens
gtaatatatgtatggcatgcttacagctaaatagcaatgatataaagaacaaatataaaatatgtttgaaaggaaagttaatgaaacttattactaaacttggatgacacttacagaaacagggaatttggaaagaaagcttgtttgagaatagaagactrtaagacagatattcagatagcctcaaaaacctatgttgcttgccccagatactagtactttttagtaggcaaaactcttaagatgatctccaatgatgcttgctctcgtgtaatctctttttaatcctgagtagaacctatgaatatgatgaggcatcactctcatgattgtgttaccttacatggcaaagggatttttgcagcattaattaagatttctaatcagataaccttgggttcatcaaaagggagattatctgtaggggcctaacccaatc

SEQ ID NO: 210176 - DNA, 563 bp, Homo sapiens
gtatttcctcaaaacactggttgtaagactcaagtgttaaagcagaggctggagtaggagatcttccaagtgactggcattttgtcctttgtctttattcatatatttccatgcactgtaacaccaaagcgtttcttttgtatcatatgtgtattagtctgttctcacactgctatgaagaaatacctaagatggggtaatttataaaagaattaggtttaattgactcacagttctgcattgctgggaaggcctcaggaaacttacaatcatggtgaaaggcaaaggagaagcaggcaccttcttcacagggcgacaggtcagagtgaatgcaggacaggggaaatgccaggcacttataaaatcatcagatttggtgagactcactcaccatctgagaacagcatgrggtaaaccactcccacgatccaattacctccacctgttcccgccctttacacatggggactgtggggattacaattcaagatgagatgttaggtggggacacagccaaaccatagcaatacctgtgaatctggattctttatattccctgaaga

SEQ ID NO: 210177 - DNA, 493 bp, Homo sapiens
cttactattaaaagatcattatatactgacagtgtgagatatgaattatgttagtaattgattctagaacagttgcgtggttgtttatatgtgtgttttttwaaatagtgggggatgcctctctattgatgtaacctttggccatcttatcaccagcacaaatacacacacacacacacacacacacacagacacacacacacagaaggagagagagaggggaatcaactctcacacctagagactgacttttcagcccagtaaatggatagcttggttttcagataccttatactaaatatcttcagttatttgggctttaagttgtatgtctttccactttcttctctggatactaaccttccatatctttctctgtgatccttttgatagggtggtggtagtgcatagaagaatgtattccaaatttttaatcagagaaatattagtattccaaatttttaattagagaaatattagcattctcattagt

SEQ ID NO: 210178 - DNA, 609 bp, Homo sapiens
taattcctgaatctagaattaaaatgtgattattgcgagtcacacatcagtgttaattctctggcatcctattagtctactggctgatgttactcatackcctgttcttgtcacagaaagaagataaatgaaaaatgaaagccttgctaagtgaaatgaaaaaggtaccagagtctaggccttggcctttattaacagctcagaaacttcattctagtggggaaaaaaattgcaaggacttaaagtagcacaaaaatgatcatccgtatcaaaaggtacatacttattgttgattagaagttagaggtttattctaatctgcacaatccaacccttgttaaaagaagattctgaattatattgaaatgttacatggaaataggttgtcaagaatgccaaaatctttcagggttggtgtttagggaatttttattacatctacgtcctcttgtcacccccggaaactcaccgttcatcactttctactaaattggtcccatatgtgattccctgcctagagtgaactacctgaattcattcattcattcattcatctatcaataaatccaaccaccatttattcatccatacctcctacaatccatccac

SEQ ID NO: 210179 - DNA, 629 bp, Homo sapiens
atttaccatctgattcttttcagaaaaagcttggcaactcctgccttaaggcctcattgtcttccatatctggcagacaaaaagaaaaatagygtgaaggggcctcagtcccttcttaaaagcctcactccaaaatgacacacatcacttctgcttttcttccattggctggaactcagtcacatggtcactgcaaattttaaagaaggcagggaaatgtatccagctgtgtgtctaggaaggaaaggaaactggtttttggtgaggttatcagtctctgaataccctattaatgggtttagattgtcttcaaaagacaatgaggaacaaaccatgagagaattctgaaaacagaattgacaagacaaaattgtttaagagcatctccttacaatagtaaataaagagctacctgcaggaagcataactcagtatcaagtcactgaggcactatcacagacttacgagcacctggcaaacggcccagaacaatttttaaaagtcacctatttgtcaattaaacttcaccacaagtcaattagcatggtgatttttatgctccagagagaacaggctataatgaacagtcaggagttgtgaggactcacaataacagtaattctttatgg

SEQ ID NO: 210180 - DNA, 578 bp, Homo sapiens
cccagccgccaagtggggtggtccctgttctgatgcaggattctgatagtgaccttgaatacagaggaggtgaccctctccttgctcctcaccttggtcagccacaccaacaactgctcaaagtgcatagggtatacagaggtctttcctcaacaatctgcgccatttggccaagtaggcaactagaatgaccactgaaaactcagaggaagagtgccaatttatagctctcattatagtgtaatgttatttccttaaaagtttgtgcacacatttaatgaactcataaaacttaaactatcagagtcttgtggtgaggaggcagggtacwgttcttgtaacttcacattctagcagctctgggttgaagccacccctgcagggctgggagctgggggcaggtgtgtgagtgactcccccagggggctcttcccaggccaggtgcccagacagtttccccatctgggctcaggacctgggctagcagggtgccaagcctccccaaggaggagactcttctccctccccatgcccataccccttcctgggcctcaggccctgattgctatggtcaggcc

SEQ ID NO: 210181 - DNA, 620 bp, Homo sapiens
gttttttgtacaaaagtgcaaaatagttatcacagcaaaccttccagtattttctattttaaagctatatattttgaagtgaacttggttttcttttcttttctttttttttttttttttttttgccatgtcaggtttgagcaggatagcaaatatataaattgagctctctaattataatctcaatatatgaattcttgctaattaaaatactttgcaccagcaaaaacaattgccacgtatgtgtttaggaggtagttaagtaactccatataaaaataagtgcactttcccctccttccttcagtgactagaaaacttccatacttttaaaataatsaaataataatttagagagcaacagccctcaactctttgctggtgcttatcacactgcctttcttcactccattcttagctctgctagtttcttcttgtctgtgatgataataagggaatgtgggtgggtcagcacttctgtgtaggtccccttttcaaatttgccttccaaaaagccaaccaaataaacaaccaaaaaattgtgcaacaaaacacaaatagcattccaacagcttggcaagtgatgcattcacctgagattaagtggttttaggtggtca

SEQ ID NO: 210182 - DNA, 557 bp, Homo sapiens
actcagtcactatcatgagaacagcgtgggggtaactgcctccatgattcarttacctcccactgggttcccatcatgatatgtgagtattatgagaactaaaattcaagatgagatttggttggagacacagccaaaccatatcatggggtctcactttattgccccggctgatttcaaactcctgggctcaagtgatcctcctgacttggcctcctaaagtgctgggaatacaggcatgagccaccatgaccagtcctaaagtctaaattcttaacatctaaaatccagaaaatcacaatcacaggagagttgtaccacgttctttgcatcatgtttggtacaactgttgctttgttttctttttatttggaagtcatgtatggtttaaggaggtccacatgggtgccaaatctactaggggtggacttgcagacttaatttcaggcgtcaacttgactggattaaggaatccctggaaagctgggaaagcattattttgggtatgtctgtgatggttttctcagaagagatcagtgtgtgggtctgagcagact

SEQ ID NO: 210183 - DNA, 528 bp, Homo sapiens
gagaacagcgtgggggtaactgcctccatgattcaattacctcccactgggtycccatcatgatatgtgagtattatgagaactaaaattcaagatgagatttggttggagacacagccaaaccatatcatggggtctcactttattgccccggctgatttcaaactcctgggctcaagtgatcctcctgacttggcctcctaaagtgctgggaatacaggcatgagccaccatgaccagtcctaaagtctaaattcttaacatctaaaatccagaaaatcacaatcacaggagagttgtaccacgttctttgcatcatgtttggtacaactgttgctttgttttctttttatttggaagtcatgtatggtttaaggaggtccacatgggtgccaaatctactaggggtggacttgcagacttaatttcaggcgtcaacttgactggattaaggaatccctggaaagctgggaaagcattattttgggtatgtctgtgatggttttctcagaagagatcagtgtgtgg

SEQ ID NO: 210184 - DNA, 528 bp, Homo sapiens
gagaacagcgtgggggtaactgcctccatgattcaattacctcccactgggttcccatcatgatatgtgagtattatgagaactaaaattcaagatgagatttggttggagacacagccaaaccatatcatggggtctmactttattgccccggctgatttcaaactcctgggctcaagtgatcctcctgacttggcctcctaaagtgctgggaatacaggcatgagccaccatgaccagtcctaaagtctaaattcttaacatctaaaatccagaaaatcacaatcacaggagagttgtaccacgttctttgcatcatgtttggtacaactgttgctttgttttctttttatttggaagtcatgtatggtttaaggaggtccacatgggtgccaaatctactaggggtggacttgcagacttaatttcaggcgtcaacttgactggattaaggaatccctggaaagctgggaaagcattattttgggtatgtctgtgatggttttctcagaagagatcagtgtgtgg

SEQ ID NO: 210185 - DNA, 557 bp, Homo sapiens
actcagtcactatcatgagaacagcgtgggggtaactgcctccatgattcaattacctcccactgggttcccatcatgatatgtgagtattatgagaactaaaattcaagatgagatttggttggagacacagccaaaccatatcatggggtctcactttattgccccggctgatttcaaactcctgggctcaagtgatcctcctgacttgkcctcctaaagtgctgggaatacaggcatgagccaccatgaccagtcctaaagtctaaattcttaacatctaaaatccagaaaatcacaatcacaggagagttgtaccacgttctttgcatcatgtttggtacaactgttgctttgttttctttttatttggaagtcatgtatggtttaaggaggtccacatgggtgccaaatctactaggggtggacttgcagacttaatttcaggcgtcaacttgactggattaaggaatccctggaaagctgggaaagcattattttgggtatgtctgtgatggttttctcagaagagatcagtgtgtgggtctgagcagact

SEQ ID NO: 210186 - DNA, 528 bp, Homo sapiens
gagaacagcgtgggggtaactgcctccatgattcaattacctcccactgggttcccatcatgatatgtgagtattatgagaactaaaattcaagatgagatttggttggagacacagccaaaccatatcatggggtctcactttattgccccggctgatttcaaactcctgggctcaagtgatcctcctgacttggcctcctaaagtgctgggaatacaggcatgagccaccatgmccagtcctaaagtctaaattcttaacatctaaaatccagaaaatcacaatcacaggagagttgtaccacgttctttgcatcatgtttggtacaactgttgctttgttttctttttatttggaagtcatgtatggtttaaggaggtccacatgggtgccaaatctactaggggtggacttgcagacttaatttcaggcgtcaacttgactggattaaggaatccctggaaagctgggaaagcattattttgggtatgtctgtgatggttttctcagaagagatcagtgtgtgg

SEQ ID NO: 210187 - DNA, 557 bp, Homo sapiens
actcagtcactatcatgagaacagcgtgggggtaactgcctccatgattcaattacctcccactgggttcccatcatgatatgtgagtattatgagaactaaaattcaagatgagatttggttggagacacagccaaaccatatcatggggtctcactttattgccccggctgatttcaaactcctgggctcaagtgatcctcctgacttggcctcctaaagtgctgggaatacaggcatgagccaccatgaccagtcctaaagtctaaattcttaacatctaaaatccagaaaatcacaatcacaggagagttgtaccacgttctttgcatcatgttwggtacaactgttgctttgttttctttttatttggaagtcatgtatggtttaaggaggtccacatgggtgccaaatctactaggggtggacttgcagacttaatttcaggcgtcaacttgactggattaaggaatccctggaaagctgggaaagcattattttgggtatgtctgtgatggttttctcagaagagatcagtgtgtgggtctgagcagact

SEQ ID NO: 210188 - DNA, 577 bp, Homo sapiens
taccatttgattatggtgaataatctttataatgtgcttttgaattatcattgctataactgctggttttgaatgtttgcatctatgtttatcaatgatattggcctggagttttcttttatttgctgttcttgtctcattttggaattaggaaatgctgtcttcatagaatgagtttggaagagttccctycttttcatttttttgaaatagtttgtaaaaaatttgtataagttctttaaatgttttgtagaatttgtcagcgaaaaccaccaagtcatgaacttttctttcttcctctatttttttagagacagggtctcactctatcactgaagctggcatacagtggtgcagtcatagctgactgcagcctcaaactcctggtcttaagtgatcctcctgcctcagcctcctgagtacaaatacacaccactatacctggataatttttatttttatttttagagatggagtctcattgtgttgcccaggctaatcttgaactcctggcctctggtgattctcctgccttgggctcctaaactgtgagattacaggtgtgagctactgtgtg

SEQ ID NO: 210189 - DNA, 577 bp, Homo sapiens
taccatttgattatggtgaataatctttataatgtgcttttgaattatcattgctataactgctggttttgaatgtttgcatctatgtttatcaatgatattggcctggagttttcttttatttgctgttcttgtctcattttggaattaggaaatgctgtcttcatagaatgagtttggaagagttccctccttttcatttttttgaaatagtttgtaaaaaatttgtataagttctttaaatgttttgtagaatttgtcagcgaaaaccaccaagtcatgaacttttctttcttcctctatttttttagagacagggtctcactctatcactgaagctggcatacagtggtgcagtcatagctgactgcagcctcaaactcctggtcttaagtgatcctcctgcctcagcctcctgagtacaaatacacaccactatacctggataatttttatttttatttttagagatggagtctcrttgtgttgcccaggctaatcttgaactcctggcctctggtgattctcctgccttgggctcctaaactgtgagattacaggtgtgagctactgtgtg

SEQ ID NO: 210190 - DNA, 315 bp, Homo sapiens
tggataatttttatttttatttttagagatggagtctcattgtgttgcccaggctaatcttgaactcctggcctctggtgattctcctgccttgggctcctaaactgtgagattacaggtgtgagctactgtgtgaagtcttttggattttccttgactgagagcctaaatcgctccttcaatctcattakttgtcattggtgtgttcacattttctatttcttctttcttcaattttgataggttatatgtgtccagagcgtacgtatttcttctaagtttttcaatttattggcatataattgtttgtagtac

SEQ ID NO: 210191 - DNA, 315 bp, Homo sapiens
tggataatttttatttttatttttagagatggagtctcattgtgttgcccaggctaatcttgaactcctggcctctggtgattctcctgccttgggctcctaaactgtgagattacaggtgtgagctactgtgtgaagtcttttggattttccttgactgagagcctaaatcgctccttcaatctcattagttgtcattggtgtgttcacattttctatttcttctttcttcaattttgataggttatatgtgtccagagcrtacgtatttcttctaagtttttcaatttattggcatataattgtttgtagtac

SEQ ID NO: 210192 - DNA, 315 bp, Homo sapiens
tggataatttttatttttatttttagagatggagtctcattgtgttgcccaggctaatcttgaactcctggcctctggtgattctcctgccttgggctcctaaactgtgagattacaggtgtgagctactgtgtgaagtcttttggattttccttgactgagagcctaaatcgctccttcaatctcattagttgtcattggtgtgttcacattttctatttcttctttcttcaattttgataggttatatgtgtccagagcgtaygtatttcttctaagtttttcaatttattggcatataattgtttgtagtac

SEQ ID NO: 210193 - DNA, 315 bp, Homo sapiens
tggataatttttatttttatttttagagatggagtctcattgtgttgcccaggctaatcttgaactcctggcctctggtgattctcctgccttgggctcctaaactgtgagattacaggtgtgagctactgtgtgaagtcttttggattttccttgactgagagcctaaatcgctccttcaatctcattagttgtcattggtgtgttcacattttctatttcttctttcttcaattttgataggttatatgtgtccagagcgtacgtatttcttctaagtttttcratttattggcatataattgtttgtagtac

SEQ ID NO: 210194 - DNA, 425 bp, Homo sapiens
tttaaggattctgtaaatatacataataaggaaggaatgagaaaatctttagaggaaatattcaagtacgtttgatttccagcaaatccagatagacagttttggcaacaaccaagtcataattttaagtcttgttataggagctagaattttattcaagggacaactgatttgattagattagttgctgtgcactgcatgtttgcatcaacaaatgcacatgttgaaactcttacaatagaatggcattagaagggggacctttggaaagtaatttggttttgatgargatggagttccacaatggggttagcatcctaataagaagagtaggagactagagccctcttctctcagccatgtgaagatacaacaagaacacctgcaaaccagtaagatggccttcaccagacactggctctgct

SEQ ID NO: 210195 - DNA, 599 bp, Homo sapiens
aggttgattctaggctattgtcaatagaggaataacaaaaaataaagagaatagcccatttattttttgcagagaagctagacaattcacagtaacttatggtctagacaattttatttcttgatcagcacaactctttatagatgcctgtgrtccaaaaatgtggattcctaatcgtccccaaaaagaagggatactctgcaaggcaacctgggagggagtttaggattgttctgaggcagtgaaagccattgagattcacatgtaagagggtagagaaaggaaatccacatgttttgatccctccgtgtgctggatataacttggtcttcattacattgcaccacctttggtgtcagagagaactggatttgaatcccagttccatcactcattatgatttgatggtgaatgtgtttttaactcgtctgagcctcagtttgctcatctataaaagatgggattgttatgagacttgcataaggtaagtgtttaaaaatctgggaattatccctgtaatttaaaagatggggttgtgataaggcttcaataaggtaagtgtgtaaaaatctggacacaatgttactaattttgtaggt

SEQ ID NO: 210196 - DNA, 599 bp, Homo sapiens
aggttgattctaggctattgtcaatagaggaataacaaaaaataaagagaatagcccatttattttttgcagagaagctagacaattcacagtaacttatggtctagacaattttatttcttgatcagcacaactctttatagatgcctgtgatccaaaaatgyggattcctaatcgtccccaaaaagaagggatactctgcaaggcaacctgggagggagtttaggattgttctgaggcagtgaaagccattgagattcacatgtaagagggtagagaaaggaaatccacatgttttgatccctccgtgtgctggatataacttggtcttcattacattgcaccacctttggtgtcagagagaactggatttgaatcccagttccatcactcattatgatttgatggtgaatgtgtttttaactcgtctgagcctcagtttgctcatctataaaagatgggattgttatgagacttgcataaggtaagtgtttaaaaatctgggaattatccctgtaatttaaaagatggggttgtgataaggcttcaataaggtaagtgtgtaaaaatctggacacaatgttactaattttgtaggt

SEQ ID NO: 210197 - DNA, 641 bp, Homo sapiens
ttcttgatcagcacaactctttatagatgcctgtgatccaaaaatgtggattcctaatcgtccccaaaaagaagggatactctgcaaggcaacctgggagggagtttaggattgttctgaggcagtgaaagccattgagattcacatgtaagagggtagagaaaggaaatccacatgttttgatccctccgtgtgctggatataacttggtcttcattacattgcaccacctttggtgtcagagagaactggatttgaatcccagttccatcactcattatgatttgatggtgaatgtgtttttaactcgtctgagcctcagtttgctcatctataaaagatgggattgttatgagacttgcataaggtaagtgtttaaaaatctgggaattatccctgtaatttaaaagayggggttgtgataaggcttcaataaggtaagtgtgtaaaaatctggacacaatgttactaattttgtaggttttcaatatatagagaaggaggattattttcctctcatttaaattttagaacaagtttataaaattagtattgttcatatttttgagataatcaaaggatcagtaggtttaaataaatcaccatagtcacaaagcagttcacaatatattaactggata

SEQ ID NO: 210198 - DNA, 529 bp, Homo sapiens
tcaataaggtaagtgtgtaaaaatctggacacaatgttactaattttgtaggttttcaatatatagagaaggaggattattttcctctcatttaawttttagaacaagtttataaaattagtattgttcatatttttgagataatcaaaggatcagtaggtttaaataaatcaccatagtcacaaagcagttcacaatatattaactggataattgctagtgaaaagtagcaatgatggtcacattgaaaatcttgtgttaggtggtggttttctcttgcataagcctcttcatttgttgaaaccatagattctaagtttgctctatcaaagtgatcattagaaaaatataaggtacttagtgtataaattttagaaaatttcctttttagtcctgttaatttgattgaatatgtgcattttgaattatgaatataaatatgaatacgtatgacatatgaaatatgacttgacatcacagagtaaccttagatcgtggtaatgttttattctgaaagcacctgcagaaa

SEQ ID NO: 210199 - DNA, 342 bp, Homo sapiens
caatatcctttcattgaattcctgttttgcttaagttgtctagaatttgttattttcagkgaaaaatataaaccagttatcccctcacattaaaacacactccacttaggcatctcctgtgatctcactggagaaaagtgtggacgttatttgtaatttgactcagaatgataggattagtttggtactagtaacaatggagataagtaactaactttttgtgaaacttcttcctggggtgaaacaaaatctattgtggaaactcttttcaatcatctctggaaatttattaagtgacctagtatataacgataatttaccatgatatttgataaaatagtt

SEQ ID NO: 210200 - DNA, 342 bp, Homo sapiens
caatatcctttcattgaattcctgttttgcttaagttgtctagaatttgttattttcagggaaaaatataaaccarttatcccctcacattaaaacacactccacttaggcatctcctgtgatctcactggagaaaagtgtggacgttatttgtaatttgactcagaatgataggattagtttggtactagtaacaatggagataagtaactaactttttgtgaaacttcttcctggggtgaaacaaaatctattgtggaaactcttttcaatcatctctggaaatttattaagtgacctagtatataacgataatttaccatgatatttgataaaatagtt

SEQ ID NO: 210201 - DNA, 342 bp, Homo sapiens
caatatcctttcattgaattcctgttttgcttaagttgtctagaatttgttattttcagggaaaaatataaaccagttatcccctcacattaaaacacactccacttaggcatctcctgtgatctcactggagaaaagtgtggacgttatttgtaatttgactcagaatgataggattagtttggtactagtaacaatggagataagtaactaactttttgtgaaacttcttcctggggtgaaacaaaatctattgtggaaactcttttcaatcatctctggaaatttattaagtgacctagtatataaygataatttaccatgatatttgataaaatagtt

SEQ ID NO: 210202 - DNA, 490 bp, Homo sapiens
aagtgaggtcaaatgaagccacatgggtggaccctacaccaatatggcaggtgtccatgtaaaaatagattgagacacagtcaacacagcctgaggacacagcaggaagggaggcatctgcaaggcagcagttctcagaagaaggcaaacctgctgacattccatcctggatttccagtcttcagagctgtgagaagataaaccactcaatctgtggcagcttgtgatggaarcccctagcactcttatatggtgaccttagcacaagaagtttcataggcttggtgaaagtgaaagccaaactgatctgaataaagagtgaaaggaaaatgagcaaaaggagatagtaaatgtggaaaatccttgagaaaaattttctaagaaaggaggagatggcttgatagctagaaagacacacagcatcaaagttaaggttcctccaagatagaagattttttaaatgaaaaatttatatttaaatgctgacaga

SEQ ID NO: 210203 - DNA, 537 bp, Homo sapiens
cgtaggattccaggacaccccagctgtggtctgaatgactgtccctgacattcgattccagagcactgctactgggttctgagtgtttctccctcagataagattycagaacactgctacgagggcatgaatgactgaacctcacgtaggattccagaacactcctgctgttgtctgagtgtttgtctctcacataggattcctgaacactcctgctgtggtcgaaatgtttgttcctcacttatgatttcagaatactcctgctgtcatctgaatgtttgtacctcacgtaggattcaagagacattgctgttgggttctgactgtgtgtccctcacgtaagattcaagtacacagctacgtgggtctaaatgattctccctcgtataggattccaaaacactgctatgagggtctgaatgtttgtcccacacataaaattccagaacactcctgctgtggtataaatgtttgtacctcacataggatttcagaacattcctactgtcgtctgaatgtctgtccttcacagaggat

SEQ ID NO: 210204 - DNA, 537 bp, Homo sapiens
cgtaggattccaggacaccccagctgtggtctgaatgactgtccctgacattcgattccagagcactgctactgggttctgagtgtttctccctcagataagatttcagaacactgctacgagggcatgaatgactgaacctcacgtaggattccagaacactcctgctgttgtctgagtgtttgtctctcacataggattcctgaacactcctgctgtggtcgaaatgtttgttcctcacttatgatttcagaatactcctgctgtcatctgaatgtttgtacctcacgtaggattcmagagacattgctgttgggttctgactgtgtgtccctcacgtaagattcaagtacacagctacgtgggtctaaatgattctccctcgtataggattccaaaacactgctatgagggtctgaatgtttgtcccacacataaaattccagaacactcctgctgtggtataaatgtttgtacctcacataggatttcagaacattcctactgtcgtctgaatgtctgtccttcacagaggat

SEQ ID NO: 210205 - DNA, 537 bp, Homo sapiens
cgtaggattccaggacaccccagctgtggtctgaatgactgtccctgacattcgattccagagcactgctactgggttctgagtgtttctccctcagataagatttcagaacactgctacgagggcatgaatgactgaacctcacgtaggattccagaacactcctgctgttgtctgagtgtttgtctctcacataggattcctgaacactcctgctgtggtcgaaatgtttgttcctcacttatgatttcagaatactcctgctgtcatctgaatgtttgtacctcacgtaggattcaagagacattgctgttgggttctgactgtgtgtccctcacgtaagattcaagtacacagctaygtgggtctaaatgattctccctcgtataggattccaaaacactgctatgagggtctgaatgtttgtcccacacataaaattccagaacactcctgctgtggtataaatgtttgtacctcacataggatttcagaacattcctactgtcgtctgaatgtctgtccttcacagaggat

SEQ ID NO: 210206 - DNA, 441 bp, Homo sapiens
tgtggtctaaatgttgttcctcacataggattccagaacactcctrctgtcatctgaatgtttgtccctcacataggattccagaacacccctgctgtggtacaaatgtttgctcctcacataggattccagaacactgctacgtgggtctaattatttgtctcccacataggattccagaacactgctacaagggtctgactgtttgtcccgcacaaaggacaccagaacactccggtgggctccggaagtattttcctcacataggattccagaaaaatgctacaaggttctgaattttattcccacacgttggattccagaacaccccagctgtggtctgaatgattgtccttcacataggattcctgtacactgctacgagggtctgaatgttttcccgcacataggactccagaacactcttgcagtattctcaat

SEQ ID NO: 210207 - DNA, 441 bp, Homo sapiens
tgtggtctaaatgttgttcctcacataggattccagaacactcctgctgtcatctgaatgtttgtccctcacataggattccagaacacycctgctgtggtacaaatgtttgctcctcacataggattccagaacactgctacgtgggtctaattatttgtctcccacataggattccagaacactgctacaagggtctgactgtttgtcccgcacaaaggacaccagaacactccggtgggctccggaagtattttcctcacataggattccagaaaaatgctacaaggttctgaattttattcccacacgttggattccagaacaccccagctgtggtctgaatgattgtccttcacataggattcctgtacactgctacgagggtctgaatgttttcccgcacataggactccagaacactcttgcagtattctcaat

SEQ ID NO: 210208 - DNA, 441 bp, Homo sapiens
tgtggtctaaatgttgttcctcacataggattccagaacactcctgctgtcatctgaatgtttgtccctcacataggattccagaacacccctgctgtggtacaaatgtttgctcctcacataggattccagaacactgctacgtgggtctaattatttgtctcccacataggattccagaacactgctacragggtctgactgtttgtcccgcacaaaggacaccagaacactccggtgggctccggaagtattttcctcacataggattccagaaaaatgctacaaggttctgaattttattcccacacgttggattccagaacaccccagctgtggtctgaatgattgtccttcacataggattcctgtacactgctacgagggtctgaatgttttcccgcacataggactccagaacactcttgcagtattctcaat

SEQ ID NO: 210209 - DNA, 441 bp, Homo sapiens
tgtggtctaaatgttgttcctcacataggattccagaacactcctgctgtcatctgaatgtttgtccctcacataggattccagaacacccctgctgtggtacaaatgtttgctcctcacataggattccagaacactgctacgtgggtctaattatttgtctcccacataggattccagaacactgctacawgggtctgactgtttgtcccgcacaaaggacaccagaacactccggtgggctccggaagtattttcctcacataggattccagaaaaatgctacaaggttctgaattttattcccacacgttggattccagaacaccccagctgtggtctgaatgattgtccttcacataggattcctgtacactgctacgagggtctgaatgttttcccgcacataggactccagaacactcttgcagtattctcaat

SEQ ID NO: 210210 - DNA, 600 bp, Homo sapiens
agaatttttgtccctcaataggattccagaatgctgctgctagggtctgaatgyttgtccctcacttaggattccagaacactgctgctggggtctacatttatgtccgaaacataggattccagaacactgctgctggtttctgagtgtttctcactcacaaacaattccagaacactgcgacgagggtttgaatgtttgtccgtaacataggattcaaaaacactcaagtatttatttgaatgtttgtccctcacataggattccagaacactgctacgagggtgtgaatgtttgtccctcacttaggattccagaacactcctgctgtggactgaatgtttgtccctcagaaagaaagccagaacagtgctaccagggtctgaatatttgtccctcacataggattcaaggaccctgctgctggggcctaaatgtttgtccttcaaataggattccagaacactactacgagagtctgaatgtttgttcctcacaggggattccagaacacttctgctgtggtctgaatgtttgtcactcacatgggattccacatcactgctatgaatgtctgaatgtttgtccctcacaaagaat

SEQ ID NO: 210211 - DNA, 415 bp, Homo sapiens
gattgtctgaatgttttccctcacataggattccagggcactcctgccgtgttatgaatgtttgtccctcacatagtattccagaacactgctgctcgggtctacatgtatgtccgtcacataggattccagtacactgttgctgggttctgagtgtttctccctcacatagmattccagaacactgtgacgagggtctgaatgtttgtccataacataggattccagaacactcccactgttgtatcaatgtttatagctcacataggattctggaacactgctgctggggtctgaatgtttgtccctcgcaaagaattcccgtacactgctaagattgtatgaatgtttgtctcccacataggattccagaacactgctacgagtgtctgaaagtttttccctcacataggat

SEQ ID NO: 210212 - DNA, 415 bp, Homo sapiens
gattgtctgaatgttttccctcacataggattccagggcactcctgccgtgttatgaatgtttgtccctcacatagtattccagaacactgctgctcgggtctacatgtatgtccgtcacataggattccagtacactgttgctgggttctgagtgtttctccctcacatagaattccagaacactgtgacgagggtctgaatgtttgtccrtaacataggattccagaacactcccactgttgtatcaatgtttatagctcacataggattctggaacactgctgctggggtctgaatgtttgtccctcgcaaagaattcccgtacactgctaagattgtatgaatgtttgtctcccacataggattccagaacactgctacgagtgtctgaaagtttttccctcacataggat

SEQ ID NO: 210213 - DNA, 404 bp, Homo sapiens
atgtttgtctcccacataggattccagaacactgctacgagtgtctgaaagtttttccctcacataggattccaaaacactyctgctatgttctgagtgtccctcacataggactccagcataatcctgctgtggcctgaatgattgaccctcacatagggttccaaaacactgctgttgggttctgagtgtttgtctctcacataggattccagaacactactaccagggtctgaatgtttgttcctcacacagtattccagaaaactgcttctggggacttaatgtttgtccgtcacataggattccagaacactgatatgaggctctgaatgtttgttcctcaccggggattccagaacactgctatgagggtctgaatgtttgtcccacacagagaattc

SEQ ID NO: 210214 - DNA, 413 bp, Homo sapiens
agaattcccgtacactgctaagattgtatgaatgtttgtctcccacataggattccagaacactgctacgagtgtctgaaagtttttccctcacataggattccaaaacactcctgctatgttctgagtgtccctcacataggactccagcataatcctgctgtggcctgaatgattgaccctcacatagggttccaaaacactgctgttgggttctgagtgtttgtctctcacataggattccagaacactactaccagggtctgaatgtttgttcctcacacagtattccagaaaactgcttctggggacttaatgtttgtccgtcacataggattccagaacactgatatgaggctctgaatgtttgttcctcacyggggattccagaacactgctatgagggtctgaat

SEQ ID NO: 210215 - DNA, 264 bp, Homo sapiens
gaatgtttgttcctcacataggattccagaacgctgctggggtctgaatatttgtccctcacataggattccagaacatggctaagattatctgaatgtttgtccctcacatgtgattcgagaacaaagctacgagtgtctgaatgttttttcctcacgtaggattcaagagcactgctgctggggtctaaaggttcgtccctcacataggattccagaacactgctacsagggtctgaatgttttttcctcacagaggattcc

SEQ ID NO: 210216 - DNA, 555 bp, Homo sapiens
gtctgaatgtttgtcaataacatactatttcagaacactcccgctgttgtttgaatgtttttccctcacataggattccagaacactgctactggggtctgaatgtttttccctagcataggattccagaacactgctacgattgtctgaatgtttgtccctcacttaggattccagaacactgctacgagtgcctgaatgtttctccatcacatagcattccaaaacaatcctgctgtgttctcagtgtttgtccctcacatatrgttccagaacacggctgctgggttctgagtgtttgtccctttataggattctagaacactgctccgagggtgtgaatgtttgtccctcacacaggattccagaacactgctgctggggtctaaatgtttgtctgtcatataggattccagaacactgctacgagggtctgaatgtttcttcctcacagaggattccagaacatgcctgctgtggtctgaatgtttgtccctcacataggtttccagaacactgctatgagggtctgaatgtttgtccatcacacggaat

SEQ ID NO: 210217 - DNA, 555 bp, Homo sapiens
gtctgaatgtttgtcaataacatactatttcagaacactcccgctgttgtttgaatgtttttccctcacataggattccagaacactgctactggggtctgaatgtttttccctagcataggattccagaacactgctacgattgtctgaatgtttgtccctcacttaggattccagaacactgctacgagtgcctgaatgtttctccatcacatagcattccaaaacaatcctgctgtgttctcagtgtttgtccctcacatatggttccagaacacggctgctgggttctgagtgtttgtccctttataggattctagaacactgctccgagggtgtgaatgtttgtccctcacacaggattccagaacactgctgctggggtctaaatgtttgtctgtcatataggattccagaacactgctacgagggtctgaatgkttcttcctcacagaggattccagaacatgcctgctgtggtctgaatgtttgtccctcacataggtttccagaacactgctatgagggtctgaatgtttgtccatcacacggaat

SEQ ID NO: 210218 - DNA, 556 bp, Homo sapiens
atacagaacccagcagcagtgatctggaatcctatgtgacggccatacatgtagaccccagcagcagtgttctggaatcctgtgtgagggacaaacattcagaccctagcagcagtgttttggaatcctatgtgtgtgacaaatattcagacccttgtagcagtgttccggaatcttatgtgagggacagacactgagaatctagcagcagtgttctgcaaccctatgtgaggkacagacattcagactacagcaggagtgttctggaatcctatgtgagggacaatcactcagacaatcgtagcagtgttggggaatcctaagtgagggacgaaaattcagaccatcgtatcactgttctggatccgaagtgagggataaatattcagaccacagcagagtgttctggaatccacagtgagggacaaactttcagaccttctttgcagtgttctggaatcctacagagtgacaaacattcagacaatcgtaacagtgttctggaatcctgtgtgaaggaaaaaccttcagactcaagcagcagtgttctggaatt

SEQ ID NO: 210219 - DNA, 556 bp, Homo sapiens
atacagaacccagcagcagtgatctggaatcctatgtgacggccatacatgtagaccccagcagcagtgttctggaatcctgtgtgagggacaaacattcagaccctagcagcagtgttttggaatcctatgtgtgtgacaaatattcagacccttgtagcagtgttccggaatcttatgtgagggacagacactgagaatctagcagcagtgttctgcaaccctatgtgaggtacagacattcagacyacagcaggagtgttctggaatcctatgtgagggacaatcactcagacaatcgtagcagtgttggggaatcctaagtgagggacgaaaattcagaccatcgtatcactgttctggatccgaagtgagggataaatattcagaccacagcagagtgttctggaatccacagtgagggacaaactttcagaccttctttgcagtgttctggaatcctacagagtgacaaacattcagacaatcgtaacagtgttctggaatcctgtgtgaaggaaaaaccttcagactcaagcagcagtgttctggaatt

SEQ ID NO: 210220 - DNA, 269 bp, Homo sapiens
gaattctatgtgagaaacaaacattcaaacaacagcgggagtcttctgcaatcctatgttacggacaaacattcagaccctcgtckcagttttctggagttctatgtgagggaggaagactcagaatcctgcagcattgttctggaatcccatgtgacagacatacatgtagagccctgcagccatcttctggaatcctacgtgagggacaaacattcagaacccagcaacagtgttctggagtcccatgtgagggacaatcattcaga

SEQ ID NO: 210221 - DNA, 269 bp, Homo sapiens
gaattctatgtgagaaacaaacattcaaacaacagcgggagtcttctgcaatcctatgttacggacaaacattcagaccctcgtctcagtyttctggagttctatgtgagggaggaagactcagaatcctgcagcattgttctggaatcccatgtgacagacatacatgtagagccctgcagccatcttctggaatcctacgtgagggacaaacattcagaacccagcaacagtgttctggagtcccatgtgagggacaatcattcaga

SEQ ID NO: 210222 - DNA, 360 bp, Homo sapiens
tatggagaaacattcaggctctcgtcgcagtgttctggaattctatgtgagggagatacattcagaacccagcagcagtgatctggaatcctatgtgacagccatacatgtagaccccagyagcagtgttctggaatcctgtgtgagggacaaacactgagaccccagcagcagtgttttggaatcctatgtgtgtgacaaatattcagacccttgtagcagtgttccagaatcctatgtgagggacaaacactgacaatctagaaacagtgttctgcaaccctataagagggacagacattcagaccacaacaggagtgttctggaatcctatgtgagggacaaacattcagaccctcg

SEQ ID NO: 210223 - DNA, 360 bp, Homo sapiens
tatggagaaacattcaggctctcgtcgcagtgttctggaattctatgtgagggagatacattcagaacccagcagcagtgatctggaatcctatgtgacagccatacatgtagaccccagtagcagtgttctggaatcctgtgtgagggacaaacactgagaccccagcagcagtgttttggaatcctatgtgtrtgacaaatattcagacccttgtagcagtgttccagaatcctatgtgagggacaaacactgacaatctagaaacagtgttctgcaaccctataagagggacagacattcagaccacaacaggagtgttctggaatcctatgtgagggacaaacattcagaccctcg

SEQ ID NO: 210224 - DNA, 360 bp, Homo sapiens
tatggagaaacattcaggctctcgtcgcagtgttctggaattctatgtgagggagatacattcagaacccagcagcagtgatctggaatcctatgtgacagccatacatgtagaccccagtagcagtgttctggaatcctgtgtgagggacaaacactgagaccccagcagcagtgttttggaatcctatgtgtgtgacaaatattcagacccttgtagcagtgttccagaatcctatgtgagggacaaacactgacaatctagaaacagtgttctgcaaccctrtaagagggacagacattcagaccacaacaggagtgttctggaatcctatgtgagggacaaacattcagaccctcg

SEQ ID NO: 210225 - DNA, 403 bp, Homo sapiens
gtagcagtgttctggaatcctatatgagggacacacattcagatcccagcagcagtgttctggaatcctatktgagggacaatcattcagatcctcatagcagtgttctggattctgggtcagggacaaacgttcataccctcgtgtcattattctggaatcctgtgtgaggaaaaaacattcagacaacagcaggattgttgtggaatgcccggtgaggaacaaacattcagaccctcgtagcagtgttctggaatcctatgtgactgacaaacatttagacaacagcagcagtgttctggaatcctatgtgagggacaatcattcaaacaacagcgggagtgttctggaatcctatgtttaggaaaatcattcagaccctcgtcgcagtgtactggaattc

SEQ ID NO: 210226 - DNA, 424 bp, Homo sapiens
ttaagaggtaatatgtatcttcacacatggctggtagaaatgtaaaatggtgcagcatctacaggaaacagtttagggttcctcaaaaagttaaagagttaccatatgacccagcaattttactcctaagtatgtatwcccaagggaaatgaaaacatacacccacaaaaatacttacataagaatattcacactagcattagtcacaatagtcaaaaaggggaaacaacctaaatgttcatcaactgatgaatggatgaacaaaatgttacatccatacaatggaatactatgcagtcataaaaaggaacaagtgctacaacaatgatggacctcaagaatgttataagtgaaagaagccagatacaaaaggccacatgttgcatgatttcttagaaaatattcagaataggcaatttcacat

SEQ ID NO: 210227 - DNA, 447 bp, Homo sapiens
gtagcagtgttctgaaatcctttgtgagggacattcagacaacagcagtagtgttctggaatcctctgtgaggaacaaacgtttagacagtcgtagcagtgttctggaatcctacgtgacagacaaacttttagaccccagcagcagtgttctggaatcctatgcgagggacaaacattcagacaatggtaamagtgttctgaaatcctatgtgagggacaaacactcaaaacccagcagcagtattcttgaatgctatgtgagggacaaactttcagaccacagcaggagtgttctggaatcctatgtgagggacaatcattcagaccctcgtagcagtgttctggaattctgtgtgagagacaaacattcagaccctcgtagcggtgttctggaatccaatgtgacggacaaaaattcagaccaccacaggagtgttctggaatc

SEQ ID NO: 210228 - DNA, 447 bp, Homo sapiens
gtagcagtgttctgaaatcctttgtgagggacattcagacaacagcagtagtgttctggaatcctctgtgaggaacaaacgtttagacagtcgtagcagtgttctggaatcctacgtgacagacaaacttttagaccccagcagcagtgttctggaatcctatgcgagggacaaacattcagacaatggtaaaagtgttctgraatcctatgtgagggacaaacactcaaaacccagcagcagtattcttgaatgctatgtgagggacaaactttcagaccacagcaggagtgttctggaatcctatgtgagggacaatcattcagaccctcgtagcagtgttctggaattctgtgtgagagacaaacattcagaccctcgtagcggtgttctggaatccaatgtgacggacaaaaattcagaccaccacaggagtgttctggaatc

SEQ ID NO: 210229 - DNA, 424 bp, Homo sapiens
ttaagaggtaatatgtatcttcacacatggctggtagaaatgtaaaatggtgcagcatctacaggaaacagtttagggttcctcaaaaagttaaagagttaccatatgacccagcaattttactcctaagtatgtattcccaagggaaatgaaaacatacacccacaaaaatacttacataagaatattcacactagcattagtcacaatagtcaaaaaggggaaacaacctaaatgttcatcaactgatgaatggatgaacaaaatgtyacatccatacaatggaatactatgcagtcataaaaaggaacaagtgctacaacaatgatggacctcaagaatgttataagtgaaagaagccagatacaaaaggccacatgttgcatgatttcttagaaaatattcagaataggcaatttcacat

SEQ ID NO: 210230 - DNA, 371 bp, Homo sapiens
gttctggaattctctttgagggacaaatattcagacactcgtagtagtattctggaatcctgtgtgagggacaaacattcagacgacagcaggagtgttctggaatacctcgtgagaaacgaacatgcagaccctcgtgttctggaatcctttgtgacagaaaaacatttttaccccagcggtagtgttctggaatcctacgtgagggacaatcattcagaccctcgtagcagtgttctggaaccctatgtgagggacaaawactcagaccccagcagtagtgttttcgaatcatatgtgtgggacaaacattgaaacaacagcactagtgtcctggaatcatatgtttcatgcaaacattcagaccctcg

SEQ ID NO: 210231 - DNA, 424 bp, Homo sapiens
ttaagaggtaatatgtatcttcacacatggctggtagaaatgtaaaatggtgcagcatctacaggaaacagtttagggttcctcaaaaagttaaagagttaccatatgacccagcaattttactcctaagtatgtattcccaagggaaatgaaaacatacacccacaaaaatacttacataagaatattcacactagcattagtcacaatagtcaaaaaggggaaacaacctaaatgttcatcaactgatgaatggatgaacaaaatgttacatccatacaatggaatactatgcagycataaaaaggaacaagtgctacaacaatgatggacctcaagaatgttataagtgaaagaagccagatacaaaaggccacatgttgcatgatttcttagaaaatattcagaataggcaatttcacat

SEQ ID NO: 210232 - DNA, 424 bp, Homo sapiens
ttaagaggtaatatgtatcttcacacatggctggtagaaatgtaaaatggtgcagcatctacaggaaacagtttagggttcctcaaaaagttaaagagttaccatatgacccagcaattttactcctaagtatgtattcccaagggaaatgaaaacatacacccacaaaaatacttacataagaatattcacactagcattagtcacaatagtcaaaaaggggaaacaacctaaatgttcatcaactgatgaatggatgaacaaaatgttacatccatacaatggaatactatgcagtcataaaaaggaacaagtgctacaacaatgatggacctcaagaatgttataagtgaaagaagccagatacaaaaggccacatgttgcatgatttcttagraaatattcagaataggcaatttcacat

SEQ ID NO: 210233 - DNA, 571 bp, Homo sapiens
cccagcagcagtgttctggaatcctatgtgattgacaaatgttcagacccccgcagcagtgttctggaatcctatgtgatttgcaatcattcagaccctcatagcagtgctctggaattctgtgtgagggacaagcattcagaccctcttagaagttttctggaatcctatgtgagggacaaacattcagacccctgcagcagtgttctggcatcgatgtaagggacaatcattcagacccacacagcactgttctggaattctgcttcagggccaacattcagaccacaaaaggagtgttctggaatcacctgtgaggaacaaactttcagaacccygtagcagtgttctggaatcctatgtgtcagacaaacatttaaaccccagcaacagtgttctggaatcttatgtgagggagaaatattcagacaatcgtagcagtgttctggaatcctgtgtaagggacaaactttctgatccaagcagcagtgttctggaatcctatgtgagggacaaacattcaaacaacagcgggagtgttctggaatcctatgttacagacaaacattca

SEQ ID NO: 210234 - DNA, 571 bp, Homo sapiens
cccagcagcagtgttctggaatcctatgtgattgacaaatgttcagacccccgcagcagtgttctggaatcctatgtgatttgcaatcattcagaccctcatagcagtgctctggaattctgtgtgagggacaagcattcagaccctcttagaagttttctggaatcctatgtgagggacaaacattcagacccctgcagcagtgttctggcatcgatgtaagggacaatcattcagacccacacagcactgttctggaattctgcttcagggccaacattcagaccacaaaaggagtgttctggaatcacctgtgaggaacaaactttcagaaccccgtagcagtkttctggaatcctatgtgtcagacaaacatttaaaccccagcaacagtgttctggaatcttatgtgagggagaaatattcagacaatcgtagcagtgttctggaatcctgtgtaagggacaaactttctgatccaagcagcagtgttctggaatcctatgtgagggacaaacattcaaacaacagcgggagtgttctggaatcctatgttacagacaaacattca

SEQ ID NO: 210235 - DNA, 571 bp, Homo sapiens
cccagcagcagtgttctggaatcctatgtgattgacaaatgttcagacccccgcagcagtgttctggaatcctatgtgatttgcaatcattcagaccctcatagcagtgctctggaattctgtgtgagggacaagcattcagaccctcttagaagttttctggaatcctatgtgagggacaaacattcagacccctgcagcagtgttctggcatcgatgtaagggacaatcattcagacccacacagcactgttctggaattctgcttcagggccaacattcagaccacaaaaggagtgttctggaatcacctgtgaggaacaaactttcagaaccccgtagcagtgttctggaatcctatgtgtcagacaaacatttaaaccccagcarcagtgttctggaatcttatgtgagggagaaatattcagacaatcgtagcagtgttctggaatcctgtgtaagggacaaactttctgatccaagcagcagtgttctggaatcctatgtgagggacaaacattcaaacaacagcgggagtgttctggaatcctatgttacagacaaacattca

SEQ ID NO: 210236 - DNA, 571 bp, Homo sapiens
cccagcagcagtgttctggaatcctatgtgattgacaaatgttcagacccccgcagcagtgttctggaatcctatgtgatttgcaatcattcagaccctcatagcagtgctctggaattctgtgtgagggacaagcattcagaccctcttagaagttttctggaatcctatgtgagggacaaacattcagacccctgcagcagtgttctggcatcgatgtaagggacaatcattcagacccacacagcactgttctggaattctgcttcagggccaacattcagaccacaaaaggagtgttctggaatcacctgtgaggaacaaactttcagaaccccgtagcagtgttctggaatcctatgtgtcagacaaacatttaaaccccagcaacagtgttctggaatcttatgtgagggagaaatattcagacaatcgtagcagtgttctggaatcctgtgtragggacaaactttctgatccaagcagcagtgttctggaatcctatgtgagggacaaacattcaaacaacagcgggagtgttctggaatcctatgttacagacaaacattca

SEQ ID NO: 210237 - DNA, 547 bp, Homo sapiens
gaattctatgtgaggaacaaactctcagaatactgcaggagtgttttggaatcctatgtgagggacaaacattcagaccctcgtagcagtgttctggaatcccatgtgattgacattcagaccacagcaggagtgttctggaatcccctgtgaggacccaacattcagayctctgtagcagtgttctggaatcctaagtgagagacaaacatttagaccccagcagcaatgttctggaatcctatgtgagggacaaacattcagaccctcgaagcagtgttctggaatccaatgtgtgggataaacattcagacaatagtagcagtgttctgtaatccaatgtgagggacacacattcaggccctcgtcggaatgctttgaattctatgtgagggacaaacactgagacaatcttagtactattcaggaatcctctgtgaggtacaaatttttagaccacagcagaagtgttctgcaatcctatttgagggacaaacattcaaacaacagagggaatcttctggaatcctatgttacggaccaacat

SEQ ID NO: 210238 - DNA, 547 bp, Homo sapiens
gaattctatgtgaggaacaaactctcagaatactgcaggagtgttttggaatcctatgtgagggacaaacattcagaccctcgtagcagtgttctggaatcccatgtgattgacattcagaccacagcaggagtgttctggaatcccctgtgaggacccaacattcagacctctgtagcagtgttctggaatcctaagtgagagacaaacatttagaccccagcagcaatgttctggaatcctatgtgagggacaaacattcagaccctcgaagcagtgttctggaatccaatgtgtgggataaacattcagacaatagtagcagtgttctgtaatccaatgtgagggacacacattcaggccctcgtcggaatgctttgaatyctatgtgagggacaaacactgagacaatcttagtactattcaggaatcctctgtgaggtacaaatttttagaccacagcagaagtgttctgcaatcctatttgagggacaaacattcaaacaacagagggaatcttctggaatcctatgttacggaccaacat

SEQ ID NO: 210239 - DNA, 295 bp, Homo sapiens
ttagttgtagattactgatagtaatgcaaatattcttatctatagacaggcaaatgattgattttggtggaactataattaatttccctttttccaccttccatcaagaagtcagttttgaacytatcaagcaaatttatttcagtgttccttagtgcctagatatgtgtggcacttaattttccataaaactcagtataacatcttactggctccctcattaaataaatgagttaaacaaaaatcttagacaagtgttcattttatatttgcaagtcataatttacccaatttt

SEQ ID NO: 210240 - DNA, 295 bp, Homo sapiens
ttagttgtagattactgatagtaatgcaaatattcttatctatagacaggcaaatgattgattttggtggaactataattaatttccctttttccaccttccatcaagaagtcagttttgaacctatcaagcaaatttatttcagtgttccttagtgcctagatatgtgtggcwcttaattttccataaaactcagtataacatcttactggctccctcattaaataaatgagttaaacaaaaatcttagacaagtgttcattttatatttgcaagtcataatttacccaatttt

SEQ ID NO: 210241 - DNA, 295 bp, Homo sapiens
ttagttgtagattactgatagtaatgcaaatattcttatctatagacaggcaaatgattgattttggtggaactataattaatttccctttttccaccttccatcaagaagtcagttttgaacctatcaagcaaatttatttcagtgttccttagtgcctagatatgtgtggcacttaattttccataaaactyagtataacatcttactggctccctcattaaataaatgagttaaacaaaaatcttagacaagtgttcattttatatttgcaagtcataatttacccaatttt

SEQ ID NO: 210242 - DNA, 295 bp, Homo sapiens
ttagttgtagattactgatagtaatgcaaatattcttatctatagacaggcaaatgattgattttggtggaactataattaatttccctttttccaccttccatcaagaagtcagttttgaacctatcaagcaaatttatttcagtgttccttagtgcctagatatgtgtggcacttaattttccataaaactcagtataacatcttactggctccctcattaaataaatgagttaaacaaaaatcttagacaagtgttcattttatatttgyaagtcataatttacccaatttt

SEQ ID NO: 210243 - DNA, 593 bp, Homo sapiens
acacctggctccctatgatgacattcaagaattccttaggattctgggaatcttagaatgaaagtcactgctctgtaggaatgaatgawtaagaaagggaaggaagaagaaagagcatgtgtactaaatgtaaattaatcatcaaggaatgtttattttgttaataaatttgtcaactttagtttgccaaatctaacaagataccaacatggcattcatggtgatcacacctctagtcaaattttattttagttcattgactataatattaatatcctgaaatactcaaaaattctgtcttaattctgtgaataattcacttattaatcactctatacactacttaatgaatggaatggtgcttggaataaagataattacagggctaaaagggttttctctagaggcagttataggattttgttgtctgactggaataaaacaaaattaatcaatattttctgcaaccagtggcttttgacttagtcatctattaatatctatcaatccctataacctcagtcctatttcctccattcttctttttttatcataaaaacttgtccatttttttcctgttagatctatatgtt

SEQ ID NO: 210244 - DNA, 593 bp, Homo sapiens
acacctggctccctatgatgacattcaagaattccttaggattctgggaatcttagaatgaaagtcactgctctgtaggaatgaatgaataagaaagggaaggaagaagaaagagcatgtgtactaaatgtaaattaatcatyaaggaatgtttattttgttaataaatttgtcaactttagtttgccaaatctaacaagataccaacatggcattcatggtgatcacacctctagtcaaattttattttagttcattgactataatattaatatcctgaaatactcaaaaattctgtcttaattctgtgaataattcacttattaatcactctatacactacttaatgaatggaatggtgcttggaataaagataattacagggctaaaagggttttctctagaggcagttataggattttgttgtctgactggaataaaacaaaattaatcaatattttctgcaaccagtggcttttgacttagtcatctattaatatctatcaatccctataacctcagtcctatttcctccattcttctttttttatcataaaaacttgtccatttttttcctgttagatctatatgtt

SEQ ID NO: 210245 - DNA, 593 bp, Homo sapiens
acacctggctccctatgatgacattcaagaattccttaggattctgggaatcttagaatgaaagtcactgctctgtaggaatgaatgaataagaaagggaaggaagaagaaagagcatgtgtactaaatgtaaattaatcatcaaggaatgtttattttrttaataaatttgtcaactttagtttgccaaatctaacaagataccaacatggcattcatggtgatcacacctctagtcaaattttattttagttcattgactataatattaatatcctgaaatactcaaaaattctgtcttaattctgtgaataattcacttattaatcactctatacactacttaatgaatggaatggtgcttggaataaagataattacagggctaaaagggttttctctagaggcagttataggattttgttgtctgactggaataaaacaaaattaatcaatattttctgcaaccagtggcttttgacttagtcatctattaatatctatcaatccctataacctcagtcctatttcctccattcttctttttttatcataaaaacttgtccatttttttcctgttagatctatatgtt

SEQ ID NO: 210246 - DNA, 593 bp, Homo sapiens
acacctggctccctatgatgacattcaagaattccttaggattctgggaatcttagaatgaaagtcactgctctgtaggaatgaatgaataagaaagggaaggaagaagaaagagcatgtgtactaaatgtaaattaatcatcaaggaatgtttattttgttaataaatttgtcaactttagtttgccaaatctaacaagataccaacatggcattcatggtgatcacacctctagtcaaattttattttagttcattgactataatattaatatcctgaaatactcaaaaattctgtcttaattctgtgaataattcacttattaatcacyctatacactacttaatgaatggaatggtgcttggaataaagataattacagggctaaaagggttttctctagaggcagttataggattttgttgtctgactggaataaaacaaaattaatcaatattttctgcaaccagtggcttttgacttagtcatctattaatatctatcaatccctataacctcagtcctatttcctccattcttctttttttatcataaaaacttgtccatttttttcctgttagatctatatgtt

SEQ ID NO: 210247 - DNA, 366 bp, Homo sapiens
  misc_feature (1)...(366): n = A,T,C or G
gtttaaacatatggcacatcccccctggctcacttgctctcctgtcaccatggtagaatgtgccttgcttcccccttcaccttctgccatgattgtaagtttcntgaagcctcccagccatgcttcctgtacagcctgtggaactgtgagtcagttaaacctcttttctttataaattacccagtcttgggtagttctatatagcagtgtgagaacagattaatacatgagcatagtacccaatagttagtttgtcaaaccttgccttcctccttctcccctctagtagtcccrgtgtttattctttccatctttatgtccatgagtacccagtgtttagctcccacttataagtgagataatgtg

SEQ ID NO: 210248 - DNA, 366 bp, Homo sapiens
  misc_feature (1)...(366): n = A,T,C or G
gtttaaacatatggcacatcccccctggctcacttgctctcctgtcaccatggtagaatgtgccttgcttcccccttcaccttctgccatgattgtaagtttcntgaagcctcccagccatgcttcctgtacagcctgtggaactgtgagtcagttaaacctcttttctttataaattacccagtcttgggtagttctatatagcagtgtgagaacagattaatacatgagcatagtacccaatagttagtttgtcaaaccttgccttcctccttctcccctctagtagtcccggtgtttattctttccatctttatgtccatragtacccagtgtttagctcccacttataagtgagataatgtg

SEQ ID NO: 210249 - DNA, 366 bp, Homo sapiens
  misc_feature (1)...(366): n = A,T,C or G
gtttaaacatatggcacatcccccctggctcacttgctctcctgtcaccatggtagaatgtgccttgcttcccccttcaccttctgccatgattgtaagtttcntgaagcctcccagccatgcttcctgtacagcctgtggaactgtgagtcagttaaacctcttttctttataaattacccagtcttgggtagttctatatagcagtgtgagaacagattaatacatgagcatagtacccaatagttagtttgtcaaaccttgccttcctccttctcccctctagtagtcccggtgtttattctttccatctttatgtccatgrgtacccagtgtttagctcccacttataagtgagataatgtg

SEQ ID NO: 210250 - DNA, 529 bp, Homo sapiens
aatgtttgtccctcacttaggattccagaactctgctcttgggttctgagtttttgtccctcaagtacgattccagaacactgctatgtgggtctaaatatttgtctgtcacatagaattccacaacactcctgctgtagtctgaatgtttttccctcagataggattccagaaaactgttgctgggattaagtatttgtccctcacgtaygattccagaacaaggctacgtgggtctgcgtgtttgtacctcatataggatttgagaacactgctaagaggatctgaaagtttgtcccttaaataggattccagaacactgctgctgtggtctgaatgttgtcctcacttaggattccagaaccctcctgctgtggactgaatgtttgtccctcacttaggattccagaacagtgctacgagggtctgaatgtttgtcccacacttaggattccagaacactgatgatgtggtctgtatgtttatccatcacataggattccagaacaattctacgaggttctgaatt

SEQ ID NO: 210251 - DNA, 529 bp, Homo sapiens
aatgtttgtccctcacttaggattccagaactctgctcttgggttctgagtttttgtccctcaagtacgattccagaacactgctatgtgggtctaaatatttgtctgtcacatagaattccacaacactcctgctgtagtctgaatgtttttccctcagataggattccagaaaactgttgctgggattaagtatttgtccctcacgtacgattccagaacaaggctacgtgggtctgcgtgtttgtacctcatayaggatttgagaacactgctaagaggatctgaaagtttgtcccttaaataggattccagaacactgctgctgtggtctgaatgttgtcctcacttaggattccagaaccctcctgctgtggactgaatgtttgtccctcacttaggattccagaacagtgctacgagggtctgaatgtttgtcccacacttaggattccagaacactgatgatgtggtctgtatgtttatccatcacataggattccagaacaattctacgaggttctgaatt

SEQ ID NO: 210252 - DNA, 622 bp, Homo sapiens
atgtacaaaagtatttcttgcatcttaaattctagaacttctccatattgtttctcaattatattcctctttctcactgtcttttccctctctactataaacatttcacgaacgttaggatgatgttttgtgacatttggattttgggactgcggctcacaggatattgtgcttgtagaatgtggacctatacaaattccagctggtgatagtacacgttgttcttttgcagacaggcctcttcttaggcatgatgcctaagtttaatttccatgtgtaaagtcatacttaaagtatgtaaactgaaacagatgttagtactctgagaaggcatttggtgcatgaagaaasagttccctagcttctttttccactcccactattttggaagcccctttccatagaaaagggcctctggagaatcgtctagtgtctttgaccccattagtatgtagcaattcattcctgggaaactgttgcttgaagtaaatgttagctagtacttgaaactcttttcttaaaaacaatatgattttctttcctataaatgccaagttttgtttaactgttttttaattagaaagctgttcaccctaatcatgtgctttttaaaaaaaatcaa

SEQ ID NO: 210253 - DNA, 455 bp, Homo sapiens
tttcctttgctgtggagtatccttgtagcttgatgtgatcccatttgtccatttttgcttttgttgcctgtgcttttgaggtcttactcaagaaatcgttrcataaaccaatgttctgtattttaaggaactttcaaaatcatgttgaataatattgagtactaatcatttccctattctttatcattataatggaaatgtctaaattcatattaaacatccatcatttaggataatatttgctatttatttctgataatcttttttaagcagcattctagtattcatattttctttagactttttattaatagcattttttactcaaggcttttcagtgtctattcatatattgttttctcctttaattgataaatataatgaactaagttcacagatttcttatattgaactaacctcaccaatcaggcaagagaaagaaagaaaaggcatcc

SEQ ID NO: 210254 - DNA, 597 bp, Homo sapiens
cagtgatttcagcctggttaagaaccattgctgggaacctagtgcagctgtttggaggaaataagtcactctggttttttgagttgccagagttcttctgctagttctttctcatctgtgtgggttgatgttcttttatctgtggtataatttgagtagtcagttgacttcgtttctggatgttttcagagggactagggtttgtsctgggactttatttgtggcttaattcttgtccttggtttcacacggggtatattttaggcttttgctcagccatgtggctcctctgtatttccttgcatttgcaaccatgctcaacctcagtgctctgagagtctgggctcctctcccactggagtgctggctgcagatctcggcttggcactcccaggctgtgcactgcagccccgaggcaagctcaagttttatgttccctccttagcttgtaggcaacaggggaaggaaacttggcagtggctgtgacaaaggacctttcacttgtctctttgagctccaccccagagatatgcagagctgctaccagtcaaagcaatcaatgcagggtggtgtggctgcattgtgggtccaaactgg

SEQ ID NO: 210255 - DNA, 601 bp, Homo sapiens
atccaatggcttgtattatgttgagctaagcctcctgcagatcactataaatgctgaacatagtacgtaaaacaaccatttaaagacatttgagagcaatcaactcaggaggactcgagagatgacagtacttgagaaaagagaaacatacaggtaarttacacattaacctcacttatactctgaaggaaatttctgcattgtggggtagaagaatataacccaagaggagggaagtgatctcaatagctcaagagacagaagttgaagttttgtacagccaaagtgactgagacttgaggaacagaattcaggaatggtgaaaacaacagagaaagacactaaaattcttaatagacattatccaggtcttttgccatttcctaagatgtatgtgtgcatggaaaaacttcaaaaaaatgcagtagggaataactataaggatgttaagctgatgagagagtttacctgtgggctgttagtacaaaagattatagttcaaatcctacctttgcttgtattatgagccttctgcctactacctatatttcaattaagacatcataaatgctacaccttaggagtaagggctaaagcctaa

SEQ ID NO: 210256 - DNA, 538 bp, Homo sapiens
agagcagaactgagtccagcattttcccttgaaataaaagtttatccttccaaaagcacaggcaaccaaagtgaaaatagacaaatgggattgcaccaaactaaaaagtttctgcacagcaaagccagcaattaagtgaagagacaacccatggactgggagaaaatatttgcaaaccrtatgtctgataaggggctaatatccaaaatatataagaaactcaattgcaagaaaacaaataacttggttttaaaatgggcaaaagatctgaacagacaattctcaaagaaagatacaagtggccaacagatatatgaaaaaaatgttcagacatatctaattatcagggagatgcaaattaaaaccacaatgagatatagccttacatctgttaaaatgactattatcaaaaagctgaatgattacaagggttggtaagtatgtgaagaaaagggaacccttgtatactgttgttgggaatggaaattagtacagccattttggaaaatagtgtggaggtgcctcaagaaaactaaaa

SEQ ID NO: 210257 - DNA, 516 bp, Homo sapiens
aaatccagtcccaaaatttatggatgggtttctgggggcccatagataccaggttagcatcctcactctctaaaataaaaaccacaaattttcccatcccataggcagcctagtaattaaggtgaccatgtgtcacagtttagkcctgttgtccaagtgtgtctgtttaaaaggtttcctttaactctcaaatgtccccatttggatgataaaatatatggctgaaggccacactcatgggtgctccagagtgatgcataaattaaacttgcagcctccctcactgatcctcactcagctccagaaagccccagagaccagagattactcttcagcacaaactctcctctgagagttcctcattccttcctttggatgccctctgaagggagcccttgatgtgcatttgaaattgctccaggggtgggaatggggattaggaggaatttgagggagagggccttctagagcctgggcgtgggcaagctggaggagccagccatgaagcccaagcat

SEQ ID NO: 210258 - DNA, 487 bp, Homo sapiens
catttcagaggcatctgccatgtggcccagcagagcccatcctgaggaaatgactggtagagtcaggagctggcttcaaagctgccctcacttcacaccttccagcagcccaggtgccgccatcacggggctcccactctcaactccgcagcctcagccccctcaatgctgaggagcagagctggtctcctgccctgacagctgccaggcacatcttgttccctcaggttgcacaactgggataaatgacccgggatgaagaaaccactggcatccaggaacttgtcttagaccgttttgtaggggaaatgacctgcagggactttccccagggaccacatccagcttttcttcsctcccaagaaaccagcagggaaggctcagtataaatagcagccaccgctccctggcaggcagggacccgcagctcagctacagcacagatcaggtgaggagcacaccaaggagtgatttttaaaacttactc

SEQ ID NO: 210259 - DNA, 492 bp, Homo sapiens
ttcaacttcagtgaagttgctgctgaacagaggcacacagagccaggggagtgagtggggagaagcatggaagcagaagaaggtactgtgccttctcaaagtctgtgaaaagagacacctgagatcattgggaaacaaaaaatctacaaatcatggtaagacaattggtcagtacctttagcaaaagaaaaccctcccctcctgccaaatgacaaattaaattatcagtggatgagactyaagtacatgtgcacataaatgcacatacacaagtacacgcacatgcacacacacacaccacacgcgcacacacacacacataggcaaagaaataaactgtatacatgccaaaaatagctgaatatttatttaatcactgctgttgaagagcactgtgagtttgtcatgtaagaaatcccatgggaaatgataacagacctgaccacagaaaaatggtaaacttctgaacattaagaagagcacagactaaaa

SEQ ID NO: 210260 - DNA, 489 bp, Homo sapiens
aacttcagtgaagttgctgctgaacagaggcacacagagccaggggagtgagtggggagaagcatggaagcagaagaaggtactgtgccttctcaaagtctgtgaaaagagacacctgagatcattgggaaacaaaaaatctacaaatcatggtaagacaattggtcagtacctttagcaaaagaaaaccctcccctcctgccaaatgacaaattaaattatcagtggatgagactcaagtacatgtgcacataaatgcacatacacaagtacacgcacatgcacacacacacaccacacgygcacacacacacacataggcaaagaaataaactgtatacatgccaaaaatagctgaatatttatttaatcactgctgttgaagagcactgtgagtttgtcatgtaagaaatcccatgggaaatgataacagacctgaccacagaaaaatggtaaacttctgaacattaagaagagcacagactaaaa

SEQ ID NO: 210261 - DNA, 397 bp, Homo sapiens
agcttgccatttgattctaacaggttttctatgtaaaagatggtgtcatcttcaaacaatgatagtttcatttcttctctttcacctcttaccttccttgtgtttctttagcattgggcaggtccttcagggatatgtgaaacagtggcagtaacaaccagacatcctggcctctttgtttttttttccatgatgaagtctcactccgttgcccaggctggagtgcagtggcacgatctcggctcactgcagcctccacctcccggsttcaagtgattctcctgcctcaaccccccaagtacttgggattacaggtacctgccactacacccgactaatttttgtacttttagtagagacagggtttcaccatgttggccaggctggttgagaattc

SEQ ID NO: 210262 - DNA, 588 bp, Homo sapiens
taaaaccacaatcatataccatttcacacctattaaaacagctaaagattttttaaacgacaatcctgaatattggtatatcggtgagcaatgaactcttacatattgctagtgagaatgcaaactgctacaggtactttgaaaaacttcggcagtttcttataaaattaaatatgctattaccataagactcagtaactctaggaattcactcaagagctatgaaaaaatctgtccacacaaaatatgtgaatatttatggcagctgtatttgtaattacccgaaactatagacactccaaaggtccatctactggagaacaaacagattgtattatatcccatacaaatgacatatttctcagcaatgaaaactaatgaactatggatacatgcaacaacatggctaaatcttaaaagcattatgttaaatgaaaaaagccagacacaaatagcttcatcgtatttggttccatytatatgtcatttgcggaaagaaaaaaaaatcatactatcagaaattagatctggttgccagaggctaagagtagtgaaaagggtttaattgtaagagggcataatggaaat

SEQ ID NO: 210263 - DNA, 439 bp, Homo sapiens
cattaggtaaagctaattgaatcgacaggattgccttggtcaaaggtattgcagactgatgacaatcagatctacttccagtgcaaactaaaagttaatcttctataaatagtcactggtaggcttatgcccctaataatagaacctcatgtatctcctgctcctaaactcccatacgactaaatgctgcaagctttaatgcattatgccaaagtgtattgtcacaaggtaaagaaagcttttccatgatccaccaactgaggaccatcatgatctagaacgcagagattgggtcttctggaaacgacctcagagaaagatcaaccttgccactcactctgcagcaraactgcagccaactgtttaaaccatgtttaaataaggcaaagattgagctgcaaccaatctggctatttctatacctcacttctgttttctt

SEQ ID NO: 210264 - DNA, 595 bp, Homo sapiens
atggaggggaggacgactttggtttccttccctgtgctctgcagaaatctcatgagtggcttggaggcagtggtggaggtggtgatgggaatgcatgagatgctggcatgaactgtagagtcctcaggagtatatcctgctctttattccttatggtttccgcagaggctggcacaawgccagccacatagcagatgcttaatacatattttacattaaagaaataaatgaaaattccatggtgtcctggtcagaatctttgtttataaagaataaaaactccatcaaattaacttgggtaaaagtgagtttagtgtgcagataaaggtgaattgcctataacccaactgtacaatgtagagcagggtcttgtgagaacagaaaggatgtttatatgtttccctctgcctggagccatgtgcatctcttaccttggctcccttctccatgtctaatcaacttttcctctttacaggttagcttcctctgccaagcttttagtttattttttcctaaaattcttcttgctttatagaaccttgttgaccacccaacatgcctactgctctatgaccaaaactaaccggctctctca

SEQ ID NO: 210265 - DNA, 528 bp, Homo sapiens
atccttttagacccagtgaaaatgttataccctctctatccccaggaaccaggtagaatgaacaacttcttcccgtgtcttctatggcattttgtgctcacctctgttaacctacttagcacttacyatcacgtgttttagttgcaggtgtttccttagcactttaccgtcatgtgttgagtttcagactgtgcctggcactatgcctggcacaggctaaccctcaaatcttccctaaacttagttcaattgaatcatgcggcactgtagttctttagtgcttactattcattcattcattcgttcattcctttttggacactcactatgtatcaggcattaaacaggccatatgatctctcatggggcagaagttctattgggggagatagataataaagccgattctgaggtgagaaatggactccataggcttcctgaccatcaactgcctcatctctgcttgaactctctctgtgatgagaaactcactttctgaagaaatctaatccaatgctggtagactca

SEQ ID NO: 210266 - DNA, 528 bp, Homo sapiens
atccttttagacccagtgaaaatgttataccctctctatccccaggaaccaggtagaatgaacaacttcttcccgtgtcttctatggcattttgtgctcacctctgttaacctacttagcacttaccrtcacgtgttttagttgcaggtgtttccttagcactttaccgtcatgtgttgagtttcagactgtgcctggcactatgcctggcacaggctaaccctcaaatcttccctaaacttagttcaattgaatcatgcggcactgtagttctttagtgcttactattcattcattcattcgttcattcctttttggacactcactatgtatcaggcattaaacaggccatatgatctctcatggggcagaagttctattgggggagatagataataaagccgattctgaggtgagaaatggactccataggcttcctgaccatcaactgcctcatctctgcttgaactctctctgtgatgagaaactcactttctgaagaaatctaatccaatgctggtagactca

SEQ ID NO: 210267 - DNA, 570 bp, Homo sapiens
ggcagccagtttccccaggacattaaacattcagagcttcctcagccttctggatcattttctatctctccaatatttttagacaggtttcttgcaggctgcatattttataacaattgtacaggaaaatgatcctagggacagtagccagagattcaaagtttagaaaaatgctccttccttatcagttggcaggtgacaaatcacagtgagattacttttggcaaggaggatattttcccataacaatctagaagacagagtgcagttgggagcccagtgttacgagtagttgtttggagatttttcttttaatgccatattctcctggtttaccagacgctacttttattcttcaagtctgaaaaattgccactgattttgagagatctgcctgtggcagaaatagtagttgtagtgatatctcycagagtagatgtcctgcttctgagatgcaacattatccaccttctattaatagtttaaacctactttgctttaagacctagcatttggaaggccttaggtctcaagttttgttcttccgtgtctatattttaaatgcagctt

SEQ ID NO: 210268 - DNA, 581 bp, Homo sapiens
gatcaccacttgaggtcagcagttccagaccagccaggccaacatagtgaaatctcgtctctaataaaaatagaaaaaattagctgggtatggtgttgcacacctgtagtcccagctacttggtaactgaggcaggagaattgcttgaacccaggaggcagatgttgcattgagccaagattgcaccactgtactccagcctgggtgactgtgagactccatctcaaaaaacaaacaaaacaaaaatcttcaccaatatctaaaaggaaatctggtacagaattaggagttagaatattttgtttcttgaggggtaaaggcattaaacttctcatgtatctaaatataggctggtcattgttgtagggaatatgtattttttacaatcttttatggtagatattattatacctattttagataaagcagttgaagaaactaaggaacaaaaaggctgagtaactagacccaaggtcacacagttagtaagtggcaatgctttatakatatcatcccaagaagaaaaaatataaggtgattaaaactgaatgatgagaaagtagtatttaagctgtaatttg

SEQ ID NO: 210269 - DNA, 380 bp, Homo sapiens
cacaccaaaccaatggaaagggatagaaagcccaggaataaaccctcctatatttggtcaaatgattttcaacaaggatacmaagaccatttgatgaggaaaagacaggcttttcaacaaaaggttctaagaaaaatgaatatccacatgtgaaagaatgaagttgggctcttaccttacaccatataaaaaattaactcacaatgggtcaaagacttaaacataagacctaaaactataggactcttagaagaaaacagcttcatgccattggatttggcaatggtttcttagatgtgataccaaaagcatgggcaacacagaaaatatagataaattggtctgcataaaaaggaaaaacttttgagcatcaaagaaca

SEQ ID NO: 210270 - DNA, 453 bp, Homo sapiens
aaaaatgtactggatggggttaacagaagattagatattgcagaataaaaggttaatgaacttaacattgcatcagaaactatccacactaaagtgaaaggctcgaaaatttaacagagcctccataaactatggaacaacattaagtggtaattggactcccagaaggaaaggaggtgggagatgggaaaggatacaatttgatgaattaattactggatattttctcaattcaatgaaaagcatcaaccacagatccataaaacacaataaatttcaagaaggataaacacaaaaacacacaccaaggcatawcttaataaaattgctgaaaaccaataacaaagaaactatcttcaaagcagccagagagggaagaggacataatacatagagaaatgaatgaagataggaattattactgatttctaatataaacaatgcaagtcaaaa

SEQ ID NO: 210271 - DNA, 587 bp, Homo sapiens
gtttatatataaaagagctctaattaactggcttagaaaaatgaacaattaaataaaatattttgtcagaaaaatagaaactttaatgcctttttgttcacgtgactttagtaatcttttggaaataaagacaattttaaagattataggtaaagtaaaatgtcttcaaaatgtagacatttggtctaaattaagaccagatatcagatttactaactactttaaggtcaaactgtttctttgacttttgaaaattgttcaatttaccttccttaaagccattagattctagataaggcctggggacatgtggagttagccacacccctaactatgctagagagtcagctcttatctacacttctgcctggtgtcctagactagactccacacctagtacacaattaaaattgcttactaaycagggttttcaccaaaagtaaaagttactaagagttaatattataacatgattaaaactactaaagaaacaactttatatgcaaggtgtgtaaagaaagtaaaatgtgtttttggtgaaatattataagaagtcatgggaatgtggattttttcggcctagagta

SEQ ID NO: 210272 - DNA, 587 bp, Homo sapiens
gtttatatataaaagagctctaattaactggcttagaaaaatgaacaattaaataaaatattttgtcagaaaaatagaaactttaatgcctttttgttcacgtgactttagtaatcttttggaaataaagacaattttaaagattataggtaaagtaaaatgtcttcaaaatgtagacatttggtctaaattaagaccagatatcagatttactaactactttaaggtcaaactgtttctttgacttttgaaaattgttcaatttaccttccttaaagccattagattctagataaggcctggggacatgtggagttagccacacccctaactatgctagagagtcagctcttatctacacttctgcctggtgtcctagactagactccacacctagtacacaattaaaattgcttactaaccagggttttcaccaaaagtaaaagttactaagagttaatattataacatgattaaaactactaaagaaacaactttatatgcaaggtgtgtaaagaaagtaaaatgtgtttttggtgraatattataagaagtcatgggaatgtggattttttcggcctagagta

SEQ ID NO: 210273 - DNA, 440 bp, Homo sapiens
ggctagtctcgaactcctgacctcaggtgatccacccgctttggcctcccaaagtgctgggattacaggtgtcagccaccatgcctagcccctttctcttaaaaaataaaaggaagaagaagtgttccactgaaaaagtgaccagagccaagaggctcagaaactgtaactgaacccaaaaaaccctccaagcctctgcatcgcagtggtgcctgaggcaggtccagcgctcacttgrgatacagagcaaagaaaagtcaaggaagcaaggggatgggtcagcagtgagggagggctcactgatgtgttgcctttgcttcacacctgactgtcctgagcccacagatgggaagtgagtccccacagggaatgcagcaacttcatggaaatgagcccgcagatgggaaatgagtccctacagggaatgcagcaagttcatg

SEQ ID NO: 210274 - DNA, 414 bp, Homo sapiens
ttgctgtcagtatcccccgctttactaacccagttttttgttttgttttgttttggttttttagttgttttttgtttgtttgttttttgttttttttttttttttttgagatggagttttgctgtcacccacgctggagtgcagtggtgcaatctcagctcacttcgacctccatctcccaggttcaagcgattctcttgcctcagtctcctgagtagctgggacgayaggtgggcaccacaacaccaggctaattttttgtattttcagtaaagacggtgttttgccatgttagtcaggctggtctcaaaacacctggcctccagtaatctgcccgtctcggcctcccaaagtgctgggattgcaggcataagctatcgcacccagcggtgccagtctttaaatgctagattt

SEQ ID NO: 210275 - DNA, 586 bp, Homo sapiens
tttgggagcaaattgaggcttacagtgaaaacggaaacatcttcagataaaaactagaaagaagctctctgagaaactgcttcatggtgtgtgcattcaactcaaagtgttcaactcttcttttccttcagcagtttagaaacaccatttttgtagaatctgcaaagggatatttgggagcatattgaggcctatgatgaaaaaggaaccatcttcagctaacaagtacaaaaaatctttcttgagagtctggattatgatatatgcattcgaytcacagagctaaactttttttggattcagtattttggaaacactgtttttgtccattctgtgaattgacatgtgtgagctcattgaggccaatggtgaaaaagtgaatacaccagcataaaatctagaaggaagctatcagagatactgctttgtgatgtgtgcattcatctcacagagttaatcctttattttcattcagcagcttggaaacactgtgttttgtagaatatgtgaagggttattttggaatgcattggggtctataatgaaaaaggaaactacttcagataaaacctagaaagaagctttc

SEQ ID NO: 210276 - DNA, 485 bp, Homo sapiens
ctatgaaactgctttttgttgtgtggatacagttcacagagttaaacccttcttttgattcagcaggttacatacagtgtttttgcagaatctgtgaaggaccatttaaaagaacaaaaaggcctatagtgaaaactgaatatcccatgataaaaactaaaaggaaactatctgtgaaactaygttgtgatgtgtggcttcagctcacagggttaaaccatttttttttttttaattcagtggtttggaaacagtctttttgcagaatctgtgtagggatatttcagagcacagtaaggcctatagtgaaaaaccaaatatcctgtgataaaaactagaaagaagctatctgtgaaaatgcttgtcaagcctccattcaactcacaaggttaagcctttcttttgattcagcagtttggaaactctctttgtgtagaatctgtgaagggacatttcaagacccctaggcctctagtgaaaaagtg

SEQ ID NO: 210277 - DNA, 485 bp, Homo sapiens
ctatgaaactgctttttgttgtgtggatacagttcacagagttaaacccttcttttgattcagcaggttacatacagtgtttttgcagaatctgtgaaggaccatttaaaagaacaaaaaggcctatagtgaaaactgaatatcccatgataaaaactaaaaggaaactatctgtgaaactacgttgtgatgtgtggcttcagctcacagggttaaaccatttttttttttttaattcagtggtttggaaacagtctttttgcagaatctgtgtagggatatttcagagcacagtaaggcctatagtgaaaaaccaaatatcctgtgataaaaactagaaagaagctatctgtgaaaatgcttgtcaagcctccattcaacwcacaaggttaagcctttcttttgattcagcagtttggaaactctctttgtgtagaatctgtgaagggacatttcaagacccctaggcctctagtgaaaaagtg

SEQ ID NO: 210278 - DNA, 484 bp, Homo sapiens
tatgaaactgctttttgttgtgtggatacagttcacagagttaaacccttcttttgattcagcaggttacatacagtgtttttgcagaatctgtgaaggaccatttaaaagaacaaaaaggcctatagtgaaaactgaatatcccatgataaaaactaaaaggaaactatctgtgaaactacgttgtgatgtgtggcttcagctcacagggttaaaccatttttttttttttaattcagtggtttggaaacagtctttttgcagaatctgtgtagggatatttcagagcacagtaaggcctatagtgaaaaaccaaatatcctgtgataaaaactagaaagaagctatctgtgaaaatgcttgtcaagcctccattcaactcacaaggttaagcctttcttttgattcagcagtttggaaactctctttgtgtaraatctgtgaagggacatttcaagacccctaggcctctagtgaaaaagtg

SEQ ID NO: 210279 - DNA, 481 bp, Homo sapiens
agaagctatctgcacaactgttttgtgatgtgtgcgttcagttgaaatagttaaagctttctgttgattcagcagtttgaaaacatactttttgaaaaatctgcaaaggatcatttcagagacaaccaggccgatagtgtaaaatcractgtctcaccataaaatcttaaagaagctatctgtgatatttcttttgtgatgtctcaactcagctcacagaattaaacctttcctttgattcacatattggaaacactccttttgtgaaatctgctgaaagatattttggagtacagtaagacatacagtgaaaaaccgaatatcccatgacagaagctaaaaatacactatctgtgaagctgctttgtgatatctgcattcaactcacagaattaaacctttgttttgattcagcagtttggaaacactcttttgtaaaatctgtaaagggatatttcagagacaactaggcctatagtaa

SEQ ID NO: 210280 - DNA, 476 bp, Homo sapiens
acaactgttttgtgatgtgtgcgttcagttgaaatagttaaagctttctgttgattcagcagtttgaaaacatactttttgaaaaatctgcaaaggatcatttcagagacaaccaggccgatagtgtaaaatcgactgtctcaccataaaatcttaaagaagctatctgtgatatttcttttgtgatgtctcaactcagctcacagaattaaacctttcctttgattcacatattggaaacactccttttgtgaaatctgctgaaagatattttggagtacagtaagacatacagtgaaaaaccgaatatcccatgacagaagctaaaaatacactatctgtgaagctgctttktgatatctgcattcaactcacagaattaaacctttgttttgattcagcagtttggaaacactcttttgtaaaatctgtaaagggatatttcagagacaactaggcctatagtaaaaaaccta

SEQ ID NO: 210281 - DNA, 492 bp, Homo sapiens
aagctatctgcacaactgttttgtgatgtgtgcgttcagttgaaatagttaaagctttctgttgattcagcagtttgaaaacatactttttgaaaaatctgcaaaggatcatttcagagacaaccaggccgatagtgtaaaatcgactgtctcaccataaaatcttaaagaagctatctgtgatatttcttttgtgatgtctcaactcagctcacagaattaaacctttcctttgattcacatattggaaacactccttttgtgaaatctgctgaaagatattttggagtacagtaagacatacagtgaaaaaccgaatatcccatgacagaagctaaaaatacactatctgtgaagctgctttgtgatatctgcattcaactcacagaattaaacctttgttttgattcagcagtttggaaacactcttttgtaaaatctgtaaagggatatttcagagacaacwaggcctatagtaaaaaacctaatatc

SEQ ID NO: 210282 - DNA, 430 bp, Homo sapiens
attcatcttttcttttgattcaagcagtttggaaacactctttttgtagaatctgtgaagggacatttcagagctcagtaaggcctatagtgaaaaaccaattatctcatgataaaaactgggaagatgttgtctgtaaaactgctttgtgatgttggcattcagctcacaggttaaacttttctttttattcagcagtttgtgaatactcattacatagaatctgtggagagacatttcggagtgcagtgaggcctacagtgaaaaactgaatagctagggataaacactagaaagaagctatctgtgaaactgctttggattgtgtagattcagcccacagagttaacctttcttttgattcagcagtttggaaacactcttttcatagaatctgcaaagggacawttcacagccccctagccctata

SEQ ID NO: 210283 - DNA, 617 bp, Homo sapiens
aaagaaaatctctgtgaaactgctttgtgaggtgtggattcagttcacagtgtcaaacctttattttgattcagcagtttggaaacactgtttttgtagaatctgcgagagacatttcaaagcgcagtaaagtctatagtgaaaaacagattatcccacaataaaaactataaagaagttatctgtaactctgatttgtgatgtgtgcatgcagctcacagagttaagccattctttccattcagtggtttggaaatactgattttgtagaatttaccaagggacatttcggagtacattgaggtctacagtaaaaaccagaaaagcccgggataaaaactagtaacaagctgtctgtgaaaytgctttgtgatgtgtggattcagctcacagagtaaagcttttcttttgatgagacaggttggaaacactctttttgtagaatcttctaagggacattacagagcacagtaagacccatagtgaaaaaccgaatattccatgatggaaactacaaaaaagctatctgtgaaaccgtgttgtgatgactgcattcacctcacagagttatacctttcttttgattcagcagtttgaaaacactctttttggtggat

SEQ ID NO: 210284 - DNA, 617 bp, Homo sapiens
aaagaaaatctctgtgaaactgctttgtgaggtgtggattcagttcacagtgtcaaacctttattttgattcagcagtttggaaacactgtttttgtagaatctgcgagagacatttcaaagcgcagtaaagtctatagtgaaaaacagattatcccacaataaaaactataaagaagttatctgtaactctgatttgtgatgtgtgcatgcagctcacagagttaagccattctttccattcagtggtttggaaatactgattttgtagaatttaccaagggacatttcggagtacattgaggtctacagtaaaaaccagaaaagcccgggataaaaactagtaacaagctgtctgtgaaactgctttgtgatgtgtrgattcagctcacagagtaaagcttttcttttgatgagacaggttggaaacactctttttgtagaatcttctaagggacattacagagcacagtaagacccatagtgaaaaaccgaatattccatgatggaaactacaaaaaagctatctgtgaaaccgtgttgtgatgactgcattcacctcacagagttatacctttcttttgattcagcagtttgaaaacactctttttggtggat

SEQ ID NO: 210285 - DNA, 617 bp, Homo sapiens
aaagaaaatctctgtgaaactgctttgtgaggtgtggattcagttcacagtgtcaaacctttattttgattcagcagtttggaaacactgtttttgtagaatctgcgagagacatttcaaagcgcagtaaagtctatagtgaaaaacagattatcccacaataaaaactataaagaagttatctgtaactctgatttgtgatgtgtgcatgcagctcacagagttaagccattctttccattcagtggtttggaaatactgattttgtagaatttaccaagggacatttcggagtacattgaggtctacagtaaaaaccagaaaagcccgggataaaaactagtaacaagctgtctgtgaaactgctttgtgatgtgtggattcagctcacagagtaaagcttttcttttgatgagacaggttggaaacactctttttgtagaatcttctaagggacattacagagcacagtaagayccatagtgaaaaaccgaatattccatgatggaaactacaaaaaagctatctgtgaaaccgtgttgtgatgactgcattcacctcacagagttatacctttcttttgattcagcagtttgaaaacactctttttggtggat

SEQ ID NO: 210286 - DNA, 548 bp, Homo sapiens
tatctgtgaaactgcgttgtgatgtgtgcattcagctcatagagttaaacattacttttaattcagcagtttgaaaaaacactttttgtataatctgcatagggacattttggagggtatggaggcctatagtgtaaaaaacaaatatcatgtgataaaaacttgaaagaagttacctgtgaaactgctttgtgatatgtggattcagctcacagacgtaatcttttcttttgattcagcactttggaaacactctttttgtagaatctgtgaagagacatttcagagtgcagtgagctctacagtgtgaagccaaakagccagaaataaaaactagaaagaagctatctgtgtaactactttgtgatatgtggattcagctcccagagttacactgttctttagattcagcagtttggaaaaacttttttcacagaatctgcaaacagacatttttaagttcaataaggtcaacagtgaaaaacggattgtcctgtgataaaaattagagataatttatctgtgaatctgctttgggaagtgtgcat

SEQ ID NO: 210287 - DNA, 502 bp, Homo sapiens
ttctttctattacacagattggaaaaaatgtttttgtagaatctgctaagggtcatttcaaagcccactggggcccataggggaaaaattgaatatcttgctataaaatctagaagaaagtacctgtgaaactgctttgtgatttgtggattcaacttacagagttaaagttttcttttgattcaacagttggaaaacactctttttgtagaatcagtgaagggacatttcagtgaacagtaagsgttctaccctgctataagaagtaatcggctaaactgctttgttgatatgtgcattcagctcacagagttaaacctttctttttattcagcaggttggaaacattctttttgtagaatctgcaaagggacatttcagagtgctataaggcctatattgaaaaacagaatatccctagataaaaagtagaaagaagttatctgtgaaactgctttgtgatgtctgtattcagctcacagaattaaacctttcttttgat

SEQ ID NO: 210288 - DNA, 397 bp, Homo sapiens
acattcagctcacagagttaaaacttacttttaattcagcagtatggaaacactctttatgtagaatctgcataggagacacttcagaaggcattgaggcctgcagtgaaaaacagaatatcacacaataaaaactaaaaagaatctacctgtgaaactgctttctaatgtgtggattcagctcacagagttaaacttttcttttgattcagcatgattggaaacatttatttttctagaatctgtgaagggacatttcgaggcacagtaagacctatactgaaaaaccgaatatycccccccaccacacacacacacacacacacacacacaaatactagaaaaaacctatctttgaaactgctttgtgacatgttcattcagttcacacaattaa

SEQ ID NO: 210289 - DNA, 547 bp, Homo sapiens
tgaaactgctttgtgacatgttcattcagttcacacaattaaacgttgcttttggttcacagtttgggaacactmtttttgtagaatctgcaaaaagacatttcagtgcccactgaggcctatagtgaaataccaaatatcttgatataaaaactagaaagaaactgtaaaactgctttgtgatgtgtgcattcagctcccagagttaaatcttagtttgatccagctgattgttcactctttttgtagaatctgcaaaaggacacttcaaagggcattgaggtctgtggtgaaaaccaaacatcctttgataaaagatagaaagaagctatctgtgaaactgctttgtgatgtgtgcattcagttcacaaagttaaaccttacttttgattcagcagtttgaaaacacttttttgtagaatctgcaaagggacatttcagaggatattgaggcctatattgaaaaactgaatatcccacgataaaagcttgaaagaagttgtctgtgaaactgctttgtgatgtgtggattcagttcacagatcta

SEQ ID NO: 210290 - DNA, 485 bp, Homo sapiens
gaattcaaaactattttagtagggcctgcaaggggacattttggggctctataaagccaaaaatgaaaaacagaatatccygcaataaaaactagaaagaagctatctgtgaaactgctttgtaatgtgtgcaatcagctcacagagtgaaaccttccttttgattcagcaggtgggaatactctttttgtagagtctgtgaagggacattttgatgcccactgaggcctatacagaaaagctgaattaccctagataaaaactagaaagaagatgtttgtgaaactgctttgtgacttgttcatttaggtcacagagttaaaccttactttcaattcagcaggttggaaacttttttttgtagagtctgtgaagggatatttcagagccaactaaggcctatagtaaaaaacggaatatcctgaaataaaaactagaaataagctatcttgaaactgctttacaatgagtgcattcaactcaca

SEQ ID NO: 210291 - DNA, 485 bp, Homo sapiens
gaattcaaaactattttagtagggcctgcaaggggacattttggggctctataaagccaaaaatgaaaaacagaatatcccgcaataaaaactagaaagaagctatctgtgaaactgctttgtaatgtgtgcaatcagctcacagagtgaaaccttccttttgattcagcaggtgggaatactctttttgtagagtctgtgaagggacattttgatgcccactgaggcctrtacagaaaagctgaattaccctagataaaaactagaaagaagatgtttgtgaaactgctttgtgacttgttcatttaggtcacagagttaaaccttactttcaattcagcaggttggaaacttttttttgtagagtctgtgaagggatatttcagagccaactaaggcctatagtaaaaaacggaatatcctgaaataaaaactagaaataagctatcttgaaactgctttacaatgagtgcattcaactcaca

SEQ ID NO: 210292 - DNA, 523 bp, Homo sapiens
gtgaaaaatcaaatatcctgaattcaaaaccagaaagaagctatctgtgaaactgctttgtgatgtgtgcaatcagctcacagagttaaatcttacttttgattcaccagtttgtaaacactctttttgtagtattggtgaagggatattttggagtccactgaagtctttagtgaaaaacagaatattttgaaatwaaaaatagaaaggatctctccgtgaaagtgatttttgatgtgtgcattcaactaacagaatgaaaccttatttttaattcagcagtttggaaacacccttcttgtagaatctgcaaagggacatttcagatgacattgaggtatacagtgaaaaactgaatatcccaaaataaaaactagaagaaagatatctgtgaaaatgctttgtgatgtgtgcatttagttcacagagtgaatattctcttttgattcagcaggttgggcacaatatttgtagaatctgcaaagggacatttcagatcccactgaagcctataatgaaaaac

SEQ ID NO: 210293 - DNA, 572 bp, Homo sapiens
ttgcataattagcattttagtgagctgtctttactatctttttggttcgatgtgagctcagttgcaagccccatgtttaaaggtggaagcagtcaccttgccagctaggcttagggattcttagtcagcctaggaaatccaggtagctctgtctctcagttccacctctcaagaggaaaacccaagtgctgttggggaggttggccaacgaycactctaaatgcttcctgctgaattggagcatagtaggggttgtgcagttgagatttcctcaggaggggtggcttccatatcattaacatcagagcatgggctagaaggccagtccaggaatctgtggtagattttagtcatggattgcatctggggctccatttgaagaatgatttgtagctttacagctctgattctggaagagacaaacttaacaaggaggttaaagatacagggtccaaagaggagtagcaatattatagctactagaggttctaagaaggggagaatccaaggcatccattggatggcaaggccccagagtccagtgttttgaagctcctcggttctatgttgta

SEQ ID NO: 210294 - DNA, 627 bp, Homo sapiens
gttctatgttgtaatcaatctcaaatttctttaactttctcagtcatgattccagattgatttacataataacagcattcttgccctaataataaacagattcccccactttcagtggttagcaagtctaaagctctttgattttgaaggactactgctgctagggagttaagttgaacttgcaaggtgaccagggagtcagtaacccattccatgtcaccatttagttcttgagatagtttgtagtagaactgagcagaggttgtgatactgccaatgccagtacctagtcygcctagcactcctgctccaataacaaaaggaagaatgggtactcttttgttgcggggcttaggtacgtgattgtataaatcttgttcagtgtagatggtcatggggacactaagaatgagaggaagcacatagattctgaagagccattcaaacaacgataggctgaggtaccacagacaaaaaaaaaagtattcctgagggtaggcagactattcgtgtgggaggaatttcccacctgattcattgggagttgattgtctctaaagtattgctaaattttacacaggtgaagtttgatgtgtgggttactcccagattggaaacagggagtcc

SEQ ID NO: 210295 - DNA, 532 bp, Homo sapiens
ttgtgatactgccaatgccagtacctagtctgcctagcactcctgctccaataacaaaaggaagaatgggtactcttttgttgcggggcttargtacgtgattgtataaatcttgttcagtgtagatggtcatggggacactaagaatgagaggaagcacatagattctgaagagccattcaaacaacgataggctgaggtaccacagacaaaaaaaaaagtattcctgagggtaggcagactattcgtgtgggaggaatttcccacctgattcattgggagttgattgtctctaaagtattgctaaattttacacaggtgaagtttgatgtgtgggttactcccagattggaaacagggagtcctactaaaatggaagtggtgtttattactgtgctgaagttgttccattgttcaggtacagggattgaaacatatggcctgaagtgcagggggaggcacatccaacagtagggttttgggctgagacctcatggagcccagtgagggtggtattaaataggcttaccag

SEQ ID NO: 210296 - DNA, 627 bp, Homo sapiens
gttctatgttgtaatcaatctcaaatttctttaactttctcagtcatgattccagattgatttacataataacagcattcttgccctaataataaacagattcccccactttcagtggttagcaagtctaaagctctttgattttgaaggactactgctgctagggagttaagttgaacttgcaaggtgaccagggagtcagtaacccattccatgtcaccatttagttcttgagatagtttgtagtagaactgagcagaggttgtgatactgccaatgccagtacctagtctgcctagcactcctgctccaataacaaaaggaagaatgggtactcttttgttgcggggcttaggtacgtgaytgtataaatcttgttcagtgtagatggtcatggggacactaagaatgagaggaagcacatagattctgaagagccattcaaacaacgataggctgaggtaccacagacaaaaaaaaaagtattcctgagggtaggcagactattcgtgtgggaggaatttcccacctgattcattgggagttgattgtctctaaagtattgctaaattttacacaggtgaagtttgatgtgtgggttactcccagattggaaacagggagtcc

SEQ ID NO: 210297 - DNA, 556 bp, Homo sapiens
gaaaatctatgaagggacatttgggagcccattggtgcccaaggggaaaaacagaatatccccaggtaaaaactagaaagaagctatctgtgaaactgctttgcratgtgcagattcatctcacagagctaaacctttcttttgatacaacaggttgaaaacactctatttggagaatctgtgaagggacattttaaagcccattgaggcctatggggagaaacagaatatccccatatgaaaactagaaagaaaccatctgtgaatctgttttgcaatgtgtagattcatctcacagagttaaatttttattttaattcagcaggttgaaacactctttttgaagaatctgtgaagggatatttgggagcccattgaagcctatggggaaaaaccaaatatcttcagacaaaaactagacaaaagctacctgtgaaactgcattgcgatttgtggatttatctcacagattttgacattgtttttgattcagcaggttggaaacacttttattggagaaactgtgaggggacatttgagagcccaatgtggccta

SEQ ID NO: 210298 - DNA, 525 bp, Homo sapiens
ctatctgtgaaactgctctgtgacatgtggatcatctcaggtgttaaactttgtttttgattcagcaagttrgaaacactcttttagtagaatatgtgaaacgacattagggagcccattgaggcccatgggaaaaactgaatattccaaggtaaaaactggaaagaatctatctttgaaattgctttgtgatgtattgattcatctcacagagttaaatatttcttttgcttcagcagtttggaaacactctttttggataatctgcaaagggacattttggagaccattttggcctatgtagagacacaaaatatccccagtaaaaactagaaagaagctatctgtgaaattgctttgtgatatgtggatcatctcacagtgttaaaactttcttttcaatccaccagttggaaacactctttttggagaatctgtggagagatatttgggagctcattgaggcttatgaggaaaaaccaaatatccccagataaaagctagaaacaagcaatctatgaaact

SEQ ID NO: 210299 - DNA, 525 bp, Homo sapiens
ctatctgtgaaactgctctgtgacatgtggatcatctcaggtgttaaactttgtttttgattcagcaagttagaaacactcttttagtagaatatgtgaarcgacattagggagcccattgaggcccatgggaaaaactgaatattccaaggtaaaaactggaaagaatctatctttgaaattgctttgtgatgtattgattcatctcacagagttaaatatttcttttgcttcagcagtttggaaacactctttttggataatctgcaaagggacattttggagaccattttggcctatgtagagacacaaaatatccccagtaaaaactagaaagaagctatctgtgaaattgctttgtgatatgtggatcatctcacagtgttaaaactttcttttcaatccaccagttggaaacactctttttggagaatctgtggagagatatttgggagctcattgaggcttatgaggaaaaaccaaatatccccagataaaagctagaaacaagcaatctatgaaact

SEQ ID NO: 210300 - DNA, 627 bp, Homo sapiens
gtggattcatctcatagaggtaaagatttcttttcactcaccaagttggaaacactctttttgtagaaaccataaagggacattgggagcccattgtggcctatggggaaaaasgaaatatccccagttaaaaagtggaaggaagccatctgcacaactgcttagttatgtgtggattcatctcatagtgttaaatatttcctttgattcagcaggcttggaaacactctttttgtacaatctgcaaaggaatatttggagcccaccgaggcccaaggggaaaaacagaatatccccaataaagagtagaaagaagatatctgtgaaactgctttgtgatgtatggattcatctcacagagttaaacttttcttttgattcagcaggtgggaatcactctttttatataatctgagggaagaaatgtgggagcccattgaggcccttgggaaacaaaggaatatccccagatgaaaactagaaagaagctacctgtgagcctgctttgttatatgtggattcctcatacagagttgaaactttcttttgactcaacaggttggaaacactctttttgtagaatctgcaaaggaacatttgggagcccattgaggcctatggaaaaaa

SEQ ID NO: 210301 - DNA, 563 bp, Homo sapiens
ggttgctttcatgtaattttggaataagcttttaaaaactgagagcagcaagaacagcaagtgaacacagatgagctggggagcagagtgaattgggtgaagtttataagaataaaaaagaagagaggattttactaatgctactttcaaaggcaaaagacctagttaaagtacttatttttgctttcttaattccttatctactactacaaataaagagcagcaaaattaaaagaaaaaaaaagctatgtgctgtaaatgcctttaaagacacttccttagtagttcactgtgttgtatacatcataatgtgctgcttggcaggctgcctagctcaccttctaatctcacagctctgtgagatgaaaagtgaaatgtaatatttacaatcctgggaatgaactaatccctggaaaaatagaaggatttgattttctcttctgctcacgtttagctggcttagtacttaagcagggtaccaggkatctgtttctacttgtcgccacagagcagggaagctaaatgtgtgacatgtctcagacaagcaaaaacagacagaattc

SEQ ID NO: 210302 - DNA, 641 bp, Homo sapiens
tgatatttattgtagtcaacactgtttgggcttgtttgtaaccattgttcctgggaaggttttagagatatttaaaaggacttgggtgttgtgatctaagctctttctactttaggggacatcttaagcccagtaacactgtggttcttgcaggctcacagaggtactaccgtgatggtcttagacaacagggtcttggagaattttctgaattatctagcagagacttttcttttcttcttttactttctcccaaacaaatagagtctgtgtgtgtgtgtgtgtgtgcrtgtgtgtgtgttctgagacacatgaaagtgaagtggaatgacacaaacatctctgtggccatgaccactatgactgcactgggtcagaactgaatccagcagagtgcttgaactcacccaaggcctgccatcacaccttcatggttacagtctgtgttcactcaaggcactgtggctctacaatcagcaggtgaaaaagtcagccaggcctcgattactcccttcagtttagcaagtttctttaggccctaggttggttcagagatgctattcaggagtcagagagtaaaataaaaaacttcagaaagctaaggttttggcagtgagagtttggcagaagagtgtggaaca

SEQ ID NO: 210303 - DNA, 641 bp, Homo sapiens
tgatatttattgtagtcaacactgtttgggcttgtttgtaaccattgttcctgggaaggttttagagatatttaaaaggacttgggtgttgtgatctaagctctttctactttaggggacatcttaagcccagtaacactgtggttcttgcaggctcacagaggtactaccgtgatggtcttagacaacagggtcttggagaattttctgaattatctagcagagacttttcttttcttcttttactttctcccaaacaaatagagtctgtgtgtgtgtgtgtgtgtgcatgtgtgtgtgttctgagacacatgaaagtgaagtggaatgacacaaacatctctgtggccatgaccactatgactgcactgggtcagaactgaatccagcagagtgcttgaactcacccaaggcctgccatcacaccttcatggttacagtctrtgttcactcaaggcactgtggctctacaatcagcaggtgaaaaagtcagccaggcctcgattactcccttcagtttagcaagtttctttaggccctaggttggttcagagatgctattcaggagtcagagagtaaaataaaaaacttcagaaagctaaggttttggcagtgagagtttggcagaagagtgtggaaca

SEQ ID NO: 210304 - DNA, 504 bp, Homo sapiens
ttctaatttcccttatgggaaaagtttttgtaaggaatccataaaatgagtacatacaataaatcgccctacagtagagattgttggcatatagagtttaaatgtttaagattaggcataaagtttttcagtcaaattttttgcagaataatgtattaaaccttcataggttgtgaaattataaagcagaaaacatatgtcatctgtctggtgttcctggaatttctttcttttttattgtataatcccatttatatgaaatacccagaatatgcaaatccatagagacagaaagtagactagtgaytgcaaagggaggaggaggaaagaatagagagtgactgctaaagggtataggatttctctttatcatcactgcttctcccacagtggtgacagtcataaccttgttaataagctaaaaaccaatggattatacattttatttatgtttatttttagagtctaaggtctcacaaagttgcccaggctgttcttgaattc

SEQ ID NO: 210305 - DNA, 584 bp, Homo sapiens
ctttctagtttttctccaaagatatttagtttttcaccatagaccttgatgcattcccaaatataccttctcagattctacaaaaacagtgtttccaaactactccatcaaaagtaagtgttatctctgtgagttgaatgcacacatcacaaagcagtttctcagaaarcttctttataatatttatgtgaagatagttcatttttcaccacaggcctcatgcactcccaaatatcccttcacagactctataaaagcagtggttccaaactacttcatcaaaagaaaggtttaactctgtgagatgaatgcacacatcacaaattcgtttgtcagaaaacttctttctaggttttcttaagatatatcctttttcaccatagtgctcaaggcactcccaaatatcccttcacagattctaaaacacagtgtttcaaaactgctcaatcaaagaaatgtttaactctgtaagatgacgggacagctcacaaaacaagttctcagaaatcttctttctaatatttatctgaaaacatatctgtttcactgtaggcctcaatacgctccaaaatatccctttgcag

SEQ ID NO: 210306 - DNA, 627 bp, Homo sapiens
gtttcacagaaagcttctttctagcttttcactaaagatatttcctttttaaccatgggcctctatatgctcccaaatatcccttcaccaattctacaaaamtagtgtttccacagagctccatcaaaaggaaagtttaattctgtgagatgaatgcacacatcacaaatcagttcctcagaaaacttctttctagtttttatgtaaagatatttctttttcaccacaggccacaacatgctctgaaatatcccttcgcatagtctagaaaaacagggtttcccaacagctccaacaaaagaaaggtttacctctctgtgatgaatgcaaacatcacaaatcagtttctcagaaagcttccttatagtttttctctaaagatatttcctttttcaccacagacctcaatgtgttccttaatgtgcattcacagaatctacaaaacagtgtttccaaactgctccactaaaggaaaatttaattctgtgatctgaaaagacacatcacaaagcagtttctcagaaagtttattttcagtttttctctaaagatatttcctttttcatcataggccaaaatgcactccaaaatgtcccttagcagattctacaaaaaaagtgtttccaa

SEQ ID NO: 210307 - DNA, 627 bp, Homo sapiens
gtttcacagaaagcttctttctagcttttcactaaagatatttcctttttaaccatgggcctctatatgctcccaaatatcccttcaccaattctacaaaactagtgtttccacagagctccatcaaaaggaaagtttaattctgtgagatgaatgcacacatcacaaatcagttcctcagaaaacttctttctagtttttatgtaaagatatttctttttcaccacaggccacaacatgctctgaaatatcccttcgcatagtctagaaaaacagggtttcccaacagctccaacaaaagaaaggtttacctctctgtgatkaatgcaaacatcacaaatcagtttctcagaaagcttccttatagtttttctctaaagatatttcctttttcaccacagacctcaatgtgttccttaatgtgcattcacagaatctacaaaacagtgtttccaaactgctccactaaaggaaaatttaattctgtgatctgaaaagacacatcacaaagcagtttctcagaaagtttattttcagtttttctctaaagatatttcctttttcatcataggccaaaatgcactccaaaatgtcccttagcagattctacaaaaaaagtgtttccaa

SEQ ID NO: 210308 - DNA, 540 bp, Homo sapiens
tctgagaatggacattgggaatctcattgaagccaatggcgaagaagggaatattccatataaaaactagaaggaagctatctgagamactgctttgtgatgtgtgtattcatctcacagagttaaacctttcttttcatgcagtattttggaaatactgtttttgtaaaatctgtaaagggatattctaaatgcattgaggactatggtgaaacaggaatcatcctcagataaaaactagaaagaagctttctgagaaactgctttgtcatgtgtgatttcatctcagagagttaaacttttctttggattcagcaatttggaaacactgtttttgtccattctgtgaatggacagttgggagctcaatgaggtcaaaggcaaaaaagtgaatatccaaggataaaaactagaaggaagctgtctgagcaactgccttaagatgtgtgcattcatcctgcagagttaaaactttcttttcattcaacagtttggaaacactgttgatgtagactctgcaataggataattgggggtgca

SEQ ID NO: 210309 - DNA, 557 bp, Homo sapiens
agctgagcaacctcaagattaaaaaacctcaatcttttaaaaataagttacatgcaaacttgtccaacatttgcstcacagagaaaaattgtcttttttacattggttgagtaatttatctgccattcacccgaagagaaaaattactacccttttcccgggctatttctgtacaaaaatctttgaaaaataacctggaacaggagagatatgtgacgtaaaaaataaaaaaacaacaaactctaaaagagctttggagaattatatctcagcagcatgcatcctttccattaaatattgcactaagcaatcctctgatgtaaaagatccattgaagattttcgacatgaagactaactttggttgttttgtgttgtgggattgttaaagactgtaagagacaggaataaatacaattaccaggactttagagaaacggaagttctttgattttttttttttttttttagatggagtttctctgtttcccaggctggagtgcaatggcgcaatctcagctcactgcaacctccgccttccaggttcaattgattctc

SEQ ID NO: 210310 - DNA, 414 bp, Homo sapiens
ttgctgtcagtatcccccgctttactaacccagttttttgttttgttttgttttggttttttagttgttttttgtttgtttgttttttgttttttttttttttttttgagatggagttttgctgtcacccacgctggagtgcagtggtgcaatctcagctcacttcgacctccrtctcccaggttcaagcgattctcttgcctcagtctcctgagtagctgggacgataggtgggcaccacaacaccaggctaattttttgtattttcagtaaagacggtgttttgccatgttagtcaggctggtctcaaaacacctggcctccagtaatctgcccgtctcggcctcccaaagtgctgggattgcaggcataagctatcgcacccagcggtgccagtctttaaatgctagattt

SEQ ID NO: 210311 - DNA, 586 bp, Homo sapiens
ttcttattttgtctagttcctatgataacatgagcttctgtgatgatgttaacataacatgtgaaggattcagtcctcctggtgcctcgagtaaccacttcttgaattattaagtggtgagaaatgtagttcaatttcccaaataatctgctatgtttgagaagtggtgaatgctaacacatctgtatcaatgcaagggcctcctcataattctattccctctatttctgctcttccaaaatcagagtggccctctggccaccctctcttcaaactccaccactgacctgtgggaggatcaggtatgcaaaagagatgatcaaatctggcaagagataaacaacccctgccataagatcagagatcccttccatattaccttttggttttcctgaagcctcaaaccccatagtcccctgtacttgagtcttgttcgcctctgagctcagcatggggctcaaggcttgtttgactcttaagggtggaatarctatcaaatcgtcattttcttatttttccccgttgatgaatgaacaagagttttcctttgcctgttttgtctatgaagatttacctgatttctcaa

SEQ ID NO: 210312 - DNA, 573 bp, Homo sapiens
ggcaaaaccaccctcatgagtcatttacctccacctsgtctctcccttgacacatggggattataattcaagatgagatttgggtggggacacaaagcctaatcatatcatggactaaacagtgttccaccaaaaatgtatatgttgaagccctcagcccaatgttactgtatttggaaatagggcttttaaagaggtaattaaggatgaatgggctcctaaaggtgggttcccaatccaatagggcaggggtccttagaagaagaagaagagacactaggggtatacacagagaaaagtccatgtgtgaacacagtgagaaggtggccatctgcaagccaagatgagcagcctcagaagacaccaactctacaggaatttgatcttagacttccagcccccagaactgtgagaaaataaatttctgttgtttacatcccccagtatgtggaattttgttatggaagctctagctgagtaatacaaaacacatagaaaagaatatttgcaagcaatttttggttgctcatggacttcatgaaatccacccttaaaggtcaggaccttcaagat

SEQ ID NO: 210313 - DNA, 499 bp, Homo sapiens
ataataactgtaggcaagctacacggatggatgctaaaattaatgtggtgaagtttggggagaaacacagcatttgcataacttccaagtatctccctcaagatcattattatttacaaaaggaaaaatagtcactttatcatggagaaagctggcagacactatcttgccaaatgattaaggttaacattattccttgatgcacccttcactgggatggacacattatttctgtgstattactgccaaaaactgcataatgtcttaaggtaattgtgagataacaccagaaggaaaaagaaaaccattggatgtcagtctacaaaatacctaagtgatactcttcaaaagtgtgtcagatcatgagaaacaacaagactgtggcaggccagacaaagaaaggcaagaagttgtcagagattggagaagattaatgaagcacaacctagtgcagaaaaagaacattaagggaaaaacttgtaaaaaatgtaatagtcta

SEQ ID NO: 210314 - DNA, 584 bp, Homo sapiens
aattcccttcattttgaaggctgaatattattgtgttgtgtagacataccacattttctttatccattcacccattagttgacacttaagttgatcatataacttggctattgtaaataatgctgcaataaatatggaagcagagatatgtcttcaacttagtgatttcatgtcctttgaatatatacccagaagtgagattgctagatcctggggcagaattttttgtacagcaatatttaaagtgatggatagagaagaaatgcaaaataaaagggcagtaggaattaaggtaaagagaataagagcaaagtcaagggaaaaaatttcttttctagaaaagggaataggaaaaatctcaacagtgagtaggatgaactctwcactggatcttatagagaccataggccctaataatagtttcagttccaactctaaaatctataactattccattctttcaaagcttaaggaaattttttcctgtaggattttctatacaacctgtcactggatccctccaagacttctaaaatcagcacaggaagctgtaggaaaataaattctaagtgctaagtaactgt

SEQ ID NO: 210315 - DNA, 563 bp, Homo sapiens
ttggtcctatttgaatgtccagtgagacttctgaaaattatgaggctgagaacaattctttttacaggactatcctggctccttcctactaaacacccacagcacactccaatgctatgaataatagtcccccataaatttaaaaaatactccctagtgaaccgtactgtccccattgagaaccactactggagaggatggcttacctacatgccagctgaggtttttctgcctcttaagatagaaacatcggattcacagttcatagaggtcctttgtactcaaagtgttgatgagaatttccaggtgtrgggtggagggttggtgcttactttctcaggtcacccgtgtctctaaaggactgcttctgctgaattagtccactttgcaggtgatcattccatcctttggcaccatctctgttccataccttttcaacctgtaaatgaaatgtcaccatgttcttcagtttatagaagagattctcaccccacccttcccagaatgtattttttttaagatagatttgaccgaagttttggtgaacaacatggccaagacat

SEQ ID NO: 210316 - DNA, 563 bp, Homo sapiens
ttggtcctatttgaatgtccagtgagacttctgaaaattatgaggctgagaacaattctttttacaggactatcctggctccttcctactaaacacccacagcacactccaatgctatgaataatagtcccccataaatttaaaaaatactccctagtgaaccgtactgtccccattgagaaccactactggagaggatggcttacctacatgccagctgaggtttttctgcctcttaagatagaaacatcggattcacagttcatagaggtcctttgtactcaaagtgttgatgagaatttccaggtgtagggtggagggttggtgcttactttctcaggtcacccgtgtctctaaaggactgcttctgctgaattagtccactttgcaggtgatcattccatcctttggcaccatctctgttccataccttttcaacctgkaaatgaaatgtcaccatgttcttcagtttatagaagagattctcaccccacccttcccagaatgtattttttttaagatagatttgaccgaagttttggtgaacaacatggccaagacat

SEQ ID NO: 210317 - DNA, 558 bp, Homo sapiens
gcatttgctttagcactttattaagtaaattctactgtatctcaaaattcattcatatatcatttaattcatgatagatactgttgttggggaaagaggtagaaagcctattagaaaaacttaacactaaattgtgtaaagttttttgcactgaagaagaatgagaaagggagacataagctctgctaataataggcctagtgcaaggctgttatctccacaatgtgagctctattcatttctcatcttagtctgtagtaatttaagttctgctgactatattatttacatgcctgtaatagagtctgctagttgcctaccaagatcttttctcccttttcctatttgttcatggttagaattaaaacttatttatggcaacccagataaagacaatactttccaccattcttgcagctaggtttggacctggaattaatttattagcttcatttgtttagaagaaaacagcttttgctaaacttcrctcattttttctggaagttgaaagaggaagatgcctaccacatctggcatcaaccatgaagaagagggcaa

SEQ ID NO: 210318 - DNA, 563 bp, Homo sapiens
gagtctcactctgtcacccaagctggagtgcagtggtgagatcttggctcactgcaacctccacctcctgggttcaagcaattctcctgcctcagcctcccaggtagctggattaaggtgtgtgccaccactccyggctaatttttttatatttttagtagagatggggttttgccccattggccagactagccttgaactcctggcctcaagtgatatacccacttcagcctcccaaagtgatgggattactggcgtgagccaccatgcccagtaaaaattctgtatttctaacaagcttccaggttatggcattttgtcaatctacaaaccttattttaagtagcagagatgtagtgaatatccttgtctgattctcagtatcagggatggagcattcaacattttggccataagcatggtgtgtgctagaggttttttgcttgtttgattttgtggatatcatgtatcagaataagacatttctttttttgtagttgatttgtcaaaattattgaatgttgaattttatcaagttatttggctacttttaatgaaattct

SEQ ID NO: 210319 - DNA, 563 bp, Homo sapiens
gagtctcactctgtcacccaagctggagtgcagtggtgagatcttggctcactgcaacctccacctcctgggttcaagcaattctcctgcctcagcctcccaggtagctggattaaggtgtgtgccaccactcctggctaatttttttatatttttagtagagatggggttttgccccattggccagactagccttgaactcctggcctcaagtgatatacccacttcagcctcccaaagtgatgggattactggcgtgagccaccatgcccagtaaaaattctgtatttctaacaagcttccaggttatggcattttgtcaatctacaaaccttattttaagtagcagagatgtagtgaatatccttgtctgattctcagtatcagggatggagcattcaacwttttggccataagcatggtgtgtgctagaggttttttgcttgtttgattttgtggatatcatgtatcagaataagacatttctttttttgtagttgatttgtcaaaattattgaatgttgaattttatcaagttatttggctacttttaatgaaattct

SEQ ID NO: 210320 - DNA, 569 bp, Homo sapiens
gttttccttctaccagtttagctacatcgtatgaattttgatgtctatttttattattatacttaaaaatattttctattatctactgagaatgcttctttgacactttagccaattgctatttctaattttcctaatcctcaacatttggggatttttagattaactttttgctatcactttcaagattaattctactatgatcagaaatattctgaatggctttttattctttgaaagatttggggattggttttatgcctagcatactgtcagttttcataaatgactcatatgcatatttacttcccttctatccccacatttcatgttattggcatcatgattttaagtctatatgtattttaagtctcataaaaacactattgtgtttttgttcagtcaatatttacttayttttatccataattttttctttttccttattaattcctgtagtttcgtgtttttgtctagagtaacttttcatcttcctgaacccctatttatttatttatttatttaaattcaggtcttctggcaatgaatttgtcagtgtttgtctgaag

SEQ ID NO: 210321 - DNA, 302 bp, Homo sapiens
ctcactaggcagattcatttgagttaacaaaaaactaaactatagacctcatgtgaaaaattataagattgtgttgtgtttctgttttgctttcttttcattctctttattatttttttattttgctttcttttatttttatttttattgtctcctacttgagttgctttattgaatcttcttttgtagacaaataagaatcatataattgtttggatttaaatggttattttcaaattgcttaagggtattmgaaaacaacttctttccttgcaatttttaaaatgtccctttctaattgc

SEQ ID NO: 210322 - DNA, 431 bp, Homo sapiens
gaattcctggggcaccttaatgtcactataatcgtcaaactgctcttcaaattgtttaaatcaatctgtactcctagtagggccaaggagagttaacattcgtctactttctctccaataccaagtattattagactttttaattttagctactgtgatggttgtgaaaaggtatctccagtggaggattcaagttttgtagggcccatctcagttcttttaacagaaagaatacaaaattgtaaatacaaatttagtcatgacagtggatatttatttggaatgaaaaaacaaatcacaatgaattataaacttaaaaatgctttaaatgcatgaaatataccacacagktgagaaaaataacatttacaagttaaagaattgcatgacccatctttgtaatagttttttgctgcatattcattaattgt

SEQ ID NO: 210323 - DNA, 431 bp, Homo sapiens
gaattcctggggcaccttaatgtcactataatcgtcaaactgctcttcaaattgtttaaatcaatctgtactcctagtagggccaaggagagttaacattcgtctactttctctccaataccaagtattattagactttttaattttagctactgtgatggttgtgaaaaggtatctccagtggaggattcaagttttgtagggcccatctcagttcttttaacagaaagaatacaaaattgtaaatacaaatttagtcatgacagtggatatttatttggaatgaaaaaacaaatcacaatgaattataaacttaaaaatgctttaaatgcatgaaatataccacacagttgagaaaaataacatttacaarttaaagaattgcatgacccatctttgtaatagttttttgctgcatattcattaattgt

SEQ ID NO: 210324 - DNA, 580 bp, Homo sapiens
aaaattgtaaatacaaatttagtcatgacagtggatatttatttggaatgaaaaaacaaatcacaatgaattataaacttaaaaatgctttaaatgcatgaaatataccacacagttgagaaaaataacatttacaagttaaagaattgcatgacccatctttgtaatagttttttgctgcatattcattaattgtctattagtatgataattttataattttattttctctagatcctaaaaagatatttagctttacttgctctagcatagctggctgattaagatgattttattatccttacttcttttaattattgaggtattattcacataacatgcaagtcaccattttgaagtgtacaggttagtgtttttttagtatagtcacagtgttatgttaaatcatcatgacgtaattccggaacatttccatcaccccaaaaagaaatctcataactgttagcagtcacctccaattccccaatcctctaacccttggcacctcaaatctactatctgtttctatgattttgcctcttctggacatttcacrtaactggaatcatacaatatgtgg

SEQ ID NO: 210325 - DNA, 534 bp, Homo sapiens
gtgggaaatgggtaggtgttggtcaaagcgaacaaactttcagttacacgatgagttagttttggagacctaatgtggctataactaaaataataatgttttgtatacttgaaatttgctaagagagtagattttaaatattcttaccacaaggataaaaatggtaactatgtgaggtgatggatatgttaattggcctgattgtggtaatcattttacagtgaatatgtgtatcaacttatgttgttcacctaaaatatatacaatttttatttgtcacttataccacaataaagctggaagagttgaatacattttaaygtattttggcacaattttatgtgtataaagttcttgtgtcttagtttttttctaggtacctggtggagtttattgctaattctaaaaatggtttttaattgattgttattgaaatattggaaagcgtttttaaagtttttttttttcctatagtctttccaaactcgtattaggtctgatactttgtatatgtttttgaattttatatgtaat

SEQ ID NO: 210326 - DNA, 563 bp, Homo sapiens
gagtggagagggcctgaaggctaagttgatcaccaatagccagtggtttaatcaatcatgcctacacaatgaagcctcgataaaaacccaagaggaccgggttcagagagcttcctgatagctgaacacacggaggttcctggagggtggcrtcctgaagtgggcatggaacccaagtacaccttcctcctatcttaccctatacatctcctcatcggtgtcctttctaatatcctttataacaaaccagtaaatgttaagtgtttccctgagttctgtgagctgctccagcaaattaatcaaacccaaagagaaggctgtgggaaccccaaatgaaagctgattggtcagaagtcctagaggcctggacttaggactagtgttgggagagggggcagccatgggttccaggctctgcaccagtgaggtctgaggttatttccaagtagaagatgttaaaattaaattagagaataagcatctggtggccactccctgctgtgtggggaaaacccccacaatttaggtcacagaaggttctgtgttgattatcgttgtgctgt

SEQ ID NO: 210327 - DNA, 451 bp, Homo sapiens
gtatgagggactgatcatagctgaaagggttctcattcccaagagagatgtagtttaaccacartcagagccttaagctaaagtgccaggtggtagaatttcaggccaagaagacaagagttttggcaaggaagggaatattgctctcatggtggcgcccttgaaatcttcccatgtgtacggttccctagtacagtgacacagaagtgacagaagtgacagaactgacagcccagagacatgtttgagtctggcaagggatcgatcctagccatgccatgccatgcctcagctgccaccaccaatcagggatgtcagatctcaaccacaaaggacactgacatgcttgtcgctccccttgcacggcctctgtctgctcacctctgcccacacctccaggtcctagaggttccttgccctctggggagccccaaacctcctactacccctg

SEQ ID NO: 210328 - DNA, 295 bp, Homo sapiens
atgcagaattagtgcccagatgggaccttaatgggcagtctttctgctcccagtaaaaggtatcatcttactccaacatctcttctctgtttgaacttcgcaatctccacctcaaaaatgatgcatatgaagttataaaatatcagtggaataaaatatttatcattggawatacataagagaaatttaagtcagaaaagaagagtaaatttgtcatctattgaaattactttccaaagcacataaagaaaattaaggggttttcttcattacttggcaaactcatataacccat

SEQ ID NO: 210329 - DNA, 160 bp, Homo sapiens
aggtatcatcttactccaacatctcttctctgtttgaacttcgcaatctccacctcaaaaatgatgcatatgaagttataaaatatcagtggaataaaatatttatcattggatatacataagagaaatttaagtcagraaagaagagtaaatttgtcat

SEQ ID NO: 210330 - DNA, 576 bp, Homo sapiens
ttcaacaaaagcccctaccagcagttaaattaactgacataaataccataaaatctgtctttattttagtttcagatgatgctttttttacacccctgctttcagtttgtrtaactcatttttgcacattattgcatgcaccatttgccatttaaagaatcagctacaacggaaaagatttaaggaatcaaatactcggagagaaaaaaagaaactagtggatctggggcatatcatactgaagattgttaacgccgttgaaaaatactacaatagacaacagtagttcaaagaaacagttaattatgagagggccagcccaatgaaatctactttttaagcttttgatagacatttaaaaaaaatgctaaagaaacctgtggtgataataggtttgatatatattctggcaaaaattatatcacattaatgaggtggcttaaagggctcatgcattttgtaggaggcatttcaatgtattagtataattagcagtgatgagaaaactgtttggaactgaattacctctcacgagttcatttgagctatatgaaattacaccatgcaagaaggaaa

SEQ ID NO: 210331 - DNA, 610 bp, Homo sapiens
atttttgaatttcttgagtaattgatactgaactgattcctttggatatggcacttacttcatagaggcttttcttgggatgggattctgcgctgtgaggatagagaatgtctgagccttaggtcaagtttttgtttttgttttttcctggtggcctttcattgtacatacagtaacaatgaaaatagttcattgggagatgcaggcaagagatcacagattagtgtgatctgccttggaccaggtagtgcaatgttgaatgtgatatccaggcaagagctaaatataacaaaataaagtctgattgataatttgttctgaagttgcgtcaacattcatgtagttaaactagagtttatggacaactgaacataatcatctagggttacactgtccaatatggtagctactaaccagatctgcctactgaacacttgaaatgtggtttgtttaaattgagatgtaacataagcaaagagttcaaagaaaagaatgtgatataataattttttatattgaatgtatgctgaaataatattttagatatactggattaaatgaaatrtattattaaaatgaaattttcacttgtttctttttttacttttta

SEQ ID NO: 210332 - DNA, 528 bp, Homo sapiens
aaggattgaatgtgttaatatatcataaaatactttgaatagtcttcggcatatactgagtgctgtataagtattgggtctttctatcagctatattgccttcagtatggtcttgtactttgtagatgatcratatattttgttgaatatataaatacagtaataaatatagagcaggtaggctagctgatattccagaattatagaaaagagacaaaaacggtagaaacaatttgcctcaccgtttagtaaaataatgatgctcatagtgatgactttgagacatctagaaaagttaaaaataagctcagaagcctgtgagccagatagataaatgccagattttccactatgatgtcgacatcagttacaaagtactcttgcaagtatgacaataaatcagtgatgtacattataatcactccaatatatatagagaagaagatctaatactcagggatgttcattggcctgaggtcacttggtattgtgtagatgcgggaatccagattttcggaatcaggtgca

SEQ ID NO: 210333 - DNA, 491 bp, Homo sapiens
gtgttgtctgctttctctgctgattatttctttggccatacagttcaattaggtcctatttatttatttttgtttttgttgcattttcttttggggtctgagtcatgaattctttgcctgggtcaatgtccagaagagtttctcctaggttatcttcttgaatttttagggcttcagccttcagatttaagtttttgatcatcttgagttgatttttatataaggtgaaagacaggtatccagtttcattctattatatgtggctatccaattttcctagcactgtttattaaataggttgtccttttcagtttttttttgtatgctttgtcaaaaatcagttggttgtaaatatttgggtttatttccaagttgtctgtaggtctgcttttataccagtatcaygctgttttggtaactatagccttgtattataatttgaagtcaggtaatgtggctcatcaagaaataatcatgtaatgtgatgcctc

SEQ ID NO: 210334 - DNA, 499 bp, Homo sapiens
aaatatttgaaaaaaattgcatctgcactgaacatgtacagattttttctcgtcattattccctaaacaatacaaaaactatttacatagcatttacattctattaggtagtataagtaatctagagatgactttaaagtatgtaggaggatatgtgtrggttatatgcaaatatgctaccttttacacaagagacttgaggatctgctgattttggtatctgcaggtgtcctggaaccaatcccccatggatataaggggatggctgtacaaaaaggagatggcctcattttcaactgggatctaatactcctcctcaaacaccaagagtatgaagctatccaaaattattcttcttaaaaaatacatgtaagtcctctcaatgggagaggactctgttaggtggcattgtaagttatgggccatgtggtctgttgcagccgtacaagattataggtgggacatagagtccacgtggagagtgagggagaaagattct

SEQ ID NO: 210335 - DNA, 525 bp, Homo sapiens
ggaagagattggagattcttcatttcccctttaaaacatatagaccgatgtcctcagcgatgttgaatgccaattgagttgcatacttccaacagcattttcatttccaatcctatttatgccagtaatagttattgcaattccataactaaatatataaaattaaatatataaatatattaaatatattaaataaagtacaactatgtaaagagagtttcagttttttaataattgamattatgaatgtgtaaactaaagacaaattgctttctacaagatgtaatcactgtacattgaggtgtgcatgagacaactatagaacattggaaccaaaatttgtaagaacctagaataataatttacttatattcttttacaaatgttcttgaggatcagttggatcctcacagagcaccttgcccagcagtcagtaagttctcactaaatgtaagcttatctgtaaggagatgtggagaacagtgtgaatctgcattcattgctatccagcaatttgcatttttt

SEQ ID NO: 210336 - DNA, 525 bp, Homo sapiens
ggaagagattggagattcttcatttcccctttaaaacatatagaccgatgtcctcagcgatgttgaatgccaattgagttgcatacttccaacagcattttcatttccaatcctatttatgccagtaatagttattgcaattccataactaaatatataaaattaaatatataaatatattaaatatattaaataaagtacaactatgtaaagagagtttcagttttttaataattgaaattatgaatgtgtaaactaaagacaaattgctttctacaagatgtaatcactgtrcattgaggtgtgcatgagacaactatagaacattggaaccaaaatttgtaagaacctagaataataatttacttatattcttttacaaatgttcttgaggatcagttggatcctcacagagcaccttgcccagcagtcagtaagttctcactaaatgtaagcttatctgtaaggagatgtggagaacagtgtgaatctgcattcattgctatccagcaatttgcatttttt

SEQ ID NO: 210337 - DNA, 525 bp, Homo sapiens
ggaagagattggagattcttcatttcccctttaaaacatatagaccgatgtcctcagcgatgttgaatgccaattgagttgcatacttccaacagcattttcatttccaatcctatttatgccagtaatagttattgcaattccataactaaatatataaaattaaatatataaatatattaaatatattaaataaagtacaactatgtaaagagagtttcagttttttaataattgaaattatgaatgtgtaaactaaagacaaattgctttctacaagatgtaatcactgtacattgaggtgtgcatgagacaactatagaacattggaaccaaaatttgtaagaacctagaataataatttacttatattcttttacaaatgttcttgaggatcagttggatcctcacagagcaccttgcccagcagtcagtaagttctcamtaaatgtaagcttatctgtaaggagatgtggagaacagtgtgaatctgcattcattgctatccagcaatttgcatttttt

SEQ ID NO: 210338 - DNA, 463 bp, Homo sapiens
tatgtttcataatggctactctttccttcccctaccagaaccaggagtagatctttctcagatcctcaacattggaacctggtggggatcttggaggaggggaaagtatatgaaagtttggtattgtctgaagattacagcccccaggagtttcctgttctcacakgagtccaccctcagcctccagcaataagtaaaattagcatttaactgtttctaccagcttatggctccagtggctgctcctgccagtaagcaaatcttagttgttaatatccctctggatgcacctgtcttcctagatttcacagtggaggattgccctatgatatggcctcagatcttttatggttccaagaaacatcattgaatttcaatttgttcagaattttcttgttgtaagtatggaagttttgacttccgaactctttgtcagctgaaattcacttttttgttttttgaa

SEQ ID NO: 210339 - DNA, 504 bp, Homo sapiens
gggctacactccagcatttaagctaaagctagaaatacatggttgaaaggttgaaggcattcactgagctcaccaggagctttgacacaaagatagggtctttgcccccatctgaacaggagtgacaacagaagctttgggaattgatragtcactaaggaaaacagggcagggcacaagttgcaactggtggcccatgggctaaattggccccaggtgtgctttatttgggctacacagggttgtgattttttgaattaactatccacttttaaatgttggactatttcaccaaaaaaaaatccatatatctagtttatcttgaaaaactggaagatctggtaacgttgggccctatttcagttgacaatgagagtcagggttgagttgtgactgtcacctttaaagaaagtacatagagtaggctaggcgacaatgacaaaatatcagcaacttaacacaatgaagatttgtttcttgttcgagcaaagtccagggtgaatc

SEQ ID NO: 210340 - DNA, 409 bp, Homo sapiens
tttgccacatattggcagtatggtagggggtaacttcctttcatttctcttaagtcttctcatttgtaagcaaaatagcaacactattagcctggcgtggtggcaggtacctgtaatcccagctactcgggaggctgaggcaggagaattgcttgaacctgagagyggaggttgcagtgagccgagatgtgccattgcactccagcctgggcgacagagttaagactccaaaagaaaagaaaatagcaatactaatcctgcatgatgtgatgattagaaagcatatggcactttagtgttcaaattactgctttcattgtaatctttcccatattttaatgttccataacattgagtatgattttgttttctataaagcttacccactgcatttggaggatgattatgt

SEQ ID NO: 210341 - DNA, 425 bp, Homo sapiens
gtattcccctaactcttgcctctcccctcctcccagtgcctccctactcattcccgcctggcttcccccacccccacctctcctgtccccagtccccagtgactcccactgctctaacctctgaaactgtctattggacaccaactcaaccaagagcagtaagatcaaggctccccagtcccaaccatatccacccctcccaaatgccaatttctgggtggggggggacacacagtcatcacgcacttcttcacagactcttcttccctgtggcaagattggaatcaggtgctccaccccctggaaatgagaaccagacttctcagcctttgccaaagacaagggacccagttgagatgagacggggagggaaagaaggccttagagccagtggtactgrctactttgggcaagcactgggcatt

SEQ ID NO: 210342 - DNA, 425 bp, Homo sapiens
gtattcccctaactcttgcctctcccctcctcccagtgcctccctactcattcccgcctggcttcccccacccccacctctcctgtccccagtccccagtgactcccactgctctaacctctgaaactgtctattggacaccaactcaaccaagagcagtaagatcaaggctccccagtcccaaccatatccacccctcccaaatgccaatttctgggtggggggggacacacagtcatcacgcacttcttcacagactcttcttccctgtggcaagattggaatcaggtgctccaccccctggaaatgagaaccagacttctcagcctttgccaaagacaagggacccagttgagatgagacggggagggaaagaaggccttagagccagtggtactggctrctttgggcaagcactgggcatt

SEQ ID NO: 210343 - DNA, 498 bp, Homo sapiens
taacttttgtttgagtacccaaagtttttgttttttttttttcttgagaccaggtcttattctgtcacccaggctggagtgcagcagcacgatgttggctctttacaacctccacctctcagcctcaagtgatcctcccatctcagtctcctgagtaactgggactacaggctcgtgccagcacgcctggctaatttttgtattttttatagagatgacgtctcactaggttgcccaggctggtcttgaactcctgagatcaagcgatccacctacatcggcctccaaagtgctgggatcacaggtgtgagccactgcactcagccccctaatttaaaaaaaaaaamaaacaaacaaaaaaactgtttgctaacatctaaaaattgagtatttcccataatcaaaatcaaatttatagttctcttgacaaactggaagctcaggtcatcctgggctcaagttctccccatggtgccaggtggctggagcgggtgtggg

SEQ ID NO: 210344 - DNA, 455 bp, Homo sapiens
tccaatataccaagtataaaagaggtaaractagacgaaaaaacctacagaaaaaataaaatgggcaatatttacagacctacagaaaatccaggttctgtgattattagacactataaaaattaacactgtagaacaactcattttgttagagacaaaagctacatttgaaaaattcagaaatgaagtggtaaatatattacataatatcagatctgataaagagtcaagtaaaaattctagaaaagaaaattacaaagacaaaaattaaggacaaaattaagaacttaatagacttaggaactaaagaaattagaaatgaaataaaaatcagaagaaactacccataatgaagcagtgaaagacaaggaaaaagaaaacataatagaaagcaaatatttagaggatccctggaaaggtacaatacatgtgtacatacatacctaattagagat

SEQ ID NO: 210345 - DNA, 496 bp, Homo sapiens
ggacataaagcaagtttcaacgcactccaaaaaattgaaataataaaatatattatcttcaaccattgtggaattaagttagaactcaatatctaaatgtttagaaattaaacaacataattctaaataaccataagccctgaaggtccatgtcctacaaacctatgtctgtaaaatcatcactactaaaacttayctatgaaaagagagaaaaccttagaagtcataatgacctttagataaattaaataagtaattacacagctttttaccaaacaaatcaaagtctagatgtttacctaagaatctaaccatttagaaagaatgaccacagtacataaattattccaaggaagggggaaaagtgtcccctttttcttgtgaaaggttttcacagtggattaaaaaaactaattatatgatgtttacaagaggcaaaccataaatttctttaaatatgaaaagttgaaggtaacgaagacatagcaatgatata

SEQ ID NO: 210346 - DNA, 545 bp, Homo sapiens
gtttgagaagttctctgttatcatccctatttcttgaataaactttctacccctatctctttctttatctcttctctaaggccaataactcttagatttgcccttttgagtctattttctagatcctgtaggcaygctttgttcttttttgtctcctctgtgtattttcaaatagcctgtctttaagctcactaatcctttcttctgcttgatccattccagtattaaaggactctgatgcattcttcagtacgccaatcgcatttttcaggtccagaattactgctggattcttttcaattatttcaatctctttgttaaatttatctgttagaattctgaattatttctgttatcttgaatttctttgagtttcctcaacacagctattttgtctgaaaagtcacacatctatttctccaggattggtccctggtgccttatttagttcatttggtgaggtcacgtcttcctggataatgctggcactagtagatgttcttcactgtctgagcattgaagaggtaggtattcattatagtctt

SEQ ID NO: 210347 - DNA, 510 bp, Homo sapiens
tatatgcttacagtaaatgcaatgtagatgactttttctttgaggcatgcttctcatccactcatgtaccccaaggcagctaatatcagaatcattgattgtcccctttccctaaatttctacttgcaaaagttggatatttgctttatacaattctggaagacaaagttcaacaaatcatttagctaggtcttattaatcaattaactctaattcatgcgttaaaaaaataacaacgtattataaatcaaatccttcagagttcacctctttatctcctggaaaaaagaaataatcaatattatttgtaaagacttttcattcagagtttgctacctgccctcttttccttatctccaagacagatggccatagagagaataagaatgctttatgtgtggatcagtctaagactccwagtcaaaaattaataaggtctgggacaagtcactaggaaagaaaagaaaaaaaatagagatcctctagaggtacagatttagagctagcaag

SEQ ID NO: 210348 - DNA, 492 bp, Homo sapiens
ccaaatcagtgatttaacatttcaggaaatcttggagaggcagcagaagcctccttatatagctcatacgctgggactttggtgatacagatacggccgagataattattcagctctcgttattgctgtagctctgcacctgatccccgagccattagagcactctgcaggttattacaactatcaaacatcaaggtctcttttctagtctcttgactatgtggttatcattttacttcttttaaatcccccatctgcatagaaagcctctgtgttttttacagagatstgctcacagcctttcccccaccctttctttattgctccctaaatggagtccttttcttactagcacattagcataaaaatataaacctcatgcttctccacttgtattgtttttataccctctctcttgtttgatttcctctttgaggctgtgcacacctacactttaatttgggcagccaatgagtcagtggaagagaattc

SEQ ID NO: 210349 - DNA, 492 bp, Homo sapiens
ccaaatcagtgatttaacatttcaggaaatcttggagaggcagcagaagcctccttatatagctcatacgctgggactttggtgatacagatacggccgagataattattcagctctcgttattgctgtagctctgcacctgatccccgagccattagagcactctgcaggttattacaactatcaaacatcaaggtctcttttctagtctcttgactatgtggttatcattttacttcttttaaatcccccatctgcatagaaagcctctgtgttttttacagagatctgctcacagcctttcccccaccctttctttattgctccctaaatggagtccttttcttactagcacattagcataaaaatataaacctcatgcttctccacttgtattgtttttayaccctctctcttgtttgatttcctctttgaggctgtgcacacctacactttaatttgggcagccaatgagtcagtggaagagaattc

SEQ ID NO: 210350 - DNA, 506 bp, Homo sapiens
cttgtgttaggttggtgcaaaaataattgaggtttttgcattgcttttgcaacaacctaatagtacaatttgaagtgtaatgtcttcagatttattctttttgcttaggattgttttggctattggggttctttttttgrttccatataagttttaagattgttttttcttctaattctgtgaaaaatgatgttggtatttttataggaattgcattgaatctataaattgctttgggcagttacggccattttcatgatattgatttttccaatccatgagcatgggatgtatttccatttgttcgtgtcatctatgatttctttcagcattgttttgtaactctccttgtagacatctttcacctccttggctaagtatattcctaggtattttatttttttgcagctattgtaaaagggattgaggtcttgatttgattctcagcttggtcattttggatgtataccagtgctgctgatttgtgtgcattgactttgtaacgt

SEQ ID NO: 210351 - DNA, 640 bp, Homo sapiens
ctgttttttttattttttatttttttatttttatttttattttttgagacagagtcttactctgttgcccaggctggagtgcagtggcgcgatcttggctcactatttttgcatttttaaatcatggccattcttgcaggagtaggatgatatctcaatgtggttttaatttgcatttttctgataattactgatgttragcattttttttcatatgattcttagccatttgtatatcttcttttgagaattgtctattcatgtcctttgcccactttttgatgggattgttttttgcttgctgatttgtttgagttccttatggattctggatattagatctttgtcagatgcataattcatgagtattttttgcccacgctgtgggtcacctatttactctgctgattatttcttttgctctgcagaaactttttagtttaattaggtcccatctatttatttttggttttgtcccatttgcttttgggtttttggacatgaattctttgcctaagccaacatctagaataattttttttgatattgtcttctagactttttatagatttaggtcttagatttaattctttggtccatcttgagttgatttttatataaggtgagagatgaggatcca

SEQ ID NO: 210352 - DNA, 459 bp, Homo sapiens
tattaaggctcctgatacaaggcatttttaatccttatttatagcagaaattagcattccaaagctcatgctttgttaatatgatagctttattgttgtgtaattcacatactttacaattcaacatttaaaatgtacaattcaacggcttttagtaaatttgctgaattaggcaataattatcacaatcaattgtagagcattctcaacatcctaaaaagaaaccccctacccaggttattccctgttctccccacattgcttctacccctgaagcccctgctcctggctcasgccctggcaacactaatttactttccgtgtctgtggatttgcctaatctgaatatttcatatgtggttgattcttgagcaatgtggaggttatgggtgtcaatctcctatgcagttgaaaatctgtatataacttttgactcacccaaaacttaagtactaatag

SEQ ID NO: 210353 - DNA, 562 bp, Homo sapiens
agctttagctctgatttcagtttagacagcctggtttgaagtccaaacttcattaattatcagtggtgtatttgcaagtcacttctttgaatcttgaattcttcatgaatataatgggaataaaaaacacttaattcataaggttaatagatttgaacactgccacctgtttttaaccaaaatcctcaaaattcggaatcatatctgatttctcagtgctaggcatttaagagagtcccagtagtgttttgtgggaaaaaaatggatggacataatgagagtaattgctaacatttacatagtacttaccatgtgtctggcccacatctatgtgctttgaatatattaactcrttaaccacatagcaatagctataatggtcatcatggaatggaatattacttctttcctcaatgtggagctaaacttgtaggagtgctctgtgtgtgtgtgtgtgtctgtgtgtgtgtgcatagaggagagacaaatgaatacttattatttcagcgatcaggtctcagcccaagtttgctaaataaagaaaaattcttcctcgagccct

SEQ ID NO: 210354 - DNA, 661 bp, Homo sapiens
ggtacataaaatccaaagctaaaatgagaaaagaacccatattctcttttaatctcttctttatctacatgcatacacagggtgcttatgaatctacatgtgataaggtttgagtcctacctttgaagtcctctttttcttcttcttctggtttactccttgatctttccttttaatggcgcattcttcaatcctatttaagaaaaaagtctctgcagaatgtaatccagatcaaaatctaaatttcataagtcattcatataacttataaagaatcattttaatgttcacaaaagcattgacaaagaaattcgtgtttaagaattgagatagctttctaaaaaacaaaagtctaaactrtattttagaacttttcaatgggttctcataataatttataaagtgaatgagatgacataaaagggctttgtaaattataacacactatatatgtgctattctcatttttacataaccatattccatgttgttagtaattccaaataggctggtccatttctattttacaaattctaaatttaaaaaagttccttgcttcctagatacttcagaatggatcttttttggtgcttggtcttataatgtaaaatatatgagtcctataatcactatattttctgatatgtttacatacatttta

SEQ ID NO: 210355 - DNA, 553 bp, Homo sapiens
aagccatggattcaatcatttagcaggtactgctatctagaagtaagtagaaagacatgtagaatattactctggttaaccagtgaagggtcatctttttttctggatctggactgcagttcagtggattttagcccaacaagaagtgaatgacttaatccaagatttccttctatattccctcttgtactagcagtcagggactctagaaaattcartgtgagactccaaacctcaagtcccttcatatagggtacaaagcaatgctagcaattcatcacttttgttttgtttttgcttttgtttttcaggaaagatgacaaacttcctcatccttccagtcttccaaaatacattttcttaatatctaaatggggtaactgcctgggatagaataatgactaaaacataggtcccaggcctgagaagctcatagtctaatataagagactaatggagaagccagagattttctatttatgtaataaagtcatggggggaggtagaagtttgtagtagcacacaaaacagggcaactaaatctgcctaaaaa

SEQ ID NO: 210356 - DNA, 553 bp, Homo sapiens
aagccatggattcaatcatttagcaggtactgctatctagaagtaagtagaaagacatgtagaatattactctggttaaccagtgaagggtcatctttttttctggatctggactgcagttcagtggattttagcccaacaagaagtgaatgacttaatccaagatttccttctatattccctcttgtactagcagtcagggactctagaaaattcagtgtgagactccaaacctcaagtcccttcatatagggtacaaagcaatgctagcaattcatcacttttgttttgtttttgcttttgtttttcaggaragatgacaaacttcctcatccttccagtcttccaaaatacattttcttaatatctaaatggggtaactgcctgggatagaataatgactaaaacataggtcccaggcctgagaagctcatagtctaatataagagactaatggagaagccagagattttctatttatgtaataaagtcatggggggaggtagaagtttgtagtagcacacaaaacagggcaactaaatctgcctaaaaa

SEQ ID NO: 210357 - DNA, 581 bp, Homo sapiens
ataaatggaattgaaacaaacaaaaaatacaaaagataaatgaaacaaaaagctgtttatttgaaaaaataagcaaaaatgatagaccattagcaagattaaccaagaaaaaaaagagcagatccaagtaaacttaattagaaatgaaatgagagatattrcaactgatactacggaaatacaaaagatcattcaaggctactacaaacatttttatgtccataaactaggaaatctagaggagacggataaattcctggaaatatgcaactatcctagattaaatcaggatgaaatagaaactgaacagaccaataacaaatagtgagattgaaacagtaataataataataataaaaaaactgccgacaaaaaaagtccaggaccagatggattcacatctatcagacattcaaataagtagtggtatgaatcttactactattccaaaagatagagaaagagggactcctccctaaatcattctatgaaaccagtgtttccctaattcccacaccaagaaaggacacaacaaaaaaagaaaactacagaccaatatccctgatgaatacagatgcaaa

SEQ ID NO: 210358 - DNA, 465 bp, Homo sapiens
aaaactttagagcatatatctgagttacattcacttcttcatatcaataaaatcattacccatgaaataaactgttttggtgagtgatagaaactgctggagaccawcttgctctattaggatttctaaagccactttgcattcatatgaatcatggctaatgtagagggtgaagagtctggggagaaaaatgttaaaatcaggaaatatgaagttttggttgccaaggtttgtggggaataagtagttgggatttggggataggttatttcacaaaatattgattgtgaacaaaaaaccatgaacaaaagaatattatacttgactgaacattgagaaggtaatttttagtgaaagagaataagaatatcactagggatcttgtatccttttaactccataatgagtatgtagtatatacagagtttaaagaggggcttttgtaaaaaaaaaaaaaaaaaaaaa

SEQ ID NO: 210359 - DNA, 465 bp, Homo sapiens
aaaactttagagcatatatctgagttacattcacttcttcatatcaataaaatcattacccatgaaataaactgttttggtgagtgatagaaactgctggagaccatcttgctctattaggatttctaaagccactttgcattcatatgaatcatggctaatgtagagggtgaagagtytggggagaaaaatgttaaaatcaggaaatatgaagttttggttgccaaggtttgtggggaataagtagttgggatttggggataggttatttcacaaaatattgattgtgaacaaaaaaccatgaacaaaagaatattatacttgactgaacattgagaaggtaatttttagtgaaagagaataagaatatcactagggatcttgtatccttttaactccataatgagtatgtagtatatacagagtttaaagaggggcttttgtaaaaaaaaaaaaaaaaaaaaa

SEQ ID NO: 210360 - DNA, 482 bp, Homo sapiens
tacccaacttacaacaattttcttagaaataagtgcacatctattcttcatgtaaattttggtattcacagtagttactgtatgcctgttactacaatagaaattggcctgaaatagagattaagtttccatagataaraaattaatcaagagattctgaatataatctttcttggctgtcaatagtttcaaatgcctgtagttcacatttcccattcttaagaaggttgagacaaccaaattaattttagtagcttccaggcttcccagatgacaggtatgtccttgcgtgtatgaaagtaagctacctgtacgggcctaagaactttatgtggagggaaagagagtaagcatggtatgatggcagaagttgaagcaaccaccaagatgattatttacctttaccttgaaaaggaaatcttaactagaaaatatgaatagaacaatactttctcatctaacttgtattataacaagaattc

SEQ ID NO: 210361 - DNA, 481 bp, Homo sapiens
acccaacttacaacaattttcttagaaataagtgcacatctattcttcatgtaaattttggtattcacagtagttactgtatgcctgttactacaatagaaattggcctgaaatagagattaagtttccatagataaaaaattaatcaagagattctgaatataatctttcttggctgtcaatagtttcaaatgcctgtagttcacatttcccattcttaagaaggttgagacaaccaaattaattttagtagcttccaggcttcccagatgacaggtatgtccttgygtgtatgaaagtaagctacctgtacgggcctaagaactttatgtggagggaaagagagtaagcatggtatgatggcagaagttgaagcaaccaccaagatgattatttacctttaccttgaaaaggaaatcttaactagaaaatatgaatagaacaatactttctcatctaacttgtattataacaagaattc

SEQ ID NO: 210362 - DNA, 523 bp, Homo sapiens
atcagggcaatactggcctcatagaatgaatttggatgtattacctcctcatctatttttcagaataatttgagtaaaatttgtacttgttctttaaatatttggtagaactyagcagtgaagccaataggtcttggaatttactttgatagaagactttttactatgcttctatcccatacttgctattgttttttttttaaatttcttcattattacatcttagtacgttgtatgtgtttagaaatttatctgtttcttataggctttccaatttgttggtgtatagttgcttacaaaagtctataattatcctttaaatttctgtggtatcagttgtaatgtctccttttttgtctgtaatttttggggctcctcgattttcttagtctcattaaaattttctgaattttgtttatcctttcaaaaacttttcttttgatttcggtgatcttttgtactttttagtctcaactacatttattcctgttctggtctttattatttcttttatcctactaat

SEQ ID NO: 210363 - DNA, 523 bp, Homo sapiens
atcagggcaatactggcctcatagaatgaatttggatgtattacctcctcatctatttttcagaataatttgagtaaaatttgtacttgttctttaaatatttggtagaactcagcagtgaagccaataggtcttggaatttactttgatagaagactttttactatgcttctatcccatacttgctattgttttttttttwaatttcttcattattacatcttagtacgttgtatgtgtttagaaatttatctgtttcttataggctttccaatttgttggtgtatagttgcttacaaaagtctataattatcctttaaatttctgtggtatcagttgtaatgtctccttttttgtctgtaatttttggggctcctcgattttcttagtctcattaaaattttctgaattttgtttatcctttcaaaaacttttcttttgatttcggtgatcttttgtactttttagtctcaactacatttattcctgttctggtctttattatttcttttatcctactaat

SEQ ID NO: 210364 - DNA, 588 bp, Homo sapiens
tcctttaaatttctgtggtatcagttgtaatgtctccttttttgtctgtaatttttggggctcctcgattttcttagtctcattaaaattttctgaattttgtttatcctttcaaaaacttttcttttgatttcggtgatcytttgtactttttagtctcaactacatttattcctgttctggtctttattatttcttttatcctactaattttggattcactttgctcttgcttttctgattttttaagatgcatcattaagttgtttatttgtagtctttctactttttgatctaggtatttatcagtataaatttccctctcagtactacctttactgtatttcgtagattttggtatattttgttttcatttttatttgctttagaaatttttaaaacattttcttaattttgtcattggcccaatggttattcagaagcacagtgtttaatttccatgtatttttacaattcccaaagttcctctttttatcggtttctagttttattgtggttaccatgaggcttgcaaaaaaatacttttaaccaattattttaaactaatagcagccctgtaatcagagt

SEQ ID NO: 210365 - DNA, 547 bp, Homo sapiens
gatgtgaaactcacagatacagaggtccaactctatttacacagtattttttaaaagagaaaaactgaaactaaaaaaaatcttaaaagttcaaaaaaataaaaaagacaaatgaattcaatagtttttaaaataaagctatatcccaatattagatatcagcatagaaactaaatgggaatatgggggaaaataatatgatttgcctatttaacaaagttgatttaagaaatagcaaactttacattgaaataatatattctccactgttttattcttttactttaaaataatcacctgtaaaaactatgtcattatgtaaaaccatttggcagtttcttatgaagctaaacatgtacttaccrtattaaccagtaacctcgatcctttttctttactcaaattcatgcaaaaatttgtgcatgaatgtttataatagctttattcgtaattgccaattccttcaactcgtatatggataaccagaccgtgattcatctatgcaacataataccactcagtaatacaaaaaaaagtaactcctggg

SEQ ID NO: 210366 - DNA, 584 bp, Homo sapiens
cttcacatattaatgttctataacatcatcagatgttgaacagagagttgccaaataagacatactttaataaagagaaagataaaaacaaacaggtcattccatgaagttagaaaaagtagtctagaagcaatcattccccaaatctagacagctagatgttcacacatagatgggagcatggagggagtttcctgttccaggtttaaaacttctatttgacagtttcgagtttagtgttctccctgctgcacctgttattctgcaggtgtgattccgcagttggtgacacttgattaaaatgaggagggcaatgacagaaaatcagcaacaggtgttcctaagcaaatacasatttaatgtacattctgaaagtttttctcatttttattgatgctgtcacttgaacacttagatttcttttctttattgtaacatttttatgaaacatcaagtagagattcatatgtgggtacatagaaggtgtatatatttatggggtacatgagatattttgatgcaggcattcaaagcataataatcacatcaaagtaaatgaggtgtctatcacctcaagcatttct

SEQ ID NO: 210367 - DNA, 570 bp, Homo sapiens
agtaatgttctcaagatcacacagcctagaaagacaaaatagccctgcttagttctctgtttcaagtcggtgattttaacttcgtttttagtcttcaaagatgtgagtttttcttgattttatatttgtttagtaataaaggctaatgtgttaacagtaataatataaaataatgtttctttttttaccaaagattttatcttttgaaccacaggtagaaactgtgcctatatgaatgtggagtaaatctaaatttactaattaggtaaattacttatatagtaatatcrcacagcaggatttagaaatgtcagttgtgggttttctaggctactcagagcattcagcacaacccacagcaaggcattatgttcaaatgatgtataattccctgatgttattttagacagcttgtatataaatgagtacagaagaaaggagtggagttggcgtgggaatataagaaaacatgtgttgaggggcaaagcaggataaccaaatagaaggctccaaaaatcattgcccctgcaaggacattaatttaacaattatctacacacaaaaaacacc

SEQ ID NO: 210368 - DNA, 546 bp, Homo sapiens
tatataaattaaaactttcactcaagagtgaaaattaaacattctcgggcatataaactgtaattttttttacagtataaatcttaattggaatttcaaaaggttgtaaaagcaatagaagaaaagaatgtgaagcaagaaacataacagaagcatgttttaatcaaacatataggtctttgaaattaaatatttacatgtaaaacaataaccactttttgtggtaaattagaaacaagtaacttttttgtaatagtccatattggcttctataacaaaatacctcaaatgtggtagcttataaataacatacagttatttctcccatttctaaaggctgggaaatcgaaactgacggcaccagatttggtgtctcagagatgcccagtttattggtataaaccaargtgtctataaagacacatttcttactgttacttcacatggtagaagagccagagggtctttcttggtcccatttatgagggccgcatccccatgacttaattgcctcctgaagaccccacctcctaccatttgcatggg

SEQ ID NO: 210369 - DNA, 258 bp, Homo sapiens
gcctgtgataggaggggttgccttaaaggtctctgacatgccttgttgacatttatcccattgtcccattgtcttggtgataaacattcagctcctgattacttatgcaaatttatgsagatggcttgaatttattctctaaaatgggtttttccttttctattgcattaccaggctgcaaattttccaaatttttatgctctccttccattcaaatgctttgctgcttagaaatttcttctgctgaatatcctaaac

SEQ ID NO: 210370 - DNA, 258 bp, Homo sapiens
gcctgtgataggaggggttgccttaaaggtctctgacatgccttgttgacatttatcccattgtcccattgtcttggtgataaacattcagctcctgattacttatgcaaatttatggagatggcttgaatttatyctctaaaatgggtttttccttttctattgcattaccaggctgcaaattttccaaatttttatgctctccttccattcaaatgctttgctgcttagaaatttcttctgctgaatatcctaaac

SEQ ID NO: 210371 - DNA, 526 bp, Homo sapiens
ggcttgggcgtatgcctgcagcggcagaaaaatgtataggaacaaacacacaactctctctcccaaataagcacaacaaagaaacacagaagcagtccaagcctttaataaactctcccaccctaaatccttaaaaactcttagtctgtaagagagtgtgcctctaacctaacacagacaaacacccctctcaggtttgttttctctaaaataaacctgtcttaaccatcaagccacctttcatgtttctttcctctttctttaattcttacgataagcacctcaataacacaaacatgaacaacattaatagaagtattgcaaaaatcagaaaacaaaattcaacaaatatcaattgagtwaaactttccccagaaaaacaaacataaagccccttgatgtactcattccaaatgggtttaagtatactcaagcaaataattggatattttaaagttgtgttaaaaaagaaattaaaaataactaagaacacaacagataacatgtaagaaaaaggtaactggat

SEQ ID NO: 210372 - DNA, 646 bp, Homo sapiens
gaattcagccaccatggctattctcgtaagttcttgagttcctggagctttcccaggtgcagggtagaagctgctggtggatttamcattctggggtctggaggccagtgcgccctttccacagctccagtaggcagtgcctaactagggacttcaggcctccaaccccacatttcccctctgcacttccctagtagaggtcctctataggggctctttccctacaggagccttctgcctggacatccaggcttttttacacatccgctgaagtctaggcagaaggtgtcaagcctaattcactcttgcattccgtgcacccacagtcttagcaccatgtgaaaccacacaaggcttatagcttgcacaccctggacctatggcctgagctatacctaagccccactgagctgaggctggaacaagatcatctatgatgcaaaagcaatgttctgaggctgtgcagggaagtgaggccctggacgtggcctatgaaaccattcttccctcctaggcctctgggcctgtgatgggaggggctgccacaaaggtctctgaaatgccttcaagactttttcctgattgtgttagatagcagcatctgccacccttttagttatacaaattcctctcacaataaattgct

SEQ ID NO: 210373 - DNA, 646 bp, Homo sapiens
gaattcagccaccatggctattctcgtaagttcttgagttcctggagctttcccaggtgcagggtagaagctgctggtggatttaacattctggggtctggaggmcagtgcgccctttccacagctccagtaggcagtgcctaactagggacttcaggcctccaaccccacatttcccctctgcacttccctagtagaggtcctctataggggctctttccctacaggagccttctgcctggacatccaggcttttttacacatccgctgaagtctaggcagaaggtgtcaagcctaattcactcttgcattccgtgcacccacagtcttagcaccatgtgaaaccacacaaggcttatagcttgcacaccctggacctatggcctgagctatacctaagccccactgagctgaggctggaacaagatcatctatgatgcaaaagcaatgttctgaggctgtgcagggaagtgaggccctggacgtggcctatgaaaccattcttccctcctaggcctctgggcctgtgatgggaggggctgccacaaaggtctctgaaatgccttcaagactttttcctgattgtgttagatagcagcatctgccacccttttagttatacaaattcctctcacaataaattgct

SEQ ID NO: 210374 - DNA, 646 bp, Homo sapiens
gaattcagccaccatggctattctcgtaagttcttgagttcctggagctttcccaggtgcagggtagaagctgctggtggatttaacattctggggtctggaggccagtgcgccctttccacagctccagtaggcagtgcctaactagggacttcaggcctccaaccccacatttcccctctgcacttccctagtagaggtcctctataggggctctttccctacaggagccttctgcctggacatccaggcttttttacacatccgctgaagtctaggcagaaggtgtcaagcctaattcactcttgcattccgtgcacccacagtcttagcaccatgtgaaaccacacaaggcttatagcttgcacmccctggacctatggcctgagctatacctaagccccactgagctgaggctggaacaagatcatctatgatgcaaaagcaatgttctgaggctgtgcagggaagtgaggccctggacgtggcctatgaaaccattcttccctcctaggcctctgggcctgtgatgggaggggctgccacaaaggtctctgaaatgccttcaagactttttcctgattgtgttagatagcagcatctgccacccttttagttatacaaattcctctcacaataaattgct

SEQ ID NO: 210375 - DNA, 644 bp, Homo sapiens
tctcgtaagttcttgagttcctggagctttcccaggtgcagggtagaagctgctggtggatttaacattctggggtctggaggccagtgcgccctttccacagctccagtaggcagtgcctaactagggacttcaggcctccaaccccacatttcccctctgcacttccctagtagaggtcctctataggggctctttccctacaggagccttctgcctggacatccaggcttttttacacatccgctgaagtctaggcagaaggtgtcaagcctaattcactcttgcattccgtgcacccacagtcttagcaccatgtgaaaccacacaaggcttatagcttgcacaccctggacctatggcctgagctatacctaagccccactgagctgaggctggaacaagatcatctatgatgcaaaagcaatgttctgaggctgtgcagggaagtgaggccctggacgtggcctatgaaacyattcttccctcctaggcctctgggcctgtgatgggaggggctgccacaaaggtctctgaaatgccttcaagactttttcctgattgtgttagatagcagcatctgccacccttttagttatacaaattcctctcacaataaattgctccacaacctgcttgaattc

SEQ ID NO: 210376 - DNA, 644 bp, Homo sapiens
tctcgtaagttcttgagttcctggagctttcccaggtgcagggtagaagctgctggtggatttaacattctggggtctggaggccagtgcgccctttccacagctccagtaggcagtgcctaactagggacttcaggcctccaaccccacatttcccctctgcacttccctagtagaggtcctctataggggctctttccctacaggagccttctgcctggacatccaggcttttttacacatccgctgaagtctaggcagaaggtgtcaagcctaattcactcttgcattccgtgcacccacagtcttagcaccatgtgaaaccacacaaggcttatagcttgcacaccctggacctatggcctgagctatacctaagccccactgagctgaggctggaacaagatcatctatgatgcaaaagcaatgttctgaggctgtgcagggaagtgaggccctggacgtggcctatgaaaccattcttccctcctaggcctctgggcctgtgatgggaggggctgccacaaaggtctctgaaatgccttcaagactttttcctgattgtgttagatagcagcatctgccacccttttagttatacaaattcctctcacaayaaattgctccacaacctgcttgaattc

SEQ ID NO: 210377 - DNA, 561 bp, Homo sapiens
cacaatcatttatcagtctctaagaaattccaaacttgtctycatcttcctgtcttctttgagccctccaaacttgtccaacttctgcctgttacgtggatcccaagctgcttccacattttcagggatcttcatagcagtgtgccaataatcagtactaattttctgtattaagccattgttgcattactataagtaaatagctgacactgggttatatatagagaaaagagatttaattgaatcatggttgtacatgttttagagaaaccatggtcgtggcatccttctaaggaggcctcaggaagattgttatcatagcagaagatgaagaaggaaaatcacatgcacatggaaaaagaaggagtaagtgagagagagtcgggaagggagagagagagtagtgggggaggtgccacacattcttaaatcaccagaactcatgtgaactcagaacaagagctcacttatcatcaaggagatggcctaagccattaatgaggaatctgcccccataatccaaatacttcccatgaatacccacttccaacactgaggaat

SEQ ID NO: 210378 - DNA, 483 bp, Homo sapiens
cattgctaagacataactcaagtgacctttgctccaattcccaatgagttcctaatttccttctcagaccttagcagactggacttcactgtccatattactatcaacagtttgggcacaatcatttatcagtctctaagaaattccaaacttgtcttcatcttcctgtcttctttgagccctccaaacttgtccaacttctgcctgttacgtggwtcccaagctgcttccacattttcagggatcttcatagcagtgtgccaataatcagtactaattttctgtattaagccattgttgcattactataagtaaatagctgacactgggttatatatagagaaaagagatttaattgaatcatggttgtacatgttttagagaaaccatggtcgtggcatccttctaaggaggcctcaggaagattgttatcatagcagaagatgaagaaggaaaatcacatgcacatggaaaaagaaggag

SEQ ID NO: 210379 - DNA, 561 bp, Homo sapiens
cacaatcatttatcagtctctaagaaattccaaacttgtcttcatcttcctgtcttctttgagccctccaaacttgtccaacttctgcctgttacgtggatcccaagctgcttccacattttcagggatcttcatagcagtgtgccaataatcagtactaattttctgtattaagccattgttgcattactataagtaaatagctgacactgggttatatatagagaaaagagatttaattgaatcatggttgtacatgttttagagaaaccatggtcgtggcatccttctaaggaggcctcaggaagattgytatcatagcagaagatgaagaaggaaaatcacatgcacatggaaaaagaaggagtaagtgagagagagtcgggaagggagagagagagtagtgggggaggtgccacacattcttaaatcaccagaactcatgtgaactcagaacaagagctcacttatcatcaaggagatggcctaagccattaatgaggaatctgcccccataatccaaatacttcccatgaatacccacttccaacactgaggaat

SEQ ID NO: 210380 - DNA, 658 bp, Homo sapiens
tttagacagagaaatcaaaatagctatgttgaggaatctcaaagaaattcaagataacacacagagagaattcagaattctaacagraaaatttaacaaaaagaataaaataattaaaagaatcaagcagaaattctgcagctgaaaaatgtaattggactattgaagaatatttcagtatctctaacttttagaactgatcaagcagaagaaagtattactgagctttaagacaggctatttgaaaatacacatcaaagagacaaaaggaaaaataataataataaagcatgcctcaaatatctagaaaatagcttgaaaagaggaataataagagctttggccttaaagaggaggtagacaggaataggggtagaaagtttattcaaaagataacatcagagaacttcccaaaattagagaaagatatcaatattcaagtaaagaaagttatagaataccaaacagatttaatctaaagaaaactacctcagggtattaaataatcaaactcccaaaaatgaaggataaagaaagcttccttaaagcagcaagatgaaataaacacaaaacatataatagagctccagtatgtctagtccagactttcagtgaaaacattatgggccagcagacagtgttatgatatattaaaact

SEQ ID NO: 210381 - DNA, 658 bp, Homo sapiens
tttagacagagaaatcaaaatagctatgttgaggaatctcaaagaaattcaagataacacacagagagaattcagaattctaacagaaaaatttaacaaaaagaataaaataattaaaagaatcaagcagaaattctgcagctgaaaaatgtaattggactattgaagaatatttcagtatctctaacttttagaactgatcaagcagaagaaagtattactgagstttaagacaggctatttgaaaatacacatcaaagagacaaaaggaaaaataataataataaagcatgcctcaaatatctagaaaatagcttgaaaagaggaataataagagctttggccttaaagaggaggtagacaggaataggggtagaaagtttattcaaaagataacatcagagaacttcccaaaattagagaaagatatcaatattcaagtaaagaaagttatagaataccaaacagatttaatctaaagaaaactacctcagggtattaaataatcaaactcccaaaaatgaaggataaagaaagcttccttaaagcagcaagatgaaataaacacaaaacatataatagagctccagtatgtctagtccagactttcagtgaaaacattatgggccagcagacagtgttatgatatattaaaact

SEQ ID NO: 210382 - DNA, 598 bp, Homo sapiens
tgatatataatctactgcaagccagatactcaattatgagtttrccagcaaagtaaattcatgtccatatgttataaggagatgaaagtcggtttgtagataaagaattagactgaagtctctttttctttttaaataaaaatttcctttcctttcaacatttctaaaagtatacctataattgccacgttaataattttttaccatgttatattatcttatttatgttatatttctgttatctttctcacttttcttggaaaacaataaaaaagtactcgtggtgtatgcactgtcaaattgtaagtaatgttttgaattaatatttatatatctgaggtaactttatacatgagaccaaaattgaatataacttttaaatttttggttaaaaaaacagtctctaaaccacatttcagggtcggtgtatcttctaaaaattttcaacatgtgcacccttgttatttgcacagtgtttgcagtttgaaattcattatcacattttattctaaattgcaatcaccataaaaaatgtataaacattattacatcacagagaaaattgagaccaaaggagaatgttttctttagaaaatta

SEQ ID NO: 210383 - DNA, 598 bp, Homo sapiens
tgatatataatctactgcaagccagatactcaattatgagtttgccagcaaagtaaattcatgtccatatgttataaggagatgaaagtcggtttgtagataaagaattagactgaagtctctttttctttttaaataaaaatttcctttcctttcaacatttctaaaagtatacctataattgccacgttaataattttttaccatgttatattatcttatttatgttatatttctgttatctttctcacttttcttggaaaacaataaaaaagtactcgtggtgtatgcactgtcaaattgtaagtaatgttttgaattaatatttatatatctgaggtaactttatacatgagaccaaaattgaatataacttttaaatttttggttaaaaaaacagtctctaaaccacatttcagggtyggtgtatcttctaaaaattttcaacatgtgcacccttgttatttgcacagtgtttgcagtttgaaattcattatcacattttattctaaattgcaatcaccataaaaaatgtataaacattattacatcacagagaaaattgagaccaaaggagaatgttttctttagaaaatta

SEQ ID NO: 210384 - DNA, 426 bp, Homo sapiens
cacaggtgtaaccaaaataccatttttaggaaattctagtggcaggaaaatgggaaaaacaactaactgtatagctaaattgtcacataatgattaagtacagtattagtttgctagggctgtcataataaaatagtacacactgagaagcttaaatagcagaaatttattttctcacatccttggaggctagaagtccaagatcaaggtttcaacaggcttaaacaacttctaaggtctcttttcttgtcttgaagtttgtaggggatcggtcagcgtggtgggaaaattataagaaaagtatagggaaagatgcaaacctactttgaaggcygggaggttttgcaaaagctttggaaaagaattatcgctgaaggcagccaaattgtcttatccagaggttgagagcaaagggcagataacaag

SEQ ID NO: 210385 - DNA, 426 bp, Homo sapiens
cacaggtgtaaccaaaataccatttttaggaaattctagtggcaggaaaatgggaaaaacaactaactgtatagctaaattgtcacataatgattaagtacagtattagtttgctagggctgtcataataaaatagtacacactgagaagcttaaatagcagaaatttattttctcacatccttggaggctagaagtccaagatcaaggtttcaacaggcttaaacaacttctaaggtctcttttcttgtcttgaagtttgtaggggatcggtcagcgtggtgggaaaattataagaaaagtatagggaaagatgcaaacctactttgaaggctgggaggttttgcaaaagctttggraaagaattatcgctgaaggcagccaaattgtcttatccagaggttgagagcaaagggcagataacaag

SEQ ID NO: 210386 - DNA, 486 bp, Homo sapiens
agtaatttaagtgaaaaaatatagtttgacaataccatagctgacacgtgcacaaatacatatgcatgagtatatataaagtctaaaattatgtatatacctataaatcattgttaaagcacattcaaaagaataacaaaaataaaatgaattcgaacagtgataattgtggaagtagatattgtgtaaaaaaatttacttgaaagtgaagcaaaatataactgttcagtaatgatgggaaraagtcatagtgttcagaaaaaggtagtttagacatttttaagaaaacaactcatgagtatttttgtaggtggatgttacaaggaactctagtgggtgaagagcaaacagttcagggactaaatcaaacttcaagagagtgcatgttttatgtaatctggtccaaactttaccatattttaaaaaatacttaaaatactatttttatttaaattccttcaatgtatttcaatgacaatttatttt

SEQ ID NO: 210387 - DNA, 486 bp, Homo sapiens
agtaatttaagtgaaaaaatatagtttgacaataccatagctgacacgtgcacaaatacatatgcatgagtatatataaagtctaaaattatgtatatacctataaatcattgttaaagcacattcaaaagaataacaaaaataaaatgaattcgaacagtgataattgtggaagtagatattgtgtaaaaaaatttacttgaaagtgaagcaaaatataactgttcagtaatgatgggaagaagtcatagtgttcagaaaaaggtagtttagacatttttaagaaaamaactcatgagtatttttgtaggtggatgttacaaggaactctagtgggtgaagagcaaacagttcagggactaaatcaaacttcaagagagtgcatgttttatgtaatctggtccaaactttaccatattttaaaaaatacttaaaatactatttttatttaaattccttcaatgtatttcaatgacaatttatttt

SEQ ID NO: 210388 - DNA, 586 bp, Homo sapiens
tgtgtgtgtatatatatataacacatgcatatatatgtatatgtatatatatgtgcgtgtgtgtatatatatacactatatgtacatatatgtgtgtgtataaatatatataatgagattaacaaaacagagtctttgtgaaaataagatattaaattataaacaaagacctaaggccattgatgacctatggtcaggccatcratcttgctacatagcatccttctgttaacataaaacatttctttctactggcttcaagtttagacagaaactcctttgactaactgcaaattaaagaatgttcaaatccccctatgacttgtaagaacccacttcaaggtatcctgctttgttggggctaaccagtgtttatgtttcgtacattggtttatgctttcgcctgtaaatttttcctccctgaaatgtataaatctaaactgtgatctgactgcctcagctgccctttctcagtactccttgagactgcttccctaggctacagtcactcatattggcccagaacaaagctctttaaaaagcactgtgcagagttaggtttttccacttgcaaatagaaatagca

SEQ ID NO: 210389 - DNA, 586 bp, Homo sapiens
tgtgtgtgtatatatatataacacatgcatatatatgtatatgtatatatatgtgcgtgtgtgtatatatatacactatatgtacatatatgtgtgtgtataaatatatataatgagattaacaaaacagagtctttgtgaaaataagatattaaattataaacaaagacctaaggccattgatgacctatggtcaggccatcaatcttgctacatagcatccttctgttaacataaaacatttctttctactggcttcaagtttagacagaaactcctttgactaactkcaaattaaagaatgttcaaatccccctatgacttgtaagaacccacttcaaggtatcctgctttgttggggctaaccagtgtttatgtttcgtacattggtttatgctttcgcctgtaaatttttcctccctgaaatgtataaatctaaactgtgatctgactgcctcagctgccctttctcagtactccttgagactgcttccctaggctacagtcactcatattggcccagaacaaagctctttaaaaagcactgtgcagagttaggtttttccacttgcaaatagaaatagca

SEQ ID NO: 210390 - DNA, 586 bp, Homo sapiens
tgtgtgtgtatatatatataacacatgcatatatatgtatatgtatatatatgtgcgtgtgtgtatatatatacactatatgtacatatatgtgtgtgtataaatatatataatgagattaacaaaacagagtctttgtgaaaataagatattaaattataaacaaagacctaaggccattgatgacctatggtcaggccatcaatcttgctacatagcatccttctgttaacataaaacatttctttctactggcttcaagtttagacagaaactcctttgactaactgcaaattaaagaatgttcaaatccccctatgacttgtaagaacccacttcaaggtatcctgctttgttggggctaaccagtgtttatgtttcgtacattggtttatgctttcgcctgtaaatttttcctccctgaaatgtataaatctaaactgtgatctgactgcctcagctgccctttctcagtactccttgagactgcttccctaggctacartcactcatattggcccagaacaaagctctttaaaaagcactgtgcagagttaggtttttccacttgcaaatagaaatagca

SEQ ID NO: 210391 - DNA, 438 bp, Homo sapiens
acagatgtggagaactgggttcttgcaccatcraggattttaggacaggtgtacagttctcaaagacgctgaattactcacctccagttatgaacaacattttctcttttccccagtacgatagataatattatacaccagtgtgtgtcatctacatgaaaagtttgggaaacactctactagcccataggtactgacacgcagagcataaatacctgctgtagctacccaatttctagtcactagtgatgatgcaccagtgaaccaaatgaaccatacaccttcccacccatgtgaagcttttattttatttgtgtggagaaaggaaattaagcaaataaccaataaacatgtaaaaattcaggcgaccctaaatgctactaagacaaaaaagatcacatgtgaagaatgcattttcctgttggggccacagcggta

SEQ ID NO: 210392 - DNA, 438 bp, Homo sapiens
acagatgtggagaactgggttcttgcaccatcaaggattttaggacaggtgtacagttctcaaagacgctgaattactcacctccagttatgaacaacattttctcttttccccagtacgatagataatattatacaccagtgtgtgtcatctacatgaaaagtttgggaaacactctactagcccataggtactgacacgcagagcataaatacctgctgtagctacccaatttctagtcactagtgatgatgcaccagtgaaccaaatgaaccawacaccttcccacccatgtgaagcttttattttatttgtgtggagaaaggaaattaagcaaataaccaataaacatgtaaaaattcaggcgaccctaaatgctactaagacaaaaaagatcacatgtgaagaatgcattttcctgttggggccacagcggta

SEQ ID NO: 210393 - DNA, 439 bp, Homo sapiens
gacagatgtggagaactgggttcttgcaccatcaaggattttaggacaggtgtacagttctcaaagacgctgaattactcacctccagttatgaacaacattttctcttttccccagtacgatagataatattatacaccagtgtgtgtcatctacatgaaaagtttgggaaacactctactagcccataggtactgacacgcagagcataaatacctgctgtagctacccaatttctagtcactagtgatgatgcaccagtgaaccaaatgaaccatacaccttcccacccatgtgaagcttttattttatttgtgtggagaaaggaaattaagcaaataaccaataaacatgtaaaaattcaggcgaccctaaatgctactaagacaaaaaagaycacatgtgaagaatgcattttcctgttggggccacagcggta

SEQ ID NO: 210394 - DNA, 419 bp, Homo sapiens
cttactcatgatagccaaaaggtagaatcactccaaacatgcagcaacagaggaactgataaaatgcagtatacacattaaataaaatattaattatcattacaaaataagttaaaatttgatacatcttacagcctggatgaaccttgaaacattatgtttaccaaagttagccaggcacagaaagacaaatattgcatgattccacttatataaagtacctagaacagtaaaattcatagagatagaaagttgaataaccagagactcaggagagggaaaatgggaaagtacccattaaacaatgggtacaaagttttacttttgcaagacgaaaagacttctgtatttcaatagtaycattggttgcacaacaatatgaatatacgtagtgttatttaaatgcacacattagagtt

SEQ ID NO: 210395 - DNA, 506 bp, Homo sapiens
cctaaactcctgcttggtgagatcatgcaataactttgataaatggtgcttgagtcagtgaaaagacatttataggttctctggaaccctaagattgaagagcattaaaataagcagtgaaaggtgctaaatcaacaaaagtgatacaatttctggttttattttaagagaaaaacagtctctatataactaaatcaatgcctcatttagcccttcttccttagccattatttgccatgttaattccctttctagttcaggtcttgctctataatcctgtcgggttcttcccctgttttctaatagagctcattcttcaaattttaaataactctwtgcaaatttccaaatacatctaggggacccgttcattctattcagtctgcattatgttactttctttaatgcagcctttgctttacttactttatagactgccttaggtgcctacttctattacttcctgctagatccccctactaagaaataagatagaaaaatattga

SEQ ID NO: 210396 - DNA, 571 bp, Homo sapiens
tcacttatatatataatatatattatataatatatcatacattatatataatatcatatatcatatatatcataataatacaatataatataatatatgatgtaatataattatatataatatatgtttaactatatgatatatattatatataawatattatattatatattattctattaaatattatataatatatatattttttgagatggagtttcattcttcttgcccaggctggagtgcagtggggtgatctcggctcactacaacctccgcttcccaggttcaagtgattctcctgcctcagccgcctgagtagctgggattacaggcacatgccaccacatctggctaatttgtattcttagcagagacggggtttctccatgttggtcagattggtctcaaactcctgacctcaggtgatcctcccgtctcggcctcccaaagtgctgggattacaggcgtgagccactgcacccaacctctcattgatactaatgttcactttgcctgagaaagaagagaggcaacatttgttactggaaaatttagtatctcattaata

SEQ ID NO: 210397 - DNA, 399 bp, Homo sapiens
tacatgtttttagttatctttctaattttcttgattaatagtatcccataaatagcatacataatctcactactccccatacgagtgtaagtttcctgatgctaaaattctttataactattcattaattacaggaagtcgtgttctatgtgttgactaaacagcaattatttggaggtcaggttcattttccttcacttgcttatcctctaaatacaacatatacctgaactcatgaaatatgcttacaatggaccatagctgaaatattccatttgtgagttatgtttgtttctctatatgtcatgcactccatttctggagagagacagtgagaggaagagaggcagaaagagaggaaggcaagaggacatrgtaggtacacaatatatagtatga

SEQ ID NO: 210398 - DNA, 623 bp, Homo sapiens
agcacaaaaaataatgtcccattcaatatatagttactggctgcattatttactgttttattttattttgttttttaattgtggtaatggcacttaatgagaactaccttttaaacaatttttaagtgtccgatacagtatcattaactgtaggcacagtgttgtacagcctttagaacttattcrtcttgcacatctaaatctttatacacattaaacagcaacaactcatttccctctcactcagcccctggaaaaccaccatttattctattcttgacactgtgagtttgacattttcagattcctcatataagtaagatcatgcagtatttgttctgttactggcttattttacattacataatgtctttgaggttcatgcagcagtgaacataggagtgcaggtatctctatgagatcccgattataattctattggatgtggacaacaggtatataaaaagataatcaacaacactagtcatcagaagaatataaatccaaaccacaaggagatatcacctcatactagctaggatggctatcatcaaaaaacaagacaggtgttgatgaggttggagagccatacatgttcggtgggaatgaaacggcataggaat

SEQ ID NO: 210399 - DNA, 267 bp, Homo sapiens
aaagatttctaaattaatatatgattaatctcatatatcaaagttatctctttattattgctttatgcaattttcttgtatatttttaaaatttagcagctatatttgcatttttatatagatattatcctttttayatgtaacataagagctaaaaagacaatgatctttccttcaaagaattatagcatgtctatctcatgtcaacacataaaaattatttttaattaaaactcatggtttgttaaaatgatgacttactgcaac

SEQ ID NO: 210400 - DNA, 588 bp, Homo sapiens
ttaggctagtgagaaaagttaagtagaatgtaacaatgacatttagcaggactagaacaagacacaagtattattcatcagtattttacagaaaataaaatgtattttttttgacacagggtcttgctctgtcacccaggctggagtgcagtggtataaacatagctccctacagcctcagcctctggggttcaagtgatcctccttcctcagcctcctgactggctgaaaccacagtcatgtccccacgcctgtatgattwttattattattattattattattattattattattattttctctagagacggggtctcatcaggtatcccaggctggtcttgaagccctgggctcaagcaatcctcctgctttggccttccatagttttgggattacaggcatacgccaccacacctagcaaataatgtaaattttgataatccattgtaaaagataaaatgatgaaaatgataaaacatctcctgatgtccatcctgggggaatagataaaatattacaccaccagccaatgaagaacacgtgactaaaaaaggatttcccgaggaaattatggccattgaatct

SEQ ID NO: 210401 - DNA, 588 bp, Homo sapiens
ttaggctagtgagaaaagttaagtagaatgtaacaatgacatttagcaggactagaacaagacacaagtattattcatcagtattttacagaaaataaaatgtattttttttgacacagggtcttgctctgtcacccaggctggagtgcagtggtataaacatagctccctacagcctcagcctctggggttcaagtgatcctccttcctcagcctcctgactggctgaaaccacagtcatgtccccacgcctgtatgattattattattattattattattattattattattattattttctctagagacggggtctcatcaggtatcccaggctggtcttgaagccctgggctcaagcaatcctcctgctttggccttccatagttttgggattacaggcatacgccaccacacctrgcaaataatgtaaattttgataatccattgtaaaagataaaatgatgaaaatgataaaacatctcctgatgtccatcctgggggaatagataaaatattacaccaccagccaatgaagaacacgtgactaaaaaaggatttcccgaggaaattatggccattgaatct

SEQ ID NO: 210402 - DNA, 440 bp, Homo sapiens
tgccactttgttaaactttttttctgatgattttttatattattgtgagaaagtatagtcagagtttatgtgtaaactttgcataaaataatctacattttgcagttttactagtaccctgagttttaaaatgaaattctttaaatcatacattacgkattcaaatataaaccacttacaataaccaatatgcctacagtcaaaatgaatatattttcaatacacaatttaaataatgcatcagttttatgtagttctatttatatgagctatattaaatatgcaactgagattgatgtatagctaattattctcattccaaatagcccgtatgacttaattttgtttcatatttgaaaagtcagagaatcacctgcagcaattgcaaaatattgggatgtatgtgggagataggtcatatttttagaacacagaacaag

SEQ ID NO: 210403 - DNA, 513 bp, Homo sapiens
ccatttgcagcagggaggagaagcctggcccctccttttcctgggtggaacttgggattcaaacaacgaggcagaaagcactctagcaaggactcaggccttgaagagagtcccttttccccccttttcttccttttcactcaataaagccttgtgttactcacccttaaaagcatctgccagcctaaactttcaaggctgtgggacaaggacctgtctttagctgaactaaggaaaagccctgtaacaccacagcatgtcactttaacttgatgatttctgtaaaacccataactccaaagaaggtcacattctgagttactgggggctagggcttcaatataygactttttcatggggagaggacaccactcaagcgacaacactaaagcaaaataacaaatagcaccaagaaaaaaataaaaacatattgactgtgtaaatttgttctttgagcccatattaaagatattagttaagcaaaatcacaagtgttgacttgaccaaaaaggg

SEQ ID NO: 210404 - DNA, 580 bp, Homo sapiens
catacatacataatgaacattatctatctatctatctatctatctatctatctatctatctatctatctaatgccacccatacaagttaggggtacaataagtgtcataacactagtaatcaaattttgcaggctgattgttatcacatgctaatgtgggacttctgtcactttacaaagtccccctaagtatgtctcacaagtgctcatggacaagtctgcttcagccagacaccactggtactcagtcctcacttagctggacattggtctccttcccactttgctgggcagatggtggctggcaccctgttagtcactctgggtgttcttgctgctcctgagcatatggagtccttgctggccaggctcagcattgctcagccagagaagcagtgtctccatttgctctgccagggattttgytcctctgctgctgaggctctgggtggatacactgctgctgtgctggacagcctgcacaccaggcatgccatgcccttctgcagctccattcacccaggagtcaaatagatggatctgtttgttatgtgttatattctatatgttatgtgctaat

SEQ ID NO: 210405 - DNA, 531 bp, Homo sapiens
accagtcagaatagctatttttaaaaagtcaaaaaataacagatattggtgaggtttcagagaaaagagaatgcttatatgctgctggtgagattgtaaattagtttagccattgtggaaaacagtgtgatgattcctcaaagaactaaaaacagaactaccatgaaacccagctatctattgcattactgggtatatacccaaaggaatagaaattgttctaccacaaagacacagacacatgtatgttcattgcaacactattcacaatagcaaaaacatgaaatcaacctacatgcctgtattagtccattttcacactgctgataaagacatacacgagactgsacaatttacaaaagaaaggtttaaaggacttatggttccacacggctggggaggcctcacaatcatggtggaaggcaatggggagcaagtcacatcttacatggatgtcagcaggcaaggagagagcttatgcagggaaattttccccttataaaaccatcagatctcatcagacttattcac

SEQ ID NO: 210406 - DNA, 417 bp, Homo sapiens
gcaatgtttattcagaattcaatgagagattctaaattctggacctgtaaaagtagccaggaaagagtctcttcatcaaatctgaatttctcttggttaaggagaaagcccatactagaaaagtttactttaaaagttggaatgtttcacagcaacaattgtttgactgtaacacaccagattatagtagtcccctctaatccatggtggatacctcccaagacctccagtggattcctgaaatcacagatagaactgaactctctatatatgtactatgtatttttgaactgataaccaacagggttactaattggctaaggggcaggtagcctatacagcatgggcatgccagacawagagaagattcatttaccagcatggaaggagtgggatttcatcatgctactcagcaca

SEQ ID NO: 210407 - DNA, 516 bp, Homo sapiens
aaacacacataaatttaaatgcaaaaaaatcataagagagactggaattgatttatataatattgaggggagaaaggacttgaagtttatgtgtagaaaatcaaaagcacaaattattttctttaaaaagtggatatttgactacataaaaattaaaacttttatactaaaaaaagaaarcataaataaaattgcagtacaaatgaaactgagggaaaatatttgcaacatatatatcaaagcatttctttaagctatgaagaggctcatataaattgatcaggaaaagatgaacatatcaatgaaaatattgcaattttcaaactaagcaacagaagttaccaataaaaatatggaagaaaaaagtattcagcttcactaggaatcaattacaaataaatagaaaacattttctcctatcaaattggctattttagaaaaatgatagtccgtgatgtccatgaaattgaattgaagttattggtgttttatttggctgagaggagtgtaattggt

SEQ ID NO: 210408 - DNA, 613 bp, Homo sapiens
taccatatggcttccactgttagctaataaaaatatattataatacagtgtttacattgtacatcatgtaggcaagctaagtgaaataatattttagagtcttaagcaataatttttaaaaacttgtataaatttgctttactcagacatgtcattccttcattacagttgttgctcagaatagggagttgtttctttaaataaatagaataacttgttttcaaactattattcctcttgaaataatctatcacttacattataactatacaatcataaaagaaattttaatcataaaagtcacaaaaatatattcctacttttattctaaacktccccattcccagtttttgctattctaactggcaatcacaggtacaaacacaaagtcttcaaagattttaaagaacttccattttagaatgtgctcattctgtgaaaggaaaataattttaaatttaaaaaggtagctcctgctgggctgatgggaggagtaaaagccttcctccagaatctctgaccagcttgttaccctacgtcttccttattttctatatttgttctgcctcctcgtactcctggcatgtgtgctaaatgtagtcattaatgagaa

SEQ ID NO: 210409 - DNA, 529 bp, Homo sapiens
actgaataatccatttattcagaaaaggtcttcaagcagtggaaagcggacaagctcgctaaggtaaattcaagttatctaaaatgttaagtttcgctgaaaagcttgaattttgatttgactattttactttatttgatgttttttcctgaaaaatacatatcgagcccctcccatggactgaaccctgttcttagtcctgggtatgactacacgaagttgcaacccttacattttgatgaggttgagaggtgacaacgtgctagcagccctcactcgctctcggcgcctcctcggccwcggtgtccactctggccgcgcttgaggagcccttcagcccgccactgcgctgtgtgggccccactttgggctggcccaggccggagccggctcctgcttgcggggaggtgtggagggagaggcgcgggagggaactggggctgcgcgcggcgctcgagggccagcgcgagttccgggtaggcgcgggctcggcaggtcccgcactcggagcggccggccggcactgccg

SEQ ID NO: 210410 - DNA, 569 bp, Homo sapiens
ggtgtgtgttttattcagtattgtgtagtacagaaaagatcacacatgtatatgtcagaagtagatgcacatgttcttttggctttttttctttgttttattcttttttcattttttgtgttttttgttagtttgttttgaattttttttcttgatgcatatgttccttcaacttattcagtacttccatgtgcagggctctggactagactttcaggatctaaggctgaatcctacacagtcctccctctgggaaagtgatgaaacctgtgagctctcctagcaactctgcagtcttccttcaaggtatgtgttgcaatttggtggttgcacattttagttgtgatatttgtgattagttgattaatgtttgtcatcccacgagactataagtgccatgagggtagatatcttatctgttttgctccccattgcttttctcacagactgctcagcaatgaatctttgttgaataaaataatactttatacaaaggttagtgataaatgtaagaagsatctagatcaagaactgatacattcttaggacagaaagattaatctagacaa

SEQ ID NO: 210411 - DNA, 361 bp, Homo sapiens
acaacaacaacaaaaaaaaacaactttgggtatggagatagcctaggccattgagtcttccaggagatagagggaaaacttgagccctttgtgaataagcatgctgacatyatttgttttagagatgggctcaataaagtaagacatgactcacccttcttggtaaactcacaaaattaaatacagagcaaaattgtgtttccatgcccattctattccttaaaaagtcaaaaagaatgattctaaaagtggtcacagccaaataatgcaaggactctggggatttatctgaatcagatcagcctttccctcaaaggtacaaagcagacctattatacatatgtttgtgtccccaaagtaa

SEQ ID NO: 210412 - DNA, 475 bp, Homo sapiens
agcagaaacttgatcaagaacccagcatcagagaaatgaaaatgctataagtgcataaccaaggttgacatggcaggagaaatgtgtgttctaaatatgtgagctttcatgggaatgttctggatacattgtaatattttctggctgtcatgtgacaccatttgaatygattatttgttattttaagcttaattaaccaattttagaacatttcccagacacatagaactattcctatattttatcccataggttgcttaaagtatttagttctccttaatttggaatatatacaacttcaaagcaaaaatatgagaattatgtgagatttcaataatcctttcctaaggtaatccacccctttgatcagcagtattgtcttctcttaaatataaagaccacaaccaacgtttcaaaacaggcaaacatgtttgtgatatgacatagttagttgcctggtgttgaaaggaactgt

SEQ ID NO: 210413 - DNA, 475 bp, Homo sapiens
agcagaaacttgatcaagaacccagcatcagagaaatgaaaatgctataagtgcataaccaaggttgacatggcaggagaaatgtgtgttctaaatatgtgagctttcatgggaatgttctggatacattgtaatattttctggctgtcatgtgacaccatttgaattgattatttgttattttaagcttaattaaccaattttagaacatttcccagacacatagaactattcctatattttatcccataggttgcttaaagtatttagttctccttaatttggaatatatacaacttcaaagcaaaaatatgagaattatgtgagatttcaataatcctttcctaaggtaatccacccctttgatcagcagtattgtcttctcttaaatataaagaccacaaccaacgtttcaaaacaggcaaacatgtttgtsatatgacatagttagttgcctggtgttgaaaggaactgt

SEQ ID NO: 210414 - DNA, 325 bp, Homo sapiens
cagaaactgtgccccaagccctagcacagggtgtgtcaggcataagaagagtgctacaaaaatacctgttcagatgaaatgcaaataaggtctgtagyttagttaaaagtattgtatcaacgtcactttcctggttttgatcctagtacttatcatcaggagaaggtgaggaaaggatatatgggaactctccattctctttatgcaacttccaagtgagtctaaagttatgccgaaatacagtttaaaacaatatctgttgaaaagcaaatcaatctctgatcctttgagcctgctgaatgtggtacacacttgaggcactgat

SEQ ID NO: 210415 - DNA, 473 bp, Homo sapiens
agaaatatagggcaggcatggtggctcaagtctgtaatcccagcactttgggaggctgaggctggtggatcacttgtggccagaagttcgagaccagcctggccaacacagtgaaaccccatccctaccaaaaaatacaaaaatttgcctggtgtggtggcaggcaccaactacttgggaggctgaggcaggagaatcacttgaacccaggaggyggaggttgcagtgtcatgccgctacattccagcctgcgtgacagagtaagagtctgtctcaaaaaaaaaaaaaaaaaaagacagaagaaataactatgtttgtatgctggtgagaatgccccagtagagaggaaaaaaactgatgatggaggaaggaggggagaaaattgtaatgatatacccaagcaggtatattagttttctagggccaccataacagattgccacaaatttggtggcttaaaacaacaaaaactt

SEQ ID NO: 210416 - DNA, 473 bp, Homo sapiens
agaaatatagggcaggcatggtggctcaagtctgtaatcccagcactttgggaggctgaggctggtggatcacttgtggccagaagttcgagaccagcctggccaacacagtgaaaccccatccctaccaaaaaatacaaaaatttgcctggtgtggtggcaggcaccaactacttgggaggctgaggcaggagaatcacttgaacccaggaggcggagkttgcagtgtcatgccgctacattccagcctgcgtgacagagtaagagtctgtctcaaaaaaaaaaaaaaaaaaagacagaagaaataactatgtttgtatgctggtgagaatgccccagtagagaggaaaaaaactgatgatggaggaaggaggggagaaaattgtaatgatatacccaagcaggtatattagttttctagggccaccataacagattgccacaaatttggtggcttaaaacaacaaaaactt

SEQ ID NO: 210417 - DNA, 471 bp, Homo sapiens
aaatatagggcaggcatggtggctcaagtctgtaatcccagcactttgggaggctgaggctggtggatcacttgtggccagaagttcgagaccagcctggccaacacagtgaaaccccatccctaccaaaaaatacaaaaatttgcctggtgtggtggcaggcaccaactacttgggaggctgaggcaggagaatcacttgaacccaggaggcggaggttgcagtgtcatgcygctacattccagcctgcgtgacagagtaagagtctgtctcaaaaaaaaaaaaaaaaaaagacagaagaaataactatgtttgtatgctggtgagaatgccccagtagagaggaaaaaaactgatgatggaggaaggaggggagaaaattgtaatgatatacccaagcaggtatattagttttctagggccaccataacagattgccacaaatttggtggcttaaaacaacaaaaactt

SEQ ID NO: 210418 - DNA, 473 bp, Homo sapiens
agaaatatagggcaggcatggtggctcaagtctgtaatcccagcactttgggaggctgaggctggtggatcacttgtggccagaagttcgagaccagcctggccaacacagtgaaaccccatccctaccaaaaaatacaaaaatttgcctggtgtggtggcaggcaccaactacttgggaggctgaggcaggagaatcacttgaacccaggaggcggaggttgcagtgtcatgccgctacattccagcctgcgtgacagagtaagagtctgtctcaaaaaaaaaaaaaaaaaaagayagaagaaataactatgtttgtatgctggtgagaatgccccagtagagaggaaaaaaactgatgatggaggaaggaggggagaaaattgtaatgatatacccaagcaggtatattagttttctagggccaccataacagattgccacaaatttggtggcttaaaacaacaaaaactt

SEQ ID NO: 210419 - DNA, 473 bp, Homo sapiens
agaaatatagggcaggcatggtggctcaagtctgtaatcccagcactttgggaggctgaggctggtggatcacttgtggccagaagttcgagaccagcctggccaacacagtgaaaccccatccctaccaaaaaatacaaaaatttgcctggtgtggtggcaggcaccaactacttgggaggctgaggcaggagaatcacttgaacccaggaggcggaggttgcagtgtcatgccgctacattccagcctgcgtgacagagtaagagtctgtctcaaaaaaaaaaaaaaaaaaagacagaagaaataactatgtttgtatgctggtgagaatgccccagtagagaggaaaaaaactgatgatggaggaaggaggggagaaaattgtaatgatatacccaagcaggtatattagttttctagggccaccataacagattgccacaaatttsgtggcttaaaacaacaaaaactt

SEQ ID NO: 210420 - DNA, 584 bp, Homo sapiens
aatgcagctggccttcaaaacctgtcttaaccttgttagtggaactcggccagtggcaatacaatctcgcaggtttggaacttttctttcagcatcacctgcttccttcatgggaaccacagcatcgattccaaagaactcaccgctagaatgtattctcgaacactgggaccagtttcaacggaatgggcttaagaagacaaaactggtgtttctatgtaatactggtatttggcttcagtattatttggaaaagcaagagaaatggcctcctgctggaactatgggctttaatactatacttcaagtgagtgttttgtaagtgggagggaaaatgggatgaaatatcatatgttcaagcatttttgctgctyattcaggataaaaacctgcagcaggtgtgtgcatgtttgatgagaggaaaagaaaaagagctagacatggttctgtttatgtgatggattacatttattgatttgagtatgttgaatcagccttgcatcctaggaatgaagccaacttgattgtggtggataagctttttgatgtgctgctggcttcagtttgccagtattttattgagg

SEQ ID NO: 210421 - DNA, 417 bp, Homo sapiens
aagtggcagacaagcctggtggatgtggatagaccttgttcttgcttctcaagattttgagcccagaaaaccactrggattcacagtagctgtagtttatgtcctttagatagaagctgtagacaatacgtttttttttttaaagaaaagatctattggtgctattatagtcttttccaatgtacgtgcctaaaatattatgttcccttcagcgtcatcaccacctgagacaatagaatatggtgcttaagagtcagagccttgaaatcagagtaggctgatggtgaatcctgtgtctgttctggtgttgggcgtttcatttaatcaccctaaacctcagtttcctcatttgtaagtggagacaatgacccccacccaccagacttggggaggagggtggctttaattaaataatgc

SEQ ID NO: 210422 - DNA, 417 bp, Homo sapiens
aagtggcagacaagcctggtggatgtggatagaccttgttcttgcttctcaagattttgagcccagaaaaccactgggattcacagtagctgtagtttatgtcctttagatagaagctgtagacaatasgtttttttttttaaagaaaagatctattggtgctattatagtcttttccaatgtacgtgcctaaaatattatgttcccttcagcgtcatcaccacctgagacaatagaatatggtgcttaagagtcagagccttgaaatcagagtaggctgatggtgaatcctgtgtctgttctggtgttgggcgtttcatttaatcaccctaaacctcagtttcctcatttgtaagtggagacaatgacccccacccaccagacttggggaggagggtggctttaattaaataatgc

SEQ ID NO: 210423 - DNA, 573 bp, Homo sapiens
gtaatggaaacactagaatgagacttaaaaatgactcatttgaaagagtcaacgatacatcaactgccttcctcagagacttatttttccagctctcactatactacacccatgctagtgagcagctttcttctagttccctcagtatcccagaaatgatctcttccaccttccctctccattaccaccctttcacctgcccctactcatccttaaggtttcaaatgtccctcctttagaaagactttgtctgacctaaattaggtcccctattatacattctcattataccctgtgcttattcttcacaacatttgatatrtgtgaccatatatttacttgaaaaaatgtttaatatctttcaccctcaattccatgaggttaagtcctgcattcttgtctcattcatctagcatagtgcctagtacagggtaggcggttcattaaacatttgttgaataaatggatgcctacatgttatcaaaaagttaattctttttcaatcacttacatagacaggataggaaaccgccacaggacttcatctggttctcagtttctacagtgtttatt

SEQ ID NO: 210424 - DNA, 581 bp, Homo sapiens
agaagaaaggtacgagtatatgtaagataatgtcctcagatatataatcctcctgggaaagtgactcctaattatgaaagaatgcactgctccagagagcccctgagagattctgcccttgaggcatcgttgttaaagaaaacagcatgaaaccatctctcttgaagcatcatttattcacaaaacattcaaaccctaaagaaaactattcacattataagaaaacagagggtattagcaacttacaagcagttaatcaagactggctttagagagcttttataaattaatattgctcactactaaagctaggaaatcttatatgacaaaaagggttattgcgtytgctacaaaagtgaaaagctaaaaggatgttgcctggtaagtctgtcagtgcaattgtattaaacccttacagatataattatagagtttataaaactgcagaaggcattgttcagatcatggcaaaagtaatggtagaagatattacttacagactcattatgtacatatggttctagtcatttgcaatcataacaaaaataacatatttgatgaaatgatggcacattaagaga

SEQ ID NO: 210425 - DNA, 588 bp, Homo sapiens
ggtgggtcctaatccaatctaactagtatacttataagaagaggaaatttggacagagacactaaggattgtgtacaaagaggaaagatcagtgaagacacagcgagaaggcagctatctgcaagccaaggagctaggcttcagaagaaaccaaacctcctgacacgttgatcttggacttctagaatccagaattgtgagaaattaattcctgctgtttaagccacccagtttatggtacactttgttgtggcagccctagcaaactaatacagatgagtaaatgtttaaattttttaaaaaacttctataacaaccaatgaaattacaaataggacaatatgaaagaaatcaatgacaatgatgaaaagcaattctacgtgttcatggtagaaatgtatttaccttttgggaaagcaattacacataagtcttaraaaagttggtacattttgacatagtaattaaacatcaggaaatctttcagagtgaaatcctgaagagaagaaaaggcctaagcagtaagaagcagtaataattgataataattaattaattataataagttattatttacttagtgtttct

SEQ ID NO: 210426 - DNA, 573 bp, Homo sapiens
tccttcgtctataaaatgggaatataattcccaacttcaaagagtaattgtaagaaaataaagttatctgtgaaaaggctcaatgcctgccacacggtaagcatttagtcartaatagccaaagttactattgaagtgatgggagcaggaagagggaaatgatgttcactttgggaacagtgacagagtgtgttatctggagtaatgccactgtgatgtttctctgtacctttttttccatttaccacaaactataatggttaattcagaacacatactcactgtaagaggtaaggtataggaaactctgataataccaaataaaatgctgtgtcataaatcatgctcatgttagaattctcattacaaagtttaaaacgatcttattaacatgacctgtggcaggctttctggataagaaggttccagtatccggtgacataatagaggggttcccatcaccaggccagattcattaataccagaaattcatgattgtgtgtgtgggtgtgtgggtgtgtgtgtttacatgtactctgatccaaaagatctcttattttaaacaagaatcaa

SEQ ID NO: 210427 - DNA, 597 bp, Homo sapiens
aaattggttttaatattgagatttctcatttggaataaacaaaaacattgaattgcaaaaagaaaatatgtttaactgaaatctcctatcaaagacagccttgtggtcgcttttcttgtttaatctcttgtagatgacagaaaaattgagagcttgtttatagacttgggaacacttaggctttgaaatccatatttacttacttgaaggtcagtcatttttgccccctgatgattttagaaaatgtcagggaaacaggcacagtaattgatcatattaggatggagtgaatccatgaagaattgacagcttgatctcgaaagctgtagtgtatgtatgaggatttgtagagaagtagaaaataagtaaaggcctggagaaagcagagtaaacatagagtagaacctgtacagagtcaaggactggtacactggtctcaattctactctttataaacaaaataaacaatggaaagttacggtttaattcctggattacatgatkgttaaaatggaaggatagtttttaacaagaaggtacatttaaacaaacaaggactccagggtactcagattcttcatctgcctattttactgt

SEQ ID NO: 210428 - DNA, 630 bp, Homo sapiens
gaacaatttgctctttattgaaataagattttcagaaagttcctggaatgaaaagttatttgcaactattatcttcttgggcaagtttcctgcgattataaagtcatgttgacacacrtgtagtggaatggttaaatcatgaaaatgtggacagtatgctgtgtgggggtggatggttttggttctcatgttccaccatgattctctctgttccttaacagtgtaatttttgctagtttattcattttccatctggtgtttactttttaagaaagcaattgcaggtatagccattgcttttcagacatttattaatgcttaccacacatttacaggaacaactactgtgaaccatgcatggtgctaggttttaaagattaaaatgatttaaggggaaatgagattttcctccaaaataaaaaaacttactctaacttccagatttaattgctaagcacacataattgcagctaaaacaggttgatgagggattgatgagggagagtatagagaagcgcctgtgtggcaactctgttcacatttaattaactgtctatagatggctgctaccagcattgatcaaatgactacctatacatattttactcttacacaggaaaaaattaaatt

SEQ ID NO: 210429 - DNA, 513 bp, Homo sapiens
gttatgcaaatttctttagtaartgattgctgcacaacctacttgaattcttctcctaaaaatgggctttttgtttctaccccacagccaggctgcacattttccaaatttttatgctctgcttctcttttaaatataacttccaaatttaagtcatttctttgttcctgcatttgaagctggctgttagaagcagccagacaacttcttgaatgctatgctgcttagaaatttcttctgccagataccctaaatcatctctctgaagttcaaacttccacagatccttagggcatgaacagaatccagccaagatgtttgctgagggataacacacatgacatttgctccagtttccaacaagttcctcatttccatctgaaacctcagcagcctggacttcactgtccatatcactatcagaattttggtcacaactatttaaccagtctttaagaagttctaaactttccctcatcttcctgtcttcttctgaaccctccacactgttcc

SEQ ID NO: 210430 - DNA, 513 bp, Homo sapiens
gttatgcaaatttctttagtaagtgattgctgcacaacctacttgaattcttctcctaaaaatgggctttttgtttctaccccacagccaggctgcacattttccaaatttttatgctctgcttctcttttaaatataacttccaaatttaagtcatttctttgttcctgcatttgaagctggctgttagaagcagccagacaacttcttgaatgctatgctgcttagaaatttcttctgccagataccctaaatcatctctctgaagttcaaacttccacagatccttagggcatgaacagaatccagccaagatgtttgctgagggataacacacatgacatttgctccagtttccaacaagttcctcatttccatctgaaacctcagcagcctggacttcactgtccatatcactatcagaattttggtcacaactatttaascagtctttaagaagttctaaactttccctcatcttcctgtcttcttctgaaccctccacactgttcc

SEQ ID NO: 210431 - DNA, 574 bp, Homo sapiens
tcaatcagcattgacttacattgggatgggagagaaaagccttaggaattagagagtgtgggagccacagcccctatttaaccaatttgtttaaactgaaggcctagatatgggggcatgctacagcactttcataggtcacaaattaatgtcacacctaaatacattttcctgcctttctcaattcagatgtcctcatgtaatagccctcttaggattaagcaaagtaggccaacagaagtctcataggcatgtcaattcacaaatgcactgtaaattatcacaaataacaaataaaactaaagaagaagaagagtaatgagaaaagataactgagaatgagaaaatctgttctagttctgctctgctactaacatactatgtgaccttaagatacttatttaaagtctcctggctcccatytgttgacaagtaaggtggtctaggtagaccaaatacactataatgtcatatccagttccattttggggggatttaataaattttcaccacctctataaacacagatacacagacacagacacacacacacacacaaacacatacacacatt

SEQ ID NO: 210432 - DNA, 557 bp, Homo sapiens
ttttgtgttttaaaacacttatttagatctagacttaagtgttgcttttcttgtaggagtttgaaaatgcttaacagtctaaagttaattattactctttacaaatatattcaagtttctcaagttatctaactggctattcttcctggctggttgcctgtagattttcttagaaaatttgctactttgacagggtagagttacatgatattgtccctactgttgtattctggatgtctctcatgctgccctatcagaatcccgagaaatggcataggaagatcactggagggtacactgagcataaattgatctggctactgccaggtcttsagaatgagaagagggaagagttgctgtgtatgttgagcaattaaagtactatcaaatgaatctgatcacaacatattgcctggaaatatgctatattgctatggcaaagtctattttgtatatgagattgattgttccacatgagggcaggaacttgtctttcataatgagtcagagaagtgacaatttctcgttatatttcagagttatgggggattgactat

SEQ ID NO: 210433 - DNA, 564 bp, Homo sapiens
aaaacagtcatgagaggctttttgagagtctggaggacaagtccatgactgtaaggaggtcatggagaaacaagcaagtactgttacctgagcatcggtttgagtaacaaggagtagacgacgaagtgaaaggaccgagggataaaatgttggtgcccatggggtaagataaccatatcatgcartcaggaatcccaatagaaactcttgcatattactaggtcaggatgcagatgagggaaaaaataaacatggactgcaagcatgaattctgatactgcagtggtgtagagatagcactacctacagcattctgcctaaagccaatgatctctgagtgggaattgacaaaaaagcaccactctttagagctttaggaatgagaatctaaaagaatttctcacatctccgctagccctcttggactctccattgtgctaatcatattcagtgctggtctctaacacttcaggggtctaaccgaatcacttttcttgtgtttgtgacccagcttgccccgaatgcacaccctttggatatcatccctccattcttggcccaata

SEQ ID NO: 210434 - DNA, 564 bp, Homo sapiens
aaaacagtcatgagaggctttttgagagtctggaggacaagtccatgactgtaaggaggtcatggagaaacaagcaagtactgttacctgagcatcggtttgagtaacaaggagtagacgacgaagtgaaaggaccgagggataaaatgttggtgcccatggggtaagataaccatatcatgcaatcaggaatcccaayagaaactcttgcatattactaggtcaggatgcagatgagggaaaaaataaacatggactgcaagcatgaattctgatactgcagtggtgtagagatagcactacctacagcattctgcctaaagccaatgatctctgagtgggaattgacaaaaaagcaccactctttagagctttaggaatgagaatctaaaagaatttctcacatctccgctagccctcttggactctccattgtgctaatcatattcagtgctggtctctaacacttcaggggtctaaccgaatcacttttcttgtgtttgtgacccagcttgccccgaatgcacaccctttggatatcatccctccattcttggcccaata

SEQ ID NO: 210435 - DNA, 435 bp, Homo sapiens
tgtagaattgaagagtggttggttttgaattttacagttgtaattgcaaacttgcaaaaatatatattttaggtgctactatttcttaattttcattttgtaaattaactagctcttttgaacagcatttttttttcttagtatgatgcctatgagaaaaactacctgccttggaggaatttgtaatagagaaagataatatgtgtgtgtgcgtgtgtgtgtgtgtgagtgcatatrtaaatatttccatatattatatgaaaagtgaagttgaataacaagagaagtttttctttgctaaggaaaaaatacatttgtttttcattaagtaaagattattatactggcattattttgttcttacattggttttcagaaagttcaatggcatattccgctgtatgagccatgcagagctgcatttatctactgtat

SEQ ID NO: 210436 - DNA, 576 bp, Homo sapiens
aagcttaaatataggagaattagatgaaactgattcctcttgcaggagagccacctggctgcagaagattgtcagagatsaagggtaggagccttgggctggttagcagggcatgattatagtaagtcaggtgagagatgtaggtggttcccaccagagttgtagcagtggagatagaagagggatggatttggaatgctgcttggacaaatacttcctggccctctagggtgattcaactagctctgcttgctttttctttatatttgcaaaagaattgtgagtgaacttgtatcacaacatctaaaatgctatattaactttcctgattatgttgtttttttctcctactagactataaaccccttgatgacaaaaatagtgtgcatttcacagcatcttgctcatattcagtgctcagtgcattctggagaggaagtaatttaatgagattttagtttacattccacaaagaatttccaatgaatgtggcttctacaatcctgttaattaaaaggattgcaacaatagtccaaaaaatacacatgatatgtaatctggctattatagaaactt

SEQ ID NO: 210437 - DNA, 576 bp, Homo sapiens
aagcttaaatataggagaattagatgaaactgattcctcttgcaggagagccacctggctgcagaagattgtcagagatcaagggtaggagccttgggctggttagcagggcatgattatagtaagtcaggtgagagatgtaggtggttcccaccagagttgtagcagtggagatagaagagggatggatttggaatgctgcttggacaaatacttcctggccctctagggtgattcaactagctctgcttgctttttctttrtatttgcaaaagaattgtgagtgaacttgtatcacaacatctaaaatgctatattaactttcctgattatgttgtttttttctcctactagactataaaccccttgatgacaaaaatagtgtgcatttcacagcatcttgctcatattcagtgctcagtgcattctggagaggaagtaatttaatgagattttagtttacattccacaaagaatttccaatgaatgtggcttctacaatcctgttaattaaaaggattgcaacaatagtccaaaaaatacacatgatatgtaatctggctattatagaaactt

SEQ ID NO: 210438 - DNA, 572 bp, Homo sapiens
attgtggttttgatctgcctttcctgggaaaatatcagaaaagatccctggggaaagatcagaagctatttcgcccatcctgtgttttgttgctgtgggaaacaaggagattctcctgctttgtgccagcagtgaatcaaataagaagtagtagataatttgaagggtgaggacaaagacaggaggccacaagcaagtgatgttcctttaaaacacagcattcaaggagaagcaagtgagtgaggctgaaagagtgaggaaagattgctaggtaaggggtcaggtggtatctggagaccaccaaggtccaaaagaaggaggagatgatccacaaaggaatgtggtgctgagtaatgtggggaccctcragatttgggtaaggaggaaggcaggaggaggatttaagggtctagatttttaaatacatgtacttttaataagtccaaactcatcaacatatatacattaaatgtgggcaaatttttttatcagttatgctttgataaaactaaaaaataaggaacttttccataaaagtaggtcgtgaccctaataatagtaataataacccc

SEQ ID NO: 210439 - DNA, 611 bp, Homo sapiens
caaagcccaagtcgcttactgcttatttctgtaacatgatgttggagattgggcaggactgcttgggagaagcaattgactataacagaagggcagaaaggagataaaaggaagagaaaaattgcagatgcagtatgtgtaataaaaagtaagctactctgcccttaaagtttatgtcctataatcttccactttaaattattctctcagatttttctagtgtaaataggttgagaatattagaactgattaccttttcagttctattgcccagccatcctcatttgcaaaggccaacagacagttttctgggttgagatgtaggaaggctttggcaatgggcagcagtctttcttagcccgtctttgccatggggctcagtctctttgggttgcgccacctttacaggttagctggagtcaagcttaggtcacatacrgggatccagatctgtggataagccaacgaaaggaagagaaatcaagtgcaaggccaagaaatcagaattcagttaccacatcaaagccagaatgacagcactctgagctgggagggctggggcactgcctcagttcctcacatgagatagtcatgctagagcccaagaagca

SEQ ID NO: 210440 - DNA, 611 bp, Homo sapiens
caaagcccaagtcgcttactgcttatttctgtaacatgatgttggagattgggcaggactgcttgggagaagcaattgactataacagaagggcagaaaggagataaaaggaagagaaaaattgcagatgcagtatgtgtaataaaaagtaagctactctgcccttaaagtttatgtcctataatcttccactttaaattattctctcagatttttctagtgtaaataggttgagaatattagaactgattaccttttcagttctattgcccagccatcctcatttgcaaaggccaacagacagttttctgggttgagatgtaggaaggctttggcaatgggcagcagtctttcttagcccgtctttgccatggggctcagtctctttgggttgcgccacctttacaggttagctggagtcaagcttaggtcacatacggggatccagatctrtggataagccaacgaaaggaagagaaatcaagtgcaaggccaagaaatcagaattcagttaccacatcaaagccagaatgacagcactctgagctgggagggctggggcactgcctcagttcctcacatgagatagtcatgctagagcccaagaagca

SEQ ID NO: 210441 - DNA, 570 bp, Homo sapiens
ttctaaccctgaggacattccaaagacaatggtatttctgtttttttaaaataaaggaatacataattttttaaaagcacattttgctaagggactttcaaagggacaggacagtcatgtaattggggggtgaaggtgattctgttcactttkattctattgttttcccctttctcctccataggggctagtcctgagataaagtaaaaaaaaaaggcatatggtaatccattctgaatatgtcatattcccttagtgttcatagctgagaccttccataaactatttcttaagacactgaagatgaatctcttgacacggttatagggagcagagataaggcatccaaggggttgcttttcagctaggaagtttttggtcatctgtacaatgcataccccagtatcataaatgataagattttattttcaaccattctttttcttgaattaaaaaaaaaaacagtgattaggaaattttcaactagaggaaaccaaagaacagcatcataaaccatgtgtattcagcttcaacatttacccacattcttttaatcctactaccagactt

SEQ ID NO: 210442 - DNA, 570 bp, Homo sapiens
ttctaaccctgaggacattccaaagacaatggtatttctgtttttttaaaataaaggaatacataattttttaaaagcacattttgctaagggactttcaaagggacaggacagtcatgtaattggggggtgaaggtgattctgttcacttttattctattgttttcccctttctcctccataggggctagtcctgagataaagtaaaaaaaaaaggcatatggtaatccattctgaatatgtcatattcccttagtgttcatagctgagaccttccataaactatttcttaagacactgaagatgaatctcttgacacggttatagggagcagagataaggcatccaaggggttgcttttcagctaggaagtttttggtcatctgtacaatgcataccccagtatcataaatgataagattttattttcaaccattstttttcttgaattaaaaaaaaaaacagtgattaggaaattttcaactagaggaaaccaaagaacagcatcataaaccatgtgtattcagcttcaacatttacccacattcttttaatcctactaccagactt

SEQ ID NO: 210443 - DNA, 432 bp, Homo sapiens
gtcagtgagctgatgataagagtggacccagagagcaaaatagaggtagagagaatggcagtcacacaagtaggtatagtcctaaggtaaaatacaggaacccatgtttggggcctttctgaccttcagggccccaggccatgagtcccattgccatgttgccaggaggcctggctgtgcacttttcctgagtgaggctggtcagtggttgagattcttgttttgcttttttccccaggtattttcatgatgagctcaccttaagcaatactgaataagactttcttcaaaatgagaagagtacagctcacacaggtagaaaacacagctggaaaaatggtgactgactttccttcttactgctgccttaataaaacacctgtttcatrtatccaggagggaaaggggatgcttcctgatttctgtgtctca

SEQ ID NO: 210444 - DNA, 371 bp, Homo sapiens
  misc_feature (1)...(371): n = A,T,C or G
tcgggctgctcacctggactcttctgctgacgtactttgcagctgccctttctttgctttatctccaagcatgtgcatcactntagagcaataatgatgtacatttattggaatctccagagatctccatcctctaattgtctattttgttcagtaaattgtactcattamtgagccacatgaggccccgaaagataccagccttttctgggtgccctctgtctgagcctggataatgggacattatctagcaaaggttcagcagtattgagccaagctgcttaaaacaacccttcagttaagtatgtttctttaacctcctatccctcattcttaaccatcctcagcttttcttatatttatatgaatca

SEQ ID NO: 210445 - DNA, 405 bp, Homo sapiens
  misc_feature (1)...(405): n = A,T,C or G
ctacctccaggtgctgagctatagtctgcatcgggctgctcacctggactcttctgctgacgtactttgcagctgccctttctttgctttatctccaagcatgtgcatcactntagagcaataatgatgtacatttattggaatctccagagatctccatcctctaattgtctattttgttcagtaaattgtactcattactgagccacatgaggcccygaaagataccagccttttctgggtgccctctgtctgagcctggataatgggacattatctagcaaaggttcagcagtattgagccaagctgcttaaaacaacccttcagttaagtatgtttctttaacctcctatccctcattcttaaccatcctcagcttttcttatatttatatgaatcataat

SEQ ID NO: 210446 - DNA, 390 bp, Homo sapiens
  misc_feature (1)...(390): n = A,T,C or G
gagctatagtctgcatcgggctgctcacctggactcttctgctgacgtactttgcagctgccctttctttgctttatctccaagcatgtgcatcactntagagcaataatgatgtacatttattggaatctccagagatctccatcctctaattgtctattttgttcagtaaattgtactcattactgagccacatgaggccccgaaagataccagccttttctgggtgccctctgtctgagcctggataatgggacattatctagcaaaggttcagcagtattgagccaagcwgcttaaaacaacccttcagttaagtatgtttctttaacctcctatccctcattcttaaccatcctcagcttttcttatatttatatgaatcataat

SEQ ID NO: 210447 - DNA, 415 bp, Homo sapiens
  misc_feature (1)...(415): n = A,T,C or G
cttttcttagctacctccaggtgctgagctatagtctgcatcgggctgctcacctggactcttctgctgacgtactttgcagctgccctttctttgctttatctccaagcatgtgcatcactntagagcaataatgatgtacatttattggaatctccagagatctccatcctctaattgtctattttgttcagtaaattgtactcattactgagccacatgaggccccgaaagataccagccttttctgggtgccctctgtctgagcctggataatgggacattatctagcaaaggttcagcagtattgagccaagctgcttaaaacaacccttcagttaagtatgtttctttaacctcctatccctcattcytaaccatcctcagcttttcttatatttatatgaatcataat

SEQ ID NO: 210448 - DNA, 374 bp, Homo sapiens
caatccaagggagaatagctttgccagccatttactttttttctctgtgattgcacatattggcaaagtagcccctaaatttgtgaggttatgtgtagactattgagagrtctgagaattgttctacaattagcaaagaaaaggagaacacttttagacatcttgccaaggggcctacatagcctattttgattacaagagtggaaactcaagttactttaaaaaatggaaggcttaactaaagatgcacgagaaaataaggaaaacagaatttcagtcatgtggcaagtctgcaaagaatctcaggggtttttaggatgagagaatagtctggctggacctcatggagtcaggacttaggagcaggaagattg

SEQ ID NO: 210449 - DNA, 461 bp, Homo sapiens
cctggaaaaagtaaaacaaaagacttatgttctgaacagaaatagtacattatacatttcgttaattggaaagtagatgagagcagaaatatttaaatggtgtttatttccaaggtaattctcttcaatcaataacttgagttggtttcmgatcttaccctttaatgaggaaaaaccgatatggatacaaagttttaaggttcaggaaaaattggccttatctttaaggaaattatgttgattgggatttctctcaaactactttagttgtgttgaacattattaaaattaagtaacattcacttggattaagtagtaataaaagatgtgagactttctactgatttgtgatcccaagccatttatcactgatgggccttcctgtgtgtacttggaaacacaatgtatataagggctgcactgatctgaagatttttggttatgaaaattacctaatcagt

SEQ ID NO: 210450 - DNA, 580 bp, Homo sapiens
attccttggtcaatatcactcactttgtggtttcagatgtcacctatctgctgatgactccaagatttgcactagtcctggccttggcctgggctcctggtgcatagacccagctgccttaccagcgtctctacctggatgtttacagggcatcttagacttcatgtgtccaaatcttaactcctgactttcctccaaaacctgcttttccttcagcctctgcttcttgttaattgtgactgtcccttaaattactcaggcctaaaatcttgatcttatcttgagcctctttgtttctcatataccccatccagcccatgagaaaatctatcaaccccatcttcaaactccatccagaatctcaccaatcctcacacttctggaagtgtgattagattacacacttccggaagtgcgaggattggtcagattctggacttagtttgggccaaactatcatcagatttttgctgcatgaacgaaacagcctctgccccaacttttgcccttgccaacctacactctactctcarcagagaaaccagagagattctactaaaagggaagtcagaccatgcaa

SEQ ID NO: 210451 - DNA, 602 bp, Homo sapiens
  misc_feature (1)...(602): n = A,T,C or G
ctcttgagtacttcagcatgtgtcagggactttactcatttctttttctttttcttttttttcttcaacttttaagttccaaggtacatgtgcaggatgtgcaggtttgttacataggtatacatgtgccatagtggtttgctgcacaaatcaacccatcacccaggaattaagctgagcatccactagctattcttcytgatgctctccctccccctgccccactgacaggccccagtgtgtgttgttcccccaatgtgcccatgtgttctcattgttcagctcccacttataagtgaaaacatgcagtgtttggttttctgttcctgtgttaatttgctgaggataatggctccctgctccatccatctccctgcaaaggacttgatctcattcctttgtatggctgcatagtattccatagtgtatatgtaccacattttctttctccagcttatcattgatgggcatttgggttggtttcatatctttgctattgtgaatagtgcagcaatgaacatactcatgcatgtatcttatgtaataatggaatgatctgtattcctttggnatataccggtaatggcattgtggtcaaatgg

SEQ ID NO: 210452 - DNA, 602 bp, Homo sapiens
  misc_feature (1)...(602): n = A,T,C or G
ctcttgagtacttcagcatgtgtcagggactttactcatttctttttctttttcttttttttcttcaacttttaagttccaaggtacatgtgcaggatgtgcaggtttgttacataggtatacatgtgccatagtggtttgctgcacaaatcaacccatcacccaggaattaagctgagcatccactagctattcttcctgatgctctccctccccctgccccactgacaggccccagtgtgtgttgttcccccaatgtgcccatgtgttctcattgttcagctcccacttataagtgaraacatgcagtgtttggttttctgttcctgtgttaatttgctgaggataatggctccctgctccatccatctccctgcaaaggacttgatctcattcctttgtatggctgcatagtattccatagtgtatatgtaccacattttctttctccagcttatcattgatgggcatttgggttggtttcatatctttgctattgtgaatagtgcagcaatgaacatactcatgcatgtatcttatgtaataatggaatgatctgtattcctttggnatataccggtaatggcattgtggtcaaatgg

SEQ ID NO: 210453 - DNA, 606 bp, Homo sapiens
  misc_feature (1)...(606): n = A,T,C or G
ctcttgagtacttcagcatgtgtcagggactttactcatttctttttctttttcttttttttcttcaacttttaagttccaaggtacatgtgcaggatgtgcaggtttgttacataggtatacatgtgccatagtggtttgctgcacaaatcaacccatcacccaggaattaagctgagcatccactagctattcttcctgatgctctccctccccctgccccactgacaggccccagtgtgtgttgttcccccaatgtgcccatgtgttctcattgttcagctcccacttataagtgaaaacatgcagtgtttggttttctgttcctgtgttaatttgctgaggataatgrctccctgctccatccatctccctgcaaaggacttgatctcattcctttgtatggctgcatagtattccatagtgtatatgtaccacattttctttctccagcttatcattgatgggcatttgggttggtttcatatctttgctattgtgaatagtgcagcaatgaacatactcatgcatgtatcttatgtaataatggaatgatctgtattcctttggnatataccggtaatggcattgtggtcaaatggtatt

SEQ ID NO: 210454 - DNA, 602 bp, Homo sapiens
  misc_feature (1)...(602): n = A,T,C or G
ctcttgagtacttcagcatgtgtcagggactttactcatttctttttctttttcttttttttcttcaacttttaagttccaaggtacatgtgcaggatgtgcaggtttgttacataggtatacatgtgccatagtggtttgctgcacaaatcaacccatcacccaggaattaagctgagcatccactagctattcttcctgatgctctccctccccctgccccactgacaggccccagtgtgtgttgttcccccaatgtgcccatgtgttctcattgttcagctcccacttataagtgaaaacatgcagtgtttggttttctgttcctgtgttaatttgctgaggataatggctccctgctccatccatctccctgcaaaggacwtgatctcattcctttgtatggctgcatagtattccatagtgtatatgtaccacattttctttctccagcttatcattgatgggcatttgggttggtttcatatctttgctattgtgaatagtgcagcaatgaacatactcatgcatgtatcttatgtaataatggaatgatctgtattcctttggnatataccggtaatggcattgtggtcaaatgg

SEQ ID NO: 210455 - DNA, 585 bp, Homo sapiens
tactttacatagaatcataatacttatattattgcagtaggttacctattgcatctctacacatgagctttgatttcctttaatatttttttggttcaagtccagacctcctccacagaagtcaaaggttattgctctggtgtggcaaaacaccaaatgtgtaccctgtatttacagactcaatgtatcagaaaggttacaaagtctaaatgcattattttaattctctgatgaaatggaaataatcttgaatagatctagaatacaatatcctaatcactagtttcaaaagacttgagagaataggccaagtgaagaccaaactgagttggtctagttggggctggagctaagtaactaaaccacagagattggttttgcttgctgggggtatagaggggattttcaggaaagtaagaggtaggctgggcatggtggctcatgcctgtaatccsagcactttaggaggccaaggcaggtagattgcttgtgcccagcagttcaagaccagcctggggcaactggcaaaaccttgtctctacaaaaaaacaacagaaacaaaaaattagccaggagtggtggtgc

SEQ ID NO: 210456 - DNA, 585 bp, Homo sapiens
tactttacatagaatcataatacttatattattgcagtaggttacctattgcatctctacacatgagctttgatttcctttaatatttttttggttcaagtccagacctcctccacagaagtcaaaggttattgctctggtgtggcaaaacaccaaatgtgtaccctgtatttacagactcaatgtatcagaaaggttacaaagtctaaatgcattattttaattctctgatgaaatggaaataatcttgaatagatctagaatacaatatcctaatcactagtttcaaaagacttgagagaataggccaagtgaagaccaaactgagttggtctagttggggctggagctaagtaactaaaccacagagattggttttgcttgctgggggtatagaggggattttcaggaaagtaagaggtaggctgggcatggtggctcatgcctgtaatcccagcactttaggaggccaaggcaggtagattgcttgtgcccagcagttcaagaccagcctggggcaacyggcaaaaccttgtctctacaaaaaaacaacagaaacaaaaaattagccaggagtggtggtgc

SEQ ID NO: 210457 - DNA, 406 bp, Homo sapiens
actctgagccacatagtttgttagagtcgcaaccccaatgcctgcaggggcaggcagtaagcaggtggagtgaacttgttggcatctggtgagtgccagccccrtttatagcaggaggccatggagctctgggtgccattggtgccagaaattgggagtttatggaacatctcctgacttttacatgttgacaactaattcaaaattttttaaaaacagcacatctgcaagccatattcaacctaaaagccactagttggaaacctctgctctaagtggagagctaggtggaattttgtctttgagaccaaggcattttccctaggtggagtttagcctggctcccacagccatgatgttactccaagcagtattagtttgctatttctgggtccagagtttgagc

SEQ ID NO: 210458 - DNA, 405 bp, Homo sapiens
actctgagccacatagtttgttagagtcgcaaccccaatgcctgcaggggcaggcagtaagcaggtggagtgaacttgttggcatctggtgagtgccagccccatttatagcaggaggccatggagctctgrgtgccattggtgccagaaattgggagtttatggaacatctcctgacttttacatgttgacaactaattcaaaattttttaaaaacagcacatctgcaagccatattcaacctaaaagccactagttggaaacctctgctctaagtggagagctaggtggaattttgtctttgagaccaaggcattttccctaggtggagtttagcctggctcccacagccatgatgttactccaagcagtattagtttgctatttctgggtccagagtttgag

SEQ ID NO: 210459 - DNA, 556 bp, Homo sapiens
cttcttcacatgatggcagcaaaaggaagtgctgagaaaaaggggaaaagccccttagaaaaccatcagatcccatgagaactcactatgatgagaacagcatggaggyaaccacccatgattccattacctgccaccgggtgcgtcccacaacatgtggggattatgggaagtacaattcaagatgagatttgggtggggacacagtcaaaccatatcaacaggagcaaccaatttctctgacgtggcagtaactcattacacccattgttccaggccctgtgctcacacggtggcctccttcatgtcatggtggggttgagttgtttgcacatccaacttcgcccaaacccctcttcatctcggggtatgcctgctacaccctcctggtgctttctcctctgtattccttccattgttgacctcctgggtgaacaggatttgcgttttttttttccctctggtgtctcctctcctccatccctctgccacagctgccataccatacccctgataagatgggaggggattggatgacctcaggaaagtgggtctc

SEQ ID NO: 210460 - DNA, 527 bp, Homo sapiens
agcataagcttgagatgagtcacctggggcctataaatattgatatagcataagcttgagatgagtcacctggggcgttacatttagtatgctttgtctgttttgagggcaacagggtagaaaggtatgaatgtaactcactccttcatttatayttagccatattgtctactatgtatcaagtacatgctaaggtaatgaggaagcagaaagaaataaatcatagtggttgcccttgtgaagattatgacagagtggtgcgaggcagcaatgtgaacaaataactgaacctcatgtaatacataataaataacaatattaagtatatgatcttacccaatgacactatccctgtccattccctgccctgttcctcctcccatcccaatgcacagtaacctctggaagacaatacctggaggcctagggctctcaataaaatggctataaaaactgttataggtggactccatgatattataacatattgttattctgtcagcttttagcatacatgtcatttgtga

SEQ ID NO: 210461 - DNA, 634 bp, Homo sapiens
tcactttctccctgtttgctggccagcagggtttgtggccgcctctgctgtgacgccacagcctggtgaggagggggctgcagttcctcaggaaactgccagtggacaaagtcataaacaagagttccagttccctggaacctgagtcgggaggcctgcaactcactttctccctgtttgctggcccagacaggcctgtgctagagggctggatagtgtggtagtgtggtggatagagtgctgcctctatccacaacgcagccatatgctgactgaagataactttgtgtctggaagagccctctgatttcttacactaatggccttacacgasatggaggattttacatttgatggaacaaagcgcttaagtgtcaactacgtgaagggaattcttcaaccgacagacacctgtgacatctgggataagatctggaacttccaagccaagcctgatgacctgcttatttctacctatcctaaagcaggtaggtggaagggcttgcaggggaaggggaagaggagagttaggaaggtaagtggaagtatgcattagtcatgaaataaagaagttgatctggaaaactctggacagagtgatatggctaaggaaagttactagtggaaactgaag

SEQ ID NO: 210462 - DNA, 432 bp, Homo sapiens
aataatatacatatttttctgctgcatgcgtgcaacagtgtacaatcagacccaaccctcaggggggttttctcacactgtttctctcaagcgtggctgctctgatgracgctgaacactgatttctgaacgaagcctttcccacagatgccacacttgtagggtttgtctccagtgtgtgttgtctgatgtttattcaaattggacctgtcagtaaaggccttcccacactcagcacacacgtaaggcttctctccagtgtgaattcgctgatgcacttggagctgtgattttttagtgaaagacttcccacagtcactgcactcataaggtttctctccagtatgaattctgtgatgtgtaatcaactctgacttctgtcgaaaggtcttcccacattcagaacaaatgtagggcttttctccggtatga

SEQ ID NO: 210463 - DNA, 432 bp, Homo sapiens
aataatatacatatttttctgctgcatgcgtgcaacagtgtacaatcagacccaaccctcaggggggttttctcacactgtttctctcaagcgtggctgctctgatggacrctgaacactgatttctgaacgaagcctttcccacagatgccacacttgtagggtttgtctccagtgtgtgttgtctgatgtttattcaaattggacctgtcagtaaaggccttcccacactcagcacacacgtaaggcttctctccagtgtgaattcgctgatgcacttggagctgtgattttttagtgaaagacttcccacagtcactgcactcataaggtttctctccagtatgaattctgtgatgtgtaatcaactctgacttctgtcgaaaggtcttcccacattcagaacaaatgtagggcttttctccggtatga

SEQ ID NO: 210464 - DNA, 388 bp, Homo sapiens
ataaagtttgacttgcggatgaaagctcttccacactcagtgcatacatagggtttctctcctgtatgaattttctgatgaacaatgagtattgatttctggttgaaggctttcccacattcgtggcattcatactgtctctctccagtgtgaattttctgatgtatattgaggtgtgacttctgagtraaggcttttccacaagtattgcattcataaggcttctccccagtatggattctctgatgtgtaatcaagtctgacctctgggtgaaggcctttccacatttggaacatatataagatttctctcctgtatgagttttctgatgtgtaatgagatttgaccggttggtgaatgccttcccacatttattgcacatatagg

SEQ ID NO: 210465 - DNA, 397 bp, Homo sapiens
tgcggatgaaagctcttccacactcagtgcatacatagggtttctctcctgtatgaattttctgatgaacaatgagtattgatttctggttgaaggctttcccacattcgtggcattcatactgtctctctccagtgtgaattttctgatgtatattgaggtgtgacttctgagtgaaggcttttccacaagtattgcattcataaggcttctccccagtatggattctctgatgtgtaatcaagtctgacctctgggtgaaggcctttccacatttggaacatatataagatttctctcctgtatgagttttctgatgtgtaatgagatttgaccggttggtgaatgccttcccacatttattgcayatatagggcttttctcctgtgtgaattcg

SEQ ID NO: 210466 - DNA, 403 bp, Homo sapiens
tgacttgcggatgaaagctcttccacactcagtgcatacatagggtttctctcctgtatgaattttctgatgaacaatgagtattgatttctggttgaaggctttcccacattcgtggcattcatactgtctctctccagtgtgaattttctgatgtatattaagatttgacttctgagtraaggcttttccacaagtattgcattcataaggcttctccccagtatggattctctgatgtgtaatcaagtctgacctctgggtgaaggcctttccacatttggaacatatataagatttctctcctgtatgagttttctgatgtgtaatgagatttgaccggttggtgaatgccttcccacatttattgcatacatagggcttttctcctgtgtgaattcgt

SEQ ID NO: 210467 - DNA, 389 bp, Homo sapiens
aaagctcttccacactcagtgcatacatagggtttctctcctgtatgaattttctgatgaacaatgagtattgatttctggttgaaggctttcccacattcgtggcattcatactgtctctctccagtgtgaattttctgatgtatattaagatttgacttctgagtaaaggcttttccacaagtattgcattcataaggcttctccccagtatggattctctgatgtgtaatcaagtctgacctctgggtgaaggcctttccacatttggaacatatataagatttctctcctgtatgagttttctgatgtgtaatgagatttgaccggttggtgaatgccttcccacatttattgcayacatagggcttttctcctgtgtgaattcg

SEQ ID NO: 210468 - DNA, 379 bp, Homo sapiens
atgggcgcacatttgcctcataaagcacagcatcagataatttatgtgagagaaaatggtagtgtcattcatatagaaaaacatcattactggaaacctattaaacattagcaaattggagaatagttttaatatagtaaatgtaggaagccctttagccatattgaaaacaaatatctttttcaacgttatcttagctctactagttgatcwttttgttatatgtatcatgatacttaacctctaccttggtttaatcattttaagatagacctaagtatattacctttattgtaagattcttggaagtattatgtaagttattaccatgtaaaagctcgtagacttggtgccttgaacgtagcataccacaaatatt

SEQ ID NO: 210469 - DNA, 434 bp, Homo sapiens
gcttcctactcatttaggttaataggcagaattcagtttcttgcatctgtaagtccaatgtctccatttgcttgctggctgtaagcaagggccattcccagcttcaagaggctgccacattccttggctcacggcccccttcctccatctcaaaagccagcaatagagggtcaagtccttcaaacattgcatctctctgatccagctgggaaagtgttgggaaaaagctgagkgttaggagaagctgaggcagggcttgcatgtctgacataatgtaaaagagtcttggaacatgtccggggtccagggtctaaaaccccttgtggcctttggaacaccaagctctatgctaaagggtggaagcctaccatcatgcaccataatctaagcccagggcataaaatcccttgtggcttggatagaatccagggctc

SEQ ID NO: 210470 - DNA, 434 bp, Homo sapiens
gcttcctactcatttaggttaataggcagaattcagtttcttgcatctgtaagtccaatgtctccatttgcttgctggctgtaagcaagggccattcccagcttcaagaggctgccacattccttggctcacggcccccttcctccatctcaaaagccagcaatagagggtcaagtccttcaaacattgcatctctctgatccagctgggaaagtgttgggaaaaagctgagggttaggagaagctgaggcagggcttgcatgtctgacataatgtaaaagagtcttggaacatgtccggggtccagggtctaaaaccccttgtggcctttggaacaccaagctctatgctaaagggtggaagcctaccmtcatgcaccataatctaagcccagggcataaaatcccttgtggcttggatagaatccagggctc

SEQ ID NO: 210471 - DNA, 434 bp, Homo sapiens
gcttcctactcatttaggttaataggcagaattcagtttcttgcatctgtaagtccaatgtctccatttgcttgctggctgtaagcaagggccattcccagcttcaagaggctgccacattccttggctcacggcccccttcctccatctcaaaagccagcaatagagggtcaagtccttcaaacattgcatctctctgatccagctgggaaagtgttgggaaaaagctgagggttaggagaagctgaggcagggcttgcatgtctgacataatgtaaaagagtcttggaacatgtccggggtccagggtctaaaaccccttgtggcctttggaacaccaagctctatgctaaagggtggaagcctaccatcatgcaccataatmtaagcccagggcataaaatcccttgtggcttggatagaatccagggctc

SEQ ID NO: 210472 - DNA, 305 bp, Homo sapiens
ggtattcagttatagcaacagaaaacagatttatgcaggcaattggtactgagaattggagctgttgctatgggaaataccccaaaatgtggaagctcctttgggacagggtaatgggcagaggctggaaaagtttggaggagcaggctagatgaagcttgctttsccatgaatggagcattatgggagattttggtgaaaagaggagaaatgtagggaaaatctgaatcttcttagagattacagttgacccttgaataatactggtttgaaatgcatgggtttaccatacaaagattttgttt

SEQ ID NO: 210473 - DNA, 463 bp, Homo sapiens
ggtcttggtctatacatctaggctagagtagagcagcatgaacatagctcactgcagactctaacacctaggctcaagggatccttccacttcagcctcccaggtagctaggactacgagtgtgtgccaccatacctggctaattttttttttttttttttttttactttttataaaaacagggttttcctattttgcccaggctggtcttgaaccrctggcctcaagtgatcctctcaccttggcctcccaaaaccctgggattacaggtatgagtcactgcacatggccctgaattttctctgttcattctggaacacctatagatttagaaaatggacctcctaggttaacctctaattttctttgtttttttcccatcccttcttgaattgttttctctactgtctgagagattcccttaattttgctttccaacccccagtttgaatattttagttat

SEQ ID NO: 210474 - DNA, 548 bp, Homo sapiens
tacttttttctttagcattgtttataatttcttttaactgattagttcagtgctcaaactacttgctagttgtaggtggggagtctttcctctttcaagctttcaaggtatcttttaataccctgcaatgtaaataatgtgaagttatctgaagaagaacgctgttcagtccttcagaaaagtctatttgagaagtctttccagacccttgttaaaacaatacttactttaagaaaaaratatctatcattcattccactgcattgttcatttgtcacttttagtttagttagagcaaatccagaaccctagtacactatcctttcactcattcttccatctcaacgccccctctcaagtatataacatatggaaggattgttttctgatacctttaaccattctgccaaacaggaatatattacaaggaatatttaatagcttcaagaagccaaatatatttcctattacttgtgtagagtatttagagagctatttagtatctaagatcaaagacagtcttttaaatttaatatgcatcttctctg

SEQ ID NO: 210475 - DNA, 524 bp, Homo sapiens
attatatatagtatacatgtgttataattgggtgtgatggtaatgaagtaaatatgtagattgcctaatgcacaatataaacattcaatacacattccaaaatactgtgtaattattagacagttgctaactcaacggaaaaaggtgagcttgatagaagacagaggtgaactatcagccctactcaataaatggtgctgagaaaaccagctaaccatatggaaaaaaatgaaatttgacctctacctctcaccatttacaaaaattaactcaagatggattaaaaatttaaatgwaatacctcaaactaaaaatcccagaagaaaacataggaaatacttttctgaacattgacctatgcaaagaatttttgactaagtcctcaaaaacaaatgcaacaaaaacaaaaattaacaatgaatcctaattaaactaaagagcttctgcttagcaaagaaactataaagtaaacagacaacttacagagtgggagaagatattttcaaactatgcatctgacaaaa

SEQ ID NO: 210476 - DNA, 524 bp, Homo sapiens
attatatatagtatacatgtgttataattgggtgtgatggtaatgaagtaaatatgtagattgcctaatgcacaatataaacattcaatacacattccaaaatactgtgtaattattagacagttgctaactcaacggaaaaaggtgagcttgatagaagacagaggtgaactatcagccctactcaataaatggtgctgagaaaaccagctaaccatatggaaaaaaatgaaatttgacctctacctctcaccatttacaaaaattaactcaagatggattaaaaatttaaatgtaatacctcaaactaaaaatcccagaagaaaacataggaaakacttttctgaacattgacctatgcaaagaatttttgactaagtcctcaaaaacaaatgcaacaaaaacaaaaattaacaatgaatcctaattaaactaaagagcttctgcttagcaaagaaactataaagtaaacagacaacttacagagtgggagaagatattttcaaactatgcatctgacaaaa

SEQ ID NO: 210477 - DNA, 623 bp, Homo sapiens
ctttaataaatgcagtgaccctgataaaaataaaagattactatatacataccattacaaatgttctaaaaggtttcatgyagtacttcactaatttaagtgatctctgtaatgagggactccaagctatttcattatcataattttattgctgacccaccaaagaaaaggtaatataatcttcaaattatcctagctctctagtattcatcaaggaagggaatttaaacagtcaataccccttgaaaagtagtcttctttcagtaatacttattttaagttgccatgacttaaatagttttgcctctggtctagatgtcatttcaaacaggaagaaacagaacaacaaaaaacaatcaggaactttaaaaaattactgaagaaacatttcaaactcaagaggagagtttgggcacagatacgcagataagtatgtattattgctaagttttgatcgcacagacaaaaccaagcccaggtgctcaaaataatccagtgatgaaaatgatctagattttcaattctaagatgatacatcatggcaaatataggaaaaagatagcatttatggatgagttacttatattaatccatagctgtcactatgcattaagtatgattga

SEQ ID NO: 210478 - DNA, 623 bp, Homo sapiens
ctttaataaatgcagtgaccctgataaaaataaaagattactatatacataccattacaaatgttctaaaaggtttcatgtagtacttcactaatttaagtgatctctgtaatgagggactccaagctatttcattatcataattttattgctgacccaccaaagaaaaggtaatataatcttcaaattatcctagctctctagtattcatcaaggaagggaatttaaacagtcaatacccctygaaaagtagtcttctttcagtaatacttattttaagttgccatgacttaaatagttttgcctctggtctagatgtcatttcaaacaggaagaaacagaacaacaaaaaacaatcaggaactttaaaaaattactgaagaaacatttcaaactcaagaggagagtttgggcacagatacgcagataagtatgtattattgctaagttttgatcgcacagacaaaaccaagcccaggtgctcaaaataatccagtgatgaaaatgatctagattttcaattctaagatgatacatcatggcaaatataggaaaaagatagcatttatggatgagttacttatattaatccatagctgtcactatgcattaagtatgattga

SEQ ID NO: 210479 - DNA, 491 bp, Homo sapiens
tgacataagcataattcttattcttggggtcttaaaatccactagagacagtgaaataatatataaatacataaaaataaactaataaaaactagattacaaatactttcagacaactagcacagacragaggtattacatgacttcagagaaagaggaaggcaacatgaacagtgtggaatttctatgaactttttaggaagggagggacacagagatggaaaaaaagagagataaacatgcgtgtgtgttgtgtgtatacacctgtgtattaaataaaatacatccatatatacagacctaaatcaaaacagtgttggcaaggacacaaaattgttagtgcatttgttattgattgacttcgttaaaataatatgaagcatactaacacatatgtttttacttgtcctttgtgacttctttgtctgggattgtggtttaggctcgatgttatctcagatagttcaaatctatcatttaaatgatgaaag

SEQ ID NO: 210480 - DNA, 491 bp, Homo sapiens
tgacataagcataattcttattcttggggtcttaaaatccactagagacagtgaaataatatataaatacataaaaataaactaataaaaactagattacaaatactttcagacaactagcacagacgagaggtattacatgacttcagagaaagaggaaggcaacatgaacagtgtggaatttctatgaactttttaggaagggagggacacagagatgsaaaaaaagagagataaacatgcgtgtgtgttgtgtgtatacacctgtgtattaaataaaatacatccatatatacagacctaaatcaaaacagtgttggcaaggacacaaaattgttagtgcatttgttattgattgacttcgttaaaataatatgaagcatactaacacatatgtttttacttgtcctttgtgacttctttgtctgggattgtggtttaggctcgatgttatctcagatagttcaaatctatcatttaaatgatgaaag

SEQ ID NO: 210481 - DNA, 491 bp, Homo sapiens
tgacataagcataattcttattcttggggtcttaaaatccactagagacagtgaaataatatataaatacataaaaataaactaataaaaactagattacaaatactttcagacaactagcacagacgagaggtattacatgacttcagagaaagaggaaggcaacatgaacagtgtggaatttctatgaactttttaggaagggagggacacagagatggaaaaaaagagagataaacatgcgtgtgtgttgtgtgtatacacctgtgtattaaataaaatacatccatatatacagacctaaatcaaaacagtgttggcaaggacacaaaattgttagtgcatttgttattgattgacttcgttaaaataatatgaagcatactaacacatatgtttttacttgtcctttgtgacttctttgtctgggattgtggtttaggctcgatrttatctcagatagttcaaatctatcatttaaatgatgaaag

SEQ ID NO: 210482 - DNA, 454 bp, Homo sapiens
ggtcaactacaaactgattcattagcactttgatttacggtcttccacttgaatacatctactcctacatatgtatcagagttctaattagctattctattctttctgtccagattttacacctgcattcagaaagaataagtgaaggaagtgtccgtattctattcaacccagagtcagaactagtcactttagtttttatcttcctcatttcttatctagactgtttccaaagccttctaaattatctgtggggtcagttttgccctcttcaaatctatgctctaatttactactacagtgatctatataaaatgaaaatcttactctgtcaygtctccatttaaagaacccaaagctcttccttgatctagcaggtaacattaaagcttattttcatggtgtaaaagacctttcatgactctccttgttcttgtttctatatccagtttct

SEQ ID NO: 210483 - DNA, 234 bp, Homo sapiens
gagcaccattatataaattttaaaattttaaccctcgattcatagtcaattgaggttaagttttgggttgagcattggatataagtacagaaaagcacccctgagagcacttgttatggaaaacagtaggcctggaaagttaaatatggaaatggattatamctaggtaaacctaaactaatctgaaatggtttggatcagtgtcctcaaccaaatcttaggtcaaattgatag

SEQ ID NO: 210484 - DNA, 633 bp, Homo sapiens
gcacaattgaatttcaaatcatagtttgaattttgaaagatttgttaactcattatccactacaaatattttatgtgaggcctaataatatctttaattattatatatagaaaaatatattacatttcttttaaattaatttcacaaaataccacagcccctatatttatctttagagtgaattgcattttagtattaccaactggcttgtaagagaggcattttaaaaaaygtcttcataggagttttgaggagaacattgtctatgctatcactaaatgcctcctatataaagacagcaccaaatgaaaaatgtttttaagatataaggacaatctgtgcttttaataaatgctggctttgttgctttgttttttctttctcctcctttgtttagctaataatgaacaacatgtgactgatcattcctgcttttggcttttatgctgaaatttctaaccaactctgaagctgcactataacaaacagctacaagccatagcaagcaacaaaagaaaaccttgaagaaaggaaataatctgatttccagagttaccatattataatattcaatatatccacatttcaaagaaataattttgaagcctgtgaagaaacaaaagaatatggctc

SEQ ID NO: 210485 - DNA, 566 bp, Homo sapiens
cgtacttgttaaagaatattgttagtatcaaaaaatctcaaataagtgtccacgaagtaagtaacagctaataacttaagagtttcaggaaataaaggaaatgttgcgctctcacctgctaagattatgcaggacctagtgtgtgctcctgaggacgaaaacagaagcagcaagttctgcttctgactatcttcaatatctcctggagtgtgattaagccaacctcacaaatctgctgctcctggaatacacatagcaagatggttaactcatagtgatayggaaatactttatatacataaaaattattttatttttatttcaatttaagaactgtaatagcttttttttttctggagctctacacacacacacacacacacacacacacacacacacacacacacacatacagagttaaaaattggctctaattccagtaatgtacaatcatattgaggaatatttgatgtatgagaaatattttatggtaaaaatatgattaattatatttattttcaaagcgggtattgctatgttctgctatatatttcaggtcaccgcaa

SEQ ID NO: 210486 - DNA, 579 bp, Homo sapiens
tgagtttaggaaatgcaaatcttttaaaacagcttctagcaaagctttcctaccattatcccagaggaagacctgaactttaccatcctgggcaggaaccaattctgcccactgccccagagaaaggcccaatttgtatcttccaaaactgcttgttgtatacacaatattgagaaaatagttcaaaataaatactgatatagaacatgcagaagggccgtgaagaatcaatcttcaacatggctctattgcaacatgaccctcaagggatctgcagagtatgtatgagattagatcttaatggtagcrcttaaataaaatatgccaaccatatggctgtacataatttacaataccatgacaatggccaactctccagctaaataattaaacaaatattaatttatttgttttacctttcttctgtatgacaggttgtgcctatagaaacagcctgaggtttctattgtttccatttgttcttaattaacatgtaataattgtacatatttgtggggtacagagtgatgttttcatacatgtttacaatgtgtaataatcaaattaggataattagca

SEQ ID NO: 210487 - DNA, 414 bp, Homo sapiens
tctctctttaaaacaaatatatgcaatgggcttatctaattctacattatttctggaaagggcatagttgaaattgcccaactctttaacagcttaacagttttgtatgccttctatacatctggggtgcagacatgtgtccttggttctgtgtgtcaggtgtttccatggaaaaactcagatcctccaaccttgtgatatccttccttgcaaagcaggcagggagagtatttttcagaggcaacagtagccaaggtcctggcggtaacatttgtggtgtgtgattttaggtgwctgtatgtagcaatagcatcatactgggccccacaggagcagcctgacagtatgatttggctattattcctggctgcatgacccccaagcttatttctttgtcttctgggagattctatg

SEQ ID NO: 210488 - DNA, 599 bp, Homo sapiens
atctgaaaagtttagccagatctcctacttcccgagcctgtgacttaattattttaaacacatagtatcagtacatgctgaataagcactcagatatctggtgatgaaaatgtccctgtgtgtaatctttaatacacacttcacatgacagacttggataaatacatagatcaatagatagatgaatagattaaaagaaaacttgctcctaaagaaattccttctactgaattactttggaaaaaaatagaaaatcggagacatttggcactttttggaaaggaaatgggtaaagcttttcagaatgagcttgacttgwcataaatgtaaaaggaaatttattaaaggacttctgactaaacacttatctttatcaaataaaattattctcagaatattaatttttatcatttaaacaaaggtaattgaaaaaatacgatacgaaatatttctccattttagaagcagaaaacacgcagaattgttaacctctgaatataaaagtttgtttttataattttaaaccaatatatttattctcaatgcataattcagttttactttacaaatgtcagttgaatcaatagagataattcctg

SEQ ID NO: 210489 - DNA, 603 bp, Homo sapiens
ctgctatatgactgacctgctgaatatatttgaattaaaaaaaacagtagataggttgttttaaaatatctcatgaccggtttttaatatgttgttttatacctctcttttgtgagatttccaactacaacttcttgtttctgatactaggcctcctctgcttcacctctatccattttttccctctgatttacaacgataaggaacttgagataaacayccttttcaatgtgtgcataaatgaaaacagtaactggcatgatctttataatatgcaacattttgcatgggcaattttgactcttttgatcacttttgtcacagtgcctaagtctctgtgttgtttatttgactatgccaagatggtgagttctgcacctgtgatttgccactccaatttccaaatttttaaatagagtcatgaatcgcttaacaatgggaataggttccaaaaattgagttattagccaatttcatgatgcaaaagtcataggatatacttacacacacttacatgaaatagcctactacacacctaggctataaaccataataaaccatacatggtatggtttattgctcccgagatgcaaatttgtacag

SEQ ID NO: 210490 - DNA, 603 bp, Homo sapiens
ctgctatatgactgacctgctgaatatatttgaattaaaaaaaacagtagataggttgttttaaaatatctcatgaccggtttttaatatgttgttttatacctctcttttgtgagatttccaactacaacttcttgtttctgatactaggcctcctctgcttcacctctatccattttttccctctgatttacaacgataaggaacttgagataaacacccttttcaatgtgtgcataaatgaaaacagtaactggcatgatctttayaatatgcaacattttgcatgggcaattttgactcttttgatcacttttgtcacagtgcctaagtctctgtgttgtttatttgactatgccaagatggtgagttctgcacctgtgatttgccactccaatttccaaatttttaaatagagtcatgaatcgcttaacaatgggaataggttccaaaaattgagttattagccaatttcatgatgcaaaagtcataggatatacttacacacacttacatgaaatagcctactacacacctaggctataaaccataataaaccatacatggtatggtttattgctcccgagatgcaaatttgtacag

SEQ ID NO: 210491 - DNA, 603 bp, Homo sapiens
ctgctatatgactgacctgctgaatatatttgaattaaaaaaaacagtagataggttgttttaaaatatctcatgaccggtttttaatatgttgttttatacctctcttttgtgagatttccaactacaacttcttgtttctgatactaggcctcctctgcttcacctctatccattttttccctctgatttacaacgataaggaacttgagataaacacccttttcaatgtgtgcataaatgaaaacagtaactggcatgatctttataatatgcaacattttgcatgggcaattttgactcttttgatcacttttgtcacagtgcctaagtctctgtgttgtttatttgactatgccaagatggtgagttctgcacctgtgatttgccactccaatttccaaatttttaaatagagtcatgaatcgcttaacaatgggaataggttccaaaaattgagttattagccaatttcrtgatgcaaaagtcataggatatacttacacacacttacatgaaatagcctactacacacctaggctataaaccataataaaccatacatggtatggtttattgctcccgagatgcaaatttgtacag

SEQ ID NO: 210492 - DNA, 585 bp, Homo sapiens
tgactaaatttttgtcaaagagagaaaggcagaagcgttgcctatgcgctccagaagactttgtgaaagatagcaggggatttctgatttcttcttttcctgatattccaataggcatgtgttagaccttttgacattgtcctgtagttcttggatgttctgtgctttgtttttttattttattttattttttaatttttattctcttttctgtttrcttctcattttgggaagtttgtattgatttctctcaaagctcattaattatttgtttatccatgtcttacctactgataaacctgtcaaagacattcttcatttctgttgcagtattttttatttctagaatttccttttgaactcttctgaatgttctcttcttcctacttctattgtctatctcttcttaaacattgtgtatattaaaatggtaattttaaatttcctgtttgataattctcaaatcagtgtaataactctgcctggttctaatgcttgcttggtctctttaggttatgttttacttgcattttagcatgctttatatttttttggtgaaatccatatatattgcatcaggtaatt

SEQ ID NO: 210493 - DNA, 501 bp, Homo sapiens
ggggcaattaatttggtaagggaggatttcattaggcaaaagtcaaaagaaggacttgaaatgtcttttgtcatgagggctgccaagtctctgagtgaagatggttgacaaaactgccatcaatcccctttcactttggcactggcaaagggcaacatagatagggtttgggaattacatagtttgttttagtttcttacatacccaagagtactgatagctgctgctttgaacacaaagtgatcagtgtttttcagtgacctgagtaaatgggaaacwatctttgtcattgtgtaattggcctgtatactttatccagaaattgaaaatatactagcatctaataaaatttagacatgtgtatgtgaactatttttttcacaataccagaaaacacacagttgactattaaagtttttgtcttgttttattgttgaatcattagggccagcatacagtaggtgatcaataagtttatgttgaataaataagtgggtgcaa

SEQ ID NO: 210494 - DNA, 501 bp, Homo sapiens
ggggcaattaatttggtaagggaggatttcattaggcaaaagtcaaaagaaggacttgaaatgtcttttgtcatgagggctgccaagtctctgagtgaagatggttgacaaaactgccatcaatcccctttcactttggcactggcaaagggcaacatagatagggtttgggaattacatagtttgttttagtttcttacatacccaagagtactgatagctgctgctttgaacacaaagtgatcagtgtttttcagtgacctgagtaaatgggaaactatctttgtcattgtgtaattggcctgtatactttatccagaaattgaaaatatactagcatctaataaaatttrgacatgtgtatgtgaactatttttttcacaataccagaaaacacacagttgactattaaagtttttgtcttgttttattgttgaatcattagggccagcatacagtaggtgatcaataagtttatgttgaataaataagtgggtgcaa

SEQ ID NO: 210495 - DNA, 501 bp, Homo sapiens
ggggcaattaatttggtaagggaggatttcattaggcaaaagtcaaaagaaggacttgaaatgtcttttgtcatgagggctgccaagtctctgagtgaagatggttgacaaaactgccatcaatcccctttcactttggcactggcaaagggcaacatagatagggtttgggaattacatagtttgttttagtttcttacatacccaagagtactgatagctgctgctttgaacacaaagtgatcagtgtttttcagtgacctgagtaaatgggaaactatctttgtcattgtgtaattggcctgtatactttatccagaaattgaaaatatactagcatctaataaaatttagacrtgtgtatgtgaactatttttttcacaataccagaaaacacacagttgactattaaagtttttgtcttgttttattgttgaatcattagggccagcatacagtaggtgatcaataagtttatgttgaataaataagtgggtgcaa

SEQ ID NO: 210496 - DNA, 408 bp, Homo sapiens
ctggatgatgctcgcctgcattgaaggagaaaaacgtactttactgggtccaccaattcaaatctcatctggaaaccttcccacagatacgtacagaattactgtttaatatgggygctccatgaccagtaaagctgatgcataaaattaaccatcaccgtagggtttattttattaaggagaaagaaaaaaagtaatgaaagacaattggcattcctggtcacaattagtaataaatgtgcatacacctacgtgtgcttgtggttttgtcaaaggcacattcctcagtcttggggatcatgacaaataaaagaagagggtggagaagaaggggaaagagggttagcaaccttgattattctggtattaggaaactgagctgcaatgcacttggtatgaggggaattc

SEQ ID NO: 210497 - DNA, 423 bp, Homo sapiens
aattcctcttccctctgccttttttttctatttttgccccaaggaactggatgatgctcgcctgcattgaaggagaaaaacgtactttactgggtccaccaattcaaatctcatctggaaaccttcccacagatacgtacagaattactgtttaatatgggcgctccatgaccagtaaagctgatgcataaaattaaccatcaccgtagggtttattttattaaggagaaagaaaaaaagtaatgaaagacaattggcattcctggtcacaatkagtaataaatgtgcatacacctacgtgtgcttgtggttttgtcaaaggcacattcctcagtcttggggatcatgacaaataaaagaagagggtggagaagaaggggaaagagggttagcaaccttgattattctggtattaggaaactg

SEQ ID NO: 210498 - DNA, 423 bp, Homo sapiens
aattcctcttccctctgccttttttttctatttttgccccaaggaactggatgatgctcgcctgcattgaaggagaaaaacgtactttactgggtccaccaattcaaatctcatctggaaaccttcccacagatacgtacagaattactgtttaatatgggcgctccatgaccagtaaagctgatgcataaaattaaccatcaccgtagggtttattttattaaggagaaagaaaaaaagtaatgaaagacaattggcattcctggtcacaattagtaataaatgtgcatacacctacgtgtgcttgtggttttgtcawaggcacattcctcagtcttggggatcatgacaaataaaagaagagggtggagaagaaggggaaagagggttagcaaccttgattattctggtattaggaaactg

SEQ ID NO: 210499 - DNA, 626 bp, Homo sapiens
gcgtgtgacataccacttagcacatagagtgactgtagtgaaacatatagacaatgaaaatgtcaaaaagtatgtggagaaattggaattctcatgcattgctggtgggaaagtaaaattgtgaaacaattttgaaagacgtgctgggattcctcaaaagctaagtacagaattcctaattatatacccaaaaggagtgaaaacatatgtccacacaaaaatttgtacatgaatgattatagaggtattatgtataatagcccaaagtggaaacagttcaatatttctcacwtggtgaataaaaacgtaaatagtgttatatccagtaacagaatattaattcagtcatgactaggaacaaaatactgatacattctaaaacacagaagagactggaaacattattctaaatgaaagaagccagtcccaaaagatcacatgttgctcgattcctgttatatgagatgcccagaatgggccaatctagacagaaaaaaaaacaaattactaaggactgtgggtagagagaataggaagttattgttaatgggtacatgatttcttttcggattgatgaaaatgacctaaaattgattatggagatggtcacatgactctttgtatgt

SEQ ID NO: 210500 - DNA, 505 bp, Homo sapiens
tctggctgaatagaacactctaacttcagacttttttcttcgataaaacaaaacaaaacaaaacaaaaaaagaaactgctgtgactgtacaaaggcttgcaagccttgatgtctctcttggatacstagacttcatggtaatagttctctggaaataacaagacaaaagtgatagtgggtcagagcctctaagacagaagtgggtggtgtcctggaatgagaaactagtaccctatggattcccttgttccatggggactacttgaatgtctggtaaagatacattaagactactttggcctagatttgctttactagagacttctttttttttctccatctcccctctctttctccctcttttctctcatacacacatgcaatactctgttcttctttatgtacttttcttctggaagtatatatccatgttacttggttttatttcctccttgtgaagttattataaatacctgtttttctttgctttttgcagaatgaattc

SEQ ID NO: 210501 - DNA, 505 bp, Homo sapiens
tctggctgaatagaacactctaacttcagacttttttcttcgataaaacaaaacaaaacaaaacaaaaaaagaaactgctgtgactgtacaaaggcttgcaagccttgatgtctctcttggatacctagacttcatggtaatagttctctggaaataacaagacaaaagtgatagtgggtcagagcctctaagacagaagtgggtggtgtcctggaatgagaaactagtaccctatggattcccttgttccatggggactacttgaatgtctrgtaaagatacattaagactactttggcctagatttgctttactagagacttctttttttttctccatctcccctctctttctccctcttttctctcatacacacatgcaatactctgttcttctttatgtacttttcttctggaagtatatatccatgttacttggttttatttcctccttgtgaagttattataaatacctgtttttctttgctttttgcagaatgaattc

SEQ ID NO: 210502 - DNA, 636 bp, Homo sapiens
cagattagtggtagaacagataaaggcattgataatgggtcattctttacaaatcagataagatcaaggttttgtagaccagaggctcatacagttctggctatctaccttgagaaaataaataaaaaacaataaatataaagtgtgggttattttcttgcaagagaccaatgtaaagtagtggcccagaagtttaagcttggttagctccacagtaartctactaccaattacagaatatatatgtgaaatacatttttttaattcatacttaatgtcttacaaaaacatcacctataaaaatagtgaaaattgaaattcttaaaattaaaaaaaattgtacattgtaaagtatatatctcaaattgtttccaagatccctccttatgccttttgtgatccaaatactttaaaaaattattttctgaaaaaaactgttatgcagtttgagttacttatgattgctattattttttatgtgaatttttttacagatcatacaaatacttattaaaacagaggacatgttcagctctggacatctgtttagaaaatgaaatacggatctgaaatatttcaaaaattgaaaatgaagttaagagtttagtcctttaagaaatgatgaggagaccaaca

SEQ ID NO: 210503 - DNA, 636 bp, Homo sapiens
cagattagtggtagaacagataaaggcattgataatgggtcattctttacaaatcagataagatcaaggttttgtagaccagaggctcatacagttctggctatctaccttgagaaaataaataaaaaacaataaatataaagtgtgggttattttcttgcaagagaccaatgtaaagtagtggcccagaagtttaagcttggttagctccacagtaaatctactaccaattacagaatatatatgtgaaatacatttttttaattcatacttaatgtcttacaaaaacatcacctataaaaatagygaaaattgaaattcttaaaattaaaaaaaattgtacattgtaaagtatatatctcaaattgtttccaagatccctccttatgccttttgtgatccaaatactttaaaaaattattttctgaaaaaaactgttatgcagtttgagttacttatgattgctattattttttatgtgaatttttttacagatcatacaaatacttattaaaacagaggacatgttcagctctggacatctgtttagaaaatgaaatacggatctgaaatatttcaaaaattgaaaatgaagttaagagtttagtcctttaagaaatgatgaggagaccaaca

SEQ ID NO: 210504 - DNA, 459 bp, Homo sapiens
acactccaggctgggcaagagagagactctgtctcaaaaaaaaatcgtgtgtgtttatataaagagagattaataggcaaagcacaggagaattttaaggcaaggagacgattgtgtatgacactaatggtggatatatgtcattacatatgtatccaagaatgaacccttatataaactctggactctacataacaataatgtgccattgtggactcactgattataacaaatgcaccactctggtaggggatattgagagtagagaggctgtgtgtgttggggggcaggtagaggtttgtagagaatctctgtactttctgcycaattttgctgtgaacctaaaacaacttcttctaaagaataaagtcgattaaaaaaatgagactcatggacatgtcatcatggtttacattctccgagtgacagtttgggtttctgagacttttatatttttga

SEQ ID NO: 210505 - DNA, 536 bp, Homo sapiens
gggtggaaaagaaagaatgctcaaacactgaaaaggggattccagttcattaactayagggctctcatggactgcacagattttgtgacagtatagtacagagaaatagttataaagactcctcctgttcagtgataaaattcctaaatattgaaaagagttttgcaactgtggatgaatggccattgctgaataaagctaaagtgatgacgtgccagctcccttcatctgctgtgaatgtttttaaagggaagtggcagacttagtatgtgtattttttaaagcataatagatgattcaaaatctgatcatgttttctatagtcaatatccatagctactaaagcattatcatattttaatgttccttattaataacaatcagaacttaacctcaaaatccattgtttattgattatttacatgttcaataatgctttcttgaatagctacacaatcaccacaccgtgctaggcactgtttatgcaaaagtgaattaagtaagttttgtgtccccaacaggttgctctatctagt

SEQ ID NO: 210506 - DNA, 587 bp, Homo sapiens
atatgtgaaacatattataacactatccacttaatacagtatttgggacatgtgtggaccactttgggaacacaaggttagtagctttctggattacatgcttcagggaagatttcaccgaggagatgaaatgtgaagtgtaatgagtattagagaaaggtgccaaaacatgtttaaaggcatggaaggcagagaagcattgtggatttgaaatgatattgagagtagaaggacataggaaagaaggatggaaatgaaactggaagtgttggcaggaattatatgataaagcatccaacatgtcaaactctaggtgttttaaagatcttttcatgagtgatgggcagtgtagtagactagcagatgtggaaggttaggttatactgccacaaaaaacaacacaccaatctcatccagctcattgcaaatgctgctaattcattcctttttatgactgagtagtattccattatatatatatatrtgtgtgtgtgtgtgtgtgtatatatatatatatatctctcacagtgaagtaactcaggaatggaaaaccaaacatcgtatgttctcactgatatgtgggagct

SEQ ID NO: 210507 - DNA, 626 bp, Homo sapiens
ctaatatttttatcatttgtgaatcagctacatatgtgggtgtaaataatgctcactacttggaacgctgaacttttcttagcagtgtttttggagtcacagtatgtgttctctgggcagatgggaagcaaaagtttattggctagggaagtctgtttgcaaactgcaaaaataaaaggaagggatgatgtagtacaaaagatgtttcactaaatcagcgaaattttcagtttagatagctcatctatccttcaaaacagtctttgaaaattgataaggctaagaagggtgactgacttttttgttatagacgatgagaaccttaaatcaagagggtgtcattaagagttgtctaaccctaaatcattccagatttakgaaattcttgtttactttcaggaactggtagagaaaatttgccctaaatctttcaatagacacatcttaaagaactcgtatgattctacactaatgaatggctgcgtattcacacacaggggtggagacaagctggatccttggaaataggcctggagagaatgatttatttgggcaaaacatgatgcactttggggatttttagttttcacttttgtctttgttttatgtgtatttttttctcagat

SEQ ID NO: 210508 - DNA, 626 bp, Homo sapiens
ctaatatttttatcatttgtgaatcagctacatatgtgggtgtaaataatgctcactacttggaacgctgaacttttcttagcagtgtttttggagtcacagtatgtgttctctgggcagatgggaagcaaaagtttattggctagggaagtctgtttgcaaactgcaaaaataaaaggaagggatgatgtagtacaaaagatgtttcactaaatcagcgaaattttcagtttagatagctcatctatccttcaaaacagtctttgaaaattgataaggctaagaagggtgactgacttttttgttatagacgatgagaaccttaaatcaagagggtgtcattaagagttgtctaaccctaaatcattccagatttatgaaattcttgtttactttcaggaactggtagagaaaatttgccctaaatctttcaatagacacatcttaaagaactcgtatgattctacactaatgaatggctgcgtattcacacacaggggtggagacaagctggatccttggaaataggcctggagagaatgatttatttgggcaaaacatgatgcactttggggayttttagttttcacttttgtctttgttttatgtgtatttttttctcagat

SEQ ID NO: 210509 - DNA, 554 bp, Homo sapiens
actaattttacttaaacacgaaacctctaggatttcatatatatgaaattctatattatatatatataattaaactataggagatgattcaaactaaaacaaaactatatctggacatattataacgtcattgaaaaagaataaacctgaaaccaggttgttttctcaagtacattgttatcacatttccaatacctaaaattaccctcatcgtgttttttcattgtttcttataatcaacatgataatgacacatctttgacctaagcccagaagragagttggaatgttatggaataatttcactttcttagaagaatgtagtgaaaaaagtttcagcttggagttccttgtacacccctaactctgtaagatgttgccaaaatgaataacaactacaattatagtcaaaataacacaatgtattagttgggattttttaaagggtcgaaaaagatctgggaatatccaatttttaataatgtattttggaccggctaaaacagaaatttatctattcacttccctggggggtcaatcctgtagaaattatc

SEQ ID NO: 210510 - DNA, 550 bp, Homo sapiens
atttcaaatttttcacttataggactagagaaagcagctatgtatttttcttcattaaatggaaaataaactgacctccagctgaatggggcccttgataagctataatgttggtatttacagtagatgatagacagataaatatacagagatagagttatgcctatgggtgaaattctactctataaatagaagagctgcaatcaccatgatagcttctccagcactggaagtatctgtactagttaattaactggttttcrttatttttatccccaactgttatatgataaattgttaaaaatcaaaatcttaattatatgaatgtctatctgtttttatatttatatatttttgatacagcagttagcccaagtagcttgttcatgctatggaaatagtttagaaaatgtgctatcagtaaactttagttgcagaaaacaaatgactagggatagtagtcttaaggaggtatggaatgacagttcttcagaaagtcagacgaggctatatgacttgaataaagatttctagacatgacatttcaaga

SEQ ID NO: 210511 - DNA, 550 bp, Homo sapiens
atttcaaatttttcacttataggactagagaaagcagctatgtatttttcttcattaaatggaaaataaactgacctccagctgaatggggcccttgataagctataatgttggtatttacagtagatgatagacagataaatatacagagatagagttatgcctatgggtgaaattctactctataaatagaagagctgcaatcaccatgatagcttctccagcactggaagtatctgtactagttaattaactggttttcgttatttttatccccaactgttatatgataaattgttaaaaatcaaaatcttaattatatgaatgtctatctrtttttatatttatatatttttgatacagcagttagcccaagtagcttgttcatgctatggaaatagtttagaaaatgtgctatcagtaaactttagttgcagaaaacaaatgactagggatagtagtcttaaggaggtatggaatgacagttcttcagaaagtcagacgaggctatatgacttgaataaagatttctagacatgacatttcaaga

SEQ ID NO: 210512 - DNA, 550 bp, Homo sapiens
atttcaaatttttcacttataggactagagaaagcagctatgtatttttcttcattaaatggaaaataaactgacctccagctgaatggggcccttgataagctataatgttggtatttacagtagatgatagacagataaatatacagagatagagttatgcctatgggtgaaattctactctataaatagaagagctgcaatcaccatgatagcttctccagcactggaagtatctgtactagttaattaactggttttcgttatttttatccccaactgttatatgataaattgttaaaaatcaaaatcttaattatatgaatgtctatctgtttttatatttatatatttttgatacagcagttagcccaagtagcttgttcatgctatggaaatagtttagaaaatgtgctatcagtaaactttagttgcagaaaacaaatgactagggatagtagtcttaaggaggtatggaatgacagttcttcagaaagtcagackaggctatatgacttgaataaagatttctagacatgacatttcaaga

SEQ ID NO: 210513 - DNA, 477 bp, Homo sapiens
attatcttttctatggactttctatggcactccatactgggaatgttaaagataaataaaatttggtccttgcccctagaaattatagtaaaagtaaagtgaagaattaatataacataatggttaagacattcttttactgtgtgtctatttttattaattggcattggtttcagcatttgtagttgttttcagtttggtgggtcatgtaaccactttatgccttagtttcttctattgttaagatgcaaataataagagtaactttctcatggtgtttatttaatgggttaaataaaaatcaatcyacagaattaattcattgaatgaaaatgtatgtcaattacctagttttatattagaatttttcaaaaagtgcaaatgattgctcttctattgatagtattgtcctgctattccccattggctttatgtggtgattactagaactgaattggcttctgggctggggaaagt

SEQ ID NO: 210514 - DNA, 598 bp, Homo sapiens
aagctttagggaggctcctggtctgggaagtaaagagtaaacctggggcagtgggtcaggccagtagttacactcttaggtcactgtagtctgtgtaaccttcactgcatccttgccccattcagcccggcctttcatgatgcaggagagcagggatcccgcagtacatggcgccagcactggagttggtgagcatgtgctctctcttgagattaggagcttccttactgctcctctgggtgatccaagtgtagtgggaccccctactagggtyaggaagtggacactaacatctgtgcaggtgttgacttgaaaaataaagtgttgattggctagaactgctgcctccctgactgtgagctgccttccacaccctgcactgcactgtgttctctcctcacccttaacctgcttcactccagtctgttctggctgtttattaccttgttgcaaaacagggccgaagcaaggattaccttgacaaccctagcttctccttagccatcttccttgacagtgtgatctgtttagtgagatttagcatgtgtgaataaagtatatgcaggaggaaattgctttgtcttcccaatcggtagaa

SEQ ID NO: 210515 - DNA, 204 bp, Homo sapiens
taaactatgaagagagtcactgctgctcttacgaagctagagcttatatcgcctggggaagatgggcaatgctttaacttgaaaattgccatcttgttaagcttgttcacacttctaattggtttctttggctggctctccrtcttctgcctgcctcttaaaggttagtgtttcccaggatcaggtccctgatcctctgagact

SEQ ID NO: 210516 - DNA, 570 bp, Homo sapiens
gaaccattaagaaattgaaaacctyaacaaaccactaacctgaaatgaggtcaaagctgtaataaaagtctttcattcaagaaaaccccagatctgatgaatccactactgaattctcccaaacttttaaagagctagtacaaattctacttaactgcatcaaaaaattggaaaggggggaatacttccaaaccattctacaagatcagcattaccctgacacccaaaccagacaaagaaacaacaaaaaaagaaaactacaggccagtatcactgatagacatacatgcaaaaattctcaacaaaataatagcaaacctaattcaacaacacttcaaaagattattcaccacaatcaagcattattcatttcagggatgcaagtatggttcaacatatgcaaatcaataaacatgatacatcacattatcagaaccacaaaaaatatcctgcgattatttcagtagatgctgaaaaagcccttgataaaattcagcatttccttgagaaaaaaaattctcaactggatatagaaaaaacatacatcaaaataataaaggtcatatataa

SEQ ID NO: 210517 - DNA, 535 bp, Homo sapiens
aatgaataatgcaatgaaacaacagaatgtaaatcgaacactttaggcaatggcaggaaactataccttctttccaagcacctatggaaaatgtactaaaatacaccatattctgagccataaagccaccttaacaaactaaaaaaaattgaaatcatatgaaatgtttcctgaccattatagagtcaaactagaaattaactacagaaataaaacaagaagatcctcaaacagttggaaatttaataacacactcttaagcaatccatgggtcaaagaggaggtcacaaaagaaattttttacaaatacatagaaatgaatgaaaatattatatatcraagtttgtggatcatagccaaagcaatgctgagagggacatttatagcactaaatatttacatttgaaacaaagaaaaatcttaagtaatttaagtttttttcctcaggataatagcaaaagaagagcgaaataaatccaaatcaaacagaaggaagaaaacaacaaagagcagaaacaaaacgaaaacaggaaaa

SEQ ID NO: 210518 - DNA, 454 bp, Homo sapiens
gggaccataacctgtatttcccataggaacaatggttcaatattgactgattctgtgtttgcagcaaatttatagaatgtatcagccactaataataaaaatcagttgtatataatttatatttctcaattctctgccaacttgccaatataacaactccaactagtgctatagtatttttttacattgacctaatcttgcacttcccaactcattttaagattgagttaatgtctgacttccaaacccttctaggacaatttgtaatggcttgttgaaatcctgtttttctatagtgtagttgtaaatcatgacaaattttaagttcactaaatatttgacttcagcagcatccaaatatgtttctactatttgataaagaggaacrtgttctaattctcatcactgaggtacatggaacaaagttaatatactctgttaaaacatgcctttc

SEQ ID NO: 210519 - DNA, 474 bp, Homo sapiens
atactgaacagtatttttcttccctctcaactcaaagtatataacagaataataaacactttctctgtaatttcttttcagcctgagaccttagctttgaaagaagaggaagaggccrggagccatagttcatgcctgtaatcccagcaatttgggaggccaagacaggcagattgcttgagctcaggagttggagaccagcctgggcaacatggcgaaaccctgtctctatacaaaatacaaaaattagccaggtatgatggtgtgcgcctgtagtcctagctactctggaggctgaggtgagaggatcacttgagcctgagaagttgaggctatagtgagccaagaccgtttcactgcactcctgtactccagcctggatgacaaagtgaaatcctatctcaaaaaaaaaaaaaaaaaagaggaataacttaatgagctgcagtgtgaccacacaatcaagattagagttac

SEQ ID NO: 210520 - DNA, 559 bp, Homo sapiens
tttattgcaagtttgaaccagcattgagcgactatttagcaaagaaacataggcacagttttcatataaatttaattatttatatttgattccaaaataacttttaggcatatatagagttatgaaaaagtttatgtaaccgacacatgtgcataacagtttgataactgatatattgaatctaaacataccactcagaaaatattttttccaaagatatgttaaattatattttaggccataattttaatcatatgtctttggtttacagttttagtagttttatcattcaaccatatcaacccatttcatgttgtaataacatcaaataatatccaattagaatcaccatttatatattttctttatgagttatacatcttgaaaaggaaggaaagaaattaatggrcagaaaggtaaattaagcttaataccagattttactcaagaaagtttggctgacaggtcaattctggttttaagaaggggaaaagaaaaaagaaaactttttcacatactttatggtaatatccttattagaactctgtatagtaaaact

SEQ ID NO: 210521 - DNA, 500 bp, Homo sapiens
aattaaaagccttcacttaatgtaggttaattcagattatctatttcttcttgagtgttttaagcaattyattttaaaatcaatttagcaaagacagaagaaatatgcattcatactgtcttttataattatgtaattgcctttactagggttctttgtttttttgtgtgagtatatggatctaaattcctgtctgggctaacagcctgagaaaagtttttttagtgatttttgtaaggtgtctattttaaaaacaaattttctcagtttgtgattatcgggtaatatttctatttcactttcatttttgaaatacagcttcagacttttggttgaccgtgtctgtgaccactttgtatatgatatgctattgcactgccttaggcttcccttgtttctaatgagaagtcagttgataattttattggagttctcttgtaagggatgagttttgattttgggcttttcttttcttctcttggtactttcaagagcttggc

SEQ ID NO: 210522 - DNA, 500 bp, Homo sapiens
aattaaaagccttcacttaatgtaggttaattcagattatctatttcttcttgagtgttttaagcaattcattttaaaatcaatttagcaaagacagaagaaatatgcattcatactgtcttttataattatgtaattgcctttactagggttctttgtttttttgtgtgagtatatggatctaaattcctgtctgggctaacagcctgagaaaagtttttttagtgatttttgtaaggtgtctattttaaaaacaaattttctcagtttgtgattatcgggtaatatttctatttcactttcatttttgaaatacagcttcagacttttggttgaccgtgtctrtgaccactttgtatatgatatgctattgcactgccttaggcttcccttgtttctaatgagaagtcagttgataattttattggagttctcttgtaagggatgagttttgattttgggcttttcttttcttctcttggtactttcaagagcttggc

SEQ ID NO: 210523 - DNA, 390 bp, Homo sapiens
atcttaggaacaaaagcaagggccccaggatctcagtagtgccatgcccaaggtagaggttacatctcatgwtttagaatgaatggaagaaaccaccatcatttggctaaactcatagtctcagtaacgtatagctgggttcaggatgcaaagtgttcatgtcttgcctttcctaggaaaataatactctaacaggaagctaggggaagaggtagacctttatttttggttgcacccatttggagttgatacagataggagacagagaattactgggtagaagagggtggttccccagcacaggccccactctcaagcctggatacctgtagccctaaaatgaggataggcattcctgttttcaagcccaaaagctgcctctggcctgcc

SEQ ID NO: 210524 - DNA, 628 bp, Homo sapiens
gaatatattagacacttcaaaattgtggggaaagatactttccaactttcaaaaaaaagtttaaagccagtcaacttacaaattaagtacaagggtagaataaagtctttttcagatatgcaagttctcaaaactatgcttcccagctagcttttctcaggaggatgtactccatcaaaaccaaggtgaaaacaaagaacactcaggatcctagagcgaaactaacacaaaggcaagaaaggcatcccacggacgatggtgaaagcaaatccaaaggcagcagctatggagcaagtcaagagaacagaacgacctattcggaacaaatatmagaattctttggtggggggaatttcttcaatgagaagaaattgacaggattcctaatatatgaatatattggaaggaaattaaacaagggaactttttatttaaattagtgataagtttatagaacacagcatataacaaaaaattactaagcatatttttaaaagacaatgactaatttttaaaattatgttcacatataattttcataaaaataaaatctaaattttacctatttaaagtgcttattatacttcctggcatatagtacttcatacatttagccactattctaaca

SEQ ID NO: 210525 - DNA, 596 bp, Homo sapiens
ctccctgctttaaacatttattggctttccacctgcttagtgaaaaaaaaattcaratgtcttattctaatacccaaggctccatgcactcattgtaatgggtcctgtatcatttttttctcgtagtctttcctgattttcttggcttggaggtaaacgtttcctttttcaattttgcagcctcttattattactttctccacagcttttatttccacctccccttaccactatatcatctacaacgtaactattggctagcctattttttggtcagttgcatagaagtactcaaacctttagctttcgtagttttcaaaataggggacacagagtttctataggttttttttcttttgctaacattaaaactcatgtgcacagatacatacacacttaatgtatcttatctaatttcataaaatggggttaacaccaaaaaatgcagacaagacagtagaataatcaagaacagaccttcacactgaaaacatttggccaatggaaagcttacagagctgttttttttcttcattttgctgaggaccaccgagagcttcctcacatatttatctcctctttaggaagacatttgg

SEQ ID NO: 210526 - DNA, 453 bp, Homo sapiens
agcctggcatggtggcaggtgactgtagtcccagctactcaggaagctgaggcaggagaatcgcttgaacccaggaggtggaggttgcagtgagccaggaacgcaccattgcactccagactgggcaacaatagtgaaactccmcctcaaaaagaaaagaaaagaggcttaattgactgacatttctgcttggctgcaaccatggtgaaggtacctcttcacagggcagcaggagagagaatgaatgccagaaggggaaatgccagctgcttataaaaccatcagatcttgtgagaactgactcactatcacgagaagagcatgggggaagcagcccccatgattcaattacctcccaccaggttcctcccacaacacgtggggattatggggattacaattcaagatgagattttgggtggggaaacagccaaaccatatcacctggtgtat

SEQ ID NO: 210527 - DNA, 491 bp, Homo sapiens
cctgtctagctgtaattttatattcattaaccaacctctctctagccatctctccccactacctttcccatcctctaataaccacaattctactctctaattgtatgagctcaactttttcttttagytcccacacgtgagtaagaatgcttatatcagttgccccagtgaaggcactaggctctggaacacatgggcagtttagtttctattgagcctatgatgcctttaatattcttccagtattcgtacccaaaagattgcttctgtgtctttcatctatttgttcaactaatattttttgagtacatactaactatctggaaagcactggagatgaaagagtgaaaagataccctggtcccttaactggctatattgtatcttccagtagcttaaaaaaaaacaggtgcaagaggtgtgataaatgctgtgctaggaagtgcatagaatgttatgggaacacctaggatgaacattttaaatcaaag

SEQ ID NO: 210528 - DNA, 545 bp, Homo sapiens
ttgaagggttggagacaggcttacaaaatttttactacgaaagagatggtggaaatgcaatgctagccagggagacaacaaatgaaaaatgttttgtttgtttgttttagaaagatctattcaatttcacaaattggaaagagattatgttgtacataaagtaaattaaatgaatgtatggcattaataccatttaacttaaatcctaagattcttcactgacaattttagattttgttgtttaggactcactgcatttttttcttctttttgttgttgttttttaaacctctttcatacacctgaaatrctacttcaagagtatgcacacagtttcatatttggaaattggtcttgaactttctgaagactttcaaatttataagatgactaaacatcaaaaacatatattgtttgtaaaaaaaatttcttgcatgattttcatagctgaagaaggaagtgattgctaatatattccagaacaatcttgtatcacatgggccaaattctcaaatagaaggtttgaggagttttctaaagtctag

SEQ ID NO: 210529 - DNA, 593 bp, Homo sapiens
ctgctgtctattactgcatattttggtcttgcacctccacagttgcatgagctgatttcttaaaatttctctgtctctccacatacatacatacatacatacatacatacatacatacatacataccctatttgttctgtttctctggagatcccttatgaatacagagcccttaatatattaatcatatttgttttaaattttctatctgataatttcaaaattagtgttctatgagagttggctttggtgattgccttgtctcttcaggctgtgctttttcttgcctgtggcataccttgtaatttttagttgaaagttgagtatgttatatgaggtaataggaaactragatatatagatctttagtgtgaggatttatattattttgatgaggatttaggctgtatttaatatttattccagccacagataccagaggtttgaaattcatctaatgtctttctttccgtctgccctccttatcttggccctccctgagtgctcctcttcagagagtgtctgcatcttgcagtcctatcattctctgttcagctattggtgtggttcttggtggtttggtgataaggtgt

SEQ ID NO: 210530 - DNA, 481 bp, Homo sapiens
tttaatctgtgatgtgggttaagaagagttttgactgattatgaggtagcatatgtaccactaaagtttctcacctacattgggctttcatctttcatctattaaagtataagtttattcatgtataaggctggctgcaaaattcttcacaaataaaagtataccctataactgcttataatagatcttcttttcatttctattgttcacagaggcataaacaaagaaagatattcaaagataagagtctygtgatagtagacattttgagccatgatcctgggaaaagctgttcagatcaaggacgccatcttcttctggagagaaactttcctggttagttttactttaagggtaccaatgggtgtacagttccagggatgtggcaggacctttctcagttgtgagattaggaacccaaggttcaaaactccaaagttttgctgtagtgtggatggcgaggacagtctttctctgatgt

SEQ ID NO: 210531 - DNA, 530 bp, Homo sapiens
tgtcctctgtgaaccataaaaagctttctttacctggtgaaaatacactgtagcatamtaatctactgttataacatcagcccccttgcatgggaaagctttatacaaccagaaaacatgcactgaaaataacaattgaatgaaatccctttataaatttttaaatggcccatcaggtagccaaatatacctgaagctttcattgtctttccaggaatatggaaccaaacactggttttaaactattcacacaatttataagtcaccatatcaatatatttgatttggattattttatcttttccatgacaagtcatggaatgcagaacctttaataacaaaacttttaggactcaggaaggacaaggtggacgtcttgggtctttatgagtccatgcttaacatcggacttatgtcctcttgaataccagttgtttctccaatgtagctgcatagcactgataactaatgggttatcataggtaatttgacttagaccatgtagctcattcaaatagtatatttaaaca

SEQ ID NO: 210532 - DNA, 530 bp, Homo sapiens
tgtcctctgtgaaccataaaaagctttctttacctggtgaaaatacactgtagcataataatctactgttataacatcagcccccttgcatgggaaagctttatacaaccagaaaacatgcactgaaaataacaattgaatgaaatccctttataaatttttaaatggcccatcaggtagccaaatatacctgaagctttsattgtctttccaggaatatggaaccaaacactggttttaaactattcacacaatttataagtcaccatatcaatatatttgatttggattattttatcttttccatgacaagtcatggaatgcagaacctttaataacaaaacttttaggactcaggaaggacaaggtggacgtcttgggtctttatgagtccatgcttaacatcggacttatgtcctcttgaataccagttgtttctccaatgtagctgcatagcactgataactaatgggttatcataggtaatttgacttagaccatgtagctcattcaaatagtatatttaaaca

SEQ ID NO: 210533 - DNA, 530 bp, Homo sapiens
tgtcctctgtgaaccataaaaagctttctttacctggtgaaaatacactgtagcataataatctactgttataacatcagcccccttgcatgggaaagctttatacaaccagaaaacatgcactgaaaataacaattgaatgaaatccctttataaatttttaaatggcccatcaggtagccaaatatacctgaagctttcattgtctttccaggaatatggaaccaaacactggttttaaactattcacacaatttataagtcaccatatcaatatatttgatttggattattttatcttttccatgacaagtcayggaatgcagaacctttaataacaaaacttttaggactcaggaaggacaaggtggacgtcttgggtctttatgagtccatgcttaacatcggacttatgtcctcttgaataccagttgtttctccaatgtagctgcatagcactgataactaatgggttatcataggtaatttgacttagaccatgtagctcattcaaatagtatatttaaaca

SEQ ID NO: 210534 - DNA, 509 bp, Homo sapiens
actcctagcaggattcattacatgctgactcaagaatccacgggccttgaatatacactagcggtacccaggcagcactcacagtgggctttgggtaagacccagggccatggtggcttcaagcgtgactcagctcatccccagctgtggtgaccatgaagagagtatcctcctgctaaaggaaaggagaaagaagagtaaaggggactttgtcttgcagcttaggcaccagcttggccacagtggagtagagcacktagcagtatcctggggtcctgattctgtgccttggctcctgaatggcatttctggacctgctctgagccagaggggaggtcactgccctgatgagggatacccaggcctagcagcatttacaagctgacggaagagccttttaggcttgagcgaatatcagtaatagtcagacagtactcgccatggccctggggcagtggtggccatggggaaagactaactctgcatgaggaaaggagaaaagagaggga

SEQ ID NO: 210535 - DNA, 657 bp, Homo sapiens
gagaagaggagaagtactgagggctagtaatcaggcaccagtcttcaggactcttatttctaaacatgtaaactggagaatgaaatgaaataagtgagatattagtagtaaattcaatgattcaatgacagtgaaatgtatttaaataatatatatttttaaattcacaatttaattggcagaaagttatcaaagcataaggaatatagaaattgtttaataagttaatcccaagctgactttatgcaaaaatacacaaacaagtgaaaaaaaattgaatcctttaattatctccacactcaatccttatatataatggttatttataaaaatggtatggtataattttaaatgattttttgattactggaaaatgtcagtagttgaaatacctgtagtatatatggcctgatggaaaagcaatgctctaagcaaaagrgtatttccccatgcttcagacagtcacagcatcacccaggcaggcttagataatcagggccagaagaaagaacgccaacaatggcaaaattgagatcagtatttctagttttataccacaaagccaaattcagccatgtaactaagctacataaacgttaatgaggagaatgcttcactctgatccaatttgtggtattttacagtctcagtcatata

SEQ ID NO: 210536 - DNA, 657 bp, Homo sapiens
gagaagaggagaagtactgagggctagtaatcaggcaccagtcttcaggactcttatttctaaacatgtaaactggagaatgaaatgaaataagtgagatattagtagtaaattcaatgattcaatgacagtgaaatgtatttaaataatatatatttttaaattcacaatttaattggcagaaagttatcaaagcataaggaatatagaaattgtttaataagttaatcccaagctgactttatgcaaaaatacacaaacaagtgaaaaaaaattgaatcctttaattatctccacactcaatccttatatataatggttatttataaaaatggtatggtataattttaaatgattttttgattactggaaaatgtcagtagttgaaatacctgtagtatatatggcctgatggaaaagcaatgctctaagcaaaagagtatttccccatgcttcagacagtcacagcatcacccaggcaggcttagataatcagggccagaagaaagaacgccaacaatggcaaaattgagatcagtatttctagttttataccacaaagccaaattcagccatgtaaytaagctacataaacgttaatgaggagaatgcttcactctgatccaatttgtggtattttacagtctcagtcatata

SEQ ID NO: 210537 - DNA, 533 bp, Homo sapiens
attcaattggtcttttttgtctcagagacaaatcctaaatagagaagaatattgcagccaatgaacaaagttaataattagttaagaagaagggtggtgagaaagaatcaaactttgatgtccatttcttgctgtgagaaggaacttggagcttgtccttatagcaatgatgataatataggttttggaagatagatagttacatacagagacattttataaaccacatcaatctrgaggtgatgtgaaaaatggattacaagagagagttgcagaaaaatggaatcggatagactaatacttaccaaagaaatgcttctgcttatgaaggaaattttagacttagcaattcactgaatgatgaacaaagaattagaaagattattactttaccaaatcataatttagagaaatgttatggtgaaaaatggctttctgtgaactacacagatcactgctttaaaaaatactgaaaatgtgcctgatagctccactaattaaaagcatgtggaaataaaatagaaataaatctt

SEQ ID NO: 210538 - DNA, 503 bp, Homo sapiens
ttgtacagcctgcagagatgtgagccaattagacctcttttctttataaattacccagcctcaaatatttttatagcaacacaaacagcctaacatatggtgtttaaagtaagatgtaataaactaaaaaatttacactgtatgtaaaaaatgtgcattaagcaaaaatacttaacggtattaacattttgagaacaataaatttctcaaagcattattaacattgtcttaagtagtatttgtgttagactaatcattttataaatgttctaatgacattgtcattctaataccattaaatttaacatatctatttaattgcactaacccactacttctaatatgtcttcagtattagttccagcttaygtgaggaaagtaacgttgatatatgatcatcattacacagccacaaaggctcacagcctacatataaacccagatacgtctattgtcaaatttcatgctgttttcattctgatgcattttctttgtctactaat

SEQ ID NO: 210539 - DNA, 537 bp, Homo sapiens
acaaaaaaaaaaaaaattagctgggcaaggtagcctatgcctatagtcccagctactcaggaggctgaggcatgagaatcgcttgaasccgggaggcagaggttgcagtgaatggagagtgcaccacttcactccagcctgggcaacagagtgagactcttctccaaaaaaaaaaaaaaagaagaagaagagctaaaaggttaaaaatgctcgaattgattaattaatagactgattgattgaatgggatagtaggttagtaattaatgcatgactgaatgcccagccaggacatggtggctaaagcaatagttctttacataagatagtattgactatgaattacccatgtgacatcaactgtccataaggaaagagagtgaaggggaaagacagatatggaccacactggatatttgggcttgttgcactaaatggtatggaattattaaaggtaaagagtgtttaggtaagaagaataaaccaaaatttgcaatccaggaaaatatgcatgattgtagcagtttcaaagaattc

SEQ ID NO: 210540 - DNA, 480 bp, Homo sapiens
ggtacttctcatcaatattcaaggtgatagctgtatccattgtaatgtaacatcaagtaaaatgtcaggacaagaaacaaatttgggaaatttgctcaagtagaatactatttgagcaaaaatacactctaaagccagaggcaaataattcgtgccatttaagtcttattggcctctccattattgattggaatcaattagaaaaaaaaaccccataatcatcatgttcttgtaagaatagttgtgtatacccaaataatcactatgagtgytattactggaaaactagaaattaggattttaagatgattcaaactcagcataattgggagggttggtaagaataaattatgtaactggttaattcagtgtcattaacttgaagaaatcttcagcagcatgggtaaaacattgagaagaatggaaggataacacatattacctgaaaatacattttaaaacatttttagtgttagaaaa

SEQ ID NO: 210541 - DNA, 480 bp, Homo sapiens
ggtacttctcatcaatattcaaggtgatagctgtatccattgtaatgtaacatcaagtaaaatgtcaggacaagaaacaaatttgggaaatttgctcaagtagaatactatttgagcaaaaatacactctaaagccagaggcaaataattcgtgccatttaagtcttattggcctctccattattgattggaatcaattagaaaaaaaaaccccataatcatcatgttcttgtaagaatagttgtgtatacccaaataatcactatgagtgttattactggaaaactagaaattaggattttaagatgattcaaactcagcataattgggagggttgrtaagaataaattatgtaactggttaattcagtgtcattaacttgaagaaatcttcagcagcatgggtaaaacattgagaagaatggaaggataacacatattacctgaaaatacattttaaaacatttttagtgttagaaaa

SEQ ID NO: 210542 - DNA, 463 bp, Homo sapiens
acaagagtgaaactccatctcagaaaaaaaaaaagagtaagtgggtaaaaagctacatcattctttagttgttacacatgtaggagaagggcatttcatgaagagatagatcagagggggraaaaaaagtcatcaagagaaaaagattataaaactaggacctagagaaaggtcttcaggggtaagaaggaggctcccaggggtctcagggtgctggaaaagagaagagaatgcagaggtttattaggaatttctacagattataccttagaaccatctgacacatagagaaaagtgagagttaaggtgtatatttcatttatgttgttgctttcttaaaaatgaatatttttagacctaagcatccagaactagtggatttataactactatgtagctaaattgccagaatatattcgtcttattttgaagcctcttttctgttccattgagctgtgtgttt

SEQ ID NO: 210543 - DNA, 463 bp, Homo sapiens
acaagagtgaaactccatctcagaaaaaaaaaaagagtaagtgggtaaaaagctacatcattctttagttgttacacatgtaggagaagggcatttcatgaagagatagatcagaggggggaaaaaaagtcatcaagagaaaaagattataaaactaggacctagagaaaggtcttcaggggtaagaaggaggctcccaggggtctcagggtgctggaaaagagaagagaatgcagrggtttattaggaatttctacagattataccttagaaccatctgacacatagagaaaagtgagagttaaggtgtatatttcatttatgttgttgctttcttaaaaatgaatatttttagacctaagcatccagaactagtggatttataactactatgtagctaaattgccagaatatattcgtcttattttgaagcctcttttctgttccattgagctgtgtgttt

SEQ ID NO: 210544 - DNA, 603 bp, Homo sapiens
ggtactcaaatttttgtcaaattaagatcaaatttaattgaataaaatatgcatactaaaagattagaaaacttctgcattttgaccttagaatacaagttttattttaaggatattagattattttggagcacttggagagaaaaattaaggtttatattctaattattaatattttttgttaaataaatctctgttttaaatagaaaaaaatgaatatttcaaaatgcaacatttctaagatccaattaactttaacagatatgtttgtaaaatgtaggcttacacatagctttaagaaatatattaaatgccagccgggcatggtggctcatgcctmtaatcctagcactttgggaagccaaggcgtgtagatcacttgtcaggagttcgagaccagcctggccaacatggtgaaacctcatctgtactaaaaatacaaaaattagccaggcatggtggtgagtgcctgtaatcccagctactggggaggttaaggcaggagaatagctggaacctgggaggaggaggttgcagtgagtggagatcacaccattgcactacagcctggccaacagagcgagctctcgatcctcttcagta

SEQ ID NO: 210545 - DNA, 603 bp, Homo sapiens
ggtactcaaatttttgtcaaattaagatcaaatttaattgaataaaatatgcatactaaaagattagaaaacttctgcattttgaccttagaatacaagttttattttaaggatattagattattttggagcacttggagagaaaaattaaggtttatattctaattattaatattttttgttaaataaatctctgttttaaatagaaaaaaatgaatatttcaaaatgcaacatttctaagatccaattaactttaacagatatgtttgtaaaatgtaggcttacacatagctttaagaaatatattaaatgccagccgggcatggtggctcatgcctctaatcctagcactttgggaagccaaggygtgtagatcacttgtcaggagttcgagaccagcctggccaacatggtgaaacctcatctgtactaaaaatacaaaaattagccaggcatggtggtgagtgcctgtaatcccagctactggggaggttaaggcaggagaatagctggaacctgggaggaggaggttgcagtgagtggagatcacaccattgcactacagcctggccaacagagcgagctctcgatcctcttcagta

SEQ ID NO: 210546 - DNA, 603 bp, Homo sapiens
ggtactcaaatttttgtcaaattaagatcaaatttaattgaataaaatatgcatactaaaagattagaaaacttctgcattttgaccttagaatacaagttttattttaaggatattagattattttggagcacttggagagaaaaattaaggtttatattctaattattaatattttttgttaaataaatctctgttttaaatagaaaaaaatgaatatttcaaaatgcaacatttctaagatccaattaactttaacagatatgtttgtaaaatgtaggcttacacatagctttaagaaatatattaaatgccagccgggcatggtggctcatgcctctaatcctagcactttgggaagccaaggcgkgtagatcacttgtcaggagttcgagaccagcctggccaacatggtgaaacctcatctgtactaaaaatacaaaaattagccaggcatggtggtgagtgcctgtaatcccagctactggggaggttaaggcaggagaatagctggaacctgggaggaggaggttgcagtgagtggagatcacaccattgcactacagcctggccaacagagcgagctctcgatcctcttcagta

SEQ ID NO: 210547 - DNA, 563 bp, Homo sapiens
aagtttaaagggaaggtgggagacaagtcagtgtgaagatacaagtacaaaattaaggattcttgctatgaggaaatctgtattttgcctatatcaatgccaatgtccggttgtgttactgtactataaactttttaagatcttatgagataaaactgggtatctataacacggtatctctctgtatcattacttacaactacacattaatatacaattatttcagaataaaatattaaatttaaaatatttatattataaacccaaaagataaaatagtgaatcaaaagttrtagagctcataagccacatatgcagaaaaacataaatagaaataaaataaaatcattttaataatcaatttatccaaaacataagagaaaagaagaaaaggaggaagagaacagaatggaccaacaggaaaaaaaaaactaagataaattatttcaacttaattatttcaattattacattaaatgtaaatggtttaaacaccctaattaaagggcagagattatcagattggaataaagaaaaacaagcctcaatgattgctgcttaca

SEQ ID NO: 210548 - DNA, 454 bp, Homo sapiens
catactttagtccaagctacttgggaggctaaggtggaaggatcacttgagcgcaggaggtcaaggctacagtgagcccatatcacaccactccactccagccagggcaacagagtgaaacactgtktcaaacaaacagattccatttatgctgacatttcttttgtggaatgagagaaacctcttcctctgtatatgactaaatcagaaagaactcagcactattgcgattggttcaaaattaatataacagagaaactgttgataagccattcccaagcaaaacatcaaatcattcagcttttcaggggaagagagtctagatatgataagaagataaaatgtcataatatatgatatttcattttaataaatatttaagacatggagaaaaccacaattaagtaaaacctgcaaactatgagttacctaaaataatttataatatatttaa

SEQ ID NO: 210549 - DNA, 454 bp, Homo sapiens
catactttagtccaagctacttgggaggctaaggtggaaggatcacttgagcgcaggaggtcaaggctacagtgagcccatatcacaccactccactccagccagggcaacagagtgaaacactgtgtcaaacaaacagattccatttatgctgacatttcttttgtggaatgagagaaacctcttcctctgtatatgactaaatcagaaagaamtcagcactattgcgattggttcaaaattaatataacagagaaactgttgataagccattcccaagcaaaacatcaaatcattcagcttttcaggggaagagagtctagatatgataagaagataaaatgtcataatatatgatatttcattttaataaatatttaagacatggagaaaaccacaattaagtaaaacctgcaaactatgagttacctaaaataatttataatatatttaa

SEQ ID NO: 210550 - DNA, 454 bp, Homo sapiens
catactttagtccaagctacttgggaggctaaggtggaaggatcacttgagcgcaggaggtcaaggctacagtgagcccatatcacaccactccactccagccagggcaacagagtgaaacactgtgtcaaacaaacagattccatttatgctgacatttcttttgtggaatgagagaaacctcttcctctgtatatgactaaatcagaaagaactmagcactattgcgattggttcaaaattaatataacagagaaactgttgataagccattcccaagcaaaacatcaaatcattcagcttttcaggggaagagagtctagatatgataagaagataaaatgtcataatatatgatatttcattttaataaatatttaagacatggagaaaaccacaattaagtaaaacctgcaaactatgagttacctaaaataatttataatatatttaa

SEQ ID NO: 210551 - DNA, 544 bp, Homo sapiens
acttcaggcaatccacctgccttggcctcccaaggtgtggggattacaggcgtgagccactggcccggcctcaagtttcttgcatattctggatatttgacctttgttagatgtatagtttgcaaatattttctactaacatcaaaatctttcttttgcttaggtagtttggcctggaatatagaggttcstatatgtctatcttttaatattgtttaagataattttaatacctaatcacatcttccctttggagttttaaagtgaatgtcaaaattataagagcagattgtgattaattaatacattacctcaagaagaaaaaactagtgagaacacacaacttatataaaaacattatctttaaaagacattggaaattgtatttcctgtttactttgtgttcttgtttaaatgtcaaagagagaaaaaccctagtgaatttaaaaaaaaaaaaaaaattagaaaatacaaattagtaaaaataagagcactgtattcacactacccagagacaactactatttagtatattattttatat

SEQ ID NO: 210552 - DNA, 630 bp, Homo sapiens
aagtctggtgtaaataaggtctttttaaaaaaaccatcaagggactactgaggtatagattaaaaagctctgaagcatgtatgtcaagtctctagccacatattatctatatctctatttcagcctgaagggaagacatttttgtacaataataagtgagcaataccatttttttatattcagctatcgttttgcacaaccaccagatatttatatctttccactttagtttttcatattatttagcggtttcacaaagacaaaagggaagaaacaaccatattgccagtgaaaacttataggctattctgtttttaaaaatgttaacttcagccaaactctgtttcattrtatctatggaccattaatgcaataccctccagctgaaaaccaggaaaatctcattgcatcagagatagggaagattaaaagagagatagaggaaaagaaaagagacaattaatgtagacatataaaactacacatcatgcaaccatcagcagatttgtgagcgcttgaaagaaatgctgcccctaaagatagtgagagtgctagtgatgaagaacacaaagaagataatgacggccacaatgatgaaaaatgaaataaaatcactggtccataataatt

SEQ ID NO: 210553 - DNA, 479 bp, Homo sapiens
acaggctcttccatctctcatgacttcatggaccctcctctgccagttttttaaatcagatcaccctccatgttgttcctgacccacaggggaagctgtcctcagttgtagccgtcttgactggatgagtcctggcagtctttctaggcgaaccaagaatgtttgtgtgagggaaggtgtttgctgttgctttactgctgtctgtatgtgccagtgctggaacagaatttggaagattctgaataattagttacttattctcaaagaaaatctttgaaagaatcaggaggtcaagtcaagaacatgaaaatttrtattttagtacagtagaaagaacattgggctctgggaattttatctgggttttctcctggcttttttttccctctgtgtaattttgggtaaatcagcctccctagctttcagttttctcttctgtgaaacaggaagactgaaccacgtaattaatatccaaggtc

SEQ ID NO: 210554 - DNA, 555 bp, Homo sapiens
atctacctttagcctgcttagaacaagggcactctagattacctacaactcagcaaacctatctatgaatacctgtaaaatgaataaagttttcatgtaggatacagcagtaagccaagaatcattttaatgaaaatgtcttaaatatttaaaatgtcttaatattgcccacttagttcccaaatcaattcagcatattgctgagtctatatgtgtttgctggcagataatataaccctaaaaataaaggtccatgtaatcccagcactytgggaggccgaggtgggcggatcacgaggtcaagagatcgagaccatcctggccaacatggtgaaaccctgtctctactaaaaatacaaaaattagctgggcgtggtggcatgtgcctatagtcccagctactcaggaggctgaggcaggagaatcacttgaacccaggaggcagaggatgcagttgagctgagatcgtgccactgcactccagcctggcgacagagcgagactccgtctaaaaaaaaaagtccattaggcatcaccaaatgcatcaaaaactaa

SEQ ID NO: 210555 - DNA, 383 bp, Homo sapiens
accatgtaagaagtgccttttgcctcctgccatgaytgtgagtcctccctagccacatggaactgtgagtccattaaacctctttttcttcccagtcttgggtatgtctttatcggcaacatgaagacttactaatacagatctcatcagaatggactttagtgtccacatttctaccaacattctgcctaggattactcaggtgcctctatgaagattgaggctctccctacagctctcctcttccacagctttacgaaaatcacatttaaaggtctcttcatggcaatgtgggctttttccagcatgtacctaaaaactctcccattctccaggtccaaagctacttctacatttctaggaatttgttacaatagtatcgc

SEQ ID NO: 210556 - DNA, 386 bp, Homo sapiens
ctcgaccttccaaagcactggtattccagttaagagccactgcaccccacttactcccttctttttgtgagaatttttttacatctataggcataatggggcccacaaattttagaattcattcattcagtattcattctaggatttcattcattaagtatttctaaaacctttgctgaatccatgatattgtagcggtatagagggtagagagagacagagtgatgagattaatgaggtctttatgaaggatgtaaaaaaccagagctgaagcttaacgaatattcaggctttcggtaggctgcaaagaaaggagagaacaaggttgagctggggcctccrtgagcaaagttgagaagtgggaatgaatgtgccattccctagcg

SEQ ID NO: 210557 - DNA, 605 bp, Homo sapiens
gagatcttaccctgatcttactagcatgcagcaggatggactgaagtatctattttactttcaaaacttgttacctcttgagacgtcacttagaggactcatataatgtattctgtgcataaaacttagtactatttattttatttgtacaatgattttctgttagaagcacactggccccaagaacactcacttatgccagggcagctgtaacatagacggatgatgctgcggccacccacctcctgtgtgcccaccttgttctgggctccacttgccagcacttcctgctattgcttttagctaggtgtccatraattccttcaaactgatagcaccatctgatgactgtgataccaccgtctgatgattgtgataccaccgtctggtgattgtgaagcattaattctcacaggagaatcatattttcccattttcttgccttcttgattgatttttcttgggattaagagaaatataaattttctgagaaatgctgggaaggaatccctgtgtggaaatactggtagaagaaaatgggccttccataaaatagccctttatcactgcagtgatggctagcccaccttgaatatcttgaatgc

SEQ ID NO: 210558 - DNA, 605 bp, Homo sapiens
gagatcttaccctgatcttactagcatgcagcaggatggactgaagtatctattttactttcaaaacttgttacctcttgagacgtcacttagaggactcatataatgtattctgtgcataaaacttagtactatttattttatttgtacaatgattttctgttagaagcacactggccccaagaacactcacttatgccagggcagctgtaacatagacggatgatgctgcggccacccacctcctgtgtgcccaccttgttctgggctccacttgccagcacttcctgctattgcttttagctaggtgtccataaattccttcaaactgatagcaccatctgatgactgtgataccaccgtctgatgattgtgataccaccgtctggtgattgtgaagcattaattctcacaggagaatcatattttcccattttcttgccttcttgattgatttttcttgggattaagagaaatataaattttctgagaaatgctgggaaggaatccctgtgtggaaatactrgtagaagaaaatgggccttccataaaatagccctttatcactgcagtgatggctagcccaccttgaatatcttgaatgc

SEQ ID NO: 210559 - DNA, 559 bp, Homo sapiens
tgtcagtgcatgatgaatgaaagttgtggatcttctacatgctgctcttatcttcctcacatcataaactccaagtttgagagcatcacaatattcatcgatatgtagcactacacaatgaactgagggcaggaattgacttactctttgtacccggaacacagtaagctgatgataaatacttgttgaaagactgtagcatataacctgttgagttgtttgagaggccagggttcctctgagcagtatcatgccaacagacacacgcatgttatgtattatggcacataatcggtaagtccataactgttggagtaatggggacgagcacagtgcactgaagggtacaggaagcatcggggtttgggggctccggcctacatttgtggttatgttactggtttttcctatcgcatcagaaaactttattaactagatggaatttctgcagccagatgaaaaygtatgtgataggagtggatcgtgtgataggagtggatcgtgttagctgcgtgagattgctagtgaggcactgagttgtcatcaggtagcaattcca

SEQ ID NO: 210560 - DNA, 541 bp, Homo sapiens
ccaactgtacacacacattttactcactctttgatgtatatgatacgcctcacagttttaaaattttttggaaggagtaactggagctgtcaaacaatggcagccacggcctctggagaggatgagcgccccctcatggagaggacaagaacagccattctcctccatcaggcacagggcaggtgcgaggtagaaggacctcaaagtttacttctattcagactctaagcttcttcctaaagtcacattctagaattcacaggaaggaagaagtccacattacctgagacttcgtagccacgmctttatagagtgatgcagaattaacatttaaggttgacagaagtgccccacttgagaaaatataccagagcacagtttacagtgacagagggtactgagggagtccttggtatatttcgagaactttcattgtatgtaactggtacattaatactgatgcagaaaaaaatgggggccactccaggaaacaggtgatgccacttgcctcggaggagactgcagtaaaatgcatatttgt

SEQ ID NO: 210561 - DNA, 562 bp, Homo sapiens
gctctttaacttatgacctctcagctggaacaataatttcctcctcttgactctggggtattgcctgcttcacaggagtgacagacaatggaggaagccatgtttagagactgcttgattcctcacacctgtagataggtgactgatacaccactagatagaaactagaaaataaatgacagatggggaaactgaggaacaaaagaggctacaaggagattaattccatatttcaaatagatccaataataacatacagcccagaaataatgcgaagcacttcccacrtgcaagattttgtgggatagatattttccttctccttcagggttggggaagtccatgatataaacaagaacaaagttacttttaacgatgaaactaccacgcccggcctgctcagggattttaactcaggcctgttgggcaccaaaggttttaagtgtgaaaacttacagctgctgaattattagaatgttacttagctctccaaaccctaccagtttgagagtgattctgacaacaggtaagtagagcgtttagtctaaacatatgaataaag

SEQ ID NO: 210562 - DNA, 364 bp, Homo sapiens
cctgtgtgtgtctgttttttccccatctttgtggctttatctacstttggtctttgatgatggtgacgtacagatggggttttaagtgtggatgtcttttctgtttgttagttttccttctaagagtcaggaccctcagctgcaggtctgttggagtttgcctgggtgtcagcagttgaggctgcagaacagcagatattgttgagcagcaaatgttgctgcctgattgttcctctggaagttttgtctcagaggagtacccggccatgtgaggtgtcagtctgcccctacgggggtgtgcctccagttaggcaactcgggggtcagggacccacttgaggaggcaatctgtccattctcagat

SEQ ID NO: 210563 - DNA, 573 bp, Homo sapiens
actattctatgatttgggacactgctatagattcttcaaaatgttacaacattccagtggtattttgggaggtatggaaggagaggaaaaacaatgggctcaagtctcccctgacttctcttcttacaacatatttcattgtccagaacttttagaactatattaatacaacattgacagtgggtattcttcttttccttctgattttaataggattgaaggaagtgttttgctatgaaattgctatrtgcgttgtattcagacaaattttgactttgtaaaggcaatattcttctcattaatttaaaatgtttaccaggattcacagtattattttcaattctccccattcaaaggcatatttaaataacttgatgaaaggggaatattatatatgttactctactatggaaacagaaaaaaccaccaccaaattgtattctagatactttgtacaccaattgcaccatctttttttatctaagacattcaattcttccacaggcggaagcacatgaattagcatcatttactacttgtagttttcactacagactttcagacctatggtac

SEQ ID NO: 210564 - DNA, 357 bp, Homo sapiens
gatctgcagaaagacatgaactagcacaggcaactgtagaacatctgcccccaagaatcataaatgccttttcactcatcctgtagaatgcactctctactttaatgatcatgtgggatgtgactttaatttstaggcatggggattgatcttaagaaaaagcagggaaagtgctttacctgtcctgggactctgctccacttgccaacatttgaatggattcatttgtgtggtagtcaagctacgggaaataaagggaccagtcagtcttccacacaatgacacagaggccaattatcacaagtccaaatctccatttgtcacccagctcacattcccgctgtggcacaaggtcac

SEQ ID NO: 210565 - DNA, 357 bp, Homo sapiens
gatctgcagaaagacatgaactagcacaggcaactgtagaacatctgcccccaagaatcataaatgccttttcactcatcctgtagaatgcactctctactttaatgatcatgtgggatgtgactttaatttctaggcatggggattgatcttaagaaaaagcagggaaagtgcyttacctgtcctgggactctgctccacttgccaacatttgaatggattcatttgtgtggtagtcaagctacgggaaataaagggaccagtcagtcttccacacaatgacacagaggccaattatcacaagtccaaatctccatttgtcacccagctcacattcccgctgtggcacaaggtcac

SEQ ID NO: 210566 - DNA, 357 bp, Homo sapiens
gatctgcagaaagacatgaactagcacaggcaactgtagaacatctgcccccaagaatcataaatgccttttcactcatcctgtagaatgcactctctactttaatgatcatgtgggatgtgactttaatttctaggcatggggattgatcttaagaaaaagcagggaaagtgctttacctgtcctgggactctgctccacttgccaacatttgartggattcatttgtgtggtagtcaagctacgggaaataaagggaccagtcagtcttccacacaatgacacagaggccaattatcacaagtccaaatctccatttgtcacccagctcacattcccgctgtggcacaaggtcac

SEQ ID NO: 210567 - DNA, 357 bp, Homo sapiens
gatctgcagaaagacatgaactagcacaggcaactgtagaacatctgcccccaagaatcataaatgccttttcactcatcctgtagaatgcactctctactttaatgatcatgtgggatgtgactttaatttctaggcatggggattgatcttaagaaaaagcagggaaagtgctttacctgtcctgggactctgctccacttgccaacatttgaatggattcatttgtgtkgtagtcaagctacgggaaataaagggaccagtcagtcttccacacaatgacacagaggccaattatcacaagtccaaatctccatttgtcacccagctcacattcccgctgtggcacaaggtcac

SEQ ID NO: 210568 - DNA, 547 bp, Homo sapiens
ctacaggtgaactggatgccacagaaagakgagtggtctttgtcacaacgaaatcaacaaaattatttcgaagtcaattaggaaactcagaaatcactcttgctaccattaagaggaagaacaggagcctgtgaatggcatccctggcctacctgagactccaaagatatttctctgtggcttctgacagcagaaatctctgtgattttcagaaaggcagggacagctcctgccagcccatccttctgcagaatgtgtcccagcagatcagtggcatggaaccatcatggacagcacaaaggctcaagggcagcatcccaggccggcctgtgactctagataagttctgagtccccatgggggctcaggaaaggttagtgatgacctggaaagaagggacaggctgaaaccgcccctaagcaatctgcaggattccaacttcagcaggaagccaaggaccagctattaccacacctgcgccccctgaaaacgctggatacaatcccactctgcagaaagttccacatagaagtggctgggaattttg

SEQ ID NO: 210569 - DNA, 547 bp, Homo sapiens
ctacaggtgaactggatgccacagaaagatgagtggtctttgtcacaacgaaatcaacaaaattatttcgaagtcaattaggaaactcagaaatcactcttgctaccattaagaggaagaacaggagcctgtgaatggcatccctggcctacctgagactccaaagatatttctctgtggcttctgacagcagaaatctctgtgattttcagaaaggcagggacagctcctgccagcccatccttctgcagaatgtgtcccagcagatcagtggcatggaaccatcatggacagcacaaaggctcaagggcagcatcccaggccggcctgtgactctagataagttctgagtccccatgggggctcaggaaaggttagtgatgacctggaaagaagggacaggctgaaaccgcccctaagcaatctgcaggattccaacttcagcaggaagccaaggaccagctattaccacacctgcgccccctgaaaacgctggatacaatcmcactctgcagaaagttccacatagaagtggctgggaattttg

SEQ ID NO: 210570 - DNA, 398 bp, Homo sapiens
gcaccagaattgataaagacttgtctatcctgttccttgtttaaagaaacaatgattttatctgggtcatttccacacaattttactattcatagtcttgcctgaccaattaatgtagccatttgatctaagtacaatgtaaaagtcttaactgtactgtgaggaaggaatgacmactccacaagatctgtattttgaacaataatgcctgttggagaatgtgcagtagcaaaaattaaaagttggagtggggctaagtgatctattctatttacttttgctgactgaaatttttcttcaactaattctatttctttagttgcctctggagttaatattcttttactatttaagtctggatcccctctcaagatagagaacaaatttgacatggcata

SEQ ID NO: 210571 - DNA, 560 bp, Homo sapiens
tcagctaacagaacaaaaagtttttacagtgctttctcatacaatgtctgggatttaccgataacaacagtagttttggtcaggggttaatattattgttactttaaccaccagggccaggtggtggcgccaaagtcgtctaggtatttattttacttctgttttttccagctttttgctttctcccttttttgctgtcttataaactagggaaaaggggaggttggggagaaactgggaaggacaacaggagaagtggtggtctcataccatatttyccccctttgagcattttcactttttagtgggagttctcactctcatctttactttttgagtctctttgtgagatagagcgatagtgatttatataacacacgtgtgctgaagttttctgatgaaccaaagtagcaacaaaatcttttatcatttgaaaaagcaagagtaatacacaggggagcagcaagtaagttcctatcactagcaatacacctacaatgagggttttaaatcctcctatagctggaaaccatttttcaaataaagactcaggattaaac

SEQ ID NO: 210572 - DNA, 619 bp, Homo sapiens
cttgtctggttttaggacaggtaaaatgggggaattgtaaggagagtttataggctttaaaaggccatgctgtagcaggtgagtgataacaggctttaatcctttcaaagcatgctgtgggatgggatattggcattgagaggggtaagagtgattaggttttaatgagatggtaaggggtgcrtgataggttgccaaggagggaatagaggtatcttctacttgtgggttaaggtgggtggcaatgaggagtggctgtagtccaggaatagtcagggaagcagataatttagttaaagtgtctcagcctaataagggaactgggcaggtggggacaactaaaaaggagtgcttaaaagagtattgtctaagttggcaccagagttggggagttttaagaggtttagaagcctggctgtcaatactcacaacagttatggagacaagggaaacaggcccttgaaaagaaggtaatgtggagtggttagcctccgtattgattaagaaggggatggacttctcctccactgtgagagttacctagagcgtctgtgatggtcctgtaggcttccgaggtgatctatcaggcagtgtcagtcttcagctgctaagccaagaa

SEQ ID NO: 210573 - DNA, 619 bp, Homo sapiens
cttgtctggttttaggacaggtaaaatgggggaattgtaaggagagtttataggctttaaaaggccatgctgtagcaggtgagtgataacaggctttaatcctttcaaagcatgctgtgggatgggatattggcattgagaggggtaagagtgattaggttttaatgagatggtaaggggtgcgtgataggttgccaaggagggaatagaggtatcttctacttgtgggttaaggtgggtggcaatgagragtggctgtagtccaggaatagtcagggaagcagataatttagttaaagtgtctcagcctaataagggaactgggcaggtggggacaactaaaaaggagtgcttaaaagagtattgtctaagttggcaccagagttggggagttttaagaggtttagaagcctggctgtcaatactcacaacagttatggagacaagggaaacaggcccttgaaaagaaggtaatgtggagtggttagcctccgtattgattaagaaggggatggacttctcctccactgtgagagttacctagagcgtctgtgatggtcctgtaggcttccgaggtgatctatcaggcagtgtcagtcttcagctgctaagccaagaa

SEQ ID NO: 210574 - DNA, 619 bp, Homo sapiens
cttgtctggttttaggacaggtaaaatgggggaattgtaaggagagtttataggctttaaaaggccatgctgtagcaggtgagtgataacaggctttaatcctttcaaagcatgctgtgggatgggatattggcattgagaggggtaagagtgattaggttttaatgagatggtaaggggtgcgtgataggttgccaaggagggaatagaggtatcttctacttgtgggttaaggtgggtggcaatgaggwgtggctgtagtccaggaatagtcagggaagcagataatttagttaaagtgtctcagcctaataagggaactgggcaggtggggacaactaaaaaggagtgcttaaaagagtattgtctaagttggcaccagagttggggagttttaagaggtttagaagcctggctgtcaatactcacaacagttatggagacaagggaaacaggcccttgaaaagaaggtaatgtggagtggttagcctccgtattgattaagaaggggatggacttctcctccactgtgagagttacctagagcgtctgtgatggtcctgtaggcttccgaggtgatctatcaggcagtgtcagtcttcagctgctaagccaagaa

SEQ ID NO: 210575 - DNA, 596 bp, Homo sapiens
agatcttgaactaacttgtaaggcttgtctggttttaggacaggtaaaatgggggaattgtaaggagagtttataggctttaaaaggccatgctgtagcaggtgagtgataacaggctttaatcctttcaaagcatgctgtgggatgggatattggcattgagaggggtaagagtgattaggttttaatgagatggtaaggggtgcgtgataggttgccaaggagggaatagaggtatcttctacttgtgggttaaggtgggtggcaatgaggagtggctgtagtccaggaatagtcagggaagcagataatttagttaaagtgtctcagcctaataagggarctgggcaggtggggacaactaaaaaggagtgcttaaaagagtattgtctaagttggcaccagagttggggagttttaagaggtttagaagcctggctgtcaatactcacaacagttatggagacaagggaaacaggcccttgaaaagaaggtaatgtggagtggttagcctccgtattgattaagaaggggatggacttctcctccactgtgagagttacctagagcgtctgtgatggtcctgtaggcttccg

SEQ ID NO: 210576 - DNA, 596 bp, Homo sapiens
agatcttgaactaacttgtaaggcttgtctggttttaggacaggtaaaatgggggaattgtaaggagagtttataggctttaaaaggccatgctgtagcaggtgagtgataacaggctttaatcctttcaaagcatgctgtgggatgggatattggcattgagaggggtaagagtgattaggttttaatgagatggtaaggggtgcgtgataggttgccaaggagggaatagaggtatcttctacttgtgggttaaggtgggtggcaatgaggagtggctgtagtccaggaatagtcagggaagcagataatttagttaaagtgtctcagcctaataagggaactgggcaggtggggayaactaaaaaggagtgcttaaaagagtattgtctaagttggcaccagagttggggagttttaagaggtttagaagcctggctgtcaatactcacaacagttatggagacaagggaaacaggcccttgaaaagaaggtaatgtggagtggttagcctccgtattgattaagaaggggatggacttctcctccactgtgagagttacctagagcgtctgtgatggtcctgtaggcttccg

SEQ ID NO: 210577 - DNA, 596 bp, Homo sapiens
agatcttgaactaacttgtaaggcttgtctggttttaggacaggtaaaatgggggaattgtaaggagagtttataggctttaaaaggccatgctgtagcaggtgagtgataacaggctttaatcctttcaaagcatgctgtgggatgggatattggcattgagaggggtaagagtgattaggttttaatgagatggtaaggggtgcgtgataggttgccaaggagggaatagaggtatcttctacttgtgggttaaggtgggtggcaatgaggagtggctgtagtccaggaatagtcagggaagcagataatttagttaaagtgtctcagcctaataagggaactgggcaggtggggacaactaaaaaggagtgcttaaaagagtattgtctaagttggcrccagagttggggagttttaagaggtttagaagcctggctgtcaatactcacaacagttatggagacaagggaaacaggcccttgaaaagaaggtaatgtggagtggttagcctccgtattgattaagaaggggatggacttctcctccactgtgagagttacctagagcgtctgtgatggtcctgtaggcttccg

SEQ ID NO: 210578 - DNA, 567 bp, Homo sapiens
accaccaacaatcagatctcttaagggttggtgccttaggttttcgagccttgtgtatcttttggctttcttttttggttgtgtgctatttatctcatagaaagaaacctcttcttcatcctatgccagtgctgtattgtaggggcttgttgacatcttcctgatatgtagcaatccaggtgactggcctctggcttcttaagagcaaggccatcacaygcttttttttttctttgtctgcttgtttccttgtaagggtcccacatacagtgggcgcttaacaaaaatttgatcaactgaactcattttctatctccgttctctccacttcaatctttcccttttacttcttccagattagttttcctacagcaaaatgggaattgtccaaaaactgcccttcatctttataacttgaaggattcatttaccctaagccgtccttttaaatttactatcacagactagatagaaatgtctgggttcacgaagaataggcatgtgtgccaccatattttctgttgaaaactttggaaagtgtcttttagcaaacaacatgaagcatag

SEQ ID NO: 210579 - DNA, 583 bp, Homo sapiens
tacttagaatgcctgatcatcttcttgggtaaaagcaataagtcytacacagaatcaccaaaaccatgtctgttcaaggggtcttatacctgtgattcatgattgcatgctcaatgcagaagggcgtgctctgttgcagggtcatatctggtcattgtgtttaagttctaatttagaagactagttgctgaggaggaagagggaaggataatgttaggaaatggaatcaaacttaaggggaaaagtccagtacaagggaccaacagtattgaggggcaataggttgaagatttcttagattattgcaatattttcaaggaggccccacgaatccttcctggctgaccccaccaaagctttggcatagcctttatgccaaatgtcttagactaactaacttttccaaaagaaaatagaggagttatggagaccaatatttaatagaataatgcctgattattttgcttttgaggtctagtaactgctagtaaacttgcctaattaattcacatttagaagtagagtaaagagggtttcaaccacttgaaacaccactgacttcatttcatgtgagagttgctat

SEQ ID NO: 210580 - DNA, 583 bp, Homo sapiens
tacttagaatgcctgatcatcttcttgggtaaaagcaataagtcttacacagaatcaccaaaaccatgtctgttcaaggggtcttatacctgtgattcatgattgcatgctcaatgcagaagggcgtgctctgttgcagggtcatatctggtcattgtgtttaagttctaatttagaagactagttgctgaggaggaagagggaaggataatgttaggaaatggaatcaaacttaaggggaaaagtccagtacaagggaccaacagtattgaggggcaataggttgaagatttcttagattattgcaatattttcaaggaggccccacgaatccttcctggctgaccccaccaaagctttggcatagcctttatgccaaatgtcttagactaactaacttttccaaaagaaaatagaggagttatrgagaccaatatttaatagaataatgcctgattattttgcttttgaggtctagtaactgctagtaaacttgcctaattaattcacatttagaagtagagtaaagagggtttcaaccacttgaaacaccactgacttcatttcatgtgagagttgctat

SEQ ID NO: 210581 - DNA, 580 bp, Homo sapiens
ctgggtgacagaattaacctccatctcaaaaaaataaaaagctaatctatacttttcttttggtgyattattagaacatagaaggcaataaggcaaaactattgtgggtatattagtgcgtatctgtagcacctagcacagtgcctagcccataacttgtgttgaaaattaagagaaccttcttcatgacagatcatttggagaacatgttatgggtgtgggagaaaaagattcctaactctccaccccagaaataattttgctgatacaaaaatcagccagacatggtggcacaggcctataatctcagctacttaggaggatgagtttgaggataaggatacattgtgaaaaaggtgggaaaatcacttgaacacaggaggcagagattgcagtgagccaagagtgccccactgcactccagcctaggcaacagagaaagactctgtctgaaagaaaaaaaaaagttgttgctatatagcacataatttcattgtcatctcatttaaaattgaatagcacatttgggttgaattcttgtgcctgcagatacatttgcttctggcttaaaatcactggc

SEQ ID NO: 210582 - DNA, 463 bp, Homo sapiens
gaggttagtatgtgcacacctggggactcctgtgttaacttctggtgtttcagcctaagagggaatgttaatataaccctggtcctggaacaccatgctgaccaacacctatcagctttcaggagataagacagctggctgatggggcagggatccagagaaggcacgggtccacacctgcacatgttgcccagtggcagagttcatgacaagcaataagccccaggacaatgtcattcccagccacctgsctgtcatctgctctttcatggcccctctctactggtacctctaggcactggcatgtcctccagaggctgcaggagggcatgatactcagtactctcccacctgcaggaggcaagaaagatggaaacagctaaataccacggcttctggattttttttggtgggcatggcatattttgcatttgctttaatagtggtggaacccagtcagtag

SEQ ID NO: 210583 - DNA, 405 bp, Homo sapiens
ggtaaagtcagctatggagttggagcttcatgtttactgcatgtaggattctgagttccaggactgatgggctggtggggatcagagacrtgtcttccttgcagggagccaggccaaaccaaccatctggttgcactactgaaagcttttgtgtgcccagtggtgggcaggacacaaatcacagtcccttcacctctggctggtagttcttgatgagagaggtttgcacacaaatgttcatattagcccatggtctcctgcggcttgcttttctttcacctcctgtttttgatgtttgccatcatggaacacatttcatagagaaattctttgactctgactccaaattacacaaggaggacacagtctgtgaagttttcatatatttaggggaagctccacatt

SEQ ID NO: 210584 - DNA, 405 bp, Homo sapiens
ggtaaagtcagctatggagttggagcttcatgtttactgcatgtaggattctgagttccaggactgatgggctggtggggatcagagacgtgtcttccttgcagggagccaggccaaaccarccatctggttgcactactgaaagcttttgtgtgcccagtggtgggcaggacacaaatcacagtcccttcacctctggctggtagttcttgatgagagaggtttgcacacaaatgttcatattagcccatggtctcctgcggcttgcttttctttcacctcctgtttttgatgtttgccatcatggaacacatttcatagagaaattctttgactctgactccaaattacacaaggaggacacagtctgtgaagttttcatatatttaggggaagctccacatt

SEQ ID NO: 210585 - DNA, 405 bp, Homo sapiens
ggtaaagtcagctatggagttggagcttcatgtttactgcatgtaggattctgagttccaggactgatgggctggtggggatcagagacgtgtcttccttgcagggagccaggccaaaccaaccatctggttgcactactgaaagcttttgtgtgcccagtggtgggcaggacacaaatcacagtcccttcacctctggctggtagttcttgatgagagaggtttgcacacaaatgttcatwttagcccatggtctcctgcggcttgcttttctttcacctcctgtttttgatgtttgccatcatggaacacatttcatagagaaattctttgactctgactccaaattacacaaggaggacacagtctgtgaagttttcatatatttaggggaagctccacatt

SEQ ID NO: 210586 - DNA, 405 bp, Homo sapiens
ggtaaagtcagctatggagttggagcttcatgtttactgcatgtaggattctgagttccaggactgatgggctggtggggatcagagacgtgtcttccttgcagggagccaggccaaaccaaccatctggttgcactactgaaagcttttgtgtgcccagtggtgggcaggacacaaatcacagtcccttcacctctggctggtagttcttgatgagagaggtttgcacacaaatgttcatattagyccatggtctcctgcggcttgcttttctttcacctcctgtttttgatgtttgccatcatggaacacatttcatagagaaattctttgactctgactccaaattacacaaggaggacacagtctgtgaagttttcatatatttaggggaagctccacatt

SEQ ID NO: 210587 - DNA, 554 bp, Homo sapiens
ttctcccacccctatgtcattttgtattttctgagcatcctagacgattgtgactgtatacacaggacagaaacaccatgactcagggtactcctgctaatttccgatgcaggagattttaagggctagattagcaggatgggagtgttgaccctctaagtgaaataaatccctcaattcattatccccatcctaaaacagattttttttttttttgagacagagtctcactctgtcgccatcgctggagtgcagtggtgggatctcagctcactgtaatctctgcctcctgggttcaagagattctcctgcttcagcttcctgagtagctgggattacaggcaagcaccaccatacccagttaatttttgtrtttttagtaaagatggggtttcaccatgttggccaggctagtctcgaacccttgacctcaggtgatccacctgccttggcctcccaaagtgctgggattacaggcgtgacgaccgcactcgaccctaaaacagattcttacttgattatttccacgttccaaggggaaatacaaaagtcag

SEQ ID NO: 210588 - DNA, 570 bp, Homo sapiens
accttttggtaattaacttttttgccttctggtaagtgaaagtaacatataggaaatataattatttaattatggttgcacactcagaagaaggaatatagtagatagagtacaatttagggttctgtggaaatgctttataagggctggttacaaaaaaaaaacaatgaagaggctttcttaatctttgaacaagtgaagtgagaaggtcaatttaaaagagaaacaatgataactgatgtttggactgccgagagaaagttgagaacaggaggcttcatatcacaggaatcatcgractaagatttcctcagtatgtcagcctcagcagtcttgtcttgtgctgctagactgtcttcaagccttttcatgaacacctgaattatataacattagagagactatatgtatgaattgaatcctatattctgcataaagcgttcagttctgaagaatgctggagtctggttcattactttctaacttttgaatgaataagggaccaatgacttatatttaataaatatttgctaagtaggaaacacattttctattagttcattagattat

SEQ ID NO: 210589 - DNA, 570 bp, Homo sapiens
accttttggtaattaacttttttgccttctggtaagtgaaagtaacatataggaaatataattatttaattatggttgcacactcagaagaaggaatatagtagatagagtacaatttagggttctgtggaaatgctttataagggctggttacaaaaaaaaaacaatgaagaggctttcttaatctttgaacaagtgaagtgagaaggtcaatttaaaagagaaacaatgataactgatgtttggactgccgagagaaagttgagaacaggaggcttcatatcacaggaatcatcgaactaagatttcctcagtatrtcagcctcagcagtcttgtcttgtgctgctagactgtcttcaagccttttcatgaacacctgaattatataacattagagagactatatgtatgaattgaatcctatattctgcataaagcgttcagttctgaagaatgctggagtctggttcattactttctaacttttgaatgaataagggaccaatgacttatatttaataaatatttgctaagtaggaaacacattttctattagttcattagattat

SEQ ID NO: 210590 - DNA, 570 bp, Homo sapiens
accttttggtaattaacttttttgccttctggtaagtgaaagtaacatataggaaatataattatttaattatggttgcacactcagaagaaggaatatagtagatagagtacaatttagggttctgtggaaatgctttataagggctggttacaaaaaaaaaacaatgaagaggctttcttaatctttgaacaagtgaagtgagaaggtcaatttaaaagagaaacaatgataactgatgtttggactgccgagagaaagttgagaacaggaggcttcatatcacaggaatcatcgaactaagatttcctcagtatgkcagcctcagcagtcttgtcttgtgctgctagactgtcttcaagccttttcatgaacacctgaattatataacattagagagactatatgtatgaattgaatcctatattctgcataaagcgttcagttctgaagaatgctggagtctggttcattactttctaacttttgaatgaataagggaccaatgacttatatttaataaatatttgctaagtaggaaacacattttctattagttcattagattat

SEQ ID NO: 210591 - DNA, 462 bp, Homo sapiens
ccatccaaccctcgagttgacacaccagggatcttcagccccacttgctagatttctcagtktgtcattgcatagatttagcagggaaatggaggctgtatcaaagacccctagtatatgcatttgggtgtccccagctcttgcctctgtctctgagcagttacctgggatcagagaataaggcagctcttctcttctatccctcagaaggctcttgaaattttgtccctggagcctctctaactggaagtagcagttcatctcatgacaccccacattttattcaggtgagtcctgagttattacacagagacagacacagctgtgctccttttactgcagtccagaagataaaacaccagcatgataaaacagccgaacctgtcagccaccttgcaagccttttctatatttgattcaatgtacttttcccgaagcaaaatgaaagttctcacagagggg

SEQ ID NO: 210592 - DNA, 462 bp, Homo sapiens
ccatccaaccctcgagttgacacaccagggatcttcagccccacttgctagatttctcagtttgtcattgcatagatttagcagggaaatggaggctgtatcaaagacccctagtatatgcatttgggtgtccscagctcttgcctctgtctctgagcagttacctgggatcagagaataaggcagctcttctcttctatccctcagaaggctcttgaaattttgtccctggagcctctctaactggaagtagcagttcatctcatgacaccccacattttattcaggtgagtcctgagttattacacagagacagacacagctgtgctccttttactgcagtccagaagataaaacaccagcatgataaaacagccgaacctgtcagccaccttgcaagccttttctatatttgattcaatgtacttttcccgaagcaaaatgaaagttctcacagagggg

SEQ ID NO: 210593 - DNA, 462 bp, Homo sapiens
ccatccaaccctcgagttgacacaccagggatcttcagccccacttgctagatttctcagtttgtcattgcatagatttagcagggaaatggaggctgtatcaaagacccctagtatatgcatttgggtgtccccagctcttgcctctgtctctgagcagttacctgggatcagagaataaggcagctcttctcttctatccctcagaaggctcttgaaattktgtccctggagcctctctaactggaagtagcagttcatctcatgacaccccacattttattcaggtgagtcctgagttattacacagagacagacacagctgtgctccttttactgcagtccagaagataaaacaccagcatgataaaacagccgaacctgtcagccaccttgcaagccttttctatatttgattcaatgtacttttcccgaagcaaaatgaaagttctcacagagggg

SEQ ID NO: 210594 - DNA, 462 bp, Homo sapiens
ccatccaaccctcgagttgacacaccagggatcttcagccccacttgctagatttctcagtttgtcattgcatagatttagcagggaaatggaggctgtatcaaagacccctagtatatgcatttgggtgtccccagctcttgcctctgtctctgagcagttacctgggatcagagaataaggcagctcttctcttctatccctcagaaggctcttgaaattttgtccctggagcctctctaactggaagtagcagttcatctcatracaccccacattttattcaggtgagtcctgagttattacacagagacagacacagctgtgctccttttactgcagtccagaagataaaacaccagcatgataaaacagccgaacctgtcagccaccttgcaagccttttctatatttgattcaatgtacttttcccgaagcaaaatgaaagttctcacagagggg

SEQ ID NO: 210595 - DNA, 502 bp, Homo sapiens
agaaatctttaacctattgctccccaatactgttggtccctggggcttgacwtttccccttaaggctccatctccatccctggctttccctcttccttctcagcatctagtcttgtagaatttaaacacaggaaccagggatgaccccacaccagagcatagcctactgcattcagcatgcgaacattaatcacaggtataaggccccttgcacagacatgctttggagaagtgtgtataggacttcttggatttgcccaaggtggttaccagacacccaaagtagattcgaaaattttctggaactcctgaacatgtgtattcaaggatgaataagcaacttattgcctctatttttgctgttttatagagaaaaaaaataaggccctggaaactgaagtgcttttcccaacagtggggtaaatgtcagagtcaacaatttgttttaatatcctggctttccctatacatcccaccctagagttctgttgtgctgttcctt

SEQ ID NO: 210596 - DNA, 502 bp, Homo sapiens
agaaatctttaacctattgctccccaatactgttggtccctggggcttgacttttccccttaaggctccatctccatccctggctttccctcttccttctcagcatctagtcttgtagaatttaaacacaggaascagggatgaccccacaccagagcatagcctactgcattcagcatgcgaacattaatcacaggtataaggccccttgcacagacatgctttggagaagtgtgtataggacttcttggatttgcccaaggtggttaccagacacccaaagtagattcgaaaattttctggaactcctgaacatgtgtattcaaggatgaataagcaacttattgcctctatttttgctgttttatagagaaaaaaaataaggccctggaaactgaagtgcttttcccaacagtggggtaaatgtcagagtcaacaatttgttttaatatcctggctttccctatacatcccaccctagagttctgttgtgctgttcctt

SEQ ID NO: 210597 - DNA, 502 bp, Homo sapiens
agaaatctttaacctattgctccccaatactgttggtccctggggcttgacttttccccttaaggctccatctccatccctggctttccctcttccttctcagcatctagtcttgtagaatttaaacacaggaaccagggatgaccccacaccagagcatagcctactgcattcagcatgcgaacattaatcacaggtataaggccccttgcacagacatgctttggagaagtgtgtawaggacttcttggatttgcccaaggtggttaccagacacccaaagtagattcgaaaattttctggaactcctgaacatgtgtattcaaggatgaataagcaacttattgcctctatttttgctgttttatagagaaaaaaaataaggccctggaaactgaagtgcttttcccaacagtggggtaaatgtcagagtcaacaatttgttttaatatcctggctttccctatacatcccaccctagagttctgttgtgctgttcctt

SEQ ID NO: 210598 - DNA, 502 bp, Homo sapiens
agaaatctttaacctattgctccccaatactgttggtccctggggcttgacttttccccttaaggctccatctccatccctggctttccctcttccttctcagcatctagtcttgtagaatttaaacacaggaaccagggatgaccccacaccagagcatagcctactgcattcagcatgcgaacattaatcacaggtataaggccccttgcacagacatgctttggagaagtgtgtataggacttcttggatttgcccaaggtggttaccagacacccaaagtagattcgaaaattttctggaactcctgaacatgtgtattcaaggatgaataagcaacttattgcctctatttttgctgttttatagagaaaaaaawtaaggccctggaaactgaagtgcttttcccaacagtggggtaaatgtcagagtcaacaatttgttttaatatcctggctttccctatacatcccaccctagagttctgttgtgctgttcctt

SEQ ID NO: 210599 - DNA, 524 bp, Homo sapiens
gaaaacacaggatggtgctaaagaatgcagcctaatgaaaggtggcatctcctctggatgtccttargtagacattgaagcagaactgccaactttttgtagaaggctagagaggagaggaggacacagagagagggcaagagtggaaaacagaatgaggctcagaataccaagccttagtgctctccctatcatctgcctcactcgatcactgggtaatcttgggcaagtttcttcctttccatcagcttatttcctcatctttaaggtaagtgactagacaagacatcctatgttcattgtaactctatcttttgttcctgaagcaaatggctggaaaagacatagtgtccacaatatgcaatacacaaggttcacaagcaaagaacaaatgaaaacgaaagatttttaaaatccctaatgttatttgaattcttgcagatgaactatggtacataataattttaaaaagccttttgtaatttcaatttttaaaaataatttcaacctttattttagattca

SEQ ID NO: 210600 - DNA, 524 bp, Homo sapiens
gaaaacacaggatggtgctaaagaatgcagcctaatgaaaggtggcatctcctctggatgtccttaggtagacattgaagcagaactgccaactttttgtagaaggctagagaggagaggaggacacagagagagggcaagagtggaaaacagaatgaggctcagaataccaagccttagtgctctccctatcatctgcctcactcgatcactgggtaatcttgggcaagtttcttcctttccatcagcttatttcctcatctttaaggtaagtgactagacaagacakcctatgttcattgtaactctatcttttgttcctgaagcaaatggctggaaaagacatagtgtccacaatatgcaatacacaaggttcacaagcaaagaacaaatgaaaacgaaagatttttaaaatccctaatgttatttgaattcttgcagatgaactatggtacataataattttaaaaagccttttgtaatttcaatttttaaaaataatttcaacctttattttagattca

SEQ ID NO: 210601 - DNA, 524 bp, Homo sapiens
gaaaacacaggatggtgctaaagaatgcagcctaatgaaaggtggcatctcctctggatgtccttaggtagacattgaagcagaactgccaactttttgtagaaggctagagaggagaggaggacacagagagagggcaagagtggaaaacagaatgaggctcagaataccaagccttagtgctctccctatcatctgcctcactcgatcactgggtaatcttgggcaagtttcttcctttccatcagcttatttcctcatctttaaggtaagtgactagacaagacatcctatgttcattgtaactctatcttttgttcctraagcaaatggctggaaaagacatagtgtccacaatatgcaatacacaaggttcacaagcaaagaacaaatgaaaacgaaagatttttaaaatccctaatgttatttgaattcttgcagatgaactatggtacataataattttaaaaagccttttgtaatttcaatttttaaaaataatttcaacctttattttagattca

SEQ ID NO: 210602 - DNA, 503 bp, Homo sapiens
taaaggggagcgggctactcacctccagccttttgtcatgtaggtgcacccaacattctcagatttttcaagaacaccaaaaaatccaaatttttgtgtgacagcagatttttaagtgtttaagaaatcaaataacacacacacacacacaaatccacacaagattattttcaggcactgccccctacgtccatgtaattcaatacaaagtaaagactgatgaatgcttacaataaccctcttctgctgtagccaggggcaaattcaaggagatctgtgaacgtccaaatggctcctgtcaggacttttgcctcgaaacagaaatccatgtagggagatgtttaaatagccgaccctgctgcctgcctctggrgcatcaaccaagaattgagagcactacacacaaaaaggactgaagcctgttgttttctggtggttttaggttctcttttttctctctccctgtccctatctccctgtctcccgttccctctctccatttt

SEQ ID NO: 210603 - DNA, 503 bp, Homo sapiens
taaaggggagcgggctactcacctccagccttttgtcatgtaggtgcacccaacattctcagatttttcaagaacaccaaaaaatccaaatttttgtgtgacagcagatttttaagtgtttaagaaatcaaataacacacacacacacacaaatccacacaagattattttcaggcactgccccctacgtccatgtaattcaatacaaagtaaagactgatgaatgcttacaataaccctcttctgctgtagccaggggcaaattcaaggagatctgtgaacgtccaaatggctcctgtcaggacttttgcctcgaaacagaaatccatgtagggagatgtttaaatagccgaccctgctgcctgcctctggagcatcaaccaagaattgagagcactacacacaaaaaggactgaagcctgttgttttctggtggttttaggttctcttttttctctctccctstccctatctccctgtctcccgttccctctctccatttt

SEQ ID NO: 210604 - DNA, 535 bp, Homo sapiens
aattaatttacatttctaccagcagtttatgagtgttccattttctctgcaaacttgccagcatgtattatttttggacttcttgataatagccattctaactggtatgaaatggtatctcattatagacactctgtttctcttgatttgagagttcaatctctttacatttaaagtaactactgataggggagttattaccattattatcgtgcgaattgtcttctctcttataattttttgcacrtcttttcctctctgtcttcttttgtgtttcattgatttttttttttttggtaatgacatgctttgatttctttctcatttttttttgtatatcttctataggtgttttatttctgtttaccatagggcttacataaaacatctaatatatataacagtatattttgaactaatgatgacttaacttcaactatgtagaaaaaactctacgcttttgttgtcccacacagaatttatgttgatgccacaaattacatctttttattttgtgtattcattaacacatttt

SEQ ID NO: 210605 - DNA, 452 bp, Homo sapiens
attactatattagattttcattgttttggagctctcatttgccacttacattttctaaaataagttatattattttattaccaggtacagtgagaggggcagataaaacagagtataaataaaatcttaagtcaagaaaaggttgacaataattaatttgaaaatattatttcccaaatagctttctttagattaaaaaaaaatctagtctagcaagccacatgttattggtagatattttggtctctagctataatgctactgataaattttatcctaatattaattttagaaacaatataagcaaataaattattttctttttcttcaaattttcatttctttacttcaatatgtttttggggagcaggtggtaattggttatatgaataagttcyttagtggtgatttctgagattttggtgaacccatcacctgagcagtgtacattg

SEQ ID NO: 210606 - DNA, 633 bp, Homo sapiens
ggctctgtaatatggtaataccttctctttggataactcttcatttcaaagcaatctgtagacattacacctttaattacaggagacctcaaggcacaaagcaaaagaagaatgaatttcatcatgggaatatacaaagcaaggcattaacatctatagttaaataagtcagcatcaaacttcttgctgtaccacccaccatttcacacagttcagctagctgactcgttcatactttaaggctaatcagaataaattaatgattcatcactaataaagatrcagagtgtgtacctttattcttcagtagggtaacgtgacccttctgagtacttctggagcaaatgtgtatgaagtgctaggttttttgtcactaagtctatgtactcagaaaagacacaaattttcagtattctggtttaccacttgccaggcaaaggaaactgtaaataaatgtttcaccacatatttatgtgaaaaaaattaattggtggatgggctttgttgtgattcttaataataatgaatcatagttttacacatatagtaggatgaagcatttgagatttgattctagcatttctgtctatgtgtttataatttatccaatggaagtattaaaagaaaagcttt

SEQ ID NO: 210607 - DNA, 541 bp, Homo sapiens
gggattttttttacttttaaaaaggaaagcaaggagagagttagtatctagctttgttatactacatcctgattttgcattgttacactattgtccaatgttttataaagtatgttgtaacaaacatttgatggtgggagtcacgagaggctatgtgtagccataatgaagtgctagtctatctaaacagacttggtttctactttaccaaatcagtaacttttctgataagtggtaaatttcttcacacatttgatcttattttgagttaaggtttgcagattatgttatagttcattgaagtccacagcagttttcagtcttttctaagtcacattaaacatgtatcattaggggcagaatggaaatatgcacagctattttaataaaagctaggaggccgggtgcagtggctcacgtctgtaatcccggcactttgggaggctgaggtgggtagatcacctgaggtcaggagttcaagaccagtctgaccaacatggtgaagycccatccctactaaaatacaaaaagttagccggac

SEQ ID NO: 210608 - DNA, 599 bp, Homo sapiens
agcattctcacattctcagcactacattttcttctctattatttgtcaagtattaaaggccccagaggggtcaccaggatgaaaactgaggatttgtcatcataaaattccagattaaaattctagttctgaaatattttgctgtgaggacaaatttcttaagctgtcatagccacactttcctcacgtataaaatacagctgagaacagaggctaaatgagtattaagtatctttacctcagaccatttaaaatgaagctaacttgtaaaagtctgagcaacaaggattagaggaagtacaatgaaatgcataacaatgaagcacataacttgtgtcatgagagatcctgtgaaaatgtcctttagaaacagtgaccaatgtatacaggttaacttgtaatgtctttaatgtaraagaaaaacaaacaaatgccattgcttttactatcaatacaacctctggggtgggtggtggagtgggtatggttgctgaatcttctctctgcctataaatattaataccacttgtatgtgtgaacatttatgtgtgtgatgtggttgtatgtagatgcaggtgtggaggtgaattgcttctagg

SEQ ID NO: 210609 - DNA, 451 bp, Homo sapiens
aaagaccctatctggtgtcgcagtgtaactcaagcattctattttatatttagattgtctatttcatgaccattttaacatggcatggkttaaaataaaagtatttctctaatctatacagcataattagcagaaggttaaaatcttgagatctgaaatttttgtgggaaaggtctcacttgttacaatatataattacttttaattagccttaatgactatattactcacttatttttagatacaatgaaatagatactgcaaaataaattttatttgtataaatatataaaataaataagttatttaacaaccagtaaatccaagtattttctaaggagaaaaatgaataatttttttaagttgattatatatacattttaataaagtaatttaggagaaatctttgcctatccttctaagaaaagttttgtaagaaaactgagttggc

SEQ ID NO: 210610 - DNA, 584 bp, Homo sapiens
aattctgaaatctaggagcacataatgttagttccctgatcagggcttatcctattactgcctgggagttgtccactgtggttccctggccctaccataaaggcttttgggttcatctctggattatcttttcattttcataaaattcagcccatatttgcagtagaataggtttttatgcctgcatcttactcataaaagttaggaagcccaaagacctcttttttttttttttgtcttttccctccctgttcctttcagttcaaacttgtattattcttttaaaaactttcagaggttttgtgtgccagtttgtaatccacccacaaatatctttgaaagaaactgttatttcctgggagctttgtgagcctgaagaaggaacacgcctttaagattctcagaagtcctaccrtttaacagagaggttgtgctaaacattctcttaagatccttacagggtctcttgtctgtttgaagggatctgtgagatgccatctcaaatccttctggggtcttaataagggcttcatctttagaccaagttttcctttcaatgccttgaattttatcttaactagagc

SEQ ID NO: 210611 - DNA, 513 bp, Homo sapiens
gtttcattaaatgtcttgcagatgtcacaatgcactgcaaaataaattataggccagcatggtggctcacgcctgtaatcccagcactttgggtggccgaggctggatcatctgaggtcaggagtttgagaccagcctggccaatatggtgaaaccccatctctactaaaaatacagaaatcagctgggcatagtggtgggtgcctgtaatcccagctactcaggaagctgaggcaggacaattgtttgaacctgggaggcagaggttacagtgagctgagattgtaccattgcactctagccttggtgacaaaagtgaaactccatctcaaaaaataaataaataaataaataaatatttttgaatacctatttattaattattttgaaatattataytgattaaacacctattgacttctaagcactccattagatatagcatagaaatttccttttgtaatactatcaattctaactgtctttatcctgactttaaagatgtgaaaacag

SEQ ID NO: 210612 - DNA, 421 bp, Homo sapiens
aacataaggcatttattacaaacgaattccagataattagtggaggagatcatgaaatgttcagagagaaaaaaagggctgaatttcaaacagaagggggtctgagccattaaygggtaatctgcacgacttttgttaatcccctggggctcctgttacaggtggttcatatttctaagcagtgaagtatgcgagatgaatggaaaatttctccttaacattttccactacccagccttagcatgaaaagccctgtaccagatcaagcagctggtttattacaacttctaattcagagacatatcgccattcagttattcccagcccttgctactcacccgagattttcatttctacatttccccggagtagaatttcctctagagaaagtgtggagctattttttaatatagactaaaaa

SEQ ID NO: 210613 - DNA, 418 bp, Homo sapiens
aatatagactaaaaagtgttctttaggtttaaaaatactggagaacgtgaatcaacgtttattaggttcaagaaggatatttcatattttaagagaaaaaattacgtatattttatgtatgaatggctctaatctctgccaattgttgcagtagaaatgagttagaaaaatactgattacctttcctataaatatcatctgagtagaaagtaccagtgtgtagtaaaatatctttaatttattccaataaatattgtaaaataataattaaatgaggtttactgacaactgtacaaacatacaaaattgaaaagctaaaacaaatcaaaacacaagtgctgttttgcrtgcccctgaatgagagaaagaaattatacataggcaattttttctttcatagttaaattatgctcgtagg

SEQ ID NO: 210614 - DNA, 371 bp, Homo sapiens
aaatctgggtggtagtgaggtagaaggcagractcaggctctagaccagattgaagagtagctcaaacagggaagaagcaaaagcacctgcccataagatatgcccactcggtccatgtcagtttaccattgccatggcaacacctggaagttgccatccctttccatggcaataacctgatggtccagaagttaccaccctatttttagaaatttctgcataacctgtcccttaatttgtacataattaaaagtgaatataaatatgactgcagaactgcctctgagccactgctctgggtacactgtttatggggtatccctgctttgcaaggaataacacctctgctgctgcttcaataaaagttgct

SEQ ID NO: 210615 - DNA, 407 bp, Homo sapiens
gaattcaaagccattataaaccttatacaaaatctgggtggtagtgaggtagaaggcaggactcaggctctagaccagattgaagagtagctcaaacagggaagaagcaaaagcacctscccataagatatgcccactcggtccatgtcagtttaccattgccatggcaacacctggaagttgccatccctttccatggcaataacctgatggtccagaagttaccaccctatttttagaaatttctgcataacctgtcccttaatttgtacataattaaaagtgaatataaatatgactgcagaactgcctctgagccactgctctgggtacactgtttatggggtatccctgctttgcaaggaataacacctctgctgctgcttcaataaaagttgctgcctaac

SEQ ID NO: 210616 - DNA, 407 bp, Homo sapiens
gaattcaaagccattataaaccttatacaaaatctgggtggtagtgaggtagaaggcaggactcaggctctagaccagattgaagagtagctcaaacagggaagaagcaaaagcacctgcccataagatatgcccactcggtccatgtcagtttaccattgccatggcaacacctggaagttgccatccctttccatggcaataacctgatggtccagaagttaccaccctatttttagaaatttctgcataacctgtcccttaatttgtacataattaaaagtgartataaatatgactgcagaactgcctctgagccactgctctgggtacactgtttatggggtatccctgctttgcaaggaataacacctctgctgctgcttcaataaaagttgctgcctaac

SEQ ID NO: 210617 - DNA, 621 bp, Homo sapiens
ataatatgtgaggtttttttgtgactagcttttttcatttaacataatgttttccagattcatccatgttgtagcatatatcagtacttcatttctttttattctgaataatattcccttgaatgaatatatccatttattagttgacagctattctttctatttagttgatccattaattaatttatttatttatccctttattaatttatagatttttcctgctttttggttcttacaaataatggtgctataaatgcatttgtatgtacactcatagcaccactatttgtaagaatttttgtgtgtacacttggcttcatttctcttggttcaataccatggagtggaattgctgggtcacatgataactctatgcttaactctttgaggaactgccaaactattttgctaagtggctgcatcattttacattttcatcagtagggcatgatggttttgatttctccacatccttgycaacacttgttattatcttttgtattttagccatcttaaagggtatgaagtggtacatcattgtggttttgatttgcatttcttttttaacataactttctaattaagcaaaaggtacttatcaaaagcagttcaaaatat

SEQ ID NO: 210618 - DNA, 534 bp, Homo sapiens
agatgttcatcaggaatattgcgctaaaattctctttttttgttgtgtctctgccagacttttgtatcaggatgatgttgacctcataaaatgagttagggaggattccctctttttctactgattggaatagtttcagaaggaatggtaccagctcctctgtatacctctatgctaccacatttttttactttgttttctttaggtacttatwtctccttttctcaattatctcatactgatacaattaatctctgtaaaaaataaattccctgagcttctatttttccagagtgccctagagatgaatctcaatgcagctttgtaaagtatgaagcacaaggctttttttattcttccgggaatattacatttcatgtttcacttttatggagaaatcagtaacaaaccactcccccatctgtttgcttaatagaatatttcagtcaatgaggctggtgtcttggagccagacaggcctggtggcatctgaaaccattttcctaactgtttcagaatcagcaaaacacaaag

SEQ ID NO: 210619 - DNA, 441 bp, Homo sapiens
aattgagggaagaatattcttatgacttctcttcacacaaacaaggcaagtgaaagtgtaaactgcaayatatgctggaagttgtttgataaaaattccttttatgacaatccagttggatgggatgagagcaggcttttcatcgtgagactgacttgaattgctttgggacctgagtatcctcaaccatttggagttctgtttttctcatttgtaagatgaaaataataatgtgtactttgatgaggaagtcaccaataagagaggactttgggagcgataaataagacaatgtatgagaaagtaagctgtacagggtcacctggtaagcactcaggatgtgttctgttaagtttaatttttttcttttttttgaggcggaatttcactcttgttgcccaggctggagtgcaatggcacaatctcggctcaccacaaact

SEQ ID NO: 210620 - DNA, 537 bp, Homo sapiens
atacaaaaaactagccgggcgtggtgacacacgtcggtagtctcaactattgtggaggctgaggcacgggaatcacttgatttgggaggcggagtttgcagtggatggagatcacacctttgcactccagcctgggggacagagcgaaactccatctcaaaaaacaaaaaaaaaaaaaaaagagagagagacaaatgtagggctatactctaraagctgctattgctgatagttttcatgtaatctgtgaattagcggcattcaaacagagaatataaaaattaactcgaagtttgagtcagatttcctagttttcttcctggtgtgaacttttggcttatgtttcaaatggaaataacaccagacctgcacggtgggtctaggattactgaacatgaacatgaacctgtatgaaaccttgtaggatatagatcctttgcgcacagttgatactcaaatatattcttcctatcccctgtaataatcaacactggcatacctcattaaatatgtcaatggatttgataaacagtatca

SEQ ID NO: 210621 - DNA, 537 bp, Homo sapiens
atacaaaaaactagccgggcgtggtgacacacgtcggtagtctcaactattgtggaggctgaggcacgggaatcacttgatttgggaggcggagtttgcagtggatggagatcacacctttgcactccagcctgggggacagagcgaaactccatctcaaaaaacaaaaaaaaaaaaaaaagagagagagacaaatgtagggctatactctagaagctgctattgctgatagttttcatgtaatctgtgaattagcggcattcaaacagagaatataaaaattaactcgaagtttgagtcagatttcctagttttcttcctggtgtgarcttttggcttatgtttcaaatggaaataacaccagacctgcacggtgggtctaggattactgaacatgaacatgaacctgtatgaaaccttgtaggatatagatcctttgcgcacagttgatactcaaatatattcttcctatcccctgtaataatcaacactggcatacctcattaaatatgtcaatggatttgataaacagtatca

SEQ ID NO: 210622 - DNA, 537 bp, Homo sapiens
cagcagacgattgactatgtaattggtgctcaaaaagtaattttagcttgaactgaattgagtcatattggattaagtaaaattaaattcattcactttattgatgaggctattaataaccttgacccttgtgcaaaccacacttatatgtaattgatatgcccccttcacactgaaaccacatgatcagtgaactcaaaaaacatcactgatgcccacaatgaatgcggcctctggaactatctatcattgcctcttataatttttggagwtcataaaatgtactggaagaaaacatggctttggtgtctcagacacttggtttaaaatcctcacactactgcataaaactgtccaaacattgacaaagtgcataatgtctccaggcctctgtctttgaatccataaaaatggttgtaagatcacttacctatagggtcattgtataattttaatgtgatatgatatgcctaactatagcataaaccccaaactagagtatttcactcattctactcctagtatccattggactca

SEQ ID NO: 210623 - DNA, 537 bp, Homo sapiens
cagcagacgattgactatgtaattggtgctcaaaaagtaattttagcttgaactgaattgagtcatattggattaagtaaaattaaattcattcactttattgatgaggctattaataaccttgacccttgtgcaaaccacacttatatgtaattgatatgcccccttcacactgaaaccacatgatcagtgaactcaaaaaacatcactgatgcccacaatgaatgcggcctctggaactatctatcattgcctcttataatttttggagttcataaaatgtactggaagaaaacatggctttggtgtctcagacacttggtttaaaatcctcacactactgcataaaactktccaaacattgacaaagtgcataatgtctccaggcctctgtctttgaatccataaaaatggttgtaagatcacttacctatagggtcattgtataattttaatgtgatatgatatgcctaactatagcataaaccccaaactagagtatttcactcattctactcctagtatccattggactca

SEQ ID NO: 210624 - DNA, 539 bp, Homo sapiens
tcacagctccattaggcaatgcccagtagggactctgtgtgggggctctgattctgtatttcccttccacgctgccctagcagaggttctccatgagggccccacccctgaagaaaacttttgcctgggcatccaggcatcggaggttcccaaagctcaattcttgacttttgtgcatcggcaggctcaacaccatgtagaacctgccaagccttgggggtccaccctctgaagccacagcccaaattctacattggcccctttcagccatggctagagcatctgggacacagggtacatgtccctaggctgcacacaacacagggaccctgggcctagctcacaaaatcactttttcctccagggcctytgagcctgtatgggaggggctgctgtgaagttctctgacacggcctggagaccttttccccatggtcttgggattaacattaggctccttgctatttatgcaaatttctgcagctggcttgaatttcctctcaaaaataatgggattttcttttctactgcatcatcag

SEQ ID NO: 210625 - DNA, 622 bp, Homo sapiens
tttgggtatgttttcagcaatacctgactctactggtaccagtttactcatagtccaacatatagagctgattttccttgatatgttaatatattttatttcagcttttaatataatctggacacctttttttcattgaagagctaattttrtatctttaatttttcttattatgacataagcttttcaaatttattataaactctttatagaggtcaatgcagtttatcatgtggtggtacatctcccctctgcttgagaacattaaacgatattgagggggcttttggttgtaacagtgattgagggtccactggcatttagcaccaggagctcaggaatgctaaacttcttgcaatgtgcaagacagtcttgaaatttaaaactaattgctctacccaagtacattaatatctcaattgagaatactgaatgtggactattattatgattttataatgaatcccttgctagtgagaaggctaaatggcacagccactttgaaaacagtttgtccttgtcgcactaaagctaaacatagttttaccatacaataaagcaatttcacttccaggaatttactcaactgattgaaaaacttacactgacacacaaaacctac

SEQ ID NO: 210626 - DNA, 315 bp, Homo sapiens
tattaatgactctaaccttctgcaaagctgcctgttgttctagacaaatatataattaaggcatcacatcgtctttaaactgctatgtccgttgcacaaataaaatcatctgttttgggagaggttgattgaatgaataaaataatgaaaagagtggtgagctgcatgcaggtaggtattatactaaatatacatgtkatttttttcattaaagtacataacatttaatagatatttattacaattaatatttctgtaaacatctaatatttgattcagttcaaaaacaactctattttcaataatattgtatat

SEQ ID NO: 210627 - DNA, 520 bp, Homo sapiens
tacaatggggctatggtacatatgtcttccatctgactgatttatgagggaacataactgagaataccatacaaatggaaatagacamcgacctaagtaatgtgttctcctatgtagttatactattgcatctaattcaagccagatttaaatatagacagaatagataattgtataggatttaaactttgagtgaaattaatcattctccaggtaattagtcattgccaacctagaaagatttttttcttttactcattttcaaaggtgtggctcattactagccaattattaggcttgcttgtattcaatatcttgtgagctacttcttaactgtgttctctagataagaatttcaatgtattggatgatcttataattacccctcacaactacggaagataatataatgtttttgtacatatccaatgataacaagttaatccctaaagacttttcagtgatatttacaatatatatttaatattctataagtttcactatacttcaaattgactaa

SEQ ID NO: 210628 - DNA, 520 bp, Homo sapiens
tacaatggggctatggtacatatgtcttccatctgactgatttatgagggaacataactgagaataccatacaaatggaaatagacaacracctaagtaatgtgttctcctatgtagttatactattgcatctaattcaagccagatttaaatatagacagaatagataattgtataggatttaaactttgagtgaaattaatcattctccaggtaattagtcattgccaacctagaaagatttttttcttttactcattttcaaaggtgtggctcattactagccaattattaggcttgcttgtattcaatatcttgtgagctacttcttaactgtgttctctagataagaatttcaatgtattggatgatcttataattacccctcacaactacggaagataatataatgtttttgtacatatccaatgataacaagttaatccctaaagacttttcagtgatatttacaatatatatttaatattctataagtttcactatacttcaaattgactaa

SEQ ID NO: 210629 - DNA, 472 bp, Homo sapiens
tctttctaaaataaagtacattctgtttagaagaccaagaataaatagaaaaataatttaagaatataatgctaaaaagagtgttatgaatttttcttctgaggttccatgaacatcaatagtaactcacaaaccaatatttaaggaccaaatatgaatcaaaatctactgggtatttatattacccttatatttattcaagcaataagtattattttgttataaccaatggtataattgatgctaagaggtcaacagataggccatgaattcaggtttctttattattaataagaagttcacaaatttaacaccatcataataggtacacagacctgggcctttgctgtgctctcaattcaagcaacaaatttcttttgcctacaaaattccctgcagctgctaaattgctaaaaatgacagaagatttgcattaaaatytgattaaattatctaggaaatatccttggtc

SEQ ID NO: 210630 - DNA, 592 bp, Homo sapiens
taatataaaatctgctaatttacatggaaaatgattcaatgttttatacatctgtgccagagtgaaaggcagtgtttttaatttaaggataaaaatttagggaagagataaataatttagtgctaggtctattgagttttatttgcttgtaagatattttggtgggcagtatgattaggcagttagaaatgtataacatagcttataamatgttcaagctattaatataaacttggcaatgatctatagtcagatggtgctaacaatttaacaataagtggtagtttatagtggcaaactttaaaatggaataaggaaaatggcaagagatgtcattcaggggggaatcactgcatttgtgtggtgagaggtgaaaaagaacaaataaacacagaaggaacactcagaagacaaggaatacaatcggtaatcacctgccacagaaggcaatagaggagactattttaagatgaatagagataataaattggcacaatgctaaaaggaaattaaaaattatgacaaaagaagatgggttattgactttggcatataggaagttattagtgatttttgtgataatagctgttta

SEQ ID NO: 210631 - DNA, 446 bp, Homo sapiens
taatttcaccagggaaaattcactctttgctcaatcaggaagacactataaaaacctgatcatctgaagccaatcagctgattgtttcagctaaatccagtttacctctgatttcaaaatcctgataaaaaaataaattgtcacatgtatgctgcaggttttgttacctaatgattttttcttgcctaaaatgtcatgtaaccatgggagatttcacttcacctcctcagcccttagcaaatatccaatgggaataattccctatgcatttggggatgttctagattccagtctctcaggcaaggttacctgactgaccaaaggtctgttggtttctcctgccactgcatccctctacctgtgttaaacctattmttcgccttgtactcagactcaacaattttccctggagagtgagggtggcaatgtctgatgatcttatgtca

SEQ ID NO: 210632 - DNA, 605 bp, Homo sapiens
atattttatttatatattcaatggttaatgaagatttcaactatttsaaggtttttggctattacattacgatgcaatgaaatttttggttgtaactttctattcataaaggcatatgttttaaggatgtgagtggaaaaaacagtttttctctgctctcacaacacaacgatcaacatgaagacttctgtgactacatgtgtgggattttcttcccaccagcaagcaagcaatcagttattcagtggataaaagacaaatgtcctccaatgaaatccccatactgtcttctatggaaataccatcaaattctacaggttgagggctcagtcccacaagaccgctcctcacttttgatgccaatcacaagcctcagaatgttgtacctgtgcttttgactgatgggctataaatcagaattcccacaactccctccttgggtttaatttgttagagtggctcacagaactcaagtaaacacttacgtttactggtttattataaatgatactgcaaagaaaatagatgaagagatgcctagagccaggtaggaggtaaaggatgtaaaacttccatgccctcccaaggtgaaccaccccccgtaa

SEQ ID NO: 210633 - DNA, 605 bp, Homo sapiens
atattttatttatatattcaatggttaatgaagatttcaactatttgaaggtttttggctattacattacgatgcaatgaaatttttggttgtaactttctattcataaaggcatatgttttaaggatgtgagtggaaaaaacagtttttctctgctctcacaacacaacratcaacatgaagacttctgtgactacatgtgtgggattttcttcccaccagcaagcaagcaatcagttattcagtggataaaagacaaatgtcctccaatgaaatccccatactgtcttctatggaaataccatcaaattctacaggttgagggctcagtcccacaagaccgctcctcacttttgatgccaatcacaagcctcagaatgttgtacctgtgcttttgactgatgggctataaatcagaattcccacaactccctccttgggtttaatttgttagagtggctcacagaactcaagtaaacacttacgtttactggtttattataaatgatactgcaaagaaaatagatgaagagatgcctagagccaggtaggaggtaaaggatgtaaaacttccatgccctcccaaggtgaaccaccccccgtaa

SEQ ID NO: 210634 - DNA, 605 bp, Homo sapiens
atattttatttatatattcaatggttaatgaagatttcaactatttgaaggtttttggctattacattacgatgcaatgaaatttttggttgtaactttctattcataaaggcatatgttttaaggatgtgagtggaaaaaacagtttttctctgctctcacaacacaacgatcaacatgaagacttctgtgactacatgtgtgggattttcttcccaccagcaagcaagcaatcagttattcagtggataaaagacaaatgtcctccaatgaaatccccayactgtcttctatggaaataccatcaaattctacaggttgagggctcagtcccacaagaccgctcctcacttttgatgccaatcacaagcctcagaatgttgtacctgtgcttttgactgatgggctataaatcagaattcccacaactccctccttgggtttaatttgttagagtggctcacagaactcaagtaaacacttacgtttactggtttattataaatgatactgcaaagaaaatagatgaagagatgcctagagccaggtaggaggtaaaggatgtaaaacttccatgccctcccaaggtgaaccaccccccgtaa

SEQ ID NO: 210635 - DNA, 605 bp, Homo sapiens
atattttatttatatattcaatggttaatgaagatttcaactatttgaaggtttttggctattacattacgatgcaatgaaatttttggttgtaactttctattcataaaggcatatgttttaaggatgtgagtggaaaaaacagtttttctctgctctcacaacacaacgatcaacatgaagacttctgtgactacatgtgtgggattttcttcccaccagcaagcaagcaatcagttattcagtggataaaagacaaatgtcctccaatgaaatccccatactgtcttctatggaaataccatcaaattctacaggttgagggctcagtcccacaagaccgctcctcacttttgatgccaatcacaagcctcagaatgttgtacctgtgcttttgactgatgggctataaatcagaattcccacaactccctccttgggtttaatttgttagagtggytcacagaactcaagtaaacacttacgtttactggtttattataaatgatactgcaaagaaaatagatgaagagatgcctagagccaggtaggaggtaaaggatgtaaaacttccatgccctcccaaggtgaaccaccccccgtaa

SEQ ID NO: 210636 - DNA, 396 bp, Homo sapiens
ttcttatttttctaatactatggggggtgaaggggagtgggaagagaaagagagcgagcgagcacataagattccaaataaaatgttataaaatttatctaagacttcaytttcctcacctctaaaatggacagcacccatcacagaggtttatcttgaggaccagttgagataatataagtgaaagcatctagtacaactaaaataaaacaccattattgctctacaagtttccttcctttgcataatggatatgttctggataaggtgattatgaaaaggtataggcttaacttctgttgtcaaatcaaagagcaattacactataaaatctcagagaaggattcccaacagattgagatgaagacctgatgtaaggcaggggttcaggtggag

SEQ ID NO: 210637 - DNA, 621 bp, Homo sapiens
gaattccttaacattaccttccaatacactcaattctttccttgaaattcctttatttcatttattgtacttttatattaatgaacatttttaattttttaagatttctgattaagttttactcttattcacctattcttattttatttctatctttaatcatttcttgttcttttttaggtatgagtactttatcactaagcatctcaagcatattcatgctgaggtcattgtcagataatttcataaaatcaaatttatctggartgaatgttacaattattgattttcttaccattacttggttatgctttagaattttgttttacaggttttgttttgtttgtttcgttttgttcacatgtccctaactaggggttttacagttgcctttatctggatcttctcagtcccaatccagatcttacaatggtagctttcagcttcattcttatatgaatattttatcataatgctgtatctttattcttccagctctcaggtcctgcagccctatataagctgttttcccaggcagtagttggccaaatttttgtagcctcgtgataaagtagtaagccaggttcaggtccaccatttcaaatggagcctctttgacct

SEQ ID NO: 210638 - DNA, 490 bp, Homo sapiens
ggagaaagaaaacctgaagaaatggaggagaaaagagtatgaagtgctagaagatggaaggagaaggcacactatggaataagggaaaccagtgaggagattgaaaaagtagtgattttcttttcccgagttcccttagactgcttttaggtttggttttgatatttctctcacctagtgccccaaaatgacctctccctagcaatttgttccataaaaaatattcctcttactgccagaaaatatctcttacctgtcaagcaggttgaaatatcctgccccagcatctaaacatcctctccagcctgccaagcccctaaccacytgacccaggggacttggacccattgccattagttctacacaccccctaccccatgccagcatggagagtgttaatggctgatgtaagtgtgaaagaacataagcgataatttggttttactttattaaaattcaaaatataaataggtaaactacatgttgaatt

SEQ ID NO: 210639 - DNA, 490 bp, Homo sapiens
ggagaaagaaaacctgaagaaatggaggagaaaagagtatgaagtgctagaagatggaaggagaaggcacactatggaataagggaaaccagtgaggagattgaaaaagtagtgattttcttttcccgagttcccttagactgcttttaggtttggttttgatatttctctcacctagtgccccaaaatgacctctccctagcaatttgttccataaaaaatattcctcttactgccagaaaatatctcttacctgtcaagcaggttgaaatatcctgccccagcatctaaacatcctctccagcctgccaagcccctaaccacctgacccaggggacttggacccattgccattagttctacacaccccytaccccatgccagcatggagagtgttaatggctgatgtaagtgtgaaagaacataagcgataatttggttttactttattaaaattcaaaatataaataggtaaactacatgttgaatt

SEQ ID NO: 210640 - DNA, 606 bp, Homo sapiens
caatgtttatttaccatttagaaaatcctagggctcttaggaattatgttaaatctaccctgcctgagctctataaatggaataataaagccaggacaagagcatatctgtttatagcatgatttactgaatattttaagcccactcttgagacctaccactcagaaaaaagagatttctttcaacatactactgctcattgacaatacctggtcaccgaaaarctctgatggagatgtacaaagaggctaatgttgttttcatgcctgctaacacgacatctattagcagcccatggatcaaggggtaattttgatttacaagtcttatatttaaaaaataaatttcataaggctatagctaccgtagatagtgatttctatcatcgacataggcaaagtaaattgaaaaccttctggaaagtatccaccattctcgatgtcataaagaacatttgtgattcatgggacaaggtcaaaatataaatattaacaggcatttggaagaagttgattccaaccctcatggatgactttcaggcacttaagactttagtagaagaagtaactgtacataatgtgatgaaaataacaagagaactagaat

SEQ ID NO: 210641 - DNA, 475 bp, Homo sapiens
ggcattgaaaatggttagtaaaggccaatgcatattcttagaactcttcctggcctgttgatctctaaagattattttcaattttttaagtttttatggctacttttcaatggtctttcagaaatagatgatattatgcatgttatgaagttaataatgaatgctttatataaacgagtggaagttttctttgtgaataattttttcagaatttttacagtgttttttcttttaaaaagcagacattagggatatttggagagattaaaactgagaaayatgaaaggatctattcagttttacaaaaaatctttcatgatactcttatccattttattttctagctctctttgtaattgaaattgtttctctcttgtgtgtggcagagtttgtgtagtgcctagtctggagtagcttctcaaaagcacagattgccttaataatattagtgtatataaattcaaagcatggtgcc

SEQ ID NO: 210642 - DNA, 443 bp, Homo sapiens
tgtgcttaccttcctctatattttgtcttcagtttcaaaagcagtctttcaataggtatctcttctacatgctggagatacaacagtgagcaaaacaggcacattcaaataatccttgttttcaaagacctaacatttggagaggagaggcagaaagtaaacaaatacatacataaaamcaaagcatatcagaagtcagtaagtccactagagaacaataaagagggagcataacagaaggtgctgggaaacaccttctatcaaagaatcctaaacagttaggagtgagccttaaaagatgtgtaaggagatctcagagttccacgtatactataatgactttctgtatcatagggagaacctgaactagacatatataagtaaccaatcacttatgaacaatttggctttattcaaaatcaaatgacagcttatgtcaaact

SEQ ID NO: 210643 - DNA, 537 bp, Homo sapiens
aacaggagagagaatgagtgctgagcaaagggggaaaagccccttataaaaccatcagatctcatgagaactcactcaccatcacgagaaaatcatgggagtaactgcttccatgattcaattacttctcaccaggtccctcccacgacacatgaagattatgggaactacaattcaagatgagatttgggtgaggacacagccaaaccatatcataatctatctttctaaaatccccccagtgcgtctagttctttctcaccctaaatttcagttcagagcttcagaaaattattagtttaatgactcatttaatgacaacccttgtgtgtattacataccaacaactgggtttagattgtcctgccttgtccctttctcctcacccaacatgatttaaattcccactctatccctctgacaagccggggagaaataaaagccagtcacacccatttctcatttccatttggatgcaggtagtactsgtggcaaagcattcttaatctctttgattttctgtcctattctgtggaa

SEQ ID NO: 210644 - DNA, 558 bp, Homo sapiens
tatgcagtgtttggctcattgtgtgcacagctcaataaatagtatgttattgcagtggcatatatttctaagaattaatctatgccgcctacttgcagccactgaacttcattccccaagtccaaacaactggattgggcctacgcactacagaacttcccccaaaaaaactataaatactcacatgttagccaaaaaatccatgcaccagagcacaggtcagaaaagtggggttgcattcttatagagggcaacattctcttccyaaaagacaattttaaaagacacacagcattggggaaaggaggaggaagaaaacttttggaatagagaggataaaatggagaatttgtaaaccacagcaagctattgcttgcattaccagcaaagaagagctttgagtaaaccaagatggtgctaagttgttatccttcccattgccttctgatgaggaccacaaattacctacagccaatccattactctttgtcatctgtgtggagtaatacttgtcagatcttggaaattctgtccagcctccatccaaacaattctatg

SEQ ID NO: 210645 - DNA, 593 bp, Homo sapiens
gccttgtgggagagagggccagtgcagctgacctgctgctgaagaaccaggtaaatcaagagaatgatgagcacagccaggcaggattacaaattacgaagtgtggcaataaaataataatcaccaacacctcctgagtgatgagtaagtgctaggcagtgatctaaacatacacacagaatacttatttgaaccctcattatcagctctctgagagagatgctattagaagttccattttacagttgacaaaactgaagaatgacaaagtttaattaatttccccaagatttatcctaaagatgttcttaaggacatatgtaaagacctagcaacaggaatgtttattatagccactgtttttaacactggtaagattttaatagtcacaatgcaggcaaatattcaacactatggaatgaattaaataaattacatctaaacaataattaaaaataatctactgggtgtatggttttgaaataaaaayctatcatagattattcagtgaaaaatcaggacacaaaataaagtataatctcatattttggtaattataaatatatatgttttttaaatttctgaaagaattt

SEQ ID NO: 210646 - DNA, 511 bp, Homo sapiens
taccattcaaatggtcaatatttttttaatatgagatgatagttgatatcaaactaccatgatacttaatttcccttataaatatttaaatgagtgatagttaacaagtctgattttaaaaaatatcaatacttatatgctggatgttgtatcttttgcactatttaaacttctgcagaaaaatgtatgactgggtacgttgkttttcaaatttctgttaaggtatatgtgaaaaataagtttgaagaccatcaccatatataaatacagccggatggtatcttaaagacccttcagttaataaaagacccttgaagaccctaaagtcccaagtccaaattttgtcctacatatgaggcatctggtctactttctgggcttactccacaatgtcccttccaacctttagttccactgttaagaaagagatataaataaaactccaattatctacatatttgacccatgatttactaacagtaacaaaaaggcaacgtttcttatggaactt

SEQ ID NO: 210647 - DNA, 623 bp, Homo sapiens
cgattttgctgagggttttaatcataaaggatgctggattttgtcaaatgctttttcttcatctattgggatgatcacgtgatttttgtttttaatcctgtttatgtggtgtatcacatttattgacttgtggatgttaaaagatccctgcatcactggcatgaaacccagttgatcatgatggattattttttcaatatgctgttggattcagttaggaagtattttgttgagaatttttcatctgtttttatcagggatattggtctgtagttttcttttttggttatgtcctttcctggtttgggtattagggtgattctggtttcacagaatgatttagggaggattccctcctactccatcctgtggaatggtgtcaataggattggtaccaattcttctttgaatgtctgatagaattcagctgtgaatctgtctggccctagactcttttttttgaaaattttattttttatttaattttaattaattaattaattttttttgagacagagtttcmctcttgtcattcaggctggagtgcaatggcacgatcttggctcactgcaacctccacttccaggttcaagtgattctcctgcctcagcctctgagtagct

SEQ ID NO: 210648 - DNA, 488 bp, Homo sapiens
gggctcagaagagaggagagctgtggagaaagccttaatcttcttagaggttatgtaagatgttgtaaacagtgttcatagaaatatggacacagagtccattccaatgaagtttcagataaaaatgaggaatgtgttactggatagtgaaggaaaggtgatctttgttataaagtggcaaaaaacttggctgaactgtattcatgtcctagtgttttgtggaaggtagaacytcagagaaacaaaataaggtatttggtggaagaaatgtctaaactaagtgtggagggtgtggcatggcttttcttgacctcttcaagtaaaacgcaagaagagagaaacaagttaaagacagaacttaaaattaagggaagtagaacttaaagatttggaaatttcttagcctggctatgttttaaagaataaaaaacatgcttgggagagaacaccaaggatgtggccaagctaccctttgctaaaattagtat

SEQ ID NO: 210649 - DNA, 637 bp, Homo sapiens
agatatggctcagattgcccctctggatggcataggtggcaaatctatgtttaccataggtgtccaagcagtgccatttccataagtgtgcagagtgcatgagctgtgggggcatggcttcctccacctagatttcaaagaatgcttgggagagccttgggtcccaggcagagaacttctgctgggatggggccaccacaccattgcaccactggagcaatacctactggaacatgagggtggggcaactgaagaaagctcccactagggcaatgccttgtggcgctgtcagggtgtggcagctttcaatatctcagactgttagaaccactaaagtgtgattccagcctgggagaatcatgggtacttgatatggtttggctgtgtccctacccaaatctcaccttgaattctaataatccccacatatcaagggtggggccaggtggagataattaaataatggaggcagtttatctcgtactattcttgtggtagtgaataagtctcatgagrtctgatggttttataaatgggagttcctctgcacaagctctcttgcctgccaccatgtaaaacgtgactttgctcctcagtcaccttctgccatgattgtgaggcctccccagccatgtga

SEQ ID NO: 210650 - DNA, 613 bp, Homo sapiens
ggagtcctcataagtgggattacttatttcataaaagagacttgagagagcctatttgctttctctaccatgtgaagacacaacaagaaagtgccatctataagaaacaggccctcactagatactgaatctacttgtgcattaatcttggacttgccagccttcagaactgtaagcaacaaatcctgttgcttttaaattacttagtgtaaggtattttgttatagcagccaaaatggacaaagacactcaaaaaattagaaaaatgattgagatgaagtaggggatcagatactctcaaagtgacaaatgttcttattggtcttttaaaaaaattgatactatgktaataataccatgaaaatccctagatttatgcttctgggaagatgaagtagacatacttctctctgttgctctcaccaagtacaaataaaacactgcacatttatataaaataaacataagaaggtactggaaaataggagaaggtagaatagctagagacctcagcacctgagaaacaatgttgtagtaagttatttgggtctcatttttgcctcacatatctataacttggagatgaagaatctggcaacctggaaacaccaat

SEQ ID NO: 210651 - DNA, 613 bp, Homo sapiens
ggagtcctcataagtgggattacttatttcataaaagagacttgagagagcctatttgctttctctaccatgtgaagacacaacaagaaagtgccatctataagaaacaggccctcactagatactgaatctacttgtgcattaatcttggacttgccagccttcagaactgtaagcaacaaatcctgttgcttttaaattacttagtgtaaggtattttgttatagcagccaaaatggacaaagacactcaaaaaattagaaaaatgattgagatgaagtaggggatcagatactctcaaagtgacaaatgttcttattggtcttttaaaaaaattgatactatgttaataataccatgaaaatccctagatttatgcttctgggaagatgaagtagacatacttctctctgttgctctcaccaagtacaaataaaacactgcacatttatataaaataaacataagaaggtactggaaaataggagaaggtagaatagctagagacctcagcacctgagaaacaatgttgtagtaagttmtttgggtctcatttttgcctcacatatctataacttggagatgaagaatctggcaacctggaaacaccaat

SEQ ID NO: 210652 - DNA, 558 bp, Homo sapiens
aaaacgattttttctctctgctcttcaggttgtgtaatttccattgatctattctgctattgagtacattcagtgatttttttaaatttcaggtattatattttttaattctaaagtatccatttggttttttcccacagtttatattttcttgttgagaacttccgtctttccacttatttcaagaatattaacagttaccacatgaagggggcttttaatagctgctttaaaaaccattgtctgatacttccaacatctaggctatctatggattggcaactgttgtggcttttcttgagaattgaccagattttccagatttttcatattgaatatcccgaacattttgaatattatgttaygaaactttgaatcctgttaaaatcttctggagaatgttgagagttttcttgtttgtttgttttgggctagcaatcaaccataagttctatctttcctgttgtaggtggcagtttcaatcttagctaaaatataaaatcttttgctatgatgtttgggtctgcctcactcagaggttactctcacaaacgaggg

SEQ ID NO: 210653 - DNA, 394 bp, Homo sapiens
catagaggctttttgcttgaaaagtacctaaacgaggccagatgtggtggctcacgcctgtaatcccagcacttagggaggctgaggcgagcggatcaagaggtcaagagawtgagaccagcctggccacaatggtgaaacccgtctctactaaaaatacaaaagttagctgtgtgtggtggcgcatgctgtagtcccaggcatgggacttgggaggctgaggcaggagtatcacctgaacctgggaggcggaggttacagtgagctgaggtcgcacctctgcactccagcctaggcaacagtgcgagacttcatctcaaaaaaaaaaaaaaaaaaaggaaaaccctcaaacagcacccatgtgaaggaaggtgcattaggattgggatggtgg

SEQ ID NO: 210654 - DNA, 394 bp, Homo sapiens
catagaggctttttgcttgaaaagtacctaaacgaggccagatgtggtggctcacgcctgtaatcccagcacttagggaggctgaggcgagcggatcaagaggtcaagagattgagaccakcctggccacaatggtgaaacccgtctctactaaaaatacaaaagttagctgtgtgtggtggcgcatgctgtagtcccaggcatgggacttgggaggctgaggcaggagtatcacctgaacctgggaggcggaggttacagtgagctgaggtcgcacctctgcactccagcctaggcaacagtgcgagacttcatctcaaaaaaaaaaaaaaaaaaaggaaaaccctcaaacagcacccatgtgaaggaaggtgcattaggattgggatggtgg

SEQ ID NO: 210655 - DNA, 609 bp, Homo sapiens
ttgtatttttagtagagatagggttttgccatgttgtccaggctgatcttgaactggtaagctcaagtgatctccctgcctcaacctcccaaagtgctgggattacaggcgtgagctacagtgcctggcctagcaaattaattttcttaatgtatgaatttcatctaaactttatgtttattttttttaaacatttaaaaaaatgtatccctaccacggctcactacaacttctgtctccctggctcaagcaatcctcccacctcagcctcccaagtagttgggactgcaggcacgagccaccacgcctggctaatttttktattatttgtagagacggggtttcaccatgttggctgggctggtctcgaactcctaagctcaagtgatcttcctgcctcgacctcccaaagtgttgagattacaggtgtgagcaaccatgcctggcctaaacttcatttttacgttagattacaaaataataactgtatgacattaaaaaatttagaaaattatgctatttaaggagtcacccactaaacaaaggcattccttctctaatgttccagattctccattttatcaccacactctttagagactttgctcc

SEQ ID NO: 210656 - DNA, 596 bp, Homo sapiens
tcactattattatatctgttctatggatctgtgatcagtgatctttaatgtttttactattgtaattattttgggcctccacgaactgcatccatataagacagtggatttagctgataaatgtgtgtgwtctgacagctgcaacaactagcatttcctcatctctctctctctcctcagacctccctgttccctgagataacaatattgaaattagcccaattaagaaccctccagtggcctctaagtgttcaagtgaaaggaagggtcacatgcctctcactttgaatcaaaacctaaaaatgattaagcttagtgaggaaggcaggtccaaagccgagataggctgaaagctgggtctcttgtgccaaacagtgagccaagttgtgaatgcaaaggaaaagctcttgaaggaaatgagaagtgctactccagtgaacacacaaatgataagaaagcaaaacagccttattgctgttatgaagaaagtttgagtggtctggatggaagatcaaaccagccacgacattcccttatgccaaataacttttccattgattctttcaaacgcgttcttcctgagttggacaggctga

SEQ ID NO: 210657 - DNA, 596 bp, Homo sapiens
tcactattattatatctgttctatggatctgtgatcagtgatctttaatgtttttactattgtaattattttgggcctccacgaactgcatccatataagacagtggatttagctgataaatgtgtgtgttctgacagctgcaacaactagcatttcctcatctctctctctctcctcagacctccctgttcccygagataacaatattgaaattagcccaattaagaaccctccagtggcctctaagtgttcaagtgaaaggaagggtcacatgcctctcactttgaatcaaaacctaaaaatgattaagcttagtgaggaaggcaggtccaaagccgagataggctgaaagctgggtctcttgtgccaaacagtgagccaagttgtgaatgcaaaggaaaagctcttgaaggaaatgagaagtgctactccagtgaacacacaaatgataagaaagcaaaacagccttattgctgttatgaagaaagtttgagtggtctggatggaagatcaaaccagccacgacattcccttatgccaaataacttttccattgattctttcaaacgcgttcttcctgagttggacaggctga

SEQ ID NO: 210658 - DNA, 596 bp, Homo sapiens
tcactattattatatctgttctatggatctgtgatcagtgatctttaatgtttttactattgtaattattttgggcctccacgaactgcatccatataagacagtggatttagctgataaatgtgtgtgttctgacagctgcaacaactagcatttcctcatctctctctctctcctcagacctccctgttccctgagataacaatattgaaattagcccaattaagaaccctccagtggcctctaagtgttcaagtgaaaggaagggtcacatgcctctcactttgaatcaaaasctaaaaatgattaagcttagtgaggaaggcaggtccaaagccgagataggctgaaagctgggtctcttgtgccaaacagtgagccaagttgtgaatgcaaaggaaaagctcttgaaggaaatgagaagtgctactccagtgaacacacaaatgataagaaagcaaaacagccttattgctgttatgaagaaagtttgagtggtctggatggaagatcaaaccagccacgacattcccttatgccaaataacttttccattgattctttcaaacgcgttcttcctgagttggacaggctga

SEQ ID NO: 210659 - DNA, 489 bp, Homo sapiens
gaaaactactcagcccagtgcctggcatgtagtatgtgcttcaattactgtgagttacraagtctgatgactgtattagtcatccagggctgccatatgaaggactaaatactggatggttgaaacaaccaaaatttatttcctcagagtcctgaaggctagaagcccccacctcactaaggatataaaaggataagaagaaagcagactcaacgatcttagatgtgggtagtccatgtgcctccccacgccctgctgagtggaagtctcggagatgcctgtccctctcgccaagcttcctaagcgggggcctcagtggggtctctcagtttgggctgtcagccgactgcttgttctgtgattctcagttgagaaatctaaagtctaaagagagagaagggatgcctggcttctggatggaagagtcaaaacagatgaattttgggggaatacaattcagcccataacaacgattaaaaaggaagaaac

SEQ ID NO: 210660 - DNA, 489 bp, Homo sapiens
gaaaactactcagcccagtgcctggcatgtagtatgtgcttcaattactgtgagttacaaagtctgatgactgtattagtcatccagggctgccatatgaaggactaaatactggatggttgaaacaaccaaaatttatttcctcagagtcctgaaggctagaagcccccacctcactaaggatataaaaggataagaagaaagcagactcaacgatcttagatgtgggtagtccatgtgcctccccacgccctgctgagtggaagtctcggagatgcctgtccctctcrccaagcttcctaagcgggggcctcagtggggtctctcagtttgggctgtcagccgactgcttgttctgtgattctcagttgagaaatctaaagtctaaagagagagaagggatgcctggcttctggatggaagagtcaaaacagatgaattttgggggaatacaattcagcccataacaacgattaaaaaggaagaaac

SEQ ID NO: 210661 - DNA, 447 bp, Homo sapiens
aaggctcagctctgcactcctggtctgcatgctctaaccttgggtggctgggactgtgcccatgactttgtcctctaatttctcaaggtcaagaaccagcttggctggaggggtcaaggtgctcctggaccactggcaacagcactgtgtctagggcagtggtggggcaggggggaatgagtaggaagcrctctggtgggaggctgtcagcaaaagcactccagtagggtggggtgggggggcctccaaagaaagtgctatggcagtggttactggcaaaagcaccctggtaggttagctgaggctgtgctgcattctggcatgccagacagggactctgggaggggctggtggacagtggggtacagagctctgactcaccctggtcatacagaaaagacagccctgctctgtcaggtccagtgattatactatgcctcattttag

SEQ ID NO: 210662 - DNA, 607 bp, Homo sapiens
gcaaaaactttttgaggttagaggttggaaaatgagggcccataggccaaatctagctcatccaagttttattggaacacagcaatgctcatgtgcttacatatcatttagctgctttcatgctacaatggcagaggtgagtagttgcaacagaggctatatgatctgcaaagccctttatagaaagagtttgtgaacctcttttctcaataatggagagacatccatgacctaaatgagccagcattttggggagaagatatggtgctggagacagagacaataaacaagtgaataaatatactaagtgctataaagtaaacaaaacagagtgatgtgctacagaatgagtaggagatggaggagaacttaaaattgtatggccagagaggccttcctgagggagttacrtgtgcaaaggtatatctgagtggagggaatgtacataaggagatctggagaaaggtcattggagctaagagaatagcaagagcaaagaccatggtctggaattaggttggcatgttcaaggtgcagaaaagagatctatttgtttgaagtggagacagtgagaggtagagtgataggcagtgatgtcaaccaggta

SEQ ID NO: 210663 - DNA, 598 bp, Homo sapiens
  misc_feature (1)...(598): n = A,T,C or G
caaacatttgttctaacacttacaaatctgctggttactataatttggctgatctaggctgggctctgctgggcactctgcttcaggctgaaagttggctgggcttgactttgagctatcagttggattcaggtcagctttctggggcncagccagcctaaagtggcagcaactacacagaggaaattcctgcacaagcgtatgtcaagcctctgttcatgtcagatctgctaacatcccattgaccaaggcaagacatatagccaaacccaagtccagggacaagcgaacatatcccacktaccacaagcccatggcatgagcttgggtatgtgattcaaccactctctgacaactcattggctttctggcatttcttttatcccatcttaaccccaccaatattccaactaacatctccagcagttcccaacttttttggaccacaggactttcttctgactaatatttaccaaaactagttccgtggaatatatttaatgttcgtctatacacaactggctgtacgcattcctgtggaatgaggctcaattttcaaacacaagattctttacagtgtaagagaaaaagggggaaa

SEQ ID NO: 210664 - DNA, 640 bp, Homo sapiens
ctattaaatatattcaccctatgaggtgggcactattattaatcacctccattttacagatgaggaaatggaggcacagagcccttcagtgcttgcccaaggtcatgcagctaataaatggcacagcaggaatgtgaacctaggcagcctggtgccagagcccatgttcttcacaccacatctgcttccttgtaggacccctggctgggggatgctgatgggggtggtcagaaagccttctgtactttcttttttgtgtgtggagacggagtctggctctgtcgcctaggctggagtgcagtggcgcgatctcggctcactgcaagctcagcctcccgggttcacgccattctcctgcctcagcctyccgagtagctgggactacaggtgcccgccaccacgcccggctaattttttgtatttttagtagagacggggtttcaccgtggtctcaatctcctgacctcgtgatccgcctgcctcggcctcccaaagtgctgggattacaggcgtgagccaccgcgcccagcctgtactttctaagcagtttcaatgaatccaattgcctatacggagaattccttgatgagatccacactttcagatgtgcagaattagaaagcagtggagcacagaacca

SEQ ID NO: 210665 - DNA, 600 bp, Homo sapiens
gtatggtaagctttagagctacttgaagactctcaggactcccttgtgggtacaaagaacaggwggctgccttcacagtaattatgccagcaataaattaaattagctagcattcattttccagctaggtgccaatcaccctctttgtgttacctcatttaatcctcaccacttacctataatttttattctattctaatccccatttcacagataaggaaactaaggtagagagcagtcatttccagaaccaaggcttttcaccattatcatgccacctctgacacaatcttgggaacccaaggaattcttcccatatttatttagtcatcaccatagataaacacatataggcttactatacctgaggcagtggtctaagtgttacatataagtatgttcatgtatttaattctcacaactctcagatgtagctagcattattattcttattttcaaatgacacacatgatgcacagagaggttagatgacattcccatggccacacagtaggtaggtgacaggattgttattcgaatctatatagtctgactagtagggtctgccctcttaatcactctgacgtattgcttctctag

SEQ ID NO: 210666 - DNA, 531 bp, Homo sapiens
  misc_feature (1)...(531): n = A,T,C or G
tagcaggaagaaaacaactaaacagattcatttcttgactttcttctttgatagatattttcttactcttaaatatactttactcctgataatttagagatctatcgttggtgagaggatatcatgaattatgagtccttgcattctttttataaaggtaatatccccggtttgatgagacagaaatttgcaatagcatctttgcagggcttttcaaagagtagtgggaatggaaaagttycctgggacccatttcctgactgttccattcgtgctgatcacgactttaaccatgtttttcaagctgccaatcaaagcacacgttctataaaatacaattccctggtaggcacagtggagctaaatatttgtccctagaactgtcctgggagagaaaggacataaagttgctgccactaggttaaaatttaagaacaaaattataggaagcagactccaaactattttcttanattaattcttccttttccaaccagaacacaatctcccctattgtcatgtacgccctga

SEQ ID NO: 210667 - DNA, 531 bp, Homo sapiens
  misc_feature (1)...(531): n = A,T,C or G
tagcaggaagaaaacaactaaacagattcatttcttgactttcttctttgatagatattttcttactcttaaatatactttactcctgataatttagagatctatcgttggtgagaggatatcatgaattatgagtccttgcattctttttataaaggtaatatccccggtttgatgagacagaaatttgcaatagcatctttgcagggcttttcaaagagtagtgggaatggaaaagttccctgggacccatttcctgactgttccattcgtgctgatcacgactttaaccatgtttttcaagctgccaatcaaagcacacgttctrtaaaatacaattccctggtaggcacagtggagctaaatatttgtccctagaactgtcctgggagagaaaggacataaagttgctgccactaggttaaaatttaagaacaaaattataggaagcagactccaaactattttcttanattaattcttccttttccaaccagaacacaatctcccctattgtcatgtacgccctga

SEQ ID NO: 210668 - DNA, 337 bp, Homo sapiens
ggaactgcagttcattttctctgtgttacactatttttgattctctttgtttttcaccagctattttcttccactcatgtrcacagtatttcttttatgaaccagctgccctgctcattttaaattgagattgttttacccaattattcaccttctgcctctctttacaatgcttcctacattgtagccacattgcattattaaacattttcatgataagcaattcagagcagtattcaaaattaaaaacattcatcctgagccaaataggagctctagtttattggaacgtgctttaacaataatctgatgtttctcagaaggttatcaaattcca

SEQ ID NO: 210669 - DNA, 337 bp, Homo sapiens
ggaactgcagttcattttctctgtgttacactatttttgattctctttgtttttcaccagctattttcttccactcatgtgcacagtatttcttttatgaaccagctgccctgctcattttaaattgagatygttttacccaattattcaccttctgcctctctttacaatgcttcctacattgtagccacattgcattattaaacattttcatgataagcaattcagagcagtattcaaaattaaaaacattcatcctgagccaaataggagctctagtttattggaacgtgctttaacaataatctgatgtttctcagaaggttatcaaattcca

SEQ ID NO: 210670 - DNA, 337 bp, Homo sapiens
ggaactgcagttcattttctctgtgttacactatttttgattctctttgtttttcaccagctattttcttccactcatgtgcacagtatttcttttatgaaccagctgccctgctcattttaaattgagattgttttacccaattattcaccttctgcctctctttacaatgcttcctacattgtagccacattgcattattaaacattttcatgataagcaattcagagcagtattcaaaattaaaaacattcatcctgagccaaataggagctctagtttattggaaygtgctttaacaataatctgatgtttctcagaaggttatcaaattcca

SEQ ID NO: 210671 - DNA, 337 bp, Homo sapiens
ggaactgcagttcattttctctgtgttacactatttttgattctctttgtttttcaccagctattttcttccactcatgtgcacagtatttcttttatgaaccagctgccctgctcattttaaattgagattgttttacccaattattcaccttctgcctctctttacaatgcttcctacattgtagccacattgcattattaaacattttcatgataagcaattcagagcagtattcaaaattaaaaacattcatcctgagccaaataggagctctagtttattggaacgtgctttaayaataatctgatgtttctcagaaggttatcaaattcca

SEQ ID NO: 210672 - DNA, 594 bp, Homo sapiens
atatctagaaataaatgtagcaaaggaggtaagtggtttctacaaggaaaactataaaacactagtgaaagrcattgaagaggacacaaaacaaaaaatggaaagatatattcatagattggaaaaatattgtgaaaatgaccatactaccaaaagggatctacagattcaatggaatccctatcaaaataccactgacagtcttcacagaaatatagaaaaaacaatcttaatatttatatggaaccacaaaaaaccttgaatagccaaaggaattctaagaaagagaataaagctggaggcctcatactgtcagacttcaaaatatactacaaaactatagtaagctaaacagcatagtactgaaataataataggcccatagaccagttgaacagaatacagaagccagaagtaaatgcatttatttacagctaactgatttttgataaagttgccaagaacatacattggagaagaaacagtatcttcaataaatggtgctggtaaaactggacattcatatgcataaaaatggaactagacccatatctctcagcatacacaaaaattaaccaaaatgaattaaagact

SEQ ID NO: 210673 - DNA, 594 bp, Homo sapiens
atatctagaaataaatgtagcaaaggaggtaagtggtttctacaaggaaaactataaaacactagtgaaagacattgaagaggacacaaaacaaaaaatggaaagatatattcatagattggaaaaatattgtgaaaatgaccatactaccaaaagggatctacagattcaatggaatccctatcaaaataccactgacagtcttcacagaaatatagaaaaaacaatcttaatatttatatggaaccacaaaaaaccttgaatagccaaaggaattctaagaaagagaataaagctggaggcctcatactgtcagacttcaaaatatactacaaaactatagtaagctaaacagcatastactgaaataataataggcccatagaccagttgaacagaatacagaagccagaagtaaatgcatttatttacagctaactgatttttgataaagttgccaagaacatacattggagaagaaacagtatcttcaataaatggtgctggtaaaactggacattcatatgcataaaaatggaactagacccatatctctcagcatacacaaaaattaaccaaaatgaattaaagact

SEQ ID NO: 210674 - DNA, 615 bp, Homo sapiens
tctgtttgtttgggagagcataagggaagagaacaagagtctctgtctggtaattcagagaattctcatagatcttatccaggacaaccaaggatgtacctctaagagtctataagaatcacagtgttacagggtttggggtgccccctaagtagatatgacttagatcacaacacccaagtccttttaaatacctggaargtctttttaagaaggacaggtacaaacaagcccagacagtgaagactaaaataaaaacctagctcttcaatgcccagacaccaaagaacatctaccagcatcaacaccatccaggaaaacatgacctcactgactgaactaataaaggcagcagggaccaatcctggagagacagatatgtgaccttccagacagagaattcaaaatatatgtgttgaggaaactaaaagaaattcaagaaaacacagagaaggaattcagaattctatcagataaatttaacaaagagattgaaataatttaaaagaatcaagcagaaattctggagctgaaaaatgcaattggcatactgaagaatgcatcacagtccttaaatagcagaatggctcaagcagaagaaagacttgctgagct

SEQ ID NO: 210675 - DNA, 557 bp, Homo sapiens
ctataagaatcacagtgttacagggtttggggtgccccctaagtagatatgacttagatcacaacacccaagtccttttaaatacctggaaagtctttttaagaaggacaggtacaaacaagcccagacagtgaagactaaaataaaaacctagctcttcaatgcccagacaccaaagaacatctaccagcatcaacaccatccaggaaaacatgacctcactgactgaactaataaaggcagcagggaccaatcctggagagacagatatgtgaccttccagacagagaattcaaaatatatgtgttgaggaaactaaaagawattcaagaaaacacagagaaggaattcagaattctatcagataaatttaacaaagagattgaaataatttaaaagaatcaagcagaaattctggagctgaaaaatgcaattggcatactgaagaatgcatcacagtccttaaatagcagaatggctcaagcagaagaaagacttgctgagcttgaagacaagctatttgaaaatacacagttttccttgttttcatatgatat

SEQ ID NO: 210676 - DNA, 557 bp, Homo sapiens
ctataagaatcacagtgttacagggtttggggtgccccctaagtagatatgacttagatcacaacacccaagtccttttaaatacctggaaagtctttttaagaaggacaggtacaaacaagcccagacagtgaagactaaaataaaaacctagctcttcaatgcccagacaccaaagaacatctaccagcatcaacaccatccaggaaaacatgacctcactgactgaactaataaaggcagcagggaccaatcctggagagacagatatgtgaccttccagacagagaattcaaaatatatgtgttgaggaaactaaaagaaattcaagaaaacacagagaaggaattcagaattctatcakataaatttaacaaagagattgaaataatttaaaagaatcaagcagaaattctggagctgaaaaatgcaattggcatactgaagaatgcatcacagtccttaaatagcagaatggctcaagcagaagaaagacttgctgagcttgaagacaagctatttgaaaatacacagttttccttgttttcatatgatat

SEQ ID NO: 210677 - DNA, 631 bp, Homo sapiens
cctcagtaatcatcagggaaacgcaaatcaaagccatagtgagctatcatctcaccctagttagaatgcctattatccaaaagacaaaaaataacaaatgctagtgagaatgtggagaaaggagaattcatattctgttgatggcaatgtaaattgttacagtcattatgaaaaacagtatggagattcctcaacaaaactaaaatagaactaccatatgatccagcagtcccattactgggcatatatccaaaggacagaatgtcagtatgtcaaaaagatttctgcattcccttgtttattgcagtactattcacaatagccaagatgtggaatcaacctaagtgcacatcaacagataaattgataaagaaaatgtggtgtatatacacaatggaatattattcagccataaaaagaacaaaattccggcatttgtgacaacacagatgggcttgaaggacattacattaagtgaaataagccagggacagaaagacaaatatctcatatgtggaagctaaaaaagttgatctcatagaagtagcragtagaatagggtttccagaggtagggaagagtgggggtaggaaaggatagccataggttggttaatgaatacacaagtaca

SEQ ID NO: 210678 - DNA, 624 bp, Homo sapiens
cctaccttttctcttgctgtactatagacttattaaaaatgaaatagaatttttaaaagacaatggttttataaagaaaattatttgatcatgaatcttattaaaaattaccatgtagaaatttcattcttgaaggtaataatgttttcaatttctgaacctttttacccagaatatagtgatcactctccaaaaactctgttcaaacatactgtttaaaagtgcagtgttggccgggtatggtgcgcctcatgcctgtagtcccagcackttggaaggctgaggtgggtagtttgcttgagcccatgagtttgagactagcctgagcaacatggtgaaacccatctctacaaaaagtagcttggtgtggtggtgcactcctgtagtcccagctacttggttggctaaggcagaagaaccacgtgagtctgggaggcggaggttgcagtgagccatgatcatgccattgcactccagcctgggtgatggagtgagactttgtcttaaaaaaaaaaagtgcagtgtctgtatttttttaatagatagtattatatacctgtctgcttgaagagctgaccttctgttgctgcacttagagtgttgagactttatggatatggcatt

SEQ ID NO: 210679 - DNA, 586 bp, Homo sapiens
atacctgcatttatgtttttctttccattcatggccttgccacttaattccagggctgtggcttcatgtctgaattatagctatctctgattagggtttgcttactgaaaactgctagtcctctgcccttcaattccccattttaatgagggcctcatcccaccccaggatctgcatcagcactgaggaaactggcttctactaggataaagcagcatacatttctgtgtcgtgtaaggttccaaacacaaataagttccatcgtctggagcttatttgtacactttaaaaatgtacagatccctaggctcaatatccagaggttttgattcagcartttttttgggtggaacccacaaatctgtatttgatgatgatcaggtttctaagcactgggcaggtttggtttggtctaaggcatcacttactgtggatttccccctggagtgaagagggcaatccttttccaggtctatctagtccctgtcttctctgtaaccttccccaatctccttcctccctgaaggaaaacaccctttctcacttaattctttatttgacttttaagccgtctgttttgtgtttt

SEQ ID NO: 210680 - DNA, 586 bp, Homo sapiens
atacctgcatttatgtttttctttccattcatggccttgccacttaattccagggctgtggcttcatgtctgaattatagctatctctgattagggtttgcttactgaaaactgctagtcctctgcccttcaattccccattttaatgagggcctcatcccaccccaggatctgcatcagcactgaggaaactggcttctactaggataaagcagcatacatttctgtgtcgtgtaaggttccaaacacaaataagttccatcgtctggagcttatttgtacactttaaaaatgtacagatccctaggctcaatatccagaggttttgattcagcaatttttttgggtggracccacaaatctgtatttgatgatgatcaggtttctaagcactgggcaggtttggtttggtctaaggcatcacttactgtggatttccccctggagtgaagagggcaatccttttccaggtctatctagtccctgtcttctctgtaaccttccccaatctccttcctccctgaaggaaaacaccctttctcacttaattctttatttgacttttaagccgtctgttttgtgtttt

SEQ ID NO: 210681 - DNA, 442 bp, Homo sapiens
ctattatcttgaatttatcctttaagtcttttatctttcactttaccatttttttttctgtgatttgagattgttcttataattggtgttccagggcattaattgtgtctygctgttaaccacttctctgtcaattaatttactgagatatttagtttgaaaatcaatgtttccagtttccaatgatcttttgtgggtgcctgtgtactgtgcttgaattttaagaagtgctagtggtaatcctcaatgaaacagtgttgggaggttggtcctaatgggaggtaatttggccatgagagctctgcctttatgaatgaattaatgtcattgttgagggagtgggttctttatgaaagaatgagttttgttatctcctgctctctcttattctctctttgcccttttgctatggagggaaggaggccctcataaaatgctggtc

SEQ ID NO: 210682 - DNA, 441 bp, Homo sapiens
attggcatttctattatcttgaatttatcctttaagtcttttatctttcactttaccatttttttttctgtgatttgagattgttcttataattggtgttccagggcattaattgtgtcttgctgttaaccacttctctgtcaattaatttactgagatatttagtttgaaaatcaatgtttcyagtttccaatgatcttttgtgggtgcctgtgtactgtgcttgaattttaagaagtgctagtggtaatcctcaatgaaacagtgttgggaggttggtcctaatgggaggtaatttggccatgagagctctgcctttatgaatgaattaatgtcattgttgagggagtgggttctttatgaaagaatgagttttgttatctcctgctctctcttattctctctttgcccttttgctatggagggaaggaggccctcata

SEQ ID NO: 210683 - DNA, 495 bp, Homo sapiens
tagaggcaagtaggaaggtgagatcctacccaagagtagcgattagccaaacagctctgcctttcatataaacatgaatagaaagaagaacagaagagagaaaagaaacaagtaaaattcaaagaaagtaggcagataatgcatggctggggtactatgttgggattaatggtcaaattctcttcccagtagcaaggtggccaaaggacttttaagaacaaggatatatgattttcaatttraaattatttttgttgctacaatataaagccctccctttctccctcttcagtcaagtctaccatatatgcaactgctttatgtaagattttttttaatacatagaaattaaggaaacctgagatcacagccagggctaagtgacagagaacaaaaagaatacacaaacgacaaatgataatgcaaaaactaaaatacagggaaccagaaggttagagccaaaggtgaccacaaacatgtaagtcccccaggaat

SEQ ID NO: 210684 - DNA, 610 bp, Homo sapiens
ctgacttatagtttaattccagatttctctgaaaggcaggagagaggaaagggaaaaaatacaggagggtaaagataagaacaggctaagatttgcamctatgttttacaaagttatctgaaaagcataatttcacaaagtatttccctttaaattaaattactgagctgggttttacacctgtctctcttagctgctgagacaagtcccaaatggagatgacatgactgatggctttaagtgtttatccattgtgtctcctgagcaaggattaaaacagctacctcctgtcatgtttgcttgccaagttttagacagatttttaaaaagaatttgatttgagaactgttcttgacttcggttgcagtgatcaaatttaccactagacagagctgtttgtcttatttttaaccattgcagactaagatttgcaagacaattagaaccaatgaaaaggaaaaccataaatgataatatcttttatgagatggacactcttaaagaatatacttattgcccttttactgctgaaaatacataatttacaggttgttcagtgtcattgtcacttgggaggctgcaactcaattctcaaatttccactcatcag

SEQ ID NO: 210685 - DNA, 610 bp, Homo sapiens
ctgacttatagtttaattccagatttctctgaaaggcaggagagaggaaagggaaaaaatacaggagggtaaagataagaacaggctaagatttgcacctatgttttacaaagttatctgaaaagcataatttcacaaagtatttccctttaaattaaattactgagctgggttttacacctgtctctcttagctgctgagacaagtcccaaatggagatgacatgactgatggctttaagtgtttatccattgtgtctcctgagcaaggattaaaacagctacctcctgtcatgtttgcttgccaagttttagacagatttttaaaaagaatttgatttgagaactgttcttgacttcggttgcagtgatcaaatttaccactagacagagctgtttgtcttatttttaaccattgcagactargatttgcaagacaattagaaccaatgaaaaggaaaaccataaatgataatatcttttatgagatggacactcttaaagaatatacttattgcccttttactgctgaaaatacataatttacaggttgttcagtgtcattgtcacttgggaggctgcaactcaattctcaaatttccactcatcag

SEQ ID NO: 210686 - DNA, 537 bp, Homo sapiens
cccacctggccaatgttgtgaaaccttgtctctactaaaaatacagaattagatgggtgcagtggtgcatgcctgtaatcccagctactcaggaggctgaggcaggaaaatcacttgaacccgygaggtggaggttgtagtgagctgagattgcatcactgcactcctgcctgggagacagactgagtgagactctgtctaaaaaaaaaaaaagtctataaggatagttcaaaaaattgaataaaagctacatagaacaaggcttcaggaagggcaggaactgaggaagctccagggatcttagtaacagtaattaatatgctatttattgagagtataagtaccaagtataaatcagtcccaactggttattcaggaaaacagcatccaacgcctaggggaagactaaggtaccactcgcaaaaggattgagggagtttccccaaaggaaagttaaggactatttcaaaaataacaacccaagaatgttaagcaaaatcaagaatgtcaccataatgaaaaaattacaaaggccca

SEQ ID NO: 210687 - DNA, 663 bp, Homo sapiens
aagaggatgctggttggtttaaattatttaagttattttgggtagttttgctttcctaatctaaagtcagggaaggaaaattgtgtttcctttgagtgggaaggcagctgggaagttatgaggaaaagagagatttttagcaataaaaccaatcttggggagtagaatgacagatttaaaagagaaaacagtaagattttttttgtaaaacttttcaaggataaacaggaatgtaatctctcagaaaatktgagatcccaaagagagagtatagagtaaaatgattcagtggcatggtattagatgaaagcctaaagaatcagaagggcttgctaatacaagaaataaagcaaaaataaaatttccatgaagctttaggatttatactttgttatccttcatctgtatttttggtttgtattcaacactttctggttgactgaatttaattttcatcctgatgttctgattttatgtaggcacagtttaaaaatctactgaaaatagtaccaaatatatcttcaaaaacttgactgattcttctaggttttctttcgattacgcagtcactttgaacaaaaggtattaaaagttagaaaatttagacttcaaatgactataaccacatcattcaatcttatagtccttagattcaaagagtca

SEQ ID NO: 210688 - DNA, 551 bp, Homo sapiens
aaatgatcagagagcaaggaagccaaagacaaaggtacttggtgtcagccagctccacccagaggagcacactttggagaaccaatggagaggagcctgagctgctggaacctattccctatgaattcatggcataataggtatagaaagataaaagacctctgaactacaaaaaataaatatatttaaaacatatatrtaatatatatgtatatatacacacacacacacataaagggcactttttaaaatttatttatttattcatttatttatttatactttaagttctgggatacatgtgcagaacatgcaggtttgttacataggtatacacatgccatggtggtttgctgcacccattaacctgtcatttacattaggtatttctcctaatgctatccctcccctagccccctaccccccaacaggcccagtgtgtgatgttcccctctctgtgtccatgttttctcattgttcagctcccacttagactgagaacatgcagtgtttgattttctgttcttgtttgctgagaatgatggtttcca

SEQ ID NO: 210689 - DNA, 551 bp, Homo sapiens
aaatgatcagagagcaaggaagccaaagacaaaggtacttggtgtcagccagctccacccagaggagcacactttggagaaccaatggagaggagcctgagctgctggaacctattccctatgaattcatggcataataggtatagaaagataaaagacctctgaactacaaaaaataaatatatttaaaacatatatgtaatatatatgtatatatacacacacacacacataaagggcactttttaaaatttatttatttattcatttatttatttatactttaagttctgggatacatgtgcagaacatgcaggtttgttacataggtatacacatgccatrgtggtttgctgcacccattaacctgtcatttacattaggtatttctcctaatgctatccctcccctagccccctaccccccaacaggcccagtgtgtgatgttcccctctctgtgtccatgttttctcattgttcagctcccacttagactgagaacatgcagtgtttgattttctgttcttgtttgctgagaatgatggtttcca

SEQ ID NO: 210690 - DNA, 437 bp, Homo sapiens
aaatcatttttttttcaattgaggggtactcaattatttttcttaaaaaaattgtaaagagtctaattcagttgtcaatgataggtcactaaaagtacttttgatatgagactactagttaggattcttcagataaacagaagcaataggagatagagataaagatatagatagatacagagacagagacagagatagaaatagagatagagagagatagagagagagagagagatagagattaggggatacagatagagataaaggtagagggggggatagagatagagatakaaacagagacagagatagagagagatagagatagagatggagatacatagagaactatcttaaggaattggctcttgcagtggggctaacaagtctgaagtttgtaagactggctggcaggctggaaattcaagtaagagttg

SEQ ID NO: 210691 - DNA, 583 bp, Homo sapiens
gtttagtgggagtttctgtgtgactgtaaggtacatggtgggatcaatttggggtgctggctgaagagctatgctgcaggatggtgcaggatgtgcttctgctcaaagaacaaacagcagggccatgtgtggggtaacgattttggaagcgaggtatcagcgtccccaagtgttgggccccaaggagttagcggagactgatagccacccagctcctcctcccaagtctgagctgcatagagggaggaacatgttttctagtttgcctacaggctttcgagggctcctaggctggatgtggggtggggataggatccagactagacacagcttgtagcacagtgggaaggcaaagctggtatacrttcatgaagagtaagagtttttggggtggtttgatcagggttggggaggcactgggaactgggccttgatgggcaaagagcaagaatgagaagggctagagtttccatttgtggggacagcagcctgagtcccgggcaagtgtggttggggggaagcccagctgggtgtggtgccctctgggcacgcaccccaatccccaagccaggacacatttcct

SEQ ID NO: 210692 - DNA, 599 bp, Homo sapiens
cgcagcaggtgcctgcactcagccacacaaccaagcatagcacctgtctcccctgggggcaggatgggggtgggattctccaccttgggtgtgatactagcaaaagatctgggaaagaatggagggccctctgcagaagccacacattaccaccatcattaccactattattatccaatccattgccaggcacttgacctgcctggggatgatcacagccacctcagcaggggctctcagggcacagatcccttgactggggacagccaggagtgaggtcaccccagagtcctcagagatcagtctctcgggccctgcccaagagggcaggaggtagagatgtgatgaacagagtatttgtcagcccaggaggctggatgatgtattaacaggactttaatgagctctgggagggggagccacacttcatcgcccygagcactggtgcagggtgggaggtggaggggtgaaatgatcaacctcacccccacctgctaactaaacctcttaatatcacccacagcagtccgcccattggaaacaactcagtactgccaagctgctggtcttgcccctggagtccagcgaaggccttatcc

SEQ ID NO: 210693 - DNA, 510 bp, Homo sapiens
tcagtcccattcccaatccccatgaggggtatccatgccaagggcgtggggcctgccggtaccccctgtgacctggctgccttgggatgggctggggggctgcctcagtcaggcagccatctttgtccaccctctgtgaataacagctccttttttctcttgtgttgccctggggccgccaggcccgactgcaacctcatcagagctgctaatcacttttccagctctcctctcctccccrcccccttcttcccaacagcccctccacgttttctctggaccctccaccaaaagctgccctgggatgctcaggccaccttccttccactgtcttgtctcaccccaaagctaggcaatatccaggaacacaaggggctccaggctggtgctctgtccccagcccatcttctgggagaaagcaggtagagagaaatagccttgttattaccctagtccctgccaccaaagaaaacacaacgtgtctccctcttgcctaggtgttgtttgctc

SEQ ID NO: 210694 - DNA, 520 bp, Homo sapiens
gggtggcatgtggcctccaaaggcttaagctttaaagtctgggtgatccggggggccctagccccaaatatggccccttcccgtgcatgggggtgggagagagacatgcccccacagggccaggccttaccaaaggcgaggaaacaggcccaggcagcccacccaggagtccccagcagctgcctcagcccctcctgccctcttcccagccctgggggggctgagccgagtaactccagctatgcagcccggccggtccacctgggtgtgagtgggcagggctgtcctcaagggggtggcccccyacacctgcagggccacaggaacacagagggaaaaagatactggggggagggtgctaggaaaagactgagcaaccacagcagctcctgtctgcctgctcccatatgggattctcaacacaagccaagtccggccctgagtgcttcacacacatcagttcatttaatctgagtgaggacgttattcccatgttgcaggtgaggaaactgaggctcga

SEQ ID NO: 210695 - DNA, 413 bp, Homo sapiens
tgaaactgctcggagaagagcaattgccacttgttcctggagacaagtggaccctaaaaaaaargctggacagcctctctccaagccacatagtcagagatgagatgaccagcccagaccctgacccagccagtgtgaactcttcccacttaaaggctggcctagtgcctcaatctcatacccctggtcgcttggttctggcggtcctactgcaagtaatatggccatggagtgagcactgagtggggaggtcaggaaacccaggctgcaggcatgactctgtcctcagcacatcagagagggatggactggggtgagggtttcttgacataaggtccccatgggcttcaggggatccaagaatcctctaaagcagaatgcaaagtctggtgtcaattaacggaagtgcattt

SEQ ID NO: 210696 - DNA, 351 bp, Homo sapiens
gccggccctgccctccgacccccgccgagctgaaccccgcgactagcagcccccgccctctcggccctctccggccccgggccggcggacaaagctcyggacaccctgaccgaacggtcacctccccccgccccatcccggcccgcccgcggccccgtacctcggcatcacggccgggtcctaggtgagtgtgcgcggcctgggggcgcgtccggcccggggaccggggcggcggcgcgggccgggggcgacaggcctgggctggggggcagtggcgctcaccatcctggagccgctgctgctgcggctgctgcggccgccgcgggcgttagcgggactgggcagtggggg

SEQ ID NO: 210697 - DNA, 491 bp, Homo sapiens
cccgcggattgtgggagggaggaggctccgaacagtcgggaagcctagtggaggaggggactggggacaagggggctgccaacacccagcgacggagacggggactccgacatggcacttgttggagggtctcacgaaactcaggaacwggggtaagagggcttgcaacacccaggaagggggttctcagccccccaggaggctaggattctgggcttttacattgtagctcctgccctaggcctcctaatagccactaatacctcaaactgaacaagttaccaacatctcttctaattcatgtactccccaaccgttcccctttacgaaaagccctagaccccttgctctccattaacttcgatattcaatcaattcctacattctctttttttattttcttttgtgcagataggggtcttgctgtgttgcgcaggctggtctccagctccagcctccgcctctgccaccacctcccaaagtgctgtgat

SEQ ID NO: 210698 - DNA, 531 bp, Homo sapiens
agtgaggtccccgctgactcctccagcctcactcctccaattcctgccctcactatcttgtaacacaacaagactcgtggcacagcacgtaagatgcagtttccagcctccatacttkgcccagctatccccctcccctcctgggtaggaagttttcctgacaccccaccaagaccaccacaagtcaggatcttttctgggcattgtttgtttgttttgttttgttttgtatcagaatctccctctgtcacccaagttggagtgcagcggcatgatctcggctcactgcaacctctgtctcccaggtccaagtgattctcgtgcctcaacctcccaagtagcttggactacaggtgtgcaccaccatgcccagctaatttttgtatttttagtagagactaggtttcaccatgttgaccaggctggtctcaaactcctgacctcaagtgatccgtccaccttggcctcccaaagtgctgggattacagacgtgagccaccgcgcccccagccatttcttggcattcttaag

SEQ ID NO: 210699 - DNA, 532 bp, Homo sapiens
tagaggatttattcaagaaacatstattcaatgtcttgtatgtaccagataattgcactaggtgtatgaatataaagactactttgatgtggtcccccatccccagcagctttatccagttgtatttttaaatgatcaatttctgagcttttcccacctagacatgggctccaggaatagcagctgtgcttgaccccttctgtatcctcagtgccaggcccaatgtctgcacacagtaaggtgcaaaatagaggagtgggggcaggtgggtctggacctccaagggctgagaggcttgtggtaatggactctggggcagtgccttagagcccccacctccaggcacactcacatttgtgtcctctttgctttgcagggtctccctgatgctcacgctgcctcctgtatgtgtgcagtgagccatagcagggagcctgggtgcactactcccctgtgctcttgcgcatgctcagcaatcttgcctagagtattcaaggacctaggagctgtgggtccaaatctctcactgaca

SEQ ID NO: 210700 - DNA, 492 bp, Homo sapiens
ctgtgtaatactttcttttaaaatacagtctcttctgaggtagacagaccacaactgcagagcatcgtcagacaggagataaatacgtccatgtacaacacgcagcaaaatgaggtagaaatggttacagcgggaggagaggatcccagccccagtctgggtagaggaaggggagaggccagctcggaagtcaccctccccactccctgcccctggattctttggtatgcctccccccarcattaccagagctggactggcccttcccctacctgccccagagcccatgaggtaggtgccactaggctgggggcagtctccttgtgcaaagctccccaagcctggggaacaggaggagcctagtagagaaagcggtggggactccacctcccagagctccctgcctcttgaagggaaggctgggatcccaccccaacttccctgacaccctccgcccacccccaccccccaatacatacacacctgagagag

SEQ ID NO: 210701 - DNA, 540 bp, Homo sapiens
ttgaaaggcactatggtagagtagaaagaacaaggaactgtactatttaaagggcaggcaaakaaaaggcatctatagcttataagatgtgtggatctttggatgtgacttggccatcctgagcctaagttgtcttgtaggagaaatgggaatgagaatattttcctctagacatcaagaggaaaagaaatataacgtgaaaacctttgtgaattgtgaatgtgttatacagagtagctaaaagaattaaaaagggagtgacaaaaaagtaaaaggcagctggctgctcagggcctccatggagggaagtaccttgatatggtcactgtggctcagtgacagctctgcagggacaggaaattgatttgttagtgcacccaaagttgaatctgctcctgagtactgatttatgggaaccaaacacacaagagatgaaggatgtgacaaccagaatgtccagcattagcttgtggggaaccacatacttccagtgactgaaataccatcctgttatcaagagatctgggaaactaaagtact

SEQ ID NO: 210702 - DNA, 530 bp, Homo sapiens
ctggcctcaagaattggagaagagggcattttaaagttcctatacctgaatgatcaataaatccttgcccatcttttcatggctcacaarccggaggtagtgccctttccactttcccttggcctagctctgggtactttgagcaggggcaggcagttctgaattgctgctcttactggccttttaagagacgctgcaagaaacataatcggttgtctccccaactccccacaggaaaacaccctgggagctctgctccatgtgttgcttaacttaatgggaagaggctgactgtcttgagtcaacacaacttctcataagacagaagcagcagggtttagagacatctgcttcagtctctttatccatctgctccatgtgtgttgatagctgggtcctgggtactaatctcagggccctgcctagcaggtggggaactgagtgaaagtttggtggtcaattgaaaggatgaatagagatgaataaggagagtgggccccgcatccccttagcctgaatggaagatgaga

SEQ ID NO: 210703 - DNA, 459 bp, Homo sapiens
tttttgcttgtcactgtgacatggggagctgttactggcatgtaattaccagaatccaaattatgctaggcctcctgcccagctttcgagtgcsccataacgtataatggttgaacccagaacccaactgtgtatcacatagagatgcagagtttcagcacagttttcagatacactgagtggttgaaaaatacaactactgtataaatagagagaagatcatatttcttttcatcagaagcttataagagtttttgtttgttttttgtttttttgttttgttttgttttttacctttttgggaaattgtgtcatcattagcaaaactaccagagttttaaagttgcccatagacgtcctacatccacttgcatttgtaactggtttaatgcatggtgattttacctataggcacaaatatctgactgcttcattatgtcttccattgcagttccacct

SEQ ID NO: 210704 - DNA, 515 bp, Homo sapiens
tttttataaactaactctcaaacatacaaaagacaaaaatgatctctaaagtctcactgtcttcctcacaaataatcaacaaagatacatatgcctctccccattaccaccacaaatgcaactgggagatgaatggctttccagggagtgatcaaatggctcagtgcaatgtttatctccactcagcgtttcactctgccacctacttcttcttataatcctccacaagatcctgcatgttattcagctctgaattctgtgatgttctttctgcagtgagcccatccagatatctcttgaggctgtcgatatacccctggaagatgggctccaggttgatggggcgggtgycaacattcatttgttgtagcagctcccatttggtctgtaacacctggttctgctgctccaagaaccgcacctgccatgaccagaaggagagcacatgagttctagatcatccttcacaccaagcaagccacgctggccaggggcagctcaggtgctgctccagg

SEQ ID NO: 210705 - DNA, 615 bp, Homo sapiens
tgccctcctacaggttctccaccctactctggtatctgtgctaacagctcaaagacatggtagaaaccattgtggctgacatcttcatttctaagatgaagacactgagttcagagcttgtcaaggcctcatgaataaagggtaacagagcaggagcccrgccccgcagctcctccacctcgccacaccagcctgacagcactgaatttcagagccagaaaaggcctcaggtagaccaaagtcaggggcttaataaatactgcagtcaacgctcaattacccataataatggaaaataggaagcaaataggagttgtgtcctttacaacttctaaatctgtcattgccacacttcccccagggctgttaaggcatcagaccaactgctcctcctattcacatccctgcagatggccaggaaaggagctaatagggtggttacaggggcaagatggtccaatccttgttttatcagactcctagtaaccacagcttgatgactgtcctgctataggacagactgcatttgcccaggtcctgccagctgtgcacccctccatggtgccacatggcaggtcagaagtgccaatgaggtggcatgaggctcctgccaca

SEQ ID NO: 210706 - DNA, 590 bp, Homo sapiens
tcctgtccaggaagggaattctcacatcccctctccacattgcttaagtatgtgtggcatgggttccaggtgcggttcctggagcagcagaaccaggtgctggagaccaagtgggagctgctacagcagctggacctgaacaactgcaagaataacctggagcccatccttgagggctacatcagcaacctgcggaagcagctggagacgctgtctggggacagggtgaggctggactcggagctgaggagcgtgcgcgaagtggtggaggactacaagaagaggtgagcaggacgccactccaggctggtctgcctcccagggtgaggctttcccagcaggcactgggatgtttgcctctggccttggaggtattgggttcatctgtccyagcaagatgagagccttctatgggcaacgaggcagactagacagtggacaaccagcctcttgggcagcgtcagggctgtcctggcaggtgatcccctccttggcatgctccttcctgctccctgttcaagggagcctgtattgtgtgtgccgcagcctcttggctcctaagctcaccactgtgcccctgagttccaaag

SEQ ID NO: 210707 - DNA, 630 bp, Homo sapiens
tctggattctccataggacgtggacgcagcttacacgagcaaagtggagctgcaggccaaggtggatgccctggatggagaaatcaagttcttcaagtgtctrtacgagggggtaaggctccccctgccccacctctggctctgtcttctggaaggacagatatgtgatgaacagtttcttacttatctgtaacttaagcagtccagggcacctccagcattggggtgctgagaaatttgtagatcaaaggtgggagtggccatctatcctggtgccccatccatccctgactgccctgaggatgtcctgctttcacttcctccaggaaaacagagtccttaaagggttcccactgaacttcagccaagcatattctcattcctgcttctcttctctctgtggctggggatgtttcctggggtcttgggcaggaatccccagggatagaggtaggaagtcctcataccccttctgccttctctatgtacatctggtttcaagcctcaacctattggccaagcatttctgggctcctgtgccccttagtgtcccatgtgtggcagccaggctgttgtcttccaccttccccactcctgtcctgtctcaggggacagacatatgggctgttt

SEQ ID NO: 210708 - DNA, 630 bp, Homo sapiens
tctggattctccataggacgtggacgcagcttacacgagcaaagtggagctgcaggccaaggtggatgccctggatggagaaatcaagttcttcaagtgtctgtacgagggggtaaggctccccctgccccacctctggctctgtcttctggaaggacagatatgtgatgaacagtttcttacttatctgtaacttaagcagtccagggcacctccagcattggggtgctgagaaatttgtagatcaaaggtgggagtggccatctatcctggtgccccatccatccctgactgccctgaggatgtcctgctttcacttcctccaggaaaacagagtccttaaagggttcccactgaacttcagccaagcatattctcattcctgcttctcttctctctgtggctggggatgtttcctggggtcttgggcaggaatccccagggatagaggtaggaagtcctcataccccttctgccttctctatgtacatctggtttcaagcctcaacctattggccaagcattyctgggctcctgtgccccttagtgtcccatgtgtggcagccaggctgttgtcttccaccttccccactcctgtcctgtctcaggggacagacatatgggctgttt

SEQ ID NO: 210709 - DNA, 496 bp, Homo sapiens
gaattctaaccgggggtaacagcaacagtcatcctggctataaggagagaggatctgaatccagtggtttctggtgagcacaggccaagaaaaaatttacgctacagtaacgggggtgctagaaggccttccctgcagagaggccagagagctgggcactccaagctgccatgccattgcctctggagggaagagaagttttgactgggtttcaggggtaggttcactgccaactgaccctgtgcacgaggataaacaacttgatgaccgagaagcttctagttacagtttattaaaattaaaataaaaataaagatcatgctcaggttgccctggaggctgcagttctttccacctctggtaggtgcttataccaggcttagaacagacacattctttggcaccaccacatcaacaggaatctaatgttgtccttgcctctgtagacagcaccacaggagtaggtsatgggatggcaagtcagctctcaaagact

SEQ ID NO: 210710 - DNA, 560 bp, Homo sapiens
atctgaaaaagaatatgacaccctctcataatatgcattccccactaggcctcctcatcccaattggtctccccactccagtgaggccaataatgagtccaacagaaccacttggccttaagtcatctcacacccacctccagataacacatcaccatgttgacttccttaaaagaccttagggataactcaacagcctctcttggccctgagtcaaggctcctacaacccttacagacttgacattcttctaaacacctactctaaaacctcctggctgcccttcctctcactccccaactcttaagtccactttgggtcataggctagatcactcacattgaccatcccatctttctctactaggccattctcacagatttccctaaagagaacccagcatgatggctrcattctggaaactagcatagtcacaaaaggaaccagggataataatgtagccttgggatgaattgcaagattcaaaactaggaaagcactcgccctttacctgagggttacccccattccatacagctgagtggtagaaggagaaagca

SEQ ID NO: 210711 - DNA, 622 bp, Homo sapiens
ttgaaatatttatttttgacggtgagttaagcctttataagaacctcctttcttttctcacatctcacaaggagtatgggctgtaagaggggaggcctgaaacccaacactacccactagggactcatctccccaggtaccccaactctgtgggcctggagtcagccatcctctccaccccaatcctcagaatccccaggtcggggtaatgaagatggaaggctgggagaatcctgagttaggtggaggcgaatgtgtcyctggttcatggcttccaatctgtctgggaaatcacccagacatataaggggcaaaaccaaccagaaatcttcattaattctggggagttgatggagctgttaggaaactctgtgggaggtgacagtgtgagtctcaaagggagtggaacctgaccttagtgatgggggatcaaacactccaccacccggccctcttttgcctgtgtctaacttgggggtacgtgctctgggccagatgctgtgttagaagtttatgttatgggtatctccattctacagatgggaaaactgaggcactgaggggttaaattacttgcttcattacctagctagtcaatggtacagccaagactcaaaagtga

SEQ ID NO: 210712 - DNA, 553 bp, Homo sapiens
caaccttcagtcttcatgccaccaggtctctctactgcagctgaaatgtgrtatatgcataagccattctttgcagtatcatcacaacagtaacttgcacatgttttttaaatccctacattccttaaaagtgtgcattaataggtttccagcttcattctggcacaacttggcaacttccttgtggatgtggtggataacccatgggcaggtccagtttgtcaagaacgtgaacacagtgctccttgatgaaatgaatctaaaaccaggagattctaaagctcctagagtggcaatgagccactggagagcaggtatacagaagttgtggtgtcattactatcttgttctagaaaggcagtgctgaccttacattgagtggtgtggaggcaggccagctgcagaaactgaggactgaggagattcaacattagattgaggaaaggcccctcttctccagatctcagggctcaggatagtgacaatctaacacaaaaccaccagaccaccatgtcagttgtgtgtattgtgtcatatataagagttccaggcc

SEQ ID NO: 210713 - DNA, 419 bp, Homo sapiens
atgtggtatatgcataagccattctttgcagtatcatcacaacagtaacttgcacatgttttttaaatccctacattccttaaaagtgtgcattaataggtttccagcttcattctggcacaacttggcaacttccttgtggatgtggtggataacccatgggcaggtccagtttgtcaagaacgtgaacacagtgctccttgatgaaatgaatctaaaaccaggagattctaaagctcctagagtggcaatgagccactggagagcaggtatasagaagttgtggtgtcattactatcttgttctagaaaggcagtgctgaccttacattgagtggtgtggaggcaggccagctgcagaaactgaggactgaggagattcaacattagattgaggaaaggcccctcttctccagatct

SEQ ID NO: 210714 - DNA, 617 bp, Homo sapiens
gtggcacacctcttgctccttcctaagtaagaaatgatatccctccatagaggacaaaacggggcgagttatccagaaaaactgcaatagaactacctgtgcaatagaactacctttgtcttgtactgtgctggtgaattgacagcacacatttcagggacgaccaaaggggatcattatgaaatatctccatcgaaggcktagtcaagtaatcacttagatactagttgaataaatgaatattgtgattttccatccttgaatggcagaggcatacacgggcgtgagagctgacagataaaggaatttttgtagcttatctagtaaagaagtctcaagctaggcttccatgaaaacagtttgatgaaacccctaaaatagtatgcaatagatgactattaataactgtgtattttttctgaaaatgttacatttattccagaaaattctctacaaaatttaataaccatatattacatcaaaatccttcattttataaacaatgcctaaggaaactaagtaactgcctccaagcctatcagctgattagcagcaaagttatgactaaaattcataatatccgaatctcaagatagctttctttccactatagaccc

SEQ ID NO: 210715 - DNA, 425 bp, Homo sapiens
tttcagtatgggtacgtctcttayattcccagtgccttaccatagtctaagcacttaataaataagagttaacataagctctgtaaagagtttattcataacttgctttttcacaagtagcatttctgaattttatttcactcatgtatttattctgtttgtgcccatattttattttgtgatttgtaactcaacacacttgtgtgtgagagagggtagaaaagggatgagagatggggaagatgggccgggagagaaaattggtatattagagttcagctgtaagtgattttgacatcactgctttgccagtgttctttgtttcttcaatagatcattatttctttgatatatattacacaaatgcctactgcaattaatggcatgaaatacgtacgtaatgatgacagatgtctcagttttta

SEQ ID NO: 210716 - DNA, 591 bp, Homo sapiens
ccacgctgtcttccaaaatgccaactatatatcttaaatgataattttatttaaagagataatacagaaaattggggaaaacccatcaagaatgaagacaatcaaaaaaccatgaaactttgtgtgatttagaaaagttaaaggaagctataaagaaaaacaagagaacccatggtacttcgaatttacaaaagtctatttcaaacagtaattttaacaacatagaactacatgtcttagcctagcaattcctagattgcttctacactgagtaatgtgtacatactcataattttgtcactgctgtttacttcttttttactgttgactcaacatacaaacaaatcacaagaatcaaagtcacaaactgctgtaaaatatgataaaccttgacagtatgaaaataataatataattaaccaacttggcagttcacaaagggatgaatgaaagaaaaataaatatgaatgctaaattcttcatctttcacagcaggatgtccagcaatagcatctraagacaatatatgaaaaaaaataatggtttatggaatcaagaaattatcctgcttttcttctaagtactgcacca

SEQ ID NO: 210717 - DNA, 378 bp, Homo sapiens
cttggtgcattttcagctctgccacaacatgagctcccgaagacaggcctgggcccaccccctccaccactgtcttctgggttcctagcacggtgtctggcacatgggagacccasctttactgaatcaatgatgggcttactccccacttggtaaacacaccatatgtactcatatctccacacttttgcctgagacctttcttctctcctctgaccatctaaattgtctaaccatccttcaagggccaggccaagttccctcacagggaatcagtcaccaaacacaccccagatagggacaagagattcacagagttctagagacacagctgggcagtgcccaaactactttcctgatttaaaaaaaaatctcttc

SEQ ID NO: 210718 - DNA, 544 bp, Homo sapiens
ctgtttttttttttttcctcttggttttcagtgcctcctgctttgcctatgagtgttttactgaatgccagacatcatatatgcaaaagatatagacgctctgggctgggcacactggctcacccctgtaatctcaccactttgttaggccaaggtaggggggaggatctcttgagcccaggatttcaagaccaccctgggcaacaaagcaagaccccatcgctacaaaaataaaaattaactgggcgtggtggcatgtgcctgtagtagtcccagccactcagaaggctgaggcaggaggatcccttaagctcaggaatttgaggctgctgtgagttatgattgcaccacygcactccaacctggatgacagatcaagaccttgtcttaaagaaactctggatggtgattttttctagagaggatataattttctggcaggcagatggggtacagttggatcaaggttgatctatttctgctttgcctttattcctagaaaatatccctagggtctcagctgagagcctatggtgtttaccag

SEQ ID NO: 210719 - DNA, 595 bp, Homo sapiens
cccattatttcctagcctgcctgtaagggttttgctgagaagtctgctggtagtctgatggggttttcttataggtgactgaaaaaggttttctttaattaaaaccagaaaggtgtttaaggaaaaaataatagaggttcactaaattcaaggattcatacattattatctctggatgggacataagaatggtctattctaaatggttccaactcctacacattttatagatggaagatggaaatacggacatgtccaggctacaacatagtttacagattaactatacatcaatttcttggcttgtaatacacgtagtgaggtagagattttattatatatgcaggattacttgaaccattatagcatcatagctgaggtttccagtgagtaaaactcaaaatatagcaaaagtctgaatatagaaagaagtgtataaatgagtagaaaaataattaaagcctctgaagtggaacaatattaattctgatgccactaagttcaaattcaagagaatacagacakagactgggataatactttcctcaggaaaactttgttgtaaaataactccaatttaatagttttcaacagg

SEQ ID NO: 210720 - DNA, 627 bp, Homo sapiens
aacaacaaaataaaccccaaaatgataagacagtcactgaaatacttttctctgaataatatgcctttatctaccatgaccagaaaatattatctaaagaaattaagattgtgaatcttcttcataattaggcaaatattttcatttcctttttctaatttctctttgatttaraaaatgtattttctttcaaattaaaaaaaaaaaagggggccaggcatggtggctcacgcctgtaaccccagcactttatgaggccgaggagggtggatcactcgaggtcaggagttcaagaccagtctggccaacatggtgaaaccccatcttcactaaaaaatacaaaaattagccaggtatgatggcaggtgcctatactcccagccactcgggaggcttaggcaggagaaccatttgaacctgggaggcagaggttgcaatgagccgagatcatgccaccgcactccagcctgggcaacagagtgagactccatctcaaaaaaaaaaaaaaaaaaaaaaaaaagtagcttcttttataaatgaaatagtctaacttagatataattgtttttgatgagtttttttttaaagctattgctaacactattggtaagcttttgctaacattat

SEQ ID NO: 210721 - DNA, 586 bp, Homo sapiens
agcatcccactaacaaaagcacttttatcagaaaaattaggttgtgtctatgagaacacacattcatctaacaaatagatgcgtcttactgtccatattattctgctacttggggttcttcaaattttgttttccaagtggttatttttggtatctaaaatttttcagacaaaagcttcctaaatggatagtgatgattcagtgccacccctatcatatagtttcrtgtgtaacttgtgattttcataacaaatgtttatcaactatcaacttgagtcctcattaaatattttccatttaatagctcataaaatagtcacatgagtaaaatctgccttcatcaagtaccattacaaagaataatattctattataataatattctatccagaacctaatagttaggcattgctcctttgaatacatttttttaaaaaattgctgtcaggaacaaataggtagacagaatggacttctgtgataaaagtaaccatgaagattaaatgttttatacatattacctagtcacctaaaagccacttttgcaaaatgattaaagagttttatcagtgaagttaaaagataa

SEQ ID NO: 210722 - DNA, 566 bp, Homo sapiens
taattgccctacatagacaatgtacatcctttgtacatcaaaaggaaaaagcagtgactcaaaatagagtaccctagggaatatgtttactgaaattgctcttcactaattacacatgcttgtttgttccttctttatttatttcagaattcaaatgggaagaacatcacagaaatctgggtcaactctaaactttggttttctcataggatctgtgttaytaaataagttattaaaaaaaaatcttttgtttgcaaagcagtgataaatcatctgtgaaggtgaatcgatctttcaaaagtgaccttttccatgctaataagaactattttatattgccccgtctgaaaagattaaaacctggttatttctcaggtgaactcagctaagactcagtctccctctaagccaaaacctcctttctcaagcaaggctcacttcaacactgtatgtttagaaggaatgcagccttactcctaggtccatttaactccatataaaaccatccctgtgctttaaataatacatgatgttaaagattgtcactgtggttataaaatttaaaa

SEQ ID NO: 210723 - DNA, 538 bp, Homo sapiens
aaatttcatcttctactatagatatgattgattcgctaacatctaaaaaagattcagctagtcagaattgctgtctctttctagcaagttttcacttttttttaagcagtaataagcaattccatccccaatgcggacttagaatcccaagccaacaagtgcaagtctataacaaacctgcatgacacacagtagaatctcattggttcacacccttgcaaaaaccacaacccctcaactttcaaaaaagcaaaggcctctttacctaagtgcacattagctgctggcttaggcaggccttatgacatggctgcctccccagtgggcaggcgtaccacagcaaggcactcattaagctattgagtttcattccagtaaccgttcaaatacattcttcattgtaccataaagtatgtttgtttgatgctagaactttgattttcctcctccttctctttttmtatcccccatccctaccttctcaaccattttggtatttttttttttttctcccatgctaacacactcacaaaaatcc

SEQ ID NO: 210724 - DNA, 652 bp, Homo sapiens
tctcttgcttaaagtttcactgatgaatgttttttcatatttggtgcctgcctttggaaagatagctgcaagcaaggaacactcattaactcagttatatamggggggaagcgttgaagaaaggcaaacttttcttaccgatgtaaagacatttttggaactgttaaatctctagaggagaaaatgattttgcaatgcatattccatgccttgtagagtctatcacaaacacagccactgacgtttaaaggtactatttaagaaaacacagctggtaggcataatatttaaatattgccccgacgtgatgcccggcagctgctgctgcataacatttgaagtgcataatagtcaaagttagagccgtctccagggaagtgttcagagagagtgaactgaaacttgttctctagtcttttctcccggatgggaagcaatgacgtggggagagagcgcggaggaagggagagatccagaaaggtagattcttctgtgtaggtgagtggatgagataatgaagcaagttaatttgggctctgctgacttatttatctgtcccgggcacttttctctgtacaagcacaggaagccatctccttcctgaggtttttaatgaaacaatttacttgaaataataataaaaaagaagagc

SEQ ID NO: 210725 - DNA, 446 bp, Homo sapiens
aatgagtgactgtcaaaaaaagagaatcagtgaaaaatgactgggtggtagtgacataagatagaaaaatagaaaaaagatgagcagaaaaataaatctgaygaggctttttatatgagacaatagtacttttgtgtagttttttgtttgtttgttttttaaagaaatgtcattttctaaccctatgtgtcaagatagatggctacgtgttgttttattagccaggtgtggtggcatgtgcttgtagtcccagctactcaggaggctgaggcaggagaattgcttgaacctgggaggcggaggttgcagtgaggtagaggctgtagtgagttgagatcacgccactgcactccagtctgagtgacagagtgagacttggtctcaaaaaaacaaacaaacagaacaacagcagcaaaaaaagatagactgctatgtgttgttttctg

SEQ ID NO: 210726 - DNA, 374 bp, Homo sapiens
aaaaaagatgagcagaaaaataaatctgacgaggctttttatatgagacaatagtacttttgtgtagttttttgtttgtttgttttttaaagaaatgtcattttctaaccctatgtgtcaagatagatggctacgtgttgttttattagccaggtgtggtggcatgtgcttgtagtcccagctactcaggaggctgaggcaggagaattgcttgaacctgggaggyggaggttgcagtgaggtagaggctgtagtgagttgagatcacgccactgcactccagtctgagtgacagagtgagacttggtctcaaaaaaacaaacaaacagaacaacagcagcaaaaaaagatagactgctatgtgttgttttctg

SEQ ID NO: 210727 - DNA, 446 bp, Homo sapiens
aatgagtgactgtcaaaaaaagagaatcagtgaaaaatgactgggtggtagtgacataagatagaaaaatagaaaaaagatgagcagaaaaataaatctgacgaggctttttatatgagacaatagtacttttgtgtagttttttgtttgtttgttttttaaagaaatgtcattttctaaccctatgtgtcaagatagatggctacgtgttgttttattagccaggtgtggtggcatgtgcttgtagtcccagctactcaggaggctgaggcaggagaattgcttgaacctgggaggckgaggttgcagtgaggtagaggctgtagtgagttgagatcacgccactgcactccagtctgagtgacagagtgagacttggtctcaaaaaaacaaacaaacagaacaacagcagcaaaaaaagatagactgctatgtgttgttttctg

SEQ ID NO: 210728 - DNA, 403 bp, Homo sapiens
gagtttatggtggggtttgacaacacatagaaaaaatatgcacccttttcaatcctaaaagtgagctcaagttcattataccatttgtggggctaagggctcctttctattaggtgtagttcactactgtctttaattttagtcttaattctgggtctatgtttttctatcattatactttccctyatttcgaagacttcaatcttttcttgactcaggaaatgaaaagtggatgaagctgggaaaattgagggactgtaggaaatttaacggatagattgtgaatatttatgaattatttcacatcctctcttctgtttcttccttgtcaactttcttctacaaatgttttgctaaggtagaaagaccaatcaatttcaatatgaaatatgtaaaatgctgt

SEQ ID NO: 210729 - DNA, 567 bp, Homo sapiens
gaattcctatgctcaaacaatccacttgcctcagcctcccgaagtgctgggattacagccatgagccaccccacctggccaaaaatatcacgaggcctttttttcttttttttaaatttgagacttcctggaaaactaaatgaatgtgtgaatgtgtagagaatgactcactcttattagtttgtgcagtaatacacagggttgacttacatatgtcaaggcagataatgtaagtcttacaaaacatggcgcagtaacgactcaaaggacagaagcccggagtaggtacagacttggccttcctctcagaaggggcctgggtccatcagagasaaattcctacctattccttttcccactgggatgaattgtggtttctgagaagcattaacaatgtgtgccaaacataagagctcagaggcagctgtttaggacttgttagttatcactagctgccatcacaaatggccataaatttagtggcctaaaacaacaacacttatgatctcacaattctttaggctggacatttgttaggctcagcttgtttatctgctgtggatgccg

SEQ ID NO: 210730 - DNA, 553 bp, Homo sapiens
ggctgaggcaggagaatcacttgaaccctgggaggtggaggttgcagagagccgagatcgcaccactgcactccagcttggtgacagagtgggacacttcttttaaaaaaaaaaaaaaaaaaaaatcaaatatattggttccctttgtctccaaaatcaaggtcaaagtaatgtaattttcaaacacaatgattttcaaagtacaatgcattactttaaaaaactgtttgtatactctctaataaaaatctaacaaaatgcttttaaagagaatttcttcgaaaaacaatttaaaaagataaatacaataaaaaggattattttatcaacccagaatttcactaaaaatagaatatccaagtaaacagccaaccaaattgtaaaactttgatcaaatttgttagaaatcaaaaatgcaagttaaaatgaataaaattcttcacctattaagttgttaaataagaaaaataattataatagcagcattgaccattatgggataagggaaygggccttgcacatctccagtaggaagaagaaattagtgcagtct

SEQ ID NO: 210731 - DNA, 566 bp, Homo sapiens
tcaaatcttaccaagaagaactttatcaacatatagttagaaagaaaagagagaaattacagtaaattttacattaactaacyctcaaaattctttattctaccaccaggaggcctaattctaaccagtttcatctccctacccactaggcttagcaatatctctatttcccaaatatttcccaaacatctggactctgaattcaaatatacctagaatttggatcctggatttttcatttactacttgcagggccatggaacaacttcttgaaagaaaatttttgcaaactaagcatctgacaaaggtctaatatccagcatctataaggaactaaaaaatctaatagaaaaaaacattgtggtgattcctcaaagacctaaagagagaaataccatttgaccctccaatctcactactgggtatatacccaaaggattataaattattctattataaagacacatgcatgcatatgttcattacagcactattcacaatagcaaagacatagaatcaccttaaatgcccatcaatgatagaatggatacagaaagtgtggtatg

SEQ ID NO: 210732 - DNA, 566 bp, Homo sapiens
tcaaatcttaccaagaagaactttatcaacatatagttagaaagaaaagagagaaattacagtaaattttacattaactaactctcaaaattctttattctaccaccaggaggcctaattctaaccagtttcatctccctacccactaggcttagcaatatctctatttcccaaatatttcccaaacatctggactctgaattcaaatatacctagaatttggatcctggatttttcatttactacttgcagggccatggaacaacttcttgaaagaaaatttttgcaaactaagcatcygacaaaggtctaatatccagcatctataaggaactaaaaaatctaatagaaaaaaacattgtggtgattcctcaaagacctaaagagagaaataccatttgaccctccaatctcactactgggtatatacccaaaggattataaattattctattataaagacacatgcatgcatatgttcattacagcactattcacaatagcaaagacatagaatcaccttaaatgcccatcaatgatagaatggatacagaaagtgtggtatg

SEQ ID NO: 210733 - DNA, 413 bp, Homo sapiens
tttcaattttggataattttacaagaagcagagcagaggaaagattcttttggaaatattcactcctaattactgttatctgaccaaacaaaacttaatacagaccaaatgacacaaaatgtaaatgactaggactccagtcctgggctctaaagcagcaaagccrttggcttcctagtaaggagctgataaatgtgtgtgccaaacctaaactgtcatcatcttttcctattcaccagatactgatgagtgtatatctctggtgtcccttattcctgtctttaaaaaaaatgcttccttaaaatattcaaagtgtgtaatttactttctaaaattataatggcattctaatttggtacaaatttttctagggttcttacattataaaaattgagaaaatgagacatagttat

SEQ ID NO: 210734 - DNA, 592 bp, Homo sapiens
acaataataatataataagtataaaatgagaatagtagtagtaattatataattatataatattatataattatatataatattatataataaaataataaatatatttattaaccataaactgagaataataataaataatgataactaaaaagtcatctagggaggagattaattatttacggaatcccaaagaaggctttgtagcagcatatttgatccaagacttgaatgctaaataggatttaacatgtagaaatgaagcaggagaggaaagaatagaaatgttcttttttttatttgtacacatttaagggttgaaagtgcaattttgttacatggatatttaatttagtggtgcagcctgggcttttagtgtaactgtcactccaacagtgtgtattgtagccattraataatttcttattcttcacctccttcccaccctgccaccctttcgaatctccagtgtctattattccacactgtatgtccatgtgtatacactgttcagctcccacttctaagtgagaacatgcggtatttgtcttcgtgtttctgagttattccacttaaggtaatggcctgcagt

SEQ ID NO: 210735 - DNA, 604 bp, Homo sapiens
agttgttcctctctccggtaaattgcacagtaaaaagtgacctctcgtggtcctcccatatttttcattgtgtttagtgcaataccataagccttgaataacaccatgggacccatacgaagtgccaatagtgatgctggaagtgctcccaaggagcaaagttgtgacattacaagaaaaagttgaatctcttgatatgtactatagattaaggtctgctacagtggttgctgccatttcagaaatacaattcatcttgaaacagatgaataaacttctggtattcacaagtacagggttattggaaggtattttctcttccttgtattttcttaataacatgttcttttctcttactttattgtaagattgcagtatataatacaaaatatgtattaattgactttatgtaatcaataatacttctggtcaagggtaggctgttggtagttaagcttttggggagtcaaaagctatactcaaawttttgactgcatagggagttgatgtccctaactccggcgtcgttcaagggtccactgaactgtttattaacttgcatgctccagtaggaaaaggcaacattctgatcacttctcagtat

SEQ ID NO: 210736 - DNA, 588 bp, Homo sapiens
agagaaggaatataggggatttgggagaggtggggtattggatttagattgtggatgtacaaagtgttaggaggttaaaaatctggtagagcagtgtgcttgataagattggattgttgaggtgaatggaatgaaggcataatgttgggttctcaggagcaacgagggaatagtgattatatgttccatataatagactcctttttgtcaatggcctgtaagttactttactgtggtcaytgagaatgctgtaggggtttgtaggtgagagtgagtaggaaaggtggttttaccaagaacacaggctgttctctgggcctctttaagtctcatctaagatggtaagactgtaagaaaacattattacttgggccacaacagaaaattccttgtacaaagccaacataaacgcattatcaaaacctaacaaagacacacacacacacacacacacacacacacacacacccctcctatgaccagtcatacttatggataataattcaaaatttttaaatgaagcatacgtagtagatataccattgtttttttttctttgagaatgatggatgttcaaataggtttttt

SEQ ID NO: 210737 - DNA, 539 bp, Homo sapiens
tgcacttaactttcaaaatattttttttcctttgcaataaattactctatgttgcatctcttttcctgtgtgttgcttgtgtaaattatttcaaactaagaagaaaagaatcgaggtctcacaacaggcatcaatacccaaaggtaccacccatagcttctttttgctgaggtccccttaccctggctgtttgttttgtttcttatttttattttttgggaatgagctcttcaggggactttgacctgttgaacttcttcttgatcatccatttttctctcaggcaactcgtgcatcattgcccatctaaattatgaaagaatagctgccttctttgctgtgcttttcttgtcctgacattgcaagcagctcacagsatggatttttgcatttgctctagtcagccttgagtcagacaccagcttctttgcttctcacacaataggtagctctacaggtggtcttctcgaatctcctctttttagacttatggcaaagaggagtaggtgggagaatgcctcaattatccagctttcaca

SEQ ID NO: 210738 - DNA, 602 bp, Homo sapiens
acaaatttaaaataaacccttgaacacgaaatatttacacactgacagttacttataaatttatgttacayggtttttatttttgtttaaatatttgtttgaatattttaaacagaaaatacgtgatgtaagatatatggtataaactttctagaagaaatttggcaagaaaaaaattcttctatttatgaacagataagtttctgaaagattgtgagtccttttgttcctccatgcaagttataaataatggcatttgttgacaccaagaagagttctgatactttttgtgtttattcatagttttatttatactcgcatgtaattaataagatttaaaattttaaagttttgtattttctgaaattatttcaaatgaataatcttggacttatctttccattttgtgcaaaataatttggtaattgaaaaaggaatatgtctaaagatttttatcacaggcattctatttaatagtgacaaattggaaatgctatgaaagtccatcaaaattgaattgattaaatagttcatagtatagctattcatttgacaaagtatgcagtaatagtaataaaaatataagattttatgttataata

SEQ ID NO: 210739 - DNA, 593 bp, Homo sapiens
acccattatcagtaattatcaatacatctaatcttttttcatctatactcaatatattttttcctctctccgtctgaagtattttttttttcagacagagtctcgctctgttgcccaggttgcagtgcagtggcacgatcttggctcactgcaacccccacctcctgggttcagtctattctcctgcytcagcctcccctgtagctgggattccaggtgcacaccaccatgcctgactaatttttatatttttagtagagacagggtttcaccatgttgaccagtttggtcttaaactcctgacctcaggtgatctgcctgtctcagcctcccaaagtgctgggattacaggcatgacccaccgcgcctggcccatctgaagtactttgaagcaaatctcaacttcataaactttaacccataaataccttagcatgtatcactaaaagataaggactctctattttttataagatctcatcatgtctcaaataaattaataatttattaatatcatcaaatatccatttagttcagattttcccaattatctctaaataagcatatgtgttttctaaaccactagcttgttt

SEQ ID NO: 210740 - DNA, 564 bp, Homo sapiens
aggactctctattttttataagatctcatcatgtctcaaataaattaataatttattaatatcatcaaatatccatttagttcagattttcccaattatctctaaataagcatatgtgttttctaaaccactagcttgtttgaatcaggatcctaatgatttttacattttatgtgttatgtcttttaagtactttttaatttgtaagtttcttctttccctcctttacatcctcctcgctgttgaagaaactgggcttgtagagctgtgcttctcaaatgttaatgtaactgtataacctaaggagatggttaaaatgcagattatgactcagtaggtctggattgaggccagaaagtctgcatttctaacaagctctcacgtaatgccaaagctgctagttcataggccgwactttgagaaacaagacgtagaatatttcacaatgtgtattttgcttattccatcttcttaatgtaatttgccatgttaactctgtactttgtgacaccctgtaaaacaataaacctagagtaatggttcttgacattggactcacaatag

SEQ ID NO: 210741 - DNA, 592 bp, Homo sapiens
tatttctttattcccctcttacttgacttctctgcagcatgtaagagtaaaccattgtctcctttttgacactgcttcctctccaggcttataaaataccattttaatttggtatctctctcacttctctgaatctcctgtccatatttctccctctctaccttgctttttaatattggggttcccggggctaatcatggacctttcttctsatctctctctgccatcaccctgtatgtaataacataaaatccattggtttttttggaagaaaaccaaagcaccattaagcataaacatttattcagaagaccaagacatgtgattgggaggaagagcagaattcttaaaatctttagcaaagaaggcatctgaagttcaactaagtttcaggaatagttggtaaaattgattctcaagggagagggatggttcttgtggtttaatagccactggtttggtaatttgagtttgagagggtgggaccgacagttagtgggtaaggtcaaattcaagagcgggtaggaacaaagagctgcaggttccaaggggatgcaatggacctagtagaaaaatgttaatccctctaggt

SEQ ID NO: 210742 - DNA, 566 bp, Homo sapiens
tcttaagggtgttcatgtggaagaaggaattaagcttatctgctccagtgagcataatgagttccgatggttggaatttacagggaagcagatttcagaactacatggcagctaaaactgttgaaaaaagaaagagctgcctcatttggccattctttgaaaatagctactatgtataatgtcagctcaatgcaggccactcttagacatttgacgtgatcctaattcatttcattcttacagtaaccccaagtaatataggtatcattacatctctatttcataaatgaggaaatgagtttaaaagtttaactcttcactgtcttatccaaggccactcagcagaagcagagccagtattctaactcaggtccactgatttccctactggggctgttgacatcatgtacacascctttccatgaaatatgcaacagcagttatgaggaatattgtgacaaactggatttacagtttgttataagaactaagatttttgaaatacttggggagaatactctttgtattcccaaagcttttcacaatgcctggatcatacttcattt

SEQ ID NO: 210743 - DNA, 615 bp, Homo sapiens
gtgtgtgttggacttaaggttcacaaaagaggcaggggcttatactgagtatgattaaaatattagcccctcaaactccaggggttttgtctgttttgatcactgttatcccagctgttatccccagggagacacagagtagaatcgtacaagattaataataaaaatatataaggaccttmaacaacttaacagcaaaaatgaaacagttcaattttaaaatgggcaaggtaatcgaataaacacttctcaaaagaagacatacaaatggtgaacaggcatatgaaaaatgctcaacgtcactaataatcagagaaatgatcattaaaacaacaatgagctatcatctcaccccagttaaaatggcttccatcaaaaagacaagtaataaataatgctagggggggatgaaaaaaaaggtcacccctcgttcccggtgagggggatgtaaattagtagagcccctatggaaaacagtatgaggatggtcaaaaatctaaaaatagaactgccccattatccagcaatctcactgctgcatatagatccaaaagaaaggaaagtgaattattagtgagatacctgaaataccctgattatttcagcactattcac

SEQ ID NO: 210744 - DNA, 535 bp, Homo sapiens
agaatatcaaagcaaagaaatctaagagaaattagaagtatagtcaggactatccatttcttcggggaagagcaaaaaaagaatttattctccttagagggtttttggtgtttwtttgttgttgttgttgttgttgttgttttccagaaaagatacagtttgatgtactcaaagaatacaaatgtttaggaagggaaaggaacaaaattatttttaaatggtattatataactgatcagtatgattggaaaatactttaaatgcttataaagcacatttttctattcctaaaccacagacatctcttatatatctgttggagggcaattttaactcatgtttaaaaatggaatggtcagaaatgaccattatgactcttacaatctaaatctcatctgttttaaggctctttacactctgcagacactttatattgttaaattacatcttttagtcaaatcttattcatgccttactatcatctgtagatctgcttctgtattaatcactttcaaatttatattttacacttaaa

SEQ ID NO: 210745 - DNA, 535 bp, Homo sapiens
agaatatcaaagcaaagaaatctaagagaaattagaagtatagtcaggactatccatttcttcggggaagagcaaaaaaagaatttattctccttagagggtttttggtgtttatttgttgttgttgttgttgttgttgttttccagaaaagatacagtttgatgtactcaaagaatacaaatgtttaggaagggaaaggaacaaaattatttttaaatggtattatataactgatcagtatgattggaaaatactttaaatgcttataaagcacatttttctattcctaaaccacagacatctcttatatatctgttggarggcaattttaactcatgtttaaaaatggaatggtcagaaatgaccattatgactcttacaatctaaatctcatctgttttaaggctctttacactctgcagacactttatattgttaaattacatcttttagtcaaatcttattcatgccttactatcatctgtagatctgcttctgtattaatcactttcaaatttatattttacacttaaa

SEQ ID NO: 210746 - DNA, 379 bp, Homo sapiens
ttattcacagaaatattactatgatcacggaaaatgtcattaacaggattgggttgggggagggaagctgcacctcttctggggtgctagttgttattgaggaggtagtcctaagtttatgtggtagggaacatgggagccagagtagacagatgaaggtagaagttaaagtaacagatcagttttagcaatagaagatggcctttaaattttaaaaggctactaataaatctgagatttccagaaattcaggacatacaggctgataccagccacccattggaygagattaagcctctttgcattcatacatctcccttccctgtaatattttttgtgttatttcttctttgttcttccagtttgtgttcacatcatt

SEQ ID NO: 210747 - DNA, 578 bp, Homo sapiens
ccatcaggggaacaactaaataatggcaaagtattttagtatattttttttcaggctaatgatatggattttcatcttgctctagcatatttctatttaaaacaccattaggaaacatttctccatagatcccctagatcccccagggacccccatcctccatagatcacccacaaaaatgaattgatgtrttatttggaaattctttcattcaaaaatatttattgagccctgactctgtgccagatattgttggagcacttaggatgcatcagtgtccaaaacagactataatctgttataaaatatacagagcttacattttgctgcatgatggtgagataagcaataagtagtaaacataataaataaaatatacactttgtttaaaagtgatagatgctttgaaaaagaaagaagagcagctaagagggtacaaaaccactgtgaaagtaggtgggttgcagttgaccaatggatgatgactttaagattatattaaacaatatactaggaagtcaacaaatgagaccagaactaggaaaagactgcattcaaatacaatgaaaaaaaaaatc

SEQ ID NO: 210748 - DNA, 629 bp, Homo sapiens
ctaagtaaaggataaaatatttaatccataaatgagactcacattctaaatcctgctgtacacaaggaaaakaaagctagtattttatacttagcattttttcaaactatttagggattatccagacagatatttacagtcttggatatgatgcatacactcaaggtagaatttataatagtttatgaatacttactatgagcctggcacagtgctagctgctgtaattactaaaataaataaaattaatttcctccctcaacaatctttggttatagttgatgaagcagacatgtatgtagataattatgacacaatgtagagacaactaaagtatgatatattattaccatgacaatcagtgcttccagaataatattgaaaacaaaaactaacatgttacaattcaatttcaaacccttgagtattttttttctattgtttaatagataaaggtcaacttcttcatgagctcttctgtgatctggacctggaatacttttctaaacctatttcttaaaagaaccattttaataccccatacttcaaccatgccaagatactatgtttgcatcttctcttgctctgaatttaattacatatgaaactattagatatatcagcatatt

SEQ ID NO: 210749 - DNA, 629 bp, Homo sapiens
ctaagtaaaggataaaatatttaatccataaatgagactcacattctaaatcctgctgtacacaaggaaaataaagctagtattttatacttagcattttttcaaactatttagggattatccagacagatatttacagtcttggatatgatgcatacactcaaggtagaatttataatagtttatgaatacttactatgagcctggcacagtgctagctgctgtaattactaaaataaataaaattaatttcctccctcaacaatctttggttatagttgatgaagcagacatgtatgtagataattatgacacaatgtagaracaactaaagtatgatatattattaccatgacaatcagtgcttccagaataatattgaaaacaaaaactaacatgttacaattcaatttcaaacccttgagtattttttttctattgtttaatagataaaggtcaacttcttcatgagctcttctgtgatctggacctggaatacttttctaaacctatttcttaaaagaaccattttaataccccatacttcaaccatgccaagatactatgtttgcatcttctcttgctctgaatttaattacatatgaaactattagatatatcagcatatt

SEQ ID NO: 210750 - DNA, 551 bp, Homo sapiens
agtttacttgaaatgtcaggagaaatcctgctaggcaagagcagatatagtatatctcagcagggtataggccttacctagttgtgaacatgtattaacaaatgttaaatataattaagagctaaagtaaaacaagaaaaatatgagcatgcagtcgtgatagggaaaatcccatttcttattgctatgatctgatcacatttcccatagagtataaaagacatgcaatttttgagcatgtcacagtaatattaataaatgatgttccaaagcttgtctcctgagaggtcattcagtctttaccattgaatagttttgcttttgccaaatgaaagcagattgttacatgattaggtgaatgtgtgtgcgtgcacccatgtgggtggtttatatgtattatgtttccagccttctgtgaatcctgtacataatagaggtctgataaaacatgctgtagtcccaytggacaatccacagtgctcagtacagatacttccctcttctaagaaacaagtacgccgtgggactttgatttgaaccatgtatttgac

SEQ ID NO: 210751 - DNA, 550 bp, Homo sapiens
tgtcagtgggagagatgggtctatccataggattcaggaaaacatgcacaggtcccgggagtggcagtgccaggctggatgggtctgtcctcaggccccccagtggggtacaggggcagaggctacagtgggtgaggtggtccactccaggcccccagatagccctatccagacccctagatgkcccatctgggaaccaacagtggtgggcaaaatgggcctctcctcatgtccctggatctcactcaggcactgatggtgggttggatgaccttgttttcaggtccccctactgtgatcatgggcactagcaaaatcaggtgtagtgagttgatcccacaggcctggatgatgtgcatggccactggcagttgcaatgagcagatgggccactccttaggttatccctatggtgtccaagagcaccagctgtggctggtggattgggttgattcccaggttcctggacagcatgctggggcagcaggggcagcagtgggcagggcacacctgtcctaaggtttcagaatggcaactgtgtggacccacc

SEQ ID NO: 210752 - DNA, 621 bp, Homo sapiens
tactaaatgttttggcagacatatgcattttctttaacttcacaatatttctctgagttaagtagtgctccattttacagatgaaaaatcaaaagcaaggagtagttaagaaattgttccacctaataattggtagagctagaattttctttgatatatacacagtaataagacagagtccctttatttgagtaactctctaaaaggaaaasctataaaattgtggaaggtttatgctaaaagtaagtacaatcggtatatagcagagactcttggaaggaattgttaataaatgttaataatacatgaaaagattcaggaaagttttcatgaattttgtccaagacaatgggtctttaacagtgtactccaggcagagaagtgtgagagggacctagaatactcagacattcggttgagagagttcaggatttgtagagagcagttgtgggaaagccaaagcagattagagatacagcaagggaagaaggcacgctgcaacttgtgggggctgtactgaaggccaagacagcagttctcaaagtgtagtctgtgaatccctgtgtcccaggactcttttagatagtctataatatcaaagttggttttagaatactgagg

SEQ ID NO: 210753 - DNA, 621 bp, Homo sapiens
tactaaatgttttggcagacatatgcattttctttaacttcacaatatttctctgagttaagtagtgctccattttacagatgaaaaatcaaaagcaaggagtagttaagaaattgttccacctaataattggtagagctagaattttctttgatatatacacagtaataagacagagtccctttatttgagtaactctctaaaaggaaaacctataaaattgtggaaggtttatgctaaaagtaagtacaatcggtatatagcagagactcttggaaggaattgttaataaatgttaataatacatgaaaagattcaggaaagttttcatgaattttgtccaagacaatgggtctttaacagtgtactccaggcagagaagtgtgagagggacctagaatactcagacattcggttgagagagttcaggatttrtagagagcagttgtgggaaagccaaagcagattagagatacagcaagggaagaaggcacgctgcaacttgtgggggctgtactgaaggccaagacagcagttctcaaagtgtagtctgtgaatccctgtgtcccaggactcttttagatagtctataatatcaaagttggttttagaatactgagg

SEQ ID NO: 210754 - DNA, 490 bp, Homo sapiens
taattcaaaccttcagataagtaccaagaattagaaacaatactctcatacacatttcatctagattcaacaattgttaataatttttttcatatttgcttgtgttctctttttgtctatattaatatatattattattttttctgggacacttaagactactgtgtatccatgataccygtttactcctaagttctctattttatccaagaacaaaggtattcacttatctaaccacagtactattatcaaaatcaggaaatgtgatcttgacataatattcttttctaaatagagcatcttctgtccttcctgttcaagatgtgatgcaatatcccacagttaatctattctgatttggcactctccctctgtctagacattaatatttttgaaaagtacaaacaagttgtttcacagaatgttctcaaaatgaatgggttttctattgaccctccatgtttttatccagactttaaatttttaacag

SEQ ID NO: 210755 - DNA, 490 bp, Homo sapiens
taattcaaaccttcagataagtaccaagaattagaaacaatactctcatacacatttcatctagattcaacaattgttaataatttttttcatatttgcttgtgttctctttttgtctatattaatatatattattattttttctgggacacttaagactactgtgtatccatgatacctgtttactcctaagttctctattttatccaagaacaaaggtattcacttatctaaccacagtactattatcaaaatcaggaaatgtgatcttgacataatattcttttctaaatagagcatcttctgtccttcctgttcaagatgtgatgcaatatcccacagttaatctattctgatttggcactctccctctgtctagacattaatatttttgaaaagtacaaacaagttgtttcacagaatgttctcaaaatgaatgggttttctattgaccctccatrtttttatccagactttaaatttttaacag

SEQ ID NO: 210756 - DNA, 511 bp, Homo sapiens
ctcacctctgctttctcctttgctagcatccttcatgctgcttttgttcctggcctcaaagcatcacatcagacaaccagagatgagaggaacatttttagaaatcctaatcaatctttgtaattcttagtagtctaagctgtattacaaattcatcaataaaatgcagagcacaacagcaaagaagagaggttcycagaagctaatataggtaggtacttttgacagaaaaaaggaggcaatagaagttgaagaggctgtcaagatccattcttttcagcacagcttgcagttcactgaacatcaaataacgtcacggtacagtctacctttgaaggtgggaaaatgaaaggcaatacttttataaaatatttggttttatggtactcttatagataaaataatatagttataaaatattatattacgtgttttccaggaagtttttcaccatgtttaaacattcatttttctcttcacagttccttggcaggcattgtaagtagagaaa

SEQ ID NO: 210757 - DNA, 603 bp, Homo sapiens
aggattttggaattgtcaaatgcctttagtatgtataattagatgtgttttcttttctttattttattaacatggtctattacattgagttttgaatgtttaaacaaccttgcattctttgaataaacctcacttggtaattatgcttgctgcatttggtttgctggtattcgttgaataattttgcatctrtattcataaagaaattggtctatagtttttatttcctgtgatgcctttgatttttttgatatcaggtgatattggcctcatagaataagatgggaaatgttccattttcttctattttgagagatttttatgaagaaatagtagtaattattcttttaaaaattaaatagtatttgttactacagcaatgtgattggcaactttatttggtgttagttttaaaattactgattcaacttctttacttactagaagtgtattcagattatctatttatttttgagtgagttggtagattgtgactttcttaaaatttctccttttaagtaagtttctaactgttcacacagagttgttcacagtgttctttgataatcctttctgtacctgtaagattgctaatgatgtttt

SEQ ID NO: 210758 - DNA, 603 bp, Homo sapiens
aggattttggaattgtcaaatgcctttagtatgtataattagatgtgttttcttttctttattttattaacatggtctattacattgagttttgaatgtttaaacaaccttgcattctttgaataaacctcacttggtaattatgcttgctgcatttggtttgctggtattcgttgaataattttgcatctgtattcataaagaaattggtctatagtttttatttcctgtgatgcctttgatttttttgatatcaggtgatattggcctcatagaataagatgggaaatgttccattttcttctattttgagagatttttatgaagaaatagtagtaattattcttttaaaaattaaatagtatttgttactacagcaatgtgattggcaactttatttggtgttagttttaaaattactgattcaacttctttacttactagaagtgtattcagattatctatttatttttgagtgagttggtagattgtgactttcttraaatttctccttttaagtaagtttctaactgttcacacagagttgttcacagtgttctttgataatcctttctgtacctgtaagattgctaatgatgtttt

SEQ ID NO: 210759 - DNA, 529 bp, Homo sapiens
gattctgtttattaaaacatttcatttttctaacctgaaacatcttcttaccttttctgtttaccaaaatwtaatctgctagcaaaatcaagcttaatatgtgcataaaatcatattacattattttcaacatacagtttctcaaacttttatccagggtaatttttttactaacatagagaaaaataagaacaaatcttttccaatagtctatcaatataaagatctaagtaatagtctggtttttattatttattatatctgagtttccaaataagtttttatctcaggtttttggagacaaaactaatttcaaatatctgtttgcggtccccataaaccattaaaatatcctaaaaactccatcattacagcacttaaactacctttcccagacagtttctcatatccagtaatggcacaaaaataatttattggaacatgggtcctgattttggttttgtaacatatggttatacatttatataacacaatacagcactttaaaatagatggaacttgcataatt

SEQ ID NO: 210760 - DNA, 529 bp, Homo sapiens
gattctgtttattaaaacatttcatttttctaacctgaaacatcttcttaccttttctgtttaccaaaatttaatctgctagcaaaatcaagcttaatatgtgcataaaatcatattacattattttcaacatacagtttctcaaacktttatccagggtaatttttttactaacatagagaaaaataagaacaaatcttttccaatagtctatcaatataaagatctaagtaatagtctggtttttattatttattatatctgagtttccaaataagtttttatctcaggtttttggagacaaaactaatttcaaatatctgtttgcggtccccataaaccattaaaatatcctaaaaactccatcattacagcacttaaactacctttcccagacagtttctcatatccagtaatggcacaaaaataatttattggaacatgggtcctgattttggttttgtaacatatggttatacatttatataacacaatacagcactttaaaatagatggaacttgcataatt

SEQ ID NO: 210761 - DNA, 359 bp, Homo sapiens
agccattgaaaaggtaggagcaagagggagaaagcaaagctcagaactttctggaaaacataagtttgcatctatctgattactggtrtttttctttagatgttgaaaatcttaaataaagacaaaatattttgttggttaaacgatttcttaggtaaacatagcaaatattctcagtcctggtgtaggttatatttttctacacaatagagtagacacttgaaatttctctgtggaagaaaacctggaaacaaattagcttttaatcatgggctttttgaaatcatcaattttgttattagaccttttctccctcctactcttcctttatcttttttctgccccatcacatccctgct

SEQ ID NO: 210762 - DNA, 359 bp, Homo sapiens
agccattgaaaaggtaggagcaagagggagaaagcaaagctcagaactttctggaaaacataagtttgcatctatctgattactggtatttttctttagatgttgaaaatcttaaataaagacaaaatattttgttggttaaacgatttcttaggtaaacatagcaaatattctcartcctggtgtaggttatatttttctacacaatagagtagacacttgaaatttctctgtggaagaaaacctggaaacaaattagcttttaatcatgggctttttgaaatcatcaattttgttattagaccttttctccctcctactcttcctttatcttttttctgccccatcacatccctgct

SEQ ID NO: 210763 - DNA, 492 bp, Homo sapiens
gttttctcactcctttatccagccactaattcattcaacaatatatacttttaattgtaactttttattgtgacacaatatcagagttataaatgagttgcaaaatttctcatactactaccactcagattcccatttgtgtgtgcatgcatgtgtgtgcatgtgtgtacacacttgtatttatatgwgtatgtatatgtattatgtatacccatatataggtgtacacgcacacaaacgtgcgtatgtatattctaaaccatttaaaagtaagttgcaggcatgtgttttacccataaatacttcggcatgaatttcctaaaaacaagaatattcttctacataatcacagtataattatcaaaatcaggaaagcaacattactacaataacattatctaatttatagaccttatttacattttgccaattgttcagtagctacctttcaaaaacctaggattttattgtacattgcataaaagaataaac

SEQ ID NO: 210764 - DNA, 492 bp, Homo sapiens
gttttctcactcctttatccagccactaattcattcaacaatatatacttttaattgtaactttttattgtgacacaatatcagagttataaatgagttgcaaaatttctcatactactaccactcagattcccatttgtgtgtgcatgcatgtgtgtgcatgtgtgtacacacttgtatttatatgagtatgtatatgtattatgtatacccatatataggtgtacacgcacacaaacgtgcgtatgtatattctaaaccatttaaaagtaagttgcaggcatgtgttttacccataaatacttcggcatgaatttcctaaaaacaagaatattcttctacataatcacagtataaytatcaaaatcaggaaagcaacattactacaataacattatctaatttatagaccttatttacattttgccaattgttcagtagctacctttcaaaaacctaggattttattgtacattgcataaaagaataaac

SEQ ID NO: 210765 - DNA, 544 bp, Homo sapiens
aaagatcattattggaaatgaggaaagatcrttatgggaaatgatgaaagatcaaacttggcagaaataatgctgccagattataagagttttctttgatatagagaagtttccattcttataggcaaagtaaattggatattttctggcagcacaacagttaaataatcaatgacataaaggctaatcacctttccactttaagcaaaagcattacagctagcaagaattaaacagtgattttccagggttgatttgtatgtacgtctctcattttctaagctggtctctggttttaatgaatttgatacgtcattgctcagggaatgattgaatggatcataccttcaactgatgttcagtaattctaatagacagttaaggaaaatactttagctgagtaaaatagtgaaagatagaaagaggcagacatcagaaaaaaataggtcaaggaagagatgtgtatggttaacttttggcataagaaactagtgaactgagaatctgactattcagatgtctcctttctgagttcagtatacac

SEQ ID NO: 210766 - DNA, 490 bp, Homo sapiens
tgctctaagaaaaacctgctgtgctattattccaaagtttaatttatagaaaaactgaataatacccctctaactttagccawtatgttcacacacagaatctcttacaattaatttttataaaccttccacaacagttcaaactttcaactttattccatctaatttaaaataactcttcaaccctttagggaaaaaaatccacattcccatgtcttcttataatcttttacaaaaaatacattttacttttcttacacaccttacatgtaaaattgtttcttcagtagtctcaattacatattacatgttaacttttagtgacttttacttatggtgaaaaccctggttagtaagtaattttaattgtgtactagttgtggagcctcgcctaggacacaccaggcagcagtgcagattagagctgactctacagcatagctaaggggcatggctaactccacatgtcccctggccttgccttacttaa

SEQ ID NO: 210767 - DNA, 490 bp, Homo sapiens
tgctctaagaaaaacctgctgtgctattattccaaagtttaatttatagaaaaactgaataatacccctctaactttagccattatgttcacacacagaatctcttacaattaatttttataaaccttccacaacagttcaaactttcaactttattccatctaatttaaaataactcttcaaccctttagggaaaaaaatccacattcccatgtcttcttataatcttttacaaaaaatacattttacttttcttacacaccttacatgtaaaattgtttcttcastagtctcaattacatattacatgttaacttttagtgacttttacttatggtgaaaaccctggttagtaagtaattttaattgtgtactagttgtggagcctcgcctaggacacaccaggcagcagtgcagattagagctgactctacagcatagctaaggggcatggctaactccacatgtcccctggccttgccttacttaa

SEQ ID NO: 210768 - DNA, 490 bp, Homo sapiens
tgctctaagaaaaacctgctgtgctattattccaaagtttaatttatagaaaaactgaataatacccctctaactttagccattatgttcacacacagaatctcttacaattaatttttataaaccttccacaacagttcaaactttcaactttattccatctaatttaaaataactcttcaaccctttagggaaaaaaatccacattcccatgtcttcttataatcttttacaaaaaatacattttacttttcttacacaccttacatgtaaaattgtttcttcagtagtctcaattacatattacatgttaacttttagtgacttttacttatggtgaaaaccctggttagtaagtaattttaattgtgtactagttgtggagcctcgcctaggacacaccaggcagmagtgcagattagagctgactctacagcatagctaaggggcatggctaactccacatgtcccctggccttgccttacttaa

SEQ ID NO: 210769 - DNA, 662 bp, Homo sapiens
tgatcacttcttgctaccatcttgcctgccaccctggtctgggtcatctgctccagaatattgcaatagtctcttaaccaagctaactcctctcttgccttttactctatattacgtttatatcaattggagtgattattcaaatatataggtcagatattgccatttttctgctcaaaggctccartggtttgccattgtattagtctgttttcacaccgctataaagaagcatttgagactgggtaatttataaaggaaagaggtttaattgactcacagttcctaatggctggggaggcctcaggaaacttacaattatggtggaaggcaaaggggaagcaaggaccttcttcacatggtggcaggagagagaatagaaagcaaagggggaagagctaattataaaaccttgaaatcttgtgagaactcactcacaatcctgagaacagcatggagaaaactgcccccgtgatctaatctcctcccaccaggtccctcccttgacatgtggggaataccattcgagatgagatttgggtgggaacacagagccaaaccatatcaaccatctcactgacaggaaaagctgaagtctttatgaatggcaccaggggcccttctctatggcctcatcttcccattgttcaagctgcaatggc

SEQ ID NO: 210770 - DNA, 550 bp, Homo sapiens
ggaatctgtgaagtggatatatttcagtcttgctgaggctgaataagccgaatgtaggrcaacggtttttaacatcgcctagacaatagaaggaccaaacatgtactctagtattaaattctgagcaggtatcttcaagaacaattttcctgagcattctgttctgggaacacgctcctctcaaaccttcttccatatccttctgccatttctatgatagagcccactgggaaacatgaacaatacaatagaaatatatagagatacacaagttaaagcccctgtcctaaagctttacagcacatacaatgaatagcttgctaaacgtctacacctacatgatcctggcagataaaactgagcactaagaaaaaaaaaaaaaaagctccattccctgggcttctttttggctagtgctcttgttacttgcatcaacaatcacacgaatacttgtgtgactttaattgggaactggaacggtggggtagtcacagcatatctatagttttagtaaggagtctggcaaagaaagtagagtttggagtgagta

SEQ ID NO: 210771 - DNA, 550 bp, Homo sapiens
ggaatctgtgaagtggatatatttcagtcttgctgaggctgaataagccgaatgtagggcaacggtttttaacatcgcctagacaatagaaggaccaaacatgtactctagtattaaattytgagcaggtatcttcaagaacaattttcctgagcattctgttctgggaacacgctcctctcaaaccttcttccatatccttctgccatttctatgatagagcccactgggaaacatgaacaatacaatagaaatatatagagatacacaagttaaagcccctgtcctaaagctttacagcacatacaatgaatagcttgctaaacgtctacacctacatgatcctggcagataaaactgagcactaagaaaaaaaaaaaaaaagctccattccctgggcttctttttggctagtgctcttgttacttgcatcaacaatcacacgaatacttgtgtgactttaattgggaactggaacggtggggtagtcacagcatatctatagttttagtaaggagtctggcaaagaaagtagagtttggagtgagta

SEQ ID NO: 210772 - DNA, 550 bp, Homo sapiens
ggaatctgtgaagtggatatatttcagtcttgctgaggctgaataagccgaatgtagggcaacggtttttaacatcgcctagacaatagaaggaccaaacatgtactctagtattaaattctgagcaggtatcttcaagaacaattttcctgagcattctgttctgggaacacgctcctctcaaaccttcttccatatccttctgccatttctatgatagagcccactgggaaacatgaacaatacaatagaaatatatagagatacacaagttaaagcccctgtcctaaagctttacagcacatacaatgaatagcttgctaaacgtctrcacctacatgatcctggcagataaaactgagcactaagaaaaaaaaaaaaaaagctccattccctgggcttctttttggctagtgctcttgttacttgcatcaacaatcacacgaatacttgtgtgactttaattgggaactggaacggtggggtagtcacagcatatctatagttttagtaaggagtctggcaaagaaagtagagtttggagtgagta

SEQ ID NO: 210773 - DNA, 605 bp, Homo sapiens
aatcacacgaatacttgtgtgactttaattgggaactggaacggtggggtagtcacagcatatctatagttttagtaaggagtctggcaaagaaagtagagtttggagtgagtaatttcagtggcagcttcctgacattgctacaacttgatcaaagtagaatggagatagttctggagttggcagctgtgatagcagctttctaattgggtgagtggctttctgattcagtagctttctagactctagaccacggcaaagataacagcttacctagtggcctagctctctggtgtggttttagaagttatttttcggagtttggtctggaatttgtttcttcagggttctcagtgattctcaactatctttatcttctaatamattcttttatgctttaaaagagcagactggattctatcatatgcaaataaaaatacttatcaaataacacagtccatttttctctatctgccaaggtggaggagcattcaatcttctcaaatgtgtttatggagatatctaggctcttttttggtaacctctttgcttttttagaaaattgtgatggactcttactctagatattgcctcaacatggagtc

SEQ ID NO: 210774 - DNA, 549 bp, Homo sapiens
cagttcagcacttctttaaggatcctctgaattccttcagtttgagcaggaagcaaagaaaagagctagggagaagaacagagaaaagggagaaaatcaaagaagcatgtcctytgacacacgaataatcttgatgtccttgcctgttcataaagcaacttggaagacagttcccaaaaggaagccctgaaatgctttgtgctctgtggaaacattgtggggccacccaaagagactgagaaacagccatcatttgggagaaagtgacttcataaacatacaatttaatgtacatgagtataaaatgcatctgtgtcattatttttttagtcatctcacagtcaaacttttgcaacttggctggaaaaggataaagccaggttctactaattgctacttctattgttgtaaagcaacaggcaaaatgtgtggctgaaatggggaaggcctttgattttggggtttcaggatcaaacttagcaccggtgcctttgagtttggacattcaacctaaacctttcaggttttttgacattgtgaagtaataat

SEQ ID NO: 210775 - DNA, 532 bp, Homo sapiens
ctttttcccatagtcacataacaagaacatgacggaggtgattagggaaggaataaaatgactaaagaggattctggcactgttccatgcctcactttccccatttctaaacgagagtgagttattcttattctttaattagtggcaatctaaataaacaaactcctcccacacactacaattaaataggatctactccaggtaaagaagttcttaaagaagtttgtgtttttttcttatctctgaattttctagaactgatcctactgaaaaatgcagtgaaagaatagccaaccctagcaaaaacaccaaatgaccctacaggatcactgactacaaagtctggggaaacactgaggagtggttctgaccttgatcagatttactcaagagcacgtcttacagttaatagagagatggactcaaatccaaagcccagaggtttaccttggacyctgacacagtagctatgtggcttgggtaactaacttcggttttctaagcttgactcctcatctggggtcttggcttt

SEQ ID NO: 210776 - DNA, 564 bp, Homo sapiens
acttcaagctctaattttaaaacccatctagcctttctgacctctttttaattctgaggctcagcccatttcctcaaayaggcaacaaaacaaaattcacacactgtaggttgatacctcagcaaggaagtttctttccactgtagaaagttggcagatggagaggagtggatgttgcaaatatattcatattattcaatttacagatacctatgggcagatgaatagatagacctgtactaaaatatatccacatttataggcttacagaattaaaatacagtgaacactaataggtttacaagataatgggtttattccagagatgaaaaatactgaggccagagaagtacctggagattcacagagctcaataaagatagaacagggacagatgtcctatgatccttgctttccaaaacatcgattcttcctccaggcatgagtaataagtagatgactaaaataagcacatgcatgcaggtattcattcacaagttataagacattttggagtgtttaaattttagttataagaagctttgtatggctggaataattcat

SEQ ID NO: 210777 - DNA, 350 bp, Homo sapiens
tgtgcagggaacaagacagacagtttgtgtccatgaaaataaaaataggtaaggaagaattttaacatgcttgaactgagacagtttaaaagtatatatcctcttgtaactatctagaatatatatctatccacttttaagatgcaaaaatgactagatgttggttaagaaatgtgagggtcagtaaatgcattttttttttcatgtactaaacctgaggaaactaatcccaggttgtccaagaggaagatgtaatttgggccctataatcactagtcattttyctgcacataaacatacacagagtacaaattttaactaaattttgtttgttatggctatctaatttt

SEQ ID NO: 210778 - DNA, 555 bp, Homo sapiens
tacaggcgtgagccacagcacccagccacaactccatcttaaataggagctgggtaaaatgaggctgaaacccactggactgcattcccagatggttaaggcattctaagtcacaggatgagataagaggtcaccacaaaatacaggtcataaagaccttgctgataatacaggttgcagtgaaggagatggccaaaaccctccaaaaccaaaatggctatgagagtgacctctggtagtcctccctgctacactcccaccagcaccatgacagtttacaaatgccatggcaacatcaagaagttagcctatatagtctaaaaaggtgaggcatgaagaatccaccccttgtttagcatatcatcaagaagtaaccataaaaatgggcaaccagcagccctcrgggctgctctatggaatagccattcttttattcctttacttttttaacaaacttgctttcactttgcactgtggacttgccctgaattctttcttgcacgagatccaagaaccctcttccggggtcagggttgggattcccttcctgtaaca

SEQ ID NO: 210779 - DNA, 604 bp, Homo sapiens
aaatattctgctaaaagaaaattcattgtatgcattttctcagagatctggaaaaaagataaatatgcccattaaccctgtccatgtttgatatagtactagaactgctagcaaatacaaaagcacatgaaaaaaaaaaaagtgagaaaagtgagaaaaaaatagcacaaacctgtaagtatttgcaaatgtatgctcatttacataggacaatcaacagattttttacataaaccagaactcaaaataaacttctgaaatactgatgagtaagatcaacttgcacatcctaatagcattcatctaaaccactaatagccaatttagaaatataatagaaattaagaacccctcataataaccataaaagaaagtayctaaaaattatcttgatcaaaagggcacaaagtattcacaaagagaaattttaaactctattatatgtcataaacataaactgaaataccagttgataccttgttcatgaattagataccttaatattgtaaaggtgtgtactatcgataaactaatttcaaagttaaacataattctcaagaaaaataccaggaggatcagcagaagtattttaaagaaattcaac

SEQ ID NO: 210780 - DNA, 637 bp, Homo sapiens
tggggctctaccacataattatctggaggctattacctaacctcactgagctttaatttcctcatctgtaaaatgagaatagttatagtatctacctcataagataataaaatgagtaggctaagtacttcagatattcgtctggcacataataagggcaatagaagtatttgcattaaaagcggagtaaggacatgtggggcagtctgaaggaagaatctttatagatatttgttcttttttccatatactttatatttatgtatctatttttagagacagtctcatactgttgcccaggctggcatgcagctcaccataacctgcaattcctgggctcaagcaatcctccccctcagctacccaagtagctaggrctacagacacatgccaccacactgggctattacttatttattcatttgtttatttatttttacgacagggtctcactctgtcaccaaggctggagtgcagtggtatgattatggctcactggagccttcatctcccaggctcaagcaattcgcctgcctcagcctccttagtagctgggaccatgaccaggtaaatttttttaaattgttttttggcagagatggggtctcagtatgttacctagactggtcttgaattc

SEQ ID NO: 210781 - DNA, 439 bp, Homo sapiens
tttgctcatttgcaaagtgtaaaatgggttataggaattaaatgaaatagcacacttagcatagtgtctggtacggaaggattcaacaaayactattaaaaacatgtcagaaacagtattttgggcttgcttgcaaaatggaattttggagtgaagttcgtgggtgaggcactaacagtgaggtcctgcgtgaggatggtggctggtcgagaggatgttaggaaggcagggatttaaaaggacttggggaaaaacaaccaagacctagtgagaggctggacaagtagaggagaaagaataaatcgaggatgacccaaagattttgacattgagataatagtggtcctaaaaaaaaaaggagaagtcaggtaggtgagatgggatgattgaatttataatttcatgatgtataattatacaaatttataaaatagatgcc

SEQ ID NO: 210782 - DNA, 516 bp, Homo sapiens
cctcaccagcatttgttattatctgtcttttggataaaagcagttttaactagggtaagatggtatctcattatagctttgatttgcatttctctaatgatcaatgatggtgagcaccttctcatatatctgtttggtatttgtatgtcttgttttaagaagtrtctattcagatattttgcatatttttaaattgcattattagatattttcctatagatttgcttgagctccttatatattcttgttattaattccttgtccaatggatagttgcaaacattttctcccattctgtgggttgtctcttcactttgttgattgtctcctttgctgtacagcagctttttaacttgatatgtcctattttttcatttttgctttggttacctgtatttgtggcatattacacaagaaatatttgctcagcccaatattctagagagtttccccaagcttttcgcagtagctttatagtttgaggtcttatatttcagtttttattcaattttgatg

SEQ ID NO: 210783 - DNA, 565 bp, Homo sapiens
ctaagtttttctgtcactatgggcatatctgtattaggcggtaccccaagcccagcaattctgtgaggtgattctgctcttgcagaatcacagaggtgctgccttggtggtctcggagaagatcgggaaaaattttctagattgccaggcaaagactcttgttctcctctcttactttctcccaaacaaacagagtctttctctgtgctgagctgcctggagctgggagagaggtgacacaagctcacctgtggccgccaccaccactgggactgtgctgggtcagacctgaagccagcatggtactgggtctcacccaaggcccgcactaaccactgcctggctaccacgtatatttgctcaaggccctagggctctacaatcaggaggcagcaaagccagctaggctygtatcctacccttcaggatggcaagttcccctttgtcctggggaggtctagggacacaatccaggagccagggcctggagtcagatactttagaaatcaacctgatgccctattgtactgcagctgagctggtactcacaagtcaaagtctttcc

SEQ ID NO: 210784 - DNA, 565 bp, Homo sapiens
ctaagtttttctgtcactatgggcatatctgtattaggcggtaccccaagcccagcaattctgtgaggtgattctgctcttgcagaatcacagaggtgctgccttggtggtctcggagaagatcgggaaaaattttctagattgccaggcaaagactcttgttctcctctcttactttctcccaaacaaacagagtctttctctgtgctgagctgcctggagctgggagagaggtgacacaagctcacctgtggccgccaccaccactgggactgtgctgggtcagacctgaagccagcatggtactgggtctcacccaaggcccgcactaaccactgcctggctaccacgtatatttgctcaaggccctagggctctacaatcaggaggcagcaaagccagctaggcttrtatcctacccttcaggatggcaagttcccctttgtcctggggaggtctagggacacaatccaggagccagggcctggagtcagatactttagaaatcaacctgatgccctattgtactgcagctgagctggtactcacaagtcaaagtctttcc

SEQ ID NO: 210785 - DNA, 479 bp, Homo sapiens
ctatcccgtgtagataaaaaaaaatgctgaatttttccactagcctttcagtctcagatgactaaattatggatacattttctaaagtgtgttcatcttttaaagtcctaaataaaagtttcttactcttgtagaattatattggaaaagaagagtatacagtaacctccattaacctccaaaaccgtggtgggattctggtcagcttctagctatgtatgttcagctcctaccagatgccggatttattttatacactacctctggtctttaaagtgacctttcaggtaataacackgcccccattttacagatgaagatactaaagtacatagagtggttcagtccattcgccacgttcacacagttaataaatgaaagagccgagttttgaattcaagtctttctgaatcccaaatcctgccttttcaactctattttcaaatatgtgcccttagtggactgattgactcactcat

SEQ ID NO: 210786 - DNA, 554 bp, Homo sapiens
tgtgacacagtaaaggatataaaaatgcatcaaaaatcttactgttgggaattttatgatattaagatggtaactgaccagaagactcagagcttgttattaaactaacacacctacycacaatggtgatgttggcaaggaagacctttcattgtgatcagtctttgactcaaactgtaacgcagaaattgtagtgccagcctggatcatttagtttacagagtggttctccaagttaaggtctcatggaacagatcagcatcatctgggaacatgttagaaatgtgcattcttgggcctcactccagaacaggggtgtccgagggagagaatacagttatgtgttcttagtttctgtttctggttgggcacggaaaaagccccatccttgtctctcttttccatttatcactagagacagaaactaaaagccatggcttcaggctgctaaaagcctaaaaggaaacaaaacaaaacagagcaacaacaacaacaaaataaagcgggctagataagcttgctctagaccaatctgtgtttgaaaaccacaaagc

SEQ ID NO: 210787 - DNA, 579 bp, Homo sapiens
tattattcagcaatatgaatctccttctgatctgacaccacttctgtagtatatttgatttatatgtggtaagacccttctttttttctccctccaaaaactacataatgaaaggagtggagatgatagcaaggactcaagggttttcattgcctttcttttgttttcttttctttttttttgagatggagtctctctctgtcaccctggctggagtgcagtggtgcaatctcggctcactgcaacctgtgccttccaggttcaagcgattctcctgccttagtctccccagtagctgggattacaggcacctgccactgcctcagtctccccagtagctgggattacaggcacctgccaccacayccagctaatttttgtatttttagtggagagggggtttcaccatattggccaggctggtctcaaactcctgacctcaggtgatctgcccacctcggtctcccaaagtgctggaattacaggcgtgagccaccacgccctgcctttcattgcctttcttagcacacttacatcatgttgaacatgtctgtgtggataaatgcaaatttgttcaat

SEQ ID NO: 210788 - DNA, 491 bp, Homo sapiens
ttgaaagtgtattagtggtgtcagactcacttttttcagaatccactactataacataaaatatcacccttcccagtctatacagagaacagagaagtagtccaaagagcatccttatggcacatatcattgccataggaaggtgaatgtctacaytaaagagctaaatcattataacttaattcttagctgtaacctcatgacatttttatataaccagtcagataatagcttcaatcatttagatacaacttggaaaattctagttagagaaatgagaatgagcatagaacactgagcagagtcctgagacactcattccaggccctaactcctggttgacatttctagacaaaacctgggccagaagggaacctgctgccttgagtggaagaactcagtcctggcaggattcatcacgggctgactaaagagcttttggcctctgaataatcagcagcagtagccaggtagcacacactgtgggcaac

SEQ ID NO: 210789 - DNA, 491 bp, Homo sapiens
ttgaaagtgtattagtggtgtcagactcacttttttcagaatccactactataacataaaatatcacccttcccagtctatacagagaacagagaagtagtccaaagagcatccttatggcacatatcattgccataggaaggtgaatgtctacactaaagagctaaatcattataacttaattcttagctgtaacctcatgacatttttatataaccagtcagataatagcttcaatcatttagatacaacttggaaaattctagttagagaaatgagaatgagcatagaacactgagcagagtcctgagacactcattccaggccctaactcctggttgacatttctagacaaaacctgggccagaagggaacctgytgccttgagtggaagaactcagtcctggcaggattcatcacgggctgactaaagagcttttggcctctgaataatcagcagcagtagccaggtagcacacactgtgggcaac

SEQ ID NO: 210790 - DNA, 457 bp, Homo sapiens
ggtaaaatgtaattaggttttatgaagttcttaacatagatgctgaggaaattttctaactgatatttttcacttcctgatttgataaaaaaaaggaaaaaaaatagccatggcagatgatatttcaggaaggccaaacaaattttatttagaatttctaggacaaagcatttatgtataacagttctgggtgaaaatggatgattttccagtaacataaaagtgcacactaactgtattgttagcatcaatctgsgatatggtcacacctttgaaactctaacttctggggtgcagagaactcagcagggaacagaattggtcacaacctctcattgcagtgaggagtcagttatcctcccaagggccagtgctggcctggggacgcacagtgtcaaaccccagggtgaaaggtcaggggtgctttctgtgtctccccacacacccaccctctatc

SEQ ID NO: 210791 - DNA, 405 bp, Homo sapiens
gagttcagtgtcctttgccctgcctgtcagtgctatgcattgggcaacaacctgcctgccttccttcctgtcacagagttaagtaatgtacaatttgacctgtgtagattctaaaactgcaggaaaaatgtatttctattgggaatacctgtttctgcaaaaagaaactgtatgtatgaagtgtggtaaatgcatacattttcaaaaacgcatacaaaacacagacatgtktgtatttttaaaaagtttcttgggactgctgaacatatgaaaagctgcttgcattctctcctgaatttggcaaacaagctgcaaaagaatggtcaaaaaaaggagaaggggtgaagaatgaagctaaaatctaattcagaaaatcttcattactacagtgacttttgttgacat

SEQ ID NO: 210792 - DNA, 405 bp, Homo sapiens
gagttcagtgtcctttgccctgcctgtcagtgctatgcattgggcaacaacctgcctgccttccttcctgtcacagagttaagtaatgtacaatttgacctgtgtagattctaaaactgcaggaaaaatgtatttctattgggaatacctgtttctgcaaaaagaaactgtatgtatgaagtgtggtaaatgcatacattttcaaaaacgcatacaaaacacagacatgtttgtatttttaaaaagtttcttgggactgctgaacatatgaaaagctgcttgcattctctmctgaatttggcaaacaagctgcaaaagaatggtcaaaaaaaggagaaggggtgaagaatgaagctaaaatctaattcagaaaatcttcattactacagtgacttttgttgacat

SEQ ID NO: 210793 - DNA, 595 bp, Homo sapiens
caaggcagtaagaatcatgtgaaaaagtctgttccactggaatcgtcttttccttttcctagctcagcataaatgaggcattaatgataactcttgagtctacttttccgatcagtagtgtcccaatcaacaaaaagatatccaagactctctatgagctgagtacatttccaccttcatctcccatcactctctgtttagaacttaatatytctgattattatacaatgcctcttccattcatgtattcattcatttattcatcagatactacacaacaccttttaatgaccatactcttgataggggagtgaatttgatagtgagtataactggtgccacccttcagggagctaacaggccagggaaggactcagacaatgaattgactttttaaaattacgattcatgagagaggacgtggagcattccatgggaacaaatggaaggtgtaattcacccattctgtgtggttaggggaagtttctaaggatgtgaattttaaacccaaacagaactgctaaagataatttaagctgaattagggcatgttcaagtcccatgaaaaaccatataatggctcaggaagagaagt

SEQ ID NO: 210794 - DNA, 595 bp, Homo sapiens
caaggcagtaagaatcatgtgaaaaagtctgttccactggaatcgtcttttccttttcctagctcagcataaatgaggcattaatgataactcttgagtctacttttccgatcagtagtgtcccaatcaacaaaaagatatccaagactctctatgagctgagtacatttccaccttcatctcccatcactctctgtttagaacttaatatctctgattattatayaatgcctcttccattcatgtattcattcatttattcatcagatactacacaacaccttttaatgaccatactcttgataggggagtgaatttgatagtgagtataactggtgccacccttcagggagctaacaggccagggaaggactcagacaatgaattgactttttaaaattacgattcatgagagaggacgtggagcattccatgggaacaaatggaaggtgtaattcacccattctgtgtggttaggggaagtttctaaggatgtgaattttaaacccaaacagaactgctaaagataatttaagctgaattagggcatgttcaagtcccatgaaaaaccatataatggctcaggaagagaagt

SEQ ID NO: 210795 - DNA, 409 bp, Homo sapiens
ttattaaacatcacagacattctaccaatgcatacatttatctagaaaatgctagggctgactatgagtactagggggagaatttcttgagttctgactaattttgtcctgaacttatgtctgttttaaattctgtttgtaaagtcttctttctaggttccctttacaaaggccttttctactgcagcttgtttcactttagcatgctaatgattgaaatagaaatttaygctattcacaataggatccttcacatgttacagtagcatagtttaaatgttcagaagctctgtgttaaaatttagtttttgacaaaatggctcaagttcctcttattaaagaaccagatctctctcattctctgagaaagtccctttgtagatgagatgcactactgcactgtgtcatc

SEQ ID NO: 210796 - DNA, 409 bp, Homo sapiens
ttattaaacatcacagacattctaccaatgcatacatttatctagaaaatgctagggctgactatgagtactagggggagaatttcttgagttctgactaattttgtcctgaacttatgtctgttttaaattctgtttgtaaagtcttctttctaggttccctttacaaaggccttttctactgcagcttgtttcactttagcatgctaatgattgaaatagaaatttacgctattcacaataggatccttcacatgttacagtagcatagtttaaatgttcagaagctctgtgttaaaatttagtttttgacaaaatggctcaagttcctcttattaaagaaccrgatctctctcattctctgagaaagtccctttgtagatgagatgcactactgcactgtgtcatc

SEQ ID NO: 210797 - DNA, 553 bp, Homo sapiens
gctcacctagtattaacatttcaccactttgctctatcatttgtgttccgtttctcacacacatataatattctttagatggggaaggtttacaaaattttatcatatgctcagaggtagggraaatcacttctaaccaggaggaagtaatggagaaactggctttcagtaaagatttgctgggaagtcaaatgttcagagctctgcttgtggaagatgacaactacaagggtgtccagtgaagtctagaaagaaggccaggctggagacagagggatcagtcaggaagctgctcagaggtccaggcaccaaggacttctactaatggacagagatactgatgggtttgagcaaaaataaaataatattcttttagtgcccaagttagataagagtgtctcacattttcttgactatttgacctaacttagtaaggtgatttacgtctaggatttttcacatctcttttataaaatagagtcctttgatcacatccatcttctcatcttggttgtttataaatgaaatgttaaaatgaaagattatgggaaga

SEQ ID NO: 210798 - DNA, 553 bp, Homo sapiens
gctcacctagtattaacatttcaccactttgctctatcatttgtgttccgtttctcacacacatataatattctttagatggggaaggtttacaaaattttatcatatgctcagaggtagggaaaatcacttctaamcaggaggaagtaatggagaaactggctttcagtaaagatttgctgggaagtcaaatgttcagagctctgcttgtggaagatgacaactacaagggtgtccagtgaagtctagaaagaaggccaggctggagacagagggatcagtcaggaagctgctcagaggtccaggcaccaaggacttctactaatggacagagatactgatgggtttgagcaaaaataaaataatattcttttagtgcccaagttagataagagtgtctcacattttcttgactatttgacctaacttagtaaggtgatttacgtctaggatttttcacatctcttttataaaatagagtcctttgatcacatccatcttctcatcttggttgtttataaatgaaatgttaaaatgaaagattatgggaaga

SEQ ID NO: 210799 - DNA, 553 bp, Homo sapiens
gctcacctagtattaacatttcaccactttgctctatcatttgtgttccgtttctcacacacatataatattctttagatggggaaggtttacaaaattttatcatatgctcagaggtagggaaaatcacttctaaccaggaggaagtaatggagaaactggctttcagtaaagatttgctgggaagtcaaatgttcagagctctgcttgtggaagatgacaactacaagggtgtccagtgaagtctagaaagaaggccaggctggagacagagggatcagtcaggaagctgctcagaggtccaggcaccaaggacttctactaatggacagagatactgatgggtttgagcaaaaataaaataatattcttttagtgcccaagttagataagagtgtctcacattttcttgactatttgacctaacttagtaaggtgatttasgtctaggatttttcacatctcttttataaaatagagtcctttgatcacatccatcttctcatcttggttgtttataaatgaaatgttaaaatgaaagattatgggaaga

SEQ ID NO: 210800 - DNA, 553 bp, Homo sapiens
gttaggaatgacttttaatgaataatgttagcaaagttcacaatgacaacttttttttttttttgagacacagttttgctcttgtcacccaggctggagtgcagtggtgcaatctcagctcactgcaacctccgcctcctgggttcaagcgattctcctgcctcagcctcccaagtagctgggattataggtgcccgccaccgcgcccagctaaattwtgtatttttagtacagatgaggtttcaccatgttggccaggctggtctcgaactcctgacctcaggtgatccaccctcctcagcctcccaaagtgttgggattacaggcgtgagccaccacgcctggccaatgactatattttagttagtattattttagatactaagatagtaactttagaatacattttcttaaagaagcttctgcaatattaacaatgtgtaaaatctgcagtagtgacaaggcatcattaactaattatatctttccaaaatgtgttcacagaatcagctagcaattgtttttcaagtggaattgaattatgtgtataata

SEQ ID NO: 210801 - DNA, 553 bp, Homo sapiens
gttaggaatgacttttaatgaataatgttagcaaagttcacaatgacaacttttttttttttttgagacacagttttgctcttgtcacccaggctggagtgcagtggtgcaatctcagctcactgcaacctccgcctcctgggttcaagcgattctcctgcctcagcctcccaagtagctgggattataggtgcccgccaccgcgcccagctaaattttgtatttttagtacagatgaggtttcaccatgttggccaggctggtctcgaactcctgacctcaggtgatccaccctcctcagcctcccaaagtgttgggattacaggcgtgagccaccacgccwggccaatgactatattttagttagtattattttagatactaagatagtaactttagaatacattttcttaaagaagcttctgcaatattaacaatgtgtaaaatctgcagtagtgacaaggcatcattaactaattatatctttccaaaatgtgttcacagaatcagctagcaattgtttttcaagtggaattgaattatgtgtataata

SEQ ID NO: 210802 - DNA, 553 bp, Homo sapiens
gttaggaatgacttttaatgaataatgttagcaaagttcacaatgacaacttttttttttttttgagacacagttttgctcttgtcacccaggctggagtgcagtggtgcaatctcagctcactgcaacctccgcctcctgggttcaagcgattctcctgcctcagcctcccaagtagctgggattataggtgcccgccaccgcgcccagctaaattttgtatttttagtacagatgaggtttcaccatgttggccaggctggtctcgaactcctgacctcaggtgatccaccctcctcagcctcccaaagtgttgggattacaggcgtgagccaccacgcctggccaatgactatattttagttagtattattttagatactaagatagtaactttagaatacattttcttaaagaagcttctgcaatattaacaatrtgtaaaatctgcagtagtgacaaggcatcattaactaattatatctttccaaaatgtgttcacagaatcagctagcaattgtttttcaagtggaattgaattatgtgtataata

SEQ ID NO: 210803 - DNA, 620 bp, Homo sapiens
cccattccctctaccccaaaagctctttatctcctctgagctccttctcacctttcaaactcatctaaattatcatcgccatatgaagtcttctttgactcctacaagagttggttactcctacctatgattccccatcagtttattcatatttttaccatacgaacttatttttgtgcacttgtttatttctctttgctcttcactaggctctgagctccttcaggcaaagaacatgtcgtatttcacctttatatctcctgaccccagcaccatgtctgccacayataagggcataataagaggatgaaaccattcagtaggagtaggatgttctgggatgaaattagatgaaggcgtaaacaagtggttgagactcaaggctctagaatcagactgactgggttaaattgcagtttaaattgcagaatcagactgactgggttaaactgcagttctgctgcttttagttgtgtaaattattttgcatctctgagcctcattttttctcattagtaatattggtggaataatagtactttcgttataggattatttggtgataactgaaaaaaaagatttggtttatttctagctaaatgcttattcattttgtgagg

SEQ ID NO: 210804 - DNA, 576 bp, Homo sapiens
ttgttatatttcttcctaagtattttattctttttgatgatactgtaaatgaaattgtttccctaatttaatgtttggattgttcattgtttatgtatagaactacaattaatttttgtattttgatcttatatcctgcaaccttgttaaacttattaactctcattcattagggcttttttgtatgtgaattccttagagttttcaatatgcaagatcatatcatcccctattatagataattttgctatgcccttcatatgtaatgccccttctttggcaagtatattctggctcttgmtttcagagcagggggaggacaaattctttcttatattcttactagaagtatctgagataattgttttactgtagagtcaaactggcttacgaaaaatattactctcagcactatctgttggtacataaaggcaatcaaaagctaatatggtaaaaggatgagaacaattaataatccagggtatttattcaaagatcttaacccatctccaacattcttagctatccccaaggaccactgtacaccagcactaaatgaatcaggcttagtaaatg

SEQ ID NO: 210805 - DNA, 450 bp, Homo sapiens
aatgtcaataagtacacagagaaagaatcattgtacctttttgtagcatagtccaagacacccaccactaagtgctttgtttgtttgataaagggctctctctttaggcccccataggcttttgactggtattagtggaaagctagggggatagcagaagtaaggagacaacrgggtgcaatcaataaagctgctgcattgaggaaatgatgtgtggtggcaggagctagcttggaagttccacaagtagactggaatatcataattaaccttttggaattgctgaccacaaagcatcatttctaaaagtatggtccaaggctcactggtagtttgcaagggactactgatggggagcaagctgttctatcactgcaagctctctcttcagttattaagccaaataactctccttcctttagattgatttttacagacaaccaaagctta

SEQ ID NO: 210806 - DNA, 560 bp, Homo sapiens
tcctttgttgtgtgggctgccctacacattgcaggatgtttggccgaatctttggcctctacccactggatgcctgtagcaccaaatgtctccagccattgcaaatgggagggggtggtaaaatcatccctggcagagaactgttgggttagaaaacactggtatgaacaagcaggaaagtataaggaagaagtttatggggatgtggttctaaatagtcacaacacaaatgctgaacaattatataatgaaataaacagagaggtattaataacacatgcaaggaaagggctggtgaagacaggagraaggatcaagacagacacatgactcaaaaaggaaaacataattggaacaggccatgtctaattccagccaacatctcttcttgaagagaataggtcctcatcacaggcttttctcagccatagacattattaactaagatgaaaataatgcaagagacaaagaaaagagttcaaggatatcagacaagaagggttattacaataggaaaatattactttgaagtattaattcccagaggcaggtctgctgaa

SEQ ID NO: 210807 - DNA, 586 bp, Homo sapiens
atcttttacctccagcaactgtgtcaatataaatacttctcaacttagaaactaggtaacattgataattactttaaacagaggcctccacattgagatgttttgtcctcatagagcctgatggagtaagacattgtgcagctgccactctccagagagactgtcactaaagcaggttgtctatctcctgtctcctaaggcaaccttatgaataaaccatcttaacgttaagtcatgtgcataaataatttaaaattggcttgcaagcaaaaaggaaaggggtgtatgtgggacactgatcacatcatcagtgtgctctcagccaagactgaggagggtccatggagcttggtaacaggtggtgaatctgtaagtttcaactgaacggaaattcccttacatctcattgtcctcctttctggaactcagttaacaatggacagggcctgataaaattcaagcttcctcagaataccctcatcttttcttttctgctaggctgactccagactagaatgataggcacrttgccttcagaagtaaatatgagtccctaactcatacggggcaaccctccataagtctc

SEQ ID NO: 210808 - DNA, 423 bp, Homo sapiens
tgagtccctaactcatacggggcaaccctccataagtctctccagactttcagcrgaaaggctgcaaaaactctatggagaggaacttgctcctcttgtttctgaacctgtctctctcctcactcacttttcctcactaggctggagttatgtggcatttaaaacatgtcctttcaagactatttacccatctgtcccctagagcagtccctatccctcaatctttctctcttccacatatatttcaagtttagctctttctgcttatgtcgcacttctctgcaatctctttctcttgttctttgtcagccagcaaaaatctccttcttcccttctccaaaacagcccacataccatctgttgaggttggcagtctcccgttctctcctctccttgttcccctggtgggagtaagtaaagggg

SEQ ID NO: 210809 - DNA, 528 bp, Homo sapiens
gcatgcttctggggttcaaagggcagagggtgtgaggggcagcagggaggcttgagaccctctggacttcgagatcaccatttctggccaaaagmcgatgcatccagcagcactggggcctgagtcctcgcagctcccctcgagatcaggagaagaccggcaggaccctcactctccctcccagggctctctgctccaacctcctggggctccgctcctcccaaacctccccacactccccagcgtcccgcacttgccaggcccttcccccagcctaaccctggctcaccatttactcagcctatttagcatcgtaatgcagactggttgtgctgggtcctacaggtattgattttgctctattttactggttttaacttaatgactagaaacccgcaaacaaataaaatttcctttaaaaactcagagagatcaatgctcatgggccagaatccctattctacgagccgaagggacagtcccctgggttctccgcatcatcgctcatggccagaggctccccggggg

SEQ ID NO: 210810 - DNA, 528 bp, Homo sapiens
gcatgcttctggggttcaaagggcagagggtgtgaggggcagcagggaggcttgagaccctctggacttcgagatcaccatttctggccaaaagacgatgcatccagcagcactggggcctgagtcctcgcagctcccctcgagatcaggagaagaccggcaggaccctcactctccctcccagggctctctgctccaacctcctggggctccgctcctcccaaacctccccacactccccagsgtcccgcacttgccaggcccttcccccagcctaaccctggctcaccatttactcagcctatttagcatcgtaatgcagactggttgtgctgggtcctacaggtattgattttgctctattttactggttttaacttaatgactagaaacccgcaaacaaataaaatttcctttaaaaactcagagagatcaatgctcatgggccagaatccctattctacgagccgaagggacagtcccctgggttctccgcatcatcgctcatggccagaggctccccggggg

SEQ ID NO: 210811 - DNA, 464 bp, Homo sapiens
ctggccacgcctcacccactacagctggcatcatggcagtggctggtccagacgggccaccgctgccatcacctgtagtcacagttacgcaggaggctgaggcagaaaaattgcttgaacccagtaggcagagttgcagtgagctgagatcgcaccactgcactccagcatgggtgacagaaagagaccctgtctcaaaaaaaaaaaaaaaaaaggaagcaaaggcaaagaaggacaagtggcagaaagtacatgtggtcagcctacctaaagtatttactctctggccctcccagcagaagtttgccagccctgttctgtagaacctgttgtgtaatggagtgttccttaatggtgtcaattttttttttttttttttggagatggagtttctctctgtcactcargctggatgctcctgccactcagcctctcaagtagctgggattacagcacctgccatt

SEQ ID NO: 210812 - DNA, 556 bp, Homo sapiens
ttggtgcagaaacatctgcaggggagcatggcaagggacagccatccccaaaggcttgccatactcctctagaagactctagccttagggggactgttagacctgaacaatgtagggyaatctacctgggagatgggactagtctgacctgagcactcttctgtttgctggcctgtcccagggccccagcctggctgtgcctatttgcaatgcagacttggatgcccaacctggatgcctcccaagggcccaaatcatagttcctacactgccagactctacatgaccatcagacagcttcaacagagtggcccctgacaatatgcaccaacccacccaaatcctccccacagcacagcctcccctgtgccactttgccaggatggacttgcccacagccacccccattgcttttccagcatgcatttgcatgggcaacctttcctcccctgccctgctggcacatgagtgtccataaaccacactgtaccactgctgcacactagagcatacctgctaccccatgccattgcagtactgtgatgccatgctgcca

SEQ ID NO: 210813 - DNA, 561 bp, Homo sapiens
cccccaaagtcttatctcattccagcattaatccaaaaatccatagtccaaagtcacatctgagacaaggcaaatcccttctgcatataagcctgtaaaattaaaagcaagttaggtactttctagatacaatgggggtaaaggcattggataaacactcctatttcaaaagagagtaattggctaaaacaaagagtttataggccccatgcaagcccaaaatacaggagacagtcattaaatcttaaagctcctaattaatctcctttgactccatgtcttacatccaagtcatgctgaggtgggctcccatgatcttgggcagctctgctcctatggctttgtaaggtacagcccccctctcggctgctttcatgggctggtgttgagtgtctgtggcttttctaggcatgcagtgcaggctcttggtggatctaccattctgggatctggagaagagtggccgtcttctcacagctccactaggcagtgcccctgtgggggctccaatcccacatttcccttcctcrctgccctagcagaagttcttcatgaaggctc

SEQ ID NO: 210814 - DNA, 566 bp, Homo sapiens
tcacccttggagaaaaattttactattcgcttgaaattttaccttcaaatatgtatttttgtttcattcattagaagatttatggagctcttctttcttccggcattttgccagacaaaggatacgatcatgatcaaaacagacataattctttccctatgcatcttgcaaaatagttgagagagagacacaattattatattactataaattgtaatactttttagaaaggaaagaaggtggtaagagaactttcaagaagatctaatgtaagatactattgccagttaaaatacagacaggtcatgcaatatttaagaaattcttgtgctaaaaatatgcgttgtttgtttgaaattcttagttgaccagtcagcctgttttgtttacgaaatctggtgaccctaatctgagtaaagacttcctctagaggaattggctagagttgagaatttaaaaatgaataggcattggcaaggtgaaggrgatgcagaattatggagctttactaagtcaagagcgtacagcatcttcaaatatcctaagttgggaagcaacattagtgc

SEQ ID NO: 210815 - DNA, 580 bp, Homo sapiens
gatctgtgtgtccatttttataccagcacttttataccagtgttgtttactgtagccttgtagtatactttgatgtatggtgatgtgattcctctagctttgttcattttgctcaggattgatttggctattcaggctcttttgttgttttatataaattttaggtttactttttctagttctatgaagagtgatgttgctattttgaktaatagcaattgatttccatgatttcttttatatgctttgtagtgtagttctgaagaggaacagagtattgagattcagaagaacattgaaccccaatccaaacaatctaaaaaatccaatataatgatgcaaaagataaaagataaaataggcatttcaagaagaaacatcttgtaaagatatttcaccttggttaaatatattcctaggtttttattgtagttatgataaaagggatttctttcttgatttggttctcagcttgattgttattggtgtatagacatgacatttgattttgtatattgattttgtattctaaaactttactgaatttatttatcaaatctaagttgttttggaagtgtct

SEQ ID NO: 210816 - DNA, 580 bp, Homo sapiens
gatctgtgtgtccatttttataccagcacttttataccagtgttgtttactgtagccttgtagtatactttgatgtatggtgatgtgattcctctagctttgttcattttgctcaggattgatttggctattcaggctcttttgttgttttatataaattttaggtttactttttctagttctatgaagagtgatgttgctattttgagtaatagcaattgatttcyatgatttcttttatatgctttgtagtgtagttctgaagaggaacagagtattgagattcagaagaacattgaaccccaatccaaacaatctaaaaaatccaatataatgatgcaaaagataaaagataaaataggcatttcaagaagaaacatcttgtaaagatatttcaccttggttaaatatattcctaggtttttattgtagttatgataaaagggatttctttcttgatttggttctcagcttgattgttattggtgtatagacatgacatttgattttgtatattgattttgtattctaaaactttactgaatttatttatcaaatctaagttgttttggaagtgtct

SEQ ID NO: 210817 - DNA, 562 bp, Homo sapiens
gagcaaacatcattctgatgttaaaaactgtcagagatagggatgtatcattccaagatggccgaataggaacagctccagtctgcagctcccagcgtgatcgacacagaagacgggtgatttctgcatttccaactaagctacctggttcacctcatttggactggttgggcagtgggtgcagcccatggagggtgggccgaagctgggtggggcatcacctcacccgggaagtgcaaggggttgggggatttccctttcctaaccaagggaagccattacagactgtacctggaaaaatgggacactcctrcccaaataccaggctttttccatggtcttagcaaccagaagaccaggaaattctctcctgtgcctgtctcggcagatcccatgcccacagagccttgctcactgctagcgcagcagtatgagattgacctgcgaggctgcaggctggtaggggaagaggcatctgccactgctggggcttgggtaggtaaacaaagtggccaggaagcttgaactgggcagagcccaccacagctcagccaggcctact

SEQ ID NO: 210818 - DNA, 604 bp, Homo sapiens
taccatatccatctcctcatgcttttaaattttttgtggtgagaatattcaaacgcctctcctttgactattttgtaatatgtaatatcttactcttaaccatatttatcccactgtgcaatagaacaccagaacttattcctcccattatgatgtactttgtcygcattggccaacctttctctatcctccacactctacttataatatcaacctattttgtttttagattagaaattgtgagtgttatcatgtggtatttctctttatgtgtctgccttattttacttaatatgatatcctctaagttcatttatgttacaacaaatgacatggaacctaggactgatgaaagaactgagacaccactgcatcaaaatccaaagagaaacaccacagaaaatcggtgtaactggacagtggggaagctgctgaactcgcagacaaaccaccacacccatgtgcacaaacatcaagcatgacaaccaacacagtggcagtcccacctactgaaaaatccaccacacagctaaccagtctactgtgcctatgtattcttgcacttggcctgacagccagtctggcattggcccttcccaccaga

SEQ ID NO: 210819 - DNA, 448 bp, Homo sapiens
acatgaggaaacttccattagaatatccacagatttctcagcaraaacattgcaggccagaagagaatgggaatataattatttaaaatgaagaaaagaaaaagtgtcagccaagaacactatagttaacaaagctgctctttcaaattaaacaaaaaaaataaagacttttccagatgagcaaaagctgagggaattcatcaccactggactggccttgcaagaaatgcttagggaaatgttttaaccagaaatgaaaggaaaataaaacaaatgaaactataaaacaaagtggtagaggtaaattcatagtcaaattcgtatatcattactgtaatattggtgtgtaaatcattcaaatccttactatgaagggtaaaagctaaaatgatcaaaaatagttatagatacaataagtttttaagaaatatacaagatcagaatgtat

SEQ ID NO: 210820 - DNA, 382 bp, Homo sapiens
atgggaatataattatttaaaatgaagaaaagaaaaagtgtcagccaagaacactatagttaacaaagctgctctttcaaattaaacaaaaaaaataaagacttttccagatgagcaaaagctgagggaattcatcaccactggactggccttgcaagaaatgcttagggaaatgttttaaccagaaatgaaaggaaaataaaacaaatgaaactataaaacaaagtggtagaggtaaattcatagtcaaattcgtatatcattactgtaatattggtgtgtaaatcattcraatccttactatgaagggtaaaagctaaaatgatcaaaaatagttatagatacaataagtttttaagaaatatacaagatcagaatgtat

SEQ ID NO: 210821 - DNA, 484 bp, Homo sapiens
cagttttcattttttttcacatttgctgttctaattcatcagagatactctaagagttttactagaaatgttaagcctcatttataagatcaatgatttcagaaaacctttctgtttcttgtttctttcttcaataatgttcttacattatgagtgcaatatattctcatctctctgtgtgattctttcttttaatatctataatttattgaatatttactatatgctaaataccatactaggcaaattatatacatcatcaagtttaatttttacaatcatattttatggtagaaaatattattaccattcgatatacaaagrtatcaagaataggtttttcatttacagattaattctcattatgtaaatactgtgtactgttttgccaagtagtatataatgattaatattttatttcctatacaactttttgttgataaatatcaatggcatattagtttgactgcaaagtccaaactcc

SEQ ID NO: 210822 - DNA, 459 bp, Homo sapiens
tccccacccttgcaggctctattttatgcaaaaagatatagaacactgtcgcatacatcacctgaattccctggaaacctggctcccattgtgcctggaaaatgaaagtcaccagcagcagatcacaaaagggaggagagagaggttgggacaatcccctcccctaccccaccgcttcttctcttccttarcattgtctctggcaagcagaggcaatcaagactacagtctagctgagagtcacctcttccataattccagtttggctcctctgacactattttctttctggtatcttctgctgtttaggtgaaaccagcttcatagagcttccatacttacctgtatgaagtactcagtttaaattatcttcctttaagtcacctggaacacattacatctttactcttctattttaatatggtatgactatgtaattgctttcatattgtagtgcca

SEQ ID NO: 210823 - DNA, 459 bp, Homo sapiens
tccccacccttgcaggctctattttatgcaaaaagatatagaacactgtcgcatacatcacctgaattccctggaaacctggctcccattgtgcctggaaaatgaaagtcaccagcagcagatcacaaaagggaggagagagaggttgggacaatcccctcccctaccccaccgcttcttctcttccttagcattgtctctggcaagcagaggcaatcaagactacagtctagctgagagtcacctcttccataattccagtttggctcctctgacactattttctttctggtatcttctgctgtttaggtgaaaccagcttcatagagcttccatacttaccygtatgaagtactcagtttaaattatcttcctttaagtcacctggaacacattacatctttactcttctattttaatatggtatgactatgtaattgctttcatattgtagtgcca

SEQ ID NO: 210824 - DNA, 591 bp, Homo sapiens
attggtcattgccaacaatactgcaataaacatgaaagtacaggcatttctttgacatactacttttatttcctttggattttcacccattagaaggattgctagataatgttatagttctattttaatttttttgagggaactttatactgtttttcgtaattgtaatatattttaaaattaggcagtgtgatgcttccagctttgtctctgtttgaattttctttttgtttggctcaaaagtgcttttattagtcaaggtcttttgtgttcccataaaaattttagaatttttttaattctttgaaaatttacattggaattttgatatagattgctttgaatctgtagatcagtttggtaagtatgaacattgaacaatattaattcttctaatttatgaacatgacatatctttccacttatttgcatcttcttcagtttcttttaccagtgtacagatctttcaactcctcagttaaatttattmtaaatattttaatttttgtagctattgagaatgggattttaaaacttttttttcagagagttcactgctagtgtatacaaatgccattaatttttgtaggt

SEQ ID NO: 210825 - DNA, 550 bp, Homo sapiens
gtattatgtgtgtttggatctcaaccttgatgctgtatatgttttaggttttcgaaaaacatgttgaattgttgactaaactgttggaaagcattcagttatacactcagaaattgattatcaaaggagaagaagtattttaaaagaaatttgcttcaaattttggcagtattaattcatatttaagaccattgagtarggatattcaagaagtttttcctttaatcgtcataaggtgtaagtccccttgacattataaacaattattcatgcaatgaagacaggtcgacctgttttggaaagggcagccagctcatttttctttcttgcctagtctagttctattttggactcaggaaatgaggaattactttacaaagaatgggacattctctgaattcctctgagctctatattgaacatccaaaccaaaaataaaagaaaaaaatatataattaaataaatagcaatacatttattatctttctttcactcttctcaaatctacctccaaaataaaaaaagaagttatcccatcactaattatttt

SEQ ID NO: 210826 - DNA, 550 bp, Homo sapiens
gtattatgtgtgtttggatctcaaccttgatgctgtatatgttttaggttttcgaaaaacatgttgaattgttgactaaactgttggaaagcattcagttatacactcagaaattgattatcaaaggagaagaagtattttaaaagaaatttgcttcaaattttggcagtattaattcatatttaagaccattgagtagggatattcaagaagtttttcctttaatcgtcataaggtgtaagtccccttgacattataaacaattattcatgcaatgaagacaggtcgacctgttttggaaagggcagccagctcatttttctttcttgcctagtctagttctattttggactcaggaaatgaggaattactttacaaagaatgggacattctctraattcctctgagctctatattgaacatccaaaccaaaaataaaagaaaaaaatatataattaaataaatagcaatacatttattatctttctttcactcttctcaaatctacctccaaaataaaaaaagaagttatcccatcactaattatttt

SEQ ID NO: 210827 - DNA, 450 bp, Homo sapiens
tgccagtgatcctcccacccatctcagagaagaggacccctgctctgccacacctcacacctcatcccaatttgtcwcatcccctctggacttggctctgtcagttaacttctttctcctgccactttgaatttttctgtctcctctggtctttctctgtctacacaccatccgagaaataaatccccacccagtcctggcttcctcttatttgatcttcaccaaagcctctagcctctagcctctccatggagtggtttttgtctactgcctccactttcctgtttccatccctgccatgtcactaaaatgccatccactttgccccctctcaacctccatggggctatctggacagcccttatctgcttgttggcctgcagacactttctgtagaaggtcaaatgttccatatgccttcaaagtgtatcaataaagactatttcttgc

SEQ ID NO: 210828 - DNA, 464 bp, Homo sapiens
ctgccagtgatcctcccacccatctcagagaagaggacccctgctctgccacacctcacacctcatcccaatttgtctcatcccctctggacttggctctgtcagttaacttctttctcckgccactttgaatttttctgtctcctctggtctttctctgtctacacaccatccgagaaataaatccccacccagtcctggcttcctcttatttgatcttcaccaaagcctctagcctctagcctctccatggagtggtttttgtctactgcctccactttcctgtttccatccctgccatgtcactaaaatgccatccactttgccccctctcaacctccatggggctatctggacagcccttatctgcttgttggcctgcagacactttctgtagaaggtcaaatgttccatatgccttcaaagtgtatcaataaagactatttcttgccccaccacccata

SEQ ID NO: 210829 - DNA, 464 bp, Homo sapiens
ctgccagtgatcctcccacccatctcagagaagaggacccctgctctgccacacctcacacctcatcccaatttgtctcatcccctctggacttggctctgtcagttaacttctttctcctgccactttgaatttttctgtctcctctggtctttctctgtctacacaccatccgagaaataaatccccacccagtcctggcttcctcttatttgatcttcaccaaagcctctagcctctagcctctccatggagtggtttttgtctactgcctccactttcctgtttccatccctgccatgtcactaaaatgccatccactttgccccctctcaacctccatggggctatctggacagcccttatctgcttgttggcctgcagacactttctgtagaaggtcraatgttccatatgccttcaaagtgtatcaataaagactatttcttgccccaccacccata

SEQ ID NO: 210830 - DNA, 487 bp, Homo sapiens
tatatgtgaaatggagtttattaaggagtattgacccacaagattacaaggtgaattcccacaatagatcatctgcaatctgaggagcaaggaagccagtctgagcttcaaaacctcaaaagtagggaagcygactgtgtagcctttggtctgtcgcaaaggcctgagagcccctgccaaaccagtggcgtagcctcaagagtccaaaagctgaagaacttggagtctgatgttcgagggcaggaagtatccagcacggggaaaagatagaggccagaagacttagccagtctcatctttccaccttctgcctgcctttattctggccttgctggaagcctattagattgtgcccacccagattgagggtgggtctacctcttccagtccactgactgaaatgttaatctccttgggcagcaccttcacagacacacccaggaacaatactttgcatccttcaacttgattaagttgacaatattaa

SEQ ID NO: 210831 - DNA, 452 bp, Homo sapiens
gaggccagaagacttagccagtctcatctttccaccttctgcctgcctttattctggccttgctggaagcctattagattgtgcccacccagattgagggtgggtctacctcttccagtccactgactgaaatgttaatctccttgggcagcaccttcacagacacacccaggaacaatactttgcatccttcaacttgattaagttgacaatattaaccatcacaagatttattatactattccctatttttaaatatgtttcagtttgttctatagtaaagtgaggaaaaaagctgctcactatcactcagctagtgtattagttacctattgctgcatgacaaattaccccaaagcttagcagcttaaaacactgcacttttattatcacactttctgtggatcagaaatctgggctcagcyggttcagggtctctcacaggctgcaat

SEQ ID NO: 210832 - DNA, 557 bp, Homo sapiens
atcctccttcctgtagtttccctgatatccaattcactgccttttattcccaccttcactaagtgcctcacaaatgctggacgatgagatggggctggaaggtacaagacagtccttcagtcccatgtttctctttatctctccacttctttccttttcctgtcacttaaatcatctcttgtgttttgcatccccacagctggtcctgaaggtcagcaatctggcactagaaggttctgacccatcctgggaatgctgtgggagaagatacctgattccagggcggttcaggagcaggtatcatcctcactgctggcctgccgctccgggacgcccctcccagcccttggacccaccttcacatggtgaccagcactcctgtcaaagcaggcccaggccygcccaccactccttcccatctagttcctctccatggtcaccattctattcctgctcctgacatcaccttagctaaactgctctctatgtgctgatcattgcggattgacagcctggaggacagcccagggaacggctgcccctccactgacctcttc

SEQ ID NO: 210833 - DNA, 458 bp, Homo sapiens
agaatctggtagtgctctccagtgaaaagacatgtacaagtaactaaacaaaaatccagttaagctgctaggtgagaaaagtaattgctaagaacaaagcatgtctactgcatgaaatgctattttttaaaaggccatggctacagtttccatgtggaggcttggmacaccacagctttgaagggtaacaggcactattcttccaggaggctgatactgtgaaggtcacaggttgtttctgttacagggaagggaggtaggtacctggaggctgcaggaaaatgcatggccgacagggccctgagacggtgggggtggaatcagcacctctcctcaatcagacatagccctgccccatttacacctcagacatcgacctccatggagcagacacatgtggaatgggggcatcccaaattatgggtaaggtcagttccatggggcccccagaattcttc

SEQ ID NO: 210834 - DNA, 620 bp, Homo sapiens
atcttcctttccacaactgaccacatcctgaagataatatctcctggactggctatgctaactcttcatgaaaygtagagaactggccaaggattcgaaagtggtttagcagaggatctgataaattcatctatacgaaggtgttagggtctgataaccctttaacgtgttatctttccaagcagacttgcattattatagagcacagacaaagtaaattgttatgcatcagctgataaggcagtagatgctggctcaattttccaaacatgaatatgtttgatgtaagtggaacatagaaactaggtggttaagtattagatgatttgggatgtggtaagatacagtggatacacgttattaagaattgggtttggattgtgtatcaaatggtatgcttttacccagaaataatagattacagaactaaaggtggctgaaagattgaggaaattttactatattatataacaagaactccagtttggttaatttaatagcaggaatgtttcctctttctgttgtaccccatatgattgattgccaggtgctatagcctgttctatgtattatgaaaatcttaattacagaaaatatctctcctttcactccttgggcaa

SEQ ID NO: 210835 - DNA, 569 bp, Homo sapiens
ctctcctttcactccttgggcaactttttttaatagaagaggctttacagmatccctttgtattaatcaacatggacttacagccatagaaatatcaccagaattctatggtcaaatataattaaggcttatttcttgctcaggtcatattctggttcaaacagactggagtgaggagaatgttctgttccatgaagacattcagggatccaggctccttctatttggtagctgcagcgtcttctggggtttcagaataacatgctggatcctctgcacctgccctgtagatggaaggaaacgtaagacatcctctcagttctcattggtgatgtgtgagtcccaagcttatgaataaatgagtcactgtcaagagaatgaaaatcatcagactggtttatgttgtgcacaaaccctaaggtggccccccaatattgcctgtcttctggtatccgcactatccgcgcctttgtataatccctcctgccctgagtgtgagataggagactttttctaaccaatggaaggtggcaaaggtgtgtgagtcacatccttgagtatgttttgtt

SEQ ID NO: 210836 - DNA, 495 bp, Homo sapiens
agaatatcactacatacctattagaatggttagagttaaaaaagtaaaaaagatacgatgaaatactgtaaaggatgcagaaaagggggatctggtgagaattgccrgtggggatataaaatgctacagccactctggaatatggtgtgggagttgcttataaaaactaaacatgcacttacaatacaacccagcaattgcactcctagacatttatgccagagaagtgaaaacttatgcttacacaaaaatggggcatgaatgtgcataccaacttcattggcgatagcaaaaaagctggaaatgatatagacatccttcaatgagtgagtggttgaacaaactttggtacatccataccgtggaatagtactcagcaataaaaaggaacaaactattgatatatgcaatcacttgaatgaatcttaaaggtgttatgcttagcgaaaataaaaaaaaaaacagcaatctccaaaggttacaggatatgtgatt

SEQ ID NO: 210837 - DNA, 429 bp, Homo sapiens
caggatgagttcctatgtttgacttgaagagggaaggaaaaaataacacaaaaacaaaaccaaaaacgaagtgaaaacatgttcttcttgcytcttgctgactcactgttccaaccaatcaagacatcttccacctgggcctccaatttgggaggctgggagacattgcagggacgctgggagctggcctgggagaggtggagtaagaagttccaagcagagcctttgggaggcatggcgatgagcctgctaagaactcaccggagagggcaggggcaggacagggcaccctcccaagtacctgtgctcaagcaactctggtcagaagacctgcctatccggttctgctgtttacttgctgtgtggctttgggcaagccatccaacctctctgagcctcaatgtttctcagctgtcaaatggagaattc

SEQ ID NO: 210838 - DNA, 423 bp, Homo sapiens
caggatgagttcctatgtttgacttgaagagggaaggaaaaaataacacaaaaacaaaaccaaaaacgaagtgaaaacatgttcttcttgcctcttgctgactcactgttccaascaatcaagacatcttccacctgggcctccaatttgggaggctgggagacattgcagggacgctgggagctggcctgggagaggtggagtaagaagttccaagcagagcctttgggaggcatggcgatgagcctgctaagaactcaccggagagggcaggggcaggacagggcaccctcccaagtacctgtgctcaagcaactctggtcagaagacctgcctatccggttctgctgtttacttgctgtgtggctttgggcaagccatccaacctctctgagcctcaatgtttctcagctgtcaaatgga

SEQ ID NO: 210839 - DNA, 429 bp, Homo sapiens
caggatgagttcctatgtttgacttgaagagggaaggaaaaaataacacaaaaacaaaaccaaaaacgaagtgaaaacatgttcttcttgcctcttgctgactcactgttccaaccaatcaagacatcttccacctgggcctccaatttgggaggctgggagacattgcagggacgctgggagctggcctgggagaggtggagtaagaagttccaagcagagcctttgggaggcatggcgatgagcctgctaagaactcaccggagagggcaggggcaggacagggcaccctcccaagtacctgtgctcaagcaactctggtcagaagacctgcctatccggttctgctgtttacttgctgtgtggctttgggcaagccatccaacctctctgagcctcaatgtttmtcagctgtcaaatggagaattc

SEQ ID NO: 210840 - DNA, 543 bp, Homo sapiens
aaatttggctgcagtgggggtaagaatggccactgtcatggagaggagaaacaggtgggggagaaagattgggatgctaacctccacacaatttttgggttgttagatggggaagaaggattttcaaagaaccctttgcattcacattgaaaggaggtgccaataggttagtgtttttaactcccatgggacttggatggagaatttaaccacttagcttgctctgatgctgtttcaaggaagtaaacattacttagatacccaggataatatcccatccctaccagccccagaagcccaacctcttggttattttattctgaaagaggagagaggtgattactggttagattcctgttgccttttaccacagaccaccagcaaatacaaggacaactaaaactgttctcaggaaagataagtggttacaagctccaggcaaaacaaggtgagaaccagcttctgagagggtaagatgatagccttttgtatttaatttcagcccgataaatcatcccatygtgcaactttagtttcaatgtt

SEQ ID NO: 210841 - DNA, 515 bp, Homo sapiens
tggcagtctctccaaagctccactgatagcaggaggctggtggaactctctaagcagtaggctcttggaagagtaaaggaccctccaaagcagcaaggaaaggaagctgttagggctgatgcctgttcttgccaattcccatggtggagtctctaaaatgatccaccaagtgtagttcccccaacatctgcccacctgtgctcttgcctctgcctggtgggatgcagagaaacacggcaggagtattccraaggtgggagtcctctgcccacacacaagccctctaagtgtgttttctggctcagtcctggtacaaaacaccctgcagagtcactttgattcctcacgttcctcagcagtacagggtgatgagcagagctctagctggcttcaggaacaaatcttccatgctggtagctagtctccagagatggccttgatggttcctctactttctgtgggctcaggctgctcttcgcatcaaaaagtggacctagtttttctctcccctcgaa

SEQ ID NO: 210842 - DNA, 379 bp, Homo sapiens
atggccatttgcagaggggaggaggcaatgctcttgtcctcacttttccgaagagagaaatctttacttcctgtttttgaaagcgcagttttcaaatcttgcttagcgctccccatttgctgacttggggatggtgctactgtgtccgcacacttgtggttctcaaccttggctgcatattagaatcatctggggaactttggaactagtattgatggctggacccccctacagascaattggctcagaatttgtgaagccattcatgtagtatttattaagtgcctactgtatgcaaaggccactgtgcacctcagtactaggtcagaggtttgggggtgatagtcaaatataactgtgactttgttgttgttctcaa

SEQ ID NO: 210843 - DNA, 407 bp, Homo sapiens
gctccattcagttctagagccaggatatctataaagcaaagttggaaaactggtttcatctcatgagctactctgatgagtaggtctggagtcttgtggggttttgtttttgtttttattttttgtttytgtttttagagacaaggtcttgctctgttgcccaggctgaagtgcagtggcacggtcagagctcactgaaaccacaagcccctggcgtcaagcgatcttcccacctaaggcttccgagtagctaggactacaggcgcgttccatcacatctggctaattttagtttttatagagatgggggctcactatgttgcccaggcaggtctcaaactcatggcctcaagtgatcctccagccttggcctcccaaagggttgagattacaggtgtgagccactg

SEQ ID NO: 210844 - DNA, 407 bp, Homo sapiens
gctccattcagttctagagccaggatatctataaagcaaagttggaaaactggtttcatctcatgagctactctgatgagtaggtctggagtcttgtggggttttgtttttgtttttattttttgtttttgtttttagagacaaggtcttgctctgttgcccaggctgaagtgcagtggcacggtcagagctcactgaaaccacaagcccctggsgtcaagcgatcttcccacctaaggcttccgagtagctaggactacaggcgcgttccatcacatctggctaattttagtttttatagagatgggggctcactatgttgcccaggcaggtctcaaactcatggcctcaagtgatcctccagccttggcctcccaaagggttgagattacaggtgtgagccactg

SEQ ID NO: 210845 - DNA, 407 bp, Homo sapiens
gctccattcagttctagagccaggatatctataaagcaaagttggaaaactggtttcatctcatgagctactctgatgagtaggtctggagtcttgtggggttttgtttttgtttttattttttgtttttgtttttagagacaaggtcttgctctgttgcccaggctgaagtgcagtggcacggtcagagctcactgaaaccacaagcccctggcstcaagcgatcttcccacctaaggcttccgagtagctaggactacaggcgcgttccatcacatctggctaattttagtttttatagagatgggggctcactatgttgcccaggcaggtctcaaactcatggcctcaagtgatcctccagccttggcctcccaaagggttgagattacaggtgtgagccactg

SEQ ID NO: 210846 - DNA, 608 bp, Homo sapiens
ggtagatctctgaacacaggtgaccctagaagtgctgtaacttctaggggaatggctgtgttgagtcaaggcaggatgacagttcagcctcctcccaggctagtgcaaagggctcttcactcggattaaaaccttctctcccagaccgaattgccaactcccaacacccctcctacagaaaatttggagtcctcgcttattccctggcagcccctacctaatagggtggtgaattaattatcaaacatgcgacagtttagcgaaaatggcaacactttggaataagtgactgtaatgtgcatcctggcgcccattttgcaggtcagttgctctccctggaaggaagagtgttctcggatttcaccttaaaggaggaaggctgccagaactgaactagcacttctgaatatcctgaggcgaggtccggtgacttccttgggaagctctgccrcgcccccaccccaccctaccccaccctaccccaccacagcaggcgctggcagtcctgggaccaccagggtctgaggcccaaatccttcctcactaaggggaggagaggggtgttcggcagggcaggatgggaaggcgtgcttgggcgggattgtgac

SEQ ID NO: 210847 - DNA, 430 bp, Homo sapiens
ccagtcctcttcactccagcaagaagccccagcacagcttccacagctccttgaggaagaaccttcttcaatgcagcaggaggccccagctctgcctccagagtcctctatggagagtctaactctaccgaatcatgaggtgtcagttcaacctccaggtgaggatcaagcttattatcacttgcccaacattacagttaaacctgcagatgtggaggttaccataacttcagagcctaccaatgagacagaatcttcccaagcccagcaggagaccccaattcagtttccagaggaggtggaaccttctgcaacccaacaggaggccccaattgagcctccagttyctcctatggagcatgaactttccatcagtgagcagcagcagccagttcagccttctgagtcttctagggaggtcgaatcttct

SEQ ID NO: 210848 - DNA, 608 bp, Homo sapiens
tctggtgattgacactgaacagttcaggctaatttgtcaatctctcatcaaagagttcaactgctttagaaacctttgtcccagccttgacatcaaagcattccaaccatgaacattttcttcttggttgtcattcatttttggtacaagtatatgtcacaggtgacatcatacctcttcaactataagttcccctttacaaggaacacaccattaccttttgtgtcccaatgcagatagcagaaaataggaattttaacaaaattggtractcaagattgaagctgagatatgataaacactttttggaataaattattgttaccagtttctctaagtggagaataataagaataaacacctatgccaatataaaaaaagtttatgtaatttttttctttcttttttttgatacagagtcttgctctgtcgcccaggctggatggagtgtggtggtacaatctcagctcactacaacctctgcctttcaggctcaaaccatcctcctgcctcagcctcctgagtagctgggactacaggaatgcaataccacgcccaactattttttatattttagtagagacgcagtttcgccatgttgctcaggc

SEQ ID NO: 210849 - DNA, 558 bp, Homo sapiens
caaaaaaatccttacaaaactagtaaagagtatctcttactaatgaaatttttttactctaaatatgcgatgtcaaaaaaggcaacttttgcactgaggaaaggagactgtgaatgttttaactgggcttattcatttttaaaataattcttgagggtccatgacccatctgacattctgataaaagtgactagccttctctccaaaatgtttaattccaggaggttcattagattccctgggagcaaacttagggccccaggtaaagaacccctcaattttagttatgttttcaaataagaaaacagaaatagacttaataatgaggcagggatgtcagccagggtggggcaagttgagtatcccttatttgaaatgcttgggaccagaagtgttttgaatttttttggaattctggaatatctgtgttatacttactggctgagcatccttaatccaaaaatccaaaattcaaaatgctccactgagcatttcctttgagtggcatgtcagtgctcaaaaygttttagattttggagcaattcatattttgaattt

SEQ ID NO: 210850 - DNA, 253 bp, Homo sapiens
gaattctgagtgggcagaggaaatcctaaggcacataaggaatgtgtattagtctgttgtcacactgctataaagaactacctgagactgggtaatttaagacgaaaagaggtttaattgacttgtagttctacaggctgtacaggaggcatggctgggaggcctcaggagacttacaatcatggcggaaggcaraggggaggcaagcacgtcttctcatggcggcaggagagagagagcaaaggggaaagag

SEQ ID NO: 210851 - DNA, 563 bp, Homo sapiens
cctatgtgaattcaaaatagctgaggcaggtctcagtcaattcaggaagttaaggatgctcctgtgacatagccttgggaggwcctgaggacagatgcccatggctctgggggtacagcttgctttctacattttagggagacatgagacttactaatgaacaataataagatggtgttggcaccatgtcatcatttgcccttttctcctccttggcatttttttaaaaaggcacttccagctgaaaagaagttgcaggagaaacatcaagagtgaaagaggggaatgatggcagccaggaggcgagcagggccacacaggcagcccctccttcagcccaggagacacctgtgccagaccccatgctttgaagggcccttaccctctgatggtgcaatgctgggaggtagatggttaggggaagtggggaaagatccctgagaccataaccatgcaaaaaaaaaaaaaaaaaaaaaaaggctttttcccacatcaattgacttaaaatcaagcccagcctcggaatcatccctaacgatttgattgcattaagcatgtgtgaa

SEQ ID NO: 210852 - DNA, 554 bp, Homo sapiens
caattcaggaagttaaggatgctcctgtgacatagccttgggaggtcctgaggacagatgcccatggctctgggggtacagcttgctttctacattttagggagacatgagacttactaatgaacaataataagatggtgttggcaccatgtcatcatttgcccttttctcctccttggcatttttttaaaaaggcacttccagctgaaaagaagttgcaggagaaacatcaagagtgaaaraggggaatgatggcagccaggaggcgagcagggccacacaggcagcccctccttcagcccaggagacacctgtgccagaccccatgctttgaagggcccttaccctctgatggtgcaatgctgggaggtagatggttaggggaagtggggaaagatccctgagaccataaccatgcaaaaaaaaaaaaaaaaaaaaaaaggctttttcccacatcaattgacttaaaatcaagcccagcctcggaatcatccctaacgatttgattgcattaagcatgtgtgaaattgcactgtggagtgctacaggaattc

SEQ ID NO: 210853 - DNA, 563 bp, Homo sapiens
cctatgtgaattcaaaatagctgaggcaggtctcagtcaattcaggaagttaaggatgctcctgtgacatagccttgggaggtcctgaggacagatgcccatggctctgggggtacagcttgctttctacattttagggagacatgagacttactaatgaacaataataagatggtgttggcaccatgtcatcatttgcccttttctcctccttggcatttttttaaaaaggcacttccagctgaaaagaagttgcaggagaaacatcaagagtgaaagaggggaatgatggcagccaggaggcgagcagggccacacaggcagcccctccttcagcccaggagacacctgtgccagaccccatgctttgaagggcccytaccctctgatggtgcaatgctgggaggtagatggttaggggaagtggggaaagatccctgagaccataaccatgcaaaaaaaaaaaaaaaaaaaaaaaggctttttcccacatcaattgacttaaaatcaagcccagcctcggaatcatccctaacgatttgattgcattaagcatgtgtgaa

SEQ ID NO: 210854 - DNA, 556 bp, Homo sapiens
gtcaattcaggaagttaaggatgctcctgtgacatagccttgggaggtcctgaggacagatgcccatggctctgggggtacagcttgctttctacattttagggagacatgagacttactaatgaacaataataagatggtgttggcaccatgtcatcatttgcccttttctcctccttggcatttttttaaaaaggcacttccagctgaaaagaagttgcaggagaaacatcaagagtgaaagaggggaatgatggcagccaggaggcgagcagggccacacaggcagcccctccttcagcccaggagacacctgtgccagaccccatgctttgaagggcccttaccctctgatggtgcaatgctgggaggtaratggttaggggaagtggggaaagatccctgagaccataaccatgcaaaaaaaaaaaaaaaaaaaaaaaggctttttcccacatcaattgacttaaaatcaagcccagcctcggaatcatccctaacgatttgattgcattaagcatgtgtgaaattgcactgtggagtgctacaggaattc

SEQ ID NO: 210855 - DNA, 554 bp, Homo sapiens
caattcaggaagttaaggatgctcctgtgacatagccttgggaggtcctgaggacagatgcccatggctctgggggtacagcttgctttctacattttagggagacatgagacttactaatgaacaataataagatggtgttggcaccatgtcatcatttgcccttttctcctccttggcatttttttaaaaaggcacttccagctgaaaagaagttgcaggagaaacatcaagagtgaaagaggggaatgatggcagccaggaggcgagcagggccacacaggcagcccctccttcagcccaggagacacctgtgccagaccccatgctttgaagggcccttaccctctgatggtgcaatgctgggaggtagatggttaggggaagtggggaaagatccctgagaccataaccatgcaaaaaaaaaaaaaaaaaaaaaaaggctttttcccacatcaattgrcttaaaatcaagcccagcctcggaatcatccctaacgatttgattgcattaagcatgtgtgaaattgcactgtggagtgctacaggaattc

SEQ ID NO: 210856 - DNA, 322 bp, Homo sapiens
ctgacatggcagagaatgcwtgtctgcacactaattcaattgcatgcatatatctgtaaactcagatgattctgcaggcctgctaaaagcagaaatgtgtctagcacttgggtgtcagaatacagggagccctggtacctgtggtcaactacaacacactcatcttttaagtgtagtgttaattgcttagctttttatttttatcttctctggaatataatattgaattgttcattcatcttcctacttattttgtattcattttaccacatttactccctaagccatttaaagtatgttttctaaagaaagagcagtgtca

SEQ ID NO: 210857 - DNA, 393 bp, Homo sapiens
aaaatatcttcataatgtaacatatatagtataaaacatactaaccatattcaaggaaataataaattgggcttaagcaaaattaaaatcttcttttcatcaaaagaccttgttaaaaataaataggcaagacactgactcaaacatattatttgagattttatatgtatatgtatgtatatatttttaaaatctcaacatattcatgtatatgacaaaaagcttttattragaatataaaaataatctctatgaatcaataataaaacatcctttttccccagaaaaaaaattaatgaaagcagaagatttgaacaaacaaaacgtataaggacatgtagaaaagacaaataagcacatgaataggtgtttagcatgagtgcaccaggttga

SEQ ID NO: 210858 - DNA, 523 bp, Homo sapiens
tctgctctttctgggtcccaagcctgtagaaacagagcgcgtgagtgacttcctggggtccagagcgccagaaaccccaccctccrcccgccctcctgtaaggcagattcactctcccttcccacccacccaatatgcagggtcactgctgcttcttctactctgttttcaggggaatatggtgcttttcaaagtatttggaactgaaataagagtctccatttaaagactgctcttctctctaccaacacccagaaaaaccagggctgttgggacccacacccaccctgccgtctgttccatggcttgaaagccagtgttttccacatcagtgaattatgatggtgctaaaaaaattaaatttaacagattttaattgagcaaagaatgattctgaatgggctcacagcaaccctggggttgccacatgatatgctttggctgtgtccccacccaaatctcatcttgaattgtagctcccataattcccacatgtcatgaaagggacccagtggaaggtaat

SEQ ID NO: 210859 - DNA, 518 bp, Homo sapiens
tcacaagaacaccaatggaaagacctgccctcgtgattcaattacctcccaccaggtccctcccatgacacacggggattataggagctacagatcaagataagatttgagtggggacacagccaaaccacatcagaagtgctcctccctgtgtcttctgtttcaatcctgggaaaattccccaggagcccagtgtagtttcattctgtggaatccaagtcaacaaatatttaaaatgcctgtgagacagacagagggtaatgcaatcagcctgaaacccaagggctgcccagaaaaacagcagacatacagagtaaagctcctcaccgcctctgcactgctgaataatgtaaaagcctggtcaccgagccgctgggtccagctcagcctcctgctaacactgggtgaaacagagaragtgggttaggatttctgctttcctcaagcttgactcctttccattatcccaaattgctgcttttccatatttaacagtcattttctcaacatgagttcca

SEQ ID NO: 210860 - DNA, 467 bp, Homo sapiens
ctcttgcttcccccagcttctccacttacatttttcataggttccccttatgtccttgaaattgctcaattactcagtctattctaacactccaaagatatgatttttttcttctcagccctaatgaagaggttaatttcatgaggtcttggttgctttctggtaagtgggtaagattacggatgaggacaaatatcttttaagagtgtttgtatagaacacaaaaagaattgattattcccccgctaactggtagttagctgcagaagatgttttatataatttggatgccctttttttataaccctcttgatttgaatttcttctgccaagaatttttttttgtcartgaaaacctatgaagtttattaaaagcaatcatcagtggaatgactctattaattttgctcaaaggtggtaaaatgtctccctaagacattttttgaaaacatttttataatttgcat

SEQ ID NO: 210861 - DNA, 387 bp, Homo sapiens
ggacctcagaggggaggaagggcctgccagttggtccatgggcagccatgggcagacctggaagaggcaccacgaatccccactccagtctgcaggactggcagcccggccctccctggcctgaaggtgggaccttactggggacccgcccccttctgcccagaaattaatctgactgctactgtcattcttggccccagggctcggcccccaccccactctgagattggagccggcaccgggatcagagagaggccaggcagcgggagcagacacctctgagcctgcatggatgctgtaaagggggtagggccttcccagcccccgagggtgcaggckgcagagacggtcaggtcctgagcctgggcgggctgccacagtagagct

SEQ ID NO: 210862 - DNA, 437 bp, Homo sapiens
gtccctgttccaggagaagggctgggtatgtgtcccccaaaggggagagcattcgagaaggatggcgccagcctccccagaactgacctgtggttwaaaaaaaaaaaaaaattgtgctttttaaaagatgagttttatcagctcacacatccttgtagagtctaatgcagatcttttgtgtgtgtggaaatagtaatcataggtcattgatatccgcacagagtcaacaacaagattctcctttcatgggcagcactggaagggttgttactctggaatggtttaaaagaggcgtcacatggcttgtttgtgctgatgtcactgcctcgctgctctcctgtggcacctcctcggtccctggccacagggcacagagccaagcacatctcatgctcttggcccagttacgcttctgcccaggggtaagtcagctggag

SEQ ID NO: 210863 - DNA, 413 bp, Homo sapiens
cctacggagactcgaggacttatgaatgtggtgttctggctgagattctgggacagaagagagrcattaggggaaactgagggaacccaaatagactatggactttatgtaaaggtaatatattcctactggttccgtcattgtgacaaatacaccatactaacgtacaaggttaataatgggaagaattgaggaatatatattctgtgctatcttcacaacttttctgtacatataaacgtatttttaaataaaaagtttgtctaaaaaaataaacagggaacaagctggagaggctgctctgtttagcaccctggaaaagggtaaggactctagacttgctgggggccatgtaggaagtagggggacccacagtaacatccgggaaaaatgtgggggtcattctgaaagat

SEQ ID NO: 210864 - DNA, 413 bp, Homo sapiens
cctacggagactcgaggacttatgaatgtggtgttctggctgagattctgggacagaagagaggcattaggggaaactgagggaacccaaatagactatggactttatgtaaaggtaatatattcctactggttccgtcattgtgacaaatacaccatactaacgtacaaggttaataatgggaagaattgaggaatatatattctgtgctatcttcacaacttttctgtacatataaacgtatttttaaataaaaagtttstctaaaaaaataaacagggaacaagctggagaggctgctctgtttagcaccctggaaaagggtaaggactctagacttgctgggggccatgtaggaagtagggggacccacagtaacatccgggaaaaatgtgggggtcattctgaaagat

SEQ ID NO: 210865 - DNA, 579 bp, Homo sapiens
cactgtcagttttagccctaataagtgaagtgtgttccttgatggaaccagagatcccaactcattcaagaggacaataggaccccttgaagagtgaatgaaatgcatcaatatagaatgtacacattcaaaaatctatcagttgacttggtgcagtagctcatgcctctaatcccagcactttgggacactgaggagcaagaattgcttgaggccaggagtttgggactagcatgggcgccaaagtgagacccctgtctctacaaaaaattwaaaaattagccaggtgtggtggtacacatccatagtcccagctactgaagctgaggcaagaggatcacttgagcccgggagtttgaggctgcagtgagctacgattgtgccactgcactccagcctgggcaacagaacaagatcctgtctcaaaaaaaaaaaaaaaaaaaaaaaaaaaaggaaaacctatgcgctgcaagtggaagggatgttattgttaaagaccccacacagtccaggggaataaaaggattcttgagaatgaatgaaaagcatcaccacagaatataaatgttgagagaaccg

SEQ ID NO: 210866 - DNA, 581 bp, Homo sapiens
aatattaacactaaggtttcccatcctgtacatgttatttgaaagtaaaaataagatacaatgttgaggaacacaaagcatcactttcattgtctgatgaaaaatcgccctgaggtatctatctgtttaatggtttctattgtctgttccttagctgtgccctccctttctaacattggaacaaagcctaggcaacatcagtttgtctctgaacaaactgcattcttcacttttactccagtagacagtcgaggtcagcagtttttcagccgtgttgagccctaagaattccctccgaggggtttcaggggctgttgtatgggaagggggaagtgggctgggtcttggctcctcttcaacttagctgccttctttttcaaattggagcaagatatgctttgaataaagggttccacagctaaaaagagtttgaaaatagttctgtgagtcatcttgtttttgctggcaaactmtctctccctccctggcccagcccccattctccatcacacacgtacgattgcttcttccacttctcttctcaatgtcaccaaactgtggttcacagtggctccaaagct

SEQ ID NO: 210867 - DNA, 616 bp, Homo sapiens
ttaccccacaagtgactttacatgtccgtgaaaaggcagagacgacctcaatccagactgactggtggtgattagaaaaatgtcatctctgttttcaatttaaagagtaattgagtgatttgggtgaaagaatcttcattttcagcagatggaaagtttggaatctttggagccttccagcaatttgaaaagggccttgagaagaccttctagtaattagaagagcttcaagaaacaaaacttataagtctcccctcagttttagggcatagctgttgttctgttgtttttggtaaggcgagtagggatgaaggtcaggagagagaagtggtgatttgctgataggtrgacagagaaggaaggcgagttcttcttgagggacagactgagctgatgaatacactctactgttaaatattggcttccaaagaggaccaggccacagcagagtcaaaagggactcaagttttgttccttattgatctgctgggaactagaagcccaagctggatggttaccttttacctttcatcgaggaatcagcccaaaaaactcgttcttgaagtgtggaaaagcagaaagccaccctctaacccaactatgtaaacaacagaaa

SEQ ID NO: 210868 - DNA, 633 bp, Homo sapiens
acactgtgtaacttcagtgtacaatgagcagctgggagtgttttgggcgaagttggtataaaagggtgcctttaatacaatatttaggtaggttgacctgactgcctaatttatatgacgaaatattaaagccctgggtactgtgaggatttcctagtactaaagtttgtccttatgtttccatctttctcagtattgagattacaaatcttggaacaccagttctgagggagcttggtagtcttcccttcaacaaaggctttaagacacaggrcatatgccttgttttctcaagtctcatttcagaagattcttcccactgcaaacaccaatgctattttttttccctcctgacctttgtcaactgtgttgctgtactgcatttggaagtattacaatggtcattacctgccctgtttattcagtgttaagtattaacaaggcctgtgctatctcagctgctgtcatatttctccagaaaagaaatgcctatgtaaatgtcctaatgcaaacaaaagactctttttctaggtgggggtggcagaagacttggagacaattgaaaagatggaagaaaacagtagatattttaaaagaacagttttcagaaatatatgaaataattgcaccatg

SEQ ID NO: 210869 - DNA, 487 bp, Homo sapiens
tttcatttaaatatgcaagtttaataaacataattcmcccaaaacagagaaatgaagcaaattcttacaactgattctttaggtctacactcttaggccacattctaagatgttttcacttgaaatgctgttaattctgacattttaactttttcttttggaaaaattatcataagccaaaggattgtccctaatattgaaaatatattactgtcacacagtttcacaaaattattcaccttttacttttatttacatattactctcctttaaaacagtgtggaaagtactacctctctacaagttgaaactgactttttactttcttgtttttatagcaagagcatattaatgatataacagcaatagctaacactcatctacatgcctagtatgtgacaaacattattctaagtaatgtatatgtgtgtatcaatcttaacaaccttataaaatagatactattattatccaattttcaagatgt

SEQ ID NO: 210870 - DNA, 608 bp, Homo sapiens
ttagatcaaaggagaaaggcctgacttacactatgaaaaacactggttagagacgtgaaaacatatcttctctgttcaatgccatgagattggctcacctgagtaggctgcagaatcttcttcccaaatgcttaataacaaaagtgagagaaccatccaaaatattctgaaaaaaatctcacagaagttaggatgggctaaattaaccatcctcaaccccattactctttcctaagagtactcgatggctatgtttccaaattattcaaaacatgttccctaatgtgttaatgggggagagtgaggaagcagagacagattaaaaagactcaagagatataacaaccaatgtaatgtgtggactttgtcgggatcctgattgacacaaacctacttggaaaaggctgttttgggacaattgagttaatytgattatgggttaggtattagatgatactaatattgttaggcttgataatagcatcattgttatatgagaactctccatttttctgagaaataacctaaagtaaataagggtgaaatgacacatctgagatttttactttgacaaaaaagagggagacgacagatgaactgagtatgac

SEQ ID NO: 210871 - DNA, 446 bp, Homo sapiens
gttccttggccaaaaaaaggctaggtaaactcaaggtactatcatcattttgcaaatatgttrttccactatataaaatagcctaaattagtaaatgcaattccacgtgctgggtcagctgagcattttttttttttttttacatttgccagattccccttgttttgtctttctagccaatagaacaacactaaaatatatggagaatttaactaacttttgaaaaagagataacacaagttagaaccagaagaagtcatctgtgccataagtttgtgtcttctaagagccatcagccaggcaaaatgaagtgggaaacttgaaacttaacatgtataaatgatttgtgttgttttgttttaatgctaagtactcagcaaaaagctgagttattagaaaatggacactagcctgtgcttgtgggcataaattctccatctatgaga

SEQ ID NO: 210872 - DNA, 458 bp, Homo sapiens
tcaaaattatgccaattacttagatataatacaactaatttctgccactcatttacttgattctcataaagataaacaataacttcttatttgtattttctaatatttaaaatttccattattactactttccttaaggtcttcttatttcttgatattaatattaaatgaaccactgaatggaaataagaagtaacacacatagatacaaggtgagacttcaaccagagtgatttatacaatctacagtaggagagttatattgagaaaaagtatataacaatgttacatttcatagaaagttagcagaaaagtaaacattaggaaaatctcactcaatttaagactttggacacttgtcttactctaaattggccacaaacttcactccatagtgagaataatcttctaaaaaatagaaattacattrcattacacttcaaatcctccaatcatgt

SEQ ID NO: 210873 - DNA, 545 bp, Homo sapiens
gtttaatgggagtaatcagttgaatgtgaaagacagaggagagactggttgagacatwgggatgtttaaaatgattagcagacaataattgaaatatagaaacagatgtggtttttgtatttgaatatttcaaatggcaaaagaagaaataaatatcttcatttgataaaaaaaataagagcccataaataagactgtaagaggacctaagagacattaggaaaagtgcgaaaagcctgaaaagtgtggtacatgaaagccaaagggaatgaggatcgtaaatgttactaggtcaggtaactctgagaatgtatgcatgagataatctaaaagaagtgcattgcgatccttgccggatcatggattgctagttacagcaaagactactgtaacctggtgtgtgtgtgtgtgtgtgtgtgtgtgtgatatgtagatatataatatattttaatctaaatatatttaaatatatacttaaacagataaaagtgtatttttatagattaaaaatagagacatacagataaatgtaagaaaataagata

SEQ ID NO: 210874 - DNA, 545 bp, Homo sapiens
gtttaatgggagtaatcagttgaatgtgaaagacagaggagagactggttgagacattgggatgtttaaaatgattagcagacaataattgaaatatagaaacagatgtggtttttgtatttgaatatttcaaatggcaaaagaagaaataaatatcttcatttgataaaaaaaataagagcccataaataakactgtaagaggacctaagagacattaggaaaagtgcgaaaagcctgaaaagtgtggtacatgaaagccaaagggaatgaggatcgtaaatgttactaggtcaggtaactctgagaatgtatgcatgagataatctaaaagaagtgcattgcgatccttgccggatcatggattgctagttacagcaaagactactgtaacctggtgtgtgtgtgtgtgtgtgtgtgtgtgtgatatgtagatatataatatattttaatctaaatatatttaaatatatacttaaacagataaaagtgtatttttatagattaaaaatagagacatacagataaatgtaagaaaataagata

SEQ ID NO: 210875 - DNA, 545 bp, Homo sapiens
gtttaatgggagtaatcagttgaatgtgaaagacagaggagagactggttgagacattgggatgtttaaaatgattagcagacaataattgaaatatagaaacagatgtggtttttgtatttgaatatttcaaatggcaaaagaagaaataaatatcttcatttgataaaaaaaataagagcccataaataagactgtaagaggacctaagagacattaggaaaagtgcgaaaagcctgaaaagtgtggtacatgaaagccaaagggaatgaggatcgtaaatgttactaggtcaggtaactctgagaatgtatgcatgagataatctaaaagaagtgcattgcgatccttgccggatcatggattgctagttacagcaaagactactgtaacctggtgtgtgtgtgtgtgtgtgtgtgtgtgtgatatgtagatatataatatattttaatctaaatatatttaaatatatacttaaacagataaaagtgtatttttatagattaaaaatagrgacatacagataaatgtaagaaaataagata

SEQ ID NO: 210876 - DNA, 472 bp, Homo sapiens
aatcatcgttgtacacattggctacattttattatgtgttgcctcatttttatgtttttgtctttttttctgtcttttcatcttaagtgtttcaagaaaacaacaaatatatgggtgttgtttttgagctaaatrtaatatttatcttaagtacttttatatttcttatttttaaaaatttttattttcgattcagtgggtacatgtgcaggtttcttatgcaagtatattgtgtgatgctaaggtttgggcttctattgatcccattacccagataatgaacatagtactcaatagaagtttttcagccctttttccgctctcccttcctctttttggagtccccagtgtctatcgttttcatctttatgtctgtgtgtacccagtgttcagctcccatgtataagtgaggatatgcagtatttggctttccgtttctgtgttacttcacttgggataataatctccagct

SEQ ID NO: 210877 - DNA, 472 bp, Homo sapiens
aatcatcgttgtacacattggctacattttattatgtgttgcctcatttttatgtttttgtctttttttctgtcttttcatcttaagtgtttcaagaaaacaacaaatatatgggtgttgtttttgagctaaatataatatttatcttaagtacttttatatttcttatttttaaaaatttttattttcgattcagtgggtacatgtgcaggtttcttatgcaagtatattgtgtgatgctaaggtttgggcttctattgatcccattacccagataatgaacatagtactcaatagaagtttttcagccctttttccgctctcccttcctctttttggagtccccagtgtctatcgttttcatctttatgtctgtgtgtacccagtgttcagctcccatgtataagtgaggatatgcagtatttggctttcygtttctgtgttacttcacttgggataataatctccagct

SEQ ID NO: 210878 - DNA, 586 bp, Homo sapiens
taactcagtaatttcttctttttctcactccaacttcaatcagagcagttcttctttcatctatattgatagagattttccacataaaattttatttaaataaagaactgtgcccagaagaaaagataaaaaaatccagtaatctagtctaatccttacatgttaacartgaggaaactgggaccctttaaagtgaagttcatatgcaaggtcacaaggcataatcaaaaatcaaaatcaaagcactggagctctgatgtcttgagattttatttttcagtagttccaattggcagcatgtggctagaaacatgtctatgtgcttgctagtttctgatgggaaggggattagagtgttacagtgtgtaaataagtaaaactttgtttaatttaggccttttcctttattctacagcatatagccactaaacaaatggtgaaaaggcaagaaattttggatttctcagtcttgagattttctgcctaaagacttcctatttggggaagtcatccgctgtgtttctttattattgactcagttaaattatacctataactttctattatatcctgagatttatacagc

SEQ ID NO: 210879 - DNA, 586 bp, Homo sapiens
taactcagtaatttcttctttttctcactccaacttcaatcagagcagttcttctttcatctatattgatagagattttccacataaaattttatttaaataaagaactgtgcccagaagaaaagataaaaaaatccagtaatctagtctaatccttacatgttaacaatgaggaaactgggaccctttaaagtgaagttcatatgcaaggtcacaaggcataatcaaaaatcaaaatcaargcactggagctctgatgtcttgagattttatttttcagtagttccaattggcagcatgtggctagaaacatgtctatgtgcttgctagtttctgatgggaaggggattagagtgttacagtgtgtaaataagtaaaactttgtttaatttaggccttttcctttattctacagcatatagccactaaacaaatggtgaaaaggcaagaaattttggatttctcagtcttgagattttctgcctaaagacttcctatttggggaagtcatccgctgtgtttctttattattgactcagttaaattatacctataactttctattatatcctgagatttatacagc

SEQ ID NO: 210880 - DNA, 586 bp, Homo sapiens
taactcagtaatttcttctttttctcactccaacttcaatcagagcagttcttctttcatctatattgatagagattttccacataaaattttatttaaataaagaactgtgcccagaagaaaagataaaaaaatccagtaatctagtctaatccttacatgttaacaatgaggaaactgggaccctttaaagtgaagttcatatgcaaggtcacaaggcataatcaaaaatcaaaatcaaagcrctggagctctgatgtcttgagattttatttttcagtagttccaattggcagcatgtggctagaaacatgtctatgtgcttgctagtttctgatgggaaggggattagagtgttacagtgtgtaaataagtaaaactttgtttaatttaggccttttcctttattctacagcatatagccactaaacaaatggtgaaaaggcaagaaattttggatttctcagtcttgagattttctgcctaaagacttcctatttggggaagtcatccgctgtgtttctttattattgactcagttaaattatacctataactttctattatatcctgagatttatacagc

SEQ ID NO: 210881 - DNA, 586 bp, Homo sapiens
taactcagtaatttcttctttttctcactccaacttcaatcagagcagttcttctttcatctatattgatagagattttccacataaaattttatttaaataaagaactgtgcccagaagaaaagataaaaaaatccagtaatctagtctaatccttacatgttaacaatgaggaaactgggaccctttaaagtgaagttcatatgcaaggtcacaaggcataatcaaaaatcaaaatcaaagcactggagctctgatgtcttgagattttatttttcagtagttccaattggcagcatgtggctagaaacatgtctatgtgcttgctagtttctgatgggaaggggattagagtgttacagtgtgtaaataagtaaaactttgtttaatttaggccttttcctttattctacagcatatagccactaaacaaatggtgaaaaggcaagaaattttggatttctcagtcttgagattttctgcctaaagacttcctatttggggaagtcatccgctgtgtttctttattattgactcagttaaattatayctataactttctattatatcctgagatttatacagc

SEQ ID NO: 210882 - DNA, 205 bp, Homo sapiens
acctcttgaattcttctgcaggtaaatcagggatttcttcttggtttggatccattgctggtgagttagtgtgatttggggcgggggyggatgttaaagagccttgttttgtcattatcagagttggtttacttgttccttctcatttgggtaggctctgtcagagggaaggtcaaggggtgaaggctgttcagattcttttgtc

SEQ ID NO: 210883 - DNA, 575 bp, Homo sapiens
cattcattttttgataaacaattaggttgattccacatcttgactgttgtgagcaatgtgttttatctcccagctcaccactattgctttagagaacactttgcatttctggtgaaataaatcctgtgcataccttcaaccacctgcaagacaccctccccttgagaagggtggcccaagatgagcatgagaaacacccagagtctcttgtggctacatatcaaaatttctggattattttgtcaccatacaccaaaattttaggtttattattttggagtgatagtgcaaaaggaactaatggaattcagaaaacccaactttcttttgattcacatgaatgtattttagcctattttattrttttactcaatatatttgtgtctttatgtttaaagtacacttacagtaggcagcaaaatgttggatcttgctttttttatacaagctgaaaatctctgccttttcattagggcatttagattgggactctggaacctgtgactagtgggggaaaatgtggcctgttggccaaatccagccagcacctatgcagttacacatcatctatggct

SEQ ID NO: 210884 - DNA, 620 bp, Homo sapiens
attccaaccaagaatttcataacccaccaaacaaagctcatgagcaaaggagaaatgaaatacttttcagaaaaacaaatgctaagataattagttaccagtagacttgccttacaagaggtcctgaaggaagtgcaaaacagggatatgaaagaatgataactgccaccacataaacamacttaagcacatatacccttgacaccataagcaactacataatcaagtctacataataaccagaaaacagcacgatgacaggatcaaatcttcacatatcaacattgatcctggatgtaaatgtgctaaatgttacacttaaaaagacagagtggcaagttggatacagaaggaagacccaactgactgctgtcttcaagagacccatctcacaagtaatgacatccatagactcaaagtaaaggaatggaaaaagatttattaggcaaacagaaaacaaaaagagagcaggaattgctatttttatatgagataaaacagacattacatcaacaatgaccaaaaaggacaaaaaaaagagagcattgaacaataataaagaaatcaatccaattggaagatttaatcattctaaatatatacacacccaacattggagc

SEQ ID NO: 210885 - DNA, 627 bp, Homo sapiens
tagagaaagtatgcagcaggattgctccaaggctgaggggcttttggggagtatgtggcagagaagaaaagaatgaggaagtgaaggtgcactggaaattggttaaagtgatgaaccatggaatctagattgcagggcactgagtggttctccaccgtgactgcatgttggaatcaactggggggagccttaaaagccctgctgattgagcccttcccccagagcatctgacgtaattgattaagccagcttagtcatcctgagtcatgaaagctccccaggtgattctaatatttagctaaggttgcaaaccaaagcagtacatcaggaaaagaagtgaagttagattggggctgatagattgaaaaaagaatgaaaggcgaagggattggggatcccggatgtagtaggactcattgaggcctggattcaggagggaggctgcctytgagagtgggatttcagggtggaaggtcattatgaatttcaggtgtggcttagcagggagtgggggcagttgaggtgagctgggagggagacaaagtggctgctaagacagcttcagactgggtcaccttcgtgggtgtttggagttctctgggattgatggctggggttgatagaatt

SEQ ID NO: 210886 - DNA, 435 bp, Homo sapiens
cattcctaacacccctctatggctrtacattcgtgttacagtaagagtttcaatttagctaacaccatttatgttcttcatgtttgaaactgcttccctcttattgtaaaatggaaagtcaacagttgcaattgaagcaggaaagaataaagactcctaccctgttttttcaaaaaagataaaactgagcccacaaaacagaccataactgtttcctcaatttcctttggaacaactcagtgggactagaactttcaaaaggattatttaaatgcttagcttccttgtctctctgatcttacctctttgtggcttattcttaacacaacagccaaagtaagcctgttctttccctgttgaaaacctttcagtatcctctcatgttgctcagagtaaaagccaaaaatccttgctaagactcacaagtcctcacat

SEQ ID NO: 210887 - DNA, 413 bp, Homo sapiens
aaaaacgcctcctttttatattctaaaatatttagcrtaaattataaatagtaatcaacatttagtatgcattttaaaaaattgcattatttccagaaattaagaacattttcctgcattgccaaaattaacctgattccttagtcaaatttgcccagttgttcccaaaagacctcttatagccagtttgtctcaaccaggaccatgcattgcattggtttgtcatataaagatgagcaactccaacacaatgacctgtggaaaagaccaggccagccagcctgtagaatataggattcacctgattgtggtgtttaccttgttcctatatcccttgatttcactgaactggaagtgaaatctaaaggcttgattagattcccccaggcacttctggctggtgtacatcattg

SEQ ID NO: 210888 - DNA, 646 bp, Homo sapiens
tcgccccaacctcgctcttccaggccggcagcccgccgcggcctctgcgcatgcccggctctggcgccccgcggacccgcgccccggcmgccgggttgggcgggtggctttgtctttcgttttctgaagctccgggcgaaggggtttatgggaatgccgggtgctgggcgccgcggccggcaggcggagcggtcctgaggtgggaggctggggagggcgtgggctgggagcaaagacgaggggagaggtaaaatgaaggggtgctcgccgtgggtgcgaccctggcccgtgggaacccagcggtgataggttacgagtgtcccaccaaagattatttttttccaggttctcaacacccctggaatgaaacctgatgctaggttgatttttcttaggctgctgacattcctttcacatgtaaccttgtattgaactcttctgagcatcttcattatcgctttaaaagcttccctttaggaacggctccacagttaacgaaggaaatataaatgtagagcgtgcatagatgttagatggctaagaatatcaagaacatttgcatagcactttgttgtttttaaagtgaattattgaaacagtgcatgaggtagttgtttttaccccgttttacagacgaggcaggaag

SEQ ID NO: 210889 - DNA, 646 bp, Homo sapiens
tcgccccaacctcgctcttccaggccggcagcccgccgcggcctctgcgcatgcccggctctggcgccccgcggacccgcgccccggccgccgggttgggcgggtggctttgtctttcgttttctgaagctccgggcgaaggggtttatgggaatgccgggtgctgggcgccgcggccggcaggcggagcggtcctgaggtgggaggctggggagggcgtgggctgggagcaaagacgaggggagaggtaaaatgaaggggtgctcgccgtgggtgcgaccctggcccgtgggaacccagcggtgataggttasgagtgtcccaccaaagattatttttttccaggttctcaacacccctggaatgaaacctgatgctaggttgatttttcttaggctgctgacattcctttcacatgtaaccttgtattgaactcttctgagcatcttcattatcgctttaaaagcttccctttaggaacggctccacagttaacgaaggaaatataaatgtagagcgtgcatagatgttagatggctaagaatatcaagaacatttgcatagcactttgttgtttttaaagtgaattattgaaacagtgcatgaggtagttgtttttaccccgttttacagacgaggcaggaag

SEQ ID NO: 210890 - DNA, 627 bp, Homo sapiens
tagagaaagtatgcagcaggattgctccaaggctgaggggcttttggggagtatgtggcagagaagaaaagaatgaggaagtgaaggtgcactggaaattggttaaagtgatgaaccatggaatctagattgcagggcactgagtggttctccaccgtgactgcatgttggaatcaactggggggagccttaaaagccctgctgattgagcccttcccccagagcatctgacgtaattgattaagccagcttagtcatcctgagtcatgaaagctccccaggtgattytaatatttagctaaggttgcaaaccaaagcagtacatcaggaaaagaagtgaagttagattggggctgatagattgaaaaaagaatgaaaggcgaagggattggggatcccggatgtagtaggactcattgaggcctggattcaggagggaggctgcctctgagagtgggatttcagggtggaaggtcattatgaatttcaggtgtggcttagcagggagtgggggcagttgaggtgagctgggagggagacaaagtggctgctaagacagcttcagactgggtcaccttcgtgggtgtttggagttctctgggattgatggctggggttgatagaatt

SEQ ID NO: 210891 - DNA, 419 bp, Homo sapiens
aaaaaaataaatttatatgtaagaagccaagaggaaaattatttgaattacagatatgtgtctcagtttattatttattgttctgtatataatccttagagtcagagaggctcagcataattttttgtgattttactcactggaatctatgatagcggtcttgttgcttaagctctctgagcatcatttgcattgcagaattatttaagttaatatatagagagcattctgattagtgctgatcacttcttttatgtacaatggatgctccctacatccaacttctttctttaagcattcttcataaaccttattataaattattgtaggtaataaagatgraattaaaatggcaactttacacaagataatttccagtttttatgaacatacagtaagtgttgactggatccatgact

SEQ ID NO: 210892 - DNA, 495 bp, Homo sapiens
gagctgtattaaaaaatgaagttcaggctgggcgtggtggcttatgcctgtaatcccagcattttggcacagttatatcataaccattatgaaataaaaataactttttaaaatttatgtaataaaagataactttaaatttttatttaattttagtagttatgacttacttcttgggagatgctggtagattccttaggaaaaagaaaagayaagacatcttaattatatatcaattcagatattactttccaccatgcagtttaccactttttcacaaaagaacaaaactaggcaaatcattaggtgatattcagggtatctctaggcatatgttatgcactattagtagaaatatatttgaaaattaacaatgtataaagttgaatctttatttggaaaacatataataaattcctcttatccagtttacaaatttgagaatggacaccatgattcctgaaggaatattgttattcaatgacagctagcaaa

SEQ ID NO: 210893 - DNA, 542 bp, Homo sapiens
tttcactgatttgcctagaaaacattaaaaaaaagatcttttcataaacaatcaaatgtactttatttcatagtattgggcctatcttttctaaataacctttcttctctgagaagttgtgttttgctgatctcttcttaacatgtttaaaatattctatactgctactagatttagctttctgaaacagagaactggttgaatcactcctctcagtgaaggtccctaataaattgctttggctacaggatgaagtccaaggtattgagcagtgttttcaaggtcccttcttatcaggttctatttctttttatcttcactttctatcatttccttctactgtcatgtgaaccatgagctacaggtatatatatatatatatatatatatatgtatacktgtatatatatgtatgtgtgtatatatatatatatatatatatacagtgttcataataccccagcagatggaaagtgcttgtgtcaaatctactgaatgaacatatttaatgtgtgaagcattggaagcattggagaacaagc

SEQ ID NO: 210894 - DNA, 629 bp, Homo sapiens
tggtggtacatttatgaatataattatattttaaatggtgaaacagttaatactcaaaagctaagaacccacctacttcctaaaagaaatatattaaaccatgacaagaattcacttgaggtatacartgatttgctcattaacattataggaaaccaagagaattttgcaaagaaactctatgcaactaaaagttcctagaatcagatgactaaaattcccttgccaccaagaaacaaaagaaacaaaatggaaagacagttttacattttaaataagcgataaaagtgaaacttgaattactttttgttttttatatagaatatggagcatcactcctccagcgaggtaagacactttaattcttccacctagtaaacacgtgatatgtcctaaactaagtctttatatgtgttaagaccaaaaatgtacacattcaaattaaccagattaaatttgtgcattttttcctctgaatagttcctaatgttaaagatattagctcagaagctatggtgaatattctacatcttgggagaagagtgacaggaattcattctacatttctgaaataagaactcatattcatctgggtccatattaaatgttaatttccaaatgatttttct

SEQ ID NO: 210895 - DNA, 570 bp, Homo sapiens
ttctcaggagagcgaattgtattgtgaactgcgcatgtgagggatctgggttgtgtgctccttatgagaatctttctaatgcctgatgatctgaggtagaacagttttatcccgaaaccatacccccgccctcatccgtggaaaaattgtcttccacaaaaccagtccttgatgtccaaaagttggggactcctgatgtaatccatcgtctgcggattagagaagtttgcttcstgtgtagggaaagcgcatggattttggtgtcaggcaacttgtattccaactccagctacacgagttactacttaacctctccaagctccagtttccttaactgaaaatacggagagctgcattaaccctgcaagattgtattagatgatatacatttaatttatacaaaaattgcttggaacacagtaaattcatctaaaaatttggcaattatcttatttcaacacagagcagacatgctttctaaaacctttataatagaaacacctgttttgaacacttaaaaatggaatgctccaaataaaacctgtctttttaggaatttagatcgttact

SEQ ID NO: 210896 - DNA, 464 bp, Homo sapiens
tggtttgagaaaagatatataatatcaagagagtttcatacacaattcaagccatttaagacaaatttcctgcatcattttctctggaaaaattaatgttttctacaaaaaaaaattgcttattttttaaatttctctctttgacaatttattcaatggattcagaaccatggtggcaactcaagaaaattgtaatgccctttgtgtagtcatgttttatttttcttattttgctcttacagcattcaggtttatctcctatcctagaattctgtctcatttaattcaaacgttttgctctttttatatgtcccaaacgcaaatttctaacrtgacaaagtaggtttcaaaacaatgaataataatagtaataataatttatcaagagcatatagtgcaccaattacaattctaagcccttgcctgtattgactaatttaatgttcacaaaaaacctatgaagt

SEQ ID NO: 210897 - DNA, 268 bp, Homo sapiens
cattgtccacgtcaagaccaagagctgcatccactagtttgcaccctggaaacaaggtatgcttttttttatgttaagatgttcccattttaaaaatttctctagtgggtgcagcgcaccagcatggcacatgtatacatatgtaactaacctgcacaatgtgcacatgtaccctaaaacttaaatwaaataaataaataaataaataaataaataaataaataaaaagaaaatgcacaaaccataacaaaaataaaataaaaataaa

SEQ ID NO: 210898 - DNA, 219 bp, Homo sapiens
tacatatgtaccattaataaataaaaatgctatttttgtatgctagattgaataagcttgctattaactctcattcactaaactgtttatcttatcaggaaacaatttctccttctacctcatagactgtattgactccatcaagcatgaacacagatagttattaaaaatcttattatgtgccatgaattatyttaagcatgagaaaatattaactca

SEQ ID NO: 210899 - DNA, 541 bp, Homo sapiens
ttagccaatttcagatagaaaaacattttttagcataagtatgtcccaaatattgcataggatatacttatcctaaaaagattcattgtttattcaaaattaaaatttaacttggtatcttaccctttattcatgctaattctggaaaccttacatatgaccaaacacccagaggaggtgaggatgcaaatcacgtagaaaatgagcattctcggcaaaggaaacagcagatgcgaaggccttgagttaggaatatatccagtgttttcaaaggttggccaggaggccagtattatagtaggagtgttatagtagaaggaagaacattaggaggcatagtcaaagagatgagagccaacatttaaaggtattctyacttttattatgacataggaatctcacggaaggctttgagcagaagagtgaaaaaacatggctgatattctgaaatgatcgctcttgtaatgatgttgattttgagaatagactcaaaatgagaagaatggaagcaagatgcccagtttggaggctactatgctac

SEQ ID NO: 210900 - DNA, 536 bp, Homo sapiens
gaattaccaagcagaaaagcataacaagtaaaaccaaataaaatagaggctacaggggcaaattacttaatctctttcactggcaatttttccatctacaagatgttgtaataacagttgtaagaataaattggatatatggtttgctattattttctcacattcctgtggttgactttattttatcagttatttcctttactgtgcagaaagtgttttgtttgatgtagtatcacttgtttttgctatctctctatctatttatttatttgtttttgcttttggtgttgtatctaagaaatcattgctaagactaatgttgtggaactttttacctatttttttcttctagtagttttacagtttcaggtcttacatttaaatcctcaatccattttgagtttatatttgtttatgacatatgataaaggtacgatttaatttttttgcatgtggatgtctastttttctaacaccattattgatgagactatcatttccctatggtatattcttggtacttttgtcaaagatta

SEQ ID NO: 210901 - DNA, 650 bp, Homo sapiens
gaagtggcctggcatggtccttctttagaaatattcaggtacagattgatgtattggcatctcaccatcgaagaaaatattttgcaggagaattgaaataaagataggaatagtacttagttaaaacttaggaatagttcttaactatttatgtgttcttcaatttttactgacaatcagatttcttaccaaatctgatcaacttcaccartattaaatcattgaacaaatacaaccagttctaaccatcatcactaacttttccctcatgcattagtctgagtcctccaagaagtaggcgccgagactacattaaatgtgcaaagattttattaagggaacaacctgtatagaaggaaatgggaagaaagtcaagaaaggctggagaagccatcagactgcgaagcaaacctaaccccaagtgaaggaaagaagcagtcaaaagttgtgtgatgatatcctgctagattgctttgcaatttaagaaagttcaggatagcgctcaaggactcctcatgctaaagccttaggcctttcttgtcaccagaaacgcgcttgccttattttccttaattaggtgcaatagtgttccatcatatacttagataataaatatttgaatggacttggtgaggttaatgacagaggct

SEQ ID NO: 210902 - DNA, 650 bp, Homo sapiens
gaagtggcctggcatggtccttctttagaaatattcaggtacagattgatgtattggcatctcaccatcgaagaaaatattttgcaggagaattgaaataaagataggaatagtacttagttaaaacttaggaatagttcttaactatttatgtgttcttcaatttttactgacaatcagatttcttaccaaatctgatcaacttcaccagtattaaatcattgaacaaatacaaccagttctaaccatcatcactaacttttccctcatgcattagtctgagtcctccaagaagtaggcgccgagactacattaaatgtgcaaagattttattaagggaacaacctgtatagaaggaaatgggaagaaagtcaagaaaggctggagaagccatcagactgcgaagcaaacctaaccccaagtgaaggaaagaagcagtcaaaagttgtgtgatgatatcctgctagattgctttgcaatttaagaaagttcaggatagcgctcaaggactcctcatgctaaagccttaggcctttcttgtcaccagaaacgcgcttgccttaktttccttaattaggtgcaatagtgttccatcatatacttagataataaatatttgaatggacttggtgaggttaatgacagaggct

SEQ ID NO: 210903 - DNA, 650 bp, Homo sapiens
gaagtggcctggcatggtccttctttagaaatattcaggtacagattgatgtattggcatctcaccatcgaagaaaatattttgcaggagaattgaaataaagataggaatagtacttagttaaaacttaggaatagttcttaactatttatgtgttcttcaatttttactgacaatcagatttcttaccaaatctgatcaacttcaccagtattaaatcattgaacaaatacaaccagttctaaccatcatcactaacttttccctcatgcattagtctgagtcctccaagaagtaggcgccgagactacattaaatgtgcaaagattttattaagggaacaacctgtatagaaggaaatgggaagaaagtcaagaaaggctggagaagccatcagactgcgaagcaaacctaaccccaagtgaaggaaagaagcagtcaaaagttgtgtgatgatatcctgctagattgctttgcaatttaagaaagttcaggatagcgctcaaggactcctcatgctaaagccttaggcctttcttgtcaccagaaacgcgcttgccttattttcyttaattaggtgcaatagtgttccatcatatacttagataataaatatttgaatggacttggtgaggttaatgacagaggct

SEQ ID NO: 210904 - DNA, 465 bp, Homo sapiens
tttggcaggcgcaaaaaaagtgaaagcttttaaagagatgaagaattttgttggtagccaattcatactgctctggaaaccaaagatggacagggaaaaacacaagtaaggagaatactgccactgccacagcatggggatcgcaaaagcaggtcgcttaggccaaagtggaaaagggtttttccaatgaggcagtaaacatcaccattctgtgtttggcataggtttataaacttgtgttcaagtcccagtgtccagagacttaggttttcctccccattttgttacaaactatttatctgatactgggcaagccactatacgtctctgggcctcagtctcttcatctgtaggaataaggatctcatgggctctaagactgctttagctcaacgtkggatgaatgccatttgtctggcactgttacatatggcaagtcaaaaacaagggaggatatccagcagg

SEQ ID NO: 210905 - DNA, 565 bp, Homo sapiens
aatcataaaatgttcatttaaaaccagaagaagaagaaaaataggacggggaagaaagaataaagtcaacagttagaaacagttacaaacaaggtggaatataactatgtcagtagtcactttaaatgtgaatggtgtaaacatccattaaaagacagttcagagtggataaaaaacgaaacttagtttagaaaagcaagacttyctcccatctcttatgacatggcagttattcattttccttgtccatattgaaattatcacccagtatgttgttactattgttactttaaacagtttcctttagatcagtggggaatatgaaaaataaaagattcttattttactttcatcttttcttttatgattttttaaggcaagctatgcattgtctgtaagaaactcactttaaatataaagaataggtaaggtaaaaaggagcgagatggagaaagatataccatataatcactaaccaaaaggaagctgaagtagctgtatacatttcagagaaaacaaacttcagagcaataaacatcagggatttaaaaaggttgggggagca

SEQ ID NO: 210906 - DNA, 602 bp, Homo sapiens
ttgtgtgtgtgaaatttgtgagttattaccaagatatttaaactttcttttattaattcctggaagttggtgtcatgtgaatcagtggaaagatacacactttcttgttgcctctctaatgatttacaaagtcctgaggcatcctttactctgaatctttaaataatgtaacataattcatcaaaactatccccttggaatccattccattgccatttggggtgggcttctgcctctggattagccttcttttttttttctttgagatggagtttcactcttgttgcccaggctggaatgcaatggtgtgattttggctcactgctccctaggttcaaacgattctcctgcctcagcctcccaggtagctgagattacaagcgcctgccaccacacccggctaattttttgtatttttagtacaggtggggyttcaccatgttggccaggctggtctcaaactccagacctcaggtgatccaccggccttggtctcccaaagtgctgggattacaggcgtgaaccactgcgcccggcctggattagccttcttaacttacattgacttgctaaacccctctttgcttcctctccaggcactc

SEQ ID NO: 210907 - DNA, 525 bp, Homo sapiens
cctttccctgttttactgttctccatarcattgtcaccatgtaacatactgtatatctttcttatttattttatttattgtctaacttcccctgtagaatccaccaggcagggagttttgtttaaagttgtgctcccgaaatctagaactgtacctggtaggtagtagatgttcaataactttgtggaatgaattactgaatgaatcttaatcaaccacttcattatacaggtgaaggaactgagaataagtggctttcccagggtctcacagcttttttaggggcagagtggttgtaccctccgtaagatcagatgccaccgtctagaacccagccctttacctatatttgaatttctttactggactctgtgcacatttttatgtctcttttaaactttgcactcaaggaaatagacttactctagaaataatctactcagtcacacccaggggatgacctccaacattctttcttgctccaaggatatgcctttgatattttttttccctaggcaggaattc

SEQ ID NO: 210908 - DNA, 525 bp, Homo sapiens
cctttccctgttttactgttctccataacattgtcaccatgtaacatactgtatatctttcttatttattttatttattgtctaacttcccctgtagaatccaccaggcagggagttttgtttaaagttgtgctcccgaaatctagaactgtacctggtaggtagtagatgttcaataactttgtggaatgaattactgaatgaatcttaatcaaccacttcattatacaggtgaaggaactgagaataagtggctttcccagggtctcacagcttttttaggggcagagtggttgtaccctccgtaagatcagatgccaccrtctagaacccagccctttacctatatttgaatttctttactggactctgtgcacatttttatgtctcttttaaactttgcactcaaggaaatagacttactctagaaataatctactcagtcacacccaggggatgacctccaacattctttcttgctccaaggatatgcctttgatattttttttccctaggcaggaattc

SEQ ID NO: 210909 - DNA, 527 bp, Homo sapiens
ccaggggatgacctccaacattctttcttgctccaaggatatgcctttgatattttttttccctaggcaggaattctgggtctgtctggatcacaggaaactaattatttcaccagggaaaaaaatttgcttgaaggaagccattacatttgattgtataataaataaaatatttaaactatagcctgaaggatttaaatagttcatttatttgacaaaaagacacatttttattgagcactttggcatgttgatatatgccaggcattgctttaggtgctgggaatraacagagagatgtgacagtctctcaggagcgaacagtctagtgtgtatgtgaggggaaggagggtaagcaaacaattacagggtgcattagtttcctattgctgctgtgacaaattaccacaagcttagtggcttaaaacaatgcatatttattctcttacagttctggaagttagaagtccaaaatggatcttattctgctaaaaatcaaggtgtcaggagtctgtcccttacggaag

SEQ ID NO: 210910 - DNA, 555 bp, Homo sapiens
ctaataaaacaccagcccatctcactggctgtatatcagagtctagagcagtagcctgcagtgaacctgggaattggtctttctgacaatgtccttgggtgattctgatgtgcctctagktttgatcattgatacagttcatcatttgccatcataactggacttgacatctcagtgtcatttgatggtatctcattcttgaaaatgggccatgtcttgattctctaactgcattcctggttctctcctctctttctggttttttgtcaatctcttcccctggcttctgctttcccaccagccatgcattagttttctagggttgctaaactacctcaaacttagtggcttgaagtcacacaaagttgctatcttataatttggtaggttagaagttccatccagggctgactgggctaaaatctaggtgttggctgggctgcattccttctggagcctctagaggagaatgtttccttccctttcccagcttctagaggctgcccacattctcagttcgtggtcctcttccatcttcaaaacccgtaatggctg

SEQ ID NO: 210911 - DNA, 555 bp, Homo sapiens
ctaataaaacaccagcccatctcactggctgtatatcagagtctagagcagtagcctgcagtgaacctgggaattggtctttctgacaatgtccttgggtgattctgatgtgcctctaggtttgatcattgatacagttcatcatttgccatcataactggacttgacatctcagtgtcatttgatggtatctcaytcttgaaaatgggccatgtcttgattctctaactgcattcctggttctctcctctctttctggttttttgtcaatctcttcccctggcttctgctttcccaccagccatgcattagttttctagggttgctaaactacctcaaacttagtggcttgaagtcacacaaagttgctatcttataatttggtaggttagaagttccatccagggctgactgggctaaaatctaggtgttggctgggctgcattccttctggagcctctagaggagaatgtttccttccctttcccagcttctagaggctgcccacattctcagttcgtggtcctcttccatcttcaaaacccgtaatggctg

SEQ ID NO: 210912 - DNA, 442 bp, Homo sapiens
ttagtatggcattccacgcctcttatgatatgactctasattaccctccaacctaatttcttaccactttctcattgctatctggtgttccagtattacagaacattagttgcagctccctatacacataagggtataagagaacacttgctgttctctctgactcgtatgcccttcctcattgatatgcatggagacctactcatccttaaacaaaaggccagctctttgtgaactgttccctgactctttccttgatgcaacttccacagccctttctccaggctatcactgtgttttgattatgagtttttattgcacccatctcacgtgactttaattttttgttcacatgcatgtctcccatctttgtgtcttagcgtctttgtattatgagtacttagcacagggccctcacaatggacatgcctagtaatgtttc

SEQ ID NO: 210913 - DNA, 442 bp, Homo sapiens
ttagtatggcattccacgcctcttatgatatgactctagattaccctccaacctaatttcttaccactttctcattgctatctggtgttccagtattacagaacattagttgcagctccctatacacataagggtataagagaacacttgctgttctctctgactsgtatgcccttcctcattgatatgcatggagacctactcatccttaaacaaaaggccagctctttgtgaactgttccctgactctttccttgatgcaacttccacagccctttctccaggctatcactgtgttttgattatgagtttttattgcacccatctcacgtgactttaattttttgttcacatgcatgtctcccatctttgtgtcttagcgtctttgtattatgagtacttagcacagggccctcacaatggacatgcctagtaatgtttc

SEQ ID NO: 210914 - DNA, 442 bp, Homo sapiens
ttagtatggcattccacgcctcttatgatatgactctagattaccctccaacctaatttcttaccactttctcattgctatctggtgttccagtattacagaacattagttgcagctccctatacacataagggtataagagaacacttgctgttctctctgactcgtatgcccttcctcattgatatgcatggagacctactcatccttaaacaaaaggccagctctttgtgaactgttccctgactctttccttgatgcaacttccacagccctttctccaggctatcactgtgttttgattatgagtttttattgcacccatctcaygtgactttaattttttgttcacatgcatgtctcccatctttgtgtcttagcgtctttgtattatgagtacttagcacagggccctcacaatggacatgcctagtaatgtttc

SEQ ID NO: 210915 - DNA, 600 bp, Homo sapiens
accatattttagtcttattttacattatatgtaggttgattctaaaaggttgagaaccaaaaataaatttatgcaattttaagtgtggaaatatttttttacggcagggctacatgtcaatatcataactccgcttctctcagactgcagcwagtacacagctgctactataagaactactacagacttagtggcctaaaacaacacagatctactatagttcttaaggcataaatctgccatgggtctcattgggctaaaagcaaggtgtcagtaggactggttctttttggaggctctagggaggaattcgtttatttgccctttccagctgttagagaccacctgctctctttgttttatggtccccttcctccatcttgaaaaccaacaaacacagaatttctctatatcttcttccagcatcacatctatctctgaccatagcctggaaaggttctctgttattaagaactcataggattcaactgggcctacctggaaaatccaggataatctccccatctaaaatttcataatcaggctattatcctaagtgaattaagacaggagaagaaaaccaaatatggcatgttcaca

SEQ ID NO: 210916 - DNA, 487 bp, Homo sapiens
tgtttggctattatgaataattctactttgaatgttcatgtacagtttttatgtggccatatgttttcatttctcttgggtatatcctaggaatgaaatayagtatctctatgttaactatctaaggaattgccattgtttcccagagtggctgtgctatttacattcctaccagcagtggatgagggttccatttctccaaatccttgtcaacatgggttactgcccatattcctgattatagccttattgtctgtctttctgattatatctctcctagtgggtatcaaattgtatctcattgtcgctttgatttgcatttccttgatgactaatggtgttgaacatcttttcttgtgtatcttagccttttatatattttctctgtctttggagaaatgtctattcaaatcagttttctttctttttgcatgatttcctcttgttttaaaattttacttctttaacttttattttaagttcaggg

SEQ ID NO: 210917 - DNA, 611 bp, Homo sapiens
aacaaaagcctgtgcagacactggaaagggtttaagatcatctgcatagagaattccaggatcctgtgcatccagagcatggtcgaggagtgtgggctctgcatggcacaatcctttggcttctcaccccatggcagctgggggagacatggctggaggacagtcagaccaaaggctcctcttggcccaacctgggtagtacttggagttaatgtcccctttgttgtaatgaataagtgggaatcaacctctttaactgcacgcttttcattcataccttctaggtggcagagaaaggtatttcaaaagagatttggaactagaaattcaagatccctagcttcatataaggcaagatatctgcaccttggtatcactaaggattatgyaacttgctctttgaattgcaagtgcagtcatctgatttcctgccccagtttccaatggtccaaagccaatgaagaaacagagcctgttatatattccaaaggagacatcataacaatgaattattatctaacatagaaataactttaattaagaggagagaatacaagctcatatttcattgtcataaatttctttagaagacaaaataagcagaagtcaga

SEQ ID NO: 210918 - DNA, 586 bp, Homo sapiens
ggagccagatcgcttaggtcttgcaggctgtggaggggagttcagagtttacatgaactggggtggggagccacaggtggattttgaacagagtgacaggatctggtctacttctttaaatcattactctggtttctctgaggagattggactccgcacatgaatggagacagggaggtaaggcastggtccaggcaaaacatgatcggtgcccagtgactcaggatacattttcattaaagagatcataaaacttgcagatggattggatgtgtgagaagaagagatatcgagaatgtctcctgcactttgagcctgagcaactagataagtacgaataccatttatcaaaataggggagcttggggtagaatcattttctgaatcttataatcctccaattgtaccagtgaactcaatttgagaattcatttttgaaagtgaaaaagacttttagtccaagaatctttagaaaatgtcaccacctgttttaggataagccatgtatagcaataattatattctgccacatggagtattccactcttagaattctgaaccagaccatggtcctgatatgatgtaa

SEQ ID NO: 210919 - DNA, 402 bp, Homo sapiens
aaaagaaaatgttttataaaatttttaaaaaacctcaagagatgaattaaaggactagataagctgactacataaagaaagcactcagaatgtaatccaatgagataaaaagaggaaaatcaggagaagttaraaaaacatggaagatagctatgagtagttccaattgacatggaagtaccaaaatatgaatcaaagtaatagttatttttttccaaaaaagaagaaacgatgttgcctacatataagaaatttagaaattgaaacagagaataggtgttctacctctcttttcgatagcttttctgaaaacaaggacgttaattaattcttactgctctgagctgtggaaacttcctatggatgagttttgtgtttgcccctgtggagcccttcaggttt

SEQ ID NO: 210920 - DNA, 598 bp, Homo sapiens
tgctgtatagtttattggagcatcctaatggaacagtaggagttcaataagacaggtggcctttgctcatatttgaactattgtaatttaagcacaccagttaagtcgatttacagagtacattgtgtagttttaatgaaattcaccctcacaaaatgaacaagaaatttaaaaagactcccgcaaaggagccacagatcaaaggcaattctattaacatacatacaactgaacaattagaaaatggcagtgctaggatctctattcttacttgagcacatttctcatcagacwcttatgagttaaagatcaatgatagtctcatcagatctaatgcagtcaggagactttcactaaaatactaaaaatagaagtaacattaatattgactaaaatataattactaaaatctaatgagaaaaaaagtttttcacactgaaaagataaataatgttgcattctacttatctttatactttttcaattcctataattggtcaagttttatagtacatctgtcatatttgtattatgtttatattttagtacaagtacataattagacatatattggagtgcaaatgcataaaaatatttt

SEQ ID NO: 210921 - DNA, 547 bp, Homo sapiens
atactgcgctaggacatcgctatagttaaaaactttcacctaaaagaagtttgatctcgatttcaggtcaytgtgatttagagactgtattgaaacttttccttttttttctttctactgtaacttcaagcctctttgtttttagctcagtaggaaatctgctgttatgtcttatatttgtttactaaggaatagtttctttgtttcaccataattcataatatatcaatctcttcattgttgaatagactatacaattattttactgtttaaacatgtgttaccagtttattctcaggtttctacccatttctattgagcttctgcgtatttgcttaagaaaaactttccattaaattcccctgtgaaagggctttctgttaattattaatgcagtcaatcctgtgtatgaaaatattttatttattagttttttgtaaagattatttttatgtctcacttacagcattgcattttacaaggtggtatatgcaaccatgtcatgtagtcatagtaaacttttcttgtaactctccaaaataagaac

SEQ ID NO: 210922 - DNA, 597 bp, Homo sapiens
tacaaataggattgagggtgtttattatgaaagctgatactgagtatctattggtaagatatctgtattttacaaagaattctgatttttctaaagactaacataatatttacacacatcacagaacaaaattgcaagtttccttttaagacacacatttttaaatatgtaaaatcctttgacaattggctaaaactgggaagaagaatattgttaaagagctttattgatttaggacattctttgcctgggtgcattttttttttagttttacctccagcaaaaaatattaataataattcaaagcataacttttcaaaatctgggcatgtataaaaaaggacttaaaagttttccytcattatgctattatttatatatgttaataaaaatatattttacctgcaaaatctgtgtgggggatatttcaccattggtttcagttgcaaaagataccatatgctctggaaaaaaatactgtcaaaaagacacagttaaattatcacaaaattcatgctagaaaagattcaattatgaccaatatagtaatcaaaagcaaaagttctttaaactggtgtgactaaaattcacccaaaa

SEQ ID NO: 210923 - DNA, 561 bp, Homo sapiens
caaccaactgtcagaaactttgaattggacatcatcggccttccaagtggacatactttcrttttacaaaaaccaaaaaccaagctgccctcagctaacatgtaagttgcactttttataataatcattttttaaaaaagaacacttcattgccttagcaaaaattctaactcactctctgcttttctcactcataatctaccttcttgcacatcaccccttctttacttcctattactcaaaatcattgatgtctcttcaacctcactgaaactgataacttcagacttttcttatttgctttttcagcaactttggtgctttgatcactccctcctcgaattactttattcccttgatttccatgtcaaaagagtgcttatatttttcttgtccgtctgggtacctcttcttggtgtcttttccatactcatcttcctttttactccctttaaatgttgcaatgcttagctaggtcatacactcaattcctttttatttttttatttttctccatccctatagactctttcctttattctcatggcttcacatactaag

SEQ ID NO: 210924 - DNA, 562 bp, Homo sapiens
aacaaatttaagtagattttaaaatgatcagccaaattccaaaatacagaacatgtacctgtggtataactacatttaaagggaagatcattttatagacttggtatttacaagcatattgatcagtgtttattgaacttttaatttaattctctcttcttttcagtgccttattggcaattactcacatttttggaatgagccaaatgagagtttctatgtgtcagttacttatttttcttctgtgaagcatattactttagaactatgaatctatttaartgtgatacatgtaaggaagcaaatattttacactttaatttttggttcacataaaacttgaatattatggacaatcttagatttatgtagcaaagtcttgcagcagtgtcataatacttaaagctatttcaaaagattgcaaacagtatgcccaatggaaaaagtttactcgtgaattttcaggcgatctttttttctattataatgaaggaaagagaaagatactcaatgaaatgaactggattagcactaagtagaaactaaataataatgagactag

SEQ ID NO: 210925 - DNA, 626 bp, Homo sapiens
tattaaatatttaagcaaaatgctttaagtaaaaaaaatcatccaaaaaacacatactttaaccttgaagaatgcagcagaaaagcctctataatgtcaggctagaaaaacaagacatggcctctaacagcctaagagaaaaatgctgccagaagtggattcttattcactggcagtgcaatgcaaaaccagttttgtattaactgctggtaaatacacygtgtaaatgatccccactggtgaatccaatatgaatctcactgtgcctgggcaaagaggcagccaaatttaaagcatcacagatgtctgacgagtttatccatttcatttgtgctgtgtgagattccgacattacatcactgggaaatgggacaaaagggcgtttcactggtaaatcaagctgtaattcttttcccattcccaagtagatcaccactaccacctagtggatcacttggcaccatcacatctctccaaaagaataccaaaaatactaaaaataagatagtatctttttttatacgatcatttcattcactttataaatactgggctcagaaataaagaaaattacaatctttcaaaacattttaataattctttgtgactcatttattttcttggtt

SEQ ID NO: 210926 - DNA, 626 bp, Homo sapiens
tattaaatatttaagcaaaatgctttaagtaaaaaaaatcatccaaaaaacacatactttaaccttgaagaatgcagcagaaaagcctctataatgtcaggctagaaaaacaagacatggcctctaacagcctaagagaaaaatgctgccagaagtggattcttattcactggcagtgcaatgcaaaaccagttttgtattaactgctggtaaatacaccgtgtaaatgatccccactggtgaatccaatatgaatctcactgtgcctgggcaaagaggcagcyaaatttaaagcatcacagatgtctgacgagtttatccatttcatttgtgctgtgtgagattccgacattacatcactgggaaatgggacaaaagggcgtttcactggtaaatcaagctgtaattcttttcccattcccaagtagatcaccactaccacctagtggatcacttggcaccatcacatctctccaaaagaataccaaaaatactaaaaataagatagtatctttttttatacgatcatttcattcactttataaatactgggctcagaaataaagaaaattacaatctttcaaaacattttaataattctttgtgactcatttattttcttggtt

SEQ ID NO: 210927 - DNA, 626 bp, Homo sapiens
tattaaatatttaagcaaaatgctttaagtaaaaaaaatcatccaaaaaacacatactttaaccttgaagaatgcagcagaaaagcctctataatgtcaggctagaaaaacaagacatggcctctaacagcctaagagaaaaatgctgccagaagtggattcttattcactggcagtgcaatgcaaaaccagttttgtattaactgctggtaaatacaccgtgtaaatgatccccactggtgaatccaatatgaatctcactgtgcctgggcaaagaggcagccaaatttaaagcatcacagatgtctgacgagtttatccatttcatttgtgctgtgtgagattccgacattacatcactgggaaatgggacaaaagggcgtttcactggtaaatcaagctgtaattcttttcccattcccaagtagatcaccactaccacctagtggatcacttggcaccatcacatctctccaaaagaataccaaaaatactaaaaataagatagtatctttttttatacratcatttcattcactttataaatactgggctcagaaataaagaaaattacaatctttcaaaacattttaataattctttgtgactcatttattttcttggtt

SEQ ID NO: 210928 - DNA, 493 bp, Homo sapiens
ccagccctgtctgggctgtggattggctgtgtgaccttggaccagtccctgcccctctctgagcctgggtgttttcaactgtaaaacgaagacttagacttgatcaagtggcttcctcacagccattctcagactgacagcttctcttgggcaagagccatgccttctcctctttagcagatcatagaatttagaatcagaggacagcgttcaaggcaaagtccatcactcccggaccgtgtatgtgaccatgggcagggcaccgcactactctgaccctctgctccccayggaaagacacagacctgtgtctactcgccctgtggtcttcctcagaccctgcgagtggtggacgtcgaagacctttggacaacagagcaaggtgctccactgggctatcagtctgccccctgcctgcccagtgcctggctccatcctggctctggagatctgggcccaggcttgtcgatggaggcaccatctgcccctggtg

SEQ ID NO: 210929 - DNA, 473 bp, Homo sapiens
acgcacgcttagtaaacaccagctgtagtgagcgagtccccctttgtaactcgacagagtactaagttctctggagcggcgggcgccgccggtcagtggcgtccgcggggaccccgcccccgccccccgcgcgcggccggggccacccggtggggttgcgacgcgctgacgtgggcggatcaaagctgccgcccgccttataaagcagtttgggaggctcgcgccggagatcgcgccaggcgaggaggagagctccggcgagcggcgagcacaggccacgggagctgagcgcagcagagagcagccggagtccgcgcctgactccgcgcgggtcctgagccggccgcagcttgccaggatccccggcgtccttctcgcgccgcttcacgaagagggcgccttcrccgctcgcccagccggagtgcgcacgggcccgctggaaaccgcactcgccgctccctgggcaggccggg

SEQ ID NO: 210930 - DNA, 473 bp, Homo sapiens
acgcacgcttagtaaacaccagctgtagtgagcgagtccccctttgtaactcgacagagtactaagttctctggagcggcgggcgccgccggtcagtggcgtccgcggggaccccgcccccgccccccgcgcgcggccggggccacccggtggggttgcgacgcgctgacgtgggcggatcaaagctgccgcccgccttataaagcagtttgggaggctcgcgccggagatcgcgccaggcgaggaggagagctccggcgagcggcgagcacaggccacgggagctgagcgcagcagagagcagccggagtccgcgcctgactccgcgcgggtcctgagccggccgcagcttgccaggatccccggcgtccttctcgcgccgcttcacgaagagggcgccttcaccgctcgcccagccggmgtgcgcacgggcccgctggaaaccgcactcgccgctccctgggcaggccggg

SEQ ID NO: 210931 - DNA, 495 bp, Homo sapiens
gggggctagggaggaggaaagtcctgtccccggccccgaggcacatctgcaaccgcccggaacatctggctgagctcgcgcacgagctccacgcctcccacccccggggctgaagtgcctcggtgtccctcaaggccctgggcgtgcagggtccggctccagggggttagcaggagggatctcgagtgctcccacccacccttcccacttccaaaacaacccgtctcccgggtgacccggcgccgcgtgcgcagccaagcagacgtctctcgaaagcctcacggctggggtcaaagccgggtggcaggcccggcctcgccccgccccgcaggtaaccttgaagccgtcgctcggcgtccctggttggcggggtcagctccgtgagctgcgtggcgggaggcttcgggacccgcccgtgccgaccttgcgcgccgcgcggacaatcggccccggtgcacrgtgcccgtggggcgtcggggtagggggggaccccgc

SEQ ID NO: 210932 - DNA, 582 bp, Homo sapiens
ctttgaaccaaggtcaaccccacaggtgactcagcacatgagcactgtcacgtgtgcattccatagatgtcagctccactcccggctcctagtcacagagcttgattccattgacactatactttagttgtaaaggaagtatacttttctgtaaactctttcagaagagtgcttaggcatttactatcccaaacttacatgaaaaatgttcaaaggcactctaaatcccctatgatgttttcgtccaaacatgtttcttgattttgtttttattttccacctgcttcagtggatttccatagcccagagtttttgcctttgtcattgttgtgtcctcagacctagaacagyatacgaattgtaagcaccaaatataggtgttttcctttataaagctagagaaacaatgatttgaaaacttgcccaactctaacctgtgatccctaattgatttgtgtaatcagcaaggatatatcttaactaagccaagacatacaattgtcaaagattctcaaaaaagtttaaattcacctatttgtataagaaatatatatatttcaccttgagaggagactaactggt

SEQ ID NO: 210933 - DNA, 582 bp, Homo sapiens
ctttgaaccaaggtcaaccccacaggtgactcagcacatgagcactgtcacgtgtgcattccatagatgtcagctccactcccggctcctagtcacagagcttgattccattgacactatactttagttgtaaaggaagtatacttttctgtaaactctttcagaagagtgcttaggcatttactatcccaaacttacatgaaaaatgttcaaaggcactctaaatcccctatgatgttttcgtccaaacatgtttcttgattttgtttttattttccacctgcttcagtggatttccatagcccagagtttttgcctttgtcattgttgtgtcctcagacctagaacagtatacgaattgtaagcaccaaatataggtgttttcctttataaagctagagaaacaatgatttgaaaacttgcccaactctaacctgtgatccctaattgayttgtgtaatcagcaaggatatatcttaactaagccaagacatacaattgtcaaagattctcaaaaaagtttaaattcacctatttgtataagaaatatatatatttcaccttgagaggagactaactggt

SEQ ID NO: 210934 - DNA, 351 bp, Homo sapiens
tttggccaggcacagtggctcacccctgtaatcccagcactttgggaggccgaggtgggtggatcacctgaggtcaggagttcgagaccagcctgaccaacaggagtaaccccgtctctactaaaatacaaaattagccgggcgtggtggcacatgcctgtagtcccagctacttgggaggctgaggcagagaatcacttaaacccagaaggcagaggttgcaatgagccgagatcacaccactgcactccagcctgggcaacagagcragaaactgtctcaaaaaaaaaaaaaaaagcagttcttttggagtacagtatactttctcctaggacatattttggagtatag

SEQ ID NO: 210935 - DNA, 505 bp, Homo sapiens
ggcattgttataatttctgtttactactgtggtccttggacataawtcataattgttttgttcaaacaatgttttgtattagtggcaagttcataaaattattttccttggaaaacgatatctaaaaagaccttaagcattgctttccacttttcgattccattccattccacagccattattaaatgttcagtgccagagtctatatttagggccataatatacacacataaagtataaggaaccatttctgaaatttaggaataaattgcaaattgcataagcaagatataaatgtaccaaaggttacataacagagagattaaaagcaacagttcttatgtaatgatattataatttttttttttctgctcagattgtccacaggcagttcatctgcctggctattatcagagataatatttgtaatacttagcatctgttaaatacttactatttgccagacaggtttcttatatcttctaacccctattacggttttata

SEQ ID NO: 210936 - DNA, 555 bp, Homo sapiens
attcaatgaaaaaacaatataactgaattctagattatgccaacttaggttcctcttgacccttcacrttgatgcttgataccattgcattgtatggttattataatcttcaaaataacctgcatatatattctatgtaattctttattagtgaatctaattttggtcctttcacagggtgttgtttactgttggatttttattaaagtcatcattcttggggccatttctcgtaagttttaagatgttgctaattcttgagtaactcttcattttatccaccacacttaccaatgataattaaaagattggaaatgaaaatacctaagttttctctgattgcatcataatttgctgaaatatgtcacctaaaaattctcaaaattgtttatttttaccattttccatgaaatttacataacattttctatcttaagtaaagcctcttaaatactaattgcagttccctattacatatcaaggttttagagagatttttggttttattcatttagatattccccaaatatagcccaaacctggcacttagcaagc

SEQ ID NO: 210937 - DNA, 306 bp, Homo sapiens
agggtaaattacttggaaaatgattagatcaaaactaatctatagtgaagcttaagtgagtcagagagaatcagtgaaaagagtggcacattcttcggaagagtccatttttagatcaggtccacaatttctggaaatgatactctcatcagtgttttaaagagtattgtttgcttgtcatgtcagactgtgtattgactagaaaaaggagaactccaataatgtattaataccagtcgatagaaacatatattcgaaaagaggaaatgttrtaattaagggatcagagattataatggccatttc

SEQ ID NO: 210938 - DNA, 555 bp, Homo sapiens
attcaatgaaaaaacaatataactgaattctagattatgccaacttaggttcctcttgacccttcacattgatgcttgataccattgcattgtatggttattataatcttcaaaataacctgcatatatattctatgtaattctttattagtgaatctaattttggtcctttcacagggtgttgtttactgttggatttttattaaagtcatcattcttggggccatttctcgtaagttttaagatgttgctaatycttgagtaactcttcattttatccaccacacttaccaatgataattaaaagattggaaatgaaaatacctaagttttctctgattgcatcataatttgctgaaatatgtcacctaaaaattctcaaaattgtttatttttaccattttccatgaaatttacataacattttctatcttaagtaaagcctcttaaatactaattgcagttccctattacatatcaaggttttagagagatttttggttttattcatttagatattccccaaatatagcccaaacctggcacttagcaagc

SEQ ID NO: 210939 - DNA, 340 bp, Homo sapiens
ggccctggtgtgtgatgttcccaggggagggatagcattaggagatatacctaacgttaaatgatgagttaatgggtgcagcataccaacatggcacatgtatacatatgtaactaacctgcacattgtgcacatgtaccctaaaacttaaagtataataataaaaaaaatgaaacccccaagaaacagaatataacaaatgaaatattctgactccctgcttatctgtcttgtttccagtccctcatttctttgakctttatagtagtgaaatggttctagtctttaatcaactgttgaatttttttacagggaaaatctattgagtgtgatgtgttat

SEQ ID NO: 210940 - DNA, 597 bp, Homo sapiens
tatggcaaataactgcgttagaattgaaactaattatgaattaggagcctataagaaaaataaagtaaatattacaaggaaatttagctagggacgtgaaaaattctcctatagctgaaatttaaatggacttaaataccaagttaagaacaattcataaaaccctaacaatattgttaagaaggtcagaaaaaatgtctaccaaaatctataattagatagaatcatgtatatattttaattggatattatagataatatatttagttacatgaatctacaaggagataaacttcatgcagtattatctcaggacattacaaagagcagaaaatttacatttggtctatgtgtaaagaaaaaaaataaattatatccaacactgaaaacctattcacatttaagaaagagagaacattttgacatctctcatttttatattttatatctcagtggaaaataaatgttacaaacacttagaactcttgaggctggcatatttgtttttctaayatgaaatatggtttcccaacatgtaaattttgttttaaatatgccctaaatattggattatttttaacaggttttgaatattaa

SEQ ID NO: 210941 - DNA, 518 bp, Homo sapiens
aaggaaggaaggaaggaaagagagagaaagacaatacaaatgaatatcaaaayaaaaatcttaattgaccagctgaatggtaaaaaaaaaaaaaatgcagctgaaaagcaaataatgatttgaaaaactgagctaaagcgttttttcgtataactcaatatgatggagcaagtaaatagaacaacatgaacaaaagagatacagagaacacaaggcaggagaatagtgtctggagccagggaacctaacagccaattcgtgctgacttcctagaactaaatggaatggaaaacaccacctctctacacccaagtaacaaaaggatcagaggctacaccctttacaatccccatctcctccccaccgtattgcacatgaaaaatattctaagaaataaaataataaaaatattttaaaacatggaatatgatgaaacttttttgttaaatgattaaacattaacttgaatgatactagcgtattaatcgacctgttccacagcccagtccagaatgttc

SEQ ID NO: 210942 - DNA, 518 bp, Homo sapiens
aaggaaggaaggaaggaaagagagagaaagacaatacaaatgaatatcaaaacaaaaatcttaattgaccagctgaatggtaaaaaaaaaaaaaatgcagctgaaaagcaaataatgatttgaaaaactgagctaaagcgttttttcstataactcaatatgatggagcaagtaaatagaacaacatgaacaaaagagatacagagaacacaaggcaggagaatagtgtctggagccagggaacctaacagccaattcgtgctgacttcctagaactaaatggaatggaaaacaccacctctctacacccaagtaacaaaaggatcagaggctacaccctttacaatccccatctcctccccaccgtattgcacatgaaaaatattctaagaaataaaataataaaaatattttaaaacatggaatatgatgaaacttttttgttaaatgattaaacattaacttgaatgatactagcgtattaatcgacctgttccacagcccagtccagaatgttc

SEQ ID NO: 210943 - DNA, 566 bp, Homo sapiens
atgatccgtggctcagagcatcaatataccaggtttcagatcatgataagtataccaaatttctatagattgtctggcaaagcagatactatcactatcttgtgacaatagtcttctaggcttacrtatcttgccggtttaaaaaagaaaaaagaattccattgtcaatgtatttattaaaataacactgtattttattgatttaagctggacatccctttacattttaacttcactgagattgggatgcataatgaaattaatgataggaaaacattttgctagagttcaattagcagaatttttctttattacctaaaataataattcaacttcaaatgaatggctgcagatttgctaaaatatggttatactactattactgctaatagtaaaaatggtaatgataataagtagtaatcaacatttactgattgctgtcaatatgccaaaccttatttggttatattatttgtattaaataatttaatcttcaaaaccttcaatgaacagagaagttaacaaaagtggggtggaactgatgataaatctgtttgattacatgt

SEQ ID NO: 210944 - DNA, 566 bp, Homo sapiens
atgatccgtggctcagagcatcaatataccaggtttcagatcatgataagtataccaaatttctatagattgtctggcaaagcagatactatcactatcttgtgacaatagtcttctaggcttacgtatcttgccggtttaaaaaagaaaaaagaattccattgtcaatgtatttattaaaataacactgtattttattgatttaagctrgacatccctttacattttaacttcactgagattgggatgcataatgaaattaatgataggaaaacattttgctagagttcaattagcagaatttttctttattacctaaaataataattcaacttcaaatgaatggctgcagatttgctaaaatatggttatactactattactgctaatagtaaaaatggtaatgataataagtagtaatcaacatttactgattgctgtcaatatgccaaaccttatttggttatattatttgtattaaataatttaatcttcaaaaccttcaatgaacagagaagttaacaaaagtggggtggaactgatgataaatctgtttgattacatgt

SEQ ID NO: 210945 - DNA, 616 bp, Homo sapiens
aacttctcattttgtgcaagtggctttgagagacacacaactctatttcagtataacccaaaactcatttgttggccaccagacagtagaatgaaaaggttgaaaagaatctcaagtatgaaaagattgagaagaattccctggaacataatgtaayaaaacttattttcaattaaaaatatgcatcttattcagagacactatgcaaggtaagataaatttcgactcagttgtgaatgcaaaggccatgctctctcagtatacaatgttgttgcatataaaaattaatatttattccacatctaattttccttgggcatttttaggaagacattcatgaagttttgcacatcagccaagactcttaatacctggaagtgactattgtatattaaataataatttccaagtaagccatttgatggtgcctccactctggcctacagtggatatatcttaaaagagcttgcccaaatagatggtttgcctctggaagtttagtgataactattactactaatctctaatgagtattagcaaaatgattcctgagaaaataagcatgccacactgaaaattttctatcttgatttctaacataatctgacaaagataa

SEQ ID NO: 210946 - DNA, 441 bp, Homo sapiens
tttagtgataactattactactaatctctaatgagtattagcaaaatgattcctgagaaaataagcatgccacactgaaaattttctatcttgatttctaacataatctgacaaagataatgttttaatgtagaaaaagaagctattggcattatccttgatgattcatcaaagaggacaaccatatgggagatcaacattatacttagcttaaatgcagagtcttgaatggaaaatataatttagggctaaagaaatatggctaaactataagaaattgttgctggccctgggaacacttttaggtaaagtattaaccaccaccccaggaagaataacaaatcctaccagatgtttcattaaaagtataagtatattgggaaaggaatattgtgakgagggacttacagagtcatccaacaagccacagcaggagtagga

SEQ ID NO: 210947 - DNA, 556 bp, Homo sapiens
aggcaggatgtaactgcagaggtggggcttagacaccacaccaaattgaggactagctaaaacaggaccggggtggaagcagatttccacaagacatgcccaccagtgcacsatgtaagtttaccattgccatggtaacacccgggcgttgcctcccctttccatggcaatgacctgatgaccccaagttactactccttccttagaaatttctgcataaattgccccttaatctgcatgtaattaaaagtgggtataaatatgacagcaaaactgccctgagctactactccctgcctatagggtagtcctgctctgcagaaggagtcacagagctgtaatactgccagagctgtaacactgcctcttcaataaagctgttttcttctacctccatcttgcccttgaattctttcctgggcaaagccctggaaagaaaattctttcgtgggctaagctccactttggggcttccctgccctgcatcagtaggatcatactagcagccttctacatttcctaagcagaagctttgagtaacacccaaacataacta

SEQ ID NO: 210948 - DNA, 556 bp, Homo sapiens
ggcaggatgtaactgcagaggtggggcttagacaccacaccaaattgaggactagctaaaacaggaccggggtggaagcagatttccacaagacatgcccaccagtgcacgatgtaagtttaccattgccatggtaacacccgggcgttgcctcccctttccatggcaatgacctgatgaccccaagttactactccttccttagaaatttctgcataaattgccccttaatctgcatgtaattaaaagtgggtataaatatgacagcaaaactgccctgagctactactccctgcctatagggtagtcctgctctgcagaaggagtcacagagctgtaatactgccagagctgtaacactgcctcttcaataaagctgttttcttctacctccatcttgcccttgaattctttcctgggcaaagccctggaaagaaaattctttcrtgggctaagctccactttggggcttccctgccctgcatcagtaggatcatactagcagccttctacatttcctaagcagaagctttgagtaacacccaaacataactaa

SEQ ID NO: 210949 - DNA, 559 bp, Homo sapiens
gttcattcacagaattgaaaatattttacattatcttatcttagcttaaaagtcaccacttattttattgtgtttttttcttaagttgcatgatatcatagagttcctacaactgggaatggaaggtgaatcaagatctatagaggttactcagaaatgagtgagccattcacagcttcactgctatgaaatttaatcaaaatcaaattaaaacaattaaatctgcttcaatgatatatatgattcatgccctgctatttgctcttttctataactataaaatatatatatttatttttcatcttgtcaatgatatcaaatatcatttacattataaaaatcagttgtacaaaaaatcatatccaaaayaaaaccagttttagccaacaagtccgaggcaacatctacaatggctaagctaaaaagaatttaaactcagggcaagcatctaaaaataaattatgtatatatgacttacacgttgcaagaaaagagaataaacagactgaaggagtaagaaaatatcagtttctatctgtgtgatcttagaaagttgctt

SEQ ID NO: 210950 - DNA, 542 bp, Homo sapiens
tcacagaaaaattgtgaagaaaatacagcattattatatagcttatgctcagtttcacctattattattaacaccttacattattatggtacacatttattacaattaatgaatcaaaattggttcatactattttaaaattattttcacttattcgttggaacaccttacaagacatagtgcctgatgcagactgatatctaatccccaayatgatggtatttggaggtggggcctttgggagatgattaagtcataagagtagactcctcatgaatggaattaatgactctataaaaaagaacctagagagatcccttgccccttctgctgtgtgaaaacatagcaagacactggcctcaaggagtgggtcctcacaagacactcaatttgctgacaccttgatattggacttcccagcctccaaaattgtgagtaacaaatttctggcatttatgaatcacccagtctgtggtaaattgctatagaagaccgaacagactaaggcactacctttcatctgttatttcgttacctggtgt

SEQ ID NO: 210951 - DNA, 625 bp, Homo sapiens
ctgcatcgtcctaaccagtttggctctctgtggagaatactcatcatcatatggacaatgttaataaacattacgacgctttgattcaggtgtagcttcagttgtacgaaagtgccgaaaactaataatttctttttacttcagctctatctatatctaaacaaagtttaattcaaaggtttccaaacattcttactatttttgcatttatgcgttgtatctaatttcagttaaaagtcaattccccaaatcattggagcttaatgtgtttatctgataggaaaaaaattgaactcagtattatattttaaatagttattaaagattattaaaatgtctatttgaaatacaagcttcaaaatataagcctacctgtataaatatgtagaaaacaaatacacacacacacacacacacacacacacacacactttagagatgatagaatcttcaacttatgaattttttgaaatatgtatacttacaattgaaagtttgtgtkattatgtaaatgaatctaccaaagcttccaacttagtttgtgtaatctgttaaaagaaaaactttagacaaattaaatttagcagagtttatttaaaaaaagaatgttcatgaattgggcagc

SEQ ID NO: 210952 - DNA, 599 bp, Homo sapiens
ggtagcctgtgattgactgaggcctggctgctatgattggctgagattcagctacttgttatgagaatatactcttaagttagtttgcagtttgtttatatactaattargtcacagtttgctgtatagaaactcaaggtacagagacaactttgggccaatttaatttaattttacaaacctaactctagtgtaataagtctatgatacaggaatacagtcttgataaggtcaggagatgaagaatcaattgggaatgtagagatctgaagggggactattaaccctccagccagctcaggaaaatataaaggacaaaaaaaatatggttaattctagggaggtgagctaaggagtcctcttctcaatggaactaaaggtgttcactgctaagaagtcatgggttgagagctggctaagcggccagtgatgagtgaaatggcctgcagattcttagaaagtagaactcatagcaacactagcacccaagagactagctggaaatggctgaaagttagcagtttgttgggatgatcttaccaggtttcctacctcttgagtattatttcacgcagtatgtaagtagtatgaattccact

SEQ ID NO: 210953 - DNA, 583 bp, Homo sapiens
tgagtgaaatggcctgcagattcttagaaagtagaactcatagcaacactagcacccaagagactagctggaaatggctgaaagttagcagtttgttgggatgatcttaccaggtttcctacctcttgagtattatttcacgcagtatgtaagtagtatgaattccactctactccagtcagtatatgacatttcacattacttacttttttttcaaatctaattaaatgagactttgagtccctccttgccagggtggcacaatccttagagttttaaaaacaatgggaaaaatgaackcagaattccaaagcaaacatactatctctacaagcagcagggatgtgtaatgtttgctctgtggttattaatgtacttttattctggtaaactttttcatgctatgtcatagttaagaatgttttctgctttagatattctcagacatgctgtgaagggcagggacagaaattaattgcctagggaaatttaatggaaagctttactgatggagaggctacaatttgctactacatttgtcaccgtcagagaacacataaattctgcagtcattaccagcaga

SEQ ID NO: 210954 - DNA, 599 bp, Homo sapiens
tgtgccacactttgttctaagtgttggggatacagtagtggacaaaagaaagtccctgcttgagtagaatttagattttagtgacataatacaaacagtgaatcaataaatatataacatgtctgatgatagagagggaaatacagggtaagaaaatagagattgtctagtgcaacagtaggaggatctctggggattgatattttatatatatgggaatatatattttatatatagggatatactctctaatcagttcattgacatttaagcagagactttaaggaagtgagggggtaggtcatgtagctatctgtgggaagagcattctgggctgaaggaacatcaaatgcaaaggcattgaggcagaatgtgcctggtttgttggagaaagaacaataagattagggttgccgatgggttgtaagcaaggggtgagtggttggagatgagcytggagtcattgtgtagggctttgcagaccattgtaagacaatttggctttaaaaaattgagaggagatgctattagaagattgtgagcagaggagttaacagggtctgtctagctatgttcacacaaaaacctgtacatgaatg

SEQ ID NO: 210955 - DNA, 635 bp, Homo sapiens
tatgggcattcctgttttatgccttgtgttaatgcttctaaattttaccataaagtatgatctttacatggttgttagataacccttaatctattgaagcagttaatttcagtctttcagatcatgaaaaactgttgaatttttgctttgtttttgcctgttactacaaagatgttatcaagttgttttaaatgttgacatttaattatttgtgtgtatacaataatacaatactatagctagatggaacctttgggccacaagagtacgtacagaaacctggcaagagcgytaatgagaccaggctttgggcttcagggatttaaaacaattggatgctttatgaggacttgagaagacacaagtggaaggagaaaggcagtaactgtagggtgcatttaaggttttaaatgttaaaaattaaagaaacttttttttctgtatgcataagatgactttttgtaatttctttcttaatcaactcatggtgatttgtgctaatagaatttctaactactaagtatctttgcatttctgctattctacagtattttatatgattctaactccaccttggtttgttttttgcctttttttgaatgtttagtttgtttgttttacataaccatatacag

SEQ ID NO: 210956 - DNA, 501 bp, Homo sapiens
catgggtgggcagtggggagatttctcctgcagacaaaaacccagcatgctggcttccccctgcccagcacagagctgarccatactcatgggtcaggaggaagaaccactcacaggggcatgcacactgtaaggtcccctggactggggctgctgtcttgggggtggatggggtgggtggtttggtggaatatccctctggatcagcagagcagcaaatgcattcctagggagccccactctattaatgggatgtccaaaggagactcctgggtgttggcatgacccgcagccctttcttcttcccagagagagttaacagtacataggatttctagaccaggaatgtcttctttccagaatgttctcaagcctttcctgtcagtaactgttcatctagtagagttcctgcaggaacctgcaggctctggttacacccttgtgggaactggctgggtcctccaggtagaaagggaggcgctgaggagtggggagaagctt

SEQ ID NO: 210957 - DNA, 501 bp, Homo sapiens
catgggtgggcagtggggagatttctcctgcagacaaaaacccagcatgctggcttccccctgcccagcacagagctgaaccatactcatgggtcaggaggaagaaccactcacaggggcatgcacactgtaaggtcccctggactggggctgctgtcttgggggtggatggggtgggtggtttggtggaatatccctctggatcagcagagcagcaaatgcattcctagggagccccactctattaatgggatgtccaaaggagactcctgggtgttggcatgacccgcagccctttcttcttcccagagagagttaacagtacataggatttctagaccaggaatgtcttctttccagaatgttctcaagcctttcctgtcagtaactgttcatctagtagagttmctgcaggaacctgcaggctctggttacacccttgtgggaactggctgggtcctccaggtagaaagggaggcgctgaggagtggggagaagctt

SEQ ID NO: 210958 - DNA, 517 bp, Homo sapiens
tcatgttgagtttctatgaagaaatgatttttttttcagcatctacttaaatgatttatgtgttttcttgattcactgaatgtgatgttacacatttatttgtgtttattgaatcatcctcatattcccgggatgaatctcacttgatcatggcacatgatcattttattgtgttgtcaaatgcaattttcragtattttgttgaggactttttgcatctgtgttcatcagggttatttaaaatgcctgtggttgtctttgtgagttgtgtcctgctctggtttttgtaccagggtcatgctgtcctcatagaacaagtttcgaagccttctctcctgttcattttatggggaacattttgagtagaattggtattagctctttaaaaaatgcttggtaactcagcagtaaaaccatgattcttgtgtttttctttgctgggagactttttattactgctttaattgcattactcattattggtctgttcaggttttttgtttatcattctatcttg

SEQ ID NO: 210959 - DNA, 517 bp, Homo sapiens
tcatgttgagtttctatgaagaaatgatttttttttcagcatctacttaaatgatttatgtgttttcttgattcactgaatgtgatgttacacatttatttgtgtttattgaatcatcctcatattcccgggatgaatctcacttgatcatggcacatgatcattttattgtgttgtcaaatgcaattttcaagtattttgttgaggactttttgcatctgtgttcatcagggttatttaaaatgcctgtggttgtctttgtgwgttgtgtcctgctctggtttttgtaccagggtcatgctgtcctcatagaacaagtttcgaagccttctctcctgttcattttatggggaacattttgagtagaattggtattagctctttaaaaaatgcttggtaactcagcagtaaaaccatgattcttgtgtttttctttgctgggagactttttattactgctttaattgcattactcattattggtctgttcaggttttttgtttatcattctatcttg

SEQ ID NO: 210960 - DNA, 517 bp, Homo sapiens
tcatgttgagtttctatgaagaaatgatttttttttcagcatctacttaaatgatttatgtgttttcttgattcactgaatgtgatgttacacatttatttgtgtttattgaatcatcctcatattcccgggatgaatctcacttgatcatggcacatgatcattttattgtgttgtcaaatgcaattttcaagtattttgttgaggactttttgcatctgtgttcatcagggttatttaaaatgcctgtggttgtctttgtgagttgtgtcctgmtctggtttttgtaccagggtcatgctgtcctcatagaacaagtttcgaagccttctctcctgttcattttatggggaacattttgagtagaattggtattagctctttaaaaaatgcttggtaactcagcagtaaaaccatgattcttgtgtttttctttgctgggagactttttattactgctttaattgcattactcattattggtctgttcaggttttttgtttatcattctatcttg

SEQ ID NO: 210961 - DNA, 490 bp, Homo sapiens
catttcccctggtcggaaaggttggcctgcctggccggggaggtgccggggaggtcagtaaacttctgtsaatagtaaaaaaacaaacaaacaaacaaaaaacaagaaaagaaattgaatgttttagaaagactcaatgaagtgagtctgtaagaaactggttttcatcaggtgtgggattgagagtctgttccattcaccccttcctttcccaccctccatgggagagccttactgggcaaccccaagggcaggagcagaatctaagcagcaggctccctggcacctctcacctacggtctgtgccttcccatgttctaccatttcttctaaacaggcatgcaagtgagtggagaggcagaggcaaggctttttagataggatttatttccttcactgactcaacaagagtcaacaggagaggcagaatgcctgcagtatacaagaagttctcagacactataggctccaacttacatcttaacccaga

SEQ ID NO: 210962 - DNA, 490 bp, Homo sapiens
catttcccctggtcggaaaggttggcctgcctggccggggaggtgccggggaggtcagtaaacttctgtgaatagtaaamaaacaaacaaacaaacaaaaaacaagaaaagaaattgaatgttttagaaagactcaatgaagtgagtctgtaagaaactggttttcatcaggtgtgggattgagagtctgttccattcaccccttcctttcccaccctccatgggagagccttactgggcaaccccaagggcaggagcagaatctaagcagcaggctccctggcacctctcacctacggtctgtgccttcccatgttctaccatttcttctaaacaggcatgcaagtgagtggagaggcagaggcaaggctttttagataggatttatttccttcactgactcaacaagagtcaacaggagaggcagaatgcctgcagtatacaagaagttctcagacactataggctccaacttacatcttaacccaga

SEQ ID NO: 210963 - DNA, 618 bp, Homo sapiens
cttgaccttgggcagttctgtctcatgtacagttacggttttcattgcatctggtttttcatatcagttcttgcggcctttgccaatgtgacctggcatcttygaagatgacactgagcatctggatcctctaaacataaaaagaagtcagtgatggtggagataaggtcagtggcatgtggtggggacctatctggatggccagttcttcacaggtcataatctctatgaattgttccaagccttcttaactatgtacagcttaagtttattcacatgtaagaaatgaaaaattcatgtcactagctatttaggggtttacataaggctacttacattttgaaatgtgaacatatgcaattaataagacctactctgttttatccgagtatattttcaaagtcagcaaagaaggacattatttttgtaaatgggcacttcctaggtattaagaagaaagtatctttgctggggcctatgtcaaaaatgctaattcctaggttatattgaaggatttttatagtttgaggtttcacatttaattctttaattcatcttgagttgatatttgtatatggtgtaaggaaggggtccagtttcaatcttttgcatgtggct

SEQ ID NO: 210964 - DNA, 662 bp, Homo sapiens
atgcaatgatttttatattaaatttacttacataattaaacatatcaaggaattaaaggcaggagtattgtcatctggaatcagaagagctcacagccatctccastgttgattgaagatttgagtgaggggacttagagactgagtcagtgggctggggtctaggcttcactcctttttggatcaggtaactttaactttgtgtctgtttcattgtttatttagcactgctgatacaaacacagaagagcaattgatcctcactggtgttcttcagggacagctggtggtaggtgagggtgagctgggaggaaggtggcattttgggagagaaagagtgtccactccccaagcagtttgattttctggggctgtccctttgacaccaaagatgagcccttactgttcttttctatttctctaagctccctctgataatcacaggttaagaatttttttttgtaatagtactaattataataaacttttgattttactgccaatttaaaaaattatatttcatttttctccattcacaggagcaaatctgtgaacacatgctttgcctgtattgaatatgctcttgttctatgtattctgctttcatgaatctagttgcgcagtatttaatttttaccccttattgattacaaataccattt

SEQ ID NO: 210965 - DNA, 590 bp, Homo sapiens
taggttttcaacttactttgcctggatccattagaggaatcatgatctatagcagctatagccttatgaaatatatttcttaaatgataaggcttgaaagtctaaaactaccccttgatccatgggctgcagaatggatgtgtgttagcaggcatgaaaacaacattaatctccttgtatatctccatcagagcttctgagtgactacgtgcattgtcaataagcagcaatattttgaagagaatctttttttctgagcaataggtctcaatcacaggcttaaagtgttcagtaaaccatactgtaaacagatgagctgtcatccaggccctgttgcattcacagagcacaggcagagttaatttagcttaattcttaagggccctaggattttcagaatggtaagtgagcactggcttcaacataaagtcaccagctgcattagcccctaacaaaagagtcagcttgtcctttgaaacttggaagccaggcattgacttgtcctttctagctatgaaagtcctaggtagcatcttatttcaatagaaggctgtttcatctaaattgaaratgtgttgtttagtgtagcc

SEQ ID NO: 210966 - DNA, 595 bp, Homo sapiens
ctgtgggttgtctgtttactctgctaattgtttctctggctgtgcagaaactttttggtttaattaagtctcacctgtttatcttcattttgttgttgtcgcacttgctttagggttcttgatcatgaagtctttgcctaagccagtgtctagaagggtttttccaatgttatcttctataatttttatggtttcaggtctcaggtttaagttgatctttgtttaargtaagaagtgagatacccattgtttctcttttaatacatttaaaacaagcaaaccttctacccagtttagatttattattcttcattgattgtttcattctcttggagaacattctggcagtaaagtaatagatacattgcatccatcattgtgtgtcaaaaggccatcaggtcgatggctctttttgaactatgttgtttcagaaaaccatagctgagtattataggcagaagtttgacattttctttgtttttttttttaattttattttattattattatactttaagttttagggtacatgtgcacaatgtgcagggtagttacatatgtatacatgtgccatgctgatgtgcagcccccatta

SEQ ID NO: 210967 - DNA, 595 bp, Homo sapiens
ctgtgggttgtctgtttactctgctaattgtttctctggctgtgcagaaactttttggtttaattaagtctcacctgtttatcttcattttgttgttgtcgcacttgctttagggttcttgatcatgaagtctttgcctaagccagtgtctagaagggtttttccaatgttatcttctataatttttatggtttcaggtctcaggtttaagttgatctttgtttaaggtaagaagtgagatacccattgtttctcttttaatacatttaaaacaagcaaaccttctacccagtttagatttattattcttcattgattgtttcattctcttggagaacattctggcagtaaagtaatagatacattgcatccatcattgtgtgtcaaaaggccatcaggtcgatggctctttttgaactwtgttgtttcagaaaaccatagctgagtattataggcagaagtttgacattttctttgtttttttttttaattttattttattattattatactttaagttttagggtacatgtgcacaatgtgcagggtagttacatatgtatacatgtgccatgctgatgtgcagcccccatta

SEQ ID NO: 210968 - DNA, 566 bp, Homo sapiens
gcattctgtgccactatccattggttttcatgtcaagataatgtcagaaattctttacarttgcttccagaaggagtagacttttgatctagtgcacaggtgtccagtcttttggcttctcagggccacattggaagaagaatgctcctgggccacacataaaatacactaatgctaacaacagctgatgagcttaaaaaaaaaaaaggtttgtgcataattttcatgatacccaccaccacagataggcggaaaagtccttgtagtcaaagggttggacacggctgatctagtagtgtcttgtcatccgttttggctttctccctgattccagaatgcaggtagagatgtagagacatgctctcaggacagctgttgagataaaaaaaaatcgttgtcatttattcccaagcacagctgtttgtcatttgcattgaaaaagtctccattgaaactgctgtcacatataaaatctatttatataagtctgtatttttctgttgtcttggcctttgtgggcagtagtgtgttttaactgagcaaactgtccttccaagtaatgaagc

SEQ ID NO: 210969 - DNA, 566 bp, Homo sapiens
gcattctgtgccactatccattggttttcatgtcaagataatgtcagaaattctttacaattgcttccagaaggagtagacttttgatctagtgcacaggtgtccagtcttttggcttctcagggccacattggaagaagaatgctcctgggccacacataaaatacactaatgctaacaacagctgatgagcttaaaaaaaaaaaaggtttgtgcataattttcatgatacccaccaccacagataggcggaaaagtccttgtagtcaaagggttggacacggctgatctagtagtgtcttgtcatccgttttggctttctccctgattccagaatgcaggtagagatgtaragacatgctctcaggacagctgttgagataaaaaaaaatcgttgtcatttattcccaagcacagctgtttgtcatttgcattgaaaaagtctccattgaaactgctgtcacatataaaatctatttatataagtctgtatttttctgttgtcttggcctttgtgggcagtagtgtgttttaactgagcaaactgtccttccaagtaatgaagc

SEQ ID NO: 210970 - DNA, 566 bp, Homo sapiens
gcattctgtgccactatccattggttttcatgtcaagataatgtcagaaattctttacaattgcttccagaaggagtagacttttgatctagtgcacaggtgtccagtcttttggcttctcagggccacattggaagaagaatgctcctgggccacacataaaatacactaatgctaacaacagctgatgagcttaaaaaaaaaaaaggtttgtgcataattttcatgatacccaccaccacagataggcggaaaagtccttgtagtcaaagggttggacacggctgatctagtagtgtcttgtcatccgttttggctttctccctgattccagaatgcaggtagagatgtagagacatgctctcaggacagctgttgagataaaaaaaaatcgttgtcatttattcccaagcacagctgtttgtcatttgcattgaaaaagtctccattsaaactgctgtcacatataaaatctatttatataagtctgtatttttctgttgtcttggcctttgtgggcagtagtgtgttttaactgagcaaactgtccttccaagtaatgaagc

SEQ ID NO: 210971 - DNA, 565 bp, Homo sapiens
tggctatgcagttcagtagaacgagggcctggaaggactgacaagaccaggtcctgatgcttgttctttgatgagtcttctcactttctaagtccctgagtgcttgggtttgttttttgtttttttgtttgtttgttttttgttttttgtattggtttcctaaaggcagtattcacagaaacaagtgaagaaacctgggatgaccatgggtgtcccacctggcttcaaaccccctgccaggtgctggtcagwttccagaagtccaagccggctctctgaaagagctgaagccaaccttttccctcagctccatttcctgggatattctaaacttcccccaaactcagcacaaagaggaaaaaacactgtccttccttggtaaataaatgtatccattcaggaagattcatcgtggctggtagtgagaagtaaggccatcattttgctgggattgaggatgggggaggactttctgggtgactcaaggaaactgccatgtgtgagcatggcccatggccctgctgctctggtccgggctgtcaggatctggctgggaaaacattcc

SEQ ID NO: 210972 - DNA, 204 bp, Homo sapiens
gaattcctcaaactcttgcatatttaaaatkacatttttgagccttgatgcttgaagtgtagcttgggtaacgggtgggctttaagccaattttggcatgcaaggggttgagtttattaggcatcagcacctctgaaaatcgtggggatgcaggcttaatttcaacacgcttctaaatacttgaaagatattgtataattcttt

SEQ ID NO: 210973 - DNA, 389 bp, Homo sapiens
agtgaattcctcaaactcttgcatatttaaaatgacatttttgarccttgatgcttgaagtgtagcttgggtaacgggtgggctttaagccaattttggcatgcaaggggttgagtttattaggcatcagcacctctgaaaatcgtggggatgcaggcttaatttcaacacgcttctaaatacttgaaagatattgtataattctttaataaactcctgtgtctacaaatggttcacattaactcaatatccatgattaaacatctataaaatcaaggcacttatttagtggagacttgctggctattctatgagaggaggtattgttattgtaatctcatcctctcataaaagtgtatcatattactcataaccagcccttcatattc

SEQ ID NO: 210974 - DNA, 377 bp, Homo sapiens
gtagcttgggtaacgggtgggctttaagccaattttggcatgcaaggggttgagtttattaggcatcagcacytctgaaaatcgtggggatgcaggcttaatttcaacacgcttctaaatacttgaaagatattgtataattctttaataaactcctgtgtctacaaatggttcacattaactcaatatccatgattaaacatctataaaatcaaggcacttatttagtggagacttgctggctattctatgagaggaggtattgttattgtaatctcatcctctcataaaagtgtatcatattactcataaccagcccttcatattctattcctattttggtattttaaaatatctttgaaacacttgaattcaaa

SEQ ID NO: 210975 - DNA, 377 bp, Homo sapiens
gtagcttgggtaacgggtgggctttaagccaattttggcatgcaaggggttgagtttattaggcatcagcacckctgaaaatcgtggggatgcaggcttaatttcaacacgcttctaaatacttgaaagatattgtataattctttaataaactcctgtgtctacaaatggttcacattaactcaatatccatgattaaacatctataaaatcaaggcacttatttagtggagacttgctggctattctatgagaggaggtattgttattgtaatctcatcctctcataaaagtgtatcatattactcataaccagcccttcatattctattcctattttggtattttaaaatatctttgaaacacttgaattcaaa

SEQ ID NO: 210976 - DNA, 388 bp, Homo sapiens
taaaatgacatttttgagccttgatgcttgaagtgtagcttgggtaacgggtgggctttaagccaattttggcatgcaaggggttgagtttattaggcatcagcacctctgaaaatcgtggggatgcaggcttaatttcaacackcttctaaatacttgaaagatattgtataattctttaataaactcctgtgtctacaaatggttcacattaactcaatatccatgattaaacatctataaaatcaaggcacttatttagtggagacttgctggctattctatgagaggaggtattgttattgtaatctcatcctctcataaaagtgtatcatattactcataaccagcccttcatattctattcctattttggtattttaaaata

SEQ ID NO: 210977 - DNA, 388 bp, Homo sapiens
gtgaattcctcaaactcttgcatatttaaaatgacatttttgagccttgatgcttgaagtgtagcttgggtaacgggtgggctttaagccaattttggcatgcaaggggttgagtttattaggcatcagcacctctgaaaatcgtggggatgcaggcttaatttcaacacgmttctaaatacttgaaagatattgtataattctttaataaactcctgtgtctacaaatggttcacattaactcaatatccatgattaaacatctataaaatcaaggcacttatttagtggagacttgctggctattctatgagaggaggtattgttattgtaatctcatcctctcataaaagtgtatcatattactcataaccagcccttcatattc

SEQ ID NO: 210978 - DNA, 388 bp, Homo sapiens
gtgaattcctcaaactcttgcatatttaaaatgacatttttgagccttgatgcttgaagtgtagcttgggtaacgggtgggctttaagccaattttggcatgcaaggggttgagtttattaggcatcagcacctctgaaaatcgtggggatgcaggcttaatttcaacacgcttctaaatacttgaaagatattrtataattctttaataaactcctgtgtctacaaatggttcacattaactcaatatccatgattaaacatctataaaatcaaggcacttatttagtggagacttgctggctattctatgagaggaggtattgttattgtaatctcatcctctcataaaagtgtatcatattactcataaccagcccttcatattc

SEQ ID NO: 210979 - DNA, 388 bp, Homo sapiens
gtgaattcctcaaactcttgcatatttaaaatgacatttttgagccttgatgcttgaagtgtagcttgggtaacgggtgggctttaagccaattttggcatgcaaggggttgagtttattaggcatcagcacctctgaaaatcgtggggatgcaggcttaatttcaacacgcttctaaatacttgaaagatattgtataaytctttaataaactcctgtgtctacaaatggttcacattaactcaatatccatgattaaacatctataaaatcaaggcacttatttagtggagacttgctggctattctatgagaggaggtattgttattgtaatctcatcctctcataaaagtgtatcatattactcataaccagcccttcatattc

SEQ ID NO: 210980 - DNA, 391 bp, Homo sapiens
gccttgatgcttgaagtgtagcttgggtaacgggtgggctttaagccaattttggcatgcaaggggttgagtttattaggcatcagcacctctgaaaatcgtggggatgcaggcttaatttcaacacgcttctaaatacttgaaagatattgtataattctttaataaactcctgtgtctacaaatggttcacattaactcaatatccawgattaaacatctataaaatcaaggcacttatttagtggagacttgctggctattctatgagaggaggtattgttattgtaatctcatcctctcataaaagtgtatcatattactcataaccagcccttcatattctattcctattttggtattttaaaatatctttgaaacacttgaattc

SEQ ID NO: 210981 - DNA, 377 bp, Homo sapiens
gtagcttgggtaacgggtgggctttaagccaattttggcatgcaaggggttgagtttattaggcatcagcacctctgaaaatcgtggggatgcaggcttaatttcaacacgcttctaaatacttgaaagatattgtataattctttaataaactcctgtgtctacaaatggttcacattaactcaatatccatgattaaacatctataaaatcaaggcacttatttagtggagacttgctggctattctatgagaggaggtattgttattgtaatctcatcctctcataaaaktgtatcatattactcataaccagcccttcatattctattcctattttggtattttaaaatatctttgaaacacttgaattcaaa

SEQ ID NO: 210982 - DNA, 325 bp, Homo sapiens
tatgttatacaaaacaaatatttttctttgtttttaaacatctacytccatctacttatctacttatttttacttttatttgtaacttaattccatcaaggagagagtgcattttctgttatgctaaatttttgaagaatgtattgattttttatgacctgatataaggatgatatgtagatattacatgtttgtattatcaaatttcagggcgataataaaataaatacttataatatttatattgtcactttatattagttattttctttcttcactacaggagtttttcaacctataggctatttttcaattctaggttatc

SEQ ID NO: 210983 - DNA, 325 bp, Homo sapiens
tatgttatacaaaacaaatatttttctttgtttttaaacatctacctccatctacttatctacttatttttacttttatttrtaacttaattccatcaaggagagagtgcattttctgttatgctaaatttttgaagaatgtattgattttttatgacctgatataaggatgatatgtagatattacatgtttgtattatcaaatttcagggcgataataaaataaatacttataatatttatattgtcactttatattagttattttctttcttcactacaggagtttttcaacctataggctatttttcaattctaggttatc

SEQ ID NO: 210984 - DNA, 325 bp, Homo sapiens
tatgttatacaaaacaaatatttttctttgtttttaaacatctacctccatctacttatctacttatttttacttttatttgtaacttaattccatcaaggagagagtgcattttctgttatgctaaatttttgaagaatgtattgattttttatgacctgatatawggatgatatgtagatattacatgtttgtattatcaaatttcagggcgataataaaataaatacttataatatttatattgtcactttatattagttattttctttcttcactacaggagtttttcaacctataggctatttttcaattctaggttatc

SEQ ID NO: 210985 - DNA, 325 bp, Homo sapiens
tatgttatacaaaacaaatatttttctttgtttttaaacatctacctccatctacttatctacttatttttacttttatttgtaacttaattccatcaaggagagagtgcattttctgttatgctaaatttttgaagaatgtattgattttttatgacctgatataaggatgatatgtagatattacatgtttgtattatcaaatttcagggcgataataaaataaatacttataatatttatattgtcactttatattagttattttytttcttcactacaggagtttttcaacctataggctatttttcaattctaggttatc

SEQ ID NO: 210986 - DNA, 592 bp, Homo sapiens
tgcctcattcagcttttctgtttggtgaacttgcatatgttctcctcacccaccagtcacctctaaaccatattgttccaagacaacaaacagaactcaagtgtgtatctttcaccactggatttgtmtttgctccataaatcttaatgcttaatagggtttctgttagcattttctctatctattttcccataaaatatcacaggccttcttcatatggaattatgggtgatttccttcaatctgcatcatatcaagttgaggttcatgttgatggaaagtaaaacatacgtataaaatatcagtaatgatgttttcccctcctttttagcacatgtgcttgtgagagtcattgtaatacaattctagtctcatgctttgatcatccctaagatgaaaataacatttttagataaaatatctgagttttatgaggccttttgtatatgatgtgatagaatatcagaagaccatacttttttctagttttccatgcaattctatcgtttcatctttactcctaccagagtaattttccagagtagatatcttgtcattcttcctgttgttatcagtaaataagtgaaatgaa

SEQ ID NO: 210987 - DNA, 592 bp, Homo sapiens
tgcctcattcagcttttctgtttggtgaacttgcatatgttctcctcacccaccagtcacctctaaaccatattgttccaagacaacaaacagaactcaagtgtgtatctttcaccactggatttgtatttgctccataaatcttaatgcttaatagggtttctgttagcattttctctatctattttcccataaaatatcacaggccttcttcatatggaattatgggtgatttccttcaatctgcatcatatcaagttgaggttcatgttgatggaaagtaaaacatacgtataaaatatcagtaatgatgttttcccctcctttttagcacatgtgcttgtgagagtcattgtaatacaattctagtctcatgytttgatcatccctaagatgaaaataacatttttagataaaatatctgagttttatgaggccttttgtatatgatgtgatagaatatcagaagaccatacttttttctagttttccatgcaattctatcgtttcatctttactcctaccagagtaattttccagagtagatatcttgtcattcttcctgttgttatcagtaaataagtgaaatgaa

SEQ ID NO: 210988 - DNA, 601 bp, Homo sapiens
gggaggtgtctagaactggactctgacatgtgtccttgttctgtcccacgtgtaagagctcaagctgagcctggcttcctgaagacctcagcaaaccctatgtaatggggcctgctttgtgccaggttcacactggaaagtctacagacgactttgcatctggctagcaaagtgaccttggaaggagccwttaccaacttcatgtcatacacgaggaaagacaatgggggctccagcaggtcatctagaccggagtgcagagtaccctagtggtgatgtgagactgctgactctgtgtgatgtcacccaggttcctggggcagctgtgggcatgggactggatcagcttccacagtggctccatttcagccacagctggagcttttccaccccaaagctttgctgtccaatgctaccacagggaataaccaaatatagctatttctatcaatattaaaattcagttcctcacttgtaatagctgtatttcaagtatgcaggagtcacatatgacttgtagctacgatattgcacagcgcagagattattcccaccactgcagaaagtttcagtacatgggcagatccaagtgttggaattc

SEQ ID NO: 210989 - DNA, 601 bp, Homo sapiens
gggaggtgtctagaactggactctgacatgtgtccttgttctgtcccacgtgtaagagctcaagctgagcctggcttcctgaagacctcagcaaaccctatgtaatggggcctgctttgtgccaggttcacactggaaagtctacagacgactttgcatctggctagcaaagtgaccttggaaggagccattaccaacttcatgtcatacacgaggaaagacaatgggggctccagcaggtcatctagaccggagtgcagagtaccctagtggtgatgtgagactgctgactctgtgtgatgtcacccaggttcctggggcagmtgtgggcatgggactggatcagcttccacagtggctccatttcagccacagctggagcttttccaccccaaagctttgctgtccaatgctaccacagggaataaccaaatatagctatttctatcaatattaaaattcagttcctcacttgtaatagctgtatttcaagtatgcaggagtcacatatgacttgtagctacgatattgcacagcgcagagattattcccaccactgcagaaagtttcagtacatgggcagatccaagtgttggaattc

SEQ ID NO: 210990 - DNA, 601 bp, Homo sapiens
gggaggtgtctagaactggactctgacatgtgtccttgttctgtcccacgtgtaagagctcaagctgagcctggcttcctgaagacctcagcaaaccctatgtaatggggcctgctttgtgccaggttcacactggaaagtctacagacgactttgcatctggctagcaaagtgaccttggaaggagccattaccaacttcatgtcatacacgaggaaagacaatgggggctccagcaggtcatctagaccggagtgcagagtaccctagtggtgatgtgagactgctgactctgtgtgatgtcacccaggttcctggggcagctgtgggcatgggactggatcagcttccacagtggctccatttcagccacagctggagcttttccaccccaaagctttgctgtccaatgctaccacagggaataacmaaatatagctatttctatcaatattaaaattcagttcctcacttgtaatagctgtatttcaagtatgcaggagtcacatatgacttgtagctacgatattgcacagcgcagagattattcccaccactgcagaaagtttcagtacatgggcagatccaagtgttggaattc

SEQ ID NO: 210991 - DNA, 618 bp, Homo sapiens
cacctgttaatttttcacaaaatcaggtctttttttagcataagattaattttaaaagaacttcccaggttttgttttcttaaactgtgttaattagtcctgctttaagcagcctaactatattagtttcctatgttgctactgcaacatattatcacaaatttagttgattaacacaatggaaatttattctcttataatctggaggtcagaggctaaagtyaaggtgcctgcagggctgcatttcatctgaaggctcctggagagaattgatttattttccttttccagcttctatagaggccaactacattcctttgctcatgacccttttcctctcagcacttcaatctctgcttccatcatccctagaaaaattacacacttacttcccatttgacacagcaaccccacatctcaaattctatcccacaaatgcattggaaaaaaacaaaacaaaacaaaaaataaccatacataaaatgttttattataacactacatgtaataacaaaagaatgaaagcaatccaaatgtctatctgagctgactgaatgaactgtggtatgatacatataatgaaatattatgcagttgcataagaggtaaaagaatgta

SEQ ID NO: 210992 - DNA, 618 bp, Homo sapiens
cacctgttaatttttcacaaaatcaggtctttttttagcataagattaattttaaaagaacttcccaggttttgttttcttaaactgtgttaattagtcctgctttaagcagcctaactatattagtttcctatgttgctactgcaacatattatcacaaatttagttgattaacacaatggaaatttattctcttataatctggaggtcagaggctaaagtcaaggtgcctgcagggctgcatttcatctgaaggctcctggagagaattgatttattttccttttccagcttctatagaggccaactacattcctttgctcatgacccttttcctctcagcacttcaatctctgcttccatcatccctagaaaaattacacacttacttcccatttgacacagcaaccccacatctcaaattctatcccacaaatgcattggaaaaaaacaaaacaaaacaaaaaataaccatacataaaatgttttattataacactacatgtaataacaaaagaatgaaagcaatccaaatgtctatctgagctgactgaatgaactgtggtatgayacatataatgaaatattatgcagttgcataagaggtaaaagaatgta

SEQ ID NO: 210993 - DNA, 575 bp, Homo sapiens
tacagtctgtcttgggctttaaggaagtcacctgtttgctggagtgaagtctggcagcttgagggcttgttatggccacatccccattctggttaaagctaacaaatctacagactcattttgagcaaatctgcctatgtcagttaactcttgctatgtgacaaaggacccctaaatctcagtggtatttattgagcccatacatcagttggttcactagaggttagctgatctagggtgggcccataggggtgatccagctgaaacacttatgtataccctatacgtctctcattcttttctggcccagaaagctggtacaggcctgtttttcctttggcaatggcagaaatgcacaaagataagaagataacacacaagtcctcttcactgagactctggcatgtgtcattcttttggccaaaataagtcacgtgmccaagcacaaaatttaatcaaataatgagaaaatatattctgcctcttcagcaggaggaatgcaaagtcccatggcaaatggcacagatacagaatgagtaaataactccattaatgcaaattaccacactgccaca

SEQ ID NO: 210994 - DNA, 453 bp, Homo sapiens
tggattggtaatgtctgagaagtagcaaaagtcccacaggagagtgtaccatttraggatttgtagttgtaccattagttgtcacgtgtgtttgaatccccgactttcacactcacagttgattttaagcatttgttccagaaagtgtatctctgttgctgactgattcccagtatacttggctgactatgcaatgttgttacttcctaattttttctgcttgttttgtcaagctgcttcagatttgctgtgaaatgttttctgacactccttccttgtttttggtacaggatactcagaatccgttgtgaaatctaaaatgtttggtatctgtagtcttgaggaagcttatggcagagattaaactggcatataactgcaatactttcaaatgtaaattttgaattagcttctaattatataatgagacattttgctttcttttcttgaact

SEQ ID NO: 210995 - DNA, 548 bp, Homo sapiens
aatagtacgtatctgatgggggtgttttgtgaattgagataatgcacatagagcttaataaatagtaattattattaaaaaaagaaagtatgctattattattgtcattgtrtcaaaacagaaactgagttaataaagataaattccccacatctttgatgagaaagaagagaatatgcaattgtagtccagtacgtgttattccagtgccaccccatgtgcttcacaatgtcaagatgatgctgtgattgatgaattatagtgctgtcaggatgctcctcttcagtcagtttggctaatagctcttcagagagatgttaagactgcttctgtaaatatagccttgacagtgaggactgcaaagctttataattaatggtaattatttctatatactttaacgctatgaactcagaactctgcacaaacattgactcataagttgtgaaataatgggtgctaaacaacatcgccatttattgtttctcattccttgatcatctccaaaatataccatcatattcctattggaagaatcttcttttatt

SEQ ID NO: 210996 - DNA, 615 bp, Homo sapiens
attaattatagtttaaaaaattcttggcttaattccaacattcccgccatgtatggttggttcagatgcttattcagcctcttcaaactgtttttctgccttacagtataacttgtaattttttgtttagaggaagacatgatttactgggtaaaaaataattcggttaagtaggccttagtcatgtggtgataaggtatgagggaagaaagagtgttctgtagtcctatgattaagtttcaactcttttagtgaggctgtgcctctgggctgttacttcacagtgccttccagtcccctcacttaagtggaacagtatggttagaggaggctggagctgggtattttcctttccccaacatggaaagctagaggatgcagagttggatatttcccttctcctrtgtgaaaggccagagctgagtggatttggatatttcccttctccaggttagttaggctctgataatgccccagaaggttagacttctgttaattagcttctcctgaggctcttgttaagaacaaaatgctctgatatctttcaaaatggttccttttcccatccccctgacagaagtgtgaggagattttttcctccggcatttactgtgg

SEQ ID NO: 210997 - DNA, 517 bp, Homo sapiens
taggtgcctccacactgccctcctgggcttccaatcaccacaaatgtgtctctactctcctactacattctaatgatctcccttcaacactccagtcaaatcagctatggattctttgctttggttcattcttgtaggggggatgaatgccaagcgtctgtagctagccatcttgccgatgtcactcccccaatttctatcacaggtttttttttttttttttttggcaagaacttctgaaagctatgctgtaaggcaacattgkggggtggattgttttttaagctttttcaggtgagcttttgtttgtttttactgaaatatcacacaaatgtctagtaaaaaacaagtttcagttataactattttatttaaagagggagcagtgacctaagaccgaattccttggccttcttctctcttaccctttggcacatttgagaatacataggcctttaccaaatgcaactgaaagctccaaaattgacatttgccagagaaacctggaattgaatct

SEQ ID NO: 210998 - DNA, 572 bp, Homo sapiens
  misc_feature (1)...(572): n = A,T,C or G
tattttgcagtttgatagatgaagaagacaatgaagctcagtgaaatctatttaaatttctctaggtattgtggcaaacaagtgaggaaacaggatttgaaactacatttattggtgatgattttaccaatggaatttccactactacgtaatgcatttggtagtcatagaaaagaaacccattctcctcatttgtgataacttggatgaggaagaatgaggactaggagacataaagaacctaatggactgaaatgctgacatgacttgctntattttttttttttttttttttttgaaacagtctcgccctgtcacccagcctggaatgcaggggggtgattacggctcactgcaacctccacctccagggttcaaatgattctcctgcctcagcctccccagtagctgggattacaggcacacgccaccacaccccgctaatttttgtatctttagtagagaaggggtttcaccacattggtcargctggtcttgaactcctgaccttgtgatccacccaccttggcctcccaaaatggtgggattacaggcatgagccactgcgccca

SEQ ID NO: 210999 - DNA, 351 bp, Homo sapiens
ctgcctcctaaatatctctcctttgtgtcgcctcctgctcccaaccactgctgcctttatttagattttcascatctttttcatagcctcttgttatgtggtcactgattcttatctaaccccttccagtttgttctcacactgctcccagacttttagctctaaatttgaaatctgatgatgtccctactcttttagattttacccttttagaatttttcaaaggttgccttttattggtaaggttttacttaaacacctgcgctggaacacaagatcatctctactttggtttatgcttttctcttcagcttcatatctaactgaacccagttctcactgtatcttaca

SEQ ID NO: 211000 - DNA, 655 bp, Homo sapiens
aatttgctgtcttattgccacaaagaggctgttttgttcgttttattatgctttccattttaaccttaatgctaaactccaaaaaggagaggatataacaaggygtgtctgactttccttcccaccatcatggccaggaattcagtttttcaggtttctttgggttcgtgttggccaagagggagtccattcagttggttgggggcttagtattttatttttggtttacaacttaaccacttcttttaaaagtgattaaaaggctgcaccttttaattctatcgtactggatattaggtgccaacatatgaattctaaggggacaccacattcagaccttagcaatcgtattgccttcactcattataataacagtcatttgtagtgacagattgcctaataatacataaactagcattcttggaatgagtttttgattatggatttgtaagatttttcatgtattcttgaattctaattgctaatattttagttaggtacttacatcaatatacataagcaggactggacaaaaattttgtcccttttagttctcactgtaaaatgttgcttttagggtttggctgacttcattcaaaacattatgaagactgcttcctttctttacggtcttgaatagttaaaatcacttaga

SEQ ID NO: 211001 - DNA, 595 bp, Homo sapiens
  misc_feature (1)...(595): n = A,T,C or G
tattgccattaccctagtccaaggggcctggcatccattcctgcctcctgcaatctgtttttcattttgtggtacaagtgatgaaagtacaaatttcatcatgtcgctctccmgcttaaaagctttcatcattgtcttcttattcttgggatagagataagtaattgataagatcctgcatgagctattccctgctatcctctctctcactttctatacgctttgcaacatctggcttcagaggtagacagaataatgcagttttaaaacaataaatcatgatgcaagtcttgaccaaatgtcccttggacaaccaccatcactctcaaaggattcggcccatgggctacaagctcactgtagagccatttttttttgtgggcaactaggaaaacacatttcttagtctttgaaatgtcctcttcctttgagcagggaagtaagggagaccccctctgagaggttacggtactatgggaaggcatttcagaggtcactgtttgtgactgtaagtaatagctattaaaatgggttgatatttattgagcacttattttaagtacacagcttaantgaagccacatgacaatcccat

SEQ ID NO: 211002 - DNA, 376 bp, Homo sapiens
tctttgttttattccagattttcaataaaatggtcttaaagatttatcattaaggtgtggtatttaaagtgaatttttgataaatttgttatttggttaaagaaggtctcatctagtcctagattgctaaggatttttgtttgacttgatttaaactcaaatagatattaaattttttcaagagcttttttcctgcatggggtgagaggacaacataactttttctttattctatttaatgtaataaaatacagatttttctaaagtttgctaatcctaaaaccatactccatcattgtgtgtgcagggaggcaccttctaatagkacaatgagtattttgtttattttatgtattgctgcatttagtttgacgct

SEQ ID NO: 211003 - DNA, 279 bp, Homo sapiens
taaagcaagactcaatatattcaagaagatcaaaatcataccaaacatactcttggaccacagtggaagaaaaacagaaatcaaaccaagaagaactctcaaaacgacacaacacrgaaattaaacaacttgctcctgaataatttttgtatgaaaaatgaaatgaagttagatatccaaaaaattctttgaaataaaaaataaaaatacaacataccaaaatctccagaatgcagcaaatgcagtagtaagaggaaagtttgtgctgctaaacacctg

SEQ ID NO: 211004 - DNA, 530 bp, Homo sapiens
tactatttacctaggtacataatattaattgaatagcctgtttaaaggcacttgggatattaagatgaatgccaaaatatctgcttttaagagacgacatacaaaatattttttgtagattcctactctttctkaaatccaaatagaaactaaaatttaaaaagtgaaataatcctagatacagaaagtatctaggactatataacagacacttaagtgcttacctctcagaatgtacaaaaaatatcattgtactgtatttgttgcaggttgttctgcttaaatacaataaagattcagtatgacctttcctatcccattttcctccctccatccccagagactggcactgtcttgaagttggtgtatatccctctagtccatgtttttatacttttacactcatatgcatgtgcccataaagaatacacaaggtcttttgttttgttttgcatttgtaagctgtagaaagatagtattacattatacacatcttctttgatacttgtgttttcactctcaacagtcca

SEQ ID NO: 211005 - DNA, 506 bp, Homo sapiens
acattctttgtgctatttattatttgtacagtctaggaaggtttgtgtttttattctagtggttacctttgtatttattatttttataagtgtmtttagtctattttcttatctgccctttaactatctggttgataccatttttttccccagtatcctttagtgcgcatatgttgcttatatagcaccaagcttttcctattttttgctttccttagttgttgtacttggttgttttttagttgcttcatttctacttttcacaggatataatatttataccttaattttctacccttatcctacatttttttcagtcttatgtgtacatttatatattttaaaatgcagctgggtgtggtggttcatgcctgtaaggctagtactttgggaggctaaagagggaggattgcttgaggccaggagtttgagaccagccttggcaacatagcaagaacctgtctctacaaaaatgttttttaattaaccaggcttggtggcttatg

SEQ ID NO: 211006 - DNA, 506 bp, Homo sapiens
acattctttgtgctatttattatttgtacagtctaggaaggtttgtgtttttattctagtggttacctttgtatttattatttttataagtgtctttagtctattttcttatctgccctttaactatctggttgataccatttttttccccagtatcctttagtgcgcatatgttgcttatatagcaccaagcttttcctatttttygctttccttagttgttgtacttggttgttttttagttgcttcatttctacttttcacaggatataatatttataccttaattttctacccttatcctacatttttttcagtcttatgtgtacatttatatattttaaaatgcagctgggtgtggtggttcatgcctgtaaggctagtactttgggaggctaaagagggaggattgcttgaggccaggagtttgagaccagccttggcaacatagcaagaacctgtctctacaaaaatgttttttaattaaccaggcttggtggcttatg

SEQ ID NO: 211007 - DNA, 506 bp, Homo sapiens
acattctttgtgctatttattatttgtacagtctaggaaggtttgtgtttttattctagtggttacctttgtatttattatttttataagtgtctttagtctattttcttatctgccctttaactatctggttgataccatttttttccccagtatcctttagtgcgcatatgttgcttatatagcaccaagcttttcctattttttkctttccttagttgttgtacttggttgttttttagttgcttcatttctacttttcacaggatataatatttataccttaattttctacccttatcctacatttttttcagtcttatgtgtacatttatatattttaaaatgcagctgggtgtggtggttcatgcctgtaaggctagtactttgggaggctaaagagggaggattgcttgaggccaggagtttgagaccagccttggcaacatagcaagaacctgtctctacaaaaatgttttttaattaaccaggcttggtggcttatg

SEQ ID NO: 211008 - DNA, 506 bp, Homo sapiens
acattctttgtgctatttattatttgtacagtctaggaaggtttgtgtttttattctagtggttacctttgtatttattatttttataagtgtctttagtctattttcttatctgccctttaactatctggttgataccatttttttccccagtatcctttagtgcgcatatgttgcttatatagcaccaagcttttcctattttttgctttccttagttgttgtacttggttgttttttagttgcttmatttctacttttcacaggatataatatttataccttaattttctacccttatcctacatttttttcagtcttatgtgtacatttatatattttaaaatgcagctgggtgtggtggttcatgcctgtaaggctagtactttgggaggctaaagagggaggattgcttgaggccaggagtttgagaccagccttggcaacatagcaagaacctgtctctacaaaaatgttttttaattaaccaggcttggtggcttatg

SEQ ID NO: 211009 - DNA, 491 bp, Homo sapiens
atttatgaaaatcttatcttgtatattcaaagctgattgagattggatggatctgtttataacattttattaaaattagctttagcattaattatacaaaatttcaatagtattaataagaaataataaaggatttttaatttaccttttcagtaaaccgtaaaaacaaaagagaaaggaagagacagattctgttggtctgatactgtctttattacrtcttttgattgtttggaaaactgaattccctctctattaaaaggtaaacgttttggcttttggaatttttgaattatcactttgactaaatgaatgactgttatttcatagtaatcagtctactttgaaatcaagtcttttttaaacctttgacacatttggaaggctttccaaaatcaaatttcaaagtctaaaattaggtttgttgatcttgaactaactattggacattcaaaaaaaggaagtccaagagggacacattaggcttactg

SEQ ID NO: 211010 - DNA, 601 bp, Homo sapiens
tggtatgttttaatttcttgcttcttattttttgtgggtctgttgaatgcattttgatttgaggttactatgaggtttgcaaataatataacccattgttttaaatcgatgacaacttaacaatgattacataaagaaacacacaaactaataggccaaaaaaaaaaaaaaaccactgataaaaactctagattttgacttcatctctatgctttgtaacatttagctgtttgtattatatcttattgtactgcccatgtcttgaaaagttgttgtagttattatttttgataggtttattttttagtctttctactcaagatatgcatagtttacacactatcattacagtgttgtaatattctrtggatttttgtttatataccactactagtgagttttgacattcagatgatttgctgttgtttgttaacatctttttcaatcagattgaagaactccctttagcatttcttgtagaacaggtctggtattgatgaaatccctcagcttttgtttgtctggaaaagtctttataactccttcatgtttggaggatattttcactggatatatgattctattataagtttttctcttt

SEQ ID NO: 211011 - DNA, 519 bp, Homo sapiens
ttatggtaaatactgagatcagaaagcatgtgtaactgtaccatacagtgattacatccaggcattattgccagccaacattgacaaatatgcccaataagtataattgttttctgtgtcagcccttgctaaaggaatactcacagcaatggtgatcactgctatcatagctatcattaaattactcattgtgactggttgtcccgcttttctcaggttttcttccgccatctgtgacagcttcttgatctgtccccaggtaggtggctgcattcgacsggtgttgctcatgacagttggggtcctcctcagtgtcaatttggacaatgctgccaccggtgggtctttgggatcctcccgaaacctcttcctgggtatctggctcatgataaagttttcaggtgtcttgatggtatccaaatcgactgctggttctggcctggagaaacacaagcataacctctacccttagttattattttacctatttcccaactttttgttgttggatctctccac

SEQ ID NO: 211012 - DNA, 451 bp, Homo sapiens
ggtcaggagttcaagaccagcctggccaacatggtgaatggaccctgtaatatctattgttcttccaggtacgagactagataattaagagagtcttagaaagattttcaatatcaatgttgatcagagaacttcagtgtctgaaagtcttctgtgtccactctgattgaagagtacaacagccttggacccaggcatcctaggttaaaatctagtgctgtgtctgtaagttttgcatgtatcattaagttttatatgcaattctaaggataatctaacagtgtgagagaagacggctttcatcatccttgtgttcayagtggacaatatacccttctaatatggtgaattaatatttttataaatcttctaatcatcttgggaatagcaaaattatattaaaaatttggtgttagatttaaacatttgtatataattcagttttcataga

SEQ ID NO: 211013 - DNA, 688 bp, Homo sapiens
aatactgttcacaaaagtattaggttggtgcaaaagtaattgtggtttttgtcatttaaaagtaatgcatacttaaagtataagatttcataaccaaggacccagaatgatgccatatagcatgattctgtaaatgcttaataagaagtcatgattataagggttgtctgactctttcctggaggctgagagaataaagagccaagaaggatgtcttcatctggtcctgaagtggaggagagaaggacctggcactgtttggagtttggaacctccttcacktagtgcctggtttgggtctgaaatgattgtcctccagctaaagggcaggaccagcattcctgaatgccccaatgtgttatggataaagagaaacatctccaagagagcaaagctctgaataagaattacggctagggggcatggtgcaccccagggaaggagtcaagggggagacattcattttggggccagaagggattccaactggaccaccacaaggaactctaagctttttattaagcagctactttgtgccaagtcctgtgcaaagcaatttcatatacattaccttatgcaatacagtaactttggacagaacattctattattttcttgtagagatgtggaaattgtgtctcagagcagtgaagcaatgtattcatgctcatatacctaataaggggca

SEQ ID NO: 211014 - DNA, 688 bp, Homo sapiens
aatactgttcacaaaagtattaggttggtgcaaaagtaattgtggtttttgtcatttaaaagtaatgcatacttaaagtataagatttcataaccaaggacccagaatgatgccatatagcatgattctgtaaatgcttaataagaagtcatgattataagggttgtctgactctttcctggaggctgagagaataaagagccaagaaggatgtcttcatctggtcctgaagtggaggagagaaggacctggcactgtttggagtttggaacctccttcacgtagtgcctggtttgggtctgaaatgattgtcctccagctaaagggcaggaccagcattcctgaatgccccaatgtgttatggataaagagaaacatctccaagagagcaaagctctgaataagaattacggctagggggcatggtgcaccccagggaaggagtcaagggggagacattcattttggggccagaagggattccaactggaccaccacaaggaactctaagctttttattaagcagctactttgtgccaagwcctgtgcaaagcaatttcatatacattaccttatgcaatacagtaactttggacagaacattctattattttcttgtagagatgtggaaattgtgtctcagagcagtgaagcaatgtattcatgctcatatacctaataaggggca

SEQ ID NO: 211015 - DNA, 447 bp, Homo sapiens
tcatagccctaaatgcctacatcaaaaagtctgaaagagcacaaacaggcaatctaaggtcacacctcaaggaactagagaaacaagaamaaaccaaacccaaacccagcagaagaaagaaaataacccagatcagagcagaactaaatgaaattggaacaaaagaaaatacaaaagataaatgaaacaaaaagccggttctttgaaaacataaataaaattgatagactgttagcaaggctaaccaagaaaagaagagagaaaatccaaataaccttattaagaaatgaaacagaagatattacaactgacactactgaaatacaaaagatcattcaaggctactatgaacacctttatgcacataaactagaaaacctagaatagatagataaattctagaaaaatacaaccctcctagcttaaatcaggaagaattagatacct

SEQ ID NO: 211016 - DNA, 447 bp, Homo sapiens
tcatagccctaaatgcctacatcaaaaagtctgaaagagcacaaacaggcaatctaaggtcacacctcaaggaactagagaaacaagaacaaaccaaacccaaacccagcagaagaaagaaaataaccmagatcagagcagaactaaatgaaattggaacaaaagaaaatacaaaagataaatgaaacaaaaagccggttctttgaaaacataaataaaattgatagactgttagcaaggctaaccaagaaaagaagagagaaaatccaaataaccttattaagaaatgaaacagaagatattacaactgacactactgaaatacaaaagatcattcaaggctactatgaacacctttatgcacataaactagaaaacctagaatagatagataaattctagaaaaatacaaccctcctagcttaaatcaggaagaattagatacct

SEQ ID NO: 211017 - DNA, 520 bp, Homo sapiens
atttattttcttccctcatatttatttcaaagcaatgatttcatttttccagaagcacgatggtcactcttcattcttcaaagatagctgtttaaaaacatctctttaaacagaaaacaccagtaattttctgggctcccttcccattggctggaatactccagaggaatttagttcttttccaagtcccattctggttctctgtgggactcctagctaaggaatttcctttggagtcatttttggcattgcttgggtactgccacatgcaccagggaaatgaaatccgcctgttatatgactatgctgttacagagtcctgtagaggtggttgcattagtggttgtggtatagaagagctcattggccttggagtcagaaaaccttggtttcagacctggtttaaccattatctaggctgctggccttgggcgacgtagtctttcctctcccctagatatcagtttccttatttrtaaagcaatcagataaagtgcccgaagggtctctgccagctttg

SEQ ID NO: 211018 - DNA, 425 bp, Homo sapiens
tgggtgatagtgatgaaatttccgtctttttcttatcctttcacttcttttaaaacaagctcaataatcctacatcaccatcttaatagggtcataatgatatttacagaatgtcgtaaaatattccctattttcaagattcattcatttaatggatgtttattgagtgcatattatgtgtcagatatttttctaggcacttggggatatggcagagaagagctactaaattgctgttattgtggatagaggagctagacaatacacaatgtaagttgagatgtgtggtatattagatagggttacatactaagaagaagaacaaagtaggcaagggagataggaarggtagggaatgaagttacaatctaaattgggtagtgagggaaggccttactaagaggatgacactgggggaaaaaaaa

SEQ ID NO: 211019 - DNA, 502 bp, Homo sapiens
gcctttgacaggataaaattccctgttttgaggcatttttcctctatgactaaattctcctcccaggcctacataggagtaggtttaagaaaccttccaactcacaggaacattttccagcccagcccaaccccrcaagctgcccttcccacccaggcccatggggcgatgatgatggaactgctcatactgctcatcagtagcctgaagaagagcaggactcccaagtctgtggtccggatgctcacatttatgaaaattcctctcctgcctgatttcccacagttcttggtcttcaagactcatgcacatctgcacagcagcatctgcttccttggcatgtggctgcaatgtttagattcctgtagtgtacggatgaggcatacgaatcaaggctggttaatgctgcaggcaagaggcaaagcacagatactagtcagggagtcaggcagcctgggtcctgggtgtcattctatactcattaaccttgggcagatgactg

SEQ ID NO: 211020 - DNA, 463 bp, Homo sapiens
cctacggctcacgcatctaggaaaatcttttgaagcacagcaaagtaaagagagaaattcctagacttaatgccatcttcttgtggacagaagcctttagagatccctcactttgctctgatcgtctttcataacttaagagtwcccttttgatgtctctcagccccaggactgttagaaggctttgtaaagtgcaaagagccaaacagctaatatgccacctgccagaggaggaggctgggctgggaggtctctctaggtgcccttccagctctatcagcctgggttgtgagtcctcacaaaaggggaaaccactgctgatggcttcagcgagattaggaaaggagtgaaatggagaaatagtatccagggacaatctcagcttcttaatgttctccaaatgcatgaagtgacccttgcccccactagctgggagccagaacgtgtcatctcagttggtgga

SEQ ID NO: 211021 - DNA, 615 bp, Homo sapiens
tacctttaatttggggtgatctattgggatatcatggacttaaaaatcagcaaccacacaagtaaatccaagtttcatcacattgtataatcttggatatatctcagttctacttttccatttttttatctgtaaatgcaataattytgatgtttccatgtttctctgagatagattgaaatatcaaattatcatcacctagctatgtacagaggctaaatctcaataaatgcatatttttaatcatttcgagtgccaagacgtctaagaaaagcaaagacttccaaaggaagacaagaaaaagaacagttaattttatttggattttctttcaaggtataccaattgaaaaggggctggatagaataacttatagtcctaccccaataacaaagctcaaatcatacttaacatcatctaggaatgaccccgggtctcttttcgaatttttcatggctactcctccatatgcttgtattggagttgtttcttttattcactaaacataactgtgccagaacatattttcttcttatatttaatttttttcttctcttaaaagtagacacatcactatttagtactgagacttcaaatactgaagtaaacagagaa

SEQ ID NO: 211022 - DNA, 615 bp, Homo sapiens
tacctttaatttggggtgatctattgggatatcatggacttaaaaatcagcaaccacacaagtaaatccaagtttcatcacattgtataatcttggatatatctcagttctacttttccatttttttatctgtaaatgcaataattttgatgtttccatgtttctctgagatagattgaaatatcaaattatcatcacctagctatgtacagaggctaaatctcaataaatgcatatttttaatcatttcgagtgccaagacgtctaagaaaagcaaagacttccaaaggaagacaagaaaaagaacagttaattttatttggattttctttcaaggtataccaattgaaaaggggctggatagaataacttatagtcctaccccaatarcaaagctcaaatcatacttaacatcatctaggaatgaccccgggtctcttttcgaatttttcatggctactcctccatatgcttgtattggagttgtttcttttattcactaaacataactgtgccagaacatattttcttcttatatttaatttttttcttctcttaaaagtagacacatcactatttagtactgagacttcaaatactgaagtaaacagagaa

SEQ ID NO: 211023 - DNA, 600 bp, Homo sapiens
cacttattgtatttttatttctttaatttttaaaatttattttaactctatcttcaatgctagctccaagagaatagggtctgcatttttttttcgtgttcactacagtgyctccaatacctaaaacagcacctagcatatagtaggtgctcaataaacattactgaaatcactagaaactccaaacaatttttaaattccatagttgcttgattttaagcatgtttcattttcaagtggtaaaactttaaaccaggaacaactcatcgcaaattgtttgattatcaactttcataagaagtatttcgaccttttagtgagacaggaatttatgttaaggctgatttataactacagagctaatatttcttttttttctcattcattttaggtttagagtagctgatcttcatgaatactggatcagaatccataagcatactccctatagtgcatgttttatttctgaaagcctggggaagaggattttgtaattaataattatgttgtctttccagctataccatatattgtaattgaaaatgcagtacataagagtatggtattctccagaacactgttgatctgggccctcattcc

SEQ ID NO: 211024 - DNA, 600 bp, Homo sapiens
cacttattgtatttttatttctttaatttttaaaatttattttaactctatcttcaatgctagctccaagagaatagggtctgcatttttttttcgtgttcactacagtgtctccaatacctaaaacagcacctagcatatagtaggtgctcaataaacattactgaaatcactagaaactccaaacaatttttaaattccatagttgcttgattttaagcatgtttcattttcaagtggtaaaacwttaaaccaggaacaactcatcgcaaattgtttgattatcaactttcataagaagtatttcgaccttttagtgagacaggaatttatgttaaggctgatttataactacagagctaatatttcttttttttctcattcattttaggtttagagtagctgatcttcatgaatactggatcagaatccataagcatactccctatagtgcatgttttatttctgaaagcctggggaagaggattttgtaattaataattatgttgtctttccagctataccatatattgtaattgaaaatgcagtacataagagtatggtattctccagaacactgttgatctgggccctcattcc

SEQ ID NO: 211025 - DNA, 439 bp, Homo sapiens
gttcaccgtttgaagcttaaatgactccaaggaggctttccggtttatgggcagcactagaaggcacgtgacttgaagaatctcagagaaggatgtgggaaatgaatgcaaggtcaaccctatgtaygtaagaattaaaagaaagtccagcctccttaattactaaccatcatttaaggaaccacctatagctggatatgtgaaataattaatccattacagttaaagcaattttcaattggatgtaatgtaaccaacagtataaaatgagacttggcaaactttttctaaggactatatcacaaatatttcagactttgtgggtcctaaggtctctgtcacaactactatgccctgctgttgtaaagcaaagtcagctataaacaatgtatcaatgaatgagtgtggctttcaataaaactttttatttacaagaaag

SEQ ID NO: 211026 - DNA, 603 bp, Homo sapiens
tatatacgaaagagagtttattaaggagaattgactcacacagtcacaaagtgaattcccataataggccatctgcaagctgaggaacaaggaagctagtagtagctcagtccgagtcccaaaacctcaaaagtagggaagacaacagttcagcctttagtctgtagctgaaggcctgagagcccctggcagaccactggtgtatgtccaagagtccaaaattaaaaaaaaaaaaacaaactaagtctgatgtttgagggtagaaagcatccagcacagcagaaaaatgaaggcctgaatactcagcaacttagctccttccaccttcttctgcctgcttttctagccacgctggtagctgattgaatggtgcccatccacactgagggcatgcatgtctttccccgtcgactgactcaaatgtcaatctctttgggcaatctccagaaacacccagatacacccagaaataacgctttgcattcttcagtccaatcaaattgacacttaatattaaccatcacagatgggaaacatttaagaatttytggcagagtagtgaatgatcatattgatttattagaataattagatcaagagctg

SEQ ID NO: 211027 - DNA, 581 bp, Homo sapiens
ttattcattttggcagagaaaaaagctgactctatatgtagctaaactttaaactacattcctgtaccttgcaaaaccatcaacattttctccacaactggctattttccatttttgatatgaataaagccaaaacaagagctagttaagaaaccagaaatcttttcagctctggaaaagtagagagagaaaaagaaatatccagcagaaaatattggttgtatgctcaccaaatcaatccttcaatctaatttcatttttaagacaaattggattatctttccctttaaaaatctgttgaattcactgtaaatacaaaattcaatttaatttacatatactaatcaggtaatctttctattggtattggagaaaaaaaagaccaaatataattccaaatgtcatattacactgagctgtatgtcacctgtggatgccaatttaaagtctgaggcatagtatatttgtattcatccttcacctctacttattagacgagttaagcgaagcccaaatttgaamgcatggttataaattactgtcttttgattttatttatgaaccagtttagtaaaacataa

SEQ ID NO: 211028 - DNA, 630 bp, Homo sapiens
tacactacctcttcatgtacaccatatggcttatcttggaactttgtaaggcttaaacgcttaaattaaaaaaaaaatcaggttcttgccacacaaaaacttttcctcatagcaatagctaggaattccaagcttacctagaatttaaatgtcatgaattagcttcttttgcagtagtatgtgataatttattatcctttctctgcaacatgttagcatgaactcccagttttgttgctgataaaggatgtgaaatmgaattagataaccaataactgaactttaaaaaatacttcaaaatgttattcctatacttcatctctatatattccaaatattttaatttataaatgatcatctgcaaatggccttttgtaacatgtttttatgagttacctatgtatcataaacatctctctgaaagacttgagaatggctacctatcaattatgtaaatgtagataatatatgtgtataaatcatattggtcatttgaaattaggcttatacatccattgtgttccatttaggttttcattaccacctatagctttaaactcttttgatctcttttatttgggtaagtttttataaaaaaaactttgagtatagtttgtgtaataattatca

SEQ ID NO: 211029 - DNA, 378 bp, Homo sapiens
gaattcttcagtttcagctcttaactcttgggtgttcaaactcagcttcacctactaataaacacagaaggaccatctgtcaaagtcatctttcttattgtgtgaagagagtactatacattctccccatgattctttttgaaatcaatttaagaaaaataatttttgatggaaatataatctggaattaaycagtaaaaatcgaaaaagattaaaaaaaggagatgttttggaagtatatatttttagaggtaagagaaaattgattgtaagttaaataaaatagataatttatttgatgacgttcctggctcagagattctataattctgatttaagaataacaagaaataaattctaaataactaatagcatcat

SEQ ID NO: 211030 - DNA, 556 bp, Homo sapiens
atatggatgcacattataatagtgtaaagtattagagggttctattgtctgtagttaaaagaaatctaactctgtatccagtgacttattattacagatcattttaacttctcattagaattggccaaaaagtgacagatgctagaccattaacaggctaaaacaaagacaaacagaatggattttggatatcttgcctttttttctgacagtttcttatgtatgaagacactgtacttttagctatgtaattataatttcctttcccccctcataatatagctcagccatttacattatatttttgggaagtggttaaaaatcaggttcttggatcattctgagttcaagtcaattttttagatttacaatttattcttcataggcctcaatttcttccattttaaaatggagaaagcaatggtaaattatkaattaagccagatattacattttaattatttagcatagtttggcaaatagtaagtattcaataaatactgtattgtgaattggtgctgataatgataattttgatgatgatgagaattacctt

SEQ ID NO: 211031 - DNA, 516 bp, Homo sapiens
ctacttgggtgttttgttttgttttgtgtttttgagacagagtcttgtgccatcagccaggctggagtgcagtggcatcacagctcatcgtaagctcaaacacytggactcaagtgatcctcccacctcaggctcccaagtagtcaggactacatgcgtgggtcaccatgctcagcaaattgtttttaattattttttacagacagggtcttgctatgtcccaggctagttctggaactcctggcctcaaatcgaccttggaaggattcttccaaagttctggggttacaggtattagccaccactgccagccaccacttggatgtttaaaatttcaaacgtttaacagagaaccaaaagcctgtctttatatattttaagccctaagtcataaagtaataatcaattgactatttaaaatgtaagaatatataaaccattgtgcccttcaaatagaataaatattttcagtattaatttaactatagcttgtctttttataaaccactccttcaa

SEQ ID NO: 211032 - DNA, 563 bp, Homo sapiens
aagcttcattttatttttcctaatgtatcccatttaatatttccttcaaggacctgtggttataatagatagctatttgaaggctgtattcaggaattctgaatggcaatcaaatgccataccttcataactaattgctttcaaaagaaaaataataaataaatatcactcactgtagccgttcccttaatttattcagaatttatccaaatcttgaaagataaggaggaagactcaactttaaaaagtgcagacccagtacaatccaactttgacctctattgaaactgctattgtggagatcagtgaccattaatttactaaatctattaatctattctcagttctcttcttaaatagcctaccaataatatttgacacagttaatcactctccactcttataaacacatttttcacttggattccaaaacagcatatcagttttgttttccatttacctttatctctcactaatatctcttcccatcttgtttcttggttcttattttgctccctaatmtcttagcattgaagtgctcatagctcagttttagcgtttct

SEQ ID NO: 211033 - DNA, 624 bp, Homo sapiens
gagaaatgaaacaaatagcatgcaatggagctccagtacatctggaagcagacttttcagtggaaaccatacaggctaagaaagagaggcatgaaatattaaaagtgctgaaggaaaacaacttttaccctagaataatatatctggtgaaaatattcatcaaacatgaaagagaaacactcttcccaaacaaacaaaaactgatagattttatcaataccagaccagtctgacaagaaatgctaaagggtgtacttcaatcagaaagaaaataacattaatgaacaataaataatcacctgaaggtacaaaacttcctggtaatagtaagtacatagaaaaacacagaatattttgacactataactatggtgtgtawactattcttatcctaagtagaaagaataattgatgaaccaatcaaaagtaataactacaacaacttttcaggacataatcagtacaataatacaaaaattaaaaacaaccaaaattaaaaggtggagggatgaagttaaggtgaatttttgttagttttctgtctgcttgttggtttgtttatacaaatattatttagttgttgtcaggttaaattatttggttataagatactatttgcaagct

SEQ ID NO: 211034 - DNA, 624 bp, Homo sapiens
gagaaatgaaacaaatagcatgcaatggagctccagtacatctggaagcagacttttcagtggaaaccatacaggctaagaaagagaggcatgaaatattaaaagtgctgaaggaaaacaacttttaccctagaataatatatctggtgaaaatattcatcaaacatgaaagagaaacactcttcccaaacaaacaaaaactgatagattttatcaataccagaccagtctgacaagaaatgctaaagggtgtacttcaatcagaaagaaaataacattaatgaacaataaataatcacctgaaggtacaaaacttcctggtaatagtaagtacatagaaaaacacagaatattttgacactataactatggtgtgtaaactattcttatcctaagtagaaagaataattgatgaaccaatcaaaagtaataactacaacaacttttcaggacataatcagtacaataatacaaaaattaaaaayaaccaaaattaaaaggtggagggatgaagttaaggtgaatttttgttagttttctgtctgcttgttggtttgtttatacaaatattatttagttgttgtcaggttaaattatttggttataagatactatttgcaagct

SEQ ID NO: 211035 - DNA, 517 bp, Homo sapiens
aacaaccacatcaagagttagtgtcaggggactcaactgtgaaccagagagatatggtgtcagccaagatggggcttacagtacagtagagaagccagtaagtagacagtgttagtgcagtatgtccaatagggaccataacctattggttatggcaatagcatagcattgcaggccaccacaggagcaaaaaggaagccacacctaatctaggtggggtgcagaaaaggcttcctggagaaggggtttcttggcagtgttttaaaggataagtaggagttttcgaggtgaaaggagggtctctccattctcttagttagggcttgggccccattcactcccattcacagtgggctggggttttcttcccatatcatggcaagtmcccccatcccatgtgtctagggccccaccttcttttcagggtatacaggagagttctggctgttgaaaagggactatccacacagatgatgtcagaacatctgagcggtttgggggcagagactctccagac

SEQ ID NO: 211036 - DNA, 498 bp, Homo sapiens
tttttctgaggcagatggcaaaacctgaaccacatccaggtcttaagactttaagccttaggccccttccagttttcactcttggctacctttcactctaatgaggaaccagcccccaagaaactgtggggttgaattaataacatttatgataatcaacacaccactttgacattattaaaaaacacaatcttcatattcaggtattattcatagtccagctacagaaacagaactttgagaattacaacataaaaattaccaacttaagaatatagactgagttaaacccacaaatgtactcaagggcacagaatggttcacagggggtaatgggcactgactgcccacaagtggattctgcaytggcttaatcagtgaagagcttggctccatgtgaaaaatttatgtcccagtaaatttagtgctgggacagaatgttgtttcattagtaacaggctatcatttgacagcaatgatgaaatattgattagaatt

SEQ ID NO: 211037 - DNA, 547 bp, Homo sapiens
gaattcaaccaggcagataacctgcctgttgctcaagcaatcatcagagttttaaaaaacaaaattaagcaaaaaagacctttccccaaayagcatcattaccacttagctttgtacgacccattcctaggaaagccacattccacttcagagaacatgaccgcttaaggtacagttaaaacaaagtccttgcctttaggtgcttactttttgttttaaattagcctctgaaatgcttttcttgtgtcttctgctgcattcctgaaaactataacttttaaggacacagccctcacttttatagaggaggaagaaaacagcaaagaggtgtctcattagggaggcagaaggttatgaccaatgctggaggtcttcctcttccttacttgttattcaacaagatgggttctatggtgtcgcatgaggtgtgagttggaaatgaaagctgcaccacacttctcacattcatagggcttctccccagtgtgggttctctggtgcacggtgaggctcgacctctgtctgaaggccttcccacactcattac

SEQ ID NO: 211038 - DNA, 337 bp, Homo sapiens
aattccttttcatcttttctgtcaaggaaggagatctttggcctaaaagagtcgttcaaatgctggcaatagagaatagattttgaaaataggtgaagatattatgggagaaaacccagccacttccatgaatttatgtccttttkctcagatgaattaaatgttggaaactgagagaagctgtgactgattcagcctgctgaagcaactacagggatctataacaacgggaactgctcctggaggctaggtactggcaagagcagttgaaaaaaaaaaaaagcacttctaaagataaataaataaatataccaactgaagaggttgctgttgattg

SEQ ID NO: 211039 - DNA, 513 bp, Homo sapiens
cagcctgaccaacatggtgaaatccaatctctactaaaaatacaaaaaattagccgggcattgtggtgcgtgcctgtaatcccagctactcgggaggctgaggcaggagaatcgcttgaatccgggagatggaggttgcagtgagccgagatcatgccactgcactccagcctgggcaacaagagcgaaactctgtctcaaaaaaaacaaaacaaaaaacaaaagaaccatagataaccaagggccggatgggcaccctcagcccaactcacctaaacattgcaaataaaacagataggtagagaaatgaggaaggttcccttgcaacaaagaggttattgtttgattttttacaccctcttttcccatggctagacataaagaaggggcaattaaaatctttctgatagaaagkaagcgaagctacagaaaaagaaagaatattatatttttatatacctgagtttatagactcagaattattcatatttaatcatggtaatcattgtattg

SEQ ID NO: 211040 - DNA, 497 bp, Homo sapiens
ttgttctgaaacaatggtgctgtgtgacgctgaccccatagggccacagtctctgccctggctcctcatctgtcttcctacatggggtgacatcagtccctcaggggcatccacagtttgcaaaagcagcaggatcaggtgcccacacagcctgacttccttgtccttcctttcccaaggggtgacaaaagccttgggatcactgctgtgggcaggccaaaggcgactcccctgtggatgggttaacaccatcctggcccactcccgcccccaccccagcatcctgccaggtcttgccctgccrtttgtttggccggctcaggcccaaccgtctcatctgtcatcgtgtgactgctccagaatgagctaagttgaagagttgagataaagacgtcaaacatcaaaaggcttcccgtcattccaaaagctaatgagctgggatactttccagtggtctgcaaaagccaggctggtggctgctgagaggagaggttcaa

SEQ ID NO: 211041 - DNA, 497 bp, Homo sapiens
ttgttctgaaacaatggtgctgtgtgacgctgaccccatagggccacagtctctgccctggctcctcatctgtcttcctacatggggtgacatcagtccctcaggggcatccacagtttgcaaaagcagcaggatcaggtgcccacacagcctgacttccttgtccttcctttcccaaggggtgacaaaagccttgggatcactgctgtgggcaggccaaaggcgactcccctgtggatgggttaacaccatcctggcccactcccgcccccaccccagcatcctgccaggtcttgccctgccgtttgtttggccggctyaggcccaaccgtctcatctgtcatcgtgtgactgctccagaatgagctaagttgaagagttgagataaagacgtcaaacatcaaaaggcttcccgtcattccaaaagctaatgagctgggatactttccagtggtctgcaaaagccaggctggtggctgctgagaggagaggttcaa

SEQ ID NO: 211042 - DNA, 534 bp, Homo sapiens
tagaaattcaggtatcacaggtcccctggcctctccagatatgtctccaaagggtagaatgagttgaattttccaaaccctcaaggtggatgtcagggtagggtggaatacaaaatttgaatgggctggctcaaagctgaaagcaatagtgaaaacaaatggagaactcaccaccatttcctggacatgaaacatctctgcaccaccagatgagagtcgattagggaaagagatgctgacagatgaccctggatgggtgcttgggccagtgttgtagacctgtgggtgtggaacacacacagcaagtctcagtggaaaatagcagacctccatttcctgtcatgcaatatatattctaagattctttgaaatcacatacagaaactctaaggttcggatctggaaggtcacaacttgaagtaaagtgaactactgaatgacgggaaatttcaacaaaatagaaacacttctaacatgcatctaaaaatctcaaactttgaaaytaccatattctctttcagcattttgtcttct

SEQ ID NO: 211043 - DNA, 382 bp, Homo sapiens
tttaccaccgtgcacacgttatgtggttaaaaatctgattgtattcctccccactcgataccaatgcagtacatttctgttcttccaaggccatacatttggtgctaatctaaaatctttgaaactttgcctaatttaaatttggtggcgaggctctatggaaattccccttcagactgatagttgacagaaggccaggcattcagaagaatcacgcagggaagawcgtgtttgttctaaaaaggcaaaccttcctactcagaaaagattttttttttcctgccaggaaaattgagaacaacagattgtagaacttcattgtagctcatggactgaaaaggcaaagtcatggaaaggagggagaaggggcattgtggaattc

SEQ ID NO: 211044 - DNA, 567 bp, Homo sapiens
taactcataagtagtcaactactgcatgttctcacttataagtgggagctaagtaatgggtacccataggcataaagagtggaattaacagacattggagactccaaaatgtgggaggggggtgagggttgaaaagttacctrttgggtaccatgttcactattgggtacactaaaagcccagatttcatcacgatacaatatattcatataagaagtctgcacttgtaccccctaaatacataaaaataaaaacagtctcttgtagacagccaaaagggggggcagccagattgtcatgaggacaccaattcaaatgctttcctttttccttttttttacccaaaatcagatgtcaacaattcaaatgcttctaaatgcatccacaagtgcggttcattagggcttacctttttcagtatttctgtgttcagcagcatgtaaatgtctatagtacgactttcttctttagcaagagcactaaagttacagtgtgctgttaggcaagaaattcctggtttttcacagtcctgagaagaaaagtcagaaaaatttccaatggaattaa

SEQ ID NO: 211045 - DNA, 629 bp, Homo sapiens
ctttaaactcactgtaaaaattaccttcagagaaacaactggaaggataagctgcataccctcagatttctttcttttgttccccagagggtgataagaacatttggtatmttctgtgcaacccctgttcttcttttccttctttcaacactcataccctcttcattacatggtctgtgttacttgaacccttctaaataattttctgaactacatctttaattgcaagacacccccaaaactataagagtaggaaagagtagaaacaactaagatgaaataaacccatcaggtctttatctatttcctacccaattacgaaaagcaaaggagaaaaataaaataactctgagaagcaattcagaaatgcagaggtgctgttcacagcaatcactctactgtctcaaaaacaagctctaaccccatccttccctttctcccctgtaaatcaagagcagggtgtgacagcaggggcttagttggtcagaaggcacatcctctgtgagctggggacatgtgttatgtatcatggtttcgcagtctgttgctgggagaatactctggggagaggaagaccattgtttgtcagagcccacaaatgttttactgccacattctctagaccctca

SEQ ID NO: 211046 - DNA, 526 bp, Homo sapiens
gcattaaatccagattctgccacttcccatgaaccgaaaagccaggacgggaaacaccaacttgtgatttcactctttttcctttcttacttgcattctctcctcacttgactcccctcccacaaagttcagcttctgacagtcttacaatgcttaaacagagtaagaaaactgcaatttggactcaagatgtctttatctacaaagacaattaacattttttaaaaataggtcacagaggccgaaacaacttgctattttacctttaaatggtacattttaaagcattgtataatcagctggggttttttgaccagagataattccatctttctctgatctccctatctatcccacctcaaggcaagacctatattttgctttagaaacaaacagctgcactcagraagagaaaacaaaataatccttagacattcctgataaaggacttcacagacagaaaataccattatcttactgtttgaaaccagaagactttgattcaaataacaatacacgtcacatc

SEQ ID NO: 211047 - DNA, 494 bp, Homo sapiens
aatatatttaatgagtattgttttgttcctatgtcttcctggaaatgtgcactgttgttttgtaggcatgtgtttaaaattgttgttactagtattatgttacagatcccattgtttcttcctttttttaaaattcagcactgtgtttctaagatctatctatgttgctatatgaacatctgatctactgattgtaactgctgtagggtactccaggaagttcattctccacatttcacctattaattctgccggggatggacactctaatggcttccaaccttggccacattaagaaacattatactgaacatccttgttcatgttccctaacaagcccaataaaataaatgtccatgcatttactcatggatcatagtgtaagttcayacgcctttatgtggtaccaaaaaatccagtaaacacactgatttataaagctgaatttagatttcttaaattctgtcttcattgtcataatgaaaatgtccaaa

SEQ ID NO: 211048 - DNA, 592 bp, Homo sapiens
tctgacgatagctccagctgtggcctctagatctgtgctctctaatgcagtacccactagccacatgtgactattgaaattcattttaattaatttaaatgagataaaactaaaaattatgttccctatcaaattaggcatattttaataatcttatagccatatgtggcttgtggctactgtattggactacacagatgtcaaacattttattctattagaccccaatgctacagaatataatatatagttgtattcgttcaaatttctatagttacaagtacaaaaacccagctaaaactcaattaagtcctagagggaaacyatgaattcagtgcctgcaaagccctggagtacagctggtttcagcacagctggatttactgcttcgtttctcttcatcttttggttctgcttgtcttggcttcctcaaatcacatcagggttttttctccctctccttgtctcagttatccttctttctatttgacttttctttgctcagcttaccagtgtgtggcatggcagtgaaaaccttgagctacaaaatcagactctctgactttgaatccttgttccaccataaatgtca

SEQ ID NO: 211049 - DNA, 422 bp, Homo sapiens
tatgttatctctggagtcttttaatctcttcttggtgacctgacatttcacaggaaaaggtcaggtgatggtcttcttcattccttattctctgcacttggtatacccacttaatcaaaagatttgtgcctgtcaggaaaatcgccctttttatatatttacataatttctttccctctgttttccctattctagctttctgggcttccaattatttagatgttgaccctccttaatggattatctgtgactcttttttttttytcttacatcttttctatttattgtattttcattcacttccaaagatatttcttcacatttgtcttccaactcttcttttgaaccttctttggcaatgtcattctcaatgtctaagcactttcttgcccctaattgctaccttttcacagcatcctctt

SEQ ID NO: 211050 - DNA, 434 bp, Homo sapiens
gtgtgaaagtagggcacagacccaacatgagatctaagcagccatgagtcagaaatcagaggaacatgggaaatgagaggtgcttgggtttctcctttccaaccaatcctcactggggattgggctagggctgggatcagggagggcaactgagcggtcactgtgtgctgcacaaaaatctagagattttatacacgtgatcccctctaatccctccaatagcagcaagatagacatcactgtacccattttacagatgaggaagtgaaggcttataaaaacaaaagcaacatgttcaaggccatagagttggtggcaatgtcaggagyagaatctagatttttcgtctcaaagtatgatgagttggcaatattgatctgagcagaaattcaaggaaatcagtttcacagggagaggaagtgtttggtctcagg

SEQ ID NO: 211051 - DNA, 599 bp, Homo sapiens
ccccactcccatccactggtcataggattgaacttggcttgaacatccaggttgcacatgtgtgagttgaatgcaggttcctggggtttggtatgcttggggcaggaagtgagaagcactggcacaggcctgaaaaaaggagacatcatgctgctcctccrtgaagctggtcaaatcctatgtggaactggcaaccacaaggacagtgggatagaaagtgaggctgaaaggatatgaagatacacaatgggcattgtatacagtccaccccttgcaccacatgggcttccttccctgccctatcccactctctcatgcccctactggtgtttcactccctaacaaactactcatccagaaagtctagtctcagagtctgcttcaaggggaacctaaactaagacatttggtactggaagtggccccaggaagcagatcatcagtctgggatcctggaattgaatgtctcactggccagaaggcaagaagaattgaaattctggtggtaagtgcagtggtcatcacccctgccatgctgcagcatcactcatgtgcagtgggtttggaggggcataggggaaggagatgtaaaggcttaa

SEQ ID NO: 211052 - DNA, 599 bp, Homo sapiens
ccccactcccatccactggtcataggattgaacttggcttgaacatccaggttgcacatgtgtgagttgaatgcaggttcctggggtttggtatgcttggggcaggaagtgagaagcactggcacaggcctgaaaaaaggagacatcatgctgctcctccatgaagctggtcaaatcctatgtggaactggcaaccacaaggacagtgggatagaaagtgaggctgaaaggatatgaagatacacaatgggcaytgtatacagtccaccccttgcaccacatgggcttccttccctgccctatcccactctctcatgcccctactggtgtttcactccctaacaaactactcatccagaaagtctagtctcagagtctgcttcaaggggaacctaaactaagacatttggtactggaagtggccccaggaagcagatcatcagtctgggatcctggaattgaatgtctcactggccagaaggcaagaagaattgaaattctggtggtaagtgcagtggtcatcacccctgccatgctgcagcatcactcatgtgcagtgggtttggaggggcataggggaaggagatgtaaaggcttaa

SEQ ID NO: 211053 - DNA, 455 bp, Homo sapiens
taaatgcacttaaagaccttgaagataggagttgaagttttgtttctaaaataatagaaactgaatattaaataagtgaagtactagataacaaaagagttagtttgctgattattaatgattctttgttagaattatcttaactgttgaaagatcttggccttgattaggaaaaagtgaaccctaattacttcagaattayaaaacatagaaaacattatcatgaagttcaagcttatttaagattccatatcacctaaagcatagtgaaaattgatctattaatatatctttagtcaaattataagtaaaattgacttgtttcagtctttttggaatctacaagttttggatttaagttattagaatactggttctcaaatattgcatgtcctcacttataagtgggacctaaacattgggaacactgaacagaaagttgggaacaataaaca

SEQ ID NO: 211054 - DNA, 455 bp, Homo sapiens
taaatgcacttaaagaccttgaagataggagttgaagttttgtttctaaaataatagaaactgaatattaaataagtgaagtactagataacaaaagagttagtttgctgattattaatgattctttgttagaattatcttaactgttgaaagatcttggccttgattaggaaaaagtgaaccctaattacttcagaattacaaaacatrgaaaacattatcatgaagttcaagcttatttaagattccatatcacctaaagcatagtgaaaattgatctattaatatatctttagtcaaattataagtaaaattgacttgtttcagtctttttggaatctacaagttttggatttaagttattagaatactggttctcaaatattgcatgtcctcacttataagtgggacctaaacattgggaacactgaacagaaagttgggaacaataaaca

SEQ ID NO: 211055 - DNA, 588 bp, Homo sapiens
ttaattaatttcttcactgtcacacagataatacaggaaattcgaatctaaaacagtgctatactgcctttcatctgaggcgaagtacacatgtctaagatcattcagggtcataaaaacaataagtaaaagcttcagattaaatgaagaaaattatttcactcatacagttggtgtattcacttaaaagggagattgaaaaatgaattgttaaataaataatgaagaaaaaggttagtagaaaaatgaaccaaagcatttttttatcctagttgattgcaagactttgtcaaaataaatacatgcatattggtattagttgtgttactacaggaggagtaaaaactatagggataaaaaaacagcagtatgtatagttctgggtcttatctatcctaatttttgtcatatgcttctatcagacctgactgtttatgaagtgttaataaacatraggaaaatatccacaatatggaccatccctcttcttcagaataaaccttggcagtccatgttatccatgtaattgccatttcctgatgaaaacagaggtttctttgaaggcatttaacaagagccaatttttta

SEQ ID NO: 211056 - DNA, 543 bp, Homo sapiens
ttgcatattctccaagtataaatgactataccttattcctcacgtctttaccatcactgaatagcatcagaatttaaatactttatctatttataggtaaaattgtttatctcattttattttgtcacatatgatggtagttgaggtctaaaatctttaggtacttctatttgatgaaaatacaaaacctttagtctgacatttaggttacattactgtaattccaacctcaactctatcattctttacaaagattctgtgcttcaggcatgggcctcattagcagcacaagtccacttgatcatttctgtgctttgcagttttctcttacmtgaatgtcctttatttttcactatttttcctgaaatcctagccatttgtcaaacctggttcaaatgtcatgtgctacatgaagccttctgggataagccctgttgaagctagtttttgtttttcttcatctattgcgttaattttccctccacagggtactcgtatcctaatttgctgatatatctaattttacctactggattttaaggt

SEQ ID NO: 211057 - DNA, 543 bp, Homo sapiens
ttgcatattctccaagtataaatgactataccttattcctcacgtctttaccatcactgaatagcatcagaatttaaatactttatctatttataggtaaaattgtttatctcattttattttgtcacatatgatggtagttgaggtctaaaatctttaggtacttctatttgatgaaaatacaaaacctttagtctgacatttaggttacattactgtaattccaacctcaactctatcattctttacaaagattctgtgcttcaggcatgggcctcattagcagcacaagtccacttgatcatttctgtgctttgcagttttctcttacctgaatgtcctttatttttcactatttttcctgaaatcctagccatttgtcaaacctggttcaaatgtcatgtgctacatgaagccttctgggataagccctgttgaagctagtttttgtttttcttcatctattgcgttaattttccctccacagggtactcgtatcctaattkgctgatatatctaattttacctactggattttaaggt

SEQ ID NO: 211058 - DNA, 620 bp, Homo sapiens
tttataaggtctctcttccttcaaagcattctccaacccagggctactcttgggcaataggtaccttcatgcaaatgcactagggtggcactcttttaagtgaaacaaactccatgaggggcacatgacctggacatcacaatatacactgcattttatccccatctgttccctagtacatgagtatgcttgcagtggtgagcttgcataattgtaaacagaagctctggttcactccactgttccaagttatctgtccaaacttgctcattcagggtaaagttgtgtctaatttaacgacccttttaaaattaaaagaaaagtctgtgaatgttagacttggggtgagaagaaggggtgtggcaaacaacatttttgactgacagtctttactgttatcttcagatgatttacatataaagcctaatccaagatcaccttctaacaagttttcggggatgttttaaaacccaattcatagtcacattattctcttggataaaaaacaaaaagcacccacctgatactaatatagactagattataaaatatattattataatwtattttaaattgttttcctgtgcccaaactctattattctagaaactagattctat

SEQ ID NO: 211059 - DNA, 616 bp, Homo sapiens
attcaaattttgggtatcctgggaaaaaaaggaacttctgagaaatgttctaaaattcttcatgaattagcaacgaggtgatagaaattcccagaaatactagatagccttaccttggtatggctgtgactcacatagaaggaatactagaaatgggttaaataaaaacagattgattaagtttctatcccacagaaaaagtgggagtgaataatatcttcaatggactctactacaagcctcttccttttcgcactttgttccaatggaagttaattagatcggctggacatggtggctcatgcctgtaatcccagcactttgrgaggccgaggcgggcggatcacaaggtcaggagttcgagactagcttggccaatatggtgaaagcccatctctactgaaaaaaatacaaaaattaaccatgtgtggtgacgcatgcctgtagtcccagctgcttgggaggctgaggcaggagaatcgcttgaacccaggtggcagagtttgcagtgagccaagatcacaccactgcattccggcctgggcgacagagtgagacttcatctcaaaaaaaaaaaaagaagaaacttaattagatctatgaaagtaaactagaa

SEQ ID NO: 211060 - DNA, 616 bp, Homo sapiens
attcaaattttgggtatcctgggaaaaaaaggaacttctgagaaatgttctaaaattcttcatgaattagcaacgaggtgatagaaattcccagaaatactagatagccttaccttggtatggctgtgactcacatagaaggaatactagaaatgggttaaataaaaacagattgattaagtttctatcccacagaaaaagtgggagtgaataatatcttcaatggactctactacaagcctcttccttttcgcactttgttccaatggaagttaattagatcggctggacatggtggctcatgcctgtaatcccagcactttgagaggccgaggygggcggatcacaaggtcaggagttcgagactagcttggccaatatggtgaaagcccatctctactgaaaaaaatacaaaaattaaccatgtgtggtgacgcatgcctgtagtcccagctgcttgggaggctgaggcaggagaatcgcttgaacccaggtggcagagtttgcagtgagccaagatcacaccactgcattccggcctgggcgacagagtgagacttcatctcaaaaaaaaaaaaagaagaaacttaattagatctatgaaagtaaactagaa

SEQ ID NO: 211061 - DNA, 620 bp, Homo sapiens
gagtgtcaaacttctattgattgctattcttcctgtgaagctgttatctactataatkgttctcactttctcctcactacaacatagcagattatatacataacatgttgcccggggctcactcagatatggcccacagcatttataaaattctcagctctcaaccgtaattcctggccttcagtttttcacacaaggaaacctatcagaatgcaagagagcaagagtacactctaatataatcttatatccattctatagtttaaaaaataaattatgcacaaatttccccacttcatttttaaacattccttgcaatatccttcacatgtatgtgttaagattgcagatcaaggcatctggtctgtaatgccttgagcacacaataaagagaaaggtagcatcagacaattagcaaccaatggcttgaggagaattaaaagataattttattattagcttggatgctagaatataattttcattgactgttgttttgacagtgaaaaaggcaatggatacttgctctattttgcagcagcctaaaatgtacaagccctatatcacaatttatctagcaataaaagggtcttctgtggaactgatcagagccaaaacca

SEQ ID NO: 211062 - DNA, 605 bp, Homo sapiens
ctgcatatgaaaagaaatcagccracattttttcttatttatggcaaatcaaatactgacttatgtatatgaatatagtaaagaagcttgacaatgtcaaagagcttatatgcaattggcaagggaaccaaaatcagttgcacgatgtaaaggtttgagttgtagatacccacctgataccgtgtatatgtattgcaagataaatatgcataccattatcaatttaatcattgaacctaaatctaacttctgttcatacaataactaattaaatttattggggcttaattctttcaacatcactacttttaagaaaaatactttagatgtttcctcctttgttgtatcagctgtaatgtctctaagctttagttttctttttattttcatgtctcacaattatatttgttatgggtttctatttcattcattgctacctgctgacatttgtctcagctgtgaatgtttttacctatgaaagataatctccttaaacatctattaatttacacttccaactgggtgtggagtttccaaccttatgtaattgtgagcaaatctgtaaattagcactaagacaactgttacaagtataaggtgtttga

SEQ ID NO: 211063 - DNA, 589 bp, Homo sapiens
tatacctatatttatatcttcatatatatttatcaaatatatatatatatattttttttatttatatacatttcttgaaggtacttcttgtcctcctgaaccaaaagttcattactctctatcttgttcagccacacacagattcaaattatataatggataaaaattattcacatgtttttcaatgatcaaatcctcaaaatattgaggaaatgatttagcmtttaatttggaaagccactgtgactccatgtttgtaaatgccatagttacctcaaatctatctttgtgttgcattctttctagctttccccttaagactttaaaaaattgttatttactctcttcttaaaaattatttttaattaatattacattggtaaatcactgtcatctgatatataagcttttatcacccaatgtaacactatcacactgaactagaatatttttcattctctcattgaaccatcagtgtttgaatttagtcaaagcctggaaaatgaatcctgagggaataaatacttcgcatagattaccttccagccaacacaacgattaacagacataaggcttgtagttacataaa

SEQ ID NO: 211064 - DNA, 589 bp, Homo sapiens
tatacctatatttatatcttcatatatatttatcaaatatatatatatatattttttttatttatatacatttcttgaaggtacttcttgtcctcctgaaccaaaagttcattactctctatcttgttcagccacacacagattcaaattatataatggataaaaattattcacatgtttttcaatgatcaaatcctcaaaatattgaggaaatgatttagcatttaatttggaaagycactgtgactccatgtttgtaaatgccatagttacctcaaatctatctttgtgttgcattctttctagctttccccttaagactttaaaaaattgttatttactctcttcttaaaaattatttttaattaatattacattggtaaatcactgtcatctgatatataagcttttatcacccaatgtaacactatcacactgaactagaatatttttcattctctcattgaaccatcagtgtttgaatttagtcaaagcctggaaaatgaatcctgagggaataaatacttcgcatagattaccttccagccaacacaacgattaacagacataaggcttgtagttacataaa

SEQ ID NO: 211065 - DNA, 454 bp, Homo sapiens
ttctgagaattagattaagagacttagccactggcactcattaaattgtaggttgaatatttgaataaaaagtgtcttgttcatctcttccccacctcttacccacccccaaggaacacaactggtctatcttcacacagaggatgaagatctgttatgttaagtagctagaacacagtatttaagaattatggkggcagatggctagtaacttcataggtgagtggttaacgtgaatgtagcacagaaagttgcatattcgtgcatcctgaaaaagcaactgaacaaaagtatatgcttaagcatgtactttactttaactcctgtatagatacaagggcttcatcagtgatgtctgataccagaaagcagggtctcagtcagtcatagcctggagatcaagaacaagactttgctctctctaggatacagtataaaggaggaacaaaaataa

SEQ ID NO: 211066 - DNA, 623 bp, Homo sapiens
ccaccataagccttcctgtacagtaccaaaggactgaacataacccactctgagtgttcctttccttcccatcccttcatgacatcaccttgcctgtaagtgaggtgtgtattgcctatcagccctgccaaacagttgcattggtacaaattgaggctctactgcattgtgctgagaaggcacagttaaggaaatggagttaatagacatataataatatttcaattactttgataatgagacaggaaaaattagaataggacaataacaaatttagaacccaggactgagagtttaattcatttgtttgtgtttcttgcgagctgagaaagacttgagcatttttgacgtgcccaagaaggaatggcagtagcaaatcactgtccaggatatggcaaccattagcttcttttctgcctaaaacccragttagctagaggaacacaggcaaggaaaagcataattttcttattttccctaatctataccaattgcatactccacttaaacagttttaaccaaatccttctttttattaagcatagaggagaaaaggtggtactggtatgtagtacctattgctcctcagctcatatatttggtcccacaaatagatactactt

SEQ ID NO: 211067 - DNA, 597 bp, Homo sapiens
  misc_feature (1)...(597): n = A,T,C or G
nnnnnnnnnnnnnnnnnnnnngtttcttttgttaagcaggagttctttagtttaattaggtcccacttgtcaacttttggttttgttgcaattgcttttgaggacttggtcataaattctttcctaaggctgatgtccagaatggcatttcctaggttttttataggattcttattgtttgaagtatcacatttaaatcttcaatccatctggagttaatttctctacatagtgaaaggcagatgtccagtttcattccactgcacatggccggccatctatcccagcaccgttcrttgaattagggagttatttccccagtgcttattttcttgtcaactctgttgaagatcagatgactgtagatatgaatctttatttctgggttctccattattttccattggtctatttctgtaccagtaccatgctcttttggttactgtagctttctagtatagtttgaaatcagataatgtgatgccttcagctagcttcattcttttgcttaggattgctttggttatttggactcttcagtggctccatatgaattttagaattgtttttttctaatactttgaaaaatgatatggg

SEQ ID NO: 211068 - DNA, 526 bp, Homo sapiens
aatgagtatcaaaaacaaaactgaattacacacaacagaaggtgaatacaagtccaaaagtttgattgtatcaaattctagctaaatattgggaaacataataagaactaagaaagaacaacaaagaacaatattaaggatagggactgcattgacagcattgtkaagaattaaaagtgcctgataataatctaggaccttaaaccattaaagaggaaagaaaacagatggaatgatagagagatacagaatatacagaactaagaacacacagaacatacaatatgtggcctggttagctggctcttgtttcaagtgtatttgaaggatgatgtctacttcatgctgtcatctgcaggtcctggataaaaaccatcttgtcattttgtatagtttggctctttgtccccatgcaaatctcatctcaaattctaatccccatgtatcaagggagggacacggtgggaggtgaccagattatggggacagtttcctccatgctgttctgtgatagtgagtaagttct

SEQ ID NO: 211069 - DNA, 504 bp, Homo sapiens
tatttggcaatttatttctatctcacctctatttctttaatcttattgtttgctctgagtgtacaawatacaaccttagctcttcacagtatatttatagttaatattgtaccactttacagaaaaagtagaaatttgcagccatatatccatttatttctcacctgccattatttttactgtaactatgtcatatttattgtatccacatataatatagacaccttaagatgtcacgtttcttatttataatcatatataaagaataagagaaaaaatattttttatgtacctgtatataaaacatttgcagtgttctacatttgtacctaaagatacacatttcccttttgcaccaatttttttagcctgaagaacttctttaacatttattgtagtggtaagtcaactggtaatgaattcttttagttttcttttatctgacagaatctttacttttattttaggggcatatttttacaaacatacaattcttttttagtg

SEQ ID NO: 211070 - DNA, 504 bp, Homo sapiens
tatttggcaatttatttctatctcacctctatttctttaatcttattgtttgctctgagtgtacaaaatrcaaccttagctcttcacagtatatttatagttaatattgtaccactttacagaaaaagtagaaatttgcagccatatatccatttatttctcacctgccattatttttactgtaactatgtcatatttattgtatccacatataatatagacaccttaagatgtcacgtttcttatttataatcatatataaagaataagagaaaaaatattttttatgtacctgtatataaaacatttgcagtgttctacatttgtacctaaagatacacatttcccttttgcaccaatttttttagcctgaagaacttctttaacatttattgtagtggtaagtcaactggtaatgaattcttttagttttcttttatctgacagaatctttacttttattttaggggcatatttttacaaacatacaattcttttttagtg

SEQ ID NO: 211071 - DNA, 456 bp, Homo sapiens
tctacctgtgtctttgaacatgatgttgtctataggcctggaatcagttttcatgtttttttttcttctagaattctatttattcttcaaaccccattacaaaacatcccactgatagaaagcatttgtagattttgatttctctccattttgcatctataatgtcgtttgcttttactgaacatggtaatgaatatgcagttctctaagtattttgacacttcactttcaccagtcaaccataaactccctaaaaaataatggtgccattttattttttaatacctgaacctagcaaaatgcctggatagaatagtcacctttgaaaaaaatgtttaaattaattattcaaaagcattttattgtttaattaagtttaattatttaaacttttctcaacaaatgagktcaatttctgtaggaactgaatataaggaaggatgagaaggtagcaaa

SEQ ID NO: 211072 - DNA, 631 bp, Homo sapiens
acaatgtaattaatgctaacatttaaaaggaaggcaataatgtatgtggattttcagagtctccaaatattwaaaaaatggatacatctttgatgatgggaatttcaagttttttacaggctaggatagtaagataactagaaatattttaagagagcaaagaaaaaaaagcttgtaaaggagagtagtagtttaatgatataaatgttaattatcataatccacctacagtctctagaagttatttttttctgaagtaacttctgattaatgggatgttaacctagaaaccttatttttgtttattttctggttaccttagagatgctttttatctcttgctattgccatggagatggaggctggcagcagtgcctcttctcacaacactccacatgcagtagcagttcatacatttgtattccagggaagagaaagctgggtgaagctcttcgctttcatttgttatcccatttccaaacttggcaaaacccatacaagattccctaaggacacaggagacaaatagctttgtattagtctttttccaaatcatctgggaaggcctacttggaaggaagctaaacatctgattttggggtctgttaattcctattctttaagcaccaca

SEQ ID NO: 211073 - DNA, 405 bp, Homo sapiens
ctggcgagctggtcctgcgcccttgctgtgtgcctgcattgcttctgcctagaacactggccctctgatctccagtcctaggacaactcccaggtcactgaaggcccactgggctcttttcccctggtaaacactgtgggcctaggctcttgcctagygctgggcaggcctctccggacccccacatgggcagtctgtgcacccctattccccgaagcatgggcctaggcctggtgttcccgtgccatccctgggaagacgagccacccatgtgggtgggtctgctctgacccggggaggacctttcccgaaggtcagagtcccttacctaccagcccctgaccatgtccagttctggagagggtgagcatggacagggaggcccaaggggctgctggtggccag

SEQ ID NO: 211074 - DNA, 574 bp, Homo sapiens
agacagttttctaagaaaggaatgatttaaccatagaataattgtattacacgaaagattttactatgttcttaatacaagaaaaatgactctgccacgactacggagtccaaatatggacaggaatgctgggaagagaaacagtaattcactgagatatcacattatcaggtgttctctttccagtagaattttccaaggtggacttagctgaatcttccatgactcataaaggggcaagagaagtaattacagttgagggcaagcagttcaggcatagagactgaagagaaaaaagataaactgtagagagaatttaaggagcagaagaaataatttatcattccaggcagactctctgccctacaacattaactattttgtctgcggcagacttaactgcttcctctgcaccctttcaagtccattcaggatttgtgtctttgagtttccaacacagctgagattggagacagttttggatctctcctggaaagaaaatagatgtggcctgctattgtgtgactcagtttaatttgctggaaytgtggaaggatcaccaaataaagaaatg

SEQ ID NO: 211075 - DNA, 490 bp, Homo sapiens
ttcctgtgccctgccagttggtgtagtatgttttattggatagcagaactctgtaatgcatttcaactcactcgataaagtctatcctgttctctaagagaagagtccattgtttttggttatttgccttcctaatcataaacaatgtaaaattggttataatttattgctktaaagtttgcattaccctcttgagcaattgctaatgttcccctttttccacttcttcctcatcctcatattaatagacaatataagcaacttcctacaaaaatactttcaggatttcttctaatacatttatttcccataaaaattacaccaaaagcacattaaaataatcagcacagctgactgattttcattaggctgcttctagattattttaggttttgacgatgaaaatcatttactctctttgtggctttaagcacaggtctgcctaatgacagacagatgctgggacttggatgccgactttctctgtata

SEQ ID NO: 211076 - DNA, 562 bp, Homo sapiens
ttatctgggtcttgagttaattctcccagacaatagagttgtaaatattcagtcatttttccttgcttctatcttatcttaataacctggcaaaatctatttgctgtcataacagtcaatgttattagaagacctagactattgagttagaaaggctttcttggagaactgattttttagtgaaatttgaagaattaaaaaaaakatttataattagttgctcttatttagggaaggaggttttatttaaaggggaaaagcaaagaatctgtgacagaaaggggcatatctactcagagtgagaagagaaataggtggcaacttttagactctgctaatgatttttagaatagaataagaaaaatgaattagaaaagaaaacagaataagaaaatgagaataagacaaatgagaagctattgaaaggttttaagccaagcttgtccaacctgtagcccataggccaatgtggcacaggatggctttgaatgtggcccaacacaaatttgtaaattctcttaaaactttatgagatttttttgtggtttttaaaaagctcatt

SEQ ID NO: 211077 - DNA, 562 bp, Homo sapiens
ttatctgggtcttgagttaattctcccagacaatagagttgtaaatattcagtcatttttccttgcttctatcttatcttaataacctggcaaaatctatttgctgtcataacagtcaatgttattagaagacctagactattgagttagaaaggctttcttggagaactgattttttagtgaaatttgaagaattaaaaaaaagatttataattagttgctcttatttagggaaggaggttttatttaaaggggaaaagcaaagaatctgtgacagaaaggggcatatctactcagartgagaagagaaataggtggcaacttttagactctgctaatgatttttagaatagaataagaaaaatgaattagaaaagaaaacagaataagaaaatgagaataagacaaatgagaagctattgaaaggttttaagccaagcttgtccaacctgtagcccataggccaatgtggcacaggatggctttgaatgtggcccaacacaaatttgtaaattctcttaaaactttatgagatttttttgtggtttttaaaaagctcatt

SEQ ID NO: 211078 - DNA, 562 bp, Homo sapiens
ttatctgggtcttgagttaattctcccagacaatagagttgtaaatattcagtcatttttccttgcttctatcttatcttaataacctggcaaaatctatttgctgtcataacagtcaatgttattagaagacctagactattgagttagaaaggctttcttggagaactgattttttagtgaaatttgaagaattaaaaaaaagatttataattagttgctcttatttagggaaggaggttttatttaaaggggaaaagcaaagaatctgtgacagaaaggggcatatctactcagagtgagaagagaaataggtggcaacttttagactctgctaatgatttttagaatagaataagaaaaatgaattagaaaagaaaacagaataagaaaatgagaataagacaaatgagaagctattgaaaggttttaagccaagcttgtccaacctgtagcccatrggccaatgtggcacaggatggctttgaatgtggcccaacacaaatttgtaaattctcttaaaactttatgagatttttttgtggtttttaaaaagctcatt

SEQ ID NO: 211079 - DNA, 470 bp, Homo sapiens
gaaatgatccgtttgtgttttacaaggtcactctcattgcagcgtagaccaaacagtggaatgaatgatgaaacatgtcgataattcatttttgtcaggaagaaattttaagtacctaactccaattagttttaatatatttatttatttataatctatatagctgcattttgttggccaatatctcaagacactgcatgcatttacgctaaggttcattgttaataataataacataatttcaaaatttttgatgatttcttgtcaaatgtgattagaccattgttgtgattatctggtaacacagcaaagaaaaagccagatttagaatttttggttctaatattttcytactgttcacttatagtatagtaatgatgtcaattcaaacttttattgtagggatattttaaaatctaattttcaattttttgaagactaaaatttagtgacataaattgcaagtccat

SEQ ID NO: 211080 - DNA, 658 bp, Homo sapiens
taacttcaggtaaaacagaacaaaaccaacattcattcttaaaatggaactataaattctgagatattctcataattcaaactattcctgcttattgtccacaaatatctaaaagcccacaagaaatagtttttcagcatctgaggctgtgttaaaattcttcctcataggaatttacaaatttttctaaagtttcttccaccaaagtttccgaataataagaaagggaggctctatggttaagtaatgtggggaaagaatgtgttgaaatcatctaaaaccagygtatttactgtataatttctcagacctttgagtatgctaatgtgcattgtaactcacaacaaaatatatcgaatgcagaatgtagcatttcatcaacttatttgactttgaaactctttattcaagttctacaagtactatttctgagaaatatattttggggaaaaaataggctagacaagcacttaggaagttgatgaattctaagagcaaacatggcttcactaagaagtcatttcagttaagccatttccagttttaaattactgaactgttgtgcctaggagtagcagaaagcatatctgagtttcaggaaagtatttcttcatgacagcaggaaatgtgggctagatgacagtttaattatttgcca

SEQ ID NO: 211081 - DNA, 658 bp, Homo sapiens
taacttcaggtaaaacagaacaaaaccaacattcattcttaaaatggaactataaattctgagatattctcataattcaaactattcctgcttattgtccacaaatatctaaaagcccacaagaaatagtttttcagcatctgaggctgtgttaaaattcttcctcataggaatttacaaatttttctaaagtttcttccaccaaagtttccgaataataagaaagggaggctctatggttaagtaatgtggggaaagaatgtgttgaaatcatctaaaaccagtgtatttactgtataatttctcagacctttgagtatgctaatgtgcattgtaactcamaacaaaatatatcgaatgcagaatgtagcatttcatcaacttatttgactttgaaactctttattcaagttctacaagtactatttctgagaaatatattttggggaaaaaataggctagacaagcacttaggaagttgatgaattctaagagcaaacatggcttcactaagaagtcatttcagttaagccatttccagttttaaattactgaactgttgtgcctaggagtagcagaaagcatatctgagtttcaggaaagtatttcttcatgacagcaggaaatgtgggctagatgacagtttaattatttgcca

SEQ ID NO: 211082 - DNA, 658 bp, Homo sapiens
taacttcaggtaaaacagaacaaaaccaacattcattcttaaaatggaactataaattctgagatattctcataattcaaactattcctgcttattgtccacaaatatctaaaagcccacaagaaatagtttttcagcatctgaggctgtgttaaaattcttcctcataggaatttacaaatttttctaaagtttcttccaccaaagtttccgaataataagaaagggaggctctatggttaagtaatgtggggaaagaatgtgttgaaatcatctaaaaccagtgtatttactgtataatttctcagacctttgagtatgctaatgtgcattgtaactcacaacaaaatatatcgaatgcagaatgtagcatttcatcaacttatttgactttgaaactctttattcaagttctacaagtactatttctgagaaatatattttggggaaaaaataggctagmcaagcacttaggaagttgatgaattctaagagcaaacatggcttcactaagaagtcatttcagttaagccatttccagttttaaattactgaactgttgtgcctaggagtagcagaaagcatatctgagtttcaggaaagtatttcttcatgacagcaggaaatgtgggctagatgacagtttaattatttgcca

SEQ ID NO: 211083 - DNA, 410 bp, Homo sapiens
atttcccactctctgcttccactggcaaccatcattctactttttgcttctatgagtttgactatgtttgatacctcatataaggggaatcatatagcatttctttccatgactggattatttcacttagcataatgtctcaaggttcatccatgttttagcatatgacaggatttccttctttgttgaggttgaataatattccattgtgcatatacaataaaacatatacattatatatatgtgtgtgtgtrtatacacatatattttttaaaagtttgacttacagttctgcatggctggggaggcctcaggaaacttacagtcatggaggaaggcagaggaggagcaagcaccttctgacatggctgtgagggaagggagaaagagtgcaatgtaaaagtgttccc

SEQ ID NO: 211084 - DNA, 410 bp, Homo sapiens
atttcccactctctgcttccactggcaaccatcattctactttttgcttctatgagtttgactatgtttgatacctcatataaggggaatcatatagcatttctttccatgactggattatttcacttagcataatgtctcaaggttcatccatgttttagcatatgacaggatttccttctttgttgaggttgaataatattccattgtgcatatacaataaaacatatacattatatatatgtgtgtgtgtatatacacatatattttttaraagtttgacttacagttctgcatggctggggaggcctcaggaaacttacagtcatggaggaaggcagaggaggagcaagcaccttctgacatggctgtgagggaagggagaaagagtgcaatgtaaaagtgttccc

SEQ ID NO: 211085 - DNA, 486 bp, Homo sapiens
agaattctcgtaattttccaacctgggtgatgtggagcgtgatgatgtgcctaaatagacacaggaaatgctgaggagtatggacgataattagttcatttggagtaaactgagtttgaaattacaactagcytgtggttgggaaatgcaggactgaagcacaggacacaagccagcataaaagcggaagatgtaatagttatttttttggagataatattgaagctgtaagattgttaagaaagagcttacaaagaagaatagatctctggtaacaatggtgcatggtggactgccggctgaagaaaacctcagactgaagatgggcacagggccactggcattaaactttggcgagattctgctgattgaagtagtggctcatacaatgtgtgtctgtgtgtgtgcgcgcgcacaagcgcgcatgtgcaggtttagtatgaatgcatatttgcatatttagtaatgggttattacacatacaaa

SEQ ID NO: 211086 - DNA, 486 bp, Homo sapiens
agaattctcgtaattttccaacctgggtgatgtggagcgtgatgatgtgcctaaatagacacaggaaatgctgaggagtatggacgataattagttcatttggagtaaactgagtttgaaattacaactagcctgtggttgggaaatgcaggactgaagcacaggacacaagccagcataaaagcggaagatgtaatagttatttttttggagataatattgaagctgtaagattgttaagaaagagcttacaaagaagaatagatctctggtaacaatggtgcatggtggactgccggctgaagaaaacctcagactgaagatgggcacagggccactggcattaaactttggcgagattctgctgattgaagtagtggctcatacaatgtgtgtctgtgtgtgtgygcgcgcacaagcgcgcatgtgcaggtttagtatgaatgcatatttgcatatttagtaatgggttattacacatacaaa

SEQ ID NO: 211087 - DNA, 515 bp, Homo sapiens
tctcttactgttttaagaatcacacatcagaacgttaaagttacacattawacattaaacccttaggactgtaacagttttgactttgctttttttggggtcaccattgacttcttacaacatacttctaaaaaagctgtggcttgctggtgtacaactatgagtataaagaaaagcatagactaagccaacttaattggagttgaatattctggaaaatttaatgtacctttaaatggtgtttgctttaaaagtagtgtggaggtcaagtccacggagtgaattgtacatagtggctgctaataacactttacaggtgtcttatcaccttctacatcataactggtttatgagtttatttctatccctgaaatgtgaactccttgaaggcagagatcttgtttgtctttttttctctctagcctcaacacacagtggcataactaatgtgttctgagtaagttgagagcaaccctcagtaaacaaagaaaagaggtaatactacttaaaagatg

SEQ ID NO: 211088 - DNA, 517 bp, Homo sapiens
aaaactaagggtaaatgcaggttgattattcctcatctgaagtgcttgggaagaaaaatgtttcagatttcagattttttttcagattttggaatatttgcatatgcataatgaggtatcttatacacatagcctgaaaataattttatacaatatttttaataatttggggcattaaacaaagttttgaatgcattttgactgcagccagtaacaagatcaggtgtggaattttctgcttatggcatcaagtctgtgttcaaaaatttttagttttgagggcattttggatgttagattttcagwttagggatgctcaatctgtagtaacctagaagagagaatagcatgttcaaaggtgtagaagcttcaaagacagtacattaaagaatccaagaatcaaatgaaacaaacatacaaaactctattttggtaaaaagactgcaaaacaggccacacatttgcacacctgtttgtgatgtaactttgcaaaggacagattctattcctttactta

SEQ ID NO: 211089 - DNA, 517 bp, Homo sapiens
aaaactaagggtaaatgcaggttgattattcctcatctgaagtgcttgggaagaaaaatgtttcagatttcagattttttttcagattttggaatatttgcatatgcataatgaggtatcttatacacatagcctgaaaataattttatacaatatttttaataatttggggcattaaacaaagttttgaatgcattttgactgcagccagtaacaagatcaggtgtggaattttctgcttatggcatcaagtctgtgttcaaaaatttttagttttgagggcattttggatgttagattttcagattagggatgctcaatctgtagtaacctagaagagagaatagcatgttcaaaggtgtagaagcttcaaagacagtacattaaagaatccaagaatcaaatgaaacaaacatacaaaaytctattttggtaaaaagactgcaaaacaggccacacatttgcacacctgtttgtgatgtaactttgcaaaggacagattctattcctttactta

SEQ ID NO: 211090 - DNA, 538 bp, Homo sapiens
tcattaagtattagatatttaagtaaatgctgttttaaatggtttctactgtgtaaaaattgttggtggcttgttaaatagatgtttgaaaatgtttaaattgggaaaaattgsttggtgtttttctatgaatgaggaacagcttttttttaatatttaaaataatgaaatatccaacatattttcaggagcaaatcagatttggataataaagaaagtttattgtttaactacttttcttctctgtaaagagactttaataatgtcttcccattttaactgacaggccatcaatagatggatttgtttattgtttacccaattattagtctaaaaagcacttgctttaattcactataaaaatgtatactcaactggaccattaaaacaagactaagtgatttatagaaacgctttttctatattaaataaaaataatttcagcaattaagcacaagattagctctgaggctcctgttaggcaaggaaacaagagaaaccatgtgtgttacatggtatttactgtttagtgaattga

SEQ ID NO: 211091 - DNA, 532 bp, Homo sapiens
tagatctgccttggaaaaaatgctagactgttcttcaacttaaaatgaaggatgctaattagtaatataataacagaggaaagtataaaactcacgagtaaaggttggtatatattaaaattcagaatactcaacactcccaataaaaagtgggcaaaggactgtaatagaaattttttcaatgaatacatataaaggcaacaagtgtatgaaaacattctaagtattgcttatcatcaggtaaatgcaaatcaaaccgcaatgagatatcacctcccatctattagaatggctattatcagaaagatgaaaaataacaagagtgtttatgtaaatgtactgaaaaagtaaactttgtacactgttggtgggaaagtaaattagtactgccattatagaaaacagtatggaggttcytgaaaaaattaaaaatacacttccgtatgatccagcaatcccacttctgggtatacagccaaaggaaatgaaatcagtatcttgaagagatagttgtactctcctgttcattgta

SEQ ID NO: 211092 - DNA, 532 bp, Homo sapiens
tagatctgccttggaaaaaatgctagactgttcttcaacttaaaatgaaggatgctaattagtaatataataacagaggaaagtataaaactcacgagtaaaggttggtatatattaaaattcagaatactcaacactcccaataaaaagtgggcaaaggactgtaatagaaattttttcaatgaatacatataaaggcaacaagtgtatgaaaacattctaagtattgcttatcatcaggtaaatgcaaatcaaaccgcaatgagatatcacctcccatctattagaatggctattatcagaaagatgaaaaataacaagagtgtttatgtaaatgtactgaaaaagtaaactttgtacactgttggtgggaaagtaaattagtactgccattatagaaaacagtatggaggttcctgaaaaaattaaaaatacacttccgtatgatccagcaatcccacttctgggtatayagccaaaggaaatgaaatcagtatcttgaagagatagttgtactctcctgttcattgta

SEQ ID NO: 211093 - DNA, 532 bp, Homo sapiens
tagatctgccttggaaaaaatgctagactgttcttcaacttaaaatgaaggatgctaattagtaatataataacagaggaaagtataaaactcacgagtaaaggttggtatatattaaaattcagaatactcaacactcccaataaaaagtgggcaaaggactgtaatagaaattttttcaatgaatacatataaaggcaacaagtgtatgaaaacattctaagtattgcttatcatcaggtaaatgcaaatcaaaccgcaatgagatatcacctcccatctattagaatggctattatcagaaagatgaaaaataacaagagtgtttatgtaaatgtactgaaaaagtaaactttgtacactgttggtgggaaagtaaattagtactgccattatagaaaacagtatggaggttcctgaaaaaattaaaaatacacttccgtatgatccagcaatcccacttctgggtatacagccaaaggaaatgaaatcagtatcttgaagagatagytgtactctcctgttcattgta

SEQ ID NO: 211094 - DNA, 560 bp, Homo sapiens
atcccaggtctcctaacacacattaatttggatgaagcattttgtatatattataaaattaatgactaaaacacactaaaatgaaagagtatataattatcctcttagccttgaaatacacacacacacacacacacacacatacatatccccccacacagggacagacatagacatgcagatcctcctctacttacaatggggttatgtactgataaatcgattgtaagttgaaaatattgtaagtcaaaatagattaaatacacctgaactcccaaacatcaaagcttagcttagyctaccttaaatgtgcttagaacacttatattagcctacatttgggcaaaatcatttggcaacactgtacgctcatagagtctcaattattcacccttgtgattgcatggctgaccggaagctgcagcttgctaatgccgcacagcatcacaaaagaatgttcaactacgtatcattagacagaggaaagatcaaaattcaaaaatttgaagtatagtttctgctaaatgcattatcacttttgcaccatggtaaactaaaaa

SEQ ID NO: 211095 - DNA, 395 bp, Homo sapiens
gaattctttctctattgcaattcccctgtcttgataaattggttctatctgggcagcaggcaagatgaamcttttgggtggttatattttcatgattagaagatcttgcacacagataaacagcaaaatttcaagtcaagataaaataggtgcaatacgcattcatttcttcaaagtgaaactgtataaataaatgccaagtagcacaaggcaatatggagccaatgattatcaagtttttattcttgaggaattaataatcttactgggaagacaaactgtgagcagattttcacccagcagctatgggaacacaaagaaatggaagctttttctgaatggaaaatctgattcaggcttcctagagaaagtgacagcatatgggagaaacaaag

SEQ ID NO: 211096 - DNA, 453 bp, Homo sapiens
gaacagacagagcagcacttggctattggaaggacagatatatttgggaagactaaatacccttgctcatgagaaacagaaaatattgagaaatatgacaatattatttagcataacagtaaactatacttatacattcatgataatgcaatttctaaacattattcaatattatgatatgattattttaaaaggatggttgcatgaaaatgggggaggctgtaaaggccaagttctcatcatttatggtaagaggtcaaattcaatgcctaaaattaataaactataaaaattgataacacattaaaaaatgtsaaacccaatgagaaatgaaataattaaaagtgcaaagtggttaccactgggaggcagggcatgttgtagaagaatgtgtggataaggttgctctttttaaatgagacttatagaacttgttttattcctaaaataaca

SEQ ID NO: 211097 - DNA, 590 bp, Homo sapiens
tgatattccacctagcctagcccaagacccatctctccaattactagggacataccagtgaagaaacaaggtttgaagaggattctattcctgtggctcaaagacatacacacattctgcactgcttcttttgctatagcaattaaagccatggattttcacatgtacatccatctaataaaagttgagctcgaaaagcccaaagtgcatttgagtaatgttgacagcctgcccaacttcacaaatggtttttgggtaatgcatgatcaaatatgtaatgtgctctcgtgcttccctctctagctaagaaaactgattgattcttgacaggagtatgaatggtgattcttgactgttgttctcccgctataccattcttcttwtctcccctaagccaattcatcattatttctggaaaaggaatattagggaatccaaataattcagctaaatctgaatgttgaaatgggcctagaatatagccaacagtgaagagccagatccactaattttattgttatatattgcctctcagtttggcagcccttatgtttttgtcattatttgattcattaaaatatattaagcca

SEQ ID NO: 211098 - DNA, 566 bp, Homo sapiens
atggtggtgcgtgctcatagtcccatctacttgggaggctggggcaggaggattgcttgaggccaggagttcgaggctgcagtgagctgtgattgccccactgcactggagcttaggcaacacagcaagatcctgtctctcaataaaaaaaaaaaagacagaggatttatgaaaaacatataaatagttatagagtaatatagagtatcatttcttttgcaccacttctctttaccttgagcgtatacatacttcattgtactagttaacataatgtatctccattacttgtttacacatctaactctctactaggcttgtgcacccctgaaggcaggaactccatcttaattttatcttggctgaccccagcactttgcacagtactgaggaacaagtgattaatgaataaataatttccttcttayatcctcaaggatagcaaccttttttagtcattcgtttgcccagagctctagaactaggaatgaagaaactgatattagcaatatctgagacaaaaattgaatattgatcatcaatggagcacccagatacacttttgg

SEQ ID NO: 211099 - DNA, 556 bp, Homo sapiens
cttacctctcctggcttccattattgccttagtattctcatgcatgcctagaatgataccagtacaacaacattcatgtgtcatgtcctgaataaataacaggattgactgatgacattagcaagccactggattttccagaaatgggaatcaggatgatttctataatatattccaaatgaaacataaccgccatttcagctaagagtaggcatttcttggttcctaaaataattgagattcctgaatgtatcgaaatctagaagcatccattgagctcttactatatgcaaaactctttattaggtgttgtcatagaacacagatttctacgtgaatgtttaaaggatattggataaagtcacatggcttattgtgcttggttcaataagamccaaaaaaaaaaaaaaaaaacagaagtaacaagtaacttctcttattacttattttttatatgacattttaaaataacaatcgtatctgaaatatgtattttggaataattttagtattcagaaaagttgcaaagatagcacagagggtttctgtatatgat

SEQ ID NO: 211100 - DNA, 458 bp, Homo sapiens
tctaagactgtattgattttaagatgcagcaatggtttgttaatagctttccctgaaataaaaaaaaataaacttacgaaaacttttacagcacttttttttgacttacaacagaaaacctttattcatacagttacttytaaatttatttttcagtgtcacaatcacaaatttgagtcaagttttctttaaaatcagagttcagtgtttctttcttttctttttctttttctttttcttttttttttttttttttttttttttttttggaaacagtctcgctccatcacccaggctggagtgcaggggggcattttcggcttactgcaacctctgcttccctgtctcagcctcctgagtagctggaattacaggcatgcaccaagacgcctgattagtttttatatttttagtagagactgagttttaccatgatggccaggctggtgttgaactcc

SEQ ID NO: 211101 - DNA, 458 bp, Homo sapiens
tctaagactgtattgattttaagatgcagcaatggtttgttaatagctttccctgaaataaaaaaaaataaacttacgaaaacttttacagcacttttttttgacttacaacagaaaacctttattcatacagttacttctaaatttatttttcagtgtcacaatcacaaatttgagtcaagttttytttaaaatcagagttcagtgtttctttcttttctttttctttttctttttcttttttttttttttttttttttttttttttggaaacagtctcgctccatcacccaggctggagtgcaggggggcattttcggcttactgcaacctctgcttccctgtctcagcctcctgagtagctggaattacaggcatgcaccaagacgcctgattagtttttatatttttagtagagactgagttttaccatgatggccaggctggtgttgaactcc

SEQ ID NO: 211102 - DNA, 458 bp, Homo sapiens
tctaagactgtattgattttaagatgcagcaatggtttgttaatagctttccctgaaataaaaaaaaataaacttacgaaaacttttacagcacttttttttgacttacaacagaaaacctttattcatacagttacttctaaatttatttttcagtgtcacaatcacaaatttgagtcaagttttctttaaaatcagagttcagtgtttctttcttttctttttctttttctttttcttttttttttttttttttttttttttttttggaaacagtctcgctccatcacccaggctggagtgcagkggggcattttcggcttactgcaacctctgcttccctgtctcagcctcctgagtagctggaattacaggcatgcaccaagacgcctgattagtttttatatttttagtagagactgagttttaccatgatggccaggctggtgttgaactcc

SEQ ID NO: 211103 - DNA, 458 bp, Homo sapiens
tctaagactgtattgattttaagatgcagcaatggtttgttaatagctttccctgaaataaaaaaaaataaacttacgaaaacttttacagcacttttttttgacttacaacagaaaacctttattcatacagttacttctaaatttatttttcagtgtcacaatcacaaatttgagtcaagttttctttaaaatcagagttcagtgtttctttcttttctttttctttttctttttcttttttttttttttttttttttttttttttggaaacagtctcgctccatcacccaggctggagtgcaggggkgcattttcggcttactgcaacctctgcttccctgtctcagcctcctgagtagctggaattacaggcatgcaccaagacgcctgattagtttttatatttttagtagagactgagttttaccatgatggccaggctggtgttgaactcc

SEQ ID NO: 211104 - DNA, 457 bp, Homo sapiens
gaattcttattgttactattgttatgtcaatatttctgtggagggcatttrttgagagcatctcattagtggtaaatgaaagagtatatttgtgtttgtagcactttggcctgtaggtgggaaagaaagaatatttctataagcctcagaaatggggagcaatatacaccaaaggccacaagtctatttataacttgccattattttcacccaaaggttctttaagcataaaccaatattatttgaaatattaacatagattgtcgtttctccgttacttgccttatagcattttcttttttgactgtcatcttgttaaacctcttcgtctttttttatgttactgatttcctatgtgattataaagcaattttctatcatgtataaactcttctgactaaaggaacactttttatagcatcattttataaaaggaatacaaatggatgagtgaaga

SEQ ID NO: 211105 - DNA, 457 bp, Homo sapiens
gaattcttattgttactattgttatgtcaatatttctgtggagggcatttgttgagagcatctcattagyggtaaatgaaagagtatatttgtgtttgtagcactttggcctgtaggtgggaaagaaagaatatttctataagcctcagaaatggggagcaatatacaccaaaggccacaagtctatttataacttgccattattttcacccaaaggttctttaagcataaaccaatattatttgaaatattaacatagattgtcgtttctccgttacttgccttatagcattttcttttttgactgtcatcttgttaaacctcttcgtctttttttatgttactgatttcctatgtgattataaagcaattttctatcatgtataaactcttctgactaaaggaacactttttatagcatcattttataaaaggaatacaaatggatgagtgaaga

SEQ ID NO: 211106 - DNA, 457 bp, Homo sapiens
gaattcttattgttactattgttatgtcaatatttctgtggagggcatttgttgagagcatctcattagtggtaaatgaaagagtatatttgtgtttgtagcactttggcctgtaggtgggaaagaaagaatatttctataagcctcagaaatggggagcaatatacaccaaaggccacaagtctatttataacttgccattattttcacccaaaggttctttaagcataaaccaatattatttgaaatattaacatagattgtcgtttctccrttacttgccttatagcattttcttttttgactgtcatcttgttaaacctcttcgtctttttttatgttactgatttcctatgtgattataaagcaattttctatcatgtataaactcttctgactaaaggaacactttttatagcatcattttataaaaggaatacaaatggatgagtgaaga

SEQ ID NO: 211107 - DNA, 559 bp, Homo sapiens
atccaattaattaataagtgtgggcatggatattaatttacctaggcttgcccctttggggacttcttaacagatacaggtttatgtggtgatatcartgatttctagacgattacgattttttatatattgcttcttaagtatgtgtatgtcttatagttcaattactgttaactgctggaaaacaacagcaaaccatcttatactagattttatgtagaattgtattctcaaagttaatactttaataagatatatttattaatgaatagaattatgtatgtatgtatatatatttaattttccattcatagatacgttttaagccttagatttatcatcagacttggtcatcatttgcatgtcctcaacatcaaggaattaaatattcatttaaacacaaaaggagtcaagattaaatattatcaaaaagcaggagttaattattttccctatagttaataccagtaacatttacagtgttatttgtggaccatgtatatttaaaaattttaacacatcactactaaatttagtgcttgttttttcttttttgtgt

SEQ ID NO: 211108 - DNA, 414 bp, Homo sapiens
cctgtggttttcttcctaaaatgctcaccttattctttctgcagtaatcatgtcatcacccagttacactcattttgaaagaagggaactctagtctcttatcactgatggaataactttcccagaagacccttagcaaactttcccttatatatttcattggccattgcacctgtggctgaaagggaggctgggagggtaagtgtattagttcgttctcacactgctaataaagacatacctgagactgagtaatttataaagggaaaaggtttaatggactcacagttccacatggctggggaggcctcacaatcctggcgaaaggcaaatgaggagcaaagtcacatcttacatggtggcaggcaagagggcatgtgcaggggaactyccatttataaaaccatcagatct

SEQ ID NO: 211109 - DNA, 547 bp, Homo sapiens
ggaattccaaatatagattacttaagaggggcaactgtttaatactatatttttgaagatagtttggggtgtaaatatttatttgtttttgaaggtagtttggggtgtaaatatttatttgtgtcattctacctcaggtggaacatcctcagagatctaaaaaggctgtatggcataaactactgtcyaagcagaggaaaagggctgttgtagcctgcttccggatggcccccttatataatctgccaaggtcggaattactttattttttgtaatagatcaatgttattttttcctagtaagtgacaggtgtttagaatctaccttaataggggtacaatagtccaagagaaggatggaaaagctttattgattcttctacataaaacttgactaattttgttggatattttcggagaactgtggtctttaatgtaattattaaatgactcttactgaggaatatctgctcacatatgtgaggcaagagagagtcattaggagttctttctttgtcctggatttgaatcagaacatgatctgaatc

SEQ ID NO: 211110 - DNA, 445 bp, Homo sapiens
ttagcgtatttaaagatagttcatagataggatcagtgtctcttcacagttatcaatttactttcattctctttccaaacactttggcaaaatgtggcccagtgatttgacgtgactttgtttccacagggaaattgactagtgataaaactggttagtaaattctactctaactagtatcagaattacagtagctccaatgaattcaactccttttaaaaaattatcgatgcytaaactgtttttgcctagttatgatctctactttgcattttgcattctcactctgcttttctcttggctctcagaaagagagagtggagctaacgatccaaaacatgaaaataaaaacttaaaaagagtcaagataaaggatgctccaggaactagtgatcatgctagggcactaactggcagacaggatgtactgccaatggccagttgc

SEQ ID NO: 211111 - DNA, 363 bp, Homo sapiens
tgatgatggaaagtatcctatgactaagtaggtaaagctattatgaaggcaaattttaggtcattcttaggaaaaacctaaaagggctgtctaaaaatgaacagtgtcttctacatgattaaggagtaaaacagagttaaggtcttcrgaggtagcaagtcacagtgcaagtagagttcacttgtctttgtcttgaaagcaaagatttcttttctcttgcaaaattcccgggacatatcctgataaagctttacatctcagcagcatcactctgattgctcttttttcagttggtgtcattggaagcccctaaaccctatttaacttcagtgccattgactggcacttcctgccacttacatc

SEQ ID NO: 211112 - DNA, 584 bp, Homo sapiens
tttttcttccttttcacctattgtttatatgttgtcattaaatctctgcctctttttacttgcctagtgcaaaactctgactcacaggctctaaggcacattgcccatattcactgggtcctccctattttggttacattgaggggtgacttgtttactgtcctatctgtagtgtgatgtctttgtagaaagttacatggctataccaccttcaaaattttgtaactccatttacgcctttctctgatccataaagatcaagatagatcaagatcaagatccaggtagatgggtacatagagagatggatagatagatttttttattggcagaagtgtggggcatgatggactagagtcttttattgcttagatatctatgtataaccacatattgaaataaaacctcaatgatttgtatctgaatattttaaaataatgttaatgctctatctctttctaagaatatttaagagcttaaaacttccctacaagtactctcrtagataccaattattcacgtcattttgcatcctccaggccacattagtactagtctagatgactgaaacttaactgttgggt

SEQ ID NO: 211113 - DNA, 556 bp, Homo sapiens
aattttaattgcattactgatggtgtgcaggtctttaagcaccccacgcagcttctcacataatacctatttgaaggattaagtgtaaaacataaagaaaagatggcatatattgtycaataaaacacctttaaatcagaagggaaaatacagtcgcttatagtacacaatacttcatccaacatcagcgccttctgaagtcagcacccccacagaattcagtgcccataaaataggtagtgcttagtaatttgccattttatttcatagcagaaaattagagcagcagtgcacgatgggcgtgcctgcttgagaacaagtctcaagacctgccaatgtctttctaggttctcctttagagaacatctgcaatttttgtttgaaatttaacattcttgccacatttattttacttttgtgtttgttgctgttatgtgtgattctgtgtattcccaccccccaagggaaccctttaagaaagaggccatctttttttgctcagggcattttttaaagaagatcatggttagtagtttaatctttgaattagaaattt

SEQ ID NO: 211114 - DNA, 556 bp, Homo sapiens
aattttaattgcattactgatggtgtgcaggtctttaagcaccccacgcagcttctcacataatacctatttgaaggattaagtgtaaaacataaagaaaagatggcatatattgttcaataaaacacctttaaatcagaagggaaaatacagtcgcttatagtacacaatacttcatccaacatcagcgccttctgaagtcagcacccccacagaattcagtgcccataaaataggtagtgcttagtaattygccattttatttcatagcagaaaattagagcagcagtgcacgatgggcgtgcctgcttgagaacaagtctcaagacctgccaatgtctttctaggttctcctttagagaacatctgcaatttttgtttgaaatttaacattcttgccacatttattttacttttgtgtttgttgctgttatgtgtgattctgtgtattcccaccccccaagggaaccctttaagaaagaggccatctttttttgctcagggcattttttaaagaagatcatggttagtagtttaatctttgaattagaaattt

SEQ ID NO: 211115 - DNA, 542 bp, Homo sapiens
tctcctttgcaaagacaaattcttgacgacaaaaccatccaccccgagacaaattctgattgtcactgaaattcaaaaatgaagcagtcttcagttattctggcataaaatgrcatatcaaatccaggcagaagaaagtttaggttggctttagacttcttgaaagttatattcaatgtcagaagacaatggagcaatttctagaaggttttgagggaatgtgttatccaaaatattagacccaggcaagatatcagataaatcaaatgacaaccaaaattcttctgaaacatgcttctgtatttcttacaaaaagagaaaaacaaaatcagaactcccatattctccattcaaatgtgataaacactcttatgaaaactactcaaaactcaaaagttaaaatcactacttcagaattgagaaaccactgtaaaacatctggaatgaaaatcaagattatttcctgcaataattgtggttgccaaataaaggtaaatgtaagcttaacaataaaattatgacatataaatgtaatatatatt

SEQ ID NO: 211116 - DNA, 526 bp, Homo sapiens
ttgaacctgtgaccttgcaaggcaactagctgcttgtatatttcttgggatttttgttgtatacaacagtattgtctgcaaataaagaaacatcatcttcttacttttcaatatttgtgtcttttatttctttttcttgccttaaaatactggctaggacctccagtatatggtgagtataagtagtgatggcagaaatatttatcatgtttatgacctttaaggagataactctcaatattttatcagtraatatgctgctagctacaggatttttagtagatattttaaaattcaaattgaatgaattcttctttatttaaatatacctatttaaataaagcaaatattacttttttcctctacgaattaagataatcatcttttttccttttgtttttaatgaactatcttttttatttctttacatgcttatttgcatcatagaaaatcccactggctcagactgtttatccattttatacaacactgaaattggctaatatggttaggtttttgtgactat

SEQ ID NO: 211117 - DNA, 250 bp, Homo sapiens
acacttacaaatcatatatatatatatatayatatatattaagggactagcttccagaatatataaagaatgttttacaactcaacaataaaaatataagtaatccaattagaaaatcagcaaaagatttgaatagacatttctacaaaaaggatatataaacagccaataagcacatgaaagaaaaaaatgctcgatacagttagtgatcagaaaactttaaattaaatcacaataggagagcacttca

SEQ ID NO: 211118 - DNA, 579 bp, Homo sapiens
atttcttcatgatgccatgttctttaattaaatatattacctaataaataatcaaacataattctcagatggtaatgatgatgtgcactgcacccatccctgaaagccatgggccaagccaagacatgccttcagcacwgttgataaacactcttggctgcatcccactggggtggccacaagtatggagatcactgaaacaatggaaaaccaagctgagtctagggagtggcaaaggcaaggactagggttcagatgctgaactaaaagcagaatcattgaagtccaggcaggcaagagggagaaaacataggaagtatctgaataatttttaggcacagaaagagagctgttttgactagcataagcattgggattagatctgtttgccaaattcttgtttgtttggtttttcttaagacttactgaatctttagaattgccttactttaaatttctttaatttttagaatgtttaagtttatcaaataagtacataaacatggttagaaaatccaatgatagaaaataacttgttttgagaagctgttattctatgtaccctatgcccactgtccc

SEQ ID NO: 211119 - DNA, 384 bp, Homo sapiens
atgtcttcaatgtgctgtcagtcatatttccccagttttgtatgaaatttggtgtgacaattaaaaacctagtcactgctttcctgatgaagcaaaggctcatcctctgatttgcattctgattgctagccagtttatggagtgaattatcctttttattgttatttgtaacttaaaagactggtattaaaatctctagtrgagcaattaagatctgtttgttcatgagaatcatgaaatatattttattttcacattggattttttctattcctataaattattttaaaaataatttacttgatgcgaatatcaaaatatatccaggttatactatatccatggtgggtagaattgcatttttgtgattctaagtaagaattc

SEQ ID NO: 211120 - DNA, 531 bp, Homo sapiens
tttattttgcaacatgattcaattgaagaaactggttgttttatcaaggctttgactggctgggtatacttcccttaaaggagtcaagctcaacttgcagagttgataaaaaccacttgggaaaactggcttcatactttgtctacatagtccctgtacagggttcttaactggtggtaagtaaagaatgtcactttctaacaggccgaggaagcccatgctttgagacctcaagaatagaagtacttacccaattcacaggtattcaagggtacaaaccagtggctgcacttagctttggaaagtcctgagattccttgtggaacagagtcccatcaaagccaatctaaaaggcctatttaaaaataattattcttgctgcactttatgcaaataatcaggccaagtataagactaaagtctattttgcaaacatcrcagtcttatcatgatttgtttttaataaaaaatgaggactggagagagagaaattatgtttcaaaatgtattatacatttctcattaagttct

SEQ ID NO: 211121 - DNA, 501 bp, Homo sapiens
agtttagagagcatattttattcttagagtacttggcaaaatgacattggggaggagaactgtaagatgtaatagtatacttcattcctcaactataaaggcaataaagtcagtccattcratgctgcctgattataaggcagctccttaatggttgcacagtgaaactggttctgtgaattatcagaccttacctctagccatgagaaaattctcaggatagcagactgaaaagttcagtgatctcagcctcataataatatttctccagccatacatagaggtacagtaaaattgaattattttctgttaagatagtgggtgtaaatgagagacaaacgacttttctgctgatctgcttcagcatatggaaactaaatgtattttgcaggaagcctaatgtgaatgttatgttctctatcttggtggttaattttgagcaacactgtgatcttgagaaaggtttttaaaatccacctcactttcgctgtgtgaatgctt

SEQ ID NO: 211122 - DNA, 557 bp, Homo sapiens
agatctttgattgtcctctcttcacaacatacttttcctttttggccctcaacacaggttttattgttatgtgattgcccaggaaggaaatccatgaaggaattggctataggggtgctgggcatgtgggaaacaattggtggaagccactgccrtccctggcactggaagggatgaaggggagaggtggcgtcatcagaaaccgagagctggagaaagcctcatgggtgatgggaggagaagtagtgatggggaaaaacatcccttggcttttcccttcctcctcccctccaatctcctgccagagtcttctgctgactgaacctaccagaaagacagaaggaaaaggaaatatagcagagcaggggaggagcagaaaacagctctgagaacaaacaagcataggctcatgactgcagtttacgtatttgtttatgtggttatttgtacaccatctgtctcccataccagactgcaccagggctgtgttaatgttactggccactgattcctcagtgctttttacagggattaatattgatccttaatatttgttg

SEQ ID NO: 211123 - DNA, 549 bp, Homo sapiens
acaacatacttttcctttttggccctcaacacaggttttattgttatgtgattgcccaggaaggaaatccatgaaggaattggctataggggtgctgggcatgtgggaaacaattggtggaagccactgccatccctggcactggaagggatgaaggggagaggtggcgtcatcagaaaccgagagctggagaaagcctcatgggtgatgggaggagaagtagtgatggggaaaaacatcccttggcttttcccttcctcctcccctccaatctcctgccagagtcttctgctgactgaacctaccagaaagacagaaggaaaaggaaatatagcagagcaggggaggagcagaaaacagctctgagaacaaacaagcataggctcatgactgcagtttacgtatttgtttatgtggttatttgtacaccatctgtctcccataccagactgcaccagggctgtgttaatgttactggccactgaytcctcagtgctttttacagggattaatattgatccttaatatttgttgaattgatgagtcaat

SEQ ID NO: 211124 - DNA, 503 bp, Homo sapiens
ggaacttgaatttactttgtggggagaggcaacatgtcaaaggcttttaaaataggagaatgatgtgatcagtgccatgttgtagaatcatscttctgactgtagccattgaggatggatttctcagtgaggactgagaaaactaccagtagggaggctgctgtaataagccagaacagaggaaatgagatctgaaattggggcagtgaatgtaagaatggagaagggggcatgtagaatggggaaacaaatgctgataatagattttaagagaaaaaagcacaatacaaaaacgtgtatgtatacagtatattcctattttgtttataaattcatgtatatatttgtgtaaacacacacatactttacatagagaaaaagggaaaaggaaattcaaccaaatgttgaatggttttctctgaattgtataggtgattttaaggtatttttaatatatatttttcttcccaaatgctctataataaccatatattacttttgtg

SEQ ID NO: 211125 - DNA, 542 bp, Homo sapiens
tgaactcattttcaacaaacatgtcaagaacatacatggaggaaaagacaatctctttaataaatgggcygggaaaactggatatccatatgcacagactacacctctatctctcacctaacaccaaaatcaaatcaaaatggattaaagacctaaatctaagaactcaaactagaaactactgaaagaaaacatcagggaaactctccaggggaaaaaaaatttaactgcatatttgtaacaagtttcattactcaatactgaccaattcccaagtacttccccatttaaaatatcttggtgatgattaaactcccagttgtatggagtatgtctgtgaggatttattttgtttctttcatttatgagagggcatgagtgttatatttatggagctttggcatatataaggatgttttctgttactagcatacataaatgacatcttggcttgatttggaattctgtattcccaatttttgtatctcagatcactataaacatatttctatttgctactgaaagttaatattgaaaaaagt

SEQ ID NO: 211126 - DNA, 559 bp, Homo sapiens
ctcacccaagggtgggctcccacaactgcagtgagagagatggtcagttcaaagcacatcaaccaagtcagtgcaaaaggaggaaaatgaatagccagaaagttttctctgccccaatacgtagtgctgagctgggctgggctgcacgatatgatcaggaaaatatagaggtcacagtgtggaagtagaaagaacagaaaggttatttcstagtatagtttcaacagaagagatcagaggcctcagtcttctctttacacctgctacatggatccaagaaatctatgtcaattttctgatattcaaccccatctagacatttcacaaaaaatttataactagagtctgatgctttagtttgtatttccctccttcttttagtatcagcaacctcctccaatgcagaactgctcttctgtctctccatgtgattccaaggatgcttgtcccagaattgtccttctctggtgcataacccagacctggccaatcatagttcccttccacttggcaacaatgtttgatgtgagaatgagagtataaccaaagccattcatgt

SEQ ID NO: 211127 - DNA, 484 bp, Homo sapiens
atttaactacagaggtaaaagacccatatactgaaagctatacaactttaatgaaagaaactgaaaaggacacaaataaatggaaaaatattccatgcttrtgcatcagaataattaaatattgttaaaaaggttcatattactcaaagcaatatgtagattcaatgcaatccctatcaaaatttcaatggcattcttcacagcaatatttttttaaatcctaaaatttgtatacaaccacaaaagaccccaaataaccaaagtaattcccgtaccctgcaaaaaaggggaagccatcactctttctgatttaaaattacattacaaagatataattataaaaagactgtggtactagcaaaaacagacacataatcagtggaatagagagcctagaagtaaattcaaatttatgtggtggactaattttcaacatggcaccaagaatacacaatgcggaaaagagagtctctttaataaatgg

SEQ ID NO: 211128 - DNA, 637 bp, Homo sapiens
agaaagttacatcccattattcctctgctttatttctccatggcaatttcttacagaacagtaacttgaaatgtgggtcttggtcacattggtcagagttttgtatctgtattagtcaaggttctacagagatatagaaccaatacaatatatatagattacatgaagaaatttattctaagaattggctcatatgattttgagggccaagaagtccaactatatgccctctgaaagctagcaagccctctacaagctagaaaacmaagaatgctgagaatgtaattaagtcagagtccaaaggcccaagaaccaggagctccaatgacaaaaaacaagagaaaatggatgtcccagctaaaaaagagagagcaaattcacacttcctatgatttttcatccactcaggccctcagtggattggatgatggcttctcacattggtgacagtgacttttactcaatctactgattcaaatgctaatctcttctggaagtaccatcacagaaacacccagaaatgttttatcagctatctggctatctcttaacccaatcaagttgacacataaccttcacagtaacttaaatataactactgttaaagtatttgttcattatgttatgaaataatctt

SEQ ID NO: 211129 - DNA, 431 bp, Homo sapiens
gaccatctgagtgtgaggctctgtgtgactgcacaagtcacatgatgtccatgaagttgccctgagcacagtttctcattaaaaccatccaggcaggggacaagcctcatcttccttgctctccgctacatctggtgtctctttcgtggtgcctaacacagtagccactaaacgagtttgtcagtgtgtggaagctcctcaatctaaactacttacaggaagtcctcacttaacattgtctayaggtatttggaaactgtgactttaagcaaaacaaggtaacacaaaaccaatttcactacaggtgaattaataaaaacagcagttaagttcctagggcatatttctggtcacgaaaacaccactaaatcgctaaataaagactccaaacacttctaacactaaacattgaaataaatgttatctataca

SEQ ID NO: 211130 - DNA, 577 bp, Homo sapiens
aacagtaaaaacaaattattaaatgtcatcaccaggaaaagataaaatcataaatccatactgtttcacatactaatctctacagcagtgttttatgcttttacctaattaatgcaacctacttggggtcggatttccatcagacatggtccgtctgtgatgtgayggtctatgttttgaagaagcacagtaaggtacattcccacatgtctgctgtaggaaggaagacggcaagtttcttgatacactacaatcagtgtcaagtcttggcatgagggctggctcacgaccacttcctggggcagtgggacaaaaatccggagtgagcatctcagagtcacaagtgacaggtgcactgtccaccagtggatcttcactgtccatctgcagcaggcactttgtggagaaagaaggtgtggagaggatgcccagggcacttgacagtggcagggagggtgggctgctggcctccccacaggtggatggcaggcttgtgggaggactggcgcttctgcgggacttggaagcccgctggaagattccctctcgtttcttcttctcttccttgggcaacggt

SEQ ID NO: 211131 - DNA, 526 bp, Homo sapiens
agttgttcagctttatcttgtaaaactgggagggacaacttccaagctctgggactttggagctggattaaaagttacatcttctcctttttaacttgtttttccagcctccatattttattgtttactctaatttccatcacaactccctttttttcattaatttttttttctatttgaatattgggggcttttaagcatttcccatcagscaaatctgaatttattgtcttgtgcttggcagtcacaatcactggtgctaccttgatggcttctattttaggctgcagggtcaccaggagacaaatgctacttttattcacatattagcaacatttggcagtaacaaacttgtttatagtgaaaaatgcattagtaacttactctaaggggtgaaacactagattagagagtgtcatgaaccaggaaagagcattgttatcagaggacctgaagtatatcagtcagcatttcaaatatccttattttaaatatcatgtgcttaaatgtttagtgtttggggggt

SEQ ID NO: 211132 - DNA, 641 bp, Homo sapiens
ttcctgtaaactaggcagaaattctgaagtaatgaactgtgctcccagtgtgggtacccataaactttgtaatgaataacactctttgaatgtctggacaagaaagatgtctcactccaggggggatgttttcctttctgtaaccaaactgtgcttagctgatatttgaagcctgacttcacactcttcagagttcttctttgatccaatatggtttagtcaaattgactctgatatgtttgcagattggagtaggggttaggaaaatgtgggtgtgagggtgtgaacccatatgtttctcttcagctgggaatttgccaatatttgtcctctaaggaataagattccctttccagttttgattgatcgatggtaagaagagattccaatatagcttttggctctaaatgctttgggggagagtcccaaaaaagagccacaaggttggatgtggtttgacaagtgaaatayagaaggggagatgaaagaaatgtcaggctggaggaatgaacataggaacaattgactaatggtcttcaagcatggaagaagagggttgattagttctccagacatacagaggagaaaaataagaaaaccgcgaaactgtagactattgtatgaatgctgaccccacctaa

SEQ ID NO: 211133 - DNA, 470 bp, Homo sapiens
tctgaaacttattttaaacattctcctgttctcttccaattagatgctctgctctcttggcttcctgtgtcctcactgcaactcatctcatttgtttgctttctcatttttgtcagcaggttgggtgtaaaagaggcatttaacagataattgaagggacttgctttccagagtcaaattcatctacatggcattcagccataggctttcagtgataaaacatggacatgtaaaacatcaacttgtgatttgtaaaagcttaaaatattgatgattgaacagggttacaggagatgatagaggggaatctgttcaattttcaatgaaaattgataatgcccaaataggtaatataaaatcagatcaaacactcaggcaaaatttatttaaggaaaacatatatatggagragtagtttatgtctacatttgctcacgcctttgtctaaaactcttttctccagactttgg

SEQ ID NO: 211134 - DNA, 541 bp, Homo sapiens
cacatagtaaataatcctgtttccttttattaaataaaggaatttattaaaatccaggtgatgtgattaacctttaaaaataatttttacaacgatcctaccagaaaggtactagtaataaaccmatctcatagatgtgaacatctgagacttagaaaggttatcaaaggtacacaactaatagtcactggagctgggactcaatgtcaagtcaactctgggtttcacagctcttgctcttaataactctccatttgcctatatgaaaaatttcaaataattttattttcattagataagtgtatattttcatacaacctggaacagaattgctgtaactgagtttggggaactttcgagagaaaatgacaacagacctttttgctgcattttcagaagacatatttattgacctttgagtttcctctcttttgagcattcaagctttcagtagcacatggacctgtggaaacccaggtgacagctgtgacttagaaagatcttttcccttttgcacaaagcatgaacgttgcaaattttc

SEQ ID NO: 211135 - DNA, 581 bp, Homo sapiens
tcaaaggagggccgcataaggcctttaagcactgcgtataccaactaataaaatgagagctgcacatgctaggcaggcgattttcgttcaatttcaaatgtacacccatttggtgtggatatggtagagtataataggtaagtatacaatggcaaagaagatctttagtaaaggaacaatgacmcctgcaaaaaaaaaaaaaaaaaaaaaaaagttggggggtgttttttttccatgcaatttcaaccttttcaacaccaagacatgattctttctttcttgcagtttgcagtttgggatggacttttggaaacaggggtaatagcgttaagaaccggctacttcatgtgctaagtataataaatagattgtgtaagttccacccaaagaccatgttcccagtttgcctctctcagaatgcacagggaaagatatattactcaaggttccacacccaacaaaagaaaggaacagaacatgtttactttggctttccttttttcatctttatgaaagcatgtgtaagaaaaagaaagactgtttctactctcgctcatactctgacattggaggtaaatgtt

SEQ ID NO: 211136 - DNA, 581 bp, Homo sapiens
tcaaaggagggccgcataaggcctttaagcactgcgtataccaactaataaaatgagagctgcacatgctaggcaggcgattttcgttcaatttcaaatgtacacccatttggtgtggatatggtagagtataataggtaagtatacaatggcaaagaagatctttagtaaaggaacaatgacacctgcaaaaaaaaaaaaaaaaaaaaaaaagttggggggtgttttttttccatgcaatttcaaccttttcaacaccaagacatgattctttctttcttgcagtttgcagtttgggatggacttttggaaacaggggtaatagcgttaagaaccggctacttcatgtgctaagtataataaatagattgtgtaagttccacccaaagaccatgttcccagtttgcctctctcagaatgcacagggaaagatatattactcaaggttccacacccaacaaaagaaaggaacagaacatgtttactttggctttccttttttcatctttatgaaagcwtgtgtaagaaaaagaaagactgtttctactctcgctcatactctgacattggaggtaaatgtt

SEQ ID NO: 211137 - DNA, 563 bp, Homo sapiens
agattcccagatagatattagaatccctctaagacctaaacctggagaatttgttgttgtaaacattgctcaatgaggtatcagttatactttattaagttttgtgaatatacaaactggaggagaaatctcttggcacccctgcctgactcttactaaaaagagcagaatttattcttggatgaaattacctatgatcctttcttcccttgctaaaaagataaatcgcaaactgtaacycacaggacaactaatttcatggtccttataagtttagcttcttactcctgcctagcccttcagtgctaacctcagagatacaaaatccagttcttacattcccaagcaagatgccctcttgtgtcttttagtaaagggaagaggtggagagaaaacgttttggtgaggagagaggaagaggtaaggaactgaactggcccttctctccttataatgcagctctaagagcacagtcattccctctttcccactgtcaaaaccccatgaatctatattttgagtggaaaggaaacagaggggaggggagaaatgtaactcactta

SEQ ID NO: 211138 - DNA, 569 bp, Homo sapiens
gggttcatgactgcccttcagagagttgaaaatagagagcctgtcattcttcagaaagtcrtatttgttcacaatgggggcctgggtcgtgatgtaagtgaggacatattcccaaacaatatgcaatcaaattattagtgaagttgaattacacttgtttctggaatttttataaataaagtatgatgaaatattttagctaatcattcaagcaaaagaaaacaagtacagtttgtagtatttctgtaaaagaagggagaaaagctgtgtaggacacatttctgatgtttaaataaaattcactcaaaaggagttattttgctaagatcatagctttagttatcaatcaataaataataacacaagtctccagaacagaataaaagctccagcacccactgctcaaaacctgccaggaaacaaatcctccaaggaagaaaggtaaaaatatcagagagagactggcaatatctcccagggatctaaaagatgtctagaagtgaatgtcatttctcaccaataatctacactttactcttacatgaaacaatttttcacaaaaaattctc

SEQ ID NO: 211139 - DNA, 531 bp, Homo sapiens
tttaaaaaatactcatgcccaggttccactctcagaaattagaatttaatcagtctgtggtaccgccttggcattgtaaatttcccataataatttttatatgcagcaacttttgagagccacagtttaggagattattgcaataggaaacattgcwgccctgaattaatgcaattgtcagtccattaacatttctgggtagattagaaagtagaagttatttctccaaatgactcttagtagccttgtgccatggccttgggctgatttactgactgattctccactgctgctgaacacctgcttggtgcattgcctaatacagcaacctagaaatgttagggaggtaacagagatgtgaataaagctagagaggaggagagagagactggttcctagcaatgtggtttcagtcttaccactgtctacttgaagtccctactttggtcccctctggtctggttatgccctggttgggagagttgattagcttgacaaatatagctgaatggtagtggctacttgggatgt

SEQ ID NO: 211140 - DNA, 531 bp, Homo sapiens
tttaaaaaatactcatgcccaggttccactctcagaaattagaatttaatcagtctgtggtaccgccttggcattgtaaatttcccataataatttttatatgcagcaacttttgagagccacagtttaggagattattgcaataggaaacattgctgccctgaattaatgcaattgtcagtccattaacatttctgggtagattagaaagtagaagttatttctccaaatgactcttagtagccttgtgccatggccttgggctgatttactgactgattctccactkctgctgaacacctgcttggtgcattgcctaatacagcaacctagaaatgttagggaggtaacagagatgtgaataaagctagagaggaggagagagagactggttcctagcaatgtggtttcagtcttaccactgtctacttgaagtccctactttggtcccctctggtctggttatgccctggttgggagagttgattagcttgacaaatatagctgaatggtagtggctacttgggatgt

SEQ ID NO: 211141 - DNA, 531 bp, Homo sapiens
tttaaaaaatactcatgcccaggttccactctcagaaattagaatttaatcagtctgtggtaccgccttggcattgtaaatttcccataataatttttatatgcagcaacttttgagagccacagtttaggagattattgcaataggaaacattgctgccctgaattaatgcaattgtcagtccattaacatttctgggtagattagaaagtagaagttatttctccaaatgactcttagtagccttgtgccatggccttgggctgatttactgactgattctccactgctgctgaacacctgcttggtgcattgcctaatacagcaaccyagaaatgttagggaggtaacagagatgtgaataaagctagagaggaggagagagagactggttcctagcaatgtggtttcagtcttaccactgtctacttgaagtccctactttggtcccctctggtctggttatgccctggttgggagagttgattagcttgacaaatatagctgaatggtagtggctacttgggatgt

SEQ ID NO: 211142 - DNA, 364 bp, Homo sapiens
tgaattcacagctgcagcatagctgacttgactatggacagactagagtgaacgtgtatgtcatttcttacgatgtgcccatggattcaggtctagtgccccatccccaggaagcctttgcgccttcagatgcttctcctctgagctcctgcagctcctgggctgccctagcagttatcacactgttttgcggttttctccaccactagactgtggtctcctctaggtccaggactgaattttattcatctccaggtcagtgtctagcattgtcttgtaaatgctgtctttattcatgttgcccagcttctacyacacggctactggaagttctcaagctcataacaccgtagcttctacaaca

SEQ ID NO: 211143 - DNA, 560 bp, Homo sapiens
aatctcatttaaacatttgtkggagatattgaatattgcagctgaaagttggtcgcctcatgcccgggcatataatagttctttatttaaaagaaacacaatgctaacctctagaaaatataaaaagcattaaagagtagtttaaaactttacaatttggtttcaccaaaaaattctgaagctggaattatactgtattgcgctgtcacatcaatattaactagtatacttacagttatgagagagtataattcacagatcaattaaataccttagtgtttctaaatgaatgttacatgggatgaagaattagaagaaacagataaatatgactttaattaattcagagtctgaagttgtatgatcagtccataaaacttttaatgacagaaagtaactctcttttattacataaaattagtttaaaaaattatctataacgatgttaaaaagtcttctttgacacaaaaagacattacaaattttttccctaatgtagacatgattatagaaacactatacttacttatataaaatatatttctcaaaggatgaattta

SEQ ID NO: 211144 - DNA, 536 bp, Homo sapiens
cttacctgaaaacatgtatagtaaatcctcacttactattgtccataagtgcttggaaactgcaacttgaagcaaaatgatgtttaatgaaaccagggtggcgagaggctaattgacataaacaagagttaagtttctactgcatatttctggtcacaggaaacatcactacacttctaaataaagattccaagcacttatcatactaaacattgaaataaatgtgagctatacatacatttaagaaagatttatcaaaacaagtaacataattatttacctaatttttggtgaatcaggaatgaaggaagttgtagtggtgatggattaagtcaaggaataaatgtctgccaagcaaaattgtcagagcatccccttaccaccaygcagttcaaaaacaatcataaaaatggtgggctccaagccagggacttacagataaaacctccatatccctgggacatagcacctgggggaaggggtggctgcgtgcacagcttcagcagatttaaacgtccctgcctgatggctctgaa

SEQ ID NO: 211145 - DNA, 629 bp, Homo sapiens
ctccttgcagaaagctagctctcaccacagtatacccacacacagacccctaagaaggctggccgctctgctgaagtaagatggaccagcttgccaatgggcactttgccatcagagcagatgggcccaagcaggggcaggcagcagagcacgcatgtctgttctggacacatgcatatttatcatttgtgtctttcatttacaggagacaaattcttgaacagaaaggctgagttataaactaagcgtcaggaaagatgagctttcagcccttaattaaaacattcaagcaaagaaatcaatgtttcagtcccactttagaaagcttatgaagtaacttgttagagaccctctttactcccaagtcactcttcactaaaggggatgctgtgtcttgctcaagcagtgttttcacttgtacatcatgaggtaacctaatattttccaaaaaaagaccagagatgtaggagaatcaccaatrtactccttttttgaaaatattattagaatttttccaaaactattcttctcttttcaattttcttgttttaataaaatgagaactaaatttaatttcttttcctgctaactgctgaaggtgactatatatggagataggactcagcctg

SEQ ID NO: 211146 - DNA, 606 bp, Homo sapiens
agtaaaaacaacttgataactcaccagtatgatgcagtataaattcatgattctctgaaagtctggtttaatccagggtagagcaaagagtatttagaaaaatggaatgtgagaatatgcttcagaagtacctcagttctcttaaccaaagttttagtagttaagaaacactgtcataaaatattttttaataaatgcaactaccaggggctttcctagcttctttgaatacatagatatgatagtgtgtacctttcattctatgagattatatacaaaggccagagctgcgtagtccactgtaagccactttatccttgagaaaacacttggtggtgatggcattttgtactcctgctcatagctgatacagatgagctggtcaggcagcccactgtctgcycgggcagagcaactcccacagtggtcagtcaaggctgattcccaaactgaggatttaaacgtcttcatcaagtttaacttatcctaactggggactgtaatgaatggtgacactgtaataaaaatggtaaatcttttaaagggtccttttactcttagtcctctctgttcatgctccatcattctagatccccctgaaattta

SEQ ID NO: 211147 - DNA, 424 bp, Homo sapiens
attcttttgtaattgaacttctgcctaaactattaattaagtcataacctagtcaagacaagtaaaattacttagcagtcattttatatttgctttttgttagaagacaatgtaaaatctaatagtgaactaatttccctttcaagttgtcatgatgattcgtatatggaccacatttgtatattttgttatttgaggtaaggtttctcttgaatcattttacatactagttttggctccttataatatgtgagtctggagamatcagtcttctagaaatattgtaccctatttcttcaagagtatcccatcaacattgaagctaccttttacacttagagagatatatacattcaattatttatccaactgtaagagttggccctgaggagagaaacacaggttattcttggcatcctttact

SEQ ID NO: 211148 - DNA, 559 bp, Homo sapiens
tctattattttttttaaaaaaacatatttatttaatcatagacttaggaaagaaatatataacactatagtgtgatacattaggcatttttaaattaagacatactggagagtagtgttatttacatgaaaaaccccaggcttgcccaacctctgctagtccttgtacttattaatgatgccacagatgatggcttccatgaggtcagtggctagaaaatactaatctgcacaatcttctcactaaggaagtactctcacttccactttgcataatcaatattttcctgtactaacacctactaactggctttttatgtaagagaatctattgctttcacagctgtcactctttgcaactgcctcttgaagttaacagctggctctaaaatttcgtgcaaaaacagcccccttccttcacacytttctatcctgattgctgtagctcaggcttatttttctcatttttatgggttcccagatgtctactggccctgctacaaagttgaaaagcactttcagtgaatcgaatattaaattccaattgtttctttgtatgt

SEQ ID NO: 211149 - DNA, 536 bp, Homo sapiens
tttgtgatggaccttttaagacatactaaggacactaagctttattttgaagggagtcatgaatcactaaagatttttaagtaggggagcaattaattgaagtctatagtttttagaagatgggtatgttggtttcagcaagtgtgtatgtagtggcagggtgagggtgtggatggagcttagagacaggagaacaactggaagaccatataatagccaagttaaatgatgaagacctgaagtagagcaactgcagwgagaatggaaagcacgggatttaagaagattttttaaatgtcttagtactggatataggccaagagaaaccagaaagagtcaaaatcaacttctgagagtgaaggatgcttgtgggatggattagaggttaaagaaattgccaaggaaaggggccagctagggacaaataatactgcacagccataaaaaagaatgtgttcatgtcctttgcagggacatggatgaagctggaaaccatcattcccagcaaactaacacaggaacagaaaaccgaacac

SEQ ID NO: 211150 - DNA, 497 bp, Homo sapiens
agatagccctgctcttggggcagccgttttcctgtactctgttgctctaataaacttgctttgcttttgcttcactctgttggcccactcttgaatttcttcatgcctgaagccaagaaccctgtctggctgagccccaattttgagactttcctgcatcattagcactgtatgtgagttcccattaccccacacctttaccaataccaattgatattataaaatgtttaaatacttgccaattcgatgaacaagaaagtgtctttwtattttaatttgcaatttcacagatttctggcaatgttgaacatagttttatagtttatcagacatttgtatttccttttgctgtgaatcatttttaacatcataaaatggaagattagaggtaaaggtgaactgaatccatactctggatctatctttcactacacacacacacacacacacacacacacacactaaggagttgacatgtgtttctatatgcataaagt

SEQ ID NO: 211151 - DNA, 546 bp, Homo sapiens
actatgtgacattgtgctgagagttacatgacaattraaatgaaaaaataatattgatcttaagattcctagtgttgtccagagttaattataggcttctgattggtcagcattaaactactccaaaattaacaaagaaatagtgcatttctccacctcctgacttcttaacatcgagctgcacctcaagaacacagagtttatatatagatgggtttacattcagcaaaaatgtttgcatgtcaggaattgataagtacatgaagtgttcattatttctcaactgacaaagatactgaaggatttttgtcttcctaaattttgttggatttagaagaaaattaaatcaatgtacacttaagatatcatatagcacttttatatatgctgcttttgaatttgagaaattttctaaacttttttattgttttcttcaaattgacaatgagacaaactatccaggttttgcacctgatgtcatctccaggggctaggctgaaataaacttggaaagctttcccacagtgcttcaatagcaagggttgg

SEQ ID NO: 211152 - DNA, 546 bp, Homo sapiens
actatgtgacattgtgctgagagttacatgacaattaaaatgaaaaaataatattgatcttaagattcctagtgttgtccagagttaattataggmttctgattggtcagcattaaactactccaaaattaacaaagaaatagtgcatttctccacctcctgacttcttaacatcgagctgcacctcaagaacacagagtttatatatagatgggtttacattcagcaaaaatgtttgcatgtcaggaattgataagtacatgaagtgttcattatttctcaactgacaaagatactgaaggatttttgtcttcctaaattttgttggatttagaagaaaattaaatcaatgtacacttaagatatcatatagcacttttatatatgctgcttttgaatttgagaaattttctaaacttttttattgttttcttcaaattgacaatgagacaaactatccaggttttgcacctgatgtcatctccaggggctaggctgaaataaacttggaaagctttcccacagtgcttcaatagcaagggttgg

SEQ ID NO: 211153 - DNA, 589 bp, Homo sapiens
ctactaataatgctactgtgtcaccaaaagccagagagatattgtgtaggcctattactgccttatttccctctttcactaaccccagtgaccgtaggttttcttatgacctgcaacaaagcttcgacagggaacacactgaaatgctattctacaatagttaacatataaaaatgcccactgcattatgaacagttccacatcatctcatttattctattatatcagtaatactcaagacagatattactatcatctccattttttacatttattttattttatcattttttgatagagtctggctctgttgcccaggctgcagtacggtggcatgatctttgytcactgcaacctccacctcccaagttcaagagattctcatgcctcagcctcccaaatagctgggattacagatgtgtgccactatgcttggctatttttatttttatttttatttttgtatttttagtagagatggggtttctccatgtagtccatgctggtcttgaactcctggcatcaagtgatccacctgcctcagcctcccaaagtgctgagattacagtcatgagccaccatgcccagc

SEQ ID NO: 211154 - DNA, 450 bp, Homo sapiens
aaaaatattattctcttatattaaacttgcatacttatgtttttagtcctaaaaattaatcacaacctacagcacwttcacacacaagcaagttcacaacacataaaagcaaataaggttttgatacagtaaactagtggagaccacatcctgcaataaccacatgtcattttatatgctgaattcacttcctaatgttttttctcattaaaaaattatctgaaagattttaaatcttggagaaaagctgcaatctttagtatgtcttgtattcctttttacttcatcctgtaagaattgatgcatgaaatgctgatatatagctagtcccagaatgaacttgtttcaatagacacagcccttacctcttggctgcaacatcaaaatgtactcatcaaacatctggctatcaaaggtaatgtttttcaaaatacaaaataattttaagat

SEQ ID NO: 211155 - DNA, 522 bp, Homo sapiens
tgttttgctgactaacatagagtcagagaaacaagggcctggcaaagtcagcctgtgtaatcctggaccacgcattatcccagtggctgccctcactctgctggaatgatctgcctccaatggccagctttcatttcttccttgggtattggcttcatttttaatttcttctaaacccatatgagaaaactagtagttacaaaatgccacatcttccggaggctgaccaatcagactggagaaatgttgcaagaaaaacaagttatttccagggcattgtcaacatgttgccaaggatgagagcacaatccgagcaaatagatctttatctgtccctatcttctccccattttctctttatttggcaccatgaggtgaagcacatggtccagtattttcccmgagctttgatcctttgctttttccttttttccaactcagtgtgagcttcatcttgaaacataaaacaaaatatgttatttaggtagaagataaaattcaaaagttttatttcaaatgaaa

SEQ ID NO: 211156 - DNA, 522 bp, Homo sapiens
tgttttgctgactaacatagagtcagagaaacaagggcctggcaaagtcagcctgtgtaatcctggaccacgcattatcccagtggctgccctcactctgctggaatgatctgcctccaatggccagctttcatttcttccttgggtattggcttcatttttaatttcttctaaacccatatgagaaaactagtagttacaaaatgccacatcttccggaggctgaccaatcagactggagaaatgttgcaagaaaaacaagttatttccagggcattgtcaacatgttgccaaggatgagagcacaatccgagcaaatagatctttatctgtccctatcttctccccattttctctttatttggcaccatgaggtgaagcacatggtccagtattttcccasagctttgatcctttgctttttccttttttccaactcagtgtgagcttcatcttgaaacataaaacaaaatatgttatttaggtagaagataaaattcaaaagttttatttcaaatgaaa

SEQ ID NO: 211157 - DNA, 563 bp, Homo sapiens
ctaccattaaatagcttttgttaaaccaatgttttaaatggcatatgctacaattataagtgtgtcaaagttggcaagactttataagagaagaaacggggaaggaaggtcattccttgttagcatcttcacatcccacaccggaaggagtgctgatctgaattaaccaaagctaagaacactgggctctagtcactggggcagagctttctactgagttaagyctttctcaatgtttgtaatttcatagactctctctagaacacataaaatactggtaacaccaagaaatggaaccaggattccttggtagaactggggctccttccattccaaggtattcaggatggctgacatcttttcaatggtgtaacatgtaaatgtatgaccagtattgttctaaaatatttctacaaactctttgctactactttccttaagagataatccttaattcagctctccttaattgtggactggccttagtgattcgcttttatcaatgtaagatatgacagaagaagggatgtcatttccagtgtatggttgtgaacagcctatag

SEQ ID NO: 211158 - DNA, 608 bp, Homo sapiens
agtgatggtttttctatggcttttggcattaacttcctctttggactcattttcttctayataatgactttagtcggaagttacagtgaaaaaagggaaatgcaaaaatactagtttttgtgtcctgcaaggtgtaaacagggaacacatgaagtttcttttagaaagatagacatgcacatagattttagaagaaatttttttgtgtgtgtttacactaatagtctacaagggtgctcatttcgttgttttctgtaactactatcaaatttggcagttcttttctctcaagtgatctattcttctttttgttgttgttgttgtttgtttgtttttttcagtgattgagaaaaggggtccaaataccaaaacaattgctggttcaaaaactaattaattacctgattttttaaaaaaacaattattttgagaccacattaaaaaaattacacaaagagtatgtcccaactcagaagaaagcgaaaaatgactaatgatcttaccgcattcagaatacaaggatttgtcaatgaatcattattctttggcttgctcaaactctttaaaattgggcccatttttctttctccatttttccattggcactg

SEQ ID NO: 211159 - DNA, 509 bp, Homo sapiens
gtctgctaattttaaattttcactttttttgtgttgaaggggagtgattttcatataacctttcaatgacacaaaagagaaactagagttttcagtttggataaggtagtgcttcaaattagtaactgtatctcatatcagcagctatgcttagaaacaaactcctgccaagtccaagtgaccaatggtaatgacaaaggggaaagagaaataaaggcacatgcaaaaaaaaaaaaagagccagagcctcccacagaagggaaaaagagaggactgacagtgttaaagaaaatgaagttactatgccactgtttttttaatgaggaataatatgtattcatacaaacacaactgctaaaaggatgaggacactgtacagagttgtcttattgtaatgcatrttttaatgcatgagtatcataggctcttctattaggatattttaggccagtcatcatatcctgatctctattggaacccaaaaaaacccctgggggtttttttttttt

SEQ ID NO: 211160 - DNA, 560 bp, Homo sapiens
gcactcttatgtcacaatcccgcccaagcacgccttcccatcctgccctgccggarcacccctctcctccccttagtgaggaaggatttgggcctcagatcctggtggtcccaggactccagcgcctgctgtcggtggggtagggtggggtagggtgggatgggggcgcggcagacttcccaaggaagtcaccggacctcgcctcaggatattcagaagtgctagttcagttctggcagccttcctcctttaaggtgaaatccgagaacactcttccttccagggagagcaactgacctgcaaaatgggcgccaggatgcacattacagtcatttattccaaagtgttgccattttcgctaaactgtcgcatgtttgataattaattcaccaccctattaggtaggggctgccagggaataagcgaggactccaaattttctgtaggaggggtgttgggagttggcaattcggtctgggagagaaggttttaatccgagtgaagagccctttgcactagcctgggaggaggctgaactgtcatcctgccttgactcaaca

SEQ ID NO: 211161 - DNA, 593 bp, Homo sapiens
aatcccgcccaagcacgccttcccatcctgccctgccggagcacccctctcctccccttagtgaggaaggatttgggcctcagaycctggtggtcccaggactccagcgcctgctgtcggtggggtagggtggggtagggtgggatgggggcgcggcagacttcccaaggaagtcaccggacctcgcctcaggatattcagaagtgctagttcagttctggcagccttcctcctttaaggtgaaatccgagaacactcttccttccagggagagcaactgacctgcaaaatgggcgccaggatgcacattacagtcatttattccaaagtgttgccattttcgctaaactgtcgcatgtttgataattaattcaccaccctattaggtaggggctgccagggaataagcgaggactccaaattttctgtaggaggggtgttgggagttggcaattcggtctgggagagaaggttttaatccgagtgaagagccctttgcactagcctgggaggaggctgaactgtcatcctgccttgactcaacacagccattcccctagaagttacagcacttctagggtcacctgtgttca

SEQ ID NO: 211162 - DNA, 595 bp, Homo sapiens
aatcccgcccaagcacgccttcccatcctgccctgccggagcacccctctcctccccttagtgaggaaggatttgggcctcagatcctggtggtcccaggactccagcgcctgctgtcggtggggtagggtggggtagggtgggatgggggcgcggcagacttcccaaggaagtcaccggacctcgcctcaggatattcagaagtgctagttcagttctggcagccttcctcctttaaggtgaaatccgagaacactcttccttccagggagagcaactgacctgcaaaatgggcgccaggatgcacattacagtcayttattccaaagtgttgccattttcgctaaactgtcgcatgtttgataattaattcaccaccctattaggtaggggctgccagggaataagcgaggactccaaattttctgtaggaggggtgttgggagttggcaattcggtctgggagagaaggttttaatccgagtgaagagccctttgcactagcctgggaggaggctgaactgtcatcctgccttgactcaacacagccattcccctagaagttacagcacttctagggtcacctgtgttcaga

SEQ ID NO: 211163 - DNA, 402 bp, Homo sapiens
ccacagctccttgaggaagaaccttcttcaatgcagcaggaggccaccagctctgcctccagagtcctctatggagagtctaactctaccgaatcatgaggtgtcagttcaacctccaggtgaggatcaagcttattatcacttgcccaacattacagttaaacctgcagatgtggaggttaccataacttcagagcctaccaatgagacagaatcttcccaarcccagcaggagaccccaattcagtttccagaggaggtggaaccttctgcaacccaacaggaggccccaattgagcctccagttcctcctatggagcatgaactttccatcagtgagcagcagcagccagttcagccttctgagtcttctagggaggtcgaatcttctccgacccagca

SEQ ID NO: 211164 - DNA, 446 bp, Homo sapiens
acatccagtcctcttcactccagcaagaagccccagcacagcttccacagctccttgaggaagaaccttcttcaatgcagcaggaggccaccagctctgcctccagagtcctctatggagagtctaactctaccgaatcatgaggtgtcagttcaacctccaggtgaggatcaagcttattatcacttgcccaacattacagttaaacctgcagatgtggaggttaccataacttcagagcctaccaatgagacagaatcttcccaagcccagcaggagaccccaattcagtttccagaggaggtggaaccttctgcaacccaacaggaggccccaattgagcctccagttcctcctatggagcatgaactttccatcagtgagcagcagcagccagttcagccttctgagtcttctrgggaggtcgaatcttctccgacccagca

SEQ ID NO: 211165 - DNA, 576 bp, Homo sapiens
ggctgctttcatggggtgatgtttagtaaatgtagcttttccaagtgcatggtgtaagctgcttgtggatctaccattctggggtctggaggatggtgaccctcttctcacagctccactaggcagtggtccagtaggagattttcttttctaccacattgccaggtggcaaattttccaaactttgatgctctgcttcccttttaaatataagttccagttttagatactctctttgcttatgcaaatgattataggcttttagaagcagccagaccatgccttcaatgctttgctgcttagaaatttcttctgccatatatcctacatcatctctctcaagttgaaagtgycacagatctctagagcagggtcacaatgccaccagtctctttgctaaagcatagcaagagtgacctttattagttcccaataagtttctcatttctatttgagaccacctcagcttgaacttcaccatctatattactatcaacattatggtcacaaccattcaacaagtctctgggaagtttcaaattttccttcatcttcctgttttcttctgagtcctca

SEQ ID NO: 211166 - DNA, 561 bp, Homo sapiens
aaagcttctgtgagttagggcactgattttgggcaagttctcagtggcaagctcatagctgcattaaaaatagaaattcctagtagctgtaccaaagggacaatgagcccagaatcatgaggtgctcctctgtgtgaaggcygctttcctctgcttcggtctataatacacaaaatatgtagtcacagagattcataatcaaagaggacattaatgttgtgggactgcagaagtggagagggttctgtagctggatggacaggttccagtacaacttgtttaagccccacccagaggatgctgacttgtagattagctgacataaagaattaagtagaatgctcaagtgaggaaacactatctcctttttggtcatggggaatccaaaaaatagtttgatttctaaaggcattgagcattgtgaatctacctaaataatctcaagaaagtattgggtttgaaggatcctacatacttttgtaaggatttagcagtcactcctgctgaagtggtgtgaaaacattacagtaagggttattgggatgggatttctaactttcg

SEQ ID NO: 211167 - DNA, 561 bp, Homo sapiens
aaagcttctgtgagttagggcactgattttgggcaagttctcagtggcaagctcatagctgcattaaaaatagaaattcctagtagctgtaccaaagggacaatgagcccagaatcatgaggtgctcctctgtgtgaaggctgctttcctctgcttcrgtctataatacacaaaatatgtagtcacagagattcataatcaaagaggacattaatgttgtgggactgcagaagtggagagggttctgtagctggatggacaggttccagtacaacttgtttaagccccacccagaggatgctgacttgtagattagctgacataaagaattaagtagaatgctcaagtgaggaaacactatctcctttttggtcatggggaatccaaaaaatagtttgatttctaaaggcattgagcattgtgaatctacctaaataatctcaagaaagtattgggtttgaaggatcctacatacttttgtaaggatttagcagtcactcctgctgaagtggtgtgaaaacattacagtaagggttattgggatgggatttctaactttcg

SEQ ID NO: 211168 - DNA, 592 bp, Homo sapiens
ccaacaagtagtcttggaccatgaggaggtgcgtgctaaagagatgcacataggcaccaactgctatactgcctctgactcctccctctcactcattctccacatctagtcaatcaccaaggtctggaaawtttttttccaaaaacattcctgaatctattccttctaatctgtttatattttttctattgtgtgttcacaaattaacacacatttactaacaattttttaaatgccacacatttgttatctcacaatttcagtgggtcaggagcccaggcacagcttcactgggttctctgctcagggtctcacaaggctgcaatcaaaggttggccaagctgtgttcctttcctgagctcagggtccactttcaagttgacatggttgttggcaaaatttagtttcttgcagttttgtgtctaaggttcctgttttcttgctgtctgtcagccagaagactttcccatctgctagaggacatttgcagtttttttttttttttcctcaagggcttctctcaggacctcttacaatatgtcagattactagttcaaagccagtaagtgggagtttctcaccccagtctact

SEQ ID NO: 211169 - DNA, 592 bp, Homo sapiens
ccaacaagtagtcttggaccatgaggaggtgcgtgctaaagagatgcacataggcaccaactgctatactgcctctgactcctccctctcactcattctccacatctagtcaatcaccaaggtctggaaaatttttttccaaaaacattcctgaatctattccttctaatctgtttatattttttctattgtgtgttcacaaattaacacacatttactaacaattttttaaatgccacacatttgttatctcacaatttcagtgggtcaggagcccaggcacagcttcactgggttctctgctcagggtctcacaaggctgcaatsaaaggttggccaagctgtgttcctttcctgagctcagggtccactttcaagttgacatggttgttggcaaaatttagtttcttgcagttttgtgtctaaggttcctgttttcttgctgtctgtcagccagaagactttcccatctgctagaggacatttgcagtttttttttttttttcctcaagggcttctctcaggacctcttacaatatgtcagattactagttcaaagccagtaagtgggagtttctcaccccagtctact

SEQ ID NO: 211170 - DNA, 565 bp, Homo sapiens
cagacacacagacacatacacacaaagtctgattaaatgaacaaaaaagagcatgctatcaccatttatatatatggaagccactatctacatatagctaacactggcaatttgaaatctttgcaaaacatttaaagtactgaaatgaacatttcatcattactgttggggaaaaaaaaaacacaatttattgccatgcatattgctgcaaacttggtgaagctttaaattttctggattgtggattttggaacatttctgccctggaggaatgccttagaggagcaaatatgaaatataaattggtctttgagaattccgctgagttagatggctggatgcatatcgacttgtgagtaaagtcttcatagaaagacctgaactgattcargcttgactgttcctgctgctgtcagttggacatttccttgagagatcccttgagagatgcagcttatgggtgccatactgtaactgtaaactacttgggaaaaaaaggagagagtgggattaaaaatatgcctggcagctcaagggtctggtatgaatgccaagtagcagctga

SEQ ID NO: 211171 - DNA, 540 bp, Homo sapiens
aaatttctagaacatcgccaatgtcaatgatagctactctccttgggcaaacaccttcagtagaggagaactgagtagtttattggagacatttcaaattttaatccaagattttgcacatactagaaaactgtagggctgggcttgagaaacaagagaaggagtaaaagaacaattttgtgctgctgctaaatccagttcttatttcctctaaccttactgcttcccttgtccaaggtttagggaccagaaggaaagggaaaggatgaaaagagaagcaaaagaaaagatargggagagaaggaaaggagagaaagggaagagaagagatgtggtgagggaggggaaagagagagggatatggaaggagggaaggaagaaatgaaagaaggaaggaaggaaagaagaaaggaagggagggagggagggagggaaagacaaacagtgggaagaaaagctgtgaaaagatttctgctggatttctcctgaaaaactactgaaattacaacaaaaaatgaatgcatcagaggtacaagcaca

SEQ ID NO: 211172 - DNA, 540 bp, Homo sapiens
aaatttctagaacatcgccaatgtcaatgatagctactctccttgggcaaacaccttcagtagaggagaactgagtagtttattggagacatttcaaattttaatccaagattttgcacatactagaaaactgtagggctgggcttgagaaacaagagaaggagtaaaagaacaattttgtgctgctgctaaatccagttcttatttcctctaaccttactgcttcccttgtccaaggtttagggaccagaaggaaagggaaaggatgaaaagagaagcaaaagaaaagataagggagagaaggaaaggagagaaagggaagagaagagatgtggtgagggaggggaaagagagagggatatggaaggagggaaggaagaaatgaaagaaggaaggaaggaaagaagaaaggaagggagggagggagggagggaaagacaaacagtgggaagaaaagctgtgaaaagatttctkctggatttctcctgaaaaactactgaaattacaacaaaaaatgaatgcatcagaggtacaagcaca

SEQ ID NO: 211173 - DNA, 456 bp, Homo sapiens
gcagcacagtgagatcccttctatttaaaagaattaaaataaagtttaaaatgtatgtggtgtgtgtgtgtgtgtgtgtgtgtgtgtgtgtgtgcgcgcggcgcgcgcacgccagtaatgatttggaatccccttttatgctctgtcaagctacatctctgcaggaatcccacagagaaggaggaatcaacccgttctcttgtgttcgtagctaagggcagcaagtccatccctctctatggcacatgcgcccagccagccatgacagcttaccttccgcttctccttctcagtcatagattgcttggagctttctacaagctggaaaagygcttcatgtttcttggtactaaccattaatttcttcttggcctagagtaaaaaacatacaaacaagaaaaaaaggagcagaggctgatgccaagagaaaactctcctcttttggaacaaagcaca

SEQ ID NO: 211174 - DNA, 528 bp, Homo sapiens
tttatagttctaaagttatgtgacagagaaggtaggccacatgcaacacaaagaaagaggtgatatctgatgtgtggtttkcatgaaagaagatgcaattgagcaaaacacaattatgaaatttaaaatgtataattaatgccataacaatcgggattccattttggagagagctaaaatgtcttcaatgaagagcagtatcaggaatggccacttaactgctaccctccgttgttttcttcatttcatttcaggaaactagaccatcaaatattgtaaaattatgtagggacttcatagtttgcttccttcttgctccactgaaatttctcagccagtgcactgccattgaaatcactgatgcattgcattcagggaatacttgcttaatcctctcttatgttgagcctttgggtttgccgtcaagtataggattgttattcaggtcgtgttaactgaactctcatgatggtgggctggggagcaatcatgcatctttgcatcaactttccatcttctctttgcaga

SEQ ID NO: 211175 - DNA, 566 bp, Homo sapiens
acacaatgaatttcttatgcaacctcccttttgtgcgaacagttggatcatgtttgyttgaaattttttgtacagttcatttcctccaaggtcagacattagcaatttctatgtttggtgaaaagactttgcaaataattattgcatgtcaaatagcccataaagccctgcattttaatttaagataggctgtggctctctattttattgggtctttgaggaaaatggttgaataaatatctgggtatgaaaaatatatgatatgacagattatgttctgatcactgatttaaaataagaatagttcaattttctttatccaagagaatgatagaatatatatggaacagggaaagaaatgtgttgttttttgactataagacaagaaagcagaaatgaaagtcatttggataatagaaatgtgttaggatcaaattgtatcttttattaactagagaatacagttgagaggaatagggaatgattcatgtgacaaagataggaatagacatcaaagggcttttgaccaatcaggaaaatggtttgttgagaacagagtgttaaac

SEQ ID NO: 211176 - DNA, 566 bp, Homo sapiens
acacaatgaatttcttatgcaacctcccttttgtgcgaacagttggatcatgtttgcttgaaattttttgtacagttcatttcctccaaggtcagacattagcaatttctatgtttggtgaaaagactttgcaaataattattgcatgtcaaatagcccataaagccctgcattttaatttaagataggctgtggctctctattttattgggtctttgaggaaaatggttgaataaatatctgrgtatgaaaaatatatgatatgacagattatgttctgatcactgatttaaaataagaatagttcaattttctttatccaagagaatgatagaatatatatggaacagggaaagaaatgtgttgttttttgactataagacaagaaagcagaaatgaaagtcatttggataatagaaatgtgttaggatcaaattgtatcttttattaactagagaatacagttgagaggaatagggaatgattcatgtgacaaagataggaatagacatcaaagggcttttgaccaatcaggaaaatggtttgttgagaacagagtgttaaac

SEQ ID NO: 211177 - DNA, 567 bp, Homo sapiens
tcttctgttttagcctatgagcaagagagaagagaaaataaaagccaggttttagaacatattgcatccctagtgggcaggtgtttctttactttgacaagtgctgarccactagcatcaatctgagactagaataaccagtgttccttagtgacatggtaatgcttaacagattttaattacatttcagggaaatcattaaaatgatctatgtttgctcataagaagaggaggaaataaattccactgtgcaaaggagagatccatatctaatgattttttgctttttattatcttgttctttttatataaaataggtggtagagaagcaagatactctggaggacctcaaactgtcctcttgaggttccacaatagtatatatgaacaaagtgtggtcaaggagttatccagaaagattcagatttcagcagatttagagcctgtctggggcccaagcatcatgacaatttgttcttcattcgttccttccagttcttgctgtcctagcctttgggctggtactacaggaagaagtcatagggattttgttttcatttaaatgac

SEQ ID NO: 211178 - DNA, 544 bp, Homo sapiens
ctctgattgattcagaggctcccaggtctagggaggtgmtcaggaatctgacttttaagcaccccaggcgctttgagacattgtcctagggccacagaggcccacaaaaaatacattttaaaatcataattcttccacccagaagtgactgctattaacatattgatatatttcagtctaggtatgtgtatatgtatgattttatcttctagttatctatcaaattattcaaatttgaaattctgttttttccacttaaccgtacatgtgaacagtttcccgtgccattagtctctgaaaataccactttaattatttcataagcatccatggtgcaggcgtgtttattcacttagtcatccctttaatgttggacatttgggatgtttgctgcctttaacatgtttcaaatagaaatctgtgtctggtttgtcagctacttcctcaagacacttttatagaaaggaaattacctttttcaacagagtcctaggaaagaatgaagccctactgtcctgaggcgtccattttatgtaatgagttg

SEQ ID NO: 211179 - DNA, 565 bp, Homo sapiens
aggctctgattgattcagaggctcccaggtctagggaggtgatcaggaatctgacttttaagcaccccaggcgctttgagacattgtcctagggccacagaggcccacaaaaaatacattttaaaatcataattcttccacccagaagtgactgctattaacatattgatatatttcagtctaggtatgtgtatatgtatgattttatcttctagttatctatcaaattattcaaatttgaaattctgttttttccacttaaccgtacatgtgaacagtttcccgtgccattagtctctgaaaataccactttaattatttcataagcatccatggtgcaggcgtgtttattcacttagtcatccctttaatgttggacatttgggatgtttgctgcctttaacatgtttcaaatagaaatctgtgtctggtttgtcagctacttcctcaagacasttttatagaaaggaaattacctttttcaacagagtcctaggaaagaatgaagccctactgtcctgaggcgtccattttatgtaatgagttgtcattcgtctcatctaga

SEQ ID NO: 211180 - DNA, 583 bp, Homo sapiens
acagtgctttgaggaaaagcctcactctaatgctatataaattattccggaacataccaaaagacagaaataagtgaaggaagacaggtgggcaggcaaagcttacaatgtaagcataattctaaagctaaaacaaaaaattaaagatagcactggccctctgcccacaactatataaactaatctcacttaaaaacataggtgcaaagatgctcaataaaatattaagttacattaaaaataatccactaagagcaaatatagtttataccaaggattttacatagtgaaggtgtaatattaggaaaatccatcacatgaataagaattgaagagacatttcatatgaattcagcatccactcctgactattcttaactataaatggaaggacatttaacatgatagaaacaaatcaaaaacctttcaaatctcatmatatatatttggcatttccaaaaggaataaaatagatgccagttagcactgttatttaatatttccctagaagtttctggccaagacaagatatttagctggtaaaactataaggaaaaaacaagaactatttttcattatatgt

SEQ ID NO: 211181 - DNA, 429 bp, Homo sapiens
tctatctagaatactcagaaaaatctactgaaaacctatcagaatttgtggtactacacmccaaaaaaatcaatagtttttgtacataacaccagtgattaatacataggtaagaatagatgtttatactaatattaatagctgcaatattcgtttttgttctttgtttttattggttttattagtttttgctattctgtgctatttttaagtactggcatacgttggagatattgcaagttctattccagatcactgtgataaagcgaatattgccataaagcaagtcacacaaatgttttggtttcccagtacatagaaaagttattttacactatattgtagtctattaagcgtgcaatagcattatggctaaaaaacaaatgtacatatcttaattaaaaatattttattgctaaaatatgctaa

SEQ ID NO: 211182 - DNA, 471 bp, Homo sapiens
aaatccctacatgtattacatagtgggacagaggatagaatttctccaatatgtttcaccacatcaaatattatataaccacaagatatttcttattgaaccattcatgtctggattatagtgcttgctacarttcaacaccattcagagatatttgactttagcttgtgttacttatgaggtggcagtaaacaacaatatattttgtaggcattgacctttaatgtctctgcatggtcattatccttttaccacaaacttatctgccttttctaaaataaactatttgagatctctccagtgtcaccttgcaatttaaaatggatttatttcagatggaatttagaccctagtgactttcagaaaatcattaccttcagtctggctagcatcccaggaatattggcagtccataatgacactgttataaatggccctgctacagctctttgaagtacccccctccattag

SEQ ID NO: 211183 - DNA, 492 bp, Homo sapiens
atttttctgagattttgatttacagtaaatccctacatgtattacatagtgggacagaggatagaatttctccaatatgtttcaccacatcaaatattatataaccacaagatatttcttattgaaccattcatgtctggattatagtgcttgctacaattcaacaccattcagagatatttgactttagcttgtgttacttatgaggtggcagtaaacaacaatatattttgtaggcattgacctttaatgtctctgcatggtcrttatccttttaccacaaacttatctgccttttctaaaataaactatttgagatctctccagtgtcaccttgcaatttaaaatggatttatttcagatggaatttagaccctagtgactttcagaaaatcattaccttcagtctggctagcatcccaggaatattggcagtccataatgacactgttataaatggccctgctacagctctttgaagtacccccctcc

SEQ ID NO: 211184 - DNA, 497 bp, Homo sapiens
atttttctgagattttgatttacagtaaatccctacatgtattacatagtgggacagaggatagaatttctccaatatgtttcaccacatcaaatattatataaccacaagatatttcttattgaaccattcatgtctggattatagtgcttgctacaattcaacaccattcagagatatttgactttagcttgtgttacttatgaggtggcagtaaacaacaatatattttgtaggcattgacctttaatgtctctgcatggtcattatccttttaccacaaacttawctgccttttctaaaataaactatttgagatctctccagtgtcaccttgcaatttaaaatggatttatttcagatggaatttagaccctagtgactttcagaaaatcattaccttcagtctggctagcatcccaggaatattggcagtccataatgacactgttataaatggccctgctacagctctttgaagtacccccctccattag

SEQ ID NO: 211185 - DNA, 609 bp, Homo sapiens
ataccattatcacacctaaagacattaacattaattgattaatgtatttaaaagctgtaaaagaaatcctcatttttgacatttatgagacaatttaaaaattgtacctagagtagtcagattcatagagacagaaagtagaatggtggttgccaaggtgtgagggraggaaagacagatttgttatttgatgggcagagtttttaataaaaagagttctggagatgaatagcggtgatggttccataatgctgtgaatacactcaacatccttttactgtacacttaaaaatggttaagatggtaaattttatgttatgagtattttaccataataaaaataacctggatatttttctgactatattgaatgttttctcagtgcttgggaaatgtagtcttttttcctctgaagctctgatatccttcatcttttatttttaattttaatacttttattgagttataatttatatactataaattatagtatataattcctcattatatttagtatatttataaagttgccagtaattgacaaaaaccagtttcagaacatctccagcaccccagaaagttccttcatgcatgttggcagtcagtgcc

SEQ ID NO: 211186 - DNA, 561 bp, Homo sapiens
gagaggagcaaccagctagttccagcattcagcaggctgagtgaaacaagccacgccagttcctgcccaaaaagggggtcaatgtcaagggaacaatcccatctcaaaaggacaaaagtaatgaagaaataaggggatttcatggtgattgccagggctcttcagattgggtggttaaaggcaccttatggacaggtgatctgagctaagaccttactgacaggagcagccagtggggraatcttgcataggagcaatccagacagaggcagtgggaacctgaaagagaaaggctgcaaggtgggactatgcttctaaattcaaggaataacaagaaggccagtgtggatgaagcataatgaacaaaaggaaggcgcaggccataagactgaaaagttagcaagggacagatcatatagggcccatatcctattcccgtggtaaggagggcaagttttaggctaagagtagtgggaaacatttcagggatttgagaagggagtagcgtaatcttattggttgtcatctttaataagagaaaggacatgagctaaacaatgg

SEQ ID NO: 211187 - DNA, 445 bp, Homo sapiens
tgattggattgaaggatgtaaactattgttcctggatctgtctgtgagggtgttgccaaaggagactgacatttgagtcagtggactcggagaggcagactcacmctcaacgtgggtgggcaccatctaatcagctgccagtgtggctaggataaaagcaggaagaggaacgtggaaggacttgactggcttaatctttgggactgcattcttctcccgtgctggatgcttcctgcccttcaacatcagactcagcttttggactcttggaccttcaactagagactgaaggctgcactgctggcttccacacatttgaggttttgggactcagactggcttcctttctcctcagcttgcagagggcctactgtgggacttcatgttgtgattgtgcgagtcaatactacttaataaacttccctttatatatacatctatcctg

SEQ ID NO: 211188 - DNA, 438 bp, Homo sapiens
tgattggattgaaggatgtaaactattgttcctggatctgtctgtgagggtgttgccaaaggagactgacatttgagtcagtggactcggagaggcagactcaccctcaacgtgggtgggcaccatctaatcagctgccagtgtggctaggataaaagcaggargaggaacgtggaaggacttgactggcttaatctttgggactgcattcttctcccgtgctggatgcttcctgcccttcaacatcagactcagcttttggactcttggaccttcaactagagactgaaggctgcactgctggcttccacacatttgaggttttgggactcagactggcttcctttctcctcagcttgcagagggcctactgtgggacttcatgttgtgattgtgcgagtcaatactacttaataaacttccctttatatatacatc

SEQ ID NO: 211189 - DNA, 447 bp, Homo sapiens
tgattggattgaaggatgtaaactattgttcctggatctgtctgtgagggtgttgccaaaggagactgacatttgagtcagtggactcggagaggcagactcaccctcaacgtgggtgggcaccatctaatcagctgccagtgtggctaggataaaagcaggaagaggaacgtggaaggacttgactggcttaatctttgggactgcattcttctcccrtgctggatgcttcctgcccttcaacatcagactcagcttttggactcttggaccttcaactagagactgaaggctgcactgctggcttccacacatttgaggttttgggactcagactggcttcctttctcctcagcttgcagagggcctactgtgggacttcatgttgtgattgtgcgagtcaatactacttaataaacttccctttatatatacatctatcctgtt

SEQ ID NO: 211190 - DNA, 464 bp, Homo sapiens
ggttaatattgagtgtgaatttgattggattgaaggatgtaaactattgttcctggatctgtctgtgagggtgttgccaaaggagactgacatttgagtcagtggactcggagaggcagactcaccctcaacgtgggtgggcaccatctaatcagctgccagtgtggctaggataaaagcaggaagaggaacgtggaaggacttgactggcttaatctttgggactgcattcttctcccgtgctggatgcttcctgcccttcaacatcagactcagcttttggactcttggaccttcaactagagactgaaggctgcactgctggcttccacacatttgaggttttgggactcagactggcttcctttctcctcagcttgcagagggcctactgtgggacttcatgttgtgattgtrcgagtcaatactacttaataaacttccctttatatatacatctatcc

SEQ ID NO: 211191 - DNA, 596 bp, Homo sapiens
tctttctttttttcttcacaatttcatggatttaagattcatccttagcgtaaatgttggcaacctcaacatatttttttctttcctctttaagtcaagaactattacctagttacttaaatgaagcagtttaggcttctctttggcatatcagaattgtcagcatcactcttgtgccttggagccattattagaaccgcctttgcaaaaaaaagtaacagtgagaaaattataacagtgaaagagatctgacctaaccaactgtgtgtcttgcttctaacctccaaattgcccttgtccattgtatcagtcaattttcatgctgctgataaagacatacccaagactgggaagaaaaagaggcttaattggacttacagttctacatggctagggaagcgtcagaatcatggcaggagaagaaaggcacttcttacatggtggcagcaagagaaaatgaggaagaagcaaaagcagaaacccctgataagtccatcagatctcaagagacttattcactatcatgagactagcatgggaaasactggcccccatgattcgatgacctcccctgggtccctcccacaatatgtagg

SEQ ID NO: 211192 - DNA, 575 bp, Homo sapiens
ataaaatttaatttactaatcatacaaggattgatattggtcaggcacacctcccatatgttttagccatgtcttctgggattctaggcttccaaggccaccacagcaagagaggagttgcaggcagcacacagcccttgactgattatgcctggaagtgacacacatcrtttatcattggtcagagttcatatcatggcctcatcattggaaggtaggctgggcaagggttgtacctgaatatttgctgagaaagacccattatgctcacattatagcacatatgtgtcaaagagccttttctttatgaaagcactgaaatccaagcttttatgtgacacagcagcagacgactactgcaactctccctctgtatctgggggtgcttggctcatgggacagatatctaagtccctggtagggaatggggaaatttctgatagcaattcaagacactggttaaaaagtgaagagttaagagttgatgcagccaatgtatttccccagcaccgaatgaataagaacagaaacttgactggaatccttcacttcttggccactatctggtgcccagg

SEQ ID NO: 211193 - DNA, 482 bp, Homo sapiens
gctaagtgttctcaccacaaagtgaagaatgtatgagtgaaaatgcacattaatcagctagatttggccattcaacaatgtacttatacttcaaaacatcatattgcacaatatcaaagacacggaatcaacccagttgcccatctacagtggattgaatgaagaaaatgtgctccacatatgccatggaatactacacagccataaaaatgaaatcatgttattggcagtaacatggatgcaactggaggccactattctaaacaaactaatgsagaaacagaacaacaaatgccacgtggtctcacttgagagagctaaacactggttacgcatggacataaagatgggaacaacaaacactgaggaatacaaggaggggaaggagagagggaggcaagagttgaaaaactatccactgttctcactccctatgtgaaggttcagttgtactccaggcctctgtatcgtgcaatataccc

SEQ ID NO: 211194 - DNA, 482 bp, Homo sapiens
gctaagtgttctcaccacaaagtgaagaatgtatgagtgaaaatgcacattaatcagctagatttggccattcaacaatgtacttatacttcaaaacatcatattgcacaatatcaaagacacggaatcaacccagttgcccatctacagtggattgaatgaagaaaatgtgctccacatatgccatggaatactacacagccataaaaatgaaatcatgttattggcagtaacatggatgcaactggaggccactattctaaacaaactaatgcagaaacagaacaacaaatgccacrtggtctcacttgagagagctaaacactggttacgcatggacataaagatgggaacaacaaacactgaggaatacaaggaggggaaggagagagggaggcaagagttgaaaaactatccactgttctcactccctatgtgaaggttcagttgtactccaggcctctgtatcgtgcaatataccc

SEQ ID NO: 211195 - DNA, 593 bp, Homo sapiens
aaataaaaaataaattatctgggtgtggtagtgtgtgcctrtagtctcagtgactctggaggttgaggtaggaggatcacttaagcccaggagattaaggcagcaatgagctatgaccaggccattgcactccagcctgggtgacagagtgagaccctgccaaaaaaaaaaaaggtaggatggcagttgccaggggctggacaaaagggattagagttattgtttaatggatacagagtttcagttttgaaagatgaaaagagttctggaaatggatggcagtgatggttgtataataaattgtgaaattaaaaatggttaagatggtaaattttatgttatgagtattttaccacaattttaaaaaataatttaaaaaacaacagcaggcacagcatgggcaaataaatcaagctaggaataaacacgatgtatcatgggaaccgtaaggagccaacttctcaaaacatgtgaatgtgcttcagaacgaggggagatattgtagacaggtaaagaaaagtcacggagaaacaggctacatttcatataaataaggtaagaaattagataggaactagtgttggtgagaatgt

SEQ ID NO: 211196 - DNA, 575 bp, Homo sapiens
atccttgacatagcacaatgagaaagacacttcacttctatgagtttcttcccaaactccatatcccacacttctgctttcaactcygacatgtaaatagcttgaaagttgtcactcctattctggtaacagtaaaaagctggaggaactgaaaataaatgacttttattggacccatcggggaaccagggtcatagcacaagtatgcacccaaaatatggagagacaggcaggcccaaagagatacagctactaagatctcgtgatcaggagcagaaggtgatggagccctaaatgggcaggaacacttaataatagtttttacagtagctggaagctgagtatggactggcatgacagtggagaatcctgagaccacggtcttggaagggactttcactttcaggaactctccttccaatgctcagatccttctttacaaaaagtcatttggaggtgggagtaccttgccagggacaatttagaaaactcatcctagctgataggggcaatttttccttatcacagtatccctcacccgttctgtgtcacttaagagggaaaaacccatagta

SEQ ID NO: 211197 - DNA, 575 bp, Homo sapiens
atccttgacatagcacaatgagaaagacacttcacttctatgagtttcttcccaaactccatatcccacacttctgctttcaactccgacatgtaaatagcttgaaagttgtcactcctattctggtaacagtaaaaagctggaggaactgaaaataaatgacttttattggacccatcggggaaccagggtcatagcacaagtatgcacccaaaatatggagagacaggcaggcccaaagagatacagctactaagatctcgtgatcaggagcagaaggtgatggagccctaaatgggcaggaacacttaataatagtttttacagtagctggaagctgagtatggactggcatgacagtggagaatcctgagaccacrgtcttggaagggactttcactttcaggaactctccttccaatgctcagatccttctttacaaaaagtcatttggaggtgggagtaccttgccagggacaatttagaaaactcatcctagctgataggggcaatttttccttatcacagtatccctcacccgttctgtgtcacttaagagggaaaaacccatagta

SEQ ID NO: 211198 - DNA, 392 bp, Homo sapiens
agcatgtagactggtaccaggtctgtgtaaccactaagttagtgctgatattgacagcattatctaagtaattgcaagatgtattatatgcatcaattattagatgcatcactatattctgttaccgtgacagaataaaaggacaaactatgacacaaatatttcctatcwcttagaatttttatcttataataacacagaaactttgtgcaacttatattaatgtgagcatttgtcataaatcacttctatgattacatgagatggaaaatataagaaaatacattaccaaagtattttccaaaatttatacctttcggattaaactcttctgaatcacttttcaactcatcttgtctgtaactttccccacagtttcatcatctatgcta

SEQ ID NO: 211199 - DNA, 392 bp, Homo sapiens
agcatgtagactggtaccaggtctgtgtaaccactaagttagtgctgatattgacagcattatctaagtaattgcaagatgtattatatgcatcaattattagatgcatcactatattctgttaccgtgacagaataaaaggacaaactatgacacaaatatttcctatcacttagaatttttatcttataataacacagaaactttgtgcaacttatattaatgtgagcatttgtcataaatcacttctatgattacatgagatggaaaatataagaaaatacattaccaaagtattttcyaaaatttatacctttcggattaaactcttctgaatcacttttcaactcatcttgtctgtaactttccccacagtttcatcatctatgcta

SEQ ID NO: 211200 - DNA, 569 bp, Homo sapiens
gagactttctgtatgtaagattatattatcttttaataaataatttgacttcctcccttataattaagatgtatttttgtctaatttttctgtttacagaactgttagtactatattgaataaaatagtcaagtragcacccttgttttcttcctaaatttatgggaaattttcagtctttcatttttgagcatgattttttctgtaggttttttgtacatggcttttactttgttaaagtggtttccctctaataccagtgtgttaatccatttgcattgctctaaaggaatacctgagacggggtaatttaggaaaaagaagaggctttttatggctcatggttctgcaggctgtacaggaagcatggcactgtatccactcctggtgaagtcctcaggaagcttccaatcatggtggaaggcaaagggggagccagcatgtcacatggtgagcatgggatcaccagagagagaaggaagttctaagttcttttaaacaaccagatctgatgtaaacacatagaatgagaactcactcaattacagtgaggatggcaacaagacatt

SEQ ID NO: 211201 - DNA, 436 bp, Homo sapiens
tgcctaaacaaaaatcaagaaagaacatcaaattactttttaaaaaatagatcatcaaatgtatagaagataggaccaaagaaaacagctaattgtaaacattaatcaacactaaatttataaacacatacaagatgaaaacatttttattatgatggatttggaaatgtgatttatgctggaaaaaattttcaggataaaatattatgttttctttagagataggtcatgtaacaatatagattaattctgatattctgtcaaataagtctattttagyggagtgttttgaatatgtaaataattttctttgagaccttgacttgaatgaacaaatataaaattcactgaaaataactgagtgtgactcagttcttctttggaaaagaaattcaattgacttcttggctattatcaagatgaatgtttcagcttt

SEQ ID NO: 211202 - DNA, 612 bp, Homo sapiens
gtgctgacgcccattagttcaaagcaaagaggtggagaaaaagctacctagaagacagaaaacacaaaagagcatggattgctattctaaattcagacaaaacagactttaaaccagcaactatcaaaaaagagaaagatggacattacataatgataaatagtgcaattcaacaagaggatttaactatcctaaatatatattcactcaacattggagcacctcaattaataaaacaagttcttagagacctacaaagagacttagactctcacgaaataatactgggagatttcaacaactcactgacagtattagacagatcactgaggacacaaaaaatcagcaamgatatttgggatttgacttgacacttgactaaattagcctaacaggaatatacagaacactccaccccacaacaagagaatatacattattttcatctacatatggcacatattctaaaattggccacatgcttggatataaaacaactctcaataaattaaaaaaaactgaaatcataccaaacccttcttgaaccacagggtaataaaaatagaattcaatgctaagaagatctctcaaaacatacaattgcattaaaat

SEQ ID NO: 211203 - DNA, 552 bp, Homo sapiens
tttcatcgtaaatgataagaaattcagaatcaatgtttgtcagagttggttaattctggagcatgacaaaattattaaatagcccagccctttccatttttctgtcctgcctcctacagggcattttccttgtctttagtgatagtcctaaattagctgcagcattctagctagcttgtcctcttagcactatattcagaaacagaaaaggtaaagcccctgtcttttttttttcatcctcagagagagagagagaaaaaaaaaacaataagaaaaagaaagaaaacttaaggtaagytcttcagaaaacgctccctaacaaattgtgcatagggtaaaatcacaacttatgtcttaatcacccatttgcaaaggattggaatagccatgattggcatataataactagcttacacttgccaacattaacctctctggggtagggaggaatccaccttctgttagtatattgacccctgaagacctgaacaaaactgagattcatcaggcaagaaagaaaagataattgccgttgggtagttaataaattgt

SEQ ID NO: 211204 - DNA, 552 bp, Homo sapiens
tttcatcgtaaatgataagaaattcagaatcaatgtttgtcagagttggttaattctggagcatgacaaaattattaaatagcccagccctttccatttttctgtcctgcctcctacagggcattttccttgtctttagtgatagtcctaaattagctgcagcattctagctagcttgtcctcttagcactatattcagaaacagaaaaggtaaagcccctgtcttttttttttcatcctcagagagagagagagaaaaaaaaaacaataagaaaaagaaagaaaacttaaggtaagttcttcagaaaacgctccctaacaaattgtgcatagggtaaaatcacaacttatgtcttaatcaccyatttgcaaaggattggaatagccatgattggcatataataactagcttacacttgccaacattaacctctctggggtagggaggaatccaccttctgttagtatattgacccctgaagacctgaacaaaactgagattcatcaggcaagaaagaaaagataattgccgttgggtagttaataaattgt

SEQ ID NO: 211205 - DNA, 250 bp, Homo sapiens
gaattcacttatgaatcgttttcagctcaatggatgagatatctggaagagatgttgcagttctacttttggttgtgcagatgtggtatccagctatctcaggatattagaccaaacycaatgtatcatttttacagcacatctagaggttgttagtgacgtcctggaaaaaagggaaaagtgaactgttgtgcatgataaaaatgaggtcaaactatgctcattgttaacatgataattaggtcttgct

SEQ ID NO: 211206 - DNA, 663 bp, Homo sapiens
  misc_feature (1)...(663): n = A,T,C or G
nnnnnnnnnnnnnnnnnnnntcctgaagaggtgaatgggttgagagggtttcttatattaccatcttggggaaagactattccagggaaaggaaactgaaaatgcaaaaattgtgaattgaaagtgtgcctcgtcttgaatgctttaaaaagaaccagaaggttggtttggccaaaatatagtgagccaggaggacagacatgaggtagctatgataaggattttgrctttgctgaaaagatgggaaatcattacaggtcttggagcagaggagctgaacatgtgacttatgaagaccaaaacgctttgggtgctgtgttgaaagggaaagaggggtagggacacagtaagggaattaattaggaagctattgtaaaatacttagtacagaaatgatagagatttggaccagtgcagtaaagagaaggcactgaagtaggtagattctggatatattttgaaggtagactagacagaatttatggacagataagataggggggtgcaaagaaaagagagcagacaaggatgactctgagacttttggcataaatgactggaaagataaaggtgctttttactgagatggggaagataatgggacatgctggatattttggccctcaaggtttgctatttggggatgtgaagataaagcaggtg

SEQ ID NO: 211207 - DNA, 492 bp, Homo sapiens
ctgacactgagctagctgcaggaggttttttcttttctttttttttggaccccagtagtgcctggaacaccagcgagacagaatcattcactcccttggaaagggggctgaagccagggagccaaatggttttgctcagtggatcccacccccatggagcccagcaaactaagatccactggcttgaaattctcactgccagcacagcagtctgaagtcaacctgtgatgttccagcttggtcgggggaggggagtccaycaacactgaggcttgagtaggcagttttcccctcacaatgtaaacaaagccactaggcagtttggactgagcggagcccaccacagtgccacaaagctcctgtacccagaccgcttctctagattcctcctctctggacagggcatctctgaaagaaaggtaggagttccagtccaggtgcttacagataaaactcccatctccctgggacagagcacctgggtaaaggggt

SEQ ID NO: 211208 - DNA, 492 bp, Homo sapiens
ctgacactgagctagctgcaggaggttttttcttttctttttttttggaccccagtagtgcctggaacaccagcgagacagaatcattcactcccttggaaagggggctgaagccagggagccaaatggttttgctcagtggatcccacccccatggagcccagcaaactaagatccactggcttgaaattctcactgccagcacagcagtctgaagtcaacctgtgatgttccagcttggtcgggggaggggagtccatcaacactgaggcttgagtaggcagttttcccctcacaatgtaaacaaagccactaggcagtttggactgagcggagcccaccacagtgccacaaagctsctgtacccagaccgcttctctagattcctcctctctggacagggcatctctgaaagaaaggtaggagttccagtccaggtgcttacagataaaactcccatctccctgggacagagcacctgggtaaaggggt

SEQ ID NO: 211209 - DNA, 410 bp, Homo sapiens
atattaataagtgattctcttttgtaaattaacaacatcaaatttgttgtgtggcaagtgaagttgaaacttcatcattttattgtcayctcttacccgggcatattgtgatttaaaatcctgcagcaaccagttatgtttagtataagaaaaatacaagtaaaattaagctgaaggagaacacaaattagcacatttgcaatacaatcattctttctatgttcagttattagctttgtaacctctacacaatacttttaaagttaggcctcaataataagttgaatatttgtgtcacctccaaaatttgggtgttgccaacgtgatcctattaagaggtagggcctctaaaactggattagaccataaaggctccttccacattaatgggattagggcccttataaagg

SEQ ID NO: 211210 - DNA, 410 bp, Homo sapiens
atattaataagtgattctcttttgtaaattaacaacatcaaatttgttgtgtggcaagtgaagttgaaacttcatcattttattgtcacctcttaccygggcatattgtgatttaaaatcctgcagcaaccagttatgtttagtataagaaaaatacaagtaaaattaagctgaaggagaacacaaattagcacatttgcaatacaatcattctttctatgttcagttattagctttgtaacctctacacaatacttttaaagttaggcctcaataataagttgaatatttgtgtcacctccaaaatttgggtgttgccaacgtgatcctattaagaggtagggcctctaaaactggattagaccataaaggctccttccacattaatgggattagggcccttataaagg

SEQ ID NO: 211211 - DNA, 410 bp, Homo sapiens
atattaataagtgattctcttttgtaaattaacaacatcaaatttgttgtgtggcaagtgaagttgaaacttcatcattttattgtcacctcttacccgggcatattgtgatttaaaatcctgcagcaaccagttatgtttagtataagaaaaatacaagtaaaattaagctgaaggagaacacaaattagcacatttgcaatacaatcattctttctatgttcagttatwagctttgtaacctctacacaatacttttaaagttaggcctcaataataagttgaatatttgtgtcacctccaaaatttgggtgttgccaacgtgatcctattaagaggtagggcctctaaaactggattagaccataaaggctccttccacattaatgggattagggcccttataaagg

SEQ ID NO: 211212 - DNA, 366 bp, Homo sapiens
cagttttagtaatttctatcttattttccattgctgattttaaagaaaaaattagatctctaccacgtgcatcagttttctttctctttatttctttcacacaaatgctgcaatacaagccacattggcccatcataggtttaatgtcaaattcagtacattatttgggtaatattagcttcagttttaccgccagccatacaaacatcctttmtactttatgcagttagttagctaagtataattaattgaactaaagtgtcttgccaatgattggtttctccaaattctttcaccttaaagtataactgatttaaacacacagctaccaatccctgatagaggcccttttatcttttccaaaaa

SEQ ID NO: 211213 - DNA, 435 bp, Homo sapiens
ggctacttaatgttgaataatgaataaggcaaagccttttgaggttgctaattcatggttagagaaataaaaatagtcatgccatgtgaaaagttaacktattttaggtggttcaataatataaaaggttaagctatagcctttggtataaaaatgtcaacattacatatatattatattcagtttttaaaaacttttccatcagaagaatacttaacttaaacttcttggtgtcttgaggaaatgtttgagtctataggtttctgtggtggagggctgtgtgttctgaattgtcctcttcttgcttgggatttcttgttcaatcttctcaccaacatgacatagtaagatttttgaagaggttacaactgctctcataattctagttatctgtatgataatcatgagattggtcagtcctaaaaagaatttagc

SEQ ID NO: 211214 - DNA, 467 bp, Homo sapiens
gtgaaatcacataatatgtgtccatttcacttagtaaaatgttgtggggttacactgtgtttaagatcccaaactcctctattcaggttgaagatcacgttcctcctctctccctgtccttcatcatctctttatgacttcctctatcttgtttttttaactgtcactctaggaagaagacatggatctaaaacaataaggccttgttcaaatgtgacgttttaaaaacactaaatgatgaagaagcaaattcaacaatacaaagattttttttaaagggtcagcattcttaaaaacaactaccagtcagttgtggcagctcacacttgcaatcccagcactttaggaagctgaggggagaggatcgcttgagcccagragttcaagaccagcctgggcaacagagtgagaccacatctctataaaaaaaaacacacacacaaaaaccccacaaaaattagccaggc

SEQ ID NO: 211215 - DNA, 562 bp, Homo sapiens
atggtcattatgatgcagaatcctagcagatttcaacaggactgattaagtttgcctgtctcctagttacggcttttcaacagggctcttcattgcaaataccragccttaaaccaaggggaaagtagaagaacaaccaataaccaatgcctttcaccattcccaagcgaagccacagaatgctacttcctgtcactgcactgcacagatataagtacccccattgctaatggggtgctggcgtgcgcagctctgagcactctccctcattcatcttaaggataatgcaatgccaatgcagttaacaacaggctctgaattctgtatgtcaggtaggttgaaatggaacagcatgtcatcgaccatgtattcagtgtctgtcacgtacggcgcactacacctgaaatccaaaaagggatattttcattcattgtggtcagtcaactattcaaaaagtattttttaaacatctgccaggcgctagggatcctgtgatgaagaaaatgacatgtggcaaatacaccgagcagcacagcttgagtaatgcaagaccactttcaca

SEQ ID NO: 211216 - DNA, 562 bp, Homo sapiens
atggtcattatgatgcagaatcctagcagatttcaacaggactgattaagtttgcctgtctcctagttacggcttttcaacagggctcttcattgcaaataccaagccttaaaccaaggggaaagtagaagaacraccaataaccaatgcctttcaccattcccaagcgaagccacagaatgctacttcctgtcactgcactgcacagatataagtacccccattgctaatggggtgctggcgtgcgcagctctgagcactctccctcattcatcttaaggataatgcaatgccaatgcagttaacaacaggctctgaattctgtatgtcaggtaggttgaaatggaacagcatgtcatcgaccatgtattcagtgtctgtcacgtacggcgcactacacctgaaatccaaaaagggatattttcattcattgtggtcagtcaactattcaaaaagtattttttaaacatctgccaggcgctagggatcctgtgatgaagaaaatgacatgtggcaaatacaccgagcagcacagcttgagtaatgcaagaccactttcaca

SEQ ID NO: 211217 - DNA, 486 bp, Homo sapiens
atggaacagcatgtcatcgaccatgtattcagtgtctgtcacgtacggcgcactacacctgaaatccaaaaagggatattttcattcattgtggtcagtcaactattcaaaaagtattttttaaacatctgccaggcgctagggatcctgtgatgaagaaaatgacatgtggcaaatacaccgagcagcacagcttgagtaatgcaagaccactttcacaccacatccaagtccaggctgcttggcccctcctgccttagaaggggctgtatagatgggattaaagccatggcccatgtctccsactcaaactgactttttgcctgcaagctatgtcatcttcttggaggaactgaatgttatagactcatcatttccccacttccttctctccctacctgacaacatccttgagagaatgagacaaacagcaactcatctcagataggggagaactgagagacagagaaagtagaagaggttttt

SEQ ID NO: 211218 - DNA, 525 bp, Homo sapiens
tgagcacttacaatgtgccgggaaatatgtcatgtgatgctcccagaaacccagtgatactactggccttttagtggaggatgccgatgcccagaaaagttaagtaatttaacttgagttgtacagctagaaacaagtggcagagcagaattkaggcccaaatctttcatgatcccattaaattacctcttcaaaaacaagtgccctcccatggacatacagagtagaagagcagacattgtagactccaaaaaatgggagagtagtagcggggtgaaggtgaatgatgaaatactacccattgggtacagtgtttactgtttgggtgctggttacactgaaaacccacacttcactatgcaatatatccatgtaacacaactgcacttgcacctaagtctatacaaataaaaaattcaaaacaataacagtgtgcccccataaggggcaccaagcctaaagaagaagaggaagggtcagaaaggatttctgcagaaggctgtgcctgaggggagggttaatgaa

SEQ ID NO: 211219 - DNA, 525 bp, Homo sapiens
tgagcacttacaatgtgccgggaaatatgtcatgtgatgctcccagaaacccagtgatactactggccttttagtggaggatgccgatgcccagaaaagttaagtaatttaacttgagttgtacagctagaaacaagtggcagagcagaatttaggcccaaatctttcatgatcccattaaattacctcttcaaaaacaagtgccctcccatggacatacagagtagaagagcagacattgtagactccaaaaaatgggagagtagtagcggggtgaaggtgaatgatgaaatactacccattgggtacagtgtttactgtttgggtgctggttacactgaaaacccacacttcactatgcaatatatccatgtaacacaactgcacttgyacctaagtctatacaaataaaaaattcaaaacaataacagtgtgcccccataaggggcaccaagcctaaagaagaagaggaagggtcagaaaggatttctgcagaaggctgtgcctgaggggagggttaatgaa

SEQ ID NO: 211220 - DNA, 595 bp, Homo sapiens
aggtattcccacacaaggtgataagcccagcacagctgtgagggctctttaaactctcagtaaagaagtgctccaggcccaaagctcatgcttatgtgtccaggcagatgtctcaggaccgcttgcacgtgacggcctttcccaacaattatctcacagaatcttgcagggcttacagttgaaggaagtctttagggtcattccatctactttcctatccrtgtcattttgtccactgtctatttagatttggctgccagacatcaggatgctcagttagctggcccaactcttatgctgtgtgccagtgaatttacccagttcccagccatccctgggactggtccaaacagctattacatcacatttttgacacttgagagattgaatatacaaataaaaaatggtcagaccacatatgtcaatagaactctgatgctcaagctctgcagcaagcaaaacctcaacctctagcaatccttccagaaaggtcagaacttggtcaatgactgtcagattccctccttttttatccctgcttccaactcaggaccagccagagaaagccaaatatgctttccgaaccaatcacata

SEQ ID NO: 211221 - DNA, 605 bp, Homo sapiens
atttggacatcagctatgtgcaagacactgtgtatgatactttgacagactgaataaaagatggaagatttattcttcaggtttcccaggttttaaaatgtgtttccttgtttctacccttcaatgtttctcttagagacattcaatttatgtatctcggaatgycataaaaaaggtcacattttggtttatttagcacatctttttttttttttttgacactttggccaaaccatttcagctgtatttaaggtatgttttaattaaaataaatatttatcgtatttgttttttctggtgttggattatctaagcatgtttaaagttgtccccagaaaatacaacctgataaacagaaaatgttaattctgtgtataattccccacttgtttcctaggtaaaaacatatgggtcactgatgaaatgcacaccagtatgccacccatcctccaaaagtcccaattatctatgtgacaacacagtacttccatgatttggaggttatcatttgtgaaacatattgttgattcaataacagatatttggggaaaaataagccattctataaagcacatatatagttgtaaatgttaaaacagagagga

SEQ ID NO: 211222 - DNA, 581 bp, Homo sapiens
aatttttttccctttgtgttggcttaaaattctgtaaattttaccttagaattacaaatctgatatgcacagattttatgtaaaytgatgatttttgaaaaatgtacacacccatgtaactcatacccccaattatgatatggaacatctccatcacccccagaaagctccctcagatctccttccagtcaatttctacacccagggcaattattgttctgattcctaccactatatattcttatcattgtcttccccaattttatgtaaatagaatcacaatgtatgtattctgtcaggcacggaggttcacacctataatcccagctacttggtgaggttgaggtgagaggatcacttgaggccaggagttcaagacctgcctgggcaacataccaagattcccatttctaaaaaattttcttaaatagatttttgtattctttagtgtatgacttctttcactcaacataatgtttttttggaaattcaagcacggggttgtgctttggtaattcattcttatttactgctgagtaatgatgccttgtatataaatggaatacttggtccagtggata

SEQ ID NO: 211223 - DNA, 424 bp, Homo sapiens
ttgtctgtcaagaatgaaatgctcacgcccatgagtttctgcttggaagttactactcttagctcagatttgacttgctctgcacactggcagtgactttatttatggagtttcagtgtttcaagtattacctggagcaaatccatctttcctggagagcccaaccatgacaatgtctgatctaagcctgacctgcaagcagaagggctgggagacgtgcatcaktagtaagaactgtgagctcagaaaacctcctgcaggctgctttcactcacctgcatcatgtagagcccatctcttccccagcaaagatcaagcactcatctgacacacaatattggtgatggtaacactaattgttgacatttcctgagaatttcctagaggctggcactatcctgccactttctatgtgtatatggtc

SEQ ID NO: 211224 - DNA, 424 bp, Homo sapiens
ttgtctgtcaagaatgaaatgctcacgcccatgagtttctgcttggaagttactactcttagctcagatttgacttgctctgcacactggcagtgactttatttatggagtttcagtgtttcaagtattacctggagcaaatccatctttcctggagagcccaaccatgacaatgtctgatctaagcctgacctgcaagcagaagggctgggagacgtgcatcagtagtaagaactgtgagctcagaaaacctcctgcaggctgctttcactcacctgcatcatgtagmgcccatctcttccccagcaaagatcaagcactcatctgacacacaatattggtgatggtaacactaattgttgacatttcctgagaatttcctagaggctggcactatcctgccactttctatgtgtatatggtc

SEQ ID NO: 211225 - DNA, 578 bp, Homo sapiens
ctgttttggttaccatagtctgcagtatactttgaagtcaggtaacatgattcctccagttttcttccttttactcaggatagctttggctattctagttgcttttttttttttattccatatatgttttaggacattttttctatttctatgcagaatstcattggtattttgatagagattacattgagactgtatattgctttaggtagtatggatatctaaacaatagtgattcttcctatccatgaacatggaatatctttccatttctttgtgccctcttcaatttctttcatcagtgttttatagttttaattgtagagatctttcacttctttggttaattcctaggtatttaattttgtttgtagcaattgtaaatgggatagctttttaaatttctttttcagattgttctctgttggcatatagaaatgctactgatttttgtatgttgattgttaggtttttccaaatgtaagatcatgtcatctgcaaaaaaggataatttgagttctttctaatttggatgccctttatctcttctcttgtctgattgctctagctaagacttc

SEQ ID NO: 211226 - DNA, 497 bp, Homo sapiens
gaaaatttgagtattggtattagttctttaaatgtttgataggatttagcggtaaagtcattgggtcccaggcttttctttactgggagactttttgttacagcttcaatctcattgctttttattggtctgttcaggttttggattttttcgtggttcaatcttggtaggttgtgcatgtctagaaacttacccattttttctagattttccagtttattggcatataattgctcatagtagccactaatcatcctttgagtttctgtggtagccgttgtgatgtctcattttycatctctgattttatttatttgggtcttctatctgttcttcttggttagtctagctaaagttttgtcgattttgtttatatttttcaaaaaaacagctttttttattgatcttttgtattattttctgtttcaaattcattcagttctgctctgatctttatttcttttcttctactaattttgggtttggcttgctcttgc

SEQ ID NO: 211227 - DNA, 604 bp, Homo sapiens
aaaaatgaagaaagagattaaaagaattcaaaacaaagtgacaaataaagactacagacaaagaagatccaacatagcataatagcataataacagtcctggggaaaaaaggaaacataacaaacactaaaaattataattttamaaaattcctgaaataaaattgaatttatattgtgaaagggaatataatttactaagtatattaacccagaatgacaaacacaaagtccagtaaaactgctatattataaaggaagtgaaaaaaactctaattaggcaaaaagatcaagtgattcttagggaaagaaaaccatgttatagccagccctttgacattttatgctaagaaaagaaaatgtaaataaagtatcttagacccaggaaaaatttattttcaactataaagacgaccatcaacctgttattaacattcaaggacccagaaaatattgcttccatgactaattcctaaataatcttctggaaaacaggcttcagacaacctaaatgacaagagagaaattgacattaaaaactggcagtattggtaaatatatatttactaatagaataagattcaatcatggataaaagagagtgt

SEQ ID NO: 211228 - DNA, 604 bp, Homo sapiens
aaaaatgaagaaagagattaaaagaattcaaaacaaagtgacaaataaagactacagacaaagaagatccaacatagcataatagcataataacagtcctggggaaaaaaggaaacataacaaacactaaaaattataattttacaaaattcctgaaataaaattgaatttatattgtgaaagggaatataatttactaagtatattaacccagaatgacaaacacaaagtccagtaaaactgctatattataaaggaagtgaaaaaaactctaattaggcaaaaagatcaagtgattcttagggaaagaaaaccatgttatagccagccctttgacattttatgctaagaaaagaaaatgtaaataaagtatcttagacccaggaaaaatttattttcaactataaagacgaccatcaacctgttattaacattcaaggacccagaaaatattgcttccatgactaattcctaaataatcttctggaaaacaggcttcagacaacctaaatgacaagagagaaaytgacattaaaaactggcagtattggtaaatatatatttactaatagaataagattcaatcatggataaaagagagtgt

SEQ ID NO: 211229 - DNA, 558 bp, Homo sapiens
acttatgcatatatccctaaataatataggttagtttgccctgcttttgtaccttagataaataaaatactacacagtatgcatgctcttgtttctggctcctttcactaaatatgtccatggtgctatttttattcattttcattgctggatgcaattcgtatttgaatacaccacattttttatatttatttactgttgatgaacattctgcttgttttcatttgggaatcctagtttatgtcctcctacacacatgcaggagcttctcaagagcatctatctagcagtagaattgctggatcagagtatgaaygctttcaaccttatcagataagttcaaatgcttccaatttacactcccactaccagtaggtgtttcccatcgttctatattatcactacatgatattgttagatttcttgacattgttgcccatctggtgggtatatattgataattcattgggggctttaattggtacttctatcttttcatatgttcattagccatttggatttcagatttctttattcaattttgttttattttaaaaa

SEQ ID NO: 211230 - DNA, 558 bp, Homo sapiens
acttatgcatatatccctaaataatataggttagtttgccctgcttttgtaccttagataaataaaatactacacagtatgcatgctcttgtttctggctcctttcactaaatatgtccatggtgctatttttattcattttcattgctggatgcaattcgtatttgaatacaccacattttttatatttatttactgttgatgaacattctgcttgttttcatttgggaatcctagtttatgtcctcctacacacatgcaggagcttctcaagagcatctatctagcagtagaattgctggatcagagtatgaatgctttcaaccttatcagataagttcaaatgcttccaatttacactcccactaccagtaggtgtttcccatcgttctatrttatcactacatgatattgttagatttcttgacattgttgcccatctggtgggtatatattgataattcattgggggctttaattggtacttctatcttttcatatgttcattagccatttggatttcagatttctttattcaattttgttttattttaaaaa

SEQ ID NO: 211231 - DNA, 478 bp, Homo sapiens
ccacaactttggcttagtttcccaaagcattgtaatgtcctctatactctatataaataggacaacaaatttgatagggcacttcttatagtatgttttactataaagtacaggacactttatacatgtaacaccctgcatgaagcttagcaaaatgcaaccagggacaaaaatgcattctaggcatggagrttttcatgttttttcaacatgtactactttaatgctcataggtatagatcacatcttgcattctaagatgaggagaggatatttaatttacacacacaactaatgatactgaaattctcctcagccttcatcttttcaggcctaagtgtccttgttttaagctgcatttaggttagccctttgggtgcctcagccattaaaatagcttaattcttccttccattactctgttcagttcttgttacagtgtttatgaggcaattgtcagccccatctgcaggctcag

SEQ ID NO: 211232 - DNA, 606 bp, Homo sapiens
actaccaacaaatgcccccctttgatgtagctaacacataatctctaagtagcgttcytcctctgccttcccttatatggccattcctattcttagctcatggagtgactcaaagtaccccctgcttgaaatgctctcagatttccccttcttcataaaatattcatggcctacatcttccttgaaacattctactgcccatttttatctctcttgtcttatttcactgaccataccataactgctctctgagtatgttgaataaaatgttggtttccacttagagcacagtccatgcatttgccttccccttatactgcctagcagagtactggtacatcacaggtgctcaacaagtaacttttatttaatccttcaaaatgaatattttaaatgaagcctgataaataagaaaaaatgatagtattagaatacaccactttgcaacaattgctgaaataatggatcctagttaatgatcatcaatgaccactaaaaatttcatattaacaattaatgggaaactttataatgaatggatcaagctggaaacaaacatatggaataatcttaacatcacagaggaacaagcagacattgctcctt

SEQ ID NO: 211233 - DNA, 606 bp, Homo sapiens
actaccaacaaatgcccccctttgatgtagctaacacataatctctaagtagcgttcctcctctgccttcccttatatggccattcctattcttagctcatggagtgactcaaagtaccccctgcttgaaatgctctcagatttccccttcttcataaaatattcatggcctacatcttccttgaaacattctactgcccatttttatctctcttgtcttatttcactgaccataccataactgctctctgagtatgttgaataaaatgttggtttccacttagagcacagtccatgcatttgccttccccttatactgcctagcagagtactggtacatcacaggtgctcaacaagtaacttttatwtaatccttcaaaatgaatattttaaatgaagcctgataaataagaaaaaatgatagtattagaatacaccactttgcaacaattgctgaaataatggatcctagttaatgatcatcaatgaccactaaaaatttcatattaacaattaatgggaaactttataatgaatggatcaagctggaaacaaacatatggaataatcttaacatcacagaggaacaagcagacattgctcctt

SEQ ID NO: 211234 - DNA, 606 bp, Homo sapiens
actaccaacaaatgcccccctttgatgtagctaacacataatctctaagtagcgttcctcctctgccttcccttatatggccattcctattcttagctcatggagtgactcaaagtaccccctgcttgaaatgctctcagatttccccttcttcataaaatattcatggcctacatcttccttgaaacattctactgcccatttttatctctcttgtcttatttcactgaccataccataactgctctctgagtatgttgaataaaatgttggtttccacttagagcacagtccatgcatttgccttccccttatactgcctagcagagtactggtacatcacaggtgctcaacaagtaacttttatttaatccttcaaaatgawtattttaaatgaagcctgataaataagaaaaaatgatagtattagaatacaccactttgcaacaattgctgaaataatggatcctagttaatgatcatcaatgaccactaaaaatttcatattaacaattaatgggaaactttataatgaatggatcaagctggaaacaaacatatggaataatcttaacatcacagaggaacaagcagacattgctcctt

SEQ ID NO: 211235 - DNA, 602 bp, Homo sapiens
agtaaacataggtggtaaccaagcagtggccatcctggtccttgagcaagacccagtgctatgctggtttcaggatgactcagcacagtcccagtggtggtggtcataggggtgcttgtgtcaccytcctgcatcttcaggttgctcagcacaaagagaggcaccatttgcttggaggacagtaagggaagagaacaagaatctctgcctggtaatccaggcaattttctggatcttacccaagaccaccaaggtagtatctttacaagtctgcaagagtcacagccttactggcttggggtgccacttaatgcagatatagcttcagtgaccaaagtcttagatcacaacattcaagtcgcttcaaatacttggaaagccttcccaagaaggacaggtacaaagaagcccagactgcaaagactacaataaatacctaactcttcaatggtcagaaactggtgaatattcacaagcatcaagaccatccaggaaaacatggcctcaccaaacaaactaaataaggcaccagaaaccaatcccaaagagacagaggtatgtgacctttcagacagagaactcaaaatacctgttttgaggaa

SEQ ID NO: 211236 - DNA, 523 bp, Homo sapiens
cagaattgcagaatggataagaattcatcaaccaactatctgttgccttaaagagactcacccagcacrtaaggatgtacacaaacttcaggtaaaggggtggaaaaagacatttcatgcaaatggacaccaaaagcaagcaggaatagctagtcttatatcagacaaaacaaatttaaagcaacagcattaaaagagacaaaaggggacattacataatgataaaaggccttgtccaacaggaaaatatcacaaatctaaacatatatgcacctaacactggagctcccaaatttataaaacaagtgataatagacctaagaaatgagatagacagcaacacaataatagtgggggacttcaatactccatggacagcactagacaggtcatcaagacagaaagtcaacaaagaaacaatggatttaaactataccctgaaacaaatggacttaacagatatatacagaacattccatgcaacaaccacagaatatacattctactcaacagtgcatgaaac

SEQ ID NO: 211237 - DNA, 575 bp, Homo sapiens
agaaatctaaaacctgaacagataaataacaagtaacaagatctgggacccgaagtattcactgctgaattctaccaaagacttgaagaactaataccaaccrtactcaaactactctgaaacatagaagaggagggaatacttccaaactcattctacaaggccagtattaccctgataccaaaaccagacaaaagtacatcaaaaaaagaaagctacaggccagtatctctgatgaatattgatgtaaaaatcctcagcaaaatactagcaaactgggttcaacaacatattaaaaagatcatccatcatgatcaagtgggatttatcccagggatgcaagggtggttggacatatgcaaatcaaacactgtgatatgtcttatctacagaatgaaggacaaaaaccatattatcatttcagttgatgctgaaaaagcagttgataaaattcaacatcccttcatgataaaaattcccaaaaaactgtgtatagaaggaacatacctcaacataagaaaagccatatagaatagaccgaccactagtatcataatgaatagggagaaactaaa

SEQ ID NO: 211238 - DNA, 621 bp, Homo sapiens
ggagtcaagattcagtcacaataatgtgaccttacgggcaatcacaaaacttcagtggtrtgcaaaaataaacatttatttttctcacaaatgtggggttcaattgatcttggctggatttggttgatcttgtcttggcttattcacgtgcctggggttcaacagactgttggccaacctggcggcctcagttgggataactagggcaatctggctctatgtgtctcatcttccatccagcatgtttgtcctggcaatactggaggagcaagagagcaggcccaatgcaaaagcatttttcaagcctcttcctatgtcttatgtttgcagatagtccattgacgaaagcattcacaaggctgagtccagaatgagaggactctgccaagttacacagcaaagggcacagatacaggtactggggccattaatgcaatcagtttactatgcaaacccaggactatctgatcccaaagcctgtactcttcatgatttttctgtaccacctctgcagataagagtggagaaatacacacacagtatgaacagggcctagttcctgcccagaaaactcacaatcaagtggggaagaccaacatacacaaacttagctgtatgtta

SEQ ID NO: 211239 - DNA, 621 bp, Homo sapiens
ggagtcaagattcagtcacaataatgtgaccttacgggcaatcacaaaacttcagtggtatgcaaaaataaacatttatttttctcacaaatgtggggttcaattgatcttggctggatttggttgatcttgtcttggcttattcacgtgcctggggttcaacagactgttggccaacctggcggcctcagttgggataactagggcaatctggctctatgtgtctcatcttccatccagcatgtttgtcctggcaatactggaggagcaagagagcaggcccaatgcaaaagcatttttcaagcctcttcctatgtcttatgtttgcagatagtccattgacraaagcattcacaaggctgagtccagaatgagaggactctgccaagttacacagcaaagggcacagatacaggtactggggccattaatgcaatcagtttactatgcaaacccaggactatctgatcccaaagcctgtactcttcatgatttttctgtaccacctctgcagataagagtggagaaatacacacacagtatgaacagggcctagttcctgcccagaaaactcacaatcaagtggggaagaccaacatacacaaacttagctgtatgtta

SEQ ID NO: 211240 - DNA, 621 bp, Homo sapiens
ggagtcaagattcagtcacaataatgtgaccttacgggcaatcacaaaacttcagtggtatgcaaaaataaacatttatttttctcacaaatgtggggttcaattgatcttggctggatttggttgatcttgtcttggcttattcacgtgcctggggttcaacagactgttggccaacctggcggcctcagttgggataactagggcaatctggctctatgtgtctcatcttccatccagcatgtttgtcctggcaatactggaggagcaagagagcaggcccaatgcaaaagcatttttcaagcctcttcctatgtcttatgtttgcagatagtccattgacgaaagcattcacaaggctgagtccagaatgagaggactctgccaagttacacagcaaagggcacagatacaggtactggggccattaatgcaatcagtttactatgcaaacccaggactatctgatcccaaagcctgtactcttcatgatttttctgtaccacctctgcagataaragtggagaaatacacacacagtatgaacagggcctagttcctgcccagaaaactcacaatcaagtggggaagaccaacatacacaaacttagctgtatgtta

SEQ ID NO: 211241 - DNA, 555 bp, Homo sapiens
tttggtatttattaaagtcaccacagcatgggggggactttatgtttaggttttgcctaagagttagcttatctgcttcttgtgctaacagggccgttgctgccagggcccttagatatgggggccagcctttggaaaccccatctagttgttttgagagataggccactggcttggcgaagccctacagtctgggttaaaactccaactgccattttttttttttgaagataaccattctttttttttttttttttaagtgaactttctttatatctgtrgactagactgtctaaggccacaagattagaagttactataatacatgttacactgttaacttttagcaaactttacttttgttgaaaaccttgtaagtttgggatttcaattatcctttgctatgagtaagaccttgtttagtctaaattaacttagaattggtatagatggccctttttttttttttttggcacatagagtgtgcactttcgtcaggtcaggtagccccagggctgggcgcgacctgagtttttctttcaactcatgaaaagc

SEQ ID NO: 211242 - DNA, 555 bp, Homo sapiens
tttggtatttattaaagtcaccacagcatgggggggactttatgtttaggttttgcctaagagttagcttatctgcttcttgtgctaacagggccgttgctgccagggcccttagatatgggggccagcctttggaaaccccatctagttgttttgagagataggccactggcttggcgaagccctacagtctgggttaaaactccaactgccattttttttttttgaagataaccattctttttttttttttttttaagtgaactttctttatatctgtagactagactgtctaaggccacaagattagaagttactataatacatgttacactgttaacttttagcaaactttacttttgttgaaaaccttgtaagtttgggatttcaattatcctttgctatgagtaagaccttgtttagtctraattaacttagaattggtatagatggccctttttttttttttttggcacatagagtgtgcactttcgtcaggtcaggtagccccagggctgggcgcgacctgagtttttctttcaactcatgaaaagc

SEQ ID NO: 211243 - DNA, 555 bp, Homo sapiens
tttggtatttattaaagtcaccacagcatgggggggactttatgtttaggttttgcctaagagttagcttatctgcttcttgtgctaacagggccgttgctgccagggcccttagatatgggggccagcctttggaaaccccatctagttgttttgagagataggccactggcttggcgaagccctacagtctgggttaaaactccaactgccattttttttttttgaagataaccattctttttttttttttttttaagtgaactttctttatatctgtagactagactgtctaaggccacaagattagaagttactataatacatgttacactgttaacttttagcaaactttacttttgttgaaaaccttgtaagtttgggatttcaattatcctttgctatgagtaagaccttgtttagtctaaattaacttagaattggtatagatggccctttttttttttttttggcacatagagtgtgcactttcgtcaggtcaggtagccccagggctgggsgcgacctgagtttttctttcaactcatgaaaagc

SEQ ID NO: 211244 - DNA, 555 bp, Homo sapiens
tttggtatttattaaagtcaccacagcatgggggggactttatgtttaggttttgcctaagagttagcttatctgcttcttgtgctaacagggccgttgctgccagggcccttagatatgggggccagcctttggaaaccccatctagttgttttgagagataggccactggcttggcgaagccctacagtctgggttaaaactccaactgccattttttttttttgaagataaccattctttttttttttttttttaagtgaactttctttatatctgtagactagactgtctaaggccacaagattagaagttactataatacatgttacactgttaacttttagcaaactttacttttgttgaaaaccttgtaagtttgggatttcaattatcctttgctatgagtaagaccttgtttagtctaaattaacttagaattggtatagatggccctttttttttttttttggcacatagagtgtgcactttcgtcaggtcaggtagccccagggctgggcscgacctgagtttttctttcaactcatgaaaagc

SEQ ID NO: 211245 - DNA, 593 bp, Homo sapiens
actaccccttttctctaatatggcctgcattaagtttctgtcatttgtaatcaaaagggccctactaataaaatacactattttttaaaaaacttcaaagaataattagactaaaaagaaaaaaatgagactttcctatatgcacttcttaytgcctaaaatgtctcttattctggaaactatccaataatgccaacttctaaaaaaaaagtggtaattgggaaaagggtgggaaataataaagcagataaaacggtagatttggcatccccacaagtattgtgtgtccgtctgggtcctccaagaagcggatgccaagacaggattaggtgtgcaagagatttcttgaggaaaacacctgtgaaggaagatgaggaaggagccaggagaaccatgagactgggcacaggtccgccttgggcataggagagagggaaggaaggttggatggaagtgtctcagactgctgtgcagttctaagaaagttcctcaaggatatcgggagttcttgagccagtcacccatcagaagagtcccatatctgcagcatctcccaaaatggagcctggctaccatagcatctgtcatacgca

SEQ ID NO: 211246 - DNA, 582 bp, Homo sapiens
ttacacattgctttcttatatcaaaatatcacatgtgggctggacacggtggctctcacctgtaatcccagcgctttgggaggccgaggagggaggatcacttgaggccaggagttcgaggctgcagtgagctgtgatcatgccacttcatgccagccttggtgaaagcacaattctgtcctgaaaataaaaataaaaataaaaataaatcacatgtatctcataaatatgtacaactattatgtatccataattatacatttttwaaaaagaattcatgaaaactcacaaaaatgtggtcaaaagaatagtttgaggattaatttgaaatctttttgaaggttctgggatttctagatccagtgtcccacattgctttgggctaccccacctggttactaaccacaaaaagttctatctttgtttatgtgtgtatatatacacacataaacatatatacatacaaacaaacatacatacattgtttatgtattatatatatgtttatgtgtgtgtgtgtgtgtgtgtgtgtatatatatatatcctttaagtaccactcaactttcaattgatgtatttaa

SEQ ID NO: 211247 - DNA, 582 bp, Homo sapiens
ttacacattgctttcttatatcaaaatatcacatgtgggctggacacggtggctctcacctgtaatcccagcgctttgggaggccgaggagggaggatcacttgaggccaggagttcgaggctgcagtgagctgtgatcatgccacttcatgccagccttggtgaaagcacaattctgtcctgaaaataaaaataaaaataaaaataaatcacatgtatctcataaatatgtacaactattatgtatccataattatacattttttaaaaagaattcatgaaaactcacaaaaatgtgrtcaaaagaatagtttgaggattaatttgaaatctttttgaaggttctgggatttctagatccagtgtcccacattgctttgggctaccccacctggttactaaccacaaaaagttctatctttgtttatgtgtgtatatatacacacataaacatatatacatacaaacaaacatacatacattgtttatgtattatatatatgtttatgtgtgtgtgtgtgtgtgtgtgtgtatatatatatatcctttaagtaccactcaactttcaattgatgtatttaa

SEQ ID NO: 211248 - DNA, 582 bp, Homo sapiens
ttacacattgctttcttatatcaaaatatcacatgtgggctggacacggtggctctcacctgtaatcccagcgctttgggaggccgaggagggaggatcacttgaggccaggagttcgaggctgcagtgagctgtgatcatgccacttcatgccagccttggtgaaagcacaattctgtcctgaaaataaaaataaaaataaaaataaatcacatgtatctcataaatatgtacaactattatgtatccataattatacattttttaaaaagaattcatgaaaactcacaaaaatgtggtcaaaagaatagtttgaggattaatttgaaatctttttgaaggttctgggatttctagatccagtgtcccacattgctttgggctaccccacctggttactaaccacaaaaagttctatctttgtttatgtgtgtatatatacacacataaacatatatacatacaaacaaacatacatacattgtttatgtattatatatatgtttatgtgtgtgtgtgtgtgtgtgtgtgtrtatatatatatcctttaagtaccactcaactttcaattgatgtatttaa

SEQ ID NO: 211249 - DNA, 385 bp, Homo sapiens
cctcctcccaggttcaagcgattctcctgcctcagccttctgagtagctgggattacaggtgcccaccatmatgcccagctaatttttgtatttttagtagagacggggtttcaccatgttggccaggctggtctcgaactcctggcctcaggtgatccacctgccttggtctcccaaagtgttgggattacaggcgtgagccaccacacccagccaaaactttgttaaatggagcatcttgcaatgctacagttctataggtgacactttggggaaatggtggtcaaaaaggtcaaagtactcttcccttctctggaagtctcaagaaatggcaaagggagagagaatcctctctgtagtcaagaacaatgacagaagagagcc

SEQ ID NO: 211250 - DNA, 569 bp, Homo sapiens
atcttgtttttagagagcgtcttcccctctctcctgatatgtgagcctgtcactgtcaactaaccattaacagagccagggtgtaatctaggtcacctaaaaccacctgtgactttttccttggctgagctccatcatcccctcaactggacacgagacctcattatggtagttgctgctttgcctgagcgggagacactgggattctctagcttcctttgcatacctggttctcaactgggcaagctatcccctgatgggggtgctctggaaatgtgggtgggggacattttggttgttgcaatgattgggggtcttgctggcattgatcaagcagaggccccagatgctaaatgttctacatkgtgtgaaattcccacatagtgatgaactgtcccactagaatgccaggagcacctgctttgagaagcactgtgtagcctgggatgcttgggtctctttaacagtgacattgtgacgagcacagacaggagggaagagggtcaggaaacaaaaagacccctttgctggggatctaggaacctgctcaagcctggaaaagcaagctg

SEQ ID NO: 211251 - DNA, 548 bp, Homo sapiens
ttagtattaaatctcagtttctagtatgaacaatcattcttttttaatgcttgaagtcaacccttcactgagggtgaaactgccattgccaaattataactgagacagtgaaacagatctgacctaaccaactccatcttgattctaacctccaggctgtccttgttcattcctgggtgtaggctgaactaactttgggaggatcttagtttacagtttagctttgaaacaaagacgataacagccctttcccaaaacaagyccccttcctacttgtgaaccagactgcctttgcaggactaacaaattagccacaaaattagaaattatggtttaggagtcatgcggctggaggccacaagattctaaacctccccaaaatcatttctctgatgttacactcttaggctgtttccagattttctctgttatagataatgctgcaatggacatcttcactgacttttttctttttttctgttgaattatttccttaggataaattcccggaagtcagaaatacataatcaatggatatttcatgtttt

SEQ ID NO: 211252 - DNA, 548 bp, Homo sapiens
ttagtattaaatctcagtttctagtatgaacaatcattcttttttaatgcttgaagtcaacccttcactgagggtgaaactgccattgccaaattataactgagacagtgaaacagatctgacctaaccaactccatcttgattctaacctccaggctgtccttgttcattcctgggtgtaggctgaactaactttgggaggatcttagtttacagtttagctttgaaacaaagacgataacagccctttcccaaaacaagtccccttcctacttgtgaaccagactgcctttgcaggactaacaaattagccacaaaattagaaattatggtttaggagtcatgcggctggaggccacaagattstaaacctccccaaaatcatttctctgatgttacactcttaggctgtttccagattttctctgttatagataatgctgcaatggacatcttcactgacttttttctttttttctgttgaattatttccttaggataaattcccggaagtcagaaatacataatcaatggatatttcatgtttt

SEQ ID NO: 211253 - DNA, 560 bp, Homo sapiens
aaattgctgtcttagttagttcaggcttctacaaaaaaataccatagactggctgacttaaacaacagaaatttatttctcacagttctggaagctagatggtccaagatcaaggtgttaagaracccactctctggtacaggctcacgacctagcattgctgacagacatctcactgtatctacacctggcatagagcagagagagagaacacattgtaccaattgctccagtgattttgcactacatgtttccaatgctgttgattttttgacataaatcatgtcattttataatggcactaatgtcaatcatgatggctccaacctcatgacctaattaccttctacaggccttacctcctaataacatcacatggggccttgggtttccacatgaatattggggtctcataaacattcagcctatagcactcatgcatttaattccaaaacaaacttattaatgaaatatggacgtgtatactttaaatcctcttatttttaaaagggaataaaccataaagttcctattcacaggctgaaatatttcacttttta

SEQ ID NO: 211254 - DNA, 560 bp, Homo sapiens
aaattgctgtcttagttagttcaggcttctacaaaaaaataccatagactggctgacttaaacaacagaaatttatttctcacagttctggaagctagatggtccaagatcaaggtgttaagagacccactctctggtacaggctcacgacctagcattgctgacagacatctcactgtatctacacctggcatagagcagagagagagaacacattgtaccaattgctccagtgattttgcactacatgtttccaatgctgttgattttttgacataaatcatgtcattttataatggcactaatgtcaatcatgatggctccaacctcatgacctaattaccttctacaggccttacctcctaataacatcacatggggccttgggtttccacatgaatattggggtctcataaacattcagccyatagcactcatgcatttaattccaaaacaaacttattaatgaaatatggacgtgtatactttaaatcctcttatttttaaaagggaataaaccataaagttcctattcacaggctgaaatatttcacttttta

SEQ ID NO: 211255 - DNA, 572 bp, Homo sapiens
aatcttttatatttattgctttttaattaataatatgtctaaacttttatataagaaaattaatatcttgtattcaaccatgtagttatatattttatttaaaaayatttacatatataaaacattcaaaggacaacatatttatagaaaaatcaagtttttacttatattattaattatataagtagctaattatttttcaaatggctaagataactctctccaataaaagcctatgcgagaataagtaatcttctatttataacattttttatcaaaatcattgttactaataatgatagcatacaagtgcaaattgttttataattaacaatgttttttaattttaactttctactagaaaatgtcccattagttcagcatttcatttatctgttaatatgccaactgttatgaaattttcagtaattcacaatccaatgactcaatagctcttcaataacagtcttgtataacaagctggtaaaattatgcttattatagaaataatagagttgtatctaaaaccttccatattgcttcagcttttcagttcttaagggaattagaat

SEQ ID NO: 211256 - DNA, 572 bp, Homo sapiens
aatcttttatatttattgctttttaattaataatatgtctaaacttttatataagaaaattaatatcttgtattcaaccatgtagttatatattttatttaaaaatatttacatatataaaacattcaaaggacaacatatttatagaaaaatcaagtttttacttatattattaattatataagtagctaattatttttcaaatggctaagataactctctccaataaaagcctatgcgagaataagtaatcttctatttataayattttttatcaaaatcattgttactaataatgatagcatacaagtgcaaattgttttataattaacaatgttttttaattttaactttctactagaaaatgtcccattagttcagcatttcatttatctgttaatatgccaactgttatgaaattttcagtaattcacaatccaatgactcaatagctcttcaataacagtcttgtataacaagctggtaaaattatgcttattatagaaataatagagttgtatctaaaaccttccatattgcttcagcttttcagttcttaagggaattagaat

SEQ ID NO: 211257 - DNA, 465 bp, Homo sapiens
tgattgcaaatcagctgtaagaattcacagttctttctcctctggccttgagagcagagctctacttagaactctatttctgagcattgagaggcttcattaattttccatcctcacactctttgtcctaagaccccgtaagggckcccacctgtctgtctacttaaacagcttttattcagcagaattggcaattgctgattccctaatggcctcactaagtcattgatctggtaagttttcttttatatttttcagaatagcaaataaaagcctcttgtagagcaatctcttaaaatctatctacttactgactcccatagattactctgtctttccttgtacacctactgctgaggcacacctgactcttaacttcttgtttcttctgcctgaaaaaaggtaaaattccccttaatataacttggttttctattctaatattgaagtacaaatgtctgtaat

SEQ ID NO: 211258 - DNA, 329 bp, Homo sapiens
atatatctctgccttcttaagcagtcaataataaaaataatgtaagattttygtgctaatttatggtaattattatgaaacaaagatttagttatagtgaattatagaaatgctttcagcgactattgaatacagagattcagattttagattctttaaaatgagttaattgtttcgttttttcttttagattttttttcttgcactattactcttatccaatgtcttattttacacagagttgtctagaagaggtctgagggtggctctaaattttcaggaaagtataacagtctgaatataatagttaatatttcttcattcttgag

SEQ ID NO: 211259 - DNA, 586 bp, Homo sapiens
tattcaatgattcaagcaaactttcctaaattatttcagacttgtgaggttttactacataattttctattagagtgaatttatacaaaaatttccctcatgtcatgttttttttctcccttatagattacaaatagttcacgttacctaggtgtttgtaggtctcatcagtacctgtttacagttaagaatttttcaaccgttattcaattatgtcatcatcagatgactttttaaaggtgatagcagtgatacatgattatttaaatattacaaaggatcatttcaaagtgataaatatctgtatgtggggttatcctagaattggtaaaaccaatctaaatttatagaatagaagctygtggtcctttttgggaagaatcaaaggtaaaaatcatgggaatggggaaatagacgtgtaagtaaagtcttcctaactgcaatattagaaaggctgtaattttacatggcatttatgagtaaagtgtcataagaagtatttaatgaatacattgccttgtaacattccacagggtacattttatgtgctctctagtattgcttttctctgtatgggtatttcagt

SEQ ID NO: 211260 - DNA, 514 bp, Homo sapiens
ctgttctttttccaaggtgcccagatttcatattgttcaaacacacatgctctacaaacaatttgtgcagttwacacaatcatcacagggtcctgagtgacacacatcctcctcagcttacgaagatgacaggtttaagagattaaagtaaagacaggcataggaaatcacaagggtattgattggggaagtgataagtgtccatgaaatcttcacaatttatgttcagagattgcagtaaagacaggtataagaaattataaaagtattaatttggggaactaataaatttccatgaaatcttcacaatttatgttcttctgccatggcttcagctggtccccccgttcagggtccctgacttcccacaacaatgtatttttagtgaattgaatgaggcagaggtgagggagattcagaacttgtgctaatgctcttgatagtgatatatagatgtgagggaacgtggtactttcacaagtgtctgagattatgttttagaagattgtggttt

SEQ ID NO: 211261 - DNA, 605 bp, Homo sapiens
tggcattctgacggtattatcaatacatgttaaaatagtttattttttatatacattttcatggtgagaggtttcaggtcgtaaaataaccaaagatttagaaatcaagtttatcagctttgaaatttgaagaaatacattacggacagtgttctcacaacaaagaaacatgagctccaaaaagattctctttcaggaatgccatttaattacctcaaaatgtagaaacgacatgtcctggtcatacaataccttaattaytatgattggcctagaaagcagcttatatgtgctcatctttaaatgataataaaatgtagtgaaaaatacattaatgcattttatatacatatccacatttattacataaaccaaatgatgtgttgatacttttatagtattctttttatctctaaaaaattacaaaaaatatatactattcagtaacaacacctacatttagttattaaacttgcaaaactttccctaaaaatttcttaggagggtaattaacgtgcttatttgtttatttcaatctatatgctatactttcattgtacattattatttcacatgccatattgaacttttatataatataaata

SEQ ID NO: 211262 - DNA, 593 bp, Homo sapiens
actattgaaaaattgggaggaaaattttaaagagtaaataagctttacaaaaaacaataaaaacggccgggtgcggtgtcacgcctgtaatcccagcactttgggaggccgaggcaggcggatcatgaggtcaggagatcgagaccatcctggctaacacggtgaaaccatgtctctagtaaaaatacaaaaaaattagccaggcgtggtggcaggcacctgtagtcccaactactcaggaggctgaggcaggagaatggcgtgaacgccgggaggtggagcttgcagtaagctgagatcatgtcactgcactccagcctgggcgacagagtgagattctgtctcaaaagaaaaaaaaaaaaaacaataaaaactaaactgtcaaaagttaaaggaaattttcaacatgaagaaaatagtcctcaagctcataagtgactgattgaataaatagtttatttattctaaattgtatttggcacctatttggtsgtgggccaacatgtgggcggtggaattaaatcagaattaactattgctgtcaagaaagttagacttagcaaactgttgaatgaacttctaagtagggaaag

SEQ ID NO: 211263 - DNA, 615 bp, Homo sapiens
cccctctcccacccagcccacttgctcaamacaataaacacagacaaacacacacacatacacacagacacacacacacacacctgaaattaaatttttaaaaaatcactagaattgattaaatatcttaaaggcctccttcctgaaatagacagtgagtcactgctatttccagtattgactttttttataattttttatttttttcagtttttttaaaaaaagtaaatactttctgtaactcaagaattggtcattctttttcctaattttcctcttcttctgcagtctttcaaattctctgggagatatataaataaaatactcaaccccttatattaaaatggtcagtacagaccctcatttggggtagtacagaaagtattgcaatcaatactgtactaggtactagataaaaggcagatacaaaagaagatatgtgatatcatactttaatctgtacaatacattttaatttatacatttatccataggttatgattttgttgaaacttcaactgtatgaagaggttttcaaaagtgatatcattacatacatattatggatgataaaaatgaggctgataaagaggaagtgaatgtctacagttgtac

SEQ ID NO: 211264 - DNA, 615 bp, Homo sapiens
cccctctcccacccagcccacttgctcaacacaataaacacagacaaacacacacacatacacacagacacacacacacacacctgaaattaaatttttaaaaaatcactagaattgattaaatatcttaaaggcctccttcctgaaatagacagtgagtcactgctatttccagtattgactttttttataattttttatttttttcagtttttttaaaaaaagtaaatactttctgtaactcaagaattggtcattctttttcctaattttcctcttcttctgcagtctttcaaattctctgggagatatataaataaaatactcaaccccttatattaaaatggtcagtacagaccctcatttggggtagtacagaaagtattgcaatcaatactgtactaggtactagataaaaggcagatacaaaagaagatatgtgatatcatactttaatctgtacaatacattttratttatacatttatccataggttatgattttgttgaaacttcaactgtatgaagaggttttcaaaagtgatatcattacatacatattatggatgataaaaatgaggctgataaagaggaagtgaatgtctacagttgtac

SEQ ID NO: 211265 - DNA, 596 bp, Homo sapiens
cataattttctttttctcaccctygcttactaccccacacacatctaaacagaaatacacatacatttcacataatttaaacccaaatatttgctaaaatattgtattacagaaactatattctaggtgatttttgtcttattgtatttcttggcctatcaatgtgagcctttgaaaaaaaagaatgtgatccttaagcatgtactgtatttattacagaaaagccttcccacataaccacttcataaattgatcttcaaaaacccatgaacacaaaaagaataacagtctagaatataatattcaattaattaaaatcacctgggaatgaaagcctagttcgcacaatctatttgcacaattataaactataaaaacatttatacattgagtattagcatattccccattactgcctctctaacattagttatttcactctacttttgctggaattagatgacagtaaattcctaattaatccgtagaatgagtagctatacacatgtttgcgtattgtagtgaacctaatttcaaagacgttctgctataaaaatcaaaacgatttacctgtcatatagaggggtctggacaaa

SEQ ID NO: 211266 - DNA, 596 bp, Homo sapiens
cataattttctttttctcaccctcgcttactaccccacacacatctaaacagaaatacacatacatttcacataatttaaacccaaatatttgctaaaatattgtattacagaaactatattctaggtgatttttgtcttattgtatttcttggcctatcaatgtgagcctttgaaaaaaaagaatgtgatccttawgcatgtactgtatttattacagaaaagccttcccacataaccacttcataaattgatcttcaaaaacccatgaacacaaaaagaataacagtctagaatataatattcaattaattaaaatcacctgggaatgaaagcctagttcgcacaatctatttgcacaattataaactataaaaacatttatacattgagtattagcatattccccattactgcctctctaacattagttatttcactctacttttgctggaattagatgacagtaaattcctaattaatccgtagaatgagtagctatacacatgtttgcgtattgtagtgaacctaatttcaaagacgttctgctataaaaatcaaaacgatttacctgtcatatagaggggtctggacaaa

SEQ ID NO: 211267 - DNA, 507 bp, Homo sapiens
attaagaaataaggtatttctgattatsctactgagttaattctctaaagagttaaggtataactttggcaaatgaaagttggtaatgggtatagattacgcactctgagcttttggtattataggaaagaagaaaaaattatgagttgcttgaaatagtacttgacttacttagttcttttatgaaagtcatggagatccctaaatacttaaagttttgtgctaagggacatatgcaagttgtaaagaaatttgacataagcaaaaaaaaattacttaaaaccaccaatgctaaactatgtattctttattactcttctaggttatttgattctaggactttattgcttttgtgctattatactactttgtaagttatagatgttaataactgaaaaaatataaaattattatggtatagacatgaaaataaattatttccagtggaggttcaattaactttccttcctcaatataaaagaatcaaattttgccttaatttgcaca

SEQ ID NO: 211268 - DNA, 507 bp, Homo sapiens
attaagaaataaggtatttctgattatcctactgagttaattctctaaagagttaaggtataactttggcaaatgaaagttggtaatgggtatagattacgcactctgagcttttggtattataggaaagaagaaaaaattrtgagttgcttgaaatagtacttgacttacttagttcttttatgaaagtcatggagatccctaaatacttaaagttttgtgctaagggacatatgcaagttgtaaagaaatttgacataagcaaaaaaaaattacttaaaaccaccaatgctaaactatgtattctttattactcttctaggttatttgattctaggactttattgcttttgtgctattatactactttgtaagttatagatgttaataactgaaaaaatataaaattattatggtatagacatgaaaataaattatttccagtggaggttcaattaactttccttcctcaatataaaagaatcaaattttgccttaatttgcaca

SEQ ID NO: 211269 - DNA, 507 bp, Homo sapiens
attaagaaataaggtatttctgattatcctactgagttaattctctaaagagttaaggtataactttggcaaatgaaagttggtaatgggtatagattacgcactctgagcttttggtattataggaaagaagaaaaaattatgagttgcttgaaatagtacttgacttacttagttcttttatgaaagtcatggagatccctaaatacttaaagttttgtgctaagggacatatgcaagttgtaaagaaatttgacataagcaaaaaaaaattacttaaaaccaccaatgstaaactatgtattctttattactcttctaggttatttgattctaggactttattgcttttgtgctattatactactttgtaagttatagatgttaataactgaaaaaatataaaattattatggtatagacatgaaaataaattatttccagtggaggttcaattaactttccttcctcaatataaaagaatcaaattttgccttaatttgcaca

SEQ ID NO: 211270 - DNA, 507 bp, Homo sapiens
attaagaaataaggtatttctgattatcctactgagttaattctctaaagagttaaggtataactttggcaaatgaaagttggtaatgggtatagattacgcactctgagcttttggtattataggaaagaagaaaaaattatgagttgcttgaaatagtacttgacttacttagttcttttatgaaagtcatggagatccctaaatacttaaagttttgtgctaagggacatatgcaagttgtaaagaaatttgacataagcaaaaaaaaattacttaaaaccaccaatgctaaactatgtattctttattactcttctaggttatttgattctaggactttattgcttttgtgmtattatactactttgtaagttatagatgttaataactgaaaaaatataaaattattatggtatagacatgaaaataaattatttccagtggaggttcaattaactttccttcctcaatataaaagaatcaaattttgccttaatttgcaca

SEQ ID NO: 211271 - DNA, 609 bp, Homo sapiens
aactacaaaaacagcatggtgggttatatattgtggtaactacatgtttggggttttattcctcctttaaaccagatttctattatttcagaaaatcagccattgtagaaaaagactattcatttatttcatttctgggtggcccatacactgtaaaaataggtcaagaacagtaatctaaattgactgctgataaataattaaagctaatagaatttttctcagacctgtgaactaaaatctttgagaaattgccaggacatacttactgtctcctgttgtatagaaagatatttttttatttaatacttcagtttcaatgccatttaaaattaccattttctatcacaagsactggaaggaatatgtgttcatctataaaagtaaccagaggaacgacgccgcactgatggctatatggtacatcttcagatgagatgggaagtgacggtttcggtatcctggacaaaagaaacttcgtttttcactgaactgcattttaagtcgaggtctacagtctgcatatcacataatatatactgtcttgtttttaaagactctgtacttggtctaagctcttacattgataagggaaacttacagctatct

SEQ ID NO: 211272 - DNA, 575 bp, Homo sapiens
gccttggtctcttcgtctattaagtgagggtagtaactccctccttgttaagctgttgtgattataaacatgagaacctcctacatcaagtatctgacacagtctggatagaaaccaaatcaacatcacaaaccttcactaataaatccaaagtcagcacctttctttccaccacaccataggttattctctgtcgtgatcaaaccaagcaggaagccaagatgtggaaagtcctggaggaccaggacacttaagcaacatttaagatgctgctggctcttctttacatgagagatctcccccagccccccattcttccttctgtgcctggacctgcccggggtcagtgctgcccaggcaggaagcggaagcccaggtcaagacccacgtgggcctggctcgtttctctcctggggggcgttctgcaaccctctgcctggtgctgrggtcgaccagatgccccggagcttccagactcccatctgggaggtcctggttcctgtcgctggccggtagattttgtggtgtggctgagcgagagtgggtgcagaattgtgtcggcacactgatgtcgc

SEQ ID NO: 211273 - DNA, 575 bp, Homo sapiens
gccttggtctcttcgtctattaagtgagggtagtaactccctccttgttaagctgttgtgattataaacatgagaacctcctacatcaagtatctgacacagtctggatagaaaccaaatcaacatcacaaaccttcactaataaatccaaagtcagcacctttctttccaccacaccataggttattctctgtcgtgatcaaaccaagcaggaagccaagatgtggaaagtcctggaggaccaggacacttaagcaacatttaagatgctgctggctcttctttacatgagagatctcccccagccccccattcttccttctgtgcctggacctgcccggggtcagtgctgcccaggcaggaagcggaagcccaggtcaagacccacgtgggcctggctcgtttctctcctggggggcgttctgcaaccctctgcctggtgctggggtcgaccagatgccccggagcttccagactcccatctgggaggtcctggttcctgtcgctggccggtagattttgtggtgtggctgagcgaragtgggtgcagaattgtgtcggcacactgatgtcgc

SEQ ID NO: 211274 - DNA, 485 bp, Homo sapiens
cagcatttctgcttatttatagtttaccagaaaatcattttacccagttttttccttttttttttttattttgcacacagtggaaggcatcttttgtatttccctttgctgtttctgtatcccctaacgctgtcatgctgccagttttccatcttattctaaatcttcytaactgcatagcctggtggtgacttcagatttctctgcagggttacatattatttcactgattgctctgggtttttcaaatataacaatcatgtcatctgttccccatggcgagcaacgtaaatcggggactcgtcttggccaaggggaccatttgcagtgtttggctcttatgacgaacgtctttgtatataaaaacttttctgcatttagaaatatttcctcaggccagatttttctggaccaaaaggtaagcatgtcttttaagccagtttatgttccaaaagggttggtcccattttcactcccaccagcaa

SEQ ID NO: 211275 - DNA, 485 bp, Homo sapiens
cagcatttctgcttatttatagtttaccagaaaatcattttacccagttttttccttttttttttttattttgcacacagtggaaggcatcttttgtatttccctttgctgtttctgtatcccctaacgctgtcatgctgccagttttccatcttattctaaatcttcttaacygcatagcctggtggtgacttcagatttctctgcagggttacatattatttcactgattgctctgggtttttcaaatataacaatcatgtcatctgttccccatggcgagcaacgtaaatcggggactcgtcttggccaaggggaccatttgcagtgtttggctcttatgacgaacgtctttgtatataaaaacttttctgcatttagaaatatttcctcaggccagatttttctggaccaaaaggtaagcatgtcttttaagccagtttatgttccaaaagggttggtcccattttcactcccaccagcaa

SEQ ID NO: 211276 - DNA, 552 bp, Homo sapiens
ctattgtccaggctggggtgcagtggcacgatcacagctcactgcagcctccacctcccaggctaacacaatcctcccgcctcagccccccgagtagctgggattacaggcacacaccaccatgcccggcttattttcrcttttttttctttttttgtagagatagagtctctctgtgttgcctaggctgatctcaaactcctgggctcaagccatcctctcgccttggcctctcaaagtgctgggcttataggcgtgagccgctgcacctggcccaccaaataattcttatctggaacccccccctccacatccaggacaaggcaagaatccccgttgaaagctctaggcttacaggaagcactggagctcgtgaactttatttttattattttattttattttttccagatggagtttcgctcttgtcacccaggctggagtgcagtggagccatctcgactcactgcaagctccgcctcctgggttcaatcaattctcccgcctcagcctcctgggtagctgggattacaggtgcccacgaccacaccc

SEQ ID NO: 211277 - DNA, 564 bp, Homo sapiens
gtggccctggctggactgcagtggcacaatcatagctcgctgcagcctcaaaytcgtgggttcaagtgattctcctgcctcagcctccctgagtagctgggactacaggaacatgccacgatgcctgtagttccagctacacaatttaaaaatttttttgtagagacagggtcttactatgttgcccagccctgtctcaaactcctgagctcaagtgatcctcctgcctcagccttccaaagtgctgggattacaggcaggagacactgcacccagcctcagactatgtatctttgttcctgctgttttgtcttctaaaaaacaccagtccccttggaagccttcctgggctgtctgaacacggctgtggttattataattatgggctgtgagcctgatgaggtggggatgcgtcccaaggtcgaggctccttgagggggcttgtcccagcccgctaagagcacgggttggtgagaggcggctggtttgtccctgaaggagcttatcttggctgaattctcctaatcctcttgcaggattaaggaaactcaatgcacgtcccgt

SEQ ID NO: 211278 - DNA, 564 bp, Homo sapiens
gtggccctggctggactgcagtggcacaatcatagctcgctgcagcctcaaactcgtgggttcaagtgattctcctgcctcagcctccctgagtagctgggactacaggaacatgccacsatgcctgtagttccagctacacaatttaaaaatttttttgtagagacagggtcttactatgttgcccagccctgtctcaaactcctgagctcaagtgatcctcctgcctcagccttccaaagtgctgggattacaggcaggagacactgcacccagcctcagactatgtatctttgttcctgctgttttgtcttctaaaaaacaccagtccccttggaagccttcctgggctgtctgaacacggctgtggttattataattatgggctgtgagcctgatgaggtggggatgcgtcccaaggtcgaggctccttgagggggcttgtcccagcccgctaagagcacgggttggtgagaggcggctggtttgtccctgaaggagcttatcttggctgaattctcctaatcctcttgcaggattaaggaaactcaatgcacgtcccgt

SEQ ID NO: 211279 - DNA, 564 bp, Homo sapiens
gtggccctggctggactgcagtggcacaatcatagctcgctgcagcctcaaactcgtgggttcaagtgattctcctgcctcagcctccctgagtagctgggactacaggaacatgccacgatgcctgtagttccagctacacaatttaaaaatttttttgtagagacagggtcttactatgttgcccagccctgtctcaaactcctgagctcaagtgatcctcctgcctcagccttccaaagtgctgggattacaggcaggagacactgcacccagcctcagactatgtatctttgttcctgctgttttgtcttctaaaaaacaccagtccccttggaagccttcctgggctgtctgaacayggctgtggttattataattatgggctgtgagcctgatgaggtggggatgcgtcccaaggtcgaggctccttgagggggcttgtcccagcccgctaagagcacgggttggtgagaggcggctggtttgtccctgaaggagcttatcttggctgaattctcctaatcctcttgcaggattaaggaaactcaatgcacgtcccgt

SEQ ID NO: 211280 - DNA, 493 bp, Homo sapiens
ggatgacaggcacctgccacaatgcctggataatttttgtatgcttagtagagacggggtttcaccttgttggccaggctggtcttgaaytcctgacttcctgatctgtctgcctcagccttccaaagtgttggattacaggcatgagccaccgtgaccagcctgtcttttttttttttcaaagccacccttggttatgaaatgtaaaatatgcaccagtgaatattactttgctgaatattgcctagtgaatattaagtatttattctcacctttcagacatgaacttgcgaattcaacatgtgaagacttacaacttgataaaccagcttcaggtggtaggtcttcagtcttaagtcagattagaagattatgtgaaataattatttaatgcttaacaatgatttttttaatggtcctttcacatgaaataatattcctcttacttttaattatgttccaggacaggagaattcatgttgtcaaaattcta

SEQ ID NO: 211281 - DNA, 493 bp, Homo sapiens
ggatgacaggcacctgccacaatgcctggataatttttgtatgcttagtagagacggggtttcaccttgttggccaggctggtcttgaattcctgacttcmtgatctgtctgcctcagccttccaaagtgttggattacaggcatgagccaccgtgaccagcctgtcttttttttttttcaaagccacccttggttatgaaatgtaaaatatgcaccagtgaatattactttgctgaatattgcctagtgaatattaagtatttattctcacctttcagacatgaacttgcgaattcaacatgtgaagacttacaacttgataaaccagcttcaggtggtaggtcttcagtcttaagtcagattagaagattatgtgaaataattatttaatgcttaacaatgatttttttaatggtcctttcacatgaaataatattcctcttacttttaattatgttccaggacaggagaattcatgttgtcaaaattcta

SEQ ID NO: 211282 - DNA, 493 bp, Homo sapiens
ggatgacaggcacctgccacaatgcctggataatttttgtatgcttagtagagacggggtttcaccttgttggccaggctggtcttgaattcctgacttcctgatctgtctgcctcagccttccaaagtgttggattacaggcatgagccaccrtgaccagcctgtcttttttttttttcaaagccacccttggttatgaaatgtaaaatatgcaccagtgaatattactttgctgaatattgcctagtgaatattaagtatttattctcacctttcagacatgaacttgcgaattcaacatgtgaagacttacaacttgataaaccagcttcaggtggtaggtcttcagtcttaagtcagattagaagattatgtgaaataattatttaatgcttaacaatgatttttttaatggtcctttcacatgaaataatattcctcttacttttaattatgttccaggacaggagaattcatgttgtcaaaattcta

SEQ ID NO: 211283 - DNA, 493 bp, Homo sapiens
ggatgacaggcacctgccacaatgcctggataatttttgtatgcttagtagagacggggtttcaccttgttggccaggctggtcttgaattcctgacttcctgatctgtctgcctcagccttccaaagtgttggattacaggcatgagccaccgtgaccagcctgtcttttttttttttcaaagccacccttggttatgaaatgtaaaatatgcaccagtgaatattactttgctgaatattgcctagtgaatattaagtatttattctcacctttcaracatgaacttgcgaattcaacatgtgaagacttacaacttgataaaccagcttcaggtggtaggtcttcagtcttaagtcagattagaagattatgtgaaataattatttaatgcttaacaatgatttttttaatggtcctttcacatgaaataatattcctcttacttttaattatgttccaggacaggagaattcatgttgtcaaaattcta

SEQ ID NO: 211284 - DNA, 537 bp, Homo sapiens
atgtgagaaaaacaggcatctccctatttggaaaatcacagctgactgcagtagtaaacaatccacaagttattcctggtaacactattcctacagccctaatctgtctcaaaaaaaaaaaaatcctaatgcagttatttccttttgcattcatgaggagatggaagaaatacccatatttgatggttggctgggaactgtctttggcactgtatgaagtattttaatattgtaaacatgaaaagatgagaatcctggagaccccgtgggcatggagaaaaggaagtacattagagggtgttgtaggaaatattttcattccaggcactgctgtttaaactacccctaaactttctttccttaaaagwacagaaaaaacaaagaggacaaaagatcaagaaacattccacgtgcccctctccattcttatttgttgtaataaaggaaaagcattttggagattttcctgaatgcagtttatgatgtgatcaaagttatttattttctgctaatgattttcaaaatttgaattaaaaa

SEQ ID NO: 211285 - DNA, 537 bp, Homo sapiens
atgtgagaaaaacaggcatctccctatttggaaaatcacagctgactgcagtagtaaacaatccacaagttattcctggtaacactattcctacagccctaatctgtctcaaaaaaaaaaaaatcctaatgcagttatttccttttgcattcatgaggagatggaagaaatacccatatttgatggttggctgggaactgtctttggcactgtatgaagtattttaatattgtaaacatgaaaagatgagaatcctggagaccccgtgggcatggagaaaaggaagtacattagagggtgttgtaggaaatattttcattccaggcactgctgtttaaactacccctaaactttctttccttaaaagtacagaaaaaacaaagaggacaaaagatcaagaaacattccacgtgcccctctccattcttatttgttgtaataaaggaaaagcattktggagattttcctgaatgcagtttatgatgtgatcaaagttatttattttctgctaatgattttcaaaatttgaattaaaaa

SEQ ID NO: 211286 - DNA, 477 bp, Homo sapiens
gaaatttaaaaaaaaaaaaaaaaaaaagaaaaakaggtccattaaataacataacttaaaaagctaagaaactaactgcaagtcccacaaagatattggccaatgactctctatgattttaagaaatgctgataaagaatgtcttaatgcagtgaaatataacaggaagtacatgtaatctcttacctttagtgtggcaagtaggaaataattagttcaagtcaagaaagaataccaagaaatgttatagtagccagtacaatggtggtctaacagctagtaaaacagtcctgatatgatgagagttttttcaaaaggagttcgcggagtcaccctgtaatgtaacaataattcctatcattgtgtacaaaaaccctgacatttccttcccatgactggcaagtaattatatgaagaataaattacttctttcatgaaaaagaaaatcaacactagtgtattttcttcagccactaa

SEQ ID NO: 211287 - DNA, 561 bp, Homo sapiens
acattgggtttttttaagacaaaatggtattacacacttaattggctacagtgtaatataaacataacttttatatgcactcagaaaccaaaaaatttgcatggaaccgtctggaaccaaacctacaacatctccaaggtgtgtctataaatagaaagmcatcccatgctcaagaattggaagacataatattgttaaaatggcaatcctactaaaataaaataaaatggcaatactactcaatctataggtttgctgcaatccctgtcaaaactccaacttactctttttaaagcccccaaaattgacaagctgacactaaaattcatatgaaaatgcaagggactcaaaatagctaaagcaaacttgaaaaagaaaaacaaatttggagggattatgcttcataatttcaaactttctacaaagctacagtaatcaaaacatagtagtactggcataagaacaggcatttagattaatggaatagaattgagagtccagttatacattcttaacatttatggtcaagtgtttttttttgcaagggttccaggacaattt

SEQ ID NO: 211288 - DNA, 411 bp, Homo sapiens
taaaataaaatcaatttttactttaggcaggaggggataggaggccaaggcagacctatrgagcagacagttttggcagtggggggcccatgaaagtttctttgtcacacagcaagaacgcacacagaatgaggtcaaattggaaacccaggggtaaacttgacagccttaacagaaaaagaaaatcattaaaatccaactacaaacaccatataaatcattaacccacaattttaaccatggagcagtagagctgaaaggggcttcagagatcatcgagctcacctccacctacctcccctaccaagtacacaaacatagttttacaaaaaaaggaaagtgaggtcagagaggctaagatatatgctcagagtcacacagcaagttaatggcaggactgaacttgaattc

SEQ ID NO: 211289 - DNA, 231 bp, Homo sapiens
gcagttcttcgggggttcacacctgtggaaggcagatagaggggacaggattgggtggagagagaagtaggactggggtccacctcaacaaagkcctcagctgggcctgtgagaactctgaggctggcacagggtgagaggacacagcatgtttcccgtggcttcaacctgccatggaggtgagctgcctgggaggagcgcttgactctgactgatgcagtgccgttcaga

SEQ ID NO: 211290 - DNA, 667 bp, Homo sapiens
ctctccctcttcattttcagcaattctttcctttttttcctttcttgctgaatagcagcagaagacccattagcaatcctgatatcaggaactctacaaaaaagtgtaaaattttaaaaatctaagacttcttcctactgtcagtcccactcccaaaagataggcactattgacagttcttgtgtacacttccagaattttctctgaatatataagctaaacctacatctcttttccccacacacaagggatcataccatatttcacttacaaatgtgtgtggaaatcattccttaacaaaacatgtagatacatgtcatctaagggctgagccataatatatttaactttctctaattaatgggcatcaggctgtttctagtactttgctgttacaaataatgctctaaagaacattttcatcataaagctttgtacacataatgaagcatttctttaagacaaattygtggaaatgcaattgctgggttgaagtgtatggccatgtttaactttgataaatgctgccaaattgactactgattgcctcactgtgtgagagttattactgctataatccacctcttccttatcattctgggttttgtatttttcacattaaaaaaatcccacattttcttctagtacttttagttgtgtttttaaa

SEQ ID NO: 211291 - DNA, 461 bp, Homo sapiens
gaattcacgcagagccagctgggcgggagaccgggagttttattattactgaagtcagtctctattattactaaaatcagagtttttaaagataatttggcagataggaaggcttgggaagtggggagtgctgaktggtcagattggagagggaatcagagaggatcaaagtgagcttttcttgctgtcttctgttcctgggtgggacagcagaacaggttgagtcagattaccggtctagtttctcagctgatccatccagtgcagggtctgcagaatatctcaagcacggatcttaggttttacagtagtgatgttatcctcaggagcaatttggggaagttcagactcttggagccggaggctgcatgacccctaaactgtaatttctaatcttgtagctaatttgttagtcctgcaaagccaggctggtccccaggcaagaactgattttgtttcat

SEQ ID NO: 211292 - DNA, 456 bp, Homo sapiens
agaactcacatacctcctcttctaatcctcaatacaatttgctttctactatatcacatttgactttcttcaaacatatagcgcctcaagaataggtgtagaattatggttaataggcaaattaacagctaccatgtacttttcatatgtacttagaagcacctggacacttattaaaaatataaattcttaggtgccactgcaagtctactgagtaagaatttcttgggaaacaacctggaaattcactttttgacaagtgccttacccaagtgatttttttaaacctcaaaatgccttagatgataggtgttatttttcacatttttgaggtaagaaaactgastcttggggaaactaagtctaaggtcatgcagttggtaaatactaaagctgagattctaacagaggcctctctgaacctgaagtctatgctcttcttactatgaaatactg

SEQ ID NO: 211293 - DNA, 437 bp, Homo sapiens
gagagagagcacttcggtggaaggaactccawgtgcaaaggccaggagctgggaatggaatgaacaaggtcagagagaaggtcagtgtgaccaatacagtgcagcagtgaggaagtggagggaggtaagttgagcagaggccaatggatggtagggtcttataggccatggctagggatttgcattctatcctgagtataatgggaagctattgacggtttcagtagggggaatgatgtgatctgattcacccttcataaagccacctgtggcacctgtgaagagggccaagagaatgagtggaaagccaagcaggaagcagtgatgtcatgcgggttggaaatggtgatagcattgactagggtcatggtggtggagcagtgagaaactgctggagtcaggctgtgtgctggaagtagagctgaagacttgctgac

SEQ ID NO: 211294 - DNA, 570 bp, Homo sapiens
tatacacgcatatatgtatgcatacacgcatatatgtatacatatacacacatatatgtatacacacacatatatgtatacatatacacacatatatatgtatatttgtgtgtgtgtgtatatatatacatcaatattcagtaaaccttgctataaacaaatgtcttgtcatccaggctttgttgttacatttatagtgcacaggcagagtagatttagcataattcttacgggccccaggatttttggaatggtcaatgagtattagtctcaacttaaagtcatcagctgcattagcttctgacaagacagtcagcctgtcctttaaagcatcaaagctgggcaattacttctctmgctgtgaaagtcctagatagtatcttcttccaatataagtctgttttgtctacactgaaaatgtgttatttagtgtggccaccttcatttattgtcttagctagatcttctgggtaacttgctgccccttctccaccagcacttgcctgtcgccttgtattttcatgttatgaagacaggatcatgaaccaacctttgctagcttccagcttt

SEQ ID NO: 211295 - DNA, 512 bp, Homo sapiens
agatgctttgtctgtcgaggcagcttgtgtcagtaattgtacaaccctctggtataaccaagtctaaagacatcatcctcaactctggaactgtgctgtatcaaatagggagctcagactttcctggcagtcatttcaggcaaaatcctttggtaagcactgagccattctccgagagtcactgctctggagtcttctcattgactgctaagagccagttggatggatacagctgtggatggggttgaagcagctccatgggcagcaagcaggcagtgtcctgcacagcatcctcctgggttcctggcagggcgtatctgcagagctgcagttggctttcgtgaagcttctccttggagtccctcctactttcatgagctgtccctcagcacaccgctccaaaaggaaaggtaaatacattgttaacgatttgttaaaaccatccattttatgtttactcrtattctttactatctgtggccatttaacagtcttagggaataacaaattgt

SEQ ID NO: 211296 - DNA, 586 bp, Homo sapiens
tgatttttctccaccccttcaaactgcttgctcaggtgcacatgtggaagaagaagaaacctgggcttaatcagggtaaacggtttccctgggcaaacagacatgagaattatatgtacttgcaagagagtgattatcaggctggaccatggagcccaggctggggatgagaatacgaaaggtataaggaataatgaaaagtggaaagtgagagagtcaaggccaagtctttatgaggttagaggattattggagtcagtgaatggggggtgatggtcggagagtgggatrtttaaatccagattttggaggtggtgtggttactagcaattatgaatctaggatgtgactatttgattggggctggagtgtgctggaggaaaagatctttggagcagggaattggaaagactatctgcatcagccatcctcaatgctatcacaccaaacatcccctttttataacaaatatattttaacatcatcattcccatcctgaaatgaaattcatagctactatgtcttttaaattaatataatgccctaaaagagaatataaaataaaaataataaagggaaatctttt

SEQ ID NO: 211297 - DNA, 629 bp, Homo sapiens
tgttgtagcatgtgtcagcattttattcctttttatagctgagtaatgttccaytgtatggatatatattttgtttatccatttgttagttgatggacatttgggttgtttccactttttggctattaaaaataatattgctataaacactggggtgtgtttttgtgtggatgtatgtttcatttctcttgcgtagatgcctaggagtggaattgctgggttatacgctaactctatgtttaactttttgagaaattattaaactgttttccatagcagctgcaccattttgcattgccaccagcaatgtatgagggttccaaatcttccatattcttggcaatgcttgttgttgtttatcttttttattatagctacccttgtggatatgaattggtatctcattccactattgatttttatttctctgatggctaatgatatttataatcttttcatgtgtttactggccatttgtatatctttggagaaatagttattcaaattctttgcccatttttaattaggttgtctttttatatgagctctttatatggtctggagacatattccctattagatacataatttgcagatattttctcttattctgtgggttctttttactt

SEQ ID NO: 211298 - DNA, 601 bp, Homo sapiens
ttttcaattcttggcctgtcttgcctcatccatgygccatttgtttcttctattttgttactttgaagcaaatctctgacataaaatcacttcaaaagtgataaactttcaaggtgaaaaatcaatcaatagtttagattaagtagtatcaagtacatataacacattttaactaggaaaaatatgttcctaattagaagtgaaaattcaaatattttttcaaatttttaactttttctttctcctcaggaatgcctgtaactcataggtttcgttgctttacacaatgccatatttcttaaaggctttattcagttttttaaattattttttctttatttgttttctggctgggttaatttgaaggactggtcttcaagctctgaaattctttcttttgcttgatctagtctattattaaagctttcaactgtattttgaaattccttcagtgaatttttcatttccagaagttgtttttttaaaaaagatctctctctcttctttcatatcctgaattatttatctgatttctttgtgttgtttttttaactttctcttggattgaattgagcttccttacaatccatattttgaattc

SEQ ID NO: 211299 - DNA, 409 bp, Homo sapiens
tattttggttaggatccattgctaaagacctagtgtgatcctttggtggtggtttcacagcagtcagttttttcatgatcttgcttgagatgtagacatccagatacaagaagtgcagagaacacctgggagatastttacaagaagaacatcaccaaggtacatagtcatcagactatctaaggtcaagttgaaagaaaaaattttaaaagcacctagagagaagtgtcaaactacctataaagaaaaccccatcagactaacagtggacttctcataagaaaccttataaacagaagaaattgggagcctattttcagccttctttaagaaaaaaaaatgccagccaagaatgttctatcctgcctaaataagcttcataagtggaagaaaaataacgtctttccag

SEQ ID NO: 211300 - DNA, 415 bp, Homo sapiens
gtttattaatggaagaataaaatgaagggaagtggcaaatctgagtcactaaaacaatttaggaagctgttgggataaattatgcttgcatggaccagaatagtagcaggaagatgccagaggtggttggattctaaatataatttgaaggtagaccctttaaaatttccaggtggatcggaggtgagatrtgagaaaaagagaattgtggacagcttcaaggtcaagaacctctttggtagtggatgctctttggggttttaatatgagacataaagatccatatgctctatgatcactcccaagggtccatcccacaacccctttccctatttgctccttattttctattcttattccttccaggcctctgaccaataaaccaagccattcacaccactgctcaggggccttg

SEQ ID NO: 211301 - DNA, 544 bp, Homo sapiens
tgtctttagtctcaaaggagactttggacttttgagtggatgctgggatgagttaagatattgagagactattgggaagtgatgactgtattttgcagtgtgagaagaacatgagatttgggggaccagggttggaatgatgaagtttggatgtttgtcccctccaaatcgcatgttgcagtataatccccaatgttggaggtggggcctggttgcagttgttcgggtcatgggtggcagatccctcatgaatggattggtccctcaaggtaatgagtgagttcttgctctgagttgatgcaagatctgattgtttaaaacatgggtccccaacccgtgggccagggactagtaccaatccatggcctgttaggaaccaggttgcacagcaggaggtgagcggtgggcaagcaagtgaagcttcatctgtatttacagccactccccrtcacctgtgttacagcctgagctccacctcctgtcagatcagcaggggcattagatgctctctatcgtgaactgtgcagtgaaggatctaggttgc

SEQ ID NO: 211302 - DNA, 610 bp, Homo sapiens
ttctttaatcctgataaaggactgttattcaaaatacacaaggactctcaaaactcaacaataagaacacaaacarcccaattaaaaagtgagctgaataccttaacagacaccttacaagacaagatattcagattgcaaataagcatatgaaaaaatcctccacatcatacgttaccaaggaaattcaagttaaaacaatgaggtactactataaacctattagaatgaccaaaatccagaacactgacttctccacatgctggctaagatgtggagcaacaggaactctattcgctgctattgggaatgaaaaatgatacagccactttggaaaatagttgggaagtttcttacaaaactaaatatactcttactatatgatccagcagtcatgctccttgttatttacccaaagcagtttaaaacttaatgtccttacaaaaatctgcatggacctattttcctccattatcactggttttattttcctccattatatcacacagccctacagatgtcttcttcaggaaggagcaggttggctaacaaaaatcttcacctgttatcactctgtggatgtttatcttttaatagggcaatattcaaa

SEQ ID NO: 211303 - DNA, 401 bp, Homo sapiens
ctctttgcatagtattaagagcaagcctggaacatggacccttttctcccttcttgcrgtcattgccccctgttaaatgtagccaaaatgttctgagatttttgcccttagagcacacatgcctttggatactcaacccaagtctcttacaaaaaagatccagacaccaattaattatatataggtcattgatatgtttattcacttcaaagtcatttcaaaaagagaagaaacaaaacaggtctcagtctgttttttggaatgtactcatcagtgaaatttcatttcagtgatggtctttaaaggcctcatgcctgactgtcttggagcccattagtgttctgaaaaggatctttatgttttttagatccttcagattttttctgtgagtatttgtgtaa

SEQ ID NO: 211304 - DNA, 500 bp, Homo sapiens
gttctcaaacttgagggtgcatcataatctcctgcagagcttgcttaaagggcaggttgctggacctcacccccagagcttctaattcagttatgtcaggaatggggtcaagaatgtgcatgtatrttactttccctggcaatgcactctgagaaccacatctatgcttagttttggaagtgaaactctatgtgcaacttgtgaccaataaatagcctcattgtttataaaggactatccttcctgtgtggagttaacagttcaaaacaggcctatttagttatttgctaaatataggtctaatcaaacattaactgatgataagattaattggtagggctatgcttactcagaattataaatttgaatttttgctacatataatttttaaaattatagcatttattgagaaactgctatatggcaagaactgtgttacgtatttttttatatacagcatttcatttaattttcatgaaaaaatctatgatataaatgcc

SEQ ID NO: 211305 - DNA, 382 bp, Homo sapiens
tgtgccagtggatgttgtgtgggtttcagaagatgtgaagaacagattcaagacatgaaaggtattgaaatcaagaggctgcccttctctaggttgaaagaaattttgtggcttctatttgttcttgcatgttgaaaagttaagagtagatagatgtagatttaaaaatatttgtcaaatgaatactaatttgctagattctttcacatacaatttgccatccagtccttgaaacgactctrtaagaaagatgttaacttcatttcactgatgaggcacctgaagctgtgtgatgttatggaaattgcctggctagaattggaggtgatttgagcctagtctcagaacaatagtctactgttgcatttccatggagcaaaac

SEQ ID NO: 211306 - DNA, 624 bp, Homo sapiens
tgctctggttggaggttgttggcatggcaaggctggaggcaggacaccttaagtgactggtttgggatgcatgtttggctttctctggttggccctgagatgggagcagggacaaaataaaaatagagaagctcaaagtcattgaataagtggttttcacctttgtgttcccagtacccactgcagttcctggaggcatttgtactagtttccttttgcagctgtaaaaagttaccacaaatttagtgggtyaaaacaatacaacttcattatcttacagttctgtaaattagaactctagtatgtgtcctagggggctacaaccaaagtgtcaggactgcactcttttctggagagtctaggcatgaatccattttctttccttttccagcttctagaagctgcttgcattcttggcccatggtcccattttccagctccaaagctagcgactttaaattcagtagtcggcatctctctctaattctcttctgcctccctcttctaattttaggaatccttgtgattacattgggcccacccagataacccaagataatctccccaaaatcagctctgtagtaaccttaacttattgatttattaattaataaattaattata

SEQ ID NO: 211307 - DNA, 400 bp, Homo sapiens
ctactacaagctccagggattaggacatgaacatctttgagggtaattattcttcctactacygcactaaataagcaaagtgtagtccctggaccagcaccattagcatcacgcagaaacttgttggaaatgcaaattccacggcctcatcctacatttgctaatccataatctctgtgggtagatcccagcaacctgtgttttaacaagtgctccaggtctcatgctcaagaaacattgatctatactccatatccattctacccactccaaaagtatatggtctatatatgaagccttttgatattgccacaattaaattcttagaaatacactctttaccgagtaattacagagtaatctttccaaaatgtgatttctaatctaatagaggatatca

SEQ ID NO: 211308 - DNA, 581 bp, Homo sapiens
gtgcattagccacctagtctgtggtatttttgttattgcaacccaaaagcactaagacaatgactgagatataaatgactacttgtgctaattgccattgacttttccttatagtactttaaatcatcatcccatcagaacttacaacagttttataatgaggatgaggcagatattactgattattttaatgataggggagacgaaaactgaggtatggagattaaatgacaaccaatcgaataactacacctgagctgagactaaaactctagtttcctacccctagccagccaatgctgtctcattcagctttgccgcctctcccaggaaaatagtgtctggtactcatggaaatactgattcctctgtccccatcatcactagaggactctgcacccaggaaatgctgacttccaaccagagatcagcatgctgactcctggcaccatgcccagggtctggtaaatgtggtagatggcacacacaraatgtcagggtgtagacattacaacacccaggttgaacaaatcactgccttctttaaatagactttctgtaaattatgaaaatgaaggtaa

SEQ ID NO: 211309 - DNA, 431 bp, Homo sapiens
gatcatccgagtctttctggtttcctggactcttctggtccactggctgtgaattattcaagggcaaagagaccatgtcattcatttgtaaaccgtgcgccttgaccagtgctgaaaacacagtcaaatgtccactaagcctggctggtggttcttatcccatagttcctctgaattaattcattatcatttgaggtactgtgtcaaatgcttaacctccagtgctaatgtgtatctccagcccttcgtttggaattctcttctagtataaaagcgatcaatttttttcctggcgtggtggctctttataaatgcttgctgtttattgtgtctgctcccattattctctctccttccacatttaattcactcttatactttattttgttttgttaratgctattgccaaatcacaaaatacatacagatag

SEQ ID NO: 211310 - DNA, 592 bp, Homo sapiens
tgttttcaaatcgcctccatgaaacctctttcattagatattttgcaaattttcttaatttgcaaatatttttaatagtagacttgatagaaaactactgggttctcattaygttcttttggttgaaggatatgaagaaagtctctccttacacaaatgtgaagttggagaagggaggtgtattttaatagtctcttcaaataactgtggatattactttttaatcctatatctttagggcctcccagttcccccactttctttctgtgccctaagtgaaaatcacagagtatcttgacagctctgtgacccagccagctgcagatattttcccagcaggcttgaacccaaaccagggccttgaacattcccaagcactgataacagtatctagcttgtccaaaacactgaaagaaactggctccagccctgagccaaattctttaagccctcatataaattccatgccctgaccccctcactgtccacaggtggaacacccttttctctcactgtccatctcaaggattgctacagcactctataaagaagttcccctaataaatgctttgaactgatcaccctggcattt

SEQ ID NO: 211311 - DNA, 554 bp, Homo sapiens
agcgggaaaaggaaccagagccacaagcaatcttgaaatccagaaggacaaacaccatttggtttcaaggcctggcaataatcatctgtgtctctcaactctgtgggccattattctctctacacactgatactcaaagattcccttctggttttctacctgtttagagaacttcctttagtcattcttttaggataggtctgctaccaacaaattcttagtcttccttcatctgagaatgtcttaatttacccttcatttccaaaggaaatttttgctgtgtatggaattctgacttggcagttattttctttcagtacttggaaaatctaccatttcctctggcctacatgatttctgtgagaaatatactattaatttcattgtttttctcttttaggtaaatttttgtttctctctcacttcttttaaagcttttttttyttttttgtctttagttttcaaaaccttcaccaagatgtgtcctggtgtggatttctttaactttatcctgtttgaagttcaatttcttgaattaatcttcttgaatctgt

SEQ ID NO: 211312 - DNA, 512 bp, Homo sapiens
gaaaaaatgtgttgtcattccagaatgtaaaattaagataactttttcagagttgttatttactcaacacttaaygggtaaaagtttctagcacccactatgaaccagtagcataccaccttgatttaatgataatcagtgaattatttcatataaatagagattgtagttacagtagaaagagcaaaaatataaaaaaaaaggttttgggaaggaacgaatagtagtttataagtcaaattgtattgagggagagaagctgaatctccaatacaatcattgtaggcctaagttggaaaacagatttcatttctaaatacaatctgttaaggagcagtgttcaataggcagagggtgttggagatgattgccaagctccttccaggctcactgagaaagcatgccctgattgattagtgatacttccagggtttaaggggaaggattgtacatgaactatgtctttgctaactttccatggaggtaaaatttacaatgagtcaaagagaatt

SEQ ID NO: 211313 - DNA, 512 bp, Homo sapiens
gaaaaaatgtgttgtcattccagaatgtaaaattaagataactttttcagagttgttatttactcaacacttaatgggtaaaagtttctagcacccactatgaaccagtagcataccaccttgatttaatgataatcagtgaattatttcatataaatagagattgtagttacagtagaaagagcaaaaatataaaaaaaaaggttttgggaaggaacgaatagtagtttataagtcaaattgtattgagggagagaagctgaatctccaatacaatcattgtaggcctaagttggaaaacagatttcrtttctaaatacaatctgttaaggagcagtgttcaataggcagagggtgttggagatgattgccaagctccttccaggctcactgagaaagcatgccctgattgattagtgatacttccagggtttaaggggaaggattgtacatgaactatgtctttgctaactttccatggaggtaaaatttacaatgagtcaaagagaatt

SEQ ID NO: 211314 - DNA, 611 bp, Homo sapiens
tgtctagctttggtctctttcccagaggtccagcaggctaatcatgaacaaaggtaagtgtctgaggcatggtctgtttggtagcatcattcaggtttcacactgctggctgccctgataagactctgcttggtagcctgtgctatttcagtaaaagcctaccatgaccttcagcacccagcacagtactctctcaataagtactttttgatagacatgtatttgttatataatatagcttatataaataaagaagatctaggatgtgtgtgatcactaaatttttctttataataaagtgtttttttttgctttctaattttctattatactccactgatgtgaaagttggaaragacagtgttccctctccatcactgtcctttatttgttttttcccttgtgatcaagatgtgtccatccttgtagctaaggccagcttaattgccagaggagttttgcctgctactgtggaatgcagaactggacaggatcttagagactgattaggttcctcccttcatgtttttttttttagaaagaccttaaaaaattgagggctttgctcatggccacttagattcctactttcagagctggaacatatacat

SEQ ID NO: 211315 - DNA, 564 bp, Homo sapiens
tgttggccaggctggtcttgaactgctgacctcatgttcctcccacctcggcctcccaaagtgctggaattactgcccacctcagcctcccaaagtgctgggagcaccgtgcccggccactaatttttgtatttttattagagatggggtttcaccatattggccaggctggtctcgaactcctgacctcaggtgatctgcccacctcggcctcccaaagtgctgggattatagacattagccactgcgcctggcctaaatacaaattttaaaaagaaataaagacatggtgaaacaataaagattctggaagataactttggagactgtcttcatgaytggaggcagtagcaatttttaaatagaatacaaaaaacactaaccataaatagaaagattaatagattatattaaaattaaaatttttatccatcaaaaacatcattaggagagtgaaaggacaagtcacagagaagaaaaagatgtttttaacatatataattgacaaatgcttgtacctttcttggcaactgcagagtctaatcaacattaaggatattaaca

SEQ ID NO: 211316 - DNA, 639 bp, Homo sapiens
ggggtctcaattttttcatttctgctgagactcgtgtttctctggctatttttgtttcatgctttcttgcactgatttatttctgggtatcagggatattgtgactaatgtcagagaattaatcacctctggaattagttctagtttgtattttaataatttcctcatcattctatattattttaatagacaaattacaattgtataagtttatgaggtacaatatgatgttttatatacacgtgtagacaatacaaaataattaaataaagctaatgaacgtatccataccctcacttttttaaaatcattttttgtagtgcaacctgtgaaatttgtactcttagctactttggaattattgactatggtcattttgctgtgcaattgttctcaaaaacatattcctcttttctaactgaaattttataccctttgaccaacaactcctcagtctctcctcccacaacaaggcccttgtaaccrccattctactcactacttctatgagttcaaatttattagattccacatctaagtgaggttgtgcactatttctctttctgtgcctggcttatctcatttagcgtaatgtcctccaggctcagccgtgtcaccacaaatgatataatttctctc

SEQ ID NO: 211317 - DNA, 358 bp, Homo sapiens
tttgagaaaaatcacttattaacagcatcaattgcatcttctaactgaatgtcaaaattaagtagaattaatgacccaagcacaaacaacattggaccatagaagcacccttcatagaagcagcagagccgatctatggaaaagcagattagaaaataatcttccataggcagcttactcctaagaggaagaggaaaaagccaacccaggcatttccatttaactgtaccaaatagtccagtcagagaaatcaccacatttctctgggataaaaagagtaatgggatagagtaaaggcaccaagaacacagatygcatttgtctactgaaaaggggaatattcatatgtggagaaaag

SEQ ID NO: 211318 - DNA, 609 bp, Homo sapiens
ggtgatttatattattctgtcttccaggtcattggttctttcctctgtcacctcccttctgctattgagcttatccactgagttttaaacaattttcattagtatattttttagtcctaaaatttctatttggttgttctttatatcttctaattttttttcttagactttctatttctgtgttaaaactttttatttttttcatttaaatgtgcttataattgcttactgaaacaattttatggtgaatgctttaaataattgtcagataattctaatgtctctgtcatcttagcatttgcatctgctgattgtctttttctattcagtttaagatctttcttattctttgtatgacatgattttccattgaagcttaggtattttgggtattatgttattaacattggattttaaaatttcattttattttgcttttcttttattggtacataatrttttacatatttatggggtagatgtaagtatttgttacatgcatagaatgtgtaatgactaaatcagggtatttgaagtatacatcaccttgagtatttatcatttctatgtgttgggaacatctcaagttctctctgctagctactttga

SEQ ID NO: 211319 - DNA, 633 bp, Homo sapiens
ttaacattggattttaaaatttcattttattttgcttttcttttattggtacataatgttttacatatttatggggtagatgtaagtatttgttacatgcatagaatgtgtaatgactaaatcagggtatttgaagtatacatcaccttgagtatttatcatttctatgtgttgggaacatctcaagttctctctgctagctactttgaaatatacactgcattgttgctaactatagtgattctactctgctatcaaacattagaacatattcttctaactgtatgtttgtaatcattaaccaacttttctccattccccttctcacccacacacccttcccaggctctggaatctgttcgtctattccctatttccaacaggtcaactttttaagctctcacatatggtgagaatatgttgtatttgtcattccatgccttgcttatttcatttaacataatgacttttagttccatctgtgttgctgcaaatgacatgattcctttttayatcagaatagtgttcagttgtatatttataacaaattttctttatccattatctattgatagacacttaggttgattttatttctttgctactgtgaatagtattgtgataaacaagcaa

SEQ ID NO: 211320 - DNA, 620 bp, Homo sapiens
aacccaattattttgggctctggattgtcaggcgggagacctgagttactcactttgtgttttcactgcttccctggttttaaaaggtcattgtgacaagagcratagaaggagcttgttcaagatgctgattcctggccaccacgccctgtgcttctggtgcagtaggtcttcagtaggacacagggacttgcatctttagccggatctctgggtgattctaatgtgatttttttttttttttgagatggagtctctctctctcttgccaggctggagtgcagtggtgtgatctcagctcactgcaacctctgcctcctgggttcaagtgattcccctgcctcagcctcacaagtagctgggactacaggtgcgtcccaccgcacccagctaatttttgtatttttagtagagacggggtttcaccatattggtcaggatggtcttgatctcttgacctcatgatccatgtgcctcggcctcgcaaagtgctgggattacagttgtgagccaccgcgcctggcctgatgtgatttttgactgtatcccagatacactgaattaggtgatcctgacaggtaaaagtcaaggctgaatggagacatggggtgaaatagtat

SEQ ID NO: 211321 - DNA, 510 bp, Homo sapiens
ttctggaaccaatcccctgctgataccaagggactacctatcgtatgtgctttagggaaagttgtaaagtgaaaactttctgatagtatttttaaagcatttgaacatgtcatccaaattatccaaatgtgtgcattttatagtataatgatatctcatatttaatcatgcagaagcaccttctgtggaatctatgaattttagaggattttggagagttttaacaagagagacattttgtgtagtgaagagcgcaatgaactgggagttggtctgtggcctcttctgaggatgattttttcctactttctcaggcaaaattaatcacagtattgttaaccttgaggggtggtatgactgaagggggcttctcargtgctggttttggattgtggcgctaattacacaagtgtgttcattttatgaaaatgatttatatacttatgcatgtatgtaacactttaaaaagttttaaaaaactgctgtctaaaatttaagaggaaaatacag

SEQ ID NO: 211322 - DNA, 636 bp, Homo sapiens
ttaagcccccataatatgtagggtgctgtgtgagggggtagtgtgttagaggcacagtgttaggggcactctgttatgtacactctgttaggggcactggcatcttaaggtgccaactctattacaactctcacctatgacaaagagtcagaatgtaaacagaaagctcccttatctaatggagaccaaaatgctaagacagcagttcaaagttctaaatagtttttcagactctctcaaagatttcctggggatatttcaaaattcaattcaattcaattcggtaagtgttaatatattaaggctgactatatgcctagcagagtgtctgtactgaggatacaaagatgaataagrcaacttccctgcccctgaagagctctcagtctaatggggactatttatctgtttcagttgcaaatgcagagattctgttacacacctagatagataaatgtatcaatgcctctattcccaataaggtttgaaaagcattacattaagtgcctacaataaaatcccatggagagaaaaatgtaaagtaatgaagaaaaggggaaaaaggttagagtaggaaaattacgcctggagaaattattagtacatgagactaatatttctaattagtttaatgtt

SEQ ID NO: 211323 - DNA, 565 bp, Homo sapiens
aattctgaaaataaacatctgcaaggaccatagtggtaagtccaagggcccargtgcctatttctctggcttaagctggagctagaaattcacctgtagtctgggagatgatctgtcttaaattacaagctcctaaaggaaagagtagttgtgagatgctttgctgctttacttaaccttaagtgcttatggcagtttaatcacctgtccgccttatgccagtgattgctctctctccctctctctctctctctgtgtgtgtgtgtgtgtgtgtgtgtgtgtgtgtgtgtgtgtgggtggtgttttgttattacatgtgttggagtgagacagattggggtttgtctctgctctgttacctaagttgtgttaccttgggcaatttgcttatcctccctaagctttagtttttattgtctgtggatttgggagagtaatatctgcttcataagtttattgggaaaaacaggtgaggtagtatacacaagcacaaagctctgtgctcagggtaaagcacttgtttaacagtagctattaaggtgatgaaactactgtaatattggta

SEQ ID NO: 211324 - DNA, 551 bp, Homo sapiens
cccctctgtaaaattaatacaatgacacttgcttcccaggactgaaatactgattacatgctttgatccatgtaaagcttttaggatggtataggaaaagtagcaagggctgaataaatggcactcattattattatttagtaatgggttaatctagccagyaagattatcccattagaattatagtcatagtgaagatagtcatattaaaatattatcaaatttgagacttgctgacttttgagaaaccacccatttagttttcttgtatgtagtgatacattgtttatcacaagaaatttaaaatctatgcagacaataccacattttgatttgcagttttacttagggaacaggaatgagttaaggcttttaggaggacaggatgaagtggtatctactcagaccactaaaacagcattcccattctgtgcttcacagacactggtattttatcacttgctaagaagcatagcaggagaaagggttctgcagtcaaatacattcaggcaatttctgtcattgcaataactggatggattttgccttgg

SEQ ID NO: 211325 - DNA, 494 bp, Homo sapiens
cccattatacttaattcccctgctccaattgctccttggctttccattgcacttaaatccaaatgccttccttttccctgcctgtctctgatcttctctcatgttccattctgctccattaactccactctggctctgtagcccttagttctgtccttgaatatgacagtctcacttctggtttagtgcatttgcctggtaatcacctgcccagagagctctcccttcagagctctgttttstagccaactcctcagaccacttacccttacatgctgtatcacatctccttgtttcatgttattttacttttggaggctaaattatcttgtccatttgtttgttacttcttcctagcctgcctggggtgtaagtttttgaaaacagggatgttgtttgaccatcaagagcttggaacagtgcctggcatttcacaggcatgcaaatgtttactgtatgaatgaatgaaatactagctaaataacagcagatgc

SEQ ID NO: 211326 - DNA, 459 bp, Homo sapiens
agagccacagtagagattctgtactagcagaggagagaacaaactggaaaatcagtcaggagctgaagtggaggagtaagtgtctgtgacagcacctgagaattaatgttgagagagaaaaatgaagatcttgcaaatctatacttgctgtcagattctgcaaatgaaatcatattaayactaaagcaaattgtgtggtttttggacttcgacaaaaagagaagaggaaatgttaaggcttaagggagaaaaaatcaaattctttctatgaaatacaatagtaaggtagagagtgggagaaaaaaaatcgctggaaaaggccagagagtaaactttacatatttggtaaccaggataatagatgtaaagggagtcattgttgaagaagaaataaatgattctatacatttttttaaaaaaatgaattggaaccaacaagtttcatttaaaaaaagcact

SEQ ID NO: 211327 - DNA, 671 bp, Homo sapiens
tagacttgattatatgattgctttatagcgcctatgagctgtgtgactaagcatgtttttgtggtaactggtgtcattttttggtttcatgtttagcattccctaaaggactggtaaggctggcctagttgagatgaattccctcagtgtttgcttgtctgagaaggatcttatttctccttcacttataagcttagttttgcaagatatgaaattcttggttggaatttcttttctttaaagatgctgaaaataggccccaagtcctggtttttaaggtttctgctgagaggcctgctgatagcctgatggggttccttctctatatgacttgacccttctctctagtggcccttaagaatttttcttttgcattgatcttggtgaatctaataactatgtgccttggggaaagtcatattctayagtatctagccagggtttttggattttcatgtaaaccttcaacctttctagcaagattagggaattttttatggactatatcctcaaatatattttttgagttgtttattctctttcattctctctcaggaatgccaatgagtcacagatttggtctctttacataattccatatttctcaaagcttttattcatttttaaaattcttttttctttatttttgtctgactaagttgattcaaagg

SEQ ID NO: 211328 - DNA, 459 bp, Homo sapiens
ctttctttcctaatttgaaatgtctatttatagtttgaaaatcaggcaaatacctatgcagatgataatgtcagaaactgttttcatctctgataagccgagtttaaacaactctgtctgagggaacattctttgagctcaagttcctcctccaattatctctaaatagacctcaaagcaaatgaagatactctcacyataggtaacttgcagaaaatttacagatgcaatcttttctcttttttgctttcctcaatcattgtcctactcataatgaaaatcttaagtgaaatagttaagtatcatatttcaatactctcctaaagtaaaaacatggagatggtagagtcagcaaaaacttttggagtcagcaaaaatttaatgtgcatgcgctctgacattgttcattaggtattctgattttatatttgcagtaggggtaaaattgctcaacaataa

SEQ ID NO: 211329 - DNA, 620 bp, Homo sapiens
aactttgaaatgtcatctcttctttgccaaatattcaatccttttccccaggaaattgctagttctgagatcactgattgtatctttgcaattgcgccataatccaaatatgaaattttagtgattgttaacttggccagaatgcaatagaaaaagtctcaaatccaggcattttataaagaagagatgttttatawcttaattaaaaataaagtctgttcaccttccatgctgcaaacataacacttcaaaaaataccttttaaatctaattttaaaagatttttaaatacatttttaaaaatattttgaaaagggatgatgtatttattataaagaaaaacctgaaatagtttattcatgttacaacatctctcaacaatgggcaaattttagaactgtctttctttagaccactgtttcaaataaatttcttctcttattttatccacagtattgtatcactatttgtggttataattacactcatacccaaaaaatgttactgtaagtgacaatttagttccttaagttaaaactacatgagcagtttaaaagagaacacaggagaaagctccataacattgacttggaatgatcttttggatatgacaacaaaag

SEQ ID NO: 211330 - DNA, 620 bp, Homo sapiens
aactttgaaatgtcatctcttctttgccaaatattcaatccttttccccaggaaattgctagttctgagatcactgattgtatctttgcaattgcgccataatccaaatatgaaattttagtgattgttaacttggccagaatgcaatagaaaaagtctcaaatccaggcattttataaagaagagatgttttataacttaattaaaaataaagtctgttcaccttccatgctgcaaacataacacttcaaaaaataccttttaaatctaattttaaaagatttttaaatacatttttaaaaatattttgaaaagggatkatgtatttattataaagaaaaacctgaaatagtttattcatgttacaacatctctcaacaatgggcaaattttagaactgtctttctttagaccactgtttcaaataaatttcttctcttattttatccacagtattgtatcactatttgtggttataattacactcatacccaaaaaatgttactgtaagtgacaatttagttccttaagttaaaactacatgagcagtttaaaagagaacacaggagaaagctccataacattgacttggaatgatcttttggatatgacaacaaaag

SEQ ID NO: 211331 - DNA, 507 bp, Homo sapiens
ttagcaatcagcactaagtcttaccactcaagatcatattcaaatcctcactgcatgattcttaaacttgcctttcagaataataattagcacaataataagttctatgtcctccgataaaaggacagagtacaataagaactwgaaggcaaaagtaccaattatatttggggcgtgggagcaaagcgaacagagaaaggtagagaggttttaccggaaaagagcttagtgtagtaggcaaaattctaaaaatttccccaaaattctatatcctaatccctagaacctgtaattttgatcatctatagctcccataattaaattatgttatatggcacagctgccctgagataggaagattatccaaaggagccagatctaatcagcagagagctttctctggcttgtggcagaagaggaagtcagagaaatgccaaacatgagagcaatgcaacatgtcattgctggtttgaagatgaagggagccacatgggaaggaatgcggga

SEQ ID NO: 211332 - DNA, 474 bp, Homo sapiens
aaatttttctccactttagtttcagtcagaatcataaccttcatacaagggcatttaacactaacaactgttgcrcttattaaacatgaagaagttaacgcttcaactcacctcaaaataaagttcacacaaagcaaaagatcagggtcaaaaacaaaatgcaatgaccgtgaacaactaaaattgctatttgttgatgactggcagagctagtacacttttcctctgtacagtgctttatgtctctggaggttattaagcagaaaataatattaaaagagctagatgtttgctgggttgttactatgtgataggtgttatgccatggactttacctgcattctctcttttaaactcaccgcagttctgaaaagcaggcacttctattgttaacattctacatagttggaaatggaagcatgaaaaagtcatcagccttcctaagtcacacagctagaaaatgcatttgatttg

SEQ ID NO: 211333 - DNA, 393 bp, Homo sapiens
acaggaacctgaccccattatttgaaaccctggatgccatcagttgtrcctggtataccttccttttgactctctggttaaataaaccaataaattcccttttaaagttagtttgggccaggggtggtggctcacacccataatcccaacactttgggatgccaaggtgggcggatcacctgaggtcgggagttcgagaccaccctggccaacatggagaaaccctatctctactaaaaatacaaaaattagcaggtgtggtggcagatgcctgtaatcctagctacttgggaggctgaggcacgagaatcacttgaacctgggaggtggaggttgcggtgagccaagatcgtgccactgctactagtttcaatcacctacaaccaaaataat

SEQ ID NO: 211334 - DNA, 393 bp, Homo sapiens
acaggaacctgaccccattatttgaaaccctggatgccatcagttgtacctggtataccttccttttgactctctggttaaataaaccaataaattcccttttaaagttagtttgggccaggggtggtggctcacacccataatcccaacactttgggatgccaaggtgggcggatcacctgaggtcgggagttcgagaccaccctggccaacatggagaaaccytatctctactaaaaatacaaaaattagcaggtgtggtggcagatgcctgtaatcctagctacttgggaggctgaggcacgagaatcacttgaacctgggaggtggaggttgcggtgagccaagatcgtgccactgctactagtttcaatcacctacaaccaaaataat

SEQ ID NO: 211335 - DNA, 556 bp, Homo sapiens
gggttggggtcaactgatccaatcttgttattttacaggggagaaagcctcagagaagctaagtcccctgccaaggtcattgaactaaatagggcagacctggaattcgggacttctgtcttctaggccagtgctgttttcatgatgccttatacttaataattaaactcttatacctgatttatgttcaatgtccttggcaagtcttgaaatagattatacctctcttaggtttcatctcttctcctggggagaaaacatatcctttcagtggaaagcagggaagcttatggaratatcatttttaactcctcagacagaatttgaaagtcagatgttaagccggcatcagcaaaaccagggtcagggtatgcaaaggggatgctagcactgaaattgtttttgtatctcacatccttagctttattattgggaatctttgattaatgtccaaattcaggatatagcatcatttcaacaattttatgaagacttgttggccacaaagatgagaaattcagtcttgcacaacttaaaggagattattaaaataaca

SEQ ID NO: 211336 - DNA, 573 bp, Homo sapiens
taaagtgacaatttagcaatatgtattaaaatataacacatctacatccaggaattcctttaaaagraatatccctacatgtatgcaaagatatgtaaatatagaacattattcattgcaatattgtttataatggcaaaaaacttgcaggctttttgctattacaaacaatattggaatgaatattgtaatatttttatgttacaatgggggactagttaaattcaaaataagctgaagaattaatagtaatgatttctacaggaggagttggaggatcatgggagaattccagtttttttttctttttatgtgccttatttcaatctttcccatactaaagtagcacttttacaataagaaaaataattaagatataaaacattacttttagaaaagcctcacaattttttaaacagaataataacaccaaataaatgttcacaagtggatactcagcattatattgaaaggattaaatgataatataataaactataatatgataacaaaggataatttcaggaatccaagaatgttttagtattagagaatatatttacaatatgtgaa

SEQ ID NO: 211337 - DNA, 573 bp, Homo sapiens
taaagtgacaatttagcaatatgtattaaaatataacacatctacatccaggaattcctttaaaagaaatatccctacatgtatgcaaagatatgtaaatatagaacattattcattgcaatattgtttataatrgcaaaaaacttgcaggctttttgctattacaaacaatattggaatgaatattgtaatatttttatgttacaatgggggactagttaaattcaaaataagctgaagaattaatagtaatgatttctacaggaggagttggaggatcatgggagaattccagtttttttttctttttatgtgccttatttcaatctttcccatactaaagtagcacttttacaataagaaaaataattaagatataaaacattacttttagaaaagcctcacaattttttaaacagaataataacaccaaataaatgttcacaagtggatactcagcattatattgaaaggattaaatgataatataataaactataatatgataacaaaggataatttcaggaatccaagaatgttttagtattagagaatatatttacaatatgtgaa

SEQ ID NO: 211338 - DNA, 573 bp, Homo sapiens
taaagtgacaatttagcaatatgtattaaaatataacacatctacatccaggaattcctttaaaagaaatatccctacatgtatgcaaagatatgtaaatatagaacattattcattgcaatattgtttataatggcaaaaaacttgcaggctttttgctattacaaacaatattggaatgaatattgtaatatttttatgttacaatgggggactagttaaattcaaaataagctgaagaattaatagtaatgatttcyacaggaggagttggaggatcatgggagaattccagtttttttttctttttatgtgccttatttcaatctttcccatactaaagtagcacttttacaataagaaaaataattaagatataaaacattacttttagaaaagcctcacaattttttaaacagaataataacaccaaataaatgttcacaagtggatactcagcattatattgaaaggattaaatgataatataataaactataatatgataacaaaggataatttcaggaatccaagaatgttttagtattagagaatatatttacaatatgtgaa

SEQ ID NO: 211339 - DNA, 573 bp, Homo sapiens
taaagtgacaatttagcaatatgtattaaaatataacacatctacatccaggaattcctttaaaagaaatatccctacatgtatgcaaagatatgtaaatatagaacattattcattgcaatattgtttataatggcaaaaaacttgcaggctttttgctattacaaacaatattggaatgaatattgtaatatttttatgttacaatgggggactagttaaattcaaaataagctgaagaattaatagtaatgatttctacaggaggagttggaggatcatgggagaattccagtttttttttctttttatgtgccttatttcaatctttcccatactaaagtagcacttttacaataagaaaaataattaagatataaaacattacttttagaaaagcctyacaattttttaaacagaataataacaccaaataaatgttcacaagtggatactcagcattatattgaaaggattaaatgataatataataaactataatatgataacaaaggataatttcaggaatccaagaatgttttagtattagagaatatatttacaatatgtgaa

SEQ ID NO: 211340 - DNA, 625 bp, Homo sapiens
gttatttgacaggcaacaagctattgtcttccttattgaagggcaggtgtgagtttaacttagtttacactgacaccatgtgggacaagctgtgtcaaagctctgactctcccctatacctcttctgacattgtgccagtggagagagggatagcgcaataatgatatcctggcttctaaactgaccttctttgaggtcacttcagggatattgggatgccttgttacagtggggtgaagctcacgcttcccactcaggttttgcttgcatgtgcgggatttaggttaatgttttttttgttgttgtttgtttcttttttgttgttgtttgtttctccgtgttgtttagatgtaggggattggttatttctgaaagttgtctgttatgctagctgcactcttcctgatgttttgactagagacaggtgagtctgtgggggataggggagctagctatggtatttgtgttgtcagtttcttcaagtcaaaatctgaatttttgtgggaaaaaaaggaaaccttagtgaamtcagcatcttgtctttttgagggtcaccaagtcctctctccaactttttagagccttcttatgtatttttgacatgctttgtccagtttttatatt

SEQ ID NO: 211341 - DNA, 466 bp, Homo sapiens
atttatcccaaatattggtggtcattttacttttttgatattacttacagcacaaaaattttaattttgatgtaatctaatttatctattttttaattttactcttatcattttgatatgacgtagtagcactgggacttctaaaagtatccacattcaaatcaagtgatagaatcaccaaggtagacacagggcccagcatcaatggtaattgtgtcttcatcagactcgttccttggtaaaatgactgtaattctgtcaaatcacatctgagggattttttttttttaacaagttgactggtatttttgttaactcaacaataatatatgaagttattttctgctgaatttcggaggctatttctgctrcatatattattatgtaaactgcctgctacagctaccaagataataaataattagtcaaatttatccgacataatcttttgaaagactatttggaa

SEQ ID NO: 211342 - DNA, 535 bp, Homo sapiens
cttggaataaaatttgttaattatgtccagaagtaatttttaaagtactttctgttttgctggcacaaattcaccattcctatgacaattctgattcactgtattaggtttatattgattgatattacattaacctttgaagctaactgctaacaactaccttcaccaggtctaaacaagaataataattgacttcaggtataagtctcattttctgaaattaattgctttcatttatggtcttcggaacttataaagttacttaattcatgctaacaatatcaaatttatctagaaaaaaatttaggaaatcttatcacaagatttttwaaaaattatgtacatgtataccttacaaaagaaaataatatgtattatatgatggcttacatctttgagaaacgacttctgaggcagagatttacataaacattagggagtacactcaagaacagcctctgtctgtgagtgagtgaaataggattgtgtagaggctggtgtttaactttaatgcagttgccttatctgacctata

SEQ ID NO: 211343 - DNA, 484 bp, Homo sapiens
gtccttggtaaccaccagcctactctagttctaggagatcaactttttagattccacacatgagtgagatcatgcactatttttctttctatgccttggtcatttcacttaacgtcctccaggttcacatatattgttgcaaatgacagaatttccttcttcmttatagctaaatagtattcccttgggtgcatatattgtattcctgaaaaatgctaatagggtgcatgtaaagtgttctcaccacaaaaacaataactaagtgaggtaatgtgcatgttacttagctaggttgagtcattccacaatatttatatactgcaaaacatcatgctgtacacagtaaatacatacaattttacctgtcacctcaaaagtaattaaatttataaaaatcagggataatttcttctctgaaaataagaagttaatcatatctttcagagactgacaaattcttcctagagctgattttagaagattg

SEQ ID NO: 211344 - DNA, 595 bp, Homo sapiens
acacatatgatgaggctagacttttacaaaaccaggtgtttggattaaagtgaagagagccaaattgcccttccaacatctctacccactttctgtgaaaatttttwaaaaaaccctaacttaaaattatttttaaaaagaaataatatgttaataaattctttaaaaaacaaaaccaaaggaaaaaaattttaagtacaattttaaaactgaactatggtctgtgaggctcttagaagaaaaaaactcactggactgatagtgctgtactgtagcacgtctcaactcctagacagtttaaccaaaaataccaaaaatgatatggcagaatttcaacggatcatggaatcctttcacttagggggaaatccctataaataggccactttcaattcatctaggctttttctggaagcacatgtgtttcccatagacttagggttacactctacatatgtgttgcagtctttcttgtttcccctgaaataatctaaggtgaacatattttcataattatgtattcttctacagtagatttttaatgagtgcacaatacttcattctcatctactgtcatgtcttaaaggattctcta

SEQ ID NO: 211345 - DNA, 571 bp, Homo sapiens
ctctagatgagacgaatgacaactcattacataaaatggacgcctcaggacagtagggcttcattctttcctaggactctgttgaaaaaggtaatttcctttctataaaactgtcttgaggaagtagctgacaaaccagacacagatttctatttgaaacatgttaaaggcagcaaacatcccaaatgtccaacattaaagggatgactaagtgaataaacacgcctgcaccatggatgcttatgaaataattaaagtggtattttcagagactaatggcacgggaaaytgttcacatgtacggttaagtggaaaaaacagaatttcaaatttgaataatttgatagataactagaagataaaatcatacatatacacaaacctagactgaaatatatcaatatgttaatagcagtcacttctgggtggaagaattatgattttaaaatgtattttttgtgggcctctgtggccctaggacaatgtctcaaagcgcctggggtgcttaaaagtcagattcctgagcacctccctagacctgggagcctctgaatcaatcagagcctctgaa

SEQ ID NO: 211346 - DNA, 571 bp, Homo sapiens
ctctagatgagacgaatgacaactcattacataaaatggacgcctcaggacagtagggcttcattctttcctaggactctgttgaaaaaggtaatttcctttctataaaactgtcttgaggaagtagctgacaaaccagacacagatttctatttgaaacatgttaaaggcagcaaacatcccaaatgtccaacattaaagggatgactaagtgaataaacacgcctgcaccatggatgcttatgaaataattaaagtggtattttcagagactaatggcacgggaaattgttcacatgtacggttaagtggaaaaaacagaatttcaaatttgaataatttgatagataactagaagataaaatcatacatatacacawacctagactgaaatatatcaatatgttaatagcagtcacttctgggtggaagaattatgattttaaaatgtattttttgtgggcctctgtggccctaggacaatgtctcaaagcgcctggggtgcttaaaagtcagattcctgagcacctccctagacctgggagcctctgaatcaatcagagcctctgaa

SEQ ID NO: 211347 - DNA, 479 bp, Homo sapiens
gcctggctaggcgcggtggctcatgcctgtaatcctagcactttgggaggccaagacaggtggaccatctgaggtcaggagttcaaggccagcctgcccaacatggtgaaaccccatctctactgaaattctctggaattctctggaatccatgattgtgtctcaaatgcttccttttcttcttttctcccccttcctcataaacttaggtaacccacagcatctgcctatatgccttttgggtcaaaagagcctggggaaagtgtgtgagtgatttaagataccaagacayattccttcctggaaatctccctccactatggtttggatatgacatagtcaagaggctaatcatgagactttgttcagtctgtcttcaggtgtgtcagtgtttgatgagtgacttccattttgcgtaacaactggctgatcttaccccaattttcattcttttcagagcattctggagctggagaagg

SEQ ID NO: 211348 - DNA, 504 bp, Homo sapiens
tttttttttttttttgtaaaaacaaggcctggctaggcgcggtggctcatgcctgtaatcctagcactttgggaggccaagacaggtggaccatctgaggtcaggagttcaaggccagcctgcccaacatggtgaaaccccatctctactgaaattctctggaattctctggaatccatgattgtgtctcaaatgcttccttttcttcttttctcccccttcctcataaacttaggtaacccacagcatctgcctatatgccttttgggtcaaaagagcctggggaaagtgtgtgagtgatttaagataccaagacatattccttcctggaaatctccctccactatggtttggatatgacatagtcaagaggctaatcatgagactttgttcagtctgtcttcaggtgtgtcagtgtttgatgagtgacttccattttgcrtaacaactggctgatcttaccccaattttcattcttttcagagcattctggagctggagaag

SEQ ID NO: 211349 - DNA, 504 bp, Homo sapiens
catttaaatttttctgagattttgatttacagtaaatccctacatgtattacatagtgggacagaggatagaatttctccaatatgtttcaccacatcaaatattatataaccacaagatatttcttattgaaccattcatgtctggattatagtgcttgctacaattcaacaccattcagagatatttgactttagcttgtgttacttatgaggtggcagtaaacaacaatatattttgtaggcattgacctttaatgtctctgcatggtcrttatccttttaccacaaacttatctgccttttctaaaataaactatttgagatctctccagtgtcaccttgcaatttaaaatggatttatttcagatggaatttagaccctagtgactttcagaaaatcattaccttcagtctggctagcatcccaggaatattggcagtccataatgacactgttataaatggccctgctacagctctttgaagtacccccctccattag

SEQ ID NO: 211350 - DNA, 449 bp, Homo sapiens
ggctgactctcttgttaggggatratgcagctgatgactttaagttgaagcttaccattccaaaaattctaggcccctaagaggcatgctaaatctcctctgcctatgttctataaatagaataataaaggctggatgacagcacatctgttgaaaacacagttttttgaatattttaagccactgttgacacctactgttcaggaaaaaatacagctttcaaaaatattagtgctcattgacaatgcacctagtcacccaggtgctctgacggagatgtacaaggagatgaatgttgttgtgcttgttaacccaacatgaattctgctgcccatgggtcagggagtaattttcacttttaagtctttttacttaagaagtaacattttacaaggctacatctgccatagttattcctctgagggaactgggcaaagtaaattgaaaac

SEQ ID NO: 211351 - DNA, 463 bp, Homo sapiens
tctagagaggagaagtcaatgcctgacttcaaacttacgaaaaataggctgactctcttgttaggggatgatgcagctgatgactttaagttgaagcttaccattccaaaaattctaggcccctaagaggcatgctaaatctcctctgcctatgttctataaatagaataataaaggctggatgacagcacatctgttgaaaacacagttttttgaatattttaagccactgttgacacctactgttcaggaaaaaatacagctttcaaaaatattagtgctcattgacaatgcacctagtcacccaggtgctctgacggagatgtacaaggagatgaatgttgttgtgcttgttaacccaacatgaattctgctgcccatgggtcagggagtaattttcactttkaagtctttttacttaagaagtaacattttacaaggctacatctgccatagttattcc

SEQ ID NO: 211352 - DNA, 467 bp, Homo sapiens
gtgctctgacggagatgtacaaggagatgaatgttgttgtgcttgttaacccaacatgaattctgctgcccatgggtcagggagtaattttcacttttaagtctttttacttaagaagtaacattttacaaggctacatctgccatagttattcctctgagggaactgggcaaagtaaattgaaaacccyctggaaaggattcaccattctagatgccattaagaacatgtaccctagaacttacagtgtatatatagatatacactttatatgtatatatatatttatgaaagaacatttgtgattcatgggaggaggtcagaatatccacataaataggtgcttgaaagaagttgattccaaccctcacagatgactttgagggttcaagacttcagagggagtaactgcagatgtcatgaaaatagcaagataactagaattagaagtggagtctgaagatgtg

SEQ ID NO: 211353 - DNA, 467 bp, Homo sapiens
gtgctctgacggagatgtacaaggagatgaatgttgttgtgcttgttaacccaacatgaattctgctgcccatgggtcagggagtaattttcacttttaagtctttttacttaagaagtaacattttacaaggctacatctgccatagttattcctctgagggaactgggcaaagtaaattgaaaaccccctggaaaggattcaccattctagatgccattaagaacatgtaccctagaacttacagtgtatatatagatatacactttatatgtatatatatatttatgaaagaacatttgtgattcatgggaggaggtcagaatatccacataaataggtgcttgaaagaagttgattccaaccctcacagatgactttgagrgttcaagacttcagagggagtaactgcagatgtcatgaaaatagcaagataactagaattagaagtggagtctgaagatgtg

SEQ ID NO: 211354 - DNA, 557 bp, Homo sapiens
tcatgaaaatagcaagataactagaattagaagtggagtctgaagatgtgctgcattaaattgctgcaatctcatgataaaacttgaatggataagcagttgcttcttatggataagcaaactggtttcttgagatgaaatccactcctggtgaaaatgctatgttaataaaagtagcagcagggtttaagagaactcaatccaattttgaragacattctactgtgggtaaaatactatcaatcagcattacatgctacaaataaatctttcatgagaggaagagtcaattgatgaggcaaacttcacagttgtcttataagatattgccagtctaaccttcagcaaccaccaccgtggtcagtcagttgctattaataaattaagatatgtacattgtttatttttagacataaagctattgcatagttagtagaatacagtatagtgtaaacacaacttttatatgcactaggaagcgaaaaaattagtgtgacatgctttattgcaatattctctttattgcggtggtctgaaaccaaacctgtaatatttca

SEQ ID NO: 211355 - DNA, 557 bp, Homo sapiens
tcatgaaaatagcaagataactagaattagaagtggagtctgaagatgtgctgcattaaattgctgcaatctcatgataaaacttgaatggataagcagttgcttcttatggataagcaaactggtttcttgagatgaaatccactcctggtgaaaatgctatgttaataaaagtagcagcagggtttaagagaactcaatccaattttgagagacattctactgtgggtaaaatactatcaatcagcattacatgctacaaataaatctttcatgagaggaagagtcaattgatgaggcaaacttcacagttgtcttataagatattgccagtctaaccttcagcaaccaccaccgtggtcagtcagttgctattaataaattaagatatgtacattgtttatttttagacataaagctattgcatagttagtagaatacagtatagtgtaaacacaacttttatatgcactaggaagygaaaaaattagtgtgacatgctttattgcaatattctctttattgcggtggtctgaaaccaaacctgtaatatttca

SEQ ID NO: 211356 - DNA, 452 bp, Homo sapiens
aattagaacacactttaaaatgtgtagctaaaacctaagtgtatccaaaacctaaactgtagttcataattctggttgggaaagacacttgccccaagcctgggggactctaaagtatgaagagcaaaggcatgtgccattaaaaccatcatagctcctgtgtgtgtggaaagcatggctcaggggaaccattaaattgcaaaagcttcacggccagraaactgaactatccacccctgcaaatgagagtacaccaaattggaatgtggaatgaatcactatgcgagaggaaattgaacaggcaatcctgtgttcactccgctatttctccacactggctcatactcagagtctcggagctttattgcctcagcctttgcgccaagcacgcatagaaagggtggtggaaggttcttaagtgtgcctgtcttgtgggctgacagcttccttca

SEQ ID NO: 211357 - DNA, 523 bp, Homo sapiens
tttatagttctaaagttatgtgacagagaaggtaggccacacgcaacacaaagaaagaggtgatatctgatgtgtggtttgcatgaaagaagatgcaattgagcaaaacacaattatgaaatttaaaatgtataattaatgccataacaatcgggattccattttggagagagctaaaatgtcttcaatgaagagcagtatcaggaatggccacttaactgctaccctccgttgttttcttcatttcatttcaggaaactagaccatcaaatattgtaaaattatgtagggacttcatagtttgcttccttcttgctccactgaaatttctcagccagtgcactgccattgaaatcactgatgcattgcattcagggaatacttgcttaatcctctcttatgttgagcctttgggtttgccgtcaagtataggattgttattcaggtcgtgttaactgaactctcatgatggtgggctggggagcaatcatgcrtctttgcatcaactttccatcttctcttt

SEQ ID NO: 211358 - DNA, 384 bp, Homo sapiens
gaattctccctaactcattctacaaggccaatatcacctgataccaaaaccagactaggacatcacaaaaacagaaaactacagaccaatatctctgatgaacatagatgtaaaaatccttaacaaaataactgaatccaagagcacatcaaaaagataacacaccatgatcaggtgggatttatacaaggcatgcaaggatggttcaacatatgcaaagcaataaacatgatatatcacataaacaatawtaagggaaaaaattatcatttcaatagatgcagaaaaaacattcaacaaaattcatcatcccttcttgataaatattctcaataaactaggcatagaaggaacatacttcgacataataaaagccatacaaac

SEQ ID NO: 211359 - DNA, 580 bp, Homo sapiens
gcacagagaagctggctacagccactacatcccctacagattagaacccacagtggcctcagacacaacctatctcatttactctgccaactaagttaaccttggaatttagagtatgtgatactctaaacggggaaaaacaaattccagaggtgcatcaggagttttaccagaaccctggtaaaatctctccctctgaagcaaggttggcctgaaactgcccttagttctgaaattgataaggaccacatcttaaccattcatcctctctacagtttaacgattcctcccaataaaaggtcatgcttgcaggactgatcggttggccracaggattctcagcataaaaatttttagacatttcttggttgatttggttgaacttcttgtgtgagctaacatttatcagggaagattgggtaagttggtttatgaaagcataggggtcgtcagagcccattaagtaggcacaattattaattaaacaaatgaagctcctcttgtttaccttgatttccctggggttcctgaggatgcctgctcacagcttcattaccagtagtctctggaaggggttcca

SEQ ID NO: 211360 - DNA, 624 bp, Homo sapiens
ctttggcatccaggcttgcaaagagttacattcttggagtaaagttttattccctgggtgatttcccacctgtcctgtggactctgtttcagttggtatgacaggaatttcccttgtgactaatgatattgagtattgcactattctataggcatgctatgaattaacraaaaatttaaaatatgctttgcttttatttttagatacataatatattatgatatttggtaattactttgcctgagttattgttttttttttctttgagacaatgtttggctctatcacctaggctgtagtgcagtggcaggatcttgcctcactgcaatctctagctgcctagctcaagccagcctcccacctcagcctcctgagtagctgagactacaggcatgcaccactacatccagctaaattttttttatgttttatagagacagggtttcactatgttgctcagactgatgttgaactcatgagctcaagcgatctgctcaccttggcctcccaaagtgctgggattacaggcttgagccaccacactgggccttgcctgagttttaatgttttcatcggtacctaccctcataacatatttttatttaatgtttattatatgtatct

SEQ ID NO: 211361 - DNA, 575 bp, Homo sapiens
ttgaaaacattggcatgttatttatggatcctctcagtcatctaagccagaagataaaagtagagatggaattattcaggtaaaatctgtgaaggaatctcttatctagtagggtgaaycctgagacatacacaggagacccacactgtccactgtccgtcagatatgataccaacagaaacattgcgagctcaaaatgaaagagacgtaaagagtataacatggaggaagaatgctggacaaccaaaattctacagactggaaacagactgattaaactattcagcagccagaatatgctaaccctcatgaaattaaaatgactccaaggacagagccataagcccaaagagtggagtcatgaaccacagaggattgcttccagtcctccaaagccagcattgtttacctggctggatattagaattgcttggggctgagaattcgttatttctttctgttttctatccttctgaataaaaatgtctgtaattgttctattatgcctatctcaccattgcatcatagatgcatataatttgttttctagctttataggtctgcaaatgaagaga

SEQ ID NO: 211362 - DNA, 610 bp, Homo sapiens
tcagttgactccagatggaaagagaaaaaagtatagatcttttgattttagaaatcctttttatatgtttcgaaatactaaatcccagttcagtggaagccataatctccatgttaaaactttttttctaaaattaaaaacagataaggaaaaaatatcagggtttaagcaacagattatatggaacagtgactggaacctcctctgcagctcattctacttagcaatggagacatgactggagcccaggcattgtaccatggtcatcacaacctctgcgcaccacctgcaaatgggaaataccagcaatctggatgcatgcagttgtgcttttggacttccctcctgtttttacaggacacttccatctctctcctcccttccccacctccaccactttattcattcttctcttcagccccccaygccttccccacaggactattagggttttgcttgggatcaggccctgcagagacagcccaagtgctaaggatgcacccactgaccccagctttgtcagagcactctcaagggcagctcatgggggtcagagaacttctttgcattccagcactgctctttgccatttgtatgactttacccctcc

SEQ ID NO: 211363 - DNA, 558 bp, Homo sapiens
actagcacacttaaacaacaatgaaagtcaagtcaagagcaaaatcaggaatgcaatcacattcaaaattgccacagaataataaaataccttggaatatatctaaccaggcaggtgaaatatctctacaaggagaactacaaaacactatccaaagaaataagagatgacagaaacaaatggaaaaacattmcatgcccaggaatagtaagaatcaatattgttaaatggccatactgaccaaacaatttatagattgaatgctattcttcttaaactatcaacagcattctttacagaactagaaaaaactatttaaaattcatatgcaaccaaaaaaaaaaaaaaagcccaaatagccaggacaatcctaagcaaaaataacaaaactagaggcatcaggcctggtgtggtggctcacgcctgtaatcccagcactttgggaggcctagatgggcggatcttgaggtcaggagattgagaccatcctggctaacatggtgaaacgctgtctctactaaaaattcaaaaaacttagccaggcgcagtggtgggcgc

SEQ ID NO: 211364 - DNA, 548 bp, Homo sapiens
tgttaacctaaccataaaccagtctcactatttacatatgcggtgtttgaagaatcccaacatcttattctccactgagcttgggatcagttgagagatayaaatgagtgttggacagagtttattgttgatcaaactggaacagaagatttgttttagatgtgcagctgcaatggaccaaaataaacatatgtccccaaactacaggcaaagcaagaaggtagaccaaccattctgcaggcagactgactcagagagaaaagaggcagccaggacaacattctcagctgcttgtcctaaattcatcaagggaaaaagtcattctgcccaccagggagagtaagtagagtgggcacagagggcaggagcttagtctagctcatgagatcaacgagcaaaatggaagaaatgttacatttaatgagcacttactgagagcctgaaatacagttccaaactttatcttgagtatcttgctctatttttgttaaagtcccatgaaataggtattatcctctattacactttaggaaagagaatctcagaga

SEQ ID NO: 211365 - DNA, 313 bp, Homo sapiens
aaatttaagtgaataaacattctcccacactcagtctttgtattcaaagacagagacactagataacctacactctgaggcaattggtttctgatagcaaacagtagttgccatttttgagtgcctcttcggtaacaaattgtgggctctacaccttaggtgtacagactaattctcactacacctctgcaagtcatattcatctcaytttctgcagaaagaaggttgaagtgaaatggtctaaggtcattattttgtccaaaacatatttatgaatgtctactagttgacaatacttactcacttatttatt

SEQ ID NO: 211366 - DNA, 628 bp, Homo sapiens
gaggctttcctccattccaggggctgcacaaggtgttttcctagaatgagacccctactaaccttccccaggggctcgcagacatataaggctggcagacacatcaatgatgagctaccatggaagcagaattatatcaataatttttctctcaaaaatacccccatacagtcttccccatctcagtaaacaataaakgtaaatgttatcgcaatgtttacaatattttctacatgttttacgtatggtaactgatgaaagcattacaaccacactataaagaaatactatcagtaattccactttatagatgaggacagtgatgcacagaaaagtaacttgcctgaggctgcaggaagtatataacagaatcaggaattaagccagagcagtatggctccaggctcatcatgctaatacacatgactccctttctaactggaagctgcattccagatgggcaggcccaaatgcttggctccttctctttttcttccaccttattcccgttcaatttcaaaacacatctcaccttctcctccactgcctccctggtccaggcaccgttgaacctcacctagattatagcgacagcttttcactggtctcccagcttctgcccttgagc

SEQ ID NO: 211367 - DNA, 524 bp, Homo sapiens
agattggagtgagctgagatcacaccactgctgtgctccagcctggatgacggagtgagtgagactctgtctaaaaaaaagaagccaatcagagaacttataaccatgtcattcatttcttatgtcctgggatccttattcagtttgtcttctttccatatttcaaagtctttcatgcttcatatataatgtccagtgttttygcagcacttagaaggaggaatagagagaaatttatctactccatcttgtccataaccagaggttcaagagagtaattttattttgccattaaattttgagtgtctagaggccattactgttagcaaactttcttcaacagagggagtgtttaccctgaaagctgcatttatataaaaaataaggtaccaaaaaattaggaagaaaaatgcaacctgagagtatgtgataacttcatgtacacttcttttctcttttatttgttcactattatacctaaaagttatgagaatagagaataacattaataacgttctgacaat

SEQ ID NO: 211368 - DNA, 473 bp, Homo sapiens
caacaggctcccaataaatgttatctcacttccttcctttccctcatttcaacaaatggtacacagacaatgccatctccgcatatacaagtgactcaatagaaaaagagccaccataagctagaaggttactacaaatgtctcattagctaaacatcacataaaaaaaatttatcacttgcggtcaggagttcaagaccagcctgggcaacatggcaaaaccccatctctactaaaaatacaaaaattagccgggtgtgatggtgtgcacctgtggtcccagctactcaggaggccgaggtggaaggactgcttgagccccgggaggttgaggctgcagtgagccatgattgcaccactgcactccagcctgggtgacagagtaagaccttgtctcaaataaaaaaaataaaaaataaaaaaagtccaataaaacttataatgasgaaaccaaaaacgtatcaacaagggct

SEQ ID NO: 211369 - DNA, 522 bp, Homo sapiens
caacaggctcccaataaatgttatctcacttccttcctttccctcatttcaacaaatggtacacagacaatgccatctccgcatatacaagtgactcaatagaaaaagagccaccataagctagaaggttactacaaatgtctcattagctaaacatcacataaaaaaaatttatcacttgcggtcaggagttcaagaccagcctgggcaacatggcaaaaccccatctctactaaaaatacaaaaattagccgggtgtgatggtgtgcacctgtggtcccagctactcaggaggccgaggtggaaggactgcttgagccccgggaggttgaggctgcagtgagccatgattgcaccactgcactccagcctgggtgacagagtaagaccttgtctcaaataaaaaaaataaaaaataaaaaaagtccaataaaacttataatgaggaaaccaaaaacstatcaacaagggcttctgttgatatttttcagaatatttttataaataaaaattaaattcata

SEQ ID NO: 211370 - DNA, 522 bp, Homo sapiens
caacaggctcccaataaatgttatctcacttccttcctttccctcatttcaacaaatggtacacagacaatgccatctccgcatatacaagtgactcaatagaaaaagagccaccataagctagaaggttactacaaatgtctcattagctaaacatcacataaaaaaaatttatcacttgcggtcaggagttcaagaccagcctgggcaacatggcaaaaccccatctctactaaaaatacaaaaattagccgggtgtgatggtgtgcacctgtggtcccagctactcaggaggccgaggtggaaggactgcttgagccccgggaggttgaggctgcagtgagccatgattgcaccactgcactccagcctgggtgacagagtaagaccttgtctcaaataaaaaaaataaaaaataaaaaaagtccaataaaacttataatgaggaaaccaaaaacgtatcaayaagggcttctgttgatatttttcagaatatttttataaataaaaattaaattcata

SEQ ID NO: 211371 - DNA, 591 bp, Homo sapiens
tatgatttgatagaatttacccattctagacttcagaaagtgacctataactacatgtgaaactactaatattgtttaattttatatatatatatatatatatatatataaattctttaaatataatgtgcaaaagtgcctgtctaccttcaaatactatctaagtggtattttactggttctaatacagttgaccattgaacaaccctgtttgtccagcctggcctgaaaagaagtctatacttttaaaatgtcttccttttccttttagtagtttgactattaatgtgactaggtatggttttctttgtatttatcctgcttagggttcactgtgggttaatatttaacacmatttttcaaaattcttagcttctgtctcttcaaatattgcttctaactcattttttctctcctcttattctcttattccaaccccatgcatgtttatttttttttcacggtttccacatgtctcttgtactcttctctgtatttcctaaccattcttccctctgtgcttcagtttgtttactttctacttgtcttccagcagataagtgtcttccagttcacttcaaataatccagt

SEQ ID NO: 211372 - DNA, 585 bp, Homo sapiens
cctatgctgctgctgacatttttgcttacatttttggccttgtggcttctgctagatctcttgaagtcttatcccatgtatatgaaggctaaaatatcattaagtaactcaagggaaaggtatatccagagtctgagttatgatttctattgttctctcctgcctgagactgtgttcctcaagttctaggctcttgggcaatcacaaacccaacctctggctcctcagccctgcagcattgctgctttttgctggcactctacttcttgtactatgaactggcaaatgcctttgggggagaagctagggtgaatataaagctctccctgttgtacttcccttttcttattttttttttttagcttttatatttgtttttgagggcaagtgagtccaatacaagcaattccatcatggccataaccagaagtctctagatagtaaacttttatcagaggcttgcaaaacagcaaaaaactagtaatgtaattaaacttcaagtttaaatgattaaatggaacaatctttgcccttatcaaaaaatattttttttgagaatctcaraaaaattgggtgcttagaatt

SEQ ID NO: 211373 - DNA, 535 bp, Homo sapiens
catatgcatctgtgatttttacacacaaatatgaatgcaatttccaattttcagttaatttattgttctctaccccaaagccaactgctagtgcttgtaagagaggagactatatatttaagaggttttgttttaaaaaaaattctagtttttcactaaaaaataaacacatttttgataaatctgtgtggcaagtcaaattcaatggaggctgacagcaatgctggaaaccaccaaatgcgctaaagagcaacaaggcaatcagggccctgttttagagaatgttctaatcactgccaaagttccatacattatatgaaatgtgcaaatcagggaatctgcaaagatttaaggaagtatttattatcaatagcaaaggtctgccataggtgatcaaatgttaaattgaataaaaacgaaacacgaaaacctttgaaataacatgtttttccccaaaaatgaggataaaaatgactatccaaaaaattatgaagytatatgatctttgaatctgaacaggaaatgacaaatacaa

SEQ ID NO: 211374 - DNA, 411 bp, Homo sapiens
tgcaaactaactaacacacaagccatcagggaaatgcacattaaaaccaatgwtgatgtgatatcacgacgtacctattagaacctctaaaataaaagtagtaacaatggcaaatgctgataaagatgtggagaaactgggtctctcccacattgccagtaggaacataaaaatctacagccactctggggaatagtttggcagtttcttaaaaagctaaacatacccttaccttataacacagtaattgcaattctgggtatttatcccagagaaataaaaacttatgtctgcacaaaaacctttatacaaatattcattgttactttatttataataatagccaaaaactggaaacaaccaaaatatccttcaatgagtgaatagttgagcaaactgtagtatatccat

SEQ ID NO: 211375 - DNA, 530 bp, Homo sapiens
agagttcatgacagcaacatggtggccatggtcgctcataagttgagccaacatgcatcaggccctcaacagtctctctggtcagacaaaacacagcacctccctgggggcaagtcagaaaattgggtgsagaaaaacaaagtgttcagcccaacactgcccctccgtggtaggggagaggaaattcccttcacaggaactgagaacaaggaaagacaattccccacccacaccagatgaaaggtgcggtcggtccaccttctctcccaggcccttgtgttagagcagttttcacagctccctctctgtgtgagcacaaaggaagggaggccccaagaatgaagaacccctcccacgtgtccacagctggtggactcctgatggctgcggggagagacactcagcttcagcccacgacttctcgctccctccggaaggcagacttggaggacaggccaggccaggctcccctccccggaccacatgcatcttcgcacagagcgagatcatgttctggtgaagtgcggact

SEQ ID NO: 211376 - DNA, 483 bp, Homo sapiens
tctgagcattgcatccctcaaggggtcatggattttgctcagagatccaaacaggaaaatgaaggaagcagaggacagagaagctcctgtaaacttccagaaactcaggagtggtgacacctgccacagctggtattagcttcctgcagtcaggagtatgccatctgccctgtgtctgctgtagccagtgcaggagagtaaaggcttcacctcctcctctatcctccaggccctgcatgggcatctcccactggaagactctcatctgacactacatagggaaaacagctggaagctaaggaragacaaaaggaggcactgaagacgccaagctgactgacattcagcccacacatggggcacagtgagatgaaccacaaatgaattagtgcaacagagcggggagtttggagggaagtgacactggagacagcacctacaccctgctctgtggatttgcagaaatttgcacagaacatggag

SEQ ID NO: 211377 - DNA, 430 bp, Homo sapiens
tggcatttatgcttacactttgcatgaggaataagttgagtacaagacgttatgccatgtcttwagtctattaattaaaaacaaattctaagattcaaggagttttcagtgttccacatttctccctttagaaaaagtaaatgtgtgcagaattaacaaagtgtttaaaaatagatatttattactttactatttggatgaatgtgtagggcagtgcttccttggcactggggatatttcattgagcaaaactaaaaatatcttccctcatggagtttatgttatagtaagacatacatgtacatctataataactattacattagaaggtgtgaagtattgtgaaaaatatgtagagctgtagtggagcgggaagaaatgttttgaaatagagcttgagattcttgattgtcttgccctctacttgaac

SEQ ID NO: 211378 - DNA, 483 bp, Homo sapiens
tctgagcattgcatccctcaaggggtcatggattttgctcagagatccaaacaggaaaatgaaggaagcagaggacagagaagctcctgtaaacttccagaaactcaggagtggtgacacctgccacagctggtattagcttcctgcagtcaggagtatgccatctgccctgtgtctgctgtagccagtgcaggagagtaaaggcttcacctcctcctctatcctccaggccctgcatgggcatctcccactggaagactctcatctgacactacatagggaaaacagctggaagctaaggaaagacaaaaggaggcactgaagacgccaagctgactgacattcagcccacrcatggggcacagtgagatgaaccacaaatgaattagtgcaacagagcggggagtttggagggaagtgacactggagacagcacctacaccctgctctgtggatttgcagaaatttgcacagaacatggag

SEQ ID NO: 211379 - DNA, 398 bp, Homo sapiens
atctgaatagctattttacctaagaagataaatgaatggctaataacttcatgagatgatcaacatcagaatgcattagagaaaagcaaattaaagccacttcacaaccactagaaaatagctacaatcaaagagtgtgatgatatccaatcctgtcaaggataaagagacattaaccttcatattttgctggtgggaatataaaatgatacaggctatttggaaaacagtttggtgatttcttaaaaagttaaayatgaatttaccattcaacccaatgacccaatcctaggcatttactcaagaaaaataaaatcacatatgtccacatttttgctcaagacctttgttcaaatgttcatatggtcataattctcagtagtcaagaggtggaaata

SEQ ID NO: 211380 - DNA, 326 bp, Homo sapiens
ttatgctaccatgtattgtgatagccaaaacatttcaactttgggaataatttcatttatcattatagtagactaaattatgggtcccaatcttcactggttctctcttaggtttctatcaacaccacgagagaaacacaccctccagcctgggtcccagaatgaggcaggtgaggcagaacggcagcagaacagccggctacacatctacagcctaaagcagagctgcctgggccaatgctatgcctgtatgtatgtagcatcactgtggcaatagctatctgatacaatkatactaaagaataatacatctttaacaatatatt

SEQ ID NO: 211381 - DNA, 505 bp, Homo sapiens
gttatagctatatttttatgtactakagttaattgactcaagactctcttgatggtaagacatatcattattttcctaccaccaagaaagctgccatttgaaaatctatgcatgccatcaaatgtgtgatacattcttatttaagatattaaaatagaaaaaagagttatcttagaattgatgaactatgtgatttgaggcaaaaaagaaaatataatactttaaatatttttacaaaggcattcgcagaaccactgactttcccccattctgatctgctggttatctatagccctgcctacttcttccttcccttaattttttcattccaaaaaaatacgtgatgcctcctacgtgcaggccctgtggtacctgccagggacaaacagtaaataagagaaagactttatgctggggaagctcccattttgggagtagatacaaaaatggactagagaatgacagtagagtgactgtcactatattagtcacaagtacagaattc

SEQ ID NO: 211382 - DNA, 488 bp, Homo sapiens
aattaggcaaactatttaaatattacactgtcattaattagccatcttattacatatatggakcagtagttaattttgtgtaactgcctctacttacatttaatagttcaactctttgcattcttgtgtttaaagagaaacccctttctcatggagaagaaaattgagcaactgggtaaataactggtaaataacacttcagattgataattttgttttatgtttgtcacggtacaacaaataataccttcccagcttatgaagaaaacaaaagtgcattttcaatgattctgaaggaaattaaagattctcatatttttatttttcagtcaagctacctcagttcctttcatattaaaacagatgaaattaaaatgaaaaacatgtataacagatcaaagaaaaatattcaatattcactgagataaacacctctgagaagtaaaaagagcaaagtataatggcattttagctttgaaggtttattt

SEQ ID NO: 211383 - DNA, 533 bp, Homo sapiens
aagtctctaggatagtggggctcctaagtgaatgaataccaagtactgaatataattttttttttttttgctggcaaaggtgtgaaagagacttaagttttttaaagttctctttaattggactctactcattaatggaaaggaactaatttgaaacttgtttatttaagcaaagtgactgatctttcaaaaagaaccacaattcacaatatatgtgaacattaaaaagtaaccaacaagaaatatcccttcaacatatctttgaacaaaatgttcgttataaacaacatgtgagatatacacacttaaaggatagtttcacagcaccacataattttacactgtactgagtatctgtggcttttcatatgtaactataatgcccaatataatttcacatacattattgaaacagaaaaattgttgatatgtctgtcaaattgtagattctctattataattcccatttcatcacttcaaagataccccawgcaagactaaagtaaggagatacatgattaataatgcagata

SEQ ID NO: 211384 - DNA, 516 bp, Homo sapiens
gcgtcaggggatctaagagaattgtaattataggatataattacatctaatctttttttacacatttatttgacatccccatctgccttcccacaacaggtgatggaggtggaagaggaattcccaaacttggtttctgcctattcatcaaataaaggagttcatattattagaatttagtccattaaaaacaaagaaggctatattcttgaagatgcgtttgtgagaatgacacatcctgatgtagaagggagtgtagctctctcaagaaagagagatggaggaaaaacaataatttcacactaagcagaccttgtgggyggttctaggccatcttaaacattttttgttttattcgtgaaataataggaaatatattgatgcttcaatattgattgtagaaacagatttgcattttcaaaagattccattagatgcagagcggagtttggatttaaaagaaaagagattgtgtgtatggaacaggatggaaggagatggggccaaacagacaat

SEQ ID NO: 211385 - DNA, 468 bp, Homo sapiens
caagttccctagctttctctcttgcctttttactgctgaattttctctaatagtcatctcttaacgcttccctactcaaaaccgttatattcctctgctccgttaagcctttgagacatatgcttatttaaatatttactcttccatctccaggatgggaaactttttcttcccagtccaaaacataatatagcaataatatatgtgtaccaagcagcagagaagatgaagggaagaaagatgggacaaatattttcctaaggaagattcctagaagctgtgttatgacacttctacttatatccaattggccagattatagccacatgaaacttggttacattggttgctggagaatgtagtctttgagtgttaatatgtcccgctaaacaatmtattgctatgattgaaagggatagagaccaataggagacaactggcagtctctgccacagtgtcagaataaca

SEQ ID NO: 211386 - DNA, 577 bp, Homo sapiens
ggggagatgaattgaaatctgatacactatccctatggggaagaaaaggactctttcctaaattagatggaaattttattgtcaaatcacatagataagaaatgrtaagtccatgatttctatctgaaaccttcaagaacaaattatttttgccatcagaattatttttgctagcacattttttaaaaagcaaaacatgtagattctgtgcctttaaacactctgagtagagcctgggcaccatcccattatcaaacgatattttcctagtgatatgtatgagtatccacactaagcgtgataaataaagatcataaatgtcctctattcatttggcatcaggttttgatgccaactgagtttgtaccaaacttctaggaaaaagaaaaaacacaaccttcagttttgagaaatatttagttgtcctcttcctggtttaagggattattgatcttattcctggaaaggctgtttcaggagtagatgtcaactcttgtctctttctgaacttcttctcttgactctaactttcagagaagacagattactagtttactttctggtagactggcacagc

SEQ ID NO: 211387 - DNA, 591 bp, Homo sapiens
tatggaggcagcagacagtgggcttatatccactcatttattatttatgtgygcttctccttcctctatttaagtgtctatttagtaaaacaggggtcaaaaaccatgggatgcccttgggagtgaattctgcgtcccatgtggctagtggcacttttatttattgctttaattatgcttattgtatccagcccacaagaccaagcaaagggcatgtgtccatgaaaagtgagtttattatggaaattgttagtgactttttatgaacataacagtctagagctagcttaatcctaggcagaacagtcatgaaatatgacaacagttttgtcagaattttcaggtccattcagttttttatacatctgtggatttgagaataacttgggttttattcattgattcattcaacaaatggatattgaactgtatcaggtactacgtgaagtgctaaagatagagcaatgaaaaagacaaagcccttaaccactcacatggagattacatcctagtgtgggagacataaaactaacaggtaattacatagagaaataatctcaggtagaacgggtctggagagtgatgccagca

SEQ ID NO: 211388 - DNA, 591 bp, Homo sapiens
tatggaggcagcagacagtgggcttatatccactcatttattatttatgtgtgcttctccttcctctatttaagtgtctatttagtaaaacaggggtcaaaaaccatgggatgcccttgggagtgaattctgygtcccatgtggctagtggcacttttatttattgctttaattatgcttattgtatccagcccacaagaccaagcaaagggcatgtgtccatgaaaagtgagtttattatggaaattgttagtgactttttatgaacataacagtctagagctagcttaatcctaggcagaacagtcatgaaatatgacaacagttttgtcagaattttcaggtccattcagttttttatacatctgtggatttgagaataacttgggttttattcattgattcattcaacaaatggatattgaactgtatcaggtactacgtgaagtgctaaagatagagcaatgaaaaagacaaagcccttaaccactcacatggagattacatcctagtgtgggagacataaaactaacaggtaattacatagagaaataatctcaggtagaacgggtctggagagtgatgccagca

SEQ ID NO: 211389 - DNA, 581 bp, Homo sapiens
acttgaccttggctctccataaaaggaatttcaattctagttggtatccatgcaaagacattagaccctgatgcttcttattgcatatgggaattgagtgactctggacactgacaggggtctgtggcaatgattgaaatatccttttggaacttgggacacatatagtggatagcagagtccatggtccatctgctcactgmcaggacattttgctttcagccttctctgtctctttaatacattactgaccctgggcccaattgtcatgcagttactttctttaaaattttcaggatactttcacaaatagagctgatatggtttggctgtgtcccccccaaatctcttcttgaattgtaacccccataatccccacatgtcgagggaggaacccagtgggaggtgattgggtcatgggggcagtttcccccatgctattctcgtgattgtgaatgagttctcatgagtctgatggttttataaggcagttttcccttctcttgctagccctctctttcctgctaccatgtgaagaaggacttcgcttccccttcaccttccaccatgactgtaagctt

SEQ ID NO: 211390 - DNA, 581 bp, Homo sapiens
acttgaccttggctctccataaaaggaatttcaattctagttggtatccatgcaaagacattagaccctgatgcttcttattgcatatgggaattgagtgactctggacactgacaggggtctgtggcaatgattgaaatatccttttggaacttgggacacatatagtggatagcagagtccatggtccatctgctcactgccaggacattttgctttcagccttctctgtctctttaatacattactgaccctgggcccaattgtcrtgcagttactttctttaaaattttcaggatactttcacaaatagagctgatatggtttggctgtgtcccccccaaatctcttcttgaattgtaacccccataatccccacatgtcgagggaggaacccagtgggaggtgattgggtcatgggggcagtttcccccatgctattctcgtgattgtgaatgagttctcatgagtctgatggttttataaggcagttttcccttctcttgctagccctctctttcctgctaccatgtgaagaaggacttcgcttccccttcaccttccaccatgactgtaagctt

SEQ ID NO: 211391 - DNA, 581 bp, Homo sapiens
acttgaccttggctctccataaaaggaatttcaattctagttggtatccatgcaaagacattagaccctgatgcttcttattgcatatgggaattgagtgactctggacactgacaggggtctgtggcaatgattgaaatatccttttggaacttgggacacatatagtggatagcagagtccatggtccatctgctcactgccaggacattttgctttcagccttctctgtctctttaatacattactgaccctgggcccaattgtcatgcagttactttctttaaaattttcaggatactttcacaaatagagctgatatggtttggctgtgtcccccccaaatctcttcttgaattgtaacccccataatccccacatgtcgagggaggaacccagtgggaggtgattgggtcatgggggcagtttcccccatgctattctcgtgattgtgaatgagttctcatgagtctgatggttttataaggcagttttcccttctcttgctagcyctctctttcctgctaccatgtgaagaaggacttcgcttccccttcaccttccaccatgactgtaagctt

SEQ ID NO: 211392 - DNA, 565 bp, Homo sapiens
ggtccatgaccgcctctggaagcttgaagttaacatgcagcttttgtctacaacaaaacacaacagagcatgctcagagcagtagggctgagtgagctgtaaacaaaagatggtttccattcagtctggaagctagcaacttgtcccacttgttataatcttaccctaatacctaattcatcatttactctacatctaaaggttcatcctcctcaaatcctttgcccaaacttaagatacaatattcagtctccaraaagcaaagtcataacggagttaaagctcaaattctgctctctgcacaactgtgctattaattttggcatttaagctttactcatgaaccacttaacacaccacataccgggatgttttgggtaactataatgaaatttatataaagaaaataatttaagtatcagtctaattcacatagattaatttagctcaaatataatttagttttttctgaatttgcaatgctcaatgagttattattttttagtaaaatgcaaaaagggtcttttctcacccttccctagctgtacatggagatgaacaagat

SEQ ID NO: 211393 - DNA, 635 bp, Homo sapiens
ggctgatggactcttcaccattttcaacaaaaagattgtaagcttgttttgttttgtttttatttatctctatctctaatagagtttttcactgccacccaggctagagtacagtggtgtgatcatagctcattgcagcctccaccttctgtgctgaaggcatcctctcacctcagcctcccaagtagctgggactacaggcacgcaccaccacattcagttttktttttttttttaattttttaaaagtacttttagtagagacagggtcttgctatgttgcccaggctggtctcaaattcctggcctcaaatgattgtcctgcctcagcctcctaaagtgctgggattacaagcatacacactcagttggcagagaagagagaggatggagaattccttagaggatttctattagccaagcccagtggtggtatatatcatttccacccatattctattggccagaactcagacacataggtacacccaaatgcaagggaggctgagaaaggtagtctagctggatgttgtgaaggaagaaaaaactaacacccttagattatctgtgcaatgaagatattacataatttcaacttaaatcaaacatacctcataaagtttgttggaatcatt

SEQ ID NO: 211394 - DNA, 476 bp, Homo sapiens
gataagtgttaaatataacgaatatactttatatattttttaacttttattttaggttcagkgtacatgtgcaggtttgtcatataggtaacctcatgtcatgggggtttgttgtacagattatttcatcaggcaggtactaggcctaatacccaatagttactttttatgcttctcttcctcctcccatcgtccaccctcaaagaggtcccagtgtctgttgttcgcttctttgtgtccatgtgttaccatttagctcccacttgtaagtgataacatgcggtatttggttttgtgttcctgtgtgagtttcctaaggataatggcctccagcttcatccattttcccgcaaaagacatgacctcgtcctttataatgtctgcatagtattccatgttgtatatgcactacattttctttatccaatctgtcactgacaggcatttacgttgattccacgtctttgctattgtga

SEQ ID NO: 211395 - DNA, 476 bp, Homo sapiens
gataagtgttaaatataacgaatatactttatatattttttaacttttattttaggttcagtgtacatgtgcaggtttgtcatataggtaacctcatgtcatgggggtttgttgtacagattatttcatcaggcaggtactaggcctaatacccaatagttactttttatgcttctcttcctcctcccatcgtccaccctcaaagaggtcccagtgtctgttgttcgcttctttgtgtccatgtgttaccatttagctcccacttgtaagtgataacatgcggtatttggttttgtgttcctgtgtgagtttcctaaggataatggcctccagcttcatccattttcccgcaaaagacatgacctcgtcctttataatgtctgcatagtattccatgttgtatatgmactacattttctttatccaatctgtcactgacaggcatttacgttgattccacgtctttgctattgtga

SEQ ID NO: 211396 - DNA, 622 bp, Homo sapiens
ttccacaaaattactaaatatttttcttaagtaactgccaggcactagtctctggagagcttgatttaccataaatgtttaaaatgaaaataaaggagttctgaaaaaaaaagagaaacggctatttaaaaattgcttcataaattaacacataggagtgaaagaatctcattgatatttatattccatattttcctttcagctcttgcgtgtttgattatgtcatggaaggggactggatggtattgtattctaaattgattgacaagaaattttaagatctttttatttgtttttaaggttgcccattcccctaaaggtggttaaaacacatatacagtatatgccatttcaccaacacaaactaattatcacattttttgatttcataattctatagtcttaaggtcataattttcacagtattctcactcttttaacagtttgtacattttcattccttggtaagatatgatataaataagaccattattcagaatgagaattttctstactaacatcatcaccatttgcagcatagaagactaaataaatatctcccatgagtgactaaatgcaaaataaaaagtaaccactcaactttaatagtttaaaaaatgtt

SEQ ID NO: 211397 - DNA, 560 bp, Homo sapiens
gatggaaacattggagttattctctagcaatgcttcaatgattcaatagattccactggcaygttacaaacagtttatgaatacagtaaaaattcctttatttagatcctcccatctttgacccatatttcaaaatgaatacttaaacacccttctccccctctcacttgaccaggtagactccagctgtcctttaaatgcaaactttgccccctcccaccgtatttgatggagtcaactacctattctccatgctgcctctgcactctacatttacttctgttagggaatttaccagacatgttacagatttttgttttcatgcttgtgtccctaactggagagttaggtccttaagaaaagggcctggtctttctatcaatttatgcccagagtttagctcatttcctgcctgtacagtattgttccataaatgtttgccgaagtgattcatagaatctcaggtttaaaaggaaactttttggtcactttaggaaatgtagaatagtggcacagattacatccaagccatatgctcccctcagttagtagacagggtt

SEQ ID NO: 211398 - DNA, 469 bp, Homo sapiens
gatgtctccatgttgttagggatttgctttttgattgaaaagtaggattcaatggattaagaggggtttttgccctccctaattagactctgatgaaaaattattgagaacgactgtactcagccaacgagtggcccgagtacctttgtgtgtcttggaatcattttgccattccataagcaagatatattaattactccttatatgttggcattgtgccaatggttgaggaagacacccagcaatatgatctttgactcaggtgaccatacttctgggtttgcctaggacagttctgtttatctttgttgccctgctgtagttaattgtagtacccccgccgycacccttttcacgatctcaaaagagttctggtttggatgataaattatacggtcaccttacctgtggtagaccttcaagaggcttgcaaactcactggtgagagaaaaaatataaatatttagaa

SEQ ID NO: 211399 - DNA, 469 bp, Homo sapiens
gatgtctccatgttgttagggatttgctttttgattgaaaagtaggattcaatggattaagaggggtttttgccctccctaattagactctgatgaaaaattattgagaacgactgtactcagccaacgagtggcccgagtacctttgtgtgtcttggaatcattttgccattccataagcaagatatattaattactccttatatgttggcattgtgccaatggttgaggaagacacccagcaatatgatctttgactcaggtgaccatacttctgggtttgcctaggacagttctgtttatctttgttgccctgctgtagttaattgtagtacccccgccgccacccttttcaygatctcaaaagagttctggtttggatgataaattatacggtcaccttacctgtggtagaccttcaagaggcttgcaaactcactggtgagagaaaaaatataaatatttagaa

SEQ ID NO: 211400 - DNA, 382 bp, Homo sapiens
tttataaaagtggagtcacacagcattttcgtttttttgtgtctgtgtgtgacgggttttttcacttagaataatatcctcagggttcatcttgtagcctgtgtcagaatttcytttcttttcaaggctgaatattccgttgtatctatatgccatattttgtttatccattgatctgttgatggacacttgggttgcttccatctcttggctattgtgaatagttctgctatgaagagtggtgtgcaaatatctccttactagctattggtctgttcccattttgtatttctttatgattcagtcttgatagggtttgtgttcctaggacttatcaatttcatttaggttattgaatttgttggcatataattacttgtaa

SEQ ID NO: 211401 - DNA, 524 bp, Homo sapiens
catcttaccctctactgaactagctctggactgtccctttttcttctcaccacctctcttctctttcctcccttccatacatttgattagatactgtggggagtgmagacatgagtcaaagaggttctagcccttaagggagatggatggataaataaataatgaaaaaaacgtaaagaataaattgctcactagaggtaaaaaaaacgtgcatgggtagtttaaaatggttgaatctggtggagagattgcagaagacttttctggaaggtggtactggagctaagcctagatacttgttttagaaacttttttttaataggtgaagaaatgggaaaggcaatccaagaccagtgtaaacaaaagcttaaagaataaaaacgcatttcatatttatgtgattattgtgggtaggggacaggcaggcagagacacgttagatatgaggaacaatgaggggagtaggtcatagagggttttaagtaccttttggaggggcttttctttaatagcaataacaaatt

SEQ ID NO: 211402 - DNA, 524 bp, Homo sapiens
catcttaccctctactgaactagctctggactgtccctttttcttctcaccacctctcttctctttcctcccttccatacatttgattagatactgtggggagtgaagacatgagtcaaagaggttctagcccttaagggagatggatggataaataaataatgaaaaaaaygtaaagaataaattgctcactagaggtaaaaaaaacgtgcatgggtagtttaaaatggttgaatctggtggagagattgcagaagacttttctggaaggtggtactggagctaagcctagatacttgttttagaaacttttttttaataggtgaagaaatgggaaaggcaatccaagaccagtgtaaacaaaagcttaaagaataaaaacgcatttcatatttatgtgattattgtgggtaggggacaggcaggcagagacacgttagatatgaggaacaatgaggggagtaggtcatagagggttttaagtaccttttggaggggcttttctttaatagcaataacaaatt

SEQ ID NO: 211403 - DNA, 524 bp, Homo sapiens
catcttaccctctactgaactagctctggactgtccctttttcttctcaccacctctcttctctttcctcccttccatacatttgattagatactgtggggagtgaagacatgagtcaaagaggttctagcccttaagggagatggatggataaataaataatgaaaaaaacgtaaagaataaattgctcactagaggtaaaaaaaacgtgcrtgggtagtttaaaatggttgaatctggtggagagattgcagaagacttttctggaaggtggtactggagctaagcctagatacttgttttagaaacttttttttaataggtgaagaaatgggaaaggcaatccaagaccagtgtaaacaaaagcttaaagaataaaaacgcatttcatatttatgtgattattgtgggtaggggacaggcaggcagagacacgttagatatgaggaacaatgaggggagtaggtcatagagggttttaagtaccttttggaggggcttttctttaatagcaataacaaatt

SEQ ID NO: 211404 - DNA, 571 bp, Homo sapiens
ggatgggctagaatcttgctggtgctrcttcagccctgtgaccttggatatgtcacctcacctctcttagcttcagtttcctcatctcttagccagacagcattatagtatgaattccacaagtgattttacaagtatttagtaactggttggcgtggcattgaccagtcattttgcaagagaaaaccttgcaaaaaggttttgcatggcattgaccggtcatgcaaaacctttttgcaagattttctctcttcaagcacttgtatgtttttcttttttgttggaatacatgaattagtttccctggtaagctaaaaattcataggtaagctcaattgtttatcttccatggaacttaagacagtgtattgctcatgataggtattagacaaaggctatctattgattcagaaaacaaacaaaaaatgcaacaagatagtagctagcaagacagtaaaaatctacaagagtaggtttaagacactgtccatcaaaatatttgcccattagggcttcttaaatttctcattctagtgatgttctaaagggtaaattggtcttttgcatggtg

SEQ ID NO: 211405 - DNA, 571 bp, Homo sapiens
ggatgggctagaatcttgctggtgctacttcagccctgtgaccttggatatgtcacctcacctctcttagcttcagtttcctcatctcttagccagacagcattatagtatgaattccacaagtgattttacaagtatttagtaactggttggcgtggcattgaccagtcattttgcaagagaaaaccttgcaaaaaggttttgcatggcattgaccrgtcatgcaaaacctttttgcaagattttctctcttcaagcacttgtatgtttttcttttttgttggaatacatgaattagtttccctggtaagctaaaaattcataggtaagctcaattgtttatcttccatggaacttaagacagtgtattgctcatgataggtattagacaaaggctatctattgattcagaaaacaaacaaaaaatgcaacaagatagtagctagcaagacagtaaaaatctacaagagtaggtttaagacactgtccatcaaaatatttgcccattagggcttcttaaatttctcattctagtgatgttctaaagggtaaattggtcttttgcatggtg

SEQ ID NO: 211406 - DNA, 581 bp, Homo sapiens
ttgtcactgccaaggcaaagtggatctccattatatttatgtcctaataacaaggccctgctgtgccttgttctggcttgttattgtggttatcagaagctctctaagcttcaaattttctaaaatgaagggggcaggaaagagagcaggatcaggctaagaaatgtttgctgtgattttcttaagcttcttctgttggtttgttatgagagcaaactgattagaagccctagtgaaagcaaaggctagaattaggaacaaaagaaagcaaaattagagtagagttaaatctaggtgagatggacagagatcgtgaaaatgaaactcaaataaagggtatgttgtatactgtgtacactgagaataagatattaaagatgcactacctgggggaagtcattagctcatgacyttatttaatgaaaacatttttgaaggcgttctcctgtttttatacatacacattccaaaaaatatgtatgtgctaacctcaaatgtgtgaaagatgcagatattcatgggatgatgggggcttcattccagaaagcttaaaatactagaaaatccctacaattacttct

SEQ ID NO: 211407 - DNA, 448 bp, Homo sapiens
tgcactctctaccctccagtgcccctcagatggagcctgtcactccctttgtgcacctgaacacagcatcgggcctgtattagtgtaacagcctgctaatgagtctttctcagaccacaagaccctgagcctctcaagggtagagatagcatcttacatatctttgttttctcagcacttggcaaggatctggcataaaacaaaaaggggatcagtaagtgaataatgagtaaagctgtctaatataaacaattataatcattattttcttgtattgactaccttttcagagaggaacactttaatcacaataaccttacatatacagtcattctgtatatrtgcatgtcagaaaccccctcagataccaagctctgcagttgccgaggttgcttatataaaatgccatagtatttgcatataacctgtgcacatccttttgtatacc

SEQ ID NO: 211408 - DNA, 550 bp, Homo sapiens
aacagtcgtacctggctgaacattcaatactaggcttagtgctgggttgcatcaaggccaagaacaataagcttatcaactaggcaagtcaacaataattagggagcactacttggctttctaatgggctctaacactagtgtttggtgtgggttgtacaaagastgctggcctgggacaaggttccatgccaactcactctatgacctgggtctccctgctaaagcccctttatttcttccttcataccgtagcattaaagttgtgctaaatgcaactctaccatggtatgtcccatggcacagccctttaaaaggaccctagtacaccctacaaagcctaccataatcctgtctgccttcccagcctccttgctgccccttgcaccttgtattttgcaaaatcacgatgcatgctacctccaggccatcacattcattgtttcctctgagtgggttatgtgtggtggcttggaagaaaccctaatttaaggctcacccttagcgttccctctatcatcttttcaggtttccccagtcatccttctcta

SEQ ID NO: 211409 - DNA, 527 bp, Homo sapiens
ataaaatattttaaaacaaaggtatgtccrttccttagctagagaactattcttccactgactcctggaagagaaaaaaaagattcccatttcttcctctacctcaaaaacacaaagcaaacccaaacaatccaattcctaatgtagtgtcacatagaacccagggcctgaaacaatatttcatgctagttttcctgctatatgcagagaacaatttagttatttacattattgagaaatctatttaacagcctagaatcatcctagtgcttccatcagcagaaggcttgctaaaaaaggcgtgagcagcggcgtctgcgaatgggaacatcaaagactctcctccgtctctcctcttcatcatcttcatctgattcatccatatctgctgaatcatcatcctcgtcttcctcctcttcctcctcctcctcttcttccatctcttcatattcatcaggacccatttccttgaaagagaaaacaatcttttgataagaagagcatctatcagttttttagttatttca

SEQ ID NO: 211410 - DNA, 298 bp, Homo sapiens
cattcttccgcctcagctcctctagtagctggggactacaggcatgtgccaccacacctggctaatttttttaaaaatttttgtaggacaaggtctcactatgttgtccaggctggtcttgaactcccaaactcaagcaatcctctcaccttagcctcccaaagggctgcgattataggcgtgggccaccgtgtccagcctgggrttacactttgactctgtttcccaatgctatcactttcccctttccctaggaatctggtgtctcttattttcactttgagtaccctataagtat

SEQ ID NO: 211411 - DNA, 301 bp, Homo sapiens
atatacaccagttttttatgtccaactgtcaagttttctcttgggttccatgccattatgtcagaatattaactctagttagagaggtctataactaaaatgcataatattctatacccattctacaatcctgaaaatacctaatgcatgcatttatacaaccatcagaacacatcttaatgccatatttaaacacacgttctacttactggacattggtagaaaayttcatttttgtttcggccctctgcagcttccactgctatgtactgactcaaaccagtatgtatgcaaaaagtta

SEQ ID NO: 211412 - DNA, 591 bp, Homo sapiens
gaattcaaaaccaccctgggcaacatgacaagaccccttttttacaaaaaatacaaaaaagtacctgggcttgggggtgcccctgtccttctacctactgggacagctgaggtggcaggattgcttgacccaggggagtcaaggctgcagtgagctgaaatcatgctactatactccaggcttggggaccgaccaaaaccctgtctcaaaaaaaaaaaaaaaaagttccacaataaatacttcattctttaraattaaattttaaacaggcaattcaattatagactgtgtttaatatgacaaaacaattttatttagtgtagtgtatgcagctctggacaaatgattgctctttacatgtatagtaggtagaatttgcgtcaagctcccaaaataatttgcctggcctgtaataagatacacatttcaagagttctgaagaatttggttaaaatatatcgcacatacctttactgtatgtcccatcccccatcccataccagacttcattttaactatacaaatatattgataaaaattgtgtttttatgagatatatttattttggtaaaatctaattcaagctataga

SEQ ID NO: 211413 - DNA, 538 bp, Homo sapiens
gcttctgaatcatcgtttgacattttcatcaattttggaaaattctctgctgttatctccaaatactgcttctacttcattctgcttttcctctccctctgggattctagtgcacgtatcatagacctttctgccatgtcctcccatatgtgtcttaggctctttttgtgtttttccgtccctttttgtcttctgacctggcttccagtttataattccctctttagctttaaaactatgatttgctgttaaaccctttcagtgtattcttattttagtttttgcatttttcagctctaagatttccatttgattcatttttatagtttctagttctctgctgaaatgctccatcttcatttaattcattgaatgtatcagttgtggttatttttaagtccatgtttactaactccaataacgatgtattatggatttggttctattttctattttttcctctttctttagtcagatcttgtcttggtataggcctagttgtttttaatttattgctagacrtaatttgaattttggg

SEQ ID NO: 211414 - DNA, 541 bp, Homo sapiens
ggctgggggcggttcgggcgctggtgggggcggggcaggggcggggccagggcggggccagacctgcaccgggccaggcaagatggcggccatggagaccgagacggcgccgctgaccctagagtcgctgcccaccgatcccctgctcctcatcttatcctttttggactatcgggatctaatcaagtaatgggacgacacgcatggcaggggtgggggcatggggagaggaggcggtgaggcagggggaaagggggtcggggccgctgacaggacccgagcttccgcgacaccagaaggtgacgccagggccgccctcatcctgcggagccaccggggaccgkggcgagacgggggcggaaagggcctcgccctgagtcttcctcctgtcctgggcccaggtatgagaagcgacgagatatctctctcccaggcctcggtgaggcccacttgcaagagaaggaggtagtggccctcgtgccgcaccgccgcgctccgcggacccccgctggccccgcaggtgcccgcccggttggggtca

SEQ ID NO: 211415 - DNA, 522 bp, Homo sapiens
ttgttgccgtttatagtgactatctgcatgctcctaactcccaaacctgaatctccctccctgacttccccactgaggtctagaattgtttgcacaactgtcygctggacctttctattggctgtcccacacttattaactggattcagtaaatgttaacaaatttgacagaatcaaagtacagatgacagaaagtgggagttgagaaaggtggaagaaatgagtaggaatgctgatatcttttcttagattaagtggagtcaggtagtgactaaagttggtgaagtaagaagcagaggtttaagcatattatttaaagctgcaagctttagacagaagtgaaaattaataacagagctatcaaacattgggaggaaaaagaacagggtaaggggaattttaagtattgctagatcttcccgtgtttccctttggggtatcagtagatacatgtgaagttgataaatcaagaattagaggcataaacatttagaactatagaggtaacttctagaaatacct

SEQ ID NO: 211416 - DNA, 559 bp, Homo sapiens
tcatccagtcctttcagacctgggagatcttgatagcaccattgtaaaattctgatttcagatcctgggacagttcctttcctgattttttgttcattgccaggttacttaatgtctttacagcctctattgcttcctggaattctatgttcatgtgacttgtctttttgcattgcaatctcttgaatatraaattcaccacatgctatactacaaaattattgcaatttaaacaaaatatttgtgatgcatttggaattcatggaaaggttgaggttcatgagaagtaacatttcatgcaatttaagtcaggtagaatcagttttcaatgcttgtgactaaaataactacagataattttttaaagctacatattaaaaccaattccaaatttatgtgtttctaagatacaatataaaattttaaagtttgcatatgtcaagttccaattacatggaataaacaaatattcttttttattcttaggtagaggtccctaaaaagggagaaattacaaacattttttcctagaaatggagaggacataatatttaatgct

SEQ ID NO: 211417 - DNA, 540 bp, Homo sapiens
actgtttattctagtgagccatttgtttaatcttttttcaaggtttttagcttctttgcagtgggtttgaacatcctcctttagcttggagaagtttgttattaccaatcgtctgaagccttcttctctcaactcatcaaagtcattctccatccagctttgttccattgctggtgaggagctttgttcctttggagaagagatgctctgatttttagaattttcaccttttctgctctggtttctccccatctttgtggttttatctacctatggtctctgatcatggtgacttacagatggggttttggtgtggatktcctttctgtttgttagttttccttctaacagtcaggaccgttaactgcaggtctgttggagtttgctggaagtccactccagaccctgtttgcctgggtatcaccagaagatgctgaagaacagcaaatattgcagaacagcagatgttgctgtctgatccttcctctggaacttcatctcaaaggggcacccagctgtatgaggtgtcagttggcccct

SEQ ID NO: 211418 - DNA, 595 bp, Homo sapiens
gaatggagccaaagtctgacttatctggggagaggaagttaggatcaaatgtctcagctcaagtgaaaatagtawctgataatcattacattatacacttttagacttcaaaataaagttctttctaaataatggaagaaatgactttggaatcacctaccaattttcagaatgcaatttatcatttaaaaactaaatcacaagccataatctaaaagaaattgtagcaatttttttttttttttgtaaattatattctgatactctgatcttcttggtcccccaagtttgctttattgatcacaacttagcagcttcttactacttattactttctatttatgttttagaatattcatttttttcctctacttcaatgttagaagttcctgggctcattttttggtaatcttaccttctctatatctaaatttattttctcagtgatattattctgtagcttcacaattttaaatattattcaactgtgaaaaagtcctgaatttataagtctatcctggattgtttgctgaactcttggctcatacccaaattgacatgaccagttggcaatttcatttatatgtctataaat

SEQ ID NO: 211419 - DNA, 575 bp, Homo sapiens
tatcactttgtgtcagacatgattcttaactttagaaatctacaataataatgattatgagagtagacaaatttcttgcttttagggaacttactttctagggaaataaggcagaaataaacraataagaaaataaatatataacattccaaacaaaatttggaatgagtgttaggaacgttcattcaacataattatttcacatttattatgtgccacgtgctatctcagatcttgaaaatacaaagaagcaaaaaacgttctacccttgggaatttacagtggcaaacatacacaggaaaggttaaaaaaaaagtttcgcagaacagatgtaaaatgcaggaatttatgacattctggttactcagattctatcctagtgtcatgataattcggaagagaccatcagggtgagccatctttgattcatcctcagagctgggggcaatgttgtagtccagtaaatacagtacctgatcaattggcagccacatgcttgatgatatgacttctcattactgaatttagatatatttttataatgtcaaagcaactgagaagtgaaagagctatgg

SEQ ID NO: 211420 - DNA, 586 bp, Homo sapiens
caagatgcgcccactgagtgctaaagaatgtgaacctgcccatgtgtgcaagtgtgtgagtgcacacacacctgcctgagcagtaagccctgaacagaagccaggcagaactcaggaggattgcggaggagagggcttctattctattgggatgcaaatatcgtggcattcagagaaggtggagaagcagggagcagaggaggagtatggcagagagcttgggggcggagagaagaatcacgagmacacatcatttttctatggctcctttcttcggaggagcccatcgcccctgtaggcgggatgcttcatgccagcatgtgctctgctgatcagagccacgctcctcttaaatcaggactccagggcatggtgcccccagagtttctggaattctgcctcctccagtgaacatttgttgagcacttgtcatgtgccaggtgccaaggataaaggagaacacggattagcagaagaagagacaagttcattcgggtctgagtgtggacttgaggatgatagtcctctcagtgaggcaggtgctaggtacagggtgtgcagtcaggggaggtagcagagggcactg

SEQ ID NO: 211421 - DNA, 570 bp, Homo sapiens
gagcttcatggcggagaacacgctcctcccggctctgtgaggggggccaccagaatgaggtgcagggagaggracgcatggaggaaaacacacaaacacagaagagccaaacatgagagaacacatcagagaagggagatggacccggcccctcacctactggtcccgagacagatcgggatctgtcttcccaaattgggagccaggagggggaatcagggcagtgagagacccctccacttccgcctttgccatcctttcacacacggaggagagggatggggtccccagcaagcagggaacgtggtcttgagccggaaagagccgttttaactggagctcctctgggtcttggacttttcagtctgatcccagcccctcagtctagtctcctcagagctccgagccctgccagtgtccccacgctcatcctccccggctcagctggttggagagaaagcccgaggactggagacagagcatcagaacggcggggcagggaccagagaggactcaggggcagaggccgatgaggagatgggagatgtggttgaaacgagctgttcagtt

SEQ ID NO: 211422 - DNA, 555 bp, Homo sapiens
tacatacaagagtggggagaacagtatcatggccctatgttgtaccatccaatttcagctaccatcaattcatggccaatcttgcttcatttgcatcccatcctacttcctcaccccaaattattttgaagaagatcccaaaccccataccattccatctgtaaatattcagtacacagttataaaagataagagctcaaataaataccacatactttgtcattttaaagaaattaataacaattccttagtactataaactaatcaggcagtcatcaaattcctaattgtctcatcaatgtcataatttttttccaatttattaaaagcttcattttaatgtgttttgtaaatcaggtatttaatcatttatccactcgttctgttgaagggcagccatgtgccacgcactgggggatggtggggaatgagacagaygtggttcctgtcctcaaagggggaagatgaccactgcacccatcatcatgaggagctttatggaagggaggcacaggtgcccaggcagctcatggtgaggaaacccacttagcccag

SEQ ID NO: 211423 - DNA, 529 bp, Homo sapiens
cgtgtgtccccagcccacagttgtccgtgcatctttctccagatcaagccctgcagtcaggcgagcatggagaaggcgagcatggaggagacaagcacgaggtcagaattggagctggcagagcagacggagatggagggagaaaaggaagaaagcctggtggaaggggagaaggargaagaggaggagaccccaccctccccctgggtcatccaccccaatgatgtcctcaagattctggaggccttcgtcatgggtctgaagaagcctaggtgggctgcggggctggaaggcttgcctgagaccagaaccaggggagctggatgggctggggagccaggcagagccagtgagtggagaagagtctgctgggcaagatgcggggactaaggacagggctatctgaaggcgggctggggcaaccaatcgctggacagtcaggaaagcaatagggcatagtggtgatctgtgcttttttcactcatcattcattcagcagacatgcactgaaggctgccatgtgtaagca

SEQ ID NO: 211424 - DNA, 558 bp, Homo sapiens
ttactcctcataagaatgaaaattctaaagataaataaaagctgccaaggaaagtagcagatcattacccaagtatttttataattccttgtcctatgcttccaccggtacactgcaaattccacccaaccatgattaagggaaaagaaacaaagatagcatacctttgagctcaaaatgatgattgaaggtatctagtgagacttgccaagttctaaagattcatttaagaggactgtagaattatccaaaggcatcttacaatgtgatagaatcagcttctgagctccagcagctttgcaggaacaagtaaaaattctgcaaagaaacagtacttactgaaataatgctaaccaatttaagtaacattattatcactagtatttttgtttcatcgaygtatagaacatttattgcgagcctcctctacgtgccaagaattgggaatgtgtcaataaatagatcagatctcatcaacccctctgggaactcaaccgtaaatgggacaaaaagtttgaaaaatcacgatggtgtgaagggaaagcataacagagatac

SEQ ID NO: 211425 - DNA, 424 bp, Homo sapiens
tttgtgtttggtaagtgaagccagtgagamaatgaagcatgcacatgagcagtggaaacaccccagcggggaacgcatgcatgtgtgcatgattcagggcagtccagagtgcagctgagccagtacctgggcccagttgcagtggtgatggtggcgggcagcaggagtaacagtcaggacagcaatggctgcggctccaaagacaggaaagggctctgcatatggacattgccaggaccaccagtgggagaccagctcgcctgtcccttgccagagcttagccccgcatcatctgcacaaatagtaactctccatcctgagtactgggacaggaactcattctgctaacttctcagtaaattagtacaacatgtatacaataaaagtgtatacatgaatattgtcatagcatagcagggggtta

SEQ ID NO: 211426 - DNA, 603 bp, Homo sapiens
cttattgaaaactgaaggaaaggtcagtcttattataaattggcaaataacccggctgaattatgtctgtatcctagggcttaatgaaaggcagaagttaagagcaacgaaatgtgatatttggcagaagaactctctamactctaaagtatccaggatgctgcatggcttctctttactccttctagtaaaatgaaataagagagacatgatttaaagatgaaatttataatttaaagggaagcaaaatgcaaagatccagaaaagtctcagcctggccatgtaaagaataaaaataaacatgtttaagagataaaactcaagttgtggtcaggcaaccatttgataaggagattaatatgggtaaagaaaatccaggtgctagtcatcaagacaatgggagaatgatggtcaaggcatttcagaggtcttcacagcttcccctcccatcagaggcccagagtgcagtgacttgggggcagaatggttttggaggatgggtctagggttcctgttggaccttgaggcttgctgccatggctgtctcaggtctctgcttcttgcattctggtgcagcactctttggctactctagccatagct

SEQ ID NO: 211427 - DNA, 591 bp, Homo sapiens
tcctccttcataaatgagattaatgcccttataaaagaggcttcacacaacacttggctcatttgaccttctactttctgccatttgagaacatagcatttctcttccccagaggatggagtgctcaccagacagtctaacctgtaggtacactgatcttggacttcccagcctctagaactgtgagaaaataattcctgttatttataaattacccagtctatgttattctttcatagcagcacaaatggactaaaataaagataaagtaaaatcttttatttttaaaattcttaattgatccaatggattttgtttattcaaagcaataataataataataatgttttggttgattatagcatatgaataaatgaactgaatgatgataatgtaaagaatgagaggaagaatttgasaatactctgttatgaggtatctgtatttcagcttgaagtggtacagtattatttgaataaattagttgttaatgtatattgtaaactctagagcaaccactaaaaaaatttatgatatgctatttacaggctaaacaaggagagaaaatgaaatcatgtaaaatactcaatc

SEQ ID NO: 211428 - DNA, 429 bp, Homo sapiens
tcctattacccaatacattatgtctggctttcaacaaaaagttacaaggcatgctcaaagccaagaaaaaatatagtctgaagagacaaagtaagcatcagaaatagacttagatatagcacagattttggaattatcagatggtgaatttaaaataactatgattaatatattaaagaacttgaagaaaaagttgacaacatacaagaacaggtgaagaatataagcaaagagatggaaactttgggaattaaaagaaatgcgaagaactaaaatcttgtaaaagaaataaagaatgccattaatgagcttatcagcagactagacattgccaaggcaagaataaataaacttgagatatgttaataaaaacttcccaaactgaaaygtaaacatcgtttaaaaagaacaaatatgaatatcttaata

SEQ ID NO: 211429 - DNA, 631 bp, Homo sapiens
aatctataacaaatatcataatgctgagacactcaaagctttcccaccaaggaacaacatccccttttaccactgcgattttagtatcatactggaagttttagctaatgcaataagacaggaaacagaaaaaaaggtatacagattgggaaggaaaaaatgaagctgtttgttcacaattttcatgatcatctatgcagaaaattcaatagttgaaaaaacacccaactcctagaaaaaataagtgattatagcagggttgcggattataaagttaatacacacaagtcaattgcttttctatataccagcagtgaacaacaagaatttgaaatttaaaaatacaatagcatttacattagtgctccaaaaaatgaaataactcggtagaaatttaacaaaatatatataagatctatattaggaaaagtagaaaagtctgctaaaagaaatcaragaactaaataaatgaagagatagttcatgttcatagataggaagactcaatattgtcaataaatcagtttttccaaacttgatttatgggttcaatgcaacagcaataaagtctcagcaggttattctgctgatgctgacaaactgattctaaattttatatggagaggcaaaa

SEQ ID NO: 211430 - DNA, 372 bp, Homo sapiens
aagcagggaaaagttgcattaataattaataattgagttggatgaaaatacttttaagaaatctgatgtctttgcagtaaatctagtagctctaccttatgtgtaaatatgaatgtatatatggtattataaacatatattaagaagaccagttcaaattaagaggactatgtggcttcatgtaaattgattataagaaataaaaataaaacttgttcccaaaatgagggttatatacagtgatgattggcattatattcaatgtaaatttccagttatggaaatttcatgtattattatatttcagtkctgttgataatcagagtatacacttaaaaacatctaatgaatgaaggcatatgaatcgtcatt

SEQ ID NO: 211431 - DNA, 423 bp, Homo sapiens
ataattcatgatctctaaaaatttattgtaaaaaataagctagggtgggattctggatagatggatgcattgtcagggtagcttggtgaatctcccccaatctcttawattaaaaaaagatagataaattaatatagcaaaaccaaatgtcccattgaaatatctacatagaatcacatgaaaaaatggtttcataaactctgaaatatgtgtgtgtagtcaaacctacaaaacccatgtggaataagaaactgcaagaggagaatcagaagaaaagtaaataggttcttgcagccctggaatctgatgaaccctcaagtcacccaagataatcttcccagattaaactgagaagagtatccaaaactgagagggggattttaggcctaaacaaatgggtgattttaaggagactgtttgaag

SEQ ID NO: 211432 - DNA, 417 bp, Homo sapiens
catgatctctaaaaatttattgtaaaaaataagctagggtgggattctggatagatggatgcattgtcagggtagcttggtgaatctcccccaatctcttaaattaaaaaaagatagataaattaatatagcaaaaccaaatgtcccattgaaatatctacatagaatcacatgaaaaaatggtttcataaactctgaaatatgtgtgtgtagtcaaacctacaaaacccatgtggaataagaaactgcaagaggagaatcagaagaaaagtaaataggttcttgcagccctggaatctgatgaaccctcaagtcacccaagataatcttcccagwttaaactgagaagagtatccaaaactgagagggggattttaggcctaaacaaatgggtgattttaaggagactgtttgaag

SEQ ID NO: 211433 - DNA, 538 bp, Homo sapiens
gagcagtcaaaggcacatccatgtcagtacattttatattcagggatcaacacaagtataattaaggtgaagatcaaagagagtaactgcagagcctgatgtcccgactaggtgatgatttactaacttaattatttcagaatcttctgtgaaaaatggggtaactgctctttaacagaagttgctctcaggtgtgccatggaatatgtgatgacataacacaaataattataccttatttattaaaaaatatatcagaatacatgatggagggttcaagtgaatgcttttggattctctttgcttaaatagaaaatttgcawgaaatgccattgtttttctatgtgtctctcagctccggcagtcaagaatcaagcttgctggactgaggaaaactgagtttctctaagatacttaatgtgagaagcatgcaaaaatatatgaattaaaaaaaactgggtttttcatcagcttcaacctagatcttagaaacaaagactatcaaagagtattagaaacaaagagattttaaaaataa

SEQ ID NO: 211434 - DNA, 309 bp, Homo sapiens
tggttttgaccaacaaggtgactgtattccatataggatttagggaaaaacaggctgaatgtcaggagactaaacaggctgttgctcaacttgaccaaatttctgtaatccctggagaaccttcctatctgcttacagatttggaagaaaaagtaaaccgtgtgagtctatatgtcctctaaatacttctaaataccctraatacttcaactcaatgggaaatatgcactctattaccatttaacttaaccataagataatcaggaaccaggatcaactgacaactgttatattaagaaaaaaaatttt

SEQ ID NO: 211435 - DNA, 494 bp, Homo sapiens
aaaacaactatttattttgacagctgcctttgccaattgccatatttatttgccagtgtcttgaggacagaaaactaaaacacattgttaaaaatgtatagggaatatatctgttatgtttgagatcaaataattaaccagtaactactcaaactctatttaatgccatttttatagaacatgagaaaatttatgcagtaggtttattgtaataatagtgataatagtaatagcatggatactgtaaattacstatttaagaaactgtgtgtataactgttgagaagttattaaatttttttgttttcattcaccctttacagtctacacctagagattcctagagagaaaaattaagtcttggacttcagcaaaatgaatatttattgaattagctatgtaaatagtcaaaactaagaataactttttcagttttgggaggaaatgccaacagtgttttccataatggctgtaccaatttacatttccaacaa

SEQ ID NO: 211436 - DNA, 398 bp, Homo sapiens
cttggcaaagtgcactcagtttattgaccaaaaaaccctccagtttttcttgcagtactaccctattgtgaaagctgaaggcttagaggtgaatggagaccaatgtcagtatcatcctgaatgcataaggctcatttatccttggagatttcagtttttccttgtttcttcaagtcacatgcaggaccaacatcatgtggaagctgccaagtcttggggcttgcaccctctgaagcaatggcctgagctgtaccttggacgcttttagttacagctggagtggctgagatgtagggcaccactccctaggctacccagagcagggctgtcytagacttggtccacaaaaccattttccctcctaggccttgccgcctgcatggcgaggggctgccatg

SEQ ID NO: 211437 - DNA, 604 bp, Homo sapiens
acctgggtaccaacaggacactgagctggttaacacttaagccatctgtgaatagcaaagctgaaagagcacactgtaacacatgcccacttggacttyggcagttgaagacatccacctttagacattaatgttggggcagagtccaaagagctcaccctggctcctgcacctgcctgtcagcatgctccccctcctgtaacgggtttgagctcgcaggagccaactggagagccacaaccctgttgcacatcctatgaagggggccagggaactctcccatctcaatattacaaaaacttagttgataaagctgtagcaggatttgagaggattgactctaatttcaaaagaagttctactgtgggtaaaacagcatcacatgacacaaagaaatcttttatcaaaggaagagtcaatcaatgtggccaacttcattgctgtcttattttaagaaattgccacagccacttcaaccttcagtaaccaccacatcatcttcagcagccatctaccttgaggcaagaccacaccagcaaaaagctaatgactggctgaaggccaagatggccattagcattttttatcaataaagttttttaaa

SEQ ID NO: 211438 - DNA, 604 bp, Homo sapiens
acctgggtaccaacaggacactgagctggttaacacttaagccatctgtgaatagcaaagctgaaagagcacactgtaacacatgcccacttggactttggcagttgaagacatccacctttagacattaatgttggggcagagtccaaagagctcaccctggctcctgcacctgcctgtcagcatgctccccctcctgtaacgggtttgagctcgcaggagccaactggagagccacaaccctgttgcacatcctatgaagggggccagggaactctcccatctcaatattacaaaaacttagttgataaagctgtagcaggatttgagaggattgactctaatttcaaaagaagttctactgtgggtaaaacagcatcacatgacacaaagaaatcttttatcaaaggaagagtcaatcaatgtggccaacttcaytgctgtcttattttaagaaattgccacagccacttcaaccttcagtaaccaccacatcatcttcagcagccatctaccttgaggcaagaccacaccagcaaaaagctaatgactggctgaaggccaagatggccattagcattttttatcaataaagttttttaaa

SEQ ID NO: 211439 - DNA, 573 bp, Homo sapiens
tggagatgtagtacttgtaagggaaagggaacacattccctttgctctatgaagtttagctaaaaatcaactgacaaaaggtagattaataaaagaatcagtgtacaaaatttattaatgtgcacacgtgtgtacaacagtcatacaaactatgagctcatagagaagccagagggttaatgcttaaatatgctcttcatagggcatatgacccaggmggcagcagacagacattaaaggaaagtgagggccggagctgtccaagaataaaagttgtcttattatgcagataaagtcccccaggtaatcttttggagctgtcttcagaagaataaacgagaagtgtgtctggccatggtgacttccaatggcttctcttctcaggtggttggttttttcatgttagtaaatgaggcggcttaagacaattgcattttttggtttttttttggaaagcatttttggtcagataagaaaattccagagagaccacctccatgcacgtggagagaaacaaggtgagagaaagccttgattctgagacagcttctcaggtctctcagtatgtcaaag

SEQ ID NO: 211440 - DNA, 240 bp, Homo sapiens
caggcagcaaatctcttggatgcaagtaagttgccgccaatagccaagagttctaatatgctaagaaaktggaatgtctagatcatacaacattaatgtcaggaaagccttacaatcattagtcaataatggctgcagaataaataagctgtaataataaatttacagtctttcataaattccataaatacctatagagaatatgatatgtcatagacactaatctaggtttgggctgct

SEQ ID NO: 211441 - DNA, 240 bp, Homo sapiens
caggcagcaaatctcttggatgcaagtaagttgccgccaatagccaagagttctaatatgctaagaaattggaatgtctagatcatacracattaatgtcaggaaagccttacaatcattagtcaataatggctgcagaataaataagctgtaataataaatttacagtctttcataaattccataaatacctatagagaatatgatatgtcatagacactaatctaggtttgggctgct

SEQ ID NO: 211442 - DNA, 589 bp, Homo sapiens
ctttgtttttcatcactaaaatggttattataaggaaaaaatacagtaatggactgaaaaactttatgcaagctgaaagtgacctactggtgtcacttgcaggcattattataactactgttgtgaagcactatgctggttatacacgaggtggtctcatgggaaagaagaataggctgcagtttatgtttacttttcctagaacccctatttattccccacccatattcagggaaactgtgagtgcatccttgtcagaggctccatttgcacagtaatctttgtgagtggcacctcaagggatatgcagtgcatccctgcatgggctgctgctcttcacacacacacacattccctcctgactatgatgtcatgttctggatttgggttccagggcccagttgcttttccttccctttgttctacatatattattcttagaaaagtcacagctgtcaatctaggatttcttactgggcagggaagtcattatgttatatacagagaagyaatataaaaaatacctgagaattctcaagcttggcccagtttccaaggggaatgttttccttttcaacactcattctaa

SEQ ID NO: 211443 - DNA, 542 bp, Homo sapiens
cctgcttttctggctctcaaaccttctcctctcagtctttccyacctcagtaaatgtcaactcccttctttcagtttcccaaacttttagctttttgattatcttgtccttttctttccctcatatcccacattcctcatatcttgaacaaatcctgttgcctttaccttcaaaatatatccaggatccaatgtcggatcatcttgtccacctctaccactctcacccaagccactgtcaagaaaggtagagagaaagacacattatcacaacatgttcttgaccagactctcccctctcattcttcagttgttcatctctccccacttgctcctttctgatggttcctgttgcccacagaataattatcaaaccctccacatctggcttgtttaccccctttctgaatgttctctcctctctaaactatgcatcttctcttgaccacattgtgacatgattgtctctcatcctctgctctgctgggtccctctgcctgatgtctcctacttctctctttgatgccactcatccttcaatgc

SEQ ID NO: 211444 - DNA, 603 bp, Homo sapiens
atcactccaacgcttccagcaatggtaaagacagtgaatacaaattctcaacttttcttaaacctgtcagatgactaaagttatagggcaacaaattagcctaaaatctggagataggcaggccctgcagggagcttagcactagactccagcaagaagacttcagctggaattgttgacaaattggtggaggccaaatatgggctgctgggacagtatgaaactcctgggctgcagccatagtgagattttatattctcttacagacttttcttttcgaaacacaccaggcactcacaggaaacacagagaagagtcctgagaaaacttccagcctagtgctagttagggaagataaaaagcagtgactacaggacaggcacaaaacccttaaacactgctctctgtctttgctatggagcaaaacccttagcctggaggaggaagaacagaaatcattgccatggggcactggtgaaaacccactgtatctgcgggaagggaatagaagaaaacaaagcaaaacacatgtgctcctgggaggagacaagaatatagtaagactgtgttmaaaaaggatgaggatgtattaaaagggcacag

SEQ ID NO: 211445 - DNA, 609 bp, Homo sapiens
cttagttgcatttcttaaaactcttgggaatactactgggtttgtagaccaagaacctgctgtgtttctcttgtatcctaggttttaatggtctctgatgcattagatccaacaatatattaggaatatactaaacacaaattattaatttttttgagaaagaatgacaggctcataaaaaaatctgatgatagacctataaagaatctaaagaaaactattgcagttctattcagagaaacacatatataaaatgatgtaacaattcaattttctgtgaagtctgagcccccaaagccctaaaacaatataatgtaatagatgttcaatactgcaagctctcagtagagatttcaggcygtacatgcaagacaggctgtgaaactggttcctttcgcatattagattgttcatccacaacagtgacacctgatagaaatatgtgagccatgtaggtaatttgtggttcttttgttattgttagtgtttttaaacataattagttataataatatattttatttgattcaatatatcaaattatgattattttaacatgtagccaatataaaaattaagaagatattttacttttgggttttatatttt

SEQ ID NO: 211446 - DNA, 565 bp, Homo sapiens
gactcaaggccatatatttaagtgtaaatcargcccacatcacagttggaatgtcctgaatgggccccgtttcctcttggaagggcctgtgacctctatatctgcccactaactctcctcttctgctgaaatactaaaatacaccaggcttagacttacttgcctcatctgcagcctttggtttcagatttttaatcagaggcagcaaaattactgcagttatcaagcttttctctctccctcttgaaaagtcttagacaggccaaaatggagaaaagccattttcctagaactctattggatgtgacttaaccactgcatgctgcattgcccaagccaaacaagggtctttaggtcataaacacacaggcatctctgtaccctctttaagaacaggcatgatttatggtgttttgtgagctttaaatgaggtcagttaatgtttgcaatgttcttagcaaactgcctaacatataacaaaagctcaaaaatgcaagcttcactatttaacagaattttccagtctcgcaccacagatagagaatacacagtctggcttgaaaat

SEQ ID NO: 211447 - DNA, 565 bp, Homo sapiens
gactcaaggccatatatttaagtgtaaatcaggcccacatcacagttggaatgtcctgaatgggccccgtttcctcttggaagggcctgtgacctctatatctgcccactaactctcctcttctgctgaaatactaaaatacaccaggcttagacttacttgcctcatctgcagcctttggtttcagatttttaatcagaggcagcaaaattactgcrgttatcaagcttttctctctccctcttgaaaagtcttagacaggccaaaatggagaaaagccattttcctagaactctattggatgtgacttaaccactgcatgctgcattgcccaagccaaacaagggtctttaggtcataaacacacaggcatctctgtaccctctttaagaacaggcatgatttatggtgttttgtgagctttaaatgaggtcagttaatgtttgcaatgttcttagcaaactgcctaacatataacaaaagctcaaaaatgcaagcttcactatttaacagaattttccagtctcgcaccacagatagagaatacacagtctggcttgaaaat

SEQ ID NO: 211448 - DNA, 565 bp, Homo sapiens
gactcaaggccatatatttaagtgtaaatcaggcccacatcacagttggaatgtcctgaatgggccccgtttcctcttggaagggcctgtgacctctatatctgcccactaactctcctcttctgctgaaatactaaaatacaccaggcttagacttacttgcctcatctgcagcctttggtttcagatttttaatcagaggcagcaaaattactgcagttatcaagcttttctctctccctcttgaaaagtcttagacaggccaaaatggagaaaagccattttcctagaactctattggatgtgacttaaccactgcatgctgcattgcccaagccaaacaagggtctttaggtcataaacacacaggcatctctgtaccctctttaagaacaggcatgatttatggtgttttktgagctttaaatgaggtcagttaatgtttgcaatgttcttagcaaactgcctaacatataacaaaagctcaaaaatgcaagcttcactatttaacagaattttccagtctcgcaccacagatagagaatacacagtctggcttgaaaat

SEQ ID NO: 211449 - DNA, 565 bp, Homo sapiens
gactcaaggccatatatttaagtgtaaatcaggcccacatcacagttggaatgtcctgaatgggccccgtttcctcttggaagggcctgtgacctctatatctgcccactaactctcctcttctgctgaaatactaaaatacaccaggcttagacttacttgcctcatctgcagcctttggtttcagatttttaatcagaggcagcaaaattactgcagttatcaagcttttctctctccctcttgaaaagtcttagacaggccaaaatggagaaaagccattttcctagaactctattggatgtgacttaaccactgcatgctgcattgcccaagccaaacaagggtctttaggtcataaacacacaggcatctctgtaccctctttaagaacaggcatgatttatggtgttttgtgagctttaaatgaggtcagttaatgtttgcaatgttcttagcaaactgcctaacatataacaaaagctcaaaaatgcaagcttcactatttaacagaattttccagtctcgcaccacagatagagwatacacagtctggcttgaaaat

SEQ ID NO: 211450 - DNA, 572 bp, Homo sapiens
tttgcaatgttcttagcaaactgcctaacatataacaaaagctcaaaaatgcaagcttcactatttaacagaattttccagtctcgcaccacagatagagaatacacagtctggcttgaaaatttattacttcccaagtcgtttcttycaggatgaggacagagggtggtatgtttgctgagagaacattcacataagaaggtgccacctgctgtatcaggttcatgtctacatttagctaaagatagtttattttgcatattcatcactgaagctactatgtacccataataataggaagcagtataactggggagtctggtcagaaatgggcagccctgtcttttggctgtcattgctcctgccgatgccatatgatctcacacgtttgtggctggcatgatgacccatctaccccttcatttcactgcataagcaataatggaggcccacacttgtgttccaagcatacagttctttgcactcacatgcccaactgttcaggcattgtttctgcagctcagccactgtgccagagaagctggcattaaccacatgttctgctggtacca

SEQ ID NO: 211451 - DNA, 612 bp, Homo sapiens
caatgtacaggctcatcactgctgctgaatcctgtttattgatgacctgagaaggataactggtacatggtagaggtaatagtatggtacatcctcccctggcaagtggaggatctctagatactgactcagctcctgataactgctagtattgcccacygacctcctctaccaggccaactctgaggagctttgtgacactaactctgctgctggtcacaaggtccctaccagcctctccacttcccacctcctcactgtgtccccttgcccactccaagatacacacatctctccctgagctattctttctaatcctctcagaacgggatggggatagccagctcttcatcctcaaatctattattaaccataaaatgcttttcttttgctaatctgaatatgcaggttcttgcaaagaaattcccttctttaaaagcaactggttttttttgttttgttttgttcttttaaccaaggacctcagaagtgtgcttggaatttcatgtcgtgcaactactctttctttttcaatgcatttttgctgtaacaaccttaccctgagggcagcatgtagagcagaaagtctttgttgctgggtgaatggcaggg

SEQ ID NO: 211452 - DNA, 561 bp, Homo sapiens
tttttgtatctatcttcatccgggatattggcctgtagttttatttttctgctgtgtctttgccagatttgggtatcagaatgatcctggttttctagaatgagttaaggaggagtccctcttccataatcttttggaatagtttaagtcagattggtaccagcttttctttgtatgtctggtagtatttggctctgaatccatctgatccagggatttttttggttagtagactttttattactgattaaatttcttaactcattattggtctgttcagggtttctgctcctttatggtacaatctttggaggttgtgtgtttccaggaatgtatctatttcctacagattttctagtttgtgtgcatggaggaattcagaatagtctctgaggcacttttgtgtttctgtgtgatcggttgtaatgttacctttgtcattttttattgtccttctttgcaccatttctctctttttctttgttaatctagctaatggtctatyaatcttgtttatcctttcaaagaacaaactttttctcttgttgattctttgaatga

SEQ ID NO: 211453 - DNA, 396 bp, Homo sapiens
tcctttcttaatatagctatgtcatgtttcaaatcttggattgtttttctggctttgctagattggatttcaactttctcttggatctcattgagtttccttgccatccatatttgggattccatatctatcatttcagacatttcaatgtggataggatccattggcagggagctaatgcaatcctytggaggtgatgaaacactctcgctttttgtatggctggagttcctgttctgattccttctcgtctgagggagccaacacttcttgttctgtttgaatttgctgtcatttggatggggctttgtatttttattcttttttcccttgagtgtatgactatggggcatgttttatatacaattggttggctttgtttctagattctttcag

SEQ ID NO: 211454 - DNA, 247 bp, Homo sapiens
tagatgaatttttaagtaagtcaaggtgtttcttgacttaaacactaaaactggartgtcttaaatgcagaaaacaggatccaaagacaaaatatatagaaacacttattaaatctcccttctttacaatccacttaacctcacatgtcactgctaatccagcgcttctttttttaaacattactctcatacccctgtcccacccctgatttataaagtttatttctccaagaaaagaacttcttcc

SEQ ID NO: 211455 - DNA, 571 bp, Homo sapiens
gcaccatgactagataaagctaactctgatttttcccctatattagttccttctcacactgctataaagacatacctgagactaggtaatttataagaaaaatggttgaatttgtttatggttctgtggactgtacaggcttctgcttctggggaggcttcaggaaacttacaattatggtggagggtgaaggggaagcaaacacatctttacacggtgtcaggagagagacagagagaagggggacatgctacacactttcaaacaaccagctattgtgagaactctatcacgaaaacagcaagggggaattccaccaccatgatccaatcacctcccacaaggccccacctccaatactggaaattataactcaatgtgagatttgggtggaaatacagagmcaaaccatattatatcctaagactggagaaatacctccttaactaagggcgctgatacctacccaattcccaaaatggattctgttagcaaagaagaaagaaggaactggtgttacatagacaatcagaaatatgacccaaacctgcttcttccaagtatccaaatt

SEQ ID NO: 211456 - DNA, 515 bp, Homo sapiens
ttgtttcttatactttaaaccacggaaaaaggacctaacaaatgacgcccttttagaagaatgaaggcctgctggcaatgctctctttaacccataatgctgattaagaggagtgaaccaatgtattgtttttgactgattatgatgcaatrcatgtaccattaaagtttcttacctacattaggccttcatcatttatctatcaaagtataaggttatccatgtctaaggctggctccaaacttcttcacaaataaaagtataccacataagtgcacataacagaccccttttccacttctattgttcacagaggcataagcaagaaaaaatattcaaagacaagagtttcatgatagtagaagtcttaatctgtgaacttgggaaaagctgttcacatcaaggatgccatcctcttcttgggagaaattttcctgtttagttttatcttaagagccccaatgggtgcacagctccaagagcatggagggacccttctcagttgtgagacaatg

SEQ ID NO: 211457 - DNA, 515 bp, Homo sapiens
ttgtttcttatactttaaaccacggaaaaaggacctaacaaatgacgcccttttagaagaatgaaggcctgctggcaatgctctctttaacccataatgctgattaagaggagtgaaccaatgtattgtttttgactgattatgatgcaatgcatgtaccattaaagtttcttacctacattaggccttcatcatttatctatcaaagtataaggttatccatgtctaargctggctccaaacttcttcacaaataaaagtataccacataagtgcacataacagaccccttttccacttctattgttcacagaggcataagcaagaaaaaatattcaaagacaagagtttcatgatagtagaagtcttaatctgtgaacttgggaaaagctgttcacatcaaggatgccatcctcttcttgggagaaattttcctgtttagttttatcttaagagccccaatgggtgcacagctccaagagcatggagggacccttctcagttgtgagacaatg

SEQ ID NO: 211458 - DNA, 403 bp, Homo sapiens
ttcttcacaaataaaagtataccacatmagtgcacataacagaccccttttccacttctattgttcacagaggcataagcaagaaaaaatattcaaagacaagagtttcatgatagtagaagtcttaatctgtgaacttgggaaaagctgttcacatcaaggatgccatcctcttcttgggagaaattttcctgtttagttttatcttaagagccccaatgggtgcacagctccaagagcatggagggacccttctcagttgtgagacaatgaacccaaagttcaaggtcccaaagttttgttgtagtgtggatggcaaggacagtctttttctgatgtttccagaagattcaagccataaaaaactttctttaactggtgaaatacaatgtagcataataat

SEQ ID NO: 211459 - DNA, 515 bp, Homo sapiens
ttgtttcttatactttaaaccacggaaaaaggacctaacaaatgacgcccttttagaagaatgaaggcctgctggcaatgctctctttaacccataatgctgattaagaggagtgaaccaatgtattgtttttgactgattatgatgcaatgcatgtaccattaaagtttcttacctacattaggccttcatcatttatctatcaaagtataaggttatccatgtctaaggctggctccaaacttcttcacaaataaaagtataccacataagtgcacataacagaccccttttccacttctattgttcacagaggcataagcaagaaaaaatattcaaagacaagagtttcatgatartagaagtcttaatctgtgaacttgggaaaagctgttcacatcaaggatgccatcctcttcttgggagaaattttcctgtttagttttatcttaagagccccaatgggtgcacagctccaagagcatggagggacccttctcagttgtgagacaatg

SEQ ID NO: 211460 - DNA, 403 bp, Homo sapiens
ttcttcacaaataaaagtataccacataagtgcacataacagaccccttttccacttctattgttcacagaggcataagcaagaaaaaatattcaaagacaagagtttcatgatagtagaagtcttaatctgtgaacttgggaaaagctgttcacatcaaggatgccatcctcttcttgggagaaattttcctgtttagttttatcttaagagccccaatgggtgcacagctccaagagcatggagggacccttctcagttgtgagacaatgaacccaaagttcaaggtcccaaagttttgttgtagtgtggatggcaaggacagtctttttctgatgtttccagaagattcaarccataaaaaactttctttaactggtgaaatacaatgtagcataataat

SEQ ID NO: 211461 - DNA, 344 bp, Homo sapiens
aaatatttgatttaagctcttattattaataaaccaattaattaaaactttacacagcagataaacactggcttttactttatatttaaccagtttgcacagagagaaagaggccagagactgatcggtaagaaattcttacccttttgccagcatgccaggtttctgggttctctctccctaagcagccctggcaaccctgcttgactatatgtaaacaaacacactgccatgaattaagaatactcacaaatacttaacaaattttgagaaattaggcagagagagagaaatatgactcaaatwctatttatgagagtatactcaatacacttaaagtatca

SEQ ID NO: 211462 - DNA, 365 bp, Homo sapiens
agaaagattagtttctgctgctttctgtaagtgcagcagagggaaggttgtggttttggttgagaaagcattcttattatccaccactatttttagaagttttagacgtctatcttattgacttgagtttataatttagacttgtaaccattagaaaaaataggccttcccccttgaaatttctcatgcatgcttttagtccagaggagaatttttttgaaagtttaccaacctttccttatcatcagggttatagagctactcaaagagaaaagagtgctattttatccataatgtcctgggacactccctagattyccactccctacccgaaattcatggtatccctgaggatctgtgggtca

SEQ ID NO: 211463 - DNA, 608 bp, Homo sapiens
gcaaccagtaggaaatggttacctcagttatccaatgacaatggtaaccagtaggaaatggttaccaatgcaaggaagattatgtcctccttgaagtgtggggtggggtgtgtatgcgtgcgtgtgtttctstgtgtgtgtgtgtgtgtgtgtgtgtgtgtgtgtgtgtgtgtgtgtatgttgtgtaggaagcgggggcaggaaggacaagcataggaagtagaagaggccaaagaattttagcggcaattctcccacttactcatatccggaacaaagaacacggccaagtgagaaagctcttcctcctcacgcatgcactttaggggcaagcagatttggaataataaccgtgactttggaataatcttcccaaactggagcacctattgtcaaatgttaatggccctactgacaagaaccaaccaggcagttgagatcaacaaacgtgggatatgacaaccttcgctgtcatgaaaaatatttccaatgaaaatagttcctaatgtgtgactgatcaaagatggtaagcatttgcgtagaattaagtcatttcttatatatttcatactaaaagttaaatgtttgtcatgagaattattttcctg

SEQ ID NO: 211464 - DNA, 611 bp, Homo sapiens
acccttgtgagcacactgaagattcatgcctctaaaattaaacattgaattagcttaaaaaataagaagtttaaatccagtcatgataactacgtatttaacctatttcccagttgatatcacccaattacaatattcttaaggctgggataactgctccctaattagagaattctaacagagcttaaagtactattcctgctctgacagctgacacatgaaattcttcattttctgttttggcctacaccaattctcaattcctttcttctcggttctctataaaattttgtattcattttgaaaaatgaaasaaacaaaaaagataacatgaacatctcagcattctggtagcctgaggtcttcctaatctcttggctctctaacacacagacaaataaaaatggcagtgataacctggaatggtaagtggactcagagtcttcaaaacccagctatgaataagctaagtgtcagagagcattagtcatacgttaatttgaaaatgcaaggtgtcgtttatactgcactttagcaatgttcaacgcatttcttatttttagtcagaggaattaatttatgcttgttaattgtaaggagatatgtgtttt

SEQ ID NO: 211465 - DNA, 617 bp, Homo sapiens
tataaagcttgtaaatggctattaaattttagctaaaactgttgccctccatattctgtgtgtttgcctcatactgcagtgaattttggaggaaatggagctggtttagggatacttcatgtcatgacaaaacacatgaagtatttacatgaacctaaccttactttgagggaggttaataagtataagtactcagaagggaaaccttgacttgctaaagattaaggatagatctttcatggaggtggaacatcttcaaatagaaattatgttttgagaagttggagagcaagaaggcaagaaattccctagtgcctgggtcgcccagcaggctgcccactagggggtgagcaatggcaaagggtagctcgggagccttccgtgattcctgctgctgggtttcccagaarcagctgaccagatgcttccccagcatgcagctattgttgaacttttagccaggcaccgtcaccaacaagttgaccacccagagcggtagcaaaaggccccaaagtctcttcataacctgctggctggtggaatccgtaggacaggatccctaggaggcattccaaagacattagactcctcaaagaagcagttttatctgccattaa

SEQ ID NO: 211466 - DNA, 591 bp, Homo sapiens
ggagtttattacatagtattaactcacacaatcacaaagtcccacagtaggccatctgccagccgaggagaaaggaagccagtccaagtcccaaagctgaaraacttggagtccgatgtttgagggcaggaagcatccaccatgggagaaagatgtaggctgggaggctaagccagtctagccttttcatgtttttctgcctgctttacattcttgtggcattggcagctgattagatggtgcccatccagattaagggtgggtctgcctttcccagcctactgactcaaatgttaatctcctttggcaacaccctcacagatatacccagggtcaatactttgcattcttcaatccaatcaagttgatgctcagtattaaccattgcactctacttccctgttggcttaggcaagccatatttccattttgaagagatagtagggacaccaaagccctaaacatgagattcccttggctcccaaacttgtcaggaacaatcttgaatagctgctcttttacttgaccaacaaagtatttctgtatgttttatcaaaaataatgggagtccccaagaatctggcactagct

SEQ ID NO: 211467 - DNA, 582 bp, Homo sapiens
ggacaagttatctgtgaaaaattctcattgaaaagttcaaggatgtgatcatgcatttgagaygcacataaccatattgagtttaatttagaatgaagaagagtatgttaactcattttgattaaaaactcctctagaagagctgaaaaatgtctgcaatatctgtagagaactaaatatacagttaaataccacataatcacaataatcaccatggaaagtctgcataaattcctgggagcctaagggccatagtaattaatgctcctgcaatttatgcagggcttttttttttttaaatggtaacttgttctcctcttcattaacagaaatagttacctgttaccgagaaatgtagtgactgagaaatacagccctaactccacagagaaacacagcagcctcttcctgagtctgaggaggaaccagtttttaaaatcagctctctggcctgatgtagggtactaaacattgaaggctgagagatgtttctcagaagattgagcaatcgtattaactctataatctttcttcttgtctttcttgtaatcagcactgcccttggtgtcttaccttatgaat

SEQ ID NO: 211468 - DNA, 582 bp, Homo sapiens
ggacaagttatctgtgaaaaattctcattgaaaagttcaaggatgtgatcatgcatttgagatgcacataaccatattgagtttaatttagaatgaagaagagtatgttaactcattttgattaaaaactcctctagaagagctgaaaaatgtctgcaatatctgtagagaactaaatatacagttaaataccacataatcacaataatcaccatggaaagwctgcataaattcctgggagcctaagggccatagtaattaatgctcctgcaatttatgcagggcttttttttttttaaatggtaacttgttctcctcttcattaacagaaatagttacctgttaccgagaaatgtagtgactgagaaatacagccctaactccacagagaaacacagcagcctcttcctgagtctgaggaggaaccagtttttaaaatcagctctctggcctgatgtagggtactaaacattgaaggctgagagatgtttctcagaagattgagcaatcgtattaactctataatctttcttcttgtctttcttgtaatcagcactgcccttggtgtcttaccttatgaat

SEQ ID NO: 211469 - DNA, 582 bp, Homo sapiens
ggacaagttatctgtgaaaaattctcattgaaaagttcaaggatgtgatcatgcatttgagatgcacataaccatattgagtttaatttagaatgaagaagagtatgttaactcattttgattaaaaactcctctagaagagctgaaaaatgtctgcaatatctgtagagaactaaatatacagttaaataccacataatcacaataatcaccatggaaagtctgcataaattcctgggagcctaagggccatagtaattaatgctcctgcaatttatgcagggcttttttttttttaaatggtaacttgttctcctcttcattaacagaaatagttacctgttaccgagaaatgtagtgactgagaaatacagccctaactccacagagaaacacagcagcctcttcctgagtctgaggaggaaccagtttttaaaatcagctctctggcctgatrtagggtactaaacattgaaggctgagagatgtttctcagaagattgagcaatcgtattaactctataatctttcttcttgtctttcttgtaatcagcactgcccttggtgtcttaccttatgaat

SEQ ID NO: 211470 - DNA, 558 bp, Homo sapiens
gggaacttcccctttttcatacaaagacaagacttcacaaggagaaggcttttggtgcttccccctttttctgacctggaatgtcaatgtgatgactgaaggagcagtagctatattgcaaccacatacttgaaagccaggcgctaaagttggtggtcttgaaaagatagaggaaaacagaaccttttatgaaattgtaagacccttgtaatgattttgttctgtcaatctttagacttatatgagggaagaaaaccttaattatttaagtcatattaattagatttataactacatgctgcataatgtgatctaagctggtacagctgtgtctcaaacatgtcccctcaggaaaactatttttcccagaatactttgtggaggggactattgtatcagaacaattttaatgcaacagtcatcttcagaaaaattactatgatcactttttttttcrtttatgtaacctggagatgcaggagacagaatggaagtatgaagcagggaactatttccgaagagttttgatgttcttggagcaggtacacaattttgttt

SEQ ID NO: 211471 - DNA, 306 bp, Homo sapiens
gaagggaatacgtgaagaaggcagtaaggaggtaggacagggaggcaagggaagagagaagccaataagataataagatacttcatgagattatccctttgtagcaaatygcattttccaaaaataatcacaaacaggtgtcctgtcccacattctctttcaaaactttgctattcccccatcaggaggagatagcctgtctcttctccttaaaactgactgtgacactgtgacttccttgacaagtaacaatgtggtggagctgactcctaggctaggttagaacaggcaatatggcttctgccc

SEQ ID NO: 211472 - DNA, 552 bp, Homo sapiens
gcgtggcttaactataaatgaaaatgtcaaagttattacattatttaaaattgaagaataattagactggaggaaaacaggctaaaagaatgctgcaggatatgttaaaggtaggaaaggacagggaaacacaacaaaacaaaacaaaacaaaaaaacgaagaagggataagcatgagaggatggggaaccactcccgtaacctccagggacacgggcatgtgattactacattgtgtaactctaataatacggcgcatgcccagaagcctcacatacaccactaagtataggttcaaatgattttcttccaggcctttaaaaaaggtggtgggggaatattttacaaggttgtttgcattctgcagtagaattgtgcctcggtatgttttgttctcagcgtccatcaaagacacctgcttgtctgaacctatcagaaaactgccaaaacraaacaaattaagaaaagtaaaagggaagcccaggtgtagggtacatgaggtgggaatggggattaattcttccagctcttagggttgttgactctgttaga

SEQ ID NO: 211473 - DNA, 552 bp, Homo sapiens
gcgtggcttaactataaatgaaaatgtcaaagttattacattatttaaaattgaagaataattagactggaggaaaacaggctaaaagaatgctgcaggatatgttaaaggtaggaaaggacagggaaacacaacaaaacaaaacaaaacaaaaaaacgaagaagggataagcatgagaggatggggaaccactcccgtaacctccagggacacgggcatgtgattactacattgtgtaactctaataatacggcgcatgcccagaagcctcacatacaccactaagtataggttcaaatgattttcttccaggcctttaaaaaaggtggtgggggaatattttacaaggttgtttgcattctgcagtagaattgtgcctcggtatgttttgttctcagcgtccatcaaagacacctgcttgtctgaacctatcagaaaactgccaaaacgaaacaaattaagaaaagtaaaagggaagcccaggtgtagggtrcatgaggtgggaatggggattaattcttccagctcttagggttgttgactctgttaga

SEQ ID NO: 211474 - DNA, 571 bp, Homo sapiens
ccagatttcaggaaaaaagcaatctaaagctgtcaatctagacagacatccaaacacctattcatccactccagagctggccaaaaaagtactgtttattaacacatcaagagaacttaattcctttgataaaagaaccacacgggtaatagcatctactgacggatcactggtacatatgattatctctggggctatgttccacatgtgaatataacatttgtactcactgaagctgtctgttgcttccctacagagagacagaggctgctcrcgtaccaaaaaatagaaaggagacaaagaggaaaaaccttacagggagaaactcataaccactaatgtgctttcactgggcttaagtccaaagccatggattgttacagaagcaacatgttacagggtgtctgaattgttaaaactgctgtccaaattggttctgcctctaggacaagacctactatgtgtaaaatattggcaggggcgatgaatacatataaggcattgttcttgtactcaaaaaagcttaagagtctcactggggacataatcaattataaagcacctataatac

SEQ ID NO: 211475 - DNA, 571 bp, Homo sapiens
atctatttgttctcatataactctatggaattttgtttttcccctttgcattcttcttcttcttcttcttctttttttttgcaattgactaataataattgaatgtatttatgaartataatgtgatattttgagaaaaattaaattaagctagttaatatatccatcacctcacctacttatcatttttttgtgtgtgtgggtgtggtgagaacatttgaaatctcctctttcagcaattttgaaatatataatacattattattaactgcggtcaccatgctgcacaacaatttactaaaacttcttccacctctatcctggaatttcttaagactgattcagactgtaatgtgcctgggaatcaacgtattccttaaggaaaactctaaaaccatgacatatttaagcctactgtatgaattagaaaaagcattctaagaggaagtatctcacatatacactgtcaaatcacaagaatagatgtccatgaaagccaggattcctgttagtattcattcactgttggttctttggttccgtcttctcctcactggtggacaatattggg

SEQ ID NO: 211476 - DNA, 571 bp, Homo sapiens
atctatttgttctcatataactctatggaattttgtttttcccctttgcattcttcttcttcttcttcttctttttttttgcaattgactaataataattgaatgtatttatgaaatataatgtgatattttgagaaaaattaaattaagctagttaatatatccatcacctcacctacttatcatttttttktgtgtgtgggtgtggtgagaacatttgaaatctcctctttcagcaattttgaaatatataatacattattattaactgcggtcaccatgctgcacaacaatttactaaaacttcttccacctctatcctggaatttcttaagactgattcagactgtaatgtgcctgggaatcaacgtattccttaaggaaaactctaaaaccatgacatatttaagcctactgtatgaattagaaaaagcattctaagaggaagtatctcacatatacactgtcaaatcacaagaatagatgtccatgaaagccaggattcctgttagtattcattcactgttggttctttggttccgtcttctcctcactggtggacaatattggg

SEQ ID NO: 211477 - DNA, 494 bp, Homo sapiens
actaaagcaaattgaaatattcaacttgccatggagaaaagatttctagtctgtcagaaagaatgtgtctttttactttatcttttaatctatttgtattgtgttccattgagagaaatgcttgattgaagtttaactttgtacacactgggggtatatgctactctcaggctcacctatttsctgctctaatctagagggagaaacatagatcagaaattagggccctttttatcacacgcctctgtctttaaaaggagattcaggggctcctagtccccactagacctgctaaagctgctctgggcaaacagtaaggctgtgtatgtttttttcatcattttactttttttttttttttgcagggagtcagtgtagcttagtacctaaagtcatattatctgaatttagtctgattgggtccccaactccactctttgacccatctaccttatgaggatattcaaagtactaaatgagtaagtgtataaact

SEQ ID NO: 211478 - DNA, 471 bp, Homo sapiens
aagcaggaattaaaggaagaaagatttggagaagttggaaatctttccaaattgactattgaattaaggccactaaatcagggctatttgccccaaagtataattcctgtctatttagaaactgtatcaggacccgaatgggccagtgcctaagctggagtgtggctgcactgttttgcagaaggataaaattatgttaagaaagtgagtattttgagtattgtgacagaggatacatgattgaaccttaaagtctgaactacagaggacaaaggtgaccaaratgcaggaataagtcagtacaaagagatcttgtcttctggaaaattatatataagcatatactgggatctctgacaaaatgccaaaaagacttaatttggggtcatagactgtaattttacaaatgacatctaaaacttgtttccttcaggattttgctctgataatacctttaaaaaatctttttaa

SEQ ID NO: 211479 - DNA, 631 bp, Homo sapiens
ttcaagaactgagattatttcttctgattggtctgttctactactaatacttgtgattgcattataaaatccttgtgtgtttttcagttctatccagttggttacattcttttctatactggctattttatcttagtttccttggtttgggtttcaacatattcctgcctctcaatrttctgtgttcctatccatattctgaattctatttctgtcatttcagccatctcagcccagttcagagctcttgatgtagagatggtgcagtcatttggaggaaagaaggcactctaactttctgagttgtcagggttcttacactggttctttctcatctttgtggccttatattcctccaatctttgaaggtgctgaactttggaatttttttggtttcttttatcctatttgatgaccttgagggtttgatggtggtataaggtggattcagctgactggcttaatttctggaagattttagagcggctgacactcagctctcaacttctgaactgtgtgctgtatctgcacatttttaatatattgtgtctaccaaattagcttattaaaaaaagagtgctcataattaagtccaaagtatttttcaatttcacgtggcttagtaaatttt

SEQ ID NO: 211480 - DNA, 560 bp, Homo sapiens
aactttctgagttgtcagggttcttacactggttctttctcatctttgtggccttatattcctccaatctttgaaggtgctgaactttggaatttttttggtttcttttatcctatttgatgaccttgagggtttgatggtggtataaggtggattcagctgactggcttaatttctggaagattttagagcggctgacactcagctctcaacttctgaactgtgtgctgtatctgcacatttttaatatattgtgtctaccaaattagcttattaaaraaagagtgctcataattaagtccaaagtatttttcaatttcacgtggcttagtaaatttttaataaacaagctggctttaaaactattgataaaataaaaatagaaatgtctacagaattgtcatcattaatttttgtctggatttcatatttgtctctgttagatattttgaggtgtcagggtttggcacagaaggttataaaactataaacctagccaaaacacaatgctttttgtttgtgcaaatctgttttgataagtaagactaatttaatgttgt

SEQ ID NO: 211481 - DNA, 560 bp, Homo sapiens
aactttctgagttgtcagggttcttacactggttctttctcatctttgtggccttatattcctccaatctttgaaggtgctgaactttggaatttttttggtttcttttatcctatttgatgaccttgagggtttgatggtggtataaggtggattcagctgactggcttaatttctggaagattttagagcggctgacactcagctctcaacttctgaactgtgtgctgtatctgcacatttttaatatattgtgtctaccaaattagcttattaaaaaaagagtgctcataattaagtccaaagtatttttcaatttcacgtggcttagtaaatttttaataaacaagctggctttaaaactaytgataaaataaaaatagaaatgtctacagaattgtcatcattaatttttgtctggatttcatatttgtctctgttagatattttgaggtgtcagggtttggcacagaaggttataaaactataaacctagccaaaacacaatgctttttgtttgtgcaaatctgttttgataagtaagactaatttaatgttgt

SEQ ID NO: 211482 - DNA, 613 bp, Homo sapiens
agatgatggttgggtgggggcacagagccaaaccatatcattgctcctccctagttcctattttcttacacattgttacatttcttccctgttaygtaaacccctagttttagtccattagggagatggatttgagactgagctcccatctccttggctgcagcaccagattaaagccttcttcctcagcagtacttgtcatctcaatcactggcttcctgtgtggtgagcagcaagacctaaaccaaacccctggtgtttagtgaaaagattttggttccctgactgggcacatgttgctcatggctttgctgtcatgggccatgtctcagaagccctcgtaagtagctgatcacccattttggctggaagtgattttctgtctctctctggctctgccatagccgaccccaaatatgttcctgattgccagggaagaactgtctttgaaatttgacatctgtgtctggataggcgagtgtctttgtgggacctgacagcaggatcttaaagggaatttccatttgcaggttgagcaagcccaactgactgagagaaagaagcaccctgactctttcagtatggacactgctgggggcttgtttggagttgt

SEQ ID NO: 211483 - DNA, 613 bp, Homo sapiens
agatgatggttgggtgggggcacagagccaaaccatatcattgctcctccctagttcctattttcttacacattgttacatttcttccctgttacgtaaacccctagttttagtccattagggagatggatttgagactgagctcccatctccttggctgcagcaccagattaaagccttcttcctcagcagtacttgtcatctcaatcactggcttcctgtgtggtgagcagcaagacctaaaccaaacccctggtgtttagtgaaaagattttggttccctgactgggcacatgttgctcatggctttgctgtcatgggccatgtctcrgaagccctcgtaagtagctgatcacccattttggctggaagtgattttctgtctctctctggctctgccatagccgaccccaaatatgttcctgattgccagggaagaactgtctttgaaatttgacatctgtgtctggataggcgagtgtctttgtgggacctgacagcaggatcttaaagggaatttccatttgcaggttgagcaagcccaactgactgagagaaagaagcaccctgactctttcagtatggacactgctgggggcttgtttggagttgt

SEQ ID NO: 211484 - DNA, 645 bp, Homo sapiens
tattttattatttggaaaaagtaggtgagaatacaaatgtttaaatggtgcttatttgcaattcaacctttatttctgaaatattcttttttaatttttaattttttcctgaacactatcctaatttctgagttttctaattctgacattttttttcaagtattgtgtcattttgttacatttcttattgtgtatccaaatagtggattacagtttcatctgtttagaataacaygtttgtatagtatttgagattatcttttctgtgtgtaaaattattttgagttattgggagaaggtaggtagagttggaatttataaaagctaactttagaaagcatcaccttcttgacttttgtgtagtgtcaaaaatacacacatgtgcacatacatacacaccccagcttgttttctaatgtctattgactcagttctctgttttacctggacctcctctttcctttatctctcttggctcagtattgaccagtttgaattccattcccatcagtgtctcctcatttttggaccacatcatgaaagggagccttgagggccaggcgcggtggctcacgcctgtaaccccagcacttggaggccgaggcgggtggatcaggagatggaaaccatcctggccaacacagt

SEQ ID NO: 211485 - DNA, 645 bp, Homo sapiens
tattttattatttggaaaaagtaggtgagaatacaaatgtttaaatggtgcttatttgcaattcaacctttatttctgaaatattcttttttaatttttaattttttcctgaacactatcctaatttctgagttttctaattctgacattttttttcaagtattgtgtcattttgttacatttcttattgtgtatccaaatagtggattacagtttcatctgtttagaataacatgtttgtatagtatttgagattatcttttctgtgtgtaaaattattttgagttattgggagaaggtaggtagagttggaatttataaaagctaactttagaaagcatcaccttcttgacttttgtgtagtgtcaaaaatacacacaygtgcacatacatacacaccccagcttgttttctaatgtctattgactcagttctctgttttacctggacctcctctttcctttatctctcttggctcagtattgaccagtttgaattccattcccatcagtgtctcctcatttttggaccacatcatgaaagggagccttgagggccaggcgcggtggctcacgcctgtaaccccagcacttggaggccgaggcgggtggatcaggagatggaaaccatcctggccaacacagt

SEQ ID NO: 211486 - DNA, 645 bp, Homo sapiens
tattttattatttggaaaaagtaggtgagaatacaaatgtttaaatggtgcttatttgcaattcaacctttatttctgaaatattcttttttaatttttaattttttcctgaacactatcctaatttctgagttttctaattctgacattttttttcaagtattgtgtcattttgttacatttcttattgtgtatccaaatagtggattacagtttcatctgtttagaataacatgtttgtatagtatttgagattatcttttctgtgtgtaaaattattttgagttattgggagaaggtaggtagagttggaatttataaaagctaactttagaaagcatcaccttcttgacttttgtgtagtgtcaaaaatacacacatgtgcacatacatacacaccccagcttgttttctaatgtctattgactcagttctctgttttacctggacctcctctttcytttatctctcttggctcagtattgaccagtttgaattccattcccatcagtgtctcctcatttttggaccacatcatgaaagggagccttgagggccaggcgcggtggctcacgcctgtaaccccagcacttggaggccgaggcgggtggatcaggagatggaaaccatcctggccaacacagt

SEQ ID NO: 211487 - DNA, 603 bp, Homo sapiens
cttttttggatctaacagaaaattgaggttgagaagcaaaccatcacataaaagtctgtaaatgaagaagcactcagagggataccacaactggggtatgcttatcagatgcagaaactgctggaggcaaaaactggtaggaacacctacatgataatgatctcatttagttctcagaactatcttatttggtggatagtattattatcaccatctcacagaggaggaaattacaactttacctaaggttgtaattttaggatgtaaagccaaatttgctggattctagtggtgtggcggtaaatgattaacaactggctctgagggatgggcgtatcataagggagtctgatttctagcatttttccagtgtgaatacttccaacatggcttattkcaagctaccaatatggcgtcactgaatgcagtggggcacacatgtgctccatggaaggcaggactaggacaacaatagcaggatatctatttcagagctttaaaagataaacatttctttgtaataactgtcatattgacaaagaaaggcaaaacataaattaacacatttgtcagtttttacactatttttggaaatttacaaaa

SEQ ID NO: 211488 - DNA, 567 bp, Homo sapiens
tctcctcagagtaactttacataccattaaaaattttgaaagcaatttttcattttaaaatctccaccatataatatttaattttactttttaatactcacgaagttgctgtgagtttatgtttaaaaactgtgtgtgttactataaacacatgtttatgtttcyagtgtggaaaatagtaacacaaactacgaaatatagagttttgaaatctcatgtaactatagtaacaaaaaaatgataataataaagtttatatggctctctcttattgaggtaaaattatgttccacgtgtttcacatatattttctctaactgtgacacagataaacagatattattatccttgtgttatgaatggaaggacagggctccaagagtttacatgaagacatatgggttggttttcccaatatctttcctttaattgtcaaattgctctaatctttagctttaattgtcaatctcttatcatatgatacagatattaccatcatattttctgttctaatttacaatgattaggctaacagtagacacattactgacatggggtcaatttgaa

SEQ ID NO: 211489 - DNA, 591 bp, Homo sapiens
agaactcataatgttttgtatatagtagactcaaaaaagtgaaccattattagttakttaagccttctgtaagtcaactattgccacaaaaaaaaaagttgtataataaagaaacttacatacagtttctttaaaataatccatggaagaaaccagtcatgggtaccttgcttgtacattgtcgcctactactactactactaccaacaataataataatgatgatgataatgtttgtggtatttcccatttgaaaacagtatcaaaatgcctccccaaactgaaggaatagattaagaaaaacctatgtctatgttaatatactgtgattctctttaaaggcagtaggtaagtggctggatctagcagcaggagatgaatgaagacctcctttgagaagggaaggcattttgatacagttgatcctcatttgccatggtcatgacacagtcactctgaacactgaattaatgaatacaaaccattgttcctatggaaaatacaaggttatgttcctataagcctctggtcacaatatttttgtcaatcagttaattcacaaccttgttttatgtgtgtttctgtttaaag

SEQ ID NO: 211490 - DNA, 491 bp, Homo sapiens
agttgtagttgcagagctcataaaattattaacaaaatcataatatcacatttgtttaaagtgtgagtgagattaaccacagtgctgggcagaaactcaaaaaaaattcactctattcttctagaatgtcaacgcactgctttttattgcacacaatatatgtgctaataaatgtaatagtcccctagcatttaaaaaaatacttatttgattgcaacaaattyttatttcagaaaagcatacatttaaaaattttaaaactccctttattacatgaccttcaacatttagaaataaagaatatatgtattaatagaatgacaaatcatagaatttttaagttggacataacttttgagataacctagttctactccaaagggcctcatgaaggaaaaaatattgctcattatgaaatatataatttgtggtaaatcctgtatttgatcccatatattcatatactttgtttttctttaggttcccattct

SEQ ID NO: 211491 - DNA, 426 bp, Homo sapiens
attgcaaaataattgcaaagctatatttcttatgcatcagttttataggaatgatgaaagattattaaacattttttcttattkctttttctctccttaagcatgtacttttgttccttagagctgagctgaagacagagtcaagttaactgttactactttactcagatacccagcaattcgttcatgggcacatctagccaaaccttacgatgttccgatctagaagacaaatagattttgtataggtcatcttacgagtctctcaggcatacagacactctgctgttagcacttaagattatttttgattagatatgttacagtgtgatagactgaattgcatgtcccaccgccccgccaccccctcacttatatgttgaagtcctaacccccaggacttcagaatgtcactttatttagaaa

SEQ ID NO: 211492 - DNA, 581 bp, Homo sapiens
taaaacccatttagataaaaacacactcattgcatattttctgcatggcacatattaaaagcatatatatatatatatatatatatatatatatatatatatatgtctcatatgtgtatgtcacagcttcagaagacaatatakttattattgtcacacaaagtcatacaaagtcatacatatatatatatggtcctcaagtggaagaaattgctctgattcttacataattttttgttttttttaaaaaagtatagaatctaactcttaataggtcttctgtgaggtatctaaataaataatagatccactctttgcttttaaaaatacccttgacttcatcaccacatcactgattagagtagaatttacaagttttgtacaataagtggctttcctcataggaaacaaaaatgcaggaacagtctggagcatttccacaattatataaactgagtttataagttctgaacagacatctgattaccttcccatcctgcaattttctactttcttttgattttctggctgtcaaatgactatgctctgagcaaaaataaagatgttataattagttgtgt

SEQ ID NO: 211493 - DNA, 589 bp, Homo sapiens
agatctcaatataagatcctagagatcccctctgaatttggtatttggcctggggccttttttttttaatttgaaaatgtgtgttcatctggttaggccaagaacaaaaagtggttctatttttataccmaattactcctggctcattgatttatgtatttatgtacattagtatattagtacaactcctatggagaacagtttgaaggtacttcaaaaataacttttggctcattgatttatgtattcctttatttataatttcaacttttattctagattcagggagttcatgtgcaggtttgatatataggtttatcgtatgatgctgagatttggttacaaatgatcctgtcacgcagataatgagcatagagccaataggtagtttgcagaatttacccctcaatatcattgatcatcaaagaaatccagatcaaaactacaatgagatatcttctcaccccagttataataccttatattcaaaagacaggcaataacaaatactggagaggatgtggataaaagggaacacttgtacactgttgatgggaatgtaaattagtacagccactatggagaacag

SEQ ID NO: 211494 - DNA, 576 bp, Homo sapiens
tatgtaaattttagatatctcattggctttatcttctatcttttagtcttttgcttagtaagtacttatgctgtgtatttactctagcaaataaaatgcaaagaaacatcataaagagatggttttccaacaaatgaattaattctttatctttaatccagatctatagtttaaaggcacaattagctaagtgtggaagcttgaaaagagacttttttagtacttttcttccagatatattcatattcattaattcttttacttttcatttactgagagtatagaatatggcaggcactgagcatactgtttgtaatataaagataaggcaggatgtgcaatatcatagagctcataggagacaaatatttaaagaaaacaaattctgaccttactctggaatatctccaattattttaatactgatacaaaactacttgaaaagtttgcagcaactcaaatgtatactcttttctcggtgatttcattcaaattcaataaacattcatccatttgaagagaacraaaattatccacggaaatggtatgaattacatcatcatcataaacgagaag

SEQ ID NO: 211495 - DNA, 588 bp, Homo sapiens
tgtggggagggtgagatgaagaggcacagcatggaggatttttagggcagtgaaagcaaatgctctgtattcactataatggtgaatacatctcattatacatttgtctaaacctatagaatgttcaacaccaataatgaaccctagtgtaaactatggactgtaggtgataatgatgtgtcaacgtaggttcatacattgtaacataggtaccactctggtgtgggatgttgataatgggggaggctgtgcatgtgtggggccaaggaatataaaggaaatctctgtattcacctctgttttcctgtgaatctatagctgcttcaagaaaacaaataagtaagtttttaaaaaatagaaagaaaattttcattaatctcaaaattgggggaaaatgctgctagaagttttatgaagcaaatgccacaaattttattcttgatcaaaataacaattacaacctattataatcagagtaaatttaatttgagttatttaatttagaagtaaatcactttcttattggcrttctcacaattttaagtaatgataatacctgaggaagtagcttgaatatatgctggcttt

SEQ ID NO: 211496 - DNA, 536 bp, Homo sapiens
ccatagacttgtgtttgaaatgttcactgatgcactaggtgttggagatttaaggtactgatatggtgtgactgtgtccccacccaaatttcatcttgaattcccacatgttgtgggagggaccccgtgggacataattgaatcatgggggcagatctttcccatgctgttctcatgatagcgaatatgtcttcataaggtagaatttccctgcacaagctctctctctttgcctgctgccatccatgtaaaatgtgacttattcctctttgccttcagccataatcgtgaggctgccccacccatgtggaactgtaagtgccagtaagcctctttcttttgtaaattgcccagtcttgggtatgtctttatcagcagygtaaaaatggatgaatacaagtactttgagacaaaaatcaggggaaactcccacctcccacccagctccctattaagaaatagttacaataaaattatgttttcttagagacaaatatgtcagaaatgaatttcaataaatttcattatccacttaa

SEQ ID NO: 211497 - DNA, 536 bp, Homo sapiens
ccatagacttgtgtttgaaatgttcactgatgcactaggtgttggagatttaaggtactgatatggtgtgactgtgtccccacccaaatttcatcttgaattcccacatgttgtgggagggaccccgtgggacataattgaatcatgggggcagatctttcccatgctgttctcatgatagcgaatatgtcttcataaggtagaatttccctgcacaagctctctctctttgcctgctgccatccatgtaaaatgtgacttattcctctttgccttcagccataatcgtgaggctgccccacccatgtggaactgtaagtgccagtaagcctctttcttttgtaaattgcccagtcttgggtatgtctttatcagcagcgtaaaaatggatgaatacaagtactttgagacaaaaatcaggggaaactccyacctcccacccagctccctattaagaaatagttacaataaaattatgttttcttagagacaaatatgtcagaaatgaatttcaataaatttcattatccacttaa

SEQ ID NO: 211498 - DNA, 559 bp, Homo sapiens
cccaaataaagtggttaaaaaaaaagtacatgccagatgtcgttcttataatccatcagctatgctgattcctaataaccttcaaaattttcattatcatcatgcagaggggcaatgatttctcattactgaaatgtttcatgagtgacataaaacatgtggacttgctaagataccacgtggggcctctgtcatgtgcacaacatgtcccagcacytagagtgtcacttccactcttcaccccggtgcctcaggctatgaatgtccacaagtcctatgagcaacctcttccagaagatgctttggcctgattccagctacaaggtaaccaggtcctgctaacagaaaactgtcatgtctgtctaagtgaaactgtcatgcccggagtttgtcacagtactaaaaaacacaaaggttgagacttaattaaacttacagggtagattgtattacattttctgtttcattgctaataagtgtttgaaaatgttgtagaatttgattgttgtgtttttaccctcattttaacatgagatgatagtgtgatcaggaaataaaa

SEQ ID NO: 211499 - DNA, 559 bp, Homo sapiens
cccaaataaagtggttaaaaaaaaagtacatgccagatgtcgttcttataatccatcagctatgctgattcctaataaccttcaaaattttcattatcatcatgcagaggggcaatgatttctcattactgaaatgtttcatgagtgacataaaacatgtggacttgctaagataccacgtggggcctctgtcatgtgcacaacatgtcccagcacctagagtgtcacttccactcttcaccccggtgcctcaggctatgaatgtccacaagtcctatgagcaacctcttccagaagatgctttggcytgattccagctacaaggtaaccaggtcctgctaacagaaaactgtcatgtctgtctaagtgaaactgtcatgcccggagtttgtcacagtactaaaaaacacaaaggttgagacttaattaaacttacagggtagattgtattacattttctgtttcattgctaataagtgtttgaaaatgttgtagaatttgattgttgtgtttttaccctcattttaacatgagatgatagtgtgatcaggaaataaaa

SEQ ID NO: 211500 - DNA, 559 bp, Homo sapiens
cccaaataaagtggttaaaaaaaaagtacatgccagatgtcgttcttataatccatcagctatgctgattcctaataaccttcaaaattttcattatcatcatgcagaggggcaatgatttctcattactgaaatgtttcatgagtgacataaaacatgtggacttgctaagataccacgtggggcctctgtcatgtgcacaacatgtcccagcacctagagtgtcacttccactcttcaccccggtgcctcaggctatgaatgtccacaagtcctatgagcaacctcttccagaagatgctttggcctgattccagctacaaggtaaccaggtcytgctaacagaaaactgtcatgtctgtctaagtgaaactgtcatgcccggagtttgtcacagtactaaaaaacacaaaggttgagacttaattaaacttacagggtagattgtattacattttctgtttcattgctaataagtgtttgaaaatgttgtagaatttgattgttgtgtttttaccctcattttaacatgagatgatagtgtgatcaggaaataaaa

SEQ ID NO: 211501 - DNA, 600 bp, Homo sapiens
ataaaggcttttaaatgcacgcctctatgccaaaaggggacctttctctcaagcctgttattccactcccagatacttggcaagtgttttctagtttttgttgtggaaaacatcatgggtgcataccaggcataagcaagctcatcagagagaccacctacttccaaacccagcatttttgccacaataccccacaactgacccccaacctagtctttttccaaaccccttcagtcaccccttatagatctataggagtaggaactygaaataacaataggatgaggccagaaaacaaatgagtgaagctcagggataacacagtaggcagctgccaggactatggagaaatagtctcccctgactcagggtattagcaactatcaccttccagatgacggctgctgctggggaaggcagcaggtctagtcttgcaagaccttcaagagaagctacaagctctggatactcatggggcacttctcaacttctaaaagcagaaacacagcaaaatgtaatttaaaacaatcctatgtgggccaagcaaaacatgtatctgtaatctcgatttgatcagcaaaatcgcagagttgacaccac

SEQ ID NO: 211502 - DNA, 513 bp, Homo sapiens
tgtaggaagttaagagtaggactgaaaacaatctttattattactttagatagcatgtatctgcattttacaatatatgaagccccttttctcagtggccargaaagattagaaacctgttgttcttatttccccattagattactgagcatacagttcagataaacaaaacttttctacgcatagggtctttttatctgggtcagacatatttctacaacactctttgacaaattactggctgtatacaccgtacatttgcaattgataaacgcagagactgtcaaaaataaaaggcattcatattgtatcactgttattcctacgtcagccaaacccactttcatgacaggtgttcctaaagcctcaggagtatgggaggtttctgttgctgtctttggcactctgcatattttacttcctttcaaaatattataaagaaaattaacccagaatacgagaaagtatccacagaaaaaaatcaagttcaattttatttgtaggcttgaattc

SEQ ID NO: 211503 - DNA, 519 bp, Homo sapiens
gaattctactggtaatgtctaaattgtaggaagttaagagtaggactgaaaacaatctttattattactttagatagcatgtatctgcattttacaatatatgaagccccttttctcagtggccaggaaagattagaaacctgttgttcttatttccccrttagattactgagcatacagttcagataaacaaaacttttctacgcatagggtctttttatctgggtcagacatatttctacaacactctttgacaaattactggctgtatacaccgtacatttgcaattgataaacgcagagactgtcaaaaataaaaggcattcatattgtatcactgttattcctacgtcagccaaacccactttcatgacaggtgttcctaaagcctcaggagtatgggaggtttctgttgctgtctttggcactctgcatattttacttcctttcaaaatattataaagaaaattaacccagaatacgagaaagtatccacagaaaaaaatcaagttcaatttt

SEQ ID NO: 211504 - DNA, 513 bp, Homo sapiens
tgtaggaagttaagagtaggactgaaaacaatctttattattactttagatagcatgtatctgcattttacaatatatgaagccccttttctcagtggccaggaaagattagaaacctgttgttcttatttccccattagattactgagcatacagttcagataaacaaaacttttctacgcatagggtctttttatstgggtcagacatatttctacaacactctttgacaaattactggctgtatacaccgtacatttgcaattgataaacgcagagactgtcaaaaataaaaggcattcatattgtatcactgttattcctacgtcagccaaacccactttcatgacaggtgttcctaaagcctcaggagtatgggaggtttctgttgctgtctttggcactctgcatattttacttcctttcaaaatattataaagaaaattaacccagaatacgagaaagtatccacagaaaaaaatcaagttcaattttatttgtaggcttgaattc

SEQ ID NO: 211505 - DNA, 519 bp, Homo sapiens
gaattctactggtaatgtctaaattgtaggaagttaagagtaggactgaaaacaatctttattattactttagatagcatgtatctgcattttacaatatatgaagccccttttctcagtggccaggaaagattagaaacctgttgttcttatttccccattagattactgagcatacagttcagataaacaaaacttttctacgcatagggtctttttatctgggtcagacatatttctacaacactctttgacaaattrctggctgtatacaccgtacatttgcaattgataaacgcagagactgtcaaaaataaaaggcattcatattgtatcactgttattcctacgtcagccaaacccactttcatgacaggtgttcctaaagcctcaggagtatgggaggtttctgttgctgtctttggcactctgcatattttacttcctttcaaaatattataaagaaaattaacccagaatacgagaaagtatccacagaaaaaaatcaagttcaatttt

SEQ ID NO: 211506 - DNA, 637 bp, Homo sapiens
aatcaatatttttcttatgaatttaaaattttagaaaacctatttcttttttaaaatacttaatatttaataaaaaatatatggatttttattttcaatcctgtcataataacctatgtaggtagaattgccttgaactttctctttcctctgttaaatataaatgtttttactcatttgtttgctgagttatttttttataacagaatacattttctttttcctttctttaagaacgttttgacaaataaaattatatatatttgtggtatacaacattgtgttttaatatgtttacattgtagaatggataaataaagctaattgtcatatgcatyacctcacataattttttgggggtaatgagaacactttcttagcaattttcaaatacacattttattaactataattaccatgatatacaatcaatctcttgaacttattcccattgtctaactgaaattttgtatctgttgagtaacatctcccccaaaccttgtcccttccctccagtctctggtatacagcattctactttctaattctgttagtttgacacttttatgactccacttatacatgagatcatgctgtatttgtctttctgtgccggacttatttcacctaacatgat

SEQ ID NO: 211507 - DNA, 637 bp, Homo sapiens
aatcaatatttttcttatgaatttaaaattttagaaaacctatttcttttttaaaatacttaatatttaataaaaaatatatggatttttattttcaatcctgtcataataacctatgtaggtagaattgccttgaactttctctttcctctgttaaatataaatgtttttactcatttgtttgctgagttatttttttataacagaatacattttctttttcctttctttaagaacgttttgacaaataaaattatatatatttgtggtatacaacattgtgttttaatatgtttacattgtagaatggataaataaagctaattgtcatatgcatcacctcacataatttttkgggggtaatgagaacactttcttagcaattttcaaatacacattttattaactataattaccatgatatacaatcaatctcttgaacttattcccattgtctaactgaaattttgtatctgttgagtaacatctcccccaaaccttgtcccttccctccagtctctggtatacagcattctactttctaattctgttagtttgacacttttatgactccacttatacatgagatcatgctgtatttgtctttctgtgccggacttatttcacctaacatgat

SEQ ID NO: 211508 - DNA, 637 bp, Homo sapiens
aatcaatatttttcttatgaatttaaaattttagaaaacctatttcttttttaaaatacttaatatttaataaaaaatatatggatttttattttcaatcctgtcataataacctatgtaggtagaattgccttgaactttctctttcctctgttaaatataaatgtttttactcatttgtttgctgagttatttttttataacagaatacattttctttttcctttctttaagaacgttttgacaaataaaattatatatatttgtggtatacaacattgtgttttaatatgtttacattgtagaatggataaataaagctaattgtcatatgcatcacctcacataattttttgggggtaatgagaacactttcttagcaattttcaaatacacattttattaactataattaccatgatatacaatcaatctcttgaacttattcccattgtctaactgaaattttgtatctgttgagtaacatctcccccaaaccttgtcccttccctccagtctctggtatrcagcattctactttctaattctgttagtttgacacttttatgactccacttatacatgagatcatgctgtatttgtctttctgtgccggacttatttcacctaacatgat

SEQ ID NO: 211509 - DNA, 637 bp, Homo sapiens
aatcaatatttttcttatgaatttaaaattttagaaaacctatttcttttttaaaatacttaatatttaataaaaaatatatggatttttattttcaatcctgtcataataacctatgtaggtagaattgccttgaactttctctttcctctgttaaatataaatgtttttactcatttgtttgctgagttatttttttataacagaatacattttctttttcctttctttaagaacgttttgacaaataaaattatatatatttgtggtatacaacattgtgttttaatatgtttacattgtagaatggataaataaagctaattgtcatatgcatcacctcacataattttttgggggtaatgagaacactttcttagcaattttcaaatacacattttattaactataattaccatgatatacaatcaatctcttgaacttattcccattgtctaactgaaattttgtatctgttgagtaacatctcccccaaaccttgtcccttccctccagtctctggtatacagcattctactttctaattctgttagtttgacacttttatgactccayttatacatgagatcatgctgtatttgtctttctgtgccggacttatttcacctaacatgat

SEQ ID NO: 211510 - DNA, 536 bp, Homo sapiens
accttctccttaaagctatcatcaagtatctccctaacatttgcagacccaggacaagagaacaaatgggtgccttccctctctgtggccagtccttctcaaacagctgccccttggccatgcttcagcctagaattgcacactccagtggtgaaatatgacctctgaaagacagactatggaataagtgtgcacgggcctcactggaaagttggcaggtacaaggtctttgaacaaagaattatgaggtatgagatacctggagcatgtctagaatggggctcatgaatttctcacrtgcccaggggatgggggtgcaaccagaaagagccttgtaatgcatgaggtgcatgacaggggctccagtttcccaggtcattacgttgtatggagaatatgatatacttaaggtgcagacagtaataaataccctgctgtaactaaaccccattggtcaaatcttacccggctctataagctgcccttattgccaggacgctgtgtcaatgtgctgtgtcaagacaggaatgtgacac

SEQ ID NO: 211511 - DNA, 421 bp, Homo sapiens
cctttagagtcaaataggtgagttcatttgaataagttatcaaatgtatttatctttattttaataatttgcttcatcctctgcatcctttcgttagaataatcacgtcttcaaattaaggcatttggttacaaaagtgtggggaaaaggtggaaatgcagagccttaaaaaatccctctgtaaatgtatctgtaaattcatggatatgaattatgctcatgagataactgcttcattaataaaggaaaaagtgactacaaaaacactagaagagtggtagagggatttgagttttcaaaagttgaatattacaataacggatgatgtctrttataaaggatgctgaatttattttcaaagtattccaaaaatctcaaatctggagtattgttctcagtgacagggagacccagttgaatt

SEQ ID NO: 211512 - DNA, 594 bp, Homo sapiens
aaaaacaaaaatccattttacaaagtaacaggaaaactggagatgcaaactgtaaaaaccgtgataggaaaagagacacacattasataaagatttcctttacactaggtttacaagtagtaacttggaaaactacaagttcttaacatgccctatcagtactagttccagtagttgattcagaatgataagatcttttgatatgcttgccaaagcaggtatttttaatctactgcaacactttccctacctgattgctaaatataaaatactaagtcaaatattataaggtaactctcgaacttttcagcttggagaggtggtatttaaaaagatcaagtgacacttcccatcatatctgcgtgaggatgtttaaaggccacttatattgctaaaaaaatggatttacatgtcgtaaatagttttaatttactaaatgtatttatagcctaccttttggcctaaaaggatttaagagtggtaatctctacttgtgtcactttggtttctcaggtgcaaaatcacggataaacaatatctatcaataacaaagatcgtacatttaaaatgtctgtaaagtgctttctaaaatat

SEQ ID NO: 211513 - DNA, 552 bp, Homo sapiens
caattaaaaagaaagtgtgataccaggatatatcaatacatccaaaaccacaagattttttcttactagttaagatgaatctagatttgggcacaacttaaaatagttttgatatagataatgagattttaaatacatgagtggctctgcctgatttcattacaaaagcctctttgtttctattctgtgatctttcagtgagaatttagaacagaatactttctctaaataagaacaaaatttgagacaatttaaaacagtctttcactcttcctggccaggagtatgtcaagagggttccttaaatcagaactaaggttcacacccagagaatatatcaaatgaatttccatgaaaaacaaaaaccatcctctgtttttactattgctgtacaaggtatgctctgcaaatcaaaactccattcctagtttgcagcgttcaggtgactaaagctacctctggagaagacactgaaaaatgtacttcactttccccctcaacagaacattcaagctyattaggctgctattcaaaaatggtatagttaagatc

SEQ ID NO: 211514 - DNA, 375 bp, Homo sapiens
ccccctcctgtagtgccacagcaggatcccttctgacttgtcagtgtccatactgagtgatcaaggatagraaggaaggagggagatggaagggaaggacgaagcgaggaaagagaaggggaaggggaggaaaaagcaaaaggggtgagggtaaaaggggggggaaaggaagttttctcagattaaatgcttacaatgacatacagatttggtggtcccttgtattgatgcttcgcttcaatacacaaagtcacaatgttaaatctcagaagccacaagggctgatgtatttcagcagagaatagttagaaagacctggattcaattcctagctctaacaccattttgctgtgtgtccttgggaaaatggcttaa

SEQ ID NO: 211515 - DNA, 375 bp, Homo sapiens
ccccctcctgtagtgccacagcaggatcccttctgacttgtcagtgtccatactgagtgatcaaggatagaaaggaaggagggagatggaagggaaggacgaagcgaggaaagagaaggggaaggggaggaaaaagcaaaaggggtgagggtaaaaggggggggraaggaagttttctcagattaaatgcttacaatgacatacagatttggtggtcccttgtattgatgcttcgcttcaatacacaaagtcacaatgttaaatctcagaagccacaagggctgatgtatttcagcagagaatagttagaaagacctggattcaattcctagctctaacaccattttgctgtgtgtccttgggaaaatggcttaa

SEQ ID NO: 211516 - DNA, 591 bp, Homo sapiens
cctggctagtttagttgatttttaaatttttatttatttatttttttaaatttttattttttgagacagagtctctctctgtcgcccaagctagagtgcagaagagcgatctcagctcactgcaacctccacttcccgggttcaagcaattctcctacctcagcctcccaagtagctgggattacagacragcgccaccctaaccctaatttttgtatttttagtggagacggggtttctccatgttggccaggctggtcttgaactcctggcctcagatgatccgactgcctcagcctcccaaagtgttaggattacagcatgagccaccgcgccaggatgaacctgtctagtttagtttaaaatacactgtagcaaacatccgttgttttcttcccagcatctgctcccagcttttctggtaacagaaccccaaatgtcctttggaagccatatctccccaatgcttgcctatgtcacttgggtgggtctgactctagccccagctgcagaggtgggcatgtgacccaggcccaagctgataagcaaaacccattccccagccacagagatgggttgagagatatggcc

SEQ ID NO: 211517 - DNA, 398 bp, Homo sapiens
cttcctgcaggtgggcagagccaaggtsccctccctacaccttcctggggcctccagcgatcctgagctcagcctcctgacctgcagacccctcagctctggccctcacgtcctgcttgctgtacctgctttatcccatgtcaccatctccattcctcagcatagtgacaatcccagttcctacccattccactggcttctccatttggcttggagctctttagctggattgagacgactactctgatgagtgccatgtcactggctcaacagaatgggcccaagtgagtcaatgtcattgacatgaaggtgctgtcagtttggtgggaaccaagggaatgagactgtgttttagctgcgttcgtttgaacaggtacacccttagggcttcttatgcg

SEQ ID NO: 211518 - DNA, 398 bp, Homo sapiens
cttcctgcaggtgggcagagccaaggtcccctccctacaccttcctggggcctccagcgatcctgagctcagcctcctgacctgcagacccctcagctctggccctcacgtcctgcttgctgtacctgctttatcccatrtcaccatctccattcctcagcatagtgacaatcccagttcctacccattccactggcttctccatttggcttggagctctttagctggattgagacgactactctgatgagtgccatgtcactggctcaacagaatgggcccaagtgagtcaatgtcattgacatgaaggtgctgtcagtttggtgggaaccaagggaatgagactgtgttttagctgcgttcgtttgaacaggtacacccttagggcttcttatgcg

SEQ ID NO: 211519 - DNA, 375 bp, Homo sapiens
aattctagatatatattgagaaagtgctcataaaatgtcatttattaatgttgattgtatgccttttatttatagccctcaatccaccaaactagaaagacattgagaaaataacaagaagatgatcttaagtccatattaaactaacatctagatgcgtttgtcaggattcgttgaaagcagcactaaagatttatgcatttaactkgatgtgcagtttacctcaaaaacaacaatgacaaaatcactgaaaataaatattgaactctagttaataatatgcatgttgaagtatgtgtaaatgatacggacaggaggcagggaaatactgggtagaagagggtggaccccagcgagggccacaccctcaatcct

SEQ ID NO: 211520 - DNA, 597 bp, Homo sapiens
atttccctgtcttttagaattggaaaccagctatcttcaccatccccaggttgtacttctctggagtgtaccctgaaccaatgggactgatttgaccctcagactrtggaggaaaaatgcctcatatccctctgcacaaaggtttggccaaattatgttttacaagaaggactggtttggcctcaggaaggacccattcattttgatacagccctgcagttgaaccttttctgtaaacatgaggacagatggtctgaggccctgtatgtgcaggctttctttaccttgcatggcaatccagacctttcctgacagtgtaggatttatccgtccctcctgtttgccatctcaggggaggctacaaggggcaatcccagggaactaataaaacacatcccagaagcacctccaacagagaagccagctccctgcagccttgctcctctaggtctacctcatcctccctatccagcttctctctcttgcgtgccccctcctagaaatcctcaccctagacaagccccagtctcgctcttgctctccaacagatgcctggtgaatttggcctcagtaaagtccaggttcccttctgtctac

SEQ ID NO: 211521 - DNA, 481 bp, Homo sapiens
gaagaactctctctctttaccctactggtttagtctttctggagagccttgatcaataaacacaaatagaaaaattgaaagaaatgtacagagcccraatgaattagaggataataacaagaagcctaaagtacatgatttccgaaaaggaggggagaaaatggggaaaatattaacactggctaaaattttcaaaaatttttaaaaacgtttactcacacatttaagaagaaagaaaactcaattaaataaataaaataaaaaccatgtgagggtcactacatagtcaaactactagtaataagacataaagaaagttgcatggggttcactatttaccatttttgggggagtatcacaggaagagcacagttacaccacttttgactgtatgtgtagcaggtcacaacctactcttgtgtgtttagatgtgtatggaatacctgtgtatgctagtgaaagctgtttactgtaaaaaaag

SEQ ID NO: 211522 - DNA, 481 bp, Homo sapiens
gaagaactctctctctttaccctactggtttagtctttctggagagccttgatcaataaacacaaatagaaaaattgaaagaaatgtacagagcccaaatgarttagaggataataacaagaagcctaaagtacatgatttccgaaaaggaggggagaaaatggggaaaatattaacactggctaaaattttcaaaaatttttaaaaacgtttactcacacatttaagaagaaagaaaactcaattaaataaataaaataaaaaccatgtgagggtcactacatagtcaaactactagtaataagacataaagaaagttgcatggggttcactatttaccatttttgggggagtatcacaggaagagcacagttacaccacttttgactgtatgtgtagcaggtcacaacctactcttgtgtgtttagatgtgtatggaatacctgtgtatgctagtgaaagctgtttactgtaaaaaaag

SEQ ID NO: 211523 - DNA, 490 bp, Homo sapiens
ggtgaccccgggattgtatgtggctgattagggtattgaaataaagggtaagaactaattacaataatcaattcatgggatgattttggggtctgtggagggatagagaggaaacaagtagcttgtagagaaaagaccttaatggagaagaaggaagccccaaaatacgcaatctgacaaagcttttgctgtgcggtatgtaacatgaaacatcaacctacattctcagagtatcttcagtaagtaatgcaatttttgttagtacatggtagagttggatccacttggtgaatagaatattaacacctgargtttagtgaattcttattctgagccaaatctgtgattacatttatttcccaatgtttctatcggtactgttgttctctccattttagatgaggaaactgattctttgagaggtttcattatttgctcagctattgaattggtgaatggtagagaggagattttaacaaaggccctgtga

SEQ ID NO: 211524 - DNA, 652 bp, Homo sapiens
caaaattaaacgttttcctctttcctctccttcttttcttagtctgcctctctttctttgtcttcttatttcatattggcttgtttattactaagaagacaaaatctagtcacaagtcaattttcacattattatcaacrtcagcaatattcatgattaaaaaccatgtaacttaagtggctggaacatcataataaaaaatttagggctggcacattataaacaaggattaaacttgattagcaaattttaacttatttaaaatttgagaggataaagacctttatggtaggcaatgtatttgctttacaattgattaattaaaacataattatattgtagaacagtcataatgctcaaacaatgtaagtttcttagaattgtaacctcaaccaaaatgcaggcttctaactcaatgtacttattgtgaaggggatcaatatatattttgtatgaattcagagatacaaagaaagaataatgctgccaccaatgtttcttttcatgcctcatggtgtctgaaagtccacaaatataatgataatagcaatgttgattgtcattctctaagtgtaaatattttttatgagaaaggaaaaaataatcaaattctgaatgagagaagaaaaggaaatgtgtagaaaagagaaaa

SEQ ID NO: 211525 - DNA, 491 bp, Homo sapiens
aaattaccctctattttttaaattgtatttggctttttaaatgccatccacattaacacctcaatctgttttcacatatttgagtgatattttaattggttggtgatatggtttggctgtgtccccacmcaaatctcatcttgaattgtagctcccataattctgacatgttgtgggagggaccaggtgggaggtaattgaatcatgagggtggatgctgttcacatgacagtgaataagtgaataagtctcatgagacctgatggttttataatggggagttaccctacacaaactctcttctcttgttgttgccatgtgcgacatgtctttcaccttctgccatgaatgtgaggcctccccagccatgtgaaactgtgagtccattaaaactctttttccttataaattacccagtctcatttacatctttatcagcagtgtgaaaatggactaatacagtaaattggtaccagtagagtggggcgctg

SEQ ID NO: 211526 - DNA, 509 bp, Homo sapiens
aagggaacagtgtttatataagcaagctgacttcattttctctgcagttaaagaaggtttttggctagacaaaacttaagcctaaacaactttcgcttatgatattttctcagggtcttagaaaagtgacataggtaattttggggggattttacatactgaaaatgtctttagcccacattcatatctagcagataatttgataggatatataatttgaagtggaagttattttcctcagaattttaaaggctttacttcattttctttagctttcagtgtagtttttaagaagtctcatgcaattctgtctatggagtcttcatattaataactgatttatttttstctctttgaaagcttttacagtaatttctctattctgtgtgttctctaatttcaggatggtaagtactgatgctggtctttttacatttgctttactgggcaatcactggtcctttacaatctggaaactcatgtctctcggtttttaggacatttttaga

SEQ ID NO: 211527 - DNA, 509 bp, Homo sapiens
aagggaacagtgtttatataagcaagctgacttcattttctctgcagttaaagaaggtttttggctagacaaaacttaagcctaaacaactttcgcttatgatattttctcagggtcttagaaaagtgacataggtaattttggggggattttacatactgaaaatgtctttagcccacattcatatctagcagataatttgataggatatataatttgaagtggaagttattttcctcagaattttaaaggctttacttcattttctttagctttcagtgtagtttttaagaagtctcatgcaattctgtctatggagtcttcatattaataactgatttatttttgtctctttgaaagcttttacartaatttctctattctgtgtgttctctaatttcaggatggtaagtactgatgctggtctttttacatttgctttactgggcaatcactggtcctttacaatctggaaactcatgtctctcggtttttaggacatttttaga

SEQ ID NO: 211528 - DNA, 494 bp, Homo sapiens
agtgttctgttagaattctcatttaatattttgcacatgacttcaaagagacaactccaagggagattattaaaattttatctttcatggttatgtgaaaatgttaattcacttaccaaagagaatattatgcacacatttagtttaatattgaaaggccaccggaggggatagcatttgagattttcattcatttattaccatgcacaaagatagtaacttyaaaattatcatattacaatgttgtaaaacaaagatagcacatttcaacaaaagaaaaccagggagatgtctttaagagcaatgggagaggaagcaccctctaggactagaaatgttgctttgtatctgagactataaactaaagacaaattcctattgatgtgttgaaaaacaagagcaaaaccaagttttatgcatcctgaaactcagactctttagggaacccactctaagaaaaataatataaacttacaaatatataattatacaca

SEQ ID NO: 211529 - DNA, 511 bp, Homo sapiens
ttccttgactgacaatgtctggaaaccactgagacaagtttatgccactgctttatacatggggaaactggggctcagggagattaggccacacggccgggaagaggtcagacgtggctgtgccactcctaactcagtgcccttggcagtggagaaggctgcctgcctccaaggctggaactgggcagtttgctgtgagggcagaaggttcttcctttctttcctggatgtggccagagaggggcctgaaggagctgcagctttgtgatccacctcytccaggacatgcggggagccacggggccaattcacaggctgggacagatcatgcataaatagaagaaggcaggccctggagctgagctgccttctggggttccgcacatgattgtcacttacccagcctcctctgaggactcaggacctcagagtcctcgggacaatggaccatgcactgtggcccaaaatagggtttcgggcacaagctttggaagtagagctgggttcaagt

SEQ ID NO: 211530 - DNA, 511 bp, Homo sapiens
ttccttgactgacaatgtctggaaaccactgagacaagtttatgccactgctttatacatggggaaactggggctcagggagattaggccacacggccgggaagaggtcagacgtggctgtgccactcctaactcagtgcccttggcagtggagaaggctgcctgcctccaaggctggaactgggcagtttgctgtgagggcagaaggttcttcctttctttcctggatgtggccagagaggggcctgaaggagctgcagctttgtgatccacctcttccaggamatgcggggagccacggggccaattcacaggctgggacagatcatgcataaatagaagaaggcaggccctggagctgagctgccttctggggttccgcacatgattgtcacttacccagcctcctctgaggactcaggacctcagagtcctcgggacaatggaccatgcactgtggcccaaaatagggtttcgggcacaagctttggaagtagagctgggttcaagt

SEQ ID NO: 211531 - DNA, 504 bp, Homo sapiens
ttgtaatcccagcactttgggaggctgaggtgggtgatcacttaatgtcaggagttcaagaccagcctggccaatatggcaaaaccccgtttctaataaaaatacaaaatacaaaatttagccaggcgtcttgctgcatgcctgtaatcccagctactcaggaggctgaagcaggagaatcacttgaactcgagaggcacaggttgcagtgagcccagattgcaccactgcactccaggctggrcaacagagtgagactctgtctcaaaaaaagaggcctggcggggtggctcatacttgtaatcccagcactttgggaggccgaggtgggcggatcgcttgaggacaggagttcaagaccagcctggccaacatggtgaaaccccatttctgctagaaatattaaaaaattagccgggcatggtggcaggcacctgcaatcccagctacctgggaggctaaggcagcagaatagctcaaacccaggaggcagaggttgtagtg

SEQ ID NO: 211532 - DNA, 504 bp, Homo sapiens
ttgtaatcccagcactttgggaggctgaggtgggtgatcacttaatgtcaggagttcaagaccagcctggccaatatggcaaaaccccgtttctaataaaaatacaaaatacaaaatttagccaggcgtcttgctgcatgcctgtaatcccagctactcaggaggctgaagcaggagaatcacttgaactcgagaggcacaggttgcagtgagcccagattgcaccactgcactccaggctggacaacagagtgagactctgtctcaaaaaaagaggcctggcggggtggctcatacttgtaatcccagcactttgggaggccgaggtgggcggatcgcttgaggacaggagttcaagaccagcctggccaacatggtgaarccccatttctgctagaaatattaaaaaattagccgggcatggtggcaggcacctgcaatcccagctacctgggaggctaaggcagcagaatagctcaaacccaggaggcagaggttgtagtg

SEQ ID NO: 211533 - DNA, 385 bp, Homo sapiens
tacaccatcggctctcctggctctcaggcctttggacttggactcagtttcaccactggctttcctggttctttagcttgcagatggtggtgcttcacagcctccatctctgcccgagccaattcctatataaatctcttcttacatacacatcatatataccctattggttctatttctctggagaaccctaatacaatgggtcctccagcactcaccccaaattaagcatgtttccttttacaaaaggtagaaatgtccactcttcataagtcctttaatcaggtcccattcaaactcctctaaaataaatttctccaaaattctatttctatattycactttgcatgctcactgtttatgccactgtttatgtgaagcagag

SEQ ID NO: 211534 - DNA, 568 bp, Homo sapiens
ctaaagcaacttgttggaccagctagatttagaaatataatggatggttggtaaaaggtaactctaggggctgccaagggaactcagttccaaaaacccttcccataaaattaggctttccagagacacacatcttagatgttccagaggtttatgagtcctctctgttgcccctttcaaatctaaatacttcctcaaagtctctagagccatctgttaaggccaaagtaaatcacaacatgtttacaccacaaaagtttatgccgcattgtaaggaagtytaaaaggccaaatgaatgcccagctacttgggaggctgaggtgggaggactgcttgagcccaagagttcaagaccagcctggacaacatagtgagaccagcctttaaaaaaaaaaaaaaaaaaaaacaaaagccaaatgctgctattctggatttcatactgtgaaaaagaatgaaagaaggttaggttttttgacagtggacgttagggtttttcaaacactttccctttttaaatgtgagtaacatcctatattagtttcctactgctgctgtagaaattaccac

SEQ ID NO: 211535 - DNA, 417 bp, Homo sapiens
aaatcacaacatgtttacaccacaaaagtttatgccgcattgtaaggaagtttaaaaggccaaatgaatgcmcagctacttgggaggctgaggtgggaggactgcttgagcccaagagttcaagaccagcctggacaacatagtgagaccagcctttaaaaaaaaaaaaaaaaaaaaacaaaagccaaatgctgctattctggatttcatactgtgaaaaagaatgaaagaaggttaggttttttgacagtggacgttagggtttttcaaacactttccctttttaaatgtgagtaacatcctatattagtttcctactgctgctgtagaaattaccacaaatactgactttacacaagcttattctcatagttgcggaggtcatgaatctgacatcggttttatagggctggttcc

SEQ ID NO: 211536 - DNA, 434 bp, Homo sapiens
atgtttacaccacaaaagtttatgccgcattgtaaggaagtttaaaaggccaaatgaatgcccagctacttgggaggctgaggtgggaggactgcttgagcccaagagttcaagaccagcctggacaacatagtgagaccagcctttaaaaaaaaaaaaaaaaaaaaacaaaagccaaatgctgctattctggatttcatactgtgaaaaagaatgaaagaaggttaggttttttgacagtggacgttagggtttttcaaacactttccctttttaaatgtgagtaacatcctatattaktttcctactgctgctgtagaaattaccacaaatactgactttacacaagcttattctcatagttgcggaggtcatgaatctgacatcggttttatagggctggttccctgtgagggctctgagggaagaatgtg

SEQ ID NO: 211537 - DNA, 495 bp, Homo sapiens
tataatatatggtatatatgtaatgtaaagttttctggtagccacattaaaaagtttttttaaaaaggtgatactaatttacataaaaatayttatttcacgcctgtaatcccagcactttgagaggccgagatgggtggatcatgaggtcaggagttcgagaccagcctggccagtatggtgaaaccccatctctactaaaaatacaaaaattagccgggcgtgatggtgggaggctgaggcacaagaattgcttgaacctgggaggcagaggttgcagtgagccgagatcgtgccactgcattccagcctgggtgacagggtaattctgtctcaaaaaaaaaaaaattattatatcactgatggtatgtaatcaatatacaaattaatgagacattttaactttttttagtacaagatcttctcaattcagactagccacatttcaagtgctcagtagctacatgtggctagcagctcccatattgaacagtg

SEQ ID NO: 211538 - DNA, 603 bp, Homo sapiens
ttacataaaaatacttatttcacgcctgtaatcccagcactttgagaggccgagatgggtggatcatgaggtcaggagttcgagaccagcctggccagtatggtgaaaccccatctctactaaaaatacaaaaattagccgggcgtgatggtgggaggctgaggcacaagaattgcttgaacctgggaggcagaggttgcrgtgagccgagatcgtgccactgcattccagcctgggtgacagggtaattctgtctcaaaaaaaaaaaaattattatatcactgatggtatgtaatcaatatacaaattaatgagacattttaactttttttagtacaagatcttctcaattcagactagccacatttcaagtgctcagtagctacatgtggctagcagctcccatattgaacagtgcggttccagaggtggtaaatacttatgatctagatttttgctcacatgtatgatctgtgtgtctttaggaaaaacagatgagtgtgtgatcagtctgtatttctagttctttagttttatattgttactgccgggttttctttcagtggggaagagggtgtttagagggtttcagagaggaagctc

SEQ ID NO: 211539 - DNA, 327 bp, Homo sapiens
tacaggcagtggatggatttaaatgtatttggaactaagagtaggatttaaatgtatttggaactaagagtaggccctagagccatcagtgtttatgccttacctgtattttctggggtggagatcatttctaatcctgggatgaggatggaatataatgattagggacagtgtttagagcttattctgccrcttagcaatttgtgatcttggggtcttggcgagttcctttgtgacaatggtgacagtaatggcacctgcctttattaaagggctcttgggaggcatgactgacacccggtgtgtggccatcattggctggggctc

SEQ ID NO: 211540 - DNA, 410 bp, Homo sapiens
cttctggaagtctggaatttttattttattttattttattttttgagacagagtctcgctctgtcgcccagtctggagtgcaacggtgcgatctcggctcactgcaacctccgcctcctgggttcaagcaaaattctcctgcctcagcctcccaagtagctggaatcacaggagtccgccaccatgcccagctaatttttggtatttttattagagacagggttttgtcacgttgcccaggctrgtctcaaactcctgacctcaggtgatccacccacctcagcctcccaaaatgccaggattacatgcgtaagccaccacacctggcctggattaaattttcaaaaaccagctcctccctgacagatcttctgtgctgtgctccagcctctgaggagctgtagctactg

SEQ ID NO: 211541 - DNA, 550 bp, Homo sapiens
aataatcatttatattgaataccttttgtttaacttactgaatagtttctcctgtttgaatctctactggtacacaattggtgtctggagtggctccagcagatagatctgaaattctgagattttggcatttgggtggttatgcctttgggcctgagcrcagtgctgagctccttgtcagagggaaatggaatgctggtaatccatggcatcacaattaattaagctatcacctgtggttgattataatgtgttgctaatgaatgcagatgcctcagagcccaagtggctgctacatttgacctttatggcaataataactgtaaggactatagtgtaggatagagtcttttgagtataattaaaggcttacagacagaaaatgactgctcagatttgttaactctgctcaagatctgccctttctcttttttgatcatatattttacttcaaatcatttcatctcctccaaattatgaataaacttgtgaattaaaagacttgttgcttgctcatttaagaaatattttgctgtgtaaaagtaatgca

SEQ ID NO: 211542 - DNA, 529 bp, Homo sapiens
gcaacctctgcctcccgagttcaagtgattcttgggcctcagcctcctgagtagctgggactacaggcgtcagccaccaagcccagctaatttttttatttttagtagagacagggtttcaccacgttggtcaggctgatcttgaactcctgacctcaggtgatccacctgcctcggcttcccaaagtgctgggattacaggcgtggccactgtgcccagccttaaggctgaacaatattctattgtaagtatatatcacattttgctttttcattcatctgtcaatggcctcttgggttgcttcaatgttttagctattgtaagtaatgctgtatgaacacgagcatacaaatatctttgatactttgcttttaattcttctgagtatggcaytgctggatcatatggtaaatctatttttaattttttgagaaaccaccatactgctttccacagtggttataccattctatatcccccaaacaggcacaaagattctattttctccacataccctgcaaacacatt

SEQ ID NO: 211543 - DNA, 450 bp, Homo sapiens
tgatttcaatgttctgacctcagcctgcgctgcagggaacgtccgagtgtaacgcgttagttcgtaggccggaacccaaagctccggacgctgcgacgccggagcctctaggcgccgggacacgggcgccggaagtggcgaaggcggggtcggcgctgccgsgtgaaatcgtaggacagtgaagatgctgctggaattgtccgaggagcataaggaacacctggccttcctgcctcaagtggacagcgcgggtcagcgggcgtgggggcggtgttctgtgggctggggaggaggtcaaaggcagcgcctggcactcaacagccttctgactttcattgcagtggtcgccgagtttgggcggattgctgtggaattcctgagacgcggcgcaaacccaaaaatctacgaaggcgccgccagtaagaagggaaaggggaaggctccgcaggc

SEQ ID NO: 211544 - DNA, 568 bp, Homo sapiens
attggctagaaagagaggtcctgtaagagaagctgatcraggactctttttaccttctagttttaaaaaaggtgagctggctgcttgaggaatactagttatgctttaggtaaaggtatgaagcatatgaagcaggccaaatggcccttcctcccttccctttgaggttcttctttccttgcctctcctctgatgctctgtgtcctcatggtggccaaaacagcctactcaggtcatgcttagacccttaaccttatatctgaacaccctcatttcctaaagttcctactcccagagggtcattttaaggagtaggtatgttgtccttgacacatgctgagcaagtcatttaatcattaagatgatttgctttttttcaagtctgtaaaagttggggttgggtcaattcaaattatcttccagcttaaaacgtcacattataatctgaacagtataagcctgaagaatagtcaaccagagtttttcctagttttgtttcatcctttggtacttcattaaataactaaattatcagttagttggggacaaatgccactgtgtgcccttc

SEQ ID NO: 211545 - DNA, 568 bp, Homo sapiens
attggctagaaagagaggtcctgtaagagaagctgatcaaggactctttttaccttctagttttaaaaaaggtgagctggctgcttgaggaatactagttatgctttaggtaaaggtatgaagcatatgaagcaggccaaatggcccttcctcccttccctttgaggttcttctttccttgcctctcctctgatgctctgtgtcctcatggtggccaaaacagcctactcaggtcatgcttagacccttaaccttatatctgaacaccctcatttcctaaagttcctactcccagagggtyattttaaggagtaggtatgttgtccttgacacatgctgagcaagtcatttaatcattaagatgatttgctttttttcaagtctgtaaaagttggggttgggtcaattcaaattatcttccagcttaaaacgtcacattataatctgaacagtataagcctgaagaatagtcaaccagagtttttcctagttttgtttcatcctttggtacttcattaaataactaaattatcagttagttggggacaaatgccactgtgtgcccttc

SEQ ID NO: 211546 - DNA, 568 bp, Homo sapiens
attggctagaaagagaggtcctgtaagagaagctgatcaaggactctttttaccttctagttttaaaaaaggtgagctggctgcttgaggaatactagttatgctttaggtaaaggtatgaagcatatgaagcaggccaaatggcccttcctcccttccctttgaggttcttctttccttgcctctcctctgatgctctgtgtcctcatggtggccaaaacagcctactcaggtcatgcttagacccttaaccttatatctgaacaccctcatttcctaaagttcctactcccagagggtcrttttaaggagtaggtatgttgtccttgacacatgctgagcaagtcatttaatcattaagatgatttgctttttttcaagtctgtaaaagttggggttgggtcaattcaaattatcttccagcttaaaacgtcacattataatctgaacagtataagcctgaagaatagtcaaccagagtttttcctagttttgtttcatcctttggtacttcattaaataactaaattatcagttagttggggacaaatgccactgtgtgcccttc

SEQ ID NO: 211547 - DNA, 568 bp, Homo sapiens
attggctagaaagagaggtcctgtaagagaagctgatcaaggactctttttaccttctagttttaaaaaaggtgagctggctgcttgaggaatactagttatgctttaggtaaaggtatgaagcatatgaagcaggccaaatggcccttcctcccttccctttgaggttcttctttccttgcctctcctctgatgctctgtgtcctcatggtggccaaaacagcctactcaggtcatgcttagacccttaaccttatatctgaacaccctcatttcctaaagttcctactcccagagggtcattttaaggagtaggtatgttgtccttgacacatgctgagcaagtcatttaatcattaagatratttgctttttttcaagtctgtaaaagttggggttgggtcaattcaaattatcttccagcttaaaacgtcacattataatctgaacagtataagcctgaagaatagtcaaccagagtttttcctagttttgtttcatcctttggtacttcattaaataactaaattatcagttagttggggacaaatgccactgtgtgcccttc

SEQ ID NO: 211548 - DNA, 559 bp, Homo sapiens
ctcttgttgcccagcctggagcacaatggtgcgatctcggctcaccgcaagctccacctcccrggttcaagcgattctcctgtctcagccttaccaagtagctgggattataggcatgagccaccaagcctggctaatgtttgtatttttagtagagatgaggtttctccatatgggtcaggttggtctcgaactcctgacctcaggtgatccgcccaccctggcctcccaaagtgctgggattacaggcgtgagccaccgcgcccggcttgtttttattttattttattttgagacagggtcttgctctgtcactcaggctagagtgcagtttctcgatcatggctcgctgcagcctcaatctcctgggctcaagtgattctcccacctcagctcccaattagctgggggtacaggcatgcgccaccacacctggctaattttgatttttagtggaaaggaggtctcgttaagttgcccgggctggtctcgaactccagggctcaagcaatcctcctgactaggcctccgaaagtgctgggatgacaggcatgagcca

SEQ ID NO: 211549 - DNA, 559 bp, Homo sapiens
gagtacccagattcataaagcaaattcttagagaccttcagagacttagactcccacacaataataaggggagacatcaacatctcactcacagtattatatagatcatcgagggagaaaattaacgatattcaggacctaaactcagcactggatcaaatggacctggtagacatctacagaactctccacgctggaaaaacagaatatacattcttctcatcaccacatkacacatactctaaagtcgaccacataatcagccccaaaacactactcagcaaatgcaaaagaattgaaatcgtaagaaccactctctcagacaacagcagcagaaaattagaattcatgattaagaaatttgctcaaaaccgtactattacatggaaattgaataacctgctcctgattgacttttgtgtcaataatgaaattaaggcagaaatcaagttctttgaaactaatgagaacaaagatacataccaaaatctctgggacacagttaaagcaatgttaagagggaaatgtataatattaaacactcacattaaaaagttag

SEQ ID NO: 211550 - DNA, 564 bp, Homo sapiens
gtgctaccaagccaaaaacaaagcaaaacaaaacaaaataaaaacatccagtagagaattgtgtttattcatagtgaccagtcttcagcttaraggtgaaccctgagaagatatgggtgagacatggacatcatctgttacctgagtggcagggcctttattaacacacaggtgagaagcaattcacctatcccctcaagaaactgtaggtgtttcagatgaaggggagagtatccttgaactagcttctgtcacaaacaaccttttccactgtgggttgacaggagggcctccttagggaccctgatgtataatctcaagtagatgaaatcttgctggtcagataaaaaaaagctcacttatctttatcctcatcagctgtaactgctatctggcaatagccattctgcaaatctagcaaggtgaactctaggtgtttttacaaacagctattgatcactcctaattcaacaattaatggtataataatgcacatactttcaattttttctagtctcctttctcactatcgcaattggagaagcatatgggctatgattcagt

SEQ ID NO: 211551 - DNA, 588 bp, Homo sapiens
aaagctttaaaatctaataccttatatttgtgcaagattaattttcaaagtgctgatacattcattaattgtatttgatcctcaaccataaatgctatgaagaatttaggacagaatgattaccttaatttatagaagtacaaaaagatttagagttaacccaggggaaaatgcatctaaacaaaggctttcaggctccctaatgtggttacctgttcaaaacatcatatttcatctttttgttctttatttttcttttttgacagagtctagctctgtcatccagctggagtgcaagcaattctcctgcctcagcctccagagtagctgctattataggcgcctgccaccacaacccagctaatttttgtatttttagtagagacggggtttcactgtgttggccaggctggtctcgaactcctgaccttgtgatccacctgtctcggcctcccctttttgttcttttaatttcctctaatatccatttttgccttcttgcaaataaatagattattcagctacaccttctwacatatcctgcaaccagatgtagtcctatggacccactactggccaatgagatgt

SEQ ID NO: 211552 - DNA, 493 bp, Homo sapiens
actacctttttattttttgccttttcagattggcaaggaatatcatttattgcatcttttaatacccacttacaagatttagcttttctcagatggccaaataattatcctttattcctaaacttcatgcactggctctcaaaccaaatgcrggttaggtgaggtttctacatttattggcctgcttgtgaaagaaggccacatatacatttggcctccatttgttagctggcttcactaagctacttggtatttgcagacaatgctgtttctttgtcctaatcatctccttccctctcaagaaagtaagaaatctcaaatacggaggacatctgatctgaactgttatgatgtatgtcttacatgaaatgctatccttgagtgaaacgttagggaggttgaatagaaaaagactgaacaggagcacaactcagtacacttactacttagttttccttttcaattttgttagcattctgttttaggctcatag

SEQ ID NO: 211553 - DNA, 605 bp, Homo sapiens
aaatagaaaattaatgatcaaacataaatggaattgtctgaatgactcagaataaattaaagactaccaggcctaaaataagaaaaatatagcatttgactatactaaccttttttctccaaaataaattttgtcaatctccctgtttctttttgattaacgttcaatgtttagatctaatcacatmgactaccataataatttatgaaccatcctttatttactaattcccttagtgttacttccttaaccctcatctgcacttaacaattcactgctggatatattatctcattctccagttgtattccctttttgcctattgtctctccaagtaaatcagggaggaaccgtgtcttgtactttctttgtatcttaatgatacttaacacaactctatgcatatacctttattcagcagttgttcagaggttaacagtccgtgaaatttagcttattgttttaatgtgtttagctatctggtctgttgcatcaaagcagactagaagcagcaaccatgagaaaagctccgaaagctagcacagatgagaagagattacatttaaaaagccagccaaaatagtaaaaccactaaccccaaagta

SEQ ID NO: 211554 - DNA, 605 bp, Homo sapiens
aaatagaaaattaatgatcaaacataaatggaattgtctgaatgactcagaataaattaaagactaccaggcctaaaataagaaaaatatagcatttgactatactaaccttttttctccaaaataaattttgtcaatctccctgtttctttttgattaacgttcaatgtttagatctaatcacatcgactaccataataatttatgaaccatcctttatttactaattcccttagtgttacttccttaaccctcatctgcacttaacaattcactgctggatatattatctcattctccagttgtattccctttttgcctattgtctctccaagtaaatcagggaggaacygtgtcttgtactttctttgtatcttaatgatacttaacacaactctatgcatatacctttattcagcagttgttcagaggttaacagtccgtgaaatttagcttattgttttaatgtgtttagctatctggtctgttgcatcaaagcagactagaagcagcaaccatgagaaaagctccgaaagctagcacagatgagaagagattacatttaaaaagccagccaaaatagtaaaaccactaaccccaaagta

SEQ ID NO: 211555 - DNA, 605 bp, Homo sapiens
aaatagaaaattaatgatcaaacataaatggaattgtctgaatgactcagaataaattaaagactaccaggcctaaaataagaaaaatatagcatttgactatactaaccttttttctccaaaataaattttgtcaatctccctgtttctttttgattaacgttcaatgtttagatctaatcacatcgactaccataataatttatgaaccatcctttatttactaattcccttagtgttacttccttaaccctcatctgcacttaacaattcactgctggatatattatctcattctccagttgtattccctttttgcctattgtctctccaagtaaatcagggaggaaccgtgtcttgtactttctttgtatcttaatgatacttaacacaactctatgcatatacctttattcagcagttgttcagaggttaacagtcygtgaaatttagcttattgttttaatgtgtttagctatctggtctgttgcatcaaagcagactagaagcagcaaccatgagaaaagctccgaaagctagcacagatgagaagagattacatttaaaaagccagccaaaatagtaaaaccactaaccccaaagta

SEQ ID NO: 211556 - DNA, 605 bp, Homo sapiens
aaatagaaaattaatgatcaaacataaatggaattgtctgaatgactcagaataaattaaagactaccaggcctaaaataagaaaaatatagcatttgactatactaaccttttttctccaaaataaattttgtcaatctccctgtttctttttgattaacgttcaatgtttagatctaatcacatcgactaccataataatttatgaaccatcctttatttactaattcccttagtgttacttccttaaccctcatctgcacttaacaattcactgctggatatattatctcattctccagttgtattccctttttgcctattgtctctccaagtaaatcagggaggaaccgtgtcttgtactttctttgtatcttaatgatacttaacacaactctatgcatatacctttattcagcagttgttcagaggttaacagtccgtgaaatttagcttattgttttaatgtgtttagctatctggtctgttgcatcaaagcagactagaagcagcaaccatgagaaaagctccgaaagctagcacagrtgagaagagattacatttaaaaagccagccaaaatagtaaaaccactaaccccaaagta

SEQ ID NO: 211557 - DNA, 287 bp, Homo sapiens
aattagaattatgtgaaattgacttgggaggtaaaagctttattttcattgcatttgcacatayccttattgaaaagtataaacaaagttaagatttggaagggccatgctaaactcttctgtaaatatcacatgtctatatgtctaaggatttggatacatgttgcatttgaagtagcttaggtgtctctaataaatgagtcagcttacaagcttacactcttttttctttacttttttttttttttttttgaagatagggtcttactctgacaccccaggctgga

SEQ ID NO: 211558 - DNA, 491 bp, Homo sapiens
tctgaattctttttatggatttgtaatccaacactgtaaatgggaaaattggtarataaaacacgtttggagaacgatttcatttctttaccatttttgtagggtctgcaaagatgctttgaggaaggcacttgccaactttcagtttgctagagaaaattactttaggatcaaatcataagttctgaatcacaaatgaactcaaaatgtgcattgatagcatcattaggtagcagtacggctattgattttcagagttggattggccttcccctgacctttcacccattgttccctttgcccacacatggcaattctactttgaaaaatacagtattttctccattcaccatctctaattcagaccatcggtcaagcttactctggttttatcctgttcatataaaaagaatcacccttttttgccctttgccagctcttacattactagtgtctgctttatggaatcaagagcaaataacttcctacct

SEQ ID NO: 211559 - DNA, 486 bp, Homo sapiens
  misc_feature (1)...(486): n = A,T,C or G
gtaaatgggaaaattggtagataaaacacgtttggagaacgatttcatttctttaccatttttgtagggtctgcaaagatgctttgaggaaggcacttgccaactttcagtttgctagagaaaattactttaggatcaaatcataagttytgaatcacaaatgaactcaaaatgtgcattgatagcatcattaggtagcagtacggctattgattttcagagttggattggccttcccctgacctttcacccattgttccctttgcccacacatggcaattctactttgaaaaatacagtattttctccattcaccatctctaattcagaccatcggtcaagcttactctggttttatcctgttcatataaaaagaatcacccttttttgccctttgccagctcttacattactagtgtctgctttatggaatcaagagcaaataacttcctacctgcagccaaaatgtctaaaagcagannnnnn

SEQ ID NO: 211560 - DNA, 484 bp, Homo sapiens
  misc_feature (1)...(484): n = A,T,C or G
gtaaatgggaaaattggtagataaaacacgtttggagaacgatttcatttctttaccatttttgtagggtctgcaaagatgctttgaggaaggcacttgccaactttcagtttgctagagaaaattactttaggatcaaatcataagttctgaatcasaaatgaactcaaaatgtgcattgatagcatcattaggtagcagtacggctattgattttcagagttggattggccttcccctgacctttcacccattgttccctttgcccacacatggcaattctactttgaaaaatacagtattttctccattcaccatctctaattcagaccatcggtcaagcttactctggttttatcctgttcatataaaaagaatcacccttttttgccctttgccagctcttacattactagtgtctgctttatggaatcaagagcaaataacttcctacctgcagccaaaatgtctaaaagcagannnn

SEQ ID NO: 211561 - DNA, 486 bp, Homo sapiens
  misc_feature (1)...(486): n = A,T,C or G
gtaaatgggaaaattggtagataaaacacgtttggagaacgatttcatttctttaccatttttgtagggtctgcaaagatgctttgaggaaggcacttgccaactttcagtttgctagagaaaattactttaggatcaaatcataagttctgaatcacaaatgaactcaaaatgtgcattgatagcatcattaggtagcagtacggctattgattttcagagttggattggccttcccctgacctttcacccattgttccctttgcccacacatggcaattytactttgaaaaatacagtattttctccattcaccatctctaattcagaccatcggtcaagcttactctggttttatcctgttcatataaaaagaatcacccttttttgccctttgccagctcttacattactagtgtctgctttatggaatcaagagcaaataacttcctacctgcagccaaaatgtctaaaagcagannnnnn

SEQ ID NO: 211562 - DNA, 538 bp, Homo sapiens
gtgttatgaagctggcttggataggaattagaacatggaaagcaataaagttttgaattgtactgaaaacttactatgtgccagactgacactctcttacgcattttacatcattatcttatttaatgtcaccgtaaaacctactgcataaataggtaacagtcccatttgacagattttaaaaactaaggctcagagagtttatgtgtctcacttcattaaaaccagtcttcttgagcccaagcataatatcataatattctcatattattctatttcaagrttatttggttactgtttttttttgttttttttttttaatggagtctcactctgtcacccaagctggagtgcagtgatgcaatctcggttcactgcagcctccacctctcccggattcaagaaattctctgcctcagtctcccaagtagctgggattacaggcacctgccaccacgcccagctaattttttctcatgtatttttagtggagacagggtttcaccatcttggccaagctggtcttgaactcctgacc

SEQ ID NO: 211563 - DNA, 597 bp, Homo sapiens
agaaaatcatgagaggaatccaagggctggcacccttggtttattatacccctttttttcctctgtgaccttaagatttggagtcctaggggctgctatggacgcttgagctctgcttccagccccaaatgagccttgttggaagtggggtaggaggaaagtgttgtctgtttgtaccagggcttccctgggagttctgagcttctcaggggaattccatyccaatctccagcttctttgcccactcacctgccctcctgtccaatgcctctggaaagtttcctagtgatggtaacttccagtgactaacctgtacctttgtagggtcactgggagtgagggaccctctaaaataccatctcctgcatgaaacatttcttgtttccctggttaaaaagagtatctcctgcaatcgcacttagcacttattgccctactctagctactagctttatgttgtttcctgctgtgaattgtaggtctctgagagcaaagtctaggtctggttcctgtttgatcagtacaatgagctgcacatatgtttccaagcaatggctgttaagctgaattccaaggaagcaagactcggggctgtag

SEQ ID NO: 211564 - DNA, 434 bp, Homo sapiens
tcctcagcataaaaagtccagagacatatctttgccgaagaattcacagttaaatatgctcaagagaactaactcatggtaacccaaatcataagaggctgaagtacaaatcagaayaccaatttcttaattaatcatagagaatattccttttgactagtaagaaaatttacacctaaagccatgacacacttttctcaaatatctggataactgaaatcctgaattagtaatcaggagtccactgaaagttagaaccttgagatatagagagtttgggggatagctaataaattatccctgcactacatacatcttcatagagataaaagttgtggctcacacaggaagagtctctctcccttgaatagtgctgccccagcactgcagacttcttggtcttcttggcctttcctcttccatatccttctctc

SEQ ID NO: 211565 - DNA, 421 bp, Homo sapiens
ctggtcctcagcataaaaagtccagagacatatctttgccgaagaattcacagttaaatatgctcaagagaactaactcatggtaacccaaatcataagaggctgaagtacaaatcagaataccaatttcttaattaatcatagagaatattccttttgactagtaagaaaatttacacctaaagccatgacacacttttctcaaatatctggataactgaaatcctgaattagtaatcaggagtccactgaaagttagaaccttgakatatagagagtttgggggatagctaataaattatccctgcactacatacatcttcatagagataaaagttgtggctcacacaggaagagtctctctcccttgaatagtgctgccccagcactgcagacttcttggtcttcttggcctttcctc

SEQ ID NO: 211566 - DNA, 432 bp, Homo sapiens
ctggtcctcagcataaaaagtccagagacatatctttgccgaagaattcacagttaaatatgctcaagagaactaactcatggtaacccaaatcataagaggctgaagtacaaatcagaataccaatttcttaattaatcatagagaatattccttttgactagtaagaaaatttacacctaaagccatgacacacttttctcaaatatctggataactgaaatcctgaattagtaatcaggagtccactgaaagttagaaccttgagatatagagagtttgggggatakctaataaattatccctgcactacatacatcttcatagagataaaagttgtggctcacacaggaagagtctctctcccttgaatagtgctgccccagcactgcagacttcttggtcttcttggcctttcctcttccatatcct

SEQ ID NO: 211567 - DNA, 434 bp, Homo sapiens
tcctcagcataaaaagtccagagacatatctttgccgaagaattcacagttaaatatgctcaagagaactaactcatggtaacccaaatcataagaggctgaagtacaaatcagaataccaatttcttaattaatcatagagaatattccttttgactagtaagaaaatttacacctaaagccatgacacacttttctcaaatatctggataactgaaatcctgaattagtaatcaggagtccactgaaagttagaaccttgagatatagagagtttgggggatagctaataaattatccctgcactacatacatcttcatrgagataaaagttgtggctcacacaggaagagtctctctcccttgaatagtgctgccccagcactgcagacttcttggtcttcttggcctttcctcttccatatccttctctc

SEQ ID NO: 211568 - DNA, 461 bp, Homo sapiens
aataattgtagcataactctctctattgtcatgttgcttctttctgcaaatatatcttagaagttagactttaaacctttgatctcccacaccaaaagagaaaataatatttatatggaagtaattttattttagtgtttgtgatttattgtggagagcaggtgtttaaaaattttagaatttctttaacaaaattctaaagagaaaataaaaaagaaatcacagtatttacagagataacagaatggcttagccatgcaaaacaaataactttggtttttccccttttactttggtttaaatgttgaccaagattcaattttttttcctgccaaataaaacttcaataaaagtttagaggcaaaataacrtattttctttttttcccataatattttatacagcatcgagtctaagaatattttatgcatttaatccataccaatgcactacggaagctt

SEQ ID NO: 211569 - DNA, 556 bp, Homo sapiens
tttaagctcaagagtttgagtttgaagtgcagggtgatcatgcctgtgaccagctactgcactccagcctgggcaacatagtgagacatcatctgcaaaaaagaaatttaaaaagtctatgagatggagacctgcccttataaggttgttttgctaaggacttatcctgcttgttttgacatgtatgtgggagttttgtgtttccagtgccctataatttccattatagatgacagaatccattgccatctcatagtcttcctaattcagtcttcacccaggaagtatgaggtcagaagacttggaaaggactgctttgaagggcactgagttcattttcaaacactgtgttggtatatctagcactcaaaattggttggccaggacaggyttccctattccataagtagaaatgctacctatagacctgttgtattaatcaacctgtctacacctcatagatgatattccttcttgtagaaccctaagacacttataagattttgggaaccctgcagtggtgggtggtaaaacagctctctggagggcaaaacta

SEQ ID NO: 211570 - DNA, 610 bp, Homo sapiens
gggaattctagcttttgatgactgaccaagctaaactatgtgaaaacacctgtcacaaggcctgtcacataacagacatacaatgaatgtctayttctttccatctgtttaatacagcagcagcagcacctgtattacctttattcttagtggtcttcatagaaacaaggactccagacagagcctgtagagtcctaagaagagactcaagtgccaaccatctctccaatgcttggtgagatgtgggcacgatttgcagaactgccactaactatgcaggcaaatttaagtaagtcatttcttccctggggtgggggagctggactagataggttttaacttcctttccagttccgaaattctttaagcctataagtctcatatccatctcagaaacaagcaataggcagagagaaaaactattgcagaacatagtcatttgcttctctactgagcactatgtctggggccctgtgccaggagctacagggaactcagagaagcagaaagtaatccttaaattcaaagcctttaaaatatgtatgagggatgagatgggggtggaaacatggaaagatggcaatacaaaataaagtttaattataaaaca

SEQ ID NO: 211571 - DNA, 326 bp, Homo sapiens
ggtaatggccaaaatggccttccatgatctattcctggtaacttctctgcctggtgtcttcacacccccgcttcctgctcactctgccccagtcacacmggtctccttgttggtctgccctcacattgtgcattctcttactccaggacccttgcactggctgttccctcacgtttttctccctcactgatttcaggttcatgcttaaaggttacctgtttatttttttatgacttcgtggctgcattgtttaaaaatagcacccccatgcacaatggtgtagccagtccctctttcctgcttcatctttctccatggtgctgacc

SEQ ID NO: 211572 - DNA, 557 bp, Homo sapiens
aggagaaagctgaaacccaatccaaagaatctaaggaattcagtaaaatgattcaagagatgaaagacaaaatttccattttaagaaagaaccaaactgatctaatagagctgaatgactcactacaagaatttcataacmcaatattaacagcagaatcaactgagctgaggaaattattcagagctcaaagactggttctttgaattagttcagtgcgacaaaaataaggaaaaacaaaatttttaaaataagcaaaacctctgagaaatgtgggattatgtaaacagacctaacttatgagtcactggcatccctgaaagacaggaagagagagcaagcaacttgggaaagatatttgaaaatatcgtccacaaaaattttcccaatcttgttagagaggtcgatgttcatattcagaaaattcagagaacctctgatatactataaaagatgaccatccccaagacacatagtcatcagaatctcgaaggtcagtgtggaaaaaatatatattaaagacagctacagagaaagggcaggtcatttgcaaagga

SEQ ID NO: 211573 - DNA, 557 bp, Homo sapiens
aggagaaagctgaaacccaatccaaagaatctaaggaattcagtaaaatgattcaagagatgaaagacaaaatttccattttaagaaagaaccaaactgatctaatagagctgaatgactcactacaagaatttcataacacaatattaacagcagaatcaactgagctgaggaaattattcagagctcaaagactggttctttgaattagttcagtgcgacaaaaataargaaaaacaaaatttttaaaataagcaaaacctctgagaaatgtgggattatgtaaacagacctaacttatgagtcactggcatccctgaaagacaggaagagagagcaagcaacttgggaaagatatttgaaaatatcgtccacaaaaattttcccaatcttgttagagaggtcgatgttcatattcagaaaattcagagaacctctgatatactataaaagatgaccatccccaagacacatagtcatcagaatctcgaaggtcagtgtggaaaaaatatatattaaagacagctacagagaaagggcaggtcatttgcaaagga

SEQ ID NO: 211574 - DNA, 557 bp, Homo sapiens
aggagaaagctgaaacccaatccaaagaatctaaggaattcagtaaaatgattcaagagatgaaagacaaaatttccattttaagaaagaaccaaactgatctaatagagctgaatgactcactacaagaatttcataacacaatattaacagcagaatcaactgagctgaggaaattattcagagctcaaagactggttctttgaattagttcagtgcgacaaaaataaggaaaaacaaaatttttaaaataagcaaaacctctgagaaatgtgggattatgtaaasagacctaacttatgagtcactggcatccctgaaagacaggaagagagagcaagcaacttgggaaagatatttgaaaatatcgtccacaaaaattttcccaatcttgttagagaggtcgatgttcatattcagaaaattcagagaacctctgatatactataaaagatgaccatccccaagacacatagtcatcagaatctcgaaggtcagtgtggaaaaaatatatattaaagacagctacagagaaagggcaggtcatttgcaaagga

SEQ ID NO: 211575 - DNA, 567 bp, Homo sapiens
agatctcagtttatttctctctccaggaattgccctctgccaaagttagttgccttgcccaagttcaggcaccctccctgaaggagctcacatctactgatttgccggtaaaagggtacaaaacttaattcccttgcctggattcaggacattccttaaggaccatcctatcccagctacataattcattgtaggatcagctgaatcttctgaaacttcatcacagttcatcttttgcctctttccagttctacttcccttactccaacataggtgtgagtccccagggtctgcctctacacccccagtaaatatcatgcatgcaaatctctrcctgagggcctggttcctgtggaaatccaaataatgactctaagtcatcctaccagcagttaacagaaacagaacttgaaggcaaattccatattctctccagagaacaccaatctggcacctgtcaggtgaattttgtgggcccccttccgtcaaaattcaaatattgaaaactaatccccaatgtgatgatggggactttggaacgtgattaggtcatgatggttccaccct

SEQ ID NO: 211576 - DNA, 572 bp, Homo sapiens
tctttcagctatggtgcctgaactcctcttgacccaaagtctttccaagtgtttttgaaagaaactcgattttacagtagaaaaaaaataattttttaaagaagttaacctcagcaaycacattcttaggtatttacttgaatcagttgaaaacttatcttcacacaaaaaaactgcacataaatgtttattcacagctttattcataatcatcaaaaattggaagcaaccaagatgtccttcaataggtgaatgaataaacaaactgtggtacatcttgaccatggaatattattcaggaacaaaaagaaatgagctatcaagtcacagaaagacatggaggatttgtaaatatgtattgctaaatggaggaagccagtctgaaaaggctacatactgtatgatttcaactatgtgacattcttgaaaaagcaaaactatggagctagcaaaaagagcagtggttgctggaaggagtctgtaaagaagaaggaatgaatagctggagcacagggcattttttagggcaatgaaactattctgtatgacattgaaatggtagatacatgaca

SEQ ID NO: 211577 - DNA, 586 bp, Homo sapiens
atcttctaggttgtacttttttaaataacctaggcctaaagaatakgataagaaaggcattgaatatacaaactatttaaaaatatatgcataaatttgataaattatacaatcgtaagtaagctttggagaatgtgagtacctttatagaatatccttttatactaaaatattgtgatgtcatccttttatattaaaacgttgtgatgtcatttgtaaccattatatacttcaatacctaaatgcattttgaacattttatccaatgccctttccatcatggttaaacatttcattttattaaatccctttcttctaccaagatattggtaacactggatatgaaactgagctctaaaactttactcagaaagttaagtgcccctcaccaacattatgatacaaagttgcactgtcagctgcattttggccaaaaaccaaatacataagaaacacattactaacaaaaaaaaattaaatgatatttgttaaatgaagatgccttcttggttgagataaaggggattttattctatcagtgaaaaactgcttcagttaatatgttgagaggggaaatgcaaataat

SEQ ID NO: 211578 - DNA, 579 bp, Homo sapiens
cctcatgattgttttgttttgtcctttgtaagttgactaaatgtgatctatttatagcctaggggattcttcatttttattcagcattccacgtaagctttaattcacycagaaagtcctctgtgatctcttgatgttgggttttgtttccttttttctgcatgtgtgatttcatggtacactccatttatactattatcatacttctaccctagtgatttaattatctgtctcttccaccattctttagttttctgaagggcagggatattatcattcatctcgaatatgtagtgccacattgaattctagacaaattacaactaactacttaattggtatttttggatgaataaattttgtactatttatgccaatttgatttactggcatggcttctattcgctgggaataagtaaactggttgcaaagtaattcaagttattgcattgaaattatttttgtaactcagaccaaagaattgaaacttcctgcatcttgaatttataaaagtttaagagtacattaaaaaatttattatgatgttgtctgtcaaacaacttagataattaaaaggga

SEQ ID NO: 211579 - DNA, 499 bp, Homo sapiens
actaaagaaaaaaataaagcagggaacaccgaaggtatgaggaaaggcttgcctgagaaggttccatttggacataaaactcaaaaaaggaagtaaagaaggaactatgcatatatttgagtagggggaggggaggatgtgttcatgtggaccttgctaagattagtcagaaggctttgaaagagactaagaaaagtggaagtcaatacaatgaagagacaacttcttcaaagaattttactctaaayagaagcataaaatggagctccccggggtgtatatagtaggagtaaatacctagtgttagaaaatggaagatgagagtattaataatatgttttcttaggatgattgaaattgtggcatggtgggaatggttcaggaaagaaagaaaagtaatgatgcatcagatgcccaatgctggtttcttggtctgtttctgtgtcttacttttacagtgctgacacctattaaaataaaatattgattagctgaattc

SEQ ID NO: 211580 - DNA, 499 bp, Homo sapiens
actaaagaaaaaaataaagcagggaacaccgaaggtatgaggaaaggcttgcctgagaaggttccatttggacataaaactcaaaaaaggaagtaaagaaggaactatgcatatatttgagtagggggaggggaggatgtgttcatgtggaccttgctaagattagtcagaaggctttgaaagagactaagaaaagtggaagtcaatacaatgaagagacaacttcttcaaagaattttactctaaacagaagcataaaatggagctmcccggggtgtatatagtaggagtaaatacctagtgttagaaaatggaagatgagagtattaataatatgttttcttaggatgattgaaattgtggcatggtgggaatggttcaggaaagaaagaaaagtaatgatgcatcagatgcccaatgctggtttcttggtctgtttctgtgtcttacttttacagtgctgacacctattaaaataaaatattgattagctgaattc

SEQ ID NO: 211581 - DNA, 617 bp, Homo sapiens
ttaattggctttccttaaactacaggggtgcatgtaaaaggctaaatacctagtctaatatctaagtacttggaaaggaaaaaaggattcatcaatgtctgctattgagacctgagacctggatttttaataaggagtttttgattttctaattttatatttttttttaaccaatgactagattacttagactagaatagtgggaaaatttctaagaattttgttgtgtatctatattattctagccaaaaataaaatatgttctgattactgaattttataaatgagatatggttcttgcctttgtggaatttggaatctcactgggaagaaagtcactgatgagcaacagtttttcatgtccagtgttgtaatggagttagtaaacaatataaggagaacatatataagggttctgcattaatttccagtgcttggaaataaatcaccacacatttagcaacttaagacagcacacattatcacagtttccttggttcaggratctagacacaatctaggtgagtcttctgctcaaagtttcagaggccagatttgagtcctcaactggagctcagagccctcttccaagctcacagggtggctgctagaattta

SEQ ID NO: 211582 - DNA, 472 bp, Homo sapiens
gaaggctaaggaaagagacaaacctactccaaagaggagctataacgcccaccaagtgaaacttactttctccctaagtcattctgctattcactagctttgtaaccataggcaatttcctttttctttttaccttaattggctgaaccataataataacttataatgatgttgtgagttttaaattaattaatacattcaaacaacgtaaaactgtggttggcataaagagtctttcagtaaatattatgcttattattrattttggtaatgtcattgtggtctttttagatatgatactatccatctcctttaaaggtaattgaactgagatttagggaggcagagtgtcctgtctacagtgagactgactagatggcaatttgttggagacaaatagaattatcactattctctgtaaatctcattttctttattcataatagtaagggtgtaaagaccacttaagttc

SEQ ID NO: 211583 - DNA, 585 bp, Homo sapiens
tcattcctccaactttttccaggtactttttgccacaggaatattaaacaacttacagtgcgaggaacacaaagttgtagaaacacaaaatgcctgtgatcttctacacacctaaaaaagtcttctaccatgtctgtctggtaaattcttagccattctccaaaatcctcacttaggtattgcatactctgtattgtcttccatgtttcctgctgcatttgcaagtcacttttagttgcaagtgacagaaaaccatttcaaatgagttggggcacaaaagkggaaatttggggcttggatcatattactaaaatgccaagggtaggaatgatttaaggatgcctagaatcaggaccagaagcaatttgttagggcctcatctcttccatgtgttttctgcatgaataggaattaatggcaaagagtacccctttcatattctaccagcttaccttccttagtagatagagagaatcgtttcccatagctcagccagaaacatgtaaagtaataatattctgatttccctggcttgggtcatgtgcccacccatttgccatgggctcttggttccttcattgacag

SEQ ID NO: 211584 - DNA, 585 bp, Homo sapiens
tcattcctccaactttttccaggtactttttgccacaggaatattaaacaacttacagtgcgaggaacacaaagttgtagaaacacaaaatgcctgtgatcttctacacacctaaaaaagtcttctaccatgtctgtctggtaaattcttagccattctccaaaatcctcacttaggtattgcatactctgtattgtcttccatgtttcctgctgcatttgcaagtcacttttagttgcaagtgacagaaaaccatttcaaatgagttggggcacaaaaggggaaatttggggcttggatcatattactaaaatgccaagggtaggaatgatttaaggatgcctagaatcaggaccagaagcaatttgttagggcctcatctcttccatgtgttttctgcatgaataggaattaatggcaaagagtacccctttcatattctaccagcttaccttccttagtagatagagagaatcgtttcccatagctcagccagaaacatgtaaagtaataatattctgatttccctggcttggrtcatgtgcccacccatttgccatgggctcttggttccttcattgacag

SEQ ID NO: 211585 - DNA, 624 bp, Homo sapiens
tgtttaagccactcggtccatggtatttttgtyctagtatcctaaattgtcgaagacagcactttatcaaggtcatcatgtactagtctttacctatagccctaaaccaaaatgtctaatacttctctaaaaggaacactctgcttcagggaagaaagaatgtttacaacatttctgctgttcaatttagcctcacatcatttctcttgcctggaacattatcttattcacccttcaatgtttctaaatcctatatacttaatttaaggcctagttcaagttgtagtacttcattgaatacttctccaattgataatctttcaatttttattcataattacaagatcgaggcagaaagagttttgtgtgcctgactttgtagacttagtaaaaatagcttcaccatttttttttaggaaataaaagcataatgtaagtactacacggcttatgtttgatataataacatctgcacaaaaaaacccacaaaaagtctcaattactctttttttttcaaaagtttatcacattccttcatgcatttactaattcaaacacatttataggtttccttgaagaggtccaggcattctgccagaaaatgggattatagtagcagactaa

SEQ ID NO: 211586 - DNA, 573 bp, Homo sapiens
cgagttataaatgaaaataatcagtaaggtaaaaaccatgactttttttattttggggaatatatgaagacaccttttaaatgtttttgaagacrtcttctaaattgtttgccaacgcaggtcaggaaaagccccctgcaatcagaccacaaacttgtagtcctgaccttgataaatatttaaattgtgtatgcaatgaatcatttcactgattaccaaaaggcattacagcataatatttttaaaatgttttgaaggaatcagacctgaatcagaaatatctctgttgtgtctttttctgtatgacttcaagtatattacatatttcctctgtgttagttgcctcatttgtaaaatgaaaataaaaataccaaatttacaaggttactggaaagattaaatgaggtaatgtatgtaaattgttttatttcatatggggcatgtaataaatgttcaagacatagctattattacagctagaagttcttaattagaaatttaatttctcaactcccatttcttcatgtatattaatatttcagaaagacaaaggaaaatgaagtgaatactaaa

SEQ ID NO: 211587 - DNA, 504 bp, Homo sapiens
aataatccagtgtttatcaaacaatattcaaaaagagaaaatgtgggggaggtaagttttgaagacattgaatttgagttgactttaaaacatccagatgacactcactgagaaggtgtagtataagcatctaagctgatgaataaagcaagtgatagtcttcagtagcytagactggccatcagagtagttgaagagcagctaaatccaaacccaagtcagaaagagaaattgatgataaagctaaaataattgtagcaaaatctttagaatttttgctatttacatttttattaatttgtgtaaacacagcatatttatcaatataaataatatgcttttagatttgtatgttatttgcatttaccagagtgtgtttacatctatgttgggtaatcttcaagatttcagaaacacagcacgctttctatcctacaggaaaggtttcttttgatttactctttggtacatgtagctggtaggaaagaaaggggtaaccttgta

SEQ ID NO: 211588 - DNA, 541 bp, Homo sapiens
aatatgcttttagatttgtatgttatttgcatttaccagagtgtgtttacatctatgttgggtaatcttcaagatttcagaaacacagcasgctttctatcctacaggaaaggtttcttttgatttactctttggtacatgtagctggtaggaaagaaaggggtaaccttgtaccccccattacttgaattagcattagttacttcagcacctctcaaatactgttcattataaataaagtataattttaattggcagtttgttttttattatgatgattttatgtatcttcatttttcagtgtaaaaataccaaagcaaaccagtgatataaaattcacggcaatgccagtaatagaaacacatactttctctctcattaaatttattttagctgtatatgatcttaaagattgaatataatagcagaaaacaacacttaaggaatgcaaaaaagtggataagaagaaagtctctaagaatccaccagagattcttctctataataaaagcataagtgacagcttaaatgataaaatgtc

SEQ ID NO: 211589 - DNA, 510 bp, Homo sapiens
aaaaaagaaaatgcctgccaatgaactgtttataatatggggaaaaatgtggaaacagcctaactgattctgtgtagcagcctaaatagttttattcttataatagaagactatttaacaacatgtatcaacactgataaattttaaaacttaatgttatgtttaaaaagtaagttgtttatgcaaatgtttaaatacataatgataatatatgttgtttatgagtatctacctatgtatataatgtgcaagaatttgcatgggaataatagattccagtttcaggatagcaggcacccctggggaaagagataaagagaaatggaatgcggaggcaccaactttaattgtttttgtgacatatttgtcttcctaaagagagatctaaatataatatagcagtaggaaaatacttcttaaatcttaatgatagatatagggtaygtcattttattttctactcttctctatgttattttcatttaaataggccaaaatagcttagaattc

SEQ ID NO: 211590 - DNA, 635 bp, Homo sapiens
gtcattctgggatctgggatatcatttgattaacccagtcgacccacagggctctactcaccatattcttagtctgttgggttctatgcagaattatggtcctgaattctctttgttcaccaaatttaatttcactctttttttcttagagcttcattatcttcatgaatggtcctgacttatcccgcctacttatttctctcctctaacttctaccaaccctgaagtgataaaggactccttsttttagttacttgacattcagaacaagttctgtatttatggattctttactttagaacacacttggaaaagctagaagagaggtactgtaagtgacttaggaaagcattagctttcacactgtttaatcatgttctgattcttgctcatctcagtccccagttatctaaaaattaaaatgttggcctggtagttctttcctagattggcttgttgtataaactaaaactcttaaacaaaattatctcagattaatagcctattctaaaaatttaatattgataaaaatatagacagaatatagtaaaacataaaaatttgaaaaatgttgtgtgcaaaatgagattcttcattctttaacctaattaaagtggaattgtggtagactagca

SEQ ID NO: 211591 - DNA, 601 bp, Homo sapiens
  misc_feature (1)...(601): n = A,T,C or G
atgtttctgctgagtggagttacataactggcacacatgsgcagggacatgggaaggatttagcggaaggttgagacaggagctttcacatttgtttatataaaggggaggggtagaaagaactaatggacagaaacaggttatggcaaggtatctgtttcctgcccagtcatttggactaggtttcagccctttatgcaaaaatagcttaaggccagaagagctattatgatttctaagagaccctggaaagaaatattgctgctaatgaactgaggtgacataggacaatgcagagttgaagagaggataatttctccttgtctgcacagaacgcagcacaccttcagcccttcaaagacgggcagctttggctgcacccctgggcagttccctgggtatgcacattgatgcaattataatgtcctcgctatgagatttcccaccacccacgctggtgttcacatctagcggcatcacagagaggtagaactaaagggaagaagttgatggatgccatctggtattgcagatgatgacaggtatgtgaatctccacatgcactgctgtcagcccacagaaannnnnnnnnnnnnnnnnn

SEQ ID NO: 211592 - DNA, 413 bp, Homo sapiens
gcattttgtgactagcttctttcacttaacaaatgttttcaaggttcatcgatgttgtagcgttgtgaatgttggctttttctgtgattaacttttttaccccttatagctgtctcaggctttggcatatgcaaacatagtcaacatatctattaggatccrtatacctcttggtgttattgattgttaatgtttttctaagaatatagtgcgaattcagagctgttttaccaacatataagtttgttcaagactaaaggtttcagcagatgttatcttggcaaattgtcagtgtaacttgaaaaaatcactagaatacttttcacttttgatttttcagatattttacactgtgccacgtgttactttctgtagctgatgttctgaatagttatacctcctgctaatgtcca

SEQ ID NO: 211593 - DNA, 569 bp, Homo sapiens
tttgtggctaatttattttcaaatgtataaatgagtgcatagtaatagatgcttaattgctaatatctattatttatatacattgccccacttaaaacaggatggaaaagcctcacacatgcagattttgtaaaatgtgttacatccattagcacagttcatggtgtgtgctctgatgggaatttaaaaggatctttactgcacatcacacactgtgtgctgaaacattactttattactaaattgtggttcatcgtgtgtggtccctttcctgaataaaatggaaagtgtccagaggactatccatgtccccacttctgtttctgcaaacttctgattgtgaaagcttctctgtggataagaaagtcagaaatatacatgatattagaaaacagtccccttaaaaataatcctgagactatacctaattgatgtataattttgaatttgagacatctcatccaggtrgaagaggaaaatcataaatacaagatacctcaaaagaatagtcttaattacaccatggactactgaataaaatgattacattttctacactgtaaatttca

SEQ ID NO: 211594 - DNA, 481 bp, Homo sapiens
tattatacatttctcttattaaaccaaaaaataaaatttcttttgtggactagttcatcatggcacaaaaggtgtttcatgaaaggatgtacttgctttgaaaattcctttcttatatggagaaagatctaccatatatttattctgtaaytttccaacacccaagatatattagagaaatatattttccaaacagttttaacctccattgtcttgagtacacgtatcaacattgtcatgtcacctatccaaaatcctcatgaaaaccttgtatttagtcaaaactaatgaatctgtttcaccacactttgcaaaaggaaaagagggtataatattatgttttcacttaacatacattttcagccatctcctttctttgttggatgggtgaggtgtggggggggaaactgcaaaaattacagtgatattatcaactgcaatgttttaatagagcgcaaaattggaaatagcattttgccga

SEQ ID NO: 211595 - DNA, 539 bp, Homo sapiens
gccaagtgatgcaagatctccctaaataaagattgcaaaatatctatcattctcattgcaagaaattataatgaatcctgggcatgcaagatgttgagcatttatttattcatattctttgcttgctgcttttccctagagaaaattaacagctgaaatgtagccatcaagcagaatatacaatagggaaaacaagcacttaacagggtagctatattccaactttgccagcccactctcaggaagctttgactagaagaggagctggtactctgtgtatggttctaaatctgggaccaccagagcaattattttaaaattaactacctaagagcaggagacataaaactccctattaagggagttttaagttagatattaagttagatattattaagttagattatatattattaagttacatattattaatattatattaagttagatattattattaataataatattaagttagatattattattaataakaatattaagttagatattattattaataagaatattaagttaga

SEQ ID NO: 211596 - DNA, 571 bp, Homo sapiens
aaccagatttaaaacatgtcattacctaccacttagtaagctgatgcatagctactacattcattcaccctttacgccaagccctgtgctaagctcaggaatgccaaggcatggttcccctccctgatggtgggaaagacacacttacaactgaatgtcatggaagcacaaaaaaggaaatgaccttcttttgtgcaagtctaggaacgcttcagagagactgaaatcttcataagggtgggcaaaggattttattcatccccrtattttcactgcctgatacagtagcagtcagcaaatatttgttgaataaaaattaattgttgaaggtttcctcatacatgatacccagatgccattctaaagggagaccaaacacctcaacacactaacatacttcctagggtcctgactatgtttccaaccagggttagttttgtatgttgaaattcacttcagtgctttggtagtaaattcaattttgtaccagttagaaattgtgcaccagttcttaatttttgctgtcagtcagcaaaaatataacttgaagtaatttttttttttaagaggt

SEQ ID NO: 211597 - DNA, 490 bp, Homo sapiens
aaagcaggactgaacagattactttagtgcatagctttacaaaagcctttactatgtgaatatgtattaggatcgcagtgcagggggaggggatgatttcagtttctcaaatatatttgaccacggagttaaatttctcacctatgactagaatgacaaacaagaaattaaagattctggtcttcaggctagttaagctatggtaatacagaccttcarggccgctgatctgattcccaggcagtgcataactttcaagtgggtggtgccacttgtatgaactgcaatgtgaatgggcactctatcagtcatacaaccactgggagatctctctctctctctttctgtgtgtgtggatagatagatagatgatagatagatagatagatagatagatagatagatagatagatagagagatgtaaaggggtctgttacagggatttgaacttacacaatttggggagctggttaaacagtccctgtaggg

SEQ ID NO: 211598 - DNA, 533 bp, Homo sapiens
gctgtcatctttctttctgattctggggcttcaagctgccaaagaagggggtcaggaagggacgaatgaatgtaaagtggaggatggcatggacagrctggaatccatgagcctgaggtagaacccatgagtttggactggagctgtgtcagttctccctgcctccagcccttatgaagtaggcatcctgcaggagaagctggtgcccttcatcctgaagatagcttatctccaggtgagctcaagagatggagaagctgaagcagactccaggaggaaaatgggcagttgcagatgaactgtggcctcacaacaataaggtatgccagcagaaaaggaacaaggtgaaggagctacagaaagggctgccccaatcttcttcccaatgtaataaaacaatatagcagctgtcacatttgtctttcaaatctcccacaaaaatatattttgtggccctccctagctggaaatatacaaggaaagaaattctaggaaacagttcagccttgccaagttgccatgtttcaaagcca

SEQ ID NO: 211599 - DNA, 533 bp, Homo sapiens
gctgtcatctttctttctgattctggggcttcaagctgccaaagaagggggtcaggaagggacgaatgaatgtaaagtggaggatggcatggacaggctggaatccatgagcctgaggtagaacccatgagtttggactggagctgtgtcagttctccctgcctccagcccttatgaagtaggcatcctgcaggagaagctggtgcccttcatcctgaagatagcttatctccaggtgagctcaagagatggagaagctgaagcagactccaggaggaaaatgggcagttgcagatgaactgtggcctcacaacaataaggtatgccagcagaaaaggaacaaggtgaaggagctacagaaagggctgccccaatcttcttcccaatgtaataaaacaatatagcagctgtcacatttgtctttcaaatctcccacaaaaatatattttgtggccctccctagctggaaatatacaaggaaagaaattctaggaaacagtkcagccttgccaagttgccatgtttcaaagcca

SEQ ID NO: 211600 - DNA, 359 bp, Homo sapiens
gtacagctcagagtagctggatagaaaggaaggaagggaaaggaaaagggaatgacgaaaaaggggaaagaaggaaaagaaggtgcttaaattggaaataatgcagaaccttgttggtcagttgggaatctggatatttttttcgcctatttggaattagaagccacrggagattctaaacagggtaacatatgcagtcatttatattgcatgaggtaaagagaagaaacagaaataaagtaggagagtattgctgttggccatgcaaaagatggtaactgggataggatacaactttgaagatgaaatagaaataattgaattttaggtctatgcaaagttagaaccaacaggactgg

SEQ ID NO: 211601 - DNA, 389 bp, Homo sapiens
ctgggctataaatcatgggtagtgtttcaataggcagtaacaatacaaactgatggaatatgatggcccaaggtatggaggcagaaaagtctggggtatgttcttttcagagaacgatagctacgtttgactggagaaaggtgtgtgtgggagtgtgaaataaatcttagctatattatgaaggacttttaacgttaggttgaagagtgtaaactgaatgttattaracaaagggaagccataaaatatatgtgaggttgggttcaggaaggtatttattacctaaagataacagaatcagctctgtgctttagaaaagatttgtgagttgaggatattatgaagatggactagaagggtagagactgaaaccagagtgactagttaga

SEQ ID NO: 211602 - DNA, 389 bp, Homo sapiens
ctgggctataaatcatgggtagtgtttcaataggcagtaacaatacaaactgatggaatatgatggcccaaggtatggaggcagaaaagtctggggtatgttcttttcagagaacgatagctacgtttgactggagaaaggtgtgtgtgggagtgtgaaataaatcttagctatattatgaaggacttttaacgttaggttgaagagtgtaaactgaatgttattagacaaagggaagccataaaatatatgtgaggttggsttcaggaaggtatttattacctaaagataacagaatcagctctgtgctttagaaaagatttgtgagttgaggatattatgaagatggactagaagggtagagactgaaaccagagtgactagttaga

SEQ ID NO: 211603 - DNA, 389 bp, Homo sapiens
ctgggctataaatcatgggtagtgtttcaataggcagtaacaatacaaactgatggaatatgatggcccaaggtatggaggcagaaaagtctggggtatgttcttttcagagaacgatagctacgtttgactggagaaaggtgtgtgtgggagtgtgaaataaatcttagctatattatgaaggacttttaacgttaggttgaagagtgtaaactgaatgttattagacaaagggaagccataaaatatatgtgaggttgggttcaggaaggtatttattacctaaagataacagaatcagctctgtgctttagaaaagatttgtgagttgaggatattaygaagatggactagaagggtagagactgaaaccagagtgactagttaga

SEQ ID NO: 211604 - DNA, 480 bp, Homo sapiens
gagaacgctgactccaacgagccttggccatggactggatattaagggatcagagagacaggagttgtcagagattacagagatttctggattcaatgggaatttttaatatgtctctakgggtatgtgcttgtgtgtggctttacgtaagttatctattttttagaaaaattagaaaatgaaaatggaaaaaaattattctcaatccccacatgcatagatagccactgtacatcttatatgctttatatgtgtgtgtatacaaatacgcacaaatttataattttaataaaatatgattatgcaatattttaatagcatgttttgatgattcatgaataaatgtgaacacctttctagggcaataaacatagatttactgcataatttcaatggctctacatatagtattctatgaagtaacaaaatatatgtaaccaattacctatgtttggatattcaggctgtttcacatttctg

SEQ ID NO: 211605 - DNA, 474 bp, Homo sapiens
caatgaaaacaaagggctggcacccaagagaacgctgactccaacgagccttggccatggactggatattaagggatcagagagacaggagttgtcagagattacagagatttctggattcaatgggaatttttaatatgtctctatgggtatgtgcttgtgtgtggctttacgtaagttatctattttttagaaaaattagaaaatgaaaatggaaaaaaattattctcaatycccacatgcatagatagccactgtacatcttatatgctttatatgtgtgtgtatacaaatacgcacaaatttataattttaataaaatatgattatgcaatattttaatagcatgttttgatgattcatgaataaatgtgaacacctttctagggcaataaacatagatttactgcataatttcaatggctctacatatagtattctatgaagtaacaaaatatatgtaaccaattacct

SEQ ID NO: 211606 - DNA, 541 bp, Homo sapiens
tggtttccagggcaatgaaaacaaagggctggcacccaagagaacgctgactccaacgagccttggccatggactggatattaagggatcagagagacaggagttgtcagagattacagagatttctggattcaatgggaatttttaatatgtctctatgggtatgtgcttgtgtgtggctttacgtaagttatctattttttagaaaaattagaaaatgaaaatggaaaaaaattattctcaatccccacatgcatagatagccactgtacatcttatatgctttatatgtgtgtgtatacaaatacgcacaaatttataattttaataaaatatgattatgcaatattttaatagcatgttttgatgattcaygaataaatgtgaacacctttctagggcaataaacatagatttactgcataatttcaatggctctacatatagtattctatgaagtaacaaaatatatgtaaccaattacctatgtttggatattcaggctgtttcacatttctgcttttaaatctcaaaggaattc

SEQ ID NO: 211607 - DNA, 634 bp, Homo sapiens
ctaacccaaagcaccacgtgagatcctcacaccttacttttcacctttggatggcactttacaatctattgcacatcaatgcctcagcttagttgcataaaatatatgtgcagaagtattaccatgcttttttacaaatgaggaaaataaaggtcagaaaagtttaaataatttggtccaaagtcacccaggtagtaaacaacaggaccaggtcccaagccaggtattctgatcctaaatccagtacatcttctatcatagactctgctttgaaatctacttgaagatgsctaaccaagagcccctcatctgcactcattacaacaaataaaattaaagaagactggaaaagtttgggcaagccaatatagctggggtatttttaaacctattactcattcagttggattccctaaacacgagcttcagcacagtcatggtgattttaacgagaaagaggacttagttatgaaattagatgaagattcagaagccaacttatctgtagatcacagtgattaaatagttcaaaatgaattacaacttagtaatattgcttcattcatatttatgagataaaagttggagttcagctcccataatatccagtaatttaagatacaaacaaattata

SEQ ID NO: 211608 - DNA, 592 bp, Homo sapiens
acatatcacatcaaagtgtggggaaaaaataactccagtggcagaatcarctatgatcagattaagaaacagcaatatatttttgcatggctaataaacagatcaaaaacctgcaaacctaaggatatttagatgccaaatctaactttaattttcaaatatccttatctggtcaaaccatctctccaacaataaaattatattatacacagccctgttttttcatattcagcaaatagcacccgattgtcaatcttagatgtgaccctgattttccttgttatatttagaatttttaaaaatttctcccctgatgatttaagtagcaggaattagcaaagagtaagagaccactctctaaaagctttaaaccataaacaaacataacatttttcagatagccattatgcatcaactgtacttttcaatcatgaattaaattcaattgtacttctgtggtcagaagcctgtgagtttatgataataacactttttagtttaagctttttctttaggtaatcaaatgacactttacaaattacctgacttcttaacacataccccacaaaaggaaaaaaataataataaacaa

SEQ ID NO: 211609 - DNA, 592 bp, Homo sapiens
acatatcacatcaaagtgtggggaaaaaataactccagtggcagaatcagctatgatcagattaagaaacagcaatatatttttgcatggctaataaacagatcaaaaacctgcaaacctaaggatatttagatgccaaatctaactttaattttcaaatatccttatctggtcaaaccatctctccaacaataaaattatattatacacagccctgttttttcatattcagcaaatagcacccgattgtcaatcttagatgtgaccctgattttccttgttatatttagaatttttaaaaatttctcccctgatkatttaagtagcaggaattagcaaagagtaagagaccactctctaaaagctttaaaccataaacaaacataacatttttcagatagccattatgcatcaactgtacttttcaatcatgaattaaattcaattgtacttctgtggtcagaagcctgtgagtttatgataataacactttttagtttaagctttttctttaggtaatcaaatgacactttacaaattacctgacttcttaacacataccccacaaaaggaaaaaaataataataaacaa

SEQ ID NO: 211610 - DNA, 564 bp, Homo sapiens
gaattcagtccttgggactgcactgcctaggtttaaatcctggccttgccactcattagctctgtgacctgggcaagtcatttactcaacctcccacgcctcagcttcytcatctgttcatcagcgataacaatacttacctcaaagcgtcgttgaaaggattaaataaattgtgaagtacaattaaataagttatgaagtactttcagaagtttatagcatataataagtgctatatgaggacctggtaaataaattccatttaaaataagaacttttctgctaaaatatgctaaaacccatgttgtaccgtgtgtttaattaggcaataattacttaaaatcagattgctcattgtcgatgcaaatcatggtaactaatcagctttgattaatattcttaatcaaaataaatggaattacccatgattttattcccccacaataaacttttaaaaatattttgatgaagagcatttcaaactttaaaaaaaagtatatatactctttttaacaaaatacaattataattaagataatatgataatataacttatgtggacag

SEQ ID NO: 211611 - DNA, 607 bp, Homo sapiens
  misc_feature (1)...(607): n = A,T,C or G
ttttgtgaataaatgtttgaagttaactataacaaagaaatatggtgaccttttgctttcttttattgggattaattatatttcagtgtaatttttctgaaatgtaaatgtgtcacttgaaatatttatagttttgtcacactggtttttcaaacttttcttggtttctctaaggaaggatttattttaagttctggggtacatgtgcaggatgtggaggtttattacataagtaaacatgtgccatggtggtttactgcacctaaatattaagcccagcatgcgttatctatttttcctgatgctctcccttcccccatgcccccacctcaggccccattgtgtgttgttcccctcccaggtccatgtgttctcaatattcagctcccacttatgagtgagaatatgcggtgtttggttttctcttcctgcgttagtttgatgagkataatggcttccagctccatccatgtccgtgcaaatgatgatctcattctttttttgtggctccataatttctgtgatgtatatgtaccacatttctttattcagtctatcattgatgggcatttagtttgattttgtgtctntgctattgtgaataatg

SEQ ID NO: 211612 - DNA, 506 bp, Homo sapiens
tagtaaacacaatgacctcagggcctaaatcattttttaaaaatgcatcgttttcatggaagctttttgaatttgcctcaaaaattaattatgaagaaaacttttctcagtttctgtgcacagaaattacctccccaaacccytgaaagcaaatattagtaagcacagctcatctatatcagtgagatgacagaagcatcaaaagcttaagctgtatccaaagattacatgagtcaacttactgtacatgcacagacattttactgttctgtaggcatgctgttgcaagcataatatccatttaacatatggtaaagatagggaactgtgaaatgcacctagagaaaaaaacagctaatgacaaagagcaggtaagtgaacacttcaaacctcaaaacatataccaatcagcaagtcagaataacatctctcccaggatatgaacaaaaatgactaacacagattttattgcttacatcttttaaatcataataactgaaaaggtt

SEQ ID NO: 211613 - DNA, 590 bp, Homo sapiens
  misc_feature (1)...(590): n = A,T,C or G
aatttatggtaaagcttgggtcgaagaataatggtgaaatcattgatgcttcatgtaaagttaatggaaacaatgcctccaacccctgaaaatcagcagtttacaaatgggtaacttgttttaagaagcaagacaatgttgaagattaagtccatagtatccattgcaggagaccatccgcatccatttgtgaggaaaaaaaaaaatcatcttatttgtgttctgattcaagaggaccaacgatgcacagcacaaataataggaaacaccacagacagcttaactgattcagctygtacaattctgactgaaaaattaaagttgagcaaactcctctcaatgggtaccaaaattattgcacccagatcagcttcaggcaagagcagagctttcaattaatttttttttaagtgggatcaagatcttgaagtatttcttgaagaattgtaacaggagatgaaacatggcttaaagtaccatactgaagacaaagcccgatcaaagtaatggctaccaaaaagtgaaagaagtctagtcaacgcanaagtggagtagtcaaaagtaaaaataatgaaaacagtgttttggga

SEQ ID NO: 211614 - DNA, 562 bp, Homo sapiens
aggtgatacttacatcgcacaggatctaatttcttaaaggtgcatataaatgtgtactccattaagcaacatttgaaaacacattgtatttttcatccttgggcagacctaaatttgcagattcaagcaatagcatgctttcgcccacttattgcactccttccctcaatgctttatctgggggggagtccttgacagccctcatgattgtctctcagcttaccccggggaaatgagaaagagtcagaaggtaccttttcaacatcacaggtaacatttaggggtaacttcttacatgagatgacactggyctgtttttctgctaataaatcactgctcatttttcctcctgtcactctgttgcctatgtacataataataatccctttttaatttcttattttacaagaggcttcattcagcttaaatttcaaagacccaatttttagcctagatgatgaattttcccatttaaatcacatttttcctaaatagacacacacagtacataggcttaaattacaaaattatatagagcacaaactagaattgaacactgaca

SEQ ID NO: 211615 - DNA, 564 bp, Homo sapiens
attgttgccattttaatccaaccatgtgatttccctsctaaacaaaaaaataaacaaaggtacatttttcgaggaaaataacagagtattcataatatgatattcactttgtccaggataaaaactcaaaattcctagatatatgaagaaacacaaaaaatgtgttctattcttaaaagaaaagacagcatatgaagagcaaccctgagactaaactagatgttaaaattagcagataaggattttaaagcattaagtgtaactaggcttataatgaagataaagttaagcaatctcaatagaaataccagaatacgaaaaaaaattctgtaattgaaaaacacaatctctgaaattaaaattatgctggatgagattaaaagcacactggtaataacagaggaaagaatctgtatacatgcaaataaatcaatcaaaattacccaatatgaagaattaagaggaaaaaagactgtaataagaaagcccctcagggatctgtgtgacaagattcaaatgcctaacatgtttatttaaacccagaaatagagaaaacagaggatg

SEQ ID NO: 211616 - DNA, 559 bp, Homo sapiens
agaattctctcaatctttccgtcacgctgcataaatgaggcacaagaaatagcaagaaatttggtactgccaaaacaaaatcacctcaaccaaaagcacatatkaaagtctccaacttgatactgtgctaaatattgcataaagaagtgcagtcactgtctggttatctataccagtgaagaggagccatggaaattgaacatggacagatcatccactcagctgatttgaggtcatagcccctctctgcacaacatggaaacttagctgaaaaacagaaaagtagctctaacttagctaagcaactaagggtacattcagtcaattcaggagccccaactagaggtcccccacaatgtggttgccatcccaggtggaaatctggtccctaattgtatctgggcaacaaagggctccaatgtgagtcaagatgtgaaacactaaaatggcactgcagttaaaaacctgagaaaaaacgtctatgaaaaaatcatctagggctgggcacagtggctcaagcctgtaatcagcattttgggaggctgaggcgggcagatca

SEQ ID NO: 211617 - DNA, 560 bp, Homo sapiens
aaatgagacattatggaataaacaaggaactggtgcccagtgagttatagcggagaataaagagacgtccagagaagatttagaaaatattttccttgtgagattgtgtaagcttaggccgagcagggtggctcacacctgtaatcccagcactttgggaggccgaggcaggtggatcacgaggtcaggagttcaagaccaaccaggccaaggtggtgaaaccccgtctctactaaaacttcacaaattagccagacgcagtggcaggtgcctgtaatcccagctactcgggaggctgagacaggagaattgcttgaaccaagcagcagaggttgcagtgagccgagatcacgccactgcactccatccaccctgggcaacagagtgagactctgtctcaaaaaacaaaacaaaacaaaacaaaccccaaaacattatgtaagcttaaaaagcccttaaartgtgtctatggtaatatacttagaaataccaggaaaatgtgaaaatgacatttaaaatgaaatgcagtaaaaataatttgcaatcattatgcatataat

SEQ ID NO: 211618 - DNA, 439 bp, Homo sapiens
tcccaaaccaataagtaagctaaatgaagtttatttgtttatttaaaactttttattcaagtaaccaataatggataaaaatgtagaagtgataaatgttcagctcaatgaattactgtattatagaattaacactgttgtgtaaatactactgaggtcaagaattagaatgttaagaatacccttgaacccctgctcatacccctcacaatcattattatttcccagttcaccaaagataacattatactgacttctaaatccatttagaagttttggygtttttgaactttacataaatgcactcattacattagtgtgtaatcctttatgtctggcttattttgctcaactttcttcatgagatttattaatgttgtttcatgtagctctcattcatcattgtacaatattccataatataaacatgccacaattt

SEQ ID NO: 211619 - DNA, 599 bp, Homo sapiens
gaattcttaaagaaaaaaaaattagactatctgaacattctgaacatgtaagactcaactttaagttcctacaaatgggagagactgaaaacaaactgccagcctgatatgagaacatgcgtgctcaayacaaccagggccatatctgcatgggacatggcgggagaaggatgagaaggctgattagtagtggggcaagtgtctggttgaaaataggagtggacatctgtcctggtctgatctatacagttctgcatcttcttttagcagttttctccccaaaagaagagctctcaagcctgaggcaaggtgcccttaactggcatctactactactgaccactcctggaagaagccctgaggacattacgtcctcactgtttcaccatagaggatcttcgaacttgtttctcttgacaaagccggctttttagcaatgtggaaggtctcacctcacacacccatgtattcacccactcccatcatccaactgccactttggttgtggcagacagtttggcagtagtcaccagaagtgatgaagtgacactaaactgccaggtaggtgaaacccaggcaagaattttcaacccaagctc

SEQ ID NO: 211620 - DNA, 599 bp, Homo sapiens
gaattcttaaagaaaaaaaaattagactatctgaacattctgaacatgtaagactcaactttaagttcctacaaatgggagagactgaaaacaaactgccagcctgatatgagaacatgcgtgctcaacacaaccagggccatatctgcatgggacatggcgggagaaggatgagaaggctgattagtagtggggcaagtgtctggttgaaaataggagtggacatctgtcctggtctgatcyatacagttctgcatcttcttttagcagttttctccccaaaagaagagctctcaagcctgaggcaaggtgcccttaactggcatctactactactgaccactcctggaagaagccctgaggacattacgtcctcactgtttcaccatagaggatcttcgaacttgtttctcttgacaaagccggctttttagcaatgtggaaggtctcacctcacacacccatgtattcacccactcccatcatccaactgccactttggttgtggcagacagtttggcagtagtcaccagaagtgatgaagtgacactaaactgccaggtaggtgaaacccaggcaagaattttcaacccaagctc

SEQ ID NO: 211621 - DNA, 548 bp, Homo sapiens
tctgaacatgtaagactcaactttaagttcctacaaatgggagagactgaaaacaaactgccagcctgatatgagaacatgcgtgctcaacacaaccagggccatatctgcatgggacatggcgggagaaggatgagaaggctgattagtagtggggcaagtgtctggttgaaaataggagtggacatctgtcctggtctgatctatacagttctgcatcttcttttagcagttttctccccaaaagaagagctctcaagcctgaggcaaggtgcccttaactggcatctactactactgacyactcctggaagaagccctgaggacattacgtcctcactgtttcaccatagaggatcttcgaacttgtttctcttgacaaagccggctttttagcaatgtggaaggtctcacctcacacacccatgtattcacccactcccatcatccaactgccactttggttgtggcagacagtttggcagtagtcaccagaagtgatgaagtgacactaaactgccaggtaggtgaaacccaggcaagaattt

SEQ ID NO: 211622 - DNA, 599 bp, Homo sapiens
gaattcttaaagaaaaaaaaattagactatctgaacattctgaacatgtaagactcaactttaagttcctacaaatgggagagactgaaaacaaactgccagcctgatatgagaacatgcgtgctcaacacaaccagggccatatctgcatgggacatggcgggagaaggatgagaaggctgattagtagtggggcaagtgtctggttgaaaataggagtggacatctgtcctggtctgatctatacagttctgcatcttcttttagcagttttctccccaaaagaagagctctcaagcctgaggcaaggtgcccttaactggcatctactactactgaccactcctggaagaagccctgaggacattacgtcctcactgtttcaccatagaggatcttcgaacttgtttctcttgacaaagccgsctttttagcaatgtggaaggtctcacctcacacacccatgtattcacccactcccatcatccaactgccactttggttgtggcagacagtttggcagtagtcaccagaagtgatgaagtgacactaaactgccaggtaggtgaaacccaggcaagaattttcaacccaagctc

SEQ ID NO: 211623 - DNA, 567 bp, Homo sapiens
tcattatttgtttttgtattcagagcaaatgctgtcctttttcaagatggggagcacaattgtagataatccaaaaaagggtaaaatctgtaaataagttctgtccaacttcagaatatatcaggatatatgagttgctttttctgattctttccagcacaaactattattaaaaggagctcagtttcagaagctttctccacgtgctgacaggagaaagacatcccaatgtccgttaggggaccatgggggctggatgagcatagaacatttgccatagaaaatctagacactggygtctgagggtcttaactgtacagcccttgctgggtccttcagcatggtggacagaagggaacaactaatgaatgcttatctattattatctttgttctttttaggcagacaaatttcagatgtatgtcacctactgtaaaaacaagcctgattccaaccagcttatcctggagcatgcgggcaccttctttgatgtaagctgtgttttccattcttgagcagctgatgagcaggtggaaatgcttctctgctttggcataatggatggat

SEQ ID NO: 211624 - DNA, 453 bp, Homo sapiens
aaattacagaaatggtttttcattgtatgttttcacaagtggaaaaaaacctaattttccatccactctgatagtcagtagaaaatggcttaaaaacttgagggcagttgtcagaattaccttgaatgaccttgagcactagtctaaagcatgattagggtgatttggcaccataatttcagcaggttcggggcacagtccccacactaaggtctcaatggttttttttctcccagcaagaaaaaataggaaaaatcctaatgaatgcagatcatctttaaaagaaatacctataacttagaaaactaagatgaagcaatgacacagcctgctgtctgagcctgaaggagcaggccaaaatactaggtctggataaactagggacaaatagtctttggaaacccagaacttcattaataagatcactaasaggcaacaaaagatcatctcata

SEQ ID NO: 211625 - DNA, 474 bp, Homo sapiens
tcacatttcttgacagtttggagggaaggatatcaaccgatactctgttttgttggaataagtagaattgtagagccctaaaacttcacaagtcattgtttccaacttgatttaagaatttttcccacaccatacaaaacagcatgttccatggttaacaaaggatcagcaaaaaaattggcatgataagttacataaccaaccaatagaaataactgtgtttccaaaatacaaatagaatctcaagacacraagaagaacatgggcataaagtcttagagctctcaggaccctgctgcagagcagtgctgtgccaggctagcagaggcatttactgagttgtgtaggtttgctggagatagaagggccatgtgtacaggtgtagcagccaccctgaggcaagactccagaatagcactgtcccatggaaccttctgcaatgatggaaatgttctatatctgcagtgtccaata

SEQ ID NO: 211626 - DNA, 366 bp, Homo sapiens
actggagaagtcacctcaagtttggtgacagatcttctcatgtgatgctagagatgggactggagaagtcacctcaagtttgrtgacagatcttctcatgtgatgctagagatgggactggagaagtcacctcaagtttgatgacagatcttctcatgtgatgctagagatgggactggagaagtcacctcaagtttggtgacagatcttctcatgtgatgctagagatgggactagggaagtcacctcaagtttggtgacagatcttctcatgtgatgctagagatgggactggagaagtcacctcaagtttggtgacagatcttctcatgtgatgctagagatgggactagagaagtcacctca

SEQ ID NO: 211627 - DNA, 587 bp, Homo sapiens
tccaacatagtttttgctacataaggaggtgctcaccaaatgtttactgagttgaatttctatataggtaaaaaggctgaccgaatggtctctttctaatataaaatgctaagggcctctgtgtgcaactaattgaagagttgagaccaccagtaagttataatcagcttatcttctctaggcagaagtttcttccttgaatgccatttctccccagccttagcctggcccctatttgttttacatgaaccccatagatttagaattgatatatcattccctactcaaataaactttcaggtgcattaagcatacctcgcttgcaattacacagttagagatttaaaagaaaaaccataaaggtggcccatattttcagaaagtcccttgtctagaatatccttcttagtgtcatttctaaggctttccaacataagtatgcccatctcagaaaatgccccaaattatccaatgatggtagaaaaactatcttgatataaatatgcatatatgtgtatatatattatattgtgcacatatwttttatcaagccaatacaaagtatataaaatttcccaggattttca

SEQ ID NO: 211628 - DNA, 410 bp, Homo sapiens
tcagtagctacagctcctcagaggctggagcacagcacagaagatctgtcagggaggagctggtttttgaaaatttaatccaggccaggtgtggtggcttacgcatgtaatcctggcattttgggaggctgaggtgggtggatcacctgaggtcaggagtttgagacyagcctgggcaacgtgacaaaaccctgtctctaataaaaataccaaaaattagctgggcatggtggcggactcctgtgattccagctacttgggaggctgaggcaggagaattttgcttgaacccaggaggcggaggttgcagtgagccgagatcgcaccgttgcactccagactgggcgacagagcgagactctgtctcaaaaaataaaataaaataaaataaaaattccagacttccagaa

SEQ ID NO: 211629 - DNA, 537 bp, Homo sapiens
ctagaatataaaaaagctcagagttggaaactctaatgggtactggaaaaagaggaatgattcttcatccttacagcataaaattcaggactggaatgaggcaaaagacaggagatgaggctggctgggcaggtaagcaggagactaaccaataccagccttgatcaagtcagtccagaaaactgagaacttgcatccagtgagtgattgggagctattgggtaactttgagaagggaaggkgaagggtgagggggactggggaaatatgaagctcgaagccagagtcggtgttggtggagtcagatttttagcctgtaaggggatcacagaggtgcacaggacttttgacgagttactagagttctctgtccctctcaagttccttatttataacaaagcaataattctaacaaacatttcctgtagaagtggacttagggaactaatgtatacaagatagctctcactgttcctgagtatagaaagtactcagtgaaaactggttataattcagaaggggagaatcagatggagc

SEQ ID NO: 211630 - DNA, 533 bp, Homo sapiens
tgataaggctttgaaatgttcgccactttgataaagaggaaatgattggttggtactggtatattcttgtatttttatcagagatgggttatgtacttttccacgtttgatagttgggtgtatttctttagtgaattgatttttcttttcctttgcccatttttctgtttggatgtttgactttcttcttaatttgtaagagtatcctatgtagtaacaaaatccttttttaaaaatttttaaagaaaaagtatacacacaggacttttttttttctaattcaaaaaatacaaaggcatgcaatgaaaaattaagtctgttccactaccccattttccagtttttttgggtatctttctaatgatagataccatatgagtattccaaatatccatccccatccccttaaaaaaaaagaggcatatactmactgttctgtttggggctttttggtggtggtgtttgtttgacagggtctcactctgcctcccaggttggagtgcaccttgaactcctggactcaagtgatcctt

SEQ ID NO: 211631 - DNA, 463 bp, Homo sapiens
tttactgtttcttactctgaaattccttttagttcagactcagatccaagtaacacttattgagtgtttgctctgtgccagagtagtgctgctctgggggtttagtttaaagatttcgtattgtgtttgtttttctccccgccatggtagagagacttgggttgggtcaggagacctgagtttgaatcatgttcaagaccaatcataagccctgtctccttagagacacttcccagacctcctagtccttcacccagtcagcctcaaccacatccttctgtgggttttstgtgtacttgccaccatccccgtgcttgttgaacagtgctgccgttcctactggatggcaagctcctgacaggaagaatctctatcttgttgacttctgtaactccagtgcctctcccagggcacagccctgagtacactctcagtgaccggcaataatgcacgatggttaaga

SEQ ID NO: 211632 - DNA, 487 bp, Homo sapiens
aaacgaatgaactaggaatacctgcatcaatatgaacaaatctgaaaaacattttcactttgaatgaaaaaagcaagagggcaaaggaacacattcagtattattctatttatatgaagttttaaaatatgcaaaatgatcccatgtatcatttaggtagacatacttgtgtaggacatacttgtgtaggaaaagtttaaagaaatgcacgggaatgcttgatgtcaagttttgggacggcgcttaccactggagctatatgtgatgtcgagaggtatacagcgggctgtgactatttcttaagcaacatggtaagttcaggaggtcttcattaactattctttattttttttaatatctgaaatttctctttttatatttaaaagactagccagaagcaagcaagtaaatataaaaaggagactggaagcaattactgrggagaagcaaacaattctgtgagtcagcagaggctttagttgaattc

SEQ ID NO: 211633 - DNA, 449 bp, Homo sapiens
aactcagatgaggttttgggaactcctctgggatcaaaaggtgatawcattttttttttgtcaattttataacaaaatctgagccagaggataggataaaataatcctccttcatactcatatattgcttatactttgagtctcacaatactgtaaattttcagcaaagatcttaacactgaaagacggcaagtgacttcttaggtctcacagctaagcagcaagtggagttagaaagtgatcccaggtcatctgaccccatcaaatattcttccctctgttcctcaccagggctcactttgccaaggaccaaatcccagaggggtccaaagagtatatcactcagactatcccagggcaagtcccagctctccatcaactaattgtgtgcccttgggcaagttactgaacttccttaacctcagttctctcagctgtaaactgaaaaa

SEQ ID NO: 211634 - DNA, 579 bp, Homo sapiens
ctgtcattcagatgttctacctgagtttcgtcattacaagtcgtcctcttagcagtgttgccccaagatgcctcacccattaccttggcaaagaaaatcggtaagattgaacactgcctaatgagagtctatttcacacctttaattgactaggccaatgtttctgaactctaatgtgtaaaagaatcacctggagaaactcctgggtctgccccagatgttctaactcagtacgcrgagttagggcccaataatttgcattcagatgctgccagtttttggaccatcctttgagtagccctggactggacaacttgattgagtaatgataataatagaggtaagaaaagaattcgtccttaaaacccaggagattggtttgaccaggtgtgtcattcacgtagcctgcaaaaaacctggccctcccaccttagccctgtaaaatgcaaaggtgggtcactatgatgtttgaacacatggtgttatctggaggcggccatcacacttggcacaagtggtgacaaggagaagatggcgggaatcactatattgagtgaagccagtttctaatggctggca

SEQ ID NO: 211635 - DNA, 579 bp, Homo sapiens
ctgtcattcagatgttctacctgagtttcgtcattacaagtcgtcctcttagcagtgttgccccaagatgcctcacccattaccttggcaaagaaaatcggtaagattgaacactgcctaatgagagtctatttcacacctttaattgactaggccaatgtttctgaactctaatgtgtaaaagaatcacctggagaaactcctgggtctgccccagatgttctaactcagtacgcagagttagggcccaataatttgcattcagatgctgccagtttttggaccatcctttgagtagccctggactggacaacttgattgagtaatgataataatagagrtaagaaaagaattcgtccttaaaacccaggagattggtttgaccaggtgtgtcattcacgtagcctgcaaaaaacctggccctcccaccttagccctgtaaaatgcaaaggtgggtcactatgatgtttgaacacatggtgttatctggaggcggccatcacacttggcacaagtggtgacaaggagaagatggcgggaatcactatattgagtgaagccagtttctaatggctggca

SEQ ID NO: 211636 - DNA, 527 bp, Homo sapiens
ctcatgcctgtaattccaacactttgggaggccaaggtgggaggatggctggtgtccagaagtttgagaccagcttgggcaacatagtgagatcccgagatcccatctctacaaaaaatcaaaaattagctgggcatggttgtgcacacctgtggtcctggctacttgggaggctggggcaggaggattgctttagcccaggaggtcgaggctgcagtgagtcatgattgtgccactgcactcagcccgggtaacagagcaagaccctgtgtcagaaaaaaaaaaaagaaagaaaaaaaagraaattcaaggccagttaagacaaaatgttatgactttgaaattcacagaaataaataaatagcagtttagattaggtcttcaggtatccaggatagagatacaggtattcaggatagagataatctcctgaaaaatatgaatttcagagattcttatactggctgccaaaggatgaagccagtgaaggagaaaaagcttaaattccatcttgagctcttggattg

SEQ ID NO: 211637 - DNA, 413 bp, Homo sapiens
taaggggtcctaggacaggcagtcactagmtacctctcccaaccactaagttgtgactggggaactttactcttttcacatgcctttctaattatgcctgaaagccccactcctttgttagggagagatatcctggcaaaagcaggggccattatacactagaattaggagaaggaaaaaggataaatatatatacagactctaagtatacttacctagtcctccatgcccacacagcaatatggagagaaagggaattcctaacttctgagggaacacctatcaaacatcaggaagccattaggccccaaaattctccttgcctctgaatctacttcctccgatccctgcctaaagataattttatggggaagaggattagtttgtgtctttcgggtgacactcaggtgcct

SEQ ID NO: 211638 - DNA, 413 bp, Homo sapiens
taaggggtcctaggacaggcagtcactagatacctctcccaaccactaagttgtgactggggaactttactcttttcacatgcctttctaattatgcctgaaagccccactcctttgttagggagagatatcctggcaaaagcaggggccattatacactagaattaggagaaggaaaaaggataaatatatatacagactctaagtatacttacctagtcctccatgcccacacagcaatatggagagaaagggaattcctaacttctgagggaacacctatcaaacatcaggaagccattaggccccaaaattctccttrcctctgaatctacttcctccgatccctgcctaaagataattttatggggaagaggattagtttgtgtctttcgggtgacactcaggtgcct

SEQ ID NO: 211639 - DNA, 561 bp, Homo sapiens
ttccatcagtgtgtaaatagtttcatagctttcttaacctcatacttaagtctcttttccacagactattaaaataatggaagtccctgttataaagataaaagaaagttgtcctggaaaatcggatgaaaaattaataaaaagtgttattaatatggtaggtcaaagtaactcattgcatgtggcatgctgcacttcccttgattgtattattctactttctggtgattggaattaggcacaaggtgtattgtgtgcaatctgaagcttaatgartagaaactgttttatactttttaactccttagcttcttttttctcattcattttatatttagtctaaattcttgctgtatttccaaaattataaatcacggtaatttataatcagggaatttgcctcagcatacgaaataatctaattctggaatccagctgttttagtttgctagggctgccataacaaaataccacatagttaattgcttaaacagtagaaatttcttttctcacagttctggaggctagaagtccaagattaaggtgtgtgtaggtttagtt

SEQ ID NO: 211640 - DNA, 568 bp, Homo sapiens
gctttagctgccatcattatcatcatcctcaccaccaccaccatcattatcatcattattaatctgccactattttcaccaattcttctttaatttctctctctttttcctggcctttagagtcaggtagccccagacttgaatcccatccatcacctactaggtgtgtgtattagtctgttctcaagctgctaataaagacacacctgagactgggtaatttataarggaaagaggtttaatggactaacagttccacatggctgcggaggcctcacaatcacggtggaagatgaaggaagagcaaaagggcatcttacatggcagcgggcaaaaagagaataagagacaagtgaaaggggaaaccccttataaaaccttcagatctcgtgagatttattcacaaccacgagaacagtaagggggaaactgcccacaggattcaattacctcccaccagatccctcccacaacacgtgggaattgcaggaactacaattcaagaagagatttgggcagggacacacagccaaaccctatcagtgtgtgactttcaataagtcacatc

SEQ ID NO: 211641 - DNA, 474 bp, Homo sapiens
accatcactgtccatcctcagaacttctttcatcttataaaactcaaactttcacccatgaaacaataagctttcatccactctccaacccatctcctagcaaccagcactctaccttctatctctacgagtttgatgactctaggtcccacctataagtggaatcacacagtatttgtctctttatgtctggcttatttcactcagcgtagtgtcctcaaagttcatccatgtggtagcacgtgtcagaatttccttgttttctaaggccaaatactatttcattacatggatacattgcattttgtttatccactcatctgttaatggacacttggcttgcttgcacctattggctactgtgatacgtgctgctataaacatgggtgtgcaaatatatcttygagtccctgctttcaatttttttgggtagacacccagcagtggaattgctggatcatacggtcagtctat

SEQ ID NO: 211642 - DNA, 540 bp, Homo sapiens
tcacgtcacatggcacagttgccttaacaaagagagcttagccaatgggcatgccataaatcctttaaatctgggagtagaggtcggaggcgtcagggattaggagctcaagaaagattcagaccaggaacagtgggacttacctgtagtcccagcactttgagaagcaggcagattgcttgagcccaggagtttgagacccacctggacaatatagtgaaatcccatctctacaaaatatacaaaagttagcyggatgtggtgtcacgtgtcagtggtcccagacactgaggaggcggaagtgggaggatcacttgagctcgagaggttgaggctgcagtgagctgtgatagcaccactgaactgcagcctgggtagcagagtgagacactgtctcacaaaagacaaagaaggtttcagggcacgatgttgggttgagcatggagggggcatctggcaaggaatggggacatcctctaggagctgacggcagcgccagctgatagccagcaaggaaacaaacacctcagatctatagcc

SEQ ID NO: 211643 - DNA, 492 bp, Homo sapiens
gtacttcttgtagttttagtagagacagggttttaccatgttggccaggctggtcttgaactcctgacctcatgatccacctgcctcagcctcccaaagtgctgggattacaggcatgagccaccgtgcccagcccacacaattatttaatacaaattttatgggacatgaaagcctgcagaaatgaagacccagggaaagagaaaaacttgtatgcttaggtttgatgatgagtgaatggttgcagggaagtatgactgaaggacaaagggtataatctaatagtaataaactgggagaacttaacaaggcytgtttgattagattcttggcatctctgtggcttcagtgttaagcatgttcttttatctagagaggatatctctcaaatgacctgcttcaggggagaagggcaggtggatggatggtcagagagtgaccttcttaagttttatgatcttctgctgctgttttctgtaatgccaaggtgcc

SEQ ID NO: 211644 - DNA, 591 bp, Homo sapiens
atgcagggcaggccagccccagactggagctcagccctggtgggttctttgcttcgcccaggaaagaatccaagggcaagccagtggtagaagaaaagagctttattgaaacagcagtgttatagcctaggctgggttatagctctgtcacttctcctgcagagcagggccaccctgtaggcagcgtgctgagactagcagctcagtagttctatagtcatacctacgtttaattacatgcagattaaggagtggattatgcagaaatgtctagaaaaagggtaataatgtctagggtgttgagttattggcatggaaagaacggtaactcctgggatgttcccatggcaatggtaaacggaaatgccaccctcgtgggtgtgtcttatggaaagctgcttytgctccattcctgttttagctagtcctcaatttggtcccgtgtctgaaccctgcctccagaatcgagtccacctcttacatcatcctcatttaacttaatataattattctaatctgctccttccaagtcattcctcaaggtgggaatgactttccccgtgccttttttccttcacatggggaaactgt

SEQ ID NO: 211645 - DNA, 629 bp, Homo sapiens
tagaatctttttcaacaaggaaccagagagagtgactcttgctgtctctctaacggtgaagttgtgaagtgtgaggatagaagcaactggtagacaagtttccagctgcacgctgaagtctgatctgagcacaggaaaccaatgggcagggaaaaatggtacctatcaacttttaaaattgtgattgctcctgaaatttatctgcttcctgccgttcctactgatctcatgcatgcatcttcttttgtgtctaaccaacttcaataaagtcctggctaatattccctgcccacctgccaagtacatagasttcttcccaggtcagtcccaaccaacttccaggcaattgcctgctatgaattttgggagaggacaaatcccctacctacagattaacaggccttttgtgataatctagtctaaatctctcattttggagatgagtaaattaagacccccaaagtggaatggctttcttgagataacagaaaacaaaacatgcatgaaatctggctctcctgaatttaaaatataacaagggaccatctgagatgaacagagcatttatatgctacttggctacctataatgcctttaggcaactcataagtcagaagcttgtgttccaa

SEQ ID NO: 211646 - DNA, 234 bp, Homo sapiens
  misc_feature (1)...(234): n = A,T,C or G
nnnnnnnnnnnaccaacgttgctgaggactgatccttcacatattccaacctttcctcctctttgtgtgctgctggaggaggaagagggtgtgcacacgcttggacatgtgtttaatcccctctccagctgcaaaagtcaggagtctctgtgccctcaaaaatatccccarcaactggaagaccataaccaaccacagcctttaaggaactcccagagcagggacttctggatc

SEQ ID NO: 211647 - DNA, 509 bp, Homo sapiens
ttaaaaaataaaattagataaataaataaataaaacgtactatggtttaagaagatccttttcaaacagctggggacactggtcactcaagtgactttcccggtgtctcacacaaawcctcagtggtggttatgtgggtgttgattttgcagtaggtcattgagctacacattttctgaatatatgtatttataatttttaaagaatattttttatagtttaaaagaagatttaaaaaaaaaatcaaagagaccaggtattctaatccttaatttagctctgtttcccacactagtctactccttggaggaacgaaggcacaaaagagaaaagatggaattatggtctctgggaactagattttaaaattgcatttaagaaatacctaatgtagacgacgggttgatgggtgcgacaaaccaccatggcacgtgtatacctatgtaacaaacctgcacgttctgcacatgtatcccagaacttaaagtataattttaaaaaattgcata

SEQ ID NO: 211648 - DNA, 558 bp, Homo sapiens
ctaaataccacagactgggtagattaaacaatagaaacatattttctcatgattctggagactggaagtccaagagcaaggtgttggtggggttgattaagtactgaggtctccttccttggcatgcagatggctgcttttcccctatctttactttgtcttgcctctgtctgcatttttgtgtcctgatcgcctcttcttaaaaggacaccagtcatatggacgagggcccaccctaatgacctcattttattttcattatctctttaaaggcattgcctctaattacagccacattctgaggtactagggattagaacttgagaacacgaattttggagggacacgatgcacccaatagcataggtgccaggcacagacactttacatgcttgagcttatkcaacgctcaaaacaaccccatgaagatggcagtatcatccccattttactggtgggtaaactgaggctcaaaggggttaagtaacttgaatgtagttatacagctgctaaatattagtgctgaaacttgagtctgactgacaccaaagcctacac

SEQ ID NO: 211649 - DNA, 558 bp, Homo sapiens
ctaaataccacagactgggtagattaaacaatagaaacatattttctcatgattctggagactggaagtccaagagcaaggtgttggtggggttgattaagtactgaggtctccttccttggcatgcagatggctgcttttcccctatctttactttgtcttgcctctgtctgcatttttgtgtcctgatcgcctcttcttaaaaggacaccagtcatatggacgagggcccaccctaatgacctcattttattttcattatctctttaaaggcattgcctctaattacagccacattctgaggtactagggattagaacttgagaacacgaattttggagggacacgatgcacccaatagcataggtgccaggcacagacactttacatgcttgagcttatgcaaygctcaaaacaaccccatgaagatggcagtatcatccccattttactggtgggtaaactgaggctcaaaggggttaagtaacttgaatgtagttatacagctgctaaatattagtgctgaaacttgagtctgactgacaccaaagcctacac

SEQ ID NO: 211650 - DNA, 558 bp, Homo sapiens
ctaaataccacagactgggtagattaaacaatagaaacatattttctcatgattctggagactggaagtccaagagcaaggtgttggtggggttgattaagtactgaggtctccttccttggcatgcagatggctgcttttcccctatctttactttgtcttgcctctgtctgcatttttgtgtcctgatcgcctcttcttaaaaggacaccagtcatatggacgagggcccaccctaatgacctcattttattttcattatctctttaaaggcattgcctctaattacagccacattctgaggtactagggattagaacttgagaacacgaattttggagggacacgatgcacccaatagcataggtgccaggcacagacactttacatgcttgagcttatgcaacgctcaraacaaccccatgaagatggcagtatcatccccattttactggtgggtaaactgaggctcaaaggggttaagtaacttgaatgtagttatacagctgctaaatattagtgctgaaacttgagtctgactgacaccaaagcctacac

SEQ ID NO: 211651 - DNA, 475 bp, Homo sapiens
aagaaactaaacccagcaaggttaagttgctcacccaaagtcacacagcagtaaacagaaaaaataggattcaaaccaagtttttgtggaaccctagacccatgtccttatcccaccccagggccaggtgctaagctcatggaacaaactccacattttgcaaggcwgtccagggagtgtcagagattcagtgtatcaaagaaatgccagatgtgatttctgaaggcagccccagaaagttctctcaatcctttcttctggctgggaggcaagaaaggagctgagaattgctgtccaggatagccacagtgctcaaaaacatggggcaagggacatacgtgttgagaaatagactgccactgactgagcaatacgatccccaagtgagatttctcagtgactgtcacttgtctcaaagagacagcattatccaatctctttgagccagagcttaaaagagtagtcagcatttgct

SEQ ID NO: 211652 - DNA, 533 bp, Homo sapiens
attattgtcttattttaaaaaattgtcaccccaaccttcagcactgccaccctgattagccagcagccatcartatcaaggcaggaccctccaccagcaaaaagattacaacctgccgaagttcaggcgattgttaacattttttagcaatagaatatttttaattagggtatgcaccttggtttttgtagacataatgctattgcacacttaatagactatattatagtataaacataacttttatatgcactgagaaaccaaaaaaattatttgactcaatttattgcagtgatctggaaccgaacctgcaatatctctgaggtatgcctgtagttagaaagtctttggctcaagtaacaaaaagcccagattcaacctggtgctaacagtgaagacaagatttcactcaacaagaggtctaaggtaaggtaggtttcaaggctggttgattcagtagtgccaccgtgccaccaagaactcaggtttttttccatttcttttgctttgctaccctcaacatgtggaccttg

SEQ ID NO: 211653 - DNA, 377 bp, Homo sapiens
agcagaaaagtccatcatattttaggaaaatcttctgtccatggggtcaaaaaaratttttgtttaattaaaccctcagttttgttgtacatgttcactttttgtgcatttttgctggtatttcttgctcaaggaaacagctctgtcaatatacttgccgcataatgaactccatcaattcactgccatgctgggtcttcgcatttatgatgacacttcctctgccttatgttatcaggaagtgaaggcttccatagaagtacattttccagataactaaagttagctctttcaaaggccactcctgaatttcaattatattttcttatgaacgtcattctaaaatgcatacatatggtggatgtctggacagaatt

SEQ ID NO: 211654 - DNA, 377 bp, Homo sapiens
agcagaaaagtccatcatattttaggaaaatcttctgtccatggggtcaaaaaaaatttttgtttaattaaaccctcagttttgttgtacatgttcactttttgtgcatttttgctggtatttcttgctcaaggaaacagctctgtcaatayacttgccgcataatgaactccatcaattcactgccatgctgggtcttcgcatttatgatgacacttcctctgccttatgttatcaggaagtgaaggcttccatagaagtacattttccagataactaaagttagctctttcaaaggccactcctgaatttcaattatattttcttatgaacgtcattctaaaatgcatacatatggtggatgtctggacagaatt

SEQ ID NO: 211655 - DNA, 377 bp, Homo sapiens
agcagaaaagtccatcatattttaggaaaatcttctgtccatggggtcaaaaaaaatttttgtttaattaaaccctcagttttgttgtacatgttcactttttgtgcatttttgctggtatttcttgctcaaggaaacagctctgtcaatatacttgccgcataatgaactycatcaattcactgccatgctgggtcttcgcatttatgatgacacttcctctgccttatgttatcaggaagtgaaggcttccatagaagtacattttccagataactaaagttagctctttcaaaggccactcctgaatttcaattatattttcttatgaacgtcattctaaaatgcatacatatggtggatgtctggacagaatt

SEQ ID NO: 211656 - DNA, 574 bp, Homo sapiens
attctatatacccatgctgttaattatgttggtgcacctgaacaaaacaatttctcatttcagatacaggtatttgtttttctgtgggcaattttgcatgtgtgggaaagaaatgtgttacactgaagaaaaatattcccattatttatacttgggttatggatgttggtgcccagaaaagtgtaggtcttatatacatttgttatgtaggtaaatgtacgaataaatgaatggatggatggataaaagagtgaatgaatcaatcctgaatgggaacacatgaaatcaatcagggaaattttcatgaattcattgtaaggcacatagtcatagacttcaatatatttaatcatgctttgtttattgaaattattaggataaatataactgaaaagatagatttttaaatgtaaatcatatttttctattcaatttatttttatgtatttaatttgctttacgctgttgcaaagggaatattaccttctatttcatcctctaacttgttgctacttgtttacaggaagacawttgtactttcttaattgattctataggcaaccaaacacaggca

SEQ ID NO: 211657 - DNA, 532 bp, Homo sapiens
caactcactagctgcatttttcccataacaagagagtcagccagtctacttaatctacagtgaaaatctgctgttttgtgtagtcactttcataaatgattttagcttgatcttctggaaaatttgctacagtttctccatcagcacttgctgcttcatcttgcacttttatgctttgaagatggcttckttccctaaaaatctcatgaactaacctctgctagcatcactttcttctgcagtttccttaccactcacagtcttgatagaattcaagagagttatggccttgttctggattagattttgggaatgtcatggctggtttaatcttccatccagacaactcaaattttctccatatcatcaataatactgttttaccctcttattatttgtgtgctactggaggtgattatttttttttttttttttttttttttgtgacagagtcttactatgtcgcccaggcttgagtgcaatggtgcgatcttggctcactgcaacctccaactcccgggttcaagtcatt

SEQ ID NO: 211658 - DNA, 532 bp, Homo sapiens
caactcactagctgcatttttcccataacaagagagtcagccagtctacttaatctacagtgaaaatctgctgttttgtgtagtcactttcataaatgattttagcttgatcttctggaaaatttgctacagtttctccatcagcacttgctgcttcatcttgcacttttatgctttgaagatggcttctttccctaaaaayctcatgaactaacctctgctagcatcactttcttctgcagtttccttaccactcacagtcttgatagaattcaagagagttatggccttgttctggattagattttgggaatgtcatggctggtttaatcttccatccagacaactcaaattttctccatatcatcaataatactgttttaccctcttattatttgtgtgctactggaggtgattatttttttttttttttttttttttttgtgacagagtcttactatgtcgcccaggcttgagtgcaatggtgcgatcttggctcactgcaacctccaactcccgggttcaagtcatt

SEQ ID NO: 211659 - DNA, 532 bp, Homo sapiens
caactcactagctgcatttttcccataacaagagagtcagccagtctacttaatctacagtgaaaatctgctgttttgtgtagtcactttcataaatgattttagcttgatcttctggaaaatttgctacagtttctccatcagcacttgctgcttcatcttgcacttttatgctttgaagatggcttctttccctaaaaatctcatgaactaacctctgctagcatcactttcttctgcagtttccttaccactcacagtcttgatagaattcaagagagttatggccttgttctggattagattttgggaatgtcatggctggtttaatcttccatccagacaactcaaattttctccatatcatcaataatactgttttaccctcttattatttgtgtgctactggaggtgattatttttttttttwtttttttttttttgtgacagagtcttactatgtcgcccaggcttgagtgcaatggtgcgatcttggctcactgcaacctccaactcccgggttcaagtcatt

SEQ ID NO: 211660 - DNA, 418 bp, Homo sapiens
ctatgaacaaaagctacctcaggtttctgtttgtttagtttgtttcctccaactgtgatttctcatcctcttcctgttttgcagaaattcagtgtaatttccctttcacgatgatatcctcccttacgttaacctccacaattctttttttctattatgagtttattcttaatcacacaccttatcttttttttaagtgaggtcttagcaggcatgggagacaaatgcatgttcctggtckgccacctttgacagcaagaatttttatctctgttcagaaatactgggatgtaaatattgaaagataagtaaaacatatatacatgttttttcaaggccaaaattattccctggagaaagcatatattctttaaaaagcaatttctgttaagcattttactaagataagtaatattta

SEQ ID NO: 211661 - DNA, 551 bp, Homo sapiens
caacaacagtagttctggtcacctaataaatggtagtagtaatattctccaggactcatactcgtcacttyagatgcactatttctaatccatacaagtttgcaagttagacattgctaacccaaattaaaacacgaagaggctgaagttcagagaggttatttgcctgctcaaggtcaccctgctggtaaatgcctgagttgcactgaaaccacatctgatgccccaaccagctctccagtcaccatttcctgctgcttttcttttaggacataaagatgtgaacaaaactcttcctcagtactttgaaaagtcaccaggtgatatgtgtccccttttctttccctgccctcttctggtttctctccaatcctttgctttttgattcacaccatatttagtcagtattcatttccccaactccaattcacttattccttcagccacagtaatgtggtattgtaccccagcccttttggaaactgtccttcctaagaaaagaaagaataaaaagaaatcaaggcaaggcttccaatctacttggaacttaa

SEQ ID NO: 211662 - DNA, 521 bp, Homo sapiens
tttgttattataggcctaatactgactcagtctttgaagtacttagtcttacgggaaaagtaaataaaggagaagaagagtgtttagaaagctggcagaacattttcagctgggctagcctagtagcaaaagccagcattagagagaattcttaaagaaatggctyatcattagctgggagggcaattaatcatttcaaacatcctcatattattgagctatccttattttagggacttcctcgataccacgtactctttctctggttgggtagacatgcaattactttgaaaatttagccaaagaccatacaccctccttttactgacaagtcaaagcattgttacccagaggaaatacgggttactgaatttatccaggtaactctgaagaatcctttgttactttgtgtgtatttgatctatatagctgacacatctgggatagagtgccagctttctaataactccatttttaataatgtttggggcccaaagaactaattatttagtcatgaatca

SEQ ID NO: 211663 - DNA, 487 bp, Homo sapiens
catacaccctccttttactgacaagtcaaagcattgttacccagaggaaatacgggttactgaatttatccaggtaactctgaagaatcctttgttactttgtgtgtatttgatctatatagctgacacatctgggatagagtgccagctttctaataactccatttttaataatgttyggggcccaaagaactaattatttagtcatgaatcaattgtatctttcttacttgtatactttgcaattccaaaggatgggagtgcaaataaaacctactgaacaaattattgtctctgttaggcatagatgctgatctcaaacatttttgtattaatctacttaaaaacagtaacacaacttgattgagtaagtatttatggaaggtcaggcacagtgtgggcacagtggctcacgcttgtaatcccagcatttcgggaggctaaggccgtggatttcttaagcccaggagttccagaacagcctggg

SEQ ID NO: 211664 - DNA, 487 bp, Homo sapiens
catacaccctccttttactgacaagtcaaagcattgttacccagaggaaatacgggttactgaatttatccaggtaactctgaagaatcctttgttactttgtgtgtatttgatctatatagctgacacatctgggatagagtgccagctttctaataactccatttttaataatgtttggggcccaaagaactaattatttagtcatgaatcaattgtatctttcttacttgtatactttgcaattccaaaggatgggagtgcaaataaaacctactgaacaaattattgtctctgttaggcatagatgctgatctcaaacatttttgtaytaatctacttaaaaacagtaacacaacttgattgagtaagtatttatggaaggtcaggcacagtgtgggcacagtggctcacgcttgtaatcccagcatttcgggaggctaaggccgtggatttcttaagcccaggagttccagaacagcctggg

SEQ ID NO: 211665 - DNA, 487 bp, Homo sapiens
catacaccctccttttactgacaagtcaaagcattgttacccagaggaaatacgggttactgaatttatccaggtaactctgaagaatcctttgttactttgtgtgtatttgatctatatagctgacacatctgggatagagtgccagctttctaataactccatttttaataatgtttggggcccaaagaactaattatttagtcatgaatcaattgtatctttcttacttgtatactttgcaattccaaaggatgggagtgcaaataaaacctactgaacaaattattgtctctgttaggcatagatgctgatctcaaacatttttgtattaatctacttaaaaacagtaacacaacttgattgagtaagtatttatggaaggtcaggcacagtgygggcacagtggctcacgcttgtaatcccagcatttcgggaggctaaggccgtggatttcttaagcccaggagttccagaacagcctggg

SEQ ID NO: 211666 - DNA, 575 bp, Homo sapiens
ccggatattaggaacaacatcaaagaaagagtgtacaccctctgcgatatggggtgtaatatcacacactgtgatattaggagggtaatatctctcctgaatattaccagtaatattccaaggtgtacacacatggtgtacacacactgtgatattaggaaactataatctccccatgatattttgaataatatcccaggttgtacacacatcgtgtacactcactgttatattaggagagtaatatctccccataatattacaaataatatcccagaatgtacacacatggtgtaaacccactgtgatattaggagagtaataactccctgagatattcctaataatgttccagggtgtacaaacatggtgaacacctactktgatattaggagagaaatatctccccaggatattacacataatatctcaggatgtacaaacaaagtgtaaacacactgtgatattaggagagtaatatctccccaaaatattgcaaataatatcccagggtgtacacatatggtgcacaccctctttgatattaggagagtaatatctctgcaggttattac

SEQ ID NO: 211667 - DNA, 544 bp, Homo sapiens
ctgctggctttctaagcttgggattagatgctataaaaccaaagtaaggttgttttgtagttacacagtactcactggagaaccatgcagagctcagtagtaaaaattcagcaaagggcasctttggcttattatatatcctgaaagaatttgctaagggacaggggtcagtgatgactgttgggttttttgttgttgttttggtttcgtttttgtttttaaccatcgcctgtatgatggtttcctttcctggagacagtgctaactctacaaaagggataggcagctccctatagagggtcatttaaggagagctgaaaggcccattgcggtgccatggtgccgaaaactcctgtgattagtcatgcctttaaggcctaccagaaaattgtgttaagtttttatgggtattttatataaagtggaagtgggacatatcttttagttaacatattagtataattcagtatatatgtcctaaaagtttgaaaaacatggcaaatgagttttgggggtggtcttaggctatgccagaggacacaat

SEQ ID NO: 211668 - DNA, 544 bp, Homo sapiens
ctgctggctttctaagcttgggattagatgctataaaaccaaagtaaggttgttttgtagttacacagtactcactggagaaccatgcagagctcagtagtaaaaattcagcaaagggcacctttggcttattatatatcctgaaagaatttgctaagggacaggggtcagtgatgactgttgggttttttgttgttgttttggtttcgtttttgtttttaaccatcgcctgtatgatggtttcctttcctggagacagtgctaactctacaaaagggataggcagctccctatagagggtcatttaaggagagctgaaaggcccattgcggtgccatggtgccgaaaactcctgtgattagtcatgcctttaaggcctaccagaaaattgtgttaagtttttrtgggtattttatataaagtggaagtgggacatatcttttagttaacatattagtataattcagtatatatgtcctaaaagtttgaaaaacatggcaaatgagttttgggggtggtcttaggctatgccagaggacacaat

SEQ ID NO: 211669 - DNA, 558 bp, Homo sapiens
tctttccctcttcaggctttaagttttttctattcttactgtttctttaattgccatctgaagctttcgcacatgacctccccggacacgggacgtgtcgtgctaaaaccaggaaagccgtggacaaaccagaatgaactgatgactctactttctgcccaccacctccacctggcaaacacctacttcaagtactagcttaaatgtcattctctcaggaaacctctgatacctcttcactgccacaagtattggtttatttccttttatctcaacattcatcacactggatttcttcttttaatgtctgtcttctctaactaygtataaactccacaggcaaggacccagtgagtatctatcttgttgaccattacatcaccatcacactggacactgtgtttagcccagagtaggtgatgagtcattacttcttgaatgaataaatcagtgaatgaaaggatttcatctgtgacagcatcagaattaaagggttttttcttctttaggctagtggagacccaggcaagtttgaagatacattcactgttctatctc

SEQ ID NO: 211670 - DNA, 604 bp, Homo sapiens
aaattgaaaaaaaattttctgatctgtaagcctgaaaaagaaaattgttttgactyttcctatatctgaagattataagatttttttctcttaaccctttctcactttatcctcctttcacctccgtggtgagcttgggacacagaatattgttaatgtattttttgtatatttcatgtttctaattccatcttcttttggtaattttgttttatttatttgtttgtttgtttgtttgtttgagacagagtttcactctgttgcccaggctggagtgcaatggcgcaatctcagctcactgcaagcacctcttccctggttcaagcaattttcctgacctcagcctcccgaatagctgggattacaggcgtgtaccaccacgcctggctaatttttatatttttagtagagacagggttttgtcgtgttggtctcaaactcctggcctcaagtgatccgtctgccttggcctcccaaagggctggtagtaaaagcatgagccaccacgtctggcctatttatttttgagacaaggtctcgctcttgtcccaagctcaccatggaggtgaaaagagggtaacgtgagaatgggttaagagaaaaa

SEQ ID NO: 211671 - DNA, 505 bp, Homo sapiens
ccttttgtttttttgtttttttgttttttttggctgccttctttttctctctttgactttcaggagcccacttggatctcttccaagggatctttctttcttctcttattaaggcaggtgaggatgtcatttgatatgagcttttcattcatttgttaatttcacaaatatagagctcctctccacacaagatagcatggtgagatgagtaaracagagtccttgacttaaagatacatacaaatccccataccttttcgttcacattctcaggataattgcttagtttcctcaatgtgagtgactaattacagaaagggacatgaggccaggcaccatggctcacacctataatcccagcactttgggaggccaaggtgggtggatcacctaaggtcaggagttcgagaccagactgggcaacatggtgaaacccggctctactaaaaatacaatagccaggtgaggtggtgggcacctgtaatcctagctacttgggaggctg

SEQ ID NO: 211672 - DNA, 462 bp, Homo sapiens
ggagcacaagatcctcagcaacgaacacctgcacttagaaaaagtggacagcttctgccaaccacaccctacccatggtactgtatgctattaactcctggaaacgccccgtaaatgcgagttgtttttgtatttgtgtgttgagatgggccttgtggtttctctgtactcagagcacatttcttgtaattactattggtatttttattgtcatgactgcccctgagctctggtgagaaaagctgaatttacaaggaaagggatgaagttaatatttgcatcacataattatatcattactgtgtatctgtgtattgyactaaatggactgatgctgcgcacatgagctgaaaatgaagagccctcccatccattctatgagaaagaaggtcaccctgagtgacttctgtttcatgatttcccaaacaggttttagagctggaaaaggacttaaagaaagag

SEQ ID NO: 211673 - DNA, 456 bp, Homo sapiens
tcagcaacgaacacctgcacttagaaaaagtggacagcttctgccaaccacaccctacccatggtactgtatgctattaactcctggaaacgccccgtaaatgcgagttgtttttgtatttgtgtgttgagatgggccttgtggtttctctgtactcagagcacatttcttgtaattactattggtatttttattgtcatgactgcccctgagctctggtgagaaaagctgaatttacaaggaaagggatgaagttaatatttgcatcacataattatatcattactgtgtatctgtgtattgtactaaatggactgatgctgcgcacatgagctgaaaatgaagagccctcccatccattcyatgagaaagaaggtcaccctgagtgacttctgtttcatgatttcccaaacaggttttagagctggaaaaggacttaaagaaagagactgggtg

SEQ ID NO: 211674 - DNA, 392 bp, Homo sapiens
gaattccatatgtctgggacattaggtactgatgtgaacatggaagaaaagtgtgggggcaaaggagaaaaaggataaatgggaatttctatttctgtctacattrtgccaagcattataattttactttctagaccaagaagatatttttatgttttttttggggcagacaagtgacaaagtgagatatttatgctttagaaaggttagttgtatcaaaatgtagaaaatattttaagaaataagaaataaagactgtatggcaaactttgagatattttaaaaataggctacattaagaacctaaactagaaacatgtttttctaagagaaataatgtgttggtactattaaacatgatagggcgaaaattgatgggaatcagtgtttaa

SEQ ID NO: 211675 - DNA, 544 bp, Homo sapiens
gttcattgtaaacttttgtcacacattactcttcaagtgaaacatytggatctgccttgagaaaaaataaagtagttaatcctctatgtcagatccaaaaggatccatgtacttaaatattacctaagtcaatcattatttcaaatcatctcagatatcataactatttcaaatgtttctttgagtaaatatgaaagactgagacaggaaaaatgtatcactattaaatagcattacattaaatcatcttgtcattaaaaccatggtatcatcctgagcaacatgatgaaaccttgtctatacaaaaaaatattaaaaaattagccaagtgtggtggtgtgcacctgtggtcccagctactcgggaggctgaggtgggaggatcacctgagcctgggaggcagaggttgcagtgagccaaaatctcaccactgcactccagcctgggtgacagagtgacaccctgtcttaggaaaacaaaacaaaaaaactgtaaagtcaagtctttcctagaagtggggctagggtgagggagaagcagtgcc

SEQ ID NO: 211676 - DNA, 544 bp, Homo sapiens
gttcattgtaaacttttgtcacacattactcttcaagtgaaacatttggatctgccttgagaaaaaataaagtagttaatcctctatgtcagatccaaaaggatccatgtacttaaatattacctaagtcaatcattatttcaaatcatctcagatatcataactatttcaaatgtttctttgagtaaatatgaaagactgagacaggaaaaatgtatcaytattaaatagcattacattaaatcatcttgtcattaaaaccatggtatcatcctgagcaacatgatgaaaccttgtctatacaaaaaaatattaaaaaattagccaagtgtggtggtgtgcacctgtggtcccagctactcgggaggctgaggtgggaggatcacctgagcctgggaggcagaggttgcagtgagccaaaatctcaccactgcactccagcctgggtgacagagtgacaccctgtcttaggaaaacaaaacaaaaaaactgtaaagtcaagtctttcctagaagtggggctagggtgagggagaagcagtgcc

SEQ ID NO: 211677 - DNA, 414 bp, Homo sapiens
accatacctgaccccttgaaaccaaactattgtggaaaagaatgagcatatgcacatggagattgacaaattcctcaaataccaatcagtggacacaaatcagccatccccacaactgctttgaargacataggattaattttacagtcagggcacaccagagcaactcggggagcttgtgtaaaaatgtagatggcgtgcagtggctcaggacttctaatcacagcactctgggaggctgaggtggaaagattgtttgagcccaagcatctaagactagcctgggcaacatagcgagaactctgaacagacgatctgaaaaagctgagggtcttgagaacaagtagtcaacatactatattgatgaattaagaccaacatcattggtcatttattaacactttattctaaaaa

SEQ ID NO: 211678 - DNA, 585 bp, Homo sapiens
aatcatcactttcatggagaattgggcaaaaggatgtcattttttcttcctcttcacggcacaatctcagtattagytttcaataatgcgtaacaaattagcacaaacctagcaacttaaaacaacacatacttattatctcacagtaccagagtgtcaggatttcagttgtaacttagctgggtcctccattcagggtctcacagggctacagtcaaggtattggctaggctgtgttttcatttggaggttcaaatgggtaggatctgctttcaaactcattctgtttgttggcaagaatcatttttttgcagttgtaggactgatgactttgaactcttactggctaccagctgaaggcctcctttaagatcctaaaagccacgcatagtccctgcagttcataatgtggcaatttggttccttcaagcacagcaggagggtctccctatgcatctgctagcaagacaggttgtgtgtgtgtgtgtgtgtgtgtgtgtgtgtgtgtgtgtgtgtgtttgtgtataataacaacggaattgatatcctatcccctttgacatattcttggccagaagcaattca

SEQ ID NO: 211679 - DNA, 487 bp, Homo sapiens
gtgtttcatctgtctttccattcgaagtgtgctattatcaccaacttcaaagttcatacaactaccgtggatatcctttagcacaacacctaaatcctctgaggaggtaagcctgcttttggcttcagaaattgaacgcaggaaggtagtttaccatctgtctgaaacgtttaaacttttttccaagacaaatgtggattatgcgcaacaaactgggaattttctggtctcagaacaggaaaaataaaggaacccttaagtattattttaagtactttgtttgctagtagtgtttgtggtgaatgaaaaattgatccttaattgtgtgggaaacagagaagtaatstgcatggcaatggccaagtacagacttcagagacttcacagttttgaaactgatacttatgaacatctgctttttccccataaattttaatatggattgtatcctttgaaactcacaaaattcccaggtgcttcttcagtc

SEQ ID NO: 211680 - DNA, 460 bp, Homo sapiens
ccctggatagtttatataggttgttgatttcatcttcttttttatataagcacttaaattatatatttaatctaagtgaaaggtctaacataatattgttgccaaatatatttttcatggagacagtatttgcattcaagttctgcttaaattcaaagtttaaagatgagacatagcaacaaatgctttattggtcatgcacagctagcatattccttgcatccaatttttcatttatgcaatgcatgtttgttgcattaggtgagtgtcttctacaggctgacccttgggatagaaatatgaataaggtacagtgtctctgctctaaaagaaattcataatccagttagagccaaaaggtgtattcgaaaaaatctagcwtacttcttttatgtttttagcatgctatatttgttgagtgagtgaatgaatgaatgaatgaataatatttttaaatggc

SEQ ID NO: 211681 - DNA, 593 bp, Homo sapiens
accacaaacaactccaaaagacacatctaaaaaggttttgagcagaggctgtatcactaaaatgcgagtagtcatgcacacttaayactatttcaaaatataaattctggtttcgaccttaaaaatcatagcaatttagatatctcaatactagacataccaagaaagagaacagtcagtgccactatcagcttttaattttagaatcctgaaagttgcatgtggattggaaaaatgttggttgtagggacatattaccctttcccccttagggattccatgaatatggagtaatttctatgttttttttaattcagtaaaaaaaactatttcctagaatctaattatgttccatgtattattatatttttatccttcattcaatataatttttggtttgatgcctcatttctgggtctggtaatttcttctgccaacagacagtctactttgtagccaacccaaagtcctcatgctgcatgcaatctcctttctttatggtctttcactaggactgagagtagccttagaccaccacacactctagtgctagtttcatggagtagttctcagacctagtttatgcaagtgtc

SEQ ID NO: 211682 - DNA, 593 bp, Homo sapiens
accacaaacaactccaaaagacacatctaaaaaggttttgagcagaggctgtatcactaaaatgcgagtagtcatgcacacttaacactatttcaaaatataaattctggtttcgaccttaaaaatcatagcaatttagatatctcaatactagacataccaagaaagagaacagtcagtgccactatcagcttttawttttagaatcctgaaagttgcatgtggattggaaaaatgttggttgtagggacatattaccctttcccccttagggattccatgaatatggagtaatttctatgttttttttaattcagtaaaaaaaactatttcctagaatctaattatgttccatgtattattatatttttatccttcattcaatataatttttggtttgatgcctcatttctgggtctggtaatttcttctgccaacagacagtctactttgtagccaacccaaagtcctcatgctgcatgcaatctcctttctttatggtctttcactaggactgagagtagccttagaccaccacacactctagtgctagtttcatggagtagttctcagacctagtttatgcaagtgtc

SEQ ID NO: 211683 - DNA, 456 bp, Homo sapiens
ctagtcatagtgatctttgagagagagtttcaaatttaaacattttagactacagaagtgttcagaaaagttgaattgtttgagaccttttcaatgctagcttcaatactttcattctttcctgtgtactactgttgcattttttgatataaattatttgagatgaagaagtatgactragaatctttttaaaatttggactcagcctacattgcataggtggtagaagggtttaagagtctctatattttgttataggccttaacttctaggcatcttcatttggatgttaacttttgtatttgagcaaatcttaaggtgcttttggagcaaagttttagccaggactatagtttcataatttgggacctagagcagcagattatgcaggttgtcaacaccagatagtcatactcattgccttaggttgaggtccttcttcctattcccagaacc

SEQ ID NO: 211684 - DNA, 582 bp, Homo sapiens
ccagtgacaacagaagcacccagagacaaggcagcccctgacccagatcttccatgggcagggctctgcaggagcctctggtctggaggggtccgaggcacaggtttccccatgggtccccatcagctttcagcccctggtgtccacacccaatccctccacaccaacccaccgacacacggggaccctcgaagcccccaccacacagatgggaaaacccaaggcccaaagacgccaggcaagggcagctcagcccgggatctttctcatgtaccggtgagctcagctcagcccagcaggcgttcagaagcccaagtggccyggctggggtcagggccctgagtcagagcaagaaacgcagcagaaactgaaacagcccagtggccccacatactccacagagtgagccacgctgcttccctgcgccgccccgtgctgggaagttcttgcttctgtggtcagggtgagggtgggggtgggggacgagtggcgtggaacagcctttcagcctggggaccctctctgggcccggcagatgagcaaagttccatgcacacaggcagagctgtgaactggccccac

SEQ ID NO: 211685 - DNA, 664 bp, Homo sapiens
ccccctctttccacaaaaccaggtatgtgtgtgtgtgtggttattgtcttccaatcttaacatgtttatatgacagacaataaaattttaatytaaccattcattcatttactccactaattcacatatttattgagtacttagaatatgacaggaactatgctaggtctagagaaaatagaaaaaaaaagtgcattttcctccctctagtagataactttggaatgtgaaagtgatatatttcaataaacttgaaaattgaacaaagagacaatatctgagaaggttctgaaaggaaatgaaagtcaaaagtattacatacccattcacgattaaaaattataatgttaaacaaatttcctgtggctgtcctgacttcaggaaaaacatctggaacattgtaagaaataccaggccacctacaaatcacaagacaaagcttttactgaggttcaggaaatgataaacaaagcttatgggaccagatgtttctggatgctgttattttgattaagatgattcttctttcacaccatctggattgatagattaaaaaaaaaatcattccttcctagcttcagtgactcctactgataagtacaccagagatatatctacctaagataaatgctagtagtactaggattagtagtttttcgaaagg

SEQ ID NO: 211686 - DNA, 664 bp, Homo sapiens
ccccctctttccacaaaaccaggtatgtgtgtgtgtgtggttattgtcttccaatcttaacatgtttatatgacagacaataaaattttaatttaaccattcattcatttactccactaattcacatatttattgagtacttagaatatgacaggaactatgctaggtctagagaaaatagaaaaaaaaagtgcattttcctccctctagtagataactttggaatgtgaaagtgatatatttcaataaacttgaaaattgaacaaaragacaatatctgagaaggttctgaaaggaaatgaaagtcaaaagtattacatacccattcacgattaaaaattataatgttaaacaaatttcctgtggctgtcctgacttcaggaaaaacatctggaacattgtaagaaataccaggccacctacaaatcacaagacaaagcttttactgaggttcaggaaatgataaacaaagcttatgggaccagatgtttctggatgctgttattttgattaagatgattcttctttcacaccatctggattgatagattaaaaaaaaaatcattccttcctagcttcagtgactcctactgataagtacaccagagatatatctacctaagataaatgctagtagtactaggattagtagtttttcgaaagg

SEQ ID NO: 211687 - DNA, 664 bp, Homo sapiens
ccccctctttccacaaaaccaggtatgtgtgtgtgtgtggttattgtcttccaatcttaacatgtttatatgacagacaataaaattttaatttaaccattcattcatttactccactaattcacatatttattgagtacttagaatatgacaggaactatgctaggtctagagaaaatagaaaaaaaaagtgcattttcctccctctagtagataactttggaatgtgaaagtgatatatttcaataaacttgaaaattgaacaaagagacaatatctgagaaggttctgaarggaaatgaaagtcaaaagtattacatacccattcacgattaaaaattataatgttaaacaaatttcctgtggctgtcctgacttcaggaaaaacatctggaacattgtaagaaataccaggccacctacaaatcacaagacaaagcttttactgaggttcaggaaatgataaacaaagcttatgggaccagatgtttctggatgctgttattttgattaagatgattcttctttcacaccatctggattgatagattaaaaaaaaaatcattccttcctagcttcagtgactcctactgataagtacaccagagatatatctacctaagataaatgctagtagtactaggattagtagtttttcgaaagg

SEQ ID NO: 211688 - DNA, 516 bp, Homo sapiens
acaaaatgaagaagaagaagaggaagaggaagaagaagaagacaaagaagaagtagtagttacagtggtggtgacgatgttggagaatgttcttgatggcctcatgtgcctcttaagaattttgagatgtttatttatttatttattttttaatgaaaatgaggagccattgccagtatttgtgcagaagagtgctatgttgaacattaggttttaacattcagattgctgtactaagaacagtctagcatgggttaactctgctctctgccatcacacaggtstaaagtccttgcctcagtgcttctaatttcttcattagtcatcttatgatgcagctgctcacatgatttgaacaagttctttggaacacattgtctttatttgatccctgttttttagtgccatgtaaattactcataaacacagtgctttggccatcccaataataagacagaacaaatgtaatttctttttaccccaacttccgcattcgtggtctctccattagtaaat

SEQ ID NO: 211689 - DNA, 462 bp, Homo sapiens
ccaacacatttcggaatttaaagtgttcttaaagattctctatatatcttgtttcattttaaaagcttaactccatacagctgagtgatggtctccatggccacaaagcaagcaagtggaagaatgtagatttarctaagttcacatgactcagtttgtcacttttcactacaccaattgactgatctggtggtatgaaagagtcaatgatgtagaatcaccaagcataaggtttgttgaacaatggtgaaaatataaatgggcatttcctaaatgtttttggtctttttaatatcatccatattttgaaaataggcacacaaacacatgcatgcacgcatgtgtgtatatatatatatatgtgtatatatatatatatatatatatatatatatatatatatatatatatatatatatatatatatacacactcatatatgcaataccttctatcaggagc

SEQ ID NO: 211690 - DNA, 462 bp, Homo sapiens
ccaacacatttcggaatttaaagtgttcttaaagattctctatatatcttgtttcattttaaaagcttaactccatacagctgagtgatggtctccatggccacaaagcaagcaagtggaagaatgtagatttagctaagttcacatgactcagtttgtcacttttcactacaccaattgactgatctggtggtatgaaagagtcaatgatgtagaatcaccaagcataaggtttgttgaacaatggtgaaaatataaatgggcatttcctaaatgtttttggtctttttaatatcatccatattttgaaaataggcacacaaacacatgcatgcacgcatgtgtgtatatatatatatatgtgtatatatatatatatatatatatatatatatatatatatatatatatatatatatatatatatayacactcatatatgcaataccttctatcaggagc

SEQ ID NO: 211691 - DNA, 462 bp, Homo sapiens
ccaacacatttcggaatttaaagtgttcttaaagattctctatatatcttgtttcattttaaaagcttaactccatacagctgagtgatggtctccatggccacaaagcaagcaagtggaagaatgtagatttagctaagttcacatgactcagtttgtcacttttcactacaccaattgactgatctggtggtatgaaagagtcaatgatgtagaatcaccaagcataaggtttgttgaacaatggtgaaaatataaatgggcatttcctaaatgtttttggtctttttaatatcatccatattttgaaaataggcacacaaacacatgcatgcacgcatgtgtgtatatatatatatatgtgtatatatatatatatatatatatatatatatatatatatatatatatatatatatatatatatacrcactcatatatgcaataccttctatcaggagc

SEQ ID NO: 211692 - DNA, 587 bp, Homo sapiens
gaaaaataaagatgaattcttagagcaaggtataatctgcttattttgtatgttcattgaacaatayttctttcagttgctggactgctttcttggagggggttggggagtggcatttactgaagaattcataacttgtataaatctcttcttttcaaaatctagcatctgtgtaaagttttgtaatttggcagatcctgtatctggacatgacaaatttcagctggaaaaatatgctgtgaaaaatctttcagatgtcatatcccaactagggcctctgctaaaccccaaagtgcagctggaccttattattacatagctattttatttgcattcctgaagcccaagaagtaagtagatttccacctggtatattatatcagttttcttctatgatgagggtaaaatattaaagttatactaacagcataacatcatttactgtaatcagtcaaattatttgaaataataacattctttactgacttagcaaggagctgtaaaaagcatatctcaaaaaggaattagtatgcataccatagttaagtaaatttcacagttagaaacgaaaggaaaatgtattttat

SEQ ID NO: 211693 - DNA, 587 bp, Homo sapiens
gaaaaataaagatgaattcttagagcaaggtataatctgcttattttgtatgttcattgaacaatatttctttcagttgctggactgctttcttggagggggttrgggagtggcatttactgaagaattcataacttgtataaatctcttcttttcaaaatctagcatctgtgtaaagttttgtaatttggcagatcctgtatctggacatgacaaatttcagctggaaaaatatgctgtgaaaaatctttcagatgtcatatcccaactagggcctctgctaaaccccaaagtgcagctggaccttattattacatagctattttatttgcattcctgaagcccaagaagtaagtagatttccacctggtatattatatcagttttcttctatgatgagggtaaaatattaaagttatactaacagcataacatcatttactgtaatcagtcaaattatttgaaataataacattctttactgacttagcaaggagctgtaaaaagcatatctcaaaaaggaattagtatgcataccatagttaagtaaatttcacagttagaaacgaaaggaaaatgtattttat

SEQ ID NO: 211694 - DNA, 587 bp, Homo sapiens
gaaaaataaagatgaattcttagagcaaggtataatctgcttattttgtatgttcattgaacaatatttctttcagttgctggactgctttcttggagggggttggggagtggcatttactgaagaattcataacttgtataaatctcttcttttcaaaatctagcatctgtgtaaagttttgtaatttggcagatcctgtatctggacatgacaaatttcagctggaaaaatatgctgtgaaaaatctttcagatgtcatatcccaactrgggcctctgctaaaccccaaagtgcagctggaccttattattacatagctattttatttgcattcctgaagcccaagaagtaagtagatttccacctggtatattatatcagttttcttctatgatgagggtaaaatattaaagttatactaacagcataacatcatttactgtaatcagtcaaattatttgaaataataacattctttactgacttagcaaggagctgtaaaaagcatatctcaaaaaggaattagtatgcataccatagttaagtaaatttcacagttagaaacgaaaggaaaatgtattttat

SEQ ID NO: 211695 - DNA, 587 bp, Homo sapiens
gaaaaataaagatgaattcttagagcaaggtataatctgcttattttgtatgttcattgaacaatatttctttcagttgctggactgctttcttggagggggttggggagtggcatttactgaagaattcataacttgtataaatctcttcttttcaaaatctagcatctgtgtaaagttttgtaatttggcagatcctgtatctggacatgacaaatttcagctggaaaaatatgctgtgaaaaatctttcagatgtcatatcccaactagggcctctgctaaaccccaaagtgcagctggaccttattattacatagctattttatttgcattcctgaagcccaagaagtaagtagatttccacctggtatattatatcagttttcttctatgatgagggtaaaatattaaagttatactaacagcataacrtcatttactgtaatcagtcaaattatttgaaataataacattctttactgacttagcaaggagctgtaaaaagcatatctcaaaaaggaattagtatgcataccatagttaagtaaatttcacagttagaaacgaaaggaaaatgtattttat

SEQ ID NO: 211696 - DNA, 512 bp, Homo sapiens
tctcttttgattgtgttattctgtatcaggggaaaaaagaaggaaacacgagttttgagagatacaggcacagttaaattacattctatgttgttcattttaaaacatgaacaccatgctcaaaatcaaattcagtcttatccattttacctcatattttctcaaaaataaaaattactatacatatgaaggaaggaaccaatgataaaatgaacaaacaaatcacctattaaactaaacattattttgccctayacattggaagctaattaatttaacaattaccttgtataattggttaaaatctctagtttatttgattttcccctcattcatagggcagtgtgaaggaattcacagttacagaacatttagtatttgtgagacactggcttataacatgatttacaccttaagataattttagcattaaggtgaagattattaacagttaagaataaagcctttggtctcaggcttgtatttgagttccagctggagactagagagtg

SEQ ID NO: 211697 - DNA, 657 bp, Homo sapiens
atatacgccatgctgagaatataaaaatgattgtaatataaagtcaaaggcaaagttcagacattgcaaactgatggactatgtggcatatgttcccagtgttatgttttgtttagactttcaagtgtaccccaagaattttaagcaaatattttaagttggtagattgtctataaaaattcagatttttttttgtttgttattttaaaacagtgccagagtgttggaggtgagtagtagtgactcttttagaaaacatgtmtctttcaggtggccacagtctctgcaattaactcaacgtaggcaaatgcaattacgtgagccatcttcaagcaaaaagatggtcccaccagtccccttttttctaattctagaaattaaaattttctctgattcacttacccaatgtttatatgtgtattgagtgtctattatgtacatcattttgagcctgggatagagcaataaacaaggcagaacatgtttctgccctcatggacagtacattgtagtttgtggaggttttggtggggcttaatagattcttctattctatttcactgtaaaggctacatgcgatcatattgaagtatattcattcatttaacatactgtggcttttgggactattaatgaattatgatatttcaggtgcta

SEQ ID NO: 211698 - DNA, 526 bp, Homo sapiens
aagaactgtaacctgttttggagtccctgcaaaaattagtttcaattctaggcagttccatgttctaaagaacccagaagtgctgtcccgggtttggcttctcatgaaatatctgtgtttgcgactgagaatttggggatgtgtatacttggcaggcaacctttggatcatttcagatgacatacagagggttkgtggttctgaagaataattctggaaagtcaaagtcagtaatgttcagtggctttgtatatttttgctcattttgtaaactctggggaaaaaataagtctgcaaagttacagccacaggtttcatgacacatcgtgttcttaaaagtgagtaattagaataatatgaattgctggtgacttataccacaagaatagtcctttttctgggaaaaagacatgtcggtaatacactttctttaaaatcgttggcaaaactttttccattcctttgttctctaccatagacatcagatggtacatgaggaaaactctgttactgttatcagtgttca

SEQ ID NO: 211699 - DNA, 548 bp, Homo sapiens
tatataagtgggcgtgggggcatgtttgtaattatacaaaaagttttaaatattaaagtgaatgtcctatagctggtagttatcagtgaccatattattgtatttttctgtttgttttctcttttattttctaccttttctacaatgagtatgtaaaattcctaatcagaaatacacattcatcggtcatagactcttttacacacctatttgacaaagctggaaaatgagatgttatggtaggctgcccaaggagaatccaacccacaggccaaggttataattaacaatatagttaaaacctactacccactgttaccaccaattattatctcattgccaacaagaaaaaatatttgacccagctcaaaatgtcctcctaggtttgagagcttgacactgtagtctcaaaatttaatatgtattttctctgttgctatttagatacttattggtgaytggaatcctaccttgcatatttttttgaaaagcttaaataaaagaacataggaaacacacatagctagtggctgccttatgatagatga

SEQ ID NO: 211700 - DNA, 410 bp, Homo sapiens
tttgattgcacttctttgcttattagaaagttgaaaatttttgaaatatgctatcagccatttctactttttccaatggaattgtttgttaatatccttagtctctcttttattggagttgttaagggtttgttgtttttttttttttaattttactttaagttctgggatrcacgtgcagaatgtgcaggtttgtgacatagattgtatgtgccatggtggtttgctgcacttctcaacccgtcatctaggttttaagccccacatgcattaggtgtttgtcctaatgctctccctcccctttctccccaccctccaacaggccctggtatgtgttgttcccctccctgtgtccatgtgttctcattgttcaactcccactatgattgagaagatgcggtgtttggttt

SEQ ID NO: 211701 - DNA, 410 bp, Homo sapiens
tttgattgcacttctttgcttattagaaagttgaaaatttttgaaatatgctatcagccatttctactttttccaatggaattgtttgttaatatccttagtctctcttttattggagttgttaagggtttgttgtttttttttttttaattttactttaagttctgggatgcaygtgcagaatgtgcaggtttgtgacatagattgtatgtgccatggtggtttgctgcacttctcaacccgtcatctaggttttaagccccacatgcattaggtgtttgtcctaatgctctccctcccctttctccccaccctccaacaggccctggtatgtgttgttcccctccctgtgtccatgtgttctcattgttcaactcccactatgattgagaagatgcggtgtttggttt

SEQ ID NO: 211702 - DNA, 667 bp, Homo sapiens
actttcttaatcctggaatgattatgggggtttttaattggtaaatatttgtaacctgtacttatttttttcaaaaatatgttatgttctgttacctctatgttataaattataatggcatactaaattagaaatgagctctttgtgcttatgtcttaattttttgtatggaattttttatttggaaaatttcaaaaacaaaagttgagaatagcataatgaacccatgaaactgtgacccaggagcagcacacagccaatcttgtttcatctctatctgtccacttatttaattttatgcatttctagtataaatgttaaatggtagaaacaccactgaacagaaggcagaaggtctgagtctgagtcttcgctctaccctgtagaagccatttaatttagtcataactcagttacatcccctacaacatgggacacgtgtgaccaaatacctttaatctctctttgtcatcttgttttacacactaagttgtagtagtatattttcggtcagtgtagtccagtgaaygcactctgcatcttcagtgacctttctctttataaatagacacttgggtataatctatctgcaccacaaaggcaaaattataaccaacttaaaaataaaatagaacttgcaatggaatagttctactagccgcagtta

SEQ ID NO: 211703 - DNA, 597 bp, Homo sapiens
aaaacattctgaaataggctgatggcatttcaaaagcagtctaaaattatttttaaaaattgttttatcttggtggtaaaacaaaatattatgaaattcattttaatatgatgaagtttcaataaatctaacaattaaaattgattacacatgtagaatccatgcaaaaaaataagtcagtgaaatagaatcaccttcatgtcatgggttgtcattgtttgcttgttattaaccctgtaatgccacacacctactctgccttgtccattgctgtattcccagcacctagcagagtatatagtacacacacacaaatttatgaattaatgaatttcagatcagtgtatgctatgaaaaaaacataaataccacaaatttgaatcatgtctatctagttatttggtttagacatattgatatgatttttcacatatgttctaatacatttttgatgctgattatattaacctatctctatctttccatttagatatggataaagkcttacatgcatttagcaataaatttcataaggttaagttgattgaaaataatcggaatttgtaaagaagaacaaatatgtctgtggacaaaatc

SEQ ID NO: 211704 - DNA, 578 bp, Homo sapiens
tgttcctgtgtgtagcatgtgcttcccagcctacarctccatctcctccccacctcacaagcccatttatctggaacatcagtcattctttaaaacttgctgttagtttgaagccttttgggccagggcaatgttgagtactgcctctttgtgcttccatatcagagggttatctattttctcatctacattcagattctcctaagaatagagacacttgtatttcagtgtccaggcaagtaaacaataaaaaatattaatttatttttgacataattgtctggtctaatttagatgtaatcatttggcctgaatgattcagatgacccttgggtttctttggcccatgtaaacacatctatgaaactcaagtctaactgttagctaaccaccacctcaaaaagttaatttaccctttcctttttgatttatcgcctgttctggagacctacttatagactcatgtgtgctgaccatcattttgtcaaatgcatgatgaggggatttccttgtgtattagagaatcctggtatagatcgcagagcatctgcaatactccttgctgctgatggtggcaa

SEQ ID NO: 211705 - DNA, 578 bp, Homo sapiens
tgttcctgtgtgtagcatgtgcttcccagcctacaactccatctcctccccacctcacaagcccatttatctggaacatcagtcattctttaaaacttgctgttagtttgaagccttttgggccagggcaatgttgagtactgcctctttgtgcttccatatcagagggttatctattttctcatctacattcagattctcctaagaatagagacacttgtatttcagtgtccaggcaagtaaacaataaaaaatattaatttatttttgacataattgtctggtctaatttagatgtaatcatttggcctgaatgattcagatgacccttgggtttctttggcccatgtaaacacatctatgaaactcaagtctaactgttagctaaccaccacctcaaaaagttaatttaccctttcctttttgatttatckcctgttctggagacctacttatagactcatgtgtgctgaccatcattttgtcaaatgcatgatgaggggatttccttgtgtattagagaatcctggtatagatcgcagagcatctgcaatactccttgctgctgatggtggcaa

SEQ ID NO: 211706 - DNA, 607 bp, Homo sapiens
attttgtcaaatgcatgatgaggggatttccttgtgtattagagaatcctggtatagatcgcagagcatctgcaatactcsttgctgctgatggtggcaaaatccttagtagttagcaaaattctgcatgatgggggtgaaaaactgttataaggagcaaggtgtttattcagccataaagtatcctctctccttaagggcatcgaataattctttttaacaaaatttgaatttgagattaagattctgttgaagtcttcgtgttagagtctcagcagtattcttctgatgcaaatgcagagtttgggtgaatggcatagagcactacattgccaccttcttcaaactttttcaacttttccatcttataaaaatgttgacatgtagttcatgcaacagtgactgacttcatctgcttctgggtttatttttcctacaaaccatgaagagaaagctggctattctcctttttgtactaaatataaggtgtaaggaatgaatcaaagttcgtttttttgttgttgttaatggatatccaactgttccatcatcatttgttgaaaagacaattcttttttcactgaattatcttttcaccttgtcaaag

SEQ ID NO: 211707 - DNA, 587 bp, Homo sapiens
tttttgatttctaatgccgtgctccaaattttcacaaatattttctcagggaattcttacctgaattaggtattattgtcctcattcttgataaagaaatcaaaactcagagaggtggtgaatcctacccaattaagaggagaggctaataaggtcatcaaggccttctgactctaagcccaggcctctgtcttacgaagccacctattttcttcccctccgaaaaaggaagagaactaagaaaacaagttccagaaaagataaggaagaagctgcccttaagtccctgtttacctgatttcttgagtattaattagcatgtatcatagtttaaattcyttcccaggaataatttgtcattttgtcccatgagatttttttttcctttacacttgttgtattctgtaactcatttgaaagatggaaagggaggtccatggccctattaacctttgctttagttacatttccacagagaggctttacttataaagtaagaaagataaactcattagagaaaaactagaaagtataaacaaaaatttaaaaatataaaaaagccataattcccctgcttagagaaaatt

SEQ ID NO: 211708 - DNA, 444 bp, Homo sapiens
tgtaactcaatttcacaagtactttaaaagcacacacagaaagatacatggacataataaccttcattaaaaaawttttttttctcttttcttcctaagcaaaccaaaacttaataataatggcataggaattgttttgataaaccataaaatcttttgggccagttaccaaaaggcaaaagaaaagaccttctgcattgcacagtatattatgttgaaagaaaacatttcctttagacctttaagaaaacattgttagcatcaggccacaacaaatagaactcgaggaaaaaatcttacatgaaccgaaaatgagttgaaggggagtgttactattttgtaccctttaaaaggggagagaaaactaaaattagggagatgcaataaaagttgaactttgggtttaaaaaaattaattgttctaacaaattatttagcatataa

SEQ ID NO: 211709 - DNA, 442 bp, Homo sapiens
agtggtggtagaacaaatgcaaagctggtactcaaagtgactcaggagtatggcaatttttctgtacgtgcttttctaacagtgcctaggaatgatggtttttgcctaaaaacaggaaagttgggtcgtctttattggagctttcttgccatagtcaaatagaaaataatcagtgatgagtatcatctaacaaattgatggctgaccttaatggaacatactcaaaagctatcttttaagcatttsctactttaattagaacaattcattcagtatcactgttacaatattccatgactcttattttcaatatactcaaagcaacttgaaagttttataaattctttactacagtattacccgcttattctgacacataaaagctctgtagttacacactgttaacatgttaatggcacatcttactagcaacttgctgcac

SEQ ID NO: 211710 - DNA, 430 bp, Homo sapiens
tgcttcatttttagtccttcaaatataaatttgatttatagagacagtctaaatctgttagagccaggtgtgaagaatactaagaacaattttgtgggatgaataatgtttgataaaaaagaagagcaataattataatctaaaattcaccgagtgctttctyggggtcagatgctgtaacaagtgacttttgttctcaaaaaaatctatgatatggatataattatttttattcctactttattggtgagaaaaagatctgagaggtaatgaacttgtcccaggtcatataaagattctgaatcaaaatctgtgtctgaatctaggacttgagtttttaaccattatgtcattctattcctctgccatacgagattctaaaatgagggcttataagttagacaagcagcaagaccattttataaagctt

SEQ ID NO: 211711 - DNA, 580 bp, Homo sapiens
cattgcatcattttttcctcaaaatccgcctttacttttgatctcaggctgctctcagaaactatgatatcattgagtactacagtattcctctttttccttgaaaaggtcacttatttaatttgctccttggacaaaagcccacgtgccttataatcaaggcctgatcttgcttaatgccatgagagtgaaagggatgtagagagagtttattctttttctaatgatattcatatgagctgctgcattcccacaaaaacagggccaggaagggtatgcttagctttttcgagaaaggtgtaatagtcaggcaatatttttcctatctgtaactcagctccttgaaaatgagccactgtggcataccagctaggagatactttaggtctagaatgtggacattctgctataatgtttcctcacataaataggaaacagaaaatattctagagcaaaagcaaaattaacatgatctgagcttactccraaaatgtagaattcaaattacatatggaagatcttaaccagaagcaatgagatgggagagttccctgacccccctcacaggaagttctagagg

SEQ ID NO: 211712 - DNA, 604 bp, Homo sapiens
atatattcttctaagtttatttccaatatctccaacattatttaatatatttcccagtgattttgagacatatttatcacatattaatttctcatgtactttcagatttctttttagactctattctctaacactaatttatttgccccttccagtgccaaaatgtttgctttacagcttgtactgacccacatttacactctcatctgacctttagaattaatttgcatgattagtgccaatatctattccccagggtgaaaagtaattgccttcttgttataattgctatacaagtttggaaaaaaaaaaaaacagaaaaaaatagcgattgaagcatcaacatgtataaggatgtttaatctcagaggcagtatcaaggcagagactcatagatcatcccaaccccaatgtatttatacctatagcaaaatgcacattttttggcattgaagctgaatgaattygcattaaaaacataagtctgccattgaatatgaaacatacttgatttctctgaggctcaattttttcctctgtaaaatcagaaagataatacctttcaggattggtgtttaaatgtgctgtgtatctagcatagcag

SEQ ID NO: 211713 - DNA, 513 bp, Homo sapiens
ttcattaaacttttaagcctatatttcctcatatgtaaaatggagctaatggcaattatgggagtattatgaaggcacctgggataattcatataaagcaccatgcctttcccatagtaaatgcaaaataatactttaccatcagcatcactgaagtcgtcatcctgctaacacttaccaagggggctggactctgcaaccatggataacccattgtctcagctactcytgaaatccctgctgccccgatctaccttgggaaaccagcaatgttggacacttgtgattgtctgctgtgtaaaagaattctaggctttccagagtagacacattgggtgttttctccctcccgttggtaacagaattccagtctccctttggggaaaccatctttcctctactcttagtccacatgtttggctgatttcctgttgtctcccactggacagaatggaatcacatggccagattgtagctgcaagagagattgggaacgtaagcatctgtgttttt

SEQ ID NO: 211714 - DNA, 606 bp, Homo sapiens
tgcttgacataagaggtgtgaatttcgtacatgttatatcagtagttcctcccttttcattactgagtagtattccattgcatgaatactgtagattaagatttatttatctgttttcctcttgatggatatttggttgctttgggactaktataagcaaagctgccaatgacattcttgagcaactttttgtgtggacatatgtcttcatttatattgtatacatgcccaggagtagaatagctgtatcatagcgtagttgtatgtttaactatataagagactgacaaactgtttttcaaagtaactatactattttgtttatttttttggttaaatttatatgcctaatctttttctttttcttttttaaatactttaagttctgggatacatgtgcagaacgtgcaggttagttacgtaggtatacgtgtgccatggtggtttgctgcacccatcaacccgttatctaccttaggtatttctcttaatgctatccctcccctacccgcaccccccgctccaccgacaggccccagtgtatgatgttcccctccctgtgtccccaactgcaattcatgagagttctggttgctctacaggctt

SEQ ID NO: 211715 - DNA, 606 bp, Homo sapiens
tgcttgacataagaggtgtgaatttcgtacatgttatatcagtagttcctcccttttcattactgagtagtattccattgcatgaatactgtagattaagatttatttatctgttttcctcttgatggatatttggttgctttgggactagtataagcaaagctgccaatgacattcttgagcaactttttgtgtggacatatgtcttcatttatattgtatacatgcccaggagtagaatagctgtatcatagcgtagttgtatgtttaactatataagagactgacaaactgtttttcaaagtaactatactattttgtttatttttttggttaaatttatatgcctaatctttttctttttcttttttaaatactttaagttctgggatacatgtgcagaacgtgcaggttagttacrtaggtatacgtgtgccatggtggtttgctgcacccatcaacccgttatctaccttaggtatttctcttaatgctatccctcccctacccgcaccccccgctccaccgacaggccccagtgtatgatgttcccctccctgtgtccccaactgcaattcatgagagttctggttgctctacaggctt

SEQ ID NO: 211716 - DNA, 606 bp, Homo sapiens
tgcttgacataagaggtgtgaatttcgtacatgttatatcagtagttcctcccttttcattactgagtagtattccattgcatgaatactgtagattaagatttatttatctgttttcctcttgatggatatttggttgctttgggactagtataagcaaagctgccaatgacattcttgagcaactttttgtgtggacatatgtcttcatttatattgtatacatgcccaggagtagaatagctgtatcatagcgtagttgtatgtttaactatataagagactgacaaactgtttttcaaagtaactatactattttgtttatttttttggttaaatttatatgcctaatctttttctttttcttttttaaatactttaagttctgggatacatgtgcagaacgtgcaggttagttacgtaggtatacrtgtgccatggtggtttgctgcacccatcaacccgttatctaccttaggtatttctcttaatgctatccctcccctacccgcaccccccgctccaccgacaggccccagtgtatgatgttcccctccctgtgtccccaactgcaattcatgagagttctggttgctctacaggctt

SEQ ID NO: 211717 - DNA, 606 bp, Homo sapiens
tgcttgacataagaggtgtgaatttcgtacatgttatatcagtagttcctcccttttcattactgagtagtattccattgcatgaatactgtagattaagatttatttatctgttttcctcttgatggatatttggttgctttgggactagtataagcaaagctgccaatgacattcttgagcaactttttgtgtggacatatgtcttcatttatattgtatacatgcccaggagtagaatagctgtatcatagcgtagttgtatgtttaactatataagagactgacaaactgtttttcaaagtaactatactattttgtttatttttttggttaaatttatatgcctaatctttttctttttcttttttaaatactttaagttctgggatacatgtgcagaacgtgcaggttagttacgtaggtatacgtgtgccatggtggtttgctgcacccatcaacccgttatctaccttaggtatttctcttaatgctatccctcccctacccgcaccccccgctccaccgacaggccccagtgtrtgatgttcccctccctgtgtccccaactgcaattcatgagagttctggttgctctacaggctt

SEQ ID NO: 211718 - DNA, 549 bp, Homo sapiens
gaataatgtgtattctgctgttgttggattaagtagtttataggcatctattatatccagttgattgatggtcctattgagttcaactgtgtttttactgatttctctgcctgctggagctgtccatttttgatagaagggtgttaagatctccaactataatagtggatttatctattttctctgaagttctatcagtttttgcatcacatattttgatgctctgttgttggatgcatacatattaagggttgttatttcttcctggaacatattgacccctttatataatgcatctcttcatctctggtattttccttgctctgaaatcttctgtcttaaattcgtatggctactcccactttcttttgattagtgtyagcatagtatatctttctccaccccttttaatatatactcatctttatatttaaagtgggtttcttgtagacaacatatatagggtcttttttttatctattctgacaatttctgtattctaattggcatgtttagaccattgatgtttaattactgatatagttagag

SEQ ID NO: 211719 - DNA, 418 bp, Homo sapiens
tctaggttcaagttctgcttccactcctcctagaggggtcaccaaaggcaaattattgtctcctcagagcctcagttttcccatctgtgaaatgggagtggcaatcattatcatgatccccttcccatcacagggagtgcgctaaggctcagatgaacaatgaagtcctttataaactgctgagtgctgtgcagatgagcaggttatagtgccttcccccttttaacctgaaagaatggctttcctcctatcagcctgctgcagcctgccttgtctggaagcrtctgggttgtgacggggcatgggcgtgtaatatatgtggtacataaggaagataatacatcccttcatctcccttttaatacggctgtaaatatgtcttatgggggagataatagagatatggtgcacataatgg

SEQ ID NO: 211720 - DNA, 418 bp, Homo sapiens
tctaggttcaagttctgcttccactcctcctagaggggtcaccaaaggcaaattattgtctcctcagagcctcagttttcccatctgtgaaatgggagtggcaatcattatcatgatccccttcccatcacagggagtgcgctaaggctcagatgaacaatgaagtcctttataaactgctgagtgctgtgcagatgagcaggttatagtgccttcccccttttaacctgaaagaatggctttcctcctatcagcctgctgcagcctgccttgtctggaagcatctgggttgtgacggggcatgggcgtgtaatatatgtggtacataaggaagataatayatcccttcatctcccttttaatacggctgtaaatatgtcttatgggggagataatagagatatggtgcacataatgg

SEQ ID NO: 211721 - DNA, 408 bp, Homo sapiens
ctcctcctagaggggtcaccaaaggcaaattattgtctcctcagagcctcagttttcccatctgtgaaatgggagtggcaatcattatcatgatccccttcccatcacagggagtgcgctaaggctcagatgaacaatgaagtcctttataaactgctgagtgctgtgcagatgagcaggttatagtgccttcccccttttaacctgaaagaatggctttcctcctatcagcctgctgcagcctgccttgtctggaagcatctgggttgtgacggggcatgggcgtgtaatatatgtggtacataaggaagataatacatcccttcatctcccttttaatacggctgtaaatatgtcttatgggggagataatagagatatggygcacataatggggatgatggatca

SEQ ID NO: 211722 - DNA, 618 bp, Homo sapiens
attttgcctccctccctctgccctgtcctttgcagctgactccagctcttctgttagctctcaactcaaatgactcctcttcagtgaagccttccaggagcatctttgtttctttcctagaatttgtyatactctgtaattttcctatttatttatatgtgtgtttattgtctgtttcctacagtttaatgttagtcccataatgccaagaaccatgtctggtgtggtttgctgccatacctaacatgtaacatagtgtttgatccatagtacgggcttatcaaatggttggtgaatgattgaaaggccattcaatcattctttatagaacaattcagtgtcagatgcccggaagttgctacttagtttaactcacctgttcgtagaatcaccctaagtaaggaagcccccaaggcttgggccttcagaaagatggtgtctcatatgactgtatatctttccttaccttcaccttccatgatgtcttcttagtctgtagtgccctcaacctggggactcctcagctaagcctgccagctcagcatcctcacccagttctcttaagaagccacatcactccagaaaggaggaaaacatttctcttccagtgtttccacc

SEQ ID NO: 211723 - DNA, 618 bp, Homo sapiens
attttgcctccctccctctgccctgtcctttgcagctgactccagctcttctgttagctctcaactcaaatgactcctcttcagtgaagccttccaggagcatctttgtttctttcctagaatttgtcatactctgtaattttcctatttatttatatgtgtgtttattgtctgtttcctacagtttaatgttagtcccataatgccaagaaccatgtctggtgtggtttgctgccatacctaacatgtaacatagtgtttgatccatagtacgggcttatcaaatggttggtgaatgattgaaaggccattcaatcattctttatagaacaattcagtgtcagatgcccggaagttgctacttagtttaactcacctgttcgtagaatcaccctaagtaaggaagcccccaaggcttgggccttcaraaagatggtgtctcatatgactgtatatctttccttaccttcaccttccatgatgtcttcttagtctgtagtgccctcaacctggggactcctcagctaagcctgccagctcagcatcctcacccagttctcttaagaagccacatcactccagaaaggaggaaaacatttctcttccagtgtttccacc

SEQ ID NO: 211724 - DNA, 580 bp, Homo sapiens
ctttatatttagcaatcagtgaagactaatagtggctattggacattcaatcaaacttccccaaagcagatgcatcccacccaaaataaagattgacattctctccaatcactctaggaaatgtcccygatctctaggtgcagaaatagatgggaaaatacatacactgaaactttcttcccagacagcagcaggtgtttttggttgtgtagtagaggggcagagtgctggatttaatcaaccaccatccaacaccaatggatttgatgtctactggataccaggtattgcatctggggataacgaatcagaaaggattcacttctgcactgaattctggaccatttttatttgagacaagaaagacctcagcagcctctatatttttaactggctgtgcttggaacagagctttgttttatttcttgttctggaatgaagcatttctgtggcatttggaagcagaagtggtaggtccagagatattgggagagctgtcaatcaagagactgtatatcaactggcggtctttgagtgtaagcaacagtaacagattcagtttgacttaaggcataggtca

SEQ ID NO: 211725 - DNA, 536 bp, Homo sapiens
agcatggtggtaagtgcgtgtgggagtattagaaaggtgatcacagaaggcttcactgaggaggtgtcacttgagctgagatgggaatgatgggtaggaaccagctggagacggatctgcaggaagagggaggggaagtcagctagcaaagggctggtgggaatgggggaacagaggaggccagagtggctggagagtagggaggaaaagtggagggtgggacctgggtgcagggccatgtgtgctgtgctgtggtgtttgggctttatagtaagtgttatggcaaacttgggaacgctgacctaattagtatgtatgtgtatgcaagtttttctttaatagactttattttttagggcatttttagtggacagtaaaattgagcagaaggaacagatgtttcctctaattcccctgccccawcgcatgcatatgggagcttgagcttccgttatcgaaatcccccatcacagtggtacatgaattacaatggaggaagctgcttggatacatcatgatcacccaaagtccatagt

SEQ ID NO: 211726 - DNA, 571 bp, Homo sapiens
cctttcttccatcctttctctcctaggtcccagttcatggcctatatgcattaccaaatcacttggacaaacaaaaagaatggctggatatattatggggtgtccacattatggattattatgtagccattaggaagacaaagaaccacatcaggtgactaggagggatttccacaaggcatggctgagtgtcaaacagcaaaaggtagagacatgtataatatgaccccaggtttatgtgtcccccccccagatgcrtatataaacatatacacacacatacatattcatgtgcagggacacacacacacatattcatgtgcagggacacacacacacacacatactgcagtcatactattgagcaaccatgaccatttgatatcccaggataggctggtggggagggaggatctaaatgtccaagaaattagctacttaccaactgatatagacacattgcaatattttcatgaccagcaaaagccttactgtggtttctgcagaacactgaccctattccacatctggattggattttatgaacgcagagaaaaataggcaaagaaac

SEQ ID NO: 211727 - DNA, 571 bp, Homo sapiens
cctttcttccatcctttctctcctaggtcccagttcatggcctatatgcattaccaaatcacttggacaaacaaaaagaatggctggatatattatggggtgtccacattatggattattatgtagccattaggaagacaaagaaccacatcaggtgactaggagggatttccacaaggcatggctgagtgtcaaacagcaaaaggtagagacatgtataatatgaccccaggtttatgtgtcccccccccagatgcatatataaacatatacacacacatacatattcatgtgcagggacacacacacacatattcatgtgcagggacacacacacacacayatactgcagtcatactattgagcaaccatgaccatttgatatcccaggataggctggtggggagggaggatctaaatgtccaagaaattagctacttaccaactgatatagacacattgcaatattttcatgaccagcaaaagccttactgtggtttctgcagaacactgaccctattccacatctggattggattttatgaacgcagagaaaaataggcaaagaaac

SEQ ID NO: 211728 - DNA, 556 bp, Homo sapiens
ttcagtggtccagagagagagaaaaatgcatataccactgtgaaaatgcttccaatagctcttcataatatttttaaaaattaagataaaaataacttttcataaagttaaatttattaaaaatgtaaaggaatgacctttattctgagattatgcctttcctccttttttatgtgaggatgtmtctcctgtatgaactgatgataataaatggtagttcttgtatctttctaatgacctattcaacaatatcagaaatcagtaactttatgtgaattctggttttgtgtttaattttaatgacagtggtacagtaatagtcaatagatgctggtcattaaccagacactgtcccaaatgcttaatgtgtaataacaaatttgatgttcagaaccaccctatgaagtgggtgcttttattatttctactttcacatgagcaaaatgagaccagagatgtttaatgagttgcctgaggtcatataaatgtaggtttcagactctgtattacttgtgcaacttggcgaggctgttccagttagtccattcattccgtc

SEQ ID NO: 211729 - DNA, 408 bp, Homo sapiens
gggtcatatttttctactttttttcattcctggtcattatttgttgaatggcagacgatgtgaattttaccttattggatgctgggtatttttatattcctrtgaatatttttgaactctcttctgggatccagttaagttagggaaaacagtttggtccttttgagtcttgcttttaaactttctttggcaggaccgctgagtactccttctagaactctacccagtgtccaaggattattgtaaggttttccactctggctggtgggaacaggaactattctcagccatgtggaagctccctcattgttcttctaatcctctcaagtggtttttccttgatctctgatggtttccttttcctgacatgcatgggctgatcatgactcaactgaagacaagaagggt

SEQ ID NO: 211730 - DNA, 408 bp, Homo sapiens
gggtcatatttttctactttttttcattcctggtcattatttgttgaatggcagacgatgtgaattttaccttattggatgctgggtatttttatattcctgtgaatatttttgaactctcttctgggatccagttaagttagggaaaacagtttggtccttttgagtcttgcttttaaactttctttggcaggacygctgagtactccttctagaactctacccagtgtccaaggattattgtaaggttttccactctggctggtgggaacaggaactattctcagccatgtggaagctccctcattgttcttctaatcctctcaagtggtttttccttgatctctgatggtttccttttcctgacatgcatgggctgatcatgactcaactgaagacaagaagggt

SEQ ID NO: 211731 - DNA, 408 bp, Homo sapiens
gggtcatatttttctactttttttcattcctggtcattatttgttgaatggcagacgatgtgaattttaccttattggatgctgggtatttttatattcctgtgaatatttttgaactctcttctgggatccagttaagttagggaaaacagtttggtccttttgagtcttgcttttaaactttctttggcaggaccgctgagtactccttctagaactctacccagtgtccaaggattattgtaaggttttccactctggctggtgggaacaggaactattctcagccmtgtggaagctccctcattgttcttctaatcctctcaagtggtttttccttgatctctgatggtttccttttcctgacatgcatgggctgatcatgactcaactgaagacaagaagggt

SEQ ID NO: 211732 - DNA, 613 bp, Homo sapiens
ttaaaatctttgcaggatttttaatagctggatcaaaagcactagctgaaatcatgaagctaaaactgcatttttatcataatgaggtctgacctctttcatttataattagaactccaaccacctaacaggctttccctgaggattattttgtcacccaattccatttcacaggctcattcatctaaactcatgtkacgagcagcatcacgttccctcacaccaccctcaagcaccacacacaaacacacacacactccccagccctctgcagcatcccatcctctaggccttgggaattgctttaaaaattatgaaactactttaattctgattcacttttgcagcaaaactcttaggtcaaagcctgatctaggtatttgtgtgaccacagggaggaccccaaaaagtgaatggctctatagtttgcaaaagctttacagttgctcccctgtattcatgagtttcacatccatgaattcaaccaagcacgtattaaaaatatttttaaaaaatgaatatttttgtctgcactgaaaatatacagacattttttcttgtcaatattccctaaacaatagagtataactatgtagatagcatttacattgta

SEQ ID NO: 211733 - DNA, 613 bp, Homo sapiens
ttaaaatctttgcaggatttttaatagctggatcaaaagcactagctgaaatcatgaagctaaaactgcatttttatcataatgaggtctgacctctttcatttataattagaactccaaccacctaacaggctttccctgaggattattttgtcacccaattccatttcacaggctcattcatctaaactcatgtgacgagcagcatcacgttccctcacaccaccctcaagcaccacacacaaacacacacacactccccagccctctgcagcatcccatcctctaggccttgggaattgctttaaaaattatgaaactactttaattctgattcacttttgcagcaaaactcttaggtcaaagcctgatctaggtatttgtgtgaccacagggaggaccccaaaaagtgaatggctctatagtttgcaaaagctttacagttgctcccctgtattcatgagtttcacatccatgaattcaaccaagcacgtattaaaaatatttttaaaaaatgaatatttttgtctgcactgaaaatatacagacattttttyttgtcaatattccctaaacaatagagtataactatgtagatagcatttacattgta

SEQ ID NO: 211734 - DNA, 560 bp, Homo sapiens
gccactgttgagaagagatgtggttcctaacgtggtacactctaccactagtgaaacatatttctaatctgtttctttctgcatttttatcctgacgcctagaatttcacatattcagacagtagttatttcctagtagaggttcccatggtcctcagtcccgcctcagtcctagtttgggatgttcggcatatcctttatgaaatggcaaggtccaatgagcaactggcaagtattaagatcatattgaaagacatattggagctaaccctggatgaataactactattatcagcttaatggttgacttgcrgaactggaggcaattataatcattagaatcttacttatttaaaaatattgttgaagctggccaggagttaagttacatttacatttactctatggctcccaaagctaactttctctaaaaaccctttgatgagctaatccagtgattaatatctacaggcataccttgttttattgtacttcactttattttggcttttacaaatggtaagtttgaggcaactctgtgtcaagcaagtctatcagta

SEQ ID NO: 211735 - DNA, 560 bp, Homo sapiens
gccactgttgagaagagatgtggttcctaacgtggtacactctaccactagtgaaacatatttctaatctgtttctttctgcatttttatcctgacgcctagaatttcacatattcagacagtagttatttcctagtagaggttcccatggtcctcagtcccgcctcagtcctagtttgggatgttcggcatatcctttatgaaatggcaaggtccaatgagcaactggcaagtattaagatcatattgaaagacatattggagctaaccctggatgaataactactattatcagcttaatggttgacttgcagaactggaggcaattataatcattagaatcttacttatttaaaaatattgttgaagctggccaggagttaagttacatttacatttactctatggctcccaaagctaactttctctaaaaaccctttgatgagctaatccmgtgattaatatctacaggcataccttgttttattgtacttcactttattttggcttttacaaatggtaagtttgaggcaactctgtgtcaagcaagtctatcagta

SEQ ID NO: 211736 - DNA, 519 bp, Homo sapiens
attacattttaaggcaaaaatctgaactgtcacagtatccacctcaccgagttcagcagccccaccttgggtcagggctgcccctgcagcgcgggcccccgaaatgcccgcaccgcccacgccgcccgcaccgcgcgcacccagccgggccagggcgagggatccaggtctcccggtctctcagggcgcgcgcccggggtccgggggtggggggcgtggaggcggttcccttggagcgcccaatcagcagtaaggcccggcggtggcgccagtgacgtagaccgcgcttccctccgccccactgcgggccgwcgctcggcgccgtcagccacgcgcgctgcagcgcgaggggagagcgagaaggagggctttggggccgaccggctgttggagggcggcgggtcgcggggagcgggggagtgagcatgcgcagcggctccggggagcgcaggggaggaggggccggcgctgagaggcgcgcgcgtgcgcgtgcacgagtggcccgccggcgtctgcggg

SEQ ID NO: 211737 - DNA, 583 bp, Homo sapiens
actgaatcaggatgtgaatttttaacaggatccccaaatgataaagtttgtaaagtactgaggtagaatatgcctcaaagttaatcagatgaaggggtgagaaaactgtgatagtcattactagcttcccccttaacactgcttgtgagctgtttctgaagttaattcccctgcactcctggcttagcctttgtatgagcagggcattcatgccccagtggtcaaaaaggaagtccccagacagaaaatcaaaggtattagcaggaagcggccctcaacatgcacagctattacaagttcagctgttaaatagttaatctaaatatgatattaaaactgaggttaaattataataataaaaacagccacaactctaatgctgattcaakgttaaagatgcattaaatagattgaaataagcaggatttcatttaggcatttattctcaaaaaagcagttgatttacctagtagaaaaataaccattatcacaattaactttaggaaaattcaattaagattaatattattttttactcagtagttatttcaggccctctcaagcaggccatgagtgagatcat

SEQ ID NO: 211738 - DNA, 531 bp, Homo sapiens
gctggggccactgaactaactggctgtgagcctggggttcctggtgcctatcgtgttatactgtaagagcaaacyttcccaagaatgaagaagcagggctgagggatgaagagagagagagaaccgtgacatccgatcagggtcctcactgatacaccgatggtagcaggtggcacctcgtatcacagtggagaagccggtgctgtgggagttctaggatggaaggcacttgtggcagggagatcatggaagaggcagggactgcaccaggccttgaaggatgagaaagttaacacaggaagatgagtgatcaggcattccagatggaaggcgaaggcaaggcttgcaggggctgaccttgaaaagaaggatttcacttccacccctctcccggagccacctggaagtcccatccctgctctagactccctcccccaatcatatacaaaacacaaaccacagaggctggcgagatgcagagtgatgtctgagcccctttaattttgttcctttctgacaggaagatctgtg

SEQ ID NO: 211739 - DNA, 531 bp, Homo sapiens
gctggggccactgaactaactggctgtgagcctggggttcctggtgcctatcgtgttatactgtaagagcaaactttcccaagaatgaagaarcagggctgagggatgaagagagagagagaaccgtgacatccgatcagggtcctcactgatacaccgatggtagcaggtggcacctcgtatcacagtggagaagccggtgctgtgggagttctaggatggaaggcacttgtggcagggagatcatggaagaggcagggactgcaccaggccttgaaggatgagaaagttaacacaggaagatgagtgatcaggcattccagatggaaggcgaaggcaaggcttgcaggggctgaccttgaaaagaaggatttcacttccacccctctcccggagccacctggaagtcccatccctgctctagactccctcccccaatcatatacaaaacacaaaccacagaggctggcgagatgcagagtgatgtctgagcccctttaattttgttcctttctgacaggaagatctgtg

SEQ ID NO: 211740 - DNA, 531 bp, Homo sapiens
gctggggccactgaactaactggctgtgagcctggggttcctggtgcctatcgtgttatactgtaagagcaaactttcccaagaatgaagaagcagggctgagggatgaagagagagagagaaccgtgacatccgatcagggtcctcactgatacaccgatggtagcaggtggcacctcgtatcacagtggagaagccggtgctgtgggagttctaggatggaaggcacttgtggcagggagatcatggaagaggcagggactgcaycaggccttgaaggatgagaaagttaacacaggaagatgagtgatcaggcattccagatggaaggcgaaggcaaggcttgcaggggctgaccttgaaaagaaggatttcacttccacccctctcccggagccacctggaagtcccatccctgctctagactccctcccccaatcatatacaaaacacaaaccacagaggctggcgagatgcagagtgatgtctgagcccctttaattttgttcctttctgacaggaagatctgtg

SEQ ID NO: 211741 - DNA, 429 bp, Homo sapiens
gtctccaacttgggccttcactgggcacagagacaccgttctttactgcttaacaatccccccccccccgccaaccgtttgccctgtgccaggctgcagctttccttaagtcctgctgacaaggaaaatctggtgccagcacccacaaatatgtgtgacttctggagggaggcagcagcctgggttccccaggccagagtgggcggatttaaaggacgggtggcagagkggggggggtcactggataggggaggaccaaactgcccaagtatgtctgggatggagggtgataaacgtttatatgtttttgaccagatacctgaaaaatactttccatgtttctaggggggcacatacatagtcttcactgcatattcttttataatgttaagattttcatcatgggcctgtatttcctaagcaaatatt

SEQ ID NO: 211742 - DNA, 429 bp, Homo sapiens
gtctccaacttgggccttcactgggcacagagacaccgttctttactgcttaacaatccccccccccccgccaaccgtttgccctgtgccaggctgcagctttccttaagtcctgctgacaaggaaaatctggtgccagcacccacaaatatgtgtgacttctggagggaggcagcagcctgggttccccaggccagagtgggcggatttaaaggacgggtggcagagtkgggggggtcactggataggggaggaccaaactgcccaagtatgtctgggatggagggtgataaacgtttatatgtttttgaccagatacctgaaaaatactttccatgtttctaggggggcacatacatagtcttcactgcatattcttttataatgttaagattttcatcatgggcctgtatttcctaagcaaatatt

SEQ ID NO: 211743 - DNA, 551 bp, Homo sapiens
gttgaattacagtgcaccacagagacccaattcaaaagataagaagtttccatgttttctctcactgttgagttttaaaatattataatccctaagatttgataaagacagacatttaacaactgtccagcatctacctatgactttgaggagactctgtatctgggtttacagctcattcacttattcattcacctacagtacactaggtactrtgttatttgtagagactaaagcctaaacaagatagagtccctctctgctttcaggggtctggtaggaaaaaataaataggaattttaataaatcatgttaaaacctaagatagggcaaattcaggtgccacaggacacacaggagtcaaggaagcttcggccacctctaaactgagtactgaagttgtaggaagaattagctaaagtgaagatggaaagaagagtaatcaaacacagggaactctgagtccaagggccggaggtggggcaagcagcccaacagacagatgggagaggctggtactttcataaaccaagtacagctgaagaatagac

SEQ ID NO: 211744 - DNA, 551 bp, Homo sapiens
gttgaattacagtgcaccacagagacccaattcaaaagataagaagtttccatgttttctctcactgttgagttttaaaatattataatccctaagatttgataaagacagacatttaacaactgtccagcatctacctatgactttgaggagactctgtatctgggtttacagctcattcacttattcattcacctacagtacactaggtactatgttatttgtagagactaaagcctaaacaagatagagtccctctctgctttcaggggtctggtaggaaaaaataaataggaattttaataaatcatgttaaaacctaagatagggcaaattcaggtgccacaggacacacaggrgtcaaggaagcttcggccacctctaaactgagtactgaagttgtaggaagaattagctaaagtgaagatggaaagaagagtaatcaaacacagggaactctgagtccaagggccggaggtggggcaagcagcccaacagacagatgggagaggctggtactttcataaaccaagtacagctgaagaatagac

SEQ ID NO: 211745 - DNA, 524 bp, Homo sapiens
  misc_feature (1)...(524): n = A,T,C or G
ctgtacctggtaagtactcagtagctattcttataggaccaggtgggagacagaactaagtattyttctcaaaaccactacttaagtctataccaaactattctattagtaccaatgggagagttactttttaaatcttaggatacaaatcagatgaaaagagcaggcacattaaaaccaaagtagctcatgaaaattttcttataaacaggcaattccctaaactagtttttaagaacatcataagtcaggtgactgttcattggctttgggttgactgctagaaagctgagtgccaaataagtggccagactcgacaaaggccttgagacatatattctttatatcatctccattcttggctcagtttttccctctcttgctctaatcttcccttcctgttgttttttttgtttcacttaaatttcattttgactcatggaaatctgtgagccaccttggattattttctggaacaagatgggttgtaaacaaacacataaacttgggaaataantttcaaa

SEQ ID NO: 211746 - DNA, 616 bp, Homo sapiens
tattttttttagatgttttccttcaaagtaataaaccttttgtaaggccctggataactactggttcatggtgaccagaccgtaaaaagtgaaagagacactattggtgaraaatgggaaaggacttgccaaaggccaaagaaacagaaaacgaggtctggatagtggatccattaaagggtgactgaaagcaggcagcgtctgcaggaaagcaatgtggggatctcttttgcaggatggattctggggctcccctcaattggcagaaatctcttgcaactcaactctgaatgccaattataaggaacccataacgaaacacagcacatgttctctgcattactgtatgtctttcctctcccccagtaagatagaagccattttaaattaaggaaatattttaaacacacacatgctaatagcatgagcttccaaatctaccatccagaattaacagtataaacaaatgctactatttttgcaatatgtgcaccggatttttaaaaattaaaaatggcagagttaaggcccactctgccttcttccccaatcccatccatctcttcctctttcaagaagagaaccacccagtctgggtgattatcatttcctctca

SEQ ID NO: 211747 - DNA, 616 bp, Homo sapiens
tattttttttagatgttttccttcaaagtaataaaccttttgtaaggccctggataactactggttcatggtgaccagaccgtaaaaagtgaaagagacactattggtgaaaaatgggaaaggacttgccaaaggccaaagaaacagaaaaygaggtctggatagtggatccattaaagggtgactgaaagcaggcagcgtctgcaggaaagcaatgtggggatctcttttgcaggatggattctggggctcccctcaattggcagaaatctcttgcaactcaactctgaatgccaattataaggaacccataacgaaacacagcacatgttctctgcattactgtatgtctttcctctcccccagtaagatagaagccattttaaattaaggaaatattttaaacacacacatgctaatagcatgagcttccaaatctaccatccagaattaacagtataaacaaatgctactatttttgcaatatgtgcaccggatttttaaaaattaaaaatggcagagttaaggcccactctgccttcttccccaatcccatccatctcttcctctttcaagaagagaaccacccagtctgggtgattatcatttcctctca

SEQ ID NO: 211748 - DNA, 540 bp, Homo sapiens
acagcttgtttttcttgtttcctttgcactatagtttaagttgtgtgttagatcatcttgaaagcacttattctccttgtgtccagggatgctttaggataatttagcagtaaataactgaaattrtctttctaaaacaaaagtatactttttctctactgagtttcccagagtgtacaaaagaacattgaacactgaaaaagaaaataaatcctgaagaaaaatagacacaggagctgaatcactgttttgatttcagaacaggaacatctaagtctgtaaaatattgagtactttgaactttgatctcactaaatttaagctgttaaattgttatgcttttctgggaattcctaagaacttccctgtattacaacggctgactctgaaattttgttcatttgaaatttttgatttttttttctccatgttagaactggaaaagatatttgttcaattcaatattttaaacaaatgaagatatatttggaaataaaataaaacctcttctgcagtggatcctgttgatactctgttaaa

SEQ ID NO: 211749 - DNA, 556 bp, Homo sapiens
tagctgctttggatatgcctttgcctcatcagacccaagggcaacccaggaaactaaacctctgcctgacctctgctttcatgtgactgccctccctgtgagtgtgagtgcaacctacatggaagcctccttccagatgaataagtgggtggcgaggcaagagtcactctcctctgtgacttcataaactatcaaatgtgcttttccaaaccagacagccatgtttgtttccttcatgagcttctcttccctggtcttctcttctttgtaccaccctagtgggcagataaaattatttgttttcttttgacttccctcccatcttatgctccttctacttgatttcaaccatctttaatggggaacagaaatatctccctgaatattatttaaattgtatattacatgaatggcaacccccggagaaaaccattgcatacaatgtagatgatgcctgctgtatctgtgcaacttggaagccttgatctcctcaayacaatgaggagatttcacaatgagtccagctgcgtcagttaaaagaaaagaaataataatt

SEQ ID NO: 211750 - DNA, 598 bp, Homo sapiens
ccatgttatggattgaatgtttgtgtctctccccaccattcatatggtggagccctaaaccctaatgtcatgcgacttagaggttaggcctgtagggaataattaggtttagatgaggtcatgagagaggtgtcttcataatgagacttgtgtccttattagaagaggaggagcttgctttttctctccatgagcacaccctagaaaggtcatgtgaggacacagccacagccagaggtggccatctgcaagccaggaagcagacactcaccagacactcaagctgctgccaccttcatcttggacttcaaagcttccagaactgtgagaaataaatgtctgttgtttaagmtgcccatagtattttgttatagcagcctgagctgactaaaataacctactatctctttgatctagattttttaatccaggaaaaaaataccttgcctgtctgcatgcaaatgtaaatgggatgcatagtagagatggcattagaaatcagtgaataaaacatagacgggcaaataaataacctggaggccttttgctatgcgtctagaacatataaataattctgtacatttcgagtgcacacaaa

SEQ ID NO: 211751 - DNA, 603 bp, Homo sapiens
accctgtctctaccaaaaatttagaaattagccaggaatcgtagaacacatctgtagtcctggctactcaaaaggctgaaaagggaaaggttgcttgagcccaggagtttgaggctgcagtgagctataatcacaycattgcactctgcctgggtgacagagagagagtctatctctaaaaaaaaaaaaaaagtgctgttcaaccaaaaatcctataaactaaggtagtgaagttactgactgggggtagatatttgcaacatatataaacaacctaggatcagtatttcaaatttataaagaattcctacaaattaacacagaaaatgacaataactaatagaaacgtagacaaaagattcaagcaggcaatttccagaagagaccagattggactgaccaatcaagaaattaataagatgctcgacttttctggaaattgttgaaatttatgtaaaaacattgagataatgtttcacacctatcagactgctaaaacattttaaattcttaaaataacacgtgttggcaaatatacttagaaagggaaattcttagaccctattgtctgaatagattactaaaaccaatttgcagagcaat

SEQ ID NO: 211752 - DNA, 603 bp, Homo sapiens
accctgtctctaccaaaaatttagaaattagccaggaatcgtagaacacatctgtagtcctggctactcaaaaggctgaaaagggaaaggttgcttgagcccaggagtttgaggctgcagtgagctataatcacatcattgcactctgcctgggtgacagagagagagtctatctctaaaaaaaaaaaaaaagtgctrttcaaccaaaaatcctataaactaaggtagtgaagttactgactgggggtagatatttgcaacatatataaacaacctaggatcagtatttcaaatttataaagaattcctacaaattaacacagaaaatgacaataactaatagaaacgtagacaaaagattcaagcaggcaatttccagaagagaccagattggactgaccaatcaagaaattaataagatgctcgacttttctggaaattgttgaaatttatgtaaaaacattgagataatgtttcacacctatcagactgctaaaacattttaaattcttaaaataacacgtgttggcaaatatacttagaaagggaaattcttagaccctattgtctgaatagattactaaaaccaatttgcagagcaat

SEQ ID NO: 211753 - DNA, 420 bp, Homo sapiens
tgcattttggtcaaaaccatttaacaagtctctaggaagttccaaaccttctctcatcttccgtcttcctctgaaccctccaaactgttccaacctctgcctgttacccagttccaaagttgctttcacattttcagatatttttgtagcaatgccccacttctctagtactaattttctgtattatttcattctcactttgctataaagaactaccwaaaactgggtaacttataaataaaaggggtttaattagctcatggttctgcaggctgtacaggaagcatggctgggggaagcttcaggaaacttacaatcatgctgaaaggtgaagaggaagctggcacattttcacaaggcggagcaggaggaagagagagagagaatgaagggggaaatgcttctcacttttaaaccacc

SEQ ID NO: 211754 - DNA, 398 bp, Homo sapiens
catcaaccatgtaaaatagacagtagtatattctcattttcagatgagtgaacaggttttcaagggtggtaattgtttcaaggttatataaacctgcaagttgaaaagagtagttggaarttagtgtttgccccagctccaaactcttcccctttcaaaaaaacaaatggtaatgccatccttagaccccatattgcttaaatcttttgtgtcaactagactaggctgtggtacctagttgcttagtcaaacactagtttagattttcttgtgaaggtattctgtgtatgtggttaacatatataattagttgtctttaattaaaacaggttacgtagtctgacctgtttgaagaccttaagaacaaaaactgagatgtcctagagaagaaggaattc

SEQ ID NO: 211755 - DNA, 462 bp, Homo sapiens
ctatggctttgcaggatacagcctccctcctggctgctttcacaggctgccattgagtatacgcagcttttccagaagcacagtacaagctatcagtgcatctaccattctggggtctggagaatggttgccctcttctcacagctccactaggctgtgccccagtagggactctgtatagtggttctgaccccacatttcccttccggacttccctagcagaggttttccataagagccctkcccctgcatcaaacttctgcctggacatccaggtgtttccatacatcttctgaaatctaggaggaggttcgcaaacctcaattcttgacttctgtgtaccctcaggctcagtactatatggaagctgtaagaggttggggcttccaccctctgaagcaacagcccaagctgtaccttggccccttttagtcacagctggagtggctggtacacagggca

SEQ ID NO: 211756 - DNA, 526 bp, Homo sapiens
tcagaattaagttacttcatttataagctcatttagtgttttccaaacttcactatttgcatattactttacaatttttgacataaacattgctacctatactctaatttacttaatacagtagtttcctcttatcctgggatatgttccaagaccctcagtggatgcctgaaactcaggtagtactgaattctatagatactatgctttttctataaatacatacttataatacattttaatttataaaatargcacagtaagagattaacaataactaataataataaaataattataacaatataataaaggttacgtaactgtggtctctttctctctgtgtgtctcaaaatatcttattttactgtacttaaggttcctgtgatccaagagatgggtagaatctatagtgtggataccatggacaaagggagggttcacatcctgggtgggctaacactggccagcatgagatttcatcacactactcagaatagcacacaatttcaacttatgaagtgtt

SEQ ID NO: 211757 - DNA, 407 bp, Homo sapiens
gctgagccaaaatctcatgttgaaatgtaatccccaatgttggtggtggagccttgtgggcgctgatcagatcatgggggtggatttctcataaatggtttagcactctccccttgatgatatccttgccatagtgagtgacttctcacaagatctggctgttwaaaagtgtgtgccacctcaccctgtacctttctcctgcttttgtcatgtatgcctgctccctctttgccttccaccacaattggaagcttcctgaggtctcctcagaagcagatgctgctatgctttctgtacagcctgcagaaccatgagcccattaagcctcttataaaatatccagtctcaagtatttctttatagcaatgcaagaacagcctaatacagaaaattggtgtcaaggagtg

SEQ ID NO: 211758 - DNA, 407 bp, Homo sapiens
gctgagccaaaatctcatgttgaaatgtaatccccaatgttggtggtggagccttgtgggcgctgatcagatcatgggggtggatttctcataaatggtttagcactctccccttgatgatatccttgccatagtgagtgacttctcacaagatctggctgtttaaaagtgtgtgccacctcaccctgtacctttctcctgcttttgtcatgtatgcctkctccctctttgccttccaccacaattggaagcttcctgaggtctcctcagaagcagatgctgctatgctttctgtacagcctgcagaaccatgagcccattaagcctcttataaaatatccagtctcaagtatttctttatagcaatgcaagaacagcctaatacagaaaattggtgtcaaggagtg

SEQ ID NO: 211759 - DNA, 407 bp, Homo sapiens
gctgagccaaaatctcatgttgaaatgtaatccccaatgttggtggtggagccttgtgggcgctgatcagatcatgggggtggatttctcataaatggtttagcactctccccttgatgatatccttgccatagtgagtgacttctcacaagatctggctgtttaaaagtgtgtgccacctcaccctgtacctttctcctgcttttgtcatgtatgcctgctccctctttgccttccaccacaattggaagcttcctgaggtctcctcagaagcagatgctgctatgctttctgtacagcctgcagaaccatgagcccattaagcctcttataaaatatscagtctcaagtatttctttatagcaatgcaagaacagcctaatacagaaaattggtgtcaaggagtg

SEQ ID NO: 211760 - DNA, 523 bp, Homo sapiens
tttgagcctcagagtgataatttagggtatctggtgaaagacatttataagcagtaaagcattcaagaagtgggctggctgcctctagaaacctatgctcagatataggagcaaataaatgacttaaagttggaatttatgtttaaaagkaaagcagagcataaatgtttagaaaatttgcaggctggctatgtggtagaaattaaaagcccatttttcaggagaagttaggcagggtgctgagaagccatttgctagagaaatttgtgtaactaaaaagaaggcaagggctgatagccaagacagtaggaaaaaggcctcaaaggcatttcagagaccttcaaggaagcccttaccacacaggccaggaggcctaggaggaaagaatgatttcatgggccatacccaggataccattgccctgtgcatccttggaacactgctctccatccggcctctctggctccagcctagcttaaagggacctgggtacaacctgggctacagcgccagagggtgcaag

SEQ ID NO: 211761 - DNA, 546 bp, Homo sapiens
cttttttgccaactattttgtgttaatggaatcactctatctctgcaatgaaatgcaaatcattattcttcaaataacagccgtagtgatcctgaagctctttgtgtaggcttccttcatttatctttccctataatttcagtaatgagcataaaaggatctagacaaaaatagtatgttgagaratgccaacataaaacccagcagtgactcatttcacaagctatcttttattttccctattctcattccctgggtcatcgatgaacaaagttgccagccttgcttcatatgttacctcttgcatggattcagcaataataattggaactgaaaataaatgtatgtccaggaatgaatgatcagccctttattcgccagatgattcaagatctccagtttctccattgtcatttttatactgcatatgctctttgttctctgcaatgctttattgacctctttcaggttgtaaagaagcagatgaaagaggcagccaatgaggagctgggaggcatgtgctgtaaggggctccttcactctgga

SEQ ID NO: 211762 - DNA, 458 bp, Homo sapiens
tgaacttgaacaaggaagttgccacaacatctgtgggccagagaactatgccagaatgttatttccagattgcttcctgtatttacaaaggtataaatctttgatttctatatattcttctcacacccttctctgcgaacacacctatcttccccattttttaactggctaagttcyatctgcctatcatgaaaagcaaagccacctataacaaattccttagatttaagtaactcttttttaaattccggtgtattttttgtgccttctattggttagattttgttaaaataatgctgcataacaaacctttccaataataatttgatacaataatttattactgtttatgtacctccaggttgccagggcgtccactggtctaaatagcactcatcttcctactgcaggtctataggtccactgatacggctttgctactctaccccgacaccctg

SEQ ID NO: 211763 - DNA, 611 bp, Homo sapiens
acgaattcacaggaaaattccaccagacatttaaagaattggtaccaatcctattgacactattccacaagacagagaaagaggaaaccctccctaaatcattttatgaagccagtatcaccttaataccaaaaccaggaaaggacataaccaaaaaagaaaactacagaccaatatccctaatgaacatagatgctggaatccttaaaacactagctaaccgaatccaacatatcaaaaagataatccaccataatcaagtgggtttcatacgagggatgcaggtatggtttaacatactcaagtcaataaatatgatacaycacataaacagaattaaaaacaaaaatcacatgatcatctcaatagatgcagaaaaagcattcaacaaaatccagcatccctttatgattaaaactctgagcaaaactggcatacaagggacatacctcaatataataaaagccaactatgacagacccacagccaacataatactgaatgggaaaaagttgaaagcattccctctgagaactcgaacaagacaaggatgcccactgtcaccactcctcttcaacatagtactggaagtcctagccagagcaatcaag

SEQ ID NO: 211764 - DNA, 495 bp, Homo sapiens
atgcttcctgtctcttagctagatggaaagtgggagattatgcccactttcctgctttcttaagtctcatcctgaagtttgagcataaaattttcccctgtgttaatttaatgaaattgcaaagatcagagattaatccagcatgatatgtaaagggctcagcaaacacgaaagcaataaagtcaagacagtgggtgacagcacagattttcgttaagtattaagttaatttagggcttttatatgaaaccccccaaaggtcctgataataaattctcattctcttttccrtagccactcctcttttcccatccaaaacttttctggacttcaaagtctccctgcacccccagaggagctctctggcccttagcagggttgtgagggtagtaactggctgatttagggccctatccacgtccccttcacaatgagggccgccttttaacttgggtcactgtctgcatgaaggtgcattttaaaaacactccaagc

SEQ ID NO: 211765 - DNA, 379 bp, Homo sapiens
ttggctatattctaccctaggccaagcaaatcagaatctccagggaggggcacaggaatctgtgcttttaacaagtaccttgttaaacattaggcaagttggaaaacctaatctaaatccatcacaaaacaatgattgggcatctccatgtttttaaaaaatttgtatggggcaagcagaaatatgaagcaggatatatgccctcagggactttatattcaatttggagattatatatgtgtgcatatatgtatacatatgtataaatgtgtttatatatgtatgtgrgtgtatacacacacacgaaaacataagtcaccatgaaactttgtcattaaaagtaagagatcagtaaaaacaaaatgcatagaaaaaatat

SEQ ID NO: 211766 - DNA, 654 bp, Homo sapiens
gtgtagtcacatacagtcattgaaagagccttaggcatacttcctgtgtaaattgagtgtgcatattaagtgggaagtgaatggtacatgtgcgaaatcttggttattcagtttaaggcccagagagattattaacatagctttgcaggctctgtgcagcatagtcagagatgaccatttccctgagatggattcaggtagagggagccctgccaggaggaggcctgaacactgcaggggcagcagcctgcttcctttctgcaacagcttgctgcctggcattgttggggttgggagtgcaggggtgcaggggagacaacaggcacttctgtaaaagtggttccagtgtgtggtaggagacttttttctccatctcctcctctctggtccatctctttcagatgagccctsagcctgtgggcttagaatttatgaagctaatttgcaagggagcttgatgtggtactaacaaccctgaactgtgggttctgatgcccttagctaattatctgaccttgggttagtcctcccccttctttgcctgattgttctctatcctaaacgaagaggtatgagtgaatgatcctaacaatcgcatgcagctgaaacagctttgggttcaggactccctttggacagttaaagactcagggc

SEQ ID NO: 211767 - DNA, 537 bp, Homo sapiens
ctgacttacatttctcccagtggacaccggccagatgcagaaaccaaagagcttggtgccggtactgcctcttccttcttttatagtttgtgcatttggatgtgtttagcatgatctgcgagtgcagggtaaggaatgtgctgtgcttaaaagacccttttgttgacattaagcaatcataaatatatgcagcacttataygccttgcctttagtgtggagtgctttaattggatggtcttctcatgtgatatcataaagaacatatgcatatttgtggcaattccattggatcttgaagaagcgaggcacatacagagcagcacattcctaacatctatggattgcctcatatatgtcaccacatcttcccaccaggcttgctttccctacactccaagatggtaacttcccaatctgtccaaattctatttggaatcctcctggactgtgtaaatgtcaaggccagtttcctttccatgtgaacagctttgaaaggagaactgcatgccttactccctcataaatacaagccaga

SEQ ID NO: 211768 - DNA, 397 bp, Homo sapiens
ggtcgggagttcgagacaagcctgaccaacatggagaaaccccctactaaaaatacaaaaaattagccgggtgtggtggcacatgcctgtaatcccagctactgggaaagctgaggcagcagaattgcttgaacctgggaggcggaggttgcagtgaactgagatcacgtctcaaaaaaaaaagaatgggcattctctaggacaaaatgaagtagaaagcaggaagatttcaggaataataagtatcmaaactcctttttccttcctgctcccaaccccttactgtgcctcccattggccaaaaccaaccagtagccagaggtcaaggaagggggtgtccagaggggtagaggggcagacaagctggcagcaggtgtgaggcctcaggcagtgagta

SEQ ID NO: 211769 - DNA, 536 bp, Homo sapiens
ctggggtggtgggtacaatcagcagtaactgggctcacgttccagtgccctggatacatgaagattagaaaaattaatttccatctccaacttagaggagacaggactctcaaatgtggggaattaccaaactataggagaggctttcaaaagacctggggccatcataartatggtacgtatctatcaccactacttttaccattgattttcctattttgcttgggaaaatgtagagatagcttcatgtatgaaaaaaagtgaaaacgggtaggaaatgataccaagtaactctctgcctaaagcagatgacccagggctccatgactgaactggcaaaatacctgcagcccaagaatgcagaaatacttcatggtgcttatagttcttaggcactcttacttttggaatctttacagtataacacatattaaaattcacttacattacccattaaatatacattttgatcatatttttaaaaaattatttataattttgtttttaaaactatttttgcttcaagcagtttctta

SEQ ID NO: 211770 - DNA, 550 bp, Homo sapiens
tgaattcctggcctccagtgatcctcccatcttatcctcctgagtagctaggactataggcacccaccaccatgcccagctaatgtttaattttttttatatatagagatgggggtctttgtctgttgtccaggctattctcgagctcctggtctcaagcaatcctcctgcctcagcctcccaaaatgctgggactacaggtktgaaccatgatgcttagctttgggggccattaattagcctaccactctgcttcccctgtggtttatggctttcaagcactgggctcctggtccttctttctgatatctggctccttccatgagtgggggtgagtagggaggaggagaggagaaattcctgtgtgtggcttgctgagaagacttccaaagaggcaccagggagcactctctgtcagggttttataaaactgttgtaataatgcttgtttgaaaaggggtagaagaccctctggtgaagatgaaagggcaggctgttttggatggcagatagctgctttgagcctccaaaatctcataaaatggaggtg

SEQ ID NO: 211771 - DNA, 454 bp, Homo sapiens
ccattgactggtgtttttcactaaatatttctcactctctgccttcttgccacaatgtaggattgttgtgttgtggctctctttggagcaggaaagatagctctctttgttttattttattttttaaaatttattgttgttattatttgagatggagtctcattccgttgcccaggctggagagcaatggctcaatctcggctcactgcaatayccacctcccaggttcaagcagttcccctgcctcagcctcctgagtagctgggattagaggcacccaccaccacgtccagctaattttttatattttggtagagatggggtttcaccatgttggccaggctggtctcagactcttgacctcaggtgatctgcccacctcgacctccctaagtgctgggattacaggcatgagccaccacacctggtgatagttctttctcaaatgacaagc

SEQ ID NO: 211772 - DNA, 537 bp, Homo sapiens
gaattctcttgctaaagttatttgtgaagacagtccataaatcttaactaagtacccagttaattaaaatatgtacagcttgtccaggcacagtggctcacgcctctaatttcagtgctttaggaggccgtttgagacyagcctggggaatataatgagacctcatctctacagaaaataaaagaattaaccgggtatgggtgcaagcacctgtaatcccagatacttgggaggctgacggggaggaggatagcttgggcccgggagttcgaagctgcagtgagccgtgctcatgccactgcactccagcctgggcaacagagcatgactaaagaataaacaaaaaaacaaaatgtacagctatcacaagaattaatattaattttcagaatcaccctcagtgtacctgaccccccaagcatctctggtcctgtgtcaggaaggatgaagttacagaatgatacagcagtattactggggcatcggttttacctacaatttaaatacgcacttgctagtattcattctaaagtaata

SEQ ID NO: 211773 - DNA, 537 bp, Homo sapiens
gaattctcttgctaaagttatttgtgaagacagtccataaatcttaactaagtacccagttaattaaaatatgtacagcttgtccaggcacagtggctcacgcctctaatttcagtgctttaggaggccgtttgagactagcctggggaatataatgagacctcatctctacagaaaataaaagaattaaccgggtatgggtgcaagcacctgtaatcccagatacttgggaggctgacggggaggaggatagcttgggcccgggagttcgaagctgcagtgagccgtgctcatgccactgcactccagcctgggcaacagagcatgactaaagaataaacaaaaaaacaaaatgtacagctatcacaagaattaatattaattttcagaatcaccctcagtgtacctgaccccccaagcrtctctggtcctgtgtcaggaaggatgaagttacagaatgatacagcagtattactggggcatcggttttacctacaatttaaatacgcacttgctagtattcattctaaagtaata

SEQ ID NO: 211774 - DNA, 537 bp, Homo sapiens
gaattctcttgctaaagttatttgtgaagacagtccataaatcttaactaagtacccagttaattaaaatatgtacagcttgtccaggcacagtggctcacgcctctaatttcagtgctttaggaggccgtttgagactagcctggggaatataatgagacctcatctctacagaaaataaaagaattaaccgggtatgggtgcaagcacctgtaatcccagatacttgggaggctgacggggaggaggatagcttgggcccgggagttcgaagctgcagtgagccgtgctcatgccactgcactccagcctgggcaacagagcatgactaaagaataaacaaaaaaacaaaatgtacagctatcacaagaattaatattaattttcagaatcaccctcagtgtacctgaccccccaagcatctstggtcctgtgtcaggaaggatgaagttacagaatgatacagcagtattactggggcatcggttttacctacaatttaaatacgcacttgctagtattcattctaaagtaata

SEQ ID NO: 211775 - DNA, 340 bp, Homo sapiens
aagcttatttcatggcaatgacaacttggcttttagacaacgtggctgcactgcactccatcayggctcactgcagcctcaacctctcaggctcaagcaatcctcctgactcagcctcccaaatagctgggattgcaaatgtgagccaccgtgaccttaattctgtctctttcttccaagacagaatcaaatacttacacttctccaatgatgacttctcagtgatgaactccatacactcagtttcatgtttgttatagtctccacgtctcttttccattttattttataattgcattatactgatctagctgtctgttatagggtaaccttgcatcac

SEQ ID NO: 211776 - DNA, 340 bp, Homo sapiens
aagcttatttcatggcaatgacaacttggcttttagacaacgtggctgcactgcactccatcacggctcactgcagcctcaacctctcaggctcaagcaatcctcctgactcagcctcccaaatagctgggattgcaaatgtgagccaccgtgaccttaattctgtctctttcttccaagacagaatcaaatacttacacttctccaatgatgacttctcartgatgaactccatacactcagtttcatgtttgttatagtctccacgtctcttttccattttattttataattgcattatactgatctagctgtctgttatagggtaaccttgcatcac

SEQ ID NO: 211777 - DNA, 435 bp, Homo sapiens
cctcccaactagccgggattacaggtgtgcaccaccacatccagctaatttctgtgttttaagtagagaaagtgtttcaccattttggccaggctggtatcgaacttctgacctcaagggatccrtccacgttggcctcccaaagtactgggattacaggcaagagccactgtgtctagccttctctgttgtttatctttctctctgttgttatctttccctctttacttcccctgcatgtcccttcaatgcctttgttttactagacgctctgagcttcttcttagaccttccacattagttagggttttctaaggaaacagagcctgtaaatatgtacatctggaatttgcttacgtggttatgggggctgagaaatcctaggatctccttgttgtcctaggcaacaagataaagacccaggagagctggtgg

SEQ ID NO: 211778 - DNA, 487 bp, Homo sapiens
gcttaaacttccttatgacatggtgggcacccacacatggcctcttcacatggcttgggcttccttatagcatggtggcctccttgtggtcagattccttatatgaagccttagagttctaagagctagtcagaagcactaaaagacacagaaggtgactttcccgtctactagtatccaaagcaattgmaaaccctcctagattcaaaatgtgaggcatgtcccccacctctcaataggaggagtgccctctaatttgtactttagagcctctactcccttaactcatccttttggtgggaggctgcccagctggagaagagcagcagattgagagacatcagcccaaagctccttgcaacacacaccctgctcccctcccagagtctctctggaaacccccagtgacagctctcacaacctatgctgatgaattccaagggaggcagaaatgattgtatttcaatcccaccatgagaaatttgga

SEQ ID NO: 211779 - DNA, 541 bp, Homo sapiens
caaaatctcatcttacattttaatctgacccttagatcaaaagaactgatgtaatcagtgcattaataagaacgcatgctagaaatacctgaaatagaataacaatgtatatgatagaatggaaatgtgtctatatttgttttgctctgtatacctctacattgtttgaatctttcaatgaaaatttcacgtagcattcatgtaattaaaaagaaatgtttctacatctctacagacactatgcagaatgtacagaacgtagtgctctcttcattctgattgtgcatcagaatcacctttgttaaaatttaaaattctagaggcctggatatcacctcagtcytaaagaataagaatctacaaaaatagacagacctgcatggaagtttttgtttggtttgtactgctccacaagcaattctgacagacatggagattgaggaccaccagggacatggtttcatgttctcattttggattggactgtttgccgtggttttgcatcattacgttgctgagctggggcccacacatactcaga

SEQ ID NO: 211780 - DNA, 604 bp, Homo sapiens
tctgcatgtttactgctaattatgaagcttctgttacacagctagcactgtcctgtgtgtgttcatttatgtaccaaaacaacctcataatgtatgaagccttctattgtttacataaacaaattggctcaataaacttgattatttccatcacaaaaataacaaacatcaaacaaaaagtggcttaaatggagttcttcaattaaaagaaaaacaatggaatgtgacttaaaacactcactgtagaaacactaacatttaaagttattttctgagcaygattaactttcataaaagtcattcttataatcccagagaacatcatataaagaatacttcatgaaccttggaatgagaaaattttatactaggtccagcaaaagaaacatgcaagaaaaaaaatcagaggatttccatggagattctgagccaaggggccataagattttagataaatgagttcgacacaaagcagagaaaatagatttgctttcagaatcttagaggttttgatctgcttagtaaattatcaacactttttaaaattatctgtactgatctaatgtttgtcttttcttctcaaaataggtacacactcacacac

SEQ ID NO: 211781 - DNA, 604 bp, Homo sapiens
gaattcccttttctcttgggaatgtatataaactgctggtgggaatataaattagttcagccattatgaaaagtagtttgataatttctttctttctttttttttttttttragacagagtttcactcttgtcacccaggctggagtgtagtggtacgatctcagctcactgcaacctctgtcctcctcttgggttcaagcgattctcctgcctcagcttctcgagtagctgggattacagatatccaccaccacgcccagctaatttttgtatttttagtagagacggagtttcaccatgttgactaggctggtttcaaactcctgatctcaggtgacccgcccttttcagcctcccaaagtgctgggattacaggcatgagccaccgtgcccagcctgacaatttcttaatgaagttaaaacagaactaccatttgacccagcaatcccattactgggtttatacccaaaggaatatatattgttctaccataaagacataggcatgtgtatcacagcactattcacaataacaaagacatagaatcaacctaaatgcccatcagtggtagactggatagagaaaacatacatatacaccat

SEQ ID NO: 211782 - DNA, 486 bp, Homo sapiens
tggttctgggactattggtgtgagggtagagacccatttacacaaaagggcatcctttttttttttttttttttttttttaaagagcagaggttctcaaagtgcagccccagaaccagaaatatcagcatcagcatcacttggaaacctgttaaaatgtaaaacctattttttttttttttacagagtcttgctctgtcacccaggtttgagagcagtggtgcagtcttggctcactgcaacctcccctcccaggttcaagtaattctcatgcctcagcttcccgagtagctgggattacaggcacgtgctaccacacccagctttttattttattttattttaagtagagatggggtttcactgtgttggccaggctggwcttgaactcctgaccttaagtaatccacccacctaagcctcccaaagtgctgggattacaggcatgagcacctgtgcccggccctagaatgtaaattcttatacc

SEQ ID NO: 211783 - DNA, 562 bp, Homo sapiens
caaaaccttaaattcctccccatttcctattaaagagatttcaaactcatatttggcaatagtatcttctgattaaataataactacttttcgggatatcccctccattttattccttttcaataatacttttcttccatttaataatattctcaaaacccactacactcttttctatttctgtgtttctcttcgtaatgttttcatgttcctggaattccctgcttttccatatttacttataccccaaacttactggttcttccaagttgaatccacagtccacctattccatgaagccttccctgattctcccttccctgactgaaaaacatctttctttcaccaatttgcccagcgttgttcctgcctctgcctccacctgagtcttctgccttggactactggttttatttacatgtyttatcctccctttcccattgggagcaggatggaaacaagatccacatatgagttaccattgtattcctcacaacattgagcacagggctctgcacttagttggtgtgctggattacctagggtcaacttggcatcactg

SEQ ID NO: 211784 - DNA, 539 bp, Homo sapiens
ctttgctttgttcacttatgtatccattcctaggcctagaacaatgtctgatacatagcggcaattattcattgaataaatggacccagcaatagtacattagctatgctatatgcatacattaaaaatgtagattattgactttaaaaagataattaatgtaaattcttactgcttttgaaaatgtttgtgagtcatgttgctgagggacctttatcttctcattatttcatcttaatccagtgttattaaaattgaaatcaccaatattattccatatctaaaaataatatctaccttgtaaaaattatcactctgctgcatttgagaatagacttcttaggtaataatggtataatccatagggcttttttggggcacagaaggattcatgctaagagaacattttattttctattttcccagagctataaaacatgaaattatatgatagtataaggcatayttttactcttttcacatttttttctaaaaaaaattagtgtttgtttcctatgtaacttttaactgtataagta

SEQ ID NO: 211785 - DNA, 561 bp, Homo sapiens
attcaaatcttgaggcctatgttttttcaaacttgagagtcatacagttgccagcttttttttttttttttaagtagtagacaaattgtaagaactacaaaactgaaaattaccttctgtttttcttccccataagctgctgttgaagtgaagtgagctcagggagacaggcctgttgttatcttcctatggcactgatttacrcttttacagaagggaaatttatggcccttatctgttgaggacttttatgaatgactggtataaatcaagaattgaatgaatatttttccctttaagcataaatctgtgattgggagattgatttctgagtaactctttggtaacccatttaaattgtcatcttccaattttctgtattttggcataaactgaataactaaaatataacttaataccagcatgatagatttgtttttcttctgttagatactttagaattcatctagacttctcacagacctcgataaataactcagcagtcagaatggaaaacaaatttatatagtggaaatctcatctaatcgggaatgaacaata

SEQ ID NO: 211786 - DNA, 513 bp, Homo sapiens
aacaagctcaaaggattaatgtagtaggaagaaatagtagtttgttatatattcatgttgaatttaggtaactattttagttatttaaaagattactaccgaagggaagaaacatattttgctaggtttcgcatagaaaaacctgtgtctggctcaaggtaatacttgaattttaataggaacctaggtttgctgtcttcccagtgtagactgtagcctgcactgtcatagaagagtgttgattgatccggttgtgaaatagatggatacccacatttaagttgcttttgaaagagtcagtttccctccacaaatatggcaacaaaattcttttataatccacaaatagaatttttctycatctgaaagagatttctcctaaaccagcctgaaaaattgcttttctaggaagaatttcatggctgagcctcattcttgtacagattcatagcatgttattactaacttgtaaatattcacttacagaagagagtgactagaatctttgaattc

SEQ ID NO: 211787 - DNA, 590 bp, Homo sapiens
ttcccttttctccgtatcattgccagcatgtttttttttgtctttttaataatggccatcctatctgggatgagatgatatcttattgtggttttttatttgcatttccctgattagtgatgttgagcatacttttcatatatttgttgctcatgtatatgtattattttgagaaatgtgtgttcagatcatttgctcattttttaatctttcttttttttttctgttcagatgtttaagttcctagtacattctggatattagttccctttgagatgaacagtttgcaaatatgttctcccattctgtaggttgtcttttcattctgttgtttcctttgctgtgcagaagcttttgagtttgaaataatcccatttatttttacttttgttgcctgtgtttttgagatattatycataaaattatttcccagatcaatgtcctgaagagaaaaggctcatgctttaaaatttttaatacatattactaattttatctgcagaaagaatagtacaaaataaattattcacctctaaacaatgtattttcctgcctcatactcaaactgggtatgctatataagctcatct

SEQ ID NO: 211788 - DNA, 590 bp, Homo sapiens
ttcccttttctccgtatcattgccagcatgtttttttttgtctttttaataatggccatcctatctgggatgagatgatatcttattgtggttttttatttgcatttccctgattagtgatgttgagcatacttttcatatatttgttgctcatgtatatgtattattttgagaaatgtgtgttcagatcatttgctcattttttaatctttcttttttttttctgttcagatgtttaagttcctagtacattctggatattagttccctttgagatgaacagtttgcaaatatgttctcccattctgtaggttgtcttttcattctgttgtttcctttgctgtgcagaagcttttgagtttgaaataatcccatttatttttacttttgttgcctgtgtttttgagatattattcataaaattatttcccagatcaatgtcctgaagmgaaaaggctcatgctttaaaatttttaatacatattactaattttatctgcagaaagaatagtacaaaataaattattcacctctaaacaatgtattttcctgcctcatactcaaactgggtatgctatataagctcatct

SEQ ID NO: 211789 - DNA, 188 bp, Homo sapiens
ctctcttaattacatgttaaggatataaccctgaaacttttctctttacttgggagggaaaaaaaaaaaaagcacttrgatttttatttttacaggctggatatggatagggtattgtgttgctttataagtaaacatgcttcccacacctcatctaatctacacatcctttatagagcaggcttctt

SEQ ID NO: 211790 - DNA, 417 bp, Homo sapiens
ctaaaacgtgtgtcgctttcttgcttaaaaaccaataaagctaatgttwctcaagtcatcatatatgagtagcatgcaagctccggatgcagctgttcctctagagactactgttgcgctccttacaagcctctagagcactagtgaagagtaatgttagattgtttcgggtttggtcaacctttcctaagactcagtggacagcaatcagttaatgtgccaagaagcataagctaaatccagattgcaacatactactcattctgaatctgtaagggaatgcctctgtgagtcactgttgtgggaatgtcctgggatggcatagttaatactttctaatgggatttaaaaagtcagtacatttctctttttgaatttgtttcttaatgatctgatgcacttttggataagatacag

SEQ ID NO: 211791 - DNA, 417 bp, Homo sapiens
ctaaaacgtgtgtcgctttcttgcttaaaaaccaataaagctaatgtttctcaagtyatcatatatgagtagcatgcaagctccggatgcagctgttcctctagagactactgttgcgctccttacaagcctctagagcactagtgaagagtaatgttagattgtttcgggtttggtcaacctttcctaagactcagtggacagcaatcagttaatgtgccaagaagcataagctaaatccagattgcaacatactactcattctgaatctgtaagggaatgcctctgtgagtcactgttgtgggaatgtcctgggatggcatagttaatactttctaatgggatttaaaaagtcagtacatttctctttttgaatttgtttcttaatgatctgatgcacttttggataagatacag

SEQ ID NO: 211792 - DNA, 437 bp, Homo sapiens
tagggtttgtgctcctatgagaatctaatgctgctgctgatttgcccggaggagctcaggcgggaatgctccttcgtccactgctsccctcctgctgtgcagcctggttcctaacaggtcatggactggtaacagttgttggcctgggggttggggacccctggtttaagaaaccttttttgaagtgttatactattttacgttgtcaccagaaatgtgtgaatgtgatccagtttcacatcctcatcattatttggtgttaccattatctttcattttggccattctgagatgtatgtggtgataccttattttggttttaatttgcattcccctaatgttgaacattgttttttcatgtgcttgtttgtcatctctatatcctcttcagtgaaacgtttatgtcttttatccattttctaactggatcgtttttc

SEQ ID NO: 211793 - DNA, 534 bp, Homo sapiens
aggaggatgcttgggcccgtgaattcaagaccagcctgggcaagayagtgaaaccccgtcttgattttttaaaaatccaattaaaatgacaagaaaagaaatacccaaacaaaatggttacacaattttatgttcccaccagtaatgtatgtgggttccaattcctccacatcttcactgacattttttttttctagataggggcttgctctgtctctcaggccgcagtgcaatgatgccatcacagttcactgcagccgtgacctcccaggcacaagtgattctctcatctcagcctcctgggtagctgaaaattacaggtgtacgccaccatgcctggctaatttttagatttttctgtagtggtgggattttaccatgttgcccaggctggtctcatactcctggcctcaagtgatctgcccacctcagcctccctaagttctggaattacaggctgccaccatgcccggccttcaccaacatttgccattatctgttttttttttcttcctttataccttaaagcagtat

SEQ ID NO: 211794 - DNA, 534 bp, Homo sapiens
aggaggatgcttgggcccgtgaattcaagaccagcctgggcaagacagtgaaaccccgtcttgattttttaaaaatccaattaaaatgacaagaaaagaaatacccaaacaaaatggttacacaattttatgttcccaccagtaatgtwtgtgggttccaattcctccacatcttcactgacattttttttttctagataggggcttgctctgtctctcaggccgcagtgcaatgatgccatcacagttcactgcagccgtgacctcccaggcacaagtgattctctcatctcagcctcctgggtagctgaaaattacaggtgtacgccaccatgcctggctaatttttagatttttctgtagtggtgggattttaccatgttgcccaggctggtctcatactcctggcctcaagtgatctgcccacctcagcctccctaagttctggaattacaggctgccaccatgcccggccttcaccaacatttgccattatctgttttttttttcttcctttataccttaaagcagtat

SEQ ID NO: 211795 - DNA, 534 bp, Homo sapiens
aggaggatgcttgggcccgtgaattcaagaccagcctgggcaagacagtgaaaccccgtcttgattttttaaaaatccaattaaaatgacaagaaaagaaatacccaaacaaaatggttacacaattttatgttcccaccagtaatgtatgtgggttccaattcctccacatcttcactgacattttttttttctagataggggcttgctctgtctctcaggccgcagtgcaatgatgccatcacagttcactgcagccgtgacctcccaggcacaagtgattctctcatctcagcctcctgggtagctgaaaattacaggtgtacgccaccatgcctggctaatttttakatttttctgtagtggtgggattttaccatgttgcccaggctggtctcatactcctggcctcaagtgatctgcccacctcagcctccctaagttctggaattacaggctgccaccatgcccggccttcaccaacatttgccattatctgttttttttttcttcctttataccttaaagcagtat

SEQ ID NO: 211796 - DNA, 608 bp, Homo sapiens
tagacagaataaacctttaaaatttgttgggatccagctagcataagtgtaaaatggatagtatttatgaatttatagtcaccagaagtaattttgactttctggacttagtgggcttcttttttaaggtaattttttagattaatacatgtcaggaaagttcaaacatttccttctaataaggaagatatctttgaaatagtcttttgtaataaaaatgccattttatttatttattattattatyttttgagacggatttcattctggtcacccaggctggagtgcaatggccagtctcagctcactacatcctcctcctcccgggttccagtgattctcctgccacagcctccagagtagctgggatacaggcacccgcaccacgcctggataatttttgtatttttagtagagacagggtttcatcatgttgaccaggctggtctcaaactcctaacctcaggcgatccacccgccttggcctcccaaagtgctgggattacaggtgtgaaccaccacctggccaccattttatttattttgggtgggcaagggacagagtctcgcactgtcgcccaggctggagtgcaatggccgatctcagc

SEQ ID NO: 211797 - DNA, 574 bp, Homo sapiens
tagttcactcttcaactgcttctaacatactaatattctgttraaaccattcatttggggtttaaatttcaattatgttattctctatggacattctatttgttttcttttaatcttcttggccattctctagagtttcctgttccattatgatatttttaattttttgttttactttaaacatactaaatatagttattttattttattttctgtatctgatactttcaataactgcagtctttgctagtcttttttctgtgctcttgctcatagtttttttcatttgttttcatgattagaaaaacagagagagaagaaggagagtaaagggaggaggcggaggaggagaaaagaagaaagcagagaagaagggacagagaaaaaaaggaagttggttctaacgtttctctaacaactggcttcagtgaaacactcccaccttgtggatttttaggttattgaaattaaccagtcttctgggtgcagcacaccaacatggcacatgtatacatatgtaacaaacctgcactttgtgcacatgtaccctaaaacttaaagtataataaaaaat

SEQ ID NO: 211798 - DNA, 574 bp, Homo sapiens
tagttcactcttcaactgcttctaacatactaatattctgttaaaaccattcatttggggtttaaatttcaattatgttattctctatggacattctatttgttttcttttaatcttcttggccattctctagagtttcctgttccattatgatatttttaattttttgttttactttaaacatactaaatatagttattttattttattttctgtatctgatactttcaataactgcagtctttgctagtcttttttctgtgctcttgctcatagtttttttcrtttgttttcatgattagaaaaacagagagagaagaaggagagtaaagggaggaggcggaggaggagaaaagaagaaagcagagaagaagggacagagaaaaaaaggaagttggttctaacgtttctctaacaactggcttcagtgaaacactcccaccttgtggatttttaggttattgaaattaaccagtcttctgggtgcagcacaccaacatggcacatgtatacatatgtaacaaacctgcactttgtgcacatgtaccctaaaacttaaagtataataaaaaat

SEQ ID NO: 211799 - DNA, 574 bp, Homo sapiens
tagttcactcttcaactgcttctaacatactaatattctgttaaaaccattcatttggggtttaaatttcaattatgttattctctatggacattctatttgttttcttttaatcttcttggccattctctagagtttcctgttccattatgatatttttaattttttgttttactttaaacatactaaatatagttattttattttattttctgtatctgatactttcaataactgcagtctttgctagtcttttttctgtgctcttgctcatagtttttttcatttgttttcatgattagaaaaacagagagagaagaaggagagtaaagggaggaggmggaggaggagaaaagaagaaagcagagaagaagggacagagaaaaaaaggaagttggttctaacgtttctctaacaactggcttcagtgaaacactcccaccttgtggatttttaggttattgaaattaaccagtcttctgggtgcagcacaccaacatggcacatgtatacatatgtaacaaacctgcactttgtgcacatgtaccctaaaacttaaagtataataaaaaat

SEQ ID NO: 211800 - DNA, 588 bp, Homo sapiens
ttatcagaggctaggagttgggggtagacatggaaaaggtagatgttgataaaagggttcaaagtttcagttagacaaagtttcagtgaactattgcacrgaatggtgactgtaataaataacaaggtattgtatgtttcaaaatgactaacagagtagattttaaatgttttcaccacaaaaaagatatgtatgtcaataagatagacctaatctttccacaatttaaacatgtatcaaaacattacattgtaccccatagatacaattattatttgtcaatttaaaatttttcactaatttatattgttattgttgcaccaactcctttccaccaggcagattctcataaagactattttctctcttacatgaagcatttcctacacacctcttaatcacggtagcattgacatcattccaccagattctatctccagtgttaaaataatcaagaacccagaaatctccaccagggggcaaccaatgcgtatcaaagtttcccactttcctttagatttacttatgggtaacttatgggaaaaaatacttaagtacttccctttttaaagaaaaaaattatatgaa

SEQ ID NO: 211801 - DNA, 557 bp, Homo sapiens
atatgaaatcaacacaggtgtctatcaactgacaaatggatgaagaaaatgtagtgtatatatacaatggaatactactcagccttaataggaaggaaaacctgatatatgtgacaacatgaattaacccagaagatatcacgctaagtgaaataagccaggcacgaaaagacaaatatcacatgatctcactgatatgtggaatctgaaaaagttgaattcatagaagtagagaatggaatggtgattatcagaggctaggagttgggggtagacatggaaaaggtagatgttgataaaagggttcaaagtttcagttagacaaagtttcagtgaactattgcacagaatggtgactgtaataaataacaaggtattgtatgtttcaaaatgactaacagagtagattttaaatgttttcaccacaaaaaagatatgtatgtcaataagayagacctaatctttccacaatttaaacatgtatcaaaacattacattgtaccccatagatacaattattatttgtcaatttaaaatttttcactaatttatattgt

SEQ ID NO: 211802 - DNA, 599 bp, Homo sapiens
aaaaagttgaattcatagaagtagagaatggaatggtgattatcagaggctaggagttgggggtagacatggaaaaggtagatgttgataaaagggttcaaagtttcagttagacaaagtttcagtgaactattgcacagaatggtgactgtaataaataacaaggtattgtatgtttcaaaatgactaacagagtagattttaaatgttttcaccacaaaaaagatatgtatgtcaataagatagacctaatctttccacaatttaaacatgtatcaaaacattacattgtaccccatagatacaattattatttgtcaatttaaaatttttcactaatttatattgttattgttgcaccaactcctttccaccaggcagattctcataaagactattttctctyttacatgaagcatttcctacacacctcttaatcacggtagcattgacatcattccaccagattctatctccagtgttaaaataatcaagaacccagaaatctccaccagggggcaaccaatgcgtatcaaagtttcccactttcctttagatttacttatgggtaacttatgggaaaaaatacttaagtactt

SEQ ID NO: 211803 - DNA, 599 bp, Homo sapiens
aaaaagttgaattcatagaagtagagaatggaatggtgattatcagaggctaggagttgggggtagacatggaaaaggtagatgttgataaaagggttcaaagtttcagttagacaaagtttcagtgaactattgcacagaatggtgactgtaataaataacaaggtattgtatgtttcaaaatgactaacagagtagattttaaatgttttcaccacaaaaaagatatgtatgtcaataagatagacctaatctttccacaatttaaacatgtatcaaaacattacattgtaccccatagatacaattattatttgtcaatttaaaatttttcactaatttatattgttattgttgcaccaactcctttccaccaggcagattctcataaagactattttctctcttacatgaagcatttcctacacacctcttaatcacggtagcattgacrtcattccaccagattctatctccagtgttaaaataatcaagaacccagaaatctccaccagggggcaaccaatgcgtatcaaagtttcccactttcctttagatttacttatgggtaacttatgggaaaaaatacttaagtactt

SEQ ID NO: 211804 - DNA, 585 bp, Homo sapiens
aagcttgtttcaatagttagagcaatctacaaatgtaattcattacattaactaattaaaggagctaaatcacatcaccaccacaataatgcagaaaaccacatttgatacaactcaatattcatgtctgcctaacaaacatctcatgatactaggaaaagaggaagggatatattattttcatgtataaagcactaaccattgtagcatgccaatatactcaaaattcaatgaaattcctatcaaaatyttagcattcctcttagtcctcaacaaagcatttctaaaatgtgtatagaagaccaaagggccaaaagagtcaacttctgaagaagcgcaaaaagaaagttgaggaaatcttaaaacatgttattgagcttaaagttgcaaaaataaactcatgtaccataattgatgagtagaaaaatagactagtggaataacataaaaataaaaacaatgcttacataaaatgttgtaactgatttggatgtcattagaaatcagtaagtaaatagatggacaatgtaatgaaagatgctaggcaaataatgtggtagggagaataatggccctcaaagatgc

SEQ ID NO: 211805 - DNA, 533 bp, Homo sapiens
aagcttgtttcaatagttagagcaatctacaaatgtaattcattacattaactaattaaaggagctaaatcacatcaccaccacaataatgcagaaaaccacatttgatacaactcaatattcatgtctgcctaacaaacatctcatgatactaggaaaagaggaagggatatattattttcatgtataaagcactaaccattgtagcatgccaatatactcaaaattcaatgaaattcctatcaaaatcttagcattcctcttagycctcaacaaagcatttctaaaatgtgtatagaagaccaaagggccaaaagagtcaacttctgaagaagcgcaaaaagaaagttgaggaaatcttaaaacatgttattgagcttaaagttgcaaaaataaactcatgtaccataattgatgagtagaaaaatagactagtggaataacataaaaataaaaacaatgcttacataaaatgttgtaactgatttggatgtcattagaaatcagtaagtaaatagatggacaatgtaatg

SEQ ID NO: 211806 - DNA, 585 bp, Homo sapiens
aagcttgtttcaatagttagagcaatctacaaatgtaattcattacattaactaattaaaggagctaaatcacatcaccaccacaataatgcagaaaaccacatttgatacaactcaatattcatgtctgcctaacaaacatctcatgatactaggaaaagaggaagggatatattattttcatgtataaagcactaaccattgtagcatgccaatatactcaaaattcaatgaaattcctatcaaaatcttagcattcctcttagtcctcaacaaagcatttctaaaatgtgtatagaagaccaaagggccaaaagagtcaacttctgaagaarcgcaaaaagaaagttgaggaaatcttaaaacatgttattgagcttaaagttgcaaaaataaactcatgtaccataattgatgagtagaaaaatagactagtggaataacataaaaataaaaacaatgcttacataaaatgttgtaactgatttggatgtcattagaaatcagtaagtaaatagatggacaatgtaatgaaagatgctaggcaaataatgtggtagggagaataatggccctcaaagatgc

SEQ ID NO: 211807 - DNA, 585 bp, Homo sapiens
aagcttgtttcaatagttagagcaatctacaaatgtaattcattacattaactaattaaaggagctaaatcacatcaccaccacaataatgcagaaaaccacatttgatacaactcaatattcatgtctgcctaacaaacatctcatgatactaggaaaagaggaagggatatattattttcatgtataaagcactaaccattgtagcatgccaatatactcaaaattcaatgaaattcctatcaaaatcttagcattcctcttagtcctcaacaaagcatttctaaaatgtgtatagaagaccaaagggccaaaagagtcaacttctgaagaagcgcaaaaagaaagttgaggaaatcttaaaacatgttattgagcttaaagttgcaaaaataaactcatgtaccataaytgatgagtagaaaaatagactagtggaataacataaaaataaaaacaatgcttacataaaatgttgtaactgatttggatgtcattagaaatcagtaagtaaatagatggacaatgtaatgaaagatgctaggcaaataatgtggtagggagaataatggccctcaaagatgc

SEQ ID NO: 211808 - DNA, 533 bp, Homo sapiens
aagcttgtttcaatagttagagcaatctacaaatgtaattcattacattaactaattaaaggagctaaatcacatcaccaccacaataatgcagaaaaccacatttgatacaactcaatattcatgtctgcctaacaaacatctcatgatactaggaaaagaggaagggatatattattttcatgtataaagcactaaccattgtagcatgccaatatactcaaaattcaatgaaattcctatcaaaatcttagcattcctcttagtcctcaacaaagcatttctaaaatgtgtatagaagaccaaagggccaaaagagtcaacttctgaagaagcgcaaaaagaaagttgaggaaatcttaaaacatgttattgagcttaaagttgcaaaaataaactcatgtaccataattgatgagtagaaaaatagactagtggaataacataaaaataaaaacaatgcttacataaaatgttgtaactgatttggatgtcattagaaatcagtwagtaaatagatggacaatgtaatg

SEQ ID NO: 211809 - DNA, 555 bp, Homo sapiens
gatggagagatcttcctgggttacccagatgggcccagtctaatcacatgagttcttaaaaatggagaacctttcttagctgagtccagagagagatgtgacaatgaaagaatggtcagagaaatgtgacattgccagctttaaaaagagagaggagaggcaatgagaaaaggaatgctgatgttctctagaagatagaaaaggccaggatatggattctaccctagccgccataaagaaacatgmctgtcgacaacttgattttagttcactaaaattcatgcctgatttctgacttgtgtacactgtaagatgacaagtttgtgttattttaggtcacttagtttgtagaaatttgttacagcagtaatagaacaagtggttatccatatgaggcaaattagattggatacctatctccaatagaaatcaattcaaggtgaattccaggaaaatacttaaaacatttagattaaaaataaatgagaatttttgttactttttgtaggtcatagaaccaagaaaaacaaacattaaggaggaaaaatgaacata

SEQ ID NO: 211810 - DNA, 574 bp, Homo sapiens
gagaaacaattcatttaaaaaaataatatttggccaggcatggtggctcacacctataatcccagcactttgggaggctgaggtgagtggatsaggaggtcagcagttcaagaccagcctagccaagatcatgaaaccccgtctctactaaaaatacaaaaatcagccaggcatggtggctggtgcctgtaatcctagctgctcgggaggctgaggcagagaactgcttgaacccgggaggcggaggttgcagtgagccgagatcgtgccactgcactccagcctgggcgacagagtgaggctccgtctcaaaaaaaataaataaataattcaatgaaattcctaagatccagggctttgcaataaatatgtaaataaatttccaatctccatactgaaagtttaaaagaaatgctaactaataactaaagaaatacaacttttcctcagctttgcagcaatctagaaacaaagtgtgtagacactacaaagcaccttacaaggagaaacatgtaaggatggcatgactcgccggcagccctgggcttgtccacggtacccccatgatgaacag

SEQ ID NO: 211811 - DNA, 574 bp, Homo sapiens
gagaaacaattcatttaaaaaaataatatttggccaggcatggtggctcacacctataatcccagcactttgggaggctgaggtgagtggatgaggaggtcagcagttcaagaccagcctagccaagatcatgaaaccccgtctctactaaaaatacaaaaatcagccaggcrtggtggctggtgcctgtaatcctagctgctcgggaggctgaggcagagaactgcttgaacccgggaggcggaggttgcagtgagccgagatcgtgccactgcactccagcctgggcgacagagtgaggctccgtctcaaaaaaaataaataaataattcaatgaaattcctaagatccagggctttgcaataaatatgtaaataaatttccaatctccatactgaaagtttaaaagaaatgctaactaataactaaagaaatacaacttttcctcagctttgcagcaatctagaaacaaagtgtgtagacactacaaagcaccttacaaggagaaacatgtaaggatggcatgactcgccggcagccctgggcttgtccacggtacccccatgatgaacag

SEQ ID NO: 211812 - DNA, 574 bp, Homo sapiens
gagaaacaattcatttaaaaaaataatatttggccaggcatggtggctcacacctataatcccagcactttgggaggctgaggtgagtggatgaggaggtcagcagttcaagaccagcctagccaagatcatgaaaccccgtctctactaaaaatacaaaaatcagccaggcatggtggctggtgcctgtaatcctagctgctcgggaggctgaggcagagaactgcttgaacccgggaggcggaggttgcagtgagccgagatcgtgccactgcactccagcctgggygacagagtgaggctccgtctcaaaaaaaataaataaataattcaatgaaattcctaagatccagggctttgcaataaatatgtaaataaatttccaatctccatactgaaagtttaaaagaaatgctaactaataactaaagaaatacaacttttcctcagctttgcagcaatctagaaacaaagtgtgtagacactacaaagcaccttacaaggagaaacatgtaaggatggcatgactcgccggcagccctgggcttgtccacggtacccccatgatgaacag

SEQ ID NO: 211813 - DNA, 580 bp, Homo sapiens
atgcctttctgggaaaacagtccacagctcttattctcagcaggcttcacggtgaaaaaaggttagaactcttgctacagagctgtggaagcagccaggtgaggggcctgcaagggcactctgggcactacctgggcactctcgagcccatcatcccctaggcaggctgcactgcttggtatttgcagagctgagggggtggggcatgtggggactgtgaaatcgccctgagatgacccacagtcctcagctaggaagtgagcgcygcatctcctgcagcgtcctccatccctagagccatagggccaggagaaccggcccttgcagcaagtgaaaagcctattattgattccctctctagccatgtagacagtgaaccaagacactcatatcaggtaaatgccttgttctctgttaccaaggtaaccagtaggcattcccagatacagcaaaggtcctcacaccaagatatgcacctggccacctgaggaaagagaaaggactatctgaggggatggggctgagctgggtgtggagtggtccttgtgggtcttggagagtgggagggggagcagcatga

SEQ ID NO: 211814 - DNA, 580 bp, Homo sapiens
atgcctttctgggaaaacagtccacagctcttattctcagcaggcttcacggtgaaaaaaggttagaactcttgctacagagctgtggaagcagccaggtgaggggcctgcaagggcactctgggcactacctgggcactctcgagcccatcatcccctaggcaggctgcactgcttggtatttgcagagctgagggggtggggcatgtggggactgtgaaatcgccctgagatgacccacagtcctcagctaggaagtgagcgctgcatctcctgcagcgtcctccatccctagagccatrgggccaggagaaccggcccttgcagcaagtgaaaagcctattattgattccctctctagccatgtagacagtgaaccaagacactcatatcaggtaaatgccttgttctctgttaccaaggtaaccagtaggcattcccagatacagcaaaggtcctcacaccaagatatgcacctggccacctgaggaaagagaaaggactatctgaggggatggggctgagctgggtgtggagtggtccttgtgggtcttggagagtgggagggggagcagcatga

SEQ ID NO: 211815 - DNA, 580 bp, Homo sapiens
atgcctttctgggaaaacagtccacagctcttattctcagcaggcttcacggtgaaaaaaggttagaactcttgctacagagctgtggaagcagccaggtgaggggcctgcaagggcactctgggcactacctgggcactctcgagcccatcatcccctaggcaggctgcactgcttggtatttgcagagctgagggggtggggcatgtggggactgtgaaatcgccctgagatgacccacagtcctcagctaggaagtgagcgctgcatctcctgcagcgtcctccatccctagagccatagggccaggagaaccggcccttgcagcaagtgaaaagcctattattgattccctcyctagccatgtagacagtgaaccaagacactcatatcaggtaaatgccttgttctctgttaccaaggtaaccagtaggcattcccagatacagcaaaggtcctcacaccaagatatgcacctggccacctgaggaaagagaaaggactatctgaggggatggggctgagctgggtgtggagtggtccttgtgggtcttggagagtgggagggggagcagcatga

SEQ ID NO: 211816 - DNA, 580 bp, Homo sapiens
atgcctttctgggaaaacagtccacagctcttattctcagcaggcttcacggtgaaaaaaggttagaactcttgctacagagctgtggaagcagccaggtgaggggcctgcaagggcactctgggcactacctgggcactctcgagcccatcatcccctaggcaggctgcactgcttggtatttgcagagctgagggggtggggcatgtggggactgtgaaatcgccctgagatgacccacagtcctcagctaggaagtgagcgctgcatctcctgcagcgtcctccatccctagagccatagggccaggagaaccggcccttgcagcaagtgaaaagcctattattgattccctctctagccatgtagacagtgaaccaagacactcatatcaggtaaatgccttgttctctgttaccaaggtaaccagtaggcattcccagatacagcraaggtcctcacaccaagatatgcacctggccacctgaggaaagagaaaggactatctgaggggatggggctgagctgggtgtggagtggtccttgtgggtcttggagagtgggagggggagcagcatga

SEQ ID NO: 211817 - DNA, 482 bp, Homo sapiens
gatgaataatgtactcagacaccaattattcagtgaaagagccgctagggggctgggccrtgcacagaaagagttctggcagccacgagccctgactagctagccctgccagcatttattgaaaaaacattaaatgacaggggcttttagtcaacacaaatagagggtaattaacctggtcaccctcccccgagagagagccatcctgcctgtgaatgatcaaaggttggcttcaggaccacatgagtaaacaagttatttagataaactcccttacattcctttgcacctactttaagctatttactcaaggaaggattaggccgccttcattcagatctattactgaagctatacaacacccccagccttccatgaaggtttgtgtcgatttcttataactatctttaaaatttttcccaccagcctgactgaactcccacagttgttgctactttttgaaattgaaatacttctaggaa

SEQ ID NO: 211818 - DNA, 406 bp, Homo sapiens
aggaggcatatttctcccctggtaacccaaagatttaggtcattttcccagagactccatttccactgtgagggttcttggaaaactaagcagaggatgaggaaaagtctgtgaacaagcttgctggtctctccctgtcctacaaaagagcatacctcttctgtaaccagaaggcccttttgattagtcaaggctggacagagtgagattgkgtgtgtgtgtgtgtgtgtgtgtgtgtgtgtgtgtgtgtgtttgtgtgtgtcttgagacagggtctcactctgtcaccaaggctagagtgcagtggtgagatcagagctcactgcagcttccacttcctgggctcaagcgatcctcctatttcagcctccagagtagctgggactatacgaatgttttaccgcac

SEQ ID NO: 211819 - DNA, 546 bp, Homo sapiens
aaataaatctacatattatagtcaaytgactttcaacaaaggtgccaggaacacacatggggaaagaacagtctcttcaaaaaatggtgttgagaaaactgaatgtccacaagattgatcttaggcccttatttcataccatataaaaatataaattcaaaataagttagacttaaatgtaagacctagcactatagaactcctagaagaaaacaggggaataactccaagacattggtctgggcaataatattttatgatatgactctaaagcacaggcaagaaaagcaacaaaacacaaatggaatagcatcaacctaaaaagcttctgcacagcaaaagaaagtcaacagagtgaagtgataacctacaaaatgggagaaattatctgcaaactatacatttgataagaggctaatgtccaaaatatcttaggaactcaaacaacacaataataagaaaacaaggatccctaatgaaaaattgacaaaggatctaaatagacatttctcaaaagaagacatacaaatggccaacagatatata

SEQ ID NO: 211820 - DNA, 546 bp, Homo sapiens
aaataaatctacatattatagtcaactgactttcaacaaaggtgccaggaacacacatggggaaagaacagtctcttcaaaaaatggtgttgagaaaactgaatgtccacaagattgatcttaggcccttatttcataccatataaaaatataaattcaaaataagttagacttaaatgtaagacctagcactatagaactcctrgaagaaaacaggggaataactccaagacattggtctgggcaataatattttatgatatgactctaaagcacaggcaagaaaagcaacaaaacacaaatggaatagcatcaacctaaaaagcttctgcacagcaaaagaaagtcaacagagtgaagtgataacctacaaaatgggagaaattatctgcaaactatacatttgataagaggctaatgtccaaaatatcttaggaactcaaacaacacaataataagaaaacaaggatccctaatgaaaaattgacaaaggatctaaatagacatttctcaaaagaagacatacaaatggccaacagatatata

SEQ ID NO: 211821 - DNA, 546 bp, Homo sapiens
aaataaatctacatattatagtcaactgactttcaacaaaggtgccaggaacacacatggggaaagaacagtctcttcaaaaaatggtgttgagaaaactgaatgtccacaagattgatcttaggcccttatttcataccatataaaaatataaattcaaaataagttagacttaaatgtaagacctagcactatagaactcctagaagaaaacaggggaataactccaagacattggtctgggcaataatattttatgatatgactctaaagcacaggcaagaaaagcaacaaaacacaaatggaatagcatcaacctaaaaagcttctgcrcagcaaaagaaagtcaacagagtgaagtgataacctacaaaatgggagaaattatctgcaaactatacatttgataagaggctaatgtccaaaatatcttaggaactcaaacaacacaataataagaaaacaaggatccctaatgaaaaattgacaaaggatctaaatagacatttctcaaaagaagacatacaaatggccaacagatatata

SEQ ID NO: 211822 - DNA, 560 bp, Homo sapiens
atgtaaactatttcagccattgtaaaagacagtataaatgattctgtaaaaatagaattaccatatgattcagtaatgctatttctgggcatatattaaaaagatatcaaatcagtgtgtcaatgagttatctgtactcccatatttattgtagcattattcacaacagccaagatgtggaattaacttaagtatccatcgacacatgagtggatgaagaaaatgtggyacacatacacaatagaatagtatacaaccttaaaaaataaaaaaagtatcatttgtgacaacatgaatgaaccgggaggacattatactgagtaaaataatccaggcacagaaagccagatactgcataatctcacttgtatgtggaggtctaagaaggctgaacacatagaagtacagagtagaatgatggttaccaggaggattgggtagatgttggtcaaagggtacaaaattgcattgtacaggaggaatgaattcaacagatctattgtgcaatatggtgactatagtggataacaatgtattgtttttaaatttaatttttgtgg

SEQ ID NO: 211823 - DNA, 570 bp, Homo sapiens
ataagtgataacacatagtatttgtctttttgtgcctggcttatttcacttaacataatgacctccagtttcatctatgttgttgcaaatgacagggtctcattcctttttatggctgaataatacttcattgtatataagtaccacattttctttattcattcatctgttgatggacacttaggttgactccataacttcgctattgwaaatagtgctgcaacaaatacgggagtgcagatatctcttcgatatactgatttcttttttggggggtatatatgcagcagtgggattgctggaccacatggtagctctatttttacttttttgaggagccttcaaactgttctccataggggatgtacttgtattcttcaaaattgctaagagtagatttttaagtgttctcataaaaaaagataagcatgtaaggtaatgcatatgttagcttaacatggctattttacaatgaatatatatttcaaaacatataattttatttatctgataaaataaatataaaatatgaaactttatattaataaatttgacaatcataaggaatgg

SEQ ID NO: 211824 - DNA, 608 bp, Homo sapiens
atcaaggtgaaagtaccttctgataaaggtgaaagaacttctacaaaataatttcatttatataagtttcaaagaaccaaactaaataatgcatcacttgagaaccattaaagtctattaaaaaacacatacaatgcaatggaaggacagtggtcatatccagcaggaaataaaggagaacacaattggcaaggagcacccaatgggmgtctaaggcactagtaaagttctattttgtttccaatcctccaagacatctagttttttttatttttctgagacatggtggcccaggctggagtacgatagtgtgatcttggctcactgcaacctgtgtcctgggcttaagtgatcctcccacctcggcctcccaaagtactgggattacaggtgtgagccaccatggccggcaaatgttctatttcatatcctgtatggtggacacatagatgttctcttttttattattccttgaacactaagtatatgtttatttatattctctgtggaatacctccttatttctcagtcaattcaggatacctccttacccccatcccctttttacttttcgtcatgtcatatagtttctgaaatatagaaaagct

SEQ ID NO: 211825 - DNA, 602 bp, Homo sapiens
caaggttgtaatatgcaaacttattattgaatcaaggtgaaagtaccttctgataaaggtgaaagaacttctacaaaataatttcatttatataagtttcaaagaaccaaactaaataatgcatcacttgagaaccattaaagtctattaaaaaacacatacaatgcaatggaaggacagtggtcatatccagcaggaaataaaggagaacacaattggcaaggagcacccaatgggcgtctaaggcactagtaaagttctattttgtttccaatcctccaagacatctagttttttttatttttctgagacatggtggcccaggctggagtacratagtgtgatcttggctcactgcaacctgtgtcctgggcttaagtgatcctcccacctcggcctcccaaagtactgggattacaggtgtgagccaccatggccggcaaatgttctatttcatatcctgtatggtggacacatagatgttctcttttttattattccttgaacactaagtatatgtttatttatattctctgtggaatacctccttatttctcagtcaattcaggatacctccttacccccatcccctttttactttt

SEQ ID NO: 211826 - DNA, 576 bp, Homo sapiens
tgaatcaaggtgaaagtaccttctgataaaggtgaaagaacttctacaaaataatttcatttatataagtttcaaagaaccaaactaaataatgcatcacttgagaaccattaaagtctattaaaaaacacatacaatgcaatggaaggacagtggtcatatccagcaggaaataaaggagaacacaattggcaaggagcacccaatgggcgtctaaggcactagtaaagttctattttgtttccaatcctccaagacatctagttttttttatttttctgagacatggtggcccaggctggagtacgatagtgtgatcttggctcactgcaacctgtgtcctgggcttaagtgatcctcccacctcggcctcccaaagtactgggattacaggtgtragccaccatggccggcaaatgttctatttcatatcctgtatggtggacacatagatgttctcttttttattattccttgaacactaagtatatgtttatttatattctctgtggaatacctccttatttctcagtcaattcaggatacctccttacccccatcccctttttacttttc

SEQ ID NO: 211827 - DNA, 602 bp, Homo sapiens
caaggttgtaatatgcaaacttattattgaatcaaggtgaaagtaccttctgataaaggtgaaagaacttctacaaaataatttcatttatataagtttcaaagaaccaaactaaataatgcatcacttgagaaccattaaagtctattaaaaaacacatacaatgcaatggaaggacagtggtcatatccagcaggaaataaaggagaacacaattggcaaggagcacccaatgggcgtctaaggcactagtaaagttctattttgtttccaatcctccaagacatctagttttttttatttttctgagacatggtggcccaggctggagtacgatagtgtgatcttggctcactgcaacctgtgtcctgggcttaagtgatcctcccacctcggcctcccaaagtactgggattacaggtgtgagccaccatggccggcaaatgttctatttcatatcctgtatggtggacacatagatgttctcttttttattattccttgaacactaagtatatgtttwtttatattctctgtggaatacctccttatttctcagtcaattcaggatacctccttacccccatcccctttttactttt

SEQ ID NO: 211828 - DNA, 504 bp, Homo sapiens
tattctctgtggaatacctccttatttctcagtcaattcaggatacctccttacccccatcccctttttacttttcgtcatgtcatatagtttctgaaatatagaaaagcttacatattatcctgtcatcaaagcggcatggaggcatttggtagaataaatattatttgttgattattcatcctttcctttcactttacagagtcaatcaaacacyaggtcatgttaattttactgtcacgcacatatcttgaatttgcctccttatctctatttccactattcagttcagaccttgataatcactcatctgcattgtagttgcatttttctaattattctgtttctagtcttgttttaaaatctttttttcctcccacaatgcagctagagtggtcaatttaaagcatcatctatctcaagaacaaaaaaccaaacaccgcatgttttcactcataggtgggacttgaacaatgagaacacttggacacaggaaggggaata

SEQ ID NO: 211829 - DNA, 556 bp, Homo sapiens
aacatcaaactccataaattactttccatctctgcctctctctctttctatatatataacatatacatgttacaaaaatgcacagggaataaatatgagcaaaatggtaagaagtgcaggtcctaggtcagatttcttgcatttagttgcaggctacaccaactttagagaaaagatttagtgaaaaataaaaatgaatcattaatacaccacttggcacagataagttattcagtaaacattaacatatktgcatttatgtttaaccatgggcttaagtgattatccagaaatctccctctctttgactatgtttgaatattcagatacttcttcaatttatctcttgctcatgcaatttgatttcttcttcactcgttgtatactcatggaccattttatgtgtttcaggaattgatattttatttaaaaactgttactatagaaaattaacttttggatagtcctgttcagactaaaactatcatttgtaagatctgtattactgcaatcattggtgttaatactttgcattaattaaaattttttatggaca

SEQ ID NO: 211830 - DNA, 556 bp, Homo sapiens
aacatcaaactccataaattactttccatctctgcctctctctctttctatatatataacatatacatgttacaaaaatgcacagggaataaatatgagcaaaatggtaagaagtgcaggtcctaggtcagatttcttgcatttagttgcaggctacaccaactttagagaaaagatttagtgaaaaataaaaatgaatcattaatacaccacttggcacagataagttattcagtaaacattaacatatttgcatttatgtttaaccatgggyttaagtgattatccagaaatctccctctctttgactatgtttgaatattcagatacttcttcaatttatctcttgctcatgcaatttgatttcttcttcactcgttgtatactcatggaccattttatgtgtttcaggaattgatattttatttaaaaactgttactatagaaaattaacttttggatagtcctgttcagactaaaactatcatttgtaagatctgtattactgcaatcattggtgttaatactttgcattaattaaaattttttatggaca

SEQ ID NO: 211831 - DNA, 555 bp, Homo sapiens
actctttgtctctttcccagatccagccactctaacattttttagctcctggaccaagacaagctcttcccagaacctgacctttgtacctgttctttattcctggagtatttttcccctgacaaattacttatcatctatcataattcaggttaaatggcactaactcagggaaggcttccctaactgcctcccttctccaaccaaattaggaacaattatatggccacatagtatcgaatcaagtttataattttaaaataattgggagattttgttgtttaacacttgttttcactataagactgtaattacatgcaagtaagaaccatgcctgtttgttcactcctgccacagtcagaatagtgcctggaatatgcagtaagggctgaacaakcactaaataaatgaacaagtgaataaatggatattgtctcatttttagaacagagtactgaatggatcatgaacactatctggtatgtcacgtaggtaatttacaagggctacaatttcagctcagatttaccttttcctggatacaggtcttgatag

SEQ ID NO: 211832 - DNA, 539 bp, Homo sapiens
tactttcaattacattttatgtttaaattgaatattatggtaatcgttatgyaaatgattaaaaatttaaagggacaacatttaatgttgctctggaattcacctttagtcataaaataaagatttaaagtatcatctgtagacaatggcaaaagcccttttttgtcataagaaaatcaaatatgctttatttcacccaattaacatggctatcccgggaaaaccaaaatgaccataggcggtaattccccaggccgtgtgatctcagtctggcattctcggatctccaaggcatcactttggccactaccctctggggctgtgattagcagctctcttcctgttttatgcagctctgtgtgtatgtctgcagtgatgccgtactggatctggttcatcttgtgagaactatacctatctgaatttttgatgatgctctttccttagttcccttggcaaaacaggctaggtgagggatagacataaaatctatacttagtaaatcggtgagccaaggtctgtgactggcaatgagtgaa

SEQ ID NO: 211833 - DNA, 493 bp, Homo sapiens
ctcattttccttcctgtgtggcctgtgccttatggtcagcgcggacgtccatcagtctatcaaatgcctagaaacctttcgccctttgtcaccttctgtgtcacccagcattccccttctcagcccttttcattctyatggtggaatccttttggtttgatttcaagggtccagcactgttgatgtcacaacagagtggcatggaaagtttctgaaaattttgtcatctaacctctcgtggggacttttaattaattcagcttttgacaactccatcacattcattatattatccattcattcattcattaatacatttgacatttataatgtgtgccaacaatgtgccaggtcaaaactgcccacttacaatgtagaacatttctgtaaattttatttcaattttcttgtatttcttctcctttattctaccatcccacttgatcttctgccacagaagttctcttctctctctctttgttctctcttctcc

SEQ ID NO: 211834 - DNA, 435 bp, Homo sapiens
caggtctaattaccatacctgagaatcagggagtatttaaaatttgagaaataattttctatacttgaaagtcacttatgtaggtagscctcagattataataaataacgtttattgtgctatactgtgtggtaggtatgaggttaagtatttttacctatattatatcacttatttcttacaaatggagcaagggagcaagcaagcaagggaggtattattatccctattttatgtatttatgtatttatttttgatttctattcttttggtttttttgttgttttttattgatgtatcatagttgtacatgttttggggtacatgtgatatttttgatacatgtatacaatgtgtaatgatcaaatcagagtaatttggatattcatcacctcgaatatttatcttttctttgtgttgggaacattataattt

SEQ ID NO: 211835 - DNA, 435 bp, Homo sapiens
caggtctaattaccatacctgagaatcagggagtatttaaaatttgagaaataattttctatacttgaaagtcacttatgtaggtaggcctcagattataataaataacgtttattgtgctatactrtgtggtaggtatgaggttaagtatttttacctatattatatcacttatttcttacaaatggagcaagggagcaagcaagcaagggaggtattattatccctattttatgtatttatgtatttatttttgatttctattcttttggtttttttgttgttttttattgatgtatcatagttgtacatgttttggggtacatgtgatatttttgatacatgtatacaatgtgtaatgatcaaatcagagtaatttggatattcatcacctcgaatatttatcttttctttgtgttgggaacattataattt

SEQ ID NO: 211836 - DNA, 314 bp, Homo sapiens
acatggggatgattacaattcaaggtgagatttgggtggggacacagcmaaaccatatcaactacaatatatcacagttgatgctcctcttgccttccaaggcagatgtcttaggaaatcctgatcctttttccttgtccacagctgtgctgcctcatggctcagggccatggggtcagcactctcctcacctccaccagtccaagacctccaacctctggttgcaggctgattttttaccaatcatggtcacttcattatggaggcagggaacgcagctaacaatgaggcttatacgctgagaggcgagtgct

SEQ ID NO: 211837 - DNA, 527 bp, Homo sapiens
tttgattctgatgtaagaaatgatggtcaccagcyggttactgctaccaccccacaaccccgagcatactggacgaatgtctaagccttgtggttagtggggacaatgctggtggagtctgaagttgtcatgcagtgactcatgcaagcttaggcagatttggtgatatatgacacagagatgcaaagaaatgttgtagctgacacacacaggctggctctgggagatgcagaaggagcacgtcacccaaaatagagccagacagacatccttaaggaaggagcaaaggggctgcatcttaaagaatgtagaaaggatttgtcatgagagatggggcaggaagttcttgagaggcagagggagagcatgagaatgttgggaagggaggagagattcttgcacatctgggaagctgacaatccatcagcatggccagaaggaaaataaggaggaggagcagaaatagatgaggctggatatagaagcagggctgaagctgtgtcaattgtggtaaagagttgtgattc

SEQ ID NO: 211838 - DNA, 513 bp, Homo sapiens
ttgattctgatgtaagaaatgatggtcaccagctggttactgctaccaccccacaaccccgagcatactggacgaatgtctaagccttgtggttagtggggacaaygctggtggagtctgaagttgtcatgcagtgactcatgcaagcttaggcagatttggtgatatatgacacagagatgcaaagaaatgttgtagctgacacacacaggctggctctgggagatgcagaaggagcacgtcacccaaaatagagccagacagacatccttaaggaaggagcaaaggggctgcatcttaaagaatgtagaaaggatttgtcatgagagatggggcaggaagttcttgagaggcagagggagagcatgagaatgttgggaagggaggagagattcttgcacatctgggaagctgacaatccatcagcatggccagaaggaaaataaggaggaggagcagaaatagatgaggctggatatagaagcagggctgaagctgtgtcaattgtggtaa

SEQ ID NO: 211839 - DNA, 542 bp, Homo sapiens
ttctgatgtaagaaatgatggtcaccagctggttactgctaccaccccacaaccccgagcatactggacgaatgtctaagccttgtggttagtggggacaatgctggtggagtctgaagttgtcatgcagtgactcatgcaagcttaggcagatttggtgatatatgacacagagatgcaaagaaatgttgtagctgacacacacaggctggctctgggagatgcagaaggagcacgtcacccaaaatagagccagacagacatccttaaggaaggagcaaargggctgcatcttaaagaatgtagaaaggatttgtcatgagagatggggcaggaagttcttgagaggcagagggagagcatgagaatgttgggaagggaggagagattcttgcacatctgggaagctgacaatccatcagcatggccagaaggaaaataaggaggaggagcagaaatagatgaggctggatatagaagcagggctgaagctgtgtcaattgtggtaaagagttgtgattctatccagaacgcaataggta

SEQ ID NO: 211840 - DNA, 551 bp, Homo sapiens
agatctacagatttgattctgatgtaagaaatgatggtcaccagctggttactgctaccaccccacaaccccgagcatactggacgaatgtctaagccttgtggttagtggggacaatgctggtggagtctgaagttgtcatgcagtgactcatgcaagcttaggcagatttggtgatatatgacacagagatgcaaagaaatgttgtagctgacacacacaggctggctctgggagatgcagaaggagcacgtcacccaaaatagagccagacagacatccttaaggaaggagcaaaggggctgcatcttaaagaatgtagaaaggatttgtcatgagagatggggcaggaagttcttsagaggcagagggagagcatgagaatgttgggaagggaggagagattcttgcacatctgggaagctgacaatccatcagcatggccagaaggaaaataaggaggaggagcagaaatagatgaggctggatatagaagcagggctgaagctgtgtcaattgtggtaaagagttgtgattctatccagaacgca

SEQ ID NO: 211841 - DNA, 542 bp, Homo sapiens
ttctgatgtaagaaatgatggtcaccagctggttactgctaccaccccacaaccccgagcatactggacgaatgtctaagccttgtggttagtggggacaatgctggtggagtctgaagttgtcatgcagtgactcatgcaagcttaggcagatttggtgatatatgacacagagatgcaaagaaatgttgtagctgacacacacaggctggctctgggagatgcagaaggagcacgtcacccaaaatagagccagacagacatccttaaggaaggagcaaaggggctgcatcttaaagaatgtagaaaggatttgtcatgagagatggggcaggaagttcttgagaggcagagggagagcatgagaatgttrggaagggaggagagattcttgcacatctgggaagctgacaatccatcagcatggccagaaggaaaataaggaggaggagcagaaatagatgaggctggatatagaagcagggctgaagctgtgtcaattgtggtaaagagttgtgattctatccagaacgcaataggta

SEQ ID NO: 211842 - DNA, 540 bp, Homo sapiens
tttgattctgatgtaagaaatgatggtcaccagctggttactgctaccaccccacaaccccgagcatactggacgaatgtctaagccttgtggttagtggggacaatgctggtggagtctgaagttgtcatgcagtgactcatgcaagcttaggcagatttggtgatatatgacacagagatgcaaagaaatgttgtagctgacacacacaggctggctctgggagatgcagaaggagcacgtcacccaaaatagagccagacagacatccttaaggaaggagcaaaggggctgcatcttaaagaatgtagaaaggatttgtcatgagagatggggcaggaagttcttgagaggcagagggagagcatgagaatgttgggaagggaggagagattctygcacatctgggaagctgacaatccatcagcatggccagaaggaaaataaggaggaggagcagaaatagatgaggctggatatagaagcagggctgaagctgtgtcaattgtggtaaagagttgtgattctatccagaacgca

SEQ ID NO: 211843 - DNA, 540 bp, Homo sapiens
tttgattctgatgtaagaaatgatggtcaccagctggttactgctaccaccccacaaccccgagcatactggacgaatgtctaagccttgtggttagtggggacaatgctggtggagtctgaagttgtcatgcagtgactcatgcaagcttaggcagatttggtgatatatgacacagagatgcaaagaaatgttgtagctgacacacacaggctggctctgggagatgcagaaggagcacgtcacccaaaatagagccagacagacatccttaaggaaggagcaaaggggctgcatcttaaagaatgtagaaaggatttgtcatgagagatggggcaggaagttcttgagaggcagagggagagcatgagaatgttgggaagggaggagagattcttrcacatctgggaagctgacaatccatcagcatggccagaaggaaaataaggaggaggagcagaaatagatgaggctggatatagaagcagggctgaagctgtgtcaattgtggtaaagagttgtgattctatccagaacgca

SEQ ID NO: 211844 - DNA, 513 bp, Homo sapiens
ttgattctgatgtaagaaatgatggtcaccagctggttactgctaccaccccacaaccccgagcatactggacgaatgtctaagccttgtggttagtggggacaatgctggtggagtctgaagttgtcatgcagtgactcatgcaagcttaggcagatttggtgatatatgacacagagatgcaaagaaatgttgtagctgacacacacaggctggctctgggagatgcagaaggagcacgtcacccaaaatagagccagacagacatccttaaggaaggagcaaaggggctgcatcttaaagaatgtagaaaggatttgtcatgagagatggggcaggaagttcttgagaggcagagggagagcatgagaatgttgggaagggaggagagattcttgcacatctgggaagctgacartccatcagcatggccagaaggaaaataaggaggaggagcagaaatagatgaggctggatatagaagcagggctgaagctgtgtcaattgtggtaa

SEQ ID NO: 211845 - DNA, 263 bp, Homo sapiens
ggagcaaaggggctgcatcttaaagaatgtagaaaggatttgtcatgagagatggggcaggaagttcttgagaggcagagggagagcatgagaatgttgggaagggaggagagattcttgcacatctgggaagctgacaatccatcrgcatggccagaaggaaaataaggaggaggagcagaaatagatgaggctggatatagaagcagggctgaagctgtgtcaattgtggtaaagagttgtgattctatccagaacgcaat

SEQ ID NO: 211846 - DNA, 263 bp, Homo sapiens
ggagcaaaggggctgcatcttaaagaatgtagaaaggatttgtcatgagagatggggcaggaagttcttgagaggcagagggagagcatgagaatgttgggaagggaggagagattcttgcacatctgggaagctgacaatccatcagcatggycagaaggaaaataaggaggaggagcagaaatagatgaggctggatatagaagcagggctgaagctgtgtcaattgtggtaaagagttgtgattctatccagaacgcaat

SEQ ID NO: 211847 - DNA, 263 bp, Homo sapiens
ggagcaaaggggctgcatcttaaagaatgtagaaaggatttgtcatgagagatggggcaggaagttcttgagaggcagagggagagcatgagaatgttgggaagggaggagagattcttgcacatctgggaagctgacaatccatcagcatggccagaaggaaaataaggaggaggagcagaaatagatgaggctggatatagaagcagggctgaagctgtgtyaattgtggtaaagagttgtgattctatccagaacgcaat

SEQ ID NO: 211848 - DNA, 263 bp, Homo sapiens
ggagcaaaggggctgcatcttaaagaatgtagaaaggatttgtcatgagagatggggcaggaagttcttgagaggcagagggagagcatgagaatgttgggaagggaggagagattcttgcacatctgggaagctgacaatccatcagcatggccagaaggaaaataaggaggaggagcagaaatagatgaggctggatatagaagcagggctgaagctgtgtcrattgtggtaaagagttgtgattctatccagaacgcaat

SEQ ID NO: 211849 - DNA, 442 bp, Homo sapiens
cctggcctttccatccttcaacttcccctctcccacgctgtgaatgattgtattggacatttttgttttaatgtcagtgacaggggaacacaggtagctctaatatagctgtgacccagatgcttctgtttctagcaygtatttattttgtagcaaacatttacatccatgatgtttcactgtcttttgaaaataattaggcaatatctcatctgaggtaggatgtttctaggggttgtgttctgagggaggaaaactaatctgttctctttccactgcattctaggaacagtaagaggaccttgtgcatgaataatttgtttccacactacagagtgggtaataagcagattagtacaaacaattctgcttcacttcaataacagcctcctccaactcattttttctcaacaaacttatttttccagcagaagaatcccag

SEQ ID NO: 211850 - DNA, 442 bp, Homo sapiens
cctggcctttccatccttcaacttcccctctcccacgctgtgaatgattgtattggacatttttgttttaatgtcagtgacaggggaacacaggtagctctaatatagctgtgacccagatgcttctgtttctagcatgtatttattttgyagcaaacatttacatccatgatgtttcactgtcttttgaaaataattaggcaatatctcatctgaggtaggatgtttctaggggttgtgttctgagggaggaaaactaatctgttctctttccactgcattctaggaacagtaagaggaccttgtgcatgaataatttgtttccacactacagagtgggtaataagcagattagtacaaacaattctgcttcacttcaataacagcctcctccaactcattttttctcaacaaacttatttttccagcagaagaatcccag

SEQ ID NO: 211851 - DNA, 442 bp, Homo sapiens
cctggcctttccatccttcaacttcccctctcccacgctgtgaatgattgtattggacatttttgttttaatgtcagtgacaggggaacacaggtagctctaatatagctgtgacccagatgcttctgtttctagcatgtatttattttgtagcaaacatttacatccatgatgtttyactgtcttttgaaaataattaggcaatatctcatctgaggtaggatgtttctaggggttgtgttctgagggaggaaaactaatctgttctctttccactgcattctaggaacagtaagaggaccttgtgcatgaataatttgtttccacactacagagtgggtaataagcagattagtacaaacaattctgcttcacttcaataacagcctcctccaactcattttttctcaacaaacttatttttccagcagaagaatcccag

SEQ ID NO: 211852 - DNA, 460 bp, Homo sapiens
gtgtggtggctcacactggtaatcgcaacactttgggaggctgaggcaggaggatggctcgaggccaagagtttgcgataggccttggaaacaaagggggagtcaccatccctacagaaaaatacatgaattagcctagtgtggtggcatgttcctgtagtcccagctacttgggaggctgaggtgggaggatcacttgagcccagggaggctgagactgcagtgagtcatgatcaggcctctgcactccagcctgggtgacagagtgagaccctgtctcaaaacaacaaaaaagtagcagcyaacatcaactgaccttttgtaccaggtgcctattgataccatagtttaatttcttataactgtttcttatttcacttaccaactctgtcttcagttactcccagatttttactgtgtgtgtacagatgaccttttgtttagactgaattgtctcccc

SEQ ID NO: 211853 - DNA, 596 bp, Homo sapiens
agtgaatgacagcataaatatggtagaaccattggattggtggctctggaggaattgaataattattagacttgaagcattagatggtgcaytagtgagggcatctccaactaagtctaccatcaagtcatggtgatttattatctcaaatatatgacaaatttatctacttatttccaaaactcccatatctagtttaagtaatcaaatttcttgccttggcaagcatgttgctttgtaattgactcacctgtatccaatttgaattccttaaaatccattctatacattgtaaccatagtgatatttacaaatgtgaaatctggtcaaatcattcttctgcttagtagtcttggatttctcattctcttaggaagcatcttccactacttatttcagcattatctgcacaatgcttcccctcacttcctcacaatgtggtttcaggcacaactcccaaggccccactctggcctcggggagcagattgttccccctgcaggaaaacctttgttctccactcagttaactgctgtttaccctttagatctcagcttcagtgttgctttcttaggggaaacttctctgactcacat

SEQ ID NO: 211854 - DNA, 596 bp, Homo sapiens
agtgaatgacagcataaatatggtagaaccattggattggtggctctggaggaattgaataattattagacttgaagcattagatggtgcactagtgagggcatctccaactaagtctaccatcaagtcatggtgatttattatctcaaatatatgacaaatttatctacttatttccaaaactcccatatctagtttaagtaatcaaatttcttgccttggcaagcatgttgctttgtaattgactcacctgtatccaatttgaattccttaaaatccattctatacattgtaaccatagtgatatttacaaatgtgaaatctggtcaaatyattcttctgcttagtagtcttggatttctcattctcttaggaagcatcttccactacttatttcagcattatctgcacaatgcttcccctcacttcctcacaatgtggtttcaggcacaactcccaaggccccactctggcctcggggagcagattgttccccctgcaggaaaacctttgttctccactcagttaactgctgtttaccctttagatctcagcttcagtgttgctttcttaggggaaacttctctgactcacat

SEQ ID NO: 211855 - DNA, 595 bp, Homo sapiens
gttcagaatgatctgccacacaacatgtgcgggttatatttatagccagaggaaaaaagtgacatacagaaaacagaagtgaggtatagaggtggctggattggttacagacctggttacagcccggatttgccttcttggaacttgttttgaacagctggctgccggccattgactgacactcggctgatgtgattggctgaaccgccgctatttgttaccatgatacattcccaagtcagatttwcagtttgtttctatactaaattaggttgcgattcttcttgttcttcttcttttttcttttttgaggcggagtctcgctctgtcgcccaggctggagtgcagtggcgcgatctcagctcacagcaagctccgcctcccaggttcacgccattctcctgtcccggcctcccgagtagctgggactgcaggctgccgccaccaagcccggctaatttttttgtattttttttttttagtagagactgggtttcaccttgtaagccatgatggtctcgatttcctgacctcatgagccacccgtctcggcctcccaaagtgctgggattacaggcgtgcagccacgcgcccg

SEQ ID NO: 211856 - DNA, 595 bp, Homo sapiens
gttcagaatgatctgccacacaacatgtgcgggttatatttatagccagaggaaaaaagtgacatacagaaaacagaagtgaggtatagaggtggctggattggttacagacctggttacagcccggatttgccttcttggaacttgttttgaacagctggctgccggccattgactgacactcggctgatgtgattggctgaaccgccgctatttgttaccatgatacattcccaagtcagattttcagtttgtttctatactaaattaggttgcgattcttcttgttcttcttcttttttcttttttgaggcggagtctcgctctgtcgcccaggctggagtgcagtggcgcgatctcagctcacagcaagctccgcctcccaggttcaygccattctcctgtcccggcctcccgagtagctgggactgcaggctgccgccaccaagcccggctaatttttttgtattttttttttttagtagagactgggtttcaccttgtaagccatgatggtctcgatttcctgacctcatgagccacccgtctcggcctcccaaagtgctgggattacaggcgtgcagccacgcgcccg

SEQ ID NO: 211857 - DNA, 407 bp, Homo sapiens
tccagagaggcgtgggaatgaggcagcagtcacgtcccatttccctcttagctaagtaatcatatcttgaagctgcttgctatgtagactagactgactgtcatcagctatagattaacctaagagtgtctttgaatattttttccagtggcaaatatttgcttctgttgtatcgtagctgaaaggaatgctgggaaacaaaataaagacaagcattcattagaataagtgatccagtcacaatgaatcaatttgaacttttttttttttcacaaagtcatactttgaaaayttccagccgtaaattgaaatagtctccaaaatgtgaatttttttccctggttctaagatgaccagctttcttagagagtgaactacaccataagaaaaatgatatgaccatgttt

SEQ ID NO: 211858 - DNA, 407 bp, Homo sapiens
tccagagaggcgtgggaatgaggcagcagtcacgtcccatttccctcttagctaagtaatcatatcttgaagctgcttgctatgtagactagactgactgtcatcagctatagattaacctaagagtgtctttgaatattttttccagtggcaaatatttgcttctgttgtatcgtagctgaaaggaatgctgggaaacaaaataaagacaagcattcattagaataagtgatccagtcacaatgaatcaatttgaacttttttttttttcacaaagtcatactttgaaaacktccagccgtaaattgaaatagtctccaaaatgtgaatttttttccctggttctaagatgaccagctttcttagagagtgaactacaccataagaaaaatgatatgaccatgttt

SEQ ID NO: 211859 - DNA, 407 bp, Homo sapiens
tccagagaggcgtgggaatgaggcagcagtcacgtcccatttccctcttagctaagtaatcatatcttgaagctgcttgctatgtagactagactgactgtcatcagctatagattaacctaagagtgtctttgaatattttttccagtggcaaatatttgcttctgttgtatcgtagctgaaaggaatgctgggaaacaaaataaagacaagcattcattagaataagtgatccagtcacaatgaatcaatttgaacttttttttttttcacaaagtcatactttgaaaacttccagccrtaaattgaaatagtctccaaaatgtgaatttttttccctggttctaagatgaccagctttcttagagagtgaactacaccataagaaaaatgatatgaccatgttt

SEQ ID NO: 211860 - DNA, 663 bp, Homo sapiens
agtgttttcaggtttttcactgtgaagttacttttttcccatgtctatattgtatgtatgcttttggaggaagtcatcatgcagagctcatacttaaaggagtggggagttagccccacctccttgatggctgtctrtatcaggtatttggaattcttctgtgtaagagatttctattcagtccatttgcatatctgtttaatcatttatttataccagtatgggtccacagatagttactttaatcttttggttgttatctaattgtacagtattttgttgctctttgttcatacctgtggccattggtagctctttccactggctccttttacataatttcatgttttttttttataatttatttctgttacttcaaaagtaccctggctcatatattttctgtcccagtcctagtttcagctatttcttctaatagccctgatttcttttgttagagaatggtatgaaaaacttacatctggccactaaatgtggtcatggcatcaggacacttagagctgacagtgcaaagaaatatatgtgtgtcttctaacttatatgtacccacttaattataaaggtttctatgtggaaccatctatgtatatgttaagctaaatgtgagtttatacttacgttgtatatatatattctgactca

SEQ ID NO: 211861 - DNA, 663 bp, Homo sapiens
agtgttttcaggtttttcactgtgaagttacttttttcccatgtctatattgtatgtatgcttttggaggaagtcatcatgcagagctcatacttaaaggagtggggagttagccccacctccttgatggctgtctatatcaggtatttggaattcttctgtrtaagagatttctattcagtccatttgcatatctgtttaatcatttatttataccagtatgggtccacagatagttactttaatcttttggttgttatctaattgtacagtattttgttgctctttgttcatacctgtggccattggtagctctttccactggctccttttacataatttcatgttttttttttataatttatttctgttacttcaaaagtaccctggctcatatattttctgtcccagtcctagtttcagctatttcttctaatagccctgatttcttttgttagagaatggtatgaaaaacttacatctggccactaaatgtggtcatggcatcaggacacttagagctgacagtgcaaagaaatatatgtgtgtcttctaacttatatgtacccacttaattataaaggtttctatgtggaaccatctatgtatatgttaagctaaatgtgagtttatacttacgttgtatatatatattctgactca

SEQ ID NO: 211862 - DNA, 663 bp, Homo sapiens
agtgttttcaggtttttcactgtgaagttacttttttcccatgtctatattgtatgtatgcttttggaggaagtcatcatgcagagctcatacttaaaggagtggggagttagccccacctccttgatggctgtctatatcaggtatttggaattcttctgtgtaagagatttctattcagyccatttgcatatctgtttaatcatttatttataccagtatgggtccacagatagttactttaatcttttggttgttatctaattgtacagtattttgttgctctttgttcatacctgtggccattggtagctctttccactggctccttttacataatttcatgttttttttttataatttatttctgttacttcaaaagtaccctggctcatatattttctgtcccagtcctagtttcagctatttcttctaatagccctgatttcttttgttagagaatggtatgaaaaacttacatctggccactaaatgtggtcatggcatcaggacacttagagctgacagtgcaaagaaatatatgtgtgtcttctaacttatatgtacccacttaattataaaggtttctatgtggaaccatctatgtatatgttaagctaaatgtgagtttatacttacgttgtatatatatattctgactca

SEQ ID NO: 211863 - DNA, 616 bp, Homo sapiens
gaattcttctgtgtaagagatttctattcagtccatttgcatatctgtttaatcatttatttataccagtatgggtccacagatagttactttaatcttttggttgttatctaattgtacagtattttgttgctctttgttcatacctgtggccattggtagctctttccactggctccttttacataatttcatgttttttttttataatttatttctgttacttcaaaagtaccctggctcatatattttctgtcccagtcctagtttcagctatttcttctaatagccctgatttcttttgttagagaatggtatgaaaaacttacatctggccactaaatgtggtcatggcatcaggacacttasagctgacagtgcaaagaaatatatgtgtgtcttctaacttatatgtacccacttaattataaaggtttctatgtggaaccatctatgtatatgttaagctaaatgtgagtttatacttacgttgtatatatatattctgactcattatgacagagatcattctaggcttccctattttttatctgtaacttctcgctgtaatagtgaggaacctggctcctactatctgccatttatttcatcccct

SEQ ID NO: 211864 - DNA, 383 bp, Homo sapiens
aaaaaagggcagcagccccagtcagagacctatagataaaacccccatctccctggaacagrgcacctaggggaaagggcggctgtgggcacagcttcagcagacttaaagcatctttgaaaagcctgatggctctgaagagagcagcagatctccctgcacagtattcgagctctgataagggtcagactgcctcctcaagtgggtccctgacccccgtgtatcctgactgggagacacctcccagtaggtgccaacaggcacctcatacaggagagctctggctggcatctggtgggtgccctctgggacaaaacttccagaggaagaaacaggcagcaatcttggctgttctccagcctctgctggtgatacccaggcaa

SEQ ID NO: 211865 - DNA, 383 bp, Homo sapiens
gaaaaaagggcagcagccccagtcagagacctatagataaaacccccatctccctggaacagagcacctaggggaaagggcggctgtgggcacagcttcagcagacttaaagcatctttgaaaagcctgatggctctgaagagagcagcagatctcccwgcacagtattcgagctctgataagggtcagactgcctcctcaagtgggtccctgacccccgtgtatcctgactgggagacacctcccagtaggtgccaacaggcacctcatacaggagagctctggctggcatctggtgggtgccctctgggacaaaacttccagaggaagaaacaggcagcaatcttggctgttctccagcctctgctggtgatacccaggca

SEQ ID NO: 211866 - DNA, 348 bp, Homo sapiens
catctctgaaaaaagggcagcagccccagtcagagacctatagataaaacccccatctccctggaacagagcacctaggggaaagggcggctgtgggcacagcttcagcagacttaaagcatctttgaaaagcctgatggctctgaagagagcagcagatctccctgcacagtattcgagctctgataagggtcagactgcctcctcaagtgggtccctgacccccgtgtatcctgactgggagacacctcccagtaggtgccaacaggcacctcatacaggagagctctggctggcatstggtgggtgccctctgggacaaaacttccagaggaagaaacaggcagc

SEQ ID NO: 211867 - DNA, 539 bp, Homo sapiens
aatctgtttattttgtttcctttctataatttcttcaataattagttctgttctattttccattaaaatatttaaatcttgtatgaatttttgtcagattagaaatttagggcgtttcttaatttctctatactctagcttttgacttwttttttctgacctaagaggtatttagagcacattttagattttttattttgactaatcatttaaaatgtatactaatcttcaatttaaataaaaaactggtctatagtgacaaaaattacaaatgagcctaactaataaattatcagctgtgtttatatgtataagcatgcacagattttgttaaatatgtacatagtatattggtgagcttatttttatcattcttaactcattgtgtagtctaaacgttggggaaaaaataaaatacaataatcagatggtgtgaataagaaaattgttctaatgtttgtaaaccaagcaactgttttaactgctcccctcttcctgattgacttctaaaagggattgatccatattgggtcctatca

SEQ ID NO: 211868 - DNA, 539 bp, Homo sapiens
aatctgtttattttgtttcctttctataatttcttcaataattagttctgttctattttccattaaaatatttaaatcttgtatgaatttttgtcagattagaaatttagggcgtttcttaatttctctatactctagcttttgactttttttttctgacctaagaggtatttagagcacattttagattttttattttgactaatcatttaaaatgtatactaatcwtcaatttaaataaaaaactggtctatagtgacaaaaattacaaatgagcctaactaataaattatcagctgtgtttatatgtataagcatgcacagattttgttaaatatgtacatagtatattggtgagcttatttttatcattcttaactcattgtgtagtctaaacgttggggaaaaaataaaatacaataatcagatggtgtgaataagaaaattgttctaatgtttgtaaaccaagcaactgttttaactgctcccctcttcctgattgacttctaaaagggattgatccatattgggtcctatca

SEQ ID NO: 211869 - DNA, 539 bp, Homo sapiens
aatctgtttattttgtttcctttctataatttcttcaataattagttctgttctattttccattaaaatatttaaatcttgtatgaatttttgtcagattagaaatttagggcgtttcttaatttctctatactctagcttttgactttttttttctgacctaagaggtatttagagcacattttagattttttattttgactaatcatttaaaatgtatactaatcttcaatttaaataaaaaactggtctatagtgacaaaaattacaaatgagcctaactaataaattatcagctgtgtttatatgtataagcatgcacagattttgktaaatatgtacatagtatattggtgagcttatttttatcattcttaactcattgtgtagtctaaacgttggggaaaaaataaaatacaataatcagatggtgtgaataagaaaattgttctaatgtttgtaaaccaagcaactgttttaactgctcccctcttcctgattgacttctaaaagggattgatccatattgggtcctatca

SEQ ID NO: 211870 - DNA, 601 bp, Homo sapiens
  misc_feature (1)...(601): n = A,T,C or G
ccatttatttatagagttactttgtcttttactaattcaatgatctgtttaatcttttattaaattataaaaatgataaatacttttaaataagtgaaaaatgtccttcactctttagacccataatcttatctcaggaaataattgcagttgagaaaatgggccatatccttcaagatacgtacatggtgattgaacatcacttcatattttcatatttcgtggacatttgtgccaatacctattgatctatcttaatccttttcatggttgcataatattttattatatggatgtatcacaatttaccagtaccagtcaactgctggaggcatttaggctccttctaatatttgctttgagctctttatataattaaaaattaaccccctcagccaggtgtggcagctcacacctgtaatcccagcattttggaaggctgaggtgagagaactgcctgagtgtaggagatcaccgaccaaccgtggtcaacagtagtgacactttgtctctactamaaattaaaaaaaaaaaanatgagctacacgttgcagtgcacacctgtagtccgaacaactggggaggctaagactgagggatc

SEQ ID NO: 211871 - DNA, 593 bp, Homo sapiens
aagcttaagccagaaagggccactgcagagacacgacaagtttaaatcacaggaaaatgcttcgtacttaggatgagggtactatatttcccctatacagaattactcccataatttttcaagataaatgaaccgatttcctttctcgtggttattatagactcgatctaagtttcgtggagtggaatgcacgggggacttcactgctctgagtctgaagtgcccaccttctcctcatccccgcccccaacgcccaaaagatgcccccatgggtcatatggcaagtgtgcagacagcagtgacatgcaggtgwctgagattctaaaccacccaggaataaccctagtaagcagtgggcaggacccacagtgcagggagggcacagggcttctgggggagccacaatgcaaccagcttgccttcccatgtcagtccgcagaccaaggcaatgcaagaggactggcaggaaccttggcaagctccctctaaagtttaccggaaaaaacattggagaatatctaagatcattctgaaagagaaaataacacaaaggtcacgacgtatcagacacactctgaggctctgctagctca

SEQ ID NO: 211872 - DNA, 427 bp, Homo sapiens
ttacaattcttgctcttaactgtcatgcctattttawaaaacataagaggcaaaaagtagtttgtggttttgcctcttccttctttcctggcgttcctgggttcccctgggatcatttctggtttggcaggacttccttcggggcttctttagagtaggttctctcagcgtttgcttgcccagcagtgtcctcaccccacctcgttactgaaggataccattgctggatgtggggttctgggagagtggttcttgtctcctagcactttaaaaatcgacactgtttccccatcttctggcttctgtggtttctgatgagcaacctgcagtcactcaaagaaatctcccctttcccctccgtgcagatgagagaggctttcagacactccaagtgtggtggtgttttaagttaaaggacgggaaggaa

SEQ ID NO: 211873 - DNA, 559 bp, Homo sapiens
gccggggccacactaaaggcagcccttttcctgctttactctcggcaaccctgagaaagaggggccatccacaggtgaaaactggaacacccagggagtgggtgtgacggacgaagcagaggctgctgcgcggggggtccagggggccacacaccaaagctgtgtggcctaggaagggtgctctctccccactgccacccccatctcactgcagggccatttgatgtccctggagctgtctcagtcccctgttctcagttcctctgatgaccaggagaaaccctggatgcccaggcctggcctgctgcagacactcagagcagaggagtggccaatgcaggaaagccatggcctcctgccaccccaccctgtgcccacagccaccgcctcccacattggattctggcaggatactcggttgccccacagccactttcaatccgcactggatggggcagcgccaacacaggcaccaaagcggasgccggagctccacctgcatctgcctggaaacctcttgcctgaggaccctgatgggtccacaaggcgggggagaggc

SEQ ID NO: 211874 - DNA, 559 bp, Homo sapiens
gccggggccacactaaaggcagcccttttcctgctttactctcggcaaccctgagaaagaggggccatccacaggtgaaaactggaacacccagggagtgggtgtgacggacgaagcagaggctgctgcgcggggggtccagggggccacacaccaaagctgtgtggcctaggaagggtgctctctccccactgccacccccatctcactgcagggccatttgatgtccctggagctgtctcagtcccctgttctcagttcctctgatgaccaggagaaaccctggatgcccaggcctggcctgctgcagacactcagagcagaggagtggccaatgcaggaaagccatggcctcctgccaccccaccctgtgcccacagccaccgcctcccacattggattctggcaggatactcggttgccccacagccactttcaatccgcactggatggggcagcgccaacacaggcaccaaagcggacsccggagctccacctgcatctgcctggaaacctcttgcctgaggaccctgatgggtccacaaggcgggggagaggc

SEQ ID NO: 211875 - DNA, 561 bp, Homo sapiens
atacttcagcaactaactgcatttcttagagcaatataggttgcccacccagcacaaaccccactaaatgctttctcaaattgcaaataggaagccacgattcttaacaatctgagctcrctgtattgttgtatgacaactgtgttaagtttgttcctgatattataacaaatggagtacatctcttatctaacaagatgaaaatcttgagataaatggtttattttccacatgtctctacgtgtttccatgaacatgtaagtagcttcgctatttttctaaaatagggaattgcttacagacattttatgcaaaattctttgagaaaaatttgtccccctaagaggttccctaagttactgccttctgcccattttaaatgctgagtttggcacagaaaacgtttaagaaaatgacagaaaaatgagcgtcatcagcaacttcaaagtaaggccatacaattcagaatttgttactaaaagtctttcaggactaaaccacacatggaggtatttttcccctcatttctcaaagcagaaaaagctgtgttgtagatcgccc

SEQ ID NO: 211876 - DNA, 393 bp, Homo sapiens
atatcaatgtgcttggctccttttttaatgatctatgcctgtttctaagattttaagtcaatcccatggataatgaatttgtatttctcctttccccaaattgtggtttttatcaacataatgcctatatattcaaataggttatttaggcatgaggcataaatgtaaatattcttcatcgcatatgtgttgaaaacatccaacactagatgtgtagcttctaactttgaraatttgattggagaactacaggaattacttttttctgccttttgagtctgtagaagagaatgattttcaaatattctacattttctgactttcctaaagcttaatcccattaatgacttataagggtaattgagatttctcttgtttaatatccctatatgt

SEQ ID NO: 211877 - DNA, 480 bp, Homo sapiens
ctgagcagacagagagttccaggagaccacccaggatgactgatgctgaggggatggtgggggtgtgtggggatgggagtagggtagagaaggggtgatttttaaggtactgatataccttttcctgtagaggcaggctaagtaacatgctcagagcttcttgaagcacaacaaatatagtgaaaccaaaagctgggaaagctggccgtggccatcacctgatcattcacagagcaccttcagacctgggaatccaggtctctattcttctttgttccttccaaagagttttcatctttcccatctctagaagaagaggagacaatttactgttacaaggtttgcttatcatyaaaacgtaaaatatgccttcctaagacagtgaatatctgtgtgtgcgcacgtatgtgtgtgatgatcttgcatctctgaagtctgacttggggtgggccccagcttccttcccttgcctcctgccat

SEQ ID NO: 211878 - DNA, 443 bp, Homo sapiens
tttgttttcatgaaaatcacaatgctaatactgttaggggattattacagtggtgagcaatgctgcaatgaggctaaattcatagagttctcaataaacctgagcaggggaaaatatatatgagaaataaaatayaaatatgagaaataaacaaaataattataaattagggtcaaggctgttcttttctggggaggaagctattagttatcattatcgcactacattaaagaaattctcacatcatgcaagatttctagataataattgttataatttttgagtagctagtctgttccaagtaccatgcttagcacgttatttgcttggttctcatttgggcctcatatttaatctataggtagaaactattatcatgtccattttctatatatggacatgatacctaaaaccaatacctagaacatgtgaattcaaagttg

SEQ ID NO: 211879 - DNA, 418 bp, Homo sapiens
agtgaaattgcataagctcattaaaagtatgatagtggacaggatatttgtttaatctcatttttaagactgacaataataaccagactagttgcctcattcttgtttggttggtcagttgttacatatttgtgtatagccagtaggatgaatttaaccaatatacaactgtttgtgtgtgtgacagagagagggaagacggtgagacagagacatagagacacagataaaattagagaaygtgttttaagtaaattatttaaaatactgaaactttcaggaaactgatctccctgaatggagacttctttacctactttgagaccttacaatttaaagtcggggtcctcaaaccacagggatcgggatcacctaggagaattaaatggcgtatctcagaaccaccctgacctactga

SEQ ID NO: 211880 - DNA, 456 bp, Homo sapiens
tgaaattgcataagctcattaaaagtatgatagtggacaggatatttgtttaatctcatttttaagactgacaataataaccagactagttgcctcattcttgtttggttggtcagttgttacatatttgtgtatagccagtaggatgaatttaaccaatatacaactgtttgtgtgtgtgacagagagagggaagacggtgagacagagacatagagacacagataaaattagagaatgtgttttaagtaaattatttaaaatactgaaactttcaggaaactgatctccctgaatggagacttctttacctactttgaraccttacaatttaaagtcggggtcctcaaaccacagggatcgggatcacctaggagaattaaatggcgtatctcagaaccaccctgacctactgaatcaaaatctgcattttaataaaatccccaggtgattttt

SEQ ID NO: 211881 - DNA, 582 bp, Homo sapiens
gatcagtattttacataagctgaatacttaagcctcaccacacaggtaattaacctcaagtagtacaagaactttcatgtttcttttctaaattttgcctcaggtattaaccacccaaaaagtagcaggctgcctttaaacatctctggcaaatagctgggtagaatttcacatggcataataagaactttactaacataacttccaaaaaattaaaagctagtttggattgctgttgttgttgggtgcttggggctatttggagtgaaaattttctgcagctaattagaaattacacacgattaggaagcagagtctggcattgttccccttcaagtgttgggctagagctagttctaaagagagaatatgttgaagtttacaagatatcaatacaaaagtattgatatccatggtttgagtctggctatcttagcctcaacgaagagcattctaattgtcactgaaatcagatatgaccaggtggaaacaggattttcttagactgyctttaaaatgatctaagtgtgcaaattaccatcctaatctaattcctgaatatgcaaaactattctaattaaa

SEQ ID NO: 211882 - DNA, 387 bp, Homo sapiens
cctcccactttggaccaaggcaagtgtcctaggagatagggctggaaaaatagtagggctaataaaaaatcaagttacaaggcagcactgttttgtggcctaataatagggtgtgatgctgtcaggggaggatatttccctacacactcacgtcagtttgggaactattggcatatcaaggaaaaatggcctcgtaggaaaatagcagagtagtggctccaagaatttcttctggtagccgtgtcttaaggagggctgcaggggattgatttgtgcagttgtacagggattctcccctagggctacagtgtyattgttaggagtggaaggatttagaccgaacagtccaccagctatgtaactggtgtggggaagattcaagaactg

SEQ ID NO: 211883 - DNA, 493 bp, Homo sapiens
agttcaagggacccttccgagatgctagtgatacttctgtggaatrtaggggggaatgtgggttgtgtgtgtgtgtgtgtgtgtgtgtgtgtgtgtagggaggtgagaagaaaaaagaatggaaagtagtcagttatgtcctgggatgtatagaagaaagataaaacttcacctcacacctcacagaagtccttgcaaaacaattaccagttcagaaatctctctctctctctctccttctttctttttctttctttcttttttttttttttgagagtgtcactctgttcgcccaggctggagtacaatggagcgatctaagctcactgcagcctctgcctcctgggttcaagtgattctcctgcctcagctttctgagtagctgggagtaccagcgcctgccaccatgcctgactactttttgtatttttagtagagatgggggtttcaccatgttggctaggctggtctcaaactccaggcctcaagtgat

SEQ ID NO: 211884 - DNA, 493 bp, Homo sapiens
agttcaagggacccttccgagatgctagtgatacttctgtggaatgtaggggggaatgtgggttgtgtgtgtgtgtgtgtgtgtgtgtgtgtgtgtrgggaggtgagaagaaaaaagaatggaaagtagtcagttatgtcctgggatgtatagaagaaagataaaacttcacctcacacctcacagaagtccttgcaaaacaattaccagttcagaaatctctctctctctctctccttctttctttttctttctttcttttttttttttttgagagtgtcactctgttcgcccaggctggagtacaatggagcgatctaagctcactgcagcctctgcctcctgggttcaagtgattctcctgcctcagctttctgagtagctgggagtaccagcgcctgccaccatgcctgactactttttgtatttttagtagagatgggggtttcaccatgttggctaggctggtctcaaactccaggcctcaagtgat

SEQ ID NO: 211885 - DNA, 493 bp, Homo sapiens
agttcaagggacccttccgagatgctagtgatacttctgtggaatgtaggggggaatgtgggttgtgtgtgtgtgtgtgtgtgtgtgtgtgtgtgtagggaggtgagaagaaaaaagaatggaaagtagtcagttatgtcctgggatgtatagaagaaagataaaacttcacctcacacctcacagaagtccttgcaaaacaattaccagttcagaaatctctctctctctctctccttctttctttttctttctttcttttttttttttttgagagtgtcactctgttcgcccaggctggagtacaatggagcgatctaagctcactgcagcctctgcctcctgggttcaagtgattctcctgcctcagctttctgagtagctgggagtacmagcgcctgccaccatgcctgactactttttgtatttttagtagagatgggggtttcaccatgttggctaggctggtctcaaactccaggcctcaagtgat

SEQ ID NO: 211886 - DNA, 493 bp, Homo sapiens
agttcaagggacccttccgagatgctagtgatacttctgtggaatgtaggggggaatgtgggttgtgtgtgtgtgtgtgtgtgtgtgtgtgtgtgtagggaggtgagaagaaaaaagaatggaaagtagtcagttatgtcctgggatgtatagaagaaagataaaacttcacctcacacctcacagaagtccttgcaaaacaattaccagttcagaaatctctctctctctctctccttctttctttttctttctttcttttttttttttttgagagtgtcactctgttcgcccaggctggagtacaatggagcgatctaagctcactgcagcctctgcctcctgggttcaagtgattctcctgcctcagctttctgagtagctgggagtaccrgcgcctgccaccatgcctgactactttttgtatttttagtagagatgggggtttcaccatgttggctaggctggtctcaaactccaggcctcaagtgat

SEQ ID NO: 211887 - DNA, 505 bp, Homo sapiens
caggaatggctttaacttgttggcctttattctagaaaacagtagtttaatatcagctctattaaaataaattactttttagccaayattattcaccaagcaattaaatgaattcattcaagtaattgtttctatatattaagattcatccctaaagcgtgacacaactcacttgcagcacaacagaattgacaagagaggctggaactgggtctgctggttccagggatcttgtattctgggccaaggagacagcaaggtcagctcaggaaccacagagactcccaagggttctatccttcattctgaactatgctgacccatccttactggggtcatcttcctccttctctcttaagaagaaagatggtgagggctggagtagctcaagtactttccacttcgggcaggactgattcaggaactgaagaggtgacaacacatagcacttaacattttctagacaaaataacatatttcatattctatgacacagaacttaaag

SEQ ID NO: 211888 - DNA, 518 bp, Homo sapiens
tatgccatctcaggaatggctttaacttgttggcctttattctagaaaacagtagtttaatatcagctctattaaaataaattactttttagccaatattattcaccaagcaattaaatgaattcattcaagtaattgtttctatatattaagattcatccctaaagcgtgacacaactcacttgcagcacaacagaattgacaagagaggctggaactgggtctgctggttccagggatcttgtattctgggccaaggagacagcaaggtcagctcrggaaccacagagactcccaagggttctatccttcattctgaactatgctgacccatccttactggggtcatcttcctccttctctcttaagaagaaagatggtgagggctggagtagctcaagtactttccacttcgggcaggactgattcaggaactgaagaggtgacaacacatagcacttaacattttctagacaaaataacatatttcatattctatgacacagaacttaaaggtc

SEQ ID NO: 211889 - DNA, 590 bp, Homo sapiens
aatgatccttacataagaatttaagggaccaatttctactagcatttattgccagaaaaaacatttttttttttgcttagtaatcttgataataagaataatgtaatccattttctttccttggttttgttctgattttcaaaggctcaaagtcatattaggaattaagtgtggcatctttctggacaaattatttttatcttctttcttcttggtttctgatcatttatttctattttaattatacacattagaaaatgggtacgtaggatttactttgaaataagggatatctgtacaatacataaataaaaaatggagacatttcctccctgctttatatcaataactgttattagcctcagtgctgttttctatctatctatcatctatctcaaaaatatctctcattttatatttcttagtcattgatgcaaaagcctcttggatggtgtgtcttatacacaaaataatagcatcaaagaaactccttaaaaataattgttttctcaatgctctgtaatagtcctaaagctgattcataaaaaccaatgagccaaagmgaagcaaccaagaatactgtaaacagt

SEQ ID NO: 211890 - DNA, 631 bp, Homo sapiens
taatgggcatagcaccttttcaagaggagcctccaaggtatggctaaattattgaaagctggataagagtttgctaattttaaaaattattttaaaactcaattcccttataggcaaagggcaatgagtattctcagtcaaagaaataaagagtgtttcttcccacttagaattctcagggctgactaccactctactcctgtccagctctctgttgtcacctcccaacactgcttggtggttgttgctgcgatgttgttttacatgtttaattgaaataatacattgtacactcttaggaggcacatgttggtatcaaaagatgttagagttgttgtcaatacatttcacccgtatcaggaaaagctgagcagggtaaggcactggttacttttgggtcatccttgggagaacttcggtaaaggatgagctgaagctgataactaaaataacaatagactagccrtagccttaattatgaagatcagcgacaattctgatttttctgatgcatatgagatgtcacagtggcagcgaacacattaatcttgttcttacttaagagcaaatattcactgtccctaattgcaaaaggtacataactgcttatcagtcattttctttcccatgt

SEQ ID NO: 211891 - DNA, 469 bp, Homo sapiens
gagtttggccccctcttgctttctctcaccctctctttgcccatagaatgatgcagcaagaaagtgctcaccagatgctagccccttgaacctggatttcccaaacttcagaatcataagccaataaatttctgtccattaaaaattacccagtctgtggtattctgtagcacaaaacaaactaagccatacaaaataatatttraagaatatgaagagggttggaagtattttaaagacaaaaacagctcatgatttaagaaattattgagatttcctgggaatatggctctcttactttcatatcctatagattatgatcagatagaaatttagaaatactgggcttaggtcatgagtgacatagtcccaaccagcatggattattgttctaatttagaaactttcataaagagaaaaaagtaaaagtttttcttgtattaagtgaactacttaatactgatttgaa

SEQ ID NO: 211892 - DNA, 456 bp, Homo sapiens
gcattaatgcgtgttctcaaatatctctgtgtgtttcatgttgctataacagaatacccgaggctgggtaatttataaaaaggtttatttagctcacaattctacagacttggaaattcaagggcatgaccctggctcctggygagggctttttgctgtgcacattatggtggagaaggtaaaaggggaagcagatacatgagaagaggcaaacctgaggggcattctgtctttatagcaatccactcttcaggaattaatccattcctataactaatccagtgtcactggagcaagaactcactcactacctagataatgcaccaagccattcatgagggatccacacccatgattcaaacgcctcccgctagcccgcacctcccaacatcaccactttgaaaaccaaatttcaacttgcattttggtgggcacaaaccatacccaaatcataga

SEQ ID NO: 211893 - DNA, 560 bp, Homo sapiens
tgaagctctatgcacgattttgaataatgaagttggtgtttattttttattatttgtttatttrttttttagagacggggtcttgctctgttgctcaagctggagtgtagtagtgcaaccacagcttagtgcagccttgacctcctgggctcaagaaatcctgccacctcagcctcctgagtagctgggactacaggcatgcatcgccatgtctggctatttatttatttgtttgttttttgtagagatggggtctccctgtgttgcccgggctggtcttgaactcctggccttaagcaatcctcctgtcttagcctccaaaaacactgagattacaagtgtgaacaaccatggccagccttatttttatttttaatcagccttatcaagttgaattggtcattaatcttgtataacagtaatttggggcagcattggttgggcggagggtgggaaacatttaggaccctgtgggctacaactcgtagtgtgtgcacttattttattttgttttgttatattatatcatattatattatattatattatatgacattaca

SEQ ID NO: 211894 - DNA, 321 bp, Homo sapiens
agatcttcttggcttagcagctgaagactgacactgcctgatagatcacctcggaagcctacaggaccatcacagacgctctaggtaactctcacagtggaggataagtccatccccttcttaatcaatacggaggctaaccactccacattaccttcttttcaagggcctgtttcccttscctccataactgttgtgagtattgacagccaggcttctaaacctcttaaaactccccaactctggtgccaacttagacaatactcttttaagcactcctttttagttgtccccacctgcccagttcccttattaggctga

SEQ ID NO: 211895 - DNA, 321 bp, Homo sapiens
agatcttcttggcttagcagctgaagactgacactgcctgatagatcacctcggaagcctacaggaccatcacagacgctctaggtaactctcacagtggaggataagtccatccccttcttaatcaatacggaggctaaccactccacattaccttcttttcaagggcctgtttcccttcyctccataactgttgtgagtattgacagccaggcttctaaacctcttaaaactccccaactctggtgccaacttagacaatactcttttaagcactcctttttagttgtccccacctgcccagttcccttattaggctga

SEQ ID NO: 211896 - DNA, 635 bp, Homo sapiens
ccagatcttcttggcttagcagctgaagactgacactgcctgatagatcacctcggaagcctacaggaccatcacagacgctctaggtaactctcacagtggaggataagtccatccccttcttaatcaatacggaggctaaccactccacattaccttcttttcaagggcctgtttcccttccctcmataactgttgtgagtattgacagccaggcttctaaacctcttaaaactccccaactctggtgccaacttagacaatactcttttaagcactcctttttagttgtccccacctgcccagttcccttattaggctgagacactttaactaaattatctgcttccctgactattcctggactacagccacatctcattgccacccaccttaacccacaagtagaagatacctctattccctccttggcaacctatcatgcaccccttaccatctcattaaaacctaatcactcttacccctctcaatgccaatatcccatcccacagcatgctttgaaaggattaaagcctgttatcactcacctgctacagcatggccttttaaagcctataaactctccttacaattcccccattttacctgtcctaaaaccagacaagccttacaag

SEQ ID NO: 211897 - DNA, 606 bp, Homo sapiens
ctgacactgcctgatagatcacctcggaagcctacaggaccatcacagacgctctaggtaactctcacagtggaggataagtccatccccttcttaatcaatacggaggctaaccactccacattaccttcttttcaagggcctgtttcccttccctccataaytgttgtgagtattgacagccaggcttctaaacctcttaaaactccccaactctggtgccaacttagacaatactcttttaagcactcctttttagttgtccccacctgcccagttcccttattaggctgagacactttaactaaattatctgcttccctgactattcctggactacagccacatctcattgccacccaccttaacccacaagtagaagatacctctattccctccttggcaacctatcatgcaccccttaccatctcattaaaacctaatcactcttacccctctcaatgccaatatcccatcccacagcatgctttgaaaggattaaagcctgttatcactcacctgctacagcatggccttttaaagcctataaactctccttacaattcccccattttacctgtcctaaaaccagacaagccttacaag

SEQ ID NO: 211898 - DNA, 321 bp, Homo sapiens
agatcttcttggcttagcagctgaagactgacactgcctgatagatcacctcggaagcctacaggaccatcacagacgctctaggtaactctcacagtggaggataagtccatccccttcttaatcaatacggaggctaaccactccacattaccttcttttcaagggcctgtttcccttccctccataactgttgtgagtattgacagccaggcttctaaacctcttaaaactccccaactctggygccaacttagacaatactcttttaagcactcctttttagttgtccccacctgcccagttcccttattaggctga

SEQ ID NO: 211899 - DNA, 321 bp, Homo sapiens
agatcttcttggcttagcagctgaagactgacactgcctgatagatcacctcggaagcctacaggaccatcacagacgctctaggtaactctcacagtggaggataagtccatccccttcttaatcaatacggaggctaaccactccacattaccttcttttcaagggcctgtttcccttccctccataactgttgtgagtattgacagccaggcttctaaacctcttaaaactccccaactctggtgccaacttagacaatactcttttaagcactcctttttagttrtccccacctgcccagttcccttattaggctga

SEQ ID NO: 211900 - DNA, 600 bp, Homo sapiens
acctcggaagcctacaggaccatcacagacgctctaggtaactctcacagtggaggataagtccatccccttcttaatcaatacggaggctaaccactccacattaccttcttttcaagggcctgtttcccttccctccataactgttgtgagtattgacagccaggcttctaaacctcttaaaactccccaactctggtgccaacttagacaatactcttttaagcactcctttttagttgtccccacctgcccagttcccttattaggctgagacactttaactaaattatctgcttccctgactattcctggactacagccacatctcattgccacccaccttaacccacaagtagaagatacctctattccctccttggcaacctatcatgcaccccttaccatctcattaaaacctaatcactcttacccctctcaatgccaatatcccatcccacagcatgctttgaaagsattaaagcctgttatcactcacctgctacagcatggccttttaaagcctataaactctccttacaattcccccattttacctgtcctaaaaccagacaagccttacaagttagttcaagatct

SEQ ID NO: 211901 - DNA, 601 bp, Homo sapiens
cacctcggaagcctacaggaccatcacagacgctctaggtaactctcacagtggaggataagtccatccccttcttaatcaatacggaggctaaccactccacattaccttcttttcaagggcctgtttcccttccctccataactgttgtgagtattgacagccaggcttctaaacctcttaaaactccccaactctggtgccaacttagacaatactcttttaagcactcctttttagttgtccccacctgcccagttcccttattaggctgagacactttaactaaattatctgcttccctgactattcctggactacagccacatctcattgccacccaccttaacccacaagtagaagatacctctattccctccttggcaacctatcatgcaccccttaccatctcattaaaacctaatcactcttacccctctcaatgccaatatcccatcccacagcatgctttgaaaggattaaagmctgttatcactcacctgctacagcatggccttttaaagcctataaactctccttacaattcccccattttacctgtcctaaaaccagacaagccttacaagttagttcaagatct

SEQ ID NO: 211902 - DNA, 444 bp, Homo sapiens
tgctactttggttcatcagaaaacttcagcacacgtgtgttatataaatcactatcgctctatctcacaaagagactcaaaaagtaaagatgagagtgagaactcccactaaaaagtgaaaatgctcaaagggggraaatatggtatgagaccaccacttctcctgttgtccttcccagtttctccccaacctccccttttccctagtttataagacagcaaaaaagggagaaagcaaaaagctggaaaaaacagaagtaaaataaatacctagacgactttggcgccaccacctggccctggtggttaaagtaacaataatattaacccctgaccaaaactactgttgttatcggtaaatcccagacattgtatgagaaagcactgtaaaaactttttgttctgttagctgatgtatgtagcccccagtcatgttcctcaagc

SEQ ID NO: 211903 - DNA, 493 bp, Homo sapiens
gtacagcccatttgttgcaggaagtcagggaccccaaacggagggacmggctgaagccatggcagaagaacgtggattgtgaagattttatggacatttattagttccccaaattaatacttttgtaatttcttatgcctgactttactgcaatctctaaacataaattgtaaagatttcatggacacttatcacttccccaatcgatatccttgtgatttcctatgcctgtctttgctttaatctcttaatcctgtcagccgagaaggatgtatatcgtctcaggaccctgtaataattgcgttaagtacacaaattgtacagcatgtgtgtttgagcaatatgaaatgtggacatcctgaaaaaagaacaggataaccgcagtcgttcagggaataagagagataaccttaaactctgaccgctggtgagcccggcagaacagagccatatttctcttctttcaaaagcaaatgggagaaatatcactgaa

SEQ ID NO: 211904 - DNA, 347 bp, Homo sapiens
ttttaatgaaataaaagctgaaaacttcccacatttkgggagagatatggacattcagatcaagcaagctaaaaattcctcaaatggattaaatgccaaaaaaaaaaaaaagccaccttgagacacattatagtcgaactgtcaaaagacaatgacaaagagaattctaaaaacagcaattgaaaagcatcacgtcacatgtaaggaaacctccataagaataacagcagatttctcagcagaaacctcacaggccaggagagaatgggatgatatattctaagggctggaaaaaaaaaaaaaaaaaaagaccaccaagcaaaactgtcctctggaaatgaaggaga

SEQ ID NO: 211905 - DNA, 347 bp, Homo sapiens
ttttaatgaaataaaagctgaaaacttcccacatttggggagagatatggacattcagatcaagcaagctaaaaattcctmaaatggattaaatgccaaaaaaaaaaaaaagccaccttgagacacattatagtcgaactgtcaaaagacaatgacaaagagaattctaaaaacagcaattgaaaagcatcacgtcacatgtaaggaaacctccataagaataacagcagatttctcagcagaaacctcacaggccaggagagaatgggatgatatattctaagggctggaaaaaaaaaaaaaaaaaaagaccaccaagcaaaactgtcctctggaaatgaaggaga

SEQ ID NO: 211906 - DNA, 347 bp, Homo sapiens
ttttaatgaaataaaagctgaaaacttcccacatttggggagagatatggacattcagatcaagcaagctaaaaattcctcaaatggattaaatgccaaaaaaaaaaaaaagccaccttgagacacattatagtcgaactgtcaaaagacaatgacaaagmgaattctaaaaacagcaattgaaaagcatcacgtcacatgtaaggaaacctccataagaataacagcagatttctcagcagaaacctcacaggccaggagagaatgggatgatatattctaagggctggaaaaaaaaaaaaaaaaaaagaccaccaagcaaaactgtcctctggaaatgaaggaga

SEQ ID NO: 211907 - DNA, 347 bp, Homo sapiens
ttttaatgaaataaaagctgaaaacttcccacatttggggagagatatggacattcagatcaagcaagctaaaaattcctcaaatggattaaatgccaaaaaaaaaaaaaagccaccttgagacacattatagtcgaactgtcaaaagacaatgacaaagaraattctaaaaacagcaattgaaaagcatcacgtcacatgtaaggaaacctccataagaataacagcagatttctcagcagaaacctcacaggccaggagagaatgggatgatatattctaagggctggaaaaaaaaaaaaaaaaaaagaccaccaagcaaaactgtcctctggaaatgaaggaga

SEQ ID NO: 211908 - DNA, 501 bp, Homo sapiens
aacctgtcatttcaaatttttgagctacatagsacatgaaaagcatggaaaaagccaggccaaagtaatctcatttcctttttaaacaaactagtagtacaaacaagtagtacattctgatttcagaaagcattcaataccgtttctcatgaggcttcaggtaataagccacaattatcatgagtcgctctcacaaaaagactcttgcaggcaaataaggcaaatggagaaatacagtctggatgacagcataagtggatcagtggctggttaaacaaccatattcatactgtgatgattattggagcaatgtcaattttgattacaagtttccagtggtaacatttacagggctttgtcttgtatcctcttctgtatttatgtaaacatcttgcatataaataaacaaaggactgcttatgtactccaaggtggaactgagtccaattgagtaactcatctctgataccaaatatgcatttaaaagatccccagaggaaa

SEQ ID NO: 211909 - DNA, 504 bp, Homo sapiens
cgtgaattctcagtagcactataacctgtcatttcaaatttttgagctacataggacatgaaaagcatggaaaaagccaggccaaagtaatctcatttcctttttaaacaaactagtagtacaaacaagtagtacattctgatttcagaaagcattcaataccgtttctcatgaggcttcaggtaataagccacaattatcatgagtcgctctcacaaaaagactcttgcaggcaaataaggcaaatggagaaatacagtctggatgacagcataagtggatcagtggctggttaaacaaccatattcatactgtgatgattattggagcaatgtcaattttgattacaagtttccagtggtaacatttacagggctttgtcttgtatcctcttctgtrtttatgtaaacatcttgcatataaataaacaaaggactgcttatgtactccaaggtggaactgagtccaattgagtaactcatctctgataccaaatatgcattt

SEQ ID NO: 211910 - DNA, 492 bp, Homo sapiens
gctgattcttttcctgccattatattcttcttcttttttttttttttttggagacagaatcttactctgatgtccagactggagtgtagtggcragatcttggctcactgcaacctccgcctcccgggttcaagcgattctcctgcctcagcctcccgaatagctggaattaaaggtgtgtgccaccacgcctggctaatcttttgtatttttagtagagatgaggtttcatgttggccaggctggtcttgaactcctgacctcaggtgatccacccgcctcagcctcccaaagtgttgggattacaggcatgagccgctgtgcctggctcaccattagaacctaattctaaagtgcatttttaaggcctgggtttgttttgtcttttaattcttacttgtgactgtaatccagaaccttctactgctctgccttttattttatatccctttctctcttaccaatacctaggtctttctttttcctaatgtc

SEQ ID NO: 211911 - DNA, 562 bp, Homo sapiens
gaattctttactggacaaagccaaaaatcctcccaagctaagccccggttttggggtcacctgtcatgcaacagtaggaaccagaataggctctctctcactttgctaaatcttctraaactgtgaaatgaaacacaaagagaaatgtacacaaaacatgaatgtataactccagggattatcacaaaatgcccatcacccagacacccttctgctcctcccagtgaatatccactcccttcacctgactaatatctaatatcctgactttaacataatagtctagtttttgcctgtgtttggaatttatgtcagtggaatcatacattattttgtgtttggtgtctatcactcaacactgtgtttataaaattcacctatgttgctccatgtttaggtttgttcattttcattatccagtattgggttgcatgaatatacaacaagttattcaaccattccctaaacatttggattatgtccaggttttagctattataaaacaatgtggttatctctttgaacaccagagtttagttttgcctgtttaaggaaattttat

SEQ ID NO: 211912 - DNA, 334 bp, Homo sapiens
gggaattctgtactatctttgtaatttttctgtaaatctaaaactgtcataggagatgtcatcaagatggttgactagaggcgcttggtactcacctcctccacaaagaaggaccagaatagcaagtagataaccacacctcgaaaagagcatctaagagacaatatgggrtttttggcagggaagtgactgagaatgtctaagacacagaaggaaaggggaaaggtaagtgagaggtccccagtggcccacatccccaccactgacacctgcaaccctacccccagaagagtccctcagctctcacaagccctaagcctggtacaggaggctt

SEQ ID NO: 211913 - DNA, 334 bp, Homo sapiens
gggaattctgtactatctttgtaatttttctgtaaatctaaaactgtcataggagatgtcatcaagatggttgactagaggcgcttggtactcacctcctccacaaagaaggaccagaatagcaagtagataaccacacctcgaaaagagcatctaagagacaatatggggtttttggcagggaagtgaytgagaatgtctaagacacagaaggaaaggggaaaggtaagtgagaggtccccagtggcccacatccccaccactgacacctgcaaccctacccccagaagagtccctcagctctcacaagccctaagcctggtacaggaggctt

SEQ ID NO: 211914 - DNA, 334 bp, Homo sapiens
gggaattctgtactatctttgtaatttttctgtaaatctaaaactgtcataggagatgtcatcaagatggttgactagaggcgcttggtactcacctcctccacaaagaaggaccagaatagcaagtagataaccacacctcgaaaagagcatctaagagacaatatggggtttttggcagggaagtgactgagaatgtctaagacacagaaggaraggggaaaggtaagtgagaggtccccagtggcccacatccccaccactgacacctgcaaccctacccccagaagagtccctcagctctcacaagccctaagcctggtacaggaggctt

SEQ ID NO: 211915 - DNA, 499 bp, Homo sapiens
atgtctagattcatttttttgcatgtgaatgtccagttgctcagtcaacatttattgaaaaaactactctttctacattgtattgcctttgctcccttgcaactttgtcgaaccaattgacaatattttctggatctagttctgaattccctattctgtttcactgaactatatgtctattattttaccaacatcacactattctgatcactgaaatttatactaagtcctaaaatcaaacagtgttagacctctaactctgttctttttcttcagaattgtgttttctgttyaaggtctgttgccttttgacaaaaacttcaggatcattttgtcaatacctacaaagtgacttgctaccattaggttgggattgtgttaagtcatagatcaagttgggaagaatagaaatcttaacaaaattaaatcttttaattcatgaacttggaatatctcttcattcatttagatattctttgatctcattcatcagaatttt

SEQ ID NO: 211916 - DNA, 577 bp, Homo sapiens
gagctactaacaggagttgggatccacatctgcagactacacaaagacaacacagattaataacacaatcatcactgaaatcacagagcctccaagtgtttttatctgttttaatgsgttactagctgctaatctgtctgcatctccttcaagcactccagtccctggcattaaggtcaggtgtgcctgggatgcttttaatatttgttctttaaatttggaatatccaaagacaagtttgtagagtgttcttctagatgtttttttattctttcccaaattttgatcttattaagagtcattaatagtttccacaaatccttatgtttagctcctacagcgggccatatcatttgaggttgaggtgccactataccgtcatgtttccagataataggaactcttaccatatttcttactatttctaccatctgaccattttgttcagaccagctgaacatagtgtggccatggtatgcagactgagaggtgcaatttaagctaaacatccccttaggggaccaatcaataatgattccataggaatcattgtgcaacacctctgcctgttctgcaa

SEQ ID NO: 211917 - DNA, 458 bp, Homo sapiens
gatttgaggttaccatgaggcttgcaaatagcatgttataacccatgattttaaactgatgacaacttaactatgatcacaaaaacaaacaaacgagtaaagagaaaactaataaaaattatactttaactttgtctcccccactttttaactttttgttgtttctatttacatyttattgtactatttatttaaaatttgttctaattattatttctcgtaggtttctctttttgtcttcctactcatgatatgaatagttgacacactacaattacagtgttataatattctgtattttttgtgtacttactattactagtgaattttgtaccttcagatgatttcctgttgctcagttatatcctttcccttctgatggaggaacttcctttagcatttcttcctttagcatttctggtattggtgaaatccctcaggttttagcttttgtttgg

SEQ ID NO: 211918 - DNA, 574 bp, Homo sapiens
aagcttcttcatatttttcagaaagggatcttgtggrttgttgagagaatccaagttcactccaaataatgtgccagtgattacatccatggtgtaggccccaaagaaactgagtagagtaaaacatggaaaattaaaaccagcacctctttactttccttctgctatacacacagcaagaagtgctatgccagagcaagacaggtgaaaacccacacacaatcagaacaacctgctgcatcatctcccatcatactcatgaggcatttattgggtatcagtgatgcagctggccctgtgctgggagtgatggagacactaaggtgagttagacccacctctgagctcaaggacctcagtcatagggagacacagacccaataatcagacaattacagtagtttgtgttgagtgtggatggtaaaaggtgtgtcaacactgtgcttctgcaggacaagaataaaataattaactccttctcggccaatcaataaatttgacattgccagaccccacagtctacgcccagagctgatgtctcttcagcactttatagaacagccacaccctgttc

SEQ ID NO: 211919 - DNA, 574 bp, Homo sapiens
aagcttcttcatatttttcagaaagggatcttgtgggttgttgagagaatccaagttcactccaaataatgtgccagtgattacatccatggtgtaggccccaaagaaactgagtagagtaaaacatggaaaattaaaaccagcacctctttacyttccttctgctatacacacagcaagaagtgctatgccagagcaagacaggtgaaaacccacacacaatcagaacaacctgctgcatcatctcccatcatactcatgaggcatttattgggtatcagtgatgcagctggccctgtgctgggagtgatggagacactaaggtgagttagacccacctctgagctcaaggacctcagtcatagggagacacagacccaataatcagacaattacagtagtttgtgttgagtgtggatggtaaaaggtgtgtcaacactgtgcttctgcaggacaagaataaaataattaactccttctcggccaatcaataaatttgacattgccagaccccacagtctacgcccagagctgatgtctcttcagcactttatagaacagccacaccctgttc

SEQ ID NO: 211920 - DNA, 574 bp, Homo sapiens
aagcttcttcatatttttcagaaagggatcttgtgggttgttgagagaatccaagttcactccaaataatgtgccagtgattacatccatggtgtaggccccaaagaaactgagtagagtaaaacatggaaaattaaaaccagcacctctttactttccttctgctatacacacagcaagaagtgctatgccagagcaagacaggtgaaaacccacacacaatcagaacaayctgctgcatcatctcccatcatactcatgaggcatttattgggtatcagtgatgcagctggccctgtgctgggagtgatggagacactaaggtgagttagacccacctctgagctcaaggacctcagtcatagggagacacagacccaataatcagacaattacagtagtttgtgttgagtgtggatggtaaaaggtgtgtcaacactgtgcttctgcaggacaagaataaaataattaactccttctcggccaatcaataaatttgacattgccagaccccacagtctacgcccagagctgatgtctcttcagcactttatagaacagccacaccctgttc

SEQ ID NO: 211921 - DNA, 416 bp, Homo sapiens
agaaaaagaaggagagcttatagctcaaaccaaagaagcccttcccctctataacaggcctatttccttgtattttgatgcctaccataccgcatatgttcataatcctaaaaaaccagaagcagtctgcaatggtttgrcacgagaggcttatcagcagcagtcctaaacatctgtacagagaatgacaaatcggatgcccagactgtaacattaagtggtctacactgacacaacaccaacacctatattcagggaagactgttctgctaagtagtatgtcaaccaaaccagatcgtaagacaaagacatgcaatcctttaaattttactatcttaaagccagagctacctttttggtctacaggacagacagcactattaagagttgataggcaaggagcaggccttagaatt

SEQ ID NO: 211922 - DNA, 469 bp, Homo sapiens
ctaggaggttactgaaataaggagtatgagaaatggtgtaggttttgctgatgttttgtaacacatctcatgacaatcttcatttccttcaccaatttcctgtttcattaattcccttccacgtgctcttctgaaatttgcctcatattctttgatttctcttttacatgttggtttcatcaccttttactttttgctttcctggaaacacaaatgattctgattgtgacatgtcagaattatttgcaacattcccctttctgctgaaacatgagytcactgaatacacaatttagtaaagtgtaggatgcacatgtcgttttcgtggtcacaaccagctctgtagcattttataactacactggcagtgtgctgggaggtgtagagagaaatatttatcacatgtgtggctgacacaacctgccaagttattttaggagcctccttggaatcccagcaagaatgctac

SEQ ID NO: 211923 - DNA, 469 bp, Homo sapiens
ctaggaggttactgaaataaggagtatgagaaatggtgtaggttttgctgatgttttgtaacacatctcatgacaatcttcatttccttcaccaatttcctgtttcattaattcccttccacgtgctcttctgaaatttgcctcatattctttgatttctcttttacatgttggtttcatcaccttttactttttgctttcctggaaacacaaatgattctgattgtgacatgtcagaattatttgcaacattcccctttctgctgaaacatgagttcactgaatacacaatttagtaaagtgtaggatgcacatgtcgttttcgtggtcayaaccagctctgtagcattttataactacactggcagtgtgctgggaggtgtagagagaaatatttatcacatgtgtggctgacacaacctgccaagttattttaggagcctccttggaatcccagcaagaatgctac

SEQ ID NO: 211924 - DNA, 469 bp, Homo sapiens
ctaggaggttactgaaataaggagtatgagaaatggtgtaggttttgctgatgttttgtaacacatctcatgacaatcttcatttccttcaccaatttcctgtttcattaattcccttccacgtgctcttctgaaatttgcctcatattctttgatttctcttttacatgttggtttcatcaccttttactttttgctttcctggaaacacaaatgattctgattgtgacatgtcagaattatttgcaacattcccctttctgctgaaacatgagttcactgaatacacaatttagtaaagtgtaggatgcacatgtcgttttcgtggtcacaaccagctctgtagcattttataactacactggcagtgtgctgggaggtgtagagagaaatatttatcacatgtgtggctgacacaacctgccaagttrttttaggagcctccttggaatcccagcaagaatgctac

SEQ ID NO: 211925 - DNA, 510 bp, Homo sapiens
aagagcaaaagtccatctcaaaaaaaaagctcaaattttaccacaaaagaaaatatcatcaaaattggcaaacttttagctacattgatgaagaaataaaaagagatgactcagtttactagtctcagaaataaagaagggaaataattactattgacatttaagaaaaataaaaaktagcataaagacattctcttaacaattttattattagaacaattgtataaattagataacaggtaaaatggataaattctttgaaagacacaaactacagaaactgagttggaaagaaacagacaatctgaatagatctataacatataaaggcattgaaacagtaatcaaaactacccacaaagaaaaggccaggccagatagttccaataatgaattctacctaatatttaaaggagaattaatatccattctacaaacactttcaaaaactaggaaatgagggaacatttccaaattcattctataaggccagtattaccatcatattaa

SEQ ID NO: 211926 - DNA, 551 bp, Homo sapiens
cttgtctttactaaaaatacaaaaattagccgggcatagtattgcatgcctgtagtcccaactactctggaggctgaggcaggagaatcgcttgaccccaggaggtggaggttgcagtgagccaacatcgtgccattgcactccagcctgagcggcaagagcaaaagtccatctcaaaaaaaaagctcaaattttaccacaaaagaaaatatcatcaaaattggcaaacttttagctacattgatgaagaaataaaaagagatgactcagtttactagtctcagaaataaagaagggaaataattactattgacatttaagaaaaataaaaagtagcataargacattctcttaacaattttattattagaacaattgtataaattagataacaggtaaaatggataaattctttgaaagacacaaactacagaaactgagttggaaagaaacagacaatctgaatagatctataacatataaaggcattgaaacagtaatcaaaactacccacaaagaaaaggccaggccagatagttccaataatgaat

SEQ ID NO: 211927 - DNA, 551 bp, Homo sapiens
cttgtctttactaaaaatacaaaaattagccgggcatagtattgcatgcctgtagtcccaactactctggaggctgaggcaggagaatcgcttgaccccaggaggtggaggttgcagtgagccaacatcgtgccattgcactccagcctgagcggcaagagcaaaagtccatctcaaaaaaaaagctcaaattttaccacaaaagaaaatatcatcaaaattggcaaacttttagctacattgatgaagaaataaaaagagatgactcagtttactagtctcagaaataaagaagggaaataattactattgacatttaagaaaaataaaaagtagcataaagayattctcttaacaattttattattagaacaattgtataaattagataacaggtaaaatggataaattctttgaaagacacaaactacagaaactgagttggaaagaaacagacaatctgaatagatctataacatataaaggcattgaaacagtaatcaaaactacccacaaagaaaaggccaggccagatagttccaataatgaat

SEQ ID NO: 211928 - DNA, 551 bp, Homo sapiens
cttgtctttactaaaaatacaaaaattagccgggcatagtattgcatgcctgtagtcccaactactctggaggctgaggcaggagaatcgcttgaccccaggaggtggaggttgcagtgagccaacatcgtgccattgcactccagcctgagcggcaagagcaaaagtccatctcaaaaaaaaagctcaaattttaccacaaaagaaaatatcatcaaaattggcaaacttttagctacattgatgaagaaataaaaagagatgactcagtttactagtctcagaaataaagaagggaaataattactattgacatttaagaaaaataaaaagtagcataaagacattctcttaacaattttattattagaacaattgtataaattagataacaggtaaaatggataaattctttgaaagacacaaactacagaaactgagttggaaagaaacagacaatctgaatagatctataacatataaaggcattgaawcagtaatcaaaactacccacaaagaaaaggccaggccagatagttccaataatgaat

SEQ ID NO: 211929 - DNA, 504 bp, Homo sapiens
gaattccttgaaccctgggagacagaggttgcaatgagctgagattgcactactgcattctaggcttggtgatggagtgagaccctgtctccaaaaaaaccagctaaaccaaaacaaaacagcatgtgaaaaaaaagctggccaaagccaccaaaaccaaaatggygatggaagatgacctctggtcatccatcactgatcatgatatgctaattataatgcatcagcatgctaaaagacactcccgccagtgccatgagagtttacaattgacatggccatgtcagaaagtttccctatatggtctaggaagggaaggaaccctcagttctggggattgcccacccctttcatggaaaactcacaaataattccccttgtttagcatataatcaagaaataacataaaaatagccaaggaggagcctatgctgctgttctgcttgtggagtagccattttttattcctttacttcttaataaacttgctttcactttactcta

SEQ ID NO: 211930 - DNA, 598 bp, Homo sapiens
tggccttaggacctaggttatgcatagccctcaccttaggaaggggtcccttcaagggcaaataaaatgcgatagtccttgcaacactgaagcatggrgtatcctgtgaggcatgaacttgcttgatgcagcatgaatgcaccccaagaaacatgggcatgccctccaagtgcaagcataccccacaagtgggtagccatagagccagaagggcaggttccctgaaaaaaataaagacctcaagacctcatcctaaatgtgagatcttggatgtaagaggatttactgatttttccacaaaacagccaggccaggaagataactgagcttagaggactcttgctggtgccaatgcattgattagtccagatgacaagggagaggatcttgagagccaattttgatcccttcctcatcaccaggaaatatgagtaaagattgtgggatctgtggaggacagagggagagcttcattttctataaaacacagtctgcagattgaggagatgcagcctcagaggtggagagctataaagtcaaaaaccacagagcaggatagaggagtcagaggagtgaagaaaagagtcttgattagaca

SEQ ID NO: 211931 - DNA, 549 bp, Homo sapiens
atatttatttctaaacactcaaattatagtcaggatggtgatgtgttcacactacaaaaggcacataagtgatgagaatgactgacagaaaagtagattcctgcctcaagtcacccttatgttggtcatgaggaaggagaagaaattgtcttgcactacttcaaaattgttattttgcactttccttctcctctcgtctcttgtttttctaattctcctccttctcctccctaccttgtcttacccctccttctctcctccttctcctccttcttctaatctccatctctccttctttctcccccacacctccatagaatagtttaagtcagataatttacacaggcatatgatgctactgtattgatggaaagcagtgtcatcactgctttctttgtctatctgttgcactaacctataaattctttgaagattagacgcatgttttttattcaaatttgattcctgaagatttgaktatattcaggaaaaaatattcatttgtgggacataataatagcattgtgatcatgtgtttttaaaagagtc

SEQ ID NO: 211932 - DNA, 583 bp, Homo sapiens
tagtttgagttaaaacgtttatacacacgtgtacacacacacacaggcacagtaaattgtacaaatctgaagtatgtggctcagtgtgtttctataggtgtgttactgctttcacctgagtggctgccttgcagatcaagatggaatactttctagcattccaggcacatctgtcatttttcccaaccccccaccaggtaaccactattgtatttccactcaccatacagatagatttgcccacataacttagggaactcttttgggtctgtctgcttttgctcaacataatgtctatgaaattcacacgtgatgttgtgcggtacttactctttagttattgattatacaactatacaacagtttgccagttttcttcttgttagaccttttgagttctttctagttttaggctttcatgagtaaagctgtaaagagcaatcttgtaaatgcctgttggtgcacatttgyatgcagttccctctggtgcctaccataagggataaggttaaatgtaattcatacggtgggtgcagaatttgcatttgaaccttgattctctataggcagagccttggctcgt

SEQ ID NO: 211933 - DNA, 540 bp, Homo sapiens
actaggcagatatgagtttaaatcctgtctctaccactggccactctaagcttcagcatctttatttatgaaatagcaataaaaactgctagcttcctgatagagttgctgccaggggtaaatgataccaggtatgcaaatcacttaacaatatgcttggcacaaagcagccatgcaacgacatttatttccctgagcccctcccagtcatcctagatgaatacaaagaagaaaaaagtsagataagatagaaagcaagagcaatatcctatcatggcacacaagtttttatacaggttacttctccttttgcttatgcatgaaataaagcagcagcacactaggtagctactactgacatttaagaattctaagcagcctcccatgtaactcacagttaccagaggtctgagaaaatcttcagagcagatcttcaagtataaacaaacaaaaaacaagcagaaaacatacggggctactagagagaagctgaactacagtaagtcagatatcaacaaagcaagttaccactagacatag

SEQ ID NO: 211934 - DNA, 547 bp, Homo sapiens
tcccttctgtccttccaatcacacagtaaatacagcacaagatttaattgcaggttaataccatcatacatcccaagggggtggtcatctgagagctgaatcagtgacgccctttaacttagactccatgaccttctgggttgtggtaattaccctaacccagaaaacagtcctcagagggaaatgtcatcagtggataacttgtgccatggggcctttgattttttttttttttttttttttgkctttcccattttcgggaagagtaggcctgggatttgttttaaaaggtaatttattatgaacatactgcatggcttttgctttggcagcgtttttcttttcttgaaataaagaaataaggagaaagacacatacaggccactgtttaagcctagaaaacatcccttatgggagggtttcttaaccttggcactatcaacaattcaggacagaacattcttttgtggggacagtccagtgcattgtagaatgttcagcagcatccttggcctctacccactagaggctggtagctccaagtctt

SEQ ID NO: 211935 - DNA, 388 bp, Homo sapiens
tttgtaatgtgctatcataaaactaaaactcaaaagaggaaaatgcctgtgtctgcaaaggggggaagagagctggcatttatacatcaggaaggggaaaaatcctatgcttcaaaactgctgcactggcaaatgcctgatgctgtgaggcctatttttaaaagggggaccgggggcacaaagaaacagaaacgtgaacttttgtttaatgtttataacatcttctttatctctttgacacatcaaggtagcagatattttttttttttttttggagagagaaagacacaggaaaagaaaaagtaaatcctacagtaaaaataaagaataagcataggaccaagtgaagttaacaatcagcactttyatgctatccttaatcagaaag

SEQ ID NO: 211936 - DNA, 561 bp, Homo sapiens
cagcagttgctcaaaaggcactgacatctaattatcatcctataggctgttgccacaagtctgcatagtgaagtcaatgctgagacaggcttcctttgccagtcagaggggctctggcttgtttacagatagaatctttaactcctttgaagggccagcgtgaggatactgggaaggttcctgtgggacagttttataattgaaccagggaactcctctgtgcctgctcataygtgatatggataagtcatgcagcaccggtcctcctgcatccaggaatgggctgacattgatctgttcactcttcagggatgctgtctcaactacttgcacaggtataattttattatattacgctgcatattaaatacctgcacttcccttttctcatcctgatacagatgatttcattttgcccacagtaacacatgcttctgtttgcacgtgaccatgatcattttctctacctctaggcttacagaagggccagaggtggtgctaatcaggaactggaaacttctgaccccactgtgcaggctggagtagggttgaggctgtggc

SEQ ID NO: 211937 - DNA, 561 bp, Homo sapiens
cagcagttgctcaaaaggcactgacatctaattatcatcctataggctgttgccacaagtctgcatagtgaagtcaatgctgagacaggcttcctttgccagtcagaggggctctggcttgtttacagatagaatctttaactcctttgaagggccagcgtgaggatactgggaaggttcctgtgggacagttttataattgaaccagggaactcctctgtgcctgctcatacgtgatatggataagtcatgcagcaccggtcctcctgcatccaggaatgggctgacattgatctgttcactcttcagggatgctgtctcaactacttgcacaggtataattttattatattacgctgcatattaaatacctgcacttcccttttcycatcctgatacagatgatttcattttgcccacagtaacacatgcttctgtttgcacgtgaccatgatcattttctctacctctaggcttacagaagggccagaggtggtgctaatcaggaactggaaacttctgaccccactgtgcaggctggagtagggttgaggctgtggc

SEQ ID NO: 211938 - DNA, 508 bp, Homo sapiens
ggaaataaaacaactccaccaatgacactggtcaatgatctgcaagctggtatttttcccaagagaaaatgctatttcaggtcctaatattttttaaaaaaaatttgtaagtrtatctataatataaatttaattaaaacgcacaacttgaatgatctccaagaggtaaagcaacaaagtcagtctcaaatcctcacatatcttacttccacatcacaaaggcaccactcaatctactattaaaattcacaacagataagctgaaaaccaagtgcccgtgatattcactgggctcattttagaagcacctatttatttactcagctatggtagtgaaaaggtcaagcaaaaattcacgctccaaagccacggttgctaagcaactctcctcagaagttctgcaacattgatcaagcatattactggtgccaccaactggattcagaataatatgagtaacatcttacctggtgtctccgaagtgggagggagatggattctttattta

SEQ ID NO: 211939 - DNA, 555 bp, Homo sapiens
aacagtactgaccatttggagtatggcttcgtgttaggtactattttgaatcaccttccaatggtttaatgaacttgtactgaatggagatgtgccttggtgtgtgtttgtaaacaagtccaccagccaagacatacatgtgtaaacatcatcacacattatagcaggatgtctgttaccacamggatctggcatttcacatgaccttaaagagctcctggaggcttagttttcaatgacagcctgtttcatctgttaaataaataacaatacttagctttcatattgttatattctgccttttgaaacatttcctgtagcatgactttgccagtacaaagctggctttttaagtgatttgtctgtaaccaggcagttttagaacttttacttccttagtctgtgctaaaaagcaattcaagaagacttaaaattctcctgggggctgattttatagcaacagtgaaagcgcacaaacgttgcactagcagccaatttctttcttcagtgaggaaacagcatcgccggtagagcctcagcacaaatggtttaaca

SEQ ID NO: 211940 - DNA, 591 bp, Homo sapiens
gtcccccaagcttactgtgttcctttctgagtcctgctctagagtttttgttcattttcatccctctctgtcaggaagtatccctactaggctgcagtgccctgaggacataaactctgattttgctctctatagcattaccatcatacctgacacatggtaggttataggggaataatgctgccctctccaaagatgtccacattttatcctcgaaacctgtgaatatgttactttacatggcaaagaagctttgcagatgtgactaagtgaagcatgttgagttgaagagattatcctggaatacctgagtgggcgcaatgtaatcacaggggtccttaaaagaggaacacaggagggtcagtgacagagactgagatatgacaacagaagcagaggttgaagtgatgtgaggccaggagccaagwaatttgggcagcctctacaagctgggaatggtgaaaaaacaggttctctttcagagcacccagaaggaatacagccctgtcatctccttgactctagcccagtgagacaagttttagacttctgacctccaaaactgtgaaacaataaatttatattgtttta

SEQ ID NO: 211941 - DNA, 591 bp, Homo sapiens
gtcccccaagcttactgtgttcctttctgagtcctgctctagagtttttgttcattttcatccctctctgtcaggaagtatccctactaggctgcagtgccctgaggacataaactctgattttgctctctatagcattaccatcatacctgacacatggtaggttataggggaataatgctgccctctccaaagatgtccacattttatcctcgaaacctgtgaatatgttactttacatggcaaagaagctttgcagatgtgactaagtgaagcatgttgagttgaagagattatcctggaatacctgagtgggcgcaatgtaatcacaggggtccttaaaagaggaacacaggagggtcagtgacagagactgagatatgacaacagaagcagaggttgaagtgatgtgaggccaggagccaagtaatttgggcagcctctacaagctgggaatggtraaaaaacaggttctctttcagagcacccagaaggaatacagccctgtcatctccttgactctagcccagtgagacaagttttagacttctgacctccaaaactgtgaaacaataaatttatattgtttta

SEQ ID NO: 211942 - DNA, 588 bp, Homo sapiens
gacagaaggataccatttttaatcttggcacatacaaagtcagtcattatttggtgacattgtccacagccacctcttacctataagagtcatctactggcttgtaggttgaactgcacatcccaatataaaacctgcccaaagaaattcacagggctatagaagcaaagccagaagaccatacacagcattctgtacagtcgtatgcaccacctaaataaggagggaaggggaaagaaaaaacaataatattataagaaaattaagaaaaagaaaaattcccatccacacaaacacaataacaaaaattagaagtgccagcatctgtagaggagaagaaacctgaacaaaaattctagcaccatgaaaaatctgaatatagtgaccaccaaaagatcataccagctctcagcaatggtccccaaacayaatggaaactcagaaatgacagataaagaattcaacgcatgaactgcaaggaagctaatgagatcaagacaagcttaaaaatcaaaatgaagagacttctaaagcaatccaggaaatgaagaaagagataaacatcttaaaaagaaatcagtcatagat

SEQ ID NO: 211943 - DNA, 588 bp, Homo sapiens
gacagaaggataccatttttaatcttggcacatacaaagtcagtcattatttggtgacattgtccacagccacctcttacctataagagtcatctactggcttgtaggttgaactgcacatcccaatataaaacctgcccaaagaaattcacagggctatagaagcaaagccagaagaccatacacagcattctgtacagtcgtatgcaccacctaaataaggagggaaggggaaagaaaaaacaataatattataagaaaattaagaaaaagaaaaattcccatccacacaaacacaataacaaaaattagaagtgccagcatctgtagaggagaagaaacctgaacaaaaattctagcaccatgaaaaatctgaatatagtgaccaccaaaagatcataccagctctcagcaatggtccccaaacacaatggaaactcagaaatgacagataaagaattcaacgcatgaactrcaaggaagctaatgagatcaagacaagcttaaaaatcaaaatgaagagacttctaaagcaatccaggaaatgaagaaagagataaacatcttaaaaagaaatcagtcatagat

SEQ ID NO: 211944 - DNA, 591 bp, Homo sapiens
tcccatgcactggctgcatcaatcaataattcccatgacctccatgggatggatgctggatcatcattcctttaagtcagatttgagctgataaaaatagaagcatatgaaataagcagtggaaacataccatatatctctagctttttggctgccaaatgactgcaaaacacactctaatatactgataaaactggagcataatattttccagaggtctgaatgctgctatgggatggaagcacgtgattttataatgcatttcatgcaacgcaactgtagccaactccagtccttttcattcactccagcgaggtggcaccaatatcttcctgagcctgaaatcgtgctcatcataatcagtggtatgagagtagacaggacagcctagttattttttcacatttgacatactctcaggagtacatgaattacacgtggcaaaattgccttaaataggaaaagtttcttctcaacccatctaacaaaatgaagaagattaaacaattatcaggataattaatgcactcaacrtacttcttaaaaaagaaaatgtatcaaggtaatttgaggaaaagtggtgattttacc

SEQ ID NO: 211945 - DNA, 535 bp, Homo sapiens
gcactgcagaatggccataactatggcctagcattcrgccctagtggctacatacaacttcatatatattgtgtctctttcatggcagaatgcagatgacttcaggtacagaaatctttgtccctttggatttggcctatgttgctatccacacgaggcctgtggacataactttaatcttcctgaaactatcctttattcaaaaacgctaaagtagagtgactacatttcaccaccttgttcttttcttccctaaatttcaccccctatagtttactttccagccttcccaaaacattctttcatactgacacagacagcaatcattttggacgcttttaaagtcatataatttctcctgagttcttaaagattcttataaatatagtgctagactacattgaatcacagagaaaatttgaaagttggctatagaaatgctaattcattttcttactagaaatcaaaaacagagtgtgaaaccatcttttttttcagaagttacagaagcttgattatttctagagttttttat

SEQ ID NO: 211946 - DNA, 535 bp, Homo sapiens
gcactgcagaatggccataactatggcctagcattcagcccyagtggctacatacaacttcatatatattgtgtctctttcatggcagaatgcagatgacttcaggtacagaaatctttgtccctttggatttggcctatgttgctatccacacgaggcctgtggacataactttaatcttcctgaaactatcctttattcaaaaacgctaaagtagagtgactacatttcaccaccttgttcttttcttccctaaatttcaccccctatagtttactttccagccttcccaaaacattctttcatactgacacagacagcaatcattttggacgcttttaaagtcatataatttctcctgagttcttaaagattcttataaatatagtgctagactacattgaatcacagagaaaatttgaaagttggctatagaaatgctaattcattttcttactagaaatcaaaaacagagtgtgaaaccatcttttttttcagaagttacagaagcttgattatttctagagttttttat

SEQ ID NO: 211947 - DNA, 535 bp, Homo sapiens
gcactgcagaatggccataactatggcctagcattcagccctagtggctacatacaacttcatatatattgtgtctctttcatggcagaatgcagatgacttcagrtacagaaatctttgtccctttggatttggcctatgttgctatccacacgaggcctgtggacataactttaatcttcctgaaactatcctttattcaaaaacgctaaagtagagtgactacatttcaccaccttgttcttttcttccctaaatttcaccccctatagtttactttccagccttcccaaaacattctttcatactgacacagacagcaatcattttggacgcttttaaagtcatataatttctcctgagttcttaaagattcttataaatatagtgctagactacattgaatcacagagaaaatttgaaagttggctatagaaatgctaattcattttcttactagaaatcaaaaacagagtgtgaaaccatcttttttttcagaagttacagaagcttgattatttctagagttttttat

SEQ ID NO: 211948 - DNA, 535 bp, Homo sapiens
gcactgcagaatggccataactatggcctagcattcagccctagtggctacatacaacttcatatatattgtgtctctttcatggcagaatgcagatgacttcaggtacagaaatctttgtccctttggatttggcctatgttgctatccacacgaggcctgtggacataactttaatcttcctgaaactatcctttattcaaaaacgctaaagtagagtgactacatttcaccaccttgttcttttcttccctaaatttcaccccctatagtttactttccagccttcccaaaacattctttcatactgacacagacagcaatcattttggacgcttttaaagtcatataatttctcctgagttcttaaagattcttataaatatagtgctagactacattgaatcacagagaaaatttgaaagttggctatagaaatgctaattcattttcttactagaaatcaaaaacagartgtgaaaccatcttttttttcagaagttacagaagcttgattatttctagagttttttat

SEQ ID NO: 211949 - DNA, 571 bp, Homo sapiens
ctaaatcaatagtttccaaactttagtgtacattagcatcacaataagggatggagatattaagtcttatcaaaatgtaaatgctgtagtcctcttggcctcccactttctgatttggaagactgaactcaggaatgtgcatttttaacatcagttcaagccattctaaagtctgtttatctacttttagaaatactggtctaataatacaaagtatgtctttaaagaaaataataaaaatttgcagtgttatttctaactaaaaactcttaaagagcagaattttttttaccagtttaactgaattaataacatctctctaaataatgtcaacaaatgtaccttccatggttaaccaattatataatagaagttaaggccacacggcagcagtaatatgatgctctccacaatccgtgaaatttatcttcaataattattctgcaaactaaactacaggttttgtggttgttgttttaaataaactaagaccagtgctcttattaagggcgaccacrtatcacaatcatgtttaaagagcctgggaaactataaattgtgtttcagtttt

SEQ ID NO: 211950 - DNA, 607 bp, Homo sapiens
ggagtgattcatgaaacctgtgtgtatttttcgtgtttctactattcctgggtgggggggagaatgtgggagaaaaaacatatttttcattctaagaatgatatattgtctcagagtcacwgaatttgatattttaaaatacattatcttctttagtgcctcaaaagtgaaattggaaatagggcatattggttgcattattaaatgattgcaatctgtaaacaaatttggcagtattttactactctttcttggtgagagtagaaccttagaaactcaacaacacatttaaatcaggttatgttttcattagaactggcagacaacatccgaattttgcaaggttacatacataggcacatatatgtatgtacatatgtatattcatcatatatctgcaacagaataatattttgatggattagccagtatgttttatttttttctatttaggcagtctatagggcattctttgtgtttttgactcataaaagtgttgacacatcagaaagatgataaagctaaaacaacagttcttaactttcgagattcaaaagcctagatctcaggagaataaatttgaatgatgaatggcaactttacatta

SEQ ID NO: 211951 - DNA, 633 bp, Homo sapiens
tgaattcaaatgttacaagtatgtgattaaaatgtcatgtgaccttaatcatctatacatgaccaattgtctattcagcaaattgcatattgcagttaaaaggtgatctctcatatttctctctctttcttttcatggtgtttaatgcaataccataagccttaaataacaccatgggacctctaccaaatgccattagtgatgctggaagcacttccaagaagcagagaaaagtcatgacgtcacaagaaagattgaagtccgcagctgcagttgcccaccattttaagataaatgaatccactataatgaccattgtaaaaaaaaaaaaaagaaaagaaacattatgaagccattgctgcagctatgccagcaggcacaaaatccttgcactttttgtgaaatacctttttatctcatattgaaaattcagcttttacctgggtgcatgattgctataagaaaggcatacctaaagaatctaatatgattcaggaaaaacaaagtcattatatgaccatttaaagcaaaaggaaggggaaggatctaaagctgyagtatttaatgccagcaacgtgtggcttgataatttcagaaagttgtttttcttaaaatatgacaagacaacagaag

SEQ ID NO: 211952 - DNA, 540 bp, Homo sapiens
gaattcccagatgtcattaagaaaatcattgaagagaaagaatatctgccttaaccgatttttaaagtagataaacgtgacatattatggggaggagatgccaaaaagaacacatattagtagggaagagaagtgagcaacaggatttaaggcaggaaatggtaggctaatcgtattgtgttatgcaaactcaatcgagtttataatcaagactgcccttatcaaaggctgctaatcctgattcttgaaatgataaacactagcagccarttttttggttgttcaacaagaaagtctggtcaatgaaaatttttttctgtattgcttccattgatgctttgtctctgaagtcaggaagtaccttgccagcaagggactgctttttaaagttattttgatattgcatcattcccttggtcatccggaaccccatgagtttaacactgaaggcacggaagtagtctacttgccccagatacaacatctataactcggtctctagatcaagggatcataaggacccttagggctcattacaca

SEQ ID NO: 211953 - DNA, 647 bp, Homo sapiens
agttcctccaggaaagaaaaatttccatgtgattgtgaaaaagataagttgcaatttgtaaatttttgaaggaaattgaagatctcagtggtgtcaagtgattaatacagttaatgcttgtataagaaataggttatatttgaagatttttcaagtaaaaataggttttgaaggtaatacaatttttgctaattataaggtttatgatataatatgaaaatataattggatgaaaaggagataaaggtcattagagatctagaagtcaaggaacttagaggcaagtgggcagggtgaactaatcatatgtaagttgaagtttacaaagaatagaaaggttagtaataatataatgttgaaaaagataagagagtctatggttaaccccctacccccgaatgcaaagatgatggcamagctgaatgtcatggacttaatgaaggacttttacaagcagaggaaacaagtggtttggaggtaaccctgaattgcaggaacactaaccctactttacaagtttgatgtacatggcatgagggtaaataatcaggttacacttaagagaagaaactcccttatcaattaagatgggagaaaaaatgctatgaaagaagatgaagattgatagaatgatctggtcaaaaaca

SEQ ID NO: 211954 - DNA, 633 bp, Homo sapiens
gaagtcttaccaatcatttcactctagaaatccatccagaaaatatatacaaaagatatgagttacatcctcaataaagttattcattgcagcattacttattatagcaaaaactgaaaacaagcatctaacaataatagataagtatttcygagttatgatttatacatagatggaatattatacatctaagaaagtgatattataaaggaatctaaaataatatggaaggctgggcacggtggctcacgcctgtaatctcagcactttgggaggctgagacgggtggatcacctgaggtcaggcatttgagaccagcctgagcaacatggtgaaaccccatctctactaaaaatacaaaaaattagccaggcatggtgctgggcgcctgtaatcccagctactcaggaggctgagggaggagcatcgcttgaacccgggaggcagaggttgcagtgagctgagatcaagccactgcactccagcctgggtgacaagagcgaaactctgtctcaaaaaataaataaataaataaataaaataatatgggaaaaagactcttggaataatattaatttttaaaaatacattaccaaattagtgaaaattagtggaaagtggaaaaatacatcc

SEQ ID NO: 211955 - DNA, 633 bp, Homo sapiens
gaagtcttaccaatcatttcactctagaaatccatccagaaaatatatacaaaagatatgagttacatcctcaataaagttattcattgcagcattacttattatagcaaaaactgaaaacaagcatctaacaataatagataagtatttccgagttatgatwtatacatagatggaatattatacatctaagaaagtgatattataaaggaatctaaaataatatggaaggctgggcacggtggctcacgcctgtaatctcagcactttgggaggctgagacgggtggatcacctgaggtcaggcatttgagaccagcctgagcaacatggtgaaaccccatctctactaaaaatacaaaaaattagccaggcatggtgctgggcgcctgtaatcccagctactcaggaggctgagggaggagcatcgcttgaacccgggaggcagaggttgcagtgagctgagatcaagccactgcactccagcctgggtgacaagagcgaaactctgtctcaaaaaataaataaataaataaataaaataatatgggaaaaagactcttggaataatattaatttttaaaaatacattaccaaattagtgaaaattagtggaaagtggaaaaatacatcc

SEQ ID NO: 211956 - DNA, 633 bp, Homo sapiens
gaagtcttaccaatcatttcactctagaaatccatccagaaaatatatacaaaagatatgagttacatcctcaataaagttattcattgcagcattacttattatagcaaaaactgaaaacaagcatctaacaataatagataagtatttccgagttatgatttatacatagatggaatattatacatctaagaaagtgatattataaaggaatctaaaataatatggaaggctgggcacggtggctcacgcctgtaatcycagcactttgggaggctgagacgggtggatcacctgaggtcaggcatttgagaccagcctgagcaacatggtgaaaccccatctctactaaaaatacaaaaaattagccaggcatggtgctgggcgcctgtaatcccagctactcaggaggctgagggaggagcatcgcttgaacccgggaggcagaggttgcagtgagctgagatcaagccactgcactccagcctgggtgacaagagcgaaactctgtctcaaaaaataaataaataaataaataaaataatatgggaaaaagactcttggaataatattaatttttaaaaatacattaccaaattagtgaaaattagtggaaagtggaaaaatacatcc

SEQ ID NO: 211957 - DNA, 572 bp, Homo sapiens
tgatgctgctacctcacattgtgctctgtgggtatgattttctatcttagaatttcttcagatcacattgttctctgtgagtataattttatatcttagaatttcttctccatctcaggatttggtttaaaatgttctcgattaatcattttgccaaatatacgaatcatctataaatttcggatttatacctgtactctctcagaaaacacagaaaatctggcgttatgtagttcaaacaaccaaaccaaattaaaccagacaatgcaaatgctgaaggtgatctttctctatatcaaatattaatatctgttcttatcaaagaaatggaataagtgaaatggatgttatctggtcacttattactgctgtatgtttttcagcctatgagaacaatwcaagaatctcttgggaaattcaaaaccatgttaagttgtatcttgaatttaaattgtgccaagactttatctttagaggtgatattttcaagcaatttaaacattctcacattcaaagctcttctctacatttgatgagtcacccacaaatacttacgttccagatcagtggat

SEQ ID NO: 211958 - DNA, 389 bp, Homo sapiens
caattaataaataggaatcatcttataaagataatttcttacggaaaagtaaaagtgaaggaagacataggaaagtctaagaagcatgcatgaattagcagatccagatgacacacaaggtaaagtattaataaaactgacagatgcgtccacagggtcctttctcattttgcctcaaagacttctgtgaaactgaaatgatgggtggagtgctgaastgttaaatctttatatcttaatgaagacctgggagatagagtgatcagtaacttaatgagattttctggatgtttctaacctgagagatgttgcaaataccagtaagcaaaggtaaaataacgcaagcatatttaatataaaataagcttggaaacacaggtaagacacag

SEQ ID NO: 211959 - DNA, 522 bp, Homo sapiens
gctgtcctctggtggttcctgattagcagtgtaacattaatcaagtgcaatgttatgtggccttatttctcctgcagggccatatactaacctgtgcaaacaacccccayatcagccctgaataatgcctctgaacttctctctctttcttttttttcttccatgtttttggtaccctgtacccccttgtaccatgtttaccttggaggccaggtgaagtaaaaattaaaataactagggctacaaaggaacccaattatattacaaatgctttctctctatatataattatattgaaatatatcatcatattaaaaaacaaacgtgtgatatagcaatacatatgcattttattaacatgttaaataacaagatctgatgtgcctagtaacttccattatattgcaacaggatgagcatattttgagatatctggaccagtagtaatatggtataaaaatatctgtgatttccattggtgacaaagtaacaggtaccattgattccactatagtttttttt

SEQ ID NO: 211960 - DNA, 580 bp, Homo sapiens
ttatacagtaaagccaaaaacaacccaaatgttcattaagttgtgaataaataaacaaaatgtggtatatacatacaatgcatactattcggcaataaaaatcatcaaactactgatacatgttaaaacatgaatgaaccttaacagctttttgctaagtgaaagaaaccagayacaaaagaaaaactattgtatgattgtatttatataaaatgtccagaaaaagcaaatctataaattcagaaagcaaatagtttcctgggcctgggtatgagagggataactgcacatggacatgacagaatattctggagtaatgaaacttctaaaacaggattgttgtgatggttgcacaactttgtaaatctactacaaatcattgtatacttaaaatggattaatttgtggaatgtaaattgtgcctcaataaagctacaagggaaaacaacagcaaggagtaggcagtagaggaattataggtgaaataatattggcaaaatattgataattgttgaagctggttaatggattatggggatcttattctattccttctacatttgtttatgtttaaagttaa

SEQ ID NO: 211961 - DNA, 472 bp, Homo sapiens
tgggaggaaaaatcaaaatactctttcttttcaaattccatttcctatcaattctcaaatagagaagaattcatagtttatttcaaaaccctaaaataatcataaacagcttgagcaattgataaccaggaattaacaaattcttcctaatatgtctccttgttataaaacaataaagcaaaccgctgttataattatttatctatatcatttatcatgctctcttagggataacccatgcataactstataaatttagcagatgtgggaaaatagttgttagtagggcagattgcagattgtatgtcaaaggaatgccttcaagatatggattaactgtaattgtctcactatgtctgtcttgggattcattagatttctctgcttcaagcttcctgatgtcccctgtacctagatccatttgctgttctctgcgcaggtgcttctctgacttccagcattttctcatcaa

SEQ ID NO: 211962 - DNA, 472 bp, Homo sapiens
tgggaggaaaaatcaaaatactctttcttttcaaattccatttcctatcaattctcaaatagagaagaattcatagtttatttcaaaaccctaaaataatcataaacagcttgagcaattgataaccaggaattaacaaattcttcctaatatgtctccttgttataaaacaataaagcaaaccgctgttataattatttatctatatcatttatcatgctctcttagggataacccatgcataactctataaatttagcagatgtgggaaaatagttgttagtagggcagattgcagattgtatgtcaaaggaatgccttcaagatatggattaactgtaattgtctcastatgtctgtcttgggattcattagatttctctgcttcaagcttcctgatgtcccctgtacctagatccatttgctgttctctgcgcaggtgcttctctgacttccagcattttctcatcaa

SEQ ID NO: 211963 - DNA, 535 bp, Homo sapiens
ctcgggcttttacaacttttactgggcagaaaaattcactcagttgaagatggttttctttgaaattatcccattagattgcttaatatccttacggtgagcaatctcatggaggctgtggaccaaagagccaggaagtaccatacattgaattaaatcaatgtcacttcaccactgatcattgttggaaggacaccttcagccttttcagatgcatgggtcaaaaggcagccccttggcgcatatccttgcatgctatattatttatctatctatccatctctctctctgtctgtctgtctctctctctctctctctctstgtgtctctgtctctccagaactcatttctgtgtcacttctggacccttgaatgtcctaactcctgagaatggtcctgggaatctgtacctgcagctaggcagtattcatatggcttcttgagatcctgaaggatactgttccctggtgctccattctacaaactgctgatactttgaggtttagagtcatctgctgataaatgttttcacaag

SEQ ID NO: 211964 - DNA, 503 bp, Homo sapiens
aaccaggtcatggtaaatgcagtgattaagggaagctcttttgtgtgggcaccctatgtaagcttactgctgtaaaatcaagcaatggtctgtgggtgggccttgttaggtttgttgtctcagctttgccttctgggtctacagatgctgagaaagagcagttcgcaaaagaatgaggcaaagacaaagggtagattcaagggactcttcccagcagggtgaaaaattttagatggcaattattaagtagcatgaataaagcaaacattgatrggtttgaaacaaggtcttgaagcagcactgtgggaagctgggtgtacatatgggagcccctgatggaccccagcattgaaaagccataaacaaaaccactctatttacttaattttaaagagtttaaaaagttagaaagcaaaggtgataatgagaaacctgacttaattgctgggggtgatggtctggccagttaatcaggatgaagatttataaaggaatgagggtgt

SEQ ID NO: 211965 - DNA, 503 bp, Homo sapiens
aaccaggtcatggtaaatgcagtgattaagggaagctcttttgtgtgggcaccctatgtaagcttactgctgtaaaatcaagcaatggtctgtgggtgggccttgttaggtttgttgtctcagctttgccttctgggtctacagatgctgagaaagagcagttcgcaaaagaatgaggcaaagacaaagggtagattcaagggactcttcccagcagggtgaaaaattttagatggcaattattaagtagcatgaataaagcaaacattgatgggkttgaaacaaggtcttgaagcagcactgtgggaagctgggtgtacatatgggagcccctgatggaccccagcattgaaaagccataaacaaaaccactctatttacttaattttaaagagtttaaaaagttagaaagcaaaggtgataatgagaaacctgacttaattgctgggggtgatggtctggccagttaatcaggatgaagatttataaaggaatgagggtgt

SEQ ID NO: 211966 - DNA, 633 bp, Homo sapiens
gcctggccctttcttctttcatttgattgagttctgtagatttttcagtgstttctggagtgagcctctttccaggctgtactagctattctttgcctccttctccctttatccttcttgtacataaaaagaaatgaggttttatcctttgaatagaataatccacacagtctctgaaactctggtcccttaatttccactctgattctggtttgacaagtggcaatctgttttttactccttcacatctttcctggccattttagaaacactgaagtgattacaaacacagaggaagcctccttaggagaactgactcagcagccctctgctgagagaaaaggctatctccttctcatccttctttgtgaccagggccagtaaaattatctgtcttcaggaaatgccttggcttgctgggagcactaatgggcatgacaatcaatattgcttctaccgatacatcacactcttggtaagggatttcaccagtaaattttctttctctggggattcagtcaacaatatttatacaacactcacagcatgtaaagcatgcatggtagtagacaggacaaagaagcaagagaatcacaacgaatggttcctgctctttagggccatctttaatag

SEQ ID NO: 211967 - DNA, 633 bp, Homo sapiens
gcctggccctttcttctttcatttgattgagttctgtagatttttcagtggtttctggagtgagcctctttccaggctgtactagctattctttgcctccttctccctttatccttcttgtacataaaaagaaatgaggttttatcctttgaatagaataatccacacagtctctgaaactctggtcccttaatttccactctgattctggtttgacaagtggcaatctgttttttactccttcacatctttcctggccattttagaaacactgaagtgattacaaacacagaggaagcctccttaggagaactgactcagcagccctctgctgagagaaaaggctatctccttctcatccttctttgtgaccagggccagtmaaattatctgtcttcaggaaatgccttggcttgctgggagcactaatgggcatgacaatcaatattgcttctaccgatacatcacactcttggtaagggatttcaccagtaaattttctttctctggggattcagtcaacaatatttatacaacactcacagcatgtaaagcatgcatggtagtagacaggacaaagaagcaagagaatcacaacgaatggttcctgctctttagggccatctttaatag

SEQ ID NO: 211968 - DNA, 596 bp, Homo sapiens
atttgggtctgtgtccccacccaaatctcatctcaaattgtaatccccaggtgttgagggagggaagtgattggatcatgaaggcggttttccccatgctgttctcgtgatagtgagggagttctcatgagatctgatggttgtaaagtgtcttggcatttcccctgcttgcactcactccctcctgccgccttgagaagaaagtgtctgcttccattttgccttctgccatgcagaaggcaacactataaaatagtgttagtcaccaagcctcaaaggaggagggaactgggtagtatataatggggtgtgggtgcctgtgtgtgtgtgtgtttgtgcgcgtgtaagtttcctgaggcctccccaggcatgcagaactgtgacctaattaaacctctttcctttataaattactcagtctcrggtatttctttatagcaatgcaaaaatggactaataaagacaccatctctcaatggccaccattggtgacattttctaaatgtagactatagctacaggaattatatagtctatattctctcacagtctaactctctctttctctctatatataacccacatgtaatattagc

SEQ ID NO: 211969 - DNA, 566 bp, Homo sapiens
gattccatgagttaaggatggagcccatatttcctaacaagtttccggttcatactgatgctgctgatccatggcccacattttgagaaccactggtctaatacacagtaagtctgaaaaggagctaatactataaactagcacccctggggaccatcagaatgactgggccatttacatgaactccaagtaaggtttaaaatctctgatgtatctgtcatgtggcagaggatggagtaaggggaaaaagaagaagaaaccaacctggctccatctgtacaaatgtcttcccatgttgctgaggaaatgaaaccagcacacatggagwaatggagtccaagaggcattgtctgattgacagacagcagaggatcaaaaaatctcaagttgtggaggttgtcatgtaggaattttgcactaaaggaagggaggatttggaaatgtggagaactttggggacagacaaataaacaggtggaaggaaatagtgtgaatggctttaaggtaaaaacaagcattgcctgggtaagaaaaagtaaatgggtaccccttatagagcagataca

SEQ ID NO: 211970 - DNA, 587 bp, Homo sapiens
  misc_feature (1)...(587): n = A,T,C or G
nnnnnctatgccctgcaaattgaataagtcaatgcccacttgtccctgacaactcaagccctcacctaaccccagaggaaacacgggtagcaatccacatctcaaaggggtcaggggagagagagaaagtccacrctcctttaagaaggaatttgtgtgtgtgtgtggtagagaaagatcaaaaaaggatgccaaaacaatgcaaaattataggaattcaccataggatttcacaaggagatcaacttcatttaagataggtaacttttactgcagtctgtttcttcaacttgactactgagcccagggtggagcccatcaaggaacagggccaaaaaattacttgtaatttgtaaaccctaacaatttacacagttgaaaagcagaacacccagacttttaaaatcgaggacttctacactgaatctcaggtcctcacaaagagagaaatgccataggaccaggccatgcaatgtctctatatgcttcctgttataaagataagcctctaagtgctcagactacgccattcctattcagcatgtgcaaagaaacaggcatgcccttgcagcaacatttaccacaaa

SEQ ID NO: 211971 - DNA, 587 bp, Homo sapiens
  misc_feature (1)...(587): n = A,T,C or G
nnnnnctatgccctgcaaattgaataagtcaatgcccacttgtccctgacaactcaagccctcacctaaccccagaggaaacacgggtagcaatccacatctcaaaggggtcaggggagagagagaaagtccacgctcctttaagaaggaatttgtgtgtgtgtgtggtagagaaagatcaaaaaaggatgccaaaacaatgcaaaattataggaattcaccataggatttcacaaggagatcaacttcatttaagataggtaacttttactgcagtctgtttcttcaacttgactactgagcccagggtggagcccatcaaggaacagggccaaaaaattacttgtaatttgtaaaccctaacaatttacacagttgaaaagcagaacacccagacttttaaaatcgaggrcttctacactgaatctcaggtcctcacaaagagagaaatgccataggaccaggccatgcaatgtctctatatgcttcctgttataaagataagcctctaagtgctcagactacgccattcctattcagcatgtgcaaagaaacaggcatgcccttgcagcaacatttaccacaaa

SEQ ID NO: 211972 - DNA, 610 bp, Homo sapiens
aattggctcacaggattatggagcctgagaagttccaccatctgccacctgcaacctggagacccaggaaagcccgtggccacattcagtctaagcctgaagacctgagaatcaggggagctgatgatgttaactcctggtttaaatctgaaggcctgagaactgggggtgccgctgctgtaagtcctagagttcaaaggcccaagaacccagagctctgatgtctgaaagcagaagattgatgtctcagctcaaaaagaaagtgttaatttgccctttctctacmtttttgtaccattcaggccctcaatggattagatggtgtccttccacattggtgagggccaatcttctttactcggtctgatactgactcaaatcctaatctcttccagaaacatcttcatagatgaacccggaaataatgttttactagccatctgggcatcccttagcccagtcaagttgacacataaaagtaatcatcacattggtatatgaagaggattaaatcactcaattttgaataggtttgtgagtgctgaaccttccttgtcaaggctgattcgagttcttaataatcttctcactgtgtccctggagaagaagt

SEQ ID NO: 211973 - DNA, 419 bp, Homo sapiens
ttgtgaatctcaagagtagttattagctaaataagatttctaacaaaattaaagggttatggaagatgctattgataattttgtaatatcagaaaagtggtagcaaattgaacagaagttctgtgtgtgtgtgtgtgtgtgtgtgtgygcgcgtgcgagctgtggacactgtgacaggcaacataatagcttccgaaagatgtccatgtgctgatttctggaatttgtaaatctgttaccttacatgcaaagggaattttgtagacatggttaagagcatcttgattatccagatgggcctagtttaattacacgtttcctttaaagtgaaagagggaagctggagggtgagagagggagatatgatgatggaaatggggatcagagtgatgtgactgctgactggtagatataaacca

SEQ ID NO: 211974 - DNA, 587 bp, Homo sapiens
gctaaataagatttctaacaaaattaaagggttatggaagatgctattgataattttgtaatatcagaaaagtggtagcaaattgaacagaagttctgtgtgtgtgtgtgtgtgtgtgtgtgcgcgcgtgcgagctgtggacactgtgacaggcaacataatagcttccgaaagatgtccatgtgctgatttctggaatttgtaaatctgttaccttacatgcaaagggaattttgtagacrtggttaagagcatcttgattatccagatgggcctagtttaattacacgtttcctttaaagtgaaagagggaagctggagggtgagagagggagatatgatgatggaaatggggatcagagtgatgtgactgctgactggtagatataaaccaagaaatgtggtcatcctctagaagctagaagagacaaggaaacagattctcccccacagcctccagaaggtgtgcagcctgcctataccttgattttagccttgtgatacccactttgggcttctgacccctccagatctgtaagataaatttgtgtggttttaaactactatgtttatggtaaatttttaca

SEQ ID NO: 211975 - DNA, 419 bp, Homo sapiens
ttgtgaatctcaagagtagttattagctaaataagatttctaacaaaattaaagggttatggaagatgctattgataattttgtaatatcagaaaagtggtagcaaattgaacagaagttctgtgtgtgtgtgtgtgtgtgtgtgtgcgcgcgtgcgagctgtggacactgtgacaggcaacataatagcttccgaaagatgtccatgtgctgatttctggaatttgtaaatctgttaccttacatgcaaagggaattttgtagacatgrttaagagcatcttgattatccagatgggcctagtttaattacacgtttcctttaaagtgaaagagggaagctggagggtgagagagggagatatgatgatggaaatggggatcagagtgatgtgactgctgactggtagatataaacca

SEQ ID NO: 211976 - DNA, 564 bp, Homo sapiens
gaactaaagggtcaggattaagttttggtgctcacttaagtttttccaaaccagagaacaatgcagggtagctatataggtctgaggcaatgggcgagatttcagggctcactataagtctttcccagaccagaaagcaatggcagggcagagatttagttccagagtagtgtttaagttcaggtgtttactacaagttatccccasaataggaagcactaacaagctggtgtttaagttttgatactgaggagtaaaggtctaacactaccaaagaacatatgcaaataatggaagaggtggcccaaatgtgtaagcatcaatgtaaagataaaaataattgtaaaaactcagagaaatatgataccgccaaaagaaatcaacaaagctccagcaatagatcaagaataattgaagatctagaaaatatttcaaaaagaatgaataacaatccccttaaggaagttcagggaatcacaagaaaatagaaataggaaattaatacgatttggaaaataacccaggaacaaagtgatacatatatattttttgagatggagtctt

SEQ ID NO: 211977 - DNA, 564 bp, Homo sapiens
gaactaaagggtcaggattaagttttggtgctcacttaagtttttccaaaccagagaacaatgcagggtagctatataggtctgaggcaatgggcgagatttcagggctcactataagtctttcccagaccagaaagcaatggcagggcagagatttagttccagagtagtgtttaagttcaggtgtttactacaagttatccccagaataggaagcactaacaagctggtgtttaagttttgatactgaggagtaaaggtctaacactaccaaagaacatatgcaaataatggaagaggtggcccaaatgtgtragcatcaatgtaaagataaaaataattgtaaaaactcagagaaatatgataccgccaaaagaaatcaacaaagctccagcaatagatcaagaataattgaagatctagaaaatatttcaaaaagaatgaataacaatccccttaaggaagttcagggaatcacaagaaaatagaaataggaaattaatacgatttggaaaataacccaggaacaaagtgatacatatatattttttgagatggagtctt

SEQ ID NO: 211978 - DNA, 584 bp, Homo sapiens
caagttaaaaccacaatgagatatcatctcaccccaacgaaaatggcttgtgtcaaaaagaaaggcaataacagatgctggtgaggatatagagaaaggagaactcttgtacactgttggtctgaatgtaaattagtacagccactatggaaaatggtgtactggctccttagaaaactaaaaacagatctacaaatatgatccagtaatcccactgttgggtatatatacccaaaasaaaggaaatcagtatatcaaagagttatctgcactctcatgtttattgcagcactgtttacgatagtcaaaatatggaatcaacgtatgtgaacatcaatggatgaatgaataaagataatgtggtatatatgcacaattaaatattattcagccataaaaaataataaaatgctgtcatttgtagcaacatgaatgaaactggaggacattatgtcaagtgaaataagccaagttcaggaagataaatattgaatgttctcattcatatgtggaagctaaaaacattgattccatggaggtagagagtagaatgagggttaccagaatggtaaggtggggaggag

SEQ ID NO: 211979 - DNA, 584 bp, Homo sapiens
caagttaaaaccacaatgagatatcatctcaccccaacgaaaatggcttgtgtcaaaaagaaaggcaataacagatgctggtgaggatatagagaaaggagaactcttgtacactgttggtctgaatgtaaattagtacagccactatggaaaatggtgtactggctccttagaaaactaaaaacagatctacaaatatgatccagtaatcccactgttgggtatatatacccaaaagaaaggaaatcagtatatcaaagagttatctgcactctcatgtttattgcagcactgtttacgatwgtcaaaatatggaatcaacgtatgtgaacatcaatggatgaatgaataaagataatgtggtatatatgcacaattaaatattattcagccataaaaaataataaaatgctgtcatttgtagcaacatgaatgaaactggaggacattatgtcaagtgaaataagccaagttcaggaagataaatattgaatgttctcattcatatgtggaagctaaaaacattgattccatggaggtagagagtagaatgagggttaccagaatggtaaggtggggaggag

SEQ ID NO: 211980 - DNA, 563 bp, Homo sapiens
tacaggctgagtctggaactggagtggaataatctctgatgctctctattgtcaaagcgtagtccaccagtttagattcaagagagagaaatagattccacytctgcatggaaggagggtcagaagtttttcagctttcttaaccctccacactatagtttatcaacctttaagtttatcgagccttctgagaatctgatgaaaaatatgggaaaatgcactttcatcacatttgtatgcaattttggtggaaacacttaccctgaagatttaatgtctaaaataagttgcttgatgaatggaattatagaaacagtatataatccttaccttgatgtcagatccattggtctgttcactaaatccctatcttctttgtcctcttcattcttctttaagcactcttgattttcgtctcctccaaccttaaccttctcttcctttcctcttgaggtctgtctttgaaaggatcttggttgtagttcagcagttataatttcacaaggttcatttctctcagggtagtaataaacttttaaagtatgactaggtcaatatttctc

SEQ ID NO: 211981 - DNA, 529 bp, Homo sapiens
caggaatatgagggaatgtttggaacttcctagagatttgttaaattgtggtgaccaaaatgctgacaatgatatggacaatgaagtccaggttgaggtggtcccagtaaaagtttggaaaatttgcaacccagccatgtggtagaaaagaaaaacccattttctggggatgaattcaagccagctgcataaattgtgtaagtagaggagagcaatggtaataaccaagacagtggggaaaatgtcttgaaggcatttgagagatcttctcagcagctcctcccatcacgggcccagagagctaggaggcaagaatggtttcatgggctgggccatggccccactaccctgcacaactttgggacaatgctcccagcatccctgccactcctgctctagccatggctaaaaggaacccagatatgtctcagtctactgttycagaatgtgtgccagccataagccttggtggcatccatgtggtgttaagtttgtgggtgcacaggcagcacgagttgaggctttggag

SEQ ID NO: 211982 - DNA, 675 bp, Homo sapiens
agtgggtgtaatcctcctcttgtgagttgatcaggccacacctgggaactgctttcaggttttagcaatatgcttttctttcaaaaataacattgattatttttattacaaagtaatatattatcactgtagaaaatctagaaagcacagaaaaatacatcaattaaaaataatctataaccccgctgatcggatagaatcattaacattttgttatgtcttctttcagatatatgcacacacacataaatacatatgtacatatgatcacattttgttttgtcatcttttatccccacttgacaacatatctcagtttctcagttaagtgacattctgttgtctattcaaacacttttaaaatttatcatataggtatactacactattattcttaaatattagaagtaatgctatgatgcacattattacagataaacatttgcttatattcctgaacatttccctaaagaaaattcttagatgtgtaaattctggataacaagagtattggcattactctttaagagagacatggacaaaccraggtatgttcagaatagtgactttatttatggactggaaacaatatcatttgaggatagttgcaagagaaaaaaatggagattcaaaacttttcacatatttcagtgcttgtcattgaaaagaagaatt

SEQ ID NO: 211983 - DNA, 538 bp, Homo sapiens
catcatgaaaaagtgctttaagttgcatatttgccttggcattaaccctcagacaatatgaatattttctaaatatctaaactcatacatgatttcaaagtgaataaaaaaagttcttgaaccaagtgatttcctggtgtttggatgtgtgagctcagccaaattttttcagtcttatcacaaawaagtagtttgaggaagagtatggacttcaaaacccctttcttgataagtgttcatactctatctcaaccaaattgaagtaacttctccctatattacagagcctcagctcactgtaatatgtttatattacacctaaaaatcacttagaatcattagatatgtatgtaaactatgtttacctttgttgattcctcagcttataattttggtttctcagacctctgaattggtcaaaaaaaattataatagccactccacaagcactcacgccttggacatctaagccattgccacagagaaatagtctactccccagtccccagctctgctgtcactcttcacatgctcacac

SEQ ID NO: 211984 - DNA, 561 bp, Homo sapiens
tctgaaaaggaaactaaggaacaatattatttacaacagcatgaaaaatacttaggaataagactgggtgcagtggcttatgcctgtactcctggtactttragatgctgaggttggagaattgcttgagcccaggagtttgagaccagcctgagcaacatggcaagacccaatcactacaaaaaattaaaaaaaattagccaagtgtggtggggtgcacttgtggtttcagttacttgggagcgctgaggtgggagggtcacttgaactcaggagattgaggctgaagtgagctgtgtttgtgccactgtactccagcctgggtgacagagtgagaccctgtctcaaaacaaacaagcaaatcaaaacttagaaatgaactttactaaggatgttgaagatctgtacactgaaaaccaccaaacaatggtggaaaaaattgaagaagaaaccagcaaatggaaaactttcctgagtttgtggattgaaagaattaatactgttaaatgtccatactatgcaaagttatctatagattcatgcacacctcatcaaaattcc

SEQ ID NO: 211985 - DNA, 561 bp, Homo sapiens
tctgaaaaggaaactaaggaacaatattatttacaacagcatgaaaaatacttaggaataagactgggtgcagtggcttatgcctgtactcctggtactttgagatgctgaggttggagaattgcttgagcccaggagtttgagaccagcytgagcaacatggcaagacccaatcactacaaaaaattaaaaaaaattagccaagtgtggtggggtgcacttgtggtttcagttacttgggagcgctgaggtgggagggtcacttgaactcaggagattgaggctgaagtgagctgtgtttgtgccactgtactccagcctgggtgacagagtgagaccctgtctcaaaacaaacaagcaaatcaaaacttagaaatgaactttactaaggatgttgaagatctgtacactgaaaaccaccaaacaatggtggaaaaaattgaagaagaaaccagcaaatggaaaactttcctgagtttgtggattgaaagaattaatactgttaaatgtccatactatgcaaagttatctatagattcatgcacacctcatcaaaattcc

SEQ ID NO: 211986 - DNA, 561 bp, Homo sapiens
tctgaaaaggaaactaaggaacaatattatttacaacagcatgaaaaatacttaggaataagactgggtgcagtggcttatgcctgtactcctggtactttgagatgctgaggttggagaattgcttgagcccaggagtttgagaccagcctgagcaacatggcaagacccaatcactacaaaaaattaaaaaaaattagccaagtgtggtggggtgcacttgtggtttcagttacttgggagcgctgaggtgggagggtcacttgarctcaggagattgaggctgaagtgagctgtgtttgtgccactgtactccagcctgggtgacagagtgagaccctgtctcaaaacaaacaagcaaatcaaaacttagaaatgaactttactaaggatgttgaagatctgtacactgaaaaccaccaaacaatggtggaaaaaattgaagaagaaaccagcaaatggaaaactttcctgagtttgtggattgaaagaattaatactgttaaatgtccatactatgcaaagttatctatagattcatgcacacctcatcaaaattcc

SEQ ID NO: 211987 - DNA, 605 bp, Homo sapiens
tcaatagccagaaaacaatctgagttaaaaaaaaggggcaaatgatatagatacatatttcttagaagaagaaatagactgtccaaaaggtatatgaaaagtatttgaacatgaataatcactggaaaaatacaagttagaaaccatatatttggcatggattaatatccaaaatatataagaaactcattcagctttatcaaaggaaaataaataactccaatttaaaaatgagaaaaggacctgaatagaactttctgcaaagaagacacacaaattgccaacacatatatgaaaaggtgttcaatatcactaatcctcaagaaaatgcaaascaaaatcacaatgagatatcatctcacacttgttagaatggctagtatgtaaatgataaggtataacaaatgttggcaaggacatggagaaaagagaaccctaatacactgttggtaggaaggtaaattggtgcagtcattatggaaaatggtatgagggttcctcaaaaattaaaaacagaaataccgcgttatccagcaatcccacttctgggtatacatacaaaaaaaaatcagtatgttgaacggatatctacactcccatgttca

SEQ ID NO: 211988 - DNA, 606 bp, Homo sapiens
aaaagccataaagaaagacatttcaaacaagaaatgtagaaaatacttaaatgttgtatggtgccttcagacggggccattaatctgtttttcacaaaacaatatttagaaattgtattctgtttctaaggagaaatgatgttattagtgatagcaatctgcttgcctttgaatttattttatggattccttatgaaaatatacatcaaggaaatgtagttattatagctgcacatttgcaaaactgtaattaaaactagatacttgttccaattaaattctccagattgtggtttctttccttctgccatatgaggtttcatcttaaaacaratttctgaacctctctatgatgttcttattatattaatactgatattactagacaataaatttctccagctttgtaaagtgcccttttagcaatcatatcattctgtggcttaaaaaaataaaggtagacatgaggaatttaaaacataattttaaatgtttaaatatggtttctgttagaaaacaaccctaagtttcctttgtttatatgtatcacatatgttgatttccactgacttctactaccaagaaatctaaaagacttgatggagt

SEQ ID NO: 211989 - DNA, 456 bp, Homo sapiens
gttgtttaaaagtgtatggcacttcccttttctctctctttgttctgctttggccgtgtgatcatatgccttgcttcctctttgcactccgccatgattgtaaattttctgaggcctccccagccatgtggaactgtgagtcaattaaagctttcttcttcttatgttacccagtctcatgtacttctttatagtgtgtgaaagtggactaatacacccagctggagagaaagaaaaaggaataaagaagagtcaagaaaagctatgggacttactgagacaacatcaagtgaactgatgtgcacatcaggaaatcccggatggagcaaagaaagagaagaggcagaaagcttattcaaaataatgacagaaaacttacctaaagcttattcaaagtaataaakacagaaaacttccccaaactgtagatggaagtgaacattgagatccttgaga

SEQ ID NO: 211990 - DNA, 456 bp, Homo sapiens
gttgtttaaaagtgtatggcacttcccttttctctctctttgttctgctttggccgtgtgatcatatgccttgcttcctctttgcactccgccatgattgtaaattttctgaggcctccccagccatgtggaactgtgagtcaattaaagctttcttcttcttatgttacccagtctcatgtacttctttatagtgtgtgaaagtggactaatacacccagctggagagaaagaaaaaggaataaagaagagtcaagaaaagctatgggacttactgagacaacatcaagtgaactgatgtgcacatcaggaaatcccggatggagcaaagaaagagaagaggcagaaagcttattcaaaataatgacagaaaacttacctaaagcttattcaaagtaataaagacagaaaacttccccaaactgtagatggaartgaacattgagatccttgaga

SEQ ID NO: 211991 - DNA, 385 bp, Homo sapiens
gattttgaaaataagtaattttaacctatgagaatttgctatcaaaatggtagagccccattacaatacactaaagataaactttactaacaaataacaaatgttacccacattcaaagccaaaagtctgttaatacaaaagataacagtgccaaagaactctactgtctcctttaatagtcaacactcatacccttcagatttctcttcaccrttttacccaccatccagtctccctgagaatctcctacaaacctggaattcccctccttatcagctactaaaaaaaaatactctcttaatttctcttcctggtgtctaaaattgtctgcctctggcatttttctcattctaaattctccttaggcaatttcatagtaatcta

SEQ ID NO: 211992 - DNA, 577 bp, Homo sapiens
tttaacaaaactggtttgggcatgagggagatcaaagatacctacctcttgtctatactgaataccacaagtacccttttgaccatgtcgactagcaaatttgtctccaatctgtggaatcctaacagagcgtacctaaattcatataaaaataagttagttaagtggatttggtttactttctaaaactagctacatgaacaaagttgtactcaccctatattttacaaaatttatatccttcctgattgagagttaccataacctgatccacaatgcccgtctcrctagttctgagaaaagtgctacagtctctcttggtatagcgtctattggtgctctccaattcatcttcattttcaggcaaggtgactgttttgcctataataacatcatctcctgatacacgaacccctggagctatcaaaccatcatcatccagcttgtcgtaaatggcatgcctcatgcctgtgaggaaatagacacggaatgtcacataatccccaacaaagattaaaaaccacatacatgaatcagttccaagtcagagagaaggccacaggagtctctataccat

SEQ ID NO: 211993 - DNA, 472 bp, Homo sapiens
accttcctaaattatattcaagaactttaaggcaaaccagttcaaaattatarctatcaggttttcttagatgctcaaaatcatctaaacattattcttttaggcaagcaaatcataatcaaatcactcagaatcaatgaattgattggccgtatgaaggaccacctccataaaacagatatgcaaaaatatacatggaattccagtgggttcatgaactccactaagcttatttactaaccctgactagcggcttctgctttaaataatttttatcttattttattattttaccctcatgtgttttcatttgcattattttattgcaagcaatttataagtctttaagaaagaacaaaagcattcaacttaaattcaagtaagcaattttaatattttaggattttctcttatgataaacattacataaccttggaaacaaggttgagaatgtctgataacttatttttaa

SEQ ID NO: 211994 - DNA, 472 bp, Homo sapiens
accttcctaaattatattcaagaactttaaggcaaaccagttcaaaattataactatcaggttttcttagatgctcaaaatcatctaaacattmttcttttaggcaagcaaatcataatcaaatcactcagaatcaatgaattgattggccgtatgaaggaccacctccataaaacagatatgcaaaaatatacatggaattccagtgggttcatgaactccactaagcttatttactaaccctgactagcggcttctgctttaaataatttttatcttattttattattttaccctcatgtgttttcatttgcattattttattgcaagcaatttataagtctttaagaaagaacaaaagcattcaacttaaattcaagtaagcaattttaatattttaggattttctcttatgataaacattacataaccttggaaacaaggttgagaatgtctgataacttatttttaa

SEQ ID NO: 211995 - DNA, 472 bp, Homo sapiens
accttcctaaattatattcaagaactttaaggcaaaccagttcaaaattataactatcaggttttcttagatgctcaaaatcatctaaacattattcttttaggcaagcaaatcataatcaaatcactcagaatcaatgaattgattggccgtatgaaggaccacctccataaaacagatatgcaaaaatatacrtggaattccagtgggttcatgaactccactaagcttatttactaaccctgactagcggcttctgctttaaataatttttatcttattttattattttaccctcatgtgttttcatttgcattattttattgcaagcaatttataagtctttaagaaagaacaaaagcattcaacttaaattcaagtaagcaattttaatattttaggattttctcttatgataaacattacataaccttggaaacaaggttgagaatgtctgataacttatttttaa

SEQ ID NO: 211996 - DNA, 509 bp, Homo sapiens
ttctaaagcaaatctgtattgtcatcaaatcactgattgtgtttctctcctttctgttttttatttatgtcttgaatgaaaagatatgtacttcatctttgtaggcccaaagacttttagaaatgaaatctgaggatctaaaatgctataatttgtcctgtgtaattttaacaaataatcatcatagtcattttcattcagatttatactaattacataatgccattacttcttatcaaacatgttatggtttattgtatggaaatattaacttttatacaagtaaacctcrgccactctgtgctcattttaaagacagaaatgcttttcttttgtgagacacgcagagccaggattgccgtcaggaccgctgagttctgatttcctctgctgccactcacttttgagatattaaatgagatactatttccacatgtttccaaaagtgagcataataactgtgtagaattgttttattcttgtcatattagtatgccaggtattgcatt

SEQ ID NO: 211997 - DNA, 461 bp, Homo sapiens
cctgaacaatcgggttcagcaggctgctgctgcttgtcatgcaagttgtggctttttatgggtcctcagaggagtctgtcctttgataaacacacatacaaaaggagtcacacggacctacaaaagggaaactctaagcccagtctgactacacaaggaagagggactggcaatggagagtcccagtatccagccctgtgtttgtttgcgatgattatgtatgcatgagtggctaccctgtgcatgcacacagatagaaagcacacacacacccacacacacacaccacacgaccctgtgtttgtgctcaccgaggagcccacctcattgtcaggcaccagctagattttctctccagcctagctagtctacagtttaataaactttwaaaaaaatcgtcaaacagaacactatttatacagcctaagcccactgttacttgctaggaagcttattctatc

SEQ ID NO: 211998 - DNA, 549 bp, Homo sapiens
ttaaatcttatagaggtatttttaggagaatgcatgggaatattctgagcttctcctgaggcaaactgtggtaagtatactctgtggatattgaggaattaagaactaatatttgaaagaaaaactgaaattagttcaaaacaagactacataaaaaatacactagggccttgagactatatttatgagatatgtgtgagaagaggggcagggcaagagtctggagttctatatttgatttagcagtgttctagcagagttattttcggaaaatcgttttggtatgactccagtatgtatggagcttccacccatcctaaagtaaactgagccaggtatgttattaaatggcgatggagtgattctttatgataataaacttgattggagttattcgggtcacagtaggaagggctcagtgacttaggaaagggatcctagtcatcacagagctytgtgtagtccctggactcttagaatcctgagaattaggggaccatcatggaaatcctaggttggttaaaaatgtgacaccactagaatggtact

SEQ ID NO: 211999 - DNA, 555 bp, Homo sapiens
tcagcatgaagacatcagagcagagtcctccctcctccttgggagcagggccgtggattsaggctggcctcccaggagttgggggccatgagtcagggctctgttgcttaatctgaaaggggtgggtgagtgagctatgtggggcagaattaacctcgcacgagaattaaggcaaaaaaaatggggctaaaagagggacagaaacacagttcaggatctgcattgagaaataaagttagcattaacagaaaaccaaagaaggcacctattttaaaaaaattaggagtttaccagaaagtggccaggttgttttacaaaaaagtaaaaaataaaataaaataaaatctcctttcagaaaacaaagtgaaatcagacttggtgttttgttttgttttttagagagacaaggtctcactccatcgcccaggctggagtgcaatggcaatgacatgattatagttcactgcagtctcaaactctcccaggtgacttttaaattttatttttttgtaaagatggggtgtcactatgttgcccaggttggtctctgaattc

SEQ ID NO: 212000 - DNA, 555 bp, Homo sapiens
tcagcatgaagacatcagagcagagtcctccctcctccttgggagcagggccgtggattcaggctggcctcccaggagttgggggccatgagtcagggctctgttgcttaatctgaaaggggtgggtgagtgagctatgtggggcagaattaacctcgcacgagaattaaggcaaaaaaaatggggctaaaagagggacagaaacacagttyaggatctgcattgagaaataaagttagcattaacagaaaaccaaagaaggcacctattttaaaaaaattaggagtttaccagaaagtggccaggttgttttacaaaaaagtaaaaaataaaataaaataaaatctcctttcagaaaacaaagtgaaatcagacttggtgttttgttttgttttttagagagacaaggtctcactccatcgcccaggctggagtgcaatggcaatgacatgattatagttcactgcagtctcaaactctcccaggtgacttttaaattttatttttttgtaaagatggggtgtcactatgttgcccaggttggtctctgaattc

SEQ ID NO: 212001 - DNA, 463 bp, Homo sapiens
ccagacctacaagaattgaatagttacaagttagcagagcacattccaaatcacacaaaaaggcttactctaaatgcaccatgactactatctgggttggttgcattttccaaatcagttgtgtggggttgggaaccttaaactatctagtttaaatttagatcaagctcctatatcaaattcccacactcctcccttgattctaacctcccagaataacattctctctaatcctttgctctccttcctgcttatctgctttcatttgttcttatagcctaatccactttataagatctgttcaggctcccatcagggctaatgctttagtctcctcctggctctctgcgatctcctgtttttagctccaacagctgggatctcgaagccctcacttgtaggctcagccctatgtttatatttgggaacaaytctttggcagggctgggagaatttaaagagt

SEQ ID NO: 212002 - DNA, 364 bp, Homo sapiens
tccggagttcgagccagcctggccaacatggtgagagcctgtctctactaaaaatacaaaaattagccaggtatagtggcgcgagcctgtaatcccagctacttgggaggctgaggcatgataattgcttgaacccaggagggggagtttgcagtgagccgagatcacgccactgcactccagcctgggcagcagagcaagagtcctcaataaataaataaataaataaataaataaataaattaaaattaaaaaaaattttaaatgacttctatatgtaaaaattgtggcatatgctctaaaartacaaaaatgaattctctttggattttgccctgagggacgtttacacgttagcagagga

SEQ ID NO: 212003 - DNA, 322 bp, Homo sapiens
tatttaagccctagatgtataacaatacataaatggtaaatgatctcacagtatttcatttcagctaccatgttgctaaagaggggaaatgacatgtaactgagggcctactatgtgccagggcctgtgctaggtgttaaatgagttattgaggttaagcctcatgataatctagcaaattcagtgctgtggcagccctctcccttmaaagacaccacgttaaatgagctcctatccttctacctgatgtggaaagagaaataaatttacatgttaagttagtcctggttggaaggcagtgggagggcgggactgattatag

SEQ ID NO: 212004 - DNA, 595 bp, Homo sapiens
tttgcacttgtcgccccctcgcctgccccatcaccataaaggaacaccctccctgtgcttcctctttctattgttaccacttactccccatcctctcacaactactaatctgttctccatctccatagttttatttccagaatgttataaatataaaattatacagtacattaacttttgagatgacttttttcactaagaataatwccctagtttcgtctacatagttgcatgtatcatttcttttatttctgagtagtattccattgtgcagataaaccagaatttgtttaaccattcacccattgatagacatgtgggttgtttccagttctttgctgttatggatagagctgccatagacatttgtgtattttgtatatagattttatgcgaatataacttttcatttttctgggataagtgcctaaaactgattgctgggacctatgattggcgcaagaaacttccaaactattttccagagtgcctgtattattttcctttcccaccatcatgtatgagagatcaagcttctctgtattctcaccagcattttgtgttgtcactgttttccattttagcagttctaatt

SEQ ID NO: 212005 - DNA, 525 bp, Homo sapiens
agcttgtgcatgcttcacgaagttctcatgccatggttttcagctccatcaggtcatttaaggtcttctctttactgtttattctagttagccattcatctaatcttttttcagggtttttagcttccttgcgatgggtttgaacatactcctttagctcagagaagtttgttattaccgaccttctgaagactacttctgtcaactcatcaaagtcattctccatccagctttgttccattgctggcgaggagctgtgatcctttggaggagaagaggtgctctgattttcagaattttcagcttttctgctctggtttctccccatctttgtggttttatctacctttgttctttgatgttggttacctatggatggggttttggtgtggatgtcctttttgttgatgttgatgctattcctttctgctcattagttttccttctaayggtcaggtctctcagctgcaggtctgttggagtttgctggagttccactccagaccctgtttgcctgggtatctc

SEQ ID NO: 212006 - DNA, 525 bp, Homo sapiens
agcttgtgcatgcttcacgaagttctcatgccatggttttcagctccatcaggtcatttaaggtcttctctttactgtttattctagttagccattcatctaatcttttttcagggtttttagcttccttgcgatgggtttgaacatactcctttagctcagagaagtttgttattaccgaccttctgaagactacttctgtcaactcatcaaagtcattctccatccagctttgttccattgctggcgaggagctgtgatcctttggaggagaagaggtgctctgattttcagaattttcagcttttctgctctggtttctccccatctttgtggttttatctacctttgttctttgatgttggttacctatggatggggttttggtgtggatgtcctttttgttgatgttgatgctattcctttctgctcattagttttccttctaacggtcasgtctctcagctgcaggtctgttggagtttgctggagttccactccagaccctgtttgcctgggtatctc

SEQ ID NO: 212007 - DNA, 605 bp, Homo sapiens
tgcttgattggatcggctattgaagcttgtgcatgagtcatgtagttctcgtgccatggttttcagctccatcaggtcatttaaggtcttctctacactgtttattcgagttagccattcatctaatctttttccaaggtttttagctttcttgtgatggattcgaacatcctcctttagctcagagaagtttgttattaccgaccttctgaagcctatttctgtcagctcttctaagtcattctccatccagctttgttctgttgctggcgaggggctgcaatcctttggaggaggaagaagcactctggttttcagarttttcagcttttctgctctggtttctcctcatctttttggttttctctatctttggtctttgatgttggtgacctacagatggggttttggtgtggatgtccttttttgtcctttttgttgatgttgatgctattcctttctgcttgttcattttccttctaacagtcatccgcaggtcagttggagtttgctggtggtccactccagaccctgtttgcctaggtattaccagcagaggctgcagaacagcaaatattgcagaacagcaaatattgctgcccaat

SEQ ID NO: 212008 - DNA, 605 bp, Homo sapiens
tgcttgattggatcggctattgaagcttgtgcatgagtcatgtagttctcgtgccatggttttcagctccatcaggtcatttaaggtcttctctacactgtttattcgagttagccattcatctaatctttttccaaggtttttagctttcttgtgatggattcgaacatcctcctttagctcagagaagtttgttattaccgaccttctgaagcctatttctgtcagctcttctaagtcattctccatccagctttgttctgttgctggcgaggggctgcaatcctttggaggaggaagaagcactctggttttcagaattttcagcttttctgctctggtttctcctcatctttttggttttctctayctttggtctttgatgttggtgacctacagatggggttttggtgtggatgtccttttttgtcctttttgttgatgttgatgctattcctttctgcttgttcattttccttctaacagtcatccgcaggtcagttggagtttgctggtggtccactccagaccctgtttgcctaggtattaccagcagaggctgcagaacagcaaatattgcagaacagcaaatattgctgcccaat

SEQ ID NO: 212009 - DNA, 605 bp, Homo sapiens
tgcttgattggatcggctattgaagcttgtgcatgagtcatgtagttctcgtgccatggttttcagctccatcaggtcatttaaggtcttctctacactgtttattcgagttagccattcatctaatctttttccaaggtttttagctttcttgtgatggattcgaacatcctcctttagctcagagaagtttgttattaccgaccttctgaagcctatttctgtcagctcttctaagtcattctccatccagctttgttctgttgctggcgaggggctgcaatcctttggaggaggaagaagcactctggttttcagaattttcagcttttctgctctggtttctcctcatctttttggttttctctatctttggtctttgatgttggtgacmtacagatggggttttggtgtggatgtccttttttgtcctttttgttgatgttgatgctattcctttctgcttgttcattttccttctaacagtcatccgcaggtcagttggagtttgctggtggtccactccagaccctgtttgcctaggtattaccagcagaggctgcagaacagcaaatattgcagaacagcaaatattgctgcccaat

SEQ ID NO: 212010 - DNA, 526 bp, Homo sapiens
cacctaggcacatagtcatcagattatctaaagtcaggacaaaggaaagaatcttaagagttgtgaggcaaaagcatcaagtrcttcatttatttttattgctgatgaatattccattatatgggttactacattttattaatctattcatcaatttatggacatttgggttttttccactgttgggctgttgtgtctggtgctgctatgaacattcatacaaaagcttttgtgtggacatgttttcatttctcttgggtagatatcaagtggtagaattgttggaccacatggtaactctattcttaatcgtttgagaaacagccaggctgcttttcaaagaggttgcaacattttgcattctgaccagcaacgtatgagggttccaattttcccacatccttgccaacacttgttattttttgtctttttgaatatagccaacctaactggtgtcaaatgatatctcactgtgatttggatttgcatttccctaatgatgaatgacgctgaaaatcttctcgtg

SEQ ID NO: 212011 - DNA, 526 bp, Homo sapiens
cacctaggcacatagtcatcagattatctaaagtcaggacaaaggaaagaatcttaagagttgtgaggcaaaagcatcaagtacttcatttrtttttattgctgatgaatattccattatatgggttactacattttattaatctattcatcaatttatggacatttgggttttttccactgttgggctgttgtgtctggtgctgctatgaacattcatacaaaagcttttgtgtggacatgttttcatttctcttgggtagatatcaagtggtagaattgttggaccacatggtaactctattcttaatcgtttgagaaacagccaggctgcttttcaaagaggttgcaacattttgcattctgaccagcaacgtatgagggttccaattttcccacatccttgccaacacttgttattttttgtctttttgaatatagccaacctaactggtgtcaaatgatatctcactgtgatttggatttgcatttccctaatgatgaatgacgctgaaaatcttctcgtg

SEQ ID NO: 212012 - DNA, 661 bp, Homo sapiens
attcattaagcttatgggtttttttttcccctcctgggatagcagttagctagttgctaaatctacttatgaaatggccagggtaaatttaaaaatgtaattcagagcttgatttgaaagatttcaaggtcttggcttttacatatttgattagattaatgcagccrtttcaggcattctggcttgagagccaaatggacaagatagggtgagggaaacgagataaagaaaacaagtcatagaatttacttcaatttgatgatcattaatgattgccacttatttggtggttctgtattagagaatacagtggtgaataagacagaccttctcctctaagagctcacaacctaatatgtgtgtgtgtatgcacgtgtgttgagacaagttcatgactaggcaataaaagacagagtactatagattcaacacaaatttatcaagcacttcctatgttaagcacttactctgttgagtacctactatgtgccaggtattagggatgcctggatcaatagaccacatgctctcttcacagtatattcccaggtaagtgcttagaatctttctgttacaatctttaggaacaatcaacacacctgatttgtttttcaccttctaaatgcctgcttatgtaaggtctgagggctttgttatttca

SEQ ID NO: 212013 - DNA, 439 bp, Homo sapiens
gagggagggggaaggtgctacctacactcttttaaacaaccagatcagtctcatgaactaacagcaagaattcactcatcaccaagaggatggtgttaagccactcatgagggatctgcccccacgatccaatgcctcccagcaggcctcacctccagtactggaggtcacatttcaacatgagatttggagggcacaaatatccaaacygtatcacctggttttcttaaagcaatctatttgaacttgtcaattcaaagccaaagacatagtttattattaccatcagagtcactcaatcttgaagatgatagggctgagaggaccagagctgagtccattttccttcctttagtcatcactgcactgaaattagttcagattaaaaagagtgagttctttgctttaaaatttcaaatgacagaggctctcatggaaa

SEQ ID NO: 212014 - DNA, 580 bp, Homo sapiens
gaattcctagtagaagaaggtctttggagataattatgaatatcaatgaaattatctcatggaacaccaacatctcacaaaattctatacccaaaggttttgagggagttcacgtcaccacaagcaaaggaagaaaggcatatcttaaagtctatgtcttctgtttagacattatcccaawtgtcccactgaactaaatgtaaacttctcagaatgccttaactgattctctttaccgctactatttatctggctgcaaattgggcagagttcccttacagatggtcatatgaaggtgcatgtgtaaaatgttgtttatgttctctccaaaagttcctgtttaattaggtttatttgatatcttcctatattcttgcataggcagaggtggaagacattgttagaatattgctaggaatttttttccaattatgacaggggagggtaagaaatgaaagcctttctattcttattatattgccagatgatactcgattgctaatttttttttaccctcacatcaggcctcaggaaaatgatggaatatgctggatgtgatgaccaccaagccatatgctgc

SEQ ID NO: 212015 - DNA, 555 bp, Homo sapiens
tgtgcgtgtctgctcagactatctttcttccatcatctcctgctactaattcttcaccagtaaaagtgtacattcccgtccccaccccaaggttagataattggggagttgttgggagtctcttattagttggcacagctgagttttatttatttataatttatactccatgtatctccaacatatttgaggtggtcaacaataaaactagtatgtccattatagaaattaaaagtaatctttcccattttcccaactaatccctgaatacacccccctcccctcccccacaataatagaaagaagtaaaatttaactttgattcagccttrgttaaaatgataggaaagcataagttacaataatatttgattatttctgatcatctcaagaacataggaatcaaaaatattggataggtggggaaaacattttatttagaattaaatgaatgtgccagttactaagtttttgtttctcagcatcaaatctatccattctgtgctacataatgctggagctgagactttacaaactacattccagctggctccc

SEQ ID NO: 212016 - DNA, 535 bp, Homo sapiens
tttacaaactacattccagctggctccctcttaagttctgccaattatggtgatgacaggaggttgtttagaaggacagcacaaggtggagacaggaagaaagaactacttgctcttgcctgcttcctcttcctggaagcatcagccctacattgctttttcaccctaagaaggcaattccgctccccaatgctgcctcaccctgagagggcaagtccttcccatcacaactcttatagaaccagcctttttgcaccttgtcagagacacaaaaactagctatctaaagacccctttttagagatctgagtttcagagcttcttgtctccaagcttccaagttttaatacagattgamcatccctaattcaacaacctgaaattttaaatgctccaaaatctgaaactctgaggactgacatgatgcacaggtggaaattttcacagttgacctcatgtgatgggtcacagccaaaatacagtcaaaactttgttttatccacaaaattatttaaaatcttatataaaattatct

SEQ ID NO: 212017 - DNA, 577 bp, Homo sapiens
ttcaggtcttgcacagcaagtaacccacccatccctgctgccacacttccacctgaatgaacagtctggcagtcccacccagggtgaactcaaccttgagccagccaaaccactgcatgcccccctcaaagtaggagaggcatccaagcctctgaacagctaatacrtacttcaggctggtggcgcatacacacttctgctcaggacctgaaaaatagccctgtccctgtagtgtcctcccactccccagcagacatgcccctagcctgcccaatggccctgcacctgcaatcaagatctgagacacagtcccacagtctggcttctggtgggcacaaccctaggccagccaagcagctttgagcccatgacctggacctaagaaacagtccccaaaggctatcctgagctagctgagctgcctaacacctgtgtcccaaaattgagaaacactccggtgggtcccccttccccagagcagacacacccttaggccatctgagcagccttgcacccatgtctcaggcctgaaaaacagtactgtgggctatccctggtagatatactaccaagccag

SEQ ID NO: 212018 - DNA, 584 bp, Homo sapiens
gaattcaatgttattttgtaagtccagaaattgttttgagtgcagtcagtgttgggattgtagaaaattatggttgtaactaatattttgcatataaggcatttccaactaggaatgagcttataactttagctagcatgtgaaaaggaataattttagtgatggatcctaatcaggataaaagatkgttaagtctgtatctagacatttcacagtgaaattgcagggaaaaaaaatctaaagcaaatagttttttttattatttatttgtttgtttgtttgttttttgagacacagtctctttctgttgcccaggctggagtgcagtggcatgatctcagctcactgcagcctcaacctcccaggctcaagtgatactctcgcctcaccctaccaggtagctgggacaacaggcatgagccactacacccaactaatttttgtatttgttgtagagatggggtttctccatgttgcccaggctggcaaatagatttttaaagtaacagattatcttcaaagtggcaaaatgtaccctgtcagctctggtttagcagtagtatgaaaaaatcaagggacaacaa

SEQ ID NO: 212019 - DNA, 267 bp, Homo sapiens
catccctactaaaagtataaaaattagccgggcatggtagtgcttgcctgtaatcacagctactcagaggctgaggcacaagaatagtttgagcctggtaggtgaaggttgcagtgagccaagatggcaccatgcactccagcctgggtgacagagcaagactctgtctcaaaaaaaaaaaaaaaaaaaactrttgggatcctccaactctcacctccaatagttagggaagtttaagaaatcttacacagttcttacagtcgttgc

SEQ ID NO: 212020 - DNA, 558 bp, Homo sapiens
attagagtaactctcctggcctgtatctacttacccccaggagaggagaagagagtttggtgagtttgagatgaggaacaggatgtctgatgaagatctaatataactcatgttccttttaccttctccattgtctttcaggtattccaccctgcaaaaagcatgtattcatggtcagctctcagcaaggccagtagcagagtggtaaaggccttggccctccaaggctgggaaaagacaatgacaagtcaaatccagacctatgttgkatgttggtctactaggtgactgtctcctggaaatgttatgcagctcagcaaggtgaaggtgagaatatctttgctttttgataaaacacagaatgcatagatttcacatctcactatgtgagcccccacaaaacaaaacctagaggagcatgtgagaaaaacgcatctctaggctagaaaacaaaaagagaaaaaaagaaaaatgtctgtgtaagaaagcaaaggaaagaagatgctcaaatccagcaaatcataccagccttgtcataggcacaaaaagaaagggatt

SEQ ID NO: 212021 - DNA, 619 bp, Homo sapiens
gggagaaaacgtgaatattttcatatttgcaaagtatgcatccaatagaagtctgatatccagaatctatgtggaacttaaacaattgaacaagcaaaaaacaaataaccctaattaaaaataggcaaaagaagccaggcacagtagctcatgcctataatcccagcactttgggaggctgaggcaggagaattgcttgattccaggagtttgagaccagcctgggcaacatagtgagaccccgtctctataaaaaataaacaaagttagcgccaggcatggtgttgcatgcctgtagtcctagctacttgggaggctgagrtgggaggatcacttgagcctgggcgattgaggctgcagtgagccaagatcacgccgttgtattccaacctgggtgacagagtgagactctgtctcaaaaaaataaaaaaattaatggacaaaaaagacatgaacagaccacttcccaaaagaggacacagaagtggctgggaaacatgaaaagatgctccacatcgctatcctcagagaaatgcaaatcaaaactgcagtgatataccatctcacaccagtcataatggctattattaccagtcgccaaacaacagctgttggcacg

SEQ ID NO: 212022 - DNA, 377 bp, Homo sapiens
aggtattaaagttatttgtagatggtgcatatttttacaacaaaaacaaacaaaaaatgacttacataatgataaacactggtatttagtaatgtgtatgtaagtattttcccgtaaagaaaaatattttcccatatattggtaaaaattcctatccatatttatttttgtctgctttkaacgattactatctaactggtagaagctcttcaggagactttttctgaaaagtggaacaaagtgttacattgaagcagtaaagtaaagtgactaatactgactggagtgaaaaagagggttggaagagtcacttttttacatacagtttctcttctttctgtttccgtatctcttatctccctcttaccattcctggg

SEQ ID NO: 212023 - DNA, 565 bp, Homo sapiens
cagcatccattttgaaaaacaattcaattttacgtagctttagttttctgtttctacctacatgggytgaattgtatcgccccaaaaaaatatgttgagtcctaatcctcagtacctcagaatgtaatcttattaggaaataaggtctctacggggataatcagggtggaccccaatccaatatgacctggatccttagaagattagaaaatttggaaacaaagacaggtacagggaaagactatgtgaacatacagggagaatgccatgcgaagatgaagaatgagatcagcgtgatgcatctgcaagccaaagattgccagtaaaccaccagaagctaggagaaagacatggaacagattctccctcacagccttcaaaaggaaccaaccctggagataacttgatcttggacttctggcctccagaacttgagacaattcatttctgctgttcaagccacctagtttgtgctactttgtcatggcagccctagcaaactagtatgctcctgtaacaaattatcgcaaattcaaaggcataaaataacacaaatgtatctcgt

SEQ ID NO: 212024 - DNA, 596 bp, Homo sapiens
gtcccagctactcgggaggctgagataggagaattgcttgaacccaagaggtggaggttgcagtgagccgagatcgtgtcactgcacttcagcctgggcaacagagcgagactccatctcaaaaaaaataattaaataaaatacacatctgttgtttaagccacccagtatgtggtattttgttataagagttcaagctaagacattccctttccctcatttcctttcttcttcaagttctaattcgggatcaagtgtcatatttatttttcatgtttgttgcaataatgtctctctgccgtcattatgaacacataaataaactagagaggaagtgcctatgatcgatgttttattwaaaaagtgttttttctttcaactacaaaataataataataataaagggtaattttttaaaagcacttagtagctagtatgttaaggattttagaaggtttgtctcactaaatcctcccaacaaatatgaggtgggttctactattactcccacacccctcatttgttaatgacttaaagaagtgaagtctctttctcaaagtcatggcagtatttaagtggtagagctaagaagaatt

SEQ ID NO: 212025 - DNA, 550 bp, Homo sapiens
gcgctttacctctatgtgtgtctacttagcggcacgacaatttcagcaagactgtattccttgtccatacttctttccattgacccagttagtgagaatgctgtgaattaatactaaatatctcaccctctaaatatcatatgaggttattggggctgcaaaaatcctgtyaggaagagaagagtcactggaagcaaagctgaaggcaaatgctagctgctaatgttcctactaagagtctgtgggtagaactacccatcaaagcaagttactgatagggcaactgcacattagtgtttctgagtataaagtacaagtacaggttggtgtgtagcagcctccagaagagataagttttgagacagaccttaaacactcctgtcaatcattatttaaaaaaaaaatacagctttaccaattaacttgccataagctgcacatcacatattcaaagtgtacaattttataagttttgacagatgtatgtatattcatgaaaccatcatcacaatccagataatgaacaagtccaaccatcccctgaaaagtt

SEQ ID NO: 212026 - DNA, 613 bp, Homo sapiens
agatctgtttccctgcgcagaacaataaagataacatcttctccagggcaaagtttggacaagtttgctagcagcctactttttagaacagctcctaagctgaaacacagattcactgtgtgcacagcatccaccygagtcttcctccgcatcatcctcatggcacttgagggtcaagagaaccatgtgaacattaatctccctcttgtaccatgcatagtaatattctttgtctctgacccaggggttttgtgtcttctggcaacatctttgaaactgtggcagctacattgttagatttcaagtagcataaaaccttttcccctctggagtttgtgacaagtaggaacacagcaaagacagcttgggagagaattcaaaatatgaatctggaaaagaaagcaggattttatgagacatggtcagaagtaatattgcaaatattgaacaaccattctaacacaggcactaaccaatgtgaatgaactcaagacaattggatgagccattaacaagccaatatggtttcagagcttcataccagctgaatatcacacatagcctgggatattttatcttaagaaaactacaaaatcatcataaaacgtttagc

SEQ ID NO: 212027 - DNA, 604 bp, Homo sapiens
ttaatctccttttttcctccctaaatgaaacaccaaacctgttaaagtaaaagcctaatttactggagtatrttttagtcttatgcaactttcagaaaattgaaacagcatttttcaccccagtttccggcagtgtacctcattgagctgtttctctctcttttgctgtgctgcagcaaaagtatttaatgtattgacatttacattttgattgtaagtctgacaagcagctttatactgagagctcaactggtttttgttgttgttgtttctagcttccaatattattaaactttgggctgggagtactggctcacacctgcaatcccagcactttgagaggccgaggtgggtgggtcacttgaggtcaggagttcgagaccagcctggccaatatggtgaaaccccatcgctactaaaaatagaaaaattagccagacatgctggcgcatggctgtaatcccagctactcgggaagctgaggcagaagaatcacttgaaccaaggaggcggaggttgcattgagctgagaccacaccactgcactccagtctgggcaacagaatgagactctgtctcaaaaaaaaactctttgcctgtcagt

SEQ ID NO: 212028 - DNA, 639 bp, Homo sapiens
ctaatgtaaatgacgagttaatggatgcagcaagccagcacagcacatgtatacatatgtaacaaaccagcacgttgtgcacatgtaccctagaacttaaattataataataaaaaaatctagtaaaaaaaaaagaataaatctcctaataaaaacgggcaaggtaagtataaaataataatgttatgataattgtcacattgctcttttttgtatccaggtcactctatgcttctattaattcatcattttcaattgtgtacactaaacaagatgcaatcagcaaatacccaatgttatgcatcacttagagattgttcctttctgccctagtccataaataatattctcttgactctggggcagagaagacccattggaatgatgttccagaaactaaagtaggaactaagggaccagctttaacagcactccttccaggaactccagtaaagctaggagaggaccttgcaggttccacagcctaatgaggtcccaatcaccaccctgacagagayctgctacgttattcattcatcaacttgctggatgtattacaagtactaagtacttttaagaaatatgcaacagtatttagcctattacagtatacaggtgatgccctataacatttcttga

SEQ ID NO: 212029 - DNA, 388 bp, Homo sapiens
tggcaaatgtgataatgatgttatggttatattttcaaaaattcatgtaactctagaaatatattctgagttatgttagggaaattacataatgtctgagatttgctttaaatattttagcaaaaaagaggaggaggagaagaagaaaggaggatagaagaaggaagagggcaaattcttgataattataaaatctaggcaattgagatacaggggttcagtatagtatttcctctacttttgtggcatgtttgaagtttttttttttyttaataataagcattctataccccatctcctctttcaatcccatctcttctcccagaaaatccttcctatcctttgccttttccacatacctaagaagccagaacaaccccctattccc

SEQ ID NO: 212030 - DNA, 600 bp, Homo sapiens
ttcattttaatatactgcattatacaacagtaaaacaagctcaaatacatttamaaatctaagcaaaaccaaatgacagaatttcgtacaggatcaatgagaagcctacactattgtggtaaggtaaagggtagagcaaggaagagggaataaagtagatgagttttatatatgttgctcacatattcctacatgtactttctatcctaggaaagttaattagcttctaactttatccccttgagagaagagtaatatagaacagaacacagagaatcatctcagagagataaaaagaaatttgggaccaatttactatcatacaatttccccctaaaccctctacagtgataaaagcaactctcttccctattgtgtgttctctcctaatctcattttaaaaatcaaagtttcattagtatgttccaaaggcctctctcaccttgaattttccttatttttaacactaattaaaaaagaggagggaagggtgttgaagtactgttcacagaatagcagcaccaaattaaacttggcttttcaagggaaatgccaaatggcagtaaattaagaattaaatttcgttttacagaccctaaa

SEQ ID NO: 212031 - DNA, 519 bp, Homo sapiens
ctgatcatgctatttgcaaaggggatgggagcatttttgtatttgtatttatgagcatgactgttctaatgaaacattatttacaaaacaggtggccagctggtttggcctgtgggccatagtttgctaacactgctataggcaatggggacatccagtgtcagcactgacctggagctttaaggaaagggacctattgttggagagtgatgagggggactacaggagacccataatgtcaaggaatgacaacataaagccacccttagggaaagagccttccaggaartcttggcagggagttgtgccagggccttaaatgcagttggcaaccaatgctacccaatcaggccagccacctgcaacacactagaggcccagcaatggttctgaaaccctaatgtatatgagaatcaccttgagagctaatgcagctggctgaggtccaggctcattggagtacacaagggcctgggcttatgtgttttcaccatgtgctccagatgagctcaagctcat

SEQ ID NO: 212032 - DNA, 565 bp, Homo sapiens
caaatatgtgacaccgtctttaccagtgcccttccaatgccaacaaaccctggtaatcacagcaggcatttttacccaacaatagtactttttcccaataaacctggatgtacccctcagaatccttctcaacacagttctccagacagctctaaaaaattcatgagagttagttcatgagatagagcctgattactagctcaggacaatattttttcagtttacataacatttttagatacattatctcttttgcttttctcaacagctttatgaagtagttgctacttcataaaggcccattttagggatgagaaaatgtatatttcatgaagataaatgacttgaccaaaattacacatataaattatgggagagtcagaatctgaacttagggctcttgcttataaattctaagcctttatctaaaccaacaaggtatttcccacctgtgtttcttcccagttakgagaactatttaataagcctcagggaacagagaaaatcaagaacagttgctaagcctcctgcactggcgtagcagacagtactggttactctaact

SEQ ID NO: 212033 - DNA, 575 bp, Homo sapiens
attcctttttatagaatctacaagtggatatttggagtggtttgagacctatggtagaaaaagaactatcttcaccgaaaaaccacacagaagcattttgagaagcttctttttgatgtatgcattcaactcacagagacgaactgatcttttgatagagcagttttgaaactcacttttgtagaatctgcaggtggatatttggagtacattgcggcctatggtgaaaaaggaactatcttcgcmtgagaaccaggcagaaacattctgagaaactagtttgtgatgtgtgcattcatctcacagagttgaaatcattttttgatttgagtagtttggaaacactctttttgtggaatctctaagggcatatttgaagcgttttgcacgctgttgtggaaaaggaaatatcttcacataaaaactacacagaagcattctgagaaactactttgtgatgtgggcattcatgtcacggttttgaaccttccatttgattgagcagttttgaaatactcgtttggtagaatgtacaagtgaatatttggagcactttgaggcctatgatagaaacg

SEQ ID NO: 212034 - DNA, 575 bp, Homo sapiens
attcctttttatagaatctacaagtggatatttggagtggtttgagacctatggtagaaaaagaactatcttcaccgaaaaaccacacagaagcattttgagaagcttctttttgatgtatgcattcaactcacagagacgaactgatcttttgatagagcagttttgaaactcacttttgtagaatctgcaggtggatatttggagtacattgcggcctatggtgaaaaaggaactatcttcgcatgagaaccaggcagaaacattctgagaaactagtttgtgatgtgtgcattcatctcacagagttgaaatcattttttgatttgagtagtttggaaacactctttttgtggaatctctaagggcatatttgaagcgttttgcacgctgttgtggaaaaggaaatatcttcacataaaaactacacagaagcattctgagaaactactttgtgatgtgggcattcatgtcacrgttttgaaccttccatttgattgagcagttttgaaatactcgtttggtagaatgtacaagtgaatatttggagcactttgaggcctatgatagaaacg

SEQ ID NO: 212035 - DNA, 649 bp, Homo sapiens
gtgcattcatatcacatagttgaacctatcttttgatagagcacttttgaaactctctttttgtagaatctgcaagtggatatttggagccctttgcagcctatggtggaaaagraaacatcttcacataaaaactacacagaagcattctcagaaactactttgtgatgtgtgcgttcagctcacagacttgaaacttcctcttgattgagcagtttggaaacactctttagtaaaatctgcaagtggatattcggagcactttgaggcctgttgtggagaaggaaatatcttcacataaaaactacacagacgcattccgagaaacttgtttgtgatatgtgcattcaactgacagagttgaacctttcttttgattgactagttttgaaaatctctttttgtagaatctgcaagtggatatttggagtgctttgaggcctatggtggaaaaggaaatatcttcatatgaaaactacacagaagcattctgagaaaattctttgtgatgtgtgcattcaaaccacagacttgaactgatcttttgatagagcagtttttaaagtgtctttctgtagaatctgcaagtggttacttggagacctttgtggaagatggtggaaaaggaaatgtcttcccgtaaaaacta

SEQ ID NO: 212036 - DNA, 532 bp, Homo sapiens
ctttcaggcctatggtggaaaaggaaatatcttcacataaacactactcagaagcattctgagaaacttcttcacgatggttgcactaaactctcagagttgaacttatcttttgatagagcagttttgaaactctgtgttactagaatctgcatgtggttatttggagtcctttgtgrccgatggtggaaaaggaaatatcttcccctaaaaagtacacagaagcattctgagaaacttttttgacatgtgtgcactaatctcacagagtttaatctatcatttgattgagcagttttaaaaaactttttttgtggaatctgcaattggatatttggaacgctttgaggcctattgtggaaaaggcaatatcttcacataaaaactacacagaaacattccgagaaacttctctgtgatgtgtgcactcatctcacggagttgaacctttctttgattgacaagttttgaaagactatgtttctataatgtgcaagtggatatttggagtgctttgaggcatatggtggaa

SEQ ID NO: 212037 - DNA, 646 bp, Homo sapiens
tttttacgggaagacatttccttttccaccatcttccacaaaggtctccaagtaaccacttgcagattctacagaaagacactttaaaaactgctctatcaaaagatcagttcaagtctgtggtttgaatgcacacatcacaaagaattttctcagaatgcttctgtgtagttttcatatgaagatatttccttttccaccataggcctcaaagcactccaaatatccacttgcagattctacaaaaagagattttcaaaactagtcaatcaaaagaaaggttcaactctgtcagttgaatgcacatatcacaaacaagtttctcggaatgcgtctgtgtagtttttatgtgaagatatttccttctccacaacaggcctcaaagtgctccgaatatccacttgcagattttactaaagagtgtttccaaactgctcaatcaagaggaagtttcaagtctgtgagctgaacgcacacatcacaaagtagtttctgagaaggcttctgtgtagtttttatgtgaagatgtttccttttccaccataggctgcaaagggctccaaatatccacttgcagattctacaaaaagagagtytcaaaagtgctctatcaaaagataggttcaactatgtgatatgaatgcac

SEQ ID NO: 212038 - DNA, 572 bp, Homo sapiens
  misc_feature (1)...(572): n = A,T,C or G
attcctttttatagaatctacaagtggatatttggagtggtttgagacctatggtagaaaaagaactatcttcaccgaaaaaccacacagaagcattttgagaagcttctttttgatgtatgcattcaactcacagagacgaactgatcttttgatagagcagttttgaaactcacttttgtagaatctgcaggtggatatttggagtacattgcggyctatggtgaaaaaggaactatcttcgcatgagaaccaggcagaaacattctgagaaactagtttgtgatgtgtgcattcatctcacagagttgaaatcattttttgatttgagtagtttggaaacactctttttgtggaatctctaagggcatatttgaagcgttttgcacgctgttgtggaaaaggaaatatcttcacataaaaactacacagaagcattctgagaaactactttgtgatgtgggcattcatgtcacagttttgaaccttccatttgattgagcagttttgaaatactcgtttggtagaatgtacaagtgaatatttggagcactttgaggcctatgatagna

SEQ ID NO: 212039 - DNA, 444 bp, Homo sapiens
gtgtccagagggttttatccatccccatccctcctaaaggtgagggctagaagttattttactgtaactcaagcctggggaggaatcataagtcttttagcaccatgagtgtgggagctgcactaacaagaagtcttcttttccctgtaaaagatcccattgtttgtagatggtctcagggaacatagcccagctggaggcctcttcyccggccctgacactagtccggccctgacagtagtcctcctctcaggatcggtagtgcctccttctcccctcccaaatgcagcaacctagctagaaaaacagacagggactgatacagcacaccaggtgctggccaggagcagatgggatctcaggagaggaagacaacgggttaaatggaagaggggagggagagggtctgggggaggctgtccattgaccaaggacatggccaag

SEQ ID NO: 212040 - DNA, 568 bp, Homo sapiens
ggtgctacgtttttataaaatactctttttcacataagataaatagaatatataataacttgctgacatatcatcagtaaagacttctaaatgataatgtaacatctctgaaacatatcttataaacaagagaaaaaaagagtagaaccaaaatgaaactttaaatttaattacattaaaattaatgttttgagtaggttttgttgartaactagtaggcttgacccttggctaaaaaataattttcttcacgaaatctacatacagcacttctacctttcttatatttgccacatttcattttgtgttatagttacatgtatgtttgttttaatagtattactacattgtttgtacacagccacatgtatggtatgctggttttaaaacatatatttacaaagtcttagatactcagcaagtggagtttattccactcaccccgcaccccccactgttttaatgtgggcttagtgactcacttctttttaaaaacaaattttatttaaaaaaaaaaaaaaaagaccaggcatggtgactcatacctgtaatcccaacattttgggag

SEQ ID NO: 212041 - DNA, 285 bp, Homo sapiens
aaacatgttctgcagttggcttccaagatgccatactctgtcttactgtccactcaaacttagtcaccattgccacttctcccaaacctcttaccattggcatgcccaaagcctggtcttggatctcttcttggtatctrcaccctgctttgtgagctagcccctcctcatggcttcaaatagcatcttaaattgatgattatttgtacctccaacctgaatatttctccttaagtccagattgatctcaccaattgcctactcaacatttctaggtggatatgt

SEQ ID NO: 212042 - DNA, 562 bp, Homo sapiens
gaatttccagccaggctctcgcggagacagcagaagaattcattggtatcacggtgtgcgttttcagttattttccaaaaattcgtctgctgctgagtgcatagtagaggacgagcaaggcaaggggaataagttgggaaattattattgcattgtcagggactgtattccacctgcatgcgttccagttcctccgacctggaaactgttactgaggtaatgaggaaaaaacayccttaaagaaaaatgtctggaccttactggtttacgttgctgattatctacaggattgtatattgcattttattaataataatccgtaatccatgcggaatcccaggagccacctaggtatgccactggcttgagatttaggattaagattcttttgcaaaagaaataacctagtaaagggaagatgactacagaaaaaagatgccagttatggcagttggtcattttaattttaaaattagtggtcagtgtagttcataaaggttttattcaattcaattgagcacagtctaatttaatcctaaggttgtagagaaaggagatgagg

SEQ ID NO: 212043 - DNA, 606 bp, Homo sapiens
atgattatactttaaaaaaaattttactgaagtatgaattttatcaggttaaaaagagccttagctctagatttaagagcataattgctgggtcatatgtgtatggctccagcttggatggaaagttctgaattgttctccaacactcccactgcaaccccaccacacattattccatagtctgccaacacttgatggtgtgaggctctctgcttgttcccaacctgacgactataaaatgatatctcgaccaggcgcggtggctcatgcctgtaatcccagcactttggaaggccgaggtgggtggatcacctgaggtcaggagttcgcgaccagcctggccaacatggcaaaaccccgtctctactaaaaatacaaaaattagccaggcatggtggttcattcctgtaatctgagctacttgagggggctgaggcaggagaattgcttgaacctgggargcggaggttgcagtgagctgagatcacgccactgcactctagcctgggcaacagagcaagactccatctaaaacaaaaaataaataaataaaatgatatcttatgatggttttaacttgacttttcctgattattagtgaaattt

SEQ ID NO: 212044 - DNA, 382 bp, Homo sapiens
actgcagataacttgttccttgctgtgctctctgttgtacattgcaactcatgtagggtattgatcctttttatgctctcacttcgtctgcaacctgtacctgctacactctgttgggatcatctcttagatccacctttcttccaccctgttacctgggcagacacccccttcccagcctctaataacataactgcttggctaggagggactgacttacccccagtggggtcccccattaatggcacacattggactaaggtgccaggtaacactacawatgattccactatcctcccactgtttgtaagtgataaaagttctacccttaatgtgtacctgcctaaacacaattatagctacatcatggccaagggaattc

SEQ ID NO: 212045 - DNA, 427 bp, Homo sapiens
tctacacacccaacaaacagccacatggaaggatgtgtgagaacatctctcctggatagatccccactccggcgggggcgggtgtcactccttcattggaaaaggatgttactgattattctcaggtttgtcttatgttatttactaattctaggatgcaaagctggaaaacgagttataaccgctgcaccttacaaacctgttcctgcacacacacctgtactcttcaatcaataaaacctgatgcaaaaaacggaaaagggggagatgtaggagattggtcagggtgrtgagaaaaattataggaaagatacaaaccttggaaggctgggaggttttgcaaaagctttgggagaggattatagctgaaggcagttaaattctcttatctggaggctgagagcaaagcggtagataacaagggaat

SEQ ID NO: 212046 - DNA, 428 bp, Homo sapiens
ctacacacccaacaaacagccacatggaaggatgtgtgagaacatctctcctggatagatccccactccggcgggggcgggtgtcactccttcattggaaaaggatgttactgattattctcaggtttgtcttatgttatttactaattctaggatgcaaagctggaaaacgagttataaccgctgcaccttacaaacctgttcctgcacacacacctgtactcttcaatcaataaaacctgatgcaaaaaacggaaaagggggagatgtaggagattggtcagggtggtgagaaaaattataggaaagatacaaaccttggaaggctgggaggttttgcaaaakctttgggagaggattatagctgaaggcagttaaattctcttatctggaggctgagagcaaagcggtagataacaagggaatgt

SEQ ID NO: 212047 - DNA, 575 bp, Homo sapiens
agttgttgttattggttagtaaaaaataatttcatagctgatcttaaaatatgtatgcagttgaaaacgtatgagcccctattttcrtagtacccaatataaatcataaacttagataccactgagtcaggatttgtgatatgacagagaaaagctgatgtttatgtataaattatgctagacaaagagctgttagcaagtttgtttaatattgttagagcagtgattaaattgcttaggttaaggtttgatttgtccacttagctaaaatactagttttgaagaaaagctacttatgtttgagttcaggtctgtctcttagtaactgtatcttgtgataaccttatgggtttaattgagcattaacttattcctctgtaaaatgggaatgatactagtaactttgcatgcctcagagaaacataaattgggtaatgtatgtgcattgtcaatgaaaagatacctatcatatcacaggatcagtcataattatcagcaataataatgagataatgattacaaatgatgatctctcaccaagcatctagccatgccatatgcttttgcttgtttta

SEQ ID NO: 212048 - DNA, 615 bp, Homo sapiens
tcaatgctatacctaatttgaaaaggggtagagaagtgcaattctaccatgtgcttgggaggagggggccagaatatttataaagagccctaatgattctcaaaatctttgtcctcagctatatataatatgttgaagaagctagaaaaagtaaatatataattgtagtaattacaatataatatgatatattgaacaaaataaatgtggggacaaagcattttggaggaacagaatgcaataactaagtgtgcttggagaagatagaaaatacttttttaggagaaaatgccaygtgaattgacctataaagataaatttactggatagaaaaaacaggagagtggtgctgttactttcaatggcaaaaaccacagttacttttgcaccaacctagcttataaaccttgtattaagttccttagagaaatagtcacttaaacaggcataaaggtggggagtttcagtgggctaatcacattaagttacatgactttagataaattattttacctctctatacttcaagtttcatgacaatttaagggaattggattaagattctcttaagctctaatagtctatatttgaattatttattttggaaacttattg

SEQ ID NO: 212049 - DNA, 542 bp, Homo sapiens
cagtgtaggcagctgcaaatgaagttctgggcacactgagaggcgtggggaggccactcataggagacaggccttcaacaataaacaggatgtcaacaagcacactaaggcactcggtaagatattttacatgcagaattgtgtgaaaagacataygtgggtatttcttcaaggaaataagaatggagcacagaagtggcaagagtaaatgcataggctgttttctacatgtatcaaagtattcaatatatttaattatcacaataagccaatcaagtggtactgttatgcccattttacagatgaagactaagccaaagagaaattatatgcaatggccaatgtcatagaattaattagatagaaaacaatactcaaattgtcacttgtcttattgtaaaaacatatctactttttatctattaatttattccaaaactatataatcagttcctatgtaggcacctgtatgttgtggtgaaataaacagtcataatttctgacatcatgaggctattagtctcctatctacactgtacctg

SEQ ID NO: 212050 - DNA, 542 bp, Homo sapiens
cagtgtaggcagctgcaaatgaagttctgggcacactgagaggcgtggggaggccactcataggagacaggccttcaacaataaacaggatgtcaacaagcacactaaggcactcggtaagatattttacatgcagaattgtgtgaaaagacatacgtgggtatttcttcaaggaaataagaatggagcacagaagtggcaagagtaaatgcataggctgttttctacatgtatcaaagtattcaatatatttaattatcacaataagycaatcaagtggtactgttatgcccattttacagatgaagactaagccaaagagaaattatatgcaatggccaatgtcatagaattaattagatagaaaacaatactcaaattgtcacttgtcttattgtaaaaacatatctactttttatctattaatttattccaaaactatataatcagttcctatgtaggcacctgtatgttgtggtgaaataaacagtcataatttctgacatcatgaggctattagtctcctatctacactgtacctg

SEQ ID NO: 212051 - DNA, 542 bp, Homo sapiens
cagtgtaggcagctgcaaatgaagttctgggcacactgagaggcgtggggaggccactcataggagacaggccttcaacaataaacaggatgtcaacaagcacactaaggcactcggtaagatattttacatgcagaattgtgtgaaaagacatacgtgggtatttcttcaaggaaataagaatggagcacagaagtggcaagagtaaatgcataggctgttttctacatgtatcaaagtattcaatatatttaattatcacaataagccaatcaagtggyactgttatgcccattttacagatgaagactaagccaaagagaaattatatgcaatggccaatgtcatagaattaattagatagaaaacaatactcaaattgtcacttgtcttattgtaaaaacatatctactttttatctattaatttattccaaaactatataatcagttcctatgtaggcacctgtatgttgtggtgaaataaacagtcataatttctgacatcatgaggctattagtctcctatctacactgtacctg

SEQ ID NO: 212052 - DNA, 593 bp, Homo sapiens
tgtgtccattgccagagaaactcatttattttgaagtggtcattaatatcaaataaacgttcatttcttacaatatactgaggtggactgtggggttcttttctttctgttgaggcagtaatcaagtgctgcataaaaacttccaaaattacaagtgcaagactacgctagcttcagggcagaggtaactgtgatcttcatttctcccttttatttgwtctgtcctagggaagaagcatagtctatgggccagtcctgcttacctcaagccacttcatgtgggaagctaattagctggtgggtttattactcacgtctctggcatcaatgacatattctttgatataatttagtactcacatgttttcaatctgtaaatatccagcataagttattgcagcatgcaatatgtaggttctacatgtgtcttgtttaattgtttacttctagctactagcaaagttttgaggtcaataaatagtcaatcaataaacaatggttaagaactcagacttggaacagaaaaaaaaacagattttaaatttaattctgactgtcatatattagctagttgtgtgactttgccaggttac

SEQ ID NO: 212053 - DNA, 540 bp, Homo sapiens
actgatttattacctttgcttagcactaggatttaagaccaaatggcagggcttgtggcttcttgtcccatagaatatagttaagcccatcaagtgtgacagatgcttggtattcaaatattttttaaataaatggctgagaaaatttgaaagaaaaaaccaataatcccaaaatacaaattgccaaaatcagaaactcagaattcagagccttatgttatcaggtatgttagtttcagaagaagggaaaatagacatactcatatatgtgctaatccggaaatcaagcagctctaggcgccgaycttcatcatccaagattatctcttcctgttttgacaatgctagcatttgcagcaagcaagctggtttgtcaagaccttgtccttttaaaaactaatggctttgtcatccccaggagaggcctgaggctgtgtatgaaggtgtacggggtttcccacgggcagctacttgctgaactgaatatacctagcttccttgtcaagtctagaattgtttgatttcctgcaggaaatgttt

SEQ ID NO: 212054 - DNA, 630 bp, Homo sapiens
catacgtggtgtttggactgaaagacattttttgggaccaaaaagtaacaaatataaagaaaaagtaaaaagattctygcccttccaccatcaaggcactaaatcaaagagagtagtcatctacttcctggcttcttgttatgtaacaaatataagacgcaattcttttaagacactataagctgggtggttacttagagcagaatgaatttctaatgggcacaacagccaatttaggatcttagataatattgatctccattgttttaatagtaaaacttgctcatcatgaagcagtaaatcaaggaactctttcaatatcaaaaatttcaggtagaaatgataccaaaatgtataagaaatgagtcccaagctttaaataactcttctagccttgtggataagaatttaataaatattgagcaaagaactttagtgctgcagtatttggagtcataataaaaagtagaggttaatttttacaatgtcaaaagcagcttgtgattagtataaaatgtaaatgttaaactacagaatttttgagtcctctaatagcacccaattccttaatcagtttgtacctgatgatcggttatccccccataataaattactggtaagtaataagaa

SEQ ID NO: 212055 - DNA, 590 bp, Homo sapiens
acagttgtaaaccactttgcccagcctatagtccattttaaagatggcaacactgacagacttacaggttaaacatttataagtcataaagctgataggtgtaagaggatggttgagaaactcaggtgctatggtccttgattcatgttttaaatcagggcttacataaagcaaatatttggtttttgtatttgcaaattatgccatacttaagtgggggcattattaagacagattatttgtcagttccaaacacagttgcttcagagagtaacactacaattgctacatttagtcttttcacaacaatcatatttgggtacagatattcttttaagaatgcaatatgtttctctaaatattgtgcagatactgattttttaaaaatgtttttgcaaagaatatktttgatccagacttgctcacattaatgaggactctgaagatgttaagttctagagttaacttaggatagaagcatgcacattgtttggattattttgtgaataatcatatctaagccaagacagtgatcagattgcattggaggtccttgccacagatgatatgattgtttacacagaaaactg

SEQ ID NO: 212056 - DNA, 586 bp, Homo sapiens
aaaagtatattaacatggaggagggagaatttaatcttggctggggtacacaggggaagcaagacatgagcaaaaaccgaaacataagtttaatagctggacaaggaaattcctggcaaagggaacagcaaaagcatggaaataggagcatggacttaaatagtagcgaatgggaacattcgaaggagctggagaatgagcctacagtttgaccttgcatttgtgcttcagctgtttctgtcttgtgtttttggtttttgtcataagccactgcaaatcctttttgcaaggatgtgaagtacaaaaacagataatttacaacaacagtgcttagcccttaagrcttttgtgagagctgacagacggctgagatgtctaaagaaaagctggtcctgacagtgggacataaggaaagaggaagagcataaccagaataagtatggggccaaggactaggcgaggccttttccaccttttacttgtttcttataacacttccacattttttttgcaatgtccctatgtcatttctacaagtatttcttaggcattttctttaaatgtcttattttttatattttctctg

SEQ ID NO: 212057 - DNA, 600 bp, Homo sapiens
gccagaatccatactgaaaataaagtgtgattccttgtacaggtaaggatgaacttcagtgattgggaaacgtgaaggatggcaaagaagtaagatcaatcctaaggtaataaaaactacatgtaattgttagccaacatagatcatttcttgaattaagagcaagcttgttgagctcagaagaattacatagtgaaaattagtcaggagtcctcattccaaggattgtaaaactaattatcctcgttaagtctcttgctatgttttgctctgggtcagttgccaggctgatttttggtattaacctctgtacttctggtttctgggagatctgtacaataaacttcttccaaatttccaataaatttcttctatttcttacaaatagaagaaatatatttttaattaaataagaataaaattcttattaaggaaagaacaaatttctaattgcttcttaaggaaatatctggaaaatatctcactgtatttttgcaaaatgaatgtttctmtattattgttttttattaactcaaggagaaatttcacagtatacttctatcttttgacacattcttctcagtttttcaaccatgtttc

SEQ ID NO: 212058 - DNA, 535 bp, Homo sapiens
aggatattctcagacatgttcctcctgggaaagtgttgtgtgctgaattttgtcccctaaaagttatgctaaattactaacamctagtagttcaaaatataattttgtttgaaaataaggtcactacacatgtaattagttaaaattagaccatataacagtcgggtgggtcctactccgtactggattaaggaatccaatatgactggtacccttttaagaagagtgaaagagacacagaaacagagaccgaaggagaaggtggccattaatgagacatagacattggagtggagcctcttcaaactaagattttcagggagtgctgacaacaccaaaatctaagggaaagacatggaacagattctcccccagacttttcagagagagcatgatgctgccaacaccttgtttttggatttctagactccagggcggtgagagaatacatttctgtcattttaagctcttctagatagtgaaactgtgttacaacacttttaggaacaagcatggatgataatcatgctgcaaa

SEQ ID NO: 212059 - DNA, 535 bp, Homo sapiens
aggatattctcagacatgttcctcctgggaaagtgttgtgtgctgaattttgtcccctaaaagttatgctaaattactaacacctagtagttcaaaatataattttgtttgaaaataaggtcactacacatgtaattagttaaaattagaccatataacagtcgggtgggtcctactccgtactggattaaggaatccaatatgactggtacccttttaagaagagtgaaagagacacagaaacagagaccgaaggagaaggtggccattaatgagacatagacattgkagtggagcctcttcaaactaagattttcagggagtgctgacaacaccaaaatctaagggaaagacatggaacagattctcccccagacttttcagagagagcatgatgctgccaacaccttgtttttggatttctagactccagggcggtgagagaatacatttctgtcattttaagctcttctagatagtgaaactgtgttacaacacttttaggaacaagcatggatgataatcatgctgcaaa

SEQ ID NO: 212060 - DNA, 582 bp, Homo sapiens
aataaactatatagatagatattatggattatattatagaaatcaaccataggaagagatacatgagcctgagcccagaaaaatgccaagtgtgatgcttccaattatattctcccagtgtagtcatgaatagaactcactttccccagcaatgatgtgtgactatatacacaaagtattgccaaccaaggaagttcacctgtgctttggtgtccagagtttttattggcactcagtcatgtagacattattggccactggcacagctgactttagtttccagcccctctggagaccaagctgatattgcctaacccaaagcccycaccagaaatgtgaaaaattccaaatatttaaaaacaatatacttccagaggactcatagataaaaaagaaattaaaagagaaattagaaattgttttatctgaattaaaaggaaaacaaagcatatcaagaattgtgaaatgcagctaaggtggaataaagctaaatacacagaaacacatacatatacatatatatgcatatctatgaaatatctacatatatatgaagtatttaggtattcttggaattaataa

SEQ ID NO: 212061 - DNA, 630 bp, Homo sapiens
gtctttgtcataaatgaagtaacctcgaggagaaattgtcaggaatggagaagaaatcagaactkctggttgtgctttcattttacttttaaactggagatattggtataaatttaattagcaaactgaaggagaaaaatactctacctcattgacaaataggaaatgagatatggatttactttcaaccttatgcatgaaaggaaagctatccaaatagtgaggtgagtgtaatatggggtctttcatattcattagttagagccaagaatggataagaggtctcagaagctatttgatttgacatttaactttgaaaagggaatttaccaacagataatttgcaggagagatgaagagagaaggttaggactacttgatgaatttcagaggaataggggaaaagcgtaaaatatgttgttttaaagaaattaattaatggtgcattaaatgcagggaacattggaggaaggacttgggagtgaataatgcaggtgacactgggtatacttcttccctctgagtatctaggaaaaaaattcccaagttggcactcacacacccaagtcaattcaattcagtcatatcttctttcctcttgtaattcttttttccttttcaggctccaca

SEQ ID NO: 212062 - DNA, 630 bp, Homo sapiens
gtctttgtcataaatgaagtaacctcgaggagaaattgtcaggaatggagaagaaatcagaactgctggttgtgctttcattttacttttaaactggagatattggtataaatttaattagcaaactgaaggagaaaaatactctacctcattgacaaataggaaatgagatatggatttactttcaaccttatgcatgaaaggaaagctatccaaatagtgaggtgagtgtaatatggggtctttcatattcattagttagagccaagaatggataagaggtctcagaagctatttgatttgacatttaactttgaaaagggaatttaccaacagataatttgcaggagagatgaagagagaaggttaggactacttgatgaatttcagagraataggggaaaagcgtaaaatatgttgttttaaagaaattaattaatggtgcattaaatgcagggaacattggaggaaggacttgggagtgaataatgcaggtgacactgggtatacttcttccctctgagtatctaggaaaaaaattcccaagttggcactcacacacccaagtcaattcaattcagtcatatcttctttcctcttgtaattcttttttccttttcaggctccaca

SEQ ID NO: 212063 - DNA, 418 bp, Homo sapiens
gagaggtgtcttatgccttgtaatcccagcactttgggaggccaaggtgggatgattgcttgaggccaggggttcaagaccagcctgggaaacatggcaaaaccctgtctcattccttcaatcctagcactttgggaggctgaagcrggtgggtcacttgaggtcagttcaagaccagcctggccaacatagtgaaacccccgtctctaccaaaaatacaaaaatgagctcttggccttggtgccatcttcttggaaacctttgtgctacaagagccaagtggaggaagaagcacatgaggaggctgaagcccaaaagaaagatgaggcagaggtccaagtaaaccactagcttgttgcacccgtggaggccacagaagcagaaacatggaatgccagaggctgggaatgctggtaca

SEQ ID NO: 212064 - DNA, 434 bp, Homo sapiens
aattaactggaaccaggagaggtgtcttatgccttgtaatcccagcactttgggaggccaaggtgggatgattgcttgaggccaggggttcaagaccagcctgggaaacatggcaaaaccctgtctcattccttcaatcctagcactttgggaggctgaagcaggtgggtcacttgaggtcagtycaagaccagcctggccaacatagtgaaacccccgtctctaccaaaaatacaaaaatgagctcttggccttggtgccatcttcttggaaacctttgtgctacaagagccaagtggaggaagaagcacatgaggaggctgaagcccaaaagaaagatgaggcagaggtccaagtaaaccactagcttgttgcacccgtggaggccacagaagcagaaacatggaatgccagaggctgggaatgctggtaca

SEQ ID NO: 212065 - DNA, 434 bp, Homo sapiens
aattaactggaaccaggagaggtgtcttatgccttgtaatcccagcactttgggaggccaaggtgggatgattgcttgaggccaggggttcaagaccagcctgggaaacatggcaaaaccctgtctcattccttcaatcctagcactttgggaggctgaagcaggtgggtcacttgaggtcagttcaagaccagcctggccaacatagtgaaacccccrtctctaccaaaaatacaaaaatgagctcttggccttggtgccatcttcttggaaacctttgtgctacaagagccaagtggaggaagaagcacatgaggaggctgaagcccaaaagaaagatgaggcagaggtccaagtaaaccactagcttgttgcacccgtggaggccacagaagcagaaacatggaatgccagaggctgggaatgctggtaca

SEQ ID NO: 212066 - DNA, 504 bp, Homo sapiens
ctgggcaacacagcaagactctggctctaaaaaatatatatttatacatagaaagaaaaaaaatcacaaatttctgttcataagcaaaataaactcacgactttagtatcatctctaaatcagactttattaattcatcctgtccttttttttttcttagcgtcttgttctgtcgcccaggctggagtgcagtggtatgctctcggctcactgcaacctccacctcctgggttcaagcagttctcatgcctcagcctcccgagcagctgggactacaggtgccsgccaccacacccagctaatttttttgtatttttagtacagacggggtctccccatgttggccaggctggtctcaaactcctgaccccaggtgattcacccacctcagcttcccaaagtgctgggattacagcgtgtgagccaccactcccggcccttgttctttttttttttcccatagaggtgggaccttgctatgttgccccagctggttttgaattc

SEQ ID NO: 212067 - DNA, 504 bp, Homo sapiens
ctgggcaacacagcaagactctggctctaaaaaatatatatttatacatagaaagaaaaaaaatcacaaatttctgttcataagcaaaataaactcacgactttagtatcatctctaaatcagactttattaattcatcctgtccttttttttttcttagcgtcttgttctgtcgcccaggctggagtgcagtggtatgctctcggctcactgcaacctccacctcctgggttcaagcagttctcatgcctcagcctcccgagcagctgggactacaggtgccggccaccacacccagctaatttttttgtatttttagtacagacggggtctcsccatgttggccaggctggtctcaaactcctgaccccaggtgattcacccacctcagcttcccaaagtgctgggattacagcgtgtgagccaccactcccggcccttgttctttttttttttcccatagaggtgggaccttgctatgttgccccagctggttttgaattc

SEQ ID NO: 212068 - DNA, 226 bp, Homo sapiens
tgtcttaaggaaaaaaaaaaagatactaatcttttgttggctatatgtgttacaaatattgttccccagtgtatgacatatcttttcactctcctaatgatattttttgatgaggtgactttcttcccccgagtatttttttcaattacatttctcaaattgagaaayaatttacatttccagccaatgtatctgcagaaaaaaaccaaacaaacagggggatggg

SEQ ID NO: 212069 - DNA, 603 bp, Homo sapiens
gagatctaaacccagctcaattctggctcatcctctaaagagttctagaaaagaggcagctacatccttattaaaaggaaaattaagaggccaggcccagtaggctcacacctatgatcccagcatattgggaggcaaaggtgggagcatcagttgaggctgggagtttgagaccaacctcggtgagatagggagaccccgtctctacaaacagaataaaaaaacttaaggccgggcgcggtggctcacgcctgtaatcccagcactttgggaggccgaggcgggtggatcatgaggtcaggagatcgagaccatcctggctaacaaggtgaaacccygtctctactaaaaatacaaaaaattagccgggcgcggtggcgggcgcctgtagtcccagctactcgggaggctgaggcaggagaatggcgtgaacgtgggaagcggagcttgcagtaagccgagattgcgccactgcagtccgccgtccggcctgggcgacagagcgagactccgtctcaaaaaaaaaaaaaaaaaaaaaaagaataaaaaaacttagctggaggtggtggttgcagtgagtcgtgttcacaccactgcactcta

SEQ ID NO: 212070 - DNA, 422 bp, Homo sapiens
tggcccagcattaaaatatcttgtggatagtaattaaaactacacaactttcttagtttggagttctaaaatatgcttgattgatagtatcttagcagaatatgtgccttttaacttaatatctgatttaacctgataatcaaaattgtcccaatttttcaaaatattactgagataaatatcttgacagtccagtaggaacccatggacttaatttcaagtattaaaaaygtaatatataactgagaatcttatagaagttaatctcatttatcattcagtataatatttccttctacacaattcttcgagatggttttgcattcgtataagctccttacctaccctgactgcagggtagcttttaagttgagtatctgtcccagatagtctaggattatctatctcctactaccctgaaa

SEQ ID NO: 212071 - DNA, 649 bp, Homo sapiens
tttatattacctgagatttgaaattttatatgcaaaattttacttctatatttcattgttatttcaacctaatgtcatgtttagcttcattgtttgcccgctgttatttttatactccttcccccaccatgcttttagtaatacttttggaaggatcactatgggtcttttctcctttcttttaraatggcatttttgctggacactggagatcagactattctttgttaaatcagaagaattgttcaactacccatccttttatcatcaatgtttagtacttttcctggcactagaggttccctcgcaaatgtttgttgaaaggattatttgatgtttctggaagaccagatgttggactaccaggatgcatcaaatgaatgccacgcttaggatcttcccaagtggaactctgacctttgaaaggtgacaccaatcagcattatcctttgaagtcagacttgtttaaatatatctatttccatatatctatagctacatctatacattagggaataggaaatatgaagctgtctaaagggaaaagttcagagaaatagggaaagcagtactttgatataatgaggaggaagaaactagggacttgccggagttttaatttgtctatttgatgaataaccctgtgaaa

SEQ ID NO: 212072 - DNA, 649 bp, Homo sapiens
tttatattacctgagatttgaaattttatatgcaaaattttacttctatatttcattgttatttcaacctaatgtcatgtttagcttcattgtttgcccgctgttatttttatactccttcccccaccatgcttttagtaatacttttggaaggatcactatgggtcttttctcctttcttttagaatggcatttttgctggacactggagatcagactattctttgttaaatcagaagaattgttcaactacccatccttttatcatcaatgtttagtacttttcctggcactagaggttccctcgcaaatgtttgttgaaaggattatttgatgtttctggaagaccagatgttggactaccaggatgcatcaaatgaatgccacgcttaggatcttcccaagtggaactctgacctttgaaaggtgacaccaatcagcattatcctttgaagtcagacttgtttaaatatatctatttccatatatctatagctacatctatacattagggaataggaaataygaagctgtctaaagggaaaagttcagagaaatagggaaagcagtactttgatataatgaggaggaagaaactagggacttgccggagttttaatttgtctatttgatgaataaccctgtgaaa

SEQ ID NO: 212073 - DNA, 601 bp, Homo sapiens
tgggggagaaataagagagaaagaagggaaagtargatgaattaatggatatggcagacagagtggtatactggagtgggctcagatgagttttcaagaagtgattatgcaaatctgagtttctttccctgaatgcatttagtgacatcatgttggtagcttgccattggtaatagtgggaatatttccgtcactgaaataaacacaccagagctttttctctcccgacccctgtggatggcagttgataaagatttaccagtatgccactgtgcacagatattaaataggtaataataaaaaataacttaaaattaataaaccaaaaaacatgttcaagtaaaaaaaagaaagaagacaagataaaaggaaggaagaggaaaagaaggaagaagagaaacagagaaagaccaagagaaatagaaaagtcattaatataaaggtaatcactagttaaaactacagatcctccaaattccaaattaaatgtccaatttagcaaaaacagaatcaaacccaataaatataacagaatctacatagctgtagtacgtaaatcttagcccaaacacaatggtcacactacaaatacaaataggct

SEQ ID NO: 212074 - DNA, 495 bp, Homo sapiens
atttttatttttaatttttgtgggttcatagtaggtatattatttatgggatatatgagatgttttgatacagacatgcaatgtgaaataagcaataacatggatggaactggaaatcattatgttaagtgaaataagccagtcacagaaagacaagcatcacatgttctcatatttatgggatctaaaaatcaaaacaattgaactcagggacatagagagtagaagaatgattaccagaggctgggaagggtagtaatgggctgggaggggtgagaaggtgggactgttgctcacttttaaaccaatgccttatagcatattttaaagtctaatttagaagtttacatctgttcttactcggcagatcataagctgcttgaactcatagaaaatgttttttgcttcttgtatcacctcagtgccgagtraagtgtgatacaaagtggggactcagtatatcttaattgattcactgattttctagtggaacag

SEQ ID NO: 212075 - DNA, 589 bp, Homo sapiens
aagcttaatcatttttagctktgatttaaagtgagagatgtgcagctcttcctttcacttcaatatttagaagccattgtaaggttattaactggtctagctttaatattgttgtgtctcagggaagagagaggcctaaggaggggggcatggagggagagagagagagagaaatgagagtgagagagacagacagagagagagagagagagagagagagagagagagagagagagagatggaggaacagccagtcagtggagcagtcagaagacccacaacatttatctgttaagtttcttatcttcataggtgtggtacatggaaccccaaaacaattaccgtagtaacatcagagatcactgatcacagatcatcataatagatataataataatgaaacatttgaaatattgtaagagttaccaaaatgtgacagagatatgaaatgtgacacagagacatttttccacatgctgttggaaaaatggtgccaataggcttggtcaacacacggtcaccacaaattttcagtttgtaaaagatgtgcaatacaattgaattatgtggctgtggttgttcatgcctg

SEQ ID NO: 212076 - DNA, 589 bp, Homo sapiens
aagcttaatcatttttagctgtgatttaaagtgagagatgtgcagctcttcctttcacttcaatatttagaagccattgtaaggttattaactggtctagctttaatattgttgtgtctcagggaagagagaggcctaaggaggggggcatggagggagagagasagagagaaatgagagtgagagagacagacagagagagagagagagagagagagagagagagagagagagagagatggaggaacagccagtcagtggagcagtcagaagacccacaacatttatctgttaagtttcttatcttcataggtgtggtacatggaaccccaaaacaattaccgtagtaacatcagagatcactgatcacagatcatcataatagatataataataatgaaacatttgaaatattgtaagagttaccaaaatgtgacagagatatgaaatgtgacacagagacatttttccacatgctgttggaaaaatggtgccaataggcttggtcaacacacggtcaccacaaattttcagtttgtaaaagatgtgcaatacaattgaattatgtggctgtggttgttcatgcctg

SEQ ID NO: 212077 - DNA, 589 bp, Homo sapiens
aagcttaatcatttttagctgtgatttaaagtgagagatgtgcagctcttcctttcacttcaatatttagaagccattgtaaggttattaactggtctagctttaatattgttgtgtctcagggaagagagaggcctaaggaggggggcatggagggagagagagagagagaaatgagagtgagagagacagasagagagagagagagagagagagagagagagagagagagagagagatggaggaacagccagtcagtggagcagtcagaagacccacaacatttatctgttaagtttcttatcttcataggtgtggtacatggaaccccaaaacaattaccgtagtaacatcagagatcactgatcacagatcatcataatagatataataataatgaaacatttgaaatattgtaagagttaccaaaatgtgacagagatatgaaatgtgacacagagacatttttccacatgctgttggaaaaatggtgccaataggcttggtcaacacacggtcaccacaaattttcagtttgtaaaagatgtgcaatacaattgaattatgtggctgtggttgttcatgcctg

SEQ ID NO: 212078 - DNA, 591 bp, Homo sapiens
agcttcatacgcaaagcaaaaatatgtgtttttttttgagacaagcaagcactaaaggaatttgttacctctaaaccagccttacaatagatccttaagggagttctaaacatggaaacaaagaaacaatacctgctaccacaaaaacacagttaagtacatagcccaagatcctataaagcaaccacacaatagaaaccagctaacaacttcaggataggataaaaatctcrcatatcaatattatctttgaatgtaaacagtctaaccatcccacttaaaaagcacggagtggtaagttggattaaaaaaaaaccaaacccatctatctactgtcttcaagaaatgcatctcacatagaataacacctataggctcaatgtaaagggttgaagaaagatctataatacaaatagacaaagagcaggggtcactattcttatgacagataaaacagactttaagccaacaacagtaaaaaagaacaaaaacaggggcattgcataatgataaagggtttaatctaaccagaagacttaactatcctaaatatatatgcacccaataatggagcacccagtttcataatat

SEQ ID NO: 212079 - DNA, 611 bp, Homo sapiens
tgatccatgagaccctagaaaacagaacttgggtcagtggatgaagatatgggggaaggactctctagctaacctgagttactaagtaatatattatctgtcagtattaatgttaagattggaggaccactggtgggagtgttgcagtggggaacataaacactggatcttaatttttgatgtccttaggctaactgattcttttaccagcctttatagggataggaggacagaaaatatactaaaaacaatatactcattaatattcatggaaggcaagraagccatagctttttattgatattcatgatttttcacctttggtagactatgaaccagtcaaggtcagtgagtgcatttgataaccctggacaataatattggttgtgatacttatgctaatgatgcagtgatgacaagatttatcttttaagtagattaagagcaagggctctgaaatcagacaggcgttagttcaaatcatggctccactacttgccagccacatcagaaaatccaagttatttagttcctatgaattttagtttctcattttaaaaggacaataatagtacatattccagcttactgtatagaattgtgcagaggat

SEQ ID NO: 212080 - DNA, 611 bp, Homo sapiens
tgatccatgagaccctagaaaacagaacttgggtcagtggatgaagatatgggggaaggactctctagctaacctgagttactaagtaatatattatctgtcagtattaatgttaagattggaggaccactggtgggagtgttgcagtggggaacataaacactggatcttaatttttgatgtccttaggctaactgattcttttaccagcctttatagggataggaggacagaaaatatactaaaaacaatatactcattaatattcatggaaggcaaggaagycatagctttttattgatattcatgatttttcacctttggtagactatgaaccagtcaaggtcagtgagtgcatttgataaccctggacaataatattggttgtgatacttatgctaatgatgcagtgatgacaagatttatcttttaagtagattaagagcaagggctctgaaatcagacaggcgttagttcaaatcatggctccactacttgccagccacatcagaaaatccaagttatttagttcctatgaattttagtttctcattttaaaaggacaataatagtacatattccagcttactgtatagaattgtgcagaggat

SEQ ID NO: 212081 - DNA, 320 bp, Homo sapiens
gaccttggaactgataatctggaggtacacacacacgaaacaaaaatggcttcaggagctctgtagaaatattactatgaatgcgaaaggagcaacgtgggctggacttcaatgcatgaaagaattatgacgggtagaaaaatagagggacatttcaagtatggaggcaatacagtgagagcaarggtttaaaaggagaaacaaattaacaaagtatgcttaaggggacaaaaccaaaagcagtctgaaagcatgaagtttctgagaaagttgctgaatggtaagggccaagaacttcaaattacactcaataggggtag

SEQ ID NO: 212082 - DNA, 616 bp, Homo sapiens
ccagcttctttgctaaggccaatcaaatgtaatcttggcttctattaataggaaattcctcattttcatctgagaccttttaagtctggacttcagtgtttaaacttttgtcagccttctaatcacaagtatttaacaattctctatagtggtccaatattttcctcatcttgctgtcttctaagctttcccaattcttctgacctctgtcttttactcacttctgaacctggttctacattgtcagctatctttatcagagcctggcaatgtggtaaaacagaaaagtccattttcgggggaaaattcacgaaggcttcagatatttgcatgaaaagaagctgagtgctggttgccaagacaaaggggaaagggccttgaaggcatttcatggctccacttcatagcactgattttctgtatgatcataaagaaaagaggtttaattggctcactatacagcaggctgtaaaggaagcgtagtggcttctgcttctkggaggatcagatcaggaagcctcccaatcataccagaaggccaaggggcaatgagatatttcaaatggcaggagtagaagcaagactgcgagaggaaagagttgccaccccgttatat

SEQ ID NO: 212083 - DNA, 507 bp, Homo sapiens
ggcagtatgatctctgcttaaccccagttaagtgtatagtgtatatgcttaaccatatatccatactgcttcctgactatgttatayattgcttccagactacattttaaaaaataggctcacgttgaatcactgggggttgaagaaatacttgacactaatggagatgtcaggaagagaggtctggaagaaataccataaaactaaaaaacatggtaaagatagatttgtaaatctttttatagatttgaaaaacatatttctaatacaaagttacagtcaaatatttaatacactttatctctcaagcacggtatgctttaattgaaacaatggacctaatcattactaggacttttagaaggtcacttctgtgtttgcctttgttttaatagcctcaaatctcccaaaaatatatcctatttggtttccagtatcaatttaaagtctttctgggaaaagataaggtcaaaattcaaaatttattttaaaatccttatttctaga

SEQ ID NO: 212084 - DNA, 507 bp, Homo sapiens
ggcagtatgatctctgcttaaccccagttaagtgtatagtgtatatgcttaaccatatatccatactgcttcctgactatgttatatattgcttccagactacattttaaaaaataggctcacgttgmatcactgggggttgaagaaatacttgacactaatggagatgtcaggaagagaggtctggaagaaataccataaaactaaaaaacatggtaaagatagatttgtaaatctttttatagatttgaaaaacatatttctaatacaaagttacagtcaaatatttaatacactttatctctcaagcacggtatgctttaattgaaacaatggacctaatcattactaggacttttagaaggtcacttctgtgtttgcctttgttttaatagcctcaaatctcccaaaaatatatcctatttggtttccagtatcaatttaaagtctttctgggaaaagataaggtcaaaattcaaaatttattttaaaatccttatttctaga

SEQ ID NO: 212085 - DNA, 479 bp, Homo sapiens
ggtagggcaggtgcttaaagtcaggcagtatgatctctgcttaaccccagttaagtgtatagtgtatatgcttaaccatatatccatactgcttcctgactatgttatatattgcttccagactacattttaaaaaataggctcacgttgawtcactgggggttgaagaaatacttgacactaatggagatgtcaggaagagaggtctggaagaaataccataaaactaaaaaacatggtaaagatagatttgtaaatctttttatagatttgaaaaacatatttctaatacaaagttacagtcaaatatttaatacactttatctctcaagcacggtatgctttaattgaaacaatggacctaatcattactaggacttttagaaggtcacttctgtgtttgcctttgttttaatagcctcaaatctcccaaaaatatatcctatttggtttccagtatcaatttaaagtctttctgg

SEQ ID NO: 212086 - DNA, 479 bp, Homo sapiens
ggtagggcaggtgcttaaagtcaggcagtatgatctctgcttaaccccagttaagtgtatagtgtatatgcttaaccatatatccatactgcttcctgactatgttatatattgcttccagactacattttaaaaaataggctcacgttgaatcactgggggttgaagaaatacttgacactaatggagatgtcaggaagagaggtctggaagaaataccataaaactraaaaacatggtaaagatagatttgtaaatctttttatagatttgaaaaacatatttctaatacaaagttacagtcaaatatttaatacactttatctctcaagcacggtatgctttaattgaaacaatggacctaatcattactaggacttttagaaggtcacttctgtgtttgcctttgttttaatagcctcaaatctcccaaaaatatatcctatttggtttccagtatcaatttaaagtctttctgg

SEQ ID NO: 212087 - DNA, 312 bp, Homo sapiens
ggtctggaagaaataccataaaactaaaaaacatggtawagatagatttgtaaatctttttatagatttgaaaaacatatttctaatacaaagttacagtcaaatatttaatacactttatctctcaagcacggtatgctttaattgaaacaatggacctaatcattactaggacttttagaaggtcacttctgtgtttgcctttgttttaatagcctcaaatctcccaaaaatatatcctatttggtttccagtatcaatttaaagtctttctgggaaaagataaggtcaaaattcaaaatttattttaaa

SEQ ID NO: 212088 - DNA, 312 bp, Homo sapiens
ggtctggaagaaataccataaaactaaaaaacatggtaaagatagatttgtaaatctttttatagatttgaaaaacatatttctaatacaaagttacagtcaaatatttaatacactttatctctcaagcacggtatgctttaattgaaacaatggacctaatcattactaggacttttagaaggtcacttctktgtttgcctttgttttaatagcctcaaatctcccaaaaatatatcctatttggtttccagtatcaatttaaagtctttctgggaaaagataaggtcaaaattcaaaatttattttaaa

SEQ ID NO: 212089 - DNA, 426 bp, Homo sapiens
taccactccccacaaataagtttctaagtcaaaggtattgtcagaagttcaaaagactggaccactcagtgctttgtgatattattttgatgattttttgactgcattccattccaaaaactaatttactttgagtagaagcagagttaataaagtatgcaaaaatactaatctggcttatttaagtagtctagtgacatatctgagaaaaattttgtgtgagattcaataaaagctgagatttaaagaacaggttactgctggtctccccaagttaacatagtttacctgagayatacacaaaattaacttttatccatctctctctctctctttttttttaagtatttgcttgaggcataatcataatcaacttctaaagttacattttacttgatttgttgtcccaaatgtagacaaaaaaat

SEQ ID NO: 212090 - DNA, 283 bp, Homo sapiens
aagcttgttttgtctccttgctgagaattgtcaaacatgaaatgtaatttcaggytatagtgaagaaagatgacataggcagaagaaattggcaatcatttggcctgtacatgtggctttttgttttttttctggacttaggatatagaccacaccttgacatttctggcctttgagtctttcacaactgttattataatacattagctcttctagaagttagaagtgactttggattaagtctttcataaggtggctaaatgaattaatatagctcatcata

SEQ ID NO: 212091 - DNA, 283 bp, Homo sapiens
aagcttgttttgtctccttgctgagaattgtcaaacatgaaatgtaatttcaggctatagtgaagaaagatgacataggcagaagaaattggcaatcatttggcctgtacatgtggctttttgttttttttctggacttargatatagaccacaccttgacatttctggcctttgagtctttcacaactgttattataatacattagctcttctagaagttagaagtgactttggattaagtctttcataaggtggctaaatgaattaatatagctcatcata

SEQ ID NO: 212092 - DNA, 283 bp, Homo sapiens
aagcttgttttgtctccttgctgagaattgtcaaacatgaaatgtaatttcaggctatagtgaagaaagatgacataggcagaagaaattggcaatcatttggcctgtacatgtggctttttgttttttttctggacttaggatatagaccacaccttgacatttctggcctttgagtctttcacaactgttattataatrcattagctcttctagaagttagaagtgactttggattaagtctttcataaggtggctaaatgaattaatatagctcatcata

SEQ ID NO: 212093 - DNA, 550 bp, Homo sapiens
tgagaattgtcaaacatgaaatgtaatttcaggctatagtgaagaaagatgacataggcagaagaaattggcaatcatttggcctgtacatgtggctttttgttttttttctggacttaggatatagaccacaccttgacatttctggcctttgagtctttcacaactgttattataatacattagctcttctagaagttagaagtgactttggattaagtctttcataaggtggctaaatgaattwatatagctcatcataattcactagattggttaagcgggaaatttacagatttttttctttgctgtaaatatttttctaaattgaaaaacttctaatactgtcttctgtagtagacctagaaataagtgcaagtgattgtttttggcaggaggccacataaacttttctgcttctctgtgccttacgggtagcattgatataaattgttaaaaataatgattgtagatagataatgtttcagagtttgggctcagccgcggtagctgctgttgacccagagggaccactgggatcctcacatct

SEQ ID NO: 212094 - DNA, 550 bp, Homo sapiens
tgagaattgtcaaacatgaaatgtaatttcaggctatagtgaagaaagatgacataggcagaagaaattggcaatcatttggcctgtacatgtggctttttgttttttttctggacttaggatatagaccacaccttgacatttctggcctttgagtctttcacaactgttattataatacattagctcttctagaagttagaagtgactttggattaagtctttcataaggtggctaaatgaattaatatagctcatcataattcactagattggttaagcgggaaatttacagatttttttctttgctgtaaatrtttttctaaattgaaaaacttctaatactgtcttctgtagtagacctagaaataagtgcaagtgattgtttttggcaggaggccacataaacttttctgcttctctgtgccttacgggtagcattgatataaattgttaaaaataatgattgtagatagataatgtttcagagtttgggctcagccgcggtagctgctgttgacccagagggaccactgggatcctcacatct

SEQ ID NO: 212095 - DNA, 550 bp, Homo sapiens
tgagaattgtcaaacatgaaatgtaatttcaggctatagtgaagaaagatgacataggcagaagaaattggcaatcatttggcctgtacatgtggctttttgttttttttctggacttaggatatagaccacaccttgacatttctggcctttgagtctttcacaactgttattataatacattagctcttctagaagttagaagtgactttggattaagtctttcataaggtggctaaatgaattaatatagctcatcataattcactagattggttaagcgggaaatttacagatttttttctttgctgtaaatatttttctaaattgaaaaacttctaatactgtcttctgtagtagacctagaaataagtgcaagtgattgtttttggcaggaggccacataaacttttctgcttctctgtgccttacgggtagcattgatataaattgttaaaaataatgattgtagatagataatgwttcagagtttgggctcagccgcggtagctgctgttgacccagagggaccactgggatcctcacatct

SEQ ID NO: 212096 - DNA, 464 bp, Homo sapiens
aatcgcttgaaccagggaagtagaggttgtggtgagctgagagcrcatcactgcactccagcctgggaaacaagagtgaaactgtctcaaaaaaaagggaggaaaaaacatatttattctctcgtattttctgtgggtcaggaatttgggcacaactcaactgggttcactgcatagggtctcacaaggttgcaggcaaggcgtcagctgagctaggttcaagctcattcaggttgttgacaaaattcatttccttatgtctgtatgattgtgtagctatgttttttattgggtattgaccggaggccaccctcaggtcctagacaccacctgctgttgggcttcctcaatatggtcacacacttcatcaaatcagcaaggagaatcttgtgtgcatgccagcaatatgtctatctcatatcctaatgtatgtctctctcctcctcctcctctcctcttccctc

SEQ ID NO: 212097 - DNA, 464 bp, Homo sapiens
aatcgcttgaaccagggaagtagaggttgtggtgagctgagagcgcaycactgcactccagcctgggaaacaagagtgaaactgtctcaaaaaaaagggaggaaaaaacatatttattctctcgtattttctgtgggtcaggaatttgggcacaactcaactgggttcactgcatagggtctcacaaggttgcaggcaaggcgtcagctgagctaggttcaagctcattcaggttgttgacaaaattcatttccttatgtctgtatgattgtgtagctatgttttttattgggtattgaccggaggccaccctcaggtcctagacaccacctgctgttgggcttcctcaatatggtcacacacttcatcaaatcagcaaggagaatcttgtgtgcatgccagcaatatgtctatctcatatcctaatgtatgtctctctcctcctcctcctctcctcttccctc

SEQ ID NO: 212098 - DNA, 380 bp, Homo sapiens
gggatatgtcacaatgctcccataggcaaatccaagacaagagtctgtcacctgggtgatcagtgcagaaatatgtgacaatgctcccagtaggcagagcctagagaagagtcccatcacctgggtgatcagtgcagagatatttcacaatgcccctgcaggcagagcgcaagcaagctttacatcacctagatgatcagtgcagagatatgtcacaagccccccaataggcagwgcctggacaagagttatatcacctcggtgatcaatgcagtgatatatcactatgccccgtaggcagagcctagtcaagcattacatcacctgggtgatcagtgcagagatatgtcacaaagcccccaaacccaaagcctagacaa

SEQ ID NO: 212099 - DNA, 614 bp, Homo sapiens
ttttattgccccaattttctcaaatttggctatggaagtttattcaaagtggatctgtttccctttcacattttccccattttgtgagcatttccttacttcctaacatgacaaaatatttcaaactaatcttgtattttccctgcccaatcctgatatcaaatatgtccccaaggagccttggttcctttaattggagaatggtgttctcattgttactgggatgatgttgtttctaggcccttttgttagaggagctagaaaatatatgtatgtatactcacacatttatacacatctgtacttatttatacrattatccatctgtacgtatactaaaaacaatgatttcatgaaacttttgatcccaatccaacactagataaagactatataggcccatttatttgcaaatcagcacataaacatagaagaattattaacaatataagctgtagcttatgctaaatgttggttggaacagacaataagttatggagaacttcagaggacactaaagttggatgggattttggaagttgtacaggtcaatgccactccagctattggctgagtttcactaggttaatacatgaacaacaacaaaaataacc

SEQ ID NO: 212100 - DNA, 515 bp, Homo sapiens
gccacatggacagccagtgctgtagagaaatgattgaaatgtccactcctactaaaaaaaaaaaaatagtatctaccaaacctttaaagttctttccctggatagttatttcacagataggatgtttatcagtaatttgatttacccaataagctgccttgccttttttattcgtgcttccaaatcctccagttcatttaatttcactttttcycattctcacatacggtacactcaggagctgtgctatgcgcattcctggctgtgctttccagggaacagaagtagatatcacaatttgaatttcttcattgtaatctggatcaatgactccagtgtgtatttgtaccccttttaaacttaaactagaccttcctaaaagtaatcccattgtccctcctggcaacggtccacagactcctgttgggaccttttgcgggggttccccaggcagaaggctcacagcttttgtgcagcataaatctactgcggcactatgggctatgttgggggac

SEQ ID NO: 212101 - DNA, 515 bp, Homo sapiens
gccacatggacagccagtgctgtagagaaatgattgaaatgtccactcctactaaaaaaaaaaaaatagtatctaccaaacctttaaagttctttccctggatagttatttcacagataggatgtttatcagtaatttgatttacccaataagctgccttgccttttttattcgtgcttccaaatcctccagttcatttaatttcactttttctcattctcacatacggyacactcaggagctgtgctatgcgcattcctggctgtgctttccagggaacagaagtagatatcacaatttgaatttcttcattgtaatctggatcaatgactccagtgtgtatttgtaccccttttaaacttaaactagaccttcctaaaagtaatcccattgtccctcctggcaacggtccacagactcctgttgggaccttttgcgggggttccccaggcagaaggctcacagcttttgtgcagcataaatctactgcggcactatgggctatgttgggggac

SEQ ID NO: 212102 - DNA, 515 bp, Homo sapiens
gccacatggacagccagtgctgtagagaaatgattgaaatgtccactcctactaaaaaaaaaaaaatagtatctaccaaacctttaaagttctttccctggatagttatttcacagataggatgtttatcagtaatttgatttacccaataagctgccttgccttttttattcgtgcttccaaatcctccagttcatttaatttcactttttctcattctcacatacggtacactcaggagctgtgctatgcgcattcctggctgtkctttccagggaacagaagtagatatcacaatttgaatttcttcattgtaatctggatcaatgactccagtgtgtatttgtaccccttttaaacttaaactagaccttcctaaaagtaatcccattgtccctcctggcaacggtccacagactcctgttgggaccttttgcgggggttccccaggcagaaggctcacagcttttgtgcagcataaatctactgcggcactatgggctatgttgggggac

SEQ ID NO: 212103 - DNA, 492 bp, Homo sapiens
atctgcccactaagttttaaattgtaagaactgagcaggagttagacaagctagagtaagagtgtcccagtcagtaggaatcatccgactggaaacagcaacattctttaacagtcccatttcaaaaggagaacctggtccatactgatttatagcttgtttaattttttgagtaatttaaaaggaaaaggctcaaatgtagctataatatttccctgttgatctgggggggtgtattcaaacagggaactgccaagcctctaaatcccacttttgtctagcttgctgwattcctgcctgaatagaactaagcagtcgctcaagtcaccagggcaactacttttcacccagtgtcctccagaaaagaaagatctggagggtcgttttcttcaaaataataatgagggggtgcagaagggtagggatgaacctctccctccttttctgctttagctttaggtggcaaataaacctggtctgtaacctctactg

SEQ ID NO: 212104 - DNA, 574 bp, Homo sapiens
aattgtaagaactgagcaggagttagacaagctagagtaagagtgtcccagtcagtaggaatcatccgactggaaacagcaacattctttaacagtcccatttcaaaaggagaacctggtccatactgatttatagcttgtttaattttttgagtaatttaaaaggaaaaggctcaaatgtagctataatatttccctgttgatctgggggggtgtattcaaacagggaactgccaagcctctaaatcccacttttgtctagcttgctgaattcctgcctgaatagaactaagcagtcgctcaagtcaccagggcaactacttttcacccagtgtcctccagaaaagaaagatctggagggtcgttttcttcaaaataataatgagggggtgcagaagggtagggatgaacctctccytccttttctgctttagctttaggtggcaaataaacctggtctgtaacctctactgttactttgttatactctccttcctcctcattatcagtgtgaaaaagttccaaggtagaacgaaccacagcccacacttgtcccattgttaccctgatgctt

SEQ ID NO: 212105 - DNA, 574 bp, Homo sapiens
aattgtaagaactgagcaggagttagacaagctagagtaagagtgtcccagtcagtaggaatcatccgactggaaacagcaacattctttaacagtcccatttcaaaaggagaacctggtccatactgatttatagcttgtttaattttttgagtaatttaaaaggaaaaggctcaaatgtagctataatatttccctgttgatctgggggggtgtattcaaacagggaactgccaagcctctaaatcccacttttgtctagcttgctgaattcctgcctgaatagaactaagcagtcgctcaagtcaccagggcaactacttttcacccagtgtcctccagaaaagaaagatctggagggtcgttttcttcaaaataataatgagggggtgcagaagggtagggatgaacctctccctccttttctgctttagmtttaggtggcaaataaacctggtctgtaacctctactgttactttgttatactctccttcctcctcattatcagtgtgaaaaagttccaaggtagaacgaaccacagcccacacttgtcccattgttaccctgatgctt

SEQ ID NO: 212106 - DNA, 574 bp, Homo sapiens
aattgtaagaactgagcaggagttagacaagctagagtaagagtgtcccagtcagtaggaatcatccgactggaaacagcaacattctttaacagtcccatttcaaaaggagaacctggtccatactgatttatagcttgtttaattttttgagtaatttaaaaggaaaaggctcaaatgtagctataatatttccctgttgatctgggggggtgtattcaaacagggaactgccaagcctctaaatcccacttttgtctagcttgctgaattcctgcctgaatagaactaagcagtcgctcaagtcaccagggcaactacttttcacccagtgtcctccagaaaagaaagatctggagggtcgttttcttcaaaataataatgagggggtgcagaagggtagggatgaacctctccctccttttctgctttagctttaggtggcaaataaacctggtctgtaacctctactgttactttgttatactctccttcctcctcatyatcagtgtgaaaaagttccaaggtagaacgaaccacagcccacacttgtcccattgttaccctgatgctt

SEQ ID NO: 212107 - DNA, 382 bp, Homo sapiens
ggatgaacctctccctccttttctgctttagctttaggtggcaaataaacctggtctgtaacctctactgttactttgttatactctccttcctcctcattatcagtgtgaaaaagttccaaggtagaacgaaccacagcccacacttgtcccattgttaccctgatgcttctgagctccccttctgactcaccayggggattgctttaagagtactcggatgtcctccagctagttccacattctccaatcgttgctccagcgatcctttgacctgtattcgagcccccatgaatgggcaccacttgctgagaccaggtcggttggggagaccctaacccagcagcactagaggaattaaagacacacacactgaaatata

SEQ ID NO: 212108 - DNA, 575 bp, Homo sapiens
gcacagcatcataacagcatatgaaaatagaaagtgctatattaaaggtaaatatataaacaggtatagaaatctctatctactgtcataatgatggtgcacaaaattttcaaaatattgctatggagtttaaaaaatgaagcacaaatctgcataaatgtgtgttcatagatactcaataacagataatatgtgatattaataacacagtgggggtatgaaaaggtacaactttgcgttcagttgaaatatggttgttatatattgtcataactgtaagatgatttatgaagtctttatttctcaagatgattaccaaaaaaacctgtagacctctggtcatcctcccactgctacactcccactagcgccaccacagtttacaaatgycatggcaatatcagaaatttaccctacatggtcttaagaaaaaaaaaaggaggcacgaataatccaccccttgtttaggatattatctagaaataaccataagaatgggtaaccagcagccctcgggctgctctgtctatagagtagccgttcttttattcttctactttcttaataaacttgct

SEQ ID NO: 212109 - DNA, 521 bp, Homo sapiens
atggaaagaaaagaccatcaccagccactacaaaaatgcaccgaagtacacagactaggaatgctaaaaaccaaccacatacacaagtctgcaaaataactagttgacagcatgacgacaggatctaatccacacataccattactaaccttaaatggaaatgggctaaatgctccgattgaaagacacaggggggcaagctggataaagaaccaagacccatttgggtgtgccgtcttcaagaagcccatctcacattcagtgtcatgcataggctcaaaatgaaggaatggtgaaaaatctttcaagccaatggaaaacagaagaactggggtgttacactcccagtttcgacaaaacgtatataccaataaagataaaaaaagacagagaaggacattacaaaggtggtcctgacctttgataaatctcrttattgattgataccaacctgggctatctttattgcccaaaccaacaggataatttgctgaggttgtggagcttctcccctgcaaaga

SEQ ID NO: 212110 - DNA, 631 bp, Homo sapiens
acctctgaggctcagccagggaccacatgaggactctctccagacagccagaaggccatttgctagtttcctggtacctcagtggatgtggcagcggttcttctgttggggaccagtgagtacacactggggagggctcacctgtgcttcctcattggctccacctctgcttctaaaaaaaattactcattccagatctggggcagagaaaatacaagatgagcttagaacatcttctgccagaaattaaaaaagtgctgacagagtaatggagacaaatcaaagagacataaagtcagcttggaatgtctactactggcctaatcttggggaattgaagcatcagaatcaagagctttccttctcccttatttattrgttttatttctccatgtagaacaaagaagacaataagaaaataatcatctggcaaccatcaaagtaataattgttcaaacacaagtcatccatgaaatgctaaatctagtgggttctgaggagtaacaagatatttacagagcctcaaagtatctccatacaaaatacggttgaactacaaaaagaaaatcataacattagcatggacaaacctggcaggtactccttaactctcctaagtaataaaaactgt

SEQ ID NO: 212111 - DNA, 314 bp, Homo sapiens
agaagacaataagaaaataatcatctggyaaccatcaaagtaataattgttcaaacacaagtcatccatgaaatgctaaatctagtgggttctgaggagtaacaagatatttacagagcctcaaagtatctccatacaaaatacggttgaactacaaaaagaaaatcataacattagcatggacaaacctggcaggtactccttaactctcctaagtaataaaaactgtaaaatgcaaataagccttcgatgacctttactaacctttactaaagtatcaatgatgacttggttgtttaaacagctgacatttg

SEQ ID NO: 212112 - DNA, 314 bp, Homo sapiens
agaagacaataagaaaataatcatctggcaaccatcawagtaataattgttcaaacacaagtcatccatgaaatgctaaatctagtgggttctgaggagtaacaagatatttacagagcctcaaagtatctccatacaaaatacggttgaactacaaaaagaaaatcataacattagcatggacaaacctggcaggtactccttaactctcctaagtaataaaaactgtaaaatgcaaataagccttcgatgacctttactaacctttactaaagtatcaatgatgacttggttgtttaaacagctgacatttg

SEQ ID NO: 212113 - DNA, 594 bp, Homo sapiens
attgttcaaacacaagtcatccatgaaatgctaaatctagtgggttctgaggagtaacaagatatttacagagcctcaaagtatctccatacaaaatacggttgaactacaaaaagaaaatcataacattagcatggacaaacctggcaggtactccttaastctcctaagtaataaaaactgtaaaatgcaaataagccttcgatgacctttactaacctttactaaagtatcaatgatgacttggttgtttaaacagctgacatttgggcaatttgagtatgtcaagctcaataatactggttttcatttgcaagatccacttaaaacttaaggaggctaaaaaacatcatttaaaataccctataaattatcatcatatatatcatacaaaaatatcctacttcagtaaatattgtaatgttatacattttatgagaaacaactaaaatgtgtaaatagcccagtaataaagttttataatcttttaaatcatacaatttttctttaagacattatggttaaatattctcttcgttagatgtggcttacccgtggattctagagaagaaagtagatgggagcaagtgtcca

SEQ ID NO: 212114 - DNA, 594 bp, Homo sapiens
attgttcaaacacaagtcatccatgaaatgctaaatctagtgggttctgaggagtaacaagatatttacagagcctcaaagtatctccatacaaaatacggttgaactacaaaaagaaaatcataacattagcatggacaaacctggcaggtactccttaactctcctaagtaataaaaactrtaaaatgcaaataagccttcgatgacctttactaacctttactaaagtatcaatgatgacttggttgtttaaacagctgacatttgggcaatttgagtatgtcaagctcaataatactggttttcatttgcaagatccacttaaaacttaaggaggctaaaaaacatcatttaaaataccctataaattatcatcatatatatcatacaaaaatatcctacttcagtaaatattgtaatgttatacattttatgagaaacaactaaaatgtgtaaatagcccagtaataaagttttataatcttttaaatcatacaatttttctttaagacattatggttaaatattctcttcgttagatgtggcttacccgtggattctagagaagaaagtagatgggagcaagtgtcca

SEQ ID NO: 212115 - DNA, 594 bp, Homo sapiens
attgttcaaacacaagtcatccatgaaatgctaaatctagtgggttctgaggagtaacaagatatttacagagcctcaaagtatctccatacaaaatacggttgaactacaaaaagaaaatcataacattagcatggacaaacctggcaggtactccttaactctcctaagtaataaaaactgtaaaatgcaaataagccttcgatgacctttactaacytttactaaagtatcaatgatgacttggttgtttaaacagctgacatttgggcaatttgagtatgtcaagctcaataatactggttttcatttgcaagatccacttaaaacttaaggaggctaaaaaacatcatttaaaataccctataaattatcatcatatatatcatacaaaaatatcctacttcagtaaatattgtaatgttatacattttatgagaaacaactaaaatgtgtaaatagcccagtaataaagttttataatcttttaaatcatacaatttttctttaagacattatggttaaatattctcttcgttagatgtggcttacccgtggattctagagaagaaagtagatgggagcaagtgtcca

SEQ ID NO: 212116 - DNA, 594 bp, Homo sapiens
attgttcaaacacaagtcatccatgaaatgctaaatctagtgggttctgaggagtaacaagatatttacagagcctcaaagtatctccatacaaaatacggttgaactacaaaaagaaaatcataacattagcatggacaaacctggcaggtactccttaactctcctaagtaataaaaactgtaaaatgcaaataagccttcgatgacctttactaacctttactaaagtatcaatgatgacttggttgtttaaacagctgacatttgggcaatttgagtatgtcaarctcaataatactggttttcatttgcaagatccacttaaaacttaaggaggctaaaaaacatcatttaaaataccctataaattatcatcatatatatcatacaaaaatatcctacttcagtaaatattgtaatgttatacattttatgagaaacaactaaaatgtgtaaatagcccagtaataaagttttataatcttttaaatcatacaatttttctttaagacattatggttaaatattctcttcgttagatgtggcttacccgtggattctagagaagaaagtagatgggagcaagtgtcca

SEQ ID NO: 212117 - DNA, 411 bp, Homo sapiens
  misc_feature (1)...(411): n = A,T,C or G
nagttagctttgtcatgcatattcccattgcagtgccctcctccctaagatgtgtctttttcctttagagarcctttctctgtttgttatttaggtttacaatgagaaggcgtgtaaagtatttttactgtcttcctaggaaaaaatcactgacttacagtatttatatttatttatttacattcctggggatgaggagttaaagatttcatacattttcttattgagaagatccaagttttcatgtgagcaaaactgaatatgtaaattgatatttaaattatgctgcagataatatggtcaaatgtttacttgtatttaatttgttacacatgaatattgcatatgtaagataatatactaagaaattatcacatttaatgaaatgctttaatcaaattcctgattgaa

SEQ ID NO: 212118 - DNA, 281 bp, Homo sapiens
gctaaagtgtagttgtatgatgtcwatgtgtacggttagtctggacctctttctgtccggtggttgccctcaactgattagagtcacctctctaaagatcatgcttatgtccctggagcagtccacagcactatcaatgtctgatctccacctttttccaattaatatttctgtacttactgaattggaaaacatacaggtgattttttcctggtcacttgtggttttacaacactccccccacttccccaccactgccccaggttattttgatgccagcc

SEQ ID NO: 212119 - DNA, 281 bp, Homo sapiens
gctaaagtgtagttgtatgatgtcamtgtgtacggttagtctggacctctttctgtccggtggttgccctcaactgattagagtcacctctctaaagatcatgcttatgtccctggagcagtccacagcactatcaatgtctgatctccacctttttccaattaatatttctgtacttactgaattggaaaacatacaggtgattttttcctggtcacttgtggttttacaacactccccccacttccccaccactgccccaggttattttgatgccagcc

SEQ ID NO: 212120 - DNA, 281 bp, Homo sapiens
gctaaagtgtagttgtatgatgtcaatgtgtacggttagtctggacctctttctgtccrgtggttgccctcaactgattagagtcacctctctaaagatcatgcttatgtccctggagcagtccacagcactatcaatgtctgatctccacctttttccaattaatatttctgtacttactgaattggaaaacatacaggtgattttttcctggtcacttgtggttttacaacactccccccacttccccaccactgccccaggttattttgatgccagcc

SEQ ID NO: 212121 - DNA, 281 bp, Homo sapiens
gctaaagtgtagttgtatgatgtcaatgtgtacggttagtctggacctctttctgtccggtggttgccctcaactgattrgagtcacctctctaaagatcatgcttatgtccctggagcagtccacagcactatcaatgtctgatctccacctttttccaattaatatttctgtacttactgaattggaaaacatacaggtgattttttcctggtcacttgtggttttacaacactccccccacttccccaccactgccccaggttattttgatgccagcc

SEQ ID NO: 212122 - DNA, 504 bp, Homo sapiens
gttattcaaaataatcacaaaagcactcatcgtaggaaaacttgtgaggactcaaatatagggaaatactttttctttctaaggcataattctgtaaaaaaattcaccttaatttgaatatacatgggaaaatatccttgttcaataatagtctatattcactctgttttcttccctcatagaccagccggttcactattattctccaaatgatgtgttcctctctagagtccaggttatctgcatatctaatttttcccacaaattactgttttgaattgcactgaattcaatttaaggggatgccatttataaacagtgcaaatatatactgcacgagggatcttaaaaatcatacgtatggtttgatccayaagctcatatgagcgtgcaatgtcaacttttttcatgtttttttaagtccacttaaattctattttaagccaccatctgcctgtgctgttagggcagttagccctcaatcattttaagatgctcccctct

SEQ ID NO: 212123 - DNA, 543 bp, Homo sapiens
tcatttagagtgcctgttatgttgcagctctgttctagggattggggattgaacaacggatcagacagtgttagttttggtcatcccaggaaaaytaagcagaggcttgctcaagaactactgaggtcttggtggggttcggagattgggggaagaggagatggacaaaggctcccaagaggaagtagtactgggtctgcagaatgacccaacaaagaatgagggcaagggattccaggcagtgggaattacttgtacataggccctgagacctgagagcagcgtgggtttgaggctcacagtaggaagattagtaaagctgtagctaaggagaggaggaagaaaaaacggctggaaggaggggggagaaatgagataaggctggaaaagtcaaccggagccagatcagaaaggttctgtaaccatgtgagaaatgtattacatatgtgaactatacatttatatctcatgtcattggatttttgaggtggaaaatatttaatttatacctgaggaatgactgtaaatttctttctttccaca

SEQ ID NO: 212124 - DNA, 543 bp, Homo sapiens
tcatttagagtgcctgttatgttgcagctctgttctagggattggggattgaacaacggatcagacagtgttagttttggtcatcccaggaaaactaagcagaggcttgctcaagaactactgasgtcttggtggggttcggagattgggggaagaggagatggacaaaggctcccaagaggaagtagtactgggtctgcagaatgacccaacaaagaatgagggcaagggattccaggcagtgggaattacttgtacataggccctgagacctgagagcagcgtgggtttgaggctcacagtaggaagattagtaaagctgtagctaaggagaggaggaagaaaaaacggctggaaggaggggggagaaatgagataaggctggaaaagtcaaccggagccagatcagaaaggttctgtaaccatgtgagaaatgtattacatatgtgaactatacatttatatctcatgtcattggatttttgaggtggaaaatatttaatttatacctgaggaatgactgtaaatttctttctttccaca

SEQ ID NO: 212125 - DNA, 543 bp, Homo sapiens
tcatttagagtgcctgttatgttgcagctctgttctagggattggggattgaacaacggatcagacagtgttagttttggtcatcccaggaaaactaagcagaggcttgctcaagaactactgaggtcttggtggggttcggagattgggggaagaggagatggacaaaggctcccaagaggaagtagtactgggtctgcagaatgacccaacaaagaatgagggcaagggattccaggcagtgggaattactkgtacataggccctgagacctgagagcagcgtgggtttgaggctcacagtaggaagattagtaaagctgtagctaaggagaggaggaagaaaaaacggctggaaggaggggggagaaatgagataaggctggaaaagtcaaccggagccagatcagaaaggttctgtaaccatgtgagaaatgtattacatatgtgaactatacatttatatctcatgtcattggatttttgaggtggaaaatatttaatttatacctgaggaatgactgtaaatttctttctttccaca

SEQ ID NO: 212126 - DNA, 543 bp, Homo sapiens
tcatttagagtgcctgttatgttgcagctctgttctagggattggggattgaacaacggatcagacagtgttagttttggtcatcccaggaaaactaagcagaggcttgctcaagaactactgaggtcttggtggggttcggagattgggggaagaggagatggacaaaggctcccaagaggaagtagtactgggtctgcagaatgacccaacaaagaatgagggcaagggattccaggcagtgggaattacttgtacataggccctgagacctgagagcagcgtgggtttgagkctcacagtaggaagattagtaaagctgtagctaaggagaggaggaagaaaaaacggctggaaggaggggggagaaatgagataaggctggaaaagtcaaccggagccagatcagaaaggttctgtaaccatgtgagaaatgtattacatatgtgaactatacatttatatctcatgtcattggatttttgaggtggaaaatatttaatttatacctgaggaatgactgtaaatttctttctttccaca

SEQ ID NO: 212127 - DNA, 497 bp, Homo sapiens
taaatcttccaatagtgtagactttcctgggtagcttgtttttacccatttcaactcattttcattatggtcagaaagcatactttctatgattacagtgttttgraacttcttgagagatattttgtggtctatagcctattgataaatgtttcatgtgtagcataatagaacatatattctattgtcttagtcaatatcgattaggtcaagttgttgtcaaaattattttatcttaattttctttagttattctgtcagcaatacagcattatgtcttcataattacttgacattttatcattatgaaatagctgtctgttgtaatattgcttgtttggaggtctactttttcttatattaatatagccacataagattgcttttgcttgttgtttccttggtatacttggaaattattttactctcaacttatctataccataatatttggcatgcatctcttataggtacttttattatccagttggacaatc

SEQ ID NO: 212128 - DNA, 602 bp, Homo sapiens
gttggctctcaatttttcatgtgtgccattttctttaggtttttctagtttatggagtctctttgttccagttgagcacacagataaactagaaatctcacaaggcttttgctgagaacatcaaagcctttaacctctgttgggccaaatatttagaccaaaaatacagatagacacacaaaagccagaaccagaccagaatgagtagctcagtagctacagcctttattccctttattctttagggttygaactcaaaccagattcaggattctaaccaaaccaggacccccctggggtgaaactgaaaccccacagtctagacaaggttgggggtctttttatattttttatttttttgagatggagtttcactcttgttgcccaggctggagtgcaatggtgcaatattgcctcacagcaacctccacctctcaggtttaagcacttatcctgcctcagcctccaaagctgagattacaagcttgtgccaccatgcccagcacattttgcatttttagtagagacggggtttctccatgttggtcaggctggtctcaaactcccaacctcgggtgatccgcacacctaagcctcccaaa

SEQ ID NO: 212129 - DNA, 602 bp, Homo sapiens
gttggctctcaatttttcatgtgtgccattttctttaggtttttctagtttatggagtctctttgttccagttgagcacacagataaactagaaatctcacaaggcttttgctgagaacatcaaagcctttaacctctgttgggccaaatatttagaccaaaaatacagatagacacacaaaagccagaaccagaccagaatgagtagctcagtagctacagcctttattccctttattctttagggtttgaactcaaaccagattcaggattctraccaaaccaggacccccctggggtgaaactgaaaccccacagtctagacaaggttgggggtctttttatattttttatttttttgagatggagtttcactcttgttgcccaggctggagtgcaatggtgcaatattgcctcacagcaacctccacctctcaggtttaagcacttatcctgcctcagcctccaaagctgagattacaagcttgtgccaccatgcccagcacattttgcatttttagtagagacggggtttctccatgttggtcaggctggtctcaaactcccaacctcgggtgatccgcacacctaagcctcccaaa

SEQ ID NO: 212130 - DNA, 614 bp, Homo sapiens
ggtgttgtagctaactgcagcctcaaccacctgtgctcaagcaattctcccacctcagccttccaagcatctgggactacaggtgcacaccatccatgcccagctaatttttgtatttttttttttgtagagatrggatcttgttatattgccgaggctggtcttgaactctggggctaaagcgatcctttcaccacaacctctcaagtagctgaaactacagatgcatactaccatgcccagctaattttttcttatttctttttgttgtttaattgagggggtctcgccgtgtttcccaggctggtcctgaagttttggcctcaagcgtttctcctgctttgacctcctaaactgttgggattatggttgtgagccacggcctctgtgtccagcaaacacaagaggtctttataagtgaaagagggaggtaagagagtccgaattgaaggagatttgatgatggaagcacaggtcacagagggagattcgaatatgctttgcttctggctttgaagatgcagttaggagccatgagccaaagaatagcagtggctttagcaactgggaaaggcaagggaacatattctctccagaacctccagaagggatgc

SEQ ID NO: 212131 - DNA, 614 bp, Homo sapiens
ggtgttgtagctaactgcagcctcaaccacctgtgctcaagcaattctcccacctcagccttccaagcatctgggactacaggtgcacaccatccatgcccagctaatttttgtatttttttttttgtagagatgggatcttgttatattgccgaggctkgtcttgaactctggggctaaagcgatcctttcaccacaacctctcaagtagctgaaactacagatgcatactaccatgcccagctaattttttcttatttctttttgttgtttaattgagggggtctcgccgtgtttcccaggctggtcctgaagttttggcctcaagcgtttctcctgctttgacctcctaaactgttgggattatggttgtgagccacggcctctgtgtccagcaaacacaagaggtctttataagtgaaagagggaggtaagagagtccgaattgaaggagatttgatgatggaagcacaggtcacagagggagattcgaatatgctttgcttctggctttgaagatgcagttaggagccatgagccaaagaatagcagtggctttagcaactgggaaaggcaagggaacatattctctccagaacctccagaagggatgc

SEQ ID NO: 212132 - DNA, 423 bp, Homo sapiens
ttgggattataggaatgagccactgagcctgactatcattctactttgtttctatgaattttactgatctaggtatctcatataagtggaatcatatataagggaggaaaaatatttttcctccaccyttctaatttcttggctggggctcttgtaccaaaagacagattaacaagagaaaagcatacacatttacttaacataagttttatatgacacagaaaaaatggacttttctggaagtaacttgatataactaggagcctttgtaaggaaataaagacctgaagaaacagttaaacctatgtctttttatattaggtttgtcaaaagactaaattacaacaaattaggttttatattaagtttatcagaggactacaacaaatttatagatttaattggcttttattcatgattcat

SEQ ID NO: 212133 - DNA, 601 bp, Homo sapiens
ttttgaattctcctttgaatagcttgtaactattcaaacctcttattggttctataattaattctttttctaattagctttttaaaaatcagaattgatattagactaatcagttattartgaggagatgaaattgagttgtttgtacactttatctaagataatgttatattggctaactcaaatcagtagttcagcaaatgcagaatcagagcttcttcagcgcggtactctcttgtggttcttgaagatgccatttctttttcttttttttttttttttgagacagcatcttcctctgtcaccaggctcgagtgcagtggcacaatctcaattcacagcaacttctgcctcccagttcagggttcaagcatttcttttgcctcagcctctgaagtagctgggactacagggatgtgtcaccatgcccagctaagctttgtattttctgtagatacggggtttcagcatgttggacaggctggtcttgaactcctgaccttgtgatccactggccttggactcctaaagtgctgggattacaggtgtgagccaccgtgcctggcctcttttttcagtctttaataaactgctgccatca

SEQ ID NO: 212134 - DNA, 594 bp, Homo sapiens
cctcttattggttctataattaattctttttctaattagctttttaaaaatcagaattgatattagactaatcagttattagtgaggagatgaaattgagttgtttgtacactttatctaagataatgttatattggctaactcaaatcagtagttcagcaaatgcagaatcagagcttcttcagcgcggtactctcttgtggttcttgaagatgccatttctttttcttttttttttttttttgagacagcatcttcctctgtcaccaggctcgagtgcagtggcacaatctcaattcacagcaacttctgcctcccrgttcagggttcaagcatttcttttgcctcagcctctgaagtagctgggactacagggatgtgtcaccatgcccagctaagctttgtattttctgtagatacggggtttcagcatgttggacaggctggtcttgaactcctgaccttgtgatccactggccttggactcctaaagtgctgggattacaggtgtgagccaccgtgcctggcctcttttttcagtctttaataaactgctgccatcatttcagaccacttgctattttaggcacttag

SEQ ID NO: 212135 - DNA, 437 bp, Homo sapiens
cttcagcgcggtactctcttgtggttcttgaagatgccatttctttttcttttttttttttttttgagacagcatcttcctctgtcaccaggctcgagtgcagtggcacaatctcaattcacagcaacttctgcctcccagttcagggttcaagcatttcttttgcctcagcctctgaagtagctgggactacaggsatgtgtcaccatgcccagctaagctttgtattttctgtagatacggggtttcagcatgttggacaggctggtcttgaactcctgaccttgtgatccactggccttggactcctaaagtgctgggattacaggtgtgagccaccgtgcctggcctcttttttcagtctttaataaactgctgccatcatttcagaccacttgctattttaggcacttagaaatttttcactggaattcatg

SEQ ID NO: 212136 - DNA, 594 bp, Homo sapiens
cctcttattggttctataattaattctttttctaattagctttttaaaaatcagaattgatattagactaatcagttattagtgaggagatgaaattgagttgtttgtacactttatctaagataatgttatattggctaactcaaatcagtagttcagcaaatgcagaatcagagcttcttcagcgcggtactctcttgtggttcttgaagatgccatttctttttcttttttttttttttttgagacagcatcttcctctgtcaccaggctcgagtgcagtggcacaatctcaattcacagcaacttctgcctcccagttcagggttcaagcatttcttttgcctcagcctctgaagtagctgggactacagggaygtgtcaccatgcccagctaagctttgtattttctgtagatacggggtttcagcatgttggacaggctggtcttgaactcctgaccttgtgatccactggccttggactcctaaagtgctgggattacaggtgtgagccaccgtgcctggcctcttttttcagtctttaataaactgctgccatcatttcagaccacttgctattttaggcacttag

SEQ ID NO: 212137 - DNA, 613 bp, Homo sapiens
tattcaaacctcttattggttctataattaattctttttctaattagctttttaaaaatcagaattgatattagactaatcagttattagtgaggagatgaaattgagttgtttgtacactttatctaagataatgttatattggctaactcaaatcagtagttcagcaaatgcagaatcagagcttcttcagcgcggtactctcttgtggttcttgaagatgccatttctttttcttttttttttttttttgagacagcatcttcctctgtcaccaggctcgagtgcagtggcacaatctcaattcacagcaacttctgcctcccagttcagggttcaagcatttcttttgcctcagcctctgaagtagctgggactacagggatgtgtcaccatgcccrgctaagctttgtattttctgtagatacggggtttcagcatgttggacaggctggtcttgaactcctgaccttgtgatccactggccttggactcctaaagtgctgggattacaggtgtgagccaccgtgcctggcctcttttttcagtctttaataaactgctgccatcatttcagaccacttgctattttaggcacttagaaatttttcac

SEQ ID NO: 212138 - DNA, 419 bp, Homo sapiens
aatggatgaatcgctagaaagacacaaactaccaaagtggctcaagaagaaagagaaaatctgaatagacctataacctaggagattgaattagtaatcgaaagcgattaacaaagaaacatttatgaccaaatagctgcattaactggtgagtcaacctaacatttaaagaagaattaataccatttcttctcaaactcttctgacaaaatatatgaagaaggaatacttgctaattcattttttgataacagcattatccttataccaaagacaaagagagcacaaaagagagaaatacagcactatatcccctatgaatatataagcaaaaatctcagcaaaatactagcaatactagcaaaatactagcagcaatwctgtataatcaaaggattgtaaactatcaccctttgaga

SEQ ID NO: 212139 - DNA, 642 bp, Homo sapiens
atttcaattgatgcagagaaaacattgatgaaatacaacacccttctataataaaaatactcaataaactaggcatagaagggatcttctgcaacatgacaatgggatgtacaaaaacccaacagttaatatcatgatsaatgatgaaacactgaaagctgttttcctaacatctagaagaaaaggatggtgcatttgccacttgtattcaacgtagcactggcagttctagccagagcaattaggcaagacaaagaaataaaaggcatctaaattagaaataaaaaataggtgtaaaattatatctacacatgatcttataggtataaagctccaaacaaaacacaaaaccgattataactaataaaagaggcaggatgcaaacaaacataggcaaatgagctatatttctatatagttgtaaagaactatgaaaacattttaaaaattccatttataatgacatcaaagaatacgttattcaggcataaatctaaccatggtggtatacacaaaacattgctgcaaaaaactaaagagagtggaaataagtggaaagacattctgtgttcacgggttgtaagacaatatcgttaagatgacaataccatctaaagtactctacagattcaatgcaatacc

SEQ ID NO: 212140 - DNA, 642 bp, Homo sapiens
atttcaattgatgcagagaaaacattgatgaaatacaacacccttctataataaaaatactcaataaactaggcatagaagggatcttctgcaacatgacaatgggatgtacaaaaacccaacagttaatatcatgatcaatgatgaaacactgaaagctgttttcctaacatstagaagaaaaggatggtgcatttgccacttgtattcaacgtagcactggcagttctagccagagcaattaggcaagacaaagaaataaaaggcatctaaattagaaataaaaaataggtgtaaaattatatctacacatgatcttataggtataaagctccaaacaaaacacaaaaccgattataactaataaaagaggcaggatgcaaacaaacataggcaaatgagctatatttctatatagttgtaaagaactatgaaaacattttaaaaattccatttataatgacatcaaagaatacgttattcaggcataaatctaaccatggtggtatacacaaaacattgctgcaaaaaactaaagagagtggaaataagtggaaagacattctgtgttcacgggttgtaagacaatatcgttaagatgacaataccatctaaagtactctacagattcaatgcaatacc

SEQ ID NO: 212141 - DNA, 642 bp, Homo sapiens
atttcaattgatgcagagaaaacattgatgaaatacaacacccttctataataaaaatactcaataaactaggcatagaagggatcttctgcaacatgacaatgggatgtacaaaaacccaacagttaatatcatgatcaatgatgaaacactgaaagctgttttcctaacatctagaagaaaaggatggtgcatttgccacttgtattcaacgtagcactggcagttctagccagagcaattaggcaagacaaagaaataaaaggcatctaaattagaaataaaaaataggtgtaaaattatatctacacatgatcttataggtataaagctccaaacaaaacacaaaaccgattataactaataaaagaggcaggatgcaaacaaacataggcaaatgagctatatttctatatagttgtaaagaactatgaaaacattttaaaaattcyatttataatgacatcaaagaatacgttattcaggcataaatctaaccatggtggtatacacaaaacattgctgcaaaaaactaaagagagtggaaataagtggaaagacattctgtgttcacgggttgtaagacaatatcgttaagatgacaataccatctaaagtactctacagattcaatgcaatacc

SEQ ID NO: 212142 - DNA, 642 bp, Homo sapiens
atttcaattgatgcagagaaaacattgatgaaatacaacacccttctataataaaaatactcaataaactaggcatagaagggatcttctgcaacatgacaatgggatgtacaaaaacccaacagttaatatcatgatcaatgatgaaacactgaaagctgttttcctaacatctagaagaaaaggatggtgcatttgccacttgtattcaacgtagcactggcagttctagccagagcaattaggcaagacaaagaaataaaaggcatctaaattagaaataaaaaataggtgtaaaattatatctacacatgatcttataggtataaagctccaaacaaaacacaaaaccgattataactaataaaagaggcaggatgcaaacaaacataggcaaatgagctatatttctatatagttgtaaagaactatgaaaacattttaaaaattccatttataatgacatcaaagaatacgttattcaggcataaatctaaccatggtggtatacacaaaacattgctgcaaaaaactaaagagagtggaaataagtggaaagacattctgtgttcacgggttgtaagacaatatygttaagatgacaataccatctaaagtactctacagattcaatgcaatacc

SEQ ID NO: 212143 - DNA, 592 bp, Homo sapiens
atgagaatacatgcagtctatctacaggaaacctaaactgtttaggttaaggaaatgtttgagaaagtcatattaattagcaggttcacaggaaactaacatttattgtataaattgcatggtaaaatrtattagggctccatgcacacaactatgtgccatctacgttaccacacggtgcttacttctttcagtctttattcatttctctcctaatggtctgtatggtattattacatagttctaaaaaccttccatgaggcagaaatttcatttaatcatatagcttcaaaaataatgaaaaacagtagaaaatttctatttttttatgaagcagaattgttgaattttcagtttcatttatttaatattacaagatgacaaacatatttctttaactccatctttttatttttgtctaacatcaaccacagccatttctttcatttgaagttgaaaactgctcatcaaaatccagtttaagctgagaaacaaagaactaaattttgcatgagagattatacactgcataagtaaaaaacaggaccagaaacaatggtggattagcaatttttaaaaagacaaaaacagg

SEQ ID NO: 212144 - DNA, 592 bp, Homo sapiens
atgagaatacatgcagtctatctacaggaaacctaaactgtttaggttaaggaaatgtttgagaaagtcatattaattagcaggttcacaggaaactaacatttattgtataaattgcatggtaaaatatattagggctccatgcacacaactatgtgccatctacgttaccacacggtgcttacttctttcagtctttattcatttctctcctaatggtctgtatggtattattacatagttctaaaaaccttccatgagrcagaaatttcatttaatcatatagcttcaaaaataatgaaaaacagtagaaaatttctatttttttatgaagcagaattgttgaattttcagtttcatttatttaatattacaagatgacaaacatatttctttaactccatctttttatttttgtctaacatcaaccacagccatttctttcatttgaagttgaaaactgctcatcaaaatccagtttaagctgagaaacaaagaactaaattttgcatgagagattatacactgcataagtaaaaaacaggaccagaaacaatggtggattagcaatttttaaaaagacaaaaacagg

SEQ ID NO: 212145 - DNA, 592 bp, Homo sapiens
atgagaatacatgcagtctatctacaggaaacctaaactgtttaggttaaggaaatgtttgagaaagtcatattaattagcaggttcacaggaaactaacatttattgtataaattgcatggtaaaatatattagggctccatgcacacaactatgtgccatctacgttaccacacggtgcttacttctttcagtctttattcatttctctcctaatggtctgtatggtattattacatagttctaaaaaccttccatgaggcagaaatttcatttaatcatatagcttcaaaaataatgaaaaacagtagaaaatttctatttttttatgaarcagaattgttgaattttcagtttcatttatttaatattacaagatgacaaacatatttctttaactccatctttttatttttgtctaacatcaaccacagccatttctttcatttgaagttgaaaactgctcatcaaaatccagtttaagctgagaaacaaagaactaaattttgcatgagagattatacactgcataagtaaaaaacaggaccagaaacaatggtggattagcaatttttaaaaagacaaaaacagg

SEQ ID NO: 212146 - DNA, 253 bp, Homo sapiens
tctacagttcctcttaacacttttctgagtttcaaatatgtgggtatgcttcattagctgargccattttccatatgtacatctggctacaagggaaactgggaatgtgagccctgatcctaatgtttgtagagtatttagaaatttgagaattccctccaaataaagagttttttaaaacattgttagacaaaaagtttgaattacaaaatgtggtagtagctcaggtctaactcaaatgcagggaaaaaaa

SEQ ID NO: 212147 - DNA, 253 bp, Homo sapiens
tctacagttcctcttaacacttttctgagtttcaaatatgtgggtatgcttcattagctgaagccatkttccatatgtacatctggctacaagggaaactgggaatgtgagccctgatcctaatgtttgtagagtatttagaaatttgagaattccctccaaataaagagttttttaaaacattgttagacaaaaagtttgaattacaaaatgtggtagtagctcaggtctaactcaaatgcagggaaaaaaa

SEQ ID NO: 212148 - DNA, 573 bp, Homo sapiens
ttctttgctatagcaaaacaaaagtaaccttggctcctgttcccagtaatttcctcattttcatctgagaccttgtaagcctggccttcactgtccatccttctgccagccttttaatcacaactattcaacaagtgcctackatggtccaaaatttctttcatcttcctgtcttctttcaagctctccaaactctccaacctctggctgttacccacttctgaacctgctttacattttcagctatctttattgcagcctggcaatgtagaagaaaaagaagtccattttcagggggaaacttcaaaaggcttcagatatttgcattaaaaagaagtccagtgctaatagccaagacgatggggaaatgtcattgcagatatttcatagctccacttcacagtactttattttctgtatgatcataatgaaaaggggtttaattggctcatggttctgcaggctgtaaagaaagcatagtggcttctgcttctgggaggactcaggaagcctcccaatcataccagtaggaaaacagcaatgaaatgtttcatacggcaggagtaagagcaa

SEQ ID NO: 212149 - DNA, 573 bp, Homo sapiens
ttctttgctatagcaaaacaaaagtaaccttggctcctgttcccagtaatttcctcattttcatctgagaccttgtaagcctggccttcactgtccatccttctgccagccttttaatcacaactattcaacaagtgcctactatggtccaaaatttctttcatcttcctgtcttctttcaagctctccaaactctccaacctctggctgttacccacttctgaacctgctttacattttcagctatctttrttgcagcctggcaatgtagaagaaaaagaagtccattttcagggggaaacttcaaaaggcttcagatatttgcattaaaaagaagtccagtgctaatagccaagacgatggggaaatgtcattgcagatatttcatagctccacttcacagtactttattttctgtatgatcataatgaaaaggggtttaattggctcatggttctgcaggctgtaaagaaagcatagtggcttctgcttctgggaggactcaggaagcctcccaatcataccagtaggaaaacagcaatgaaatgtttcatacggcaggagtaagagcaa

SEQ ID NO: 212150 - DNA, 573 bp, Homo sapiens
ttctttgctatagcaaaacaaaagtaaccttggctcctgttcccagtaatttcctcattttcatctgagaccttgtaagcctggccttcactgtccatccttctgccagccttttaatcacaactattcaacaagtgcctactatggtccaaaatttctttcatcttcctgtcttctttcaagctctccaaactctccaacctctggctgttacccacttctgaacctgctttacattttcagctatctttattgcagcctgrcaatgtagaagaaaaagaagtccattttcagggggaaacttcaaaaggcttcagatatttgcattaaaaagaagtccagtgctaatagccaagacgatggggaaatgtcattgcagatatttcatagctccacttcacagtactttattttctgtatgatcataatgaaaaggggtttaattggctcatggttctgcaggctgtaaagaaagcatagtggcttctgcttctgggaggactcaggaagcctcccaatcataccagtaggaaaacagcaatgaaatgtttcatacggcaggagtaagagcaa

SEQ ID NO: 212151 - DNA, 617 bp, Homo sapiens
ccatgttctttgctatagcaaaacaaaagtaaccttggctcctgttcccagtaatttcctcattttcatctgagaccttgtaagcctggccttcactgtccatccttctgccagccttttaatcacaactattcaacaagtgcctactatggtccaaaatttctttcatcttcctgtcttctttcaagctctccaaactctccaacctctggctgttacccacttctgaacctgctttacattttcagctatctttattgcagcctggcaatgtagaagaaaaagaagtccattttcagggggaaacttcaaaaggcttcagatatttgcattaaaaagaagtccagtgctaatagccaagacgatggggaaatgtcattgmagatatttcatagctccacttcacagtactttattttctgtatgatcataatgaaaaggggtttaattggctcatggttctgcaggctgtaaagaaagcatagtggcttctgcttctgggaggactcaggaagcctcccaatcataccagtaggaaaacagcaatgaaatgtttcatacggcaggagtaagagcaaggctgagagaggaaagaagtgccacaccgttatataacc

SEQ ID NO: 212152 - DNA, 617 bp, Homo sapiens
ccatgttctttgctatagcaaaacaaaagtaaccttggctcctgttcccagtaatttcctcattttcatctgagaccttgtaagcctggccttcactgtccatccttctgccagccttttaatcacaactattcaacaagtgcctactatggtccaaaatttctttcatcttcctgtcttctttcaagctctccaaactctccaacctctggctgttacccacttctgaacctgctttacattttcagctatctttattgcagcctggcaatgtagaagaaaaagaagtccattttcagggggaaacttcaaaaggcttcagatatttgcattaaaaagaagtccagtgctaatagccaagacgatggggaaatgtcattgcagatatttcatagctccacttcacagtactttattttctgtatgatcataatgaaaaggggtttaattggctcatggttctgcaggctgtaaagaaagcatagtggcttctgcttctgggaggactcaggaagcctcccaatcataccagtaggaaaacagcaatgaaatgtttcatacggcaggagtaagagcaaggctgagagaggaaagargtgccacaccgttatataacc

SEQ ID NO: 212153 - DNA, 423 bp, Homo sapiens
ttgggattataggaatgagccactgagcctgactatcattctactttgtttctatgaattttactgatctaggtatctcatataagtggaatcatatataagggaggaaaaatatttttcctccacctttctaatttcttggctggggctcttgtaccaaaagacagattaacaagagaaaagcatacacatttacttaacataagttttatatgacacagaaaaaatggacttttctggaagtaacttgatataactaggagyctttgtaaggaaataaagacctgaagaaacagttaaacctatgtctttttatattaggtttgtcaaaagactaaattacaacaaattaggttttatattaagtttatcagaggactacaacaaatttatagatttaattggcttttattcatgattcat

SEQ ID NO: 212154 - DNA, 527 bp, Homo sapiens
caaaaataattgtaattatatcaagtcatttctctgatcacaatgaaataaaactagaaatcaataatgaaaggaactttggaaactatacaaatgcatggaaatgaaataatgtttctgaatgaccagtgggtcaaggaagaaatcaagaaagaaatttacaaatttcttgagacaaatgataatggaaacacaacataccaaaacytacgggatacagcaaaaccagtactaagaggaaagtttataggtataagcacctacattaaaaaaacatagaaaaacttcaaataaacaacctaacaacgtatgctaatgaactagaaaagagcaaatgaaatccataattagcagaaaaaaagaaataaagatcagagcaaaaatacataaaattgatatgagaaaaacatcgcaaaatgaaacaaaaagtttgtttgttgaaaagataaacaaaatcgacaaacctttagccagactaagaaaaatagaagactcatgtaaataaaatcagagattaagaagggaga

SEQ ID NO: 212155 - DNA, 495 bp, Homo sapiens
tctggaaaacactctggcagtttcctataaaattaaacatatacttacgtacaactcaataatcacactcctgggtcttaatcctagtgcagtttctcaacctcagcactgacattttgaaacaattctttgttgtggaggactgtcttgtgcattctaggatattccacagcacctctatgttttatttactagacaccagtagcatttctttcctagtcattacaatcaaaaatgtcttcagacatttcccatgttccctgagaggtaaaatcactcctagttgagacccactgtcayagagaaataaaaaacttatggtcatgtaataacaagtacatgagggattcccgggcaagatggccaaatagaacagctccagtctgcagctcccagcaagaccaacgcagaaggcaggtgatttctgcatttccgactaaggtacccagttcatctcattgagactggttagacagtgggtgcagcccacagagg

SEQ ID NO: 212156 - DNA, 619 bp, Homo sapiens
taaaacaaaaacatcaacattctctatggcatttaaacaagacttgtcatttcataacacgtcattatgaaatacaatccaaaattattcatcatatttagaaccagaaaaatctcagctcaaatggtgtcttagtctgtttgcactgctattaaggaatacttgaggctgggtaatttaccaagtaaaaaggtttgtttggctcacagttctgcaggctgtgtaagaagcatgggaccagcatctgcttctggtgaggaactcaggaagcttccaatcacagcagaagtgtaaggggagagcccacatcacacgggaagagaaaagaagtggaaggtggggaggaggggagtcattcttttttaaacaaccagctcttgggtgaactacgagccagaactcactcattaccacagggaggtcactgagccattcaygagggatctgcccccataacccaaacatctctctttaggtcccacctctaatgctggggatcaaatttcaatatgagattttgaagagacaaatataaaaactaaatcacatgggaacagacaccaaggctaggataaaagagatatcagaattccctgacaaaaactataaaacagcagaa

SEQ ID NO: 212157 - DNA, 567 bp, Homo sapiens
gaagcttccaatcacagcagaagtgtaaggggagagcccacatcacacgggaagagaaaagaagtggaaggtggggaggaggggagtcattcttttttaaacaaccagctcttgggtgaactacgagccagaactcactcattaccacagggaggtcactgagccattcatgagggatctgcccccataacccaaacatctctctttaggtcccacctctaatgctggggatcaaatttcaatatgagattttgaagagacaaatataaaaactaaatcacatgggaacagacaccaaggctaggataaaagagatatcagaattccctgacaaaaactataaaacagcagaaataaatgaaaactggatacttacatgcagaagaatgaagctagaactctatatctttygccatatacaaaaatcaaatcaaaatggattaaaaacttaaacctaagacctcaaatcatgaaactactacagaaaaacatgagggaaaatctttaggatattggtctgggcaaaaatttcttgagcaataccccacaagcacaggtaaccaaagc

SEQ ID NO: 212158 - DNA, 475 bp, Homo sapiens
aaatcaaaacacttgtatatatggcatggctrttcattcaagagatgagataatggtatagtattacagattgtgtttttcaaagatgactgcttcaacatatatatatatgagatatatatgataaatatatataatttcatatacatataacatatatgtatatatatcatcttgcttgcttttcctataatgtgaccttgacatgcatcaattgaaaggtgtgtgtgtgtgtcggggagagggtatctatgctcctttcccttgaaccaggttgtaactttgtaactgtctcactgaatataaggtctatcactgaagctaggttataaaaggcaacacggcttctacctggatgtctctctctctggatgcttgtcctaggaacccatccagaatgttgtgaggaagcctaggtcacaggaagagattatgtgtgagtattctggccaacaatcccagctaggcctccacc

SEQ ID NO: 212159 - DNA, 424 bp, Homo sapiens
ttctttgaaacacaaaatgttttaatccaaagctgaaatcgttattatccctgcaacattccctcctcccttcttctccatctcaatatgcagcactactacccactgaattcctcaagactataaatttggaactyattaagtcatccttaacatattcctactctccccctccttcctcaccacactcattcctcccattcagtgatcacttgctcttgctgattctatccccaaaatatgccttgaacccattcactgccatctcaaggcctaggccaagcaaccatcattgtcatgatgtctacattttgaaacccacacagaaaaggcactcctcactcctgatattattttgtatacttctcccaaaattttttctgggtcttttacggtttcattttgtgctctcaaatttctgaag

SEQ ID NO: 212160 - DNA, 526 bp, Homo sapiens
  misc_feature (1)...(526): n = A,T,C or G
acaccttgattttagcctgcaagacccattttgggcatctgatctccagaactgtaagatatccaatatgtgtgtttttaaaagccattatatttgtggcaattggttacagcaacaataggaaaataatttacctggtttaaagtgtaatataaacctttctactcaagagaacttagcagttctctcaagttcacccgaagaacccccaaatcccaacacaaccctctctcccctctytgaagattccaaggagaaaggaaagcagtcctggcaaaatcctcctccggacccggtaaacaacctgcaaccatggcacattgctgtgtgatataaacgtgtgtgtgtgtgtgtgtgtgtgtgtgtgtgtgtgtgtgtgtatgagaagccaaaagaaataaaaaggatttctatattatctgcggttttcttcactaacctttccctttctagctacatagataattgaggactcactccattctatcaannnnnnnnnnnnnnnnnnnnnnnnnnnnnnnnnnnn

SEQ ID NO: 212161 - DNA, 346 bp, Homo sapiens
tgtgttggagaaaagctttggcagcggtggtgtggaggagagactggcgtggggacagatgggctgcagagctctctgttaggaggcttttgaagtaggtcaggtgagagatgatgtttgaggcctgagttagtgggaggaagagaactaatgccagttgaatacctttgagtgtgcacttaaggtgaaggtgcattakctcatgtaatcttcacagaaaaacttttcatagggtgctgttgtcatcctcattttgcagaaaaggaagcaagctcaaagtaacctagttcagccaggattgaacttgggtttactgtcctgtgccaccatggtttttagaacaaga

SEQ ID NO: 212162 - DNA, 340 bp, Homo sapiens
aagaaaatgaataacttgattaaaaaatggacaaaagatccgttatggttagagtgcagtttgtccccaccaaaactcatgttgaggcttagacctcaatgggatggtgttgggagatggcgaatttaagaggtaattaggttgttaagatagattaatgtctttcttgagagactgttagttctcccaggaatggattagttccttgcagagctggttggtatagggaggttgcctcttgtattttgccctttgtyacattagcctagctcctctttcatttctctgccatgtttcgatgcagcctgaggcttcaccagaagccaccagatgtgaccac

SEQ ID NO: 212163 - DNA, 562 bp, Homo sapiens
cacatctattgcagcttgttacctagtggaaacttccattttaacattctattgtagtcaagaattaagataattatttcaaaacaaatcatttayagctgattcttccatgactgaggacctctgggtgtctgagtttccacagcattgtcaagtacatacaactcacttttataagctaataactttccaaactgaattttgaagacaatacttgaaatgcccttttgtctggaagaatgtgtaagacattttttttctccagttttgactctgttctcattgtgatgaattctgaaagctttcttaaccttgctgctttattttccagtcccctcaaaatggaggtttggggacccacaggtaacttctcattcatgttgttttctgactttaaaaaagcattttaaaatgtttggaacatagaagagtgaatgactcaaatctgatgaaaatataatgacctgttttgcttctacatgtagcatttcactgcttacaacacatctacacatagattttcttttttgattttctttttagattttcttttttgaggtaa

SEQ ID NO: 212164 - DNA, 548 bp, Homo sapiens
aactggcaacaaaagttatcaaaattatgctatgaaaaagtaattttatttgtagttatgaaaaaggtttttgtatataaagagaatcttcatactatagagtacatgttttaatttttgcatacgtgttccatcattaatcatgaaactgcattttaaatctgttttctaagaaacactccgattttgaaaatagaactgcctttgttctcatcatggaaatagttttcactaacatccacataaacaataaacaaatgtgagtttcaatatcatatactgaaataactattgctgtcacaaggataactgtaaaggagtttattctacttgtcattaaaaatcaaaacaggtccaaacattcatatacatgaaagatgtaagtccattttatataaactgtatgtgccaatacctgcacagataactgatcttattatacacaaaggtaagtttttaatatatttttwaaaatatctgttaataacatattttaaaatataacttgtcctcttaactatctcaacgttttgttttatattaaatta

SEQ ID NO: 212165 - DNA, 621 bp, Homo sapiens
cattaaggaagggattactagttactgaatgccgattacaggtattgttttatttaatattcatatctaccctgtgaaataatgctagtatcttcgttttatataaaaggaactgaggcacagtgggataaagcaccttgtccaggattcacaacagaaaatggttgtgagcaggattcacgccagcactgtcttgactccacagctgttgctgtctttaccattacatacccctcarctttcccatgcaacaaggctggcaatgccttcaaatgtactcatagaatgaatgtaagttgcaggccccgtgcctagactcaccatacgaggagaagttccttgaaggcagagaatgtctggtgcttcactgatctatgcctatagttctgcaggcagacggtagcccgtacatatccatgactccctgacaaaccagcaatagctttcctgtggtttacatcaattcacttgaatttaaaattccagggaaagaaaatgtggcccttcccagaaatccttgaagtatgctaactccagtaacttctatatatcattaagaaagagtgtgttttatggactgaaatttgaaaacaattgagcatctggtaaaaagtgtaggat

SEQ ID NO: 212166 - DNA, 481 bp, Homo sapiens
gaggcacagtgggataaagcaccttgtccaggattcacaacagaaaatggttgtgagcaggattcacgccagcactgtcttgactccacagctgttgctgtctttaccattacatacccctcagctttcccatgcaacaaggctggcaatgccttcaaatgtactcatagaatgaatgtaagttgcaggccccgtgcctagactcaccatacraggagaagttccttgaaggcagagaatgtctggtgcttcactgatctatgcctatagttctgcaggcagacggtagcccgtacatatccatgactccctgacaaaccagcaatagctttcctgtggtttacatcaattcacttgaatttaaaattccagggaaagaaaatgtggcccttcccagaaatccttgaagtatgctaactccagtaacttctatatatcattaagaaagagtgtgttttatggactgaaatttgaaaacaat

SEQ ID NO: 212167 - DNA, 610 bp, Homo sapiens
tgtttatgttttcatatgattgaaaaaaattgaaagaagaataatatttcayggtacataaaaactgtatgacatgaatttcagtgtctattaataaaggataatttgaacatagccacgctcatttgtttacatatattctgtggttcctttctggctataatggcaaagttgagtagttgtgacagactatatggcctaaaaagccaaaaataattgccatctgccctttaacagaaaaagtttcccagtcattggggtaggcataagtaaggttgcagcaagtaagcacacaatagaagtactgagaacaaatgaaattaatctttggaaaatgtatatatttatacctagcaccttagaacattctagaaaatggaatgcacagacacatttcactgatcatcagagtgctattatcacacattatgaatcctttgggatccatccccgaggctttctagttagcagtttgagaaccgctattccacagtatacatattgattttacctaaaatattcagaatagcgaaggagattcctcataatacagaataggatgaggatgatgatctttgtactttgtgttttgatctgtgagtgtctgagt

SEQ ID NO: 212168 - DNA, 610 bp, Homo sapiens
tgtttatgttttcatatgattgaaaaaaattgaaagaagaataatatttcacggtacataaaaactgtatgacatgaatttcagtgtctattaataaaggataatttgaacatagccacgctcatttgtttacatatattctgtggttcctttctggctataatggcaaagttgagtagttgtgacagactatatggcctaaaaagccaaaaataattgccatctgccctttaacagaaaaagtttcccagtcattggggtaggcataagtaaggttgcagcaagtaagcacacaatagaagtaytgagaacaaatgaaattaatctttggaaaatgtatatatttatacctagcaccttagaacattctagaaaatggaatgcacagacacatttcactgatcatcagagtgctattatcacacattatgaatcctttgggatccatccccgaggctttctagttagcagtttgagaaccgctattccacagtatacatattgattttacctaaaatattcagaatagcgaaggagattcctcataatacagaataggatgaggatgatgatctttgtactttgtgttttgatctgtgagtgtctgagt

SEQ ID NO: 212169 - DNA, 617 bp, Homo sapiens
ggcaggtacttagtctgttttgttaccactgtatccccaatatttaacccagatgctcaaaaaatatttactaaataactaattgagtaaaaacacagatattaatgaatatgccttttcctccatgcacacccaactgaaagagattgaattatgtgatttatgtgacattcaagtaaggacattgaaacaatagagctttctagctgtgtttcaggagttaaagatgtagttgaaggctgacatacagcaggtgctcattaaagtattattacagtgtgtcaataatttagatcggctaacttatgtattaacattaccttcagtacaagttgttgttcagcagtayactgccaatcagaaagcagcaatcaagggcctaaaatgaaatatttctctgccaaattataaaaacattggtagcaatatcagtaatgcaaaaaagtaataaaaatactgaagtagcaaacacagaaacagaatatgatagggtatggggaacacactttgttttcctaaaacttctcaaattcatcattagtaaaaagcttttttaaaaggtggggaagagtgaagtgaggcagatactatttttcccagtatcatggtatagtttt

SEQ ID NO: 212170 - DNA, 617 bp, Homo sapiens
ggcaggtacttagtctgttttgttaccactgtatccccaatatttaacccagatgctcaaaaaatatttactaaataactaattgagtaaaaacacagatattaatgaatatgccttttcctccatgcacacccaactgaaagagattgaattatgtgatttatgtgacattcaagtaaggacattgaaacaatagagctttctagctgtgtttcaggagttaaagatgtagttgaaggctgacatacagcaggtgctcattaaagtattattacagtgtgtcaataatttagatcggctaacttatgtattaacattaccttcagtacaagttgttgttcagcagtatactgccaatcagaaagcagcaatcaagggcctaaaatgaaatatttstctgccaaattataaaaacattggtagcaatatcagtaatgcaaaaaagtaataaaaatactgaagtagcaaacacagaaacagaatatgatagggtatggggaacacactttgttttcctaaaacttctcaaattcatcattagtaaaaagcttttttaaaaggtggggaagagtgaagtgaggcagatactatttttcccagtatcatggtatagtttt

SEQ ID NO: 212171 - DNA, 656 bp, Homo sapiens
cttgcccataaaggactactttttaaaattcttttgatattggaaaattccccctagtcacacagagcaccatgagttcaaccttgaaggggctgaagtggtctacttgccccaatagctctaattcagcctctagatgggggacataaggacctttaaggctcattacaccgcagtattctatggaaatgactgctaatactatggaagagaaccccaatagagtataccatagaaatctgggagaattacactactgaagatgccaccattgttatggaaaaagccataaaagccatcaagctgacaacaattcattcctgctggagaaaactatgttcagacgttgtgcatgattttacaagatttacaacagagccaatcaagaaaaycacataaaagaccgtgaatgtggtttaaaaaaaatggcagcaggttgggggggtataaaagggtttcaagatatggatcttagagaaattcaagagctcatggacaccacaccagaagaattaacaatgacttgatgaagagaaatgcttccaaaccagtgccagacaatgaagacgacgacgtagaagaagctatgccagaaaacaaattgacactagacaatctggcagaaggcttctgattattcgagatcgctttaaact

SEQ ID NO: 212172 - DNA, 391 bp, Homo sapiens
gccctgaagggaaaactcctgggcaagacccagggctgtgctggcttcacgtccgacccaccacagtcccagggtggggccacacgggtacttgcatcatcatactcccagctccaggttgctcagcacagagagacagagactctgtatgtttkggagaaaataagggaaaagaataagagtcatcgtctagtaatccagagaattcttctggatcttatctaagaccaccaaggcagtacctctatgagtctgcaaaaaccatagtgttatgtggctttgggtgcagttcccttagaatacctggaaagccttccaaagaagggcaggcacaaacaagtccagaccataaagactacataaatacctaactcttcaatgcccagaaact

SEQ ID NO: 212173 - DNA, 391 bp, Homo sapiens
gccctgaagggaaaactcctgggcaagacccagggctgtgctggcttcacgtccgacccaccacagtcccagggtggggccacacgggtacttgcatcatcatactcccagctccaggttgctcagcacagagagacagagactctgtatgtttgggagaaaataagggaaaaraataagagtcatcgtctagtaatccagagaattcttctggatcttatctaagaccaccaaggcagtacctctatgagtctgcaaaaaccatagtgttatgtggctttgggtgcagttcccttagaatacctggaaagccttccaaagaagggcaggcacaaacaagtccagaccataaagactacataaatacctaactcttcaatgcccagaaact

SEQ ID NO: 212174 - DNA, 391 bp, Homo sapiens
gccctgaagggaaaactcctgggcaagacccagggctgtgctggcttcacgtccgacccaccacagtcccagggtggggccacacgggtacttgcatcatcatactcccagctccaggttgctcagcacagagagacagagactctgtatgtttgggagaaaataagggaaaagaataagagtcatcgtctagtaatccagagaattcttctggatcttatctaagaccaccaaggcagtacctctatgagtctgcaaaaaccatagtgttatgtggctttgggtgcagttcccttaraatacctggaaagccttccaaagaagggcaggcacaaacaagtccagaccataaagactacataaatacctaactcttcaatgcccagaaact

SEQ ID NO: 212175 - DNA, 391 bp, Homo sapiens
gccctgaagggaaaactcctgggcaagacccagggctgtgctggcttcacgtccgacccaccacagtcccagggtggggccacacgggtacttgcatcatcatactcccagctccaggttgctcagcacagagagacagagactctgtatgtttgggagaaaataagggaaaagaataagagtcatcgtctagtaatccagagaattcttctggatcttatctaagaccaccaaggcagtacctctatgagtctgcaaaaaccatagtgttatgtggctttgggtgcagttcccttagaatacctggaaagccttccaaagaagggcaggcacaaacaagtccagaccataaagactacataaatayctaactcttcaatgcccagaaact

SEQ ID NO: 212176 - DNA, 451 bp, Homo sapiens
gaattcagcattctatcagataaatttaacaaagagattgaagtgattagaaagaatcaaccaaaattacagagttgaaaaatgcaattgatatgctgaagaatgtatcagagtctctaatagcagaatcgatcaaatagtagaattagcaagcttgaagacaggctatttaaaaatatacagtcagaagagacaaaagaaagaagaataaaagcagtgaaacacacctacaagatttagaaaatcgcctcaaaagggcaaatctaaaagttgctggcattaaagaagaggtagcgagagagatagggatagayagtttattcaaagagacatcagagaacttcccaaatccaaagaaagatatcagcattcaagcacaataaggttatagaacaccaaccagatttaacccaaagaagactacctcaaggcatttaataatcaaactccc

SEQ ID NO: 212177 - DNA, 574 bp, Homo sapiens
catttgaatgcctgtaagtggtgtttagaattatcctccccataagaaatgtttacattcttgtcaacctcagtactacctttagtcttcttcttaatctttatcaatttattttcttaaaaagacttggtatcattcatttggttgctggtgatatttaacatgttttatatagttaatggccattttatgaattaatttttttagattatttctgttttcagattatttctgtttttatttctgtttttctttagttaatttgctacatttatttgctaggacttttattatataatgtgtagtaaagggtttcataacatrccaaacactatttaaattttccaatgataattttaatatatatttattgttataattacaatatgttcaattttcatctttgtgctgaaggtgcttgtttgtagttgtcacctctaaaaaatctcaaaccacgttagtttccccaaaatagatttggaagccatcacacactaaacttgtcaatcagattaattttaagaattacccatcttaatttttagctgatgaattaaaatatatggaggtttgc

SEQ ID NO: 212178 - DNA, 569 bp, Homo sapiens
cccttctagcacctagaaaagtgctcgatgtatagttggttctcaatacagagatgccaagtgaacaaatgcttatacaatctatttgaccacaccattttatcacccagacatcatcaaccatttcaagactgctagtgacaaaatcaagaaatcccagacaaataaatcctatttctgtaactacatcaaaatgtccagtccaagattaaggtgacattatgagattcagggttgaatttctttcttctttcaaacatttgtattgaattgagtatttactgtatgctgggctctcgtggtccaatgatgaacagacagacatgctctttgacggcagagtgtgtatagtattgaactagcagcaaagaaataattaacaaagcaaatacatctcagtcggttttacgttgctataaaraaatatctgaggctgggtaatttataaagaaaggaggtttatttggctcatggttcttgcaggctctcaagaagcttggtgccagcatctgtgtctggtgaggtctcaggaaactttcactcctggtaggaaagtgaagggcagcctg

SEQ ID NO: 212179 - DNA, 419 bp, Homo sapiens
tttttctgtggtgaacatttattacttacataaaaatatttttttaaatttagaagttacggatcttcccttgatctttaatcttaccctaaatttttattgacaaacctaaaatcagatttattagggatactaaaataatcaattagattaattccatgattaatcagctgattttggcctcaaaaaaattacaacttacacctactatacttaacatattcaaagttaatactactcattaatggttaaaggggttgaagatacagaggatgggaagatcccagaatgtaaattctcctattatttctaatgataaatccataatatacaatatagaaatctatagtatctatgartttctatagaatctatagtttctgtgaatctaactgcttaagagaactttccacaaagga

SEQ ID NO: 212180 - DNA, 584 bp, Homo sapiens
ttgattgtatgatgagcactgtggtacttttagagtatataaaataacattttcttcctccagagaagattttcatttacctggtgcttgagctaccttaatctaatttcagggtttgaacttyttctatctacccagacaacttgaagcagggctgctttatgtacaactcacatgtacttttaagatccaaccctctgaggtcacaattctaaatgtagggtggttgcagaccccttgtcttccagccctttgaggctgtcaatagcactgttccacttctcagctgccctttccaagtcatcaagtgctcctgggcaaaacagctccaaatgttgggctttgtagtgagaatttctctcttctcccagatcttaacctggcaattcctcactatcttattagttttttaatgtttggggttaatattattttatttctttttttcccccatcacagaaatctgcctattgttttatttcatccacatattctagccttctgttttgggaggtttgtctgtatcacctaatacactgttaggagtgaaaactgggtcctgggttccttttgcttcacccctc

SEQ ID NO: 212181 - DNA, 202 bp, Homo sapiens
aagtctatttttaaacagagccgatttcttcaagttgtgtacaagttgtgttttgaaaagtccttttgaaaattaaatccctctactgacttatgttttgtgtacctttgcggccctgtttagtagattcgtttraatagggttcattttatataatgaagtatggttacacatgatttctaaataccttgtacctagaaaa

SEQ ID NO: 212182 - DNA, 580 bp, Homo sapiens
tgtgtctggccaattttcgtattttcartagagatggggtttcgccatgttgacctggctggtcttgaactcctgacctcaggtgatccacctacctcagcctgccagagtgctggaattaaaggcttgagccactgtgcccaaccaacaatgcttccttctttagaatgagtattattctgcatatacactagagtatagcatagtggtttgagaaaatggcctttgcagtcagacatatctgtatttgaatcctggctcagtcatttactaactctgttatttaaaccctcaaacctcagtgtataaatctgcaaaataagaagaagaattccaagctttggcatgagaattataagaaagaaggtatataaaacccttagcttggtgcctgacacttagtgtgtccttgcactcccactctccactaagtggaagctgtgcattttattcaatgcatttttgttatgagtagcacggtgccctggaaagaatcagaagaaaacaggtcaattcactccagctcttggagtcttcacctcagtgtgtaaggaaggggaccagttttgtggtccccagg

SEQ ID NO: 212183 - DNA, 367 bp, Homo sapiens
gattgggtatatgctaatttttgaatctgcaaagggacatttgggagccctttgatgccttgtagaaaaagttaatatccccagattaaaactagatagaaactatctgtgaaactgctttgtgatttgtggattaatctcatagattaaaccattcttttgatctagaaggttggaaacattcttttcatataatctgggatggacgtttggaartccattgaggcatattagtaaaaaattaatatcccaagataaaaaccaggaagaagctatctgtgaaacagcttggtgtttggtggattcatcccactttgttaaaaatttcttttcatccagcaggttagaaaccctctttttgtagtat

SEQ ID NO: 212184 - DNA, 406 bp, Homo sapiens
tgacaggtctttctcttgtgtggattcacgtcaaggagttaaacctttcttttgattcagcaggttggaaacactctaattggagaatctgtgaaataacttttgggagcccattgaggtctatgagggaaaaccgaatatttttagacaaaacctagaaacmggctatctgtaaaactatgttgtgatgtgtggatttatctcatagagctaaaactttaatttgattcagcaggttggtaacactccttgtagagaatctgctaagggacatttgggagcccattgaagccaagggaggaaacacttaatacccccagaaagaagctatttgtgaaactgctttgtgatgtgtgaattcatctcacagaattaaacttttctttttattcagtagcttggaaac

SEQ ID NO: 212185 - DNA, 341 bp, Homo sapiens
agaacatacaaggatacatttggaagccctttgaggtctatggggcgaaatccaaaatccccagataaaaagtagaaaaaagctatctgcaaaacagctttgtgaagtgtggattcttctcacagagttaaacgagtcttttgattcagcactttgaaaacctctttttggagaatcaggtaaggggcatttgggagcccattgaggcctayggggaaaaaacaaatttttcctgataaaaactagaaacaaactatctgtgaaactgctctgtgaagtgtggattcatttcacagagttaaacctttctttcaattcagtaggttggaaaagctattttt

SEQ ID NO: 212186 - DNA, 341 bp, Homo sapiens
agaacatacaaggatacatttggaagccctttgaggtctatggggcgaaatccaaaatccccagataaaaagtagaaaaaagctatctgcaaaacagctttgtgaagtgtggattcttctcacagagttaaacgagtcttttgattcagcactttgaaaacctctttttggagaatcaggtaaggggcatttgggagcccattgaggcctacggggaaaaaacaaatttttcctgataaaaactagaaacaaacyatctgtgaaactgctctgtgaagtgtggattcatttcacagagttaaacctttctttcaattcagtaggttggaaaagctattttt

SEQ ID NO: 212187 - DNA, 604 bp, Homo sapiens
ttttgacaaatctgcaaagacacatttgggagcccattgaggcctatgtggaaaaactgaatatcaccagataaatagtagaaagaatctatctgtgaaactctcttggtgtgtggattcatctcacatagttaaacctttctttggatacagcacttttgaagcactctttttgtagaatctgtgaagggagatttgagagcatattgtttcctgtgaaggaaaattgattattccaagattaaaactaaaaagaagctacgtgtgaaactgcttagtaatatgtggacacacctcccagagttaaacctttcttttgattcaccaggttggaaacactttttttgaagaaaatttaaagggacattcgggacctcattggggcctacggggaaaaacaaaatatcctcagataaaaactggaaagaagttatstgtgaagctgctttgtgaagtgtggattcattccccaattctaaacctctcttttgattcagcaggttggaaacaatctttttttgggaatctgcaaagtgacattcaggagaacattaaggcttatggggggaaaaacaaatgtccccagaaaaacgagacagaagct

SEQ ID NO: 212188 - DNA, 545 bp, Homo sapiens
tttttgtccactctgtgaatggacatttgggagttcattgcrgccaatggcaaaaaagaaaatattgcaggaaaaaaactagaaggaagctatctcagaaactgctttatgatgtgtgcattcatgtcacagagttaaacttttcttttcatagagtagtttggaaacactgtttttgtagtatctgcaaagggatatttcggagagaattgaggcctatggagaaataggaaacatattcagataaaaagcagaacgaagctttttgagaaaccactttgtgttctgtgctttcatttctcagagttaaacctttctttggattcagtaccttgcaaagagtgtttttgtccactctgcaaatgggtatttgggagctctttgtggccagtggtgaaaatgcaaatatcccaggataaaaactagatggaagatatctgagaaactgctatgtgatgtctgcattgaactcacagaggtaaatgtttctttccattcagcagtttggaaacactgtttttatagtatctgcaagtggacatttt

SEQ ID NO: 212189 - DNA, 568 bp, Homo sapiens
taaatatttattttgattcagcagtttggaaaaactgttttcacaraatctgtaaggggatatctcaaagagctttgaggcgtatggtgaaaaaggaaacaccttcggataaaaactagaaagaagcattctgagaaactgctttgtgatgtatgcattcatctcacagacttaaacctttctttggattcagcagcttggaaacaattttgtccattctgcgaatggacatttggaaggtcattgaggccaatggcaaaaaccggaatattccaggataaaaattaaaaggaaactatgtgagaaactgctgtgttatgtgcgcattcaccttgcagagttgaacctttcttttcattcagctttggaagcactgtttttgtagattctgcagagggatatttcagagatcattgagggctatgatgaaaaaggaaacttcttcagatacaaactagaaagaagctttctgagaaactgctttgtgatgtgtgtattaatcttacagacttaaacctttctttgggttcagtagattggaaacacagtttttgtccattctgtgaat

SEQ ID NO: 212190 - DNA, 291 bp, Homo sapiens
aaaatacaaagaatctatctatgaaactgctttgttacatgtggattcatctcacaaagttaaatctttctttttattcagcaggttggaaacacttttcttggaaaatcttcaaagggacattttggagcccattgaarcctaaggggcaaaatcagatatccccagataaaaactagaacaaagctatcagtgaaactatttttcaatgtgtggattaatctcccagagttaaaacttccttttgattcagcagtttggaaacactctgtttgaagaatctgcaaaggg

SEQ ID NO: 212191 - DNA, 540 bp, Homo sapiens
gcaggtagaaaacattcttctggagaatcctcaaagggatattgcagaacccwttgaggcctatggggaaaaatgtaatatcaccagataaaaactagaaagaagctacttttgaaacaactttgtaatgtgtgggttcttctcacagagataaaactttcttttcattcagcaatttggaaacactgtttttgtacattctgtgaatggacatttgggaacaacttgaggactatggtgaaaaataaattatcttcagataaaaattagaaggaagctttctgatgaactgctttgtgatgtgtgcactcatatcagacatgtaaatctttcttttgattcagcagtttggaaacacagtttttctccattttgtgaatggacattgggagctcattgagggcaaaagtgaaaaagtgaataaaccaggttaaaaatgagaagaacaatatctgagaaactgctttgtgatttgtgcattcctcttgctgagtaaatcctttcttttcattcagcagtttggaaacacaggttttgtag

SEQ ID NO: 212192 - DNA, 500 bp, Homo sapiens
gaattcatctcacagagttaaaccattcttttgattcagcagtttggaaacaccatttttgtgcaatctgtgaatggacatttgggagctcattgaggccaatggtraaaaagcgaatatgccaggacaaaaactagaaggaagatatctgagaaactgctttgtgatgtgagcattcatctcacacagtgaaatttttctttaccttcagcagtttggaaacagtgtttttggggaatctgcaaagggatatttgggagcacattgaggtctatggtgaaaaaaagaaaataatttcagataaaaacaagaaagaagctttctgagaaactgctttgtggtgtgtgcatttgtctcacagagataagccttccttttgattcagcagcttagaaacacagtgtttgtccattctgggaatggacatttgggagatcactgaatctaatggcaaaaaagcaaatatcccaggataaacaacaagaggaagctatctgaga

SEQ ID NO: 212193 - DNA, 500 bp, Homo sapiens
gaattcatctcacagagttaaaccattcttttgattcagcagtttggaaacaccatttttgtgcaatctgtgaatggacatttgggagctcattgaggccaatggtgaaaaagcgaatatgccaggacaaaaactagaaggaagatatctgagaaactgctttgtgatgtgarcattcatctcacacagtgaaatttttctttaccttcagcagtttggaaacagtgtttttggggaatctgcaaagggatatttgggagcacattgaggtctatggtgaaaaaaagaaaataatttcagataaaaacaagaaagaagctttctgagaaactgctttgtggtgtgtgcatttgtctcacagagataagccttccttttgattcagcagcttagaaacacagtgtttgtccattctgggaatggacatttgggagatcactgaatctaatggcaaaaaagcaaatatcccaggataaacaacaagaggaagctatctgaga

SEQ ID NO: 212194 - DNA, 558 bp, Homo sapiens
ggtttacctctttgagatgtatccacacatcacaaagcagtttcacagatagcttctttctagtttttaatcttaagatattaggttttttttgttactatcgtccataaagggctccataatgcccatctgtagattttccaaaaagagtattttcaatgtgctgaataaaaagaaatgtttaacagtatgaaatgaatccacacatcacaaagcagttttacacgaagcttctttctagtttttctctgtgcatacttggttattccagatagtaatcattgggctccaaaatgtccctttgcagaatctccaaaaagattgtttccwgcctactgaatcagatgaaaggtttaactctgtgagatgaatccacacatcataaagcagtttcacagatagcttgtttctaggttttatccaggaatatttggtttttacctatagacttcaatgagctccaaactgtctttatgcagattcagcaaaaagagtgtttccaacatgctgaatcaaaagaaaggtttaactctgtgagatgaatccacacatcacaca

SEQ ID NO: 212195 - DNA, 570 bp, Homo sapiens
attgaaatgctcaaatcaatcagttcagtcaattttgacactaacacatgcatgcatgtaacccattcccctaccagaaaatgaaacatttctattgctacagaaagctgcttctaaccatttccagtcaaccctccccgaagagcaacgaccaccaatctggttttcatattcatgtattatttttgctagaaactgtctacttctttgtgtcctggcctctctcactcagcatgayactttttatatttgtctatgttgttgtgtgcatcagtagtttggggctttttaatgctgtgtatgttccattgtacggatgcaacggagtttattcatgctttttcctcttgatggatatccttatgtctatcataattcttgtagaaggcttattgtggacatgtgccatttctcttagcctgtggcttgcttagtttcttaactgcatctcttgatgagttttataattttttttttttttaataaatagccctttttcttttagtttgtttcaagtagcagattcctcttgacttccctgaggaaatttctccaactgtgtagacaaaa

SEQ ID NO: 212196 - DNA, 539 bp, Homo sapiens
ccatttcttacctataacagcaggaacctgtggtccattttcttcccttcctcatacaaatttagcatagagcttaacgttgagctgccttatagacttttcttaattcttgtgtttggataaaaaaaatgtaagcaaaygtaagtatttatcacaatctctcaagaaaatgccaaagaggtaaggttgtcagataaaatacagaccacccagttaaatttgaatttcagataaacaatgaatacttttttcatgtaaatatgccccatatgtagtataaatctgtcccatacaatatttggtatatacttataaaaatattcatcatttgtctgaaattcaaatttaactggtcatcctgtatttttatttgctaaattttgcaatcctacaaagcaggatgacatccataatgcacgtaaaaactcctgaaagtcatcattctctacccttttctatctcccacacatagggcagatgctcccagagtcttctttatcccgactcccaccccaagctcccaagaacagctaatgctg

SEQ ID NO: 212197 - DNA, 539 bp, Homo sapiens
ccatttcttacctataacagcaggaacctgtggtccattttcttcccttcctcatacaaatttagcatagagcttaacgttgagctgccttatagacttttcttaattcttgtgtttggataaaaaaaatgtaagcaaatrtaagtatttatcacaatctctcaagaaaatgccaaagaggtaaggttgtcagataaaatacagaccacccagttaaatttgaatttcagataaacaatgaatacttttttcatgtaaatatgccccatatgtagtataaatctgtcccatacaatatttggtatatacttataaaaatattcatcatttgtctgaaattcaaatttaactggtcatcctgtatttttatttgctaaattttgcaatcctacaaagcaggatgacatccataatgcacgtaaaaactcctgaaagtcatcattctctacccttttctatctcccacacatagggcagatgctcccagagtcttctttatcccgactcccaccccaagctcccaagaacagctaatgctg

SEQ ID NO: 212198 - DNA, 288 bp, Homo sapiens
atgaggtttttaagctctgaaagcccccagctggaattgattcatgtcagaaaacatgtgctctgagcagaaaaagactggacagatttgggatcccttttagttctgtgtgattggttgtgtacagttatttttatgataaccttgtgggcaaaatgggtattaggactataattttagaaccatgttttctggttctcttgtcttgtagaacggtttagtttsaactaagagaagaaatattgtgcactgaaaatgaagagaaaatcactggccataaaggaattt

SEQ ID NO: 212199 - DNA, 487 bp, Homo sapiens
cagcagccttgacctcctgggctgaagcaatcctcccaccttagcctcctgagtagctgagactgcaagtgtgtgccactgtgactggctatgtttttaatttttttgtagagacggggttttcgccacgttgcccaggctggcttcaaactcctgggctcaagggatccacctgcctccgcctcccaaagctgatgttaagtattatctaacataacttcatttatgaaaatttaaaaatgcrtaagataaagaaatcaatgttttacaggagcacatatacataaaagaatatgctttaaacaaattataagtggtgtctatggtggtggagaagaaaggaaatgaactgggtcaaaggccataagtaaagaagagaatggccttctaatccagtcatggcttatgccaagaaccagagcatgtgatgacctcaaccttgtgtacttgtggttataaaagaagaaacaatcaaataaacagacta

SEQ ID NO: 212200 - DNA, 442 bp, Homo sapiens
atatttctgtattccaggtggactaaacaagggaataatgtaactatgctacagaaaggtgaatgtggagtaagtggrctaactggccctagtgaacaagggtgtatagaaaaacccttgaagtgagttagaattcttttagctgcaagtaacagaagactcaactaaaatggcttaaacaataagcaaaaattattatttctcatgaaaagaaatctcaagctagggcagatccaggattgggtaatcaattcactcaatggtgtgttatcgaggacgcaagttctgcctgtccttcttctctgaaatcctgggttatcctcttagactagctacctcacggacacaaaatagcagctgcagtagtagacacatgcagataacccaagtgttagaggaagaagagggctggtttcctcttgtggatctcttcttattagaa

SEQ ID NO: 212201 - DNA, 430 bp, Homo sapiens
atatttctgtattccaggtggactaaacaagggaataatgtaactatgctacagaaaggtgaatgtggagtaagtgggctaactggccctagtgaacaagggtgtatagaaaaacccttgaagtgagttagaattcttttagctgcaagtaacagaagactcaactaaaatggcttaaacaataagcaaaaattattatttctcatgaaaagaaatctcaagctagggcagatccaggattgggtaatsaattcactcaatggtgtgttatcgaggacgcaagttctgcctgtccttcttctctgaaatcctgggttatcctcttagactagctacctcacggacacaaaatagcagctgcagtagtagacacatgcagataacccaagtgttagaggaagaagagggctggtttcctcttgtggatctc

SEQ ID NO: 212202 - DNA, 411 bp, Homo sapiens
gaattctgcacaagtgtgcattccaaccgactgtgaatagagttctgatttctccacattctccccaacacttggtattgtcatgggccctttttaacaccagccatgagtttgttttctcagcacatcatgaagtcaagggagattcatctacaacaaggttcyggaaacagataggatgaagtaggggctggacgggagaaaggaagctgtgtttccaatctggaagtttctcacctgcctgtttcctcaacccccaagacatgctcttcttaggtctcctgtatcaatatatatgtttggagtctctgaatgagtttgggaggtataagttccctgatttaagttgggtaatagactaatggggtgttgatgatctaaaaagctcaaagataggagagaaagaaacaa

SEQ ID NO: 212203 - DNA, 363 bp, Homo sapiens
taaacttgacagattatttgaaaatatacagtcagagaagaagaaaaaaataaaaggaagaaacaatggttacagggtttatggaaaagtataaaaattcaatgtatagaagtttctgaagaagaaagaaaaaggaacaaaaagcatattttaagatataatatcaaaaaaccttccaaatttggagaaaaatataagtatccagatataagaaggtcaaaattctccagtcagatttagtccaaacaaaattgatagactgctagcaagactaataaagaaaaaaagagagaagaatcaaataracgcaataaaaaatgataaaggggatatcaccactgatcccacagaaatacaaactac

SEQ ID NO: 212204 - DNA, 452 bp, Homo sapiens
ggttgcagttagccaagattgcaccattgcactccagcctgggtgacatgagtgaaacttagtctaaaaaaaaaaaaaaagcagtgtcacgagaaccaaaaatcaggtgagcaatcatagtaactggttttaacttcatatcctggaaagaggaattgaggggggcaggagagacaatcttgaattgtcgatgccaccctttccccatgcaacatggagaaagagtctatgcccttgagggagggagagtgcagcaacttgggattttacattgaattcagtactgctctatcacagtagagaataaagcttagcagagaataaggcygtgctgggctcagccagctcacccttgcccgaagtgagcatttggaccagccctagccagaggggattcacccatcccagtggttggaactcgagtttcttggcaaagccttgccaccacaggc

SEQ ID NO: 212205 - DNA, 570 bp, Homo sapiens
tgaattcagtactgctctatcacagtagagaataaagcttagcagagaataaggccgtgctgggctcagccagctcacccttgcccgaagtgagcatttggaccagccctagccagaggsgattcacccatcccagtggttggaactcgagtttcttggcaaagccttgccaccacaggctgaagtgctttggggttttagataagcttgaaagacaatgtaggacacaaggactgcaattcctaggaaattcctagtgctaagctgggctcagagccagagttctagagtggcacgtgacctagggagacactagcttctaagggagtgctggtgtcacccctcccccgaccccaggcagtgaagctcacagcaataaaagtgattctttctttctatttaacaagaggagaacaaagagcaaagaggactttgtcttgcatcttggataccagctcagccacagtaagatagggcaccaggcagagttgtgaggcccccgttccaggacctggctcctggacatttctagagacaacctgagccaaaaggaaacctgctaccttgaag

SEQ ID NO: 212206 - DNA, 570 bp, Homo sapiens
tgaattcagtactgctctatcacagtagagaataaagcttagcagagaataaggccgtgctgggctcagccagctcacccttgcccgaagtgagcatttggaccagccctagccagaggggattcrcccatcccagtggttggaactcgagtttcttggcaaagccttgccaccacaggctgaagtgctttggggttttagataagcttgaaagacaatgtaggacacaaggactgcaattcctaggaaattcctagtgctaagctgggctcagagccagagttctagagtggcacgtgacctagggagacactagcttctaagggagtgctggtgtcacccctcccccgaccccaggcagtgaagctcacagcaataaaagtgattctttctttctatttaacaagaggagaacaaagagcaaagaggactttgtcttgcatcttggataccagctcagccacagtaagatagggcaccaggcagagttgtgaggcccccgttccaggacctggctcctggacatttctagagacaacctgagccaaaaggaaacctgctaccttgaag

SEQ ID NO: 212207 - DNA, 570 bp, Homo sapiens
tgaattcagtactgctctatcacagtagagaataaagcttagcagagaataaggccgtgctgggctcagccagctcacccttgcccgaagtgagcatttggaccagccctagccagaggggattcacccatcccagtggttggaactcgagtttcttggcaaagccttgccaccacaggctgaagtgctttggggttttagataagcttgaaagacaatgtaggacacaaggactgcaattcctaggaaattcctagtgctaagctgggctcagagccagagttctagagtggcacgtgacctagggagacactagcttctaasggagtgctggtgtcacccctcccccgaccccaggcagtgaagctcacagcaataaaagtgattctttctttctatttaacaagaggagaacaaagagcaaagaggactttgtcttgcatcttggataccagctcagccacagtaagatagggcaccaggcagagttgtgaggcccccgttccaggacctggctcctggacatttctagagacaacctgagccaaaaggaaacctgctaccttgaag

SEQ ID NO: 212208 - DNA, 570 bp, Homo sapiens
tgaattcagtactgctctatcacagtagagaataaagcttagcagagaataaggccgtgctgggctcagccagctcacccttgcccgaagtgagcatttggaccagccctagccagaggggattcacccatcccagtggttggaactcgagtttcttggcaaagccttgccaccacaggctgaagtgctttggggttttagataagcttgaaagacaatgtaggacacaaggactgcaattcctaggaaattcctagtgctaagctgggctcagagccagagttctagagtggcacgtgacctagggagacactagcttctaagggagtgctggtgtcacccctcccccgaccccaggcagtgaagctcacagcaataaaagtgattctttctttctatttaacaagaggagaacaaagagcaaagaggactttgtcttgcatcttggataccagctcagccacagtaagatagggcaccaggcagagttgtgaggcccccgttccrggacctggctcctggacatttctagagacaacctgagccaaaaggaaacctgctaccttgaag

SEQ ID NO: 212209 - DNA, 260 bp, Homo sapiens
agagaaagagacatatgtgacctttcagagagataattcataatagttgttttgaggaaamtcaaagaaatccaagatagtctagaaaaggaattaagaattctatccaataaatttaacaaagagattgaaattatgaaaaagaatcaagcagaaattcttgagtcgagaaatgcaattgccatcatgaagaatgcatcagagccttttaatagaattgatcaatttaatagaagaaagaattggtgagcttgaagaca

SEQ ID NO: 212210 - DNA, 553 bp, Homo sapiens
atctaccagaatttccacatgttattggagggacccaggtagaggtaattgaatcatgggggccggtctttcttgtgctattctcatgatagttaataagcctcaggagatccgatgggtttatcaggggtttcttcttttgcttcttcctcatcttctcttgcagccaccatgtaagaataacttttgcctcctactgtgattctgaggcctccccaatcacgtggaactctaagcccaattaaacctcttttwcttgccagtctcaggtatgtttttatcagcagcatgaaaacagactaacacattgagttaacaggctgacactgagaagagcaattgaaacagacgggccattttaaatggcagctttctaattttacatttaaaaatgaagccgaaaaataaattgcttgacctgtcaggatcacaacatttctcaatggtccttctgtttagcacctggcttcagactcattccagtgtttcccctggaatatcttgtaatctgaagaatgtctgtggccagggagaggggttgttgtccaaggcc

SEQ ID NO: 212211 - DNA, 553 bp, Homo sapiens
atctaccagaatttccacatgttattggagggacccaggtagaggtaattgaatcatgggggccggtctttcttgtgctattctcatgatagttaataagcctcaggagatccgatgggtttatcaggggtttcttcttttgcttcttcctcatcttctcttgcagccaccatgtaagaataacttttgcctcctactgtgattctgaggcctccccaatcacgtggaactctaagcccaattaaacctctttttcttgccagtctcaggtatgtytttatcagcagcatgaaaacagactaacacattgagttaacaggctgacactgagaagagcaattgaaacagacgggccattttaaatggcagctttctaattttacatttaaaaatgaagccgaaaaataaattgcttgacctgtcaggatcacaacatttctcaatggtccttctgtttagcacctggcttcagactcattccagtgtttcccctggaatatcttgtaatctgaagaatgtctgtggccagggagaggggttgttgtccaaggcc

SEQ ID NO: 212212 - DNA, 560 bp, Homo sapiens
atttttggtagctgctttagggttttctatacataagatcatgtcatctccaaacagagattgtttaattcttcctttctgatttgaatagcttttatttctttctattgtctaattgctctggctagatcttccagtgctatgttgaacagaagtgatgagagtaagcatccttgtcttgttcctgatcttagaggaaaaagtttcaaattctcaccattgaatataattttagctgtgcatggggctttattttgttgaggtatgtattttttgtgcctaatttcttgcaaatttttatcatgaaaaaatgttaaatgttttcagatgctgtttctgtatctattgagatgattatatggtttttgtccttcattctgttaatgtggtgtatcaaatttattgatttgcatatattgaaccatccttgcatccctgggataaattccacttcatgttgaatgattcttttgacatgctgttgaattcggtttgctagtacttgtytgaagatttttgcatctatgttcatcagggatattggcctgtaattttctttt

SEQ ID NO: 212213 - DNA, 567 bp, Homo sapiens
tgttttttatctctattgttcttacttcttctgacacctaaagtttttgagttgattaataaattttttttttccttcttactggacaaacactgagcccccaaatccatgtttggtacctatgatattatagtgactcaggaaaattgctgcttccctgtgacagcactcatacccacacctctaatggacaggaagcactgtgttttcccacaggcagtcagcagcatcaaaccagattcttagycacagggcaccagtgggtcatggaaagggcatagtgcacacaaaaggtaactttaatgaggtgtttctgctcagaggctcctccagggtaacttgatgtaaatttaaaagacaaagggaaaagaagtcaccatttgggcagtggcacagtgtctgtgtacttactgctcagtctagttttttccttctacttcttctagatctgtcatcttttttttttctcagaaattttcaggagcagaatagaatggcaaaagtgaggacttaatggggagaactttctggggactaaaacctcagaaaatcctgcctttggaaaat

SEQ ID NO: 212214 - DNA, 536 bp, Homo sapiens
cataatcacccctcatctcccagcctgaaccacgtcctttggtcatggacatcctgactctgactctgcacttgagcataaattctttccaggatgtttcttttttcctcattcaaataatctccattaggctccctcaccacttcttcatgtgctcccatgccacccgaattcctgcataatcacaggggtccatctgggaccctggccatgctcgtaattcccacttagagatatcagactctgagcttcagcttctatctaaattgsaacctcagtacacactctcaatccctctttgctgttttacttttctcattagcatttacttctctcttgacatacactttacttatttatcttgtttactggcaatatctccctactagaatgtaagtttcatgagggcaggggttttatatttttgtgttgtctcagcaacaacaattccgggagcatggtagatcttcaataaatatcagttgaatgaatgacagaattcattctttaactgttttgatgcttttagtacctac

SEQ ID NO: 212215 - DNA, 536 bp, Homo sapiens
cataatcacccctcatctcccagcctgaaccacgtcctttggtcatggacatcctgactctgactctgcacttgagcataaattctttccaggatgtttcttttttcctcattcaaataatctccattaggctccctcaccacttcttcatgtgctcccatgccacccgaattcctgcataatcacaggggtccatctgggaccctggccatgctcgtaattcccacttagagatatcagactctgagcttcagcttctatctaaattgcaacctcagtacacactctcaatccctctttgctgttttacttttctcattagcatttacttctctcttgacatacactttacttatttatcttgtttactggcaatatctccctactagaatgtaagtttcatgagggcaggggttttatatttttgtgttgtctcagcaacaacaattccggragcatggtagatcttcaataaatatcagttgaatgaatgacagaattcattctttaactgttttgatgcttttagtacctac

SEQ ID NO: 212216 - DNA, 569 bp, Homo sapiens
gtcccatttaacattattacatctatattttattataggatgaagttggaattggagttttctggggtagatctggggaggacttagtctacaagcaagtcaggaatgggatagggtttaaatagtctctgagaaggtggggagcctgtaatgtaccctgaaacctgtttgcttagctataccatgccaagtgggatagctccctttgaagatttttatttccacattatgtagacagctccaggggaaagggccccaggagagaggacaggcaagaacaccattggccgtggcttgggccgatgaraacaacagctacaccttagctccagggacaggcttcctcaaagaaattacaaccattttggcccttttatgcaggtggctgcagaggtcgatgccttggaaataagttccccagcagcagggtagaaaagacacagtgagatacatcatacttaagattcaactgggagcataccagggatgctctataatgtaatcgagggaaggttgaatgaaacaaagtgatttatcatctataacttcaaacctattggtgttttgac

SEQ ID NO: 212217 - DNA, 444 bp, Homo sapiens
agtccaaagtagttgctgtaatttatacttctatcagcaatatatgagagttccagttcctctacatcctcagcaacacttgtattaccagtcttactaaaaatactcactttaatgggtgtgcagtggtaccttactgtggtcttaatttgcatttttctggtgactaatgatgttgagaattttttcataarcttttggacatttggattttctcatttgtgaagtttctgttcaaattgtttgtgaagttcctgcttgacattttctactgggctatcttttcttttattattgatttgtggaattacttgatacattctgggtaatagatctttctcagaaatatttattgcaaattatttatttatttatttatttatttatttatttatttatttatttataggaagggtcacggagcttccatgtcctccctgggca

SEQ ID NO: 212218 - DNA, 488 bp, Homo sapiens
tgaattagctgctttttttacggaacaccatttttttcttgaaagaacaagacatcaaactacagtaattcagacttggttatctgtcagacattttctcaaaaatgaatgaagtgagtctgcaagaaaaacaactggcagtatttgtatccaatgataacattctagctttcaagcaaaaattggaattttgggaaacttgtatatgccactataagcttgacatcatcmcaatactatgactttttttaatgaaatcagtggtaatattaatgaatgtggtttttgatgctgtacaaagaaatgtgtcaacatttgaaagatatgcataattcaatgaaccaatattttccaaatggccagtgcatcatggtacaaaatcatgcatgggtaatagaaattttcaaggtacaaaatagggcactagattttaacataatatactacataactttcactgctgtggtttcagattccacattggaacc

SEQ ID NO: 212219 - DNA, 561 bp, Homo sapiens
atttggagttatttgggcttcaaaaatctggatgttaatttccctctccagatttgagaggttctctatcattatttctttaataagttttctgctcctttctctttctctgctccttcctggatttccataacgtatctattggtttgttcagtggtgtcccataagttctgtaggccttcctcattatttttcattctttttactttttatttttctgactggataatttcaaatgatctttgagtttactaattctttcttttgcctgattgagtttgttattgaagatctctattgaattttttagttcagatatggtattctgcataaccagaatttcagtttggtttttactaatggtctatttttctttgttgaacttgtaattttattcatgtatcgtttaactgattttgtttaattatctattttctctggtagttcactgagcttctttaaaatgattgtttgaaacaatttgtctggtgatttatatayctccattttttgaggtcagccactggagctttattttgctccttcagtgatattatagtc

SEQ ID NO: 212220 - DNA, 550 bp, Homo sapiens
ccatttttgttctaccaggattgacttaataaggatattacaatgtgtagttacacagggccccaaaccagaaggaccctacatgcttggattattgccctgctatcatcatcttgaaattctccttaattttgtctttcaaattgtgttttgtaagtgaattccaatggaacactgaggagggggcctggagcctcagtgtagtcccacttcccactacctctctgcctttctaggataggttcttgtcttctattccccagccatctggcaccctggccctgcccagcttcccctttcccatcctcacttcttttcagacttttaaaatatgcaaggtcaccaaaaaattagctacatgcacsctttctgaaaaacaaactgaaggatatactctaccaaaataaaagaataaaactagagagaaaaatattgaattctagaggcaaagatccaaatgggagagaggaaaaaggacttcaataaagatagctggtcctggagaacagcccattcaaactggagcaggaagacagagggttgtgggtgg

SEQ ID NO: 212221 - DNA, 563 bp, Homo sapiens
ggacggaactagaggtcattatgttaagtgaaataagccaggcacagaaagacaaacttcacatgcggaagctaaaaattaaaacaattgaactcatggagatagagtagaatagtgggaggggggtgggggaagaaggaatggtaagggktacaaaaatatagttagatagaataaataagatctagtatttgatagcacaacatggagagtatagtcaaaaataactgtacattttaaaataacttaaagagtataactggattgtttgcaacacaaagaaaggatagatggataccccatttaccctgaggtgattattacacattgtatgcctgtatcaaaatatctcatacaccccattaatatatgtacctgctatatacccacaaaattttaaaataagaaatttttttaaataaaataataaatttatcttgtagttaacccaaaccttgcaggaaccataccatgaaaataatactaaggaacacagttccagtttagttaaattgtcagggaacaaattaccacagaaacaaacattttagcctctgttctcc

SEQ ID NO: 212222 - DNA, 563 bp, Homo sapiens
ggacggaactagaggtcattatgttaagtgaaataagccaggcacagaaagacaaacttcacatgcggaagctaaaaattaaaacaattgaactcatggagatagagtagaatagtgggaggggggtgggggaagaaggaatggtaagggttacaaaaatatagttagatagaataaataagatctagtatttgatagcacaacatggagagtatagtcaaaaataactgtacattttaaaataacttaaagagtataactggattgtttgcaacacaaagaaaggatagatggataccccatttaccctgaggtgattattacacattgtatgcctgtatcaaaatatctcatayaccccattaatatatgtacctgctatatacccacaaaattttaaaataagaaatttttttaaataaaataataaatttatcttgtagttaacccaaaccttgcaggaaccataccatgaaaataatactaaggaacacagttccagtttagttaaattgtcagggaacaaattaccacagaaacaaacattttagcctctgttctcc

SEQ ID NO: 212223 - DNA, 552 bp, Homo sapiens
atttactaaagcatgccagctccgtagtattttatgatttactgagcattgtcaacccattatttcactttattcttatgaaatccttttggtagatgtagggctagcattttacatgtatactatttgtttacagaagtcttgtgacttagccaaagtcacagaattgttaggagaagccargataaaagtcaggtctcctgtcttcagcagtgccttcattaggggcctcttctgagaggagggaatatggtggtcttgcaaggttcatggcattcagatcaattgaacctacaatttctacttcatttattctcctgtaaaatatgcaccttaaagagaaaaaaaatgccttttaagggaaaacacagaacacgttctagtaatagttttgtacgcttgacaatttatgctgattgatttgttgtgtcaccaaacaaatatcatttttatattttcaattaccatttacatttcctctaagatctataccagtctagtcatctaatgaattaaatttgcattcatttcacttcagaaaggttgagagaa

SEQ ID NO: 212224 - DNA, 552 bp, Homo sapiens
atttactaaagcatgccagctccgtagtattttatgatttactgagcattgtcaacccattatttcactttattcttatgaaatccttttggtagatgtagggctagcattttacatgtatactatttgtttacagaagtcttgtgacttagccaaagtcacagaattgttaggagaagccaggataaaagtcaggtctcctgtcttcagcagtgccttcattaggggcctcttctgagaggagggaatatggtggtcttgcaaggttcatggcattcagatcaattgaacctacaatttctacttcatttattctcctgtaaaatatgcaccttaaagagaaaaaaaatgccttttaagggaaaacacagaacacgttctagtaatagttytgtacgcttgacaatttatgctgattgatttgttgtgtcaccaaacaaatatcatttttatattttcaattaccatttacatttcctctaagatctataccagtctagtcatctaatgaattaaatttgcattcatttcacttcagaaaggttgagagaa

SEQ ID NO: 212225 - DNA, 567 bp, Homo sapiens
atgctccttgtcctctcattgccccaygtggctgaccactcctttcttcctcactctccccccatatggctgccatgtcacctctctctccttctcttcctccctgtcctccagctcttcatttgtcagcttgtctagctttcctggtgactcaagctccccactatgttcactacttgagcttctctgtagcattctttctggttctctcagcaacctcctcccgcactgtggcttccatcatcacctctctccagacacaagcttgcacctcggtttggacctcccaggtccccattcccatctagctgctggaagcatctatgtgggtgccccctgatccctcaagctttgtgcatcccaaagtgtgccctcccaaggctgagcctccttctagattggttaatgaggcaaaaaatttctgtgcccttcatccatggctctcagagctggggaattctggcagggaattttggccgtgctcctcatccctctgccaggaaatacccaccttggacctcactcaaatcgtgattccaatttccttgactttctccttgctgctca

SEQ ID NO: 212226 - DNA, 580 bp, Homo sapiens
ccttttcataccacatgctccttgtcctctcattgccccatgtggctgaccactcctttcttcctcactctccccccatatggctgccatgtcaccyctctctccttctcttcctccctgtcctccagctcttcatttgtcagcttgtctagctttcctggtgactcaagctccccactatgttcactacttgagcttctctgtagcattctttctggttctctcagcaacctcctcccgcactgtggcttccatcatcacctctctccagacacaagcttgcacctcggtttggacctcccaggtccccattcccatctagctgctggaagcatctatgtgggtgccccctgatccctcaagctttgtgcatcccaaagtgtgccctcccaaggctgagcctccttctagattggttaatgaggcaaaaaatttctgtgcccttcatccatggctctcagagctggggaattctggcagggaattttggccgtgctcctcatccctctgccaggaaatacccaccttggacctcactcaaatcgtgattccaatttccttgactttctccttgctgctc

SEQ ID NO: 212227 - DNA, 580 bp, Homo sapiens
ccttttcataccacatgctccttgtcctctcattgccccatgtggctgaccactcctttcttcctcactctccccccatatggctgccatgtcacctctctctccttctcttcctccctgtcctccagctcttcatttgtcagcttgtctagctttcctggtgactcaagctccccactatgttcactacttragcttctctgtagcattctttctggttctctcagcaacctcctcccgcactgtggcttccatcatcacctctctccagacacaagcttgcacctcggtttggacctcccaggtccccattcccatctagctgctggaagcatctatgtgggtgccccctgatccctcaagctttgtgcatcccaaagtgtgccctcccaaggctgagcctccttctagattggttaatgaggcaaaaaatttctgtgcccttcatccatggctctcagagctggggaattctggcagggaattttggccgtgctcctcatccctctgccaggaaatacccaccttggacctcactcaaatcgtgattccaatttccttgactttctccttgctgctc

SEQ ID NO: 212228 - DNA, 576 bp, Homo sapiens
ttgtcctctcattgccccatgtggctgaccactcctttcttcctcactctccccccatatggctgccatgtcacctctctctccttctcttcctccctgtcctccagctcttcatttgtcagcttgtctagctttcctggtgactcaagctccccactatgttcactacttgagcttctctgtagcattctttctggttctctcagcaacctcctcccgcactgtggcttccatcatcacctctctccagacacaagcttgcacctcggtttggacctcccaggtccccattcccatctagctgctggaagcatctatgtgggtgccccctgatccctcaagctttgtgcatcccaaagtgtgccctcccaagsctgagcctccttctagattggttaatgaggcaaaaaatttctgtgcccttcatccatggctctcagagctggggaattctggcagggaattttggccgtgctcctcatccctctgccaggaaatacccaccttggacctcactcaaatcgtgattccaatttccttgactttctccttgctgctcatattagaatgagtcac

SEQ ID NO: 212229 - DNA, 563 bp, Homo sapiens
tggcgaaacagggaggtggagaaagaagttgagagcataaagcagtcattcaatcaacaaagattgatgagtgatgtggcagattgtgttttccaaagatggtcaccacaacatatcccaatccacatgctcttcttagaatgtgacactgagaactttcccatcaagagatggggtttgtgcttcctccccttgaatctgrgtgggtgtgtgattacagcagaagtgacactatttgatttccaagcctaggtcttaaaaggtgacaccacttttgcctaccccacttgagatcttcacacttggaagtcagcagccacactgcaaggcagcccaaactagcccatatggagagagcacctggaaaggccacatgtaggtttctagctgacagtccagctgcggcccagctgacagccagcatcaacccccagacaggtgagtgcgcaagccttcagacgattccagcaccagacattctggagtggaaacaagctgcccctgctatgccttgtccaaattcatgacacatggaaaccttgaaggattttttaaaaattgct

SEQ ID NO: 212230 - DNA, 603 bp, Homo sapiens
gagacttaacttgaaactactcatctacagctaatagacagccttctccatccttcagccttcctgacactttgtttcttcctctgacatgacacttagcttattcctcctcatgggatagttatttctgtcactgtcaatgccatcactagacatggaactcttcgagggcagggatggggcttcattcagctctgtctgccctggcaaagagcagatggttagtacattgggttgaataaaaatgtcatagataacgaagtctgtgttaatccagaggacatgagacacattctgcttcccttaaagtgaggtcctcgatgcatgaagatgaaactgcaccaactaggaaaggycaggagaggtactaacacatctgctatcagggaactcggaacattacagctgggggcgagggtcttggagaagatcagaacatttgaaaaaagagctgtacaaagaaaagggggagagaacagatgagagaagtgcagcttgtgtgtgcgggtggggagtgagggagagtgctgaggcaggatgaccttgtactttatttaatgaccctgaagtaccccaggatgctgctccaacctctcctatggc

SEQ ID NO: 212231 - DNA, 488 bp, Homo sapiens
ttatcatttaagccagattgagttatttttctgacactgtgacttaaaccatccctaactaacatagactgcaatgttgtaagtatgggtccccaaacgtggaactggctgaaggcagtagctaaggtcaaagtcagtggggatacctctagttaccaaaattgcyggttacccccatggcctgttatatattctaagtccatcttcgagccaaagttttatcaaaaacgaaaattcagggtattggagactatttcttgcatcagtcttagtaaggcccactaagaaagaaattaacttactttgaaactgattcttctgatagcagagaaggggaaaaaaagtagttttttaaagaaatgtactttctgcttgctgcctgaaaaccaagctaattaagaatcctgtgatctggagcttgcaggactagaagagcagaattttccagtccaagctaatgttaatataagcaaaaatgaggaggtgag

SEQ ID NO: 212232 - DNA, 595 bp, Homo sapiens
taacctttttagagcctaggaccactcaggtcttgctctgaccctggttggagctcatccttcgggaaggagacaaaagcccccaaatttaccagagaatggaagaaagatgggatgatccctcctcagcttttgcattcctccatttttgatccttctaccccttgactcataatttagacacaagtaaatgtctcgcctgcttgggtttgaggtaaacgttagttcagggttaattggatgagctgaaacactctgagcatggagagaaaggatctagtcatggccaaccrctaatcccacagcccccgccactgcatggtagctgtcctgccctgagattaatccccaatgacagttttttcctgatctcctccactgtgctgaattccattctattctgaagcttggctctgacaccctctttggggtatgtggaggctcagggacccagtgagctgttggtagcaatattagacattgacttgtgaacatgttacttgagctttggagaaagtaaagaaggatattggaagaaagctgtattggacccagctggatcactggactccagcaagtcaggctggagaggagg

SEQ ID NO: 212233 - DNA, 514 bp, Homo sapiens
gtagcaatattagacattgacttgtgaacatgttacttgagctttggagaaagtaaagaaggatattggaagaaagctgtattggacccagctggatcactggactccagcaagtcaggctggagaggagggagttggcacgtgaagcaaaaagcttagaaggacccatgaggtggggactagggcccctatatatggactttgggtggccttgaaataatatgcagcatattagatatagatctgctccttgaaagttagattgtatggccaaaccscaaacccaaatatggatttcttacttctaggcatttgtctctcatggttctttctatccatggagtttgcaaactccactttctcttctgctttctctctcctgctttctctgtctgcttttcaagatttctgtcaaatgctacatcttctccgatcctcccagaccaaagtggcccatctccacctcctctgacacaccacagcctatgacaccctcattccacatttattgggc

SEQ ID NO: 212234 - DNA, 552 bp, Homo sapiens
cacagcaaatccaatggtgcttgaggtgtcagtggtagataaggatgctgtttggagcctttggcaggttcccataggtgaatcacagcagaggcctccaggattttggagcaagtccctgccatcttgttcagataactactctccttttgagagacagctcttggcctgttactgggctttggtggaaactgaacgtttgactatgggtcatcaagtcaccatgtgacctgaactacctgtcatgaactgggtgttttccaacccatctagccacaaagtgggtcatgcacagcagcattccatcatcaaatggaagtggtatatatgtgatcrggcttgagcaggtcctgaaggccaagtaagttacatgaggacatggctcaaatgcccatggtctccactcctgccaccctgccttctctcccccagcctgcaccgatgggcctatgatcagttgacagagtaaaagaagactagggccaggttcacagatggttccacacgatatgcaggcgccaccagaaagtggacagctgcagcactacagcc

SEQ ID NO: 212235 - DNA, 552 bp, Homo sapiens
cacagcaaatccaatggtgcttgaggtgtcagtggtagataaggatgctgtttggagcctttggcaggttcccataggtgaatcacagcagaggcctccaggattttggagcaagtccctgccatcttgttcagataactactctccttttgagagacagctcttggcctgttactgggctttggtggaaactgaacgtttgactatgggtcatcaagtcaccatgtgacctgaactacctgtcatgaactgggtgttttccaacccatctagccacaaagtgggtcatgcacagcagcattccatcatcaaatggaagtggtatatatgtgatcaggcttgagcaggtcctgaaggccaagtaagttacatgaggacatggctcaaatgcccatggtctccactcctgccaccctgccttctctcccccagcctgcaccgatgggcctatgatcagttgacagagtaaragaagactagggccaggttcacagatggttccacacgatatgcaggcgccaccagaaagtggacagctgcagcactacagcc

SEQ ID NO: 212236 - DNA, 582 bp, Homo sapiens
aattattatcatttaacttgaagggtttacataatgttgttattgatgataagaaatatagaaaatttttaattgatgactgtctccacaactaaccatgagatttcagccatttcctataagatacacatatgtagacctggctcaatttgtttattcatccttcttttaaaatgtatattcataaagcacctggtatacactaggttctgcgtgaatgggcaaagataaataatagatgttctccatcctgatgattcagatgaggagaggagattaaataaccatctaaccacatcagcaagcagaatgggggatgtacctccaagaacagcatggtgagggcactaagctgagagcctgcrgagatgagatctgtcctgcatccaaatcactgtgtgcacatgagaaagtcactggtcctttctgattcccagcttccattcagtaaatggccagtttagacaaatcaaatggcagatacatagcatgcaagctgcactgcaacagaaactgcacgttggtcacagcgtatcttcccaatgtgcctggatatggcctcagaatcatttccaacacaga

SEQ ID NO: 212237 - DNA, 487 bp, Homo sapiens
cagcttccagaatgaaagtggctgaggctggcatgtctgtgccaaccccaccaagttctggtgccaagtgcatcattgatctcagagtcaaatccctgagtgacctggaagcaacaagacactgttacgtttgtggcagattaggaagcagggacccaggccctagggacgtcccttcaattcctgaacctacccctacccaagcaaccacactctgggactcttcttaacatgcatttcaacttatctagactatttaatttttgtaatgtatttctatgcgttcttgactgcttgtcagaagggacctcacaacaccctctacgccccttcctcagcccctccagtcacacagcggctgacacatattcaggcacatggctattctttgyggctctcatacaaggtgggtggctacgttcagctttttctagaggacattgttccaaagctgtcaaccaacaaatatttatagaacattatttac

SEQ ID NO: 212238 - DNA, 497 bp, Homo sapiens
ggctggcatgtctgtgccaaccccaccaagttctggtgccaagtgcatcattgatctcagagtcaaatccctgagtgacctggaagcaacaagacactgttacgtttgtggcagattaggaagcagggacccaggccctagggacgtcccttcaattcctgaacctacccctacccaagcaaccacactctgggactcttcttaacatgcatttcaacttatctagactatttaatttttgtaatgtatttctatgcgttcttgactgcttgtcagaagggacctcacaacaccctctacgccccttcctcagcccctccagtcacacagcggctgacacatattcaggcacatggctattctttgtggctctcatacaaggtgggtggctacgttcagctttttctagaggacattgttccaaagctgtcaaccaacaaatatttatagaacattatttaycatttctatgttcagctatgtaaaataatgaattt

SEQ ID NO: 212239 - DNA, 564 bp, Homo sapiens
ctgtcaaccaacaaatatttatagaacattatttaccatttctatgttcagctatgtaaaataatgaattygttttgagtaaaccagtcttaaactgttggtgatcctattggctttgttttgtgacaaagcaaggtggtgggatgggaggggaagagtagaaaactctgaagaggggaagtcaacagaaaggaaatgacggtaatgcctctccccaaataatgaaacactactttataaaacaaggattattttataaaatattatgcacccagtgtataatgcatatgcactaggtaaattcatgcttgatatatatattcatgcatttaagtttatttttctcatgggtcaagctctcttaaaaattattcattgtccttcaaattctaacaatgtctccaagggctaagtattattaatattcccatttgatagaagaggaaatgttggctcagagggttaaaacaacttgtccaaggccatgcagcaaataaatagtgtaactaatatgcaaacctatgagcattccagaaccacctgggatggtcgtttaaaatgctc

SEQ ID NO: 212240 - DNA, 564 bp, Homo sapiens
ctgtcaaccaacaaatatttatagaacattatttaccatttctatgttcagctatgtaaaataatgaatttrttttgagtaaaccagtcttaaactgttggtgatcctattggctttgttttgtgacaaagcaaggtggtgggatgggaggggaagagtagaaaactctgaagaggggaagtcaacagaaaggaaatgacggtaatgcctctccccaaataatgaaacactactttataaaacaaggattattttataaaatattatgcacccagtgtataatgcatatgcactaggtaaattcatgcttgatatatatattcatgcatttaagtttatttttctcatgggtcaagctctcttaaaaattattcattgtccttcaaattctaacaatgtctccaagggctaagtattattaatattcccatttgatagaagaggaaatgttggctcagagggttaaaacaacttgtccaaggccatgcagcaaataaatagtgtaactaatatgcaaacctatgagcattccagaaccacctgggatggtcgtttaaaatgctc

SEQ ID NO: 212241 - DNA, 564 bp, Homo sapiens
ctgtcaaccaacaaatatttatagaacattatttaccatttctatgttcagctatgtaaaataatgaatttgttttgagtaaaccagtcttaaactgttggtgatccyattggctttgttttgtgacaaagcaaggtggtgggatgggaggggaagagtagaaaactctgaagaggggaagtcaacagaaaggaaatgacggtaatgcctctccccaaataatgaaacactactttataaaacaaggattattttataaaatattatgcacccagtgtataatgcatatgcactaggtaaattcatgcttgatatatatattcatgcatttaagtttatttttctcatgggtcaagctctcttaaaaattattcattgtccttcaaattctaacaatgtctccaagggctaagtattattaatattcccatttgatagaagaggaaatgttggctcagagggttaaaacaacttgtccaaggccatgcagcaaataaatagtgtaactaatatgcaaacctatgagcattccagaaccacctgggatggtcgtttaaaatgctc

SEQ ID NO: 212242 - DNA, 562 bp, Homo sapiens
tttatagaacattatttaccatttctatgttcagctatgtaaaataatgaatttgttttgagtaaaccagtcttaaactgttggtgatcctattggctttgttttgtgacaaagcaaggtggtgggatgggaggggaagagtagaaaactctgaagaggggaagtcaacagaaaggaaatgacggtaatgcctctccccaaataatgaaacactactttataaaacaaggattattttataaaatattatgcacccagtgtataatgcatatgcactaggtaaattcatgcttgatatatatattcatgcatttaagtttatttttctcatgggtcaagctctcttaaaaattattcattgtccttcaaattctaacaatgtctccaagggctaagtattattaatattcccatttgatagaagaggaaatgttggctcrgagggttaaaacaacttgtccaaggccatgcagcaaataaatagtgtaactaatatgcaaacctatgagcattccagaaccacctgggatggtcgtttaaaatgctcacaagagaattgggt

SEQ ID NO: 212243 - DNA, 562 bp, Homo sapiens
tttatagaacattatttaccatttctatgttcagctatgtaaaataatgaatttgttttgagtaaaccagtcttaaactgttggtgatcctattggctttgttttgtgacaaagcaaggtggtgggatgggaggggaagagtagaaaactctgaagaggggaagtcaacagaaaggaaatgacggtaatgcctctccccaaataatgaaacactactttataaaacaaggattattttataaaatattatgcacccagtgtataatgcatatgcactaggtaaattcatgcttgatatatatattcatgcatttaagtttatttttctcatgggtcaagctctcttaaaaattattcattgtccttcaaattctaacaatgtctccaagggctaagtattattaatattcccatttgatagaagaggaaatgttggctcagagrgttaaaacaacttgtccaaggccatgcagcaaataaatagtgtaactaatatgcaaacctatgagcattccagaaccacctgggatggtcgtttaaaatgctcacaagagaattgggt

SEQ ID NO: 212244 - DNA, 562 bp, Homo sapiens
tttatagaacattatttaccatttctatgttcagctatgtaaaataatgaatttgttttgagtaaaccagtcttaaactgttggtgatcctattggctttgttttgtgacaaagcaaggtggtgggatgggaggggaagagtagaaaactctgaagaggggaagtcaacagaaaggaaatgacggtaatgcctctccccaaataatgaaacactactttataaaacaaggattattttataaaatattatgcacccagtgtataatgcatatgcactaggtaaattcatgcttgatatatatattcatgcatttaagtttatttttctcatgggtcaagctctcttaaaaattattcattgtccttcaaattctaacaatgtctccaagggctaagtattattaatattcccatttgatagaagaggaaatgttggctcagagggttaaaacaacttgtccawggccatgcagcaaataaatagtgtaactaatatgcaaacctatgagcattccagaaccacctgggatggtcgtttaaaatgctcacaagagaattgggt

SEQ ID NO: 212245 - DNA, 568 bp, Homo sapiens
aagcagaatgataaacaaatgagtccagactgggaaaaagctacaaacagtattattccatttacataatagaatgtataaggcaaaactatagagacaaamgtcagatctggtttccaaggactggggataggagaaagtgactacaaaaggaacacaaagggactttatggagtgatgggaatgttatcaattttgatggtagtggtggttacatgactgtccatctgtcaaaactcatcaagttgtatacataaaaatgattaactatatctgtatttaaattatatgtcaataaacctgactccctgccactcccccaacacacacacacacacacacacacacacacacacacaaaatcagaggactgcagatatgggccggggggtgggtaaagcaaattgaactaaactccaaaaagtgatgcactgaactttaactttcaatagctatgtctgagttaacatgacagattagaattccaaggagccccaaatgcagagcaagactgtacccatctgccaactctttcctacaagtccccaccaagagcatcattagcata

SEQ ID NO: 212246 - DNA, 580 bp, Homo sapiens
actaagggctgggggcaacagagctgagagagaamcccttgagttgtgttgggcctccactaagttcaaaacaactacattccagaggcagggaacagaaaatagaaaggagttttgtctattcaaggttcaccaaattttcagctactgaaggtagagggcatggcaggaaatctgagataaatccatccaaggcactctaggctactgaaaataggggacaggaaagctaagaggaatcattctggaacacttgggccttcagctactgaagtcaggtgcaggagagtttaaagaaatccctctgggggcattccagccctttgaaaaatttaaagtagctgccttccaaaatccgtggtaaaagcaaagcaaaatctcttgaggtgcagaaagctaggaacaggactataaagggaaattaccagtgaccctgatgggcaaatagacagtaaattttttttaatttcctatggttcagaaagctggcaacacaaagagatcttaagaatcttgctaatactcaggtcccaagccctgctgaagggaaagtcttgagcctgtcctcaaaacgtttaaa

SEQ ID NO: 212247 - DNA, 580 bp, Homo sapiens
actaagggctgggggcaacagagctgagagagaaccccttgagttgtgttgggcctccactaagttcaaaacaactacattccagaggcagggaacagaaaatagaaaggagttttgtctattcaaggttcaccaaattttcagctactgaaggtagagggcatggcaggaaatctgagataaatccatccaaggcactctaggctactgaaaataggggacaggaaagctaagaggaatcattctggaacacttgggccttcagctactgaagtcaggtgcaggagagtttaaagaaatccctctgggggcattccagccctttgaaaaatttaaagtagctgccttccaaaatccgtggtaaaagcaaagcaaaatctcttgaggtgcagaaagctaggaacaggactataaagrgaaattaccagtgaccctgatgggcaaatagacagtaaattttttttaatttcctatggttcagaaagctggcaacacaaagagatcttaagaatcttgctaatactcaggtcccaagccctgctgaagggaaagtcttgagcctgtcctcaaaacgtttaaa

SEQ ID NO: 212248 - DNA, 506 bp, Homo sapiens
gtagtggtgcaaacatggctcactgcagcctcgacctctagggctcaagcaatcctcccacctcccagcctcctgagtagctgagaccacaggtgtgtgccaccatgcctggctaattttataattttctgtagagatggggtctccctgtgatgctcaggctggtctcaaactcctggcctcaagcaatccctccaccttggcctcccaaagtggtaagattacaggcatgagcctggacagttctctttaactctcaaatgcccacatcagaaaagacagtacaaatgtaagctgattttcctatttctctttaggggcactgtgttaacaacagtttctaacttaatgaatgccaaytgtgagccaatttaaaccaaataaaccaggccaagtcattctattacacagtagatcagagcaaaacccattctagcctggaccagtggcatccaaacaataacctaaatgcctggggagaaaggccaatttaattaacattccac

SEQ ID NO: 212249 - DNA, 474 bp, Homo sapiens
ttagtacttggcattcccagccttactttttgtctttgctggaaatatattccatgcggggagggaaatgggaatgatcttactttatagatgccacttcatagaaagcattggcactgggattgccagcctttcccaaagcagtgtgtgttccttcatcattctgctgatgatgatcatttatggagcaatttactatgtgaggtacatgataaccccagtctcctttaatcctcgtgaaaccctatgaagcaataagggactattattatccacactttatacatataaatgaagaaagtgaggctttgtgaagttgaatgatrttcccaaggtcacccagttagtaaatgctgaagctggagtcctcagtcttagttattaatgtaagcttgcttttcaggacagagagggctttggaggaccaggaagggctccaattctgaggcaaaggctgtgaaacaccggggtcag

SEQ ID NO: 212250 - DNA, 597 bp, Homo sapiens
agaattcctaagaactgtggggtcaaagggtatgcgcacttgtactcttgattgctgctgccaaattggtactgccagatgaccacaccaacttcagcatattgacaatgatgactttgcatctgggaaatttaaatgtgaggggagaagcagtggcccstgggtatctctgtcctctctgggagggggccaaggggctctgggatggagccaagactcccagttgccctggagctccatgggaaaccttctgtggctgggccttggcctcccagctggtgcaaacatgtgcctgtgtccgccctctgcaggttctccaccaagtcctggctgtcgcaggtctgccacgtgtgccagaagagcatgatatttggagtgaagtgcaagcattgcaggtgatgggaagaggagtgggggtggggggagcagacacttttagttcagtaaatcaaatgcgcttccctatgcttgctattcatagtcctattcagcacaccagggagtgatcaggtctcttcagggagactaagcaagttactcctggaagaagggaatacttgaggtgggctttgaaggatgaatagaagtttacaaggt

SEQ ID NO: 212251 - DNA, 570 bp, Homo sapiens
attgctgctgccaaattggtactgccagatgaccacaccaacttcagcatattgacaatgatgactttgcatctgggaaatttaaatgtgaggggagaagcagtggcccgtgggtatctctgtcctctctgggagggggccaaggggctctgggatggagccaagactcccagttgccctggagctccatgggaaaccttctgtggctgggccttggcctcccagctggtgcaarcatgtgcctgtgtccgccctctgcaggttctccaccaagtcctggctgtcgcaggtctgccacgtgtgccagaagagcatgatatttggagtgaagtgcaagcattgcaggtgatgggaagaggagtgggggtggggggagcagacacttttagttcagtaaatcaaatgcgcttccctatgcttgctattcatagtcctattcagcacaccagggagtgatcaggtctcttcagggagactaagcaagttactcctggaagaagggaatacttgaggtgggctttgaaggatgaatagaagtttacaaggtagaccaaggggaaaagagaattc

SEQ ID NO: 212252 - DNA, 394 bp, Homo sapiens
ctatgtaaatggttgtgatactgtattatttagggaatgatgacaagaacaaagtctgcacatgttcagtagagtcatctaatctcttttccgaatattttccatccgctgttggctgaatccacagatgcagagctcccagatacgagggccaagtgtgctttgagagtaggatggtgaggtggctaatgagtacaagggagtaagtgtcagtcaggagggccctgcactggggcatctggatgccctrtctcaggacttgaggctccaggtttggatggcacaggcaggctcagccaaagtcaaagccctccccttgaatgttctttttatcccaagctctttctggcccctggaatttggcatcccctaggatgccttgggtggaatgacg

SEQ ID NO: 212253 - DNA, 471 bp, Homo sapiens
ggagtggctgagacctctgttgcaactggagtgcagtcactctgtctggccaggcctgccagcttcaccctctcacaggtgctggtcctgagggtacttcccaaggaacttccttaaccagtgacaactagggtagattccttaactatatgctttttcagggcacatatcgcctttgtaagttttacatccatttgtggtatctggctaatgtctgcctgtcccatcaactgtaatagccacagagtgggagctctatctgattttattcaccattgcattctgccatgctggcatgcagtttaaaaatatttgtagagtgaacaaacaattttattacccatctaatctaatcccttaggaggccatcagctttacttagggctgcagaatgtctcattcattcattcrataaatatttacaaggagaagctggattcctacctctcaacaccaaaacaattccagatg

SEQ ID NO: 212254 - DNA, 450 bp, Homo sapiens
accttcagttaaatcagtcaagaaatgcacggagccaccctggagatatacattctttttattgttatgatgtacacctgtgcacattcattcattcattcaacaaatatctactgaacccccaatatgtgctcagcactgtgcccaactctagggatacggcagtaaacagtagattgtgttctagtttatagaagractttccatctatttcagctcacagtaaactgtgttgtcttcctaaggctagaaagggtgcttaaggtgggtgctttctcccagctagaaaacaccatgggttccttgttggcctcagagtgaagtatgaattcttgaaccagggctacaaggtcctgtgttcccgggccctgctgatgtctccaagcttatctgctacccaaggctgttttgagtgaatgtcccggtttgaagaatcgatgaaaataaaaa

SEQ ID NO: 212255 - DNA, 395 bp, Homo sapiens
gatgccgaggcatggatagagcrgcgctgcgcgcggcggcgatgggagagaagaaggagggcggtggcgggggggatgcggcggccgcggagggaggcgcaggggccgcggccagccgggcgctgcagcagtgcgggcagctccagaagctcatcgacatctccatcggcagcctgcgcgggctgcgcaccaagtgcgctgtgtccaacgacctcacccagcaggagatacggaccctggaggtaagtgggtcggggaccaggctgggctcgaggagcgggcccggacacctccctccgggccccagtactcctggccgagttgcatccttgagcccgcgtcgccccccttggaggcttcccctccctcctgcactcgctgatgcggcagccgga

SEQ ID NO: 212256 - DNA, 590 bp, Homo sapiens
ctctaactattctagatatacatgcctcatcagatatgcaatttgcaaaattttctcccattctgtgggctgtttttaaactttctacatgatatccttttcagtacaaaagtttttaattttgacaattttcaatttktcatttttttttctttttttaattgtgcttttggtttcatatctaagcaatcattgctaaattcaaagtcacaaagatttgtagttatgtttccttcaaaagttttacagttagctcttacgtttagcttttagattcattttaagctaatttttgtatatggtgtgagttagtggtccaacttccttttgcacatggatatccagttgtcccaacaccatttattaaaaaaattactctttctccattgaaatatcttggcactcttgctgaaaatcagttgatctaatacccaatggtttatttttggactttcaattctgttttattaatctacatatctttcctatgccagtaccgtattttcttgattactgtagctttgtagtaaattttgaaatcaggaagtgtgagccctcctactttgtctttttcaacattgttttagata

SEQ ID NO: 212257 - DNA, 545 bp, Homo sapiens
atacataagcatttaagacattgctttgcttcaaatccttgaataaatattaacttattcatcatctcattacccctgagagttgggaaagcagagcccaaatagaggttagaatgttataatcccatctataaattacagtgcttgtcatatttactaaatgaaagctttaaggttttaaraagcttttctaaatgtgatctctccatccctatcataggatttgctcaaaatggatttgcaaagagaaaaaaaatttaatgtcacactgccatgataagtcaaccaaccatctcatatatcaaaggagagaggcagagaaagaaaaggaggaggataaagaagaggaggaagaggacgaaaggaaaaccaagaggaggagaagccacttcttactttggattaatgtgaaactaaatagtttactacattttaagtgggaaaatgttagttgaaaagatatttgtcaaccacaaacatttgaaagggaagcattccaaagattttcactgtttatgttcaaattacaacatgtgcagaaagtt

SEQ ID NO: 212258 - DNA, 365 bp, Homo sapiens
ctcaggagcaacatctatgtcagtctcaaactggggaaatcccatatcacaaggaaagtgcaaattcagcttccaagcctaggattggcatggccatggggcttcattttctcgtgggaaactttcctttcccaccctgctcttagggctgaggcaagcctctttgctgtttccctggtgggtaggtggactttgtccagttcctttatactgaggttgtagcgctgtaggactctagcttgatstagaggtctcagccgccactgtcctctttgcatggcccactcttgtatcttgtcctagtgtagatgggagggcctatttcccagcatcatctgagcccctctgcttttcccaccccaagg

SEQ ID NO: 212259 - DNA, 487 bp, Homo sapiens
ttttcttcttcaaggagccctgggcaaccagctcaggagcaacatctatgtcagtctcaaactggggaaatcccatatcacaaggaaagtgcaaattcagcttccaagcctaggattggcatggccatggggcttcattttctcgtgggaaactttcctttcccaccctgctcttagggctgaggcaagcctctttgctgtttccctggtgggtaggtggactttgtccagttcctttatactgaggttgtagcgctgtaggactctagcttgatctagaggtctcagccgccactgtcctctttgcatggcccactcttgtatcttgtcctagtgtagatgggagggcctatttcccagcatcatctgagcccctctgcttttcccaycccaaggccactgctgcatccatttggacatcctctgcctttctggaacctggtcatttccgtattcttggaattcttcattatttctcatgagctta

SEQ ID NO: 212260 - DNA, 461 bp, Homo sapiens
ttttacattaatgtttgcctagggttactagttcacaacaaaatgtgaaaamaaaaatgctagtacttgctgacagggtcatggaggaatttctgaagagaacatctgtcagagggaagactcgccttccacagatgcagcacagccttctttctgtgaagacacgggatttctgtgaaatcctactggggatttcacctactgggtgaaggacctactgggggcttagtaggtcctgaatatcgggctgtggtgatggtggtggaagcggaaatgcaagcccccacagttacttttatcagtgaagtagaaagtcattttattctcaaaggaaaatagaaagctcagaagcagtatagaatgtaaaaggaaaagaacggaggaaaggaaaaaggtcttttaaagaagggtcactgtggagtgtgaatcagattcttagtgaccttaaagaggtgtgaatt

SEQ ID NO: 212261 - DNA, 461 bp, Homo sapiens
ttttacattaatgtttgcctagggttactagttcacaacaaaatgtgaaaacaaaaatgctagtacttgctgacagggtcatggaggaatttctgaagagaacatctgtcagagggaagactcgccttccacagatgcagcacagccttctttctgtgaagacacgggatttctgtgaaatcctactggggatttcacctactgggtgaaggacctactgggggcttagtaggtcctgaatatcgggctgtggtgatggtggtggaagcrgaaatgcaagcccccacagttacttttatcagtgaagtagaaagtcattttattctcaaaggaaaatagaaagctcagaagcagtatagaatgtaaaaggaaaagaacggaggaaaggaaaaaggtcttttaaagaagggtcactgtggagtgtgaatcagattcttagtgaccttaaagaggtgtgaatt

SEQ ID NO: 212262 - DNA, 544 bp, Homo sapiens
ctgtaggagtgcaatttgaggtcaaaatacataagcatttaagacattgctttgcttcaaatccttgaataaatattaacttattcatcatctcattacccctgagagttgggaaagcagagcccaaatagaggttagaatgttataatcccatctataaattacagtgcttgtcatatttactaaatgaaagctttaaggttttaagaagcttttctaaatgtgatctctccatccctatcataggatttgctcaaaatggatttgcaaagagaaaaaaaatttaatgtcacactgccatgataagtcaaccaaccatctcatatatcaaaggagagaggcagagaaagaaaaggaggaggataaagaagaggaggaagaggacgaaaggaaaaccaagaggaggagaagccacttcttactttggattaatgtgaaaytaaatagtttactacattttaagtgggaaaatgttagttgaaaagatatttgtcaaccacaaacatttgaaagggaagcattccaaagattttcactgtttatg

SEQ ID NO: 212263 - DNA, 411 bp, Homo sapiens
atttctcatcttcaaaaatggaagagatgacttaagaagtttatttgaggcagtaaattctgtaattctcataatcagcaccaaacgacagatctttggctaaagttaaatgactttggaataagctattttctggcccatcccacctttcttttcaagcagaacagagttatgcatatatgaaaattctcatactcctcaggcacaaatccgatctttatttcagttctccaggccactaagccaagtcttcacagccaggccatgtggagtgacgggtgayaattaggctgtgaccaacagctacatttcctcttgaaacaaagggagctttgcaaagtacaccagacatttactagatgaaccagtctttgcagagaagtcatagcattttgctttcacatagataca

SEQ ID NO: 212264 - DNA, 590 bp, Homo sapiens
ggagttcttgaatgcaacttggaagggaaagaatgaggaagatgaaacagagccaacacaggatgggaaagttcaggatgctgcctaggccaggagtgctggtgataacatccctagaggtagaaaggccagaagctctttctgagcggcagcagcaaattttaagttgctttcatttttaagatataaatgcttctatatctgcaaactttaatactactgcatttgtgggatcagcctgtgtttaaaccaaggaaaagtgctgaatttcaatttcatgtctccactgagccactgtggagagaagacaacccaatcagcatggtggaaagttttctcacayagcacacatgcagtagaagcagaatgctggaatcagaggtaagcacaaaagcataagacacctatgaattcacaaaattctgaagaaggaattgggcatttaaaagttttattaaaaagcatttaagtcatgcaaaaaaataaaaggataaatacaataaatttccaggtacacacaccagccagcctaagaaacacattatcaatatatttgaagctccctgtgtttcttcaatattgtttccctc

SEQ ID NO: 212265 - DNA, 557 bp, Homo sapiens
agccttttggaattagcaaaaccgaggtagagccaactagcttttgccccaaatctgaagtgtagagttttataaaccaaaagaaataatttccctcatgttggaaaatgggagggaggtgagggggagagagaggtgggacacagaactacaagatgaaggatgcgaagaaggaaaagtcagaaataagatgaattcagaaccctttaagctgcatggccctcctcagtgtggtacaagggacaagtcaatcagatgaaataaaaattcccagccctgatctgcattgctccacagtgtccactcaatctttaagcaaaayaagtttatgaatcttcctttagttcactttgtgtccggtctgaggagggacatactcagtctctgaccaatatacagagtgcctgcaaagtagggttaagcagccccatggtctaccttgctgtgaatttcaaagtgcatccatgtgctgcagagaaagaaccacaaacaagaggccttctgggcttcctgctctggggagctttccctggcagcagtggggataaaagatcttt

SEQ ID NO: 212266 - DNA, 198 bp, Homo sapiens
  misc_feature (1)...(198): n = A,T,C or G
nnnnnnnnnnnnnnnnnnnnnnnnnnnnnnnnnnnnnntgtcagtcaaatttcagctagaccctcctcctgtcccctcaagacccagttaagattggctccagaaaatttttaaaaagtggccctagactattcaataaatagagttagaaatttggytacccgttcgaaaaagaaaaaagaaatctttacctcacac

SEQ ID NO: 212267 - DNA, 548 bp, Homo sapiens
gaaatggattttccccaagagcttccagaagaaacacagcattgccaacccaatttagagttctgacctctagtattgtaaaataataaatttatgctgttttatgccatgaagcttatagtaatttgttatagcagcaataggaaactaatacgccattgtaagcctgtgtatttgattaattttttttcctgtataatttttttttgcatttaagtaaatattctgagaaggggtctataggcttcaccagatgtaaaagggttgtggcacataagaggtctgtcccatgccattgttaggatcctgttggcagtggtgggagtgcctgaaagcatttgggttggaaaatccatcccagagaaccatgmccctatgtggtgggtcacaagatctgaactggagtgtgggagggaggggccagcaggagggcaccctgtgaatacacccaggttcaagctcagggttctgctgtctggtcctgccagcctggcctggcttggccttggaagggctcagtggccctggggaatccagtgctgtcttga

SEQ ID NO: 212268 - DNA, 451 bp, Homo sapiens
ctgcagccccttccgcttcccacccaaagcaggaggctcctctcccctcctccccactccaggcaaggaccttagggtggccaccacatctggtgagggttccaaggactctgtctttgaccacagsctggcacaggagttaaattcaagcccttctcttggacttgggtagacaccctggagccttggggccagctactgacatcttgtgcctcattgattgcctgcttgggtggctgggtgccagatacatgcctaccaaataaggttggggtcagatccacttctgggtccccagcacccagccctgttcttttacacataatgggtgctcaagaggtacgcgtgaaatgaaaataaaaatacacaccctttgctaaccactttgcttcactgataggtacccagagtcgtgagtgtgaagtggggggtgaaggagaggggatcaaga

SEQ ID NO: 212269 - DNA, 554 bp, Homo sapiens
gcagtgccaaggggaaatgtggggttggagacccaagacagagttctcagcggggcactgcctagtggagctgtgggaaggactccaccatcctccagaccccagaatgttaaagccactggaagcttgcaccctgcacctggaaaatctgcaagcactaaattccaacctgtaagagcagatgtgggagctaaaccctgcagaaccacagggtcagacctgcccaaagccttgggaacccaccccttgaaacagtgtgtccgggatgtgggacatggacycaaaggagactattttggagctttaggatttaacagctgccctgctgggtttcagacttgcatggggcctgtagccctttcttttgactgatttatctcttttggaatgggaatgtttacctaatgcctatatccccacctgatcttgtaagtaaatgatttgtttttgatttttcaggctcataggtaaaaggaacttgcattgtctcaaatgagactttagaattttaagttaatgctggaataagctaataatttgggggattattggaa

SEQ ID NO: 212270 - DNA, 590 bp, Homo sapiens
gtcatttactaaatgccagccctggggtgactagggcacttgaacaaaacttccagaaattgaaatcatttccagatgtctcctctacacaactttacttggaggtggatagctatcaatcactgtccctcatttgttaatatggtctcacttcctctaattcctttctgataccatttctcctttcagaaattgccaccattgctctccaccgattcgtgcttcaaaccccaaataaaatcccaattttcaatgaaggcttcttagattattgtagccaccatcagtctcttgtagtgctctgttaaatgtcattttctcaaacacacaactaacatttggtttttaaaatggccatttaccagttttctgttgcacaaaattagctgtttattatacacaatctcgtcctcaataatcattttatatatttaaaatgttctttttgggggctacaggtggtattatattccttttaataactacagggcctagaatacatatgtakatacttatacatttcatgattttgtaaaccatttggaacagaaatgtcaacaacttacatgttctaattgtgtaagagaatg

SEQ ID NO: 212271 - DNA, 447 bp, Homo sapiens
aggggtggctggctttgcaatgccttttactcttacctgtggagccagtgaagtttaatttgcacacctctcacagcaggaggaattgtaggcgttattccacctgtcctaagctcttgtgactttctctatggcctccctgatggaagatgctagaatatgccagattcttttttttttcctcagaagtttcagcagtcttctcagtccctttctctctcactcttcttggaagctcttgtttctagagtagttggtatgtttattttctttgccctaaagccaaaacgtgatacattgcattacctaacaaaccaaatatacagtgtttaamacctttgaaataaatgtctttaaaatatagatgaagactgtaaatagactacttaaaaatcaatttttctaaatgtgagccattatttagtcaatttgttaaagcacgaattc

SEQ ID NO: 212272 - DNA, 551 bp, Homo sapiens
gaaatgagaacaaaagccaaggcagtttggagtaactaaactgctgaagatattgaccattctgattgggtgctgctgctagagttacagggatctatctgatctatctcctatctctctaatcaagactcaaagtcctgaaagggttgaaagggagcctaatttgactaactagatcatgtactagtcaagagggttgttacttgccctttggccagagtagggcagggtgttttggtatgcagtctacaataaggcaacatataataagagaaatataattttccaaaacaaaacaggaaatagggttgtagaagagaagtatatgccggtgaccaaggagcaataggcatctgccaccacttcctatcaatatattttaataacttaaggtaggtgagatttgattttttgtactgtaatgagccccrtataagatcacagactaagtaattttaattttatttgtttgacagtgaggggatagtgacaaattttaacagcttaatggtatcggagctatgttgtaggaaggctgcgttacatggaac

SEQ ID NO: 212273 - DNA, 518 bp, Homo sapiens
tatatgatgtgtctttgctgttcctgatgaaaatgtaaaattgatagaagcaaaggttttgtctattttatctgttgcaayattttggagtctaaaccatgactgccacatagtagatattcatagcagatattcaaataaacacaaagatatggataaaggagcattaactataagccaggcttttgttctggacctgccctcttgcaacatgtgttgaatatcaaagagaaaataaacaaccaaaacaaaagccagataattacagatggtgataagtgctgcgaaagaaatgcagtaagtgatgtgttttgcagtgactgagtgagacagcctgaagtgggccgagcaaggcatttctgaggaagtgatatttaacgagagcctgaaggttaagaagttaacctctgaaaaagctaaaggaaaaatacttccatagaggaaatcataaatatccgagtcctgtattaaaaaaaaatcaaatgctatgcagctgacttaagacagtaagactacca

SEQ ID NO: 212274 - DNA, 562 bp, Homo sapiens
tgtctagctcagggtttgtggatgcaccagtcagtactctgtatctagctaatctggtggggacttggacaatctttatgtctagctaagggattgtgaatacaccaatcggcactatgtatctagctcaaggtttgtaaacacaccaatcagtaccctgtgtctagctcagggtttgtggatgcaccaatcggcactctgtatctagctaatctggtggggacttggagaatctttatgtctagctaagggattgtgaatgcaccaatcgtcactctgtatctagctcaaggtttgtaaatgcaccaatcagcactgtgtgtctagctcagggtttgtaaatacaccaatggatactctgtatctagctaatttagtggggacrtggagaacttttgtgtctagctcagggattgtaaatgcaccactcagcatcctgtcaaaacggatcaatcagctctctgtaaaacagaccaatcggctctctgtaaaatggaccaatcagcaggatgtgcgtggggccagataagagaataaaagcaggctgccccagccagcaggg

SEQ ID NO: 212275 - DNA, 586 bp, Homo sapiens
ataaggaaatatctgagactgggtcatttataaagaaaggagaattaattggctcatggttctgcaggctgtgcaggaagcatggtgcttggcttctggggaggcatcagggagcttttgctcatggcagacagaaggtgaagcaagagcagacacttcacatggtggaagcaggaggaagagagggaggggaggtgccacaccttaaaacaaccggctctccagaactctctgtcatgaggaaagcaccaagctatgaaggatctacttctatgaccaaaatacctgccaccaggcatcacmtccaacactgggaattacatttcaacatgagatttgggtggggacaaatatccaaaccatatcagattgtgtctacttctagatagtttcagccaaagttacagatttctgtcttattttcctcatattgtgcatatcaaaagcaaatactgatgggtgagaggtggattatgataattggccagatgtggctcacttgtcaattcctggaataatagggtaggctcagagtccttgaaatcatgaatatgagagaatggtgattccacaatgcaaaattaaa

SEQ ID NO: 212276 - DNA, 466 bp, Homo sapiens
caaatctggtcatggatagatattaatcttccagtattgcttgcacccagaggtttctatgttactctcttctggctaattccacagaacaggaagtcttctggtgtgttaatggaaataattttgccctctaataggaggtaaaagaaggtaagattactttcttagccaaccactgcttcctctatttgaatgaaaccatgctgtcaaagtcaataccttgcctaaggaagggagagtagatatttgaaaggggttgggtttggataaagtcattgaggaactgaacaaatttcagcaactgccaacctctacaattagtttcgtagwgccaagaagaaagttccccttttgccctctgagtcactgaaaatcaccaataaaagacagattaacagggtaaagcaaatacaaatgtatttaatcatactttcatgtgacataggaaccttcagaatgaagatct

SEQ ID NO: 212277 - DNA, 471 bp, Homo sapiens
tgaatttggctaacaacctgaataaccttgaaaacaaatttgtccctggagatgccagaaagtaacacagtaacatgttgattctggctttgyaaaacctggaacagaaaactagctgagcccgggaatgcccagatatctaacctacagaattctcatataataaatttctgttgtttaagtcactgtgtttgtagtaatttgttttggtagcaatagaaaactaataaaaggacagaagtggctgagatgtggaataaaagctggtcttttaacaagtgagccatatagataagacaacataccagcaccaagtgtcttaggtatagatattcggagatgggaagtagaatttggaaggaagaggaaaaatactgtgaaaagtaatttgaagactattgaagacatatttgatcttcattcctgatcttgggtttccaccctgaattacctctttttgtagaatattac

SEQ ID NO: 212278 - DNA, 324 bp, Homo sapiens
gaagtagacccccaacacagcacagctgttctaccaaaacgtggccagactgctttttcaagtggttcctaatcctgttcctcctcactgggtggaacctctcaactaggctctccagccacttcctacagctgctttgggccaccaaaactgcatacctccctgggacaaagctctcagaggaagggacaagccactgtctttgctgtttcacagccttcactggtgacacctccaggttctgggaaatctgaggtgaccagstactggagcagcccccaagcataaaacagcagccctatggaaaagtggccagagtgtttc

SEQ ID NO: 212279 - DNA, 504 bp, Homo sapiens
atgggttatgtaaacaggccaaatctacaagtaattgrcatcactgaaagggaggggaaggaagaaaacaacttggaaaatatatttcagaatattgtccatgaaaatatccccaaccttgctagagaggacaacagtcaaattcagtaaatacagagaagtccttcaagattctacacaagaagataatcaccaagacacataatcattatgttttccaaggtcaaaataaaagaatgttaaaggcagctataaggaaagggtgagtcatctacaaagggatccccgtcaggctaacagcagacctctccactggtaccctacaagccagaagagtttggggttttgtcttccacatccttaaagaaaatagtcttcaaccaagaatttcatatctagccaaactaagctcctaagtgaaggaataatacaatccttctcagataagcaaatgttgagggacttcattaccaccagacctgccttacaagagatcttgaaagg

SEQ ID NO: 212280 - DNA, 504 bp, Homo sapiens
atgggttatgtaaacaggccaaatctacaagtaattgacatcactgaaagggaggggaaggaagaaaacaacttggaaaatatatttcagaatattgtccatgaaaatatccccaaccttgctagagaggacaayagtcaaattcagtaaatacagagaagtccttcaagattctacacaagaagataatcaccaagacacataatcattatgttttccaaggtcaaaataaaagaatgttaaaggcagctataaggaaagggtgagtcatctacaaagggatccccgtcaggctaacagcagacctctccactggtaccctacaagccagaagagtttggggttttgtcttccacatccttaaagaaaatagtcttcaaccaagaatttcatatctagccaaactaagctcctaagtgaaggaataatacaatccttctcagataagcaaatgttgagggacttcattaccaccagacctgccttacaagagatcttgaaagg

SEQ ID NO: 212281 - DNA, 623 bp, Homo sapiens
gggcccttagtatgtaccaggcacaaaagttatttaattaaatactcattgcagtactaaaatacacaatgaactatctgtatgttacaaaataaggaaacagtgtgtcagcaaggaaaattaacttgctcagggtcaccaaggaagaggcagractctcattcacaccaaggtcttcctgactccagagcccacgttctgcccaaacgctgcactccacattcaacaaaaaaatagcccaaaagtagtacgagtatataactcttgttactggcatatggcagaatctgaaaagatacactatgtgtagttaaggtaaattagaaaaacaagatgcctacctcatcaaatgccctctctaggatctccctgttgaattccaattatggctactgagtaatttgctaagcaaatgctgaaggacattccccttggctgccatttctctctttctcagctatgtaagggctgggaaatttgagtccaatggtgtcataccaatactcttcttttctcagtctcagtcccctaaactgcctatcagtcagtacctccttgatttttctttaatatttcactaaatgttgtattttttttcttttaatttaatttaattttatttt

SEQ ID NO: 212282 - DNA, 524 bp, Homo sapiens
tgctaataatagtctctagtgatcctttaaatttctgtgatatcatttataatacctccattttcatctctgattttacttatttgtgtcatctcacttttttcttagtctagataaagttttgtaaatttagtttatcttttaaaacacaaacttttccttttacgttttgtactgttttcttagtttcaattaattatttctcctctgatctttatgacttattttcttctactaactttgggttcattttactcttgcttagattattgattcaaagtcttttactattttaatgtagatatttattgatataaacttccctctttgtactgcttttgctatgtcctatagatttygtacattatgtttccattttcatttgtttcaatacatttttaaatttacttcttttgtattgactcaatggtcattcatgagcagattgttcaatttctgtgtattttatagttttcaaaatttcttttattgatttctagttttattcctttgtggtcagaaaa

SEQ ID NO: 212283 - DNA, 406 bp, Homo sapiens
agggaaatctggaatcagtggtggagaaagttaagattaatcagttctgacctcagaatcacctgctatagcaaggatrataacctgcttaactagccaattcattgtacctcatcttttggggaacaagtgaggacatctagtttttgcaaaaatggaagctccatactgtagcattggagtctgatacaatgggaagctgtaaatgggtctgaattgtacaaagggcagatagttattacccaccttgtcagatcatctgagcctcacctatgtctgaaaatttttgttgtagccccagctattgatgtggcacccaatctttgaaccttctaactcttcattcagatgctgcctgacaatatcttgcctcaggattgctcctcattccacacaaaatattaac

SEQ ID NO: 212284 - DNA, 378 bp, Homo sapiens
aatggctaagaatgagggaaatctggaatcagtggtggagaaagttaagattaatcagttctgacctcagaatcacctgctatagcaaggatgataacctgcttaactagccaattcattgtacctcatcttttggggaacaagtgaggacatctagtttttgcaaaaatggaagctccatactgtagcattggagtctgatacaatgggaagctgtaaatgggtstgaattgtacaaagggcagatagttattacccaccttgtcagatcatctgagcctcacctatgtctgaaaatttttgttgtagccccagctattgatgtggcacccaatctttgaaccttctaactcttcattcagatgctgcctgacaata

SEQ ID NO: 212285 - DNA, 519 bp, Homo sapiens
agttttctgcaattctgtgaagaatgtcaatgatagtttaatrtaaatagcattgaattaataaattgctttgggttgcataactaaccattttaatgatattgattcttcctatccatgagcatggaatgtttttccgtttgtttctgtcatctctgatttatttgagcagtgatttgtagttcttcttgtagagatctttcacctccctagttagctgtatttctaggtattttactctttttgtgtcagttgagaatgtagttcatttctgatttggctctcaactatactgttgttgatgtataggaatgctagtgatttttgcacattgatttttgtgcaaaattttttgatcctgatatttcgctgaagttgtttataagcttaagaagctttggggctgagactatgaggtttattagatatcagatcacgtcatctgcaaacagaaatagttttacttcctctcatgccatttggatgcccttcattttttcttttgcctgattgccctga

SEQ ID NO: 212286 - DNA, 632 bp, Homo sapiens
atacttgatcatggtggataagctttttgatgtgctgctggcttcagtttgccattattttgctgacgatttttgcctcgatgttcatcaaggatattggtctcaaattttctttttcattgtatatctgcgaggtttttatatcaggatgatgctggcctcatagaatgagttatctcctccctttcttaaaataactttacatatattaaaatttcattttgtagaatggaaatctaaatttcaccctaacatagttctctattaaattcatttctttccctttaccatatgatttatataataaagaaaatgagaagtgttacaaagttaataactaagtggaaaagtgaaaaatrtaaataaatgctaatctcatttgtataaaattatcagtgcttgtcttcttcatcctgatcctcattttcttgcttcatcctatgcatagcctattcttcactttcagtcaatttatgttttcacagggttattcatcaaatagacaaattaaaactccggcaagtccctagtttcttcctcctcattatatcaaagtactgctttccctatttctctgaacttttccctttagacagcttcatatttcctattccctaatgtatagatgtagc

SEQ ID NO: 212287 - DNA, 632 bp, Homo sapiens
atacttgatcatggtggataagctttttgatgtgctgctggcttcagtttgccattattttgctgacgatttttgcctcgatgttcatcaaggatattggtctcaaattttctttttcattgtatatctgcgaggtttttatatcaggatgatgctggcctcatagaatgagttatctcctccctttcttaaaataactttacatatattaaaatttcattttgtagaatggaaatctaaatttcaccctaacatagttctctattaaattcatttctttccctttaccatatgatttatataataaagaaaatgagaagtgttacaaagttaataactaagtggaaaagtgaaaaatataaataaatgctaatctcatttgtataaaattatcagtgcttgtcttcttcatcctgatcctcattttcttgcttcatcctatgcatagcctattcttcactttcagtcaatttatgttttcacagggttattcatcaaatagacaaattaaaactccrgcaagtccctagtttcttcctcctcattatatcaaagtactgctttccctatttctctgaacttttccctttagacagcttcatatttcctattccctaatgtatagatgtagc

SEQ ID NO: 212288 - DNA, 632 bp, Homo sapiens
atacttgatcatggtggataagctttttgatgtgctgctggcttcagtttgccattattttgctgacgatttttgcctcgatgttcatcaaggatattggtctcaaattttctttttcattgtatatctgcgaggtttttatatcaggatgatgctggcctcatagaatgagttatctcctccctttcttaaaataactttacatatattaaaatttcattttgtagaatggaaatctaaatttcaccctaacatagttctctattaaattcatttctttccctttaccatatgatttatataataaagaaaatgagaagtgttacaaagttaataactaagtggaaaagtgaaaaatataaataaatgctaatctcatttgtataaaattatcagtgcttgtcttcttcatcctgatcctcattttcttgcttcatcctatgcatagcctattcttcactttcagtcaatttatgttttcacagggttattcatcaaatagacaaattaaaactccggcaagtccctagtttcttcctcctcattatatcaaagtactgctttccctatttctctgaacttttccctttagacagcttcrtatttcctattccctaatgtatagatgtagc

SEQ ID NO: 212289 - DNA, 527 bp, Homo sapiens
atttttaccctttatataggtcagttattgtatttgatagttcttaagaatcgaaatcttttgctgtttctgactctgacagatagtaactggttatctcctgcatttttcaactctttttagttcatattttattgaattcatcaataggagagccaatgggtctgaattgggaatatcttcctttagaaatgttctgtattgtttctgccagaagttaagggagatatttgcttatagctgggatcatagttttatataattttacctgtattattaatttcatcaaaagtactttctcatattctaactacccctgaataaacataatttttratggttgattaacattcataatgcaagtacaacaattaaagtaagcattctgttcttgttggacactttcattgttttactattacaaacaacaacataatgctgttattcattatgtttcacttgaattattttctcatgttggatgtaaaagttactagggcagaggcaatgaagcattctgaggtctg

SEQ ID NO: 212290 - DNA, 576 bp, Homo sapiens
tgtttccctacttgccctctctttttccttctcatttggacagaattcagttaatcatacattgtgttcagggcacattagttcctagaagtctcctcttggttaatttttgaacattggaggattttctgatttttgttgttcttagtgcttcctgacttaattcccatgaggtcagaaaatgttctgtatgaatttaaaacttttgaaatgtactaacactactttatggcccagaagtatatgactaatctttctacattttctgtgtgaatgtgaaataaaaatgcatagtcagaagtttatagatgtagtatcatatataaatcgcaagtttatttcaaatattctctccctgatcatttttatctcacttctccatcaattactgagaattgtgtgttaataattttcactgtaatgattaatttttatatttcttccagtarttattatttttcatattgaagtcaaataactagagacatgtaaattcagaaggctattttgcaattattaatgcagatatactatgtttttttgtggtagttgtatgtgatatcataatttcatcaa

SEQ ID NO: 212291 - DNA, 567 bp, Homo sapiens
ctgctaccgttcccagcctctgatacccaccaatctactctctgtctctaggagatccaatttttcagctcccacatgtgagtgagaatatgtaacatctgtttttgtgttcctggctyactttacacaagataatgacctccagttctttccacgttgttgtgaatgtcaggattcattctattttatggctgaataatatcccatcgtgtatatgtaccacattttctttatccattcagacattgatagatgcttaggctgattccacatcttaactattgtgaatactgcagcaatagatatgaaatgttaatagatatgacttcctttctcctggatatatatgcagcagtgagattgctgaatcatatgatacttctatttttagttatttgaggaaactccatactgttttatagtgactgtactaatttacgtttctaccaatattataccaaggttgtcctccctccacatcctcaacaacatcagttattttttgtctttttgataaaaagcaattgtaacttgggtgagataatattttattgtggttatcatgca

SEQ ID NO: 212292 - DNA, 453 bp, Homo sapiens
ggaatatccttattaccatctttatccttcttgctccttgtcttgcttggggtatttcccacattgggtcctggttaggctcaatctctcgtattagagatgtctcacctagccttctctggaggcttgctggggctattagactcaatcgctcatattagagatgtctcgcctttcctttagccccacctgctggaggctccttgcattcacgcacactttcaacccccagaatatccccaccaccaaggaagtattttgttgtccctgcgacatttcttaccttggtctgtgcacagagttacctggtcgcagttgtatctgaggatcctttcccccaagtcgccagctggtttctttctgcattgctgagagtctgggtttattcatcacactaggtgggtcttgattccttacccctgaggccactgyaacaaggcagcgggcatgcct

SEQ ID NO: 212293 - DNA, 508 bp, Homo sapiens
taaatttgctaaagatcaagtcatggaataattctagagaggatttaatggctctacaaagtaaacagtcgctggccttgaaggacagatttcttgtaagtagaagagttctcgactgagaatcaaacgttctagtggaaggtcaagcttggtcacagactatatatcttttcctctctcactctctggtttcttacccataatgtgaggagccaggtgagcttgtctgccttattcattgcttggtcttactcatgtaactgtgttgtatatacaatttctcaacaaatatttgttgaatgtatgaataaatctcagagaggcattgaatcacggtggtgaaacgtggactctagaattaggaagtcatactttgagtaacagcactatmtcactggatatgtgacctggggtaagcttctggaacctcaacaagcctcagtttcctcctcttgaaattgggataagaataataatatcaaaagtatatgtttttaaaaaggttagc

SEQ ID NO: 212294 - DNA, 583 bp, Homo sapiens
gaattcaaatcattggtaagcctgagtacccaggggccagtctaggtgacaacagtatccaccgctcagggcttacagtgacctgcaggaagagaggaataacagagcacatgctatgaataaatgtggagatcaatttgtggattttaaacttcatgacatgctgcagataatcctttaggtgtatctgtggtaaatggtgccttgctatgttctgaagcaatcaaacatgatgtcctaatagctcaatttatcagttcctcattagcttgtgtactcactgaaattcttttagcagttaatgtccytgtattagtctgttttcatgctgctgataaggacatacccacgactgggcaatttacgaaagaaaggggtttatcggacttacagttccacgtggctggggaagcctcacaatcatggcagaaggtaaaaggcatgtctcacatagtgacagacaagagaagagagattgtgcaggaaaactctcccttataataaccatcagatcttgtgagacttactcactatcacgagaatagcacaggaaaaacctgcccccatgattcaattacctccc

SEQ ID NO: 212295 - DNA, 471 bp, Homo sapiens
acacccatgccagcatttgtgattgtctgtcttttggatataagccattttaactgggataaggtatctcattgtagttttggtttgcatttctctgatgatcaatgatgttcagaacactttcatatgtctgttttccatttgcatgtcttcttctgagaaatgtctattcaaatcttttgcccatttttgactggattattagatttcttcctataaagttgtttgagctctgtatatatcctggtcattattctcttgtcaggtgggtaatttgcaaatattttctccyattctgtgggttgtcacttcactttgttaactgtttcctttgctatgcagaagtttacattgatgttatcccatttgtccatttttcctttgattatctgtgcttatgtggtattgcttaagacatttttgcccggaacaatgtcctggagagtttcctaaaagttttcttacattctt

SEQ ID NO: 212296 - DNA, 488 bp, Homo sapiens
ttattttttattttttatgatattagctgtgggtctgtcatatatrgtttttattatgttattttcattctgtacacagttttttgagggctttgaacatgaagggatgttgaactttattagatgctttttagcatcagttgaaaatatcatatttttttgtccttcattctgtggatatggtgtatcacactgattgatttgcatatgttgaaccatccttgcctctctaggataaatcccacttggtcatgatgaatgatccttttaatgtattgttgacttaggtttgctggtattttgtttgggatatttgcaccaatattcatcagtgatatttacccgcagttttctttttttgatgtgtctttgtctggttctggtatcgggtaatactggcttcatagaataagtttgaaagcattcccttctcctatttctcagaatagtttgagtagaattgacattagttattctttaaatgttta

SEQ ID NO: 212297 - DNA, 488 bp, Homo sapiens
ttattttttattttttatgatattagctgtgggtctgtcatatatggtttttattatgttattttcattctgtacacagttttttgagggctttgaacatgaagggatgttgaactttattagatgctttttagcatcagttgaaaatatcatatttttttgtccttcattctgtggatatggtgtatcacactgattgatttgcatatgttgaaccatccttgcctctctaggataaatcccacttggtcatgatgaatgatccttttaatgtattgttgacttaggtttgctggtattttgtttgggatatttgcaccaatattcatcagtgatatttacccgcagttttctttttttgatgtgtctttgtctggttctggtatcrggtaatactggcttcatagaataagtttgaaagcattcccttctcctatttctcagaatagtttgagtagaattgacattagttattctttaaatgttta

SEQ ID NO: 212298 - DNA, 431 bp, Homo sapiens
tctgactaggatcagttaggcccacagatgacaaagcatcagtaaacacagaaaataaaarcataattaatacaaaggcaggccgtggtaagtcaaagaaaaagccctgtgttttataaaacttaaagcaaccactgaaatataacaacaaagagttatacctaataatccaatgaaggaaataaaatggaatcattagaaataatcaatacaaaagaaaatattaaaagaagaaaaagggaacaaaaacaaaagtacaaatagaaaatgaacagctagatgatagatttaaatccaacaatagcaataatcacattaaatataaatagtctaaacactccaattaaaaggcagagtttgtgcgattggataaaaacacaagaaccaacagtatagtgcttataagaaacacactttaggtaccatgtcgt

SEQ ID NO: 212299 - DNA, 433 bp, Homo sapiens
tgctctgacgggacaatctgactaggatcagttaggcccacagatgacaaagcatcagtaaacacagaaaataaaagcataattaatacaaaggcaggccgtggtaagtcaaagaaaaagccctgtgttttataaaacttaaagcaaccactgaaatataacaacaaagagttatacctaataatccaatgaaggaaataaaatggaatcattagaaataatcaatacaaaagaaaatattaaaagaagaaaaagggaacaaaaacaaaagtacaaatagaaaatgaacagctagatgatagatttaaatccaacaatagcaataatcacattaaatataaatagtctaaacactccaattaaaaggcagagtttgtgcgattggataaaaacacaagaaccaacartatagtgcttataagaaacacacttt

SEQ ID NO: 212300 - DNA, 591 bp, Homo sapiens
tgcatttctctggtgatcaacgatgttgagcacctttcgtatgtctgtttcccatttgcatgtcttatttttgagaaatggctattcagatgttttatccatttttagattattatgtttttcctttaaagttgtttgacttctttgtrtattctggttattaataccttgtcagatgggtagtttgcaaatattttctcccattctgtgggttgtctcttcactttgctgattgtgtcctttgctgtccagaagatttttaacttgatataatcccatttctccatttttttttgttttgattgcctatgcttgtgggttattactcaagaagtatttcctcaatacaatgtcctggagagtttccccaatgttttcttgtagcagttttacagtttcaggtattagatttaggtctttaatccatttttatttgatttttgtatatggcaagagatgggcgtctactttaatttttctgcatatggatatcgtttccacaagaccatgtattgaaagactgtcttttccccattgcatggttcttgacacctttattaataataaggttgctgtaggtatgtggatttg

SEQ ID NO: 212301 - DNA, 591 bp, Homo sapiens
tgcatttctctggtgatcaacgatgttgagcacctttcgtatgtctgtttcccatttgcatgtcttatttttgagaaatggctattcagatgttttatccatttttagattattatgtttttcctttaaagttgtttgacttctttgtgtattctggttattaataccttgtcagatgggtagtttgcaaatattttctcccattctgtrggttgtctcttcactttgctgattgtgtcctttgctgtccagaagatttttaacttgatataatcccatttctccatttttttttgttttgattgcctatgcttgtgggttattactcaagaagtatttcctcaatacaatgtcctggagagtttccccaatgttttcttgtagcagttttacagtttcaggtattagatttaggtctttaatccatttttatttgatttttgtatatggcaagagatgggcgtctactttaatttttctgcatatggatatcgtttccacaagaccatgtattgaaagactgtcttttccccattgcatggttcttgacacctttattaataataaggttgctgtaggtatgtggatttg

SEQ ID NO: 212302 - DNA, 591 bp, Homo sapiens
tgcatttctctggtgatcaacgatgttgagcacctttcgtatgtctgtttcccatttgcatgtcttatttttgagaaatggctattcagatgttttatccatttttagattattatgtttttcctttaaagttgtttgacttctttgtgtattctggttattaataccttgtcagatgggtagtttgcaaatattttctcccattctgtgggttgtctcttcactttgctgattgtgtcctttgctgtccagaagatttttaacttgatataatcccatttctccatttttttttgttttgattgcctatgcttgtgggttattactcaagaagtatttcctcaatacaatgtcctggagagtttccccaatgttttcttgtagcagttttacagtttcaggtattagatttaggtctttaatccatttttatttgakttttgtatatggcaagagatgggcgtctactttaatttttctgcatatggatatcgtttccacaagaccatgtattgaaagactgtcttttccccattgcatggttcttgacacctttattaataataaggttgctgtaggtatgtggatttg

SEQ ID NO: 212303 - DNA, 571 bp, Homo sapiens
gagatcaacggcaatactatactagtattgcattttcaacaatgaacagatcatttagacagaaaatcaataatgaaacaactgacttgaattacactttacactaaatgggcctaacagacatacagaacattccacctaatagcagcagaatacacattcttctcaagcacacatagaaaattcttcagtgaaaatatgctagtccacaaaacaaactttaccaaatttaagaaaattgaaaccataccaagcatcttttcagaccacaacaacaataaaatagaaatcaatcacggaagaaatattgaaacacaactatgtggatattaaacaacatgctcctgaacaaccaaaggatctcaaaagaaattwaaaaaaattaaaaaaaatacctcaacacaaaaatggaaacacaatgtatcaaaacttatgggattcagcagaaacagtcttaagaaaaagatatataatggtaaatgcttgcatttaagaataatccagataaacaatcaaatgttacaccccaaggaagtagagaaagaagaagtaagcccaaaggtagtgcaag

SEQ ID NO: 212304 - DNA, 549 bp, Homo sapiens
ggtatctttctccatgttgtactgcctgggcttgggggaggggtgatatgggtaatgcgagactattcttcctaytctcttcaatccatcttttcttatttgtgtactccactaaggttctataatctctcacctgaattccttagctcttgtcaaggtgttttcatggatggatagttgtttaaattgatgcttttgcaagtggtgatcatttgagtgtcctatatggtcatcttgctagtcacttttccattaggttctttttaatacattctatttctctgttaaaattatttatattttcattttgcccatttttttctctcatttaatatatcttaatagttattttaaagtcatcatgttataatttcaacatctggtctgcttctattacctattttttcctgcttcttcatatgtcacataaattcttattatattcccaacattgtagaaagcattatcttcccctagagagagcacactcctttctttgtgaagcagatacatggaggaattcgtcaccaagatcacatcagatttgag

SEQ ID NO: 212305 - DNA, 418 bp, Homo sapiens
ggcaattttgaataaatcttaagtaatttgtaccactaattccccatctctaaaatggggtattttctggttccctgtctgctaggatataacagctattataatgtactttttagtactacagggtcacctcaccttttgtatgctattttacttcctaaatctggaactgtttcagtgaagtctatttctgtggtccaccccccttctgtagcaattatgcagcattagtttatgatttatatattagtattgtttttaattgtcccatgtgttatttgcactagcagcttgaggatagaaaacatatttgtakacctgaagtcttgaacatgggtaggaaaaaactaattattggttggtaagtaaaactttggatctcataaacatggtagaattgtaaattagaggatcaggg

SEQ ID NO: 212306 - DNA, 576 bp, Homo sapiens
aattttcaattaattatggatcatttaaattatacacagagaagggcagagcaagatggtagaaaagaagcctacagcatttgtccctctagtaggatcaccaaattttaacaactacgtgcacacagaaaagcatcatcacaagaacaaaaatcaggttgttcgaacaatcacagtacctggttttaactttatatcactgaaagaggcattaaagagggtagaagagacagccttgaattgctgaaactaccattctcccatcctctggcagtagccatgtagcacagagaccctgtgcacttgggggagtgagatcgcagcaactgggtgacttcrcattgaactcagtgctgtcctgtcacagaggagagtaaagccatgctgggcttagccagcacttgtgtacagagggaacaatttggaccagccatagccagagggtaatcaaccatcccagaagctagaacttgagtttctccgcaagccttgtcactgcaagccaaagtgctttggggtcctaggcaaaactgaaaggcagtctagggacacaaggactgcacttcctagggaact

SEQ ID NO: 212307 - DNA, 576 bp, Homo sapiens
aattttcaattaattatggatcatttaaattatacacagagaagggcagagcaagatggtagaaaagaagcctacagcatttgtccctctagtaggatcaccaaattttaacaactacgtgcacacagaaaagcatcatcacaagaacaaaaatcaggttgttcgaacaatcacagtacctggttttaactttatatcactgaaagaggcattaaagagggtagaagagacagccttgaattgctgaaactaccattctcccatcctctggcagtagccatgtagcacagagaccctgtgcacttgggggagtgagatcgcagcaactgggtgacttcgcattgaactcagtgctgtcctgtcacagaggagagtaaagccatgctgggcttagccagcacttgtgtacagagggaacaatttggaccagccatagccagagggtaatcamccatcccagaagctagaacttgagtttctccgcaagccttgtcactgcaagccaaagtgctttggggtcctaggcaaaactgaaaggcagtctagggacacaaggactgcacttcctagggaact

SEQ ID NO: 212308 - DNA, 505 bp, Homo sapiens
aggaatccctttcgccctattgttttgaaccctatggaagtttrtaaagccctttattcacgatcccctccctctaacacagagttctggagattcagttagtccagaagagtaagccctggcttatacctcatctctgagagtgatgaggtacttagttatgtctctgtgtgtacgattagaagatgtttagattatagctgagaacttttagtttgcatctccaatgttatcctgcaaataaaaaaatgatgatttttgaatggaaattcaccttccaatcagttattaattttaaaagaaataaatctacgcttcacaggggatacagcaacacatcctgagtttcattggtaactgagatgtttttatgtaataatcattttgaatatgttaactgggttagtgatgaggatgagtaccaggatttgaggaaagacatctcagcttaggcggaccttacatatgaggaggtgggtaaaccagatgaaccacagttatggtt

SEQ ID NO: 212309 - DNA, 672 bp, Homo sapiens
gaattctaaccattgttttcttttgtagttttaccacactatatttttgcctgctttattattttttattttttatttttgagatggagtctcactctgttgcccaggctggaatgcagtggcacgatcttggctcactgcaacctccacctctcgggttcaagcaattctcctgcctcagctcccccctaccccaccaacagtagctgggattacaggtgcctgccaccacacccagctaatttytgtatttttagtagagacagggtttcgccatgttagtcaggctggtctcaaactcctgacctcaggtgatccacccgcctcggcctcccaaaatgctgggattacaggcatgagacaccatgcctggccacctattttaaatgttgatgtaaatggaatcatacagtatgcattctaggaattattcatgtttttgtataaagctttacttttttgcaatatattatggtatttagttatatgaatattatggtagagaactttccagtactgatggaaaacatcagcccagagattcaagaagcccgaaaagccctaagcaagaagaacaaaaaatgcagcttgatagtaaaatttcaggaagtcaaagaaaataataaaatgttaaaagcaaccagaggacaaaggacataatacattccaaag

SEQ ID NO: 212310 - DNA, 672 bp, Homo sapiens
gaattctaaccattgttttcttttgtagttttaccacactatatttttgcctgctttattattttttattttttatttttgagatggagtctcactctgttgcccaggctggaatgcagtggcacgatcttggctcactgcaacctccacctctcgggttcaagcaattctcctgcctcagctcccccctaccccaccaacagtagctgggattacaggtgcctgccaccacacccagctaatttctgtatttttagtagagacagggtttcgccatgttagtcaggctggtctcaaactcctgacctcaggtgatccacccrcctcggcctcccaaaatgctgggattacaggcatgagacaccatgcctggccacctattttaaatgttgatgtaaatggaatcatacagtatgcattctaggaattattcatgtttttgtataaagctttacttttttgcaatatattatggtatttagttatatgaatattatggtagagaactttccagtactgatggaaaacatcagcccagagattcaagaagcccgaaaagccctaagcaagaagaacaaaaaatgcagcttgatagtaaaatttcaggaagtcaaagaaaataataaaatgttaaaagcaaccagaggacaaaggacataatacattccaaag

SEQ ID NO: 212311 - DNA, 578 bp, Homo sapiens
tgcattatgtttagagatgatagcctatgcaataacagttatatttgtcaagatatatgttatattgtgggtaaatgattaatttacctaagtgttccacatattttagaagaatgtatttttcaagtaattcatacaggtttctgcatgtgtcccataggtcagatgttttaatggtgatattcaaatctgctttatctttactaattttgtgtctatttcatctatcaattattgagacatatattcagatatgttactctgattatagatttgtcaagtttttcttgtgtttattcttgcctartaaaaatgtatggattatatttctactaagtgaactttattcattataccttttagcctaagagtccattttgcttattactgtcagcatccaccaccttttcccaatattataatgtcaagtttaattccagctgaacactttttcatatccttgtagtcatgtgagcctccagttaaattttattcctctattggttgtttgttctaatttttattatttgcacacatacgtgtatactttctcacctcatttatttaagtaggatcta

SEQ ID NO: 212312 - DNA, 642 bp, Homo sapiens
gcacgtgtctttttggtagaacaatttattttctttaggatatatacccaataatgagattgtaggggtcgaatgctaggttttttttttgagatgaagtcttgctctgttgctgaggctggagtgcagtggtgcaatcttggctcactgcaacttctgcctcccaggttcaagccattttcctgcctcagcctcccaagwagttgggattacaggcaccaaccaccacgcccagctaatttttgtattttcactagagacaggggtttcaccatgttggctaggctggtctcgaactcctgacctcaggtgatctgcctgcttcagccttccaaagtgctgggattacaggtgtgagccactgtgcccgacctcgaatggtagtttggttttaagttatttgagaaatctccaaactgctctccacagtggctgaactaatttacattcccagcattgtgtaagtgttcctttttctctgcaaccttgccagagtctgttattttttaactttataataatagccattctgactagtgtgagatggcatatctcattgtgattttgttttgtatttctctgattattagtgatatggagcatttttccttaggtttgttggcaacttgtatgtcttctttt

SEQ ID NO: 212313 - DNA, 637 bp, Homo sapiens
gaatcttgaaagaccagggaaacatctttctgccttgggttgaactttatcgaagtacagaacaagaatttcctgctaagcttttccactgtgcctctgaattattcctttgtgaaacttcagtcctacagaagtgstcctccactaaaaaccaattgccttaactaacttttccttaggattcagccttcctagcagttttgtttcttgaaagatactagttcccctattcaccgtaataccacagttaggaaaagaatgggagtgggagtagagatagtggagtattgttattgttccttattccccttacaagttattagtctatcacccacatatataaatcccattattgaatctgtgtagcattcagattagcatctattagctttcattttcatctactcatcttagcaatttcttcccaaagccagattttctacatctgagcctcatcatcattcttggctacttttctttgcagtctcgaccttctggtcttcatttcagcaggctactttcctggatctcgttgttacccagaactgttccatttgaggaattttataatttcctgtcatttcttttttattcccctcctactgctcttcaatttcatgtcttcgctattacattg

SEQ ID NO: 212314 - DNA, 452 bp, Homo sapiens
acccttccatatcctgttgttaggaagggatgtcctattcaccagcaggtctgcttactccacacaccctttgcaaaacaacatttctggaagaaatcyaatgacctatgaaatccaagcagggaatattccaggtaattaggacacaggcagggtttttttttttttttggtgcctcccccttcactgcccacgttccctcccacctctccctactcccaaagtcagaaatcttcttcccttggaagcagcagttccctcctattcccccctcccacctaccacttcttggtagcctatgaagatgagattggaataaaaggtagctacagggttcatgtaaggtgacaaatctggcacatgctaaacacttagcattatacagccgccccttaagagtgctccaaatccatcagtcatcatggaaaaattagaagctttgctggattcct

SEQ ID NO: 212315 - DNA, 398 bp, Homo sapiens
caccagcaggtctgcttactccacacaccctttgcaaaacaacatttctggaagaaatctaatgacctatgaaatccaagcagggaatattccaggtaattaggacacaggcagggtttttttttttttttggtgcctcccccttcactgcccacgttccctcccacctytccctactcccaaagtcagaaatcttcttcccttggaagcagcagttccctcctattcccccctcccacctaccacttcttggtagcctatgaagatgagattggaataaaaggtagctacagggttcatgtaaggtgacaaatctggcacatgctaaacacttagcattatacagccgccccttaagagtgctccaaatccatcagtcatcatggaaaaattagaag

SEQ ID NO: 212316 - DNA, 446 bp, Homo sapiens
tatcctgttgttaggaagggatgtcctattcaccagcaggtctgcttactccacacaccctttgcaaaacaacatttctggaagaaatctaatgacctatgaaatccaagcagggaatattccaggtaattaggacacaggcagggtttttttttttttttggtgcctcccccttcactgcccacgttccctcccacctctccctactcccaaagtcagaaatcttcttcccttggaagcagcagttccctcctaytcccccctcccacctaccacttcttggtagcctatgaagatgagattggaataaaaggtagctacagggttcatgtaaggtgacaaatctggcacatgctaaacacttagcattatacagccgccccttaagagtgctccaaatccatcagtcatcatggaaaaattagaagctttgctggattcctgcc

SEQ ID NO: 212317 - DNA, 528 bp, Homo sapiens
aacacactgtcaggcaacttgaaacaggcagagaggagcaagtcaaaacaatcagcaatttcattaagaggataagattaattctgaatgaggcccaactctgactcacmttgtcaattattatatatgatctctatgagcaggccattttcccaattcactaaaacatctgtgcatttcaatgggctaagctttaccctgcccactgccctctagctgtttttgttgtggattatgtaatttggtgagtgatgcaataagaagaatgctttctacctgtgctttttacaagatattgtccaatgatgagtgcaacaggcttgatggctcagaatgttggatttcaacactctaatttgttctatgaccttgggcctattacttcctctctcctggcatctgctataaaaataagaaggagcaaatattcttgcctctttttatcacctgatctgaaaacccattgtaactgccatgaaaataagcactggtccatgagaccaatgcccagaaaattcaggctaagat

SEQ ID NO: 212318 - DNA, 511 bp, Homo sapiens
acatgaactgagtaaattccaaaggattaattggggtcaaaaatttyttcttcatccataaatcccaaactttacagcatgtctctaaagctatgtattttatatatttttatacaaaaatgtacatttctcaaagggtggaaatgtaagaaacagagcagtgtatgacatgcataaaaatcaaaaggccaggcacggtagcttatgcctaatcctaacaccttgggaggctgaggaggatcacttgcagccaggagtttgagaccagcctgagaagcatagcaagaccctgtctctacaaaaaaaaaaaaaaaaaaaaaaaattagatgggcatggtggcacacacctatagtcttagctactagaaagtctgagtggggagaatcgcttgagcccaggagtttgaggttgcagtgagctatgatcacaccactgcactccatgctgggtgacagacagagactcccgtctcaaaaaatcaaaaaaacagaacttaggcagttgtaagga

SEQ ID NO: 212319 - DNA, 511 bp, Homo sapiens
acatgaactgagtaaattccaaaggattaattggggtcaaaaatttcttyttcatccataaatcccaaactttacagcatgtctctaaagctatgtattttatatatttttatacaaaaatgtacatttctcaaagggtggaaatgtaagaaacagagcagtgtatgacatgcataaaaatcaaaaggccaggcacggtagcttatgcctaatcctaacaccttgggaggctgaggaggatcacttgcagccaggagtttgagaccagcctgagaagcatagcaagaccctgtctctacaaaaaaaaaaaaaaaaaaaaaaaattagatgggcatggtggcacacacctatagtcttagctactagaaagtctgagtggggagaatcgcttgagcccaggagtttgaggttgcagtgagctatgatcacaccactgcactccatgctgggtgacagacagagactcccgtctcaaaaaatcaaaaaaacagaacttaggcagttgtaagga

SEQ ID NO: 212320 - DNA, 511 bp, Homo sapiens
acttctgtaagtgaacatgaactgagtaaattccaaaggattaattggggtcaaaaatttcttcttcatccataaatcccaaactttacagcatgtctctaaagctatgtattttatatatttttatacaaaaatgtacatttctcaaagggtggaaatgtaagaaacagagcagtgtatgacatgcataaaaatcaaaaggccaggcacggtagcttatgcctaatcctaacaccttgggaggctgaggaggatcacttgcagccaggagtttgagaccagcctgagaagcatagcaagaccctgtctctacaaaaaaaaaaaaaaaaaaaaaaaattagatgggcatggtggcacacacctatagtcttagctactaraaagtctgagtggggagaatcgcttgagcccaggagtttgaggttgcagtgagctatgatcacaccactgcactccatgctgggtgacagacagagactcccgtctcaaaaaatcaaaaaaacagaactta

SEQ ID NO: 212321 - DNA, 486 bp, Homo sapiens
aacttctgtaagtgaacatgaactgagtaaattccaaaggattaattggggtcaaaaatttcttcttcatccataaatcccaaactttacagcatgtctctaaagctatgtattttatatatttttatacaaaaatgtacatttctcaaagggtggaaatgtaagaaacagagcagtgtatgacatgcataaaaatcaaaaggccaggcacggtagcttatgcctaatcctaacaccttgggaggctgaggaggatcacttgcagccaggagtttgagaccagcctgagaagcatagcaagaccctgtctctacaaaaaaaaaaaaaaaaaaaaaaaattagatgggcatggtggcacacacctatagtcttagctactagaaagtctgagtggggaraatcgcttgagcccaggagtttgaggttgcagtgagctatgatcacaccactgcactccatgctgggtgacagacagagactcccgtc

SEQ ID NO: 212322 - DNA, 511 bp, Homo sapiens
acatgaactgagtaaattccaaaggattaattggggtcaaaaatttcttcttcatccataaatcccaaactttacagcatgtctctaaagctatgtattttatatatttttatacaaaaatgtacatttctcaaagggtggaaatgtaagaaacagagcagtgtatgacatgcataaaaatcaaaaggccaggcacggtagcttatgcctaatcctaacaccttgggaggctgaggaggatcacttgcagccaggagtttgagaccagcctgagaagcatagcaagaccctgtctctacaaaaaaaaaaaaaaaaaaaaaaaattagatgggcatggtggcacacacctatagtcttagctactagaaagtctgagtggggagaatcgcttgagcccaggagtttgaggttgcagtgagctatgatcacaccactgcactccatgctgggtgacagacagagactcccrtctcaaaaaatcaaaaaaacagaacttaggcagttgtaagga

SEQ ID NO: 212323 - DNA, 621 bp, Homo sapiens
ttacgcttaatgcaggagttaataaatagtccccctagttattcaaccggtaacatcctgccttcccttctctcagctattccctagaccagagattggcaaactaatccacaggccaaatgcaagcccaccaattgtttttatattgtctgtgagctaataatggtttttatagttttacatggttggaaaaaattaaaaataataattttgtgtaacataagaattatatgaaattcccatttcagtatccacaaattaagttttattcgaacatagccaaggtgattcccttattaattcccttattttctagtctcataagactatctggtggycagcctaatttttaacactattgtcttccatgcagatgtgtggtttcttacctgtatacattttaaaatttcagtttaacctttgataatgttatttgctcttttttaattagtatggaaagctccttcactttctttgtttcatttgtgggccaaaaacaactgattacatccgaaaagctgagtaatgttagtgtcatttctgtatcaagaaaaagaagagcatacacttagacgcaaaataaaaataaagtcccaaaatagagccttgaaaataacgaga

SEQ ID NO: 212324 - DNA, 527 bp, Homo sapiens
cagcaaagccctgggttctttttgtttaggagcccttccttagcttacttctctcatttactgtttatcataagcagtaagaagaaatcaggcaaacagcttcaaccttttgcttgaaaactccttagcttaaccactcagtacattaggtacattttctgcctcccacattactgccatgacattgttgctaagctttcagccactaaataaacattccctttcttccattttccaatatggttttcttcattttcatttaagccctcactgacgctctatccaaagatcttcaagcttccagtaagtctcttcggaacttcactaaaactygcctcaaagaccttccagcttttatttactgtctgagtcctgagtccaaagtcattcccatgttttagtatttgttacagcagcactccattttcaggtcttcagaatctgcattagtcaaaaatcattcccaaatttagtggcttaaaataacaaacatttattatttcacaattcctgttgaccaggaattc

SEQ ID NO: 212325 - DNA, 431 bp, Homo sapiens
gaactcactgtcacgagaacagcaagggggaaatccacccctatgatccaattacctcccaccaggtccctcctccaacactgtggattataatttgacttgagatttggatggggaaacagagccaaaccatatcacggaagttcagtctcataatgaaagcaaatctcataattatttttgttaascatgcattcctctgttgactcaactaagactcaggctctgggaacttaaaatgcaccaggctttatctatgttaggagttatggggatatagaaaaataaggcatgatttggattattggggagtttgcaatccaatgaggagaaagatgagtgtcttagtcacctgggctcctataacaagataccacagactgggtggctttaacaaatatttatttctcacagctctggaggctgggaag

SEQ ID NO: 212326 - DNA, 436 bp, Homo sapiens
tgtgagaactcactgtcacgagaacagcaagggggaaatccacccctatgatccaattacctcccaccaggtccctcctccaacactgtggattataatttgacttgagatttggatggggaaacagagccaaaccatatcacggaagttcagtctcataatgaaagcaaatctcataattatttttgttaaccatgcattcctctgttgactcaactaagactcaggctctgggaacttaaaatgcaccaggctttatctatgttaggagttatggggatatagaaaaataaggcatgatttggattmttggggagtttgcaatccaatgaggagaaagatgagtgtcttagtcacctgggctcctataacaagataccacagactgggtggctttaacaaatatttatttctcacagctctggaggctgggaag

SEQ ID NO: 212327 - DNA, 436 bp, Homo sapiens
tgtgagaactcactgtcacgagaacagcaagggggaaatccacccctatgatccaattacctcccaccaggtccctcctccaacactgtggattataatttgacttgagatttggatggggaaacagagccaaaccatatcacggaagttcagtctcataatgaaagcaaatctcataattatttttgttaaccatgcattcctctgttgactcaactaagactcaggctctgggaacttaaaatgcaccaggctttatctatgttaggagttatggggatatagaaaaataaggcatgatttggattattggggagttygcaatccaatgaggagaaagatgagtgtcttagtcacctgggctcctataacaagataccacagactgggtggctttaacaaatatttatttctcacagctctggaggctgggaag

SEQ ID NO: 212328 - DNA, 436 bp, Homo sapiens
tgtgagaactcactgtcacgagaacagcaagggggaaatccacccctatgatccaattacctcccaccaggtccctcctccaacactgtggattataatttgacttgagatttggatggggaaacagagccaaaccatatcacggaagttcagtctcataatgaaagcaaatctcataattatttttgttaaccatgcattcctctgttgactcaactaagactcaggctctgggaacttaaaatgcaccaggctttatctatgttaggagttatggggatatagaaaaataaggcatgatttggattattggggagtttgcaatccaatgaggagaaagatgagtgtcttagtcacctgggctsctataacaagataccacagactgggtggctttaacaaatatttatttctcacagctctggaggctgggaag

SEQ ID NO: 212329 - DNA, 508 bp, Homo sapiens
gtgaggacacaatattagaataaggagcagaataatatgttgggaaaaataacttgaaaaaagagaaagtacaattagataggtaggaggagaatcaggatattgtggaagaatgtcaagaagaagataacattcaactgccaatcctgaaaagaagttaaggagaatgaatcctaagaaaaggccaacatatttaacaattgagagagacggctgtggagtaaacgtctgattacaggaatgcaaagaaaacagattgaagggatagggatatgtgcatatttacaccacacagtcaacaaatctggccagaaagaaaggtggcaaatcaagctttttttcaagatattagagatctgttatctgtctaccttctctgggygagaagcccagtatactgaaagactaaagatgctgggaagagagaagtaaacaaaaacacaaatgcctgaaagcagagggagaggatggactttaaaagagttctggatcatgacttgtcatctga

SEQ ID NO: 212330 - DNA, 243 bp, Homo sapiens
taatctgagcgtcattcaccccctgcctttcccataatgaaagggctactcagacacagaggggtttcctaggtatttcaggaagtggggagatttccaccagacctttgaagtgaagtagtttggaactgaggaaaagctttgtcacaatccatgaaatgggaaggagmtgtaggaagagtaaacagacactgctctgccacaaaagaataacatgggctgctttcttctagcactagcaaa

SEQ ID NO: 212331 - DNA, 665 bp, Homo sapiens
aataaaggaattggcatgatagagatgaaaatctctctccaaatctgataatagactactagactaacatatattttattcctcaaggaaaactatgttacaaccaacatttgtataattttccatttttttttatcatttagcaaattgctaaatatattatcttctgtgagtaagcttcaaaaataagattaaatgtgataatttcctgtaaaataaagtctctattttttcccacatgtttactggaatatagtttcatagaatatttgaatacatacattattataatagagttaggctggaaaaatttgcacttctaaagtctgtgttcccctgaacaatggctgacagataaggagggattgatttaaagtatgaaaatatggatttaatctgttgaaccaggccctacccattttacctgtcttgaattagaattttacttttggcagaaagacccccccttttatatgctagaatgctttcaaaagcaatcaagaattccattactgaggawgcaagcactaaagtaattgctgcttctcatttgggaaaaacttaggttcaagtcatacacagtcccctcttgaaaagtttgagaagtggttgagttaacaaaacaagtcaaggtgaaagagaggactcatatcaagacaaaacag

SEQ ID NO: 212332 - DNA, 583 bp, Homo sapiens
taacaatttggggcaacataacatttaatattcttgaaattacctaaataagaccatttgtaatcaataatacatttaaattttcaccctgttgaaacggtggccaaatacatgatgattggatgcaaagtgctgtgagttccataagacaagcatttatccaatatgataaacatcagtataataaaggtatcaggaaatttctagaagtaatcgatgatctgttactctttggatgaayattgacttgtgtttaggtattaggaatatgtgtgtgtgtgcatatacatatgtatgtgtatgtgcgttaacgctacacaagataaagattgttgaatgcaagtataagatttaaaatgtttaatttgcattgctttgtctgctatacatatatatttttagatgagcaaagcttagacaaattgatttttgttcatattaataaataacatagcataagtatacttattttttctagttttatcaaaagtttttcaatttagaaacaatttaatgacaaaactaaaatattgaaactggacttcagaacaaaatctaatcttttaatcaaaagcaaacaact

SEQ ID NO: 212333 - DNA, 565 bp, Homo sapiens
tatttaaaccagatacaggaatttgtgttagtgacatgaaaakatgttcaaattttatgaagaatttagctgtgagatttcaaatctgtagccgggaagacatagtgtaaaatttcgatctactgacttgtttgatcttcactttgtctctttcaaatgagccacatttaaaatttctctcctaaaagtacatgccaaatcacatcaggaggtacccacttacttctcctatttttaaaaccaactagatcattttaccagatattaaacgcttattgggagccaatattgtgttgaaaaccatgttgactgcttcattgaactgagtctgtggttttccctaaggctcctgatactgttgtagacatgattcaacacttcttttcaagtgactttcatacaggatttaatatgaatatagaagttagcaaggtagtatgatcaaaagcctaatcacgtattgccatgtaacaatgaaatttgcattaaaaatatagtgaaatcattaagggcctatgttgaaacatttcaaacaaagatttacttcccaaattatgagtaatag

SEQ ID NO: 212334 - DNA, 605 bp, Homo sapiens
taatactaagaataattgaagtytcaactacttaaaaggctcagtgtgtttcatccttttttctgacggtagttatacattcactcatgttaatcttctccttcttcttttgttttgtattagctcttgtaagaattgctttctaaggctatctgtgtagggccatcttcaccacggcatttttgatgacctttctcttctactcactttaccccatccattgcttttcttttattcttatggttctaggttcagagttgttgatacatgttttaacttcccttggagacaataatatgcttatttgttgattattacccttgtaatctgctgagctttgcctcacatcagcccatcttccaccatattttttcaccatcatattgcatttatccttcatatgttgcagatttctttataaactgatcaacagcctggagaccctggcctttgctgtagccttcatgtgtgagggctgggattgtgagacaaagcctatgtgggtaggcccaggagtttatgtttactgacaactgtgttaggatgaaggcaatacctgtcctagcaagtaatgaaagatgttggtggattgaaaagcaggattc

SEQ ID NO: 212335 - DNA, 422 bp, Homo sapiens
cactttgggaggccgaggaggactgatcacctgaggtcaggggtttgagaccagcctggatcaacatggtaaaaacctttctctatcaaaaaaatacaaaaattagctgagtgtggaagctgaggtgggaggatggcttgaacctgaaaggcagaggttgcagtgagccaagattgcaccaccgcactccagcctgggtgacagagtaagacmctgtctgccacaaaaaaaaaaaaaaaaaagaaaaaagaaaagaaaaacaaacaaacaaaaaagaaataaacaccattaaaacatgacatgcacaggaaacaagacttaatactctaccattaacttccttttaaataagccacagtatgcaggaataaaagggccatcacatttgcctcttgcttttatgtgcaatacatccttcacat

SEQ ID NO: 212336 - DNA, 560 bp, Homo sapiens
taggagtttgatgctgcagtgagctatgaccatgccactgcactccagcctgagcaacagagtgagatcccatcttaaaaaataataataatgaagaggtgaagatggagctggaaatcctagtctttgtcctggcagctgcttccagcaacaattctacactgtggaaggtcccatggatttttggtgaactgccagccatctttgcttagcacctttttgataagcaagktgtttctcatcctgctttgcttaggaatcaccgttatgcactacccaggtgtatatttgttgtttgttgctgtgaaaaataatttcccaaaatttcatgacttaaaacaacaaatactttgtatctcatgttttctatgagtcaagagtgttgatgtggctcaaccggatgcccgtggctcacggtctttcatagacatcaacagacactgcagggaggatccacttacaagctcactttcctggccacttgcaggcctcacttcctcactggcggttggtggtagatacaggtgcctggccactaaggtctttccactgggaaactc

SEQ ID NO: 212337 - DNA, 532 bp, Homo sapiens
tctttgaaatcaatgaaaatagtgacgcaactaaacaaaatctctgggatacagttgaagcagtgttgagagaaatgtttatagccctaaacaccttcatcaggaagtragaaagatctcaaattaacactctaactttgcacctaaagaaactagaagaaaaaaaaaccagagctagtgaaagaaaagaaataactaaaattagagaagaactgaataaaattgggatgaaaagcccatacaaaagatcagtgaaaccaggagtgggttcttcaaaaataaataaataaacaaacaaacaaacaggattattacctgactgccagctagattaaaaaagaaaaaaatgaagattaaaataagtacaatcagaaattacaaagatgacattataacaggtcccacagaaatcaaaagatcagcaaagaatactgttaacaactctgcaaacaaactagaacatctagaggaaatggataaatttctggaaagacacaatctcccaagattaaatcagaaagagattgatacc

SEQ ID NO: 212338 - DNA, 532 bp, Homo sapiens
tctttgaaatcaatgaaaatagtgacgcaactaaacaaaatctctgggatacagttgaagcagtgttgagagaaatgtttatagccctaaacaccttcatcaggaagtgagaaasatctcaaattaacactctaactttgcacctaaagaaactagaagaaaaaaaaaccagagctagtgaaagaaaagaaataactaaaattagagaagaactgaataaaattgggatgaaaagcccatacaaaagatcagtgaaaccaggagtgggttcttcaaaaataaataaataaacaaacaaacaaacaggattattacctgactgccagctagattaaaaaagaaaaaaatgaagattaaaataagtacaatcagaaattacaaagatgacattataacaggtcccacagaaatcaaaagatcagcaaagaatactgttaacaactctgcaaacaaactagaacatctagaggaaatggataaatttctggaaagacacaatctcccaagattaaatcagaaagagattgatacc

SEQ ID NO: 212339 - DNA, 532 bp, Homo sapiens
tctttgaaatcaatgaaaatagtgacgcaactaaacaaaatctctgggatacagttgaagcagtgttgagagaaatgtttatagccctaaacaccttcatcaggaagtgagaaagatctcaaattaacactctaactttgcacctaaagaaactagaagaaaaaaaaaccagagctagtgaaagaaaagaaataactaaaattagagaagaactgaataaaattgggatgaaaagcccatacaaaagatcagtgaaaccaggagtgggttcttcaaaaataaataaataaacaaacaaacaaacaggattattacctgactgccagctagaytaaaaaagaaaaaaatgaagattaaaataagtacaatcagaaattacaaagatgacattataacaggtcccacagaaatcaaaagatcagcaaagaatactgttaacaactctgcaaacaaactagaacatctagaggaaatggataaatttctggaaagacacaatctcccaagattaaatcagaaagagattgatacc

SEQ ID NO: 212340 - DNA, 449 bp, Homo sapiens
gtgacactgttagatttgtattgtattgtattgtatttatttatttaattatttttgagacagagtctcgctctgtcacccaggcttgaggagtgcagtggcacaatctcagctcacttcaacttctacctcccaggttcaartgattctcctgcatcagcctcctgagtagctgggattacaggcatgtgccaccatgactggctaatttttgtatttttattagagatggagtttcaccatgttggccaggctggtctcaaactccttggttcaagtgatcctcccgcctcagactcccaaagggcttacagttgtgagcaccaggcatggctaggtttgcattttagagagacctttgtagccactatgctgaacatgcaataagggctgtatgtctggtgggctacgtgcctcatgaggaggctcaaaggctagtgagtagtgag

SEQ ID NO: 212341 - DNA, 544 bp, Homo sapiens
cttaaatcctttccagattgagtcttagttctgtctataatwttttaagatcagttcaaattttattcaagtaagacatttgtctttattttggccccagtcatgggtgttatgaagtcaccattaatctgtttcaagaattcttttaagaaaagatattttattttaaaatagaagtgtgtttcatagaagccttcaatcataaattataaattttacagaaaacagaatctgcagtgagaccaatactaaactgctcttaaggtcactcttccacttgagccaacagtctttggaatcaaacatgatattgtttgtgataggaaacatgacacttcctaaggaaaatttctgatgaccaacctaatgatttgcatgcaagtgatagtcaataacttgacaaaataagtatatagatggaatgcagagaagagatacagaaagcatagtagcaaagctttgattttacttgtaaagggtaaaattaaagcattataaatgtccttccctcaacagtaaccaaatatgctgaacaatagcttcc

SEQ ID NO: 212342 - DNA, 609 bp, Homo sapiens
caggaagagcaagagggaaagctccattctttcaagtccctggggattgaagaggaagaaggaaaatgatctaatataaggttctctcctcatttccatccccacttccttggtaaatccaattccaaagaatataaggtagccaaaaacctagacatgttcagaaagagtgtgggaggaacactaaggccactatggcttttctcccttctaaagtttgggttctaagaaagaccatcttgtagtctgcccccacagccatatggggcattgctatatcaaagtcagggtagcatggctgggaggaggaggcttcagtgtttagcttgccctaactaccctcagttcctgtttggcaggaacatggttcccaaatagatcaaagcctggccagagctttctagcagtgcctaccacagcatgaaataaaaggacagcagctgtagggtggatgcttgggccaaaatggatggagaccattagtgcttccaagaccaagaacacattgcagattgaaacaaaacaaaacaatactaaataaaacaaaaataactttttctgttagtggtggcagtgracacagaaggagaatctatatcaattatgagc

SEQ ID NO: 212343 - DNA, 611 bp, Homo sapiens
ctcctggttccattggtttttagaaacatgaatatactcaagattgattttttcaaaggaatctatgacatagccactctcaaaagttataaatgttggcatcattcttctctctcctaaagtagtgacacacatcctctctataaaactagacacaaggtgtcatttgatggaataggtaagtgttaacaacatggcttgctacctaccaggcctatggcagaaatgacyacagaaactattccctggggaaatttttttaaaatgaagattcctagcaccatcccagacattctgaagaatagtctcaggaatggagtgatatgttttggctgtgtccccattcaaatctcatcttgaattgtagttctgcaatcctcatgtgtcaagtggggggccaggtggagataactgaatcataggggcagtttcccccatactgttctccaggtagtgaataagtctcacgagagctaatggtttcataaaggggagttcccctgcactagctctcttgtctgccaccatgcaagatgaacctttgctcctcattcgccttctgacatgattgtgaggcctccccagccatgtggaactgtgagtcaattaaa

SEQ ID NO: 212344 - DNA, 611 bp, Homo sapiens
ctcctggttccattggtttttagaaacatgaatatactcaagattgattttttcaaaggaatctatgacatagccactctcaaaagttataaatgttggcatcattcttctctctcctaaagtagtgacacacatcctctctataaaactagacacaaggtgtcatttgatggaataggtaagtgttaacaacatggcttgctacctaccaggcctatggcagaaatgaccacagaaactattccctggggaaatttttttaaaatgaagattcctagcaccatcccagacattctgaagaatagtctcaggaatggagtgatatgttttggctgtgtccccattcaaatctcatcttgaattgtagttctgcaatcctcatgtgtcaagtggggggccaggtggagataaytgaatcataggggcagtttcccccatactgttctccaggtagtgaataagtctcacgagagctaatggtttcataaaggggagttcccctgcactagctctcttgtctgccaccatgcaagatgaacctttgctcctcattcgccttctgacatgattgtgaggcctccccagccatgtggaactgtgagtcaattaaa

SEQ ID NO: 212345 - DNA, 541 bp, Homo sapiens
gtctcacgtcactttgctttatcacaaactgatgatcgccagatcactttggagacatgtctgaatatattttatcaaataatgatagctatcatttatagagggcttacactttgccacacatcatagccagtattttaaatagattatctgtttcatttaattatcacatcacttaaccagtgaatactaatatgatcattatatcataaatgatgaaattagttgcagaaaaataatgtgcccacaggggtccatctaagtggtagagaggttttgccaagaagtctgataattgcacctgcgatcttactcattgtacctcactttcttctgcaatttgcacattcttttttttcttttttcttttcttttcttttytttttttttttttacacaagcagcatgttataagcggcagttttaaaatttagcacaaaggtagtgctttgcaatcaatattttttcacgaaaccaaaaatagtcaagttaggaagagaaagaaaatgtgctgttcctgcacctttaattttagtactca

SEQ ID NO: 212346 - DNA, 624 bp, Homo sapiens
tttgtggcaatgtgttatggcagccctgaggaactaatacggaactacctaatttatttttccattcataagtgagtcagccaattggcaagcaacatttgttagtcatcttctatgtgccatttcacagatgtagaaactgagacttatagagctgaggtgtgctccttgttatactttgtaagtaaatcacagaactggcattcaaggccagatcatttttatttcaaatccagtttatctttctactacacaatcctttagcagcaaaaattaagggccaggttatttagtgagtcacaaatataattcttgccaaatcaaggccttcacagtagcacatccataaaatacctctgtgcacaattcctgtttttagtacattagtgaagacgaatattgtcagcctcattgtgtataaatccctatcatgtcttcctcaagtccagaacccctgtgccttcttctgtttaatactatctcctcaagtcacaataggaaaaaaagctgacttttcatttatctgaagtcaattcacttctaatttatttatttatttatttwtttgagacggagtcttgctatgtcgccaggctagagtgcagtggcacgatgtcagctcac

SEQ ID NO: 212347 - DNA, 464 bp, Homo sapiens
taaaaatcagccacccatcattcacaatacaaaaagttatggctatagctggggttaattacctttagttctcaaatgaagttggtttctataatggttatagtactgagaaaaagataacaaaattcacgagtttctctggagctttctcatgttcatgcatgaccttggaggycctttccaactctgagtctaggattccacagtgaattgtacctggagtactttcactgctgccttacggaaacagaagtttggctgaaatccagcttatttttactttcaaatatactcaagtagtttcatacagtggatgattttcagctattaaaaatcatgttttttgaagaaaaagacaaaaaactatactcaaatatacacacattatatgtactgtattattgcaattttatctaaaaatctattaaataaattctaccaaaaattttgaataatttataatg

SEQ ID NO: 212348 - DNA, 455 bp, Homo sapiens
gccacccatcattcacaatacaaaaagttatggctatagctggggttaattacctttagttctcaaatgaagttggtttctataatggttatagtactgagaaaaagataacaaaattcacgagtttctctggagctttctcatgttcatgcatgaccttggaggccctttccaactctgagtctaggattccacagtgaattgtacctggagtactttcactgytgccttacggaaacagaagtttggctgaaatccagcttatttttactttcaaatatactcaagtagtttcatacagtggatgattttcagctattaaaaatcatgttttttgaagaaaaagacaaaaaactatactcaaatatacacacattatatgtactgtattattgcaattttatctaaaaatctattaaataaattctaccaaaaattttgaataatttataatg

SEQ ID NO: 212349 - DNA, 617 bp, Homo sapiens
cttggctccgttgttagttttcttaaagctgaatatgtacaactcctagaccaattattaatgataagcaggttttcatctcatctggcaatgtggatagagggtcttctatctccatttcctaattatcttgtactcttaagctatttagcaaattgaaaactatttttattttcattttattatttgtttatttgaggctgagtcttgctttatcacccaggctggagtgcagtggcgtgatcttggctcactgcaacctctgcctcccgggttcaaacgattctcatgcctcagctccctgagtagctgggattacaggcacctgccaccatgcctggctaatttttgtatttttagtagagacggggtttccccatgctgaccaggctggtttccagctcctaacctgaggtgatcagcctgcctyggcctcccaaagtgctaagattacaggcgtgagccatcgtgccccaccctatatcaatcaatctatctatctatctatctatctatctatctatctatctatttatctatctaatctctctatatatctacaaatatatatatatctacaaatatatattatatgtatatatatatatatagagaga

SEQ ID NO: 212350 - DNA, 617 bp, Homo sapiens
cttggctccgttgttagttttcttaaagctgaatatgtacaactcctagaccaattattaatgataagcaggttttcatctcatctggcaatgtggatagagggtcttctatctccatttcctaattatcttgtactcttaagctatttagcaaattgaaaactatttttattttcattttattatttgtttatttgaggctgagtcttgctttatcacccaggctggagtgcagtggcgtgatcttggctcactgcaacctctgcctcccgggttcaaacgattctcatgcctcagctccctgagtagctgggattacaggcacctgccaccatgcctggctaatttttgtatttttagtagagacggggtttccccatgctgaccaggctggtttccagctcctaacctgaggtgatcagcctgccttggcctcccaaagtgctaagattacaggcgtgagccatcgtgccccaccctatatcaatcaatctatctatctatctatctatctatctatctatctatctatytatctatctaatctctctatatatctacaaatatatatatatctacaaatatatattatatgtatatatatatatatagagaga

SEQ ID NO: 212351 - DNA, 584 bp, Homo sapiens
aaattaaatcatttatgattctgcaagagaggtgtaaccactgaattcttgaatcaccagacttttactgtagccctccattactggaggagctgggtagagcagccactctaggcaaaaacactcttcagtattagaatgcttaaaagctacaccctsattttgaacccttagacctgatgacccataaagaatcacgtggaaattgcaaagactctttttgtgcctttagtccaatacactaaatgcaaatggagcagcctcctcagtccatttcttctgtgcacacaccctcatctcagttctcagtctttgagactcctctaggcgttattcacagaccagctgtattggcatcccttggaagctcatcataattgcagaatctcaggccccaccccagatacactaaatcagaatctgtttcatcaagtgttgtgttttatcaagatccccaggagcaacctgatggtaattcattggtactgctgctcagttgagatgcattgctagagtttatcaattggctgatgaataaaggcaaataataagcaaagaagagcaaaaggaagaacaaaacaaag

SEQ ID NO: 212352 - DNA, 464 bp, Homo sapiens
ctcagattacattacatattagcattgaagatgatttgtaaaataaatatcacagggagaaacccgcatggtcaagaactaaacacacaagcacagttctcaacatgttctctaggatatatctattcatttttcctaaccagcagaactataaatctggcctttgcttggcacactgtatgtgttttgctttatgaaggcataaatcaccaagatacaatttgtgtttgattttttggacacttaatttgcttaaatgttcagcagttcatagacgtaaattgtgctgggcatagctccaagtggaataagctgagagcaagaaagctatacatattaggatgtaattcagaagaaaaatcatcctggctggtcaagtaagtcctctttataaattacttayaaataactttcctccatgagcaatataaacacttagtatatacttctagaagatagagcat

SEQ ID NO: 212353 - DNA, 577 bp, Homo sapiens
gatacaggcacacaatgtgaaataagcatggagaatgcrgtatccatccccttaagcatttatcctttgagttaccaacaattcaattacactccttaagttatttttaaatatacaattaagttattattgactatagtcaccctgttgtgctatcaaatagtaggtcttattcattctttctatttttttttggtaccattaaccaccctcacctcttcccaaccctcccactacgcttccagcctctggtaacccatgttctactctctatgtccatgaggtcaattcttttgatttttagatcccacaaataagtgagacacacaatgtttgtctttctgtgctgaattcatttcatttaacataatgatctccaattccatccatgctgttccaaatgactggatctcattctttagtatggctgaatagtattccattgtatatatgtaccacattttctttattcattcatctgttgatggacatttagattgcttccacatcttagctatcataaacagtgctgcagacaaacataggagtgcagatcaaagagactcacttaagtttc

SEQ ID NO: 212354 - DNA, 577 bp, Homo sapiens
gatacaggcacacaatgtgaaataagcatggagaatgcggtatccatccccttaagcatttatcctttgagttaccaacaattcaattacactccttaagttatttttaaatatacaattaagttattattgactatagtcaccctgttgtgctatcaaatagtaggtcttattcattctttctattwttttttggtaccattaaccaccctcacctcttcccaaccctcccactacgcttccagcctctggtaacccatgttctactctctatgtccatgaggtcaattcttttgatttttagatcccacaaataagtgagacacacaatgtttgtctttctgtgctgaattcatttcatttaacataatgatctccaattccatccatgctgttccaaatgactggatctcattctttagtatggctgaatagtattccattgtatatatgtaccacattttctttattcattcatctgttgatggacatttagattgcttccacatcttagctatcataaacagtgctgcagacaaacataggagtgcagatcaaagagactcacttaagtttc

SEQ ID NO: 212355 - DNA, 576 bp, Homo sapiens
ggagctcagtttaaaaatccttcagaattcaagggttgttttatgtaaagtgttctgacaggcaaaatgattcctttttaaacataattcacctctgctctgcaggcctcttgtggagaacaaaaacatctattcagagtaacaactgtttttggtrtgcacagaatttaaggtgcttaagaagatgggaagccctacaacattatgccgttggtctaaaagcaccagatgaaatcaggtgagagaaataaggcttggagaaatcctctcactggctagaattatcaacaatagcttgactgtcttttcaagtgttctttcattatggcacttaattttttttcaagtaaaacaagataaacaagtaggctgtgattgaactttgactttctagttaagaattcgctatttgaagagtctattcgcctcacaaaaatgagacttcctttacaaagaaccacaaaagcccaaagtaaagataaccttatatttcccagattgtgagcatagaaaattattccgagtcgtcacacaaaccaattttcgcacctggacttgatccaggtacacggctga

SEQ ID NO: 212356 - DNA, 434 bp, Homo sapiens
tagatctctgtggaatgagtgaagcccaggtgttatttacctgtggggaggaagggcatcctgggggttctacctcctaaatctgtctttcgtccttccatgtcyctttcttctctactgcctcttcccagtacaggccattctcccatctttctccttaagctgctaactggtctcctacaccgggctttgtggctccctttttattagccacacgaacctcacagctggcctgcatcaaccctttacaagaccattcccagtcccacccagccctgcattccagccctgtctctccctccctgccgcctcatctcctcacattataacccaaagaaactggatttccccccacattttccccgaacattgtgtgcccttttgcttccagacctttgcaaatgcccttctcttttcctagtgccctgcctatc

SEQ ID NO: 212357 - DNA, 593 bp, Homo sapiens
attataccattattatgggtgcaaagtagtatctcattgtggttttgatttgcattacctgaatggctaatgatttttagtatcttttcatgtgctcattagccatttgatatcttctttggagaaaagtgtattcaaatcctttgccaatttttccattgaattatttgtcttttattgaatgataaatgctctttatatattttggattccagtttcttaccagatatatgatttataaatattttctcccattctgtgtgttgctttcattttcttgacagccttgtctgtagcacagagttttaacctttagatacagttcagttctatttatctattttttcttttgycaattgtgcttttggtttcgaatcttaagaaaatattatctgacctcaggtcacaaagattgactactatatgttcttcaaagagtttgatcgtttttggctcctacatttaggtttataatctattttgagttaaatgttgtgtgtggtatgaggtaggggtccaaattcattcttttccatgttgattcccagttgtcccaacactacttgttgaaactattctttctcacattgagt

SEQ ID NO: 212358 - DNA, 536 bp, Homo sapiens
aggtggtggaagaggagaaggagaggagtagtaagctggagtaaaagagtgattatgattttgtgattaagacaatataggaaagcgttaactgaacagtcaggttgttgtatatggatattatgtgtaattctttgaactttttgtatatttgaaattttttctaataaattcttgaaaaaagttcaagaaagttttgcctgttactctatatttgtctgtttagaaacatataaatgcttacaattattaaccatgatgagcrgtgaaagttttctacctgaaacgtagcttcatgggaaaaaagccttgtgtattagtatgtattaattttaagaaattgggctcaactctaaaaattgtaccactttctaaaaggatcagcaactttgcaattttcatttctttttttttataatgatgatattgtaagaagccattgatacacaaatttatgcattcatttgtttattcacttaattaatatttattgagactgttccatgtgttttgcaaagcactaagaacacagtagt

SEQ ID NO: 212359 - DNA, 573 bp, Homo sapiens
ggttgtgtacttcttattgttcagatcttagcttaaatgtcacattttcaggaatacagttcctgaccacttagtctaaaagagcccttgaatcacttacccatcattccattttattttattcatatcacataaataactgatagattttcttgtttgtttatttacatccctctgacacacatgcacaatacatacacatatgctgaaatatttttgctatgaaagcagacacctaggccatctggtttaatgatgttcctatctttcagaaaaagggacaaaataagcacttaatgtttgaatgaaataattattgccatcagtgtggatgcaaggtcattacayatgggagcacggtgcagaacctggtcaaccattctcaggaggcagccccccagaagtaaagcacactaaataaaaccctttcttataatcatgatttaacattcttaagaatgctatagagccatatataaggagtgagtggaaaattttcattttaattccttttccgcatatgctcaagattacattatttattaccttggcaaaagtcctgatcactctcat

SEQ ID NO: 212360 - DNA, 642 bp, Homo sapiens
cattttctcgagtctctaaaattcacatcaaagaaaattctctcctctgtgtattcttttttctaataaaaagagaaattctctaaagaatagagcaaaatttctgtaaacaatctatttttcccgaagtgactaccatttaaaactatcgtttatgggtagtctatgaggtttggttctttaagttgtatagagggttagagattcaattttgtaattagtaagaaatgggttcaaatccctggatttaggcccatttgtaagggaatgtgtttgagcaagttataaaaaaacttcatactttgatatcttctcccataaaatggtcacaattctagaaagtctctcaagggaattgtgaggatttaattaggtaatgcactttaggtcctaattatagtgtctttcaaatagtaaatgctcaataaatattagctattattaccawcttatagtcagtagatagcctgaaatagtcacgtttactgccaaagaagcatttgtggcagaacatcattatatttactggggaaaggagtgtgtatgtatgtgtgtatatctatatagagatatttatatacatttttaaaatatatgcatatgtatatataactttaagaaacattgttcttatcacaattc

SEQ ID NO: 212361 - DNA, 615 bp, Homo sapiens
catattatttgttgtcgagagatggctaaagagtctttttaactaattttttttttctctaaatagctccttctactctttcagattttttttctgatttcttctcctctgtccctcacaaccaccaaatcacacagagatacttataggcaagtaagaacagagagagagagagagagagagaaaaaaagcatctattgagaagcaatatatcatgattgtgctaggtactttcatttgtatttgtatttcatcttatagctatcctcttgctgtggtttggatgtttsctgcctctaaacctcatgttaaaatctaatccccagtgttggaggtggggcctaataggatataggatgtgcttgggtcatggaagtggattccttgcgagtagactaatgctctccttgggcagtgaatgaattcttgccctattagttcctgtgagagatggttgttaaaaagagcctggcaccacccctctcttttgcttcctctttcatcatgtgatctttgcacacacaggctctccttcacctcccttttgagtggaagcagccctgaggctctcatcagaagcagattctggcacaatgcttcttgtatagtctgctg

SEQ ID NO: 212362 - DNA, 639 bp, Homo sapiens
ttttacatagtagtgagatcatgcagtatttgtctttctgtgcttggattatttcacttaatataacatcctccaggttaattcatgttgtcacaaatgacaggacttcctytatttttaaggctgaataacactccactttgtatgtatatacttttctttatccattcatctgttgattgacaccgaatttgactccatctcaactattgtaaggtttaagtgaacatgggagtgaagatatcacttgacatatggatgtcgtttctctttttttgagaaggagtctcgctctgttgcccaggctggagtgcagtggcgcaatctcggctcactgcaagccgcctccagggttcacaccattctcccgcctcagcctcccgagtagctgggactacaggtgcccgccaccacgccctggtaattttttgggcttttagtagagacggggtttcaccatgttagccaggatggtctcgatctcttgacctcacgatccgcccgcctcggcctcccaaagtgctgggattggatgtcatttcttttggatatctccccagaaatggaatcaccggattatacagtaattcttttctaatcttttgaggaatctccatagtgttttgaataattgctata

SEQ ID NO: 212363 - DNA, 639 bp, Homo sapiens
ttttacatagtagtgagatcatgcagtatttgtctttctgtgcttggattatttcacttaatataacatcctccaggttaattcatgttgtcacaaatgacaggacttcctctatttttaaggctgaataacactccactttgtatgtatatacttttctttatccattcatctgttgattgacaccgaatttgactccatctcaactattgtaaggtttaagtgaacatgggagtgaagatatcacttgacatatggatgtcgtttctctttttttgagaaggagtctcgctctgttgcccaggctggagtgcagtggcgcaatctcggctcactgcaagccgcctccagggttcacmccattctcccgcctcagcctcccgagtagctgggactacaggtgcccgccaccacgccctggtaattttttgggcttttagtagagacggggtttcaccatgttagccaggatggtctcgatctcttgacctcacgatccgcccgcctcggcctcccaaagtgctgggattggatgtcatttcttttggatatctccccagaaatggaatcaccggattatacagtaattcttttctaatcttttgaggaatctccatagtgttttgaataattgctata

SEQ ID NO: 212364 - DNA, 639 bp, Homo sapiens
ttttacatagtagtgagatcatgcagtatttgtctttctgtgcttggattatttcacttaatataacatcctccaggttaattcatgttgtcacaaatgacaggacttcctctatttttaaggctgaataacactccactttgtatgtatatacttttctttatccattcatctgttgattgacaccgaatttgactccatctcaactattgtaaggtttaagtgaacatgggagtgaagatatcacttgacatatggatgtcgtttctctttttttgagaaggagtctcgctctgttgcccaggctggagtgcagtggcgcaatctcggctcactgcaagccgcctccagggttcacaccattctccmgcctcagcctcccgagtagctgggactacaggtgcccgccaccacgccctggtaattttttgggcttttagtagagacggggtttcaccatgttagccaggatggtctcgatctcttgacctcacgatccgcccgcctcggcctcccaaagtgctgggattggatgtcatttcttttggatatctccccagaaatggaatcaccggattatacagtaattcttttctaatcttttgaggaatctccatagtgttttgaataattgctata

SEQ ID NO: 212365 - DNA, 639 bp, Homo sapiens
ttttacatagtagtgagatcatgcagtatttgtctttctgtgcttggattatttcacttaatataacatcctccaggttaattcatgttgtcacaaatgacaggacttcctctatttttaaggctgaataacactccactttgtatgtatatacttttctttatccattcatctgttgattgacaccgaatttgactccatctcaactattgtaaggtttaagtgaacatgggagtgaagatatcacttgacatatggatgtcgtttctctttttttgagaaggagtctcgctctgttgcccaggctggagtgcagtggcgcaatctcggctcactgcaagccgcctccagggttcacaccattctcccgcctcagcctcccgagtagctgggactacaggtgcccgccaccacgccctggtaattttttgggcttttagtagagacggggtttcaccatgttagccaggatggtctcgatctcttgacctcaygatccgcccgcctcggcctcccaaagtgctgggattggatgtcatttcttttggatatctccccagaaatggaatcaccggattatacagtaattcttttctaatcttttgaggaatctccatagtgttttgaataattgctata

SEQ ID NO: 212366 - DNA, 545 bp, Homo sapiens
ttgtaaatattttctcccattctgtaggtagtcccttcactctaatatttgttccctttcctgtgcagaagtttttattttgatacaatctcatttgtctctttctgcttttttacccttgcgttttttctattataaccaaaaaatgattttccagttgattttgtcatacagtcataacatggacaatgttgtgacatttccccctaagttttcttgtagtagttttagagttcccagtcttatgttcaagtctttacccattttgagtttatttttctgtacagtatgagataagcgtctaattttattattttatgtatgcacgttaagctttcacaacaccatttattgaaraaactgtttatcaacattatctattcttggcatctttaaaaactccattgactgtaaatatgtgaatttatttctgggctattttgctccattggtctatggatttgtttttatgctactacaatgctgtcttgattaatatagttttgtagtatattttgaaatcaggttgtatgatgtttccagca

SEQ ID NO: 212367 - DNA, 597 bp, Homo sapiens
tgctcttgttccctgattctgaatgggtatttaatgggaatttcagtaagcttttaatttcacatcactatctgtaacttcacaacaacagacaattgacttcaaaccaacaacttcatattccattactttgagcttacttaggcatcagctccctgcagttcccacctgcttggactttgagaacatctgtatcatgctagctacttatgctgaaaccttgctggaaacgctggcttaaatttacgtaactactaaaccttgtgatgtggtgtggctctgtgtccccacccaaatctcatctcaaattgtaatcctcataatccccatgtgtggattgaggaacctagtgggaggtgattggatcacgggagtagtttcccccatgctgttctcttgatagtgagtgcattctcacaagatctgatggttttataaagggctcttccctctccactctctcttgctcacctgccaccatgtaagacatgctttgcttccccttcrtctccatgattgtaagtttcctgaggcctccccatcctcaggaaagtctgtgagtcaattaaactatgagtcaattaaacctctttcctt

SEQ ID NO: 212368 - DNA, 651 bp, Homo sapiens
ttatttgcctttgaagatccttcgaacccaatgtctcaactcacctggactgttttaccccaggggttcagagatagcccccatctatttggccaggcattagcccaagacttgagccaattctcatacctggacactcttgtcctttggtacatggatgatttacttttagccacccattcagaagccttgtgccatcaagccacccaagcactcttaaatttcctcgctacctgtggctacaagattccaaaccaaaggctcagctctgctcacagaagtttaaatacttagggctaaaattatcsaaaggtaccagggccctcagtggggaacatatgcagcctatactggcttgtcctcatcccaagaccctaagcaactaagagggttcttggcataacaggtttctgccaaatatggattcccaggtatggcaaaatagccagatcattatatacactaattaaggaaactcagaaagccaatacccatttagtaaggtggacacctgaagcacaagcagctttccaggctctaaagaaggctctaacccaagttccagtgttacgcttgccaaaggggcaagatttttctttaaatgtcacagaaaaaaacagaaatagctctaggagtccttacacaggtccg

SEQ ID NO: 212369 - DNA, 580 bp, Homo sapiens
agcaaggcctagaccatgccattctttctcagaatttaagtgcaaacagtgggagttctagaagagagacattcttgtttcttgagcttgtaggctgttctttagcacctatttcccttcttaggtcctgctctaacctaggacagttgacagtgtatgccccattcccatcttaaggagactcacagtggaataatagagaaaatacagcattaagtattattcattttcaaatgactccatgcatgaggtttccattttctaatttgaactgtacttggccaggcctaagccattcattttttacttctagcttaaagtgaaggttagctcttgacattcttggataaatttatggaacaagagctctttctgtgcctatctgtctctgtcttttcttactttttccttgtctctgtctctckcaccccccaacacccctccccacacaccttcatatatggacaagaaataatgaatgggaataaggccatcaagtccaaccgttcatacacagaaatatctctccattaaaaagaaaacaaattccagagacaaatttttgcccaacatacactca

SEQ ID NO: 212370 - DNA, 603 bp, Homo sapiens
ccttaatgatagcaaattcagaagaatgctgagagcagaagtaaaatttcaatgtaatgagtcaaacggagatgtgaaattggacatgattcatacaggtaacactttttcaaagtttgaaagagaaggggaagaactaaatgtaaattatttggggaggataatggattcaagggagggttattttctcaacttttaaatttgaaataattatagatccgtaggaacattcaaagtaatatgcaaaagatcccaggcagtatcaaaaccagagaaaacaatttagtaaaatccataaattttattcagatattatcctttatacattcactcaggtgtgtgtatgtgtatgtgtggccccatgaaattttattagatgtgtatctttgtgtaaccaccaccacaatcacaacacaatataaaaaaatacaactgcataagactctctcttgctatccctttatagcragatatatatccctttatacccatcccttcttcactccccaaacctttgctatcaccaattttctatagatccccataattagattatttcatggagtttttataggtggaatttgctatatacatatattatta

SEQ ID NO: 212371 - DNA, 580 bp, Homo sapiens
cttattgatccaacacttctatacatataaagtagttttaaattgttattctatagcactgtgagaagcaaatttacaaactatgatacaatgtttacataaaattatttkttgtctttagtctttataagtatctactcaaaatactgttatccaacttaagtcagctcattttctccaccacatacatgtaaccatagtatggttacatgattctttgtaaaagagttagattcatttgttttagtttgcattctatctcgagttctctcaattttgttatctcataaaaatttggattctcctaaatttgcatttttaaatttttataggtacatagtaggtgtatatatttatgaggcacttgagatgttttgatactggcagacaatgtgaaataatcacatcatggagaatggggtatctatcccctgaaacctttatcctttgcgttacaatctaattatactcttaattattttaaaatgtacaattaaattattactgactatagtcaccctgttgtgttatcaaatagtaggtgtcattcattctttctgagtattatttttgtagccat

SEQ ID NO: 212372 - DNA, 497 bp, Homo sapiens
atcatggagaatggggtatctatcccctgaaacctttatcctttgcgttacaatctaattatactcttaattattttaaaatgtacaattaaattattactgastatagtcaccctgttgtgttatcaaatagtaggtgtcattcattctttctgagtattatttttgtagccattaaccatctccccactccactacacttcccagcctctgataaccatccttctactacctctatccatatgttcaattgtttctgtttttagatcccaaaaataagtgagaacatacgatgtatgtctttctgtgcatgttttgttcacatagcataatgaggtggcgctccatccacgttgttgcaaatgacagaatcacattcatttttacggctggatagtactccattgtgtatatgtaccatattttctttattattttgttgatggacacttaggttgcttccaaattttggctattgtgaatagtgctgaaacaaa

SEQ ID NO: 212373 - DNA, 497 bp, Homo sapiens
atcatggagaatggggtatctatcccctgaaacctttatcctttgcgttacaatctaattatactcttaattattttaaaatgtacaattaaattattactgactatagtcaccctgttgtgttatcaaatagtaggtgtcattcattctttctgagtattatttttgtagccattaaccatctccccactccactacacttcccagcctctgataaccatccttctrctacctctatccatatgttcaattgtttctgtttttagatcccaaaaataagtgagaacatacgatgtatgtctttctgtgcatgttttgttcacatagcataatgaggtggcgctccatccacgttgttgcaaatgacagaatcacattcatttttacggctggatagtactccattgtgtatatgtaccatattttctttattattttgttgatggacacttaggttgcttccaaattttggctattgtgaatagtgctgaaacaaa

SEQ ID NO: 212374 - DNA, 598 bp, Homo sapiens
tttttttctaaccccttctgttcttggaaggatccagctcatgcttctcattttcccagttaccatactcagcgctggtccaactctccctctagtggtaatttgtttcatctgcccatagttacctaaaactgtatgctttakattattggcattcaaaagtttgactgctattcataataaaaaataaattttatatctccacaccgttcctacatgcatacataactaaaataaaaatttcacaaaacagtatttccctaaatttgtgaagtatactgtggcattttctattcgattctatctactttcctttagaaaattatgttagttgttacccactgaattcaaccaccaacaaactgcaacccatgctttgaaaaaccatgctttagactattattaaaactgtattaaccttgtgatctacaaattggtatttctcccaaatagagacacacagacaagcacacaaaagcttcctgtgaccaaatacctgatgacctgcaaaccttcttttatttttcttttattacttattttattttcctaacacatttgcatataatgacttacaaaaatcttgcagtgaagaaac

SEQ ID NO: 212375 - DNA, 527 bp, Homo sapiens
agaatgtcagcccttccacatgagaaagaatcaatgcaagaattctggaaactccataagccagcgtgcccccttacctgcaaacagacactctagcccctcagaaatgataattagctagattgagatgactgaagtgatggacatagaatttagaatctggatggtaaggaagctcaatgggatcaaggagaaagtwgaaacccaatccaaggaatccagtaaaacaatccaggagctgaaagatgaaatagccatttgaagaaagaaccaacctgaacttctggagctgaaaaatttacttcaagaattccacaacacaattggaagtatcaatagcagaatagatcaagctgaagaaagaatctcagagcttaaagactggctcttcaaataagctctctcatacaaatataaggaaaaaagaattttacaaaatgaacaaaactttcaataaatataggattatgtaaaaaagttaaatctacaactcatgggcattcctgaaagagaaggagtaagtaatt

SEQ ID NO: 212376 - DNA, 604 bp, Homo sapiens
ctttcctatatagtcggcaatctagtctctcttgtgactctgacagtaacaaaataggtaagaagttggtgcataaagatgctttgttgactgaaaacagaataagtttattcatgaatgacaagaacacctaggaaattcagccttccacttatatctccaatcatctacagtgcaccttgctacacaggacattagagsatctgtaaacagcctgatttctggaaagcgataaaagctggtacttaagagaccagaacttgaacctccttcttacttctcaaacctgatcattaggagataaagaaggctgcagcctacctttttggggtcatggaggccaatccagacattgaagtcatcagtgccactctccttaatcagtgaggccacaaaggcaccctcggcctgggtgagcacagacaccaggttgcccgaattcatgttctggcaatagagctgttgcagaagaaaatggagcactcagtggaggaggaagttgtgacggatatactgagtcctccaagaggacgggtcagaaaaaggacagcagagtaatgtccgtgatgatgctgtcactgaccaccaggttctttgtgctggg

SEQ ID NO: 212377 - DNA, 518 bp, Homo sapiens
tatatgaattgggacaaatggattaacaaaatataataaaatactaaacagaatttaaatcgaataaagtagatatctatatttcaacttggactagtatcaaagccataacattgaatacaaaaattcagttgcaagaagttataagctatttgataaactttatatatggttttaaaagacagattaatactaaattttatttattaatcaattcttatacagtttaaaaaataaaaatctgaaatgtaagaatatatattacaatttgtcatagtatttgcctaacaattttaaggttyttttttctttatataaaaactgatgatgggcctggtgtggtggctcaagcctgtcatcccagcactttgggagactgagatgagaggatcacttgagcccaggaattcgagaccagcctgggcaacatagcgagaccccatctctacaaaaaaagtatatatatatatatatatatatatatatatatatccagatatggtggcacatgcctgtag

SEQ ID NO: 212378 - DNA, 578 bp, Homo sapiens
tctaactacaaaacttagggtttcttatcttttcattcatatgtgataccttttatatatttttttcttcatgaatttttcttcatttgcatttcttcttctcataaaaactatccttgagctcggtgcagtggctcatgcctctaatcctaacactttgagaggccaaggtgggaggatcacttgagcccgggagtttgaaatcagcctgggtgggcaacacggaaagagcccatcctacaaaaaatttaaaaaattagccaggcatcgtggtatgcacctgtagtcccagttrccaggaaggctgaggtgggaggattgcttgagcccagaaggtggaggctgcagtgagctatgatcacaccactgcactacagcctgggtgacagagcgaggccccatctcaaaaaaaaaaaaaaaagaaaagaaaaaaaattctttgatattttcagtaacaatattgtagttttcagtttcaattcttttaagtttttctcaaaaaattctcaattgcttattttctcttttaggagataagctgttattttaactctgtctttattatctaaggcacttcc

SEQ ID NO: 212379 - DNA, 578 bp, Homo sapiens
tctaactacaaaacttagggtttcttatcttttcattcatatgtgataccttttatatatttttttcttcatgaatttttcttcatttgcatttcttcttctcataaaaactatccttgagctcggtgcagtggctcatgcctctaatcctaacactttgagaggccaaggtgggaggatcacttgagcccgggagtttgaaatcagcctgggtgggcaacacggaaagagcccatcctacaaaaaatttaaaaaattagccaggcatcgtggtatgcacctgtagtcccagttgccaggaaggctgaggtgggaggattgcttgagcccagaaggtggaggctgcagtgagctatgatcacaccactgcactacagcctgggtgacagagcgaggccccatctcaaaaaaaaaaaaaaaagaaaagmaaaaaaattctttgatattttcagtaacaatattgtagttttcagtttcaattcttttaagtttttctcaaaaaattctcaattgcttattttctcttttaggagataagctgttattttaactctgtctttattatctaaggcacttcc

SEQ ID NO: 212380 - DNA, 586 bp, Homo sapiens
ttttggttctatagtcagtgaagcaactgctaatataaactgtaggctcccctgaagttaccctcttagcatctttctaatatactgtctctaccttgtgaacaagctttgctatgctgcactcctcctatctgaatgtctctctgatatcacccatggcgcaatcagtatttctgtcctcagaattttctgatgcccttcagtagtgggagtggtttgaaccaaccctcagtaacaatctcacttttctctcctgagttgtatatgctaaacaactcagcagttttagccaaacttcaagagaactcactgaatagccctattcaatttctgcaaattcctgcaatctgcatatgtactggttacaacaacttcaaatattatctgagtagatggatcgtaagtgtccagtgaaaatatctgtgccaacacccttggtatatctttaacacttgtttctgcaaaagccccactcaaattcagatttatttttagtgacattayggttcaggccaacaggattaatagataaatatgattcaaccaaaaccccaaaagccctgccagtctctaagtttcctgccta

SEQ ID NO: 212381 - DNA, 503 bp, Homo sapiens
agagcctaatacacatgtttttaataacaacttgtcacttacaataatgtatgcacctggctgttaagtttaattttaaattcaaagaaaagctttaaaaaattgtcccttactaaagttaatgagatttaaaggtaaagtccagtctcacattttaascattccttatggctaaatgttgggcaagaagtgaaatgatgtacacacttaaaatgtgatttcctttacaaagaaaaaggttcagttagcactcaggaggccacagttgtttccctattggtgaataacttccagttttgctctgggcaagtgctttaatctctaggacacaatctgagcactatgaataaacatatatatgccactttcccctcattaatgttcggattttgcagtgctgccaggaaagagctttaggattttgtttgtttgtttgtcttctcagctacatagcagagcatagtagccaactttattcctcaaaatgttagagaaatagtttt

SEQ ID NO: 212382 - DNA, 640 bp, Homo sapiens
ttacaggtgaggagccagttaagaatggtctagtctgggtgttaattatgcacagaaatccactggctttgttttgaagatagctgggaatttgggataggattagaggggttataattgcgaaggaaagcccttgctttgacgtctctgacttaggtatctatctaaatattgcaaaataattataataggtgtaaccctgaacattggctttaggcatagtatgattttagagatgaggaaaagttgtccatatatgaatatctgccaacatttcccccatcatctcagtgttaactttcttttctgagaaatgaattcattcattctttctacaaccagaagtaaggaagattcatcagttttaggtggagtagagaggaagattcaggtgaatttcttttggacaggtgagaaatttctaaagcagggcctcaaattggaacttgtgtatgttgctktgcagggaggtgtaagcaagctgggtggtcagcctgggaaagtcaggtcttttgttgcatcacaatttatagccctgactttgggatatgtgtaataatttcgcaagtattttcagtctcttgggcacagtggctctaaatgaaagcgtgaagaaggtagttacatcagcatactccca

SEQ ID NO: 212383 - DNA, 284 bp, Homo sapiens
caagtctgatttctgcctctcaccagtgggtractttggctgcatcaccagcctctctgagccatctttgtctccacctacaaagtggggttgtggtgcccccttgcaggcccactgtgagcatagggcaagtgcatgtccgggtcagccagaacccctggcatgtggtgggtggctgatgcacaccagcttttatcactgctgtctgtgaagacggactgaccacacagtcacatgcttcatttgaagcagatttcagttggctcagatagtcagaagaaaat

SEQ ID NO: 212384 - DNA, 361 bp, Homo sapiens
tacaacatttgaaggctttatacagcatttatgacagttgcaaacctctctgaggcctacatgcttgtatggattcacgatcttacatgttgccctaagcccaggtataatagtcaacatctcttctgtaggctgagttcaaaactgagttccattattatgcctgtcagctggatccagaaatgagtcaccatcacacctgtgccagagccacatatgaaggtcacaattccaacttgttactatattcacttkttagactcaggacctcaacagtgggctttggacatgtgggatggtgacaacatttgctttcacctgggtgaaatcaaatcaagggtcctaatctgaactttttgct

SEQ ID NO: 212385 - DNA, 361 bp, Homo sapiens
tacaacatttgaaggctttatacagcatttatgacagttgcaaacctctctgaggcctacatgcttgtatggattcacgatcttacatgttgccctaagcccaggtataatagtcaacatctcttctgtaggctgagttcaaaactgagttccattattatgcctgtcagctggatccagaaatgagtcaccatcacacctgtgccagagccacatatgaaggtcacaattccaacttgttactatattcacttgttagactcaggacctcaacagtgggctttggayatgtgggatggtgacaacatttgctttcacctgggtgaaatcaaatcaagggtcctaatctgaactttttgct

SEQ ID NO: 212386 - DNA, 361 bp, Homo sapiens
tacaacatttgaaggctttatacagcatttatgacagttgcaaacctctctgaggcctacatgcttgtatggattcacgatcttacatgttgccctaagcccaggtataatagtcaacatctcttctgtaggctgagttcaaaactgagttccattattatgcctgtcagctggatccagaaatgagtcaccatcacacctgtgccagagccacatatgaaggtcacaattccaacttgttactatattcacttgttagactcaggacctcaacagtgggctttggacatgtgggatgktgacaacatttgctttcacctgggtgaaatcaaatcaagggtcctaatctgaactttttgct

SEQ ID NO: 212387 - DNA, 467 bp, Homo sapiens
ctggttctggcgttagctccaagatcctcatatcttgatgctggatgaggtcatcttgtcctaagtgaaacagagcaaaaacaaggtcaaaagttaccatggaaaactaaatattcaaaatactcagtgtttcctgtaggtagttctaaagatgattagaagttccatctctggcaaaatgttaaatgaaaaaagcaaaaagtttacaagtactatggtaactggtaaattttactgtatatggcktctctttaaaaaaaaaaaatttttttttttttttttggtgacacggtctcactctgtcacccagactggagtgcagtggagtgatcacagctcactgcagccttgacctcctgggctcaagtgatccacccacctcagccttccaagtagctagaatcacaggcatgtgctaccatgcccagttaattaaaaaaaattgttttagagacagggtctcacta

SEQ ID NO: 212388 - DNA, 389 bp, Homo sapiens
actattaccccattttgcagatgaagaaaacagagtataggattctaattcatgctcttaacccattatacatattaccatcactattaccttataccacctgttccaagagcacatatttctagtgctctactgcactgttcaggaaatagtgacatgggaaatgtactccccaccctactttccattcctatccaactcccttccctacttgcccacagtttccctttccattaaactcctaacagtccctttgccatgtgtcatctcctgatgtgcatctaacacattctgttctaygttctttaaatttcaaaacgtggtactaactctacatttccttgaaacccagagaagaaagtcattccaaattaagatttgagcttttt

SEQ ID NO: 212389 - DNA, 569 bp, Homo sapiens
ttgtcagatgcattgtttgcaaatatttcctcctattccacagattgtctgtttactctgtttattatttcttttgctctgcagaagctctttaattaagtcccatttttctatttttgtttttgttgtgytaccttttgagaatgtagacataaattatttgcctacatcaatgtccaaaagagtttttcctaatgtttcttctaggatttttatagtttcaggtcttacatttaacatattaatccatcttgaattaatttctgtacatggtgatagacaggggtgtagtttcattcttctgcatatggctatccaattttcccagcaccatttattaaacgatgtgtcctttctctagtgtatattcttgtcaacttttgagttggctacaggtatatggctttatttttgggttttctgttctgatccattgatctatgtgtctatttttatatacaggttgtttttaaataaattatcctgataaaaggtgtggttatctgtcctgcccatttatcccacaagatacacacgacagacaggccacagataaaatatctgaattc

SEQ ID NO: 212390 - DNA, 569 bp, Homo sapiens
ttgtcagatgcattgtttgcaaatatttcctcctattccacagattgtctgtttactctgtttattatttcttttgctctgcagaagctctttaattaagtcccatttttctatttttgtttttgttgtgttaccttttgagaatgtagacataaattatttgcctacatcaatgtccaaaagagtttttcctaatgtttcttctaggatttttatagtttcaggtcttacatttaacatattaatccatcttgaattaatttctgtacatggtgatagacaggggtgtagtttcattcttctgcatatggctatccaattttcccagcaccatttattaaacgatgtgtcctttctctagtgtatattcttgtcaacttttgagttggctrcaggtatatggctttatttttgggttttctgttctgatccattgatctatgtgtctatttttatatacaggttgtttttaaataaattatcctgataaaaggtgtggttatctgtcctgcccatttatcccacaagatacacacgacagacaggccacagataaaatatctgaattc

SEQ ID NO: 212391 - DNA, 616 bp, Homo sapiens
gctggtcatgatactgttggctaatgaaagactagaaaaatggaaaggagagatggcctacatgagctccaaaattagacaagaaaaattatctttgtacttcattttataattataattaaattaacctaaatcaacttaaaattacatagcattttatagtttacaaaataacttattacatatttcatttcatctttttaacaatattactaaaattatttaagagaatttttatcatccccatttaacagataagacaggttcagaaagagtcattctctatgaccacatagtaatgaattcatgggaatacactccacactgatgtctasattcactaaatccttaccaaattcccggattgcatttttgcaaaaattgacaagctaatctcaaaattcatacggaattgcaagggacccagaataacataaataatcttgaaaaagaagaacaaaattaagaactcgaacttcctgatttcaaatttcactacagagctatagtaatcaaaacagtgtggaactagcatatagagatatatagaaatgtacaacaataaaataaaattgagagttcaggaattaaactttagatttagaatcaatttatt

SEQ ID NO: 212392 - DNA, 616 bp, Homo sapiens
gctggtcatgatactgttggctaatgaaagactagaaaaatggaaaggagagatggcctacatgagctccaaaattagacaagaaaaattatctttgtacttcattttataattataattaaattaacctaaatcaacttaaaattacatagcattttatagtttacaaaataacttattacatatttcatttcatctttttaacaatattactaaaattatttaagagaatttttatcatccccatttaacagataagacaggttcagaaagagtcattctctatgaccacatagtaatgaattcatgggaatacactccacactgatgtctacattcactaaatccttaccaaattccyggattgcatttttgcaaaaattgacaagctaatctcaaaattcatacggaattgcaagggacccagaataacataaataatcttgaaaaagaagaacaaaattaagaactcgaacttcctgatttcaaatttcactacagagctatagtaatcaaaacagtgtggaactagcatatagagatatatagaaatgtacaacaataaaataaaattgagagttcaggaattaaactttagatttagaatcaatttatt

SEQ ID NO: 212393 - DNA, 616 bp, Homo sapiens
gctggtcatgatactgttggctaatgaaagactagaaaaatggaaaggagagatggcctacatgagctccaaaattagacaagaaaaattatctttgtacttcattttataattataattaaattaacctaaatcaacttaaaattacatagcattttatagtttacaaaataacttattacatatttcatttcatctttttaacaatattactaaaattatttaagagaatttttatcatccccatttaacagataagacaggttcagaaagagtcattctctatgaccacatagtaatgaattcatgggaatacactccacactgatgtctacattcactaaatccttaccaaattcccggattgcatttttgcaaaaattgacaagctaatctcaaaattcatayggaattgcaagggacccagaataacataaataatcttgaaaaagaagaacaaaattaagaactcgaacttcctgatttcaaatttcactacagagctatagtaatcaaaacagtgtggaactagcatatagagatatatagaaatgtacaacaataaaataaaattgagagttcaggaattaaactttagatttagaatcaatttatt

SEQ ID NO: 212394 - DNA, 566 bp, Homo sapiens
tcttttattttcaaggactattactaagaacagtgttttaaaacaagaatatgttgtttttccctaaaagtaaattattctttgggtcaccaaagcctcagcaaaatgccygaaattactaagtgacatttcgttcaagatactcatgctagtttgatctaatataatcatctaaggcctccatttttcagcaagaagtccacctgcttgcctgcatcactctttcttattgtaaaaccttatcttcctttccactccccagaccacctggcttacagtatcctcaatgggcactcatattctggtatgtaattcctccttccaacccctgacaattttttaagtttccaccccttttaagccacctcttcatttctgctgcctctctctgcttcttaccaaccccaatacacaccatttccatctcctccagaacacttggtatccaaactccaaaccagtggggtcctaagagctaatctgaaaacacatactgcaacaatgtaacagggaagattgtttgctttattcagagttgacctccacaatcagagatagtccttctg

SEQ ID NO: 212395 - DNA, 566 bp, Homo sapiens
tcttttattttcaaggactattactaagaacagtgttttaaaacaagaatatgttgtttttccctaaaagtaaattattctttgggtcaccaaagcctcagcaaaatgcccgaaattactaagtgacatttcgttcaagatactcatgctagtttgatctaatataatcatctaaggcctccatttttcagcaagaagtccacctgcttgcctgcatcactctttcttattgtaaaaccttatcttcctttccactcyccagaccacctggcttacagtatcctcaatgggcactcatattctggtatgtaattcctccttccaacccctgacaattttttaagtttccaccccttttaagccacctcttcatttctgctgcctctctctgcttcttaccaaccccaatacacaccatttccatctcctccagaacacttggtatccaaactccaaaccagtggggtcctaagagctaatctgaaaacacatactgcaacaatgtaacagggaagattgtttgctttattcagagttgacctccacaatcagagatagtccttctg

SEQ ID NO: 212396 - DNA, 375 bp, Homo sapiens
tctgtttaactctgttaagaaatttatttcatccttatacaaagtcttatttgaagttcaacaatcttcagtcttgctgcctcgtggtctgtgagccctaaggattgargatgtgacaggccatgcctgtcattcacacacagtgggagccagggctctggaaagaactgagaatagctggatcacatgactagataccagtataaaaggctgcttaaatggttctcaggagaactgagaaccatttatagtggttatagattactcgacatcctagaaaaaataaatcacacagggagaaattaagagagcaaattaaaatgtttttcctagaaagttagaagagaattgcttacaaattacttcacctgtagt

SEQ ID NO: 212397 - DNA, 470 bp, Homo sapiens
gaaatcgcaccattgcactccagcctgggaaacagagcgagactctgtctcaaaaaaaaaaaaaaaaaaaaaacaaaactgaagctatttaatctgtttaactctgttaagaaatttatttcatccttatacaaagtcttatttgaagttcaacaatcttcagtcttgctgcctcgtggtctgtgagccctaaggattgaaratgtgacaggccatgcctgtcattcacacacagtgggagccagggctctggaaagaactgagaatagctggatcacatgactagataccagtataaaaggctgcttaaatggttctcaggagaactgagaaccatttatagtggttatagattactcgacatcctagaaaaaataaatcacacagggagaaattaagagagcaaattaaaatgtttttcctagaaagttagaagagaattgcttacaaattacttcacctgtagtctt

SEQ ID NO: 212398 - DNA, 522 bp, Homo sapiens
ttgacctaaggaccttaagcagaaaaacaggttactcagctactccttttttaaataacgaaaatgaaatgagagaaagtagatggtcattattattactattatcacagctgtcattccctcattgatgcctcgttaagatggattttagtagatcacaatctaatatactactatattgaagacacttttttaaaaaagcaaaaataaatcaataaaatgttaaaagaccactgatgaaatcatggartggattaattagggtgtaatattcagatcatattcttgagttgggcattttttaaaatgttgtttttcctgtattcatgtttctagggcgttggctctgactttaatctgtcaggattcaaaccctaacagatcctcattcgaacatttaccatgtgactcaggacaagttattaacctaaattccaatttcctcacctataaaatgggaataatgagaacactgatcccagagagccactatggtgattccatgagcgatgtgggtgaagt

SEQ ID NO: 212399 - DNA, 602 bp, Homo sapiens
aagaaggatcttttagtctctgccctcagtttataggcctggctgctggtcctctgaaaaagaggatgagatcttgacattttgcatgcatatttttgcttaggtcccctgttttaaatctagctctattctctgttttccattgtgtccggtgttcccaaatccaaaggctgatttattcgatgtatgcaaagagtcaatccctagtctcttggaagaggtggtcactgggctatctgggagtagaactaagttcctgaaggcccaaatgtccyctgtgtggcctttcaccctgaggtgagccatctctaggtctgttgtaggtgtttactgaactcaaaagagtatcttggcaagagtttcttcctaggaccctaggacagatctctgcatgataataggataatagggatcttctgctttgtgaatttcttgcacatgaagctgttttccgacaattccaatgtacttgtgtgggagaaatgcagagaccctgacagctggatactcccttgtatctctgttttggaattagctttggaatgatttgctagtaccaatggaaaaaaaagaatcttgaaccaagtctgagttgtcattct

SEQ ID NO: 212400 - DNA, 561 bp, Homo sapiens
tctgctttgtgaatttcttgcacatgaagctgttttccgacaattccaatgtacttgtgtgggagaaatgcagagaccctgacagctggatactcccttgtatctctgttttggaattagctttggaatgatttgctagtaccaatggaaaaaaaagaatcttgaaccaagtctgagttgtcattctcacaaatcttcaaagacaggctgacccttctttggtctgactcttgatcactccattttcagctccatacttcagtcgctcattttggagtactcgaaacaatttctgagaccatctgtcattgccattttctgaggccctgtggttgactacatattggtatcyatctctgcaggcatgtaagatttaggttcttctcttcactttcagtcattataaattttattagcatttcttcttaattaattgttttctccacttctggttacttgactgctacagatttataactttttcttttctttacacttattgtggtaggatttgaagtggaggcaaatataaatgcatgtatcctctgccacgtttatcta

SEQ ID NO: 212401 - DNA, 456 bp, Homo sapiens
cagtgtctctcacacatcatgttcctgccatggtacctgtgattttccttgtttggaagactttgtctgggaattaggtttttattacactgttttgattatactgtaggtcacttgttctctctgtaacttcactgactcaaattgtaatatgtctggtgccacactggctctakaaatatcagtagctgtatcattcaaaaccagtgaaataaaaggatttttctgtttcaaacacataaaacgcaaaacatagtcttcttgctgaagaattgtttgctacgtgtaatctaatcagaaaataactataccttaaatttaatgaggaacaattttttaattcttctggtttttgtttataaatgttaaaacgtaccacatgactattttctgctaagctattaaggacttggaacttctgctttcttctgtgctaatacagaccaagatattata

SEQ ID NO: 212402 - DNA, 645 bp, Homo sapiens
ggtttctgggttagtgtgattctgctagactatgagttccaaaagaacaagaccttgactttgtgttcactgcatttatctaacatttaaataaaacactgggagatactcgtcttatgataacattagatgaawgaacaaactatccagtgtcaccctgaacacatccctttccatgaaataaggaaatggcactgaaatcaactcttagaaaatggatccaagaataaacaggaatgatgttccatgaagctgaaaaatacaggaaagctgggagcagaggaggtttatgctgcagtatgaggactgcaaagaccaactacatacaaaacaatcttgatactcagactttgaggtacctactttattgttcccacagaggctagtctttctgatatgcaataaattagaaactgaaaatgcaaatttgtcattcaatttgcatttattgtggtagcatacttaatccctgaaaagatccatagaactcaaataagcaactgcaaagaaaatattagaactgtgataagtgggcaacaaaattagaagacagatcagctcatctctaacattcctatagcaacttaggatttgaactttcatgaaaagttctaatgtgttggaaagaacaacatcatagcaata

SEQ ID NO: 212403 - DNA, 521 bp, Homo sapiens
ggaacaggcaatgtataatgtggatttcctgaacaactgttcacattctaggggctggtcaagcaaagggaacagataaggaagcccttggctgtcatttcccttgaactattgtgaggatctcagggcctagggaaagaatcctcctgagtcttctctctttcataatagtttcatttttgtccttgtcatacattttcaagaatacagagactgatgtaggcatctctggaatagtcttaggaaaattattctgggaacaggatcaatgaagaggattgtgaaaatgaacatggagacttgaatcccctgtgccttctagaaacggaaggacagaaaaatatagcaatagtctaatgcaaaaattgtcatacacatgccaacctcttaaaacagacaatgccaccaagcgtcaaggtgaccttagaacytaagaatgtggaaagaagaagacacacatttggcaggctaccccagacccatgtggagcagaggtggtaaatatctcacatgttgcaatc

SEQ ID NO: 212404 - DNA, 459 bp, Homo sapiens
agaaactggcaataggaggacaaaaatctcactccaaagcctagactatttaagattatgttatatgactattaaaccagtcatgattcttctttattccaagagtttgtgaggaagttatctgcgtcatcctaaaygtgggaacatctattattccttggtacatttttcctatgtgctgtgcctttccagtcccaacccaacatagatcacgtcttctggattttggatctggtttcaatctccttcataacctactaattatctacagagattggcagtagtcagtattttattaagaatgtttgggaaaatctcagttcatacatattgtaagctggaaagtacatttagaaagccatatctaatctgaactgaatttttgatgcatacaaccctccttttcaaaactcactcagccatcctgaaaattttccctcctataagggacatattatt

SEQ ID NO: 212405 - DNA, 459 bp, Homo sapiens
agaaactggcaataggaggacaaaaatctcactccaaagcctagactatttaagattatgttatatgactattaaaccagtcatgattcttctttattccaagagtttgtgaggaagttatctgcgtcatcctaaacgtgggaayatctattattccttggtacatttttcctatgtgctgtgcctttccagtcccaacccaacatagatcacgtcttctggattttggatctggtttcaatctccttcataacctactaattatctacagagattggcagtagtcagtattttattaagaatgtttgggaaaatctcagttcatacatattgtaagctggaaagtacatttagaaagccatatctaatctgaactgaatttttgatgcatacaaccctccttttcaaaactcactcagccatcctgaaaattttccctcctataagggacatattatt

SEQ ID NO: 212406 - DNA, 494 bp, Homo sapiens
ggtttgagcctgtggcaaccgagtaaacragccacacccctgtcgcaagttccacaaagggatcaagggaattatcccatctcggaaccagccctttaagtttgctgatgagcttttcttttggtttgagttcttcaggaagcaggccctatgtgaaggattgcagtgcctgtgatttatgaaagagttaatctcaggacaacaagaagtaagagggagaagaaaagcaaggatgtgattcaaggtaaagtctcaaccctgtctgatcctacaggatgtgtgaaaccacacctcagtctatactgcctagaaacaaagggccagggcttctgtgtccccacacaattcagccactggctatgggttgctccaggggtgtgtaagtgcccaggtgcttgtcctgtcccaaggtgaggctgccctagtagctcaaggctctccttggagtgccactactctgaggcgttcaaagagcacagaatactggcaaaggg

SEQ ID NO: 212407 - DNA, 494 bp, Homo sapiens
ggtttgagcctgtggcaaccgagtaaacgagccacacccctgtcgcaagttccacaaagggatcaagggaattatcccatctcggaaccagccctttaagtttgctgatgagcttttcttttggtttgagttcttcaggaagcaggccctatgtgaaggattgcagtgcctgtgatttatgaaagagttaatctcaggacaacaagaagtaagagggagaagaaaagcaaggatgtgattcaaggtaaagtctcaaccctgtctgatcctacmggatgtgtgaaaccacacctcagtctatactgcctagaaacaaagggccagggcttctgtgtccccacacaattcagccactggctatgggttgctccaggggtgtgtaagtgcccaggtgcttgtcctgtcccaaggtgaggctgccctagtagctcaaggctctccttggagtgccactactctgaggcgttcaaagagcacagaatactggcaaaggg

SEQ ID NO: 212408 - DNA, 494 bp, Homo sapiens
ggtttgagcctgtggcaaccgagtaaacgagccacacccctgtcgcaagttccacaaagggatcaagggaattatcccatctcggaaccagccctttaagtttgctgatgagcttttcttttggtttgagttcttcaggaagcaggccctatgtgaaggattgcagtgcctgtgatttatgaaagagttaatctcaggacaacaagaagtaagagggagaagaaaagcaaggatgtgattcaaggtaaagtctcaaccctgtctgatcctacaggatgtgtgaaaccacacctcagtctatactgcctagaaacaaagggccagggcttctgtgtccccacacaattcagccactggctatgggttgctccaggggtgtgtaartgcccaggtgcttgtcctgtcccaaggtgaggctgccctagtagctcaaggctctccttggagtgccactactctgaggcgttcaaagagcacagaatactggcaaaggg

SEQ ID NO: 212409 - DNA, 659 bp, Homo sapiens
tgccaattctaaatgtgagagcatctaatgatgtagcctgaaatatatatgaagcaaaactgagaactaaaaagagacatagacaattacacacacatagagaaaaacttgagcacccattttttttttatgaaataaataaggagttattaccagatgggtgctctgggattcaagaccaggtttgtctgaccccagacctgagacacaataactctgagcattactttgccaagtttacatcgtcttcacctcttgaacctacatcgttctctaagttggatttcctttgcttgattttcattttgtgttttcgagatcactctcagtgagtggttcatcatcacatcctaaataacctattttatagttcctgacataccacaggtattcaataactatttgctgagtgaacaccatcaatgtcttatgaaaataatttatragggtaaagtcagcattgttttgttgtcttcggacattcaggcttgtgatctttgaaccacaattctgagccctattttagagtgaagtgaaacatatcacatctgatatttttaaactgttgccagtgcatacgctttgaccacttcttgctcctttcattattatcctgacaaattgtttgtacccaaatccgcaaccatttttggctaaat

SEQ ID NO: 212410 - DNA, 464 bp, Homo sapiens
ttttttgtacaagcaagtcctttttttgtacatttatgagtcataaatttattccgttactaaagataaatagggtattggtattctcttcattcagctgtttaatcaataggtcaatcactcactaaataacttgtataattagttaattaagtccaaaatggtggtggatttggaaacaatgagtggagttacacaatattcattttggccaaggattcatccaatgtatcttatctgaatatcaattatatgataataygtaattttactattggtctacagcattttatagtagagataagttatggattatgtgatcattttcattcaaactcagaaaaccgaaagctgcatttaagggatgacagtattccattaaaggttgatgactacttcccattaatagattctgaaaccttttaagagaaagtaattgatattcaattttaagaaaggcgaga

SEQ ID NO: 212411 - DNA, 464 bp, Homo sapiens
ttttttgtacaagcaagtcctttttttgtacatttatgagtcataaatttattccgttactaaagataaatagggtattggtattctcttcattcagctgtttaatcaataggtcaatcactcactaaataacttgtataattagttaattaagtccaaaatggtggtggatttggaaacaatgagtggagttacacaatattcattttggccaaggattcatccaatgtatcttatctgaatatcaattatatgataatatgtaattttactattggtctacagcattttatagtagagataagttatggattatgtgatcattttcattcaaactcagaaaaccgaaagctgcatttaagggatgacagtattccattaaaggttgatgactrcttcccattaatagattctgaaaccttttaagagaaagtaattgatattcaattttaagaaaggcgaga

SEQ ID NO: 212412 - DNA, 484 bp, Homo sapiens
atgccttcacagtcatcaggatagagaaggagtactcagggtctgggctttgcttttctcttaagaggaaactctgttagaaataaaaaggtctacaggatattgatttttctctttttttctttgaaaaaaagactttttcacattcttttaattttatggacatgatgatgccagaagtaacatttgcctacttattatgtgctgatcattgtgttcctcattacatttgttttctcatttgataatacaacagcctaaaatagactgatggtaaagagagasagacagagagagagagagaaagaaagagagagtgagagagagagaatagaagatagataggatagatgatagatgatagagagagagagagatagatgatagattagatagatagatagatagatagatagatagatagatagataaatacacacacagagaactatacatgcacaaaaaaagaaagaaagggaaaaat

SEQ ID NO: 212413 - DNA, 401 bp, Homo sapiens
gcaggagaatggcgggaacccgggaggcggagcttgcagtgatcgcgtcactgcactccagcctgggggacagggcgagactccgtctcaaaaaaaaaaaaaaaaaaaaaaaaaagaacaaaaactcctggacataaaacagaaagcaacccacagaaggctctgaaatgtggagattagaaggtgtagcggctrgggacctcagaattccagggaagaggaaggatgctgtttacttttgcatcctaaacagcctggccctccaacctaggaccaccaaggagcacaaagacaaaaagctccaagaaaatgttgttctaggtagacagccgactgggaggagggaggcgctgcagattgatctcttttaactgtaaccactcctctaacagttaaggagc

SEQ ID NO: 212414 - DNA, 401 bp, Homo sapiens
gcaggagaatggcgggaacccgggaggcggagcttgcagtgatcgcgtcactgcactccagcctgggggacagggcgagactccgtctcaaaaaaaaaaaaaaaaaaaaaaaaaagaacaaaaactcctggacataaaacagaaagcaacccacagaaggctctgaaatgtggagattagaaggtgtagcggctagggrcctcagaattccagggaagaggaaggatgctgtttacttttgcatcctaaacagcctggccctccaacctaggaccaccaaggagcacaaagacaaaaagctccaagaaaatgttgttctaggtagacagccgactgggaggagggaggcgctgcagattgatctcttttaactgtaaccactcctctaacagttaaggagc

SEQ ID NO: 212415 - DNA, 401 bp, Homo sapiens
gcaggagaatggcgggaacccgggaggcggagcttgcagtgatcgcgtcactgcactccagcctgggggacagggcgagactccgtctcaaaaaaaaaaaaaaaaaaaaaaaaaagaacaaaaactcctggacataaaacagaaagcaacccacagaaggctctgaaatgtggagattagaaggtgtagcggctagggacctcagaattccagggaagaggaaggatgctgtttacttttgcatcctaaacascctggccctccaacctaggaccaccaaggagcacaaagacaaaaagctccaagaaaatgttgttctaggtagacagccgactgggaggagggaggcgctgcagattgatctcttttaactgtaaccactcctctaacagttaaggagc

SEQ ID NO: 212416 - DNA, 591 bp, Homo sapiens
tcttatgtgatagaagcaaagtgtcatttccacggaggagatttcaaascctgccatggctgcagatgcctttcatgggagctgggaaaggaattctctgtattgttaggacaaaattggcccctgccttttgacatgacccttggatgggcaacagtgttttatttaataattaactattaaatgaactaccaacatttattcaattatttatgtatttaatgatagttttgaatttacagaatagttgtcaagacaatatagagacttctcatatatcccatacccaatttttccctatagttaaaaatattccatgtccatggtacatttgtcacaatgcatgaacaaatattgatatattattattaactaaagtccatatttattcagatgtccttagttttcacccaatgtgctttttccatcctgggatccaagagaccacattgcattcagtcatcacgtctccctaaactcttcttagctgggacagtttctcatactttgtagtgaattgtatccactattcaacttttttgatgatcttgacagttttgagaaagctagtcagacattttataaaatgcc

SEQ ID NO: 212417 - DNA, 605 bp, Homo sapiens
tatcaactttggggaaaaaagacatcatttattcatagcattccgtttttagtagtggtatttccatttacaaaatatagtaattcttgatcacggaaaatatcaaaacccagaaaatgtagcaattctacacgtgatgttaacatcactctggaacagttggccgaatattatttgatgaatccgagttttctgaaatagacgattctgattattcagacgattctgatgttagttctgtttagaaatagcttcaataacagtttttatattctattttcacattgaaaatcagtcagattggcttcagcctcaaagaatgtgtttatgtaaaattaaatgagtgctggcagtgagctgtacttttcttttttttctaaatgggaaaarggttaaattacctctccaataaaaaaaattatactaaatatcttggtgatttatatagctctaattctctctatctctgtctctttgactttttttctctctctctttacctaaattatatattctgctgctattctggcttgccgcaggtggttgggaatatgtggctggctgtggaatcttgagctgttcattcggtctcacgaaggaagagg

SEQ ID NO: 212418 - DNA, 522 bp, Homo sapiens
gattgactccaattctgaaataagtcctactgtgggtaaaatgctatcaaacaccatgcatgctacagagaatttttttgtgtaaagaagagttggtctacgtggcaaacttcactgtggtcttattccacaaaattgccacagccaccaccctgatcagtcaaccaccatcaacatctaggcaagaccctccatcagcaaaaatactatgattggctgaaggctcagatgagcattagcattcttttagcaataaagggatttttaaaattaaggtatagttattgttttttcgacataatgctattgcacacttcatagactagaatatagtgtgaagacaagttttaaatgcactgagaaaccaaatacatttgtgtwacttgctttattgcaatattcagttgattgtggtggtctggaaccaagcccacaatatctccaaggtatgcctgtgcaaggtctacaccaacaactcacacagcaaagtcatgaaatccactctgtaggccagattaaggt

SEQ ID NO: 212419 - DNA, 495 bp, Homo sapiens
cagcagcttaaatgcttccacagcttctccattctgaacccaataccagacacctcttttgcacttagcagctgtgaggtcctcagacaggtgggtggaacccagagggtgcaagtagaaaccgagacttgttagtgtctggttttaatatattgggaaggaccccagatgtcatgcaatagcctctcattcagattcagagaggagacatggggagcccaacctcacagcctctgcctctgaattacaatacggaattctttctactaccgctgaatttccctgtgcwggtagggggtgggggaagttcaggtgtcctgggtaaggggacatgatatcttcatttcagccattggacagtttgtttttcagcaaacatcctgtgtctctgggacagagcacttgggctgtgctcagaagaagggcccagaccttctacacatggcttcagggagagatgacactactgatccggtcacattctgccttctcctt

SEQ ID NO: 212420 - DNA, 559 bp, Homo sapiens
gtggaagtggatcattataaaggtcttcacattgagtagactggggaagaagaggaggggttggtcttgctgtctcagggtggcagagayggaagaaaatacatgtataagtggacccgtgcagttcaaacctgtgttgttcaagggtcaactgtatatgaatcttcttgcttcagaaaaaatatgtactttgtatacatatgtaacaaacctgcatgttgtgcatatgtaccctaaaacttaaagtataataataataaataaataaataaataatttttaaaaatgtactttgcaaaactatggagatgcagtctagaaagagcatttgcaaatattatggcttacatgcatatggaataaaaaatttattgactttagtgagaactattcaggatcttctgtgaaataaataaagataagtagtaaattggttcaaacaaagcagtataaattcagtaatattgtactcacagttcagggataaacagaacaggactcctggttgaaagctgataaatgtgcttcaaagcatgggacctggtattagatagatcac

SEQ ID NO: 212421 - DNA, 559 bp, Homo sapiens
gtggaagtggatcattataaaggtcttcacattgagtagactggggaagaagaggaggggttggtcttgctgtctcagggtggcagagatggaagaaaatrcatgtataagtggacccgtgcagttcaaacctgtgttgttcaagggtcaactgtatatgaatcttcttgcttcagaaaaaatatgtactttgtatacatatgtaacaaacctgcatgttgtgcatatgtaccctaaaacttaaagtataataataataaataaataaataaataatttttaaaaatgtactttgcaaaactatggagatgcagtctagaaagagcatttgcaaatattatggcttacatgcatatggaataaaaaatttattgactttagtgagaactattcaggatcttctgtgaaataaataaagataagtagtaaattggttcaaacaaagcagtataaattcagtaatattgtactcacagttcagggataaacagaacaggactcctggttgaaagctgataaatgtgcttcaaagcatgggacctggtattagatagatcac

SEQ ID NO: 212422 - DNA, 519 bp, Homo sapiens
tgagggattgctggctagctatgttcatagctactcctaagtatatgctaaataaggggcaggttattcacaaagtttctagaaagggggcggagaatttccagaaccttataaggtaacatccgggcattgtcatcgcatctgtaaactgtcacggtgctggtggcagtgtcccatagcatrcaaatgcattatcattcctagtccaagctggttttagctggtgtctttgctacatcctgtcatgaaaacacaacctactgatcttctacctcaatgatgcctactggggacacagagtgggaacagacacaacactgcctctgcctaaatgaaagaggatggagccttagtatccaggttgatttctgatattaatgaccctaatatggtagcccatacacacgaccagagctaagtcatcacggaaaagtaatggagcttgcatttgctggttttcaagacaacctatttgactagatctacgtgtattcatccatttgtttattcctccaacaa

SEQ ID NO: 212423 - DNA, 570 bp, Homo sapiens
ttggctcaccacaacctccgccacccgtgttcaagagattctcctgcctcagcctcccgagtagctgggactacaggcgcacacccccatgcctggctaatttttgtattttaagagagattgggtttcactatgccaagctggtctcgaactcctgatcygccttcctcagcctcccaaagtgctggaattacaggcatgagccaccgtgcccggcctggcaaagtttctacctaatttttcccattcccgtgcctacaagacccgcctgagcagaaagctatgctggacacttgccggtggaggagagcacttttttttctctctctctctttttgtagagagtggtgaaaagcactagctggcactgccttttagaaatgcatctgatttacatgcaggcctaaaaagagaaacatccaggaccaaggagacttctgcttctggctaaagtcaggtcatttacacagcagtgaaattccaggatcaagtcagcaagatacacagtaggataactgtcaaccatttagcttatatcaaacacattattctgcagaatcctcttaagat

SEQ ID NO: 212424 - DNA, 505 bp, Homo sapiens
gcgtgaaccggggaggcggagcttgcagtgagctgagattgcaccatggcactccagcctgggtgacagagcgagactccatctcaaaaacaaacaaacaaacaaaaaatttgaattagatgacagtatttgtaaaaatcatttcccatatagaattccagagttctagcttctcttaaaaaaacatagaaagacatggaatagtctattccagtgtgaaacaataagaataactaaatttaaaaattaaaaaaaatcctttggctgcagctaagtaataaatgtcccctttagcctggccatgcgttgtctggttctctaacacttattacatcstgactgtaagaaggtaaaattttatagattcctgtcagaatcctataagcattgtgtttatgacactggaatgaagtagccaacaatgcatccatatgatggaacactagtcattcattaaaccatgtaataaatgttacaagttatgtaatatgtacatgattccttt

SEQ ID NO: 212425 - DNA, 572 bp, Homo sapiens
catccgctgtcacaagaacagcacaagaaagacccacccccatgattcagccatctcccaccgggtccctcccacaacacatgggaattatgggagctacaagatgagatttgggtatggacacagatgctaacacccttgaccaatttcctaattgtctgacatttgtatctcctgttttccattcccttttctttttgctggaaaaattctcaactttacattctgacctttctattgaaaatattaatttctagttgggtggattggctcacatctattatcccagcactttgggaggckgtggctgtaggatcacttgagcccaggagtttgacaccaactaaggcaacatagtaagactcatttctacaaaacgtaaaagaaattaggcaggcatagtggcatgcacttgtagtcccagctactcagggagcttaggtgggaggattgcttaaacccagaaggtccaggctgcagtgggctatgatcatgccattgcactccagcctgggtgactaagaaggatcctgtctcaaaaaaagaaacaaagaaagaaaataaaatattcc

SEQ ID NO: 212426 - DNA, 494 bp, Homo sapiens
caataagtggcatccaggcattaaaaaaaaatgaaattgactggaaatagttgcacaaccttgtgactatactaaaaactactcaattacacactttaaaagagtaaactttacagtatgtgaattataactcaataaagctgtataaagtaaaatactagacccagactaatagtgcataaatttaccttttatcactcttttgcttaatgatctacacaatccactactgtctatcaaataaatcgcaaaccattctgccccatttaaaatccttctgaaataaggcaagatgagtaaataaactacttgctgtcccayagctcccaacagaaatatctgaattccaggcagggcaatttcctaactgacccatcccccaaatactttgaaactccttcatgacttccctttatcagtaaaatatttgctgggcattattaaatatcatgcaggacgctatcacttgaatagagaatgcacaaaaaagaaat

SEQ ID NO: 212427 - DNA, 615 bp, Homo sapiens
tattcctttcctggttccaaggagtatgtaagaatggcttgagtttaaatcgacagtttggaaagaattttgaaaattctgaaacaaaattattattaaaattctgcaaaatcgtcctttaaaaaaactagaattttttttcttttttttgctctggtattagtcaattatgtaggttacgttgtttcctgatataaaggcccatataaagttataaaatcagcacacaaactaatattagtcactatcctatttcaaagaactaaatttaaaacaatccaataacatcaccttatctcctatctaataattcataaatgtygtgtttggtaagctacagcacacatttttgtagtgctattattacttaattgctttgctcttgcttctttatgctactgtctatcactgattatggttgtgtcataaaaaaggcaacaagctccaacagaattacaagggagcattcaaatgctttttttattatagtggaattttgtttcaggaaacacatgttgctacattttaaccattccaaacttctgctcctagtccaatcctttagctgtttccacaagttgggggagcaggagcatgctggacaagggaaattta

SEQ ID NO: 212428 - DNA, 601 bp, Homo sapiens
aaattaataatacaaactcttgaacactgggggaaaaaaaggaaatatttytaacttttgtatgaggacaattttgacaatttcattgcaagaaaaaaaaatatatatagactaatttctctcattcagtagtcataaaaatacattaaaaattcagcaaattaaatccagtaatatataaaaaggataatgcataacaaccaagtctgatttacgtaaggaatccaaaataggtttaaattgggaaatcaattaatgtagttcactatattcacagaataagggggaaaactgtatcattaccaaaaaaaaaaaaaaaaaagaataatagcttgattcctctaaaagaaagcaagaaaggaaaaaaaaaaaaaagatgtgacaagtagaaaacaaattgcaagatggtaaacataaacccaaatatatctgtaattacattaagtgcaagtgaaccaaaacagttcagataaaagacaaagtctgtcagactggattaaaaaattattggcatattcaacatcattaatcatccgtgatatgaaatttaaaaccaaaatgaaatacgtcctcacatccacacaaatggctagaactacaa

SEQ ID NO: 212429 - DNA, 601 bp, Homo sapiens
aaattaataatacaaactcttgaacactgggggaaaaaaaggaaatatttctaacttttgtatgaggacaattttgacaatttcattgcaagaaaaaaaaatatatatagactaatttctctcattcagtagtcataaaaatacattaaaaattcagcaaattaaatccagtaatatataaaaaggataatgcataacaaccaagtytgatttacgtaaggaatccaaaataggtttaaattgggaaatcaattaatgtagttcactatattcacagaataagggggaaaactgtatcattaccaaaaaaaaaaaaaaaaaagaataatagcttgattcctctaaaagaaagcaagaaaggaaaaaaaaaaaaaagatgtgacaagtagaaaacaaattgcaagatggtaaacataaacccaaatatatctgtaattacattaagtgcaagtgaaccaaaacagttcagataaaagacaaagtctgtcagactggattaaaaaattattggcatattcaacatcattaatcatccgtgatatgaaatttaaaaccaaaatgaaatacgtcctcacatccacacaaatggctagaactacaa

SEQ ID NO: 212430 - DNA, 460 bp, Homo sapiens
gccaaacaaactgaaatataatcaagaactctttttagatttgttgaaactgaggtcacagggcaaattgctgccctccaaaattagagagagagatgaatatagggagtcaaaacttaacaggagcaaacctgtaagtagaaccctccatggaaacaaatggtgaggaagggaaacctgaacagtaattggtaaattactagaggctccayagggacaagtctgagagtttaaaacaccatgggtggggagaggactcagccaaaggtcatttgtaaatgacctttattatgttgagggacttttcttgtatacccagactgttgagcgtttttatcaagaaaggatgttggattttgttgaatactttttgtgtcaattgagatgatcatgtggttttgtctttcagtctgtgatgtgtcactttgattaacgtacctatgttaaaccagtcttgcat

SEQ ID NO: 212431 - DNA, 628 bp, Homo sapiens
tgactgtgggcagaaaaccagaacacagtaatcaaaccacaccccacctcccagccagagagcttctctgaagtcacaggttaggtcctccaaaagcaggcactgaggcaaagtttggggtgcaaatagtttgttagagaccaacacctgtggaaggaagggtataggagcaagactggaccaagggagaaataaaactgtgatacaggccagacaaaccaggcagggaactcttgggagcatattttctatcagagtgtcccacactgggccaaaatagtgaggccttttatgcccagctcattgactcaccaaatttgggctgccccaggaaggtcatcatcttgggaaaggcagctctttgcagctgaggcagaccccgaaggagctgacagctgggggctgtctgctgaatgcactccctgcagtggagcagcaagtacatccttgaagagaggtccagtggggtgcatctctatgtctaccacaaaggccacccagataatgtamttgctagctctcatggatttgggggcagggagttgggagcagcgggagctggtggtttgcctaatatgggaacttggtctttctttgtttgcatgacataaaattttgactaagctct

SEQ ID NO: 212432 - DNA, 597 bp, Homo sapiens
aagcttcccagaagcagctgtcccccagccacctcttgggcacaagagtatgaacaccagagtcagcaatgttcgcccatgggagtacagacattagcagataacactgctgctagygtgcagacccttgaagcaggctcagagtcatttggggagggaatttggaatttgccttctaaagtgtgggccctggacaagggctccttgggtctaagtataaggacaactactggccaaagaatacctgtgcccacatggaaccacttaaaaactaaactgaattttacagtaaacacaggaggagccatgctgtaagcatatttattcaaaaacagggtgtcccaaaagtcttcctgcagttttagtaacctcaaggctataaatgctgcaacttataagaacaccatttgaaagttaatttaacactatttatctctgtgaatgttgaataacacgttttaactttaatttttgtttcagttcccctgagtgaaatatggcatacattaaccagaagagaaaattacatttattaaaataattaaaacagagtcaaaagaagtaaacgttcaaatgagttttgtaagtttgtagcat

SEQ ID NO: 212433 - DNA, 597 bp, Homo sapiens
aagcttcccagaagcagctgtcccccagccacctcttgggcacaagagtatgaacaccagagtcagcaatgttcgcccatgggagtacagacattagcagataacactgctgctagtgtgcagacccttgaagcaggctcagagycatttggggagggaatttggaatttgccttctaaagtgtgggccctggacaagggctccttgggtctaagtataaggacaactactggccaaagaatacctgtgcccacatggaaccacttaaaaactaaactgaattttacagtaaacacaggaggagccatgctgtaagcatatttattcaaaaacagggtgtcccaaaagtcttcctgcagttttagtaacctcaaggctataaatgctgcaacttataagaacaccatttgaaagttaatttaacactatttatctctgtgaatgttgaataacacgttttaactttaatttttgtttcagttcccctgagtgaaatatggcatacattaaccagaagagaaaattacatttattaaaataattaaaacagagtcaaaagaagtaaacgttcaaatgagttttgtaagtttgtagcat

SEQ ID NO: 212434 - DNA, 461 bp, Homo sapiens
gggttgaaaacattttcagaatcttcaagaaaaacaataacaatgtaaattctatatcacaaggaatacgggaccaggggacctctccaaagagcagagatttcaaagccaaagctcctggagactgtgggttgcatttcctagattctagagataccctatcctttcatcaccatgtttaattatttttaaaatgaggatacatcttacaatcagtgtatgagartgcattcgcatttttttaatgctgctgattaagactaaggactaaggaatatacatgatataatcaatggtacttgaggtggtggattatttgcacttataattgaatatatgtttattgtaaaggtggtttatagtacaaatgaacaagccatttgtcttccgtcattccatcctttcttttccttcccttccttctttccaactttattgcatactactatgtgctggttgct

SEQ ID NO: 212435 - DNA, 622 bp, Homo sapiens
gaagcttctgtttcttcagttatgagttagtaaataacatgacatagtttataggatagctactgtgattccacaaaattgtggattaaaaaagtgtgtggyagaccgtggcctgagagctcacagatgcggaatcatcggtcgccatccttatcatctcttttgaccttcccatcacccctatgaagtaactgttctcactcaagagtttccagcatggtggctcatgcctgtaattccagaactttgggaggcgaaggctggtggatcacctgaggtcacgagttcgagaccagcttggccaatatggtgaaaccctgtctctactaaaaacacaaaaatcagccagatgtggtggtggggacctgtaatcccagctacttgggaggctgaggcaggagaatcgcttgaacccaggaggtggaggttacagtgagccaagatcatgccactgcactccagcctggatgacagagtgagactccatatcaaaaaaaaaaaaaaagtttccaggaccagtaaccagcccacagctagcaagcggcaaaatgaaagtttaaaccaggtttgtctaactccaccttcttctcatgtcatagaccccctccaattggtgagggct

SEQ ID NO: 212436 - DNA, 622 bp, Homo sapiens
gaagcttctgtttcttcagttatgagttagtaaataacatgacatagtttataggatagctactgtgattccacaaaattgtggattaaaaaagtgtgtggtagaccgtggcctgagagctcacagatgcggaatcatcggtcgccatccttatcatctcttttgaccttcccatcacccctatgaagtaactgttctcactcaagagtttccagcatggtggctcatgcctgtaattccagaactttgggaggcgaaggctggtggatcacctgaggtcasgagttcgagaccagcttggccaatatggtgaaaccctgtctctactaaaaacacaaaaatcagccagatgtggtggtggggacctgtaatcccagctacttgggaggctgaggcaggagaatcgcttgaacccaggaggtggaggttacagtgagccaagatcatgccactgcactccagcctggatgacagagtgagactccatatcaaaaaaaaaaaaaaagtttccaggaccagtaaccagcccacagctagcaagcggcaaaatgaaagtttaaaccaggtttgtctaactccaccttcttctcatgtcatagaccccctccaattggtgagggct

SEQ ID NO: 212437 - DNA, 596 bp, Homo sapiens
gaggtggggagaagaagactaaaattttttatcatgagaattataacattacttttattatattgacaaaaatcaaaagtagttaagaagaactcaaaaactaaacttattatctccttccctaaacttgtccttacttccctatttttcatcttggttggaaatactcccatcaactcaagtactaaagccagaaatccaggatgtattctttatttatccatttttctctggccctgcattcccacagccaatcaatcaccaactgaatctcctagatgttcttcaaattcaccttcacctctctaaatctactctcatggcctaatccagttctttattgtgayttgcctggactactgcaaacctccaaactagtttccaaccttgactttaactcctaattaaatgaatccctctatacttccctcatgtgctgctgtctctcctattgaggtggcatcactgtctggggtaaatacctggggttcgccatctcatgccaagattaaggacatggacacgcacaaggagtgagtttaggagcagaggtttagtaggcaaaagaaagagaaaggagaacacttctctctctt

SEQ ID NO: 212438 - DNA, 542 bp, Homo sapiens
ctttgctgatcctagtgctcctatagaccagctggtgacccaccatacaggcatttaacctccctgttcttcagtttctcctctatggaagatgtactgcctgtgggccacctggattaaaagagcccccacatgtaaaatctatataaagaagctggcaggtagggagcagaactactgttgctgtctgtgaaatgcacctgctgactaggaacagggagcacctctgagcagaggaggtcatggggacaaaagaaaggtctcaacaggtggtccttgagggtcctgttaggctagcacaatagaagagcatgggtttcctagcctgacagacctgggtttggaatcctaactagattaggactccccagcaagttgctccatctctctgrgcctctttccttttatgcaaaatataaatactgattccgctatcctgggctttctgtgaggatcaaacaacaaaaatgcatatgaacccttagcctagcactgcacataaaatatgggttcagtcaattggaagggaaagttatcattag

SEQ ID NO: 212439 - DNA, 524 bp, Homo sapiens
gaaactaacgttatactttatttacaaactagttcataaatcaggcaattttaaaaacagaatgcattgtcataagcattagacaaagattatacaaattcaaacacctactttggctccttctgtttgactaattctacacaaaagatatcaactttggcctacttttrtgaaacaaactacttgaatactttgagaaatattccagaaggcttgaagtgagggccatactaaatgcattaaacatcttaaaagtaagacaaagcaaatattttcattaaggctttggcagttttgattatccaagcgtcttaagtacagaacaaagaatgtgggcattttcaagagactcgtaaacagacttgaagctctgggacctgagacccagaactccaatcccagcctgtgtccttcacaaaagtgcctctataacaagctctacttgggggaaatcatgttaatcagaagttgttttgagttatctgaaatatcacacattctcagtggtcagattataacgtata

SEQ ID NO: 212440 - DNA, 553 bp, Homo sapiens
gctatttggtggggttgctttttgtcctagttgtagcttttataatttcgagattcacattttgcaatagaaatatacaggcataccttggaggcattacagctttggtcccagaccacaatgaagcaagtyacacgaattttgttggtttcccagtaaatataaaacgtatgctgataccatactatagtctaagtgtgcaacagcatatgtctaaatgaatatacatatatatttttttgagacaggttcttgctctgtcacccaggctggagtgcagtggcactatcatggctcactgcagcctccacctccctggactaagatgatcctcccacctcaggctcccaagtagctgggactacaggtcacaccaccacacccagttaatttttgtattttttgtagagacagagtcttgacatgttgcctaggctggtcttgaactcctggcttaagtgatctgcctgactttgcctcccaaagtgctgggattacagatgtgtagtctttgaaatccagtgtgtgttcttacagtgcatttcaatttgga

SEQ ID NO: 212441 - DNA, 553 bp, Homo sapiens
gctatttggtggggttgctttttgtcctagttgtagcttttataatttcgagattcacattttgcaatagaaatatacaggcataccttggaggcattacagctttggtcccagaccacaatgaagcaagtcacacgaattttgttggtttcccagtaaatataaaacgtatgctgataccatactatagtctaagtgtgcaacagcatatgtctaaatgaatatacatatatatttttttgagacaggktcttgctctgtcacccaggctggagtgcagtggcactatcatggctcactgcagcctccacctccctggactaagatgatcctcccacctcaggctcccaagtagctgggactacaggtcacaccaccacacccagttaatttttgtattttttgtagagacagagtcttgacatgttgcctaggctggtcttgaactcctggcttaagtgatctgcctgactttgcctcccaaagtgctgggattacagatgtgtagtctttgaaatccagtgtgtgttcttacagtgcatttcaatttgga

SEQ ID NO: 212442 - DNA, 586 bp, Homo sapiens
gtccaccttcatggtggagttaaggggagggagatttcgaaaagggaacgcatagctattggttaatagcttctctgcgcctctgtcctcacctgtaaaatgggcacagtggtagcgcctaccccacagggaggcactgaggacgcctggcctcacacagaggaagggcaataggactaaagcagttttcagggccargtgggtttaaaagtcctgcattctagtccttggcctccaactccttgggcttctactgtgaggaccaaatgacccagcactaagatccttccctgactcagataagtcagtgcccaatatggccaggcaccgaggtagccactggcagagacaatctctgctctcaaggaaagtctgccatgtggctgcagcagagctccttcccacttacccaaagctttgagctccaataaatcatctcaggaatacctggaaaatggaagagatgaggcgctctccctgtagaggggaagaaatggaagcacagaaaggacttggctcagagcctctttctaggaaaacatcaacttccttttgattttccaggcatcaaagaaaggtctatgca

SEQ ID NO: 212443 - DNA, 451 bp, Homo sapiens
ggtttctccattgttgctcaggttggtctcgaactcccaacctcagatgatccacccaccttgacctcccaaaatgctgagattacaggcatgagccactgagccyggccattagcactcattcctaatctccaacaactattaggctacaactgttcttaaaaattgttattgttatcttaaaaattgataaaggacccactgtggtcctttatcttgcacttctatgagccatctaagaaagtgaatttaaatgatatcttgtggctgtataactcctttaggcatagtttgttgtataaagttaatgtaatttcaaaaattttgtgtttgtgttttaatagactgacttccttttgatagtactgcgtgatgtgtttcaggcttatcctgaagttcacattgttcttatgtctgctactattgataccaacatgttctgtgaatattt

SEQ ID NO: 212444 - DNA, 471 bp, Homo sapiens
tggtaagtggcaggtggatgttacattgccttttagtaggttgacaaataggagtgtgcagtcaaattgctgattcttattgtgtcattcatgaatagtcaccacatgtaggtatggctttaactacatagtggaaagcattcactacttagtggattagtggatatatcatagttattgataatacacacgagtcttagaattaaccactctttcctatgtaggcagaaagtaaaactcttcactgctcacaacaatatgaccaactatgctagagtacagacatcataaacaaaccttgagcagyggaaagggtgagctggccgagtacgtcccggattctgctttcacctctgcagccaagctcgttttgacaggtaagtccaattcttgacatttagtaagggattttcttctgttccatttcttgtcgttctgttctctgtaagaacagacatgtgcagttatgta

SEQ ID NO: 212445 - DNA, 554 bp, Homo sapiens
gaaaaagtgaatatcccgggataaaaactagaaggaagctatccgagaaatcactttgtgatgtgtgtattcatctcacagagttaaactttccttttattcagcagtttagaaacactgttttggtagtatctgaggagggttatttgggagcactttgaggcccagtgtgaagaaggaaatatcttcagataaaacctagaaagtacctttctgagaaactgctttgtgatgggtgcattcatctgagagagttaaacttttctttggattcagcagtttggaaacactgtttttgtctattctgcaartggagactgctgagttcattgaggccaatggcaaaaaagtgaatagcccaggataaaaactagaaggaagctatttgagaaactgcattgtgatgtgtgcattcatctcacagagttaaagttttctttcaattcagctgtttggaaatactgttttggtagatttctcaaagggatatttgggagcacattgaggcctatggtgaaaaggaaatatcttcagatgaaattagaaagaagctt

SEQ ID NO: 212446 - DNA, 419 bp, Homo sapiens
aaggaaatatcttcagataaaaaattgaaagaagctttctgrgaaactactttattatatgtacattcatctgacagatgtcaatctttctttggattcagcaatttggaaacactgtttttgtagaatctatgaagggatgtttgggtactcattgaggccaaagatgaaaaatcgaatatcccaggataaaaactagatggaagctatctgagaaacagctttgttatgtgtgcattcatctcacagagttaaacatttcttttccttcagcagtttggaaacattgtttttgtagaatctgaagggatatttgagagcactttcaggcctgtggtgaaaaaggaaatatcttcatataaaacattgaaagaagctttctgagaaactgctttgtgatgtgtgcattcttctgacgt

SEQ ID NO: 212447 - DNA, 566 bp, Homo sapiens
aaaacaagttccaggaaatagagtatttcctttatccactctcagtcctgccattgcctgtgccaacaaagtagatttatgcagattacctccaataccatctcaggccttgatatatcaactaaatatgctttccctctgataggtcactgagcagcctggcaattcggagtagtattgtcaaaagctaataactacaacactatatcctgagcagctgaaaatccacgtatggttctcttggtccctgtttcatagaactaaatgaagggtatttttctccacatgcagtgattttttcccaacctctaatgcacactcccttaagctgttcyatggcattatgctgtatgaccacttgtgcatctaaacaaacccagctgccaacccccaaaagttcgtctgcaattatattaatttgaggttgggcctgggcattgtgagcagcctgaatggaggcttcatctgcccaccaagttttaaattgtaaaaactaagcaggagttagactagctcgagtaagggtgtcccagtggctgggaatcatctgactgaaaacagcaaca

SEQ ID NO: 212448 - DNA, 590 bp, Homo sapiens
catctctaaaatggctgctctgggaatgtctgtcttttacaattgctgataagggatgaaataagccccagactcctgaagcgctttcctgcctattaggacaacaaaattcctgccttgtaaatttttgtcagatcggttgtttgctctcaaaccatgtctcctgataagatgttattaatgacaatgtgtgcacaaaacttcattagcaattttaatttcaccctggtcctgtgagcttcccctgcctccatttgccttgcaatattttattaccttgtggagcatgtgatctctgtgactcacaccctattcctacactccttccsctttgaaaatcactactaaaaacttgctggttttggggcttgggtggcatcagggaacctgttgaaatgtgaggtttcactctgataccaagctttaaaattctcttttttgttctctttccctttatttctcagactggtttatacttagggaaatagaaaagaacctatgtgaaatacattgaattattgggagcatgttcacccgatatctggcacctcaatgtggttttttctttttcccaagtgcatgtgggaacc

SEQ ID NO: 212449 - DNA, 545 bp, Homo sapiens
aagctttaaaattctcttttttgttctctttccctttatttctcagactggtttatacttagggaaatagaaaagaacctatgtgaaatacattgaattattgggagcatgttcacccgatatctggcacctcaatgtggttttttctttttcccaagtgcatgtgggaacccaattccctttggyaggtgtggaaaaacgtcatcagtttggtccacagaaaagcttgttcgactccctgatgactggtgagtagtctgtgtatggtccaggttaaccatgggtcatgcagagtctaacatcatgcttatctctgctatattaaactcctgttaaaacagggtggtttctgagtaaccatggaaaatatggtcactctattcaaggcagtagaaaaacactgtccttggtttcctgaaaaaggaaccttagatgtagaacaatgggatcatgttgctgcaatattctggcaactggtctccactgggaattatgttcccatcacagtttgtggtaattgggccttggtacataccgtcatgatg

SEQ ID NO: 212450 - DNA, 545 bp, Homo sapiens
aagctttaaaattctcttttttgttctctttccctttatttctcagactggtttatacttagggaaatagaaaagaacctatgtgaaatacattgaattattgggagcatgttcacccgatatctggcacctcaatgtggttttttctttttcccaagtgcatgtgggaacccaattccctttggtaggtgtggaaaaacrtcatcagtttggtccacagaaaagcttgttcgactccctgatgactggtgagtagtctgtgtatggtccaggttaaccatgggtcatgcagagtctaacatcatgcttatctctgctatattaaactcctgttaaaacagggtggtttctgagtaaccatggaaaatatggtcactctattcaaggcagtagaaaaacactgtccttggtttcctgaaaaaggaaccttagatgtagaacaatgggatcatgttgctgcaatattctggcaactggtctccactgggaattatgttcccatcacagtttgtggtaattgggccttggtacataccgtcatgatg

SEQ ID NO: 212451 - DNA, 572 bp, Homo sapiens
gtttatacttagggaaatagaaaagaacctatgtgaaatacattgaattattgggagcatgttcacccgatatctggcacctcaatgtggttttttctttttcccaagtgcatgtgggaacccaattccctttggtaggtgtggaaaaacgtcatcagtttggtccacagaaamgcttgttcgactccctgatgactggtgagtagtctgtgtatggtccaggttaaccatgggtcatgcagagtctaacatcatgcttatctctgctatattaaactcctgttaaaacagggtggtttctgagtaaccatggaaaatatggtcactctattcaaggcagtagaaaaacactgtccttggtttcctgaaaaaggaaccttagatgtagaacaatgggatcatgttgctgcaatattctggcaactggtctccactgggaattatgttcccatcacagtttgtggtaattgggccttggtacataccgtcatgatgacataccaatcctgtgagcccctacggttaccacaattttctgaatctgatgacactccacctcttcctcaaccttc

SEQ ID NO: 212452 - DNA, 591 bp, Homo sapiens
tgccaagtttttgtacttccaaatcaggaacctggtgttaatcccaaggcctaaatcctaatgatttatggcaaatggatgtgagccatgttaggtcctttggcagactgtcatatgtgcatgtctctgtagatacattctcaggttttatctgggctacttgccaaacaggggaaggcatggcccgtgttaaaaaacatctgtgtacttgctttgcagttatgggtcttccacatcaaataaagacagacaatgcccctggatatgttagtaaggcttttgatttatttatacaacagtggggaatttcccatattactggaatccattataatcctcagggacaagytgtggtggagcaggccaatcacgctttaaaaacccaattgtccaaacagtctgaacaaccaaaacataatttaactaccccccactcccaattacatttggcattgtttactttaaattttttttaatgttcctaaagataataatctaactgcagccaaatgccattatacaggcaaaaaattctccctaaatgaaggcaatccaaagttatggaaaaattcccaaaccaatacgtgagaa

SEQ ID NO: 212453 - DNA, 569 bp, Homo sapiens
gataaaaactagaaagaagctttctgacaaactkctttgtaagatgagtattcatttaacaaagttaaacctttcttttgattcagcagtttggaaacactgttattgtccattctgctaatggacaaaaatcaaatatcccattaaagaaactagaaggaagccatctgagaaaccgatttgtgattgtactgcagagttgattgtactgcagattgattgtactgcagagtgattgtactgcagagttgaacttttcttttcattcagcattttggaaacacttttaactcatcattttggaaacactgttttgtagaatccgagaagggttatttccaagcacattgaggccaatggtgaaggagaaatatattcagataaaaataagaatgtttctgagaaactaatttgtgatgtgtgcattcatctcatagacttaaatctttcttttctttcagcactttggaaatactgtttttgtagaatctgtgaatggaaattttggtgctcattgaggtctatggggaaaaaggaaacatcctaagataaaaactgggaggaatatt

SEQ ID NO: 212454 - DNA, 535 bp, Homo sapiens
ttccccttttctaagttggaataagggatatcccaaaagtmcatttgcagaaaggacaataacagtggttccaaactattgaatccaaagaaaggtttaactctgtgaggtgaatgcacaaatcccaaagtagtttctcagaaagatgcttgctagcattgaagatacatcgtttttctccgtaggtctcagtgggcttcataaagcagtttctcggatagatttcttctagtttttatcatgggatatttgctttttcgctgttggcctcaattacctcacaaatgtccattcgcagaatggacaaaacagtgtttccaaactctgaatccaaagaaatgtataactctgtgagatgaatacacacaccacagagcagtttctcagaaaattctttctagtttttatctgaatatgtttcctttttaccattggcttcaatgcactcccaaatataactttgcagattctacaaaaacagtgttttcaaacagctcaatgaaaggaaatgtttaactctgcaagatgaatgcag

SEQ ID NO: 212455 - DNA, 504 bp, Homo sapiens
gaggcctatggtgaaaaagaaaacaccttcagttaaaaactggaaagaagctttctcagaaactgctttgtcatgtgtgcattcatttctcagatttaaacctttcttggatgcagcagtttggaaacactgttttcgtctattctgcgaatgtacatgttggaactcattgaggccaatggtgaaaaaacgaatatccaatgataaaaactagaaggaagctatctgagtaactgytttgtgatgtgtgcatttatctcggagagttaaacatttctttgtgttaagcattttggaaacactgtttttgtagaacccatgatggggtaattaggagcaaattgaggcccatgctgaagaaacaaacaccttcagataacaactagaaaggtttttaataaactgttttgtggtgtgtgcatttatctcacagagttaatactttattttgattcagcagtttgggaacacacttttcgtctattctgtggatggacatttaga

SEQ ID NO: 212456 - DNA, 569 bp, Homo sapiens
gataaaaactagaaagaagctttctgacaaactgctttgtaagatgagtattcatttaacaaagttaaamctttcttttgattcagcagtttggaaacactgttattgtccattctgctaatggacaaaaatcaaatatcccattaaagaaactagaaggaagccatctgagaaaccgatttgtgattgtactgcagagttgattgtactgcagattgattgtactgcagagtgattgtactgcagagttgaacttttcttttcattcagcattttggaaacacttttaactcatcattttggaaacactgttttgtagaatccgagaagggttatttccaagcacattgaggccaatggtgaaggagaaatatattcagataaaaataagaatgtttctgagaaactaatttgtgatgtgtgcattcatctcatagacttaaatctttcttttctttcagcactttggaaatactgtttttgtagaatctgtgaatggaaattttggtgctcattgaggtctatggggaaaaaggaaacatcctaagataaaaactgggaggaatatt

SEQ ID NO: 212457 - DNA, 475 bp, Homo sapiens
ttaactctgtgagatgaatgcacatatcacaaggcaatttttcagaaagcttatttctaatttttatctgaagatatttcctttttctcagttggcataaatgtgctcccaaatgtcccctcaaaaattctgtaaaaaagtgtttacaaactgctgaatgaaaagaatgggttaaatctgtgagatgaatgcacacatcacaaaacagtttctcagasagattccttctagtttttatcctgagatatttgcagaatggacaaaaacagtgtttccaaactgctgaatccaaaggaaggcttaagagtgtgagatgaatgcactcatcacaaagtagtttctcaaaagttttcttctagtttttggctgaagatgcttcttttttcaccatagacttcaatgcaatccgaaataactctttctagattatacacaacagtgtttccaaactgctgaaagaaaagaaagttttaag

SEQ ID NO: 212458 - DNA, 472 bp, Homo sapiens
cacacatcacaaagcggtttctcaaataacctacttctagtttttatcctgggatattctctttcttgcctttgacctaaatgacctctaaaatatccatttgcagaatatacaaagtgtctccaagctactgattccaaagaagttttaaatctgtgatatgtatgcacacatatcaaagcagttttgataaagcttctttctaggttttatctgaacatatttcctttttcaccttaggcgtcaatgtgtccccaaatattcatacacacattctaccaaaacagttccaaactgctggatgaaaataaaagtggaactctgcgagatgaatgcacacatcacaaagcagtttctttgataggtttcttctggtttacatccttggatatttgcttttctgcctttggcctcaatgagcctccaaatgtccatttgcagaakggacaaaaacagggtttcctaactgctg

SEQ ID NO: 212459 - DNA, 505 bp, Homo sapiens
caaagaagtttctcagaaagcttctttctagtttttatctgaagatatttcttttttcaccatagacctcaatgcactcccaagtatcctttcacagatcctacaaaaacagtggttgcaaactgctgaatgaaaagtaaactttaactytgagagataaatgcatacataacaaagtggtttctcagatagcttccttttggttttctcctgggatactcgtttttttgtctgtggcctcattgaactccaattatcccttcacagattgtacaaaaatagtgtttccaatctgctcaatgcaaggaaatgtttaacttggcaaggtgaatgcatacatcacaaagcagtttctcacatagcttctgtctggtttttattctgggatatttgctttttggcttttggcctcaatgagctccaaaacatccctttcaagattctaaaaaaacggtgtttcaaactattgaatccaaataatgatttaactctgtgagatgaattc

SEQ ID NO: 212460 - DNA, 617 bp, Homo sapiens
aagcttctttcttgtttttaccttaagatatttccttttacaccataggcctcaatgcattcccaaatatcaattcamagattctacaaaaacagtgtttccaagctgctgaatgcagagaaagttttaactctgcaagatgaatgcacatatcaccctgcagttcctcagtttgcttccttctagattttatcatgagtatttgttttacagcctttggcctcaatgagctcccaaatatccattggcagaatggaccaaacattgtttccaaactgctgaatccaaagaaaggataaactctgtgagatgaatgcactcatcacaatgcagtttctgatggagcttctttctagtttttacctgaagatatatcctttttcaatgtaggcctcaacatactcccaaatatcccttcacagattctacaaaaacagtgcttccaatctgctgaataagaagaaaattttagatctgagagatgattgtgcacatcacaaagttgtttctcagatagcttccttctattttttattgtaggatattcactttttcaccattgtcctaaatgagctcccaaatgtccattcgcagaatggacaaagacagtgtttcca

SEQ ID NO: 212461 - DNA, 617 bp, Homo sapiens
aagcttctgtccagttttcatctgaagatgtttcctttttcactctaagcctcaatgccttcccaaatatcccktcacagattcttcaaaaacagttcttacaaatggctgaaggaaaagaaagatttaactctgagagatcaaggcacacatcacaaagtggtttctcagatagcttccttctagtttttatcttggtactttcactttattgtgattggccttaatgagctataaaatgtctacttgtggaatagaaaaaaccatgtttccaaattcctgaatccaaagaaaagtttaaatctgtgagatgaatgcacagatcacaaagcagtttatcaaaatgtctctttctagtttttatctgaatatgtttcctttttccctattggactctatgggctccaaaatctcctttagcagattatacaaaaacactgtttccaaatggctgaatgaaaaggaaggtttaaactggtgagatgaatgcacacatcacaaagctatctctcagagagcttccttctagtttttttcctggtatattcactttttagccattggtctcaatgagctcccaaatgcccatttgcagaatggacaaaaacagtgtttct

SEQ ID NO: 212462 - DNA, 618 bp, Homo sapiens
aagcttctgtccagttttcatctgaagatgtttcctttttcactctaagcctcaatgccttcccaaatatcccgtcacagattcttcaaaaacagttcttacaaatggctgaaggaaaagaaagatttaactctgagagatcaaggcacacatcacaaagtggtttctcagatagcttccttctagtttttatcttggtactttcactttattgtgattggccttaatgagctataaaatgtctacttgtggaatagaaaaaaccatgtttccaaattcctgaatccaaagaaaagtttaaatctgtgagatgaatgcacagatcacaaagcagtttatcaaaatgtctctttctagtttttatctgaatatgtttcctttttccctattggactctatgggctccaaaayctcctttagcagattatacaaaaacactgtttccaaatggctgaatgaaaaggaaggtttaaactggtgagatgaatgcacacatcacaaagctatctctcagagagcttccttctagtttttttcctggtatattcactttttagccattggtctcaatgagctcccaaatgcccatttgcagaatggacaaaaacagtgtttcta

SEQ ID NO: 212463 - DNA, 559 bp, Homo sapiens
taaatggtttctcagattgcttccttttagtttctgtgctgggttattcactttttcaactttggcctcaatgaactctcaaatgtccatttgcagaatggacaaaaagagtgtttccaaactgctgaatcaaaagaaatgtgtaattctgggagatgaakgcacacatcacaaagcagtttcttagaaagcttatttctagtttttatctgaagatgtttcctttttcaccagaggcctcaaggtgttcaaaaatatagcgcagcagtttctacaaaaacagtggttccaatctgctgaatgaactcaaagatataagtctgcgagatgaatgcacacctcacagtgctgttactgagataccttccttctagtttgtgtactggaaattcactttttatcgataggcctcaatgacctcccaaatgtccatttgcagaatggaaaaaaccagtttttccatactgctggatccaaagaaagtcttacctctgtgagatgaatgctcacatcacaaagcagtttctcagaaaccttctttctaatttttaactgaaga

SEQ ID NO: 212464 - DNA, 592 bp, Homo sapiens
tgtttttgcagaatctgtgaagggatattttgagcacactgaggccattggtgaaaaaagatacgtcttcagaaagaagctctctgagaaacctcttttgatgtgtgcattcatctcaaaggattaaaacattctttggattcaacagtttggaaacactgattttgtccattttccaaatggatattcgggagctcattgaggccaaggtgaaaaagcgaatattccaggataaaaagttagaaggaagctatctaagaaattgctctctgatgtttgcattcttgttgaagagttaatcctttcttttaattcaccagtttagaaacactgcttttatccattctgtgaatggacatttttgagctgttttgggccaatggataaaaagcatatatcccagragaaaagctagaaggaagctgtctgagaaactgctttgtgatgtatgcattcacctcgcagagttaaaactttcttttcattaagcagtctgggaacactgtttttgtagaatgtgtgaagcgatatgtgaaagcgcagtgaggcatatggtgaaaaaggaaacatcttaagacaaaaaccggaaaga

SEQ ID NO: 212465 - DNA, 576 bp, Homo sapiens
aaggtttaacactgtgagatgaaggcacacgtcacaaagaagttcctcagagagcttctttctagtttttatctgaagatacttcctttttcaccctagtcctcaatgcaatcccagatatctctttgcagaatctacaaaaactgtttccaaactgctgaatgaaaagacaagtttaaatctgtgagatgaatacacacatcacaaggctgtttctcaagtagttttcttctagtttttatcctgggatattcccttttttgcctttgtcytcaatgaggtcccaaatatcccttcactgattctacaacaagagtgtcttttttctttctaacatttgggatttatttaatgcaaatctaatagtattcaggattagccagttatgataatcagactggtaggataattttcagcttttttttttaaatatatactttaagttctgggttacatgtgcagaacatgtagttttgttacataggtataaatgtgccatagtggtttgctgcacacatcaatccgtcacctacattaggtatttctcctaatgttatccctcccctagctccccac

SEQ ID NO: 212466 - DNA, 592 bp, Homo sapiens
tgtttttgcagaatctgtgaagggatattttgagcacactgaggccattggtgaaaaaagatacgtcttcagaaagaagctctctgagaaacctcttttgatgtgtgcattcatctcaaaggattaaaacattctttggattcaacagtttggaaacactgattttgtccattttccaaatggatattcgggagctcattgaggccaaggtgaaaaagcgaatattccaggataaaaagttagaaggaagctatctaagaaattgctctctgatgtttgcattcttgttgaagagttaatcctttcttttaattcaccagtttagaaacactgcttttatccattctgtgaatggacatttttgagctgttttgggccaatggataaaaagcatatatcccaggagaaaagctagaaggaagctgtctgagaaactgctttgtgatgtatgcattcacctcgcagagttaaaactttcttttcattaagcagtctgggaacactgtttttgtagaawgtgtgaagcgatatgtgaaagcgcagtgaggcatatggtgaaaaaggaaacatcttaagacaaaaaccggaaaga

SEQ ID NO: 212467 - DNA, 592 bp, Homo sapiens
tgtttttgcagaatctgtgaagggatattttgagcacactgaggccattggtgaaaaaagatacgtcttcagaaagaagctctctgagaaacctcttttgatgtgtgcattcatctcaaaggattaaaacattctttggattcaacagtttggaaacactgattttgtccattttccaaatggatattcgggagctcattgaggccaaggtgaaaaagcgaatattccaggataaaaagttagaaggaagctatctaagaaattgctctctgatgtttgcattcttgttgaagagttaatcctttcttttaattcaccagtttagaaacactgcttttatccattctgtgaatggacatttttgagctgttttgggccaatggataaaaagcatatatcccaggagaaaagctagaaggaagctgtctgagaaactgctttgtgatgtatgcattcacctcgcagagttaaaactttcttttcattaagcagtctgggaacactgtttttgtagaatgtgtgaagcgatatgtgaragcgcagtgaggcatatggtgaaaaaggaaacatcttaagacaaaaaccggaaaga

SEQ ID NO: 212468 - DNA, 359 bp, Homo sapiens
ggaaacactgttttcatagaatctgcgaaaggacatttgggagcgctttgaggacaatggtgagaaagcagttatctcaaaacaaaaactagaaagaaattatttgagaagcagttwtgttatgtgtgcattcagctcatacaattaaaactatgtttaattcagcagtttggtaacaccatttggaaacactgttttatagtgtctgccaaagaacatttgggagctcattgaggacaatgttgcaaaagcagttatccccagataaaaactagaaagaagcttatttgaggagcagctttgttatgtgtgcattcagctcacacaattaaactatgtttttgattcagcagtttgga

SEQ ID NO: 212469 - DNA, 529 bp, Homo sapiens
tgtgtattcatctcacagatttaaagctttcttttgattcaatagtgtgtaaacaaacactgtttttgtagaatctgtgaaagaacatctgggagctcattgaggccaatggtgaaaaagcaaatatccccagataaaaactagaaagaagatatttgagaaacggcttttttatgtgtgcattcagctcacatggttaaatctatgttttgattcagcagtttggaaacactgttttcttagaatctgcaaaaggacatttgggagctcattcaggtatatggtgaaaargtgagaatctccagacaaaaagaagaaataagctatctgagaaactgctttattgtgtgtgcattcatctcaaagagttacaccattcttttgattcagcagtttggaaacactatttttgtagaatctgcgaaaggacatttgagagctaatggagttcaatggtgaaatagcaaatgtcaccagacaaaaagtagtaagaagttatgtgagaaacagctttgttatctgttcattc

SEQ ID NO: 212470 - DNA, 593 bp, Homo sapiens
aatgacaaattatagaatcattttaagtagaaaattaaaaacaacatttttaaagtgtctgccatagaaaccaatagtattttttgtacatttattgtttctgttaattattcagctggcagtaggacagatttactacaataatccaaaaatgctaataaacaattgtatctaactttgtagttgttaagtcacttttcttttttactgtctcagcccagaagaatcagtgcagtttctgtggcagagcgagttgcatttgaaagaggagaagagactggaaaaagctgtggatacactgttcgaattgagtctgtactccctcgttttcatgccggtataacgttttgtactgtaggtcagtaatatattttcaaatttcatttggggtttatgttgtggtgtttgtgaagaaaacttgacagcagaacagaatgactggaaagaaataatgattcagtytcagatttcttgtttaaataaaacttttggcagttttttccttcatggtaagtatgatatacccattagatcttgtagcttagagaaaatgaaatcataaaattggtgaaaaaaactatatttcatagtgt

SEQ ID NO: 212471 - DNA, 404 bp, Homo sapiens
ttcccaataagacccctttggccgggcacagtggctcatgcctgtaatcacagaactttgggaggccaaggcaggtagatcacctgaggtcagaagttcaagaccagcctggccaacatggtgaaaccctgtctctactaaaaatacaaaaaaaaattagctgggcatggtggcacatacctgtaatcccagctactcagaaggctaaggcaggggaatcacttgaacccaggaggcagaggttacagtgagccgagattgcaccactgcactccagcctgggcaacagagcgagactccgtcttaaaggaaaaaaaaaaaagaccccttccccaagaactgctcaaaggtgggtgacatggctacctycagaggtagcctgggtaacatcaacaatgagagca

SEQ ID NO: 212472 - DNA, 582 bp, Homo sapiens
aatcattaaacagagcatttcatgtctctattcaaaatgctacaagggttttcaaccacactcacaataaaattcagagtcctaaccaaagcctacaggagcctacatgatctggcttccattgaaatacctccagatctaaactcctactcatgccccttgcttaccccactccagccatgctggcttcctcactgttcctcaacgtgcagagcaaactgccgcctcagggcccttgcatgggctgttctcactgcctagaacatattccagagtctctgccctactagaggccttctctgataacccaacatacccatgcccttgcccatgtcttattttttctttgcacttattaccacccaaatttatttatttagttattgtttgtctcacttcccaccatgagaatgcaagctccatgagaagcgatttttgtctttttgtttgattgtttgtttgtttrttttagaaaatgatgtttattttccaccagccttatttccatgttgcttaagagcctgtggaagaacagctttaagcccattcagtggttgttcctatgtattcagtggcctgagc

SEQ ID NO: 212473 - DNA, 456 bp, Homo sapiens
gaagagagcaagagacaggaggaaactcaacagccaaacaggtttatttacaggaataagcctgcgaggcgtcccagtcaggagtctgcctgagaccctgatcgattacaagctgaggcttttataataaagtttctactggggaggggttggggaagtgctggctggctgggactgttgcggacttttccagctgggggtagatgtagttagggctgttatgctctgttgaagctataggcagggttgacatttgctttgyttctgagaacacagtagccaaggttgtaaaatggcataactattgttagtcctcatattctccccctctttgttttaattatctctttggatagggtttttagcagaggggtagctactcgttctgactgcttcctgctggtttaggggtgatggtgtggggggaggtagccttcctctggtgatgaagtcatt

SEQ ID NO: 212474 - DNA, 454 bp, Homo sapiens
gtaaagaaataaaagaatacttactccatggtcagagtagcccaagggctgctggttgcctatttttatgattatttcttgatgatatgctaaacaaggggtggattattcmtgcctccgctttttagaccatatagggtaacttcctgaggttgtcacggcatttgtagactgtcctagcactggtgggagtgtagcagtgaggatgaccggaggtgactctcagcgccatcttggttttggtgggttttagctggcgtttttactgcaagctgttttgtcagcaaggtctgtatgacctgtatcttgtgctgattttctgtctcatcctgtgacttagaatgcctaaccatctgggaatgcagcccagtacgcctcaggctccttttacccaggcactactcaagatggagttgctctggttcaaacgtctctgacacaacaatactataag

SEQ ID NO: 212475 - DNA, 351 bp, Homo sapiens
tactctaggccttggtggttaatgaccctcttaccatctatgctcaagcatgcctgtaactgattagctcagaatcgcccggaagctgaaaacaagcagattgtttatggctcattttgaggaagagggcttttatcagggctgcgtggcaatggaatgatactcaaggatcrcagcacttcttatctgtggaactgaagaaatgggatgagaggttggaaatgacctcttgggtttcctgccagctttgctgtgaatctaggaaataacaggctggagttacttgtaatctttttaattgaagtataacagacacacagaaaagcacattgattagaaatcacaaggtga

SEQ ID NO: 212476 - DNA, 631 bp, Homo sapiens
catctgttacatgtcaggtatttggaggaataaacaagctttagtgaacctgcttccatgtgtgacattgtttctacagcaaaaatatgttatgaastttggataaatgattataaacatacttttgtaacacagccccgtttatactgaatttaatttttcatgaaacaaatggaactcattaaattttatcttctttgaacctgcacagagaaaccaacatccttgaattcccaagtctcacaaacaaatgccgctattgaaaagaatccacatatcttccaagtatactaagcataatttaaaataatccttttgctttccgtctaactgatgattgatttagaaaagcgtttgtgctgtaattgtctttaataaaagtaaaatttcagccacctttcagataattacacaacttccagatttttccaaagtaaaggactcagaagacgttacttccttatgtggcctcaagttatgccatttctctgctccatttgtccctccacagtcaaagggaaactaaaacagaaaaatacccatttctgttgctgttgttgttgttgctggtactagaataaacttcctgtggggaaagataagaactgccttacgtaagaattttagttat

SEQ ID NO: 212477 - DNA, 468 bp, Homo sapiens
atgggtagcgactccaaatcctctccatcccctttctcaagggctaatggagtagaactaaaatttgtaagtagataagttgagggagtgagacttatttagcactcaaagtccctggactgtaagctccactaatccaaaaattatgtctgtttgtattattttttacttattgtatcttcagtgcttaggacagtgcctagcatttgatagtcacttgataaacatttgttggaagatgggacaaattcaatagtcasggctatgaaattggtcattttagcagtttttactgcatttatgatgaatttaattaaaacttacaggttactattaaacaagaaagtatatgtcaatcatttagtacttaataggatttcaataaatgaaatctgttgttttatcttctactattatcaatttcaaccatcactcattaccacctactaaaggcaactgattagaggg

SEQ ID NO: 212478 - DNA, 604 bp, Homo sapiens
gctcagtcacttgctggctatgtaacctctgacatcaacattctatgacttaataatccatatttgagccaggtgtggtggctcacacctgtaattccagccctttgggaagctgaggcaggtgggccacctaaggtcaggagttcaagaccagcctggccaacatggtgaaaccctgtctctactaaaaatataaaaattagctgggcagggtggtgcattcctataatcccagctactcaggaggctgaggcaggagaatcacttgaacccaggaggtggaggtggcagtgagctgagatcacgccgctgcaccagcctgggtgacaaagcaagactctgtctcaaaaaataaataaataaataaataaataaataaataaataaataaataatccwtatctgtaaagctggggacataatagtacctaccacaaagaagtattgtgagaattgagttagtatatgtaagcacagatgaatgatacatcaatttaaattttactagtagtaggttatgatttggcagaatcattttagatatatgccaaaagctcatgaaaccttattttcttaatacctgatatttatgaattgaaagtcc

SEQ ID NO: 212479 - DNA, 528 bp, Homo sapiens
tacctaacatttcaatagacacatggtttttttttcagtcatattaattaagttctgtgcacggtgcttgcacataaataaaaccagatgcttaaattgtagctcaatcattacgctgtatttgctcacatcccctcctgtaccactttcaagaaattggcttttygcctaaatggcaggggagggaaagggaaaaaaagaagaaaaaaaagttctggagctttagccttattctcaggttgatgagtggttgttgatatgtgacaaatacatttcgctttcatgacatctctatggaaagttaagaattgtagttttcttgaggcagttgagattcttaaaggagtatttattcatcatgctattaatttattggccttcataaaaactctttcaaaattgtcacctatctataaataagacttaaaacccaccctcggctacatagatacacacaaacacaaacacacagatgtatgtgtgtgaatttataaaataacctgtcaatacatatggagaaaatagttt

SEQ ID NO: 212480 - DNA, 528 bp, Homo sapiens
tacctaacatttcaatagacacatggtttttttttcagtcatattaattaagttctgtgcacggtgcttgcacataaataaaaccagatgcttaaattgtagctcaatcattacgctgtatttgctcacatcccctcctgtaccactttcaagaaattggcttttcgcctaaatggcaggggagggaaagggaaaaaaagaagaaaaaaaagttctggagctttagccttattctcaggttgatgagtggttgttgatatgtgacaaatacatttcgctttcatgacatctctatggaaagttaagaattgtagttttcttgaggcagttgagattcttaaaggagtatttattcatcatgctattaatttattggccttcataaaaactctttcaaaattgtcacctatctataaataagacttaaaacccaccctcrgctacatagatacacacaaacacaaacacacagatgtatgtgtgtgaatttataaaataacctgtcaatacatatggagaaaatagttt

SEQ ID NO: 212481 - DNA, 637 bp, Homo sapiens
ggattgtagacttaattactactgctcttatgtgtaaataagttaaagcttatgctccacatcagatcaagtcttcctctcaagttcccatcttaggctgggctatggagaagaattttaaattgccaatctgtccccttctggttttgtttgtttaaatggygcaatcttttggggaaaatacttggtctttcagatttcttctctcttctcaatgcccctttccaacacaatgcctggatatttgagaggctttgtgtgacttcttggtagcagagagtatggttctttcagatcttcatggagtcccctggatgctggtctggttgagtccctgggctagcactaactgaggtatggtgtgtcccacttgacctttaagggagaatttggattcatgatttccctagtcctaaccatttgtgaaattgagaaatctgtatgctgaaactctaacacagaacctcacgcctatgcacatccatgatctaatcaattctgaggcttcttctgcacaagcaggagttctgattcttactcagctatatgcagggtaaggaatccagcagaactgctgcaggttgggaattagagagatgagctgggcatctggaggtcagcaactacccccgggaaa

SEQ ID NO: 212482 - DNA, 635 bp, Homo sapiens
gcaatatacataatcagctcatttgagtcctaacttgatgtgtagattcaggtcctttctcggctttttaatagctgcttgaccttggctaagtcactgagggaatatgccaccatttaaatcatcttcttactgagaatccaagttgctataagaaatatcttttgatttgatgacttttttaaaaaacataatgagaatggagtacattaggtacttagactcttaacctagaagaatgttattaaaatgaaaacatccacgtacccttttaaaaatccagccaagcttgtggttattgttcgttcacttttaaacaaacattactctgtcagacacaactacagcccccatgggagccaccagggagggttctgttgtctcatgtagccgagagtggctctcaggtccagttggcaaaagggagagaaaaaaggtttgatgttaatctgaaatgtctctgagaggccatacatgatttgagaatggattaaatatcaatgggtgactagggrattcttatactcagttaattttagaaagaacttttatttagagctgcctttatgcctgtgatggggcgggatacaccacaattacacattttcagaagggtggatcctttgatgacagat

SEQ ID NO: 212483 - DNA, 527 bp, Homo sapiens
  misc_feature (1)...(527): n = A,T,C or G
agtgggtatgagagagtggtaagagagaacatcaggttatgaaggagattgacttttctcctgtaacactgagaagctatctaaatgaaagcaccagaagccactcttcaaggagtggaggatntgtgtaaggcatgatacaagaaagaacctgaaaactccttgcaaattttggaagattctaggtaaaatactgatgtgaatgtcataaggaagcccagggtckcgattaatagctcctttgcttttgcacagagttggctgcaaggcaagttggaaaaacaaaacaacctccagagtgtgttatgtcccctcttgggaatcacagagggaagaaaaggaagtacagagggaattacaagtcaattataataatataggccaaagtaaactatttaacccagtgggcttggcagccctgaagaaaactcagtcccttaacttttataaatgctccaaaaaaagtgactgacttttaccttaagcattaagttttgctttttttctgtctcatatacaccctggta

SEQ ID NO: 212484 - DNA, 433 bp, Homo sapiens
ggacatgaagttgtcatttgtgacatgtttgttgagttttccmcaaatgcaagttttcagcagatgcaggagaggtcagttgatcaatgatgcaagttataaattacccatttagtaaaaaaaaaaaaaaaaaaaaaaaaaaaaaaaaaagtcttaggagaaacttgcacagctttcaaactgcagaagttattttattttattgtaaagtaataaaaccacatttccttatcataatatgtgattcagacttattactaattcagattggccttgaaactaattagtagcttttattatgtttttatttttttctaacatatttacagccaaaatctaaagagggttctgtttgtttttttaagattcatttaaactagtctctgcacatcactgaactcaacatctcataattcttataactattatggtg

SEQ ID NO: 212485 - DNA, 433 bp, Homo sapiens
ggacatgaagttgtcatttgtgacatgtttgttgagttttccccaaatgcaagttytcagcagatgcaggagaggtcagttgatcaatgatgcaagttataaattacccatttagtaaaaaaaaaaaaaaaaaaaaaaaaaaaaaaaaaagtcttaggagaaacttgcacagctttcaaactgcagaagttattttattttattgtaaagtaataaaaccacatttccttatcataatatgtgattcagacttattactaattcagattggccttgaaactaattagtagcttttattatgtttttatttttttctaacatatttacagccaaaatctaaagagggttctgtttgtttttttaagattcatttaaactagtctctgcacatcactgaactcaacatctcataattcttataactattatggtg

SEQ ID NO: 212486 - DNA, 640 bp, Homo sapiens
aaactaattagtagcttttattatgtttttatttttttctaacatatttacagccaaaatctaaagagggttctgtttgtttttttaagattcatttaaactagtctctgcacatcactgaactcaacatctcataattcttataactattatggtggatacaattggcttcttttatgaagaattgaaaatagagagttaycctgttgaaataaagacttgaaactctggaaagtgttctgtcattgcttcccatttcacttcatatctttacattgtggtgattaggttgtttgaaaactttcaaattaccataaagaaaccagaacagtgtgttctgtcagaaacacttataatgtctctctgatttaaattgtacaacataagggcagaaatagaggctttttgtctcctgaataaaatataactcaggcaccaaataatatgtaataaaagtaataacaggacttcttcatctcctgttagtgtttgaaacaacatcaaggagacagtgtcttgggaattttttttaacgttcatttgtcctgaaacaatattgtgctctttccattagaacattttatgtatatttctgttcaatttgagaaaatactattatagtatttccaaagtaagaaac

SEQ ID NO: 212487 - DNA, 569 bp, Homo sapiens
caaagagccaaggacgtctgtatgtagtaaaattctacacatatttagtgccagacttgggctttaattacagtgaggcttctgatctttattatcaacagtcactgccttctgctgtgctagaatgttgatttttagaagtycatcacagtgttctcttaggtgtaaaaatgtaacatccatcttgcaatttgttttctgaaaaccaggagatgaatgtgactaaaggtccaacaactttcaacaaatgagttgaagtatctgattcttcatagtgaatttgcctttttaggtcagagcaacatttttaatagatgtttacattctgtagatgaaaacttgagatacttcctgtaattgacagaatacattgccctgtccagtcgacatcccagttgatgtttagaggcagctggctttgatgatttgactcacaccaatattaaaaaccaaattcaatcataattcaaaatgagtccttttggtgcccattagagagcagcagtgcagctagaaatcatcacctaatggaacaaaaagcattctacatcttagacttattacttaat

SEQ ID NO: 212488 - DNA, 569 bp, Homo sapiens
caaagagccaaggacgtctgtatgtagtaaaattctacacatatttagtgccagacttgggctttaattacagtgaggcttctgatctttattatcaacagtcactgccttctgctgtgctagaatgttgatttttagaagtccatcacagtgttctcttaggtgtaaaaatgtaacatccatcttgcaatttgttttctgaaaaccaggagatgaatgtgactaaaggtccaacaactttcaacaaatgagttgaagtatctgattctwcatagtgaatttgcctttttaggtcagagcaacatttttaatagatgtttacattctgtagatgaaaacttgagatacttcctgtaattgacagaatacattgccctgtccagtcgacatcccagttgatgtttagaggcagctggctttgatgatttgactcacaccaatattaaaaaccaaattcaatcataattcaaaatgagtccttttggtgcccattagagagcagcagtgcagctagaaatcatcacctaatggaacaaaaagcattctacatcttagacttattacttaat

SEQ ID NO: 212489 - DNA, 569 bp, Homo sapiens
caaagagccaaggacgtctgtatgtagtaaaattctacacatatttagtgccagacttgggctttaattacagtgaggcttctgatctttattatcaacagtcactgccttctgctgtgctagaatgttgatttttagaagtccatcacagtgttctcttaggtgtaaaaatgtaacatccatcttgcaatttgttttctgaaaaccaggagatgaatgtgactaaaggtccaacaactttcaacaaatgagttgaagtatctgattcttcatagtgaatttgcctttttaggtcagagcaacatttttaatagatgtttacattctgtagatgaaaacttgagatacttcctgtaattgacagaatacattgccctgtccagtcgacatcccagttgatgtttagaggcagctggctttgatgatttgactcacaccaatattaaaaaccaaattcaatcakaattcaaaatgagtccttttggtgcccattagagagcagcagtgcagctagaaatcatcacctaatggaacaaaaagcattctacatcttagacttattacttaat

SEQ ID NO: 212490 - DNA, 429 bp, Homo sapiens
ctgacagcactgggcactgcatttccaacttggtggcaatcagctgaggctaagtagaaagtgctgagggggatgatgccctctccagttcccaataatttgtgtgatacacttgtacttaccaaaccacttctccccacctgtttgacatttgatggcataagatatcacttgattttacagcccctggcctatccagaccctacctgaggctttgacctaataaaatctttttaaattgtttctttgtatataaatcacagctttgcctctcagttcatgtacctctcagttcacgttcctcacctacaagaagaggagtgaagaccagatggtccccaactcttctaactacaaggacakggttgggaaaataaataccctgacttcacatttcttcctccctccagtctctcactagagctattc

SEQ ID NO: 212491 - DNA, 499 bp, Homo sapiens
cagctatttgggaggctaaggcaagagaattgcttgaactcaggaggcagaggttgcagtgagccgagatggcaccactgcacaccagcctggcaacagagtgagactctgtctcaaaagaaaaaaagaatgatacaatggactttggggactcaggagaaagggtgggaggcgggtgagggataaaagactacaaattgggtttagtgtgtactgctcaggtgatgsgtgcaccaaaatctcacaaatcaccactaaagaatttgctcatgtaaccaaataacacctgttccccaaaaacctagggaaataaaaaaataaactaaaagtttaactagcttctttttcctttaattaattttctgggatcctacccctatttataaatatacaaaatgactcactcattcaacaaatagcagttaatagtcaataactgttggctgcatactaagaaatatactacatattaaagacatacagttaaataaaatattag

SEQ ID NO: 212492 - DNA, 487 bp, Homo sapiens
aactaaaagtttaactagcttctttttcctttaattaattttctgggatcctacccctatttataaatatacaaaatgactcactcattcaacaaatagcagttaatagtcaataactgttggctgcatactaagaaatatrctacatattaaagacatacagttaaataaaatattagtctctaggtcttagcctatcaggagacctagaccaaaataaagtgttgcattacagcatgggaagtgccatcatccagctctggtcagagatagaagctccaacaatgagccttttctctctgtcagtctgggtgtaccctgggtgtaaatattggggacggtggcattttctgaggaaaagatgcatatcttgagtcttgacatttgagttggaattattcagacagataagaacaaataaatttttaagagtctggcaagtaagatttggaaacaagccttccataccacaatcacttgtgtttat

SEQ ID NO: 212493 - DNA, 410 bp, Homo sapiens
atatatatatatatatatatctcctattgtatctcctattatatatatgggagtttattaagtattaacttacatgatcacaaagcccataataggctgtctggaaacttgaggagcaaggagaaccgtctgagtctcaaaactgaagaacttagagtctgatgttcaagggcaggaagcatccagcatgggagaaaggtgtagaccgggatgctaggccagtctygcctcttctcatttttctgcctgctttatattcactggcagctgattagatggtgcccacctgattaagggtggatctatcttccccagcccactgactcaaatgttaatctcctttggcaacaccctcacagacacacccaggatcaatattgcatccttcaatccaatcaagttgacattca

SEQ ID NO: 212494 - DNA, 592 bp, Homo sapiens
ctctgtctgcatgggaaaattaaagaaataaatcaggatttttttctcttaatggttgttttcattggccagcacttggcaatatgactcaaggcccagattgaatttcactgttgggcaatttcatttatcattgctccaaatgcaggtactgatgccattggatttgagcacacaaaaaagttactagtccaatatgatttgctttattttactatgtgaggaggacaatttacaatagcgtattcttcaggagaaaatgtttccattaatattttgaattagtagtaaaatatttagccatatagtgatrgcggtggaaataaggtgtttcaaaatacactaattatttagtaccagtgtttctgatgtatgatattggccactatacactcgatccatgtttatggtgataagacaaaaaaattggctaaaatattggagtgaaaaattcattgtttttattatgccttgaaagttgagattttggaggtactcattcatcaacatatgttgaatgccttctctaagttactcattgtgttaggtgctagaaatattaaaataaataagacaaaatgacagccctcat

SEQ ID NO: 212495 - DNA, 568 bp, Homo sapiens
atcaggtgattttaatgaggactcagatggcaatggaccgccctacaggagacagctttgtagatggccaagctctaggttgaagtccttaaygtgagttaggtttttttatctcaaaagtatctgtataatgtcatatcaaaggctcttagtaaacaaatgatgtaaaaaatgttgaggttatgtttcattacagcaatcaacaagaactgtccacatgagttacaacgaaagaattgttaaagagggacaaggattggagatttaaatatatttcgcatttagatttttatttgaattgcatttattttaattgcatttgacatatcctattactacatttgtttcttgttctattttaagtatgaataactttaagtctttccttttacaaataacttatgaaaagtaataactaattgctgaaattaaccttactgcagaaaaaactatgttttgattttctgaaatatttgcattttaataacatgtatcaggggtatggataaaatttaaatctcaaaatgctgccattgagaattttcagttttaactttagcattgtttt

SEQ ID NO: 212496 - DNA, 495 bp, Homo sapiens
gaatcagtccagctcacaatgagttatttacagttcactatttcaatcaaagctatgttaatgaaaattactgtgtagctctgaagtttaaaaatgagttaataaagtaaatgtaattctaaggtttgagatacttgagctgattcacattagatgcartgttctatgtattattatgttagagctacaacttgattgacttagaatgatttgttaaaacaatttaccactgcaatattgagatggaaagcaaaacaaaatctccatccccttactttcttgttccttagtatagtgcatgtgagttcacatattcatattgagtgtctatttattcacaaactccttcagcaaaattagcacaaagtacttaccacagactttgcgaggccctggaaaaatgaagacaaaaaagcaatgggaacaaacaaacaaaagcaaatttaaaatgtattatcattgcatacttcacatcatagaacttcagtggataga

SEQ ID NO: 212497 - DNA, 431 bp, Homo sapiens
tatataatgataaaggagtcaaccccttaagaggacataacaattttaaatatataagcactcaacactggagcacatggacacataaaaaaattattagagcaaaagagagagcaaggctccaatacaataatagctggagactttaacaccccgttttcagcattggacagatcttacagacagaaaatcaaaaaagaatcatcaaatttaatctgtgttatagggcaaatgtacctaatatatatttacagaacatttaatccaatggctgaggaatacacattattttcctcagcacatgaataattatmaaggataaacaatatttcaggtcataaaacaagtcttaaagcattcaaaaaaactgaaataatatcaggcatcttctctgaccacagtggaaaaaaattagaaattaatagtgagag

SEQ ID NO: 212498 - DNA, 604 bp, Homo sapiens
aacagaactagtaataacattcaaatcatttaattgccaattatatgttctgtctgtgacattcctcttcacaaataagaatgtagcattctagaaaagatagaaacagttgctgactttgtatgtcaatagaccactaataaaaaatctatatttgatgaaactaagtaattattaaaggataaattttgttgtcatttattatcagtatatgattaaacttaattttaggaaaaattcctaggactccctgtttacaacagagaactaggaatcgcctctagaaatgctgtatcttggatcctatacagcatcaagaatgcgatgactgggcagaatttatgactagaagaacttgggtatgtataaagtgagaaaagtattcagtactttgttttacaataacctcaaaatttccatttgagattatttatattgttttctattttcaaggccattctaaaattttctgtattttaagagccactaaaaccaacgtaaactaaayatgagtcattacattatgtaaattatgtcagcagctctgatttttaatgtatatttttcctagtcataaaatagcagaagtccagaaattattccc

SEQ ID NO: 212499 - DNA, 406 bp, Homo sapiens
tgtaaacgcaccaagcagcactctgtaaaaatgcaccaatcagcgctctgtgtctagctaaaggtttgtaaacacaccaatcagcactctgtaaagacggaccaatcagcactctgtaaaatggaccaagcagcagaacgtgggtggggccatataaaggaataaaagctggccacccaagccagcagcagaaacccactagggtccccttccatgctgtggaagctttgttctttcgttcttcacaataaatcttgttgctgctcaatcttttggtccggactacctttaagagctataacactcactgcgaasgtctgcagtttcactcctgcagtcagcaagaccatgaacccaccggaaggaagaaactccggacacacctgaacatctgaaggaaaaaact

SEQ ID NO: 212500 - DNA, 406 bp, Homo sapiens
tgtaaacgcaccaagcagcactctgtaaaaatgcaccaatcagcgctctgtgtctagctaaaggtttgtaaacacaccaatcagcactctgtaaagacggaccaatcagcactctgtaaaatggaccaagcagcagaacgtgggtggggccatataaaggaataaaagctggccacccaagccagcagcagaaacccactagggtccccttccatgctgtggaagctttgttctttcgttcttcacaataaatcttgttgctgctcaatcttttggtccggactacctttaagagctataacactcactgcgaaggtctgcagtttcactcctgcagtcagcaagaccatgaacccacyggaaggaagaaactccggacacacctgaacatctgaaggaaaaaact

SEQ ID NO: 212501 - DNA, 465 bp, Homo sapiens
ttagttatccatgtggaaaacaatgaaactagagcccttctcacaccacacagaaaaatcagtttcaagtgaataatagatctaaagatgaaaggttaacaatgaccttcacgaaggtagcattggagaatatagctatgaccttagggcagtaaagattactttaacaggacattaaaaaaaaagttggccagrcacagtggctcacacctgtaatcccagcactttgggaggccgaggcgggcggatcacgaggtcaggagttcgagaccagcctgaccaacatggtgaaatcctgtctctactaaaaatacaaaaattagccaggcatgatggcatgcacctgtaatctctgctactcgagaggctgagacaggagaatcatttgaacctgagaggtagaggttgcaaaaacaaaaacaaaactgatcacttgaactacaggaaaataaaaaactctttttc

SEQ ID NO: 212502 - DNA, 515 bp, Homo sapiens
gggggacatatattattatatattacattatatattattacatgctgtatataatatataaccttgatcttctgagccactgtttttcatcaataaaaacatgaagacaatatccaccaaaaactttcattatgaagatcagaagaaatagtttatgtgatgcatccagtaagtaccaagaactagtaggcaatcaataaatggctatgatttcttctcaaacatttatatacacacacatatagctataatcagatgtgtggaaaacatagaggccaaaatgaacttttaaagagggaaaaagtcattcaaagttgtgatcatcttgttataacttgttacatgtctactgctgaccaagtttcataagcatttcctgttttaaaatcagctttccggtgacacaggagaaagagtaatgactatggcygccaattttctcatccagacatcatggaatatcagatggaccttatattgataaccattttctttaaggctcagggaaattccct

SEQ ID NO: 212503 - DNA, 473 bp, Homo sapiens
cttcttatctaggaagccaagataaattgtactaagaagtagaatgtwttagataatataaaataatataaaacacatagaaacttgtattagggtgcaaatcagacacatgtgcccatacagtttaaaaatatatagataaatgtaattgagagtatagtattaccataatgaaggacatatagattaatggaacacaaaagagtccagaagtggacatatacacatatatgattaattgactttgaacagagatgccaaggtaattcaataaagaatgatagtctgttcaaaaaatgacactggaagaactggatatccacaaggaaaaaatgaactttgacccttacctcgaaacatacatttttaaaaactcaaaatggattatgtaactaaatttaaaagccaaaagttataaaacttttagaagaaaaaatgagaaaatctccatgactttgagttaagcaagtaaa

SEQ ID NO: 212504 - DNA, 473 bp, Homo sapiens
cttcttatctaggaagccaagataaattgtactaagaagtagaatgtattagataatataaaataatataaaacacatagaaacttgtattagggtgcaaatcagacacatgtgcccatacagtttaaaaatatatagataaatgtaattgagagtatagtattaccataatgaaggacatatagattaatggaacacaaaagagtccagaagtggacatatacacatatatgattaattgactttgaacagagatgccaaggtaattcaataaagaatgatagtctgttcaaaaaatgacactggaagaactggatatccacaaggwaaaaatgaactttgacccttacctcgaaacatacatttttaaaaactcaaaatggattatgtaactaaatttaaaagccaaaagttataaaacttttagaagaaaaaatgagaaaatctccatgactttgagttaagcaagtaaa

SEQ ID NO: 212505 - DNA, 473 bp, Homo sapiens
cttcttatctaggaagccaagataaattgtactaagaagtagaatgtattagataatataaaataatataaaacacatagaaacttgtattagggtgcaaatcagacacatgtgcccatacagtttaaaaatatatagataaatgtaattgagagtatagtattaccataatgaaggacatatagattaatggaacacaaaagagtccagaagtggacatatacacatatatgattaattgactttgaacagagatgccaaggtaattcaataaagaatgatagtctgttcaaaaaatgacactggaagaactggatatccacaaggaaaaaatgaactttgacccttacctcraaacatacatttttaaaaactcaaaatggattatgtaactaaatttaaaagccaaaagttataaaacttttagaagaaaaaatgagaaaatctccatgactttgagttaagcaagtaaa

SEQ ID NO: 212506 - DNA, 547 bp, Homo sapiens
atacaaatgatggtacatgttcatataaggacttgtacacaaatgttcacgtaaattttatttgtagtagccaaaaaccaaaaacacctcaaattccatcaccagatagatggataaacaaatggtggtatatccatacaatggaatatgaaatggttgagtttatgtgtcacttttgctagatatttggaaaaacattattctagatgtttctgtgaaggtattttttagatgaagttaacatttaaatcagtacactttgagtaaagcagattacattccataatgtggatgggcctcatccaatcagtaaaaggccttaatagaaaaggactggaggaaggaggtgcagcaagatgcccaaatagaacctccaacaatcaccatctcctacccctgcaggaacaccaaattaaacatctmtccacacaagaaaacaccttcataagaaccaaaaatcaggtgagcaatcacagtacgtggttttaacatcatagcaaggaaaaaggtgctgaagaaggtaggaaagacagtctttaatcaacta

SEQ ID NO: 212507 - DNA, 386 bp, Homo sapiens
gacctgatctgcattatagaccaaatggatctaatagatatttacagaacatttcacccaatggctacaaaatacacattcttctcctcagcacattggtcattctcaaggatggagcatatgttaggtaacaaaacaaatcttaaaatattcaaaaaacagttgaaatattatcaagcattttctctgaccrcagtggaataaaactaaaaatcaataacacaggaattttggaaactatgaaaacaacaaacacatggaaattaaacaatatggtcctgaatgaccagtggatcaatgaagaaattaacaagaaaattaaaaaatttcttggaacaaatgaaaatggaaacacaacatatcaaaacctatggaatacagcaaaa

SEQ ID NO: 212508 - DNA, 386 bp, Homo sapiens
gacctgatctgcattatagaccaaatggatctaatagatatttacagaacatttcacccaatggctacaaaatacacattcttctcctcagcacattggtcattctcaaggatggagcatatgttaggtaacaaaacaaatcttaaaatattcaaaaaacagttgaaatattatcaagcattttctctgaccacagtggaataaaactaaaaatcaataacacaggaattttggaaactatraaaacaacaaacacatggaaattaaacaatatggtcctgaatgaccagtggatcaatgaagaaattaacaagaaaattaaaaaatttcttggaacaaatgaaaatggaaacacaacatatcaaaacctatggaatacagcaaaa

SEQ ID NO: 212509 - DNA, 386 bp, Homo sapiens
gacctgatctgcattatagaccaaatggatctaatagatatttacagaacatttcacccaatggctacaaaatacacattcttctcctcagcacattggtcattctcaaggatggagcatatgttaggtaacaaaacaaatcttaaaatattcaaaaaacagttgaaatattatcaagcattttctctgaccacagtggaataaaactaaaaatcaataacacaggaattttggaaactatgaaaacaacaaacacatggaaattaaacaatatggtcctgaatgaccagtggatcaatgaaraaattaacaagaaaattaaaaaatttcttggaacaaatgaaaatggaaacacaacatatcaaaacctatggaatacagcaaaa

SEQ ID NO: 212510 - DNA, 573 bp, Homo sapiens
ctgatattacttttaatgaaaggaattgtggactttgtagagaaaggaaagggaaaaaagaaaagaggagagaagagaaaatgagccacttttacttccttctcaggtactctccctattttggagatttttacataaatgacacattagtggtggtagggagtgtaaaaagagacacccaattccctctcaaatccaataaaaatacgtgtatgtgtccaaacagccatagatagtcagagggtactcaaaatatatcccagagaatcaggctcaaaaccagttaactaaaatgaaataattttaagattgagcaayggggacacacacaccaaggtgatgtagagagatgtaggagagatgtagacagaattttgaggaagatgtcttttttatctcagggccttttaatctaggcagtattgacgtttaatgttagataatcctttgatggtggggagggcgtgccctgtacattagaagatgtctagcagcaaccctggcctttacccactagatagctatagaacttcccactgttccagttgtggcaacaaaaaatgtctccagaca

SEQ ID NO: 212511 - DNA, 585 bp, Homo sapiens
ttgctgctaagatattgcagatacttgtctgtcattttacatttaaaatttttggttcacattattttaaatatgtttcttgtatatgatgcatactggaattttttgtgaaatctgagcctttartcttttcaatagattaaaatttatatcatttttctaaattaacagaattggcctctccagtgtcttcttatttagcttttgtttttaatgttttctgtcttttgctatgtgtgtatgtattattttaggctatatgaggtatgtttgtgtataatttccttcttatattttagaagatctactgtctctattgtttttaagtgcataagtttactttttgtagtgtatttaactctctgtgtcatctttgaacaacatatctataaagttcctgttatggcaggagaaaaaataacatctatcaccttccctactccttttagatcattatgtttattaatatatttgtattattgcttcttccattgatttactctataattttgtttttcctattgtagacttatctaaattcagcagaagaaattggctgactttttgagaagctgtaagaaaata

SEQ ID NO: 212512 - DNA, 610 bp, Homo sapiens
gaccaagttcttgcaaccaacctcttggagttagcaatggtgggctatgcaagaagagtccctgatgttctgtactctcctcttctctgtatgatgaccctccatgatcaacactggaaatcttagtgttcatcaatggacaataatatcaataccaaatattataagataaaaattcttactgagagaagaagagcagatcttcaaacatgatttatttgaagcgaatttagggacagtaggttcatctctgatgacgagttacacaggcacatgattgaagaaataaattgatgaggaagggaatttagttttcttaagcacctaccatmtatcacgcacagctttaggctctttcacataccttatcttacacaatcagcctttataatttactgatagaaaaaaaaaaaacagggctcagagaggttaagtgacttacccgaagcaacatgttatttaatgatggagccaatatctgaacaaagatctctgacttcaaagccaggcttttataacattatcttgccaaaaagtagagggtgaagagaagaaataacctagaatttttttttctactttttataaagtgaagagaggctgagacaag

SEQ ID NO: 212513 - DNA, 286 bp, Homo sapiens
ttactgcttttccctcttctccatcttaacctagacacatgattgactggagactatatttgactgacagatataacaatttaaatayaaacacttattaaccctgcaagagcatcttaataaaagaacatggagatagacatacaaggtagatatgctgattttgaagccaattgcattgtaccttaatgtgacagaagcaatgaatcaaatgaaagtctgtgtgaaataattccaaagattttttttcccacacatttaaatcagcacctccatgtaggcaagc

SEQ ID NO: 212514 - DNA, 433 bp, Homo sapiens
tcaggaattcattcattttaatctgttctatgaccatggttggaccttgaccctgctagaacgacttataaatctgagtcattatttctgggtaagacaatgggcaaaaaaggtatatgataataactgctaaccatgaagatggtactrtattagatcctttacattattagctcatttaatcttcacaaaaaacaaatggcataggtaatatattgcctttatttacagatgaggaaactgaaagtccaagattttttaaaatttgttttttttttttagattcaaggggtacatttgcatgttgttacatggatatattgtgtgctgatagagagggcttctagtatatccattacccaaatagtaaacactatacctgacaggcaattttcaatccttgtcccctttccatctacccctcttttggagt

SEQ ID NO: 212515 - DNA, 433 bp, Homo sapiens
tcaggaattcattcattttaatctgttctatgaccatggttggaccttgaccctgctagaacgacttataaatctgagtcattatttctgggtaagacaatgggcaaaaaaggtatatgataataactgctaaccatgaagatggtactatattagatcctttacattattagctcatttaatcttcacaaaaaacaaatggcataggtaatatattgcctttatttacagatgaggaaactgaaagtccaagatttttwaaaatttgttttttttttttagattcaaggggtacatttgcatgttgttacatggatatattgtgtgctgatagagagggcttctagtatatccattacccaaatagtaaacactatacctgacaggcaattttcaatccttgtcccctttccatctacccctcttttggagt

SEQ ID NO: 212516 - DNA, 522 bp, Homo sapiens
cagatgccccatgcagatggaaatacattgcatggggatatgcagaccacagcagagctccaccaatcggcaacagccttgttcacaacaggaccaaatctctcaaacatttgtggctaggggaattaaaagaaaaagagactcttaatatgatggtaaggctttagctgtcaagcagcaggatgctgctcctccttgacagcatgaaaggaagcccagctctaccagcctacctgtctgggagccacctgtcacataggagtaggaagcagatttactgccagaatttgggcaaaactgcatcccctctctccaaaatcatggggataagtgaagtgtaggactgagcttgcagggatgatgccatcatgtaaacatgtaamcatctaccttaattcatctttttttttttttataagagggaggcatgtgaggcaacttcagttaagttgaaatccttgttattttgaaaggtagttgtaatggtggctctgatatgtgaaagttaatatacttgacata

SEQ ID NO: 212517 - DNA, 447 bp, Homo sapiens
ggccagcctgtcgtttaatgagagccatgctgtaataaatatgcattagttccattaaattaggtccagwggtagagaaatccctgtagatgtggctgtcaattttgttcatgccacagagcagtcctgccttacattgtttgtgaaagcacctaaatgtgtgaactgtgtctcctcatttttggagttctccttcaccatccagcatattgtttgcttctttaaatgtttctacaaacatcagtgcagtgtacatctttctgttatttcagtcaaatctcaattgttcactgtggtagtgattgtgtatcatgtaatgtactaaaatcatcaaattaccccaaactaattttgagaattcgcagtttctttcgggagaagaattgtttaaactaagtgtttgaaatccacctttttcttctctttatttatttcataaagttgcca

SEQ ID NO: 212518 - DNA, 673 bp, Homo sapiens
aagaaaaataaagcatcatttttaaaattctgatttcaacttagaattcttactcagccaaactactcaacaatgtaagagtaaagaacagagcattcaaaattaacgaaaataacaacaaaaaatctgttttcatattcctttttaaaattatgttttattatgataggaatatttaacatgatatctacctttttggcaagtttttaagttataaaatccattattgttaactataggcacgatactgtatagcatatttctacagcttactcatcctgcttagctgcaactttgtgcctgcaaattagcaattccactggcccctatctccactccctggcaaccaccattccactctttgattctatgaaactattttagatacctcatgtaagtggaattatgcagtatttgtctttctgtaaatggctcatttcacttagcataatgtcctcaaagttcatgtatgttgtctcatatttcagaatttccttttctgawggctgactagtgttccattgtatgcatacacaacattttctttacccattcttctctctatagacacttaggttatttctgcatattgcctattgtgaatattctttgggatcctgatttttaattcttttggatagatacaaagaagtaagattgctggatcacatgg

SEQ ID NO: 212519 - DNA, 544 bp, Homo sapiens
aggcaagctgttgagcagttattttttgtcagaatatgagagtaacttttactagtttgtaaaaagtattgctttttgctaaattttaattgaatttagataagtgtctatcatttgatrtaagtatatgaataaatagatgtactggtacaacatatcatattgctgagtttggtaaaattacattgctgtttgtcacgtcttttatcccatcgtgaactatggcagactgtatcaagtagcctacattccttactcctcttcacagccatatgctttgccatgtgactttgaagtatcttttagtgaaggagtatcatatgtttccctatctcttgattttgggtatagtcatacaacttgttttgccagtggagatagaagttattggagctcaggacacattaccccaaaatatgactgtaggaaaccagaatatgccaacccaataccatacttttttgaaatattttgagctggttatttttgagaaattgcatacacaggagtagctctgaaaagctgttcttttgtaaaataaaat

SEQ ID NO: 212520 - DNA, 603 bp, Homo sapiens
tttgctttggcgacatgcctttatggtacattagcaggatgccagatgaggttgctccaggtactactagctggttgacatttcaaactcatcaattccatcatgagtctccaaatggtacaaaatatgtggggactcatggcagtttaacacagtggaagtgttaagaagtcctaaccaggtgtcgattttagtcattttcttttgtacttctaaactgtccatgaaatttcagagtgtgtgcrtaaaccaaactcctactagtttatttcatagagattgttctacaccttaataaaggcaggaagctgactaattcaaacttaaaactttagttctagtaagttccacatgtagccagccctaagacttactgagtgaagtgtgggctaaggaatagtcacgcacttcttctaaaatacttttacatgtgtacagaaagatacggcataatggcttatccaggtgaaagaaggtagaaaattttcctaagtcagttttcctcaatggcaatttgcatgcaagagctttacaaagtaatctagtgtgttggagcctaaggggtaaggagtaattaaaataaagacctgggttcaaattaaa

SEQ ID NO: 212521 - DNA, 423 bp, Homo sapiens
aggaattcttttatgtgattgtggggaccaggaaatttcaatattcttaggccacaaggaaagacagactgtagccttaggcataaactgaagcttctgtccatggggggattttattcttttttggggacacctcaggtctgttcttaaagattttccactgattgaatcaggcccagaatgtctagagtactctcccttatttaaagtcaattgattctggactttaattaatacaaaaatgcatgggagttccaagatggccgaataggaacagctccagtctatmgctcccagcgtgagtgatgcagaagatgggtaatttctgcatttccaactgaggtactgggttcatctcactggggcttgtcagacagtgggtgcagcccatggagcagggcggggcattgcctcactggggaa

SEQ ID NO: 212522 - DNA, 578 bp, Homo sapiens
aggtctgttcttaaagattttccactgattgaatcaggcccagaatgtctagagtactctcccttatttaaagtcaattgattctggactttaattaatacaaaaatgcatgggagttccaagatggccgaataggaacagctccagtctatagctcccagcgtgagtgatgcagaagatgggtaatttctgcatttccaactgaggtactgggttcatctcactggggcttgtcagacagtgggtgcagcccatggagcagggcggggcattgcctcactggggaagtgcaaggggttggagaattccctttcctagcaaaggaaagctgtgacagacggtaactgaaaattgggacactcccaccctaattctgcacttttccaatggccttagcaaacggcacaccaggagattatatcccatgcctggctccgagggtcccacgcccacggagcctcgcttactgctagcacagcagtctgagatcsaactgcaaggcaggtagcagtgagcctcggggagggacatccaccattgctgaggcttgagtaggtaaacaaagtggccaggaagct

SEQ ID NO: 212523 - DNA, 597 bp, Homo sapiens
attgggacactcccaccctaattctgcacttttccaatggccttagcaaacggcacaccaggagattatatcccatgcctggctccgagggtcccacgcccacggagcctcgcttactgctagcacagcagtctgagatccaactgcaaggcaggtagcagtgagcctcggggagggacatccaccattgctgaggcttgagtaggtaaacaaagtggccaggaagcttgaactgggtggagcccactgcagctccaggaggcctgcctgcctttgtggactccacctctaggggcagggcatagctgaacaaaaagcagcagaaacttctgcagacttaaacatcctttgaagtaagtagtggttctcccagcatggagtttgagatctgagaacggacagactgcctcctcaagtgggtccctgacccccgaatagcctaattgggagacacctcccagtaggggccaactgacacctcatacagccaggtgcccctctgagacaaaggttccagaggaaggatcaggcagcaacatttacygttctgcagtatttgctgttctgcagcccctgctggtgatacccaggcaaaca

SEQ ID NO: 212524 - DNA, 487 bp, Homo sapiens
atgctgagccatattaaagtctgagacaaaaagaaaaatcaataatattgatcctgcctttatttaaaattttgattttttatcattgattttttgcattgatttttatttttaaaatatcgtattaaaatattatctgtcttgattgctgagttttttgctctccttaagtttcatacatctaattgagagtgttatggactgaattccttttccctcaaattaggacactgaagtcctaacccccaatgtgactgttttttgagacaggccctttaagaagataatcaaagttaaacaaggtcataagggtagggtctttagaataagagagagactccaggcatgcaygcagaaagaggaaaagccatgtgaggacacagcaagatggcagccatctgcaagctaaggagagaggcctctggagaaaccaaacctgccaacaacttgatcgtggatttccagcctccagaactgtgaaaaatac

SEQ ID NO: 212525 - DNA, 551 bp, Homo sapiens
aagatcttgggggcagccccactctcccaactccactagacatttccctagtggggatactctcagccatcctttgcaatctaggtggaggtagctgtgcatccaatgcttgttcactctgtgtgccagcagatttagtatcaggtggacaccaccaagctttacaactcgtgccctctgcagtggtggcccaagctgcacctgagcccacctgagtcacatctggagcagccaaagagtgctacgccagaatgcagccagctgagacttgaggcagcctgggcagtgatccctgcagtcccacaggcaccctggaactctgtagtgacctgggtctctcccttgaaaccattctgcactcagtgttctgactctgggcctgtgatggcaaggtagcctggaaratctccaaaatgccctcagggtcattctcccatagtcttgatgaatagcatctggcttccttcaatccgtactaatcttcttatcaacgggaccgttggctacctccttagttttctctcctaaatatgcttttttattctttacat

SEQ ID NO: 212526 - DNA, 444 bp, Homo sapiens
tagaaatatatatatatacacatgtaaacacatatatgtatcattgcaccatgcataatacatatgcatcatatatgtataggtaatgtatgtgatatatatgtgcatatgcacataattacrtatgtataagatacatgtaaaatgactccatactgaaaggtctacaggcttttggtgaaatggctgatttcaaggctggggcaaagaaagttaaaaatgaatttggaatatgttatgctgggaagtaggcacaaagtatgatggggacacctaaaaagaacagaagtcagcacaaaaattactggccaaatctgaaggaatgtatcaaaataattaatgggagtaatgaattcttacccactgaagaaattaagagtctatcaatccacatggctataaatagataaacagaaaatattcttttttacagtaggatttcca

SEQ ID NO: 212527 - DNA, 621 bp, Homo sapiens
tgttaatctcgaaactgtctcaagaaggcttgccttgtgtatttgagaacaattcaaaatactgttgagataaaaatatttatattttttgatgtctctagttacctaaatttctggataactttgcatacagcttgttaggaaatgtcacttcattcctgtacaattgggactatggttataacatcatcacctctatgccaaagcatggctrggaataccagcattcttacaatggaaacttgtcttcaggccaggctgccaggagctgttctttgcttctcctgaaccataattaatttatagtctatcatttcaaaggagaatgactctgtagaatttggactaagtgcaatctcccaagattgaagatgtaccaacattgttttatgatttactattgctccattttcttctttaacatgttaaattgcatataattactgcaaagggaagaaatagacttagaaatagactaagagtcagtgcataaaaagagaatctatgcatagtcctatgggtgatgcaaaaatatcctgtccacttgatacagctataaattttctttaggaaaaggacattacagatttttttaagccgaaatcattaacagttggtatc

SEQ ID NO: 212528 - DNA, 575 bp, Homo sapiens
ttaatttcatacacttgtaaaatatactcatcccctaaacctctggtcacattaaagccaaaatayttaaggcaaagaaaaatccttccacactcttctcggcctgaaaggactccttagggcattaaaaaaaaaagcctgacttcagaggaagttgtatcttaattagtagtcaaatttctctcccatcttatttagtttgctctttaaaaggcaaatatcactgtagcaaaaatgtagtctttaagcaataaaaatataccaacagaccttaaggagcgtagaattaaagacacagagaattttatgtcggaaggaagaatgaggaatttagttactctaataatatctcttcatgaaagagctcaggtaagaaagcttaaatatttattttatatatcaccatctttatttgttccttcattaaaactaataaagagacataacgtatataaacacatgatgaagctgaaaggatattatatctgaggcaggaagactctaggtcaaatcctagttcagtcacttattaattttctgtcactgagttcttgactttgtcactaaatggatga

SEQ ID NO: 212529 - DNA, 575 bp, Homo sapiens
ttaatttcatacacttgtaaaatatactcatcccctaaacctctggtcacattaaagccaaaatatttaaggcaaagaaaaatccttccacactyttctcggcctgaaaggactccttagggcattaaaaaaaaaagcctgacttcagaggaagttgtatcttaattagtagtcaaatttctctcccatcttatttagtttgctctttaaaaggcaaatatcactgtagcaaaaatgtagtctttaagcaataaaaatataccaacagaccttaaggagcgtagaattaaagacacagagaattttatgtcggaaggaagaatgaggaatttagttactctaataatatctcttcatgaaagagctcaggtaagaaagcttaaatatttattttatatatcaccatctttatttgttccttcattaaaactaataaagagacataacgtatataaacacatgatgaagctgaaaggatattatatctgaggcaggaagactctaggtcaaatcctagttcagtcacttattaattttctgtcactgagttcttgactttgtcactaaatggatga

SEQ ID NO: 212530 - DNA, 575 bp, Homo sapiens
ttaatttcatacacttgtaaaatatactcatcccctaaacctctggtcacattaaagccaaaatatttaaggcaaagaaaaatccttccacactcttctcggcctgaaaggactccttagggcattaaaaaaaaaagcctgacttcagaggaagttgtatcttaattagtagtcaaatttctctcccatcttatttagtttgctctttaaaaggcaaatatcactgtagcaaaaatgtagtctttaagcaataaaaatataccaacagaccttaaggagcgtagaattaaagacacakagaattttatgtcggaaggaagaatgaggaatttagttactctaataatatctcttcatgaaagagctcaggtaagaaagcttaaatatttattttatatatcaccatctttatttgttccttcattaaaactaataaagagacataacgtatataaacacatgatgaagctgaaaggatattatatctgaggcaggaagactctaggtcaaatcctagttcagtcacttattaattttctgtcactgagttcttgactttgtcactaaatggatga

SEQ ID NO: 212531 - DNA, 626 bp, Homo sapiens
attaaatttccaaaaacaaaacaaaacaagcaggtttcatggagcccgagtccatgaaagcttcatggaccaacataaacaaagtcaaaagacaaacaatgaattgaaaatcacacataaaaaccaaacgactaatatccttaatttataaagtattctaataaattagtaagaaaagatcaataacataatgaaaaaatggaataaaggtataaacagacaattgacagaaaaaagaaatatacatgactcttaaatatacagaaagatatccaacttacaataggttaccatttttattaactgttagaatgataaacataaaaacatttattgttgaaggtggagggaacaagacatccatgcataatgggaacataaattggaacarcttctacagtgggtgttttgataatctttatccaaaaatgcacatacccatgaactcagtaattccacttccagaaatgttgtcccacagaaatatttatgtgtgaagatatatttgagaatatttcttgtaacatctaaatgtctttcattactctatgtttcattttgcttatctgtaaggtggcaatagggattctagtttcctgacacttgaaatggctggtataggagca

SEQ ID NO: 212532 - DNA, 545 bp, Homo sapiens
ggagccaagaccttctggttaatcaaagaggtctagattcaaaatacaaatttcctgaaaaagggaatccactgccttatattcacactgggttctaaatggccaacttcakaagctcctgggagcaggtttcaatgaggtagagagacaccatcacctctctgaatgcacaggggaagaataaagagacctcccccttgacttgacaagttttcccacctctggcataatttctcactccctcctaccagcaaacaccaagtcagctgtggtctgaagttgtttatggtgttcagtggcaaggcagtttgaaacttccagctaataagtccctgggttgatggtgaacttagcttcccacattatttctgtcccccaccacaagaaatgattgagaattggctgcaacttagctgcctatcaatggataatatatatctagccaagggatggagaaacaggaacatctaccaccaaaggcagatactggattccagtggagtatagctgggaggacggagcacacaagactgcctgggaccatt

SEQ ID NO: 212533 - DNA, 420 bp, Homo sapiens
cccaccacgaatgcaagacctttctaaatcttctaatcaatgcctgtgaatcctgaagtttcctattctggctggtggaaagagatactattcttggccctgtgggagcagcatacactattctctctaatcctgtcccgtagttctttcccaggcttcaggtagtccccccaactccaaccccccatcccatgcactcatcagtacacagatgaatacttgagggaaccctcttcacttatacagaggagcccctctatgtgcttctcacctctctagcgctgtgtcatgaggctctagcattgtggtctccccagactgtcagctccgtctcctcaactcagcaatctcccaggctctgcctggagtccccctcactgcatsatagcctagaaaccctctcaatgcattaagctgagt

SEQ ID NO: 212534 - DNA, 581 bp, Homo sapiens
ggcatataaaagatagatctatatagatttatatagatccatatagataaaaatatagatcctctggcccaaccttgagagcttttgatgctacaatttggaataagctgggaatctacatttttaaccagctgtcccagagattctgaccagaccaggcttgctttgagaaacattgggctagaatagaaattgcaggccagagagggctccagataattaatggatcaagcatttttacatagatatgtcctgaaatgtgactgtataactttataatttttaaagaaagatttagaataataattgtgtgaactagaagtattgggattcatgttagaagcagaggctgaatgaatgctggatggattggcattgcatttagcacaggggtgggaggcaggcggagcaaggattagggcttgaagggctgcatgcaggtgacagctagctggctcrttcacattttggatttttctctatcattgcttcagtagtctacacactgagctcagtttcctctttgttctactgccctgcctctgaagacatctttggcgaatgtcactcccttgctgtat

SEQ ID NO: 212535 - DNA, 421 bp, Homo sapiens
agaattcttcactttgaaaagccaagttgctttaaaaaaaagttggggggcacagttttggcatacaccgagtgactgcatttgacctccgcctgcctggggcatgtggataacgrcagtggtcccatgccgtgtggtcttcctcttggcttatccccctagctcgctgttgtcctagtggccatgtactatgtgcaggacactttcatagtccgttcatccacagagcagtcctagcctcttctaatctccacttaagagccaatgaagcttccagagcgcaggtaacttaagtcacacagcttgaattagactggacaatgagccacctttccaccgtggctgcactgtgaccctgggtcaaacggcctcatgaccagccccctccacgcctgtccccttcttgcccgggtctgccgcc

SEQ ID NO: 212536 - DNA, 610 bp, Homo sapiens
gtggtggcacaaatggccaccagcctctccaggcttaaattcaactattaatattttaggaacctacagaatgatacgagagggtatctctcctggtagctttagcagaagtcactgggaaggcccgtctttggtccactgctgtggctgggtctggacatcattggacagaggagaaaattatgagccttggaaaagctaagtgacttttctaagatcacacagaagactgaagtgcctgtcttgtgaccaagagtgtcyctgtgtgagcccttttttgagtttaggggcagctgttgactcagtcgcaaagggaacagattgtatatttggggtttcaactttcctttttctgtacccttttacagcctgcagaggactcagctaattctgaagactcatctaatgtccagtctcttaaaattctgtttcctcccttcctttttaaaaacctgacgtttatataaaaaaaattatgttcagtgaaagaagccagactgaaaaggctatatactgtattatctcatgtatgtggctctctggagaagacaaaattctagggttaggaaatagatcaatggctgccaggagtggggtgggggtacaagat

SEQ ID NO: 212537 - DNA, 610 bp, Homo sapiens
gtggtggcacaaatggccaccagcctctccaggcttaaattcaactattaatattttaggaacctacagaatgatacgagagggtatctctcctggtagctttagcagaagtcactgggaaggcccgtctttggtccactgctgtggctgggtctggacatcattggacagaggagaaaattatgagccttggaaaagctaagtgacttttctaagatcacacagaagactgaagtgcctgtcttgtgaccaagagtgtccctgtgtgagcccttttttgagtttaggggcagctgttgrctcagtcgcaaagggaacagattgtatatttggggtttcaactttcctttttctgtacccttttacagcctgcagaggactcagctaattctgaagactcatctaatgtccagtctcttaaaattctgtttcctcccttcctttttaaaaacctgacgtttatataaaaaaaattatgttcagtgaaagaagccagactgaaaaggctatatactgtattatctcatgtatgtggctctctggagaagacaaaattctagggttaggaaatagatcaatggctgccaggagtggggtgggggtacaagat

SEQ ID NO: 212538 - DNA, 574 bp, Homo sapiens
atgtggagctccagtaaacagcaagttaatggacttcccagatatgtgaatttcaacagctgttgcaaacaacagtgagcacagaaaaaaaaatatatgaaggaagagagaaaggaagaggaaagagaggaagagagggggaggggygtcagcaatggaagtaggaaacaacaaggatgaggtccagtttttaaaatccagattcttgtatctgggcctgattgcaaatgccatgtatcctaggaagccatctggaaaaacagccaatctgagaatgccctgagggtggccaaggacagacttgtggagggagttgtctggatttcctagggcttggtgtgcctttagaggggagtagaacagacttttgatatagaaagtacatgtggttaccctcccttttgggagaattaacatccatggacttagaaattcaccatcagtagtaggttaaaatttatgtattgccaaggagtggtaagagattacatcttgtcatcttgttttaagactctttataaactagcccctagtttttattttttctagcttcgtctatttctatttttaatag

SEQ ID NO: 212539 - DNA, 606 bp, Homo sapiens
aattatacttcaataaacctgactaaaaaaatagtacacacaaatttggacatagactgatctgacacaccatgcttttctgaatttgaattccagtgtgtgaaggctctagtactaaaattctgacaatatgcattcctagatgaatgtttcaagcaagcactttgcaggatagtttcaatttattaaggtggaagatggaccaatggtactagatataatatttagttctgaattacagtatccagacatggctayctgtggttagtccagatttgactaaaataaatctggccccattatgctgccatttatcccttccttgaaacccagccagccatggcatcatcaggatcttaatgagccctctggggtttccatacttggatctcagactgtttaatagatattttaggcctttgagatggtccctgagcactactgatgagaaactcaacaggagaaaaaatttcaatatgtttgctcatgattgcaaccaattgaatgcctcttagccagtgactttgcaaggtaagtgatcagtggaagagtggaccatgcaatagatatggtatttcatctattatttatgttttttatgggtct

SEQ ID NO: 212540 - DNA, 518 bp, Homo sapiens
cttgcggaaatattctaaagccaatcccagacatcctaacattcccctccaggcatcctaacattcccctcccaaatatttctgactgcatctccaaaaaaataaagacattttcttgcataaccacaaaaccatgatcacaacaaatccagcaattattcytaagtatcctctaatactcaaaccgtattcagattttcccagttgctcaaaaaggtctttgcagttgaatgaggagatgaacaaggcctatattcacattgcctttgattgctagctacctttccctacaaaatttgcttttgtaggcgtagggggatctgcagtgagctggggctagctagttgcaacaagtgacccagagctgttgaaatgcatctgaggtggggaaagcaggtttgaggtagggtctgtgaatagagtgcagtactgattctgaggcctggagacagctctgtgctgctgagatgctttcactttattctattttctttcatctgaagaggcaaggaggccag

SEQ ID NO: 212541 - DNA, 517 bp, Homo sapiens
ttgcggaaatattctaaagccaatcccagacatcctaacattcccctccaggcatcctaacattcccctcccaaatatttctgactgcatctccaaaaaaataaagacattttcttgcataaccacaaaaccatgatcacaacaaatccagcaattattcctaagtatcctctaatactcaaaccgtattcagatttycccagttgctcaaaaaggtctttgcagttgaatgaggagatgaacaaggcctatattcacattgcctttgattgctagctacctttccctacaaaatttgcttttgtaggcgtagggggatctgcagtgagctggggctagctagttgcaacaagtgacccagagctgttgaaatgcatctgaggtggggaaagcaggtttgaggtagggtctgtgaatagagtgcagtactgattctgaggcctggagacagctctgtgctgctgagatgctttcactttattctattttctttcatctgaagaggcaaggaggccag

SEQ ID NO: 212542 - DNA, 517 bp, Homo sapiens
ttgcggaaatattctaaagccaatcccagacatcctaacattcccctccaggcatcctaacattcccctcccaaatatttctgactgcatctccaaaaaaataaagacattttcttgcataaccacaaaaccatgatcacaacaaatccagcaattattcctaagtatcctctaatactcaaaccgtattcagattttcccagttgctcaaaaaggtctttgcagttgratgaggagatgaacaaggcctatattcacattgcctttgattgctagctacctttccctacaaaatttgcttttgtaggcgtagggggatctgcagtgagctggggctagctagttgcaacaagtgacccagagctgttgaaatgcatctgaggtggggaaagcaggtttgaggtagggtctgtgaatagagtgcagtactgattctgaggcctggagacagctctgtgctgctgagatgctttcactttattctattttctttcatctgaagaggcaaggaggccag

SEQ ID NO: 212543 - DNA, 518 bp, Homo sapiens
cttgcggaaatattctaaagccaatcccagacatcctaacattcccctccaggcatcctaacattcccctcccaaatatttctgactgcatctccaaaaaaataaagacattttcttgcataaccacaaaaccatgatcacaacaaatccagcaattattcctaagtatcctctaatactcaaaccgtattcagattttcccagttgctcaaaaaggtctttgcagttgaatgaggagaygaacaaggcctatattcacattgcctttgattgctagctacctttccctacaaaatttgcttttgtaggcgtagggggatctgcagtgagctggggctagctagttgcaacaagtgacccagagctgttgaaatgcatctgaggtggggaaagcaggtttgaggtagggtctgtgaatagagtgcagtactgattctgaggcctggagacagctctgtgctgctgagatgctttcactttattctattttctttcatctgaagaggcaaggaggccag

SEQ ID NO: 212544 - DNA, 494 bp, Homo sapiens
gaattcaatttcctctgtgctatgtttgatacatgacagtctccttcaaagggacaagaaattaacatttcaattatgtccagtagagatagaattttggctgcattgyggacccatgagcatctgtgtgttccatctgcatcctaacttctgcttcaggtatatgaggacctgagaaaatgaagcttgttctgaaaagagaaagtttactgtgatctaatcttcacaacattgtaatggaaatagtaactgcattcaactctgagtttttcagagtgagtcaacagtgccaagataataccaaatgacagatttttaagaagtctgtttgactctaggcataaactgtgatgcccctgtctccaccagcaaggctgcctttgtcatatgtctggttgaaagtccaaatgagatgaccctgccttctctgagctctcttcaaaagacagtggaccaagatgagctgggagcgaggcattttatctggtattttt

SEQ ID NO: 212545 - DNA, 440 bp, Homo sapiens
gttgtatttaaaacctaaagcagcacccccacatttcatctaggaattatctttccagaaaaacaaaaacaaactacaaaacagccctataaaaacaaagggtctgaaaccttctagggaactgaattggggtgtagaagggtaagttgaaaagggagtttctattttttaattgaggtgatccacagtgttctcagttttaaacattccttagaaaaccatttacaagttaagagatgcaaaaatggcagagcaacccaaatcaaaacctgaaattgaattacttttagaggtttcaaatatagtcattagagaaacttaacaatactaatcttkaccacattatagctcatttgtgtattagtggataaaatgttgattcactatacaatcaaagggttccataaatagaaactgttttagtaaggtcattgatactg

SEQ ID NO: 212546 - DNA, 433 bp, Homo sapiens
aaacctaaagcagcacccccacatttcatctaggaattatctttccagaaaaacaaaaacaaactacaaaacagccctataaaaacaaagggtctgaaaccttctagggaactgaattggggtgtagaagggtaagttgaaaagggagtttctattttttaattgaggtgatccacagtgttctcagttttaaacattccttagaaaaccatttacaagttaagagatgcaaaaatggcagagcaacccaaatcaaaacctgaaattgaattacttttagaggtttcaaatatagtcattagagaaacttaacaatactaatctttaccacattatagctcatttgtgtattagtggataaaatgttgattcaytatacaatcaaagggttccataaatagaaactgttttagtaaggtcattgatactgata

SEQ ID NO: 212547 - DNA, 549 bp, Homo sapiens
cattgcctcacttgatccttacaacgaccccgagacagaatcgatattaacagaccattttacagctgagaacaaagaggctcagaagagttaagcatctaccgcagatgcatgtagtttgtaggtgagacaaagcaagatcctgccctacattttcctccatgggatgtgtgggtatagaacaaaaattcattatgtgagaatttactttcacattccctgaaatgcagctgaaacctataaccattgatgggaagcaggactggctacataatgaatttttggggcttagtaaaaaatgaaagtgcsgggccatgtgttcaaaaatcaagaatttcatggggctacagcaaagcatgaaaacaagtctgagcccttccggatgcacaggcagaacacctgtgaacccgtccctgatgggcagggccactgctgttccacaagaatctgcgctttctagggctaatcaaaaaatgaggccttccgtaagcagggtgctcacattcactctgagttcatcttaaggacacacaggacagagtctggaag

SEQ ID NO: 212548 - DNA, 424 bp, Homo sapiens
gaattctaaagtgattgtcttgagttccctgggggagactcctgggaggtgtggcccactctattccagaaacaaaccaggagactgaagactcatcccaatcccatatcccatgaaaatgtgaaatcaaatcacccctgacaattccaaaactaayggaatcctaacataactctatgtaactctaaagctgagtgtgctggtaattaagcttccagcccacccttcccagctctggggtgcagggtcaccatgggctccttcctgtgtgcaccccaccccacccccactgtcagcatcctgtctccaccctgagagtgacagctggttccagtagcgggagttggttccagcttgccattttcctagcactcctataaccagcctgctgatgcccattcagagacagcagcacgggctggcc

SEQ ID NO: 212549 - DNA, 520 bp, Homo sapiens
gggaattcaaaaagagatttgggtagggacacagccaaaccatatcagatgtccactcttcacttctattcaacattgtactagaggttctagccagaacaactaggcaagaaaaaacaatgcatccacaaagcaaaacaacacacaaaataattttttttttttttttgagacagagtcttgctctgtcgcccaggctggagtgcagtggcacgatcatggctcaatgcaacctccgcctcccaggttcaagcaattctcctgcctcagcctcacaaataactgagattacaagcatgtgccaccaygcccaagtaatttttgtatttttagtacaggcagggtttcaccatattgaccaggctggtcttgaacttctgacctcaggtgatccacccgcctcagcctcccaaagttctaggattacaggcgtgagccaccactcctggcttaagaaaaataattggtatttgcatatgacataatcttgcatataaaaaaatccataggaatccactaa

SEQ ID NO: 212550 - DNA, 520 bp, Homo sapiens
gggaattcaaaaagagatttgggtagggacacagccaaaccatatcagatgtccactcttcacttctattcaacattgtactagaggttctagccagaacaactaggcaagaaaaaacaatgcatccacaaagcaaaacaacacacaaaataattttttttttttttttgagacagagtcttgctctgtcgcccaggctggagtgcagtggcacgatcatggctcaatgcaacctccgcctcccaggttcaagcaattctcctgcctcagcctcacaaataactgagattacaagcatgtgccaccatgcccaagtaatttttgtatttttagtacaggcagggtttcaccatattgaccaggctggtcttgaacttctgacctcaggtgatccacccgcctcagcctcccaaagttctaggattacaggcgtgagccaccactcctggcttaagaaaaataattggtatttgcatatgacatmatcttgcatataaaaaaatccataggaatccactaa

SEQ ID NO: 212551 - DNA, 505 bp, Homo sapiens
taaagtgcagtctgacagagaatgtggcaaaaatcaaacattaggatgttgtgcactctagagagtaattctaaaaggtgttaaaggaattaaaaaatacagggatgccatcagtccagttctgaatggcagctaatatatgaaattatggaggaatatgtaagatggaatagccatatagtctgggaatagtgagaacaaaaataatgctgagacacaggagagtatgaaagctgtgtgtgctgacctaaagtgacagcagtcatgcagataattacaaaagagaaggacaggtgacagagagtgaatggaaagaaggatgggtcttgagaagtctattcagtaatagaggyccttggagagaccaaagtggctctcaggcctgttaaagtatagaaatagagaggagaaggtatccttggaataaagacaatatcccacaaactaaaaaacttttctctttcctattgttagttaattgagaggtgtgaacccaactcaacat

SEQ ID NO: 212552 - DNA, 407 bp, Homo sapiens
gaattccacaatcttgtagaatttttttgccaatgattaacaaagtttactgactgaacagaagagtgcaatgcaactcctgctacagcagccgtagctgtgactgcaattaatcccataatcactgcaattaaagtaaaaatgaatcttttggatctatttaaaacaccttttaatacttcagtcaaaatatggacrgatggtgaggcctcccacggtcggtccatggacacagggatccacacgccctctcttgctctcaccagcagaatacggtgttgccaattaaaagttgaatcaatgcaagtaagcaatctacaattttcacaggttatagtttgagagtctggtttaataactatatttcctacaactagcatataagggggctttacgcaactttgtaa

SEQ ID NO: 212553 - DNA, 407 bp, Homo sapiens
gaattccacaatcttgtagaatttttttgccaatgattaacaaagtttactgactgaacagaagagtgcaatgcaactcctgctacagcagccgtagctgtgactgcaattaatcccataatcactgcaattaaagtaaaaatgaatcttttggatctatttaaaacaccttttaatacttcagtcaaaatatggacagatggygaggcctcccacggtcggtccatggacacagggatccacacgccctctcttgctctcaccagcagaatacggtgttgccaattaaaagttgaatcaatgcaagtaagcaatctacaattttcacaggttatagtttgagagtctggtttaataactatatttcctacaactagcatataagggggctttacgcaactttgtaa

SEQ ID NO: 212554 - DNA, 407 bp, Homo sapiens
gaattccacaatcttgtagaatttttttgccaatgattaacaaagtttactgactgaacagaagagtgcaatgcaactcctgctacagcagccgtagctgtgactgcaattaatcccataatcactgcaattaaagtaaaaatgaatcttttggatctatttaaaacaccttttaatacttcagtcaaaatatggacagatggtgaggcctcccacggtcggtccatggacacagggatccacacgccctctcttgctctcaccagcagaatacggtgttgccaattaaaagttgaatcaatgcaagtaagcaatctacaattttcacaggttatagtytgagagtctggtttaataactatatttcctacaactagcatataagggggctttacgcaactttgtaa

SEQ ID NO: 212555 - DNA, 407 bp, Homo sapiens
gaattccacaatcttgtagaatttttttgccaatgattaacaaagtttactgactgaacagaagagtgcaatgcaactcctgctacagcagccgtagctgtgactgcaattaatcccataatcactgcaattaaagtaaaaatgaatcttttggatctatttaaaacaccttttaatacttcagtcaaaatatggacagatggtgaggcctcccacggtcggtccatggacacagggatccacacgccctctcttgctctcaccagcagaatacggtgttgccaattaaaagttgaatcaatgcaagtaagcaatctacaattttcacaggttatagtttgrgagtctggtttaataactatatttcctacaactagcatataagggggctttacgcaactttgtaa

SEQ ID NO: 212556 - DNA, 538 bp, Homo sapiens
tctttcgtttctgcagcacataaaatatcatcaatataatgaataatataacagtctgaaaacttttctctaactggttgaagagctcgacctacaaaagtctgacaaatagttggactattaagcattccctgaggtaacactttccactgaaacctggtggctggttctttattatttatggctggtatagtaaaggcaaatttttcacaatcctgctctgccagagggatggtaaaaaagcaatcctttagatcaattataattaaaggccaatcttttgggatcatggccggagagggcaacccgggttggagaggccccatgggttgaattacggcgtttacrgcccttaagtcagttaacatacgccatttgcctgatttcttctgaattacaaacacaggagaattccaaggcgagaatgaaggctcaatatgacccttttctaactgttcatttgctaataaatgtaaagcctccagtttttgttttggtagcggccactgatttacccacaccggtttttctgttttcc

SEQ ID NO: 212557 - DNA, 538 bp, Homo sapiens
tctttcgtttctgcagcacataaaatatcatcaatataatgaataatataacagtctgaaaacttttctctaactggttgaagagctcgacctacaaaagtctgacaaatagttggactattaagcattccctgaggtaacactttccactgaaacctggtggctggttctttattatttatggctggtatagtaaaggcaaatttttcacaatcctgctctgccagagggatggtaaaaaagcaatcctttagatcaattataattaaaggccaatcttttgggatcatggccggagagggcaacccgggttggagaggccccatgggttgaattacggcgtttacggcccttaagtcagttaacatacgccatttgcctgatttcttctgaattacaaacacaggagaattccaaggygagaatgaaggctcaatatgacccttttctaactgttcatttgctaataaatgtaaagcctccagtttttgttttggtagcggccactgatttacccacaccggtttttctgttttcc

SEQ ID NO: 212558 - DNA, 538 bp, Homo sapiens
tctttcgtttctgcagcacataaaatatcatcaatataatgaataatataacagtctgaaaacttttctctaactggttgaagagctcgacctacaaaagtctgacaaatagttggactattaagcattccctgaggtaacactttccactgaaacctggtggctggttctttattatttatggctggtatagtaaaggcaaatttttcacaatcctgctctgccagagggatggtaaaaaagcaatcctttagatcaattataattaaaggccaatcttttgggatcatggccggagagggcaacccgggttggagaggccccatgggttgaattacggcgtttacggcccttaagtcagttaacatacgccatttgcctgatttcttctgaattacaaacacaggagaattccaaggcgagaaygaaggctcaatatgacccttttctaactgttcatttgctaataaatgtaaagcctccagtttttgttttggtagcggccactgatttacccacaccggtttttctgttttcc

SEQ ID NO: 212559 - DNA, 556 bp, Homo sapiens
tcacataaacccatttatgttggaggaaaggggaaatggagaagaatctccaccagcagagacagtacacaacatactttcatgcacactcacaatttgtgattgtcatggccagaccaaaaaaaggttcccaacctctctctcatcccctccttctacagcagattgttttgtaggcttaagctagccttttattatagctgcattaattgctaatgctaggtgaatagtactctccttgactctggtgtaaccacttcagaggggagaggggacagggtgtaaaaagawaaaagcatcatcattctttcaattcacatgtgtgtaataattaaacactttgaggggagcgttcagaagaatattaataaattcccttgagagttcttttcaataataggcaggctcttttacctttggaatattccatgtgtcattatttttcatctttagctttcctttgggatgcaatcattggcagttcagacaactttcacatcaaagttttcaagttgaaggaagtcatttaagtaagattaacctaagtaagtaccat

SEQ ID NO: 212560 - DNA, 602 bp, Homo sapiens
ggaatttaaattttagaagttcctccttcttaatataatgcataaaatattgacagagtgtgtaatatgaatggtttttaattccaagatatggttataaggttttaataaccaatctaggggaacactagctaatttagaacataattcttggaggagtttgttatgcccttagggctctggctttggagagacctttgataacatttagcatttctccattgagactcttaagtagctcaatctgggtagctttgtgttaggatgtttcatttcattaaaacattccttttcttattagcattcccaagtctttctgatagttatagaatgtgattggcttaataaaagattttctaggagacwgctcaattcattaaatgggatttttatcatcaaaattaacatttaaaatattatattttgaaataattgaatgtgatggatgagttaaataggctgcatttttaaactaacattttggctatggttttgaaattcaaagctttacttgttttgaagtaaacataggttgggtgattctgttgcttaaattattttcgactcttatctatgctttaatcaaacttgaacagttacaa

SEQ ID NO: 212561 - DNA, 592 bp, Homo sapiens
agatttttaatgcagacaaaagtgccctattctggaaacacgtgccacaaaggacattattcataagggagaaaagtgagcaccagaatttagcacaagaagggatgggctaactctactctactgttttgtgcaaatgcagttgaatttatgatcaagactgtcctcagctataaagccactaacctctgagccttgaagaaaaaagataaacaccagcttccagtctttttattgttcaacaagaagacctgcacaatgagaacactctttctggattggttacatcaatgatatgtccttgaggtcaggaagaagcttgccagtaagagactgccttttaaagttcctttgatattgggcaaagttccagaccacccagaacaccatgagttcaacaggaaaggtgtcaaaatggtctacttgccccagcacaatgtctctaattcagcctctagatcaggagatcayaggaactttaaggctcattacgcatatactctatggataggattgtcaatgctgtggaagaaaaccccaattgagggaacatggaacatgatgaaagtctggatggattacaccattgaag

SEQ ID NO: 212562 - DNA, 592 bp, Homo sapiens
agatttttaatgcagacaaaagtgccctattctggaaacacgtgccacaaaggacattattcataagggagaaaagtgagcaccagaatttagcacaagaagggatgggctaactctactctactgttttgtgcaaatgcagttgaatttatgatcaagactgtcctcagctataaagccactaacctctgagccttgaagaaaaaagataaacaccagcttccagtctttttattgttcaacaagaagacctgcacaatgagaacactctttctggattggttacatcaatgatatgtccttgaggtcaggaagaagcttgccagtaagagactgccttttaaagttcctttgatattgggcaaagttccagaccacccagaacaccatgagttcaacaggaaaggtgtcaaaatggtctacttgccccagcacaatgtctctaattcagcctctagatcaggagatcataggamctttaaggctcattacgcatatactctatggataggattgtcaatgctgtggaagaaaaccccaattgagggaacatggaacatgatgaaagtctggatggattacaccattgaag

SEQ ID NO: 212563 - DNA, 408 bp, Homo sapiens
aagttccagaccacccagaacaccatgagttcaacaggaaaggtgtcaaaatggtctacttgccccagcacaatgtctctaattcagcctctagatcaggagatcataggaactttaaggctcattacgcatatactctatggataggattgtcaatgctgtggaagaaaaccccaattgagggaacatggaacatgatgaaagtctggatggattacaccattgaagatgtcatcattgttatagaaaaaagttgtgaaagccatcaagcctgaaacaataacttcctgctgtagaaaactgtgtccagatgttgtgcatgacttctcaggatttaccagaatgaatcaatgaaatcatgaaagagattgtggatacarccaaaaaggtagtcggcaaagggtttca

SEQ ID NO: 212564 - DNA, 522 bp, Homo sapiens
tacgaggaccttgaagagaagaaaagttgagtggcctggttggttgctgagccaccaggtttcactttgttaggatgtatttttttgagctttggcaaatctagtgatcttgctggactccacattcctgatctgaaataataatttgtggctgggcacagtggctcacacctgtaatcccagcactttgggaggccgaggcgggcrgatcacgaggtcagaagattgagactatcctggctaacacggtgaaaccccgtctctactaaaaatacaaaaaattagccgggcgtggtggcgggcgcctacactctggaggctgaggcaggagaatggcgtgaacctgggaggcggagcttgcagtgagctgagattgcgccactacgctctagcccggacgacagagcgagacgccgtctcaaaaaaaaaaaaaaaaaaaagaaaaagaaaaaaaaatgataatttctacgttctgttaatgggtttcggtatagggtaattacttattcttcctaaagtttt

SEQ ID NO: 212565 - DNA, 522 bp, Homo sapiens
tacgaggaccttgaagagaagaaaagttgagtggcctggttggttgctgagccaccaggtttcactttgttaggatgtatttttttgagctttggcaaatctagtgatcttgctggactccacattcctgatctgaaataataatttgtggctgggcacagtggctcacacctgtaatcccagcactttgggaggccgaggcgggcagatcacgaggtcagaagattgagactatcctggctaacacggtgaaaccccgtctctactaaaaatacaaaaaattasccgggcgtggtggcgggcgcctacactctggaggctgaggcaggagaatggcgtgaacctgggaggcggagcttgcagtgagctgagattgcgccactacgctctagcccggacgacagagcgagacgccgtctcaaaaaaaaaaaaaaaaaaaagaaaaagaaaaaaaaatgataatttctacgttctgttaatgggtttcggtatagggtaattacttattcttcctaaagtttt

SEQ ID NO: 212566 - DNA, 546 bp, Homo sapiens
gatgctggaagtgctccccaaaaaagcagaggaaagccaggacatacaagaaaaagttgaattgcttaatatgtaccacagattgaagcctgcagctgcagttgccaaccatttcaagataaatgaatcccatgtaagggccactgtaagaaaagaaaattgataaagctgttgctgcagctacaccagcaggtgcaaaaactttgcatttcttgttaaatatcttttatcttgcattgaaaaggcagattttaagtgtgtgcaggattgctataagaaaggcatacctatagactytaatacaatttgagaaaaagcaaagttatgacgttacatgacaacttaaagcaaaagggaagtgaaggatctaaaactggaaaatataatgccagcaaaggatgatttgatagttttagaaagaggtttggcttaaaaaatgtcaagacaatgatttcatatcctgagactttgttgaagttgcttatcggcctaaggagattttggtctgagatgatggggttttctaaatatacaatcatgtcatgt

SEQ ID NO: 212567 - DNA, 546 bp, Homo sapiens
gatgctggaagtgctccccaaaaaagcagaggaaagccaggacatacaagaaaaagttgaattgcttaatatgtaccacagattgaagcctgcagctgcagttgccaaccatttcaagataaatgaatcccatgtaagggccactgtaagaaaagaaaattgataaagctgttgctgcagctacaccagcaggtgcaaaaactttgcatttcttgttaaatatcttttatcttgcattgaaaaggcagattttaagtgtgtgcaggattgctataagaaaggcatacctatagactctaatacaatttgagaaaaagcaaarttatgacgttacatgacaacttaaagcaaaagggaagtgaaggatctaaaactggaaaatataatgccagcaaaggatgatttgatagttttagaaagaggtttggcttaaaaaatgtcaagacaatgatttcatatcctgagactttgttgaagttgcttatcggcctaaggagattttggtctgagatgatggggttttctaaatatacaatcatgtcatgt

SEQ ID NO: 212568 - DNA, 546 bp, Homo sapiens
gatgctggaagtgctccccaaaaaagcagaggaaagccaggacatacaagaaaaagttgaattgcttaatatgtaccacagattgaagcctgcagctgcagttgccaaccatttcaagataaatgaatcccatgtaagggccactgtaagaaaagaaaattgataaagctgttgctgcagctacaccagcaggtgcaaaaactttgcatttcttgttaaatatcttttatcttgcattgaaaaggcagattttaagtgtgtgcaggattgctataagaaaggcatacctatagactctaatacaatttgagaaaaagcaaagttatgacrttacatgacaacttaaagcaaaagggaagtgaaggatctaaaactggaaaatataatgccagcaaaggatgatttgatagttttagaaagaggtttggcttaaaaaatgtcaagacaatgatttcatatcctgagactttgttgaagttgcttatcggcctaaggagattttggtctgagatgatggggttttctaaatatacaatcatgtcatgt

SEQ ID NO: 212569 - DNA, 503 bp, Homo sapiens
tggatagtgagcaaaatggctaagtatgtgaatgtattacttttttatttcaatcttagagttgtctgttaatatcagtactgtcatgagcattgtacagtgggctaaactgaccagttcgaacaacacagactctgacctctagtagctgtcacgtgacgatgtgatagtgggaagcagaatgaaagctctgcttttttgatcaccaactatctctcaaatactctactggtttgctttacatatagttaatcaccacaacaatcctaagggtaaacactattcttgtcatttccagtttactgatgcttggagagtttatgtaactgagatcctggttgttctggtgccaaagcccctgccatttaactgctgcacgctgagcccctgaatgggaatagaagtcrcaacatatccagttcgatctgggccacaatctcagctggtgagctgagaatatcataccgatttccacgcctcagtttcctcatctctaaaatgag

SEQ ID NO: 212570 - DNA, 614 bp, Homo sapiens
  misc_feature (1)...(614): n = A,T,C or G
ttcctcattccctgtgacncaagtgagagagctaggctttcagaatactatgcttttcagttgttcattaaggaccattccaagagcatgtaaattcccaacttcttgtgagcaaagaggctcccaaagcaacagatcatggccattgaaagtaaaagcccacaaagccaggagggcccccaaaatggggacaagggattgcaggggaccggggcagagcaccaatgttgtctgcacacacactgagcaagatcatccattagcatttcccctgmaaagaatataaatccctgggggaagggggaatagatggggaagttctgttgaagcaaaaagaagaaatagaatttcagccagggtccatggcctgagaaaggcgtaaggacattgagagaatggtcttgagcatgaggaagcttctagcatgaggaagcaataagacagaataaatgtgagacaagaaagagcacaaagcagtggaggaaaaaacaaatgcaaagttaaccttcttcacaatttgacttggtcgtctgggatttttctttgttggaataattttcaaacatctcagcagccttctaagaagggttactattcatacatacccatggacc

SEQ ID NO: 212571 - DNA, 477 bp, Homo sapiens
gccaaccatgcagctctgggattttctatccagtataatccgtgaaagccttggttattatagagaaaatattctgagccaaacaaattaccaagatacaactaaacatctagaaacacaaatgaaattcaaaataatgaactgtagaaagcatacacattttagcatcaaagccctggggcaagttctgtgtctgcatttaagtctgcattaacttgggcaagtcattcaaaatctctaactctttgkgttctcacctgaaagtgggaatgataataataatacctacccaattatgacatataaaaagctgcattatacattataaaacaataaacaagttagttacttgaattaatcattaaagataatttcctgaagattctattgcaattctctttcttggagaaataagagagagaacaagaagcttgtttatggaatgcaagaactgtaataataataagaatgcaaaag

SEQ ID NO: 212572 - DNA, 610 bp, Homo sapiens
tttgtaattggagggtggcacatgcaattgcaaaccagcctgattcaggcagaatgttaaaatggttgccatctatctgttctgctgactgcatgtacccgactgttcactggaatgatcacttgtggcccacccagttcagctatctgtatttaacaatatatgaagagtttcttttaactcaagactatataaagacaaaagaaccatttggtttagaataaatcagagcattgtaataattgtgtatattttactaaacatataacttacttttacaataactacacttagcaccatgccataattgggagagactgcagagtcaggttaaactaattttaaaccccagttcttctacttactagctttgtaatcttgggccattattttatccttgttaaaccaccattttctcattagtgaaatgggaatgagaattcrtttttcatttgagttgctgtgagatttaaaagaaaaaaacagaccctggaacctggtatcagacccagcaaaaagtgtatgctcaataactattcattcattttgcttaaagtattgtgtggttttgatgtttacttatagtcctaacttgacaaaaaaattggtg

SEQ ID NO: 212573 - DNA, 510 bp, Homo sapiens
tttgggggtttgattatacatacaaagattgatagctgagtgggaaaggaggcaccaccttgggttaatagaaatgcatgggtaaacagaaataactctattgttgggctttgtcaaaagatcgatttgaaaacacagtttaatcctggaagccagatgaaccctctcaaatcctgaggatctcatccctgcaatgtgaaaaaggccaatctgctgcacttagcagtgctggggcaatgagaaagrcagcaaagaagggttccctttccaccggtggctgttcccagccatcttcagggcttatcccactgttcagtctgactgccttttgtgtcaggaggagaaggggagcgagaccctgaatctctgctacatgaagcaaaaatttaaagagaacagtggggaacgattcactttgagtgggtacagatagtggaaggaagcatgacgtacccatgtctttctcaagatacagtaactcgaccctctgttaaaatgtggcaccaaaga

SEQ ID NO: 212574 - DNA, 575 bp, Homo sapiens
ttcattcaatcagcttttcaagagactggaaacgacagtgaaaagaatcaataaacttgacaacaggtcaacggatcatccacattttagcacaataaagtgaaaagtagaatagcaatatcaaacagtctaaagtatatgtaattagaatcttatattatgaattgaaattgtattaattgtaaagggaaagatatacataacttaaccaagtgatcagagttaacagttcatcagtattggaatgaaccaatagcatgtgccacctgatatgacacactaagtatactatataacttcagtggtgcaactgtcctaaaaatgcataatctgaatcttaccataaggaaatatcggacaagacataattgaaggacattctatacaacagatgacttgtactcttcaaacattttgtcaagaaagtcaaaggaagacaggcattattccatgtttaaaragaccaaagagacaactaactgcagtctgtgaatctgaattgaatcctggacaagagaaactatcaattaaaacattatttgcataattaattaaaatcaaatgtggactgtata

SEQ ID NO: 212575 - DNA, 625 bp, Homo sapiens
aacaaaagtgagcataatttcctaaaaccccaaaatgaaaaaggcattaaagaggaataataaaagcatattcgataatggaattattttcctcacgccctcttcaccaaaaggtaattgaagcatcaacgaaagtacatgtaaaggggctgagagacatttataaatatatsaagagggacaatcccaccaaattatatgtaatatgctagaggaccctttctctagctattagctccaattttgtaacccttcagaaggaaaactgaaccacaagagaaattccaatttatatactttgagcctaaggcatattcaagccctagtgatcaattggaatggctttataaagctaagataatctactgatgtcagttggggctttctcatcatcctgcatttttcctccatcaaaggaaaagaaagaaaagtgcctgaatgggatacggctctaccaaaaaaacatctaacacataggaaatgctatttccccttgacacactgtcattatccaacaaaagaccaactgaagagacaggtgtttcctgaggaataggatagaacagtgaggggcattctccgagatttgaatgggagtaggactttacctaaaggtctgtgctga

SEQ ID NO: 212576 - DNA, 540 bp, Homo sapiens
ggggaaaaaagttgtcagagaacacatatattcttgaaagtattaaagaactaacaagataaagaaacaggctgaaatctgaaaaagtgcagtaagtccaagcaagcctagaactgaaagtggcttttacctacccaaactgaggaaagaactgcaaagctgtactgtagttttagtggccttgtgggtgtaggatacagccatccacattaaactggaatgagaacaactagatgctcagggtaagggtgaagggaaagtactggttagcttctccagcctggtccggggaaccactgacaggtagggctccccaggggtctgacaagcaagtgaaaagacttaggcatcaaattattccaagtaattytgaaatgccagtacaccaaaataaccaggcataaaaggacaaacaagactctagaagcaaaaaccaacaggcaaaaacaacagatgacatatatccagttccagattttgtctgctggtattcagatcttttctgcctctactgcagaaggttagaagcctgaaaactac

SEQ ID NO: 212577 - DNA, 630 bp, Homo sapiens
ctagaaggttggactaaaatactaaagataaaaggaggaccaaagttaggaaattacaagatatataagaaaaattctagcattatatagcttttagaatttgtctagcaggttttccagtttctaccagaaacccctacccaaaaaagaacggaaaggaaaaaagaaaggaatgaaaaggaagggaggaagggaaagaaaaagaaagagagggaggagggcgggagagaggaaaggaacttcttatatgaaacagggagaaaatctcgttatctgaaagttctccctaaaaggagattgactgcattttcagaactagcaacatgtgatggggccctaacaataagactaaaagaaaaaaataggacaaaaaaagacgaaaacagaacaatcagagaaagcacattgctaaatatgttcagcacattcaagaagttccaaagcaccttcgcaaacctatcacttgatccccaaggttcccccacaaatttaagtagtatagtcaaagatcctagggccaggaaataaaactctagaaatttgaagcatattttagggattctctagctaaaaaaaggatgtaatttccaagaaaytcatcctgcagtctttggtagtagcagacagtag

SEQ ID NO: 212578 - DNA, 553 bp, Homo sapiens
ctcattatcacccttgcattctgctgttgcttcaaggacttggcatctggcccacaaatttccctatctccccaagggaggtagagcagagtggttaagagaatgggttatgcattggaactactctagtggaaatcactgtttccaccagttggacaagttacttaacctctgaaaacaytgagtttttcatctacagaactgcaaaaacaatagcacttatcatataagattggttgtgataactgaaataatgtctgtctcttgagcatagcctgatatctgcaagtgatggccttgaggactatagtcttaatggatggtggtagccatccagctgacgtccctgactgctgctgccttccttcaagctcagttatttccccagcctggccctgaactgttccaccttaacgatcgtaaacccagcagttcatttgccaattgcacgctttaattttttaattgtgataaaaaatacatagcattaaatttgtcatcttaaccatttttaagtgtaaagttcgagtgttaagtatatttacattgtttt

SEQ ID NO: 212579 - DNA, 555 bp, Homo sapiens
cctccctctcattatcacccttgcattctgctgttgcttcaaggacttggcatctggcccacaaatttccctatctccccaagggaggtagagcagagtggttaagagaatgggttatgcattggaactactctagtggaaatcactgtttccaccagttggacaagttacttaacctctgaaaacattgagtttttcatctacagaactgcaaaaacaatagcacttatcatataagattggttgtgataactgaaataatgtctgtctcttgagcatagcctgatatctgcaagtgatggccttgaggactatagtcttaatggatggtggtagccatccrgctgacgtccctgactgctgctgccttccttcaagctcagttatttccccagcctggccctgaactgttccaccttaacgatcgtaaacccagcagttcatttgccaattgcacgctttaattttttaattgtgataaaaaatacatagcattaaatttgtcatcttaaccatttttaagtgtaaagttcgagtgttaagtatatttacatt

SEQ ID NO: 212580 - DNA, 470 bp, Homo sapiens
ttcaaagggagggaggtccaccccacttgtagcagttagctaaaatacaggcttctcaactattcaaagaacagggaaaatgagaatgtaagaaaagagataatcattttgttgctagaatgctccaagcgagagtcactataaggttacggagacaaagatataaaccagcccaaagccacagacacaagacttgtaggagagagatgaaggttggtcttaggctacaaagaggaaggcaaggttaatggtacayggtaagaccggctcattccatcaacccaagggtgaacagttggcccactattcattctggtatgtcctttgttctcaagtaggtaattgtgatgagatgagaaaaaagttaagggtaaatggtaagactggtttattccagaaccctaagtatgaatgaggggtgctgtattcaggatagtagaagaataagaggggacttcttcttttccctt

SEQ ID NO: 212581 - DNA, 614 bp, Homo sapiens
aatgaaacaaatgctgataaatttttgtgttgttttcactaaattatttatttaattaaacttgtaatataaaatgaatggaattcaggtttagccgattcacatttgaatgtaaatttttgctactttctggattatctctgtcaagwtatttaaacactgcaatatttacgtaactcttttttttccccataatgtcaggaatggagaaaaatcaaaaatgaaaacaaaagagaaaataaaacaaaagtgcctcctctgagtagctcaattttagaagatgatgtagaagcaacaacattgttttgaactactttactgatctgtaactatgcacagttctgagaagagccatcatctaataaaattatgcatgatgaaatttgatacacaatgcactcataaaaatattaagagattgaggctccaatttagtgataaaaatgtaaacaatcttattataatttagtatattttatttgagaaataagcatgtagtggggcacatgtaactacttggaaaaactgtcccactggtcagaatttaccatgaaattttatgttgccaattatgttagtatgtatgaattacattgcggacagggaagaaagac

SEQ ID NO: 212582 - DNA, 614 bp, Homo sapiens
aatgaaacaaatgctgataaatttttgtgttgttttcactaaattatttatttaattaaacttgtaatataaaatgaatggaattcaggtttagccgattcacatttgaatgtaaatttttgctactttctggattatctctgtcaagatatttaaacactgcaatatttacgtaactcttttttttccccataatgtcaggaatggagaaaaatcaaaaatgaaaacaaaagagaaaataaaacaaaagtgcctcctctgagtagctcaattttagaagatgatgtagaagcaacaacattgttttgaactactttactgatctgtaactatgcacagttctgagaagagccatcatctaataaaattatgcatgatgaaatttgatacacaatgcactcataaaaatattaagagattgaggctccaatttagtgataaaaatgtaaacaatcttaytataatttagtatattttatttgagaaataagcatgtagtggggcacatgtaactacttggaaaaactgtcccactggtcagaatttaccatgaaattttatgttgccaattatgttagtatgtatgaattacattgcggacagggaagaaagac

SEQ ID NO: 212583 - DNA, 378 bp, Homo sapiens
aatcagtagcactgctatacatcgacaatgaccaagctgagaatcaaatmaaaaactcaattcctttaaaaacagctgcagaaaaaacaaaacaaaacaaaaaacaacctaggaatatacttgacaatggaagtgaaggatctgtaaaaggagaagtacaaaacactgctgaatgaaattataaatgacacaaacaaatggaaatacatcccacactcatggattggaagaatcattcttgtggaaggtatactccccaaagcaatctatagatacaatgtacttcctatcaaaataacaacatcacttttcacagaactagaaaaacaattctaaaatccatatgggaccaaaaaggagcccacatagccaaaacaa

SEQ ID NO: 212584 - DNA, 551 bp, Homo sapiens
tttgtagccattttttggatattaatgatattacattttactctatatttcatggccttgtacttattgcccagtggctattctttttgtccccttttatgaaataccaatatgtcgttttcccatttttttgttgatttgtaagtacttcttatatawaataaatataaaatctttgttttatgtgatatgaatacatttttccactctgagatcttattttctatttctgtattatgtcttttgatgttaaaacaaagtcaaatgcacaagactttgaccttaggatctcctttctattgacttcacttaaaatttttttttcataaaattactttcacttaaattgtaaaagttttgttgttttgccattcttattaaattaagaatgtctttaagtattacaccaggagggatttagagattaaatgcactggtgtaactttggattgcctgattttgtacaaatatgttttatcttctgctagtccatttttagcggcagtatataattacctaagttttgatttcacaactaattagtcaaagtc

SEQ ID NO: 212585 - DNA, 551 bp, Homo sapiens
tttgtagccattttttggatattaatgatattacattttactctatatttcatggccttgtacttattgcccagtggctattctttttgtccccttttatgaaataccaatatgtcgttttcccatttttttgttgatttgtaagtacttcttatatataataaatataaaatctttgttttatgtgatatgaatayatttttccactctgagatcttattttctatttctgtattatgtcttttgatgttaaaacaaagtcaaatgcacaagactttgaccttaggatctcctttctattgacttcacttaaaatttttttttcataaaattactttcacttaaattgtaaaagttttgttgttttgccattcttattaaattaagaatgtctttaagtattacaccaggagggatttagagattaaatgcactggtgtaactttggattgcctgattttgtacaaatatgttttatcttctgctagtccatttttagcggcagtatataattacctaagttttgatttcacaactaattagtcaaagtc

SEQ ID NO: 212586 - DNA, 613 bp, Homo sapiens
agataaggagtgtatgtgatttattataytgtcccttagactttttgagtagatttagtatgtttctatataaagatgttgaaaaataaaataatatttacactctgtgtattcttaatctgataatttaaaaaaatttagaaaatgcattatctattataattgaataatatgtgtaaaatataatactatttaacttcctggagttgatataaaaattatcaccaacagccaggtgtggtggctcacaccagtaatcccagcactttgggaggctgaggcaggtgattcacctgaggtcaggagttcaagaccagccttgtcaacatggcgaaacccagtctctactaaaagtaccaaaattagctgggcgtggtggtgggcgcctgtaatcccagctattcaggaggctgaggcagaagaatagcttgaaccctggaggtggaggttgcagtgagccaagatcgtgccactgtgctccaatctgggctacaagagcgaggctccatctcaaaaaaagaaaaaaagaaacaaagaaaaaaaatcacaaacatggtgaattaaaagaaatttattcttttacagttgtggagatactgaagtccactaccaa

SEQ ID NO: 212587 - DNA, 660 bp, Homo sapiens
ctctgctacttggatcagtgagattaagagcactacacttttcaaatcacatttccttaaattcattctttaaggaaaacaccaattagcatcctattatagacaattttttgaaatctgcacaccaattaacatcctctccactcaatttaaatctacaatttttaaaaataaaaccacagtgaaaatctgggaggtaatacatttctctttttctccaatgtagtaataaattatgctggaaaaaccctacacacatatttttattttctaagtcatttaggtagaaacagagagtagcatcctagtccaatgacaytgaatatattaattacaaaggactgaagatttcaagaaaataattagaattaacccactgatttatttctatattttgggaaagcttagtcatttcctttgtatcagaaaaatattcatcaattaccaatgatcatcaaaactaaaatgtccctgagaaaaacaccaagcaataagctttttagggacaaaaaaaatgtgtctgatttgtctttgtatctcccatacctagagcaatgcctgatcacatatgtttgataagagtaagaatgaacagttgagtatgtgcataaagtgaataaccttttccttatttctccatcacttttcaaagccagttag

SEQ ID NO: 212588 - DNA, 620 bp, Homo sapiens
actccctcatgttctatctactgcagctgagcttgcacccaagccataagacaaagtctttcccacacttttcttttttgtgactgagctggtatccamtttgcaagacaaagtcctcttcactcttcccccttctctccaggcagagggaaggcatctctcccagagctgtgggctgtgctgcctttggttgggggtgagttgtacaagcactctccccatggccaccactgccacaagtgtgtggtgagtactgcctggctaccacttatgttcacacagggtacaagggctcttcagttagcttgtagtgaatgctgctaggtctggggcactgccttcagggcagttgtccccacctctggctcagggcaggtccagaaatgcaatcaaagagccaaggcctggaatcagggacccaacaagtccactagttttctaccccaccgtggccaagctggtatctaagctggaaggcaatgtcctattcacatttccctctgcttttctaaagtctctccctgtagccaccaacactggaaaagttgtaggtcacacctgaagccagcacttctcagagtctcactcaaggatcatggcgagtagccagcaaacgagga

SEQ ID NO: 212589 - DNA, 484 bp, Homo sapiens
aaaaagcctgattctgtagttctggtatggctttgaaatctgttttataaaataaaaccaggtttgagaaacattgctttattaagtcatgggatagtataaaataaaaatagatatacaatagaaaatagaaatagaggctttcccttttattttgctttctagtttggctgaaggaatrcatgaaaacactaagtgatactttaaaagctagggcatggctatgtgtttgtgtgtgtgtgcacatattttatatgtgaacatattaacatacattaatttagccatccaaggtagaatttggctgaaacaaaaacaatctcaataaacagtacaaaaattcatttaaaattaagaattcttttaagataaactttagataacagagtgatatttcaattttaattttataattctgtattataaaattacttctagcacagtaacttttctttatgacattttaaaaattaattgtctttaa

SEQ ID NO: 212590 - DNA, 605 bp, Homo sapiens
ttcttgcctattcatttccctttccttttaacccctggctactactcatctttttacagacttcattattttgcctttttcagagcatcatatagttggaatcacacactatgtagccttttcagattggcttccttcacttaatatgcatttacatttcctccatgtattttcatagctcatttctttttaacgccatctaattcatgaataataccccactttcttgatatactacagtttattcattcacctactgaaggatatcttggttgcctccaatttttggcaattatgaataaagctgctagaaacacgtatgttcagttttttgtgtagttgtgttctcatttcttttggataaatagtatgattgttggattgtacggtaagagcatgtttaatttggtaagaaaccaccaaactgtcttcccaagtggctgtaccatttttgcgttcccaccggcaatgaatgagttctttgtgctccatttcttcaccagcatttggtgatgccagtgttaygcattttcatcattctagtgatgtatagtagtatatctttgttgttttaatttgcatttccctgatgacatatgatgtgg

SEQ ID NO: 212591 - DNA, 621 bp, Homo sapiens
atatccaactatatgctagacatcttttattaatgtcccaaaggaatgccttgcccatggccagtcagtgatggaggtgaaatttgaatcctgactgtttgacttgaatgcccctgattttaaccattaacttctattgggctctcatcctttttatgatttctctagttcagaccttctttgtctctgggaagatgaagctttctgttttggaggcatccaacactatcccaagttcagtgtttctctagcaggattcacaggactctacatagtggtgttttatttatggccataatttactatagtgaaaggatacaaaacaaaatcaatgtatgcaaaaggtgcattgggcagagtctggaagaaaccaagtgtaagagtctactctgagtggattcatacagcacatgcttaattctttcagcaatgagttgtaacaacaggagtctagtagggaagctcrttagagattttgcccagggttgtcattgtaggatgatcacataggtacccattgcctaacacatagcaacattttagtctcccagaaggaaagcaggtgttcaacgtaaactatatcgtttgcatacacagttcaggcatagtaaactattttta

SEQ ID NO: 212592 - DNA, 575 bp, Homo sapiens
attctgttccactggtctacgtgtctgtttttataccagtaccctggcattttggttactacagttctgtagtataatttgaagtcaggtaactgagcatagctttggctattctgagtattttgtggtttcatataaatttaaggattgttttatttttctatttccatgcagaatttccctggtattttgaaaggggttgcattaaatctgtagattactttgggtagtatgcacattttaacaatattgattcttccaatccatgaacatggaatatcttccggtgtttttgtgtcctcttcaatttctttcatcagtttttatagtagagaactttctttctttggttaacttaattcctaggtatttaattttattcatacctactgtaaatgagattactttcttggcttctttttcagattgttgactgttggcatatagaaatgctactgacttttgtatgttgattttatattcttcaactttactgaatktgtttatcaattgtaatagttttcttgtggagtctgtaggtttttccaaatataggataatataatttgaaaatt

SEQ ID NO: 212593 - DNA, 576 bp, Homo sapiens
ttggttcatgtaagtgatcagatcattttgtaccctttgtctaatctgcaaagtacagaaaatgaaagaaggtggaatgtatgaaggaggtgaaaaagaaaacggcaaaaaaaaaaaaaaaacaaggtacagacaaaaagacaaaaagtcaattaaaaatggaagaaaatagaagaggacatatatatcttgaatggtgctccaatcccaaaaactcttctaatgatttactttactagttgtgtaactgcacaawatccttgtgaggctttaattgctgtcccaaatttatagctgggaatttatgtttgtcatcaagtgattcagctactagaaaccagatatccaaagtataaaagtgagaagaaaaaggaggaggaagaaaaagaggaggagggaaaaatggtcattagttcattatttttcaaatcatgaagaagcagacaaaatactcaacaatctataagtctgcactggatctctgaaagcaaacgccagcattcagtttcttaattcagagattaagaagtaagggggacaaaatcataatcatacagtccatgggtaagaaagggc

SEQ ID NO: 212594 - DNA, 558 bp, Homo sapiens
ttttctatcagtgttggtaatactgttatctgcattcatattttcatatatatataatttgagaaaaactgcttcagaacctgcaaatcagacacaattttaaccaataacatgttttaaatatgaattcacttcactgtcatcttgagctgttaygtgcacactacaatccacaaaggctagtgacctaacaaattgaagtgacttgatagacttaaagttatttcttaatgctctattgtagattttacatttgcaacagtaactaattgcacctaatatgaaatctaattaagacttcattgtaccatctgtgttctttcattaaaagacatgtactattaaacatgtattgaaaaggagatactgaaagagttacttaaaattcatttccttccattctcaaagactggatagtggcagagtgtaatacactattgttatatccagtctttaatagctcctcagagtcatagctaattttcctattagttacagagtagagattgcaccaccaaattaaacctcacaatttcagcaatagggaagggagagaaa

SEQ ID NO: 212595 - DNA, 591 bp, Homo sapiens
aatgagcccctaatatccttatgggagatttcatttagtttaaattcattaaaggtaagtttctgttactgggaaccgaggatcctagactggttcagtggacaaatgccatcaaaagttaaatgagaaagttagaaggtgaatgtcaacacatattcttgagactgaaagggtattgaggatgaatacattgggatgacagtaagatatcacataacaagttgccaagtgtgtctgtgaggtggctcaggyaggttgctgatgaataaaagaatggctaaacttcttttatctgagtctcatactactaggaatttcccataactgtgaaggctgtcaatgcaacttttgatggctgattccatgcaatgccataaaagttactggaaaaattgctcataattatgcaatatacatctcagaaaatcgtcccctgctcttaagctcaataggacctcatggggtcatctgttccaatctcatctctcgagaaagaaattgaaatagacttcccaagctaccacaaggaactcattatttttctccataagaaagtatatatttttctcaaataaacatagtagataaaag

SEQ ID NO: 212596 - DNA, 634 bp, Homo sapiens
gctaatctgttttccaaggtggctaccccactttgcatttccaccagcaatgaatgggagctcttgttgctccatatccttgtcagcatttggtgtttgtgttctggatttagcccactgtaataggtgtacagtggatctcatctttgtttcgctttgcatttccataatgtcatacaacgtggagcatctttttatatgcttggttgccatctgtatatattatttggtgagttatttgttaaggtatttgactcatttttaatagtattttgtttcttattgttgagttttaagagttctttgtattaggttggcataaaggtaattgtagtttttrccattacttttgtacaaacctaatatattttggacaacagacttttattaaacatgtctttttcaatttgttttctatactgtagcttgtcttcactttttattctttttgtaccatcattcacaggtcagaaaaatttaattttaatgaagttcagcttatcagttctttcttttatggctcacatcattggtgatgtatctaaaaaagtatagccaatcctatgtcatgtagatttatcatacgttgtcttctagaagttttacagttttgtgttctgaaaaagctgctata

SEQ ID NO: 212597 - DNA, 564 bp, Homo sapiens
ggtgagatcttagaagattagggaaaggttagaactccttagagtttaataaattgtcatgaccagaatggtaatagaaatatggaaaataaagaataatctgacaaagtttcagatagaacgctaagaaacaaggcattagaaattggagtaaaggctatccatgttatcaactggcaaaaaacttgtttggattktgttcatgctcaagggctttatgtaatatagagctcaaaaacagcaaattagaacatttggcagaagaaaatgtaagcagcaaagcttttcagtgctgcatccttttaactgcttacattgagctgtgagaggaaaaaatgaggccttgagggcccatccattgccccagtgtatcccagaggaggcacatagagtcaaaagagattattctccagctttacgatttaatgtcatccttgtgggttttaaacttgcttggggctggttactcctctcttctgtcctttttctcaatttcggaatgggaatgtataacctgtgcctgctgcaccaattctgtcttggaagcagataatttgttttgat

SEQ ID NO: 212598 - DNA, 523 bp, Homo sapiens
cttatggtgagaacaacaatttaaagggaggcaactcatgctgatgtaattggtgtaaatcttggattgaatcatagtgtcctaagattaatctaawttgtaaaccagtggcattttttgttagtctttttttccttaaccttatgtatgtcactagaatttatcaaatcaatataatcaacatcctggtaatgactgaatttgaagggaaaccagtagtatgctggatattaagagcaaagccatacaaagatagacaattaacaaatcaccatacatgtctgaacatcaaggcttattttgaaaagcaaaaggtcaacagtgattattcactttctcatgaagcttgtctgtaatctgccaatagacaggaaaaatgagccactcataagtaacataaaacataagaccagtctgccctttggagatcacccagtcaagacatttcaaatacagctgttctcactttccaaccctaattgattaatatcatctgctagattagtcttgttcagaatgattc

SEQ ID NO: 212599 - DNA, 542 bp, Homo sapiens
gtgaaaattatcacattacagccttagggccaatttttcctagaagtctttcaaagggtaaaaaccactttaagattgtgaatataaattgacaaatygcctttcagacaacttgtattgatttatacttttcactattaggcatggaaatactagttttcccattgattatcatcactctttttcttttcctacctcatagaccactgaaaagtcccttccaagtaccttataataccacataggcacctctgtcaccacacttatcatatttttaatctgtctgtgtgtttgtcctaggtcttcaagtgttttttactttttctattgtctctctaattgtctctcattctttcaacctgaggatctcaaaacatacaattaaagagagtgtctcagaggacaagatgattaaagagatgatattcttaggatcaattggaagaatatgtcacataaatgcatggatttgatttaaaaatgaaattttttttaaatgggattgatagaataaggaagaaagccaaattcaatagcatccc

SEQ ID NO: 212600 - DNA, 578 bp, Homo sapiens
acttactagagcagaaactcagacaacttgcaacctcctccggaaccagtgctgggtaggaaaacctgaactgtaattgacaaattgcttgaagctcagtgtaggcaattctygagagttaaaatcttccggtggacccagtcacagtgaccccactttttttgtaagtttcacctccaggagctttatctcacagtgaatatcagagttaaaaaacccatcttgcttctagtcaaaggggacatggggtaggaggagagaagaaccatcttgaaatataccagagcattccgttcttgttaacaagatctgtccttaggagaaattattcaggcagaatctcacctctgaagttttaccggagcctaatctacctgaggaaagggaaatacccatctccacaccctccaggcatctggtcacacctgaaggggtggaaaaaaaaaagtggggaggcacaggtgaagatcatctttccaaagcacaaggtcacccaaagatagagacctaatcgtggtcaccgaaagagggagacctagttgtggaagtacagaataccttccttcacaccttaccac

SEQ ID NO: 212601 - DNA, 519 bp, Homo sapiens
ttttcaccttaacgttggcacctatgtaatttagctgaaacayttttagaattcaagtgagctatgcacacctctggggaaatcttgctggccagttttccagcgttcccatacagggatattcactctttggctgagcctttgcttaattgtattattttagatgatgggttgccttgtgagtaaatgatgaaaagatggaagctaaaatatacagtagcacacaccagccctgtggaaaataaatagctgactttaaaagaatgttgttccgaaagtcaagggcaattttaaagaagcagtgagtaggccaactcagtaacgagtcacagtggtgtactcattgctcctcagaggctcacatacgttctgggtgtgtgtgtggggcccagcctggagactgagagacaacattcttcacctagtgaggatggtctaaaaacaaatacattttaagaaactaaaacctaataatatcttggccaagttatgtattataaaaacaaagctaagaaaggt

SEQ ID NO: 212602 - DNA, 569 bp, Homo sapiens
gtccacagaacctcacaatcggcatataattcataaatttgcattatattcatggattggaaggattaaccattcctagttattaacaagtttgaagaggggaaaattaaaactacaaagaaaacatcatttcttcaactgagatagaaaaaaaaattaagagtacaatctggaaattggatatcagacaatatccaattccacattttttacttgaatctttagaccagtgagaaatgggaacatacacagaaatcctatttctgcctaatgggaagctaataagttgtcaaaaaatgtcttcttttttaaaacaaaaaacaaaaacaaaaacaaaaaacaaaaaaacagggtctcactctgttgtccaggctggagtgcagtggcacaaccacagctcamtgagccacagctcactgcagcctcgacctcccaggctcaggtgattctccagcctcagccttctgagtagctgggactgcaggcacatgccaccacactcagctaatttttgtatttttaatggagacagggtctccccatgttgcctagactggtaaaaaataagt

SEQ ID NO: 212603 - DNA, 598 bp, Homo sapiens
gaaaacttgaacaagtattattccctctaaaccttcatttttgttttgttttatctgtaatatgggaataataactagcttayactgttgttttaagaaatggatgaaatatttatacaaagcacttagccaagttcttggcatgtagaatatgctcaatacaatactcaaggttctcccatgctcttggggcttatagtttatttaagacataagatatgctcgttaaaaatccattaataatgctcaatttaagtttaagttcctagcaacaatagaacgtatgtcactggtaagtaatcattgccaaatggggatgaataaccatttgagaatttggaaaaatggctaacttttattgagtgcttatgatatggcagcactatattttatttacattataggaattaactcatttcactcttataggaaaacataaccctgtgaaatagatactattatcattttcagattttgaaattaaggcacagaaatattaatttgcctaatgtcaacagctaatacattgcagaactgaattagaatgcagatctgtacatttacacaccacactgtaaaagatggggaaagctagcca

SEQ ID NO: 212604 - DNA, 535 bp, Homo sapiens
aaatcccccatgtttagccagtgcattccacgtgggattcagagactctgtcttattccatccagtggttccaccagtctctaaagcctagaggtcctatgccagattatgtgaattaaaattagaagagagtattaaggatcttctgggacagtggtgggatggttacagtttccagactcataaatgtaaaacagtgttccttctacaaatattctattggctggggctcattcactttcacacagtaacaaagaatgcttggaaatgtggccacactgtatacccccaaaagaagaggaattagtttggttcaaatttatctagtctctgtcatgctttcatcatcatcatcatcatcgtcatcatcatcgtcatcagctactgtggatcagcatactttcctgcaattttccaaatcgaattttgtggttatrtattaacagagtatataaaattcattttccctacataatatgtattttattcctatatgtgttttctgcagtggtctgatttatatcaatgactaaca

SEQ ID NO: 212605 - DNA, 593 bp, Homo sapiens
gtgctgggattacaggtataagccacactatgcctagccaaaactgcagctttcaataagtagccaaatctaacaagtatactttcattctcagtctaacatttaatcaacagaaaattgagtcaggtgaggaaaaaggagttaaagaacaggctgtactgtatatgcttacctctgatatagaggacagtctcaatcattattattaaatgaaatattcatatacaaattaataccactgcatcygagttatgttaaaatagatgctcaataacagcaaatgcctcactttgaagaatgcacgtacttcctgtcattttcccaggttggattcagtggtccatctccctgggctctaacccaagggtcagggagatgctaggaactgggatagtgggaaagggcagagggggcaagaggaggaaggaaatccaggaagatgagacttttggatgtcaactggagacaaattcaaacatctttggggattagaatcggagcgctcattttagggaagctggtggggacaataccaatgctacaaaccaagtattttatcagagttttaacagcaacttgattaaagacaacag

SEQ ID NO: 212606 - DNA, 645 bp, Homo sapiens
atttgctgtgcctagcatagggtctgccaatgtgtactaaattcataaataattttatttcatgaaatagtagaaggtctgcctttctatcaatggaattatattgtaaaaaatggtgatgacaaaacttaagcctatttcctttagccttttgtccaagacaaaatcaaacatagcaggtaggaccayctgctcatgatttttggaagcacgttacttcaggaattgattcataggaagaaaagaccactttcctataaagttattatatgtcagtgttgcaaaatttagtggtaatttatatgaccttctttctatttgggtttcttgaaatacatttgtattggtcagagttctccagaaaaataaaaccataaaatatacttctatatctctagaaagggatatattacaaggaattggctcatatgattatggagactggcaagtccaaatctgcaggcagatttgcaagcccaccaggcagagaggcaagagaagacccaatgatgtaaatgaagtctaaaggttgtcttctggagaattccctcttacaagggtctttagctggtctttacattctagtctggtcttcaactgattggacaagacccacccacattatggagggcaccctattttact

SEQ ID NO: 212607 - DNA, 583 bp, Homo sapiens
tggtgtatgaggggaaaacatattccaaagcattcctttgtaatataagtaaacattcttcctgttagacattccagggacatagctatgtatcattcttgctgtgatacagattacaactgcactcacaggaaattctttccttaattgaaaaaaatacattttattatatactttatgccactgctatttgccttttattatatgttttggggaaaaaaatccagatgtctcccttttgctaatttaaattatttattaaagtaacatgtgagcctcgtttatgaagtcaaacactcttttttattataaaccacttatggctgtttgatcttaaaactgctggttccccagccctactccccagagaccaccactttcaactctttyaacaatttcttctggcatttgcttccgtatttgtaaataatatactgttatttcttaaatttttaattgacagtgttctatggaagatgaagacttagcttgtttccctactggatactgtccccccctcaaccctcttctctcactatagttaatataattgtgtcataatcctggttaaatcaaaattcag

SEQ ID NO: 212608 - DNA, 606 bp, Homo sapiens
aggagaaattcttcattttacaaaaaagtccagcatattctaagaatttcattttcacatttatttaactaacaaattccataatgctttttactttttaacttttattttaggttcgggggtacatgtgcaggtttgttatataggtaaactggtttcatgagggtttgttatatagattattttgtcacccagctactaagcttagtacccaatagctattttttctgcttctctgcatcctcctacattccaccctcaaatgggtcccagtgtctggtgttcccttctttttctttcctttttttgagaagaagtctcactctgtcacccaggccgaagtgcagaggcatgatcttggctcactgcaacctccatctcccgggktcaagcaattctcctgcctcagcctcccaaatagctgggattataggtacccatcaccacacccagctaatttttatatttttagtagagacggggtttcaccatgttggccaggctaacctcaggtgatcaacctgccttggcctcccaaagtgctgggattacaggtgtgagccaccacgcccagtctgttgttaccttctttaagttcatgaattc

SEQ ID NO: 212609 - DNA, 573 bp, Homo sapiens
aggataatggcctccagcttcatccatgttcccgcaaaagatatgatttcattctttttatggctgcatagtattccatggtatatatatacaaaattttcacacatatccagtttgtcattgatgggcatttagattggttccacatcactgcaatgctcggaaagcattaggttccatcaacagaggaaaaggaacctgatgctttacaaatattgtccactgtcctctgacaacagaaaggaagaaaaaaaaagtaacttagtactggcctcaggaatgttggtctgataggggaaagttcactctcttgctaattccaaggagcttttaaaaataaatggtgtggaaattacctattgtttattcaggaataacccttatccttttcttaattgatcagcatttcatttgttgtaaaactctttgtcctgtgaagctggaggcccttgaaaaatctccatggtgctcactctcatatctcaagccatccagrtagatttgagacggcacttggtattaggctagagtaaaattttccttgatctgcaagcttatttggtgtttgaattc

SEQ ID NO: 212610 - DNA, 396 bp, Homo sapiens
gagaatactttgtgtatcattatttaattgtgccccaaatttcaaaaggaagaagttgggagaaggaagggcttgattcctagtgctctggtggaatatggtaagaagtaatctcagggtaactatgtaaagatcaaattgaagctcaaactgtcaggaacagaatgagcagcccaggtagtgtttkaagccttttttttttttttttttttttttttttggagacggagtctcactctgtcggcaggctggagtggagtggcctgatctcggctcactgcacccttcgtctcctgggttcaagcgattcttctgcctcagcctcccgagtagccgagtagctgggactgcaggtgcgccaccatgcccagctaatttttgtatttttagtagaga

SEQ ID NO: 212611 - DNA, 396 bp, Homo sapiens
gagaatactttgtgtatcattatttaattgtgccccaaatttcaaaaggaagaagttgggagaaggaagggcttgattcctagtgctctggtggaatatggtaagaagtaatctcagggtaactatgtaaagatcaaattgaagctcaaactgtcaggaacagaatgagcagcccaggtagtgttttaagccttttttttttttttttttttttttttttggagacggagtctcrctctgtcggcaggctggagtggagtggcctgatctcggctcactgcacccttcgtctcctgggttcaagcgattcttctgcctcagcctcccgagtagccgagtagctgggactgcaggtgcgccaccatgcccagctaatttttgtatttttagtagaga

SEQ ID NO: 212612 - DNA, 530 bp, Homo sapiens
gtggaacgtgagggcagcaccagcaaggggcacactcagagcccaggagagttcgaggaaggctgatcactgtggtctggctcacttgaaagccaggaaacagaatgatggaattaacaagaggcagagtgcatttttccttttgctctcagacctcagtagagaaacccatgcagctttcctctttaactagtgccaaatgtccctgagaaggctgtgcctgagaggtaggggccagggagaggctggaagtcactttgctggtcatacattgcsagcttagcttcagttgcactcctgtgaccctgaggccattcaaggccctcagagccccacttccaagcagtctccgctaaaatgtagttcagaagccccatgaattttcattaataactctcagtggaaacaaagccttagaggggtggagattggaggaggctagagacttgttgggaggggagaaaggaaaggaggggaaggaggggaatccaccagagctaaatgactttccagactgtggtaaaggatgt

SEQ ID NO: 212613 - DNA, 530 bp, Homo sapiens
gtggaacgtgagggcagcaccagcaaggggcacactcagagcccaggagagttcgaggaaggctgatcactgtggtctggctcacttgaaagccaggaaacagaatgatggaattaacaagaggcagagtgcatttttccttttgctctcagacctcagtagagaaacccatgcagctttcctctttaactagtgccaaatgtccctgagaaggctgtgcctgagaggtaggggccagggagaggctggaagtcactttgctggtcatacattgcgagcttagcttcagttgcactcctgtgaccctgaggccattcaaggccctcagagccccacttccaagcagtctccrctaaaatgtagttcagaagccccatgaattttcattaataactctcagtggaaacaaagccttagaggggtggagattggaggaggctagagacttgttgggaggggagaaaggaaaggaggggaaggaggggaatccaccagagctaaatgactttccagactgtggtaaaggatgt

SEQ ID NO: 212614 - DNA, 509 bp, Homo sapiens
gccccacttgcagacaatgcacagctgcagataagatgggcagccctagttctcttcaaagaacagagagtaccaatgccacagaggcccaccccttccaggaagccctgggctctggggtactgcttaaccacagagcagccctttattccacgcaccaccccctcctcccctcagcacttatacccttgtcctctggaggcttagaacagttcctctctggctctactgccaggaaggggctgcaaacagtctcatttgcattcacattgcttagcctgagactctgcaattctatgctaagatgcatggaactttctgctcacttctgaactctgctcatagcagaatcagaaggcccatggctgcaggctctttggactctccttttggtgctctgctgcactaggtctgtgcttttctctttctgaatgctaggagactctgctccrtcctttgatctgtgaccacagccctctaagaaggttatgtttcaattgtccatgtgt

SEQ ID NO: 212615 - DNA, 452 bp, Homo sapiens
tgcaggctctttggactctccttttggtgctctgctgcactaggtctgtgcttttctctttctgaatgctaggagactctgctccatyctttgatctgtgaccacagccctctaagaaggttatgtttcaattgtccatgtgtgcaggtctctgcctctgaggctgtgagatctgtaagggcagggacatgctacctcctctctacctactgcctatggctagtcagtggccactgctccttcaccccacttccctttctctatatccagctttcccccagagtcacttttgtataatcccttgcagaacagaatttcctgttcctctctcatgctctgaagaagcacccccaacaccctacctctcccctgggattccactacagtaatacaagccacatcacggtgtaattctctgaggctggggaggagaacagcaccctcctcccaga

SEQ ID NO: 212616 - DNA, 441 bp, Homo sapiens
caccaaaccaccaactggtttgatttgttagtttatcagtatttattctttttaatstgttagtcaatttcttgttaatcaattgagttgggggaaggtcagtcaggaaaggtatctagacattttcctgtctagtcatttttgggatgtgaaagacctgccaggaggcaacatcgtaaagggaaggagaataagtttggggtcatcaggtctgggcctgaagcctgcctctgtttcctaccagccgtgtggtttgggtcaagcaattcaactttctacgctgcagtcttctcaccttaaaatggaaaaaacaatacctactctgcaggagtattatgagtattaaatggtataacccacgtaaatccatcatggtctgaaacggcagggacgtgaagaagtaatttcttctctctttgcctactttggacaaagggttat

SEQ ID NO: 212617 - DNA, 441 bp, Homo sapiens
caccaaaccaccaactggtttgatttgttagtttatcagtatttattctttttaatctgttagtcaatttcttgttaatcaattgagttgggggaaggtcagtcaggaaaggtatctagacattttcctgtctagtcatttttgggatgtgaaagacctgccaggaggcaacatcgtaaagggaaggagaataagtttggggtcatcaggtctgggcctgaagcctgcctctgtttcctaccagccgtgtggtttgggtcaagcaattcaactttctaygctgcagtcttctcaccttaaaatggaaaaaacaatacctactctgcaggagtattatgagtattaaatggtataacccacgtaaatccatcatggtctgaaacggcagggacgtgaagaagtaatttcttctctctttgcctactttggacaaagggttat

SEQ ID NO: 212618 - DNA, 529 bp, Homo sapiens
taggaccgtcaagctgtcccactctccctctggcagcgtgctgactaagcccaggtgggaccaaactctcctccttgaatttaaaggttgaatataaccactaaaccctatggagcagattaatgatgatcatggcacactgaagaagttgcctatttgttcttgttacatacatccatggaaatggtccatttccgtctttactgagacctagttgctcatccttcctttgagtcaatgagcaaactttcaataagtttcttgtctgcttaagttaaacagaatcyatttctgttgcttgaacccaatgagtcttcattaatctactcaccaatccaagaatattgtcctaatgcatggctgggaaatagttaactaaagacgtccatatagctgtcatgagaagggtacttactgggcttctggtaccatccgaagggataggtgtggacttcaatgtcaggagagccacagtccaaaatgcgccaggctcctccattctcctcactgcacatctgaattcccaagc

SEQ ID NO: 212619 - DNA, 529 bp, Homo sapiens
taggaccgtcaagctgtcccactctccctctggcagcgtgctgactaagcccaggtgggaccaaactctcctccttgaatttaaaggttgaatataaccactaaaccctatggagcagattaatgatgatcatggcacactgaagaagttgcctatttgttcttgttacatacatccatggaaatggtccatttccgtctttactgagacctagttgctcatccttcctttgagtcaatgagcaaactttcaataagtttcttgtctgcttaagttaaacagaatctatttctgttgcttgaacccaatgagtcttcattaatctactcaccaatccaagaayattgtcctaatgcatggctgggaaatagttaactaaagacgtccatatagctgtcatgagaagggtacttactgggcttctggtaccatccgaagggataggtgtggacttcaatgtcaggagagccacagtccaaaatgcgccaggctcctccattctcctcactgcacatctgaattcccaagc

SEQ ID NO: 212620 - DNA, 529 bp, Homo sapiens
taggaccgtcaagctgtcccactctccctctggcagcgtgctgactaagcccaggtgggaccaaactctcctccttgaatttaaaggttgaatataaccactaaaccctatggagcagattaatgatgatcatggcacactgaagaagttgcctatttgttcttgttacatacatccatggaaatggtccatttccgtctttactgagacctagttgctcatccttcctttgagtcaatgagcaaactttcaataagtttcttgtctgcttaagttaaacagaatctatttctgttgcttgaacccaatgagtcttcattaatctactcaccaatccaagaatattgtcctaatgcatggctgggaaatagttaactaaagaygtccatatagctgtcatgagaagggtacttactgggcttctggtaccatccgaagggataggtgtggacttcaatgtcaggagagccacagtccaaaatgcgccaggctcctccattctcctcactgcacatctgaattcccaagc

SEQ ID NO: 212621 - DNA, 552 bp, Homo sapiens
ttagtattctgaaaccatggtttttagtttctgtctttagtgataagcagaaaagagtgatgaggaaggggatttactggcccaaccagaaacagaaactaggaacccatgactgtattctctcccttagacactgctgctagtgttggataaatggtaataactgtttatcaataactagctcttcattaggacaaatacctaatgcatgcagggcttaaaacctggatgacaggttggtaggcgcagcacacyaccatggcacatgtatacctatgtaacaaaccagcacaaagttttgcacgtgtatcctggaacttaaagtaaaataaaataaaaatttaaataaaggtataaaaagactagctcctaataataattaaaaacaaaatttgatcatatctcgatgtcccaggctgtcagccagccctctcctgtagcatggggcttatttgcctccagactctgctatctgggctatttccctcaccttccatgtcacagggaatttgaaaggaactgaagactgagcaggggcaaaagaggcagcac

SEQ ID NO: 212622 - DNA, 552 bp, Homo sapiens
ttagtattctgaaaccatggtttttagtttctgtctttagtgataagcagaaaagagtgatgaggaaggggatttactggcccaaccagaaacagaaactaggaacccatgactgtattctctcccttagacactgctgctagtgttggataaatggtaataactgtttatcaataactagctcttcattaggacaaatacctaatgcatgcagggcttaaaacctggatgacaggttggtaggcgcagcacactaccatggcacaygtatacctatgtaacaaaccagcacaaagttttgcacgtgtatcctggaacttaaagtaaaataaaataaaaatttaaataaaggtataaaaagactagctcctaataataattaaaaacaaaatttgatcatatctcgatgtcccaggctgtcagccagccctctcctgtagcatggggcttatttgcctccagactctgctatctgggctatttccctcaccttccatgtcacagggaatttgaaaggaactgaagactgagcaggggcaaaagaggcagcac

SEQ ID NO: 212623 - DNA, 552 bp, Homo sapiens
ttagtattctgaaaccatggtttttagtttctgtctttagtgataagcagaaaagagtgatgaggaaggggatttactggcccaaccagaaacagaaactaggaacccatgactgtattctctcccttagacactgctgctagtgttggataaatggtaataactgtttatcaataactagctcttcattaggacaaatacctaatgcatgcagggcttaaaacctggatgacaggttggtaggcgcagcacactaccatggcacatgtatacctatgtaacaaaccagcacaaagttttgcaygtgtatcctggaacttaaagtaaaataaaataaaaatttaaataaaggtataaaaagactagctcctaataataattaaaaacaaaatttgatcatatctcgatgtcccaggctgtcagccagccctctcctgtagcatggggcttatttgcctccagactctgctatctgggctatttccctcaccttccatgtcacagggaatttgaaaggaactgaagactgagcaggggcaaaagaggcagcac

SEQ ID NO: 212624 - DNA, 597 bp, Homo sapiens
tccgaacccctatagcatccaccagctcctcaatgttggctatgcagcctggtctctcctcccagcctaagtgtggctgagttgtgcccactgaatttctgtgagtgatgtactgcaggctcctcagggttggggagaaagacagacggttgtgaggcctgttagcccaaggatggtgccaggctttggtccagggttgaacacaagcttcacctctccctcttcatatcagcccctttcaaagggtgtcttagtgcatttggatgaacattaygaaataccacagactgtgtgtcttataaacaacagaacattttttctcataagttctggaggctgagaagtccaagatcaagatgtcagccatgtgtggtgaaggttctcttcataaatgtctgtcttctcactgtgaccatggtggaaggggcaaggatctctctggggtctcttttataaggacactaaccccattcatgagggctgcaccctcatgacctaacacaaagttccctaatactatcatgttggggattatggtttggatatgaatttcggggggacacaagcattcagatgatggcaaaaggtaacattcca

SEQ ID NO: 212625 - DNA, 597 bp, Homo sapiens
tccgaacccctatagcatccaccagctcctcaatgttggctatgcagcctggtctctcctcccagcctaagtgtggctgagttgtgcccactgaatttctgtgagtgatgtactgcaggctcctcagggttggggagaaagacagacggttgtgaggcctgttagcccaaggatggtgccaggctttggtccagggttgaacacaagcttcacctctccctcttcatatcagcccctttcaaagggtgtcttagtgcatttggatgaacattatgaaataccacagactgtgtgtcttataaacaacagaacwttttttctcataagttctggaggctgagaagtccaagatcaagatgtcagccatgtgtggtgaaggttctcttcataaatgtctgtcttctcactgtgaccatggtggaaggggcaaggatctctctggggtctcttttataaggacactaaccccattcatgagggctgcaccctcatgacctaacacaaagttccctaatactatcatgttggggattatggtttggatatgaatttcggggggacacaagcattcagatgatggcaaaaggtaacattcca

SEQ ID NO: 212626 - DNA, 597 bp, Homo sapiens
tccgaacccctatagcatccaccagctcctcaatgttggctatgcagcctggtctctcctcccagcctaagtgtggctgagttgtgcccactgaatttctgtgagtgatgtactgcaggctcctcagggttggggagaaagacagacggttgtgaggcctgttagcccaaggatggtgccaggctttggtccagggttgaacacaagcttcacctctccctcttcatatcagcccctttcaaagggtgtcttagtgcatttggatgaacattatgaaataccacagactgtgtgtcttataaacaacagaacattttttctcataagttctggaggctgagaagtccaagatcaagatgtcagccatgygtggtgaaggttctcttcataaatgtctgtcttctcactgtgaccatggtggaaggggcaaggatctctctggggtctcttttataaggacactaaccccattcatgagggctgcaccctcatgacctaacacaaagttccctaatactatcatgttggggattatggtttggatatgaatttcggggggacacaagcattcagatgatggcaaaaggtaacattcca

SEQ ID NO: 212627 - DNA, 597 bp, Homo sapiens
tccgaacccctatagcatccaccagctcctcaatgttggctatgcagcctggtctctcctcccagcctaagtgtggctgagttgtgcccactgaatttctgtgagtgatgtactgcaggctcctcagggttggggagaaagacagacggttgtgaggcctgttagcccaaggatggtgccaggctttggtccagggttgaacacaagcttcacctctccctcttcatatcagcccctttcaaagggtgtcttagtgcatttggatgaacattatgaaataccacagactgtgtgtcttataaacaacagaacattttttctcataagttctggaggctgagaagtccaagatcaagatgtcagccatgtgtggtgaaggttctcttcataaatgtctgtcttctcactgtgwccatggtggaaggggcaaggatctctctggggtctcttttataaggacactaaccccattcatgagggctgcaccctcatgacctaacacaaagttccctaatactatcatgttggggattatggtttggatatgaatttcggggggacacaagcattcagatgatggcaaaaggtaacattcca

SEQ ID NO: 212628 - DNA, 509 bp, Homo sapiens
gcctatgctgccttcatgatatgctctctcgttaattcagactgtaaatttcaggctgaaacagactgcctgtgcatgttgccttaataagtcaaatgcagctaatctcaaatttgccctctctcgaagtgtacattaaacaagttagggtgtgcctaaattcacaactgcaaccagcttgcacatccttaagtgggccatacatattcaagcctctggggctttgttgtagagtgccactcatttccccttttctgcttgtcagaatcctcattggccttcaagaccaacatgaaacgcctctgcgatgaagctataggagttagcrgtggctacctgtcttcgctgtgctcagagcatgccaagggtttctttcccagcattccgatcatgcttccccgtggcctggttaattgtgtgctaggctgtattcctcaacaggctcctaaagactaagaattacatttaattcatttttgtgcccttcacagacccaggagagaggtctg

SEQ ID NO: 212629 - DNA, 585 bp, Homo sapiens
tacccccaaccctgtgctctcagaaacatgtgctgtgtggaatcaaggtttaatggatttagggctatgcaggatgtgctttgttaaacaaatgcttgaaggcagcatgcttgttaaaagtcattaccactccctaatctcaagtacccagggacacaaaacactgtggaagtccacagggacctctgcctagcaaagccaggtattgtccaaggtttcttcccatgtgatagtctgaaatatggccttgtgggaagggaaagacctgaccgtcccccagcctgacacctgtaaagggtctgkgctgaggaggattagtaaaagaggaaggcctctttgcagttgaggtaagaggaaggcatctgtctcctgcttgtccctgggcaatggaatgtctcagtgtaaaacccgattgtatattccatctattgagataggagaaaactgccttagggctggaggtgagacatgctggcggcaatactgctctttaatgcattgagatgtttatgtatgtgcacatcaaagcacagcacttttttcttaaccttgtttatgatacagagacattcgttcatatgtttt

SEQ ID NO: 212630 - DNA, 585 bp, Homo sapiens
tacccccaaccctgtgctctcagaaacatgtgctgtgtggaatcaaggtttaatggatttagggctatgcaggatgtgctttgttaaacaaatgcttgaaggcagcatgcttgttaaaagtcattaccactccctaatctcaagtacccagggacacaaaacactgtggaagtccacagggacctctgcctagcaaagccaggtattgtccaaggtttcttcccatgtgatagtctgaaatatggccttgtgggaagggaaagacctgaccgtcccccagcctgacacctgtaaagggtctgtgctgaggaggattagtaaaagaggaaggcctctttgcagttgaggtaagaggaaggcatctgtctcctgcttgtccctgggcaatggaatgtctcagtgtaaaacccgattgtatattccatctaytgagataggagaaaactgccttagggctggaggtgagacatgctggcggcaatactgctctttaatgcattgagatgtttatgtatgtgcacatcaaagcacagcacttttttcttaaccttgtttatgatacagagacattcgttcatatgtttt

SEQ ID NO: 212631 - DNA, 622 bp, Homo sapiens
taactcatagtttggcaatatgtttattgttttgaaaggaactggtttgctagagtgctgacagaattgtatagaaatttatgtagatgcatctctcataaaggacccagcaaatgataatgctttctcccatgtgaatgttcaacaatatttttcctaatataggggcagctctcaacagtcaagtaaccgaaatggtccagtgtgaatgtaagtcttyttcctcagcagagcagcttagccaatgggttcatagacacaatggccatgatagcagaaatgagtttatacatgggctcaaaaattaggatatgctctaactgaggcttctctggctattactgttgaccactgaccaacttgccagccttaatgacatactctgttaacttgatatgagaacatatttcagggtatcagccaaccatttggcatgactaattacatttgacttctagatatctgtttttctgatttcatactgatttggacttggatttacattctctgcctgctttgcttttgccaacaagagcatctaaggacttactgagtatcttattcaccatcacagaataccttatatttccccccaaaaattattttactgtaaattatggta

SEQ ID NO: 212632 - DNA, 582 bp, Homo sapiens
ctagttttctgggtatgttattcttggctgtaagttgctcttgtmgttgttttcccttcagtccctggaatatattattctgctctctccagtgtttctgttaagaaatattctgaaagccgtattggagcttcattgaatgtgatgtgtgtcttttctattgctgctcttactatttttttgtctttgattttgaatagtttgattatgatgtatcttgtggatttcctccttgggctgaatttgattggtgactactgagctttctgtacctggatgctgtttctttctccaggattgataaattttcagccatcatatttttaattacaatttctaagactttttcctgctaatctacttgaagaactcctattatgtggatgtcagttcacttgatgttctcccataaatctcgtaagacttctttatgctttctgattccttttccatttttgcttatctgatggagtaattttatgtgttctgccttagaggtcactgtcttttctctgtttgatcaactctgcttttgaagttttctaatgagtttttcagtttgattatgcatttttttatttc

SEQ ID NO: 212633 - DNA, 569 bp, Homo sapiens
aatggataatagaatatgtaaatttaataccagcctcaatcactataaaatataaaaccaaacgtaaccactgcagcaaaaaatatatttgtttcatttttatttacttacgtatttattttgagacaggatctcactctgtcccccaggctgtagagtagtggcatgatcatatttcattgcagcctctaactcctgggctcaagagtttctcctgcctcagcctcctgaggtaagactacaggcacatgcctccgtgcctagstatttttaagaaatattgtttgtagagacacagtctgtctatgttgcccagctggtctcaaactcctgagctcaagcaatcctcctgcctcagcctcccaaagtgctaggattataggcttgagccacatgcccagccagagcaataacattttttaagaaaataaattttggttatttccactaatgggacatagaaaggattttaaaacagctggactaaagaaggtttagactagacagataaagtaaaaataaaaataaaattatatacatattcattttagtcttactgaaatgtcaat

SEQ ID NO: 212634 - DNA, 523 bp, Homo sapiens
tagcagcatatgattataatttagaattaaatattgcatagtttgtggcacatctaagattttttaatagaaaagaatgtagtatgtaaaaagtttggagatcactgatctaggggctttagttgtaaggaaaggagaaaatggcttgatcttgttctgggatgcttgaagggttacactatttaagtaaataaagattagaataaaatatttcctcaaggcaaacaaataataacaaggcttatctacatcagataatgaagtataagaaaggcagaaacaaatagatatgtttgaataaataacagaactgaaaagagagaacaaatagatactacaaaatcaaatgtctgaaatgaacttgaatacattagtgaagcaacaaatataaatagataacatttgccatttatggtgyaaagattggctaaaatgcaaaattgagtcatatgtcttttataacatatatgtataaaacataagggagagaattattgaagccaagtgacagaaaaattcacac

SEQ ID NO: 212635 - DNA, 457 bp, Homo sapiens
tctcttctggagctgggacttccagcttctcccatcctcagacatcagagctccagattctcaggccttcagattccaggatgtagggacctgccccacagggtcggtgagtttctccccgtgtgcggcgacgagagtgtagaaataaagacacaagacaaagagataaaagaaaagacagctgggccygggagaccactaccaccaacgcgcggagaccagtagtggccccgaatgtctggctgcgctgttatttactggatacaaagcaaaaggggcagggtaaagagtgtgagtcacctccaatgataggtaaggtcacgtgggtcacgtgtccactggacagggggcccttccctgcctggcagcccaggcagagagaggggacaaaaagaaagacagcttatgccattatttctgcatatcagagacttttagtactttcactaatttacta

SEQ ID NO: 212636 - DNA, 457 bp, Homo sapiens
tctcttctggagctgggacttccagcttctcccatcctcagacatcagagctccagattctcaggccttcagattccaggatgtagggacctgccccacagggtcggtgagtttctccccgtgtgcggcgacgagagtgtagaaataaagacacaagacaaagagataaaagaaaagacagctgggcccgggagaccactaccaccaacgcgcggagaccrgtagtggccccgaatgtctggctgcgctgttatttactggatacaaagcaaaaggggcagggtaaagagtgtgagtcacctccaatgataggtaaggtcacgtgggtcacgtgtccactggacagggggcccttccctgcctggcagcccaggcagagagaggggacaaaaagaaagacagcttatgccattatttctgcatatcagagacttttagtactttcactaatttacta

SEQ ID NO: 212637 - DNA, 629 bp, Homo sapiens
gaaggtaaaatgactatgcagttagaaggtacttaatgtcagctcctcatctgacttttctgaacaagcacttacttgcctgtggtgactgggtctgaagccttcaagtgtctactttggactcaaatatctttattagtcctccctgcacatggactacagtacttttcactcatgtccagtaaacgtaactctctagcatggagccctcgktgggacacttaaatcctaagggatgaaaggagggcaggtctcggtgtttcccaatccatgcttttctctacacagaaaaatattcacctttaatgtccagatctatgtgtgtcttaaagagtggggagatgggagtcatgcatatttaaaatggtctttcttctttatttcctattgcataactttgttggaagtgttcaattgtctagaaaataataataataatttgttttaaaaaaagtctagtatttgaacattagaactttgaaataacttattttactgcccaaaaagaaaatgtcacttttcaaagaaaattatgtgttttggtaaaaaatatatatatatatgatagtttctaatcaaaaagaggttagtcttgggctctggtctcaacccatcttcagattcaatcc

SEQ ID NO: 212638 - DNA, 629 bp, Homo sapiens
gaaggtaaaatgactatgcagttagaaggtacttaatgtcagctcctcatctgacttttctgaacaagcacttacttgcctgtggtgactgggtctgaagccttcaagtgtctactttggactcaaatatctttattagtcctccctgcacatggactacagtacttttcactcatgtccagtaaacgtaactctctagcatggagccctcgttgggacacttaaatcctaagggatgaaaggagggcaggtctcggtgtttcccaatccatgcttttctctacacagaaaaatattcacctttaatgtccagatctatgtgtgtcttaaagagtggggagatgggagtcatgcatatttaaaatggtctttcttctttatttcctatkgcataactttgttggaagtgttcaattgtctagaaaataataataataatttgttttaaaaaaagtctagtatttgaacattagaactttgaaataacttattttactgcccaaaaagaaaatgtcacttttcaaagaaaattatgtgttttggtaaaaaatatatatatatatgatagtttctaatcaaaaagaggttagtcttgggctctggtctcaacccatcttcagattcaatcc

SEQ ID NO: 212639 - DNA, 587 bp, Homo sapiens
ttcaatttatggaatgagaggcttgaaaatgtagattttatgtctcagagcatgtgtgtatttactcaaccttataaaattggatcttttacttgagcagtgagacttgtacctctttagcacctgtgtattttggcaactttgcttttgaaacatcatttggagcactaagggaacaattggtgcttagagagacattaaagaaatgctaaatgctatttaaaattttgtgggtgttttttcttggttttgtttggtttgatttttggtgcatggaaaagaatragacttttgggacatcagccctgttaagaagaaaatggaatgtttgaattgcatcaggtgaaaaatgtttaccccaatgtcacattactaagttaatgcattcaggactctcccatatgagagagtggtagacatagtgttaacatcactataaacctttgtcccagtccagcttggtggcagaaaggaaaggggagggtccaaagattattactataatttctatcatacataatgtatccaacaaatgataatttatcttcctctggtttatgtaattaagttttccagttcaaaaacca

SEQ ID NO: 212640 - DNA, 587 bp, Homo sapiens
ttcaatttatggaatgagaggcttgaaaatgtagattttatgtctcagagcatgtgtgtatttactcaaccttataaaattggatcttttacttgagcagtgagacttgtacctctttagcacctgtgtattttggcaactttgcttttgaaacatcatttggagcactaagggaacaattggtgcttagagagacattaaagaaatgctaaatgctatttaaaattttgtgggtgttttttcttggttttgtttggtttgatttttggtgcatggaaaagaataagacttttgggacatcagccctgttaagaagaaaatggaatgtttgaattgcatcmggtgaaaaatgtttaccccaatgtcacattactaagttaatgcattcaggactctcccatatgagagagtggtagacatagtgttaacatcactataaacctttgtcccagtccagcttggtggcagaaaggaaaggggagggtccaaagattattactataatttctatcatacataatgtatccaacaaatgataatttatcttcctctggtttatgtaattaagttttccagttcaaaaacca

SEQ ID NO: 212641 - DNA, 444 bp, Homo sapiens
agatcttgtcacaaaaaaaaaaaaaaattaattaattyctcagtctaactagccatattcaagtgttcaataaccacatgtggctagcagctaccatactagacaatgcagttctagaagtttttctcataagccagaatcttcctccacctgtatttaactcattatttctactgttgtactctgggacaaaaactgcatctccaacttatatctattatcaggcaatttgtaaagaacaaaggagaaatacttttaaagaagctcactataagtttaatgagaataccattaaaagcttagaccaaatgttgtcaattactgaattatttagaatactgttcaagaaccccaggtaatttacatggcatttatcaaaagttattctcaataaatatgtttctttacaagtcattctttctaaatatgcacatactttttaac

SEQ ID NO: 212642 - DNA, 444 bp, Homo sapiens
agatcttgtcacaaaaaaaaaaaaaaattaattaatttctcagtctaactagccatattcaagtgttcaataaccacatgtggctagcagctaccatactagacaatgcagttctagaagtttttctcataagccagaatcttcctccacctgtatttaactcattatttctactgttgtactctgggacaaaaactgcatctccaacttatatctattatcaggcaatttgtaaagaacaaagkagaaatacttttaaagaagctcactataagtttaatgagaataccattaaaagcttagaccaaatgttgtcaattactgaattatttagaatactgttcaagaaccccaggtaatttacatggcatttatcaaaagttattctcaataaatatgtttctttacaagtcattctttctaaatatgcacatactttttaac

SEQ ID NO: 212643 - DNA, 444 bp, Homo sapiens
agatcttgtcacaaaaaaaaaaaaaaattaattaatttctcagtctaactagccatattcaagtgttcaataaccacatgtggctagcagctaccatactagacaatgcagttctagaagtttttctcataagccagaatcttcctccacctgtatttaactcattatttctactgttgtactctgggacaaaaactgcatctccaacttatatctattatcaggcaatttgtaaagaacaaaggagaaatacttttaaagaagctcactataagtttaatgagaataccattaaaagcttagaccaaatgttgtcaattactgaattatttagaatactgttcaagaaccccaggtaatttacatggcatttatcaaaagttattctcaatraatatgtttctttacaagtcattctttctaaatatgcacatactttttaac

SEQ ID NO: 212644 - DNA, 445 bp, Homo sapiens
ccaggaatcagctaatacaaatttgtatcccttgcacccatctctgtcctcagctccaggtttatatattttctgcttcctgcatatttctatttggaaagcaaytaaaattcaacatgtcccaagctttctttcactcgttctgtaaatatttacctaatgcctatttgaggacaagagccgagcaaaaatagaggttcacataaacaaggtccttgacctcatgcagtcttatagggagatttataagcaattgactaattactaaaaaaaatgataaatgcaatattagtggaagcaaagttactgtgagagcaaaagagaactgcctaggccagtgcagagcaagggaagtacaaaaatttcctagagaaagtcacgtgttagttgaaatccataaggataaattagagttgcccagagagagttccacaagattagagtc

SEQ ID NO: 212645 - DNA, 619 bp, Homo sapiens
agtacgttctaacagaacatgccttgttaccttcatgctctcggtgtagtgggaggcaatgtcactggttgaataaatatgaataaatgaatgaatgaataaatgaatgaaggtggctagggtagaggattaagaagcattaaaatgaatatttcaagaactatttatgggggtcagtaaayataatatttctaaactcaaaacttctaaactcaaggtatttataagctagttgaagatgtaaagacatcatacatcttttcaaagcacaggaagttaaatgaatggttcctaaaatatgaatgttcagagggaaaagtacgtttattaactgcttgacaaagaagtatgtagctatattttgtgtaacacactatggtgtagtcttatctttttgggtatgtttttctttcttaatgttaaaatatttcatagctggtccatgtaactatagttatacttttagttttactcaggttccctgataatgtttgtcgcacagacaggtttgtgtactggttttaataattccattgtactttctacctcctcctccgcccccatccccagggtcttcaggtcacagttgggacctactctatgtactctggtgctctcc

SEQ ID NO: 212646 - DNA, 471 bp, Homo sapiens
gaatgtaacctcttcaaaattcaggtattgccaatgagatactgttaagaagtgaagcctttaggatgcgattgagccattagggctcctcccttgcaaatggaacaaggtcagcaaaccaataggagtgctaaggtaaatgactgtagaacaaaatggtgtttatgtagcttgatggtacatgtaatttcacaattgcattttgtgtctgaaaaacatatgaggttttgctaagcttagtagagaaatgcctgctttgtggcaatgttgtccattagttaaccagagagaaatatgagaacagatgatgtcactatattcttccactagcctaggttcwtaaaagctctaagactacaagtgttatagatgactccagcatgcactcatactgctacttaactttcttcatggaaatgtgtcttattctgtcaacagactaaaagaggggcaaggacatatattatataa

SEQ ID NO: 212647 - DNA, 430 bp, Homo sapiens
caattttcagatataaataggatgcttcatatgttacaagcactatgctaagctgtgggggatacaaagctagacattgaaaaagcctgaaataaacctggttgtcttccttcctacttacttacagtcgtcatacagtaagctgtggggatacaatgctgcattgtacgcagacttggttcctgccctcatgaaagtatactttctcratttccatgcctttgctctctgaaccccctgccttgaatttaccaccatctgctcctccctccatctcactgccatgtcctccttctcctaccagctacttaaagaataccatctcaacttttaagaatcagcttacatcattcccttgtattaagctctttactctatctccttttctcttctaaaaatgtttcctccctcaaaaggtatcattgaaaaa

SEQ ID NO: 212648 - DNA, 430 bp, Homo sapiens
caattttcagatataaataggatgcttcatatgttacaagcactatgctaagctgtgggggatacaaagctagacattgaaaaagcctgaaataaacctggttgtcttccttcctacttacttacagtcgtcatacagtaagctgtggggatacaatgctgcattgtacgcagacttggttcctgccctcatgaaagtatactttctcaatttccatgcctttgctctctgaaccccctgcsttgaatttaccaccatctgctcctccctccatctcactgccatgtcctccttctcctaccagctacttaaagaataccatctcaacttttaagaatcagcttacatcattcccttgtattaagctctttactctatctccttttctcttctaaaaatgtttcctccctcaaaaggtatcattgaaaaa

SEQ ID NO: 212649 - DNA, 430 bp, Homo sapiens
caattttcagatataaataggatgcttcatatgttacaagcactatgctaagctgtgggggatacaaagctagacattgaaaaagcctgaaataaacctggttgtcttccttcctacttacttacagtcgtcatacagtaagctgtggggatacaatgctgcattgtacgcagacttggttcctgccctcatgaaagtatactttctcaatttccatgcctttgctctctgaaccccctgccttgaatttaccaccatctgctcctccctccatctcactgccatgtcctccttctcctaccagcyacttaaagaataccatctcaacttttaagaatcagcttacatcattcccttgtattaagctctttactctatctccttttctcttctaaaaatgtttcctccctcaaaaggtatcattgaaaaa

SEQ ID NO: 212650 - DNA, 446 bp, Homo sapiens
gggactgataaagatgtgggttaaagattccttttaaagccatcccttaatgctaccactgtacagaaagatggcagagtgactgcctttatagacacctgcccacacttcctaatctgccctcagttgcaactcctagagagtaggcacacagcttagggtggaaaatacatgaaaattcagtacttgtaaatagatgggaggtgggtaatgaggatgagcgacagargaaaaaaccttctatatttgtctgttctcaccacctaaggggttcttcagaaaaccagtgagctttacgctcaggttgagaaatccttgttacagtcactttaattgcaatctctatttcttctctctttttctttctctctctgtgtctctacacctctccctcaccactttctggatatgcacacatatttacattcagatgattttagaaagct

SEQ ID NO: 212651 - DNA, 551 bp, Homo sapiens
aagccagtcgtcagggaacatccttgcccttcctaygattttctcttgtaatatacatgccaaggcagagacacggactcctcctcagatcagagttgtggatcctcccttttaggtggagaaactcctgccctgcagcttccagtggcatctgttccctccccaggaacatggggctctcggtcacacgccctccattaacctagaatttaaaatcagggatatcctggttcctcgagttacttctagatcctgtgggtaccagattgcagcccccacccctcatatcatatgcatagatttgattccacacatttcaatatagcagacctgcaggggcacttttatgcagtagttataagagcattcagtgatttggaatagagcagttattaaaccacttcttgttctacatcatagtaggagaaagcagctgagagaaaggagagaaaagcaaattagaacattctcaccctccatacccactagggacccatttagaacaatgtagtaatttactaaatgatagcctaatggcctgaaagagttaa

SEQ ID NO: 212652 - DNA, 564 bp, Homo sapiens
cactggcctgctaatatctcttagagatcctgatttcaatttttttggatactcagaagtgagactgctggatcatatgttctgtttttaattttttgagagtctccatactgttttccttaatggctgcaccactttgcattaccaccaacartgtatgagggctccaattttgtccttgctaatacatgctggtttttgtttttttgaaaatagccatcccagaaggtatgagatgatatctcattgtggttttgatttgcatttccctgctgactactgacattgagcattttttcatatatctgttggccatttgtatgtcttctttggagaaatgtctattcaaacctttagcccatttttaatctggttattctttgttttctgttgttgttattgaggtgttccatatatattttggaaattaactccttatctaatatatggtttgcaaataatttctcccattccttaggttggcttttcactttgttgatcatttcctttgctgtgcagaagctttttagtttggtttgatcccactttctttttgttgcctgt

SEQ ID NO: 212653 - DNA, 356 bp, Homo sapiens
atggtagcttgtgtttaaaacaagctcagaagatagaataaatgatcaarctgtaataattgggaaggtcttcctaaatgatatatgtacatgtacctgtagagagatagagactttgttagtttcaaaggagcagacctgaataaacctgttaaagaaataaaattaattttatctaggatgtctttccattaaacatcttgtcccttcacacagtagtctcatggtagctcagctaatttccacatgttccacagatgtgtggaatcttgtggatcctttctacaaagcagagaagccaaggcactcaggctttttcctgccttcccactctataactccacactgccattttt

SEQ ID NO: 212654 - DNA, 570 bp, Homo sapiens
ttttgtgctacgggaagataagcaggataaaataactaaaaaaaaagttttgcgacagtatatagaatatgatcctgtttaaaaaataaagatgtatataaaatagcaaatataaaacagaaatagtgaagcaatggaaaagtttagtagcaaagtgatgggaagaaaagatagataatagctaaagmagcaggaaagcctagcaaagcttaggaaattccattccccaaaggtgactattccttggatgggcatatggaggacgcatttctcctataaatcaggagagtaccactaatttacagccttggtcacatctctgacatatcccagataaaagcaaagaacatgggtttttgttgttggcgttgttgttttgtcctcttttatcccttcacgctccataccatgaactggtaatgcaccatttactgagagctgtgtaagtgcctgacactacataagtgctttattttgtttgattctcaaacctcacaacaaccccatgtaggaagaactcttatctgtgctgccatttcatggaagagaaaagcagagtacttgaaagtg

SEQ ID NO: 212655 - DNA, 570 bp, Homo sapiens
ttttgtgctacgggaagataagcaggataaaataactaaaaaaaaagttttgcgacagtatatagaatatgatcctgtttaaaaaataaagatgtatataaaatagcaaatataaaacagaaatagtgaagcaatggaaaagtttagtagcaaagtgatgggaagaaaagatagataatagctaaagcagcaggaaagcctagcaaagcttaggaaattccattccccaaaggtgactattccttggatgggcatatggaggaygcatttctcctataaatcaggagagtaccactaatttacagccttggtcacatctctgacatatcccagataaaagcaaagaacatgggtttttgttgttggcgttgttgttttgtcctcttttatcccttcacgctccataccatgaactggtaatgcaccatttactgagagctgtgtaagtgcctgacactacataagtgctttattttgtttgattctcaaacctcacaacaaccccatgtaggaagaactcttatctgtgctgccatttcatggaagagaaaagcagagtacttgaaagtg

SEQ ID NO: 212656 - DNA, 429 bp, Homo sapiens
gaattcctctggtgctgaacaaagactcaactctggttggcaataacttatatttcytagtcttgtgtgatctctgggagctttcagtttacagccccttagatgttcttttgctggcttcctggaattttaccttactgatgcatctcttagtacagtcatgtgccacataacaatgtttcagtcagcaacaaactgcatatgcaacagcggtgccataagattataataccatatttttactgttcttttctacgtttagatacacaaatacatgccattatgttacagctgcttactgtattcagtacagtaatatgctgtacagatttatagcctaggagcaacaggctataccatatacaccatctagatttgtgtaagtacacgttatgatgttcacacaatgatgaaatcgcctaacaacac

SEQ ID NO: 212657 - DNA, 635 bp, Homo sapiens
gaatttacagactaattttattttcaggtttttttaatacctgggtttaaattcctgaattaaagaattagatttttttttttggccattctgtccttcattgagataataaagaaaataaataggctcttaccttattaagttattctcatttacacacacacacacacacacacacctccctatcaggcttccggaagtagaaaaaaagaactttcagctggttatttcagctcttttgccaatataagtagcatgtgcttttaccctatggttggcagagcaatgtgtactctttggccttctgctttctcctttaatttcgcttggagagcctaggtaagtgcggaatttgtctttaagaaaaagtttgctacttttcttatttgaaagagtcaaagaataaaggaaaataaatttagaagtaataaaaatttattttcttatatgaaattgtgatggcgtttatgcaagtagcttaagttytcaaaagaaataaccattattttcctttcagtgtttacttttttaaacaaattcagtctataaatgcatttccatatttaaaaatattttatgtttaacatgttcttgaggaaagtcttaatttccaaggagatgtaagttgatatttt

SEQ ID NO: 212658 - DNA, 582 bp, Homo sapiens
agagaatagaagcagctctgtttttcagtgccctaaataagaaagaaaaagttaaaattatattttaatttctttacatataagcatattgggcaacaaaagggaaggcagcccaacctcaggacaagaaacattgacaggtttttgtacatgaaatgagattgatggacaattttgtctgccacttttaagacaaaaaaaaaattttaatcttaaaaattattaaattttgtccagacatttgaaataattcagatagaaccttcaccaccagaaagttaagaaaccaagtgttygtaatatttcttgaaaaatattatctggataaaaatggaaggacatttgtattctctttgaagctcatgaatttaaatttcacatatttcaatttactgacttaaaattaatttattaactactttgtggcctggaaagaagacagacatttccacatgatttgggtaaaaaatttcctaaaacatgaaatgtgcgatgataaaatattaactgaaaaatacttaagtagaatcaaataaatgtttcacaagtttcaatgttatatatgaacaaaattatccttaa

SEQ ID NO: 212659 - DNA, 421 bp, Homo sapiens
gagtaataagcaccaattttatgatgattaaagtaatagatttaaacattgtatatattctttaataaatatattttatagtgatattgcttttaaaaactgtaacacaagcatttatcttgttgctattctgatagttcagaattgcttctacaatgacttccttttcatctgtgtatttagctatttagatggctttctattattcactagtataaaaawtactaaaataaattcttcattcgcactacgtgtagtcttttagtatgtaatcaatataagtataattatattgaacccaattccattaaatatcgtatttgattttaccttggattcatggtgttacctataattttcctcacaatgacgaagaatgtcatttgcaaagacaaagaatattaacaatgaaatagaaaat

SEQ ID NO: 212660 - DNA, 277 bp, Homo sapiens
gcaacccatggataagaagatccctttgtgagccctatcagcagggccttgggtcccaagcacagagctgtgtagattctcagtggctgctcagctggaggctgcccaagactaccaagttcctggggcaaaggggtggctgccatcagtgcagcttcagycagctgttttcccctgccagtgccagggagactggacagtttggacccaggagaaattccccacagtgcaccacagcagctgtggcagatcgtggccagactgcctctttacgcca

SEQ ID NO: 212661 - DNA, 554 bp, Homo sapiens
ttttgtagcacatagaaaaatacattttctgattcctgaattctttcatatgtaatccttggtatatacacacacacatgcacacatacacatatgtatatacacaatgtattatacccatatacaaatttattaaccaaaattttttgtctgagttatttcaaatattaaaaaaaaattttctaatgatatcatcatctaaaatcactaaagacaatttgctataacaaaaagtaaaatccactgttcagaaaccttacattaaatcaaagctgctmtcatgtattatgaatatattggatgttcaggagcataataaaaatagatatgataaatggcatcaaaaattgacataactatttaattttgtttatatttagatatatgaagatgtagacatttggatataataagtaggtatatgtactatatctacttttatatatgcatatgcactatatatacatactgtatatacaatatagacatatagatatagagatttgcaagtatatagatgtagtatacatatgtgtgtgtgtatgtatacgtat

SEQ ID NO: 212662 - DNA, 599 bp, Homo sapiens
tgcaatcttttgatttagtctttaaataatagtcattaatctcctctatgctgatgtgatttagaaggcagtgtgttcatttttcccacctagcatttagattaatgccattctggcatttctttgtgcagggtaattcaagggacagccataccgcagagatggttattttatattgctctgtccagattactttatctacttgtaggtactagagtccaatcattcctgcttagaaaaattgaggaaggggcaagatttattttytcaagtatttttctaagaatctaatacacatacataaaacactgcactaaatgttggtaatacgaatatacatacaatcatgtccctcctcttaacttgttcactgtttactataaaatatataaagtaaactgattgtcctaaagaatgtgaagagtcctatgaaaacaacagtaagtctattttatgtataataggttttcaagattttgtaatttcttccaacaccctggaaaattagtgcaattttcatgcccaatagaaaatcttgaaaaaaaaaaatggcaccatttcctcttccctgggcaacagatctgaaaaaaaaaaaaaaa

SEQ ID NO: 212663 - DNA, 599 bp, Homo sapiens
tgcaatcttttgatttagtctttaaataatagtcattaatctcctctatgctgatgtgatttagaaggcagtgtgttcatttttcccacctagcatttagattaatgccattctggcatttctttgtgcagggtaattcaagggacagccataccgcagagatggttattttatattgctctgtccagattactttatctacttgtaggtactagagtccaatcattcctgcttagaaaaattgaggaaggggcaagatttattttctcaagtatttttytaagaatctaatacacatacataaaacactgcactaaatgttggtaatacgaatatacatacaatcatgtccctcctcttaacttgttcactgtttactataaaatatataaagtaaactgattgtcctaaagaatgtgaagagtcctatgaaaacaacagtaagtctattttatgtataataggttttcaagattttgtaatttcttccaacaccctggaaaattagtgcaattttcatgcccaatagaaaatcttgaaaaaaaaaaatggcaccatttcctcttccctgggcaacagatctgaaaaaaaaaaaaaaa

SEQ ID NO: 212664 - DNA, 599 bp, Homo sapiens
tgcaatcttttgatttagtctttaaataatagtcattaatctcctctatgctgatgtgatttagaaggcagtgtgttcatttttcccacctagcatttagattaatgccattctggcatttctttgtgcagggtaattcaagggacagccataccgcagagatggttattttatattgctctgtccagattactttatctacttgtaggtactagagtccaatcattcctgcttagaaaaattgaggaaggggcaagatttattttctcaagtatttttctaagaatytaatacacatacataaaacactgcactaaatgttggtaatacgaatatacatacaatcatgtccctcctcttaacttgttcactgtttactataaaatatataaagtaaactgattgtcctaaagaatgtgaagagtcctatgaaaacaacagtaagtctattttatgtataataggttttcaagattttgtaatttcttccaacaccctggaaaattagtgcaattttcatgcccaatagaaaatcttgaaaaaaaaaaatggcaccatttcctcttccctgggcaacagatctgaaaaaaaaaaaaaaa

SEQ ID NO: 212665 - DNA, 416 bp, Homo sapiens
tggctagaggttcttaaactgcaaatcccaaagccctagagcttccataacaagcctggtatggccaaggagcagctcatgatggaagtaagattggggcaccatatagggcggcaggcttcakttccccctccgtgattcaaacagagcagctctgttttatctgtttctatgttgggatcccatgcacgatttcatttgcaaaaagaatttattactaaaacaaacaaacagaaaatctttgaaaactactaggattagaattaggaaacgttggggggtggtaagagtgattaatttcttcatttcacagaagaggagagtggcttttagaagaccaataacaaagcaatggcagggctgggactggaaccttgagaaccccgaaaccctgacttgtgttccagtgctttcta

SEQ ID NO: 212666 - DNA, 366 bp, Homo sapiens
ctcttctcagcatatcacatcagaaggcaaccacactgaccgtatccccacttgatcacctggtccagttggtacttgccagatctccccatcattctttgagcatttctttatattctggtacaaaaaagatgctccaggatcatcttatactgtccctgtccagccttggaatcagccacttctccaagcagctctggttcctgtccgtgtagaatgattttagaaatcaagatctgggtgcttagcatgcttattgttcctgtgatgtcaatgctttgagacccagtcaacacagagmtaggaaatatgtacatataagtccacacaaacacacacttattattatttccatatctgggtatg

SEQ ID NO: 212667 - DNA, 584 bp, Homo sapiens
ctccacttaacaaaatcactaaaaaagtatcttcttatcaaaatggcctaatgttcccctcaacttgactaaacttgtagaaagttccttcctgactataagaccctgaccgctcttttcttacagctctcactttagaaaacttgcaattgtaaattcttcctctgcccctttgagatgtaaatcttctacaaccaaggagtatctttctcaaggacatggaaggcatccctttgaaatataaacatcaagaaaaacagcagccctatcttccagtctccgtgagaagatagaagcctaacttcaataagaaccaattagcaaacagagatggcctaagcacacaaaccaacttccgggctaatgtcctctaggacttttccagtagctcayctcagcaagcacaaacactccaaccttttgttttggagtagttgagttcaatttttgtcctctgttgtaacagtcttgacccctttgcaatggtcttaaataaagcctttcttgcctttttaatgtgtccagtgtgatttttctttgacacttgcttctaaagtagggactttgccacttgatccaaagcc

SEQ ID NO: 212668 - DNA, 583 bp, Homo sapiens
aagaattagccatgtttaaggtaccttcctatcccatacacttctctctgccctgtacttaaggcaactccactgataggaaacacatgttcccaacttcacttaaaatatccaaccccatggaaatgtccttacctgccagttattacgccctttgaagagtagtttgaactaagaaacacagaaactatattcaggragagtggtacttggaagtctatgtccagtcagaagtggtgaggtcatttccctaaacagagaaacttggtcttcaaagagaagcagaagctcagagaaaagacatggtaaaaagaatatgtggcctgagagagagaaagagaaatggagagaatagctatctcactcacaactcaccaccctgtttccagtgccagctcccataaagccaacctacacttcacatttatgacatgctcataatccctttaatcaacaacctatgtgtgagaagtgaatacatttctttccttacaactcaataactttgactataaaatgcagtttcttttctgattctttttaggacatttgcaaaacttccaatataaagctatgcaaataa

SEQ ID NO: 212669 - DNA, 642 bp, Homo sapiens
gggaggccttaggagacttataatcatggcggatgaccgatggcacaggggaagcaaggcgtgtcttacatggcagcaggcgagagagtgcatgtgaaggaggacctgycaaacacttgtaaaaccatcagatctcatgagaactcacttactatcatgagaacatcatggggggaaactgcccccatgatccaatcacctcccaccaaatccctccctcgacacagggggattgtggggattacaatttgagatgagatttgggtgaggacacagagccagaccatatcatccccagagatttaaaaaaagcattggttgtcttgcagtataaaatgtctacacattctattttccttcaccttgtattttcaatacgcaaaagtggagtgaagcaaatttgaatgtgtttagtaacttcatgatgaataacagtcagagatatcactcacgtaaacctcttcctaattatgattcagcaacagccccctgccaccccataaagacactgatagaatgtcctcaggttgaagaaggggttgagggagtggggggaccaagggaacaaagatagcttcacaaaacccagagagcttgcctcttgttgctcttaattaaggatacaaagcaaacaaacaagca

SEQ ID NO: 212670 - DNA, 446 bp, Homo sapiens
cacattttctaagatgaagataatatttttattgtggtttacattggtaaagcaagtgctataagccatagttaaggatatgttatatataataatttatcacatttaagccaaaattgtatgcctatttagttacgccaaattattttttwaaaaaacagaatatatacatatttttaagtatattcataatgttagatcatttaaattgcatgtgtatctattagacataatttaaattttaactccacatgaagtatacttttaaaatataaacacctttaattcaatttctattgcttctaacaagctgaatgcaccagaatattgtcaaacaaaagctccccattcaaattaaaatttgcctacacaaatagaaagcatatgatagttaagacaaaaaattcttaacaggaaataacttttacctagcaacagtttcacaa

SEQ ID NO: 212671 - DNA, 446 bp, Homo sapiens
cacattttctaagatgaagataatatttttattgtggtttacattggtaaagcaagtgctataagccatagttaaggatatgttatatataataatttatcacatttaagccaaaattgtatgcctatttagttacgccaaattatttttttaaaaaacagaatatatacatatttttaagtatattcataatgttagatcatttaaattgcatgtgtatctattagacataatttaaattttaactccacatgaagtatacttttaaaatataaacacctttaattcaatttctattgcttctaacaagctgaatgcaccagaatattgtcaaacaaaagctccccattcaaattaaaatttgcctacacaaatagaaagcatatgatagttaagwcaaaaaattcttaacaggaaataacttttacctagcaacagtttcacaa

SEQ ID NO: 212672 - DNA, 634 bp, Homo sapiens
cccaattgtacctaggaagtaactcacttgttttttattttataggctcataggcagaagggacttgccttgtctcagatgacactttggactgtggacttttgagttaatgctgaaatgagtgaagactttgggggactgttgggagggcatgattggttttgaaatgtraggatatgagatttgggaggggccaggggcagaatgatatggtttggctgtgtccccacccaaatctcatcttgaattcccacgtgttgtgggagggacctggtgggaggtaactgaatcctggggacaggtctttcccatgctgttctcctgatattaaataagtcttatgagatctgatggttttgaaaaatgggagtctccctgcacaagttatctctttgcctgctgtcatccatgtaagatgtgacttgttcttccttgccttttgccatgattgtgaggcttccccagccacttggaattgtatgtccagtgaaacttctttcttttgtaattgcccagtcttgggtatgtctttattagcagtgtaaaaacagactaatacagtaaattctcaggtatgtctttgtcagcagcatgaaaatggactaatattctagtaaatttcatttttaaaata

SEQ ID NO: 212673 - DNA, 572 bp, Homo sapiens
atcattagcatttttatccataaagcattttacaattaaggttatacattgttattaggttggtgcaaaagtaattccggtttttatcattacttttaatggtgccaacctataatattttagacataatactattgcacatttaataaactacactatggtgtaaacataactgcattgtgctgttcgctttattgcagtggtctggaactgaacctgcagtatctytgaagtatgcctgttgtaatgatttatactgtccctagcaatgtttgagagtttttaattgctccacattctccttctcattagtcattttagtatcaaccattctggtagggatatagtggtaactcattttagttttcatttatatttgcctaatgactaatgatgttgagtactgttttttaatgcttattggccatttggatattctgtatatgacatgcctgttcaaatttttggcacccctttttcccccatggagctgattgtctttaaaaaaaaatgatttgaactttttacatattctggataaaatctgtgaatacatactgtgaatatgccag

SEQ ID NO: 212674 - DNA, 563 bp, Homo sapiens
tgactagctggactaatatcacagttccacctacatgggataaaagcctagaagtaggtaggagasggctgaggggaggaagagctgtatccaccatgggtttttttttggggctcaactagacattaagactcgcaagacctggacagatcatacctggcatcagagtttcttagaaggatggagagagatgctcagcatgccagcagggccatgtcagcagttcccttccacaggagcagtccttacatcagtactcctgagggccaccttgattcagaagcccatgccccataggagtcaatgtgttttcaacaacccacaatcagagttcccagggtccctcaagggacatgcccagttatgagtttctgcacttagggaagcctaaggccatggtttcttaccagatggtatagcttattctttgtccttccagcccaggtgtagcttatcaatcagaggtcaaaaactcccatgggcagtttggcctaatactgtacctgacattcagctaactggcttgtctggcttccatgggagcagagctagaaagttagccc

SEQ ID NO: 212675 - DNA, 556 bp, Homo sapiens
gtttgctggtgagacccaaactgaccctgccattgcagacatgccggggggcggccccacctcctcccctcaattctaaccatcgaaattacacaccctgtcttttctgccctgcaatgttcatggcaggagggaaagagaaatggagttaccttcactgtgtggttctacagctactctctttctccttccttgtcaagcccctacctctcamcccttcaccaatacccctccttaattcctcagagaagatgcccatgggcttaacagtcccatccacccacagttgcggagaaggagcagtgaaaacaggggggtagctagagaaatagacacacaggttttgttgaagacacctctgagttctgcttctgcccttctgagctgcgttacaataggcaagtcacacaacctctctgccctgtttcctcagctataaaatggggagaaagagatatcttctccctccaggagttggcacaataaataaatgagtcaaagtatgtaaaaggcccactacatggttgggtatatttacatgagtggtgggatccgg

SEQ ID NO: 212676 - DNA, 476 bp, Homo sapiens
ttcaagcttcaaaggaaggttgactcatttgttatgggctaagacagctggtgattttaagtggatgccagtgctgctttaccgttccaaaaatcctagggcccttaagaattatgctaagtctactcttcttgtgctctataaatggaacaaaaaagtctgtttgacagcacatctgtttacagcgtggtttactgaatatttgaagcccactgttgagacctactgctcaggaaaaaaagattctttcaaaatgttactgcttaatgacaatgtatctagtcatccaagagctctgatggagakgtacaaggagatgaatgttgttttcatgcctactgacacagcatccatttctgcagcccatggatcaaggaatgatttctacttttatgtcctgttatttaagaaatgcatttcataaggctgtaactgccattacatagtgattcctttgatggatctgggaaaagtaa

SEQ ID NO: 212677 - DNA, 606 bp, Homo sapiens
atttccttttttttaaggctgactcatattctattgtagtatgtcccatgttttgtttatccattcatcagttgatgaaatttgggttgcttctacattttgtctattgcgaatagtgctgctgtgaacatcagtgtacaaatatctcttcaagaccccgatttcagttctttttggatatacatccagaaatggttgctgaattatatgataattctatttcaattttctgagaaattgccatattgttatctataatggctacaccatttttacattcctaccacctgagtccarggttcccatttgtctacagccttgccaacacttgttattttctgtttatgtgatagcggccatcctgaatataaagtgatgtttcattatggtttccctttgcatttgccttatgattaacgatgttgagtactttttcatgtgcttgttggcaagtgatgttcttttaaatgtgtactatgttctttatggtcaaaataaataatttattctgtgtaattttccaaaccacacaacttcttggaaggcatgtttaagtgttcacataataaaacagtacatttcttccttgcaaacagccctacacca

SEQ ID NO: 212678 - DNA, 482 bp, Homo sapiens
ggggctgaggcaggaggatcacttgaggccaggaatttcagatgaacctgggcaacaacatgagactttgtctctaccaaaaataaattttaaaagtgtctgggcatggtggcacacacctgtagtcccagctctctggggggctgaggcgggaggatcacttgagcccaggagttcgagactgcagtgagccatgatcataccactgctctccagcctaggtgacacagcaagaccctgtctcttaaagtaataataataataattttttaaaaagtcaatgtactttgagggtgagatagttccttcccaggaaaaggatgtggggaggacatacagatamatttagtcttcaaatgagtcaaagcacaagctttggaaccaggtcactgagattatgggaagagaagagtgggcaacttgaatttgaagcaacagagtctaagtaaaagggggtaaatggataaaaaaacaaaaatcat

SEQ ID NO: 212679 - DNA, 613 bp, Homo sapiens
tttaaagagactagagagggagtcttggttggctccccctgctccacagcatagtagaagcaaaactgcctccaagaaccctcatttccaaaccagagctagcctgagcgtttcctctcctcagagccccrgaagaggtccaaagggcaaggctagagcagggacaggggctagagggatctcaggaagtacaggaggagctgggggcagaaacatctctgctcccttctctgcacaggcagcagcctgcctggtcacctgggtccccagcccaaggacggctctgtaataaacacttttgaaatattctggcctgtgtcctagagttcactcaaacgcgcagaaacctgtctgcttcccctgtggcactcgggcattcaccaaatctgcctcccatccacttccccctagagtaaggcttagttttattttccaaccctgggctgtgaattggtcctccaaagtctagtaactggctcacgtatcaccctgtggctctggctagcctgctaaacctgagttttgaattgacctttaattgctctaaatgtgctaccccaccccaccccatcctgggaagattcgggcaatgatatagatcaaggcttagatc

SEQ ID NO: 212680 - DNA, 536 bp, Homo sapiens
ctgcaggtagtggtggacagtctatattctcctgccctcccaggcatccctgcaacatggcattcatttgcttgtgctctcattcattcaatgaatataatgaaattaactgcatccggccctgggaratatgatattgaacaagacatagatcctgccctctaggagccttttttttttttctttttttttttctgacaggatctcactctgttgcccaggctggagttcagaggcgcgtgcagtcatggctcactgcagcctcgaaagactcaagctattctcatacctcggcctcccgagtagctgggactacagatgtgcatcactatgtctgataaaaatttgtttgtattttttgtagatggggtttcgccatgttgcccaggatgatcttgaactcccaggctcctcctaccttggcctcccaaagtgctgagattacaggtgtgagccaccttgcctggcctcagaagtttatagtctagagaagagacctggcaagcaaacagccctttccaaacaagcgtgagggg

SEQ ID NO: 212681 - DNA, 525 bp, Homo sapiens
gtttgtctttgtatagtctgcaggtgcggatcctgactcctgtgagaattagctcaccatgacaaagctgcctttgcttttatcactttggaaaacaaaaaggggaacgtgttgggaacaggcccccaaatctggccataaactggccccaaaactggccataaacaaaatctctgcagtactgtgacatgttcatgatggccatgatgcccamactgaaggttgtgggtttatcagaataagggcaaggaacacctggcccacccagggtggaaaaccgcttaaagcattcctaagccacaaataatagtatgagctatctgtgctttaaggacatgttcctgctgcagataactagccagagcccatccctttgtttcggcccatccctttgtttcctgtaaggaatacttttagtttatctataatctatagaaacaatgcttatcactggcttgctgtcaataaatatgtgggtcaaactccgttcagggctctcagctctgaagtctgtgagtcccctga

SEQ ID NO: 212682 - DNA, 525 bp, Homo sapiens
gtttgtctttgtatagtctgcaggtgcggatcctgactcctgtgagaattagctcaccatgacaaagctgcctttgcttttatcactttggaaaacaaaaaggggaacgtgttgggaacaggcccccaaatctggccataaactggccccaaaactggccataaacaaaatctctgcagtactgtgacatgttcatgatggccatgatgcccaaactgaaggttgtgggtttaycagaataagggcaaggaacacctggcccacccagggtggaaaaccgcttaaagcattcctaagccacaaataatagtatgagctatctgtgctttaaggacatgttcctgctgcagataactagccagagcccatccctttgtttcggcccatccctttgtttcctgtaaggaatacttttagtttatctataatctatagaaacaatgcttatcactggcttgctgtcaataaatatgtgggtcaaactccgttcagggctctcagctctgaagtctgtgagtcccctga

SEQ ID NO: 212683 - DNA, 601 bp, Homo sapiens
aattatccctcagttactccctcgttgctgctgtggccatggctttcactataccactgttgggtccctgggctctttcatttcctgcctaccccagaaaatctccttggcrtgagtaacccttacccaagaccaaagaaggttatctttccagaagaagataactcactcccttccactgggagaggagtactgcagtacaggtaagaggcagcctgtgtgcactggtccatttgcggagtttccacttgctagatttcttgcagggagctgtttgtctcgagctgtcttcctagtattttctgctcctggcttacctcttggagctgcctatccatgcactcatggaagagatgtgcattttcatgtttgagcctgagcacaacagatgagcaagtacatctatttctgaaagaatcataatcctctaagggtgatgtggtaaagtctgctcattgtcccccatcacccgttctttccctcttccttttaataaatgacccttctgagtttcacgacatagtcaactagtcagctaaagactgcatttctgggagctaaacaatgggtacatgcaggcatacggtgtggaataatagac

SEQ ID NO: 212684 - DNA, 475 bp, Homo sapiens
ctataacctgatttaccactataacctgtttttgcttatactctgatcccctattctttctgtaacttcaagatggcatctaaactatttttttttgcctgttcagctgtgmttttatatctatatacatatatacagatatatatttataaatatatctatatagacatccatcttatatatgcttttatatagaagcttatatataaatgttaatatatttagaagcttatatataaatatttatatataattttctctatatataatatatatttacatatttgtatattttgtgtgtgtgtgtgtgtgtgtatgtgtgtataaacttctgtaccccattgcgaggttgggcaatcactctgattctccctgtgtacacattcatacatttgtgtgccatttctcttgttaatctaccttttttgagttgattttttttccatgaaactacagagggcaaaggggaagtttt

SEQ ID NO: 212685 - DNA, 534 bp, Homo sapiens
gtaaagctgagctaaacattttatttatagaaaagtttcatttgaaacacatgcagtcagtgaccttcattcaacatgtttaatacacttttgcctgactcacctctgagcagaaggtgccatatatttataatgactcttccatgtacagaagaagttcaactgaaatataccagcaaaattatttttgttttgttatgttgttgttcatattgacataaacgtgctctttaaaaggtaaaacttaagagggggaatatataactatgcatattataacagaagaaaaagtggaacatgtccccctgtaattaagcataagcttattcatgccaaatmttcaccatgaaatcaccttcattataattattgatctttttggctgattataaccattattccagttatctcatgataaagaagatagtgtttgaaggccactgactattagcgtgtattttaaagcagattttccaaaatactgatatatttattacattaagaaacttgcagaaagtgcaaaattccttagat

SEQ ID NO: 212686 - DNA, 453 bp, Homo sapiens
gcttcattgatgataaaaacacaaacattaaataaaaaacttctatttcaaaaaacagagttcatttgtttgttttacttctagaggctctacttattttaaaattacacatttaaagtcatttattaggtccttacttaatttgagataattagcacatataatttttctcatccatttctaactcacttcttttctttattatcaagtttacagtgttaaagtgtgtagcattaaattaacattttaaaaccataattcctcatattcttcactttgtatactcatatacagatgaattgacwtattaacactttcctcttgtggcttctccatcagttagaactttgttttgatacatctttcagttctcagtatgttatcatcaaatatttctttccctccaagtgtgactcatgggtactgtttttccagaattcttattgatcttag

SEQ ID NO: 212687 - DNA, 520 bp, Homo sapiens
aaataataatatctactccaaaagttattaataattcactcacatattcctttactccaattatttagatcaacctgttgatacattcaaatccatgatgtggcattaaatttcctgttactgtagatagttcttctatacaatctattctgggttgtcctgtgtgcccactgcacagatgtcctcctggaatcttcagtctcatttattcgtataagtactgagcgctaaccgattgcataactgcagccacttcagtaccaattatactattcattttatttaaccaggttggtagtttccttgtggagtgtccattgcctgtattatgataacttttcttatgggctaatcaaattttgagataaatttccaatttcttaactgtttttgaaatgatactctattctaattaagagaytttttaaaaaaaatttaacaccatccagagaatatatctttcattttctgtcagtgtgtaggagaaacagaagaatcatgtatttgagcttgtaactcc

SEQ ID NO: 212688 - DNA, 585 bp, Homo sapiens
tctttcactataatttggggtgtggggagggggaccagatgaccaacatgacaaatgaaatagctagtaagttaggtagagatacttgctaaggagaaaaataaataaataaataaataaataaaggaggaaaaagaacaggaaatggtgtgggtggatttcagttatacaaaggatggtcagaaaaagtttcactcatcaaggtgacatttgaaaactacagaaagtgaggagtggtccagaaacactccaatcacaaagacccagaagttaagaatgtgctggttatttttaaggaatagcaaagtaaacagaaacagaaagaaatttgagggagagaaaaatcagagatgaagttagaaagttaacaaatgagagggagaaggttgatattgttaggctttgctttttttcttttttctgagtaaaattggaaaacagtgtaagactgaatttatagcataatcttgcaatgttgtgtacaaatctagttcaggccatgatggcaagtggggagtaggacagrcctcactgtaccctcctcctattggaattcaggcacaactgaccagcattaacattaaa

SEQ ID NO: 212689 - DNA, 555 bp, Homo sapiens
attattgttcttataacttcgtgttgaactcagtgctagagtcacttcataattagtattcttttaattgaagcttcaagtaagyatattaataatctacctcctttagagttcttcactgtattttatcttgagaaatgttatggttggttgcctttcttccacgattacagattatgtatgtctgactagatggagtcactagggtggcttgtgagaagtaatcattctacccagattcaaatcatttctcttcacttgcctggacctccgtttataacctactaaagaagaatatcagcctatattttatatatatatatatatatatatatatatatatatatatatgttttttctttttacaatattaaaacttatattttagacaaatatctatttgcttcactcacatttttcacttaaatatcctaaatatctctccccaaaaataggagatctcaatgaaatttttatatccctaaaagtgacttaaaacccctcatgtataaaaaaattcaaaattgtcactatttattaaaagagactccaatt

SEQ ID NO: 212690 - DNA, 438 bp, Homo sapiens
tttaaatttttttgagtttctgatctcagtattacagttaagtagaaattatgctgttaggttattatgtataggtaatgtgtgataattaaattcttttttgagaaaacttatttttgtatgagtctcccagcatctatcaatgatgtaatatcaagttaaaagggaaaagagaagtgctgcttcacttttgagaaagaagctacaacttccttctctcttgcactaaatacttgtcccctgaaagtgttattgacacttacttatacttatctgtacctcaatttcctgaattataaaatgggattttagaactaaaatattraatatactaatattaaaaggctcaaaataatttttcttatttttcttgccttagagtttatattaagactgttgatttgattctgttagtgttttttttccaattctgaaaat

SEQ ID NO: 212691 - DNA, 438 bp, Homo sapiens
tttaaatttttttgagtttctgatctcagtattacagttaagtagaaattatgctgttaggttattatgtataggtaatgtgtgataattaaattcttttttgagaaaacttatttttgtatgagtctcccagcatctatcaatgatgtaatatcaagttaaaagggaaaagagaagtgctgcttcacttttgagaaagaagctacaacttccttctctcttgcactaaatacttgtcccctgaaagtgttattgacacttacttatacttatctgtacctcaatttcctgaattataaaatgggattttagaactaaaatattgaatatactaatattaaaaggctcaaaataatttttcttatttttcttgccttagagtttatattaagactgttgatttgattytgttagtgttttttttccaattctgaaaat

SEQ ID NO: 212692 - DNA, 584 bp, Homo sapiens
acaaaaaactcctgtgtagaacataattttcctgatcagcatctggcatctgttgtgaatgtatactcaaattattcaggtattaaaattgtcatgatcatattaataagtgtagtttttttcaaaaaatctaacacccatttaagatataaagctctcagctgacttaatttgatagaagaacaaatgaaagctctcagcagaacttcttcagtttgataaaagaacaaatgaacaaatgaaaacctacaaaaaatctacagctaacattatccttaatcataaaaatttgaactctttcttcattagattgggaataaggtaagaatgtcttctctcacagcttctartcaaaattgtactggaagttttagcgagtgcaatggggtaaaaaagaaaaagaaaaaatgtacatgaagtagaattgtatttctttttaaaaaaactgacatcactgcttatgtataaattcccaaagaatcagaaaagacaaacacacaaacaaaaaatttctgtaaataataagtaattatagtaaaagtatagaatacaaggttgctacagaaaagtcaattgcttttctg

SEQ ID NO: 212693 - DNA, 435 bp, Homo sapiens
ataacacagctttgtctataaggatgaacaaatacagtaaaagcctgtatagccaacctgcactaaatgactatacatttaaccagtgctccctatgtcctcagggaaacatactggctgataccaggcatgctcagtgctcctggctcgcagcctcctcccttgtaagcctgtaggcttctactcccagcaattgcatggttcgcttaccaacaggcaattgatagaaaagttgtgccacttgtatttgttattataatcatatttamttaaatatgttgtctgatgaatgtgacaataaaaatagttacattaaaaaataggttgaatccttttaaagaatcaatacagatatgttgctaagataatctgctcttaaactgtatatgacaagtgttaatggcagggaaaaatagtaaaaatacaccaggattc

SEQ ID NO: 212694 - DNA, 435 bp, Homo sapiens
ataacacagctttgtctataaggatgaacaaatacagtaaaagcctgtatagccaacctgcactaaatgactatacatttaaccagtgctccctatgtcctcagggaaacatactggctgataccaggcatgctcagtgctcctggctcgcagcctcctcccttgtaagcctgtaggcttctactcccagcaattgcatggttcgcttaccaacaggcaattgatagaaaagttgtgccacttgtatttgttattataatcatatttacttaaatatgttgtctgatgaatgtgacaataaaaatagttacattaaaaawtaggttgaatccttttaaagaatcaatacagatatgttgctaagataatctgctcttaaactgtatatgacaagtgttaatggcagggaaaaatagtaaaaatacaccaggattc

SEQ ID NO: 212695 - DNA, 454 bp, Homo sapiens
gtttcccctgggattcttgtctttaataaacccgagacaaaatgaatcacaatggtgttttctctagatgtaaaacaaagtatgcagtgccttcatcagctgtgtagagtattgggctgaaagtattccaatttagtgtgtctgccactacacacacacacacacacacactcatttggtatgacccaaggattacattattctgaatcactgcagttttttgacatrgcttcattcttcaatcaaaaatattgatgaacaaagccctgggccaggtgctggattcccttgaaatgtaggagtctgggaactaggatttggcattcacgggtgtcctaatgagcctggagcagcacattctttccaatatgtgtgctttggctatatgtaccagcgatagcctctatgaggtggggatgggacgggaaccccaggttagctaaatactgacttg

SEQ ID NO: 212696 - DNA, 565 bp, Homo sapiens
ttatttcacagatatttgctaagggctgggtgtgcggaaaaaaaaaaaaaaggtatggcctctgcttccaaggagcttgagaggaagggaaagtaatacaaattcttgaacatcttttaactgctagccttttacatccacgactcattcagctgttgcaatacctctgaggtgagtgttactcttatccttgtcttaggatgaggaaaggggcccagccatctgtctcaaatcatactgctgtcgtgtacaagccgtgagctaarcccaaagtccatggccttcccaccttatgctgtaggtacacttcaaaagctgtcatgtcttctgtttgaataccacccctgccccttcacagccgcaagatcttgggaaaaatgtcttcatctctgtgagcctcagtttccttatctttaaaatatagataatagtatttacctcaaaagggtatgcatgaagcatatatgaaagttcttggcacatagtagccaggaactaaatattgttagtttccttttttggtgaaccagtgtatggcaagagaatttgtgatgtgattttggtg

SEQ ID NO: 212697 - DNA, 565 bp, Homo sapiens
ttatttcacagatatttgctaagggctgggtgtgcggaaaaaaaaaaaaaaggtatggcctctgcttccaaggagcttgagaggaagggaaagtaatacaaattcttgaacatcttttaactgctagccttttacatccacgactcattcagctgttgcaatacctctgaggtgagtgttactcttatccttgtcttaggatgaggaaaggggcccagccatctgtctcaaatcatactgctgtcgtgtacaagccgtgagctaagcccaaagtccatggccttcccaccttatgctgtaggtacacttcaaaagctgtcatgtcttctgtttgaataccacccctgccccttcacagcygcaagatcttgggaaaaatgtcttcatctctgtgagcctcagtttccttatctttaaaatatagataatagtatttacctcaaaagggtatgcatgaagcatatatgaaagttcttggcacatagtagccaggaactaaatattgttagtttccttttttggtgaaccagtgtatggcaagagaatttgtgatgtgattttggtg

SEQ ID NO: 212698 - DNA, 442 bp, Homo sapiens
ttccgttgtttggagtttagacactggctgtaagacgtttttcttttctcctaagcaggacccgtatttgtttacctccaacgtagactaaatgcctgtgggctggtagctataagacgacccctcggccccacaacctctaagttcacttcacctccgcggctttgcaaaagcgctacacgcacgcgcaagaagcaagaggactgcaaccgaagaagcaaagggagagccgtgcaccacgatgattctgcgcatgtgccyggcgggaggaggggggagggttggagtttgcgcatgcgtaaaaatgtcgggaaagcaagagaaggggggttaagaggcggtattgacagctgtggaggcagcccgcgttcccggcattccctggggcggcggggttggctctaacgaatttgaatgaggagcctcagcgctttcggcgcca

SEQ ID NO: 212699 - DNA, 559 bp, Homo sapiens
agagaggattatgtaactcatgttttagttaggggaggtaacagtaattaatatgttatctgttaaattacataaacttttttttaaaaacctctagcattagtcaacaacaaaaaaaaagtaacctcaatttatggctgaatatgcttgacttcacaatgccaagaaaggttgtgggctcatttattttttcrgataactagacacatactatgacaaagctttttttagtaatattaccagggaactaatattctgaatttactgtgattggcacaggaaaatattaagagtgagagtgatcaggagtgattttaatgaaggtgaccagaaagcaactatatgattaccttttaaatagaatgctattgcaaatgtcaaactttaaacgggacatttggctttatacactaaaaaaaaaaaaaaaaaaaaaaaaaaaggcgttagtagtttcccaccaagaccgctacaaataaattcagaacatttatagaaatccaacattcacacttccctgtaactctaacctattgaaattagatgtaaaaggaagaaaaaa

SEQ ID NO: 212700 - DNA, 574 bp, Homo sapiens
ttcctgtgtagatattatgtaaatttatttatattcctagttaagactttggtttcttgctttttaaaatttaggaacacatgtagaattttaagtaactatctctttaattctcttttttaaattgcttttcttgtatctatttaaggtatatttatggtagaaaatatatacattgcagaataattaaatcaagctaattaacatacacattacctcatttttttgttgttagaacatttaaaatatattctcttagcaattttcaagtatataatatgttgtcattgactatagtmaacatgatgtgcaactgacatcttgcacattaacttcttcctcccgtctaactgaaattttgtatttttcaactgacatctcttcaatccccctacctcagtctccggtaaccaccattttactctctcattctatgagtttgacatttttagattccacatatcagcaagatcataaagtctctcagtgcctggcttattgcacttaacataatgtccttgagattcattgatgtcatcccaaatgacatgatttctgtttttatggctgaata

SEQ ID NO: 212701 - DNA, 574 bp, Homo sapiens
ttcctgtgtagatattatgtaaatttatttatattcctagttaagactttggtttcttgctttttaaaatttaggaacacatgtagaattttaagtaactatctctttaattctcttttttaaattgcttttcttgtatctatttaaggtatatttatggtagaaaatatatacattgcagaataattaaatcaagctaattaacatacacattacctcatttttttgttgttagaacatttaaaatatattctcttagcaattttcaagtatataatatgttgtcattgactatagtaaacatgatgtgcaactgacrtcttgcacattaacttcttcctcccgtctaactgaaattttgtatttttcaactgacatctcttcaatccccctacctcagtctccggtaaccaccattttactctctcattctatgagtttgacatttttagattccacatatcagcaagatcataaagtctctcagtgcctggcttattgcacttaacataatgtccttgagattcattgatgtcatcccaaatgacatgatttctgtttttatggctgaata

SEQ ID NO: 212702 - DNA, 562 bp, Homo sapiens
catcctttgcagtaacatggatggagttggaggccattattccaagtgaactaatgcaggaatagaacatcaaatactgtgtgttctcacttataagtgggtgtgaaatattgcatacacatgggyacagagaaggaaacaatagataccagggcctatttcagggtggagggtgacaggagggtgaaaaataaaaaaatacctattgggtactatacttattacctggatgatgaaattatctttacaccaaaccctcatgacttgcaaattaccaatgtaacaaacttggacatgtttctctgaaatgaaaataaaagttaaaaaaatttaaaaataaaatgtgttatatagttaaaaatatatatgagagtatgtccataggttatatgcaaacacaccacaccgttttttataaaggacttaagcatctactgattttggtatctaaggggactgtataggttgggggagggggtccagaaaccaacctccacagccaccgagtgaagactgtacatttatctgtgcttcaaaattatttattgctttcagttaagga

SEQ ID NO: 212703 - DNA, 562 bp, Homo sapiens
catcctttgcagtaacatggatggagttggaggccattattccaagtgaactaatgcaggaatagaacatcaaatactgtgtgttctcacttataagtgggtgtgaaatattgcatacacatgggcacagagaaggaaacaatagataccagggcctatttcagggtggagggtgacaggagggtgaaaaataaaaaaatacctattgggtactatacttattacctggatgatgaaattatctttacaccaaaccctcatgacttgcaaattaccaatgtaacaaacttggacatgtttctctgaaatgaaaataaaagttaaaaaaatttaaaaataaaatgtgttatatagttaaaaatatatatgagagtatgtccataggttatatgcaaacacaccacaccgytttttataaaggacttaagcatctactgattttggtatctaaggggactgtataggttgggggagggggtccagaaaccaacctccacagccaccgagtgaagactgtacatttatctgtgcttcaaaattatttattgctttcagttaagga

SEQ ID NO: 212704 - DNA, 521 bp, Homo sapiens
agggaagtattttattctcattttttaaatgaagaaactgagattcagaaggaatttatgagttgtctaagataagataactagtatcagaactggaactcaaattcctagcctagcctattaaagggtaccaacagaaaaggaggattggagatagaatgatagcagtgaagatacacaactatccagaaaaactgttaccaaccttaaatactttactcagaggtatcgagacatttatttatcttactstttgtaagtgtcattaaggactaatccttcagtccaaactttcactcagtccagaaatatttgttaaaatagccctgaaagatgatgtgtcatcttctgctgaagacttctatttttcttccacagacatagctgttatgtattgtcttttagttttgagacaaaactgcctcttacagttttaaaatatttatttaaagctctttaatcccaggacaatcattcacttactattatttttaattttctcatattataaaatacactca

SEQ ID NO: 212705 - DNA, 440 bp, Homo sapiens
ttggtaggaatgtggtaaaacaattaaaaattaagttaccatatgatccggtgatttcacttctgggaatataccacaaataattcaaagcagttacttgaacagatatttgcacaccaatgttcatggtaacatcattcacaatagcagaaaatggaaacattgtaaatgtcaattaatggaaggatrgatgaacaaattgtagtatgtttatacaatggaatattatacagccttgaaaagaaagaaaaaaatgcacaaatgttacagcatgatgaaacatgaagatattatgctatgtgaaatgaacaagacaccaaaggtgtaatcttacttatacaagttacctacaataacgaaattcgtagatacacagagtagaatggtggttgcaaggagctggggaaagggaaagtggagagttaatgtttattgtgtag

SEQ ID NO: 212706 - DNA, 460 bp, Homo sapiens
aagcattctgcagcctgaattttgaaggtaagtatgaacaatttatatataatttacttggaaagtagaacatacattaaatgaaaatattttttatggatgaacttctgtttttcctgtgttttaacactgtattttgcaaaactcctraattatttagctgctgtttctcttacaggagtgtgtttaggcactaagcaagctgatttatgataactgctttaaacttcaacaaccagtaagtcttcaagtggaatttattattgattcttttatgttaatttgttaggtcaaaagaaaaatctttagagcaaaataaaagttttgctctttattaggaggttctttagatattacacttttaattgggtagcttatttgcatgtattttgaaactatctaaagtaaatagtgtttcctttgtatgcttatctttagctaatgtgtttttttttttggt

SEQ ID NO: 212707 - DNA, 562 bp, Homo sapiens
tacaattaaattattattgaatacaatcactagattgtgctatcaaatactaggttttattcatttttttctaactcgtcttttgtaccyatgaaccatcctcatattccccccatccaccattaccctgccaagcctctggtaaccatccttctattctctctctgtgagtttaattgttttgatttttagatcacacaaagaagtgagaagatgcaatgtttgtcttcctatgcctggcttatttcatttatcataaggacttccggttccatccgtattgttgcaaatgacaggatctcattctttatggctgaatagtcctccattgtgtatctgtaccacattttctttattcattcatctgttgatgaacacttaggttgcttctaaatcttgtccattgtgaacattgctgcaataaacatgggagtgcaggtatctctttgatatactgatttcctttcttttgggtatatacccagcagtgggattgctggatcatacggtagctctatttttagttttttgacaaaactccaaactgtttttcatagtgatt

SEQ ID NO: 212708 - DNA, 562 bp, Homo sapiens
tacaattaaattattattgaatacaatcactagattgtgctatcaaatactaggttttattcatttttttctaactcgtcttttgtacccatgaaccatcctcatattccccccayccaccattaccctgccaagcctctggtaaccatccttctattctctctctgtgagtttaattgttttgatttttagatcacacaaagaagtgagaagatgcaatgtttgtcttcctatgcctggcttatttcatttatcataaggacttccggttccatccgtattgttgcaaatgacaggatctcattctttatggctgaatagtcctccattgtgtatctgtaccacattttctttattcattcatctgttgatgaacacttaggttgcttctaaatcttgtccattgtgaacattgctgcaataaacatgggagtgcaggtatctctttgatatactgatttcctttcttttgggtatatacccagcagtgggattgctggatcatacggtagctctatttttagttttttgacaaaactccaaactgtttttcatagtgatt

SEQ ID NO: 212709 - DNA, 562 bp, Homo sapiens
tacaattaaattattattgaatacaatcactagattgtgctatcaaatactaggttttattcatttttttctaactcgtcttttgtacccatgaaccatcctcatattccccccatccaccattaccctgccaagcctctggtaaccatccttctattctctctctgtgagtttaattgttttgatttttagatcacacaaagaagtgagaagatgcaatgtttgtcttcctatgcctggcttatttcatttatcataaggacttccggttccatccgtattgttgcaaatgacaggatctcattctttatggctgaatagtcctccattgtgtatctgtaccacattttctttattcattcatctgttgatgaacacttaggttgcttctaaatcttgtccattgtgaacaktgctgcaataaacatgggagtgcaggtatctctttgatatactgatttcctttcttttgggtatatacccagcagtgggattgctggatcatacggtagctctatttttagttttttgacaaaactccaaactgtttttcatagtgatt

SEQ ID NO: 212710 - DNA, 562 bp, Homo sapiens
tacaattaaattattattgaatacaatcactagattgtgctatcaaatactaggttttattcatttttttctaactcgtcttttgtacccatgaaccatcctcatattccccccatccaccattaccctgccaagcctctggtaaccatccttctattctctctctgtgagtttaattgttttgatttttagatcacacaaagaagtgagaagatgcaatgtttgtcttcctatgcctggcttatttcatttatcataaggacttccggttccatccgtattgttgcaaatgacaggatctcattctttatggctgaatagtcctccattgtgtatctgtaccacattttctttattcattcatctgttgatgaacacttaggttgcttctaaatcttgtccattgtgaacattgctgcaataaacatgggagtgcaggtatctctttgatatactgatttcctttcttttgggtatatacccagcagtgggattgctggatcatayggtagctctatttttagttttttgacaaaactccaaactgtttttcatagtgatt

SEQ ID NO: 212711 - DNA, 376 bp, Homo sapiens
ggagagcattggtctgttagaacctaaaggtttagttccagtctgaccccgaggagctttgcaacagtgaacaagccctyaagcctggaagagtctgtgattcttcatttgtaaaaagggaaaaaccttgttcacttcacagagctgatgtgagaatcaagtgagacagcatatataaaagtgccccgaaaactgtaaagggctataaaatataagatagtgtggtaaagaggtatttttatacagaatcaaaaggtttttttgtgtgtgtgtttgtttgttttcacctcattttacgttttaactactaagatcctttttttttttttaaatgttacattttacgggagttcatctaaaagggcagaaacaaacc

SEQ ID NO: 212712 - DNA, 573 bp, Homo sapiens
ccctccagggaccagcatgtcacagtaccattcctgctgacgcaccaccatccagacattatttactaactaggggactgcattctgtaggccagtcctacccatcatgatggaacttttttttttgagataagktctccctctgtcaaccaggctgagtgcagtagcgtgatctctgctcactgcagcctccgggctcaagagatcctccgcctctcagcctcccaagttgcttggactacagatgtgcaccaccatgtccacctaatttttgtattttttttgtagagaggaggcgttgtcatgttgcccaggctggtctcaaacttctgagctcaagtcatccgccctccttggcttcccaaagtcctgggattacaggtgtacgccactgggcccatgatgtaacttttgacaatgagttcccaacactaatttgattcctatagaagaggaatttaacggcatgacaagttatttctacgtatgtaagtgaatgaatctattacacatctctcaatgaaatggggggttctgtaaagcacttaaagatcctttgggaggtggagtact

SEQ ID NO: 212713 - DNA, 573 bp, Homo sapiens
ccctccagggaccagcatgtcacagtaccattcctgctgacgcaccaccatccagacattatttactaactaggggactgcattctgtaggccagtcctacccatcatgatggaacttttttttttgagataaggtctccctctgtcaaccaggctgagtgcagtagcgtgatctctgctcactgcagcctccgggctcaagagatcctccrcctctcagcctcccaagttgcttggactacagatgtgcaccaccatgtccacctaatttttgtattttttttgtagagaggaggcgttgtcatgttgcccaggctggtctcaaacttctgagctcaagtcatccgccctccttggcttcccaaagtcctgggattacaggtgtacgccactgggcccatgatgtaacttttgacaatgagttcccaacactaatttgattcctatagaagaggaatttaacggcatgacaagttatttctacgtatgtaagtgaatgaatctattacacatctctcaatgaaatggggggttctgtaaagcacttaaagatcctttgggaggtggagtact

SEQ ID NO: 212714 - DNA, 573 bp, Homo sapiens
ccctccagggaccagcatgtcacagtaccattcctgctgacgcaccaccatccagacattatttactaactaggggactgcattctgtaggccagtcctacccatcatgatggaacttttttttttgagataaggtctccctctgtcaaccaggctgagtgcagtagcgtgatctctgctcactgcagcctccgggctcaagagatcctccgcctctcagcctcccaagttgcttggactacagatgtgcaccaccatgtccacctaatttttgtattttttttgtagagaggaggcgttgtcatgttgcccaggctggtctcaaacttctgagctcaagtcatccgccctccttggcttcccaaagtcctgggattacaggtgtacgccactgggcccatgatgtaacttttgacaatgagttcccaacactaatttgattcctrtagaagaggaatttaacggcatgacaagttatttctacgtatgtaagtgaatgaatctattacacatctctcaatgaaatggggggttctgtaaagcacttaaagatcctttgggaggtggagtact

SEQ ID NO: 212715 - DNA, 620 bp, Homo sapiens
gttaattctaggtgtcaaattgactgggttaaggaatgcccagatagctggtaatacattatttctgggtatggttgtaagggtagacattagcatttgaatcagtcaactgagtaaaggaattccaccctcatcaatgtgagctgtcatcatcccatctgttgagggccctgacagaatgaaaaggcagagaatgggcaaattctccattcttgagctgggacatcattttctcctgaccttgtatatcagaactgctgattcttgggccttcaaactccaagacttacaccaatcccccaaaacccccaagttccagttctcaggccttacatgttgaactgggagttacaccatgggctcccctggttctccggcctttggaattgaactgaattatgccatcactttcctgtttctccaacttgcagatggtatatcatggggcttctcagcctccataactgcacaagccaattcacacaataaatttcctcctatatatatatctctctatatmctattggttctgtttctctggagaatcctgactgatacatactctcttagtgaatttcaagtgtacaatacaggattactaactacagttaccatgctgt

SEQ ID NO: 212716 - DNA, 601 bp, Homo sapiens
gttaaaaaccatgtttctgaactgctaaattaaaagaaaggttaaactatgtgagatgaatgcacacatcacaaagcagttcctcagaaagcttctttctagtttttatctgaagataatttctttttcaccataggcctcaatgtgctcccaaatatccattcacagattctacaaaaacagtgtttccaaacagctgaatgaaagaaaagtttaactctgtgagatgaatgcacacatcacaaagtggtttcccagatagcttctttctagtttgtatcctgggatattccctttttcaccattgtcctcaatgagctccaaaatattcattcgctgaatcgacaataacagcttttccaaactccgaatcaaaagaaaggttttaacactttgagatgaatgcacacctcacaaagcagtttctcagaaggcttctttctgtttttttttttttctgaatatattttcttgttcaccataggccttaatgaactcccaaatatcccttcgttgattgtacaaaaatartgtttctaaactgctgaatgaaaagaaagatttaactctgcaagaaaaaacacacctcacaaagtggttt

SEQ ID NO: 212717 - DNA, 540 bp, Homo sapiens
gaacacctgaggatgaaaattagaaggaatctgtctgagaaactgctatgtgatgtgtgcattcatctcgcagagttgaacctttctttttattcagcagtttggaaacactgtttttgtagaatctttgaagggatatttgggaacatgttgaggccagtggtgaaaaagaatatatcttcagataaaaagtagaaagaagctttctgaggaactgctttttggtgtatgcattcatctcacagagttaaacctttattttgattcagcaatttggaaacactgttttgtccattctgcaaatggacatttgggagctctttgaggccaataacaaaaaacrtatgtcaaaggacaaaaactggaagaaagtgatccgagaaactgcttggtgaggtttgcattcatctcaccgagttaaagctcactttcattcagcaatttggaaacactctttttgtagaatctgtgaagggatatttagaagtgccttgaaggctatggtgaaaaagaaaatatattcagataaaaagtagaatg

SEQ ID NO: 212718 - DNA, 392 bp, Homo sapiens
aagccatctgagaaacggatttgtgaggtgcacaaaaaaaaaaaaagctgagttaaacctttcttttcattcaggagtttggaaacccagtttgtgtagtatctgcaaagggatatttggtagcccatcgtgtcctttggtgaaaaagtaaatatcttcatataaaaacgagaaagaagctttctgagaaactgctttgtgatgtctgctttcatcacacagagttaaaacaaacattcttttgtttcaacagtttgcaaacactgctttgtccattctgtgaatgaacatttgggagctctttgagatcaatggaggaaaagcaaatatcccaggawaaaaactatatggaagtaatctgagaaactgatttgtgatgtgtgcatttatct

SEQ ID NO: 212719 - DNA, 430 bp, Homo sapiens
ctctgtgagttgaatgcaaacatcacaaagtagtttctcagaatgcttccctctattttttatatgaagatatctcctcttctaactcaggccrcaaagcgctctaaaaatccattgcacattcaacaaaaagagtgtttcaaactgctctaccaaaaggaaggcctcaagtctactaaatacacacttgcaaattcttcaaaaagagattttcaaaactgctctatcaaaagaaaggttaaactctgtgagttgagtgcagacaggacaaaggtgtttctgagaatacttctgtctacattgtatgtgaagatactcccatttccaaagaaggcctcaaattgctccaaatatccacttgcagactttacagagtgtttcaaaactgctctatcaaaagaaaggttaaactctgtgatttgaacgcaca

SEQ ID NO: 212720 - DNA, 430 bp, Homo sapiens
ctctgtgagttgaatgcaaacatcacaaagtagtttctcagaatgcttccctctattttttatatgaagatatctcctcttctaactcaggccacaaagcgctctaaawatccattgcacattcaacaaaaagagtgtttcaaactgctctaccaaaaggaaggcctcaagtctactaaatacacacttgcaaattcttcaaaaagagattttcaaaactgctctatcaaaagaaaggttaaactctgtgagttgagtgcagacaggacaaaggtgtttctgagaatacttctgtctacattgtatgtgaagatactcccatttccaaagaaggcctcaaattgctccaaatatccacttgcagactttacagagtgtttcaaaactgctctatcaaaagaaaggttaaactctgtgatttgaacgcaca

SEQ ID NO: 212721 - DNA, 611 bp, Homo sapiens
ctactcttagtttctatttttcagtttttctgtcccacaactcatagttgttcatggtccctcattgtcccttaatctatctcattgtatttatctagtcatctattccaaatcaattatgtttgtgacagaaaaaacagttaccataactgcaagctgggcagagtgtttcacctcagactacttcccagaccccagtctatagayagacttcttgagggtctgtctactctcacccctgagtagaaagtcccctgttaaaagtaatgtagtcaaacaagactaaacccttcctcagatgctatgtcatagaatttacccttacagggatccatgtgcatggtggggaccataactatcatgactaggagggttggtggtcacaaagaaaggcaattaattatgattatggcctcagctatcagtgtcatatgaatccataagatttaatattatgactacaaagagccttcttactttggttcttaaggacagttaaaaatcagtacatttaatgaactgacatggctataaggtttctttattttatatgaactggtataatgttagccaaaagtatactgtaaaaagttaaggatgttactgtagag

SEQ ID NO: 212722 - DNA, 611 bp, Homo sapiens
ctactcttagtttctatttttcagtttttctgtcccacaactcatagttgttcatggtccctcattgtcccttaatctatctcattgtatttatctagtcatctattccaaatcaattatgtttgtgacagaaaaaacagttaccataactgcaagctgggcagagtgtttcacctcagactacttcccagaccccagtctatagacagacttcttgagggtctgtctactctcacccctgagtagaaagtcccctgttaaaagtaatgtagtcaaacaagactaaacccttcctcagatgctatgtcatagaatttacccttacagggatccatgtgcatggtggggaccataactatcatgactaggagggttggtggtcacaaagaaaggcaattaattatgattatggcctcagctatcagtgtcatatgaatccataagatttaatattatgactacaaagagccttcttactttggttcttaaggacagttaaaaatcagtacatttaatgaactgacatggctataaggtttctttattttatatgaactggtataatgttagccaaaastatactgtaaaaagttaaggatgttactgtagag

SEQ ID NO: 212723 - DNA, 582 bp, Homo sapiens
aacacctggtttggtgagttatctttttacataagatagtgaatgtgaaaatgccttatagataacgggctaagaggattttaactgttactgctattacattaaaaattctcttcccttcagtcaagggaaagtcataactgcattttactaagctatttaatactttgagattgctctttgaaatttgagagcatacttctgggtactgggctgtgttggtttcttctcatttcagggtgacaaccatgtgacattgttgacatgcaaaactctcaaattctatgctttaaaaatatagagaataaagcacgtagacctgggcatgatgcaaggtggaaatttcaggaaacacataatgtttcttctgtaaaatattcttggctgtgtaattgtgggcttcatcaatcaccccattgtttattctttaaaagtagcgtgtgcttcttgcaaattgacagaaagcaaaaaacaagaaaaccataggcaacttgtattactcagtgatgggatgtyggggcatataagattatatctgtcagtaaaatattagtttatacctaccaagtggggccagtgagg

SEQ ID NO: 212724 - DNA, 587 bp, Homo sapiens
tcacaccctacaaatgcaccccttataaatacttgttgttaacatcattgctattaaactctgtttatggctgttttgtttctaatattcatttttaaaataaatatttcaattatgaaatagaccgtaaacccattgttcacagattaatcctatagtatgcatcacatctatcattgctactgattaaataaagcaaattcataacaaattktatctctgatagaacataattattgcatattgaatatgaaatcaaaatcaaattagtttcagtttggagggaggacaatccgactgtgaactcaccatgcaaccttggactacatgtccttgtctgtaaacacaaggggctgagtcaggtgacttcaaagtctcttctagttctatttgattataagttgcatatgcatatcggcaatgtgaattactgattaatcacgcttgtatttcaatatatggcttggatccaatgcttttgatagaaagttcttaggaattcttagtgactaattcctggggtgatcaacttctctcactcacagggaattcatctaaaggtaccccacaataagtacatggcagag

SEQ ID NO: 212725 - DNA, 599 bp, Homo sapiens
gttttgacatcaaaccaacttactagaacaataggaaaaattatatgtaggattctggaacttaggattcccctcagtacagagcaaggcccactgatagttttgtggcacctcttgccaaatgaaagaataatgtttgtctcttctccaataaygattccagggcccagaggatacaaggaatcaaaagactttcccctgaagatgtggagtccataagggacattctgacatccaacatgtaccaagttcggcaaagggtgtgtatgagccacctgtgttgtccccattttctgtccttgaaaacagtctctgaagggggagtctgttgatgttcaagtctcctgatgttcacgtcaccctctgtaaggtggtaacttgctgaatattttctctctgcttagtttggagaatagaaagttaattgtcatgtttctgctgcaaaattggtacctgtgacataaaaagaaatgcaaatctagttaccgtctctagggggcaggctgccctagccctgcagcctggtgctgtccagaactagcaggtctctgtagagaagcacacacaccacaccacagaacaaagatggcaccaggatg

SEQ ID NO: 212726 - DNA, 599 bp, Homo sapiens
gttttgacatcaaaccaacttactagaacaataggaaaaattatatgtaggattctggaacttaggattcccctcagtacagagcaaggcccactgatagttttgtggcacctcttgccaaatgaaagaataatgtttgtctcttctccaataatgattccagggcccagaggatacaaggaatcaaaagactttcccctgaagatgtggagtccataagggacattctgacatccaacatgtaccaagttcggcaaagggtgtgtatgagccacctgtgttgtccccattktctgtccttgaaaacagtctctgaagggggagtctgttgatgttcaagtctcctgatgttcacgtcaccctctgtaaggtggtaacttgctgaatattttctctctgcttagtttggagaatagaaagttaattgtcatgtttctgctgcaaaattggtacctgtgacataaaaagaaatgcaaatctagttaccgtctctagggggcaggctgccctagccctgcagcctggtgctgtccagaactagcaggtctctgtagagaagcacacacaccacaccacagaacaaagatggcaccaggatg

SEQ ID NO: 212727 - DNA, 498 bp, Homo sapiens
cattgagtagctaggaacattaaatgagataaagcaagtaaagaatttggcatgtagttggcacttaaatgttagtttttattttaaattacatttcttatacttttaggataagatacaacacttttgcaatgattactgatactcagtaaaaaatgagaataatacatcatccatatactaccccaacatctcttttacatcaaactgcaagatrctttgtgttttgttttttcttagttcatattagtgagtgcaggggatttccccccagccaacacacacacacacacacacacacacacacacacacacacacacacactcagctaacatcactgggaaattgagaaaggaatggttgagaagggctaacacctagatgcaaattcatagtgaggcaatagaattaaaagttcacatatgaatattttttctttttccttcagtttgactccagaatagattagattcagtcactgaaatgagactatcagg

SEQ ID NO: 212728 - DNA, 555 bp, Homo sapiens
tcggcatcacttccactcatgcagtactttcttacagatgtcagaacattctttctaaaatgatttcttagtataaggtccccagaaagtgtatgtgagacaaagcttccatgagaagtgcaaactaagggcagcaaaagtgaggggaaagggggaagaaaggagaagctcttctagaatgacagcataagaagcaccatagatttcctagtgaaacaactataactggtgagatcattaaaaatcaaaaacaaccatccagtctctggaaattgtcctaagagcagacagaaattgaaaaaaatcttctaaatmttggtaagacctgaaggcacggcctgttttctctacccacccctcagctcaatgtgagaaaaactctattctggatgaatgtagccacgaggatggggctgcctctaatcccagatcccagtttatgactacagtttctacccagaaaagtcaggttgtcagcatacgtaaccaaactctgccctaccccaatcctagcaatatgttgaacagactctattgcaggcaaatgtaactgaa

SEQ ID NO: 212729 - DNA, 570 bp, Homo sapiens
  misc_feature (1)...(570): n = A,T,C or G
attaggaacgcctagtaggtctgttttccctcttttctttctttcctcaactaaattcctattcccttaggggggaccatgacactggatttcgaggaacactgattctcattaaggtaggtggataacgtgttctgacattgggaagaggctgcttttgttagcagaaggattgctgatagatattcaggcagtttagataaatggacattgcaaacataagccaatgagatgtgggcaataccgtggaccagaggagaytgcagttttctcctttactcaggcttcgagtacgtgcatgagtgtggaggaagccagctgaactttattcacaattagtcttcaaagaaccaactcatataccagtgaccagtgccacctcccattttctataattcagtgcaggtaaatctattcctccttcaaggcttctgcctgcttcatatcatctccagcatcacatacccaggtaagcttgggaactgtattaattttctcaggctgtcataacaagttatcacagactgnnnnnnnnnnnnnnnnnnnnnnnnnnnnnnnnnnnnnnnnnnn

SEQ ID NO: 212730 - DNA, 570 bp, Homo sapiens
  misc_feature (1)...(570): n = A,T,C or G
attaggaacgcctagtaggtctgttttccctcttttctttctttcctcaactaaattcctattcccttaggggggaccatgacactggatttcgaggaacactgattctcattaaggtaggtggataacgtgttctgacattgggaagaggctgcttttgttagcagaaggattgctgatagatattcaggcagtttagataaatggacattgcaaacataagccaatgagatgtgggcaataccgtggaccagaggagactgcagttttctcctttactcaggcttcgagtacgtgcatgagtgtggaggaagccagctgaactttattcacaattagtcttcaaagaaccaactcatataccagtgaccagtgccacctcccattttstataattcagtgcaggtaaatctattcctccttcaaggcttctgcctgcttcatatcatctccagcatcacatacccaggtaagcttgggaactgtattaattttctcaggctgtcataacaagttatcacagactgnnnnnnnnnnnnnnnnnnnnnnnnnnnnnnnnnnnnnnnnnnn

SEQ ID NO: 212731 - DNA, 472 bp, Homo sapiens
tggtgccccctattccagagactttccagagttcttaaaaattcagagttaaaaagttccagagtgtaaatatgctttgcctcttggcttctctctgggcaagcactgggctttctttgtctttgttttccagattccaaaatttgattgctataatctactttcctgatctctttgaccccatggattttatccatttacaataattttagtattggcacggggytcccccatgtagggtggtgcagggagactcactaaccacaggaggtcctgcccggggctcctcctttacccccctccttttggggcaggctggagggagggtcaggtaatgctgctcacacaaagcctgcctggaagtccagaggtggggggtactctgggcctcagctgtcaagactggcaaccctttaacccctgatgacccagaaaatgccctcccttaaaatgtctgagtaccatgcttctt

SEQ ID NO: 212732 - DNA, 556 bp, Homo sapiens
ccttcatcctctgcaggcctgggctccaggccgccctctgkaccccaagcaggtctaggcattggctaggggctccgtgaggggctgagctctagtgatgtcacccagtttcccttgggaacctccttgggtggaagaagctattttctaaaccctccttagggctaggagaggcagcccccacctcttacttctaccgggtgtctgtggcagatcctattgctgtggtgctcagcaccatgaacagggccctgcagggctcctcccaccgagaccactccattgggtgaatatggacggaaccagctgggtgtgagctcttaggaagctctaatctgaagacaaagactctgtctctgacctttgggagccctagtctgaaagaaatgtgttgacggtatcagtgcttgggcaacagcagggagtgaagcagtaatcaggggagagggcaactgggagacagtttgagtttcctcaccttcttggcctccttactcctgattagtccattgtctgtccacctctggtaatgtcctctttccgcctcttccccagt

SEQ ID NO: 212733 - DNA, 523 bp, Homo sapiens
cttctcaatatattcatatttttgttaaataaatgtttacattatyatgactatttaaatgttattcatagtcaaatcatatattatactatattacattttatactatattagatttccttggaataaatatctctttttcaatttgcctaaactttctatgtattgatcattaatttgtttcctgattcactgctggaagcataaatctcctcagtattttagaaccctgggtgttccttcaatttcatcctcatgaagatgtgtctcctagggccttctgtcctgctcttgtctgttctgggtgctgtttgggtttcctgctcagctgtgatcctggaatctctcttcaccatcatcctgaaatccttctttttcctgggttgctttccttgttttctggatccaatgtcttcctccttcctgtttttatttttccctttgttttagtgaagcacatcctcaagtagtttcctgggaagggagttatcagggttaaatttttttagactgtttgtgtcaa

SEQ ID NO: 212734 - DNA, 447 bp, Homo sapiens
cttctcaatatattcatatttttgttaaataaatgtttacattattatgactatttaaatgttattcatagtcaaatcatatattatactatattacattttatactatattaratttccttggaataaatatctctttttcaatttgcctaaactttctatgtattgatcattaatttgtttcctgattcactgctggaagcataaatctcctcagtattttagaaccctgggtgttccttcaatttcatcctcatgaagatgtgtctcctagggccttctgtcctgctcttgtctgttctgggtgctgtttgggtttcctgctcagctgtgatcctggaatctctcttcaccatcatcctgaaatccttctttttcctgggttgctttccttgttttctggatccaatgtcttcctccttcctgtttttatttttccctttgttt

SEQ ID NO: 212735 - DNA, 523 bp, Homo sapiens
cttctcaatatattcatatttttgttaaataaatgtttacattattatgactatttaaatgttattcatagtcaaatcatatattatactatattacattttatactatattagatttccttggaataaatatctctttttcaatttgcctaaactttctatgtattgatcattaatttgtttcctgattcactgctggaagcataaatctcctcagtattttagaaccctgggtgttccttcaatttcatcctcatgaagatgtgtctcctagggccttctgtcctgctcttgtctgttctgggtgctgtttgggtytcctgctcagctgtgatcctggaatctctcttcaccatcatcctgaaatccttctttttcctgggttgctttccttgttttctggatccaatgtcttcctccttcctgtttttatttttccctttgttttagtgaagcacatcctcaagtagtttcctgggaagggagttatcagggttaaatttttttagactgtttgtgtcaa

SEQ ID NO: 212736 - DNA, 581 bp, Homo sapiens
gccttatctttcagagtatgtattttcttcttaaaatctgtgcatattcttttgttacttccaaaactggatcttgattcagattttccttgtgtgtaaatcctagaggagaagctatataggatccaggttcatatttagtagcagctgaaaaaaaaagcaagaattatattattattattattgttattattttaagatagggtctcactctttcacctatgctggagtgccatggtgtgatcacaggtcactgcagtcttgtcctcccaggcttaagcaattctcctgcctcagccccaagtacttggaactgcaggcatgagccactgtgcctggcaagcttttgtattttttataggggcagggtttcgtcatgttggcacaggctgctctcaaactcctgggctccagtgatctgcctgcctcaggctcccaaagtgctgggactacaaacgtgagccaacatgyctggccaaagaattatattctatatatttcatagttaactaagtgcaaatcagtaaaaaagagttgagagctttttcagtgttaacaagaatgaaaagtatgtatgacta

SEQ ID NO: 212737 - DNA, 536 bp, Homo sapiens
ttttaaatttactttttatttcaataggtttttaaggaacaggtggtgtttggttatataaataagttctttagtggtgatttttgagattttggtgcatccctcacccgagcagtgtacactgtactcaatgtgtagtcttttatttctcactcccttcccaccatttcccctgagtccccaaagtccactgtatcattcttatgcctttacattctcatagcttagttcccacatatgagaacatatgatgtttggttttccattcttgagctacttcacttagaagaatggtctccaattccatccaggttgctgcaattagaagaatggtctccaattccatycagtttgctcctttttatggctgagtagtattccatggggtgtgtgtgcacatatcacattttctttatccactcattgattgatgggcatttgggctggttccatattttcacaattatgaattttgctgctataaacgtgtgtacaagtatcttttttgtataatgacttcttttcctctgggtaga

SEQ ID NO: 212738 - DNA, 561 bp, Homo sapiens
cagtttcaccatgttggccaggctggtctcgaactcctgacctcaggagatctgcctacctcggcctcccaaattgctgggattataggcctgagccaccgtgcccagcctaccagcatttccatcagcaaacttctccgatgtgttctattgctgctgatactttctcttttcattttctaagcccgttcccttcctttgttttctgcactttctcataagcttgctttgcttctgtgtctccagtgctccatgtagcttctcatcaaaactgcgagtcgtgctcggtcccaggagaagactgtccattcgcattactgcgatgactgacatctttgattctattgttttctgcatttgttacccttattattcattttactgacttgtttttgcaggtttgatcaaattattgtctgtctactataattttcccaatagttacatttttacttgaaaactcaattgccatttcttcccttagaatttmtgttccctttcaggggattttgttattgttttttgctattgattggaagcacgttgctaactttcgcctct

SEQ ID NO: 212739 - DNA, 584 bp, Homo sapiens
ctgtagaggaaggagcagcttgctcacaataacagcagtaagactcatgccagatttctccggatgcaatcgatgtaagtattaaaagaaaataagtttgagtttagaaatgtattatctagtcatgttgtcttttatgtgtaaaaaaacaagtaaccaagcaacaacacaaamaaaattcttgaatttttcaagtaaaatcagcaaatctagagatgttacaagcaagatggagaataagagtgatctaatatttatgtgccattatcttaaaatttaagaaaataagctaagccaaagaggtaaaagaaagaatattcatgacaactcagaaaggaacatgagcgtgctaaactaattgtcttcttagaaaaacaacataaaaatctatatggtaaaaaatcaatagtggtaaataaatatgagtatggtcttaagggtaaccactagtaaaataaaataggttatgcaacttggcaaacagaagaaaatacagagaatgcaatgaaagtaaaccaaataaataaaaggataaatgacaaatggaaaaatgaaataaaatagtagaggtaagttctaccaaa

SEQ ID NO: 212740 - DNA, 482 bp, Homo sapiens
gaattctagcaagaagtggggacaggccatttatttaacaggccttagtaacctctttttagctcttttattccctttttccagacgctatattgtgctacatcctacattttgctcctttccatgttgttaatttttccagaactctgccattaaaatcagaattgcaaggctgaggaaatagtaaatcccactctaattctagacagcaaagctctatgtcaacaatttattasggtaccaagttctaaaactttctagagttaagaactcctctaagaatctgttataccacagaccccatccctaacaaacagcatttataccttttcattaggttcatggccctcgagtgaagaatgcctgccttaagatgacagaagcagagggttcccttcatggccaggttaaagatcgttaccacacaaatatctgaccaaatcagctttatattataccctgtctaccaccacactagcatc

SEQ ID NO: 212741 - DNA, 573 bp, Homo sapiens
gcagggtgagggtctctggatggaaaattactaacagggagcactggggaaaaggggactctggctatacctaactaataggaatcttgctaaagacaaaggaaggtgatcagacatcacttgggggatggtggaggataggaggattagatagatatcaaggtgatcagatagggaggacagggtggaggggttcttaataaactggcatggaaggggttttgctaaaattggactttataattacagagatgggttcaaacaaaggttcaggagccggattaaagtttggtcaagcacataatcttttccacactctcttctttttttttcttcgcatctctcagattctttgtcactctcaattgctggccccacctcttccacccaaactgtgggagtggctcaggactcagtcctacgcctactccttttcttacactaccctgtgcatagagaattccatctaatcccataattttaaataaatatgccaatgcctccaaaagttctatctccagtcctgatcctctgggctmcagaacaatctacaactgcccatttaacatttcc

SEQ ID NO: 212742 - DNA, 582 bp, Homo sapiens
tgctaagagcagattttctggaagctctgcctacactctcagctttagggtttcccctcctgctcttgcaatggcttagtaaaccactgagtacctgataaatctcttcttcctgaaactagctaaaatggcttctatttctgcaattgaactctaacagatgaactgacagactgagttatttaactgaactaagactatggtttagaaagtaaagttttttgatcattctgcatgaatttgaacccccattccaatacttacacactatatgaccttagataaattgcttaatctctccagcttcagctttactcatttgtagaataggaataaaaatagtattttggcccaggcatagtggcccacacctgtaattccagcactttgggaggcagaggtgggataattgcttgaggccaagagttttgagaccagcctgggmaacatagtgagaccctatctctgcaaaatatttaattttaaaaattaactgggcatggtggtgtgcacctgtattcctggctacttggggtgctgagatggaaagatcacttgagcccaggacttggaggctgcagt

SEQ ID NO: 212743 - DNA, 582 bp, Homo sapiens
tgctaagagcagattttctggaagctctgcctacactctcagctttagggtttcccctcctgctcttgcaatggcttagtaaaccactgagtacctgataaatctcttcttcctgaaactagctaaaatggcttctatttctgcaattgaactctaacagatgaactgacagactgagttatttaactgaactaagactatggtttagaaagtaaagttttttgatcattctgcatgaatttgaacccccattccaatacttacacactatatgaccttagataaattgcttaatctctccagcttcagctttactcatttgtagaataggaataaaaatagtattttggcccaggcatagtggcccacacctgtaattccagcactttgggaggcagaggtgggataattgcttgaggccaagagttttgagaccagcctgggcaacatagtgagaccctatctctgcaaaatatttaattttaaaaattaactgggcatgstggtgtgcacctgtattcctggctacttggggtgctgagatggaaagatcacttgagcccaggacttggaggctgcagt

SEQ ID NO: 212744 - DNA, 534 bp, Homo sapiens
caatcagatgtttgcacaggagtgtgacctttgtaactttaattcagcctctcattggttgctttgcacaaccaatcagactgactgcgggccaccacttcatctacatgaggtgaccaccaaggggccaatgggaaacctgtagagggtgtttgaagccgagaagatgctgtatcttggaccttgagccactgctcaggcctkctgccacactgtggagtgtactttcattttcagtaagtccctgctttcttctttcattgcttccttcttcctttgctttgctgggtgttttgtccaattctttgttcaaaacactaagaacctggacaactcgcagtcaagatcctctaatggtaacatctccacaagatctttagattctagaccattgaaaccttagaatgacatgcatccttcactttgttaactgacagagttagtccccacatatccagcacagatacacaaatcagcttgtttcatctctgcaattcgattttcactccttgattgtagggactagaaagcctc

SEQ ID NO: 212745 - DNA, 575 bp, Homo sapiens
gttttttttttaatgtctatttaccatgattacattttattcttttctttaacataacataggttgtgacaaagacctttcacggtacaggcctggttcctccagtagataaaaatgttgttggatacagagagctccctgaaacagatggtaatatatttcatatgtaaacacatgcatatatgttaatgcatatgtaggaaagttttgcttrtattgggaagtaggtatttccatataacttttgtgagacagtcgctagaccttggtaataaagagtaagctttggttttagggtcagtcattcctgaattaaaactgagttcatagctgtgtggccttgaacaaattatttaaccccacgaaaccttgtctttttcatctgtaaaatgaagttaatgataatcacttcataggggaatttggggtataaacaagtattaagatacttagcaaaatgcttgcctcagtgctcaaaatttggtagttatttttaagaatttaaagaattttaacctattgcctacttttttggaactacttccaaacctttgacattacagtcagcttgcaaa

SEQ ID NO: 212746 - DNA, 626 bp, Homo sapiens
ttaaaaatggggtgagccaggtttggcccaagtttgccaattcctggacctgtctgctgaatctttaaagcttatgtaaaatcatgattgccaccatggaatagactttcaaaaaaaatcatgactgtagccgggcgcggtggctcatgcctgtaatcccagcactttgggaggccgaggagggtggatcatgaggtcaagagatcaaggccatcctggccaacatggtgaaaccctgtctctactaaaaatacaaaaatcccctgaaaatggtggtacgcacctgtaatcccagctgcttgggaggctgaagcaggaaaatcccttgaacccgggaggcagaggttgcagtgagccaagattgcgcctctgcactccagcctggagacagcgagactccatctcaaaaaaataaataaataaataaataaaatttaaaaatttttaaaaaagactaaatcctgtgaaatagtcgctaagaaatctttaagccatttttaagcttgaatcctatgtagaaaaattaccaaattgccattctaaattacagtgctgcagattactacccgaggtggcacaagttgtrctagtacaaaaagtcttaggaggaaaaaccctctttgtag

SEQ ID NO: 212747 - DNA, 595 bp, Homo sapiens
aacagattgctgtaaactactcggcagtgtcctaagacctttgcattacctcaaacactgaccttaccagcttaatgttgttctgtccaaagtattcctatcataattaaattttaatgtctggatgggaaaggtggctcatacctgtaattccagcactttgggaggccaaggtgggcagatagcttaagcccaggagtttgagaccagcctgggtaacatggtgaaactctgtctctacaaaatattagccaggcatggtggtgcacacctgtggtctcagctactcaggatgctgaggtgggaggattacttgagccagggaggcggaggttgcagtgagttgaggtcatgtcactgcacttcaggctgggtgatggagtgagactctgtctcaaaaaaaaaaaaaaaaaaaaaaaaaaaaaaaaaaaattttttatatatatatatatatatatatatataggggggggayccctacaatactaccctttaagttacttgacttactttttaaatgatctaaattaggggttgattgacaaactaaaaactagtcccttttcagtcccaataatgaaaacctcccaaattt

SEQ ID NO: 212748 - DNA, 595 bp, Homo sapiens
aacagattgctgtaaactactcggcagtgtcctaagacctttgcattacctcaaacactgaccttaccagcttaatgttgttctgtccaaagtattcctatcataattaaattttaatgtctggatgggaaaggtggctcatacctgtaattccagcactttgggaggccaaggtgggcagatagcttaagcccaggagtttgagaccagcctgggtaacatggtgaaactctgtctctacaaaatattagccaggcatggtggtgcacacctgtggtctcagctactcaggatgctgaggtgggaggattacttgagccagggaggcggaggttgcagtgagttgaggtcatgtcactgcacttcaggctgggtgatggagtgagactctgtctcaaaaaaaaaaaaaaaaaaaaaaaaaaaaaaaaaaaattttttatatatatatatatatatatatatataggggggggacccctacaatactaccctttaagttacttgacttactytttaaatgatctaaattaggggttgattgacaaactaaaaactagtcccttttcagtcccaataatgaaaacctcccaaattt

SEQ ID NO: 212749 - DNA, 595 bp, Homo sapiens
aacagattgctgtaaactactcggcagtgtcctaagacctttgcattacctcaaacactgaccttaccagcttaatgttgttctgtccaaagtattcctatcataattaaattttaatgtctggatgggaaaggtggctcatacctgtaattccagcactttgggaggccaaggtgggcagatagcttaagcccaggagtttgagaccagcctgggtaacatggtgaaactctgtctctacaaaatattagccaggcatggtggtgcacacctgtggtctcagctactcaggatgctgaggtgggaggattacttgagccagggaggcggaggttgcagtgagttgaggtcatgtcactgcacttcaggctgggtgatggagtgagactctgtctcaaaaaaaaaaaaaaaaaaaaaaaaaaaaaaaaaaaattttttatatatatatatatatatatatatataggggggggacccctacaatactaccctttaagttacttgacttactttttaaatgatctaaattaggggttgattgacaaactaraaactagtcccttttcagtcccaataatgaaaacctcccaaattt

SEQ ID NO: 212750 - DNA, 595 bp, Homo sapiens
aacagattgctgtaaactactcggcagtgtcctaagacctttgcattacctcaaacactgaccttaccagcttaatgttgttctgtccaaagtattcctatcataattaaattttaatgtctggatgggaaaggtggctcatacctgtaattccagcactttgggaggccaaggtgggcagatagcttaagcccaggagtttgagaccagcctgggtaacatggtgaaactctgtctctacaaaatattagccaggcatggtggtgcacacctgtggtctcagctactcaggatgctgaggtgggaggattacttgagccagggaggcggaggttgcagtgagttgaggtcatgtcactgcacttcaggctgggtgatggagtgagactctgtctcaaaaaaaaaaaaaaaaaaaaaaaaaaaaaaaaaaaattttttatatatatatatatatatatatatataggggggggacccctacaatactaccctttaagttacttgacttactttttaaatgatctaaattaggggttgattgacaaactaaaaactagtmccttttcagtcccaataatgaaaacctcccaaattt

SEQ ID NO: 212751 - DNA, 531 bp, Homo sapiens
ctgctgtcctgcgaatgaggataaatagttattcactagcctcacccaaggtgaaaggcatattttcccctggatatatgagccatctgttgttcttgctgttaccattttmaccttccctaggatgggtaaactctttaggtttaatctcactggtttttcctttccttataaaattttttttcccttttgggttcagaataactcttttggcccaataaagctaattcagagcagctgttgtgacttgtacttaataagctatgtgcttccaggtgccagagtggcaactgggagctaagagtgatctctggagtcacacttgtcctcctgtttattgtctgtgtgaccctgtgtcattagtgactgtgactttctgtgactcagtcttgtaacaataggaataataattgtacatacctgataggaatattatgagaattaaatgaatgcatgcaagatacttagtaggttaggaaatagagaaactccaggaggaaaataccttgtccgcttgtaccagtagagatg

SEQ ID NO: 212752 - DNA, 379 bp, Homo sapiens
gccttttaattttacatcacttcaaaccagtggcrtggactaggtctttgtgtcggctgtggggtgggggggtggggggcattgatctcaatagagaatggagaattgatgagccataaattctcccaatcagtactccgtgttggctttcctttctcggagctccagatgagggcttccctcccttgtctactcactcacaacaggctgcagccagcagggccctagagaggttctggaggcacacgagccacacctgggaggcagcaccacctcttcctactgggaaaacatcttacccttcctgttgtctcagacactgcccttctgtcctgcagcaggcaagttctgcaatgagaatttttaccagatcccctgc

SEQ ID NO: 212753 - DNA, 545 bp, Homo sapiens
tacttggctgaatctgtgctctgtaacccttctcttctctgcatccaaagcacattctaattctgctgaggagattccttccgggttgtttccatgctgctgggggtaccaagagcagccccaattcttaatgtatagtacagatgacatgtgttttgacttacagcatgtattgtctgctttgccgagtcaaaaaatatgtaaaagtttttggttaagctattcacgacattgcatttggagggcatggagctcagtgtgagatgaccaaaagacacagtgtggtgacaagccggaggtcatgatgctttttatttctgattgtggtgtggatgggtatggggtggctccacccaagtcacttactctctctgggccttcagatgcagcttagtatagagggtggaattaggctaaccagtatctgctgtgtggctttggacacgttaattagtctctttgagyctcagttgtgaaatggagatagcaacaacgtataacaacagaacccttgtgggaattaataaagataagattcagaattc

SEQ ID NO: 212754 - DNA, 407 bp, Homo sapiens
gcagggtggagaatggcttgaagtagattaaaacaaggaggagggagaccattgaggacatcactaatcaagcacagacacagatatcaggggcataaaagatagcacataataactgatcgattttgaggtccaagagaagaaagtctagggaaactcccaggattctgcatccaggtgaatagggtgccaataacaaagacacggggaggtggagaagaccactgccagttacaaacagacctttggagctttagagagaagtcagtattaacagtrttgatttagaatcattagcataagatgctagttgaagtcttagaaagatgagcagaggcctcaggatagaaacttggaaaagtagcaacacctgtaagtggagagagagtagaatctaccttggacac

SEQ ID NO: 212755 - DNA, 592 bp, Homo sapiens
tatgaacccctgtctaactgaggcccttaaatattactctgttctacctttcactgtattatgttgtctctcaatttttgatgtgagtagaaagaagtttgggacaaagcaatcagcaggaggctgtctaggacttccaggagcatgttagaagtaccagctgctggctgggcacagtggctcatgcctgtaatttcagcactttgggaggtcaatgcgggcagatcgcctgagctcagtagtttgagaccagcctggccaacatggtgaaatcctgtctctactaaaatacaaaatattagctggacgtggtggcttgtgcctgtaaccccagctactcggggggctgaggtggaagaattgctggaacctgggaggcggaggttgcagtgagcygagattgtgccactgcactccagtctgggtgacagagtgagactccgtctcaaaaacaaacaaacagacaaaaaaccaaaatgaaaaacaaacaaacaaacaaacaagtaccagctgctatgggatttggaaaatcagggtaatcaaaccctctcttacttactggtgaattctggcctctactaatggatttcac

SEQ ID NO: 212756 - DNA, 592 bp, Homo sapiens
tatgaacccctgtctaactgaggcccttaaatattactctgttctacctttcactgtattatgttgtctctcaatttttgatgtgagtagaaagaagtttgggacaaagcaatcagcaggaggctgtctaggacttccaggagcatgttagaagtaccagctgctggctgggcacagtggctcatgcctgtaatttcagcactttgggaggtcaatgcgggcagatcgcctgagctcagtagtttgagaccagcctggccaacatggtgaaatcctgtctctactaaaatacaaaatattagctggacgtggtggcttgtgcctgtaaccccagctactcggggggctgaggtggaagaattgctggaacctgggaggcggaggttgcagtgagccgagattgtgccactgcactccagtctgggtgacagagtgagactccgtctcaaaaacaaacaaacagacaaaaaaccaaaatgaaaaacaaacaaacaaacaaacaagtaccagctgctatgggatttggaraatcagggtaatcaaaccctctcttacttactggtgaattctggcctctactaatggatttcac

SEQ ID NO: 212757 - DNA, 560 bp, Homo sapiens
caaagtgcttgttttcactggatgattcagagcaaccgagtcaccccaggaaagccaatctgatttcgtcttcagaatcaagcttttccccttctaagatgtgttcttctctttccctttgactggcagcagtgaagtctgcctcttaggagctgagagagtgttgtctggttcagaaacaccgrcagtatgggtcagcatttgctccctccctagcgtggccaggaattctgaggtccggtgtgcctgtacccactgagggagaagcgttccacgtgcgagaagtgagtgaggtgaggcatgcaggagagctcagctttgccatgcaccagctgtgtgattgagggcaagttatccagcttctcagaactttacacaatggcaatgaaaattcctccttattgtcttaaacgaaatatcatctatgaagtgcctgccccatggtggactctcaaataatggatgtgaattcctcttccgttagaatgctcctctgaccttgttgagaaccctccaggcatttcgatgggaaacttcaaacataaatcatattagaacac

SEQ ID NO: 212758 - DNA, 516 bp, Homo sapiens
acttttacaccactcacctcctgctgtgcagcccagtccctaacaggccacggactggtaccaggggttagggacccctgttctagaaggatctccactgtttcaatgtaagaggtggggacacctattaggaagtgtcccaatgcagtagaaagataataatggcctcacccggaatagtagctgtaaagatggggagaagtgtycctgttttagatataatcagaagtaaaatcaataggacctgatggaatcacatatgtggaaaagtggaagcaaaagattgattcagatttctgcttgggaaaactgaaaaatggcagtggcatttattgctaaaggtagcatgggaaacctttagcatatatagtagaatatatgggtgggagatgagtatcattttggatattttgaattggaatttctcatgagacaaccaattattttggaaaaaacttaggcatataagtttgaatcttagcagagaaacaaaagcagggttatgtgaattgtcaa

SEQ ID NO: 212759 - DNA, 592 bp, Homo sapiens
agatctaaacgagtaccaatagactctgaaaataaaaagaaagaaaaaacacacagtaaactgttattaaccacattatgctgttatttccaacaaatatttgattgacttaatccactaaaagaacgcagaagtagatgtttgtggagcaaaagaattgctacatcctcscccaaccctgatttagtcagtaatgtcataaaaccaaatggccccttacatgacttacaaatcatccacacacagaaaaagtggctgcttctgtccctaaatctctatcacccatagagcctttcttatcactgcaaaaataactatacacaatggtatgtgggtgggggacttttatctctttagggaatctttgggttcataaggaaaagaggaagttgtttctcttttgagaaacatctttgaagattttactccaagggaaaaatctcggttataaatatcctgtctatgtggttctacctgcccccaacatatctctcttcttcctaaatacacttcttttggaaatcccttccatttgtcataatgcctaaaattctgccaaatagagttgcattttagttaacaataattatct

SEQ ID NO: 212760 - DNA, 587 bp, Homo sapiens
catataggtccatttgtggggtggagaaygaggtggagaagggtggagagcagatccacagggtcaaatgggagatctgcgtcacaggtctacaagaaaaagtctatggattccttagagttaaactcccatcttagtcagcttaggctgccctaacaaaataccacagactgggtggcttaaacaaaagaaatttagtttctcacagttctagaggctagaagtccaaggttaaggtgtcagcaggttgggttctgatgaggactcttgccagcttgcggacgaccacctccttgctgtgtgcacacacagcctttcctggtacatgcagagagacttctcttcctcttcttatgaggccactaactcattatgaggtctcatcttcaagaccttatccaactctaattaccccccgaaggccccatctccacatgctaccaagttgggggttaggagttcaatatacgaattttggggagccacaaacattcagcccataaccaactcagatactgttttctttgaggagccttccccatgtagcagaattggttcttcctagattttacttcatggtccagtgc

SEQ ID NO: 212761 - DNA, 575 bp, Homo sapiens
aagcttcttccataaatcaattcaaataaagtacactatgtattccttgttggtctattcccatacaccatttaaaaaattctcaggcatgccaaaacataaaataaaaatacataaatttcaagaccttcacatgcttactgagttgacactctccaacactgtcctcggcagcttccatcgtatacctatgtagattatctttccastatcctgggctctcaatattttggcctccttttctgttatgatcttgtccaacaacctccttcagcctctcccactcatgagcacaccctagatcttgccattgacagtaactttgagtcctccgtaatttcgatttcaagtatcccacactcacacaaccatctcctctttttccagctcacttccactagtgcttgtactttaacaatctttcttctaacattggaacttaaaatacattgattcccacttaccttcaccctcctcatgtcctcattcctctcttcccagtttaaatttcatgatcagtcatgatcactttcttgcatgtatatttggttcttttggccttctctcatttcctc

SEQ ID NO: 212762 - DNA, 661 bp, Homo sapiens
tgtcatgtcaattatatcaaataaaatttgtatgccttctctcctatcactctgtatttcttcagcctagtgtttaggrcctcaggcaaagaacctgagagaaaagaggaaaaaaaaattttcttctcatacaatttgaatctgagtttcggttcaagttgagcacttaagtttcatagacttgaaaagcaataccaaagttttagattcttttttcttttacttttgctagcatgtggtcacttggatattatttccacaacctatgtttgtgacaataccataaaggtgaattagaaataggacaagtcagccaggcgcagtggctcatgcctgtaatcccagcactttgggaggctgaggcaggcggatcatgaggtcaggagattgagaccatcctggctaacacggtgaaaccccgtctctactaaaaatacaaaaaattagccaagcatggtggcgggtgcctgtagtcccagctacttgcgaggcagaggaaggagaatcgcttgaacccaggaggcagaggttgcagtgagccaagatcgcgccactcactccagtctggtgaagaagcaagactccgtctcaaaaaacaaaacaaaacaaaaaagaaataggacaagtcacactgtaaaccttctgttcctaatctttttaa

SEQ ID NO: 212763 - DNA, 521 bp, Homo sapiens
taacacctatggactttaatagagacataatcccacaggttctctctctctctctctttctctctccctttctctccctctctcactctttccctctccctatccactggttgmgcaccccaccacctgtggactatctgttggcacccctgacttctctgggacctgtgaataacaaatttcttctgtttcatgcattttggtttcccctttccattgtgcctcatctaatacacacaacccaacctaactccctactccctaggtcaggtctctcctagagagtggctactttgtcttatggcctttctcaagagagacactttaaaaataaattagaaaaaaagaagaacatggaaatagaaatcacaacacactggcatattggagtgtacctgtttcagcatttagtgttattgtgactaatgcagagggaagctaggagcattttgaatatgtatttctggagttttgtgtgtgacttgcccacacaggagaaatcctgcttgatgttcctagtt

SEQ ID NO: 212764 - DNA, 425 bp, Homo sapiens
caagacacaaaaagcatttaggataaaaatgataaacatcactttttaaaaattacttttatgtacatttttaagagaaatggtctctgtaatgcaggttgaagtgcagtggcgagacatagctcactgcagcctcaaactcctgggctcaactgatccacccgcctcagcytcttgagtagctgggattacaggcgtgtaccactgtgtctggctaattttgtttattttttgatagagatggtagtttcaccgtaatgctcaggctggtcttaactcctagccctaagcgatccaatcgcttctgcctctcaaagtgctgggattacagatgtgagctatcgcatccatccctgaaacatataactattaaaatcaaggacttctcctcttcattaaaagactccaaaaaaaagaagaaagaa

SEQ ID NO: 212765 - DNA, 482 bp, Homo sapiens
aattcttccatggtggactgttattttcttaatcagcatttggtgtcagctgtttgtggcaggaaaattctttgtatgagacagtccctacccctactgaatgaatgtcaataatccaattrtattagttataaattgccatggtttctgagtaagtgatttaaaaaagtaagagtatgaaaaagcacacaaaatgggagctataatgttctttataatgtaaacatacgagtcacatcccttctgccacatcctgttggtcacagaccaactttggatctgggttaggtgaatagttttcagtgggaatgtataaatattagaaagcaggatcgttggcaaccagcttggagacctgttctcttaccaaccaaaatgtgtcatttgaacttcaaaatgccacccgctcattttgtgtataattaagacataacctctttctcactctagcactagcatcctatccttccctgtgggaagca

SEQ ID NO: 212766 - DNA, 482 bp, Homo sapiens
aattcttccatggtggactgttattttcttaatcagcatttggtgtcagctgtttgtggcaggaaaattctttgtatgagacagtccctacccctactgaatgaatgtcaataatccaattgtattagttataaattgccatggtttctgagtaagtgatttaaaaaagtaagagtatgaaaaagcacacaaaatgggagctataatgttctttataatgtaaacatacragtcacatcccttctgccacatcctgttggtcacagaccaactttggatctgggttaggtgaatagttttcagtgggaatgtataaatattagaaagcaggatcgttggcaaccagcttggagacctgttctcttaccaaccaaaatgtgtcatttgaacttcaaaatgccacccgctcattttgtgtataattaagacataacctctttctcactctagcactagcatcctatccttccctgtgggaagca

SEQ ID NO: 212767 - DNA, 523 bp, Homo sapiens
ctctgctctagggggatcttctggaccacctcagctgcccctccagagctgccaaactgtccccagctaggactgtgacaggcacttctcaggctcgatgcagctaaggtcagctgtccgtaaaccttcagcacaggagagaggagagggtcccagtctggtacactctggttggtgaagtacattttaagaggcaatgcatacttcaggcaaaaaaacaaaccccaaactgtccaaattcagactgcagccatgcagcctggggaaagggttggactctgtgacagctggccsgggtgcaatcctggccccggcacgggcgagctgggggaccttgggcatttctcttggcctcaacttccttcactcccaaagtagacaacgtgaaatgacccaggtacagaatccagcgtgtggctcagggagaacaaatgtcctcgtccttgtccgccttttgatgtgcaaatccctgaaggaaacctcgagcccttgtggcaggggttggtcccaggctggaggcagg

SEQ ID NO: 212768 - DNA, 575 bp, Homo sapiens
ctcggcaccgctatgtgcttttttgttgttgttgagacaggctctcgctctgtcacccagactggagtgcagtggcatgatcttggctcactgcaatctctgtcccctcccacctcagcctcccaagtagctgggactacaggtccctgccaccaggccckgctaatttttgtatttttagtagacacagggtttcgccatattgcccaggctggtctcaagctactgagctcaagggatcctcccacctcggcctctctcaaactactgagctcaaggggttctcccacctccgcctaccagagtgctgggattctgggcatgagccatcacgcctgaccctgctgggtaccttttgcttcctacattacttatgtctttcctgttgtttattctacttattcgaagtttgttttattgatgatttcataaaatattattttggtgctgattatctcaaagttatgtctgtgggtttttattgaattaaattgtttttctcccttattaattttcttctaatttatttgggtttattgtgctgttctttctcctggattcttgagcggaaagct

SEQ ID NO: 212769 - DNA, 476 bp, Homo sapiens
ctatactgctcatagatcaagggtatcagaaattagaagacacgaagtttcctcattcctccctcaagctttatgtttttgagacagggtctcgctctcgctctgtcatccaagctggagtgcaatggcacaatcacagctcactgcctcagcctcccaggttcaagcaccctcctgcctcagcctcctgagtagctgggaccacaggtgcgcaccaccatgcctggctaatttttaaatttttatggagatagggtcgatgttgtccaggctggtcttgaactcctgggttcaaaaggtcctcctgtctcagcctmttatacgtgctgggattataaagcatgagtggccagccccctgttctttaaacacactaattcagaaggcttatcaggtcccacaggccagtaggacagagatgtggacaccaaatttgtagcacggtagtttgagtttctattaacctcaataatgtt

SEQ ID NO: 212770 - DNA, 476 bp, Homo sapiens
ctatactgctcatagatcaagggtatcagaaattagaagacacgaagtttcctcattcctccctcaagctttatgtttttgagacagggtctcgctctcgctctgtcatccaagctggagtgcaatggcacaatcacagctcactgcctcagcctcccaggttcaagcaccctcctgcctcagcctcctgagtagctgggaccacaggtgcgcaccaccatgcctggctaatttttaaatttttatggagatagggtcgatgttgtccaggctggtcttgaactcctgggttcaaaaggtcctcctgtctcagcctattatacgtgctgggattataaagcatgagtggccagccccctgtwctttaaacacactaattcagaaggcttatcaggtcccacaggccagtaggacagagatgtggacaccaaatttgtagcacggtagtttgagtttctattaacctcaataatgtt

SEQ ID NO: 212771 - DNA, 476 bp, Homo sapiens
ctatactgctcatagatcaagggtatcagaaattagaagacacgaagtttcctcattcctccctcaagctttatgtttttgagacagggtctcgctctcgctctgtcatccaagctggagtgcaatggcacaatcacagctcactgcctcagcctcccaggttcaagcaccctcctgcctcagcctcctgagtagctgggaccacaggtgcgcaccaccatgcctggctaatttttaaatttttatggagatagggtcgatgttgtccaggctggtcttgaactcctgggttcaaaaggtcctcctgtctcagcctattatacgtgctgggattataaagcatgagtggccagccccctgttctttaaacacactaattcagaaggcttatcaggtcccacaggccagtaggacagagatgtggacaccaaatttgtagcacrgtagtttgagtttctattaacctcaataatgtt

SEQ ID NO: 212772 - DNA, 476 bp, Homo sapiens
ctatactgctcatagatcaagggtatcagaaattagaagacacgaagtttcctcattcctccctcaagctttatgtttttgagacagggtctcgctctcgctctgtcatccaagctggagtgcaatggcacaatcacagctcactgcctcagcctcccaggttcaagcaccctcctgcctcagcctcctgagtagctgggaccacaggtgcgcaccaccatgcctggctaatttttaaatttttatggagatagggtcgatgttgtccaggctggtcttgaactcctgggttcaaaaggtcctcctgtctcagcctattatacgtgctgggattataaagcatgagtggccagccccctgttctttaaacacactaattcagaaggcttatcaggtcccacaggccagtaggacagagatgtggacaccaaatttgtagcacgstagtttgagtttctattaacctcaataatgtt

SEQ ID NO: 212773 - DNA, 621 bp, Homo sapiens
atttaaaacactgagagaaaattgctgacacctagaattctatacatacttgaacttttttttttttttcagaggaggaggtaaaataaaaatatttcaaaaaacaaaaaatttagaaagtttaccttcctttttttttttttttttgaaataagggttaaactatttacttcagtggaggaaataaaacccaaatcaaaggcaggtactacaacaagaagggagcaaaatttgctaaatttataggtaaatctgaaaaaaaracatttgtcttaaagaatattagtaatgataaaaatgaccaatattgaggtcataaataaagatgaaacaaaaatgctaagtgacaataacacgtaagcttgtgagggtaagtggcgatcagagcttggaattcaaaaccacttttttattttattgggaggagggtggagacaatggctaactttatactttgttgtatgaactgtgtgcatgtttccattttaagagtagcctctaacacaataaaaatagaattgtgtattggagaggtaaggctgagtgacagtcaaatccacaatctctagcctccatgtgcactttattcattattcacataaattccactgtagattgggc

SEQ ID NO: 212774 - DNA, 621 bp, Homo sapiens
atttaaaacactgagagaaaattgctgacacctagaattctatacatacttgaacttttttttttttttcagaggaggaggtaaaataaaaatatttcaaaaaacaaaaaatttagaaagtttaccttcctttttttttttttttttgaaataagggttaaactatttacttcagtggaggaaataaaacccaaatcaaaggcaggtactacaacaagaagggagcaaaatttgctaaatttataggtaaatctgaaaaaaagacatttgtcttaaagaatattagtaatgataaaaatgaccaatattgaggtcataaataaagatgaaacaaaaatgctaagtgacaataacacgtaagcttgtgagggtaagtggcgatcaragcttggaattcaaaaccacttttttattttattgggaggagggtggagacaatggctaactttatactttgttgtatgaactgtgtgcatgtttccattttaagagtagcctctaacacaataaaaatagaattgtgtattggagaggtaaggctgagtgacagtcaaatccacaatctctagcctccatgtgcactttattcattattcacataaattccactgtagattgggc

SEQ ID NO: 212775 - DNA, 598 bp, Homo sapiens
aaccttcattgaaaattctcgcagtatcagtcattacatttggggttgcaaaatgtttattttcacattctattatcctttctgcttttattatgtgrcattcttttataaagaagggcttccctttttctctttttgtcgaaatatcactctaaattcatgaattttcattcagtcagtatgtgttttagttattaatattatggctgtgtaaaaattatctcaatgaataaacaaaacaccgtggatacatacgagggaatattattcagctttaaacaaaaaaaaaggacattctgacacatggtacaacagagataaaccttgaagacatggtgctcagttatataagccagtcacaaaaagacaaatactgtgagactccatgtataccaggtacgtagagtggtcaaattcatagagacaggaagtagaaaggcggttgccagaagctggtgggaggggaaaagggaagtgagtgtttaatgtgtacagagtttcagtttggcaagactgaaagagctctgtgaatggatggtggcgatggttgcaccacagtgtgaatgtactggctgccactaaactgcatgcacactta

SEQ ID NO: 212776 - DNA, 571 bp, Homo sapiens
gagtttattttacacactacagcatggactgttgcctgagtttatcgtaaacaagaaaactgtgataggaatttagtgctaatcacatctttgagaagatttgagagacagaacaacctacaaagctctcaaataatttttgttataagttcaggatctgatttttcactttgattttgtttactgtgttttggagatccaaatatttcccctaagacaaacaaaagcacaatcaatatcatattagccctcaaatccaaaaatttaaatttcaagggtctttggtagagagtgggagaagcaggcatgcaaaagacacaaaaatcagaatgaatgttttcagatatccagatttcttttttttttttttttttttttgagatgaaacctcactctgttgcccaggctagagtgcagtggcgtgatcttggctcactgcaacctccacctcccgggttcaggtgattctcgtgtctcagcctcccgattagctgggattacaggtgcccrccaccacacctggctaatttttgtattttttagtagagatgggtttcaccacattggccag

SEQ ID NO: 212777 - DNA, 530 bp, Homo sapiens
atgtagggtgaaagggtgatatatttggacaatggatcagggagagtccgaggtcagcctgctgcaggargagctactaaggaggggtgtgtgctggctcaggatgaggacaggacacagggcaggtacatggggagggagaagagctgaaccaaaatctggttagcaagaatgttgttccgattgaccagtgggaacaaaacagctcatcagttatgaagcaaagaatcggaatttggaagggctgtgtgttggctcatcataaatgaggggacatcatgagtcctctacgtcctataaggaaggctattttttgcagtgggccattccctagaatgcagatggctccttaacttcactgttttccaggatcacagggcttgggcagagctcaacacagtctccatctggccagtcaggggttgctcagctcctgagcccaggccgctctgcttcttagctatttttgccaggtgttgctattggcaagtgcagcccaatgactgcagatcctgggaggtgtcacgagg

SEQ ID NO: 212778 - DNA, 530 bp, Homo sapiens
atgtagggtgaaagggtgatatatttggacaatggatcagggagagtccgaggtcagcctgctgcaggaggagctactaaggaggggtgtgtgctggctcaggatgaggacaggacacagggcaggtacatggggagggagaagagctgaaccaaaatctggttagcaagaatgttgttcygattgaccagtgggaacaaaacagctcatcagttatgaagcaaagaatcggaatttggaagggctgtgtgttggctcatcataaatgaggggacatcatgagtcctctacgtcctataaggaaggctattttttgcagtgggccattccctagaatgcagatggctccttaacttcactgttttccaggatcacagggcttgggcagagctcaacacagtctccatctggccagtcaggggttgctcagctcctgagcccaggccgctctgcttcttagctatttttgccaggtgttgctattggcaagtgcagcccaatgactgcagatcctgggaggtgtcacgagg

SEQ ID NO: 212779 - DNA, 530 bp, Homo sapiens
atgtagggtgaaagggtgatatatttggacaatggatcagggagagtccgaggtcagcctgctgcaggaggagctactaaggaggggtgtgtgctggctcaggatgaggacaggacacagggcaggtacatggggagggagaagagctgaaccaaaatctggttagcaagaatgttgttccgattgaccagtgggaacaaaacagctcatcagttatgaagcaaagaatcggaatttggaagggctgtgtgttggctcatcataaatgaggggacatcatgagtcctctacgtcctataaggaaggctattttttgcagtgggccattccctagaatgcagatggctccttaacttcactgttttccaggatcacagggcttgggcagagctcaacacagtctccatctggccagtcaggggttgctcagctcctgagcccaggccgctctgcttcttagctatttttgccagrtgttgctattggcaagtgcagcccaatgactgcagatcctgggaggtgtcacgagg

SEQ ID NO: 212780 - DNA, 632 bp, Homo sapiens
ttaacctgtctattatcagtttgttttatagactcaaatgatcgaattttcaggggaaaaatttaaacttccttacaaccacaactgcaacaatgactatgaagctaacattttctacaccataaaatccgtatgaaaatctttgacttgcaagtatttagcatttgcttgagtgaaccacataaatctcagccataaggataatctctcagagcatcatcagaaagataatggtgggttacaatgaagatgcagcatccgactaaggtttcacaataaaatgtaaaacattcagagatagcccttcatgcaatgagagtgctgaataataacaatgatctcatttaaatttatgtatyggataatgaaatgaaatggccccatcatttccagaggaatctgtagaaatcactggtttcattatttcatgtcctgtgctctagagctcacctggcgtgtaaatggtctcatttatatcctgtgttccttccacatcccttacactctcatcgccatagtcactaatgtactttaatgagagcaaagcatggggagactcaaatgaaccaataaaaatagaagggataaagtattattaggtggaatgaatacaaaactaaacttatgctatg

SEQ ID NO: 212781 - DNA, 608 bp, Homo sapiens
ggacattgtgtgtattatattatgtcgttcagttctcacagtaaacatgtgagctggaaatactttatctcaatatttaatatgaggaaaattacaggtcaaatgaatcattcaaggacacgtatctagtaaattgcatttcttgcatttgcacccagccatttaattccaaggcctgagcttgcaagtatgatgtggttatttttattttgttatttacactaaggattcttagggaattcttagagtaaatagtcaagacacatttatgtcagtggctctyagatatgttcaggcgttttattggttcaggataaaatatgcatgcagaagtgtgcacatatcagctattgagagtcaacaaactttcgcagagagtttgtgaaacttcagtacaaggccaagatgcagaacattactcccacaagatgctagcatgctcttgaaatcgtcagtcccaactcaggggtagccattctcttggcttctgacagcattgactaatttgcctattttgacacattctgtaaatgacactgtagattttgcattgttttgcttttggattctttcacacaaagttatgtttgtgacattcacctacattg

SEQ ID NO: 212782 - DNA, 314 bp, Homo sapiens
caggtacattgttaaagagcagcaatatttagaaaggaatstttttctgagcagtacgtctcaacagtggccttaaaatattcagtaaaccatgctataaagagatgtgctatcttcccggctttgttgttccattgatggagcatagttgatttagcagaattcttaaggatcctgggatttttgtaatggtagatgagcactggcttcaacttaaaatcctgagttgcattagcccctaagaagagagtcagcctgtcttctgaagctttaaagctagtcattgacttcttttctctagctatgaaaatcct

SEQ ID NO: 212783 - DNA, 314 bp, Homo sapiens
caggtacattgttaaagagcagcaatatttagaaaggaatctttttctgagcagtacgtctcaacagtggccttaaaatattcagtaaaccatgctataaagagatgtgctatcwtcccggctttgttgttccattgatggagcatagttgatttagcagaattcttaaggatcctgggatttttgtaatggtagatgagcactggcttcaacttaaaatcctgagttgcattagcccctaagaagagagtcagcctgtcttctgaagctttaaagctagtcattgacttcttttctctagctatgaaaatcct

SEQ ID NO: 212784 - DNA, 314 bp, Homo sapiens
caggtacattgttaaagagcagcaatatttagaaaggaatctttttctgagcagtacgtctcaacagtggccttaaaatattcagtaaaccatgctataaagagatgtgctatcttcccggctttgttgttccattgatggagcatagttgatttagcagaattcttaaggatcctgggatttttgtaatggtagatgagcactggcttcaacttaaaatcctgagttgcattagcccctaagaagagagtcagcctgtcttctgaagctttaaagctagtcrttgacttcttttctctagctatgaaaatcct

SEQ ID NO: 212785 - DNA, 547 bp, Homo sapiens
gttcatccagggctgtttcagagaaatctctatttccatctattcttatatgttagttattgaaaaacaacagacaattgcaaaaacaagttgacccttttgtgttcctggagcccagttgcgaagggcccttgtgactgggactcatgccmaacaactcattaaaagagagctagggtcccagaccacgccgaagcttcatgagacctctcctcatcagtgcactaatgagtggctgactctggagctcaggctattgtttccttgtctggtggtgaatcttccagagtctggtgagtggagtgtctgactctggagcccaggctgtcccttccccatttggggagtttatgtatgtatatatacacatacatccacatacgtatatttttttcgcttgtccccttcccattgcaatttccttattatatcatttgcttattttgtcaatttgattatattaatttgcttattggatcatttgcttattatatctgcattgccatttatgtgggacatgtttacccttaaaggtattgtgtgtgtg

SEQ ID NO: 212786 - DNA, 583 bp, Homo sapiens
ttttaaaaccatcagatctcataagacttatgtgctatgatgagaacggcacaggaaacacttacccccatgattcaattaccttctaccaggttcctcccacaacatgtgggaattgtgggaactaccgttcaacatgaggtttgggtgaggacagagctaaatcatatcagaagtcataaacttgctattgactttatgtggtccaagcatgacttttctcgtataacatgtaatattatatattattacwtatcacatgttattacttacatactaacatgcaatattaaatgttattacacattacatgttatttcttacatagtaataacatgtaatattgctttcaggagcagaatgagctgacattgtaagagtcagctcaacatgtattattttcatttaagtggaaactttcataaaagcatctccaaaaccattgccctgccctggagtctgctcaccagcccccttgtagcactgtacctctgcaaaagggagctgggaagtcccacgatgcaccatttcctgggctgacgatgcaggtcaggatggcgtggccttccaagatgtagccagg

SEQ ID NO: 212787 - DNA, 468 bp, Homo sapiens
gtttaaaatgcatataatattttgtaatagataaaataaatgtaacaaagaagcttttttactctatagcaaacttaccaagatctgtttcctttctaaccaataattttttaattgttagtttctattttaaatgcacttttatctttactggcmtttcacttatcacttttctaagatattccattttaagtttcatgtaactgttttctactcagaacctttttatgaggtgatgtgcctcttttatgttactcaatagctatctgaaattcaaaacccaaattaatcccaaatttatggaaaataaatttaagacaaccatttcttttaagagcacagtattctcaaagccaggtatccatgaataaacgcccacatgtttttaagtctcaaaatgttgcttacatagtgtcatcttccaggattcggagaaaatctctgaaaatcttgttaggctgcctatca

SEQ ID NO: 212788 - DNA, 468 bp, Homo sapiens
gtttaaaatgcatataatattttgtaatagataaaataaatgtaacaaagaagcttttttactctatagcaaacttaccaagatctgtttcctttctaaccaataattttttaattgttagtttctattttaaatgcacttttatctttactggcctttcacttatcacttttctaagatattccattttaagtttcatgyaactgttttctactcagaacctttttatgaggtgatgtgcctcttttatgttactcaatagctatctgaaattcaaaacccaaattaatcccaaatttatggaaaataaatttaagacaaccatttcttttaagagcacagtattctcaaagccaggtatccatgaataaacgcccacatgtttttaagtctcaaaatgttgcttacatagtgtcatcttccaggattcggagaaaatctctgaaaatcttgttaggctgcctatca

SEQ ID NO: 212789 - DNA, 553 bp, Homo sapiens
gtaattattggcaccaagaaattcatgtagcatcagtgctgctaactcattttcagactctgtttgatttcctctgccttttctactgatgtcttttctggtccagggctccagccagggacccacagagcatttggttttgcctccttggccctgtccaactgtggccgtttccatctttctttgtttctatgaacttgacctatcccatgttaacaattcaatcttttgtgagaaaaatggctttggaaaagcagtgacatcgtttatgaatatggaggagaccacgcagcaatgctgcagtgccaccaattaaaatgggcgaatwgttttttgtgctttcctttataattttttaatgttagtactgggtctccttctgtcacccagtgtggagtacagtggtgctgtcatagctcactgtagcctcaaactcctggactgaagccatccttccaccttagcattccttgtatctgggactacaggtgcagaaccctggctaatttttaaaacattttttgtagacacacggacgtactgtgttgcccaa

SEQ ID NO: 212790 - DNA, 553 bp, Homo sapiens
gtaattattggcaccaagaaattcatgtagcatcagtgctgctaactcattttcagactctgtttgatttcctctgccttttctactgatgtcttttctggtccagggctccagccagggacccacagagcatttggttttgcctccttggccctgtccaactgtggccgtttccatctttctttgtttctatgaacttgacctatcccatgttaacaattcaatcttttgtgagaaaaatggctttggaaaagcagtgacatcgtttatgaatatggaggagaccacgcagcaatgctgcagtgccaccaattaaaatgggcgaattgttttttgtgctttcctttataattttttaatgttagtactgggtctccttctgtcacccagtgtggagtacagtggtgctgtcatagctcastgtagcctcaaactcctggactgaagccatccttccaccttagcattccttgtatctgggactacaggtgcagaaccctggctaatttttaaaacattttttgtagacacacggacgtactgtgttgcccaa

SEQ ID NO: 212791 - DNA, 594 bp, Homo sapiens
gagagaacagatttaactggttttacttagagtaatcttattattattattattattattatttttgcaaaattcctctaacataggattggatgcacggtctcttagatcctcttgcagaacttagttggggcctgaatgaatgaggggctatgaagcctgtcacttcacaagctttggggaagttctccttgatgatctgtgtaggtaaaggataacacatagaaagcataatacgttccccacacgtcttcttgaagacataggctgaagacagtttcccttttcagcaattaagcgttgagtgatgtgtagttgttctttgtgctggattattgaatgttcaggtatctgagtaaatgcttgacctcagcactttaatttaaccttgtaaaatagggctacacattggaagcaggctaaatgcctcatatatttggggctgttacctttcactttactgatattatcttagagcttatgtatctgtcctgcctgaataggaaactttgaaaagcacacacacaatgaaccttmcccaaatgtgactttccttaattttttttttttttgtttgcgactatcatgttggtg

SEQ ID NO: 212792 - DNA, 594 bp, Homo sapiens
gagagaacagatttaactggttttacttagagtaatcttattattattattattattattatttttgcaaaattcctctaacataggattggatgcacggtctcttagatcctcttgcagaacttagttggggcctgaatgaatgaggggctatgaagcctgtcacttcacaagctttggggaagttctccttgatgatctgtgtaggtaaaggataacacatagaaagcataatacgttccccacacgtcttcttgaagacataggctgaagacagtttcccttttcagcaattaagcgttgagtgatgtgtagttgttctttgtgctggattattgaatgttcaggtatctgagtaaatgcttgacctcagcactttaatttaaccttgtaaaatagggctacacattggaagcaggctaaatgcctcatatatttggggctgttacctttcactttactgatattatcttagagcttatgtatctgtcctgcctgaataggaaactttgaaaagcacacacacaatgaaccttacccaaatgtgactttccttaattttttttwtttttgtttgcgactatcatgttggtg

SEQ ID NO: 212793 - DNA, 415 bp, Homo sapiens
aatctctctttaatttatcattattaaatttgattaattattattgctgctgctaagttagtcttgttcgaatcttgcatcgtcacacttcattttgttttctaaacactgatttttcatctgaatcattgggagtaaaacttctaacttgcagcaaccaatgaattggtcaccagcagaaaaaagatagttaacatattaagctccttttaagaattgtatgaaatgrcaattatggtaattgaatgagtttgtaagtacttttggtcataaaggataaagtttctttaaatataatacaattaataaaatcttcacataaacctaaatggtataaagatatgcttttaattatatgacgaaaatcatcattgatattgaagtcacagaaatagaatacatttatagacagagg

SEQ ID NO: 212794 - DNA, 392 bp, Homo sapiens
taaatttgattaattattattgctgctgctaagttagtcttgttcgaatcttgcatcgtcacacttcattttgttttctaaacactgatttttcatctgaatcattgggagtaaaacttctaacttgcagcaaccaatgaattggtcaccagcagaaaaaagatagttaacatattaagctccttttaagaattgtatgaaatggcarttatggtaattgaatgagtttgtaagtacttttggtcataaaggataaagtttctttaaatataatacaattaataaaatcttcacataaacctaaatggtataaagatatgcttttaattatatgacgaaaatcatcattgatattgaagtcacagaaatagaatacatttatagacagaggg

SEQ ID NO: 212795 - DNA, 413 bp, Homo sapiens
tctctctttaatttatcattattaaatttgattaattattattgctgctgctaagttagtcttgttcgaatcttgcatcgtcacacttcattttgttttctaaacactgatttttcatctgaatcattgggagtaaaacttctaacttgcagcaaccaatgaattggtcaccagcagaaaaaagatagttaacatattaagctccttttaagaattgtatgaaatggcaattatggtaattgaatgagtttgtaagtacttttggtcataaaggataaagtttctttaaatataatacaattaataaaatcttcacataaacctaaatggtataaagataygcttttaattatatgacgaaaatcatcattgatattgaagtcacagaaatagaatacatttatagacagagg

SEQ ID NO: 212796 - DNA, 631 bp, Homo sapiens
ttccttggccttgctctacaggaattctaatttaattggttgagattaaggtctggacattcatgtttacaaaaacaggcaactctaatgttcagccagaggtgagaactggacgcctagaacaaaattagccccactttcatggatagggtctataatttgtccatacatttcagacagagtagaaggtaacttgttcttggatacatctggaaagagctgttgatttatcttgcttttattgctatcctgaaaacgtctcagaaactatcacctggcgatggggggaggatgtaccgtgggcctcccaggtggttgtgtcaccactgctgtgcaagaacattgatgtccttctcatggctaagatgttccttgttgacgctgattgcctctgggcgcttgaacwcttcagcagctggaataccctctacgcatgccatcatcctcacccacacaatagagttttggtagaagtcccaccctctacttttcagagctcagctagagtgggattgtgtcttgatgtgtaggtgggaaaatgtgtgaggcagagtttgaaaggtcactgaagtccatgtggtaccaggtgatcaatgcttctctaagtgttcataatgcatttatctgaaga

SEQ ID NO: 212797 - DNA, 649 bp, Homo sapiens
ctttcatacagctagtaaaagactgagcccagaattaattcagtcgcctgatgagaaagacctgcctcttagccactctgaaattctgtatctaggaaacatcttcactcttgccacctgccttctacattttttcgtcattccatctataaaccacaaatggagaaaaggcaatgaagcataaagcagaggaaggaaaagggatgtataaatattttcttcaatattatagcaattggtatgtgtgtaacagagtaaaggcaatttgcgtgcctgtccctggtgttctttgccagcaattctgattttgcacaaggcacagagcaggccctgtgatcaaggtcttttctcayacattcatgtatctattatctaggaaccatcccaagtttaatttcattgaaatgctattctgatcacacccagattttacaggtaacgaacctggcttcgctggggccacccctgagagccgaaggtaatgtgggagtcgcctgttagcagctacatcatctcggtaactatgtgctccaccactcgcatctcttgctcccctgtaccccaccccttctcgttccagcagggatggaggagaaaattgcattatatttctcggctccataaactatgtcaatttctctagaaacaa

SEQ ID NO: 212798 - DNA, 537 bp, Homo sapiens
aagttttattgtgtatgtatcaaaagtcactatataactgtgctctcaatcttgttttttaaacaaatgaatattgctgtattttaaaaayatgaacgtcattttattttattttattgagacagaatcttgctctgtcacccaggctggagtgtagtggctcagtctttgctcactgcaacctccatctcctgggttcaagcaattctcctgcctcagcctcccgaactgggattacaggtgtgtaccaccatgcctggctaattttttatatttttagtagagagagggtttcaccatgttggccaggctggtctcgagctcctgaccttaggtgatctgcctgcctcagcctctcaaagtgctgggactacaggcataagccactgcgcctggccaaaaatatgaatacatttggctatttccaccctttctgttaatcccaaggatcttcaacttttattcttctctttaagatagtgagtcctggaaataaaagtgaaaatgaacagttctaaaaggttagtattttaaaaa

SEQ ID NO: 212799 - DNA, 456 bp, Homo sapiens
atgcctcaggtggccacatttcaatggtgcctatagagcacaggccaaattctcattctctgtgttaatcagtgggagaattcccatagaaaatgggatgtgaacatatttcaggaaaactcaaagagattagccagatgattaggccaggacattgtaagttcaagttttatgtaggatttctatagcattatcttagttgacmgaagaatgctataaaatttggagatatttagaaattaaaaataatcatccttttcattttactgtgatttctccaaagagaaattcaacaatattttttcttttgatataataggatctcatcttgattcataacatcaaagacaacggatgtacctagtcatataatttgactgaaactttttcccatggtattaaaaggatctgattctacttgtagaagtctcattatacttctcttttcaattaaat

SEQ ID NO: 212800 - DNA, 499 bp, Homo sapiens
ccattaacgcagtaatgttggcaagctaaaaatgtgtggaaagtagggagttaaggggggaatttwaaaaaaaaatttcatgtaaataaatacatatatattttagcagcaaatcaaagattagaaggcattcacttttataataaccattaaaacatgttatcaaataaacctcttgaatcaatgttgctttcctaaattgttcataaaacacttctgtactgctgccattcttcttccacttttactttaagcagattgtcagtctctttgaagttttaaaaagagtcatttctggcttgaaatttaatatttctcgcccttatgtcctcccttggttcattttgagaagtcttagcaaattgcctattcttttcacgggtaattttgatagttaagtcacatttaataggctagtctcttctcttcgtattgaaaaggtgaactgtatagatttattattatattaccttgtagcctagtccatggtaagtagtcc

SEQ ID NO: 212801 - DNA, 600 bp, Homo sapiens
accaagtttcataacatatatattaaaaaaatctactaatagcatttagaaggtgagaattcatactgaatcttctacttctagatcaaaagcactagaatactcagagtactctagaaatgtatgatggaggtaggtgactcattcttttagaattcatctgtgggaggcaaaataattgcaccccaaaatgcccactgcctaaagcccagaacctgtggtacatggcaaaatgttatgttacatgaaaaagsgactctgtaaatgtaatgaaggttgttaacactaaaacagggagagtatcctagattatccaagctggcccagtctaatcatcttaaaagcagagaacttttttggctggaatttggaaaagaggtgtggtagaaggggaaatttgaaagatgtcaagtgtaataatgattcaaggtgctgctgctggctctgacatatagggacagcacacatgcaaggatctaaagatggttcccagctgatagcaaggaaatggagatcttagtcccacaaccatgaggaactgaataagcatgaaagtggattttttttcagagtttcctccgtgtaagaatccagccgaca

SEQ ID NO: 212802 - DNA, 384 bp, Homo sapiens
aacgtatacatttgcttaaactccagagtaaaggaaaaatctcatggactgaaaacattttttaaaaaaatgaatattcactaaacaatcctgaaatgctttttgctctctgaatacattcaaacaagtagatatcacagcatttcattgatagcttatcaaaccacagaatagaacaggaggacagaatacaaagggcattcttaagggagcaccatcatgattgttctgtaaaaacatatgaacatattgctrtaaactcatcttcacaggaagtcacacagcttaataagcacagacctgcaagttaatattaaaattcactttgatttcagcagcagcaaagctgatccaactaggagctattacataaaacccttattg

SEQ ID NO: 212803 - DNA, 600 bp, Homo sapiens
gatatcatatacctttgatgttataagaagggcacatcacctcttttgtattcttctctaaaacctataatccgaatctagttacgggattggacaaatcaaagttgtaaaaggtttcacaaaatatctgaccactagtcttcacaattatcagtcatgaaaaacatggaatgaccaagaagttatcacagatcagaagagactgaggagacatggcaattaaaatgcagtatggtatcctggattggatttttggaacagaaaaaacatattaatggaaaaattggtgacatctgaataaagtctgtagtttagttaatagtattgtgtcaatattaatttcttaattttgtcaaatttaccatggttatgtaagatagtaacattaggaaaaactagtgaaggaaatatgggtactctctgtactatcattgcaacttttccataattctaaaattgttccaaaatacaaagttaaaattttaaaaagcaaatggagaatttatagattaaaggataattatcrtttgaatataatgtgtacatcttatttagatcctgattcaaactaaccagttataaaaagaaaagaccatttaa

SEQ ID NO: 212804 - DNA, 546 bp, Homo sapiens
atgttatcactgtacattgagaagtaatgggttaaaagaaaaccaaaccgaaatttacccgaaggtgtattttaattatagtacatactaagtgtatattggaggccaggcaatagagctaggaaaataaaaatatgaggtatatccttctcttaaggttgatattgggcacccgttcagaatattccttctcataaagttctaggaaataaaatcataaattaagtaggaataagcctaacatgaaatgaacaagatatttataaggaaaattgtagaaccctactaaggaacatagaataatgaagggatatattgtaattgttaaaatatttattattataatatgcatacatcttccagagtaagctacaggtctgaaaatatcacaggcaaaacccccaaagaatgttgtttgtatatttgaatattataacttggtagtatagttcaaatgtaagagaaaatgtgaarcaataacaaaagaaaaatgaaaaagaaaggagaagaaaaagggcttgcttaagatataaaatgcaccataac

SEQ ID NO: 212805 - DNA, 366 bp, Homo sapiens
ggttgcataaattgatctgatgtggcaccctcaacaaatctcaggccaacctatacctatatcaggtattcccttggccaatggggcagtagtaatgcaggtattctggtccattctgagacatgtcctgatctcactctatctagctgcttgcattccttttgactctgcagaaatgtaaattttgagtttgatcaagaacatagaagagttttcatcttccccttttgcaagtaattctacctgtactaataatgacaatagttttmtcaaatgtagtttagtatcctaatgtataacagcatatttaaaagagattttgtacaacatacacctgcctaattgtttccaaaaaagaattatttg

SEQ ID NO: 212806 - DNA, 570 bp, Homo sapiens
ttttaccaaataatactgtagcaaataataaacaagcctttggctgttctaaatcctggagctgtgtttagtaaactgtgtactcagtaaatatttgataaagcttgtgggaatatggtggcagccaccattaatgtcaacggtagaggaagaaagttgcttgggagaagacatcactgtttgcattcaaattccagccaggatggtctctgcagcactaagggcaggcataatcagacagcagatcatgctcatctattgamcctaacctcacataggtatggtagcaaaggtcagagtaacagaaaatcagtttcaaattcattcctaactgtgggacttttgcaatgttgcactctgtcctctttctatttctcatgtttactcattgattctggttctccctggtttaacctctaccttgtgcaaatgtcatagaataagcagttgtttctgaggctttcttaggtaggagagagaacaggataaggctgaaagagtagcagatttattttaagactttagttttaaatttgaaggttaaaagttacatagacacatgcatgtctt

SEQ ID NO: 212807 - DNA, 550 bp, Homo sapiens
aagagagctttaaggtaaaatacctgtggaaaycctcaatgagtagatagactcagagtcactcacaaaatgagaacaagtccccagatgattgtctctgtttagtgcattacagtgagaaacgtgattttattccccactaagtctttctagccatccctggagccccagccaccttataaaatgcatttaactgttgcactgtcattcttcctatctacagatgcccacagatctttgcttatgggattctttcagcctgaatgttcttcacaaactctgcctttctaaatcccaggaacatttcaatgcaattcttctctgaagccttccttggttactaatattaaatctaacaccaaattcacagcttatgtgtttcctagagcacttggatgttctgcctgttttagagtttttttgtcattgttagtctgtcttgctcgccacatatcaatctgttttactagattgttttacttgtttgtatgattttacaagctcctataataccaatctatcacacattctaaaacagatgggtgcaata

SEQ ID NO: 212808 - DNA, 407 bp, Homo sapiens
ccaggaagacaaagaaaaatagctccttagggctacacccacaatccacagcacacaaaacacacaaagaaggatgagaggragggagggaggaaagtcccctgctgaagagtttaccatgcaaatttaacatcacaaatgatagatggaaacaacccaccatgtgggaatcggcaagaacaacaaaaccgagaaatgactccaaaatgtccacaaatattaaaacaatgtggaaaagacaacaagctgcgctaaaaaaaaaaaaaagttaaatgaagaagagaaactatcatgaaggaaaaaaacctggaaatgggagatgagaagtttttaaaaagaattaagtgaattttctataattgagaagaacagattagatctagttaaagataaaaacagcaaattag

SEQ ID NO: 212809 - DNA, 428 bp, Homo sapiens
accctgtagccccaggaagacaaagaaaaatagctccttagggctacacccacaatccacagcacacaaaacacacaaagaaggatgagaggaagggagggaggaaagtcccctgctgaagagtttaccatgcaaatttaacatcacaaatgatagatggaaacaacccaccatgtgggaatcrgcaagaacaacaaaaccgagaaatgactccaaaatgtccacaaatattaaaacaatgtggaaaagacaacaagctgcgctaaaaaaaaaaaaaagttaaatgaagaagagaaactatcatgaaggaaaaaaacctggaaatgggagatgagaagtttttaaaaagaattaagtgaattttctataattgagaagaacagattagatctagttaaagataaaaacagcaaattagatataaagat

SEQ ID NO: 212810 - DNA, 526 bp, Homo sapiens
tcagcccagagcctgtggtatggcgtgagccccagtccctagatcacagcctgcaagtaggaaatatggccttgtggggcaggagaggaagagagaagtgacacagtgaaacgtcctttgtcacacagagggcatctgacagccagctaaggagaagaggatctaagggtgaagctcctgccagagcccaggaaggaaggctgaagactcaaggagccagatgacaccgctcccttgccttccacccccaacgctgtgattgatttcctaactgcatgccaggccgccacctctataagctgagcaattccttttggtgaagttcagctgaaagacagaggttggggtgtcccatccaacggaagcccctctgcggaccrcgtgtccagactctgcaggcgccctgtgacgactctcttgcacacacgcacacacacacgctcatgcaaaagcatcgcatggtgggtaagaccgtggactctgaacccagacgtgcaattcaaaccagactccctcactcactagc

SEQ ID NO: 212811 - DNA, 524 bp, Homo sapiens
gtccgtaatcagattaaataaaaaataataataaagctaatttatatcatgtttgctttagggtttatttggaagagaaaattaagcttaggaaatgagcagtctaacttcatatccaattaratatattgggaaactacatggtgtttgatactacctggaaaatgaaaccagacaatgcattatcaatgagagttctggttttcatcagtatcacgcttcattcaccacaaagaataatagcatggcgccccccttgtgcgttctagtgacacatctctgtctgtgagaaatgtaattgtcatctcacataacagaacacattatgttagatgagggcttatatctccacatattttagcggaagcaagagcattctcatttgcacaacaaatgtgttcagttccaaaaacacaattatttcttctagtgcaatgaggatgtgatttaaaataattaatatgaaggctgtatgttttttatttgtggaaaaaagcataattctaaattacttatgtaaatat

SEQ ID NO: 212812 - DNA, 386 bp, Homo sapiens
tttttgggcaattttaatatgaaatttagtgttgacttgcagtcctcgactatgaaaatctttgtaaaatgaggttgggtgtctaatttctactgcacttagcttataaatgtattatacatatagcatgctgcagctggtcgtaggctcctccagacacagggtatttccagtgcttcctgtaaaggttacttgcttggaacttgaaacacattttccacagacataatgttttcagtagttgcaaagtcctctggctagtctacaaatactcaaaatgggcttgaaagtacaaycttgaaaccactgagtcatagattcattacagtttaaggctattaactactctgtagagcaaggattacctttgcagagattctgaattc

SEQ ID NO: 212813 - DNA, 584 bp, Homo sapiens
gtctgcataactccctcttatctatgtagttgtgggtatgtctctaggtaagcacagagtgcagcttctcttgtttataattgtgggtttgttttatgtaagccccccttcccctccccatgaagctcccatggagcccaccatgtacatgtctgaaaagtgggggaaacttttcctgtgagtcagctagtcacacaaagaacaaaatgcttctatgctacaccctatctgtgcatctgtagtctgagttttmccctgcttgctttatttttgcctatagctgtgattattcaggcaggctgcttctctgaggactagccctagctgtctacctagctgatttttccttttcttatccctcaatagcattatattaaacacattgaatatatttttggttgattttggtatctgaagtatctttgggtctgattctttgtttccatagacccatgttcaacttccttttttctcttaccattctttgaacagatccagaatgggatacagccttgtcccagcacaaagtaggagaaacaagaaattgcactgtaacttctcagctcctgcaccagcatttcatg

SEQ ID NO: 212814 - DNA, 596 bp, Homo sapiens
ggcaaaggagagctacacttagccagcaagatacacagtagagtgtgaaggctgcctctgagtgggcagttctgcccacatgcttgtagctttgcttctacattgtcaggtctgatggatcagggcagtggagaattcagcagggagaaagagaatcatttggtcctctggaaagtgtttatacttgttatggtgatttccactgtgctttacccttaggttcagtctccaaagaacagataaatgatcataattatttttttcctccctttactttgagagaaataaatttactcaaagcattttcagtaatagagccagataaaaatctttggaaaatgtgaacacaaagatgaacaatcccaaggcttaagtcattttgttgggagactgtatatgatttaaatgtgatgaagaaatgcccattttgctcacccaacatgtaaacattttagataaaattgttaccaaaatgccagggagctggtctcggtcctgttgcttgctgcacagaaagccagtcgctgagacarcaagtattgccaaggaagaactctttatttgggtactgcagctgaggagaacagatcagtctc

SEQ ID NO: 212815 - DNA, 591 bp, Homo sapiens
ctttcaaaagcattcagttttaaatgaaaacagagcatgaaattttgaaaaatgttcagcctgactatgcaatagaaaataaaaaaccattttctaagaagaaawtcaagcttgctgcagaaatttgcataagtaacaagaagccaaatgttaatcaccaagacaatggggaaaatgtctccaggatatgtcagagaactttgtggcaatctctcccatctcaggcccagaagcgtaggagaaaaagattgcttgtaggccaggcccgggggccccttgctgtgtgcaatctaaggacttggtgccctgcgtcccagctgctcttgctgtggctaaaagggaccaaggtacagctcaggccatggcttcagagggtgcaggccccaagccttggcaacttccacttagtgttgagcctgcaggtacataaaagtcaagaactgaggtttgagaacctccaactagatttcagaggatttatggaaaatcctggatgtccaggcaggagcttgctgtaagggtgggaccctcatggagaacctctgctagggcagtgtggaaggtaaacatggggttaaagcccctacatag

SEQ ID NO: 212816 - DNA, 421 bp, Homo sapiens
  misc_feature (1)...(421): n = A,T,C or G
caggtagttgaggcatcagtgagctgtgatcacaccactgcactccagcctggatgagagaacangaccctgtctcaaaataaataantaaatacaaataaaaaataaatttattcatgttaaaggagaaatgtaacccattggtataatccagattatgcaanatgcattattataaggaagtagcgggcctctaataattattttatcaatgatatggatgtcatagtttggcccctttgattgaccatttggaagcaaaacaaatgtaagcttatgtgtgcatattccaaaatgtattttctttaggatttttgyatctatgttcatattggtatgtagttttctttttttgttgtgtccttgtctggctttggtattggggtgaaacctacttcctagactgaattagggagaattc

SEQ ID NO: 212817 - DNA, 532 bp, Homo sapiens
tcatgattttatccattattgtcattcaataatattgggattgtttattcctgttatttcaccagcactaaggatattgtgttcctcaaatatcatgtaactttaatgagtattacattgtttttcttctcaaacttcctttgagatagccgatgtaaaatactcatgcacatttcatttataattaacttaaaaatttctatttggttttcaattcttttccacaatctgatctattactattttcatttttcttttatccacttttattgtcttctgcattcaacagccattcacagttggatctctcacaacaaatattcagtcctgcctaatttttcaattcatttatgattgaatgagaaagtactatgtatcraagcctcacactccaatgtgaaaaggcaaagcactaaataaattgtgactaccttatcaagaatggatctggaggccaataaaactttcgaatctcaattttctaatattgtttcttgaatacatccaaaaatgttttatcagaaaattatat

SEQ ID NO: 212818 - DNA, 566 bp, Homo sapiens
  misc_feature (1)...(566): n = A,T,C or G
tgtaaaacataatttggccaaacctttgtgcagagggatatgaggcatttttcctccayagtctgagggtcaaatcagtcccattggttcagggtacactccagagaagtacaacctggggatggtgaagatagctggtttccaattctaaaagacagggaaatagaggcatccttcattttctttcttctttcagtgataaccagaggtgtaatggagagaaagtgggcatcctttatttctcttccatcttgtcacctagtcctggcgaccttggcaggtgccacccacgggtgccaaagtgattttcacctgtgctaacagaggaagtgcttattgnggtgggagtatcttctcttacccattacgccctattttccctttgagttccctgggcctcatctatgtcatggagcatggcctctttccatgaaacagagatttagttagcaggaattggtcctacccatttacattgtgcctgttgcctagcttcggatccctcagatcaggtttttcattctagggcctcaatctgaagcctagaattgattttgggacaaatt

SEQ ID NO: 212819 - DNA, 459 bp, Homo sapiens
agaagaaatgctgttttgctgaaagaattgaattatctggttttcacaaagtatcaactaattatatttaatatgaaatctgttttaaaaaatagtatgtactttctttggttatctttattgcttttcaattaatacctttgagttggcaagaagagaaagtgcytgatgtgttatatttatttgttctaaaggtaatcattgttcaaaatatgtgaagctattgttcagaaccagggtacttagaatgcattagaaacattcatgctgacattagagaggtggtttgctctcattactaaaatgtgttaccttagcacattgctgttttccaaaaaaagtagccaaattcataaagatcataaccataaaggtttctgaaaatttatgtttaagggagaaaaatgaaatgctggctttaggagtggtgaatgtttatttttaaatatttaataaggt

SEQ ID NO: 212820 - DNA, 415 bp, Homo sapiens
atttattctaggtttgttctatatatggatcaaactctagcaattaattgcttttgctaggaaagtggtgctacagactcaatttgaaggccaccccttccaagaggtctttgttctcttaggaaaaaagtgtaacgattgtagttttaggaagtcttggatgaaaattagtctctaaccctttctacttatttgaataagacaatcaatctcccaaagttcagttactctrtctaaaacagtgggaatattattacataatacttacagaaattgtaaggaaaattgaatgccgtaatatttttaaaaggaagcacagagcaggcacacagtagctgcttaataaatgctagttctctagtctggtaaatgaaactatctggaggatgtgctattatacatatgctattttatt

SEQ ID NO: 212821 - DNA, 673 bp, Homo sapiens
tctaaaacagtgggaatattattacataatacttacagaaattgtaaggaaaattgaatgccgtaatatttttaaaaggaagcacagagcaggcacacagtagctgcttaataaatgctagttctctagtctggtaaatgaaactatctggaggatgtgctattatacatatgctattttatttataaaccacaaactcaaacttactattttggcatctatggaatacatatctacaaaggaagtaaccatacgatagtataaaatgatagaacaaaagtgtctttggaattgttgattatgaaataacatcccttcagaattttattacaattaggttaattggttacttattattttatatggattgtttaaaaacaaaaatacaaacagcaaacaaaatatattgttcattttccaaaagattttataaattttctggaattttgctagatttttgttcctggaattataattttaacaagaacgattattaaagacactcctgtttattaaactaatggtgaattaatactgacccatgttcatatccagtccaatrttatgtctcatttcttatctctatgatgtgttaacctaaaatatagaactgcatttcctacctctgtggagatattatcaacataattacaatccatatattttatgtgag

SEQ ID NO: 212822 - DNA, 673 bp, Homo sapiens
tctaaaacagtgggaatattattacataatacttacagaaattgtaaggaaaattgaatgccgtaatatttttaaaaggaagcacagagcaggcacacagtagctgcttaataaatgctagttctctagtctggtaaatgaaactatctggaggatgtgctattatacatatgctattttatttataaaccacaaactcaaacttactattttggcatctatggaatacatatctacaaaggaagtaaccatacgatagtataaaatgatagaacaaaagtgtctttggaattgttgattatgaaataacatcccttcagaattttattacaattaggttaattggttacttattattttatatggattgtttaaaaacaaaaatacaaacagcaaacaaaatatattgttcattttccaaaagattttataaattttctggaattttgctagatttttgttcctggaattataattttaacaagaacgattattaaagacactcctgtttattaaactaatggtgaattaatactgacccatgttcatatccagtccaatattatgtctcatttsttatctctatgatgtgttaacctaaaatatagaactgcatttcctacctctgtggagatattatcaacataattacaatccatatattttatgtgag

SEQ ID NO: 212823 - DNA, 556 bp, Homo sapiens
atgtaaatccaactatttggtatgaataaacaacacacagactctaggctatttctaactggaattataatgaaaaaaaatccaaaaattaaacccttatgaatgtaaaagagagcaacaacttgtaatggtggttcaaacttaaaaatatgtggaaatagtttayggtggacagatatttccaggaagttgacaatgccatactctatgaaactgtaggcaagaatttcaccaagctagcaaataaagaaggccatttgtttggaaatatttgtgataaacactgcctggagagaaaattagagaagtccccagttcccttcaacccatcatcttccttcgaccgcacactattacatattcatgcattatgcctaactacattaagattatcaagaaagcacaaatcagtttgtaatttgtgttcttgacaagttaactcaacactgcaaaatatatcaactactacctttaggaatttgttggctaaaagaagaaaaattttctaaaagcttattttcctcatggtggttaatgtggacaatttaaatgtaac

SEQ ID NO: 212824 - DNA, 572 bp, Homo sapiens
acttcctcaattgctcttacagataacattactactggaaaatctaagactggtgttttgaggtgtttttcagacttttgcattctgctaaccaactgaccccacctcgttccatgactcctgactcaaatggttctgtgtccctcactcagaggcaaactcagtgtataaggaccattttccatgtctctatgattgcattcccaacccatcaggaacagccatttcctagttctctgccaaccaaactatccttgaaaaactctaacctcttagtctttgggagactgatttgagtaataaactctgtcttccatgtggctagcttagtattaattaaactcttttttactgcaataccatggttttggtgaattggttttactgtgtgggcaggaaaaacttgtcaggtgacaacacattttgagtttatttttgtgtatggtataaggtagggatctaacttttatcttttccatttacayatccaggtgtcccagcaccatttgttgaaaaggatattctttccctgttgaaataatgtcttggcacccaaactgaaaatgaattca

SEQ ID NO: 212825 - DNA, 492 bp, Homo sapiens
ctctaactagacagagcccactgcagctcagcaaggcctattgcctatgtacattccacctctgggggcagggcatagctgaacaaaaggcagcagaaacttctgcagacttaaatgtccctgtctgacagctctgaagagagcagtggttctcccagcatggtgtttgagctctgagaatggacagactgcctcctcaagtgggtccctgacccccgtttagcctaactaggagacatctctcagtaggggcccactgacacctcatacaggtgggtgcccctctgggacgaagcttccagaggaaggatcaggcagcaatgtttgttgttctgcaatatttgctgttctgcaccctccgctggtgatacccaggcaaacagsgtctggagtggacctcaagcaaactccaacagacctgcagctgagggacctgactgttagaaggaaaactaacaaacagaagggaatagcatcaacatcaacacaaag

SEQ ID NO: 212826 - DNA, 577 bp, Homo sapiens
tataatgaaacttttttaaggacaaatcagggatgtatgaaaagataaaggatgtcataatagcactatttggaataatatttataagaaaaatgatatttatctatttatttattttttgagatggagtctcgctctgtcgcccaagctggagtgcagtggcacaatctcagctcactgcaacctccgcctccygggttcaaacgattctcttgcttcagcctcccaagtagctgggactacaggcatgcaccaccatgcccggctaatttttgtaattttagtagaggcggggtttcaccatgttggccaggatggtcttgatctcttgaccttgtgatccacccacctcggcctcccaaagtgttgggattacaggcatgagccactgcgcctggcttgataataatatttgtaataaaaacttggcacttaatattccaagaactgtaggacaattacaaaagatgtaacatatgcaaaatgggacttccagaaggagaggagagaaaggaataaaaaaattatttgaagtcataatgactgagaactttccaaaacatcaaatcatagatct

SEQ ID NO: 212827 - DNA, 596 bp, Homo sapiens
gatttatagagcaatctctgattataaaaagtgctcttaaaactgcattatcttggcggtgtaaatgggtaagccaaggtctggtgaagtcaatatccataggaggttcaattttattctattcatttcatttttccatccctaatattccaactttcctattgataagtaacagtctctgattggccaatttcaatggcttactccttctaatcctgtggtaggctaaaactgttccccaaagataacagagtctaatccctgggacctgcaaatgttaccagatacggggaaaaggcctttgaagatgtgaytaaattaaggatcttcagattgagagagtattttggattagctccatgggccttaaatgcaattacacattcctaaaagggaggcaatgggaagtctgacacacatagtgaaggcaatgtgaaaagggagcagagatgtgaagatgttggccttgaagtctaaagtgatgtggccacaagccaatgaatgccagcagccaccagaagctggaagagtcaaagaactgattctcccctagagtctctggagggaacacagccctgtcaacatcttgattttgg

SEQ ID NO: 212828 - DNA, 569 bp, Homo sapiens
acatttggctgcatttcctgtgatgtgggtgaaagtagtgattcgacaggttgstcaattctctctctggtttttcagaagtttgcgccatagactcttgtcttctgatgtcccctcattctttcttgtggttccctggggcaggatttaaaatggcaatctggctctccactgagagggctcagtgagccttaaaaacacttacacatcctttgctctgacgctgtaggagcacaggccacctgcccttcactcccttgtctttatcctgcttctgcatgtaatgccagcctgaagtctctggcttcaggactttccaaatgggagtcaggcaccaatccactcacttgatgtaaagggagaagggccctccactactcccctgaggtgggcagagagacaatcacagaatcatattctgcaggtacatgtaccacaaattcttctccttttaaaaacaatttgcttcctttatgctctcaatataggtcaagggttgttatgagccatgttaccagttttcaggtatctactttaagactcctttaggatggtttgtctcaaaactc

SEQ ID NO: 212829 - DNA, 543 bp, Homo sapiens
tatatatgggtcttcagagtgactcatgaagactgaaagttgtgaagccatcctgtcctagtttaaatccaagctatgacmcctcacagttatgtgatcctgggtgaatttactgctctgcttcagtttctttatctataaaatggagataataatggtgatatggtttggctgtgtctccattcaaatctcaactaatttttttttttttttttttttgagattgagtttcacttttgtcacccaggctggagtgcaatagcaaggtctcagctcactgcaaccttcacctcccgggttcaagcaattctcctccctcagcctcccaagttgctgtcattacaggcacccgacaccacacggggctgaatttttttttttttttttttttttttaagtagagacagggtttcatcctgttggtcaggctggtcttgaagtcctgacctcaggtgatttgcctaccttggtctcccgaagtgctgggattacaggcatgagccaccacaccggccttcaacttgaatgtgtctcccagaattc

SEQ ID NO: 212830 - DNA, 543 bp, Homo sapiens
tatatatgggtcttcagagtgactcatgaagactgaaagttgtgaagccatcctgtcctagtttaaatccaagctatgacacctcacagttatgtgatcctgggtgaatttactgctctgcttcagtttctttatctawaaaatggagataataatggtgatatggtttggctgtgtctccattcaaatctcaactaatttttttttttttttttttttgagattgagtttcacttttgtcacccaggctggagtgcaatagcaaggtctcagctcactgcaaccttcacctcccgggttcaagcaattctcctccctcagcctcccaagttgctgtcattacaggcacccgacaccacacggggctgaatttttttttttttttttttttttttaagtagagacagggtttcatcctgttggtcaggctggtcttgaagtcctgacctcaggtgatttgcctaccttggtctcccgaagtgctgggattacaggcatgagccaccacaccggccttcaacttgaatgtgtctcccagaattc

SEQ ID NO: 212831 - DNA, 520 bp, Homo sapiens
tcccagccccaacattaagggtcactttcctctgtttgggaacgaggtggtatgccttaaagctacatgagacagcctggcacagctcctcaatgttacagaatcttccctttgacctgctggctgtcacctggarcttccaaactcagccctgccatgggatgctgcttctcgatgtggacgttagtggaggggagcaggatgggcaaggtacctttagcttgtcccttcttgaccccactgaaaccaggaccaggaccaagacctctaccttgtaaagttgttctagaatatgagaatttagggatgacctagaagtgactgtgatggaaattgaaagacaaaacttttaataatgtcaaactctttttaacttaatataactgctctccatagacaaggggaaaggagagaaaatccaataccttaacagagatttctagcctggcattgtttctcagacttctgggcaccctggtcccaagaccatctcctgcaaatacagtggagctgaactgtg

SEQ ID NO: 212832 - DNA, 520 bp, Homo sapiens
tcccagccccaacattaagggtcactttcctctgtttgggaacgaggtggtatgccttaaagctacatgagacagcctggcacagctcctcaatgttacagaatcttccctttgacctgctggctgtcacctggaacttccaaactcagccctgccatgggatgctgcttctcgatgtggacgttagtggaggggagcaggatgggcaaggtacctttagcttgtcccttcttgaccccactgaaaccaggaccaggaccaagacctctaccttgtaaagttgttctagaayatgagaatttagggatgacctagaagtgactgtgatggaaattgaaagacaaaacttttaataatgtcaaactctttttaacttaatataactgctctccatagacaaggggaaaggagagaaaatccaataccttaacagagatttctagcctggcattgtttctcagacttctgggcaccctggtcccaagaccatctcctgcaaatacagtggagctgaactgtg

SEQ ID NO: 212833 - DNA, 656 bp, Homo sapiens
cccttctggtctgattgacccttaggtacaggatgtgattagatcactctctgtgattagaagggccctcctatccctactacctcacatgctttgcttctgagagctgtgattttactattagagattcatttctttggggggaaatctagatctcttggtaaattacaagtgccccttcagatgactaacacattatgccttcatcatttataaactgctcactgtcatattgtaaagagggaccatggaaaggatggtccaggaggttggcatagtttagacagtggtcctcagaggagtcccttgtgaagcttgcagtttgggggtcctggtacatctggctgtagggcagcggagcayggacagaggagatgggccttcctcttctccacaatttggcttcagaccaccactgatatgtgacctcttcttgggcacctggctatgatacatgtccctgcctcccttggaacaggtgtggtcgcactgagttcaggctggtgaactatgagtagaggtgaaatgagtcaagaaagagaagtagggatccctaagtagccactgcatggaaaccccacccctcccccaccccaccctcatcatgaactatgatctgagtgaggagtagacttggtgcacaaagcctctgaatt

SEQ ID NO: 212834 - DNA, 480 bp, Homo sapiens
tccttcctcctcctccccttctttagagacagtatccttactaagtaaccattaatcaataaaaatgataatagctaactcttactgaatactctcaacgtgctagaaatgtacattgtccttttaatcatttcaacaaccctgtgagttagatattagtagctctgttttgcagatgaggaaaaactagctcggagtaattaggcaattttctaagaagtagaagagctaggatttcaatttaggagtcctttttttcaagttcatgcttttttactcttcacattaccttttaatcattttctttatataaaactaatagccttattataattattgtattactattgttaaatgtatttttcatttctgcaaaaccttttcaatgttcttatwacaagaaagaaaggtagcatttttttcctgatataatgatgattaaaattggaagagctgcggcaaacggcatttcagaaggaa

SEQ ID NO: 212835 - DNA, 577 bp, Homo sapiens
caagcttttaaagcatttctaagtagtcccaggtgatgccaatgcagctgatctgccaggctggtggtgttaacaattagttttcattgcatgtgcctgagtgacatgactttcagttttggctctgtgccatctgtaacagcttaagcaacgttaattggtttgagctggtcacttggttrcaagtggttcactttgacaaaagaaaatagtttgcaagagtgaattgtgatgatatgagtgaaaggaaggctgaaagtatcaccaaaggcccaaaagccttgaaggccagagtgaggagttacattcaattacgtggatgaggaatagccaccccatattttgaacaaagaagtgatattgttaatcttgtgttttggaggaagttaatacacttccacgggaattaaggaaggaaggagtccagttatgacagctgagtagttagttggagagctgggggcccaaactgtttcctctttggggtagaggcagagtcctggagggactgggttgatatgcagaatagtggcccccagagatgcccacgtcctagtccctggaacccatgggcatg

SEQ ID NO: 212836 - DNA, 345 bp, Homo sapiens
cgggcaacgcagccagcccgcgcccaccgcagtccagcgagtccccagcgcaagtgcaggcggccgcgcagggcgcccgcgggccggccgcggcggtcaccggctccagccgaascaaaagcagccagagaaggagaaggcaaggcgagcggcgcggggccccgagccctccccggaccggccgcgccatcttgtctggagcgcgctgcgaactccgggcgcggggactgtgaggacccgaacggccgcagacgcgggcgggcccgcggggcgctccgctcggctctagactccgcaccggggcatggcccccgccccaagttctctctgcggccgcggctccgg

SEQ ID NO: 212837 - DNA, 345 bp, Homo sapiens
cgggcaacgcagccagcccgcgcccaccgcagtccagcgagtccccagcgcaagtgcaggcggccgcgcagggcgcccgcgggccggccgcggcggtcaccggctccagccgaagcaaaascagccagagaaggagaaggcaaggcgagcggcgcggggccccgagccctccccggaccggccgcgccatcttgtctggagcgcgctgcgaactccgggcgcggggactgtgaggacccgaacggccgcagacgcgggcgggcccgcggggcgctccgctcggctctagactccgcaccggggcatggcccccgccccaagttctctctgcggccgcggctccgg

SEQ ID NO: 212838 - DNA, 411 bp, Homo sapiens
gtagtaaattagtaaaaatactaatagtccctgatatgcggaaataatggcataagctgtctttctctctgtctcctctccctctctgcctcggctgccaggcagggaagggccccctgtccagtggacacgtgacccacgtgaccttacctatcattgsaggtgactcacattctttaccctgccccttctgccttgtatccaataaataacagcgcagccagacattcggggcactaccgttctccgcgcattggtggtagtggccccccgggcccagctgccctttctcttatctctttgtcttgtgtctttatttctacactctctcgtcgccgcacacagggagagacccaccgaccctgtggggctggtccctgcagggttataggcatgagccaccatgcccgg

SEQ ID NO: 212839 - DNA, 424 bp, Homo sapiens
cttctagatagcagtagtaaattagtaaaaatactaatagtccctgatatgcggaaataatggcataagctgtctttctctctgtctcctctccctctctgcctcggctgccaggcagggaagggccccctgtccagtggacacgtgacccacgtgaccttacctatcattgcaggtgactcacattctttaccctgccccttctgccttgtatccaataaataacagcgcagccagacattcggggcactacygttctccgcgcattggtggtagtggccccccgggcccagctgccctttctcttatctctttgtcttgtgtctttatttctacactctctcgtcgccgcacacagggagagacccaccgaccctgtggggctggtccctgcagggttataggcatgagccaccatgcccgg

SEQ ID NO: 212840 - DNA, 394 bp, Homo sapiens
atactaatagtccctgatatgcggaaataatggcataagctgtctttctctctgtctcctctccctctctgcctcggctgccaggcagggaagggccccctgtccagtggacacgtgacccacgtgaccttacctatcattgcaggtgactcacattctttaccctgccccttctgccttgtatccaataaataacagcgcagccagacattcggggcactaccgttctccgcgcattggtggtagtggycccccgggcccagctgccctttctcttatctctttgtcttgtgtctttatttctacactctctcgtcgccgcacacagggagagacccaccgaccctgtggggctggtccctgcagggttataggcatgagccaccatgcccgg

SEQ ID NO: 212841 - DNA, 394 bp, Homo sapiens
atactaatagtccctgatatgcggaaataatggcataagctgtctttctctctgtctcctctccctctctgcctcggctgccaggcagggaagggccccctgtccagtggacacgtgacccacgtgaccttacctatcattgcaggtgactcacattctttaccctgccccttctgccttgtatccaataaataacagcgcagccagacattcggggcactaccgttctccgcgcattggtggtagtggccccccrggcccagctgccctttctcttatctctttgtcttgtgtctttatttctacactctctcgtcgccgcacacagggagagacccaccgaccctgtggggctggtccctgcagggttataggcatgagccaccatgcccgg

SEQ ID NO: 212842 - DNA, 411 bp, Homo sapiens
actcactcaccaggagccagtcctctccatacctgatctcagttacctcactcaccagtagccaggcctctccagacctggcttaattctcactayacttaattcaattaattctcactatagccctatcagacaaactctaggatacacatgaggatacagagtctcagaaaggctgagaaagtggcttgaggtcacctaggtggtaagtggtagagctaggagttgaagtcaagtctgactctcaagtccacgctctttccattgcactatctgcttttctttctccccaaagccacaatatgccacgatgcggcccaaggcctctcctccagtaccgtgctgagggctctgaacagatcagggctgaagccaagatgtcatccagtgcaatacccacatgacctccgt

SEQ ID NO: 212843 - DNA, 411 bp, Homo sapiens
actcactcaccaggagccagtcctctccatacctgatctcagttacctcactcaccagtagccaggcctctccagacctggcttaattctcactatacttaattcaattaattctcactatagccctatcagacaaactctaggatacacatgaggatacagagtctcagaaaggctgagaaagtggcttgaggtcacctaggtggtaagtggtagagctaggagttgaagkcaagtctgactctcaagtccacgctctttccattgcactatctgcttttctttctccccaaagccacaatatgccacgatgcggcccaaggcctctcctccagtaccgtgctgagggctctgaacagatcagggctgaagccaagatgtcatccagtgcaatacccacatgacctccgt

SEQ ID NO: 212844 - DNA, 516 bp, Homo sapiens
ctgagtcaggatttgaaccagcagatcatctgaccccggagccagtcgtgggcrgcacagcgggagctgcaaccgaggctcttgactcctgcgtcgtcattccctgaggtccacaggacaaccagttggggacctggggccccatcctgatgccctggggagaggtgctaggccccttttgggtctatgggctacttttgggccagtggagctgggtaaagaccatctcaaaccctgtgccaggggaggtcagactccaagagcgccacctttgggcttccagctgtgtaggctggaccaagaaggctcagagaattagggggttcgtatttgatccttttccttccaagactgggattaccagataaaacacagggcatccagttacatttgaatttcaggtaacaattttttttaagtgtaagtatgtagccaatattgcatgagaaatactcatgctaaaaagttattcgtcgtttatctgaaatgcaagttcaaatttaaccgagtaccctg

SEQ ID NO: 212845 - DNA, 516 bp, Homo sapiens
ctgagtcaggatttgaaccagcagatcatctgaccccggagccagtcgtgggcggcacagcgggagctgcaaccgaggctcttgactcctgcgtcgtcattccctgaggtccacaggacaaccagttggggacctggggccccatcctgatgccctggggagaggtgctaggccccttttgggtctatgggctacttttgggccagtggagctgggtaaagaccatctcaaaccctgtgccaggggaggtcagactccaagagcgccacctttgggcttccagctgtgtrggctggaccaagaaggctcagagaattagggggttcgtatttgatccttttccttccaagactgggattaccagataaaacacagggcatccagttacatttgaatttcaggtaacaattttttttaagtgtaagtatgtagccaatattgcatgagaaatactcatgctaaaaagttattcgtcgtttatctgaaatgcaagttcaaatttaaccgagtaccctg

SEQ ID NO: 212846 - DNA, 583 bp, Homo sapiens
atcctcttatacagccttatgctggtggcatttccctcatcagtcttacaacactaaaaaagaagtaaagttaatctgctgtgacttttcattctttatttgctgtaataaattggtctaatgttttcctgggagtgtcaagttttatmatctacattctaaacaatcttcaggcatttttacatcattaaagtcagaaatgtatttgtctttttccattctctgagcaatttttacatttgctgctatttcttaaaaatcaccaacagggatgggtgatttttgctacaggtttctcagtacattgaagtaaaattcatctgtacctgtgatgagtaaactcatctgtggtattaggggtcttttactaggatactcactcaaccttttatttcatatttactatgtttgttttattctttttgacagaaaatataaaagcaaaattatgtcaataatagtcttttcctggttttgcactaaccttttctacctgccacaagagatggacttattccttcctttttttacctgtctgctcccaaagatagcctcagaaaaccattggtttgtggccaatagc

SEQ ID NO: 212847 - DNA, 560 bp, Homo sapiens
atattacaaaaagtgggtgaaagagctggagcagctcataaaagctggtcttacctattgcatacctcacctcttaaacagagtgctgctaaatctgccattcttaacaataccaccagggacaatgttgggcacaaattttctgagaatatggattccttatgctgttcaaaccatcagccagcaggcttggggctcccccagggccctgcctttcctggcatgggactagggtggcaggtgggaaataggctgcaggaagaggaggagatgaggttgcagaggaccagaggtttgaggcaccagtttcagattaacagagagtaagggcaayggggcttgggctaagggttttggaacaggctggagagaaaaaaatcaagacaaggaatgagttttttcttctctttatcccctttatcatcaagttaagtggaggggaggggaggtagaagggaccacccatttactgactgtaaaaggtggcaggtgcaaaggtgtggtggatgctgcccctcctctcctggttttgtgtgtggcagtgagatcatgtcatacat

SEQ ID NO: 212848 - DNA, 609 bp, Homo sapiens
agggggtttcacagtgtatccctgatattagtcatacttttcatttctccctccttctccccactcccttagtgggagatgtgaaagcccagctgggccaatcctgcttttaacagtatccctgcttataaatttctagcaaatgaaactcaaatgacagcttctgctgatgtcatgtgaggcaaaacagaaaccagctggaattgctcctggcagtgttggttctttggcctagtgagagaaccaggtttgttattagaaacaaaatactaacagaaggcttttcagacttttgatcctatgtgcgccaactgatgatcatatcagaaatgtgtcttctgcagagctaatgatatctaaagtaagaatgkattagaaaagaccaaatgaaatagacatgataccaaagcaaaagatggagagaaaagaatttttcgccagagaggagaccaatgggtgaaaacattgttggtgctgtttagccttttccactcacttttcccatcaaacttggctaatgttactcaggaagctcagtgattcaattactattcattaaggcttagtgctctcaagctgtttaagtatggctgagaacaactacctcca

SEQ ID NO: 212849 - DNA, 614 bp, Homo sapiens
ggtgaggcaatgggtgaattgcatggcttctgcctttgaagtttaatgaactcttatgagacagacatacacagaggaaacaaaattttactgacttgcctctcataaaacggagtatgatgtggatgccagactggatttagatggtacacttacatgagcctccgcatctctcccggagctatattcatcatccccagggagcctgagacacacatctcctgcttcacctaccaaagaattatcagatgtccaagttcttcagtgactactgcttagatcttttacactctctggtactaacaggcattgagcccagagccctccaaggtaactgttgatagtgcatggtcttccagagaaaatgtgggcttaattcyaaagaatgagttaaatagtggcatttctggtattccaggctgtggagagatctttgacaatagaataattttctggaataagggacattcagtgcccctgacccatcaagttgcatcatcatcttccagcttctccagggccttgagccactgaagggctgtcctcccttcgtggttctctgccttttgtcctgggctgacatcatccatcagtgacaatgcttcccagaggca

SEQ ID NO: 212850 - DNA, 378 bp, Homo sapiens
aacaacctaacatcacaacaaaaagaactagagaggcaagagcaaaccaaccacaaagctaacagaagccaagaaataaccaaaatcagaactgaactgaagacagcttttgagatacaaaaaaaccatctaaaagatcaatgaagccaggagtggggttttgaaaaaaaaaataagatagatagactgctagctagactaataaagaagaaaagagagaagatscaagtaaacacagtcggaaacaacaaaagggatattaccactgaccccacagaaatacaaatcaccattagaggctaatatgaacaactctatgcacacaagctagagaatatagaagaaatggatacattcttgaacacataacccctctca

SEQ ID NO: 212851 - DNA, 454 bp, Homo sapiens
gttagaaaacagagaaatcttgtattattattatttttactttattttactttaagttctgggatacacatgcagaacatgcaggtttgttacataggtatacatgtgccatggtggtttgctrcacctatcaactcatcatctaggttttaagccccgcatgcattaggtatttgtcctaatgctctccctccccttgtcccccatccccctacaggccccagtgtgtgatgttcccctcccgaaacagaggtgtttaagctgatgtataaaattttggtaaaataatcctggtagtattgaggaagatagattggagcgctggtgagacactggggttggagagccatccattcaagcaagaggtagtaagagctgccttcaggcagtggtaggagtgcagatagagaaaagacacatctgcagcatgtgtagagtacaagagggagaggga

SEQ ID NO: 212852 - DNA, 532 bp, Homo sapiens
gaattctactgaaagctttcattggcattttgccttgttgaataaaagttagaagctatgcttagacattttttttttaaatcaacactgccttttcattagactaacgtttaaaatatgacttaaaatcatgggaaaatatagtaatgataaaatctaacactcataaagctcttagctctgtgtcaggaatagttataaacattttaatgaactaatttaacccacacaacaacaacattatcagccaggtactatctttacctttgttttacataggaggatcaagagaaatggagattaaataacttccccaatgttacctatctcgaaggtgtcaacaatgggattttaaaataaggagtttaatgcttaacsattatactactgtactgcttcccaaaatttttatcatgtgctgattatcatatgctgatttatctagtatctatatctaaagtgtgactttggtatttgctaactcatactaccacattttgccaaagatggctattctgctcatttgcaaaag

SEQ ID NO: 212853 - DNA, 468 bp, Homo sapiens
gcccctaccatctatttacctttgcagcccatcgctccctaaacaacactcttcatccatccctggacccatctgccaccgcctcagtgctcccacctctaactctgcagtcttcccttgatcacrctgggctcattttcaggtcaaaacactcctcaggaccttctaagtcagtcgcaattgtcacttactagaattctcttttccaaagccagtgatctcacagcttgtgccaaactggggatcgttatacatcgagggcaggcagatggtctgtatagtccgggatggctgcgcacacctgccctccttggaacggatcttcagcaaggctgggggaggacagagggtcagaggagaaagatcactactggttaggcggtccccatctgtcccctccaagtgccgaggaagtagctatgcctatccctaggtcagtcatccagggaggtctgctggtcgcttatc

SEQ ID NO: 212854 - DNA, 556 bp, Homo sapiens
gaattctaagacacatctattaatttaaaccatctattaacttttaaaaggccatttaaaagctttatgaagagaggaaaaagaggatattctgtaatgttatgatagatctagatataccttcgctttcccttcaagagctccagttcctgcatatatcttactgattgaatcaccattcacggaccacattgaccgaaaaacttcttgaaagcgagtcaccaactgaggcttttcagctaaaccaagagcttccaactgtttagctagcatctwaaaaagcaaacaagaaatttttataagtacattaatatattaattgtaatatggcttttaagaactaccagaatcaaaccaaaaatttatcattatagcactatttgggactagcttctgaaaacataacagtttactaggctgagttatttcccatcatttcaatttttaaaacaaatactgtatcaatggaaactacaagtattgataaggacttctttctggttaaatgataaaatttatcttattaaagtatccctataaatcagagttgtttacc

SEQ ID NO: 212855 - DNA, 592 bp, Homo sapiens
cagcagtctcaataaaatgtaactgcatactatgaaacacttagttactgcttaagaatatggaaggatgttcacttgtaaaaggaaatggatgacttaagtgaataactttcaagtatctgttttattcaactatcctagaatatgctttataattggttgaaacagtatatttttcttcaaacttagtgtgataaatttgtacaaaactaaagagaaaacatgtcacagactttaaactgtactctaaatgtcttaggtaagtagacctatatgtggaaatgtacttaaaaggaaatttatatagatattataaaattaactctatattaccaaaaatctctggactatttatagttaatacaaaatgaaatacttctgtctgagacaaaattctcctatggcagatagaatcgtctgcaacacagacattataggaaaggagaattttgtgctctgccagcttagaacagaagtcacctgctgcatcagtgctatacatttaaacacctttatwtgcatatataagaaaatttttatttcaaaataagttaatttgatagaatcaggatcatttttcccagacttgaaa

SEQ ID NO: 212856 - DNA, 574 bp, Homo sapiens
atatgtaatgctatttttcaaacatataaagagactgttgtggctaatttttaaaacctataaatttatctaaaaatcctattgaaatccaaatgtcttttgccttacatacaccattagataataaaagcacaacttccacwacgtaaggtctgattctttggtggggaaaagggattaaaagaggtcctcatcttgagaaaccactgctatacaccacaggtgtgtaatgacagccctgccttggtgatcctccaggttggggagtggcaccacatccaggttatgttgaatctcaatttacaatgtatagtgtactttttttttttttaagatggagtcttgctctgttgcccaggctggagtgcccattatgagtcatggagactcagattttgagtaagagagaaataaaactttgtgcttttaagtaataataagtcaatcctgactaatatcacatggtaagaagtctggattttattctaagtgggataggaagtcatttcaaattttgagccagagagtgataagatcttgtatatgtttaaatgacctctttactgtgtgtagg

SEQ ID NO: 212857 - DNA, 599 bp, Homo sapiens
atctttacttctttctttttctttgggatgatttcattgtttattttctagcttctttaactgaatgcttagctaatttattttcaaatattattgtacttcaatatgagaatttaaaagtataaattttatcctaaatattttttatctgtatcatgcaaacttcaaaatatactttttaatgttctaaattagtgtaaattagggcaaaattaagctaaaattttcaattatattcctttgtgtctgttgyatagaaagcaattttcaacacaaagttaaattttagtatcattaaacactgtttgattttatattaatttgatttcactgaactctatgtttgggtacttgtggacaaatcatggttgtataaaatttgtgttcgtgtttaactttgaatatcaactgttgcaatgaagtgcatttgaatgtttcctttaatacctgggcacaataaaagttaaataggtactcctccaactcctactctgaagtgcaaattagcacttcctttttcaggtacaatatggtgctaaataaagtttgtcttgaatgtgtgtttcccctttttcaggtacaatattgtgctaaataaa

SEQ ID NO: 212858 - DNA, 646 bp, Homo sapiens
tgccacacacatatttttaaacactattatactcttaaaatgttttagaagcaaatttcattcaaatctttacacgtttatcatttttattgctcatccttccttcaccaattcctgaactcccatcgggtttcatttcccttctgcctgaaaaacacctttttgtatttctttcagtgctggtctgctggagctaaattttctgtttttctttgttagaaaatgtctttgttgtaccctcacttttgaaaaatgcattctttgagtatagcattctcagttggcagttattttttttccatgctttgaagatattaatcctgtgttttctggcttctattgcttctgttgaaaaatctcctgcagtctgattcttggtcttttcagattcatctttttttgtcccttatgtggttgtaagattttctctgtttttaacattttcaaatgatatgcctattaaaaaaatttatcctgcttgtggctcagaatgctttttgaatatttcctttggttaccactttaggacaattctcaaccactatcttttcaaatattactacagctccattttgatttccttctgggaaagmaaattacatgtatgttaaatacccttggtctctttctcctctattgtttattt

SEQ ID NO: 212859 - DNA, 580 bp, Homo sapiens
acttctcctaccatggagaggagtgactgtaagaagtgtttacttctgaagttctgaactcctatagaaatatcaaaatgagatgtgttcaccaactgtgaaaacagatcattaaaaaaactagaaaagataaatcaaacaattatttttaactctaatgtarcaaccatttttaaaaatagtaaggtcaatttgtgtgtgtttgatattcctagcacacattgacctactccccagttataacttttccctctcttgcctgacctacttcatcttaaacatcactatggttatgaaaataaggaacctgattaacatcagtggtggtcactggaccactgagaacacatgcagtggtttcaaaagaagaaattggggacagaactaataatactgaaatactgaaaggtggaatctggttctgagtaatgaggatgtggtttctgaaatcatctgatctgctctaccagagctgatacaacttttctttatggaaaaaataagaatgaaagtacccggtggttctttttaatctggtgctattttaaaattgtatgacagcgttaatacttgctctttc

SEQ ID NO: 212860 - DNA, 576 bp, Homo sapiens
gccaagggagttgtgagaaaaataacaagttgaacatttctttcagttctcaatatgacctcatattgatatctgtgaaaacaaacaaagataagaaagtggcagatgttgttatattgcttgactgggccagaacatgctcttcacgctttccatatgttaactagtaatcctccccatctctggagaggtaagtactcttattatctccactttacaaataaggaaatgtggtacgagcagattattattattattattatttgctcacactatcatagctatcaaaatatgaaggtagaatttgaagccattcaattggacttcagaatacatagtttttaccattgcactattctctatttagtagaaagttaatttgtgaagttaataaaagcaacttatttccctcctgaatatccaagatacaccaagaccagagaktattaaaaattctaaacattcaacagtgtctccccatcaacttggaaaccaggggtgtttcctctaccttcctacacttacattcttaatttttgttgtgcccttttacctgtcaatttatcaaactggagc

SEQ ID NO: 212861 - DNA, 542 bp, Homo sapiens
agatctgtaaaatgattatagtattatatattatatataataatactaatatataatactattatactgtataagatatatgatatattatataaacatatcaatatattataattaattaacttattaattatattaattaatatattaatatactatacatkatattaacatattaatataatatataacactgtttatgttatatataatatattaatacagtatataatatataatactatttatcattttataatatatactaaatcatatattatatataatatcatgcctcattccccagactccctggactccatgcctccatgcctcatctccccagactccatattatatatataaaatatattatatagtatatattataaaatgataaatggtattattactatttacatcagaaggtgttgtaggaagatcaaatgagttaaataatgttaatgtattattatattagttaaatattaataaaattaatatattatatagtatatattatatatgagttaaataatatt

SEQ ID NO: 212862 - DNA, 577 bp, Homo sapiens
atttatattttttttaaaaagaggtttaattggctcgtggttctgtaggctgcacagtgagcatagaggcatctgctttgggggtggcctcagggagctttcaatcatggtagaaggcaaaggggtagcaggtgtcacatggtgaaagcaggagcaagagagagagagaattggggaggcgggggtgccatacacttttaaatkaccagatttcacaagcactcactatcacaaagacagcaccaagccattagggatctgtctccatgatccaaacacttcccaccaggtcttaccttcagcattggagattacaattcaacatgagatttgggtggggacaaatatccaaactatatcattctgcccttggttcctcccaaatctcatatccttctcacattgcaaaatataatcatgccttcccagcagtcccccaaagtcttaactcattctagcattaactcaaaagtccaaagtctcatctgagacaaggcaaatccctcccacctataagcctgtaaaataaaaaacaagttagttacttgcaagatatagtgggggtattgggtaagcc

SEQ ID NO: 212863 - DNA, 558 bp, Homo sapiens
gtggtgatggatcttctcccatccaatccaccgtaaatcaatatttctgtaraataaaaacaaactaggaaagtaaaatgccacctggatgtcacaacatcaaattgccaaaaaaaaaaaaaaatctaaagtcttactctcaatttctgtatttacttcaccataactggtaacaagcagttcacattctttggcccacacaagaataactatgttagggccaggcacggtggctcatgcctataatcccagcactttgggaggccaaggcaggtggatcatttgaggtcgggagttcgagatcagcttgacctacatagtgaaaccccgtctctactaaaatacaaaaattagccaggcatggtggtgggctcctgtaatccagctacttgggaggctgaggcaggagaattgcttgaacctgggaggtggaggttgcaatgagccaagatcatgccactgcagtccagcctgggcaacacagtgagactccatctcaaaaaaaaaaataataactatgttaggcctgtcttctcatatgcatatattcttttacta

SEQ ID NO: 212864 - DNA, 558 bp, Homo sapiens
gtggtgatggatcttctcccatccaatccaccgtaaatcaatatttctgtagaataaaaacaaactaggaaagtaaaatgccacctggatgtcacaacatcaaattgccaaaaaaaaaaaaaaatctaaagtcttactctcaatttctgtatttacttcaccataactggtaacaagcagttcacattctttggcccacacaagaataactatgttagggccaggcacggtggctcatgcctataatcccagyactttgggaggccaaggcaggtggatcatttgaggtcgggagttcgagatcagcttgacctacatagtgaaaccccgtctctactaaaatacaaaaattagccaggcatggtggtgggctcctgtaatccagctacttgggaggctgaggcaggagaattgcttgaacctgggaggtggaggttgcaatgagccaagatcatgccactgcagtccagcctgggcaacacagtgagactccatctcaaaaaaaaaaataataactatgttaggcctgtcttctcatatgcatatattcttttacta

SEQ ID NO: 212865 - DNA, 558 bp, Homo sapiens
gtggtgatggatcttctcccatccaatccaccgtaaatcaatatttctgtagaataaaaacaaactaggaaagtaaaatgccacctggatgtcacaacatcaaattgccaaaaaaaaaaaaaaatctaaagtcttactctcaatttctgtatttacttcaccataactggtaacaagcagttcacattctttggcccacacaagaataactatgttagggccaggcacggtggctcatgcctataatcccagcactttgggaggccaaggcaggtggatcatttgaggtcgggagttcgagatcagcttgacctacatagtgaaaccccgtctctactaaaatacaaaaattagccaggcatggtggtgggctcctgtaatccagctacttgggaggctgaggcaggagaatygcttgaacctgggaggtggaggttgcaatgagccaagatcatgccactgcagtccagcctgggcaacacagtgagactccatctcaaaaaaaaaaataataactatgttaggcctgtcttctcatatgcatatattcttttacta

SEQ ID NO: 212866 - DNA, 607 bp, Homo sapiens
tgttgcatatttgaattgactgaggactttaaaaaatggcagtgacatatccctgctcttagagattctgatttaatttatctgagatgagaaccaaagatattttctaaattcaccttgtgcaattcccatatatagcttgggttgagatttttgactgaaaataatatttcccaaaatgtgatccacagatcattggagatttttatgaatctttgagctcatcagagcgctcatgatattaatgtggatttttttcctgaaatgaaataatgaatttttcatttttaaacctcctaagtatcttctcagaatgggcatcartctcataaatgctgtggtttgtttggtgttagttagcaagttaggaatctggttcactgaatgaaattactgttttaaagtatcagaaaggacacactgagaatgttggagttgagagttttagtcaagcacatttaatttatggatgaggaagttgaggccagagaaatgagatgttttgtctaacttcacatagctggtctgttcaacactacggagaatctggggctcgtaactttcagtccaatattctttctgctttatttaccccttgcctccctgg

SEQ ID NO: 212867 - DNA, 609 bp, Homo sapiens
agccttatgaagtatatatcttaaataattagagctgaaagtcagaattactccttgatcaatgaactgcagaaaggatattatgttaacaggcaaggagataatatcaatcttgtctatctccatcagagctcttaggtgaccaagtgcattgtggatgagcagtaatattttgaaaataattcctaggatttttagaatggtcaatgagcattggcctcaacttaaagtcaccagttacattagctcctaacaagagagtcagcctgtcctttgaggctctgaatccaggcaatgacttctcctctgtaactatgaaaaccctacatggcattttcttccaatagaaggatgcttcatctacactgaaaatctcttctttggtgtagctaccttcaatgatcttaactagagcttctgcataaatttctgcagcttctacatcacacttgctggtttctttaaacttctgaaccaacctctgctagcttcaaatgtttctttttgcagtttccttacctctctatcttcacataattttagacasttcgttcctggctctggattagggttaggtctttaagggaacgttgtggttggtttgacctt

SEQ ID NO: 212868 - DNA, 599 bp, Homo sapiens
aaaaactatcctattacccactaccctaagataacaactgatgaagcattaatgcatttttttcaagtcatctccctgtggtatatgttttggatcactttactattaataatgtcctataatatatatttatgctaccacatcagaaatattttacatattattaaaaatcttcytcaagatttttttaatgactcttagtctactcacctcataagttaactttttctctcctgttggatataatttatattacctttaagaaggaacattctcaaagatgatgctagcccattttaatagctctattgcaggaatttgatttcaataactaagcagataaatttctccacaatagaaaattacaaaagtatgattacataaccaactcctcccttgatgctccattataaattccttgaaattacactttatataaaaatttgattaaattcaagcaaacatgagaagtttggtataaataagattcatttcaaaaaagtaactgacttaaaactaaattgccttccagaccagttaaaaggattaatggcataataaacacaggatagccaaacagtataaagccaccttgaaca

SEQ ID NO: 212869 - DNA, 590 bp, Homo sapiens
gtggaatcacatgtgtaactttctaatcaaagaaaaaaaacacacactggagagatcctactatttccatcctattccagtagtcagtcagttgttatatgccctgkgatataatgcaagatataatgagcaactttcacaatgtagtctagtcaaaaaagttttaccaacatcagatcattaggagatacaggagatagaagaacaagggagacatcatcacatggatgcaatcagacaaatgacacgtgcgagacattctgtgaaacagcagacctggtctcttcaacaagtcactgtctggaaaaaggactgaactatattaagaatgactgaagaaacagaatcagatgcaatgattggtcttgaattagatacttattttgtcaaaccagatgaaaaggcatttttgacaggattgcctgtttttgtaacccaaaatatgcattgaaaaaaataagcaagacttttgttaaaatatctttagacagaattttggtatatatatatgatatatatgtgattatatctacatatatctatatatatattctgtctaaaaattctcacaattctgtgtaaagatattt

SEQ ID NO: 212870 - DNA, 590 bp, Homo sapiens
gtggaatcacatgtgtaactttctaatcaaagaaaaaaaacacacactggagagatcctactatttccatcctattccagtagtcagtcagttgttatatgccctgggatataatgcaagatataatgagcaactttcacaatgtagtctagtcaaaaaagttttaccaacatcagatcattaggagatacaggagatagaagaacaagggagacatcatcacatggatgcaatcagacaaatgacacgtgcgagacattctgtgaaacagcagacctggtctcttcaacaagtcactgtctggaaaaaggactgaactatattaagaatgactgaagaaacagaatcagatgcaatgattggtcttgaattagatacttattttgtcaaaccagatgaaaaggcatttttgacaggattgcctgtttttgtaacccaaaatatgcattgmaaaaaataagcaagacttttgttaaaatatctttagacagaattttggtatatatatatgatatatatgtgattatatctacatatatctatatatatattctgtctaaaaattctcacaattctgtgtaaagatattt

SEQ ID NO: 212871 - DNA, 495 bp, Homo sapiens
tgaatgactgcagagcttctcagctaatagcaaatagttagatgcagcagctggcaaggcctaggtcaaaaaggatgattttaccctagggaacaaacagtcctgatctagaccctttccaaatacctcaaaaccaaaaggtgtgtcggttatttattaagaacaaaaacaacccttcccaagtgacaggtaagagcatgaaaataattctaaygaacatgttcaaaaacccagatgcggcatctctaaagctttcaattctcacagacatagcatataacattaggagggaccaaagagtggtctctttactttgcctgttagagtcagacctggatttgtctaacaacaaatgtgtatgtgatcaccattgattacaagtctcctataattgcgcttagtcactctgtacattatgcctttaaataatcagtggataaaatataggttctaaagtcatatttgagtctaagctttaccacgcatttgctgcat

SEQ ID NO: 212872 - DNA, 495 bp, Homo sapiens
tgaatgactgcagagcttctcagctaatagcaaatagttagatgcagcagctggcaaggcctaggtcaaaaaggatgattttaccctagggaacaaacagtcctgatctagaccctttccaaatacctcaaaaccaaaaggtgtgtcggttatttattaagaacaaaaacaacccttcccaagtgacaggtaagagcatgaaaataattctaatgaacatgttcaaaaacccagatgcggcatctctaaagctttcaattctcacagacatagcatataacattaggagggaccaaagagtggtctctttactttgcctgttagagtcagacctggatttgtctaacaacaaatgtgtatgtgatcaccattgattacaagtctcctataattgcgcttagtcactctgtacattatgcctttaaataatcagtggayaaaatataggttctaaagtcatatttgagtctaagctttaccacgcatttgctgcat

SEQ ID NO: 212873 - DNA, 605 bp, Homo sapiens
aaatacataatcaagtgttcatcatataggatagcaaagctcctcttactaaacagttaacagacaacacaatttgcattggggagaaattttattttaagcagagagaagagttcaaaaatttataaaaacaattataggaattattagaaaaaggggaggaaaataaaaagatactgaatgtgttaaatgtcaaaatttttaaatmttaaatatttactgtagcatgttgaaaaacaggctaagatattcctttcctggatagatatttgaggttctgtgtttgtaactgtatcaaagttaacttggatattaataagctgcttaacctaaatagtttttaggttatcatagcatgcataatcctagtatgcataaccttgataaatgtacaaattgataatgttggcatcattacatctcaaactattcacaataatcactcatttcaaactgtagtcaaaagacaaatagaacaggcaaaaataaatcctttttgtctctgaaatgtataaacttacgggtgttctctgccacttggttcttttgttagttctgagtaagctctgagacagcagatgttatctatacaacagataagccaa

SEQ ID NO: 212874 - DNA, 410 bp, Homo sapiens
ggtacagaaatggttcacacctaagagtaagtcttcactattactcctttttttcagggctatttgttgtctatgttacttacatagacacaaaccaaagcaatttggttaaataaactgaaaagcttgaatttgattctggcaccaaacattagcttctttttatatcatgaccacaatattcagtcgtctatgtataaaataaagatttattcatagagctaatgattcaagaattactaactgagtacctattatgagccaggaacttttataggttcttaytttattgcactgaagaaaccagtctcagcattcacacggcttacaacctagcatgaggagatagtaaacaaatacacatatcacatgtcaggtggtgataaatgccatggaggaatgagagactg

SEQ ID NO: 212875 - DNA, 587 bp, Homo sapiens
aataggagttattggaaaattaagtatagcaggacaatcaccctctgggtcagtgtacacactgtcattgcctttttctgaaaacatgagaacaatcacctgagaatctatgaattgtgatattcaccaacctggctgtattattcgtcttattgccagaatgaataactggcacaaagtagctactcggaaagtgtttgttaaactgtgctggatattgcaccaatctgtytattttgcccacatattagatctcaaatgaattagggatctccctagcctcagtttcatccctaataaaatacagtgactttatcttctactaagtatctcccaaaatatatctcatagaatactgattattaaatacataggaggagtgagttctatcatccagatatgggaacaattctgtttgaaacagtgataaatttttagctgtaagacttctcagggtatttaacattaaaccatccattgtatctattatggaagacggacagtatttctcaatttatttgacgttagaatgatttttaattaaaatattacagtaggttgattaagccttctcatagttattgaac

SEQ ID NO: 212876 - DNA, 362 bp, Homo sapiens
gtcctctaatgtagcccactgtctactccggcaataataaatcatgatctgctcgttgctctgatcaaagccatcactgctttgactggcctgccttccccaaaaaagggcatgggaagaaattatgagaggggcatggagaagagctcttttattttgttctcagaatgtgtatggaaatagccaaaatagatggtaagtaattcctatgtcatgtaattaaccagataytgagccttcaggagggaaggagacgatgggcatgacagaggctctttcctgggtgaaacaagtataaggtgggaaggggagacataaggaatcctaagagctttgggtgaaacagcccaaggcaggaaagc

SEQ ID NO: 212877 - DNA, 445 bp, Homo sapiens
atattcacaacgagccactggcatatacatgacttctaacctagttgggtttttctaatgaagaaaagctaaaccaggttttttgtttgtttgtttgttttttgttttttcttccgagacagagtcttactctgtcgcccaggcttaagtgcagtggtgcgatctcggctcactgygacctccgactcctggttccaacgactctcctgcctctgcctctcaagtagctggaattacaggcacatgccaccacacccagctaatttttgtattttttctagcagagacgggtttcaccatgttggccaggctggtctcgaactcctgacctcgtgatccacccatctcgcctcctaaagtgctgggattacaggatgtgagccacacatgccctagcagttctaaaccaggtttttaaccacaaaatatgattttatgtttagaa

SEQ ID NO: 212878 - DNA, 472 bp, Homo sapiens
tattttcataacttctatctctacagcttgattcaatakgacattttcctattttgtaactagaatgtatatctcctgtctgaacccccttatactttaatccctaattacatgcaactaattctttagagacagttgtttctgcttgcaattctgtgtgttattgtttcagaaaaataatgctttccttaaaaaaaaagaagaagaagaaaaggagcctacgctggaaatactaggccaaaattccaagcattttatgaaaaaactaaataaggaagcctatcagattaaactgtcctccagctatgacaataatttcctgagtctaagagtgagaggaagactacctgatcatgcatcagagtgggaaaactgaccttctgaagtagaaaggctgggagatgcaagcactatcaatgtgccattgtattttttgtaaaatgaatccccaccaagaatcactttgagaggc

SEQ ID NO: 212879 - DNA, 604 bp, Homo sapiens
tgaaagattttttgtgtgtttaacatcttaagtccaaaacatttctctgctcaaacaacaaaaacatttatctttttcacttttaccactataggtttagtatactagaaaacacttgtctctactaaaaaatacaaaaattagccgggcatggtggcgggtggctttaatcccagctactcaggaggctgaggcaggagaatcgcttgaacccaggaggcggagcttgcagtgagccaagatcacaccactgcactccagcctgggtgacagagcaagactctgtctcaaaaaaaaaaaaaaaaaaaggaaggaaaaagaaaaacacttgttcgtatatatatgtccaaacagcctagtcccctgtttcactgatatatgaggtattccatatctgcatagaatttcatacttggttgatttgtcatagatgttactgatgatgttttgatttgcaattctttttctttagggatttttctgaatgtcaatgaagagtttacgatagctttcatgtacctgttgtatgcaactacacrtaggtattccttcctttgagtgttctcaaccaaacaattgcctaataaatgtatttttaaagcat

SEQ ID NO: 212880 - DNA, 351 bp, Homo sapiens
tgcaataaccagatatctacaaataaaaaaaattgatctggaatgatatggcagtgycatggagcctcagttggtctcatatagctagtctcttgctgtccctgccggcagaccactctgtctcctacagggcatgcatgtgcaggatcaggtgatatgcgtgatcagtggctgcagcctagaaagatggcagagcaagagcaaagaaaaaaattccctttgattccagaatatctcctgaaaaagatgaagacttttcaagccctcaaagccatccaggcaaagtaggcacttctggtaaagaatgagcagaggaaaggaagaaggctcaggtttaagcgactggaattc

SEQ ID NO: 212881 - DNA, 597 bp, Homo sapiens
cccatatgcgtatgcatcagtctcttgactttccattctgttctgttgatttgtatttctctatgccaatgccattctaccttgattactgtagcttcctagaagtcctgaaatcagggagtgtaaggcctccaactttgttctttttcagaatgtttggctattctaggtcatttggttttccatataaattttagaatcaacttggcaaatcctttaaagaaaggtgttgggattttgattggtatttattgaatctataggtccatttggggagaattgctctattaacaatattgagatttccaattcatgaacatcaacattctccatttatttaggtcttatctatttttgttgtaagtgttcatagatttttggttttgcgaactacctacactgcctgtttttatgcggggacctgggaagattaaacaactatgctctcaccactgctgccatctttsctaaatctcttttaccaacttcttgaaaacaatgcttagttcattaatttttattcttttttattataaaaataggcatttgtgactataagatttcctctaagcactgctttagctgtatctggcaaat

SEQ ID NO: 212882 - DNA, 558 bp, Homo sapiens
tttataagtaaataaatatttttctcttgctaattctaggattatcgcttttacttttgatagtttgactatgaagtgccatggagaacacctttttgaattgcacctatttggatatcgttgagcttcctgtatctggatgtctaaatctcttgctagacttggtacattttcaactattttctcattatataggtttttctaacactttcatctactcttgaccttttgggattccaaaagtcaaacatttggttkctttatgtgttccattcagtctgggcacataaaaatgtgtggcagcttggctgctggtggcaatagagtcactgctggttgcccacaccatggccctggcagcagcagccatctgtgacagtggctgcaggtagaggatgtcggtggggctccaggaatatggagatgcaggctttgttggaccccagggcagggtgcagtttgttcaggcctgggctctcaaaatggcaccttgctgtagctgcctaaagctcagtgttgtatgagaagcatgagtttcttctcgagagcagtgctgtt

SEQ ID NO: 212883 - DNA, 551 bp, Homo sapiens
acaaatggaaagacattccatgctcatggattagaagaattggtattgctaaaaatgaccatactacccaaagcaatctacagattcaatgtgttccctatcaaaataccaatgtcatttttcacagaaatagaaaaaaatcctaaaatttgtatagaaccaaaaaatatcttgaatagccagagcaatcctgagcagaaagaacaaagtggaggtatcacactatccaacttataaatacatacaagtctatggtaaccaaaatagcattgtataggtataaagasagacacatagaccaatggaacagaatagagaacccagaaataaattaacatatttacagctaatggatttttgacaaaggcaaccaagaacatacactgaggagaagacaccttcttcaaaaaatggtcctgggaaaatctgacatttatttgcagaagaatgaaactggacccctatattttatcaaataaaacatcaatttgtctgggcgtggtggctcatgcctgtaatcccagcactttgggaggccaaagagggcggat

SEQ ID NO: 212884 - DNA, 602 bp, Homo sapiens
ctgcacactgactgcaggcacaggagtggatgagcatttggaaaaactcaatcaaaatgatctctacagggcctatgggagaggaggaggaacaagtgactgacccttttgcattcagattcttaatctgaaaggaaaaacaacctgctccatgaggttgttctcagcagtacatgagaacatgcaggcagagctagctttcagggccgagcatccagtaagtgtcccgctgccattagggggctggcctggcagttctgccctctagactagaggctgtgtcttcttcttctttgcacccccaccccaaaggtttgtagagctattgaggtatgtatttatttgtttattttctgctttgttctgaagacaattggttaaattattagaatcaagtggctacaatagtctatgttttgtttcttttgtgattgttgttgttgttgtctcactttacaaagaactaacattaactgagcaaatttgatttgacaaactagatggcttacatacattacctcatttgattccagtatattgtagaaagaaaacatgttacttcaaaacacatgayagaatacctttcaggaagagaactgtgt

SEQ ID NO: 212885 - DNA, 591 bp, Homo sapiens
ggaatataaattggtctattggaaagacacatgcatgcaaatgttcactgcagcactattcacaataacaaagacatggaatcaacctaaatgccaacgattgaattaagaaaatctggtacatgtacaccatggaataccatgcagccataaaaaagaacgagatcatgtcctttgtggggatatggagggagctggaggccattaccttagcaaactaacacaggagcagaaaatcaaataccacatattctcacttgtaagtggcagctaaataatgagaacacatggacacacagaggggaacaacacacactggggcctattggagtgtggaggttgggaggaaggagaggatcaggaaaaaaaactaatgggtactaggcttaatacctgggtgatgaaataatttgtactacaaacccccatgacacaagtttacatatgtaacaaaatccatgtwcccctgaacttaaaagtttaaaaaacaatcagtggcttccaggggttgggtgggtggggaggaatgaatatatggagcacaatgaagttttgggatagtaaaactgttctgcatgatactaaaatgtt

SEQ ID NO: 212886 - DNA, 525 bp, Homo sapiens
tacctaaagaaacctacagatttagtgcaatccctatcaaaacaccaatttcatttttcatagaaacagaaaaaaaatcatatattacaaggccacagtaaccaaaacagcatgatgttggtataaaaacagccatacagatcgatggaagagaaaagagaacccagaaataaatccacttatttgcagccaactgatttttgacaagatgccaagaacatacacyggggaatggacaccctctttagtaagtggtgctggggaaactggataaccacatgcagaataatgaactagacccctatctctcaccattacaaaaatcaactcaaaatgaattacagacctaaacaaaagactaaaattataaaactgctagaagaaaacataagggaaactctgctggacattagtctaggcaaagattttatagctaagacctcaaaagtacaggcaacaaaaatagacaaatggactatattaaactaaaaaccttttacacagcaaaggaaacaatcaacagag

SEQ ID NO: 212887 - DNA, 542 bp, Homo sapiens
tccatttagaactttgaagctgactagttctatgaataattgtacgcataccaggatataaagcttgtaattctcccatggtgttggaatggcagcaaaggctcaaagcagtggtcatgcctcctgcaagcagtgtgccacctcaaagcagtattcacacctcaaagtagtatgtcacacctcctatattccaataattgatcaagtgggggccagttccacatgaagtttctgatacctaaggctttaccactacatgttaaacaataaaatggaacaatmaaataattacatgatggtgcataaaatggtttcagagcattgtacgttgtcctctgttgtactagtttcattactttgcactttgtgcaagagcacactgttattgggagatcttctcagtcatataaaaagagagaaagcctaagtggaatgtaaattaaaacattatgttttgtagtaggatttgagtaagaggaaaagtatctctttggtatctcagaacagaaaggaaaagtattcacaatgtatgagagatgaaa

SEQ ID NO: 212888 - DNA, 542 bp, Homo sapiens
tccatttagaactttgaagctgactagttctatgaataattgtacgcataccaggatataaagcttgtaattctcccatggtgttggaatggcagcaaaggctcaaagcagtggtcatgcctcctgcaagcagtgtgccacctcaaagcagtattcacacctcaaagtagtatgtcacacctcctatattccaataattgatcaagtgggggccagttccacatgaagtttctgatacctaaggctttaccactacatgttaaacaataaaatggaacaatcaaataattacatgatggtgcataaaatggtttcagagcattgtaygttgtcctctgttgtactagtttcattactttgcactttgtgcaagagcacactgttattgggagatcttctcagtcatataaaaagagagaaagcctaagtggaatgtaaattaaaacattatgttttgtagtaggatttgagtaagaggaaaagtatctctttggtatctcagaacagaaaggaaaagtattcacaatgtatgagagatgaaa

SEQ ID NO: 212889 - DNA, 529 bp, Homo sapiens
aaacgttggattaactgttctgaaaatatctattgggtccatttggtttatagtgcagattcaatttgatgtttttttgttgattttctgtctggaagatctgtccaatgctgaaaagtagggtgttgaagtctccagctgttattgtattggggtctatttctccctttacctctaataatatttgctttctatatctcggtgctccagtattgggtgcatatatatttacaattgttacatcttcttgcaaaattgacccctgtatcattacataatgactttgttgtctctttttacagtttttgccttgaaatatatattgtctagtgtaagtatagctactcctgctcttcattttcctggaatttttttccatctttttattttcagtctatgcrtgtctttagaggtgaagtgtgtttcttgagggcaacaggtaggttgcgtcttgtttgtttttttccatgcaatcattctatgtcttttgattagagagtttattccatttatattcaatgccattatt

SEQ ID NO: 212890 - DNA, 435 bp, Homo sapiens
  misc_feature (1)...(435): n = A,T,C or G
ttctatgtcttttgattagagagtttattccatttatattcaatgccattattgataagtaaggacttactcctatcrttttgttattttgttttctggttatttttgngatcttctcttccttctttccttccttcctgtcatccttttagagaaagggattttctctggtggagtgttttaatttcttgcttttgattctgtatgtatcttttctacgtttttgatttaagattactctgaggctggcagataatatcctacaacccactattttaaactcatggaaacttaacactgattgcatgaacaaacaaagagaaaagtaataaaaaatctacactttaatttcattgtcccatttttaaatttgttgttgtttctatttatatgttattatactatgtctttaagagttgttgcagtttttatttt

SEQ ID NO: 212891 - DNA, 576 bp, Homo sapiens
taaattaccacagaccagagagcttaaacacagaaatttattttctcacagatctggatgttggaagttcaagataatggtatcctaatgcagatgatgggttgatgggtgcagcaaaccaccatggcacgtgtatacctatgtaacaaaactgcacattctgcacgtgtatcccagaatttaaagtatttaaaaaaaaaaaaagatcaaggtatcagcatggtaagtttctggtgagagctcacttcttgatttatacatggccaccttctcactatgtcctcccttggtctttccttggtgcttgtgcccagaaagtgacagagttctctggtgactcttcttatgaagacactaaccctttgggatcagggccccatccttmtgacctcatttaatcttaattacttccttataggctccatctccaaatacagtcacattgcgggtttgggcttcaacatatgaatttttgggggacaccaacatttagtccatcacaccaagtaagattcattttagacttttgacctcagaaattataagacaataaatttgttttatttaaagccatga

SEQ ID NO: 212892 - DNA, 546 bp, Homo sapiens
gaaatatctgtggtttcacattcacttctattttgagggtggttcactgtgaatagagtcggcctagagctttacytttactatgtaaaactcagatagaaaatatgcttttatacctgtgaaagtgaaagtaaacccaccatgatctaaagtgatctatatgaagattgtggcatgccttcatggaaaagagagatgaaattggaaaaaaaaaaaaaaaagccaaaaataatggctatgtgtcagcattcccagagccaaaggcaccctgtgaaaaattttaattgtggaattataacaaatgacatatcctatatgtatagaagtcaatggggagatggggttgacccctgaaggggtatctgtcaaggtttggatccatttttagttgtcgcaactggaggagagactgatattgtcagctggttgatagaagccagggatgccgctaaacatcctaaaatgcccagaacatcctcctgaaaacaaataattatccaccccaaaatactacagtgttgagaaaccctaatatagatgtaaaat

SEQ ID NO: 212893 - DNA, 602 bp, Homo sapiens
tatatttttcctagtgcatatttagaagtgatttgaaaagtggaatacctgttcaaattatccttcatagaatttatttatctatgaattcccatcagcaatttagaacagtgttcagttgcccagagccattcaggtatatattattatatttttgtgtggtttccaatacagtgagatatgttatcctgacatagttaaatgttttattatctcattttyaataacgttcagcattaaaaaagaaagggaagacatataatattttgtagtaaaaactgtaccagtgttagaaactaggatttccagctgtcagaaacttaaaggcatttgtaatttgttttgtagggaagattgaattgagagaggggacagccaacccacaatttacttcatgcaaagaaaagtatgcttaggaaataagggtatccctttcagcttcagcaaactcctccaacagccactctccccataagtgttaccaccagcagaactctaccaaagccaataaccccaaatggcaaatgatggatgagaacattggtatagcagtggagctacagaaaaagcaatgtctagatgacctcccagcagcctaaata

SEQ ID NO: 212894 - DNA, 602 bp, Homo sapiens
tatatttttcctagtgcatatttagaagtgatttgaaaagtggaatacctgttcaaattatccttcatagaatttatttatctatgaattcccatcagcaatttagaacagtgttcagttgcccagagccattcaggtatatattattatatttttgtgtggtttccaatacagtgagatatgttatcctgacatagttaaatgttttattatctcatttttaataacgttcagcattaaawaagaaagggaagacatataatattttgtagtaaaaactgtaccagtgttagaaactaggatttccagctgtcagaaacttaaaggcatttgtaatttgttttgtagggaagattgaattgagagaggggacagccaacccacaatttacttcatgcaaagaaaagtatgcttaggaaataagggtatccctttcagcttcagcaaactcctccaacagccactctccccataagtgttaccaccagcagaactctaccaaagccaataaccccaaatggcaaatgatggatgagaacattggtatagcagtggagctacagaaaaagcaatgtctagatgacctcccagcagcctaaata

SEQ ID NO: 212895 - DNA, 602 bp, Homo sapiens
tatatttttcctagtgcatatttagaagtgatttgaaaagtggaatacctgttcaaattatccttcatagaatttatttatctatgaattcccatcagcaatttagaacagtgttcagttgcccagagccattcaggtatatattattatatttttgtgtggtttccaatacagtgagatatgttatcctgacatagttaaatgttttattatctcatttttaataacgttcagcattaaaaaagaaagggaagacatataatattttgtagtaaaaactgtaccagtgttagaaactaggatttccagctgtsagaaacttaaaggcatttgtaatttgttttgtagggaagattgaattgagagaggggacagccaacccacaatttacttcatgcaaagaaaagtatgcttaggaaataagggtatccctttcagcttcagcaaactcctccaacagccactctccccataagtgttaccaccagcagaactctaccaaagccaataaccccaaatggcaaatgatggatgagaacattggtatagcagtggagctacagaaaaagcaatgtctagatgacctcccagcagcctaaata

SEQ ID NO: 212896 - DNA, 585 bp, Homo sapiens
ggaaactgaaaacatttgattcattttagagtgttggtgaaaaggttctttttaaaaagtgaaataaatgtctaatataaaactgtgattgctatggattaytcttcatcaaatattcatttcatttttcctcccattgtagtctgaagcattttcctatttcttcataattaggctttgccttgtggcttgtttgaccaatggaatattagcagctgtaacatgggcagtgatcttacatatgggtaagtggtttgctctgactcttggtctcaggtaaatagctactagaaaagcatcgtctaggtagcctctgctgctacatatccagagtgaacatatatcatctaagcatttgagactattaatgagaactttatatttttattttaaaaatcattcaaattttgaaatatttacaaaataaaaaatgctgaaggtaacttactagctaccataaacctactactagacttaacaaatatttctccattttgatggctatagcaagaaattaaaaaattcaccaaatttatgcaagaagtagaaaataaaattttaatggaggatcagaaatataaataa

SEQ ID NO: 212897 - DNA, 601 bp, Homo sapiens
aagcttcaaaaattagaatccagccctcaaaccccacaacaggaattaatcaacctcaccttcaaggtgtacaataatagagaggaggcagccagacagcaacgcatttctgagttacaattatttgcctctgctgtgagaaaaaacccagccacacctccakcacacaagaacttcaaaatgcctaagctgcacatgcctaagctgcagcagtcaagcattcctacaggacttcctccatcaggatcttgcttcaagtgtcagaaatctggccactgggtcaaggaatgcctgcagcccaggattcctcccaagctgtgtcccatctgtgcagggacccactcgaaatcagactgcctagctcacccagcagccactcctagagcccctaaaactctagcccaaggctttctgactgactccttcccagatctgcttggcttagtggctgaagactgacgctgtccaatcatcttggaagccccctggaccatcacggatgccaggctttgggtaactctcacagtggagggtaagtccatcccctgtttaattgctatgggggctacccactccacattaccttctttgcaaaggcctg

SEQ ID NO: 212898 - DNA, 430 bp, Homo sapiens
agatcttggagaaacaatgactgaaaagtttccttatatgtttgaaaatacatacatctacaaatccaggaaggtcgctgaatctccaatggagtaaatttatgcaaaatgcacataagcatataattgtcaaactgaaatccaaagggaaagaaaaaattctaacgggtaccacagtaaagaatgcatcrtgtaagagggagtaacaatctcattaacccaacgcattgacattttaaagtgctaaaagaaaacaactaaaaaacgattatcaacttagaatcctacatccagcaaaaatcgccttcaaaactaaaggtaaaatacatactttttcagataaatgaataaataataaatcaaagctgagagaatttgttgccatcatatctgcactataagaaatgtcaaaacttcttcaatctgaaga

SEQ ID NO: 212899 - DNA, 392 bp, Homo sapiens
ttacagtgctacaccctgtagcacctttggaaatggagttaagtctttcaggataattaagagactggtaaaccaacaaattaataaactatcttcaggtggcctcaaaaagataatatgattcytacaaagtgacaagcattcccagggagaattgcagacactagggatgtctggtctgtaacagcttagtaggccaaatttatcaacaatcttttaagtgaaaaacaaataatttaatttaaaaagtaaaatcttctacaaatgattttatataaaatatatttataggaatctttctcatgtacaacttcgtttttataaattatcagatgtcaagaataagcgtttgcacattatctcatgctgttcagtgtttggcttgaagccag

SEQ ID NO: 212900 - DNA, 573 bp, Homo sapiens
tttggaagaatccacaaagtgatatgtgggagcacattgaggcctaaggtgaaaaagtaaatatcatcagataaaagctggaaactagctttctgagaaactgctttgtgatgtgtgcattcatctcacagagttaagcctttctttggatttggcattttggaaacactgttgttgtaggatctgcatagcaatatcttggatcttaatgatgacaatggtgaaaaagtgaatatcccaggaaaaaaaaaactagaaactgctttgtgatgtgtgcattcatatctcagagttagaccttgcctttatttagcagtttggaaacaatgtttttgtagaatctgtaaaggtatacctgggagcgcattgaggtccatggtgaaaaatgaaatatcataaaataaatcaataaataagctttctgagaagttgatttgtyatatgtgcattcatctcacagagttaagcttttctatggattcggccatttgttaaaactgtttttctgcattctgtgaaaggacatttgggagttcatagaggccaatggcgaaaaacaaatatcccagaata

SEQ ID NO: 212901 - DNA, 315 bp, Homo sapiens
gagaaactgctttgagatgtgtgccttcatctcacagacttaaatgtttctttggattcaatagtatggaagcactgtttttgtcgaatctgtgaagaggtagttgggagtrcattgaggccaaaggtgaaaaagcaaatatcctgggataaaaactagaaggaagctacctgagaaatccctgggttatgtgtgcattcatcttgcagagttaaacctttccttttattcagcagtaaggaaacactgtttttgtagagtctgcaaagggacatttaggagctcattgaggccaaatgcgaaaaagtgaacagc

SEQ ID NO: 212902 - DNA, 601 bp, Homo sapiens
tttaactctgtgagatgaatgcacatatcacaaagtggtttttcagatagattctttctaatttttttcatgggatattcactttttggcctttggcttcaatgagctgtctaatatcccttcgcggattctacmaaaagattgcttgaaaactgctgaatccaaaaaacggtttaacactgttaggtgaatgcacacatcataaagcagtttctcataaagcttcttcctactttttgtctgaagatatttcctttttcaccataagcctccgtgctctcccaaatatccctttacagattctaccaaaacggtgtttccaaactgttgaatgaaaagaaaggtttaactctgtgatttgaatgcacccatcacaaagcagtttctcagatagctttcttctaagttttatccttggatattcactttttctccttggcctcaatgatctcccaaatgtccattcatagaacggacaaaaacagtgtttctacactgctgaatccaaagaacggttcaactcttagagatgaatgcacacatcacaaagcactttctcgtaaatcttctatcttgtttttttctgaagatatttccttta

SEQ ID NO: 212903 - DNA, 637 bp, Homo sapiens
tgtgaagagatacttgggaatgcattgaggcttacagtgaaaaaggaaatattttcagataaaaactagaaggaagctttctgagaaattgctttgtgatgtgtgcatttatctcacataattaaaactttcttcagatttggcagtttggaaacactgtttttgtccattctgtgaatggacatttgggagcacattgaggccaaagtgaaaaagcaaatatcccaggataaaaactagaagaaaggtatctgagaaaccgcttttctgctgtgtgctttcaactcagaattaatcctttcttttcattctgyagtttggaaacactgtttttgtagaatctacaaagggatattggggagtgctttgaggcctatgttgaaaaaggaaatatctccagataaaaactagaaagaagctttcttctgtgacactggtttgtgatgtgtgcattcgtctcagagagttaaacctttcttagtattcagcaatttgcaaacactgtttttgtagagtctgcacagggatattaggtagcttatttagccaatggcaaaaaagtgaatatcccaggataaaaaatacgagaaagctatctgagaaacagctctgcgatgtgttcaatcatcccacagag

SEQ ID NO: 212904 - DNA, 533 bp, Homo sapiens
ctgccaaaacggtgtatccagactgctgaatgaaaataaaagtttacctagggaagatgaatgcaaaaatcacaaagcggtttctcaggtagctgccttccacattttatactgggatattcactttttcaccattggcctcaataagttcccatatgcccattcacagaatggacacaaagagtctttgcaatttkctgaatccatagaaaggtttaactctgtgagataaatgtacacatagaaaagcattttatcagaaatcttatttttaatctgaagatatttcctttttcaccataggcctctatgcattcccaaatataacttcgcagattctacgaaaacagtgcttccaaagtgctgaatgaaaagaatgttttacatctgagagatgaatacgcaaatcaaaaagcggtttctcagataacttccgtcttgtttttttcctgggatattctgtttttccactttggcctcaataagctcccaaatatcccttcacagactctacaacaacagtgtttccaaac

SEQ ID NO: 212905 - DNA, 569 bp, Homo sapiens
aaactcctttgtgatgtgtacattgatgtcacagatttaagcatctctttgcattcagtcattaggaaccactctttttgtaggatctgcaaagtggtattgtggagctcattgaggccaaattgaaacagcaaacatcccaggataaaaacttgaagaagatatctgaaaaaccgctttgtgaagtgtgcattcatctcacagatgtaaaactttcttttcattcagcagtttggaaacaacatttttgtccattctgcgaatggacatatgggagytcattgagtccaaaggtgaaaaagtgactatctcaggataaacgttagaagaaagctaaatgaaaaaccgctttgtgatgtgtgcattcatctctcagagttaaacctttccttccattgagcaatgtggaaacactgttttggtacaatttgccaagggacatttgggagtggattgagacctatgttgaaaaaggaaatatcttcagataaaaactagaaagcagctttctgagaaactgctttgtgatgtatgcattcatcttgcagagttaaacttttctttggatt

SEQ ID NO: 212906 - DNA, 530 bp, Homo sapiens
tgcacacatcccaaatagtttctgagaaagcctctttctagtttatattttaaaatatatcctttttcaccataggcctccaggtgctctcaaatatccctttatggattcttccaaaacagtgtctccaagcagctaaatgaaaagccatgtttatctctgtgaggtgaatgcacacatcacaaaactgtttctcagatagcttacttctagtatttatcctgggatatttgctttttctctgttagcctcaatgagctcctaaatgtccacttgccgaatggacaaaaacagtgtttgcaaatggctgaatacacagaaaggtttaattctgtcaggggaaagcacatatcaaagcagtttctcagaaagattccttctagtttttttctgatgatatttcctttttcaccataggcttcaaagcgctcccagatattcgttcaaagattctatgraaacagtgtttccaaactgctgaatgaaaggaaaggtttaactatgcaagatgaatgtacacatcacaaagt

SEQ ID NO: 212907 - DNA, 570 bp, Homo sapiens
tcacttttgcatcactggcctcgatgaactcaaaaatttccattcgcagaaaggataaaaacagtgtttccaaactgctgaattaaaagaaaggtttaactatgtgagatgaaagaatgcatcacaaagcastttctcagaaagcttctttctagtttttatctgaagatatttcctttttcgccataggcctcaatgagctgccaaatatccctttgcagattccacaaaaaaagtgtttccataccggcgaatgaaaagaaaggtttaactctgctaaatgaatgtccccatcacaatgcagtttctcagatagcttccttctagtttttatcctgggatattcgctttttcaccatttgcctcaatgagatcccaaatgtccattccaagaatggacaaaaacagtgttcccaaactgctgaatccaaagaagggtttaactctctgagatgaatgcacacataccaaaccagtttctcattaagtttctttctagtttttctctgaaggtatttccttttacaccattggcctccatactcttccaaatatctctctgcagattct

SEQ ID NO: 212908 - DNA, 546 bp, Homo sapiens
ttcctttttcactgtaggcctcaaatgcactccagatatcccttcacactttctacaaaaacagtgtttccaaattgctgaatgacaagaaatgtttaactctgtgagactaatgaacacatcaccaagaggtttctcagattaatttyttctagtttttttttcctggaatatttgcatttccgccattggcctcagtgagctcccaaatatccctttgcagaatctacaacaacagttttttccaactgatgaatccaaagagaggtttaacactgtgagatgaatgcacacatcacagagccgtttctcagagagtttctttcttttatctgaagatagttcctttacaccataggcctcagtgagctccaaaacatccctttggggattctgccaaaacagtttttccagactgctaagtgaaaagaaagttttatccatacaatgtgaatgcacacatcacaaagcagtttctcagattgatttcttctagtttttgtcctaggatattcactttttctccattggcctcaatgagctctc

SEQ ID NO: 212909 - DNA, 562 bp, Homo sapiens
tgaaaagcaacgtttatctctgcgaggtgaatgtcacatcacaaaactgtttctcagatagtttctttctagtttttatcctgggatattcccttttttgccattggcctcaatgagctcccaaatgtccatacgcagaatggacaacaacagagttttcaaactgctgtatccaaagtaaggtttaactctgtgagatgaatgcacacatgtgaaagyagtttctcagaaagcttctttgtagtttttatctgaggttatttcgtttttcaccataggcctcaatgcactcctagatatcactttgcagattctacaaaaatattgtttccaaactgctgaatgaaaataaaggtttaactctgcgagttgaatcctcacttcacaaagcagtttctcagaaagtttctttcttgtttttgtttgaaaatatgtcctttatctccatcagcctctatgcgttcccaaataacccttcggggattctgccaaaacagtgtttccagactgctaaatgaaaaacaatgtttatctctgcatggtgaatgcacacatcaccatg

SEQ ID NO: 212910 - DNA, 518 bp, Homo sapiens
tgaatgcaaacatcaaaaagctgtttctgagatagctttcttctagttttatcctggggtattttccttttcaccattgrccaaaggacctccaaaatgcccattcatagaatggacaaaaacagtgtttgcaaactgctgcatccacagaaaggtttaaatctgtgagaggaatgcacacatgacatagcaatttcccagaaagcttcttgctagtttttatatgaggataattcctttttcaccggaggcctcactgcactccaaaatataatttgcaaattctacaaaaaaaaaaaggtgtttccaaactgctgaatggaaagagtggtgtaacatcacaaagcggtttctcagataactttcttctatttttttcctggaatatttgctctttcatctttttcctctgtgagctctgaaatatcgcttcacagattcacaacagtgttcacaaactgcagaatgcaaagaaaggtttaactctgtgagatgaatgtacacatcacaaagtagtt

SEQ ID NO: 212911 - DNA, 518 bp, Homo sapiens
tgaatgcaaacatcaaaaagctgtttctgagatagctttcttctagttttatcctggggtattttccttttcaccattgaccaaaggacctccaaaatgcccattcatagaatggacaaaaacagtgtttgcaaactgctgcatccacagaaaggtttaaatctgtgagaggaatgcacacatgacatagcaatttcccagaaagcttcttgctagtttttatatgaggataattcctttttcaccggaggcctcactgcactccaaaatataatttgcaaattctacaaaaaaaaaaaggtgtttccaaactgctgaatggaaagagtggtgtaacatcacaaagcggtttctcagataactttctyctatttttttcctggaatatttgctctttcatctttttcctctgtgagctctgaaatatcgcttcacagattcacaacagtgttcacaaactgcagaatgcaaagaaaggtttaactctgtgagatgaatgtacacatcacaaagtagtt

SEQ ID NO: 212912 - DNA, 518 bp, Homo sapiens
tgaatgcaaacatcaaaaagctgtttctgagatagctttcttctagttttatcctggggtattttccttttcaccattgaccaaaggacctccaaaatgcccattcatagaatggacaaaaacagtgtttgcaaactgctgcatccacagaaaggtttaaatctgtgagaggaatgcacacatgacatagcaatttcccagaaagcttcttgctagtttttatatgaggataattcctttttcaccggaggcctcactgcactccaaaatataatttgcaaattctacaaaaaaaaaaaggtgtttccaaactgctgaatggaaagagtggtgtaacatcacaaagcggtttctcagataactttcttctatttttttcctggaatatttgctctttcatctttttcctctgtgagctctgaaatatcrcttcacagattcacaacagtgttcacaaactgcagaatgcaaagaaaggtttaactctgtgagatgaatgtacacatcacaaagtagtt

SEQ ID NO: 212913 - DNA, 607 bp, Homo sapiens
tgtcttctcattcttttgacattgtcttttgcagagcagaagtttttaactttaataaaattcagtttatcaattatttctttcatggactatgcctttggtgctgtatctaaggactaatcaccatacccacggtcatctcagttttcccatatgttatattccaggagttttacttctgcatttgacatttaggtttatgatctattttgagctaacttttgtgaatggcataaagtctgtgtctggattaaattttctgcatgtagttgtgcagttgttccagcaccacttatactatatttttacttttaaagtgattcctatagagtttgcaatatacgtcrtatacatttaccatgaatataagtccactttaaaataacactctatcactttatgagttatgaaaatactttattgtgaaataattctaatttctccctctcccccatttatatatacacatacctgcatgcttatgtgtatgtatatacacacattagatataagcatatataactgagtacattgttggtattatatttttaacaaactgttacctgttcgatcaactaagaataagaaaaagtaagatgttttactt

SEQ ID NO: 212914 - DNA, 587 bp, Homo sapiens
ggtatttcagcagacaacaagagcttcacggtttgttatgacccagcattagaaatcacataacataacttccaggtcactgtattaatggaagaagtcacaggctgacccagattcaaggggagaggacttagctgccagctctcaatgggagaagtatcaaagaacttacaactatgttttaaaactaccacaaataataacttcacatacacatgtgattttgatcatcagaataattcaattataccaacaaaagtaagtaatgttatattctaaacacatggaatatttggattgaaagaaatatttataactcaagaaatgttttacatacattttaaaggaaatctacacaattctacattatacaaatgtagaattcttttaaaatattatattacattaagatggatattaaactgcataagaattcaaataatttaatagacctctgagacttccttcatccattccttggggaggcatgaactattaaayatataacaatttacattacaataattatattaaaacaatttacaaaattttaaatttatgtaaatataaaaatgaccataaggcat

SEQ ID NO: 212915 - DNA, 636 bp, Homo sapiens
tcaattcaaactcatctacttctcaaggagacatctgatgtgtgggttacatgtagatgtatgcacaggaggaagtggtgaaataaatgcagagggctgaggtccctattctgtttcccatgataaatccatcttttgattgtcaataatgcctgaatggatggggcttacatgggttccattgtactttgtgcttccatgcaatttggttcatacctcttttaaagcacttgatataggtggctttatagttactcagtttgatgcttctttttcccaaygagactggttggtttttgaagctgtgtttcattatattcacttgtgtgtcaccagcacccagtacagtatctgacacccaggagatgatcaaaatgctcgctggttttgttaaaatctgatatgcacacatgtgtttaaataggggcaattggctctcaagaatcactcaaagcaaagtctcaaaaatatttcgttttagagaaagaagtaagtagctatagattctgcttcctagctattctcagctctctactttctgtgctatttttggccccaaccctcagttgctgggtggagtgatggcactagttctgaatatcaaggtatgagcagagctgagatgtgtcgattcat

SEQ ID NO: 212916 - DNA, 636 bp, Homo sapiens
tcaattcaaactcatctacttctcaaggagacatctgatgtgtgggttacatgtagatgtatgcacaggaggaagtggtgaaataaatgcagagggctgaggtccctattctgtttcccatgataaatccatcttttgattgtcaataatgcctgaatggatggggcttacatgggttccattgtactttgtgcttccatgcaatttggttcatacctcttttaaagcacttgatataggtggctttatagttactcagtttgatgcttctttttcccaatgagactggttggtttttgaagctgtgtttcattatattcacttgtgtgtcaccagcacccagtacagtatctgacacccaggagatgatcaaaatgctcgctggttttgttaaaatctgatatgcacacatgtgtttaaataggggcaattggctctcaagaatcactcaaagcaaagtctcaaaaatatttcgttttagagaaagaagtaagtagctatagattctgcttcctagctattctcagctctctactttctgtrctatttttggccccaaccctcagttgctgggtggagtgatggcactagttctgaatatcaaggtatgagcagagctgagatgtgtcgattcat

SEQ ID NO: 212917 - DNA, 556 bp, Homo sapiens
caaataaacaagcttaatttcagagagggagaaatgatatgaagcacatcagtcaggagaatgtgctgraagatgattactgggctcattctatcaggtggcccagcaggccacggtgaagaagaaccaatgtgttgaaaactctgacaacaatcttatgacatgggaattacttttattcccattttataaacagaaagattaaattactgaaaccaaattgttgttgccctaataaaatatatacgcttttctctgattgcaaatttaacacttgtttatgatagaaaacaaaactaaggacaaaaaaaaagtcatctgtgatcgtatggctaacactgtgtgtgtatactatcttctttttctgtatgtatctacataatatgtttaacaaatggaattgccctaagaataacatctgtaacttgtttttttccattaagcaatatttttccatgccattaaagagtcttataaacatcagctttaatagctgtaaagtctcacattacatggaagaatcattatataatggtttctttagtctcttaaaata

SEQ ID NO: 212918 - DNA, 556 bp, Homo sapiens
caaataaacaagcttaatttcagagagggagaaatgatatgaagcacatcagtcaggagaatgtgctgaaagatgattactgggctcattctatcaggtggcccagcaggccacggtgaagaagaaccaatgtgttgaaaactctgacaacmatcttatgacatgggaattacttttattcccattttataaacagaaagattaaattactgaaaccaaattgttgttgccctaataaaatatatacgcttttctctgattgcaaatttaacacttgtttatgatagaaaacaaaactaaggacaaaaaaaaagtcatctgtgatcgtatggctaacactgtgtgtgtatactatcttctttttctgtatgtatctacataatatgtttaacaaatggaattgccctaagaataacatctgtaacttgtttttttccattaagcaatatttttccatgccattaaagagtcttataaacatcagctttaatagctgtaaagtctcacattacatggaagaatcattatataatggtttctttagtctcttaaaata

SEQ ID NO: 212919 - DNA, 556 bp, Homo sapiens
caaataaacaagcttaatttcagagagggagaaatgatatgaagcacatcagtcaggagaatgtgctgaaagatgattactgggctcattctatcaggtggcccagcaggccacggtgaagaagaaccaatgtgttgaaaactctgacaacaatcttatgacatgggaattacttttattcccattttataaacagaaagattaaattactgaaaccaaattgttgttgccctaataaaatatatacgcttttctctgattgcaaatttaacacttktttatgatagaaaacaaaactaaggacaaaaaaaaagtcatctgtgatcgtatggctaacactgtgtgtgtatactatcttctttttctgtatgtatctacataatatgtttaacaaatggaattgccctaagaataacatctgtaacttgtttttttccattaagcaatatttttccatgccattaaagagtcttataaacatcagctttaatagctgtaaagtctcacattacatggaagaatcattatataatggtttctttagtctcttaaaata

SEQ ID NO: 212920 - DNA, 556 bp, Homo sapiens
caaataaacaagcttaatttcagagagggagaaatgatatgaagcacatcagtcaggagaatgtgctgaaagatgattactgggctcattctatcaggtggcccagcaggccacggtgaagaagaaccaatgtgttgaaaactctgacaacaatcttatgacatgggaattacttttattcccattttataaacagaaagattaaattactgaaaccaaattgttgttgccctaataaaatatatacgcttttctctgattgcaaatttaacacttgtttatgatagaaaacaaaactaaggacaaaaaaaaagtcatctgtgatcrtatggctaacactgtgtgtgtatactatcttctttttctgtatgtatctacataatatgtttaacaaatggaattgccctaagaataacatctgtaacttgtttttttccattaagcaatatttttccatgccattaaagagtcttataaacatcagctttaatagctgtaaagtctcacattacatggaagaatcattatataatggtttctttagtctcttaaaata

SEQ ID NO: 212921 - DNA, 579 bp, Homo sapiens
aacaaaactaaggacaaaaaaaaagtcatctgtgatcgtatggctaacactgtgtgtgtatactatcttctttttctgtatgtatctacataatatgtttaacaaatggaattgccctaagaataacatctgtaacttgtttttttccattaagcaatatttttccatgccattaaagagtcttataaacatcagctttaatagctgtaaagtctcacattacatggaagaatcattatataatggtttctttagtctcttaaaatagatatttatgtcatttcaattttttattcttataaaggatgctgtgataaaccacctgrtaataataacagctaatgtttattcagtttatgtggaatgcattgtggtaagcaatttacaactttcaactaatttaatgtgtacccaaatcctatgaaatggatacaatgaaaatcttccctttagaaacgaagtaaactcagacgaaaagaagttaaacaatatggtcgaggtcacacattcagtaaactacagagctaaaacttgaacttaagacatttctgttccagagcatacacataaccattgcac

SEQ ID NO: 212922 - DNA, 317 bp, Homo sapiens
ctcagtttctttctggttctggcttaggagggtgtatgtatccaggaatttatccatctctcttagactttctagtttgtgtgcatagaggtgttcataatattctctgatggttattcatatttctgtgttgtcagtggtaatatcccctttgtcatttctaattgtgtttatttggaacttctttattttctttattggtctagctagcagtctatctattttactacttttttcaaaaaaccaactcctgaattttgactttgtgaatggtttttcargtttcaatttccttcagtttagctctactgtttgtt

SEQ ID NO: 212923 - DNA, 317 bp, Homo sapiens
ctcagtttctttctggttctggcttaggagggtgtatgtatccaggaatttatccatctctcttagactttctagtttgtgtgcatagaggtgttcataatattctctgatggttattcatatttctgtgttgtcagtggtaatatcccctttgtcatttctaattgtgtttatttggaacttctttattttctttattggtctagctagcagtctatctattttactacttttttcaaaaaaccaactcctgaattttgactttgtgaatggtttttcaggkttcaatttccttcagtttagctctactgtttgtt

SEQ ID NO: 212924 - DNA, 440 bp, Homo sapiens
taggcctctcaatccattttttagcccccattaatgagctataatactgtttaaataacactgttatgggtgttggaaatatatgcgctatcatcaaaggattttgattacaggagacatagtttagagtgttacttcaactgggtcactctgatagcagtcattagctgtctgaaratgattttgagtcatttgccaagctcaggcaaaagagaaaaggggagacaaaatcaagtctacttagatgccacaaaaaataaattgaataacttagagtctccactaaaattataattctttattagaagaatgttaaagaaatgatccgaggaccactattcttgaatatccttaaaagtgcaatacaaagccagttagattagcagggttactgacatacccgcctgaaggaaaggaaacaaacaggcgaccactggtgc

SEQ ID NO: 212925 - DNA, 433 bp, Homo sapiens
atggagtaggcctctcaatccattttttagcccccattaatgagctataatactgtttaaataacactgttatgggtgttggaaatatatgcgctatcatcaaaggattttgattacaggagacatagtttagagtgttacttcaactgggtcactctgatagcagtcattagctgtctgaagatgattttgagtcatttgccaagctcaggcaaaagagaaaaggggagacaaaatcaagtctacttagatgccacaaaaaataaattgaataacttagagtctccactaaaattataattctttattagaagaatgttaaagaaatgatccgaggaccactattcttgaatatccttaaaagtgcaatacraagccagttagattagcagggttactgacatacccgcctgaaggaaaggaaacaaacagg

SEQ ID NO: 212926 - DNA, 599 bp, Homo sapiens
tgctcagagttcttcatacaagtctctagatagttgcttaggacagattgttacaattaccagacattaaatctttaagtgtcttgatccatatagccaaatttgttttcataataataatatcaatgtacactgccacggacagcrcacggtcatccatctaattgctctcaacaatagcaatatactctctaactattgcttacatagtaggtgaaaagagtttttgaatgtgattaaatagtggggtgcctacactattgttaaagcataataagattagaatgtctagctcaacttctgagtttatttcctgttctactaaaaacccaacagaatgacattaaagaaacttgaggggaaaaaggataagccagaagcacaaggaaaatgggaagaaaattcttgccatgctatcaccaggcaagagagtcaacacatttctcaaagatgaaaaactaaggaaatagtgttaattgtgatggatatgccccacaaaatggagctaaagcaatgggttcagttatttagcttagcttataccccaagacacaggaatacaattaatgtacattcaatggagggcaggaaggagaagg

SEQ ID NO: 212927 - DNA, 584 bp, Homo sapiens
tatgctcagcaccacctcccagattattctttcagccatgtctaattaattattcaaacaactagttgtcccaattgcctaaagtctggctctccttargcctttccccaccctcaatgcagaatgtcatccaggatctcaagttgcatttagttgtctatccactcagttgatgggcatttatgctggttccatatttttgcaattgtgaattgtgctgctataaacatgcatgtgcaagtgtctttatcatagaatgacttcttttcctctgggtagataaccagtagtgggattgctggatcaaatggtaggtctacttttagttctttaaggaatctccatactgttcttcagagtggttgtactagattatattcccatcagcagtgtaaaagtgttccctttttaccacatccatcccaacatctattattttttatttttaattatggctattcttgcaggagtaagttggtgtcgcattgtggttttgatttgtatttccctgattattagcaatgttgaacattttttcatatgtttgttggccacttgtatgtcttcttttgagaattctctat

SEQ ID NO: 212928 - DNA, 584 bp, Homo sapiens
tatgctcagcaccacctcccagattattctttcagccatgtctaattaattattcaaacaactagttgtcccaattgcctaaagtctggctctccttaggcctttccccaccctcaatgcagaatgtcatccaggatctcaagttgcatttagttgtctatccactcagttgatgggcatttatgctggttccatatttttgcaattgtgaattgtgctgctataaacatgcatgtgcaagtgtctttatcatagaatgacttcttttcctctgggtagataaccagtagtgggattgctggatcaaatggtaggtctacttttagttctttaaggaatctccatactgttcttcagagtggttgtactagattatattcccatcagcagtgtaaaagtgttccctttttaccacatccatcccaacatctattattttttatttttaattatggctattcttgcargagtaagttggtgtcgcattgtggttttgatttgtatttccctgattattagcaatgttgaacattttttcatatgtttgttggccacttgtatgtcttcttttgagaattctctat

SEQ ID NO: 212929 - DNA, 609 bp, Homo sapiens
agaattctctattcgcgtccttaactcactttttgatgggattattattattattattgctgattttgttttgcttagccttagctttggctatgcagggtcttttattgttcatatgaattttagaatattttctctagttctgtgaagaattatggtggtattttgatgggaattgcrttaaatttgcacattgcttttggcattacggtcattttcacaatattgattctacccatccatgagcatgggatgtgtttctatttgtttatgtcatctatgattcatttcagcagtgttttgtagtttctcttggagggctctttcacatccttggttaggtttaatcctaagtattttttattttatttttggcagctgttgtaaaagggattgagtctttgatttgattttcagcttggtcactgttggtgtataggtgctatttatttgtctacatcgattttgtatcctggactttactgaattcatttatcagagctagttgctttttggatgagcctttagagtcttctaggtatacaatcatgtcatcagtgaacagagacaatttgacttcctcttcaccaatttggatgccctttattt

SEQ ID NO: 212930 - DNA, 609 bp, Homo sapiens
agaattctctattcgcgtccttaactcactttttgatgggattattattattattattgctgattttgttttgcttagccttagctttggctatgcagggtcttttattgttcatatgaattttagaatattttctctagttctgtgaagaattatggtggtattttgatgggaattgcgttaaatttgyacattgcttttggcattacggtcattttcacaatattgattctacccatccatgagcatgggatgtgtttctatttgtttatgtcatctatgattcatttcagcagtgttttgtagtttctcttggagggctctttcacatccttggttaggtttaatcctaagtattttttattttatttttggcagctgttgtaaaagggattgagtctttgatttgattttcagcttggtcactgttggtgtataggtgctatttatttgtctacatcgattttgtatcctggactttactgaattcatttatcagagctagttgctttttggatgagcctttagagtcttctaggtatacaatcatgtcatcagtgaacagagacaatttgacttcctcttcaccaatttggatgccctttattt

SEQ ID NO: 212931 - DNA, 471 bp, Homo sapiens
cttaactcactttttgatgggattattattattattattgctgattttgttttgcttagccttagctttggctatgcagggtcttttattgttcatatgaattttagaatattttctctagttctgtgaagaattatggtggtattttgatgggaattgcgttaaatttgcacattgcttttggcattacggtcattttcacaatattgattctacccatccatgagcatggratgtgtttctatttgtttatgtcatctatgattcatttcagcagtgttttgtagtttctcttggagggctctttcacatccttggttaggtttaatcctaagtattttttattttatttttggcagctgttgtaaaagggattgagtctttgatttgattttcagcttggtcactgttggtgtataggtgctatttatttgtctacatcgattttgtatcctggactttactgaattc

SEQ ID NO: 212932 - DNA, 471 bp, Homo sapiens
cttaactcactttttgatgggattattattattattattgctgattttgttttgcttagccttagctttggctatgcagggtcttttattgttcatatgaattttagaatattttctctagttctgtgaagaattatggtggtattttgatgggaattgcgttaaatttgcacattgcttttggcattacggtcattttcacaatattgattctacccatccatgagcatgggatgtgtttctatttgtttatgtcatctatgattcatttcagcagtgttttgtagtttctcttggagggctctttcacatccttggttaggtttaatcctaagtattttttattttatttttggcagctgttgtaaaagggattgagyctttgatttgattttcagcttggtcactgttggtgtataggtgctatttatttgtctacatcgattttgtatcctggactttactgaattc

SEQ ID NO: 212933 - DNA, 566 bp, Homo sapiens
taattattgcctgggaagaatagggaggaatagagaaggactactaattggtatggggcttattttaaaagtaacgaaaattttccaaaatgatattgtggtgatggctgaacaactctgtgaatataataaaaaccattgaactatatattttaaatgggtaaattgtatggtatgtgattatttctcagggaagatatatacyggttcaagatatgggacatacccaatagacaacttgcacagcactctaggttgacttttccagttctgtgttactggaatagtgctatatcaatttatgaatgttacctatagacataagaatctactttactgagtttaagcacaaagggatttaacgaatatcaagtttctcacagaacttctacgtggtctagagatccaaacttgggtgctggaaaaaaataggtcaggtggaggcaaccccagtaggagaaataccaagccacacaccacggtactcaaacaccttgcacaatattttttaatacaaaagttattcatagaacaataaaggggacaaattcccaaacattcagtgg

SEQ ID NO: 212934 - DNA, 524 bp, Homo sapiens
caatttccagttctacattacccacccccagctcctcaatgtggttcatctaaatatctgccttataaaatatctccttcatggccagtcactacagaacagctagagtcagcttacttgaygacctgttgacctcacaccctgcatgaactgtgcagcagtcactgcatcacctcctggaacttgtacctccttgctttaaatccactaattaaaactctttgcaggaaacctgtttgaaaaatgctatggaccacactacattgttgacccatgagtttctttctttttcttcctgacttctgaatatatggcttcaaggcctgccttggaccgtccagggtctataagtattaaaactttaatactttcacattatatcattgaagccatgcccacaatccagcctctgagagggagaccacctgtggatccacgaaggtgaatctcttgctggtgctcctttgtccaggtgtctggtggctgctggagatggtagctgccagctaagtttagatgtttcg

SEQ ID NO: 212935 - DNA, 569 bp, Homo sapiens
tgtttggtataaatttcaaacaccacattcttcacgaacattttcacatttctcctgaactaaatgttgtcgttccttatatgaaatatattttttgctcttttatagaacattgtgttttgtttctggttaaataccactttatgttgaccacccccaagtccttagtggataacaaatagccaatattatttttcatgtattttgaggattggctaggaggtttctctgctgagtttgcctatggtcatgtatgtgtctgcattcagctgggagctcagctcagcaggaaggctccagacggtcttattcatgtcsggcagcttgcaccagctgctggctggtgtgccctgtttctttttttttcaacctgttcttccattcacctattggctagactacctcattccattgataaaagaaatagagagagccagttttcatttaatagagagagccagttttcatttaaggactgaagaatgaatttcacttcttgatgcgaaggatgtaaggccacttttactgtattacacatttcatattttggttgtgcttttattcttaca

SEQ ID NO: 212936 - DNA, 485 bp, Homo sapiens
attaatttaatgcctatatttttctcacgtacatgtaattacatacatatttcaaataaatacttggttgtttattttccttccacttaagcatatttaaaacaaagttgaatattcacctaatttcccctaaacaaaatgagcattggtatacaagggtaaaatgatgaaagtcatatttttaacaatatttccttatatgtgtcatcgaggaaattatctaatcttttttagtctctatttattcatctgtaagatagaaaatagcaattttttccagattgcatacctctaaaacactgtaattctctatatgccycttagctgtgtaacacactaatacaaaattagaggattcattagctgttattttgctacccatcagtttcattaataggagctttacaatttggaaggggggaaaatagcactagataattaatgaaccagatattaagcctaaatatatattcacacattactca

SEQ ID NO: 212937 - DNA, 627 bp, Homo sapiens
gtatgttccttgtggagaccagaagaatgtacattttgtgattgacgagtgcagttttctgtagatgcctattaggtccaaatggtcaagtgtcaaatttaagtccagtattttttttgttacttttctgccttcatgatctatctaacattgttagtggggtgtcaaagtacccactattattgtgtgactgtctaagcctttttataagtctagaagtacttgttttatgaatccaggtgttccaatgtttagtgcataaataggtgcatatatgtttaggataactaagtctgcttgttgtatcgaacactttatcactatgtaatgcccttctttgtccttttatactgttgttagtttaaactctattttttatgatacaaaaatgatgactcctcctcttttttgctttccatttgtgtgatagatttttcttcattcctttactttgagtccgtgttacaaaaagatggcaattagactggaaaattccatcaaacaatcttgttggytcaacaattgaattataagaaaaacaaaaagaagggaggggagctttaggttaaaaataccaagtgcatcaaccactttcaatgtattaatctcataatcctaactaaaaca

SEQ ID NO: 212938 - DNA, 627 bp, Homo sapiens
gtatgttccttgtggagaccagaagaatgtacattttgtgattgacgagtgcagttttctgtagatgcctattaggtccaaatggtcaagtgtcaaatttaagtccagtattttttttgttacttttctgccttcatgatctatctaacattgttagtggggtgtcaaagtacccactattattgtgtgactgtctaagcctttttataagtctagaagtacttgttttatgaatccaggtgttccaatgtttagtgcataaataggtgcatatatgtttaggataactaagtctgcttgttgtatcgaacactttatcactatgtaatgcccttctttgtccttttatactgttgttagtttaaactctattttttatgatacaaaaatgatgactcctcctcttttttgctttccatttgtgtgatagatttttcttcattcctttactttgagtccgtgttacaaaaagatggcaattagactggaaaattccatcaaacaatcttgttggctcaacaattgaattataagaaaaayaaaaagaagggaggggagctttaggttaaaaataccaagtgcatcaaccactttcaatgtattaatctcataatcctaactaaaaca

SEQ ID NO: 212939 - DNA, 553 bp, Homo sapiens
gagccaggattataccactgcattccagctggtacaacagagtgagactctgtgttttgttttttttttctttagtcaacagaggcttacgtttaaacactcacaattgtgcatttgacctgaagtttgtttgtgttttccctataatttgttaaagaaactgggccagaatgcactctgcctaacrgtagttcaacttgttcttttggtaaatgccttcaagttttaccttgtttctcaaaagggcaagtttctgaggcttcttttcaaatagaaatgatcaattcaagaaacttatttgagagtgtgttcggccgttcttgcatttatataaagaaatacctgagactgggtaattatttaaaaaggaggcggggtggttagatgaatcacagatgtgcaggctgtacaggaaacatagtgccagcatctgcttctggggagtcctctggaaacacaatcatggtgaaaggcaaagcaggaccttgcacatcacatgggcaaaagcaggggagacagagagagacagagagagaggccatacggttttaaa

SEQ ID NO: 212940 - DNA, 531 bp, Homo sapiens
accaaatccagtggaatgcaaccatgagacacacagaaagtcattaaaacctcaggaaaaaaatgattcaaaaccttagtcataagggctaaagcttcccacawaacttatgacatatttttaaataactaaaagaatagaaatggtaaatttctaacccaaagtataaatgctcaatacgatgaatactccagttaccctaatttgatcattacacattgtatacctgtatcaaaacatcacatgtaccccatagttatacaccattatttacccataataattaaacattttaaattataaaacagaaggtgcatgtcataaatccatggtataatctttggagttgataactaaatatatttataactacatttattaagatacatggatgtcaatatccataattaaattgtcattttgtaataaagattcttttggtctaaaaaatattttggttgctataaagcatgcagttaaagaatttatccaagtacttccataaaaatgcctaaaattggtaaatcttgt

SEQ ID NO: 212941 - DNA, 531 bp, Homo sapiens
accaaatccagtggaatgcaaccatgagacacacagaaagtcattaaaacctcaggaaaaaaatgattcaaaaccttagtcataagggctaaagcttcccacataacttatgacatatttttaaataactaaaagaatagaaatggtaaatttctaacccaaagtataaatgytcaatacgatgaatactccagttaccctaatttgatcattacacattgtatacctgtatcaaaacatcacatgtaccccatagttatacaccattatttacccataataattaaacattttaaattataaaacagaaggtgcatgtcataaatccatggtataatctttggagttgataactaaatatatttataactacatttattaagatacatggatgtcaatatccataattaaattgtcattttgtaataaagattcttttggtctaaaaaatattttggttgctataaagcatgcagttaaagaatttatccaagtacttccataaaaatgcctaaaattggtaaatcttgt

SEQ ID NO: 212942 - DNA, 517 bp, Homo sapiens
tgataattacatgcataactggtatgaaatattattaaacctggcattttaaaagtgtatttcccattcccctgaaaagtgtatgcaaatgaaaagcgatatgaggctgctcattgagctaaataaactgagacaagagttagatgactcatttaacatatttaggaaaatgacatgatagaatgcatttctaatctgtgacataaaaggaaacagacctgtttttggtggtgttcagtggtttcctcatttatggcaaaggggaattttctaattaatttatagcctaaaattaacttttcaatygagctatgaccaggaacagacagctggtatcccctcagttgtattacacctggtaccactcaagagatctaaaaggaaaaaaagttgggcctttgctcacatgatagtatgcatttccagatttattatgtggagatagaccatattaagcacatggttctctcaacatctttgtactactttactaaaaaatcagatcatcagtttcata

SEQ ID NO: 212943 - DNA, 517 bp, Homo sapiens
tgataattacatgcataactggtatgaaatattattaaacctggcattttaaaagtgtatttcccattcccctgaaaagtgtatgcaaatgaaaagcgatatgaggctgctcattgagctaaataaactgagacaagagttagatgactcatttaacatatttaggaaaatgacatgatagaatgcatttctaatctgtgacataaaaggaaacagacctgtttttggtggtgttcagtggtttcctcatttatggcaaaggggaattttctaattaatttatagcctaaaattaacttttcaattgagctatgaccaggaacagacagctggtatcccctcagttgtattacacctggtaccactcaagagatctaaaaggaaaaaamgttgggcctttgctcacatgatagtatgcatttccagatttattatgtggagatagaccatattaagcacatggttctctcaacatctttgtactactttactaaaaaatcagatcatcagtttcata

SEQ ID NO: 212944 - DNA, 406 bp, Homo sapiens
atatagtaggctctcagtaaatatttgctaaatgaatagttgtattgaaatggcaataatcaccttatatgtgtrttttatccaggaacattcaactgttcagaactagccttagaaaagtaagaagataattaggcccacacaagtttggatttgtgtgtggaagaagacacatgcataggagtaaaggatgtttttaaaaggatgattttaatagttaattatggaatttaaactagtcatgatggcaagtgaagatgaacatagtgatgaataatgaaaacttatgaaagtcaagggacttgcggtcttgaggagtcaaagcattgatgtaagattgctaaagatggaagctggagagcctggtggtgttgtttatagtgggctttctgaaattaaaagatct

SEQ ID NO: 212945 - DNA, 406 bp, Homo sapiens
atatagtaggctctcagtaaatatttgctaaatgaatagttgtattgaaatggcaataatcaccttatatgtgtgttttatccaggaacattcaactgttcagaactagccttagaaaagtaagaagataattaggcccacacaagtttggatttgtgtgtggaagaagacacatgcataggagtaaaggatgtttttaaaaggatgattttaatagttaaytatggaatttaaactagtcatgatggcaagtgaagatgaacatagtgatgaataatgaaaacttatgaaagtcaagggacttgcggtcttgaggagtcaaagcattgatgtaagattgctaaagatggaagctggagagcctggtggtgttgtttatagtgggctttctgaaattaaaagatct

SEQ ID NO: 212946 - DNA, 406 bp, Homo sapiens
atatagtaggctctcagtaaatatttgctaaatgaatagttgtattgaaatggcaataatcaccttatatgtgtgttttatccaggaacattcaactgttcagaactagccttagaaaagtaagaagataattaggcccacacaagtttggatttgtgtgtggaagaagacacatgcataggagtaaaggatgtttttaaaaggatgattttaatagttaattatggaatttaaactagtcatgatggcaagtgaagatgaacatagtgatgrataatgaaaacttatgaaagtcaagggacttgcggtcttgaggagtcaaagcattgatgtaagattgctaaagatggaagctggagagcctggtggtgttgtttatagtgggctttctgaaattaaaagatct

SEQ ID NO: 212947 - DNA, 406 bp, Homo sapiens
atatagtaggctctcagtaaatatttgctaaatgaatagttgtattgaaatggcaataatcaccttatatgtgtgttttatccaggaacattcaactgttcagaactagccttagaaaagtaagaagataattaggcccacacaagtttggatttgtgtgtggaagaagacacatgcataggagtaaaggatgtttttaaaaggatgattttaatagttaattatggaatttaaactagtcatgatggcaagtgaagatgaacatagtgatgaataatgaaaacttatgaaagtcaagggacttgcggtcttgaggagtcaaagcattgatgtaagattgctaaagwtggaagctggagagcctggtggtgttgtttatagtgggctttctgaaattaaaagatct

SEQ ID NO: 212948 - DNA, 635 bp, Homo sapiens
gatctttctacctgggatgtttttccctccattctttcccaagttagcatatatgacaacttcatatgtcaggttacattgccattttctcaaagaaacttttttatcccctctttctagacaaattcgtcatagtatgtagtcttatagcactatctctccttcttagtagctaaagcagatataatgtttcatttttcttagatttaataatgtttttcttcaggaaaaataagctttccgtatgggaatggtcaaaacctttgcttgccatttctgaaatayttattagtgctctattctaattcttctgtgttgtctgcataacaaggatcctgaagcctgaaaattacattttctaaactcccttgcagctgggtattgcaaggattggataggttctgccaatagtagtctctggaaagaagtaagattcctgctgggagggaaaaggcattctgcctctgtttctagcataagccttggtggtagctacaggtgattatgtgcccgaggcagcagcatcagtagtttcagtaatgaaagcaggaaagctcctgcctggtctcatcgccctaattccatcacatgtgtaacagattcctgcattgaatccctcactgccttgcttagat

SEQ ID NO: 212949 - DNA, 597 bp, Homo sapiens
aatttcatgagactcctaaggaagtaggtactttttctactgaaagrcactgaaataaaaacaggtgaggtaacttacctacctaatttgtttctatcacctctttcctacctttatatcttttatgctcaacacatatttattttcccactcatcctacaatttctttctttcctttcttccactgccaaatcttaaaatgagcatgtagatttttttcagtgtctccatgtcctcatctaccactcaccctcaattcattacaggatgatctactctaaatagtcttttacaatatagactatctttacttaacttttaaaacacagtcttgcaaagcttcaaagactgcaattcagtaagtctttggtagaatccagaaatctgcatttttcacaagtaactgctgtagttctccctaatctttttctcaaggattatcaatttcagtttgtcacaatttcataaactatatgggttggtcttcttgtgcgtacttttatatgttgattactctaaagctatcatgtcagccttcttcctaacctcatttttgggattccttataacccacaactccaaccactgtctatggag

SEQ ID NO: 212950 - DNA, 522 bp, Homo sapiens
ctgaaataaaaacaggtgaggtaacttacctacctaatttgtttctatcacctctttcctacctttatatcttttatgctcaacacatatttattttcccactcatcctacaatttctttctttcctttcttccactgccaaatcttaaaatgagcatgtagatttttttcagtgtctccatgtcctcatctaccactcaccctcaattcattacaggatgatctactctaaatagtcttttacartatagactatctttacttaacttttaaaacacagtcttgcaaagcttcaaagactgcaattcagtaagtctttggtagaatccagaaatctgcatttttcacaagtaactgctgtagttctccctaatctttttctcaaggattatcaatttcagtttgtcacaatttcataaactatatgggttggtcttcttgtgcgtacttttatatgttgattactctaaagctatcatgtcagccttcttcctaacctcatttttgggattccttataacc

SEQ ID NO: 212951 - DNA, 522 bp, Homo sapiens
ctgaaataaaaacaggtgaggtaacttacctacctaatttgtttctatcacctctttcctacctttatatcttttatgctcaacacatatttattttcccactcatcctacaatttctttctttcctttcttccactgccaaatcttaaaatgagcatgtagatttttttcagtgtctccatgtcctcatctaccactcaccctcaattcattacaggatgatctactctaaatagtcttttacaatatagactatctttacttaacttttaaaacacartcttgcaaagcttcaaagactgcaattcagtaagtctttggtagaatccagaaatctgcatttttcacaagtaactgctgtagttctccctaatctttttctcaaggattatcaatttcagtttgtcacaatttcataaactatatgggttggtcttcttgtgcgtacttttatatgttgattactctaaagctatcatgtcagccttcttcctaacctcatttttgggattccttataacc

SEQ ID NO: 212952 - DNA, 522 bp, Homo sapiens
ctgaaataaaaacaggtgaggtaacttacctacctaatttgtttctatcacctctttcctacctttatatcttttatgctcaacacatatttattttcccactcatcctacaatttctttctttcctttcttccactgccaaatcttaaaatgagcatgtagatttttttcagtgtctccatgtcctcatctaccactcaccctcaattcattacaggatgatctactctaaatagtcttttacaatatagactatctttacttaacttttaaaacacagtcttgcaaagcttcaaagactgcaattcagtaagtctttggtagaatccagaaatctgcatttttcacaagtaackgctgtagttctccctaatctttttctcaaggattatcaatttcagtttgtcacaatttcataaactatatgggttggtcttcttgtgcgtacttttatatgttgattactctaaagctatcatgtcagccttcttcctaacctcatttttgggattccttataacc

SEQ ID NO: 212953 - DNA, 550 bp, Homo sapiens
tgggattagatggcctctaagcagacctctggctttgagatactatcttcccttcatagcccatctcataggcatggatattacaaaatcatgtttaattctactgctaataggctaataagctgttatgttcctcttgtgcaccttttatyttaactcttctggctatagaaatttaactaataaatttgaaaaattctgtatataactttagaaaacatgagtggctcagagtaggtgctaattcattatgtttgaagttgagcattctttttagaaaagttatctcttagtgatgtttttatttagagtttaaagcatgtgttggtgttaataagttcttagaagtaaagttataatgaaacaaaaatataaaaaatgggggcaagtgggcctctaactttattttttatcatcatcatcattattattattattttacagacagggtcttgctgtatggagacaatgcagctctagcctcactgtaacctcaaactcctaggctcgagtgatcctccaccttagcctcctgaatagctaggattac

SEQ ID NO: 212954 - DNA, 565 bp, Homo sapiens
gtttgttcctcagtatgtttttccrtccaaacatatgcctgtgatttgaaatcagcttaagagttttctttcacatttagtatttgtgtttagtttactggcattaaaagatgcagaacaaacttgtttgattcctaaatccctacagtgatattgccactaaggatgattctcatggggagagtttagttattgctgactgtagaaaaacacatgaaagttattgttaaaataaacttatttctggaaagggctaaaggaaaacatgttccagcttgcatgtactttgcatcttttcttctagagtttcttagaaaagtatttcttatttgttaaaactgtcttagaggcttaaagttttattctgcctgaaacatggctgttatccttgacttctctaccagggttatatatctagctggtgacttgaaactatactcattggattagttcctcttgagaattcattgaatgtatgggagcaaaatattgaagactttgaaatctatgtgtcctgccatgttctggagaggtgagacttgtgtttgataagacactgtgtcca

SEQ ID NO: 212955 - DNA, 407 bp, Homo sapiens
aattcttccaaatctggcatygtcatttacttcgaaagttgctccctaagcaaaggctggaaaaatataaaacggactcaccaattattattattcaggcaactcctaggactttataaatgtgctgtaataaattaactttgttatctccctgagttacgtagaagttttagttgtattcaaatgctaaactaagccccacattcttcatggggggtagtggcaagaaagaagtcctccactgagggcctgggaatatgtggtgcagtctcaggtcctctgtgtacgcactctataaactgtggaaaagtatggaaacgttgccatagtttgaacatgtatgaacaaaatatgaattaggaccttgaataatatgttctactcttatgtcaaattcacattgttca

SEQ ID NO: 212956 - DNA, 407 bp, Homo sapiens
aattcttccaaatctggcatcgtcatttacttcgaaagttgctccctaagcaaaggctggaaaaatataaaacggactcaccaattattattattcaggcaactcctaggactttataaatgtgctgtaataaattaactttgttatctccctgagttacgtagaagttttagttgtattcaaatgctaaactaagccccacattcttcatggggggtagtggcaagaaagaagtcctccactgagggcctgggaatatgtggtgcagtctcaggtcctctgtgtacgcactctataaactgtggaaaagtatggaaacrttgccatagtttgaacatgtatgaacaaaatatgaattaggaccttgaataatatgttctactcttatgtcaaattcacattgttca

SEQ ID NO: 212957 - DNA, 408 bp, Homo sapiens
gaattcttccaaatctggcatcgtcatttacttcgaaagttgctccctaagcaaaggctggaaaaatataaaacggactcaccaattattattattcaggcaactcctaggactttataaatgtgctgtaataaattaactttgttatctccctgagttacgtagaagttttagttgtattcaaatgctaaactaagccccacattcttcatggggggtagtggcaagaaagaagtcctccactgagggcctgggaatatgtggtgcagtctcaggtcctctgtgtacgcactctataaactgtggaaaagtatggaaacgttgccatagtttgaacatgtatgaacaaaatatgaattaggaccttgrataatatgttctactcttatgtcaaattcacattgttca

SEQ ID NO: 212958 - DNA, 561 bp, Homo sapiens
acactgatgaaatttagtctgttatttacctgattagcaataaatatctctctttattgccaacaacacagcaattagggccctaatctgtcaccactaccttcaagttttggctttcatcaaaagaaaaggaatttgccaagaaggaaaagcacagctctaccttcaagctaaaaatagttctgtcttctagacaatatacactttcacacggctccagcaaaccttgcttcaagcagcctacaaaggatatatcaggagaagtacacaatagtccctagttttaggtactggtttagccaaaagatgcaaacaggcaaaagctgatacagaaaagccaacccgggtgatataagaggaaatgaaatctctaatccattgatactttttgaggggatcaaaaatagataaaacaaaaccactgsacatatagtcaatgtatctaaatttccagaaactttttataagcctgtctaccaaaggctttattaaaaagttgttatgaaggttacattacatatttattcttaggcagaaaaccaactaaaaaacaaagaacaa

SEQ ID NO: 212959 - DNA, 671 bp, Homo sapiens
gtatatacccagtaatgggatggctggatcaaatggtatttctattcctagatcctttatttatcagacaagcaaatgctgaggaaattgattatcactaaactgtttctatgagaaatgctcaagggaatcctaaacctggaagtgaaaggatgacatttaccatcatgaaaacacacaaaattataaaactcactagtaaagcagtcacacaaagaagggaaagagaaaggratcaaacggtatcactatagaaattcaccagaccacgatgacaaacaataagagaaaaacaaaagagcaaagaatatataaaacaaccagaaaacagctaacaacatgacaggaagaaagctgcacatatcaacaataaccttgaacataagcagattaaattatccacataaaagacatagaatggctgaatagacttttttaaatgatgcaaccatattctgcttaccagcatatatgcctatcagcatagatactgaaaagcccaccttaccagtaaagacacatatagactgagaaagtaaaggaatgggaaaagatgttccatgcaaacaaaaaccaaaagcaagcagggatatctggacttatatcaagcaaggctgactttaagtcaagaacaagagaaaacaaaaagaagggaattacatgaagataaa

SEQ ID NO: 212960 - DNA, 671 bp, Homo sapiens
gtatatacccagtaatgggatggctggatcaaatggtatttctattcctagatcctttatttatcagacaagcaaatgctgaggaaattgattatcactaaactgtttctatgagaaatgctcaagggaatcctaaacctggaagtgaaaggatgacatttaccatcatgaaaacacacaaaattataaaactcactagtaaagcagtcacacaaagaagggaaagagaaagggmtcaaacggtatcactatagaaattcaccagaccacgatgacaaacaataagagaaaaacaaaagagcaaagaatatataaaacaaccagaaaacagctaacaacatgacaggaagaaagctgcacatatcaacaataaccttgaacataagcagattaaattatccacataaaagacatagaatggctgaatagacttttttaaatgatgcaaccatattctgcttaccagcatatatgcctatcagcatagatactgaaaagcccaccttaccagtaaagacacatatagactgagaaagtaaaggaatgggaaaagatgttccatgcaaacaaaaaccaaaagcaagcagggatatctggacttatatcaagcaaggctgactttaagtcaagaacaagagaaaacaaaaagaagggaattacatgaagataaa

SEQ ID NO: 212961 - DNA, 562 bp, Homo sapiens
ttccaataagtcagaggctgtagaggaaaaagtaatcataacaaataattaatttaatgaagtgttgttactgagtgctagtgccatggagaaggaagcaacaccaactttcagcaaatatttattgaatgaatgaactaactctattaatggaaggtatatttgtggtgaattttttacagattagcaggtcttcgcctgaagaaaggatgaaggaacatttcgggtaaaaggaataacatacaactagaaaagatccagagtatatgatcagtytagaaaatcaacgattctcaaattgggtagtacattggagttaccttggaaatgtaaaaaaaaaaaaaaagtgtggcctggatcacaccccccaaaattttgacttaattggtatggggagaggcctgagtacttgtgtattttatacttccccaggtgcttttaatatgcagcaaagttgaggaaccactagtggaccatcctgcaaatttccttaattctggtttgttgactttcctgccacaatactcattaaatctttaagtaagtcacaaaattagagcat

SEQ ID NO: 212962 - DNA, 579 bp, Homo sapiens
tgaacacatggagagtggcaagcctggggagggcacggaagcttcatgcctcttcctccatacattgctctacgcatctcttccatcgggmtgttcctgagttgtagccttttataataaattagagatagtaagtaaaacactttcctgagttctgtgagccactctagcaaattattgaacccaagaagggagttgcgagactttcaatagaagcacaggttaacaacctagactttcagttgacgtctgaagtagggggcagtcttgtgagactgagcccttaacctgtgagatctgtgctaacttcagttagtgatagaattaaattgaactgtaggacaaccagctggtgttggaaaattgcttggtgtgggaaaaagccacacatctggtataaaggtgaagtattgagagtagtgagaaaagagaaagtaggagaaaacagtttctttcttcctatttttaacatagtccaataacgtgattttaagaaaataatgcaaacactccatgtcctagctttctcacttctaaacagaagtgttgctttcctagtcagtttgacttttgtaaaga

SEQ ID NO: 212963 - DNA, 579 bp, Homo sapiens
agacataagaaaagctaagatgattagctagaaacattattttattactcaataacacttaagttatccccagccctgaaatgttttatctgttttcctgatcatgtgtccgtctggattctgttaagcagaattgttattctctttgctgaattccctgctggtaggctgattttaggcaatgacatacagcagagcattctatccaatattgtaaaaaagttttttggaagggtggttcagaatgggaagggaagtgaatgcaaaacggtatagatatttctagctaaaaaaaaaaaagatgagtcagccgtggtggctcacacctgtaagcccagtgctttgggtggttgagatgggaggattgcttgagaccaggagtttgagaacagcctgggcaacatagcaagaccccatctgtacataaaattaaaaaaaattagcttggttgtggtggcactcayctgtagtcctagctacttgggaggctggggtgggaggattgcttgaacccagagtttgaggctgcagtgggctatggttgtgccattgcatgccagcctatgtgacagagcaagg

SEQ ID NO: 212964 - DNA, 460 bp, Homo sapiens
tttctctgaaaaccccaaggtataagctaaaaataaaacagtattagtttctgtattatttctgtagctaaggcattttcagaagatctatactttaaaaagttttaaacttttaaatttgtagcccaaatttttagttgaatatatattgctttctgattacaagtggcctgtagtcatatatgtatgcatgtatgtatttatgcataaatacttaggatttgttgtttgctaggatttgtttatgtatatatatgcataaatacttaggaacaacatataatacttagtaacatcaatagctactgctaatgttttgggcatattatctttcagtgcttttttctgtgcacatgtattatatttaatttttaatcatacttgtcacactatatttttgcmttctcggttttcggttttaaatattttttaaattgatacataatatttgtacatattt

SEQ ID NO: 212965 - DNA, 440 bp, Homo sapiens
attacagaataaagaggaaatcaaaaggaaatttgtgaaaacaaaatgagagccagagaaatagtaaaatttattgccagaaaacttttcagtttgatcagtttttatagttccttaaccttcatcgttctttgtatgcctcctgcctgtcctgaagggaaaaagaaaagcattcaaagcttaagcactttattaaaccttttatagcttgacaccatttggaaccatttcagtatttcatattgaagacaaagacatgtctttctgaaaaattaaaatgaaaacagacccaattacagtggcttcagcagtcttggctgagggctgaacgtctgacagctkcacgacacagggctttatccatgtaaccagcgagtggccttagagacctgattattggaagggtagagggtcctgtgattctagcgctttgattaatc

SEQ ID NO: 212966 - DNA, 421 bp, Homo sapiens
aaggcggcaatgaattaatttatcaaggttttgaccttaacactgttccttatattgcatacgtcaatgtgaagtctggcagtacacaatgtctctgtgaatgtgaacatagaaccattttgggacgtaataacctttgcttggatttttctctttagtaatagtgaggtttaaaatgtgaaccacccatctatattgtgaattaaccaagtacctatgctggaatatccagatttcactggaactcctcactaaagctttcctttgtgtatttgtcaaaaatatcctgattaactcagaaataaaagcaatgactggagcccttaagtcatcattattttatcttttagagtaaagcacctaaktgctgtctgaccattcaggccgtggactaaagcagctaatgatatggctcctggaa

SEQ ID NO: 212967 - DNA, 588 bp, Homo sapiens
aaagtgaagctgatggtaattcaaaacttttccactgcataatactcagggctgatatctcattcctggagagtattacaaatattccttagcttctgtttttcttgacccactaataattttcccaagaagatctatcaagattgttcattgtaattgacattgtgtaactgccatggaaacaacaagtgatcattcttaacaattttaatttgataagtagacaccayttctcctttaaaattgctgaaattttagaagtcccaaataataccttcacagttaaagagaaataaaatttaagatgcaaatatgtaggcatttcagcaaaaggaatcatgagaaaaaaaatgcctcattattttcccctgcttctatgtatctatccatttgttcatccattagagaaacatttattgagtaactattaggtgctaagcattgagaagaggcttcagggataaaatgatgatcaaacaaatgtctgagctctataaaacttacctggtgagaaagacagatatggaataaataaccacctacattcatcattgcaaaatgtaataagtgctataaagaaaatgtttg

SEQ ID NO: 212968 - DNA, 592 bp, Homo sapiens
cgtactgctgttgtacagcatggtcgtgctctgtggtgaaactgtgtttaatcctacaagtaccatttcatgttacagtgaattactgctggacctgtccgacctatgacttgatgattcatacatatccaggtcacaagggggcagttctgactgcatgatcacttggtgtcccatggcactccatctccaccagtgctcagtaacatgctaacaataatttcccaaaaggtgcatgattaattctgtgacaggtagcatgccccagagccctgtggatctgcattatgattcttccactgatactggccataaaatgcacgtggcatttttgctgaccactgaggcatctattaccatagggtctgctggaatatatggcccaaaagasagattgcttgacctccagcctggactttctgtatatccctttcctgctccaatcccaacgaaaagctgacaactcttcctgctctggaccttcactaaaagctggaaacttggtagatgtgttgaagcaatattcccaggtatggaatatgctgccctcagaatccagagaagctgatcaggcctgaggcacttcttcttt

SEQ ID NO: 212969 - DNA, 516 bp, Homo sapiens
actggctcctatgggggggcggtcatgatgatacctcagttttctggatttctgtgtcaaccttataggatgttgcaggaaggcggtgtgtgccttaggtgaatcactttcttcagctaacgcaaatccctgtagagactaccagctgagggcatcctctttgcagcaaccctacgagtgggcaagtaagttcatcattcttgaagggggacttggacagtgcatcacagtgttcccactacatccgctcaccctccatccccaccatcaatattctcctgtattctgctaggggtgtatgcagagtagttagtgaggcttagctttggagcccctcacttgcatgggccccttcccagactttgaacctartgttgtatactttttcttgaaaagagccccccaaatgtagatgcttcacaaaactcaattgttcccctgattctgctttatttcctttcagtttgagaaaaggaagataaaggaaattgacattcgagtgcttaccctgttcca

SEQ ID NO: 212970 - DNA, 516 bp, Homo sapiens
actggctcctatgggggggcggtcatgatgatacctcagttttctggatttctgtgtcaaccttataggatgttgcaggaaggcggtgtgtgccttaggtgaatcactttcttcagctaacgcaaatccctgtagagactaccagctgagggcatcctctttgcagcaaccctacgagtgggcaagtaagttcatcattcttgaagggggacttggacagtgcatcacagtgttcccactacatccgctcaccctccatccccaccatcaatattctcctgtattctgctaggggtgtatgcagagtagttagtgaggcttagctttggagcccctcacttgcatgggccccttcccagactttgaacctagtgttgtatactttttcttgaaaagagccccccaaatgtmgatgcttcacaaaactcaattgttcccctgattctgctttatttcctttcagtttgagaaaaggaagataaaggaaattgacattcgagtgcttaccctgttcca

SEQ ID NO: 212971 - DNA, 516 bp, Homo sapiens
actggctcctatgggggggcggtcatgatgatacctcagttttctggatttctgtgtcaaccttataggatgttgcaggaaggcggtgtgtgccttaggtgaatcactttcttcagctaacgcaaatccctgtagagactaccagctgagggcatcctctttgcagcaaccctacgagtgggcaagtaagttcatcattcttgaagggggacttggacagtgcatcacagtgttcccactacatccgctcaccctccatccccaccatcaatattctcctgtattctgctaggggtgtatgcagagtagttagtgaggcttagctttggagcccctcacttgcatgggccccttcccagactttgaacctagtgttgtatactttttcttgaaaagagccccccaaatgtagatgcttcacaaaactcaattsttcccctgattctgctttatttcctttcagtttgagaaaaggaagataaaggaaattgacattcgagtgcttaccctgttcca

SEQ ID NO: 212972 - DNA, 433 bp, Homo sapiens
ttggtacagagtgaatcgtgtacatttccctccaaaacacagggcatagctaaattctggacaattgactggatctctgggtcactagtatctcactcctgtaaaatagaatttcataatatgtgtgtttaaatcctccaaaagaagaactatcaagtataattcaatacttggctgtgcttatttgtgagcataaattaacaattttgaaaaatacagtcatactagaacaaaaagaaaacagctctatctctgtgataaggagcaacttaattccttgagcctcarttttcccatctataaagcagaaatagcaaaaccccatgtaaaatgttgttatgagaataaaagattgtcatgataaaagtctaggaaagcctagcacacacttgttgtctgataaatatttgtttaacaaaatacccacaaatca

SEQ ID NO: 212973 - DNA, 480 bp, Homo sapiens
ctgggacaaggtgggggatgatcaaacaacccatctcgaagtaaacatgaaagtaaaatagaatcaggtcatattaaatgagtccaatccttgaggaccaaacaaaattccacccgaagaggatgaaagaacgtccaggttttatctctgaaccagtgaagctatcttttggggaataatttttttttcagtgaccactttcctgatttaccagaaaggrggaaaggatggatctcagaaacaaccaaaaaaatttaggctagtttatgaaatagtagatatatagaaaataatgtgtggtgattcccaaaacccctgctaggtcacctaataatataacaacaaattattctcatcttcttttttaataaaagtgtttgacaaattctctctaatgtttctggataagatgattaaatgtaagttatatgataatagatttatatggacttaaactagaggaactagaaagcaggtcga

SEQ ID NO: 212974 - DNA, 201 bp, Homo sapiens
  misc_feature (1)...(201): n = A,T,C or G
nnnnnnnnnnnnnnnnnnnnnnnnnnnnnnngtatagagatttattgcaaagtgaaaagtacacactcaagaaggggagcgtgtgtgtactcaagagagttgcacaatggggcttgaggtttctaygttgggtttttaaccaaagggtggaatatgcatgaaaattcctgaaaaagctggagatttcttagaactgtggtg

SEQ ID NO: 212975 - DNA, 594 bp, Homo sapiens
ccatgacctggcagaagctgctacagcagcagagcccacatagaggacatccaagaggtgagaaggaccctcagtcaaggtgggcttccatgcagccatagtcagaatgctctggtattatgtgcagtggattaagctgcaaaggatgagagacacagtaactgaatgctcgagtcacacagtttattggcatgtaaattcttaacaaatataggtattttatccccattcacactgcccacaattcctattttttatcctgcttggaaacattttttacccttctacgacgagccaatcttrcaggaataggcatagaattggtcatacaagtcctggggcatccaggaataggttcctcctgcatcaaggttggagcattgaggccgaagcatccagtcaaaaagacggcatgcctggctccaggtccctttctgagtggcagcatcttgtcctcgtgagtctgtttctcagtggagcaggtagggctgactgagggcttctctttttgtagtccctttatgggcatccacctatttctccttagcttgaaagttggcgcaccctagcacgtgatgttgtcctgcctcagaa

SEQ ID NO: 212976 - DNA, 572 bp, Homo sapiens
atctttgaaattattcaaaaagcatgatactgagcaaaatcttcaatctgagtcygatttgacaattcaatgctttttgtgggttcagattggcactgagagcaggattgtcttttagacccacacaccaaaatagtgaatgttttctttttctacctgggctccttttcaaaaggaaataatggaaaaatatgagaatttgttctcaggatagttggctgtacatttttggtatgaggtagtggaatctttgaggcaggttaagggaaataagtcttaccattgaaatctgggggccatagactacagtctgggagtacgggtctagggagtacatggacaaagggaaattgggtgcaaatcccattgactgactcctgctagcatacctgtaaaagctaaccttttaataggttagtttttaataggaggagatgatagtgggagaaaaagctgcgagattacattttattcactggaaaaccttcttatccctccctggtttcttggagaaatttcttgtatcttttgaaatgactcaaaatattgattataggacaaactatttatgt

SEQ ID NO: 212977 - DNA, 572 bp, Homo sapiens
atctttgaaattattcaaaaagcatgatactgagcaaaatcttcaatctgagtctgatttgacaattcaatgctttttgtgggttcagattggcactgagagcaggattgtcttttagacccacacaccaaaatagtgaatgttttctttttctacctgggctccttttcaaaaggaaataatggaaaaatatgagaatttgttctcaggatagttggctgtacatttttggtatgaggtagtggaatctttgaggcaggttaagggaaataagtcttaccattgaaatctgggggccatagactacagtctgggagtacgggtctagggagtacatggacaaagggaaattgggtgcaaatcccattgactgactcctgctagcatacctgtaaaagctaaccttttaataggttagtttttaataggaggagatgatagtgggagaaaaagctgcgagattacattttattcactggaaaaccttcttatccctccctggtttcttggagaaatttcwtgtatcttttgaaatgactcaaaatattgattataggacaaactatttatgt

SEQ ID NO: 212978 - DNA, 572 bp, Homo sapiens
atctttgaaattattcaaaaagcatgatactgagcaaaatcttcaatctgagtctgatttgacaattcaatgctttttgtgggttcagattggcactgagagcaggattgtcttttagacccacacaccaaaatagtgaatgttttctttttctacctgggctccttttcaaaaggaaataatggaaaaatatgagaatttgttctcaggatagttggctgtacatttttggtatgaggtagtggaatctttgaggcaggttaagggaaataagtcttaccattgaaatctgggggccatagactacagtctgggagtacgggtctagggagtacatggacaaagggaaattgggtgcaaatcccattgactgactcctgctagcatacctgtaaaagctaaccttttaataggttagtttttaataggaggagatgatagtgggagaaaaagctgcgagattacattttattcactggaaaaccttcttatccctccctggtttcttggagaaatttcttgtatctttwgaaatgactcaaaatattgattataggacaaactatttatgt

SEQ ID NO: 212979 - DNA, 628 bp, Homo sapiens
atttacttttgaagaaaatataaatagcatttaaaaagtaagccttgatagaatttttaataagaaagtaaaagcacattatcaacttttgaatcagaggagtactgtagcccccaccaatcccttaaagaatcatagaaaatttgctttatttattgtggctgaaagagttcaaatccaattatgaggatatgatatagaacagaatatacttgaacagggggctgagtttactgccttaattaaagccatagaatctgaaaacaattaaataaagaactgaggtctgttcattccagccccagtcatggatctgaggccatatatgtaataatttgaacaaagttacctggggtggtattcaaagtttcttatcattggtaggatgcagagcagaatttacagtaggccttatggaaggtaggaaagagtctcatacatgctctaagtgaaatctggagtgcatgaagagaacatcagggaggaaaccaaggtaaagatgaygttacaggttgaaatgtgtggttggagagaatattacctgcttgtgctaccttcacataaatacaaaattgcaattgtcattcaatatgaatgggacattgtcgtctttgtgttttccacagag

SEQ ID NO: 212980 - DNA, 607 bp, Homo sapiens
gaaatttgaatgttaacacaaagcaaaataaaagaaatgccaaatacatacaattttaaaactataacaacttcaaacttcaaaaagaaacgtttatattattatgttatataatatttttatttttaaaggcayttttttcttgtgattaaaggtatgttttctcttaaaaacatgtatttctctacatttaaaaaaagattttttaacttaaaaaataaattttcttcctttttctattcctattttattttttttaatttttttagacttttggccatttttcttaactttatatagcactaaaatgacttataaaatactataattatataaattttgataggatgttagtgaaatttatatgctattctgttagtttattaaattaatgtttatttttatacaaacattaattattttcaaagtggctaccaaaatgaataataagcaatcataaaataattatacaaaattatatagataaataagggcagaaattgtatatttttatataattattttattttatttttttgagagggaatctctctctgtcaccctgtctggagtgcagtggcacgattttggctcactgcaaactcca

SEQ ID NO: 212981 - DNA, 391 bp, Homo sapiens
atgacttcctatatagaatcattttctttatctttactagttatctctgtagattactttaagaacgatataaattaaattagtagcttcctgctgtgacagccagcctgtggactatacttcaaaatcacaacktttcccatttctactatttaacctggtttattcattttcaggacagcaatccacacatttttctggaagtggagggacaagggtcagtaatcatttgctttaaacatactctgatatttcaggcctttaaaacaatagcacaggttttaggaagcggatttccaagaaaacttcccatttttgcctgacatttctactactgccttctcacttatccactattgagtttcttctggatcaaacaaccttctcgaaa

SEQ ID NO: 212982 - DNA, 391 bp, Homo sapiens
atgacttcctatatagaatcattttctttatctttactagttatctctgtagattactttaagaacgatataaattaaattagtagcttcctgctgtgacagccagcctgtggactatacttcaaaatcacaacgtttcccatttctactatttaacctggtttattcattttcaggacagcaatccacacatttttctggaagtggagggacaagggtcagtaatcrtttgctttaaacatactctgatatttcaggcctttaaaacaatagcacaggttttaggaagcggatttccaagaaaacttcccatttttgcctgacatttctactactgccttctcacttatccactattgagtttcttctggatcaaacaaccttctcgaaa

SEQ ID NO: 212983 - DNA, 631 bp, Homo sapiens
caaatagaatgacgtggctagtgtgtgtggttggtgggaaaataaagagggaaatgatgtgttttaagtttgaggttagaaaattagagtaaaattgagaaatacggttttaagttcaaactattgaatctattaaatctagaaaaatcaacaataaagtatctatttagagtaataactaaatctgcctttccttttttcaattaaaatagaaacaaatattgtggcattatttttattgttgtaacagttttgggctgcttttgagtctttgttttgggaaagtttttatttttaggttatttttcttttgtaatattctagacaacstcttgtataaatgttaaaatgtaattttactacctttcaggcatattttaatgtgccctagttgttaacaaatttattcaagattaagtactatatttttaacttcttaaaaaaattaatttctttctatgcaatgattgaccttgaaaatacaaaagtatgtacagtatgcacataatattcatactgaatctaattgtttaactgttgtttaattcatttaatcattcatttttcaagggaaacatattgaataattaggtaaaaatttatcagcagccactgtgtttatttggtaatt

SEQ ID NO: 212984 - DNA, 590 bp, Homo sapiens
attaaaaaatacaagttcagggttcgggcttwcacctgtaatcccagcactttgggaggccaagagggttagatcaccgggtcaggagatcgagaccatcctgactaacatggtgaaatcctgtctctactaaaaatacaaaaaattagccgggcgtggtggtgggtgcctgtagtcccagctactcaggaggctgaggcaggaggatggcgtgaacctgggaagtggagctggcagtgagccgagatcgtgctactgcattccagcctgggatacagagcgagactccatctcaaaaaaaaataataataattcaagttcagagagatgaaacaactttttaaggcaatcagactacagatctaactgtcatttacactaaaacattttaggaaaacaaaatcataatgcttttgtggtattttgatatttcaagaaaaatagttatatgttttggtgtgtggcgtgtgtgtgtgtgtgtgtgtgtgtataaaatgattctacattaaatcaaaaatttaacttaaaattttaaagatagagtaagggctgataataggtttaccaccaatgcacattttctagcagtt

SEQ ID NO: 212985 - DNA, 590 bp, Homo sapiens
attaaaaaatacaagttcagggttcgggctttcacctgtaatcccagcactttgggaggccaagagggttagatcaccgggtcaggagatcgagaccatcctgactaacatggtgaaatcctgtctctactaaaaatacaaaaaattagccgggcrtggtggtgggtgcctgtagtcccagctactcaggaggctgaggcaggaggatggcgtgaacctgggaagtggagctggcagtgagccgagatcgtgctactgcattccagcctgggatacagagcgagactccatctcaaaaaaaaataataataattcaagttcagagagatgaaacaactttttaaggcaatcagactacagatctaactgtcatttacactaaaacattttaggaaaacaaaatcataatgcttttgtggtattttgatatttcaagaaaaatagttatatgttttggtgtgtggcgtgtgtgtgtgtgtgtgtgtgtgtataaaatgattctacattaaatcaaaaatttaacttaaaattttaaagatagagtaagggctgataataggtttaccaccaatgcacattttctagcagtt

SEQ ID NO: 212986 - DNA, 590 bp, Homo sapiens
attaaaaaatacaagttcagggttcgggctttcacctgtaatcccagcactttgggaggccaagagggttagatcaccgggtcaggagatcgagaccatcctgactaacatggtgaaatcctgtctctactaaaaatacaaaaaattagccgggcgtggtggtgggtgcctgtagtcccagctactcaggaggctgaggcaggaggatggcgtgaacctgggaagtggagctggcagtgagccgagatcgtgctaytgcattccagcctgggatacagagcgagactccatctcaaaaaaaaataataataattcaagttcagagagatgaaacaactttttaaggcaatcagactacagatctaactgtcatttacactaaaacattttaggaaaacaaaatcataatgcttttgtggtattttgatatttcaagaaaaatagttatatgttttggtgtgtggcgtgtgtgtgtgtgtgtgtgtgtgtataaaatgattctacattaaatcaaaaatttaacttaaaattttaaagatagagtaagggctgataataggtttaccaccaatgcacattttctagcagtt

SEQ ID NO: 212987 - DNA, 590 bp, Homo sapiens
attaaaaaatacaagttcagggttcgggctttcacctgtaatcccagcactttgggaggccaagagggttagatcaccgggtcaggagatcgagaccatcctgactaacatggtgaaatcctgtctctactaaaaatacaaaaaattagccgggcgtggtggtgggtgcctgtagtcccagctactcaggaggctgaggcaggaggatggcgtgaacctgggaagtggagctggcagtgagccgagatcgtgctactgcattccagcctgggatacagagcgagactccatctcaaaaaaaaataataataattcaagttcagagagatgaaacaactttttaaggcaatcagactacagatctaactgtcatttacactaaaacattttaggaaaacaaaatcataatgcttttgtggtattttgatatttcaagaaaaatagttatawgttttggtgtgtggcgtgtgtgtgtgtgtgtgtgtgtgtataaaatgattctacattaaatcaaaaatttaacttaaaattttaaagatagagtaagggctgataataggtttaccaccaatgcacattttctagcagtt

SEQ ID NO: 212988 - DNA, 543 bp, Homo sapiens
ttcaacaaatctcaaaaaggaaacctaattatgtataataatctgactgattttgtttgctcaccaaattgaaattgaaaagaaaaaatacagcactctataaaaaaacaaaatgatttcaaaatataattattgtctccctttgaaaatataaatgtttaaataatggtgaaatagagaacataaacattcacaaatattacatatccattcaacattttcaggtattattttgttttgttcawacctccccttctgtcatttttctctcctttctttatctttagcataactgagctgctttccaaacatctatagttataccggacatagcattttccaacatcaaacatggtttttcttaaacaccagctccaaatattaattcccagggaaaatgacattttccatatatgagaaatattggaaccaatataacaaaactcattaacatttataacatttgaaaataatttcacaaaagttttatttaaaaaaattatattgtaaatttatgtaagaaattctctatccattatatga

SEQ ID NO: 212989 - DNA, 373 bp, Homo sapiens
agtagggttacctgaatctggcttaataatcaattaatcagtatttatctttaaacattttttcctttatgaattgtgtcacacttttaaagagcccttcctacattacaagcatatataaaatatattcttatactattttagaataatttcagaagttagattgttttctagtttttagtgttttcattgataccaaatttatttttatgtacataaatgtatgattttaagttagattatttcaaactggtatccctgyaattatctgaacaaaatttttaagtagtcacattgacttttttttcaaaagttagttttaagctatttgataacatatggatatacttcactaaagttgtatttttgtgtg

SEQ ID NO: 212990 - DNA, 550 bp, Homo sapiens
aatgacataaacatacttcttatacattatgattgaaatgctgaggttttatttaatacataaccaataaagctaagaaacccttaaaaatcaagatgtactccttaaataaaatattgagtgagtacttataaggcaataagttttgtaaaatatgctaaaaatttttaaaaattctctacatattcgagwcatacttgaagatactgtgggttttgttccagaccatcacaataaagcaaaaatcacaataaaacaagtcaacaaaaatttttggtttctcaatgcatataaaagttatgtttacattgtactgtaaagtgtgtaagagtattatgtttaaacaaataatgtacttaccttaattttaaaaagatttattgctaagtaatgttaatcatctgagccttcagtgagtcataatgttttggttgctggagggtcttgcctcagtactggtggttgctgactgatcagggttgtgattgctaaaggttggggtggctgtgggaatttctttttcttttttttttttttttgagtcagagtc

SEQ ID NO: 212991 - DNA, 550 bp, Homo sapiens
aatgacataaacatacttcttatacattatgattgaaatgctgaggttttatttaatacataaccaataaagctaagaaacccttaaaaatcaagatgtactccttaaataaaatattgagtgagtacttataaggcaataagttttgtaaaatatgctaaaaatttttaaaaattctctacatattcgagacatacttgaagatactgtgggttttgttccagaccatcacaataaagcaaaaatcacaataaaacaagtcaacaaaaatttttggtttctcaatgcatataaaagttatgtttacattgtactgtaaagkgtgtaagagtattatgtttaaacaaataatgtacttaccttaattttaaaaagatttattgctaagtaatgttaatcatctgagccttcagtgagtcataatgttttggttgctggagggtcttgcctcagtactggtggttgctgactgatcagggttgtgattgctaaaggttggggtggctgtgggaatttctttttcttttttttttttttttgagtcagagtc

SEQ ID NO: 212992 - DNA, 550 bp, Homo sapiens
aatgacataaacatacttcttatacattatgattgaaatgctgaggttttatttaatacataaccaataaagctaagaaacccttaaaaatcaagatgtactccttaaataaaatattgagtgagtacttataaggcaataagttttgtaaaatatgctaaaaatttttaaaaattctctacatattcgagacatacttgaagatactgtgggttttgttccagaccatcacaataaagcaaaaatcacaataaaacaagtcaacaaaaatttttggtttctcaatgcatataaaagttatgtttacattgtactgtaaagtgtgtaagagtattatgtttaaacaaataatgtacttaccttaattttaaaaagmtttattgctaagtaatgttaatcatctgagccttcagtgagtcataatgttttggttgctggagggtcttgcctcagtactggtggttgctgactgatcagggttgtgattgctaaaggttggggtggctgtgggaatttctttttcttttttttttttttttgagtcagagtc

SEQ ID NO: 212993 - DNA, 347 bp, Homo sapiens
tttatgaggctagtcttaagctgtagccaatgtagtgtgctttgtgtgtctttctgtatagttctgtcataaagaggggtaccttaggatagaatgcaggcctaggaccccaaaagtttgctgatcaagccagcctggcaaactggtcagtaacaaaccttgctgcagttcttcatcttgttttatgtccttaggagcttgaccttgtaaccamttgataatactttcttttggcctctgccattttacaatggtggcctgggtttaatcctggcttagggaatgagtatattgtggctaatatctgtgtgacttttaccatttgctgattctcttcccctctataa
